(19) United States
(12) Patent Application Publication
(10) Pub. No.: US 2019/0185849 A1
(43) Pub. Date: Jun. 20, 2019

(54) COMPOSITIONS AND METHODS FOR GENE EDITING

(71) Applicant: CRISPR Therapeutics AG, Zug (CH)

(72) Inventors: Ante Sven Lundberg, Cambridge, MA (US); Samarth Kulkarni, Cambridge, MA (US); Lawrence Klein, Cambridge, MA (US); Hari Kumar Padmanabhan, Cambridge, MA (US)

(73) Assignee: CRISPR Therapeutics AG, Zug (CH)

(21) Appl. No.: 16/312,676

(22) PCT Filed: Jun. 29, 2017
(86) PCT No.: PCT/IB2017/000953

§ 371 Date: Dec. 21, 2018

Related U.S. Application Data
(60) Provisional application No. 62/355,907, filed on Jun. 29, 2016.
(60) Provisional application No. 62/461,831, filed on Feb. 22, 2017.

(51) Int. Cl. C12N 15/11; A61K 48/00; A61K 35/407; A61K 31/7088; A61K 38/46; A61K 9/00; C12N 7/00; C12N 9/22

(52) U.S. Cl. CPC C12N 15/11; A61K 48/0066; A61K 35/407; A61K 31/7088; A61K 38/465; C12N 2800/80; C12N 7/00; C12N 9/22; C12N 2750/14143; C12N 2310/20; A61K 9/0019

(57) ABSTRACT

The present application provides materials and methods for treating a patient with one or more conditions associated with ANGPTL4 whether ex vivo or in vivo. In addition, the present application provides materials and methods for editing and/or modulating the expression of ANGPTL4 gene in a cell by genome editing.

### RELATED APPLICATIONS

[0001] This application claims the benefit of U.S. Provisional Application No. 62/355,907, filed Jun. 29, 2016 and U.S. Provisional Application No. 62/461,831, filed Feb. 22, 2017; each of which is incorporated herein by reference in its entirety.

### SEQUENCE LISTING

[0002] The present application is being filed along with a Sequence Listing in electronic format. The Sequence Listing file, entitled CRIS018001WOSeqList, was created on Jun. 22, 2017, and is 14,523,422 bytes in size. The information in electronic format of the Sequence Listing is incorporated herein by reference in its entirety.

### FIELD

[0003] The invention relates to the field of gene editing and specifically to the alteration of the Angiopoietin Like 4 (ANGPTL4) gene.

### BACKGROUND

[0004] Genome engineering refers to the strategies and techniques for the targeted, specific modification of the genetic information (genome) of living organisms. Genome engineering is a very active field of research because of the wide range of possible applications, particularly in the areas of human health. For example, genome engineering can be used to alter (e.g., correct or knock-out) a gene carrying a harmful mutation or to explore the function of a gene. Early technologies developed to insert a transgene into a living cell were often limited by the random nature of the insertion of the new sequence into the genome. Random insertions into the genome may result in disrupting normal regulation of neighboring genes leading to severe unwanted effects. Furthermore, random integration technologies offer little reproducibility, as there is no guarantee that the sequence would be inserted at the same place in two different cells. Recent genome engineering strategies, such as zinc finger nucleases (ZFNs), transcription activator like effector nucleases (TALENs), homing endonucleases (HEs) and MegaTALs, enable a specific area of the DNA to be modified, thereby increasing the precision of the alteration compared to early technologies. These newer platforms offer a much larger degree of reproducibility, but still have their limitations.

[0005] Despite efforts from researchers and medical professionals worldwide who have been trying to address genetic disorders, and despite the promise of genome engineering approaches, there still remains a critical need for developing safe and effective treatments involving ANGPTL4 related indications.

[0006] By using genome engineering tools to create permanent changes to the genome that can address the ANGPTL4 related disorders or conditions with a single treatment, the resulting therapy may completely remedy certain ANGPTL4 related indications and/or diseases.

### SUMMARY

[0007] Provided herein are cellular, ex vivo and in vivo methods for creating permanent changes to the genome by introducing insertions, deletions or mutations of at least one nucleotide within or near the Angiopoietin-like 4 (ANGPTL4) gene or other DNA sequences that encode regulatory elements of the ANGPTL4 gene by genome editing and reducing or eliminating the expression or function of ANGPTL4 gene products, which can be used to treat an ANGPTL4 related condition or disorder such as Dyslipidemias. Also provided herein are components and compositions, and vectors for performing such methods.

[0008] Provided herein is a method for editing an Angiopoietin-like 4 (ANGPTL4) gene in a cell by genome editing comprising the step of introducing into the cell one or more deoxyribonucleic acid (DNA) endonucleases to effect one or more single-strand breaks (SSBs) or double-strand breaks (DSBs) within or near the ANGPTL4 gene or ANGPTL4 regulatory elements that results in one or more permanent insertions, deletions or mutations of at least one nucleotide within or near the ANGPTL4 gene, thereby reducing or eliminating the expression or function of ANGPTL4 gene products.

[0009] Also provided herein is an ex vivo method for treating a patient having an ANGPTL4 related condition or disorder comprising the steps of: isolating a hepatocyte from a patient; editing within or near an Angiopoietin-like 4 (ANGPTL4) gene or other DNA sequences that encode regulatory elements of the ANGPTL4 gene of the hepatocyte; and implanting the genome-edited hepatocyte into the patient.

[0010] In some aspects, the editing step comprises introducing into the hepatocyte one or more deoxyribonucleic acid (DNA) endonucleases to effect one or more single-strand breaks (SSBs) or double-strand breaks (DSBs) within or near the ANGPTL4 gene or ANGPTL4 regulatory elements that results in one or more permanent insertions, deletions or mutations of at least one nucleotide within or near the ANGPTL gene, thereby reducing or eliminating the expression or function of ANGPTL4 gene products.

[0011] Also provided herein is an ex vivo method for treating a patient having an ANGPTL4 related condition or disorder comprising the steps of: creating a patient specific induced pluripotent stem cell (iPSC); editing within or near an Angiopoietin-like 4 (ANGPTL4) gene or other DNA sequences that encode regulatory elements of the ANGPTL4 gene of the iPSC; differentiating the genome-edited iPSC into a hepatocyte; and implanting the hepatocyte into the patient.

[0012] In some aspects, the editing step comprises introducing into the iPSC one or more deoxyribonucleic acid (DNA) endonucleases to effect one or more single-strand breaks (SSBs) or double-strand breaks (DSBs) within or near the ANGPTL4 gene or ANGPTL4 regulatory elements that results in one or more permanent insertions, deletions or mutations of at least one nucleotide within or near the ANGPTL4 gene, thereby reducing or eliminating the expression or function of ANGPTL4 gene products.

[0013] Also provided herein is an ex vivo method for treating a patient having an ANGPTL4 related condition or disorder comprising the steps of: isolating a mesenchymal stem cell from the patient; editing within or near an Angiopoietin-like 4 (ANGPTL4) gene or other DNA sequences that encode regulatory elements of the ANGPTL4 gene of the mesenchymal stem cell; differentiating the genome-edited mesenchymal stem cell into a hepatocyte; and implanting the hepatocyte into the patient.

[0014] In some aspects, the editing step comprises introducing into the mesenchymal stem cell one or more deoxyribonucleic acid (DNA) endonucleases to effect one or more single-strand breaks (SSBs) or double-strand breaks (DSBs) within or near the ANGPTL4 gene or ANGPTL4 regulatory elements that results in one or more permanent insertions, deletions or mutations of at least one nucleotide within or near the ANGPTL4 gene, thereby reducing or eliminating the expression or function of ANGPTL4 gene products.

[0015] Also provided herein is an in vivo method for treating a patient with an ANGPTL4 related disorder comprising the step of editing the Angiopoietin-like 4 (ANGPTL4) gene in a cell of the patient. In some aspects, the editing step comprises introducing into the cell one or more deoxyribonucleic acid (DNA) endonucleases to effect one or more single-strand breaks (SSBs) or double-strand breaks (DSBs) within or near the ANGPTL4 gene or ANGPTL4 regulatory elements that results in one or more permanent insertions, deletions or mutations of at least one nucleotide within or near the ANGPTL4 gene, thereby reducing or eliminating the expression or function of ANGPTL4 gene products. In some aspects, the cell is a hepatocyte. In some aspects, the one or more deoxyribonucleic acid (DNA) endonuclease is delivered to the hepatocyte by local injection, systemic infusion, or combinations thereof.

[0016] Also provided herein is a method of altering the contiguous genomic sequence of an ANGPTL4 gene in a cell comprising contacting the cell with one or more deoxyribonucleic acid (DNA) endonuclease to effect one or more single-strand breaks (SSBs) or double-strand breaks (DSBs). In some aspects, the alteration of the contiguous genomic sequence occurs in one or more exons of the ANGPTL4 gene.

[0017] In some aspects, the one or more deoxyribonucleic acid (DNA) endonuclease is selected from any of those listed in SEQ ID NOs: 1-620, and variants having at least 70% homology to any of those listed in SEQ ID NOs: 1-620.

[0018] In some aspects, the one or more deoxyribonucleic acid (DNA) endonuclease is one or more protein or polypeptide. In some aspects, the one or more deoxyribonucleic acid (DNA) endonuclease is one or more polynucleotide encoding the one or more DNA endonuclease. In some aspects, the one or more deoxyribonucleic acid (DNA) endonuclease is one or more ribonucleic acid (RNA) encoding the one or more DNA endonuclease. In some aspects, the one or more ribonucleic acid (RNA) is one or more chemically modified RNA. In some aspects, the one or more ribonucleic acid (RNA) is chemically modified in the coding region. In some aspects, the one or more polynucleotide or one or more ribonucleic acid (RNA) is codon optimized.

[0019] In some aspects, the methods further comprise introducing into the cell one or more gRNAs or one or more sgRNAs. In some aspects, the one or more gRNAs or one or more sgRNAs comprises a spacer sequence that is complementary to a segment of the coding sequence of the ANGPTL4 gene. In some aspects, the one or more gRNAs or one or more sgRNAs is chemically modified.

[0020] In some aspects, the one or more gRNAs or one or more sgRNAs is pre-complexed with the one or more deoxyribonucleic acid (DNA) endonuclease. In some aspects. the pre-complexing involves a covalent attachment of the one or more gRNAs or one or more sgRNAs to the one or more deoxyribonucleic acid (DNA) endonuclease.

[0021] In some aspects, the one or more deoxyribonucleic acid (DNA) endonuclease is formulated in a liposome or lipid nanoparticle. In some aspects, the one or more deoxyribonucleic acid (DNA) endonuclease is formulated in a liposome or a lipid nanoparticle which also comprises the one or more gRNAs or one or more sgRNAs.

[0022] In some aspects, the one or more deoxyribonucleic acid (DNA) endonuclease is encoded in an AAV vector particle, where the AAV vector serotype is selected from those listed in SEQ ID NOs: 4,734-5,302 and in Table 2. In some aspects, the one or more gRNAs or one or more sgRNAs is encoded in an AAV vector particle, where the AAV vector serotype is selected from those listed in SEQ ID NOs: 4,734-5,302 and in Table 2. In some aspects, the one or more deoxyribonucleic acid (DNA) endonuclease is encoded in an AAV vector particle which also encodes the one or more gRNAs or one or more sgRNAs, where the AAV vector serotype is selected from those listed in SEQ ID NOs: 4,734-5,302 and in Table 2.

[0023] Also provided herein is a single-molecule guide polynucleotide comprising at least a spacer sequence that is an RNA sequence corresponding to any of SEQ ID NOs: 5305-19006. In some aspects, the single-molecule guide polynucleotide further comprises a spacer extension region. In some aspects, the single-molecule guide polynucleotide further comprises a tracrRNA extension region. In some aspects, the single-molecule guide polynucleotide is chemically modified.

[0024] Also provided herein is a non-naturally occurring CRISPR/Cas system comprising a polynucleotide encoding a Cas9 or Cpf1 enzyme and at least one single-molecule guide polynucleotide described herein. In some aspects, the polynucleotide encoding a Cas9 or Cpf1 enzyme is selected from S. pyogenes Cas9, S. aureus Cas9, N. meningitides Cas9, S. thermophilus CRISPR1 Cas9, S. thermophilus CRISPR 3 Cas9, T. denticola Cas9, L. bacterium ND2006 Cpf1 and Acidaminococcus sp. BV3L6 Cpf1, and variants having at least 70% homology to these enzymes. In some aspects, the polynucleotide encoding a Cas9 or Cpf1 enzyme comprises one or more nuclear localization signals (NLSs). In some aspects, at least one NLS is at or within 50 amino acids of the amino-terminus of the polynucleotide encoding a Cas9 or Cpf1 enzyme and/or at least one NLS is at or within 50 amino acids of the carboxy-terminus of the polynucleotide encoding a Cas9 or Cpf1 enzyme. In some aspects, polynucleotide encoding a Cas9 or Cpf1 enzyme is codon optimized for expression in a eukaryotic cell.

[0025] Also provided herein is a DNA encoding the single-molecule guide polynucleotide described herein.

[0026] Also provided herein is a DNA encoding the CRISPR/Cas system described herein.

[0027] Also provided herein is a vector comprising a DNA encoding the single-molecule guide polynucleotide and CRISPR/Cas system. In some aspects, the vector is a plasmid. In some aspects, the vector is an AAV vector particle, wherein the AAV vector serotype is selected from those listed in SEQ ID NOs: 4,734-5,302 and in Table 2.

### BRIEF DESCRIPTION OF THE DRAWINGS

[0028] Various aspects of materials and methods disclosed and described in this specification can be better understood by reference to the accompanying figures, in which:

[0029] FIG. 1A is a depiction of the type II CRISPR/Cas system.

[0030] FIG. 1B is another depiction of the type II CRISPR/Cas system.

[0031] FIGS. 2, 3, and 4 describe the cutting efficiency of gRNAs with an S. pyogenes Cas9 in HEK293T cells targeting the ANGPTL4 gene.

### BRIEF DESCRIPTION OF SEQUENCE LISTING

[0032] SEQ ID NOs: 1-620 are Cas endonuclease ortholog sequences.

[0033] SEQ ID NOs: 621-631 are intentionally blank.

[0034] SEQ ID NOs: 632-4,715 are microRNA sequences.

[0035] SEQ ID NOs: 4,716-4,733 are intentionally blank.

[0036] SEQ ID NOs: 4,734-5,302 are AAV serotype sequences.

[0037] SEQ ID NO: 5,303 is an ANGPTL4 nucleotide sequence.

[0038] SEQ ID NO: 5,304 is a gene sequence including 1-5 kilobase pairs upstream and/or downstream of the ANGPTL4 gene.

[0039] SEQ ID NOs: 5,305-5,341 are 20 bp spacer sequences for targeting within or near a ANGPTL4 gene or other DNA sequence that encodes a regulatory element of the ANGPTL4 gene with a T. denticola Cas9 endonuclease.

[0040] SEQ ID NOs: 5,342-5,459 are 20 bp spacer sequences for targeting within or near a ANGPTL4 gene or other DNA sequence that encodes a regulatory element of the ANGPTL4 gene with a S. thermophilus Cas9 endonuclease.

[0041] SEQ ID NOs: 5,460-6,105 are 20 bp spacer sequences for targeting within or near a ANGPTL4 gene or other DNA sequence that encodes a regulatory element of the ANGPTL4 gene with a S. aureus Cas9 endonuclease.

[0042] SEQ ID NOs: 6,106-6,467 are 20 bp spacer sequences for targeting within or near a ANGPTL4 gene or other DNA sequence that encodes a regulatory element of the ANGPTL4 gene with a N. meningitides Cas9 endonuclease.

[0043] SEQ ID NOs: 6,468-13,243 are 20 bp spacer sequences for targeting within or near a ANGPTL4 gene or other DNA sequence that encodes a regulatory element of the ANGPTL4 gene with a S. pyogenes Cas9 endonuclease.

[0044] SEQ ID NOs: 13,244-19,006 are 22 bp spacer sequences for targeting within or near a ANGPTL4 gene or other DNA sequence that encodes a regulatory element of the ANGPTL4 gene with an Acidaminococcus, a Lachnospiraceae, and a Francisella Novicida Cpf1 endonuclease.

[0045] SEQ ID NOs: 19,007-19,036 are intentionally blank.

[0046] SEQ ID NO: 19,037 is a sample guide RNA (gRNA) for a S. pyogenes Cas9 endonuclease.

[0047] SEQ ID NOs: 19,038-19,040 show sample sgRNA sequences.

### DETAILED DESCRIPTION

### I. Introduction

### Genome Editing

[0048] The present disclosure provides strategies and techniques for the targeted, specific alteration of the genetic information (genome) of living organisms. As used herein, the term “alteration” or “alteration of genetic information” refers to any change in the genome of a cell. In the context of treating genetic disorders, alterations may include, but are not limited to, insertion, deletion and correction. As used herein, the term “insertion” refers to an addition of one or more nucleotides in a DNA sequence. Insertions can range from small insertions of a few nucleotides to insertions of large segments such as a cDNA or a gene. The term “deletion” refers to a loss or removal of one or more nucleotides in a DNA sequence or a loss or removal of the function of a gene. In some cases, a deletion can include, for example, a loss of a few nucleotides, an exon, an intron, a gene segment, or the entire sequence of a gene. In some cases, deletion of a gene refers to the elimination or reduction of the function or expression of a gene or its gene product. This can result from not only a deletion of sequences within or near the gene, but also other events (e.g., insertion, nonsense mutation) that disrupt the expression of the gene. The term “correction” as used herein, refers to a change of one or more nucleotides of a genome in a cell, whether by insertion, deletion or substitution. Such correction may result in a more favorable genotypic or phenotypic outcome, whether in structure or function, to the genomic site which was corrected. One non-limiting example of a “correction” includes the correction of a mutant or defective sequence to a wild-type sequence which restores structure or function to a gene or its gene product(s). Depending on the nature of the mutation, correction may be achieved via various strategies disclosed herein. In one non-limiting example, a missense mutation may be corrected by replacing the region containing the mutation with its wild-type counterpart. As another example, duplication mutations (e.g., repeat expansions) in a gene may be corrected by removing the extra sequences.

[0049] In some aspects, alterations may also include a gene knock-in, knock-out or knock-down. As used herein, the term “knock-in” refers to an addition of a DNA sequence, or fragment thereof into a genome. Such DNA sequences to be knocked-in may include an entire gene or genes, may include regulatory sequences associated with a gene or any portion or fragment of the foregoing. For example, a cDNA encoding the wild-type protein may be inserted into the genome of a cell carrying a mutant gene. Knock-in strategies need not replace the defective gene, in whole or in part. In some cases, a knock-in strategy may further involve substitution of an existing sequence with the provided sequence, e.g., substitution of a mutant allele with a wild-type copy. On the other hand, the term “knock-out” refers to the elimination of a gene or the expression of a gene. For example, a gene can be knocked out by either a deletion or an addition of a nucleotide sequence that leads to a disruption of the reading frame. As another example, a gene may be knocked out by replacing a part of the gene with an irrelevant sequence. Finally, the term “knock-down” as used herein refers to reduction in the expression of a gene or its gene product(s). As a result of a gene knock-down, the protein activity or function may be attenuated or the protein levels may be reduced or eliminated.

[0050] Genome editing generally refers to the process of modifying the nucleotide sequence of a genome, preferably in a precise or pre-determined manner. Examples of methods of genome editing described herein include methods of using site-directed nucleases to cut deoxyribonucleic acid (DNA) at precise target locations in the genome, thereby creating single-strand or double-strand DNA breaks at particular locations within the genome. Such breaks can be and regularly are repaired by natural, endogenous cellular processes, such as homology-directed repair (HDR) and non-homologous end joining (NHEJ), as recently reviewed in Cox et al., Nature Medicine 21(2), 121-31 (2015). These two main DNA repair processes consist of a family of alternative pathways. NHEJ directly joins the DNA ends resulting from a double-strand break, sometimes with the loss or addition of nucleotide sequence, which may disrupt or enhance gene expression. HDR utilizes a homologous sequence, or donor sequence, as a template for inserting a defined DNA sequence at the break point. The homologous sequence can be in the endogenous genome, such as a sister chromatid. Alternatively, the donor can be an exogenous nucleic acid, such as a plasmid, a single-strand oligonucleotide, a double-stranded oligonucleotide, a duplex oligonucleotide or a virus, that has regions of high homology with the nuclease-cleaved locus, but which can also contain additional sequence or sequence changes including deletions that can be incorporated into the cleaved target locus. A third repair mechanism can be microhomology-mediated end joining (MMEJ), also referred to as “Alternative NHEJ,” in which the genetic outcome is similar to NHEJ in that small deletions and insertions can occur at the cleavage site. MMEJ can make use of homologous sequences of a few basepairs flanking the DNA break site to drive a more favored DNA end joining repair outcome, and recent reports have further elucidated the molecular mechanism of this process; see, e.g., Cho and Greenberg, Nature 518, 174-76 (2015); Kent et al., Nature Structural and Molecular Biology, Adv. Online doi:10.1038/nsmb.2961(2015); Mateos-Gomez et al., Nature 518, 254-57 (2015); Ceccaldi et al., Nature 528, 258-62 (2015). In some instances it may be possible to predict likely repair outcomes based on analysis of potential microhomologies at the site of the DNA break.

[0051] Each of these genome editing mechanisms can be used to create desired genomic alterations. A step in the genome editing process can be to create one or two DNA breaks, the latter as double-strand breaks or as two single-stranded breaks, in the target locus as near the site of intended mutation. This can be achieved via the use of site-directed polypeptides, as described and illustrated herein.

### CRISPR Endonuclease System

[0052] A CRISPR (Clustered Regularly Interspaced Short Palindromic Repeats) genomic locus can be found in the genomes of many prokaryotes (e.g., bacteria and archaea). In prokaryotes, the CRISPR locus encodes products that function as a type of immune system to help defend the prokaryotes against foreign invaders, such as virus and phage. There are three stages of CRISPR locus function: integration of new sequences into the CRISPR locus, expression of CRISPR RNA (crRNA), and silencing of foreign invader nucleic acid. Five types of CRISPR systems (e.g., Type I, Type II, Type III, Type U, and Type V) have been identified.

[0053] A CRISPR locus includes a number of short repeating sequences referred to as “repeats.” When expressed, the repeats can form secondary structures (e.g., hairpins) and/or comprise unstructured single-stranded sequences. The repeats usually occur in clusters and frequently diverge between species. The repeats are regularly interspaced with unique intervening sequences referred to as “spacers,” resulting in a repeat-spacer-repeat locus architecture. The spacers are identical to or have high homology with known foreign invader sequences. A spacer-repeat unit encodes a crisprRNA (crRNA), which is processed into a mature form of the spacer-repeat unit. A crRNA comprises a “seed” or spacer sequence that is involved in targeting a target nucleic acid (in the naturally occurring form in prokaryotes, the spacer sequence targets the foreign invader nucleic acid). A spacer sequence is located at the 5′ or 3′ end of the crRNA.

[0054] A CRISPR locus also comprises polynucleotide sequences encoding CRISPR Associated (Cas) genes. Cas genes encode endonucleases involved in the biogenesis and the interference stages of crRNA function in prokaryotes. Some Cas genes comprise homologous secondary and/or tertiary structures.

### Type H CRISPR Systems

[0055] crRNA biogenesis in a Type II CRISPR system in nature requires a trans-activating CRISPR RNA (tracrRNA). Non-limiting examples of Type II CRISPR systems are shown in FIGS. 1A and 1B. The tracrRNA can be modified by endogenous RNaseIII, and then hybridizes to a crRNA repeat in the pre-crRNA array. Endogenous RNaseIII can be recruited to cleave the pre-crRNA. Cleaved crRNAs can be subjected to exoribonuclease trimming to produce the mature crRNA form (e.g., 5′ trimming). The tracrRNA can remain hybridized to the crRNA, and the tracrRNA and the crRNA associate with a site-directed polypeptide (e.g., Cas9). The crRNA of the crRNA-tracrRNA-Cas9 complex can guide the complex to a target nucleic acid to which the crRNA can hybridize. Hybridization of the crRNA to the target nucleic acid can activate Cas9 for targeted nucleic acid cleavage. The target nucleic acid in a Type II CRISPR system is referred to as a protospacer adjacent motif (PAM). In nature, the PAM is essential to facilitate binding of a site-directed polypeptide (e.g., Cas9) to the target nucleic acid. Type II systems (also referred to as Nmeni or CASS4) are further subdivided into Type II-A (CASS4) and II-B (CASS4a). Jinek et al., Science, 337(6096):816-821 (2012) showed that the CRISPR/Cas9 system is useful for RNA-programmable genome editing, and international patent application publication number WO2013/176772 provides numerous examples and applications of the CRISPR/Cas endonuclease system for site-specific gene editing.

### Type V CRISPR Systems

[0056] Type V CRISPR systems have several important differences from Type II systems. For example, Cpf1 is a single RNA-guided endonuclease that, in contrast to Type II systems, lacks tracrRNA. In fact, Cpf1-associated CRISPR arrays can be processed into mature crRNAs without the requirement of an additional trans-activating tracrRNA. The Type V CRISPR array can be processed into short mature crRNAs of 42-44 nucleotides in length, with each mature crRNA beginning with 19 nucleotides of direct repeat followed by 23-25 nucleotides of spacer sequence. In contrast, mature crRNAs in Type II systems can start with 20-24 nucleotides of spacer sequence followed by about 22 nucleotides of direct repeat. Also, Cpf1 can utilize a T-rich protospacer-adjacent motif such that Cpf1-crRNA complexes efficiently cleave target DNA preceded by a short T-rich PAM, which is in contrast to the G-rich PAM following the target DNA for Type II systems. Thus, Type V systems cleave at a point that is distant from the PAM, while Type II systems cleave at a point that is adjacent to the PAM. In addition, in contrast to Type II systems, Cpf1 cleaves DNA via a staggered DNA double-stranded break with a 4 or 5 nucleotide 5′ overhang. Type II systems cleave via a blunt double-stranded break. Similar to Type II systems, Cpf1 contains a predicted RuvC-like endonuclease domain, but lacks a second HNH endonuclease domain, which is in contrast to Type II systems.

### Cas Genes/Polypeptides and Protospacer Adjacent Motifs

[0057] Exemplary CRISPR/Cas polypeptides include the Cas9 polypeptides as published in Fonfara et al., Nucleic Acids Research, 42: 2577-2590 (2014). The CRISPR/Cas gene naming system has undergone extensive rewriting since the Cas genes were discovered. Fonfara et al., also provides PAM sequences for the Cas9 polypeptides from various species.

### II. Compositions and Methods

[0058] Provided herein are cellular, ex vivo and in vivo methods for using genome engineering tools to create permanent changes to the genome by deleting or mutating the ANGPTL4 gene or other DNA sequences that encode regulatory elements of the ANGPTL4 gene. Such methods use endonucleases, such as CRISPR-associated (Cas9, Cpf1 and the like) nucleases, to permanently edit within or near the genomic locus of the ANGPTL4 gene or other DNA sequences that encode regulatory elements of the ANGPTL4 gene. In this way, examples set forth in the present disclosure can help to reduce or eliminate the expression of the ANGPTL4 gene with a single treatment (rather than deliver potential therapies for the lifetime of the patient).

### Site Directed Polypeptides (Endonucleases, Enzymes)

[0059] A site-directed polypeptide is a nuclease used in genome editing to cleave DNA. The site-directed polypeptide can be administered to a cell or a patient as either: one or more polypeptides, or one or more mRNAs encoding the polypeptide. Any of the enzymes or orthologs listed in SEQ ID NOs: 1-620 or disclosed herein may be utilized in the methods herein.

[0060] In the context of a CRISPR/Cas9 or CRISPR/Cpf1 system, the site-directed polypeptide can bind to a guide RNA that, in turn, specifies the site in the target DNA to which the polypeptide is directed. In the CRISPR/Cas9 or CRISPR/Cpf1 systems disclosed herein, the site-directed polypeptide can be an endonuclease, such as a DNA endonuclease.

[0061] A site-directed polypeptide can comprise a plurality of nucleic acid-cleaving (i.e., nuclease) domains. Two or more nucleic acid-cleaving domains can be linked together via a linker. For example, the linker can comprise a flexible linker. Linkers can comprise 1, 2, 3, 4, 5, 6, 7, 8, 9, 10, 11, 12, 13, 14, 15, 16, 17, 18, 19, 20, 21, 22, 23, 24, 25, 30, 35, 40 or more amino acids in length.

[0062] Naturally-occurring wild-type Cas9 enzymes comprise two nuclease domains, a HNH nuclease domain and a RuvC domain. Herein, the term “Cas9” refers to both a naturally-occurring and a recombinant Cas9. Cas9 enzymes contemplated herein can comprise a HNH or HNH-like nuclease domain, and/or a RuvC or RuvC-like nuclease domain.

[0063] HNH or HNH-like domains comprise a McrA-like fold. HNH or HNH-like domains comprises two antiparallel β-strands and an α-helix. HNH or HNH-like domains comprises a metal binding site (e.g., a divalent cation binding site). HNH or HNH-like domains can cleave one strand of a target nucleic acid (e.g., the complementary strand of the crRNA targeted strand).

[0064] RuvC or RuvC-like domains comprise an RNaseH or RNaseH-like fold. RuvC/RNaseH domains are involved in a diverse set of nucleic acid-based functions including acting on both RNA and DNA. The RNaseH domain comprises 5 β-strands surrounded by a plurality of α-helices. RuvC/RNaseH or RuvC/RNaseH-like domains comprise a metal binding site (e.g., a divalent cation binding site). RuvC/RNaseH or RuvC/RNaseH-like domains can cleave one strand of a target nucleic acid (e.g., the non-complementary strand of a double-stranded target DNA).

[0065] Site-directed polypeptides can introduce double-strand breaks or single-strand breaks in nucleic acids, e.g., genomic DNA. The double-strand break can stimulate a cell's endogenous DNA-repair pathways (e.g., homology-dependent repair (HDR) or NHEJ or alternative non-homologous end joining (A-NHEJ) or microhomology-mediated end joining (MMEJ)). NHEJ can repair cleaved target nucleic acid without the need for a homologous template. This can sometimes result in small deletions or insertions (indels) in the target nucleic acid at the site of cleavage, and can lead to disruption or alteration of gene expression. HDR can occur when a homologous repair template, or donor, is available. The homologous donor template can comprise sequences that are homologous to sequences flanking the target nucleic acid cleavage site. The sister chromatid can be used by the cell as the repair template. However, for the purposes of genome editing, the repair template can be supplied as an exogenous nucleic acid, such as a plasmid, duplex oligonucleotide, single-strand oligonucleotide or viral nucleic acid. With exogenous donor templates, an additional nucleic acid sequence (such as a transgene) or modification (such as a single or multiple base change or a deletion) can be introduced between the flanking regions of homology so that the additional or altered nucleic acid sequence also becomes incorporated into the target locus. MMEJ can result in a genetic outcome that is similar to NHEJ in that small deletions and insertions can occur at the cleavage site. MMEJ can make use of homologous sequences of a few basepairs flanking the cleavage site to drive a favored end-joining DNA repair outcome. In some instances, it may be possible to predict likely repair outcomes based on analysis of potential microhomologies in the nuclease target regions.

[0066] Thus, in some cases, homologous recombination can be used to insert an exogenous polynucleotide sequence into the target nucleic acid cleavage site. An exogenous polynucleotide sequence is termed a “donor polynucleotide” (or donor or donor sequence) herein. The donor polynucleotide, a portion of the donor polynucleotide, a copy of the donor polynucleotide, or a portion of a copy of the donor polynucleotide can be inserted into the target nucleic acid cleavage site. The donor polynucleotide can be an exogenous polynucleotide sequence, i.e., a sequence that does not naturally occur at the target nucleic acid cleavage site.

[0067] The modifications of the target DNA due to NHEJ and/or HDR can lead to, for example, mutations, deletions, alterations, integrations, gene correction, gene replacement, gene tagging, transgene insertion, nucleotide deletion, gene disruption, translocations and/or gene mutation. The processes of deleting genomic DNA and integrating non-native nucleic acid into genomic DNA are examples of genome editing.

[0068] The site-directed polypeptide can comprise an amino acid sequence having at least 10%, at least 15%, at least 20%, at least 30%, at least 40%, at least 50%, at least 60%, at least 70%, at least 75%, at least 80%, at least 85%, at least 90%, at least 95%, at least 99%, or 100% amino acid sequence identity to a wild-type exemplary site-directed polypeptide [e.g., Cas9 from S. pyogenes, US2014/0068797 Sequence ID No. 8 or Sapranauskas et al., Nucleic Acids Res, 39(21): 9275-9282 (2011)], and various other site-directed polypeptides. The site-directed polypeptide can comprise at least 70, 75, 80, 85, 90, 95, 97, 99, or 100% identity to a wild-type site-directed polypeptide (e.g., Cas9 from S. pyogenes, supra) over 10 contiguous amino acids. The site-directed polypeptide can comprise at most: 70, 75, 80, 85, 90, 95, 97, 99, or 100% identity to a wild-type site-directed polypeptide (e.g., Cas9 from S. pyogenes, supra) over 10 contiguous amino acids. The site-directed polypeptide can comprise at least: 70, 75, 80, 85, 90, 95, 97, 99, or 100% identity to a wild-type site-directed polypeptide (e.g., Cas9 from S. pyogenes, supra) over 10 contiguous amino acids in a HNH nuclease domain of the site-directed polypeptide. The site-directed polypeptide can comprise at most: 70, 75, 80, 85, 90, 95, 97, 99, or 100% identity to a wild-type site-directed polypeptide (e.g., Cas9 from S. pyogenes, supra) over 10 contiguous amino acids in a HNH nuclease domain of the site-directed polypeptide. The site-directed polypeptide can comprise at least: 70, 75, 80, 85, 90, 95, 97, 99, or 100% identity to a wild-type site-directed polypeptide (e.g., Cas9 from S. pyogenes, supra) over 10 contiguous amino acids in a RuvC nuclease domain of the site-directed polypeptide. The site-directed polypeptide can comprise at most: 70, 75, 80, 85, 90, 95, 97, 99, or 100% identity to a wild-type site-directed polypeptide (e.g., Cas9 from S. pyogenes, supra) over 10 contiguous amino acids in a RuvC nuclease domain of the site-directed polypeptide.

[0069] The site-directed polypeptide can comprise a modified form of a wild-type exemplary site-directed polypeptide. The modified form of the wild-type exemplary site-directed polypeptide can comprise a mutation that reduces the nucleic acid-cleaving activity of the site-directed polypeptide. The modified form of the wild-type exemplary site-directed polypeptide can have less than 90%, less than 80%, less than 70%, less than 60%, less than 50%, less than 40%, less than 30%, less than 20%, less than 10%, less than 5%, or less than 1% of the nucleic acid-cleaving activity of the wild-type exemplary site-directed polypeptide (e.g., Cas9 from S. pyogenes, supra). The modified form of the site-directed polypeptide can have no substantial nucleic acid-cleaving activity. When a site-directed polypeptide is a modified form that has no substantial nucleic acid-cleaving activity, it is referred to herein as “enzymatically inactive.”

[0070] The modified form of the site-directed polypeptide can comprise a mutation such that it can induce a single-strand break (SSB) on a target nucleic acid (e.g., by cutting only one of the sugar-phosphate backbones of a double-strand target nucleic acid). In some aspects, the mutation can result in less than 90%, less than 80%, less than 70%, less than 60%, less than 50%, less than 40%, less than 30%, less than 20%, less than 10%, less than 5%, or less than 1% of the nucleic acid-cleaving activity in one or more of the plurality of nucleic acid-cleaving domains of the wild-type site directed polypeptide (e.g., Cas9 from S. pyogenes, supra). In some aspects, the mutation can result in one or more of the plurality of nucleic acid-cleaving domains retaining the ability to cleave the complementary strand of the target nucleic acid, but reducing its ability to cleave the non-complementary strand of the target nucleic acid. The mutation can result in one or more of the plurality of nucleic acid-cleaving domains retaining the ability to cleave the non-complementary strand of the target nucleic acid, but reducing its ability to cleave the complementary strand of the target nucleic acid. For example, residues in the wild-type exemplary S. pyogenes Cas9 polypeptide, such as Asp10, His840, Asn854 and Asn856, are mutated to inactivate one or more of the plurality of nucleic acid-cleaving domains (e.g., nuclease domains). The residues to be mutated can correspond to residues Asp10, His840, Asn854 and Asn856 in the wild-type exemplary S. pyogenes Cas9 polypeptide (e.g., as determined by sequence and/or structural alignment). Non-limiting examples of mutations include D10A, H840A, N854A or N856A. One skilled in the art will recognize that mutations other than alanine substitutions can be suitable.

[0071] In some aspects, a D10A mutation can be combined with one or more of H840A, N854A, or N856A mutations to produce a site-directed polypeptide substantially lacking DNA cleavage activity. A H840A mutation can be combined with one or more of D10A, N854A, or N856A mutations to produce a site-directed polypeptide substantially lacking DNA cleavage activity. A N854A mutation can be combined with one or more of H840A, D10A, or N856A mutations to produce a site-directed polypeptide substantially lacking DNA cleavage activity. A N856A mutation can be combined with one or more of H840A, N854A, or D10A mutations to produce a site-directed polypeptide substantially lacking DNA cleavage activity. Site-directed polypeptides that comprise one substantially inactive nuclease domain are referred to as “nickases.”

[0072] Nickase variants of RNA-guided endonucleases, for example Cas9, can be used to increase the specificity of CRISPR-mediated genome editing. Wild type Cas9 is typically guided by a single guide RNA designed to hybridize with a specified ˜20 nucleotide sequence in the target sequence (such as an endogenous genomic locus). However, several mismatches can be tolerated between the guide RNA and the target locus, effectively reducing the length of required homology in the target site to, for example, as little as 13 nt of homology, and thereby resulting in elevated potential for binding and double-strand nucleic acid cleavage by the CRISPR/Cas9 complex elsewhere in the target genome—also known as off-target cleavage. Because nickase variants of Cas9 each only cut one strand, in order to create a double-strand break it is necessary for a pair of nickases to bind in close proximity and on opposite strands of the target nucleic acid, thereby creating a pair of nicks, which is the equivalent of a double-strand break. This requires that two separate guide RNAs—one for each nickase—must bind in close proximity and on opposite strands of the target nucleic acid. This requirement essentially doubles the minimum length of homology needed for the double-strand break to occur, thereby reducing the likelihood that a double-strand cleavage event will occur elsewhere in the genome, where the two guide RNA sites —if they exist—are unlikely to be sufficiently close to each other to enable the double-strand break to form. As described in the art, nickases can also be used to promote HDR versus NHEJ. HDR can be used to introduce selected changes into target sites in the genome through the use of specific donor sequences that effectively mediate the desired changes.

[0073] Mutations contemplated can include substitutions, additions, and deletions, or any combination thereof. The mutation converts the mutated amino acid to alanine. The mutation converts the mutated amino acid to another amino acid (e.g., glycine, serine, threonine, cysteine, valine, leucine, isoleucine, methionine, proline, phenylalanine, tyrosine, tryptophan, aspartic acid, glutamic acid, asparagine, glutamine, histidine, lysine, or arginine). The mutation converts the mutated amino acid to a non-natural amino acid (e.g., selenomethionine). The mutation converts the mutated amino acid to amino acid mimics (e.g., phosphomimics). The mutation can be a conservative mutation. For example, the mutation converts the mutated amino acid to amino acids that resemble the size, shape, charge, polarity, conformation, and/or rotamers of the mutated amino acids (e.g., cysteine/serine mutation, lysine/asparagine mutation, histidine/phenylalanine mutation). The mutation can cause a shift in reading frame and/or the creation of a premature stop codon. Mutations can cause changes to regulatory regions of genes or loci that affect expression of one or more genes.

[0074] The site-directed polypeptide (e.g., variant, mutated, enzymatically inactive and/or conditionally enzymatically inactive site-directed polypeptide) can target nucleic acid. The site-directed polypeptide (e.g., variant, mutated, enzymatically inactive and/or conditionally enzymatically inactive endoribonuclease) can target DNA. The site-directed polypeptide (e.g., variant, mutated, enzymatically inactive and/or conditionally enzymatically inactive endoribonuclease) can target RNA.

[0075] The site-directed polypeptide can comprise one or more non-native sequences (e.g., the site-directed polypeptide is a fusion protein).

[0076] The site-directed polypeptide can comprise an amino acid sequence comprising at least 15% amino acid identity to a Cas9 from a bacterium (e.g., S. pyogenes), a nucleic acid binding domain, and two nucleic acid cleaving domains (i.e., a HNH domain and a RuvC domain).

[0077] The site-directed polypeptide can comprise an amino acid sequence comprising at least 15% amino acid identity to a Cas9 from a bacterium (e.g., S. pyogenes), and two nucleic acid cleaving domains (i.e., a HNH domain and a RuvC domain).

[0078] The site-directed polypeptide can comprise an amino acid sequence comprising at least 15% amino acid identity to a Cas9 from a bacterium (e.g., S. pyogenes), and two nucleic acid cleaving domains, wherein one or both of the nucleic acid cleaving domains comprise at least 50% amino acid identity to a nuclease domain from Cas9 from a bacterium (e.g., S. pyogenes).

[0079] The site-directed polypeptide can comprise an amino acid sequence comprising at least 15% amino acid identity to a Cas9 from a bacterium (e.g., S. pyogenes), two nucleic acid cleaving domains (i.e., a HNH domain and a RuvC domain), and non-native sequence (for example, a nuclear localization signal) or a linker linking the site-directed polypeptide to a non-native sequence.

[0080] The site-directed polypeptide can comprise an amino acid sequence comprising at least 15% amino acid identity to a Cas9 from a bacterium (e.g., S. pyogenes), two nucleic acid cleaving domains (i.e., a HNH domain and a RuvC domain), wherein the site-directed polypeptide comprises a mutation in one or both of the nucleic acid cleaving domains that reduces the cleaving activity of the nuclease domains by at least 50%.

[0081] The site-directed polypeptide can comprise an amino acid sequence comprising at least 15% amino acid identity to a Cas9 from a bacterium (e.g., S. pyogenes), and two nucleic acid cleaving domains (i.e., a HNH domain and a RuvC domain), wherein one of the nuclease domains comprises mutation of aspartic acid 10, and/or wherein one of the nuclease domains can comprise a mutation of histidine 840, and wherein the mutation reduces the cleaving activity of the nuclease domain(s) by at least 50%.

[0082] The one or more site-directed polypeptides, e.g. DNA endonucleases, can comprise two nickases that together effect one double-strand break at a specific locus in the genome, or four nickases that together effect or cause two double-strand breaks at specific loci in the genome. Alternatively, one site-directed polypeptide, e.g. DNA endonuclease, can effect or cause one double-strand break at a specific locus in the genome.

[0083] Non-limiting examples of Cas9 orthologs from other bacterial strains include but are not limited to, Cas proteins identified in Acaryochloris marina MBIC11017; Acetohalobium arabaticum DSM 5501; Acidithiobacillus caldus; Acidithiobacillus ferrooxidans ATCC 23270; Alicyclobacillus acidocaldarius LAA1; Alicyclobacillus acidocaldarius subsp. acidocaldarius DSM 446; Allochromatium vinosum DSM 180; Ammonifex degensii KC4; Anabaena variabilis ATCC 29413; Arthrospira maxima CS-328; Arthrospira platensis str. Paraca; Arthrospira sp. PCC 8005; Bacillus pseudomycoides DSM 12442; Bacillus selenitireducens MLS10; Burkholderiales bacterium 1_1_47; Caldicelulosiruptor becscii DSM 6725; Candidatus Desulforudis audaxviator MP104C; Caldicellulosiruptor hydrothermalis_108; Clostridium phage c-st; Clostridium botulinum A3 str. Loch Maree; Clostridium botulinum Ba4 str. 657; Clostridium difficile QCD-63q42; Crocosphaera watsonii WH 8501; Cyanothece sp. ATCC 51142; Cyanothece sp. CCY0110; Cyanothece sp. PCC 7424; Cyanothece sp. PCC 7822; Exiguobacterium sibiricum 255-15; Finegoldia magna ATCC 29328; Ktedonobacter racemifer DSM 44963; Lactobacillus delbrueckii subsp. bulgaricus PB2003/044-T3-4; Lactobacillus salivarius ATCC 11741; Listeria innocua; Lyngbya sp. PCC 8106; Marinobacter sp. ELB17; Methanohalobium evestigatum Z-7303; Microcystis phage Ma-LMM01; Microcystis aeruginosa NIES-843; Microscilla marina ATCC 23134; Microcoleus chthonoplastes PCC 7420; Neisseria meningitidis; Nitrosococcus halophilus Nc4; Nocardiopsis dassonvillei subsp. dassonvillei DSM 43111; Nodularia spumigena CCY9414; Nostoc sp. PCC 7120; Oscillatoria sp. PCC 6506; Pelotomaculum thermopropionicum_SI; Petrotoga mobilis SJ95; Polaromonas naphthalenivorans CJ2; Polaromonas sp. JS666; Pseudoalteromonas haloplanktis TAC125; Streptomyces pristinaespiralis ATCC 25486; Streptomyces pristinaespiralis ATCC 25486; Streptococcus thermophilus; Streptomyces viridochromogenes DSM 40736; Streptosporangium roseum DSM 43021; Synechococcus sp. PCC 7335; and Thermosipho africanus TCF52B (Chylinski et al., RNA Biol., 2013; 10(5): 726-737).

[0084] In addition to Cas9 orthologs, other Cas9 variants such as fusion proteins of inactive dCas9 and effector domains with different functions may be served as a platform for genetic modulation. Any of the foregoing enzymes may be useful in the present disclosure.

[0085] Further examples of endonucleases which may be utilized in the present disclosure are given in SEQ ID NOs: 1-620. These proteins may be modified before use or may be encoded in a nucleic acid sequence such as a DNA, RNA or mRNA or within a vector construct such as the plasmids or AAV vectors taught herein. Further, they may be codon optimized.

[0086] SEQ ID NOs: 1-620 disclose a non-exhaustive list of endonuclease sequences.

### Genome-Targeting Nucleic Acid

[0087] The present disclosure provides a genome-targeting nucleic acid that can direct the activities of an associated polypeptide (e.g., a site-directed polypeptide) to a specific target sequence within a target nucleic acid. The genome-targeting nucleic acid can be an RNA. A genome-targeting RNA is referred to as a “guide RNA” or “gRNA” herein. A guide RNA can comprise at least a spacer sequence that hybridizes to a target nucleic acid sequence of interest, and a CRISPR repeat sequence. In Type II systems, the gRNA also comprises a second RNA called the tracrRNA sequence. In the Type II guide RNA (gRNA), the CRISPR repeat sequence and tracrRNA sequence hybridize to each other to form a duplex. In the Type V guide RNA (gRNA), the crRNA forms a duplex. In both systems, the duplex can bind a site-directed polypeptide, such that the guide RNA and site-direct polypeptide form a complex. The genome-targeting nucleic acid can provide target specificity to the complex by virtue of its association with the site-directed polypeptide. The genome-targeting nucleic acid thus can direct the activity of the site-directed polypeptide.

[0088] Exemplary guide RNAs include the spacer sequences 15-200 bases wherein the genome location is based on the GRCh38 human genome assembly. Exemplary guide RNAs include the spacer sequences based on the RNA version of the DNA sequences presented in SEQ ID NOs: 5,305-19,006. As is understood by the person of ordinary skill in the art, each guide RNA can be designed to include a spacer sequence complementary to its genomic target sequence. For example, each of the spacer sequences, e.g., the RNA version of the DNA sequences presented in SEQ ID NOs: 5,305-19,006, can be put into a single RNA chimera or a crRNA (along with a corresponding tracrRNA). See Jinek et al., Science, 337, 816-821 (2012) and Deltcheva et al., Nature, 471, 602-607 (2011).

[0089] The genome-targeting nucleic acid can be a double-molecule guide RNA. The genome-targeting nucleic acid can be a single-molecule guide RNA.

[0090] A double-molecule guide RNA can comprise two strands of RNA. The first strand comprises in the 5′ to 3′ direction, an optional spacer extension sequence, a spacer sequence and a minimum CRISPR repeat sequence. The second strand can comprise a minimum tracrRNA sequence (complementary to the minimum CRISPR repeat sequence), a 3′ tracrRNA sequence and an optional tracrRNA extension sequence.

[0091] A single-molecule guide RNA (sgRNA) in a Type II system can comprise, in the 5′ to 3′ direction, an optional spacer extension sequence, a spacer sequence, a minimum CRISPR repeat sequence, a single-molecule guide linker, a minimum tracrRNA sequence, a 3′ tracrRNA sequence and an optional tracrRNA extension sequence. The optional tracrRNA extension can comprise elements that contribute additional functionality (e.g., stability) to the guide RNA. The single-molecule guide linker can link the minimum CRISPR repeat and the minimum tracrRNA sequence to form a hairpin structure. The optional tracrRNA extension can comprise one or more hairpins.

[0092] The sgRNA can comprise a 20 nucleotide spacer sequence at the 5′ end of the sgRNA sequence. The sgRNA can comprise a less than a 20 nucleotide spacer sequence at the 5′ end of the sgRNA sequence. The sgRNA can comprise a more than 20 nucleotide spacer sequence at the 5′ end of the sgRNA sequence. The sgRNA can comprise a variable length spacer sequence with 17-30 nucleotides at the 5′ end of the sgRNA sequence (see Table 1).

[0093] The sgRNA can comprise no uracil at the 3′ end of the sgRNA sequence, such as in SEQ ID NO: 19,039 of Table 1. The sgRNA can comprise one or more uracil at the 3′ end of the sgRNA sequence, such as in SEQ ID NO: 19,040 in Table 1. For example, the sgRNA can comprise 1 uracil (U) at the 3′ end of the sgRNA sequence. The sgRNA can comprise 2 uracil (UU) at the 3′ end of the sgRNA sequence. The sgRNA can comprise 3 uracil (UUU) at the 3′ end of the sgRNA sequence. The sgRNA can comprise 4 uracil (UUUU) at the 3′ end of the sgRNA sequence. The sgRNA can comprise 5 uracil (UUUUU) at the 3′ end of the sgRNA sequence. The sgRNA can comprise 6 uracil (UUUUUU) at the 3′ end of the sgRNA sequence. The sgRNA can comprise 7 uracil (UUUUUUU) at the 3′ end of the sgRNA sequence. The sgRNA can comprise 8 uracil (UUUUUUUU) at the 3′ end of the sgRNA sequence.

[0094] The sgRNA can be unmodified or modified. For example, modified sgRNAs can comprise one or more 2¹-O-methyl phosphorothioate nucleotides.

TABLE 1

| SEQ ID NO. | sgRNA sequence |
|---|---|
| 19,038 | nnnnnnnnnnnnnnnnnnnnguuuuagagcuagaaauag |
| | caaguuaaaauaaggcuaguccguuaucaacuuga |
| | aaaaguggcaccgagucggugcuuuu |
| 19,039 | nnnnnnnnnnnnnnnnnnnnguuuuagagcuagaaauag |
| | caaguuaaaauaaggcuaguccguuaucaacuugaaaaa |
| | guggcaccgagucggugc |
| 19,040 | n₍₁₇₋₃₀₎guuuuagagcuagaaauagcaaguuaaaauaag |
| | gcuaguccguuaucaacuugaaaaaguggcaccgaguc |
| | ggugcu₍₁₋₈₎ |

[0095] A single-molecule guide RNA (sgRNA) in a Type V system can comprise, in the 5′ to 3′ direction, a minimum CRISPR repeat sequence and a spacer sequence.

[0096] By way of illustration, guide RNAs used in the CRISPR/Cas9 or CRISPR/Cpf1 system, or other smaller RNAs can be readily synthesized by chemical means, as illustrated below and described in the art. While chemical synthetic procedures are continually expanding, purifications of such RNAs by procedures such as high performance liquid chromatography (HPLC, which avoids the use of gels such as PAGE) tends to become more challenging as polynucleotide lengths increase significantly beyond a hundred or so nucleotides. One approach used for generating RNAs of greater length is to produce two or more molecules that are ligated together. Much longer RNAs, such as those encoding a Cas9 or Cpf1 endonuclease, are more readily generated enzymatically. Various types of RNA modifications can be introduced during or after chemical synthesis and/or enzymatic generation of RNAs, e.g., modifications that enhance stability, reduce the likelihood or degree of innate immune response, and/or enhance other attributes, as described in the art.

### Spacer Extension Sequence

[0097] In some examples of genome-targeting nucleic acids, a spacer extension sequence can modify activity, provide stability and/or provide a location for modifications of a genome-targeting nucleic acid. A spacer extension sequence can modify on- or off-target activity or specificity. In some examples, a spacer extension sequence can be provided. The spacer extension sequence can have a length of more than 1, 5, 10, 15, 20, 25, 30, 35, 40, 45, 50, 60, 70, 80, 90, 100, 120, 140, 160, 180, 200, 220, 240, 260, 280, 300, 320, 340, 360, 380, 400, 1000, 2000, 3000, 4000, 5000, 6000, or 7000 or more nucleotides. The spacer extension sequence can have a length of less than 1, 5, 10, 15, 20, 25, 30, 35, 40, 45, 50, 60, 70, 80, 90, 100, 120, 140, 160, 180, 200, 220, 240, 260, 280, 300, 320, 340, 360, 380, 400, 1000, 2000, 3000, 4000, 5000, 6000, 7000 or more nucleotides. The spacer extension sequence can be less than 10 nucleotides in length. The spacer extension sequence can be between 10-30 nucleotides in length. The spacer extension sequence can be between 30-70 nucleotides in length.

[0098] The spacer extension sequence can comprise another moiety (e.g., a stability control sequence, an endoribonuclease binding sequence, a ribozyme). The moiety can decrease or increase the stability of a nucleic acid targeting nucleic acid. The moiety can be a transcriptional terminator segment (i.e., a transcription termination sequence). The moiety can function in a eukaryotic cell. The moiety can function in a prokaryotic cell. The moiety can function in both eukaryotic and prokaryotic cells. Non-limiting examples of suitable moieties include: a 5′ cap (e.g., a 7-methylguanylate cap (m7 G)), a riboswitch sequence (e.g., to allow for regulated stability and/or regulated accessibility by proteins and protein complexes), a sequence that forms a dsRNA duplex (i.e., a hairpin), a sequence that targets the RNA to a subcellular location (e.g., nucleus, mitochondria, chloroplasts, and the like), a modification or sequence that provides for tracking (e.g., direct conjugation to a fluorescent molecule, conjugation to a moiety that facilitates fluorescent detection, a sequence that allows for fluorescent detection, etc.), and/or a modification or sequence that provides a binding site for proteins (e.g., proteins that act on DNA, including transcriptional activators, transcriptional repressors, DNA methyltransferases, DNA demethylases, histone acetyltransferases, histone deacetylases, and the like).

### Spacer Sequence

[0099] The spacer sequence hybridizes to a sequence in a target nucleic acid of interest. The spacer of a genome-targeting nucleic acid can interact with a target nucleic acid in a sequence-specific manner via hybridization (i.e., base pairing). The nucleotide sequence of the spacer can vary depending on the sequence of the target nucleic acid of interest.

[0100] In a CRISPR/Cas system herein, the spacer sequence can be designed to hybridize to a target nucleic acid that is located 5′ of a PAM of the Cas9 enzyme used in the system. The spacer may perfectly match the target sequence or may have mismatches. Each Cas9 enzyme has a particular PAM sequence that it recognizes in a target DNA. For example, S. pyogenes recognizes in a target nucleic acid a PAM that comprises the sequence 5′-NRG-3′, where R comprises either A or G, where N is any nucleotide and N is immediately 3′ of the target nucleic acid sequence targeted by the spacer sequence.

[0101] The target nucleic acid sequence can comprise 20 nucleotides. The target nucleic acid can comprise less than 20 nucleotides. The target nucleic acid can comprise more than 20 nucleotides. The target nucleic acid can comprise at least: 5, 10, 15, 16, 17, 18, 19, 20, 21, 22, 23, 24, 25, 30 or more nucleotides. The target nucleic acid can comprise at most: 5, 10, 15, 16, 17, 18, 19, 20, 21, 22, 23, 24, 25, 30 or more nucleotides. The target nucleic acid sequence can comprise 20 bases immediately 5′ of the first nucleotide of the PAM. For example, in a sequence comprising 5′-NNNNNNNNNNNNNNNNNNNNNNNRG-3′ (SEQ ID NO: 19037), the target nucleic acid can comprise the sequence that corresponds to the Ns, wherein N is any nucleotide, and the underlined NRG sequence is the S. pyogenes PAM. This target nucleic acid sequence is often referred to as the PAM strand, and the complementary nucleic acid sequence is often referred to the non-PAM strand. One of skill in the art would recognize that the spacer sequence hybridizes to the non-PAM strand of the target nucleic acid (FIGS. 1A and 1B).

[0102] The spacer sequence that hybridizes to the target nucleic acid can have a length of at least about 6 nucleotides (nt). The spacer sequence can be at least about 6 nt, at least about 10 nt, at least about 15 nt, at least about 18 nt, at least about 19 nt, at least about 20 nt, at least about 25 nt, at least about 30 nt, at least about 35 nt or at least about 40 nt, from about 6 nt to about 80 nt, from about 6 nt to about 50 nt, from about 6 nt to about 45 nt, from about 6 nt to about 40 nt, from about 6 nt to about 35 nt, from about 6 nt to about 30 nt, from about 6 nt to about 25 nt, from about 6 nt to about 20 nt, from about 6 nt to about 19 nt, from about 10 nt to about 50 nt, from about 10 nt to about 45 nt, from about 10 nt to about 40 nt, from about 10 nt to about 35 nt, from about 10 nt to about 30 nt, from about 10 nt to about 25 nt, from about 10 nt to about 20 nt, from about 10 nt to about 19 nt, from about 19 nt to about 25 nt, from about 19 nt to about 30 nt, from about 19 nt to about 35 nt, from about 19 nt to about 40 nt, from about 19 nt to about 45 nt, from about 19 nt to about 50 nt, from about 19 nt to about 60 nt, from about 20 nt to about 25 nt, from about 20 nt to about 30 nt, from about 20 nt to about 35 nt, from about 20 nt to about 40 nt, from about 20 nt to about 45 nt, from about 20 nt to about 50 nt, or from about 20 nt to about 60 nt. In some examples, the spacer sequence can comprise 20 nucleotides. In some examples, the spacer can comprise 19 nucleotides. In some examples, the spacer can comprise 18 nucleotides. In some examples, the spacer can comprise 22 nucleotides.

[0103] In some examples, the percent complementarity between the spacer sequence and the target nucleic acid is at least about 30%, at least about 40%, at least about 50%, at least about 60%, at least about 65%, at least about 70%, at least about 75%, at least about 80%, at least about 85%, at least about 90%, at least about 95%, at least about 97%, at least about 98%, at least about 99%, or 100%. In some examples, the percent complementarity between the spacer sequence and the target nucleic acid is at most about 30%, at most about 40%, at most about 50%, at most about 60%, at most about 65%, at most about 70%, at most about 75%, at most about 80%, at most about 85%, at most about 90%, at most about 95%, at most about 97%, at most about 98%, at most about 99%, or 100%. In some examples, the percent complementarity between the spacer sequence and the target nucleic acid is 100% over the six contiguous 5′-most nucleotides of the target sequence of the complementary strand of the target nucleic acid. The percent complementarity between the spacer sequence and the target nucleic acid can be at least 60% over about 20 contiguous nucleotides. The length of the spacer sequence and the target nucleic acid can differ by 1 to 6 nucleotides, which may be thought of as a bulge or bulges.

[0104] The spacer sequence can be designed or chosen using a computer program. The computer program can use variables, such as predicted melting temperature, secondary structure formation, predicted annealing temperature, sequence identity, genomic context, chromatin accessibility, % GC, frequency of genomic occurrence (e.g., of sequences that are identical or are similar but vary in one or more spots as a result of mismatch, insertion or deletion), methylation status, presence of SNPs, and the like.

### Minimum CRISPR Repeat Sequence

[0105] In some aspects, a minimum CRISPR repeat sequence is a sequence with at least about 30%, about 40%, about 50%, about 60%, about 65%, about 70%, about 75%, about 80%, about 85%, about 90%, about 95%, or 100% sequence identity to a reference CRISPR repeat sequence (e.g., crRNA from S. pyogenes).

[0106] In some aspects, a minimum CRISPR repeat sequence comprises nucleotides that can hybridize to a minimum tracrRNA sequence in a cell. The minimum CRISPR repeat sequence and a minimum tracrRNA sequence can form a duplex, i.e. a base-paired double-stranded structure. Together, the minimum CRISPR repeat sequence and the minimum tracrRNA sequence can bind to the site-directed polypeptide. At least a part of the minimum CRISPR repeat sequence can hybridize to the minimum tracrRNA sequence. In some aspects, at least a part of the minimum CRISPR repeat sequence comprises at least about 30%, about 40%, about 50%, about 60%, about 65%, about 70%, about 75%, about 80%, about 85%, about 90%, about 95%, or 100% complementary to the minimum tracrRNA sequence. At least a part of the minimum CRISPR repeat sequence can comprise at most about 30%, about 40%, about 50%, about 60%, about 65%, about 70%, about 75%, about 80%, about 85%, about 90%, about 95%, or 100% complementary to the minimum tracrRNA sequence.

[0107] The minimum CRISPR repeat sequence can have a length from about 7 nucleotides to about 100 nucleotides. For example, the length of the minimum CRISPR repeat sequence is from about 7 nucleotides (nt) to about 50 nt, from about 7 nt to about 40 nt, from about 7 nt to about 30 nt, from about 7 nt to about 25 nt, from about 7 nt to about 20 nt, from about 7 nt to about 15 nt, from about 8 nt to about 40 nt, from about 8 nt to about 30 nt, from about 8 nt to about 25 nt, from about 8 nt to about 20 nt, from about 8 nt to about 15 nt, from about 15 nt to about 100 nt, from about 15 nt to about 80 nt, from about 15 nt to about 50 nt, from about 15 nt to about 40 nt, from about 15 nt to about 30 nt, or from about 15 nt to about 25 nt. In some aspects, the minimum CRISPR repeat sequence is approximately 9 nucleotides in length. In some aspects, the minimum CRISPR repeat sequence is approximately 12 nucleotides in length.

[0108] The minimum CRISPR repeat sequence can be at least about 60% identical to a reference minimum CRISPR repeat sequence (e.g., wild-type crRNA from S. pyogenes) over a stretch of at least 6, 7, or 8 contiguous nucleotides. For example, the minimum CRISPR repeat sequence can be at least about 65% identical, at least about 70% identical, at least about 75% identical, at least about 80% identical, at least about 85% identical, at least about 90% identical, at least about 95% identical, at least about 98% identical, at least about 99% identical or 100% identical to a reference minimum CRISPR repeat sequence over a stretch of at least 6, 7, or 8 contiguous nucleotides.

Minimum tracrRNA Sequence

[0109] A minimum tracrRNA sequence can be a sequence with at least about 30%, about 40%, about 50%, about 60%, about 65%, about 70%, about 75%, about 80%, about 85%, about 90%, about 95%, or 100% sequence identity to a reference tracrRNA sequence (e.g., wild type tracrRNA from S. pyogenes).

[0110] A minimum tracrRNA sequence can comprise nucleotides that hybridize to a minimum CRISPR repeat sequence in a cell. A minimum tracrRNA sequence and a minimum CRISPR repeat sequence form a duplex, i.e. a base-paired double-stranded structure. Together, the minimum tracrRNA sequence and the minimum CRISPR repeat can bind to a site-directed polypeptide. At least a part of the minimum tracrRNA sequence can hybridize to the minimum CRISPR repeat sequence. The minimum tracrRNA sequence can be at least about 30%, about 40%, about 50%, about 60%, about 65%, about 70%, about 75%, about 80%, about 85%, about 90%, about 95%, or 100% complementary to the minimum CRISPR repeat sequence.

[0111] The minimum tracrRNA sequence can have a length from about 7 nucleotides to about 100 nucleotides. For example, the minimum tracrRNA sequence can be from about 7 nucleotides (nt) to about 50 nt, from about 7 nt to about 40 nt, from about 7 nt to about 30 nt, from about 7 nt to about 25 nt, from about 7 nt to about 20 nt, from about 7 nt to about 15 nt, from about 8 nt to about 40 nt, from about 8 nt to about 30 nt, from about 8 nt to about 25 nt, from about 8 nt to about 20 nt, from about 8 nt to about 15 nt, from about 15 nt to about 100 nt, from about 15 nt to about 80 nt, from about 15 nt to about 50 nt, from about 15 nt to about 40 nt, from about 15 nt to about 30 nt or from about 15 nt to about 25 nt long. The minimum tracrRNA sequence can be approximately 9 nucleotides in length. The minimum tracrRNA sequence can be approximately 12 nucleotides. The minimum tracrRNA can consist of tracrRNA nt 23-48 described in Jinek et al., supra.

[0112] The minimum tracrRNA sequence can be at least about 60% identical to a reference minimum tracrRNA (e.g., wild type, tracrRNA from S. pyogenes) sequence over a stretch of at least 6, 7, or 8 contiguous nucleotides. For example, the minimum tracrRNA sequence can be at least about 65% identical, about 70% identical, about 75% identical, about 80% identical, about 85% identical, about 90% identical, about 95% identical, about 98% identical, about 99% identical or 100% identical to a reference minimum tracrRNA sequence over a stretch of at least 6, 7, or 8 contiguous nucleotides.

[0113] The duplex between the minimum CRISPR RNA and the minimum tracrRNA can comprise a double helix. The duplex between the minimum CRISPR RNA and the minimum tracrRNA can comprise at least about 1, 2, 3, 4, 5, 6, 7, 8, 9, or 10 or more nucleotides. The duplex between the minimum CRISPR RNA and the minimum tracrRNA can comprise at most about 1, 2, 3, 4, 5, 6, 7, 8, 9, or 10 or more nucleotides.

[0114] The duplex can comprise a mismatch (i.e., the two strands of the duplex are not 100% complementary). The duplex can comprise at least about 1, 2, 3, 4, or 5 or mismatches. The duplex can comprise at most about 1, 2, 3, 4, or 5 or mismatches. The duplex can comprise no more than 2 mismatches.

### Bulges

[0115] In some cases, there can be a “bulge” in the duplex between the minimum CRISPR RNA and the minimum tracrRNA. A bulge is an unpaired region of nucleotides within the duplex. A bulge can contribute to the binding of the duplex to the site-directed polypeptide. The bulge can comprise, on one side of the duplex, an unpaired 5′-XXXY-3′ (SEQ ID NO: 19,041) where X is any purine and Y comprises a nucleotide that can form a wobble pair with a nucleotide on the opposite strand, and an unpaired nucleotide region on the other side of the duplex. The number of unpaired nucleotides on the two sides of the duplex can be different.

[0116] In one example, the bulge can comprise an unpaired purine (e.g., adenine) on the minimum CRISPR repeat strand of the bulge. In some examples, the bulge can comprise an unpaired 5′-AAGY-3′ of the minimum tracrRNA sequence strand of the bulge, where Y comprises a nucleotide that can form a wobble pairing with a nucleotide on the minimum CRISPR repeat strand.

[0117] A bulge on the minimum CRISPR repeat side of the duplex can comprise at least 1, 2, 3, 4, or 5 or more unpaired nucleotides. A bulge on the minimum CRISPR repeat side of the duplex can comprise at most 1, 2, 3, 4, or 5 or more unpaired nucleotides. A bulge on the minimum CRISPR repeat side of the duplex can comprise 1 unpaired nucleotide.

[0118] A bulge on the minimum tracrRNA sequence side of the duplex can comprise at least 1, 2, 3, 4, 5, 6, 7, 8, 9, or 10 or more unpaired nucleotides. A bulge on the minimum tracrRNA sequence side of the duplex can comprise at most 1, 2, 3, 4, 5, 6, 7, 8, 9, or 10 or more unpaired nucleotides. A bulge on a second side of the duplex (e.g., the minimum tracrRNA sequence side of the duplex) can comprise 4 unpaired nucleotides.

[0119] A bulge can comprise at least one wobble pairing. In some examples, a bulge can comprise at most one wobble pairing. A bulge can comprise at least one purine nucleotide. A bulge can comprise at least 3 purine nucleotides. A bulge sequence can comprise at least 5 purine nucleotides. A bulge sequence can comprise at least one guanine nucleotide. In some examples, a bulge sequence can comprise at least one adenine nucleotide.

### Hairpins

[0120] In various examples, one or more hairpins can be located 3′ to the minimum tracrRNA in the 3′ tracrRNA sequence.

[0121] The hairpin can start at least about 1, 2, 3, 4, 5, 6, 7, 8, 9, 10, 15, or 20 or more nucleotides 3′ from the last paired nucleotide in the minimum CRISPR repeat and minimum tracrRNA sequence duplex. The hairpin can start at most about 1, 2, 3, 4, 5, 6, 7, 8, 9 or 10 or more nucleotides 3′ of the last paired nucleotide in the minimum CRISPR repeat and minimum tracrRNA sequence duplex.

[0122] The hairpin can comprise at least about 1, 2, 3, 4, 5, 6, 7, 8, 9, 10, 15, or 20 or more consecutive nucleotides. The hairpin can comprise at most about 1, 2, 3, 4, 5, 6, 7, 8, 9, 10, 15, or more consecutive nucleotides.

[0123] The hairpin can comprise a CC dinucleotide (i.e., two consecutive cytosine nucleotides).

[0124] The hairpin can comprise duplexed nucleotides (e.g., nucleotides in a hairpin, hybridized together). For example, a hairpin can comprise a CC dinucleotide that is hybridized to a GG dinucleotide in a hairpin duplex of the 3′ tracrRNA sequence.

[0125] One or more of the hairpins can interact with guide RNA-interacting regions of a site-directed polypeptide.

[0126] In some examples, there are two or more hairpins, and in other examples there are three or more hairpins.

3′ tracrRNA Sequence

[0127] A 3′ tracrRNA sequence can comprise a sequence with at least about 30%, about 40%, about 50%, about 60%, about 65%, about 70%, about 75%, about 80%, about 85%, about 90%, about 95%, or 100% sequence identity to a reference tracrRNA sequence (e.g., a tracrRNA from S. pyogenes).

[0128] The 3′ tracrRNA sequence can have a length from about 6 nucleotides to about 100 nucleotides. For example, the 3′ tracrRNA sequence can have a length from about 6 nucleotides (nt) to about 50 nt, from about 6 nt to about 40 nt, from about 6 nt to about 30 nt, from about 6 nt to about 25 nt, from about 6 nt to about 20 nt, from about 6 nt to about 15 nt, from about 8 nt to about 40 nt, from about 8 nt to about 30 nt, from about 8 nt to about 25 nt, from about 8 nt to about 20 nt, from about 8 nt to about 15 nt, from about 15 nt to about 100 nt, from about 15 nt to about 80 nt, from about 15 nt to about 50 nt, from about 15 nt to about 40 nt, from about 15 nt to about 30 nt, or from about 15 nt to about 25 nt. The 3′ tracrRNA sequence can have a length of approximately 14 nucleotides.

[0129] The 3′ tracrRNA sequence can be at least about 60% identical to a reference 3′ tracrRNA sequence (e.g., wild type 3′ tracrRNA sequence from S. pyogenes) over a stretch of at least 6, 7, or 8 contiguous nucleotides. For example, the 3′ tracrRNA sequence can be at least about 60% identical, about 65% identical, about 70% identical, about 75% identical, about 80% identical, about 85% identical, about 90% identical, about 95% identical, about 98% identical, about 99% identical, or 100% identical, to a reference 3′ tracrRNA sequence (e.g., wild type 3′ tracrRNA sequence from S. pyogenes) over a stretch of at least 6, 7, or 8 contiguous nucleotides.

[0130] The 3′ tracrRNA sequence can comprise more than one duplexed region (e.g., hairpin, hybridized region). The 3′ tracrRNA sequence can comprise two duplexed regions.

[0131] The 3′ tracrRNA sequence can comprise a stem loop structure. The stem loop structure in the 3′ tracrRNA can comprise at least 1, 2, 3, 4, 5, 6, 7, 8, 9, 10, 15 or 20 or more nucleotides. The stem loop structure in the 3′ tracrRNA can comprise at most 1, 2, 3, 4, 5, 6, 7, 8, 9 or 10 or more nucleotides. The stem loop structure can comprise a functional moiety. For example, the stem loop structure can comprise an aptamer, a ribozyme, a protein-interacting hairpin, a CRISPR array, an intron, or an exon. The stem loop structure can comprise at least about 1, 2, 3, 4, or 5 or more functional moieties. The stem loop structure can comprise at most about 1, 2, 3, 4, or 5 or more functional moieties.

[0132] The hairpin in the 3′ tracrRNA sequence can comprise a P-domain. In some examples, the P-domain can comprise a double-stranded region in the hairpin.

tracrRNA Extension Sequence

[0133] A tracrRNA extension sequence may be provided whether the tracrRNA is in the context of single-molecule guides or double-molecule guides. The tracrRNA extension sequence can have a length from about 1 nucleotide to about 400 nucleotides. The tracrRNA extension sequence can have a length of more than 1, 5, 10, 15, 20, 25, 30, 35, 40, 45, 50, 60, 70, 80, 90, 100, 120, 140, 160, 180, 200, 220, 240, 260, 280, 300, 320, 340, 360, 380, or 400 nucleotides. The tracrRNA extension sequence can have a length from about 20 to about 5000 or more nucleotides. The tracrRNA extension sequence can have a length of more than 1000 nucleotides. The tracrRNA extension sequence can have a length of less than 1, 5, 10, 15, 20, 25, 30, 35, 40, 45, 50, 60, 70, 80, 90, 100, 120, 140, 160, 180, 200, 220, 240, 260, 280, 300, 320, 340, 360, 380, 400 or more nucleotides. The tracrRNA extension sequence can have a length of less than 1000 nucleotides. The tracrRNA extension sequence can comprise less than 10 nucleotides in length. The tracrRNA extension sequence can be 10-30 nucleotides in length. The tracrRNA extension sequence can be 30-70 nucleotides in length.

[0134] The tracrRNA extension sequence can comprise a functional moiety (e.g., a stability control sequence, ribozyme, endoribonuclease binding sequence). The functional moiety can comprise a transcriptional terminator segment (i.e., a transcription termination sequence). The functional moiety can have a total length from about 10 nucleotides (nt) to about 100 nucleotides, from about 10 nt to about 20 nt, from about 20 nt to about 30 nt, from about 30 nt to about 40 nt, from about 40 nt to about 50 nt, from about 50 nt to about 60 nt, from about 60 nt to about 70 nt, from about 70 nt to about 80 nt, from about 80 nt to about 90 nt, or from about 90 nt to about 100 nt, from about 15 nt to about 80 nt, from about 15 nt to about 50 nt, from about 15 nt to about 40 nt, from about 15 nt to about 30 nt, or from about 15 nt to about 25 nt. The functional moiety can function in a eukaryotic cell. The functional moiety can function in a prokaryotic cell. The functional moiety can function in both eukaryotic and prokaryotic cells.

[0135] Non-limiting examples of suitable tracrRNA extension functional moieties include a 3′ poly-adenylated tail, a riboswitch sequence (e.g., to allow for regulated stability and/or regulated accessibility by proteins and protein complexes), a sequence that forms a dsRNA duplex (i.e., a hairpin), a sequence that targets the RNA to a subcellular location (e.g., nucleus, mitochondria, chloroplasts, and the like), a modification or sequence that provides for tracking (e.g., direct conjugation to a fluorescent molecule, conjugation to a moiety that facilitates fluorescent detection, a sequence that allows for fluorescent detection, etc.), and/or a modification or sequence that provides a binding site for proteins (e.g., proteins that act on DNA, including transcriptional activators, transcriptional repressors, DNA methyltransferases, DNA demethylases, histone acetyltransferases, histone deacetylases, and the like). The tracrRNA extension sequence can comprise a primer binding site or a molecular index (e.g., barcode sequence). The tracrRNA extension sequence can comprise one or more affinity tags.

### Single Molecule Guide Linker Sequence

[0136] The linker sequence of a single-molecule guide nucleic acid can have a length from about 3 nucleotides to about 100 nucleotides. In Jinek et al., supra, for example, a simple 4 nucleotide “tetraloop” (-GAAA-) was used, Science, 337(6096):816-821 (2012). An illustrative linker has a length from about 3 nucleotides (nt) to about 90 nt, from about 3 nt to about 80 nt, from about 3 nt to about 70 nt, from about 3 nt to about 60 nt, from about 3 nt to about 50 nt, from about 3 nt to about 40 nt, from about 3 nt to about 30 nt, from about 3 nt to about 20 nt, from about 3 nt to about 10 nt. For example, the linker can have a length from about 3 nt to about 5 nt, from about 5 nt to about 10 nt, from about 10 nt to about 15 nt, from about 15 nt to about 20 nt, from about 20 nt to about 25 nt, from about 25 nt to about 30 nt, from about 30 nt to about 35 nt, from about 35 nt to about 40 nt, from about 40 nt to about 50 nt, from about 50 nt to about 60 nt, from about 60 nt to about 70 nt, from about 70 nt to about 80 nt, from about 80 nt to about 90 nt, or from about 90 nt to about 100 nt. The linker of a single-molecule guide nucleic acid can be between 4 and 40 nucleotides. The linker can be at least about 100, 500, 1000, 1500, 2000, 2500, 3000, 3500, 4000, 4500, 5000, 5500, 6000, 6500, or 7000 or more nucleotides. The linker can be at most about 100, 500, 1000, 1500, 2000, 2500, 3000, 3500, 4000, 4500, 5000, 5500, 6000, 6500, or 7000 or more nucleotides.

[0137] Linkers can comprise any of a variety of sequences, although in some examples the linker will not comprise sequences that have extensive regions of homology with other portions of the guide RNA, which might cause intramolecular binding that could interfere with other functional regions of the guide. In Jinek et al., supra, a simple 4 nucleotide sequence -GAAA- was used, Science, 337(6096):816-821 (2012), but numerous other sequences, including longer sequences can likewise be used.

[0138] The linker sequence can comprise a functional moiety. For example, the linker sequence can comprise one or more features, including an aptamer, a ribozyme, a protein-interacting hairpin, a protein binding site, a CRISPR array, an intron, or an exon. The linker sequence can comprise at least about 1, 2, 3, 4, or 5 or more functional moieties. In some examples, the linker sequence can comprise at most about 1, 2, 3, 4, or 5 or more functional moieties.

### Nucleic Acid Modifications (Chemical and Structural Modifications)

[0139] In some aspects, polynucleotides introduced into cells can comprise one or more modifications that can be used individually or in combination, for example, to enhance activity, stability or specificity, alter delivery, reduce innate immune responses in host cells, or for other enhancements, as further described herein and known in the art.

[0140] In certain examples, modified polynucleotides can be used in the CRISPR/Cas9 or CRISPR/Cpf1 system, in which case the guide RNAs (either single-molecule guides or double-molecule guides) and/or a DNA or an RNA encoding a Cas9 or Cpf1 endonuclease introduced into a cell can be modified, as described and illustrated below. Such modified polynucleotides can be used in the CRISPR/Cas9 or CRISPR/Cpf1 system to edit any one or more genomic loci.

[0141] Using the CRISPR/Cas9 or CRISPR/Cpf1 system for purposes of nonlimiting illustrations of such uses, modifications of guide RNAs can be used to enhance the formation or stability of the CRISPR/Cas9 or CRISPR/Cpf1 genome editing complex comprising guide RNAs, which can be single-molecule guides or double-molecule, and a Cas9 or Cpf1 endonuclease. Modifications of guide RNAs can also or alternatively be used to enhance the initiation, stability or kinetics of interactions between the genome editing complex with the target sequence in the genome, which can be used, for example, to enhance on-target activity. Modifications of guide RNAs can also or alternatively be used to enhance specificity, e.g., the relative rates of genome editing at the on-target site as compared to effects at other (off-target) sites.

[0142] Modifications can also or alternatively be used to increase the stability of a guide RNA, e.g., by increasing its resistance to degradation by ribonucleases (RNases) present in a cell, thereby causing its half-life in the cell to be increased. Modifications enhancing guide RNA half-life can be particularly useful in aspects in which a Cas9 or Cpf1 endonuclease is introduced into the cell to be edited via an RNA that needs to be translated in order to generate endonuclease, because increasing the half-life of guide RNAs introduced at the same time as the RNA encoding the endonuclease can be used to increase the time that the guide RNAs and the encoded Cas9 or Cpf1 endonuclease co-exist in the cell.

[0143] Modifications can also or alternatively be used to decrease the likelihood or degree to which RNAs introduced into cells elicit innate immune responses. Such responses, which have been well characterized in the context of RNA interference (RNAi), including small-interfering RNAs (siRNAs), as described below and in the art, tend to be associated with reduced half-life of the RNA and/or the elicitation of cytokines or other factors associated with immune responses.

[0144] One or more types of modifications can also be made to RNAs encoding an endonuclease that are introduced into a cell, including, without limitation, modifications that enhance the stability of the RNA (such as by increasing its degradation by RNases present in the cell), modifications that enhance translation of the resulting product (i.e. the endonuclease), and/or modifications that decrease the likelihood or degree to which the RNAs introduced into cells elicit innate immune responses.

[0145] Combinations of modifications, such as the foregoing and others, can likewise be used. In the case of CRISPR/Cas9 or CRISPR/Cpf1, for example, one or more types of modifications can be made to guide RNAs (including those exemplified above), and/or one or more types of modifications can be made to RNAs encoding Cas endonuclease (including those exemplified above).

[0146] By way of illustration, guide RNAs used in the CRISPR/Cas9 or CRISPR/Cpf1 system, or other smaller RNAs can be readily synthesized by chemical means, enabling a number of modifications to be readily incorporated, as illustrated below and described in the art. While chemical synthetic procedures are continually expanding, purifications of such RNAs by procedures such as high performance liquid chromatography (HPLC, which avoids the use of gels such as PAGE) tends to become more challenging as polynucleotide lengths increase significantly beyond a hundred or so nucleotides. One approach that can be used for generating chemically-modified RNAs of greater length is to produce two or more molecules that are ligated together. Much longer RNAs, such as those encoding a Cas9 endonuclease, are more readily generated enzymatically. While fewer types of modifications are available for use in enzymatically produced RNAs, there are still modifications that can be used to, e.g., enhance stability, reduce the likelihood or degree of innate immune response, and/or enhance other attributes, as described further below and in the art; and new types of modifications are regularly being developed.

[0147] By way of illustration of various types of modifications, especially those used frequently with smaller chemically synthesized RNAs, modifications can comprise one or more nucleotides modified at the 2′ position of the sugar, in some aspects a 2′-O-alkyl, 2′-O-alkyl-O-alkyl, or 2′-fluoro-modified nucleotide. In some examples, RNA modifications include 2′-fluoro, 2′-amino or 2′-O-methyl modifications on the ribose of pyrimidines, abasic residues, or an inverted base at the 3′ end of the RNA. Such modifications are routinely incorporated into oligonucleotides and these oligonucleotides have been shown to have a higher Tm (i.e., higher target binding affinity) than 2′-deoxyoligonucleotides against a given target.

[0148] A number of nucleotide and nucleoside modifications have been shown to make the oligonucleotide into which they are incorporated more resistant to nuclease digestion than the native oligonucleotide; these modified oligos survive intact for a longer time than unmodified oligonucleotides. Specific examples of modified oligonucleotides include those comprising modified backbones, for example, phosphorothioates, phosphotriesters, methyl phosphonates, short chain alkyl or cycloalkyl intersugar linkages or short chain heteroatomic or heterocyclic intersugar linkages. Some oligonucleotides are oligonucleotides with phosphorothioate backbones and those with heteroatom backbones, particularly CH₂—NH—O—CH₂, CH, ˜N(CH₃)˜O˜CH₂ (known as a methylene(methylimino) or MMI backbone), CH₂—O—N(CH₃)—CH₂, CH₂—N(CH₃)—N(CH₃)—CH₂ and O—N(CH₃)—CH₂—CH₂ backbones, wherein the native phosphodiester backbone is represented as O— P— O—CH,); amide backbones [see De Mesmaeker et al., Ace. Chem. Res., 28:366-374 (1995)]; morpholino backbone structures (see Summerton and Weller, U.S. Pat. No. 5,034,506); peptide nucleic acid (PNA) backbone (wherein the phosphodiester backbone of the oligonucleotide is replaced with a polyamide backbone, the nucleotides being bound directly or indirectly to the aza nitrogen atoms of the polyamide backbone, see Nielsen et al., Science 1991, 254, 1497). Phosphorus-containing linkages include, but are not limited to, phosphorothioates, chiral phosphorothioates, phosphorodithioates, phosphotriesters, aminoalkylphosphotriesters, methyl and other alkyl phosphonates comprising 3′alkylene phosphonates and chiral phosphonates, phosphinates, phosphoramidates comprising 3′-amino phosphoramidate and aminoalkylphosphoramidates, thionophosphoramidates, thionoalkylphosphonates, thionoalkylphosphotriesters, and boranophosphates having normal 3′-5′ linkages, 2′-5′ linked analogs of these, and those having inverted polarity wherein the adjacent pairs of nucleoside units are linked 3′-5′ to 5′-3′ or 2′-5′ to 5′-2′; see U.S. Pat. Nos. 3,687,808; 4,469,863; 4,476,301; 5,023,243; 5,177,196; 5,188,897; 5,264,423; 5,276,019; 5,278,302; 5,286,717; 5,321,131; 5,399,676; 5,405,939; 5,453,496; 5,455,233; 5,466,677; 5,476,925; 5,519,126; 5,536,821; 5,541,306; 5,550,111; 5,563,253; 5,571,799; 5,587,361; and 5,625,050.

[0149] Morpholino-based oligomeric compounds are described in Braasch and David Corey, Biochemistry, 41(14): 4503-4510 (2002); Genesis, Volume 30, Issue 3, (2001); Heasman, Dev. Biol., 243: 209-214 (2002); Nasevicius et al., Nat. Genet., 26:216-220 (2000); Lacerra et al., Proc. Natl. Acad. Sci., 97: 9591-9596 (2000); and U.S. Pat. No. 5,034,506, issued Jul. 23, 1991.

[0150] Cyclohexenyl nucleic acid oligonucleotide mimetics are described in Wang et al., J. Am. Chem. Soc., 122: 8595-8602 (2000).

[0151] Modified oligonucleotide backbones that do not include a phosphorus atom therein have backbones that are formed by short chain alkyl or cycloalkyl internucleoside linkages, mixed heteroatom and alkyl or cycloalkyl internucleoside linkages, or one or more short chain heteroatomic or heterocyclic internucleoside linkages. These comprise those having morpholino linkages (formed in part from the sugar portion of a nucleoside); siloxane backbones; sulfide, sulfoxide and sulfone backbones; formacetyl and thioformacetyl backbones; methylene formacetyl and thioformacetyl backbones; alkene containing backbones; sulfamate backbones; methyleneimino and methylenehydrazino backbones; sulfonate and sulfonamide backbones; amide backbones; and others having mixed N, O, S, and CH₂ component parts; see U.S. Pat. Nos. 5,034,506; 5,166,315; 5,185,444; 5,214,134; 5,216,141; 5,235,033; 5,264,562; 5,264,564; 5,405,938; 5,434,257; 5,466,677; 5,470,967; 5,489,677; 5,541,307; 5,561,225; 5,596,086; 5,602,240; 5,610,289; 5,602,240; 5,608,046; 5,610,289; 5,618,704; 5,623,070; 5,663,312; 5,633,360; 5,677,437; and 5,677,439.

[0152] One or more substituted sugar moieties can also be included, e.g., one of the following at the 2′ position: OH, SH, SCH₃, F, OCN, OCH₃ OCH₃, OCH₃ O(CH₂)n CH₃, O(CH₂)n NH₂, or O(CH₂)n CH₃, where n is from 1 to about 10; C1 to C10 lower alkyl, alkoxyalkoxy, substituted lower alkyl, alkaryl or aralkyl; Cl; Br; CN; CF₃; OCF₃; O-, S-, or N-alkyl; O-, S-, or N-alkenyl; SOCH₃; SO₂ CH₃; ONO₂; NO₂; N₃; NH₂; heterocycloalkyl; heterocycloalkaryl; aminoalkylamino; polyalkylamino; substituted silyl; an RNA cleaving group; a reporter group; an intercalator; a group for improving the pharmacokinetic properties of an oligonucleotide; or a group for improving the pharmacodynamic properties of an oligonucleotide and other substituents having similar properties. In some aspects, a modification includes 2′-methoxyethoxy (2′-O—CH₂CH₂OCH₃, also known as 2′-O-(2-methoxyethyl)) (Martin et al, Helv. Chim. Acta, 1995, 78, 486). Other modifications include 2′-methoxy (2′-O—CH₃), 2′-propoxy (2′-OCH₂ CH₂CH₃) and 2′-fluoro (2′-F). Similar modifications may also be made at other positions on the oligonucleotide, particularly the 3′ position of the sugar on the 3′ terminal nucleotide and the 5′ position of 5′ terminal nucleotide. Oligonucleotides may also have sugar mimetics, such as cyclobutyls in place of the pentofuranosyl group.

[0153] In some examples, both a sugar and an internucleoside linkage, i.e., the backbone, of the nucleotide units can be replaced with novel groups. The base units can be maintained for hybridization with an appropriate nucleic acid target compound. One such oligomeric compound, an oligonucleotide mimetic that has been shown to have excellent hybridization properties, is referred to as a peptide nucleic acid (PNA). In PNA compounds, the sugar-backbone of an oligonucleotide can be replaced with an amide containing backbone, for example, an aminoethylglycine backbone. The nucleobases can be retained and bound directly or indirectly to aza nitrogen atoms of the amide portion of the backbone. Representative United States patents that teach the preparation of PNA compounds comprise, but are not limited to, U.S. Pat. Nos. 5,539,082; 5,714,331; and 5,719,262. Further teaching of PNA compounds can be found in Nielsen et al, Science, 254: 1497-1500 (1991).

[0154] Guide RNAs can also include, additionally or alternatively, nucleobase (often referred to in the art simply as “base”) modifications or substitutions. As used herein, “unmodified” or “natural” nucleobases include adenine (A), guanine (G), thymine (T), cytosine (C), and uracil (U). Modified nucleobases include nucleobases found only infrequently or transiently in natural nucleic acids, e.g., hypoxanthine, 6-methyladenine, 5-Me pyrimidines, particularly 5-methylcytosine (also referred to as 5-methyl-2′ deoxycytosine and often referred to in the art as 5-Me-C), 5-hydroxymethylcytosine (HMC), glycosyl HMC and gentobiosyl HMC, as well as synthetic nucleobases, e.g., 2-aminoadenine, 2-(methylamino)adenine, 2-(imidazolylalkyl)adenine, 2-(aminoalklyamino)adenine or other heterosubstituted alkyladenines, 2-thiouracil, 2-thiothymine, 5-bromouracil, 5-hydroxymethyluracil, 8-azaguanine, 7-deazaguanine, N₆ (6-aminohexyl)adenine, and 2,6-diaminopurine. Kornberg, A., DNA Replication, W. H. Freeman & Co., San Francisco, pp 75-77 (1980); Gebeyehu et al., Nucl. Acids Res. 15:4513 (1997). A “universal” base known in the art, e.g., inosine, can also be included. 5-Me-C substitutions have been shown to increase nucleic acid duplex stability by 0.6-1.2° C. (Sanghvi, Y. S., in Crooke, S. T. and Lebleu, B., eds., Antisense Research and Applications, CRC Press, Boca Raton, 1993, pp. 276-278) and are aspects of base substitutions.

[0155] Modified nucleobases can comprise other synthetic and natural nucleobases, such as 5-methylcytosine (5-me-C), 5-hydroxymethyl cytosine, xanthine, hypoxanthine, 2-aminoadenine, 6-methyl and other alkyl derivatives of adenine and guanine, 2-propyl and other alkyl derivatives of adenine and guanine, 2-thiouracil, 2-thiothymine and 2-thiocytosine, 5-halouracil and cytosine, 5-propynyl uracil and cytosine, 6-azo uracil, cytosine and thymine, 5-uracil (pseudo-uracil), 4-thiouracil, 8-halo, 8-amino, 8-thiol, 8-thioalkyl, 8-hydroxyl and other 8-substituted adenines and guanines, 5-halo particularly 5-bromo, 5-trifluoromethyl and other 5-substituted uracils and cytosines, 7-methylquanine and 7-methyladenine, 8-azaguanine and 8-azaadenine, 7-deazaguanine and 7-deazaadenine, and 3-deazaguanine and 3-deazaadenine.

[0156] Further, nucleobases can comprise those disclosed in U.S. Pat. No. 3,687,808, those disclosed in ‘The Concise Encyclopedia of Polymer Science And Engineering’, pages 858-859, Kroschwitz, J. I., ed. John Wiley & Sons, 1990, those disclosed by Englisch et al., Angewandle Chemie, International Edition’, 1991, 30, page 613, and those disclosed by Sanghvi, Y. S., Chapter 15, Antisense Research and Applications’, pages 289-302, Crooke, S. T. and Lebleu, B. ea., CRC Press, 1993. Certain of these nucleobases are particularly useful for increasing the binding affinity of the oligomeric compounds of the disclosure. These include 5-substituted pyrimidines, 6-azapyrimidines and N-2, N-6 and 0-6 substituted purines, comprising 2-aminopropyladenine, 5-propynyluracil and 5-propynylcytosine. 5-methylcytosine substitutions have been shown to increase nucleic acid duplex stability by 0.6-1.2° C. (Sanghvi, Y. S., Crooke, S. T. and Lebleu, B., eds, ‘Antisense Research and Applications’, CRC Press, Boca Raton, 1993, pp. 276-278) and are aspects of base substitutions, even more particularly when combined with 2′-O-methoxyethyl sugar modifications. Modified nucleobases are described in U.S. Pat. No. 3,687,808, as well as U.S. Pat. Nos. 4,845,205; 5,130,302; 5,134,066; 5,175,273; 5,367,066; 5,432,272; 5,457,187; 5,459,255; 5,484,908; 5,502,177; 5,525,711; 5,552,540; 5,587,469; 5,596,091; 5,614,617; 5,681,941; 5,750,692; 5,763,588; 5,830,653; 6,005,096; and US Patent Application Publication 2003/0158403.

[0157] Thus, the term “modified” refers to a non-natural sugar, phosphate, or base that is incorporated into a guide RNA, an endonuclease, or both a guide RNA and an endonuclease. It is not necessary for all positions in a given oligonucleotide to be uniformly modified, and in fact more than one of the aforementioned modifications can be incorporated in a single oligonucleotide, or even in a single nucleoside within an oligonucleotide.

[0158] The guide RNAs and/or mRNA (or DNA) encoding an endonuclease can be chemically linked to one or more moieties or conjugates that enhance the activity, cellular distribution, or cellular uptake of the oligonucleotide. Such moieties comprise, but are not limited to, lipid moieties such as a cholesterol moiety [Letsinger et al., Proc. Natl. Acad. Sci. USA, 86: 6553-6556 (1989)]; cholic acid [Manoharan et al., Bioorg. Med. Chem. Let., 4: 1053-1060 (1994)]; a thioether, e.g., hexyl-S-tritylthiol [Manoharan et al, Ann. N. Y. Acad. Sci., 660: 306-309 (1992) and Manoharan et al., Bioorg. Med. Chem. Let., 3: 2765-2770 (1993)]; a thiocholesterol [Oberhauser et al., Nucl. Acids Res., 20: 533-538 (1992)]; an aliphatic chain, e.g., dodecandiol or undecyl residues [Kabanov et al., FEBS Lett., 259: 327-330 (1990) and Svinarchuk et al., Biochimie, 75: 49-54 (1993)]; a phospholipid, e.g., di-hexadecyl-rac-glycerol or triethylammonium 1,2-di-O-hexadecyl-rac-glycero-3-H-phosphonate [Manoharan et al., Tetrahedron Lett., 36: 3651-3654 (1995) and Shea et al., Nucl. Acids Res., 18: 3777-3783 (1990)]; a polyamine or a polyethylene glycol chain [Mancharan et al., Nucleosides & Nucleotides, 14: 969-973 (1995)]; adamantane acetic acid [Manoharan et al., Tetrahedron Lett., 36: 3651-3654 (1995)]; a palmityl moiety [(Mishra et al., Biochim. Biophys. Acta, 1264: 229-237 (1995)]; or an octadecylamine or hexylamino-carbonyl-t oxycholesterol moiety [Crooke et al., J. Pharmacol. Exp. Ther., 277: 923-937 (1996)]. See also U.S. Pat. Nos. 4,828,979; 4,948,882; 5,218,105; 5,525,465; 5,541,313; 5,545,730; 5,552,538; 5,578,717, 5,580,731; 5,580,731; 5,591,584; 5,109,124; 5,118,802; 5,138,045; 5,414,077; 5,486,603; 5,512,439; 5,578,718; 5,608,046; 4,587,044; 4,605,735; 4,667,025; 4,762,779; 4,789,737; 4,824,941; 4,835,263; 4,876,335; 4,904,582; 4,958,013; 5,082,830; 5,112,963; 5,214,136; 5,082,830; 5,112,963; 5,214,136; 5,245,022; 5,254,469; 5,258,506; 5,262,536; 5,272,250; 5,292,873; 5,317,098; 5,371,241, 5,391,723; 5,416,203, 5,451,463; 5,510,475; 5,512,667; 5,514,785; 5,565,552; 5,567,810; 5,574,142; 5,585,481; 5,587,371; 5,595,726; 5,597,696; 5,599,923; 5,599, 928 and 5,688,941.

[0159] Sugars and other moieties can be used to target proteins and complexes comprising nucleotides, such as cationic polysomes and liposomes, to particular sites. For example, hepatic cell directed transfer can be mediated via asialoglycoprotein receptors (ASGPRs); see, e.g., Hu, et al., Protein Pept Lett. 21(10):1025-30 (2014). Other systems known in the art and regularly developed can be used to target biomolecules of use in the present case and/or complexes thereof to particular target cells of interest.

[0160] These targeting moieties or conjugates can include conjugate groups covalently bound to functional groups, such as primary or secondary hydroxyl groups. Conjugate groups of the disclosure include intercalators, reporter molecules, polyamines, polyamides, polyethylene glycols, polyethers, groups that enhance the pharmacodynamic properties of oligomers, and groups that enhance the pharmacokinetic properties of oligomers. Typical conjugate groups include cholesterols, lipids, phospholipids, biotin, phenazine, folate, phenanthridine, anthraquinone, acridine, fluoresceins, rhodamines, coumarins, and dyes. Groups that enhance the pharmacodynamic properties, in the context of this disclosure, include groups that improve uptake, enhance resistance to degradation, and/or strengthen sequence-specific hybridization with the target nucleic acid. Groups that enhance the pharmacokinetic properties, in the context of this disclosure, include groups that improve uptake, distribution, metabolism or excretion of the compounds of the present disclosure. Representative conjugate groups are disclosed in International Patent Application No. PCT/US92/09196, filed Oct. 23, 1992 (published as WO1993007883), and U.S. Pat. No. 6,287,860. Conjugate moieties include, but are not limited to, lipid moieties such as a cholesterol moiety, cholic acid, a thioether, e.g., hexyl-5-tritylthiol, a thiocholesterol, an aliphatic chain, e.g., dodecandiol or undecyl residues, a phospholipid, e.g., di-hexadecyl-rac-glycerol or triethylammonium 1,2-di-O-hexadecyl-rac-glycero-3-H-phosphonate, a polyamine or a polyethylene glycol chain, or adamantane acetic acid, a palmityl moiety, or an octadecylamine or hexylamino-carbonyl-oxy cholesterol moiety. See, e.g., U.S. Pat. Nos. 4,828,979; 4,948,882; 5,218,105; 5,525,465; 5,541,313; 5,545,730; 5,552,538; 5,578,717, 5,580,731; 5,580,731; 5,591,584; 5,109,124; 5,118,802; 5,138,045; 5,414,077; 5,486,603; 5,512,439; 5,578,718; 5,608,046; 4,587,044; 4,605,735; 4,667,025; 4,762,779; 4,789,737; 4,824,941; 4,835,263; 4,876,335; 4,904,582; 4,958,013; 5,082,830; 5,112,963; 5,214,136; 5,082,830; 5,112,963; 5,214,136; 5,245,022; 5,254,469; 5,258,506; 5,262,536; 5,272,250; 5,292,873; 5,317,098; 5,371,241, 5,391,723; 5,416,203, 5,451,463; 5,510,475; 5,512,667; 5,514,785; 5,565,552; 5,567,810; 5,574,142; 5,585,481; 5,587,371; 5,595,726; 5,597,696; 5,599,923; 5,599,928 and 5,688,941.

[0161] Longer polynucleotides that are less amenable to chemical synthesis and are typically produced by enzymatic synthesis can also be modified by various means. Such modifications can include, for example, the introduction of certain nucleotide analogs, the incorporation of particular sequences or other moieties at the 5′ or 3′ ends of molecules, and other modifications. By way of illustration, the mRNA encoding Cas9 is approximately 4 kb in length and can be synthesized by in vitro transcription. Modifications to the mRNA can be applied to, e.g., increase its translation or stability (such as by increasing its resistance to degradation with a cell), or to reduce the tendency of the RNA to elicit an innate immune response that is often observed in cells following introduction of exogenous RNAs, particularly longer RNAs such as that encoding Cas9.

[0162] Numerous such modifications have been described in the art, such as polyA tails, 5′ cap analogs (e.g., Anti Reverse Cap Analog (ARCA) or m7G(5′)ppp(5′)G (mCAP)), modified 5′ or 3′ untranslated regions (UTRs), use of modified bases (such as Pseudo-UTP, 2-Thio-UTP, 5-Methylcytidine-5′-Triphosphate (5-Methyl-CTP) or N₆-Methyl-ATP), or treatment with phosphatase to remove 5′ terminal phosphates. These and other modifications are known in the art, and new modifications of RNAs are regularly being developed.

[0163] There are numerous commercial suppliers of modified RNAs, including for example, TriLink Biotech, AxoLabs, Bio-Synthesis Inc., Dharmacon and many others. As described by TriLink, for example, 5-Methyl-CTP can be used to impart desirable characteristics, such as increased nuclease stability, increased translation or reduced interaction of innate immune receptors with in vitro transcribed RNA. 5-Methylcytidine-5′-Triphosphate (5-Methyl-CTP), N₆-Methyl-ATP, as well as Pseudo-UTP and 2-Thio-UTP, have also been shown to reduce innate immune stimulation in culture and in vivo while enhancing translation, as illustrated in publications by Kormann et al. and Warren et al. referred to below.

[0164] It has been shown that chemically modified mRNA delivered in vivo can be used to achieve improved therapeutic effects; see, e.g., Kormann et al., Nature Biotechnology 29, 154-157 (2011). Such modifications can be used, for example, to increase the stability of the RNA molecule and/or reduce its immunogenicity. Using chemical modifications such as Pseudo-U, N₆-Methyl-A, 2-Thio-U and 5-Methyl-C, it was found that substituting just one quarter of the uridine and cytidine residues with 2-Thio-U and 5-Methyl-C respectively resulted in a significant decrease in toll-like receptor (TLR) mediated recognition of the mRNA in mice. By reducing the activation of the innate immune system, these modifications can be used to effectively increase the stability and longevity of the mRNA in vivo; see, e.g., Kormann et al., supra.

[0165] It has also been shown that repeated administration of synthetic messenger RNAs incorporating modifications designed to bypass innate anti-viral responses can reprogram differentiated human cells to pluripotency. See, e.g., Warren, et al., Cell Stem Cell, 7(5):618-30 (2010). Such modified mRNAs that act as primary reprogramming proteins can be an efficient means of reprogramming multiple human cell types. Such cells are referred to as induced pluripotency stem cells (iPSCs), and it was found that enzymatically synthesized RNA incorporating 5-Methyl-CTP, Pseudo-UTP and an Anti Reverse Cap Analog (ARCA) could be used to effectively evade the cell's antiviral response; see, e.g., Warren et al., supra.

[0166] Other modifications of polynucleotides described in the art include, for example, the use of polyA tails, the addition of 5′ cap analogs (such as m7G(5′)ppp(5′)G (mCAP)), modifications of 5′ or 3′ untranslated regions (UTRs), or treatment with phosphatase to remove 5′ terminal phosphates—and new approaches are regularly being developed.

[0167] A number of compositions and techniques applicable to the generation of modified RNAs for use herein have been developed in connection with the modification of RNA interference (RNAi), including small-interfering RNAs (siRNAs). siRNAs present particular challenges in vivo because their effects on gene silencing via mRNA interference are generally transient, which can require repeat administration. In addition, siRNAs are double-stranded RNAs (dsRNA) and mammalian cells have immune responses that have evolved to detect and neutralize dsRNA, which is often a by-product of viral infection. Thus, there are mammalian enzymes such as PKR (dsRNA-responsive kinase), and potentially retinoic acid-inducible gene I (RIG-0, that can mediate cellular responses to dsRNA, as well as Toll-like receptors (such as TLR3, TLR7 and TLR8) that can trigger the induction of cytokines in response to such molecules; see, e.g., the reviews by Angart et al., Pharmaceuticals (Basel) 6(4): 440-468 (2013); Kanasty et al., Molecular Therapy 20(3): 513-524 (2012); Burnett et al., Biotechnol J. 6(9):1130-46 (2011); Judge and MacLachlan, Hum Gene Ther 19(2):111-24 (2008); and references cited therein.

[0168] A large variety of modifications have been developed and applied to enhance RNA stability, reduce innate immune responses, and/or achieve other benefits that can be useful in connection with the introduction of polynucleotides into human cells, as described herein; see, e.g., the reviews by Whitehead K A et al., Annual Review of Chemical and Biomolecular Engineering, 2: 77-96 (2011); Gaglione and Messere, Mini Rev Med Chem, 10(7):578-95 (2010); Chernolovskaya et al, Curr Opin Mol Ther., 12(2):158-67 (2010); Deleavey et al., Curr Protoc Nucleic Acid Chem Chapter 16:Unit 16.3 (2009); Behlke, Oligonucleotides 18(4):305-19 (2008); Fucini et al., Nucleic Acid Ther 22(3): 205-210 (2012); Bremsen et al., Front Genet 3:154 (2012).

[0169] As noted above, there are a number of commercial suppliers of modified RNAs, many of which have specialized in modifications designed to improve the effectiveness of siRNAs. A variety of approaches are offered based on various findings reported in the literature. For example, Dharmacon notes that replacement of a non-bridging oxygen with sulfur (phosphorothioate, PS) has been extensively used to improve nuclease resistance of siRNAs, as reported by Kole, Nature Reviews Drug Discovery 11:125-140 (2012). Modifications of the 2′-position of the ribose have been reported to improve nuclease resistance of the internucleotide phosphate bond while increasing duplex stability (Tm), which has also been shown to provide protection from immune activation. A combination of moderate PS backbone modifications with small, well-tolerated 2′-substitutions (2′-O-Methyl, 2′-Fluoro, 2′-Hydro) have been associated with highly stable siRNAs for applications in vivo, as reported by Soutschek et al. Nature 432:173-178 (2004); and 2′-O-Methyl modifications have been reported to be effective in improving stability as reported by Volkov, Oligonucleotides 19:191-202 (2009). With respect to decreasing the induction of innate immune responses, modifying specific sequences with 2′-O-Methyl, 2′-Fluoro, 2′-Hydro have been reported to reduce TLR7/TLR8 interaction while generally preserving silencing activity; see, e.g., Judge et al., Mol. Ther. 13:494-505 (2006); and Cekaite et al., J. Mol. Biol. 365:90-108 (2007). Additional modifications, such as 2-thiouracil, pseudouracil, 5-methylcytosine, 5-methyluracil, and N₆-methyladenosine have also been shown to minimize the immune effects mediated by TLR3, TLR7, and TLR8; see, e.g., Kariko, K. et al., Immunity 23:165-175 (2005).

[0170] As is also known in the art, and commercially available, a number of conjugates can be applied to polynucleotides, such as RNAs, for use herein that can enhance their delivery and/or uptake by cells, including for example, cholesterol, tocopherol and folic acid, lipids, peptides, polymers, linkers and aptamers; see, e.g., the review by Winkler, Ther. Deliv. 4:791-809 (2013), and references cited therein.

### Codon-Optimization

[0171] A polynucleotide encoding a site-directed polypeptide can be codon-optimized according to methods standard in the art for expression in the cell containing the target DNA of interest. For example, if the intended target nucleic acid is in a human cell, a human codon-optimized polynucleotide encoding Cas9 is contemplated for use for producing the Cas9 polypeptide.

### Complexes of a Genome-Targeting Nucleic Acid and a Site-Directed Polypeptide

[0172] A genome-targeting nucleic acid interacts with a site-directed polypeptide (e.g., a nucleic acid-guided nuclease such as Cas9), thereby forming a complex. The genome-targeting nucleic acid guides the site-directed polypeptide to a target nucleic acid.

### Ribonucleoprotein Complexes (RNPs)

[0173] The site-directed polypeptide and genome-targeting nucleic acid can each be administered separately to a cell or a patient. On the other hand, the site-directed polypeptide can be pre-complexed with one or more guide RNAs, or one or more crRNA together with a tracrRNA. The pre-complexed material can then be administered to a cell or a patient. Such pre-complexed material is known as a ribonucleoprotein particle (RNP). The site-directed polypeptide in the RNP can be, for example, a Cas9 endonuclease or a Cpf1 endonuclease. The site-directed polypeptide can be flanked at the N-terminus, the C-terminus, or both the N-terminus and C-terminus by one or more nuclear localization signals (NLSs). For example, a Cas9 endonuclease can be flanked by two NLSs, one NLS located at the N-terminus and the second NLS located at the C-terminus. The NLS can be any NLS known in the art, such as a SV40 NLS. The weight ratio of genome-targeting nucleic acid to site-directed polypeptide in the RNP can be 1:1. For example, the weight ratio of sgRNA to Cas9 endonuclease in the RNP can be 1:1.

### Nucleic Acids Encoding System Components

[0174] The present disclosure provides a nucleic acid comprising a nucleotide sequence encoding a genome-targeting nucleic acid of the disclosure, a site-directed polypeptide of the disclosure, and/or any nucleic acid or proteinaceous molecule necessary to carry out the aspects of the methods of the disclosure.

[0175] The nucleic acid encoding a genome-targeting nucleic acid of the disclosure, a site-directed polypeptide of the disclosure, and/or any nucleic acid or proteinaceous molecule necessary to carry out the aspects of the methods of the disclosure can comprise a vector (e.g., a recombinant expression vector).

[0176] The term “vector” refers to a nucleic acid molecule capable of transporting another nucleic acid to which it has been linked. One type of vector is a “plasmid”, which refers to a circular double-stranded DNA loop into which additional nucleic acid segments can be ligated. Another type of vector is a viral vector, wherein additional nucleic acid segments can be ligated into the viral genome. Certain vectors are capable of autonomous replication in a host cell into which they are introduced (e.g., bacterial vectors having a bacterial origin of replication and episomal mammalian vectors). Other vectors (e.g., non-episomal mammalian vectors) are integrated into the genome of a host cell upon introduction into the host cell, and thereby are replicated along with the host genome.

[0177] In some examples, vectors can be capable of directing the expression of nucleic acids to which they are operatively linked. Such vectors are referred to herein as “recombinant expression vectors”, or more simply “expression vectors”, which serve equivalent functions.

[0178] The term “operably linked” means that the nucleotide sequence of interest is linked to regulatory sequence(s) in a manner that allows for expression of the nucleotide sequence. The term “regulatory sequence” is intended to include, for example, promoters, enhancers and other expression control elements (e.g., polyadenylation signals). Such regulatory sequences are well known in the art and are described, for example, in Goeddel; Gene Expression Technology: Methods in Enzymology 185, Academic Press, San Diego, Calif. (1990). Regulatory sequences include those that direct constitutive expression of a nucleotide sequence in many types of host cells, and those that direct expression of the nucleotide sequence only in certain host cells (e.g., tissue-specific regulatory sequences). It will be appreciated by those skilled in the art that the design of the expression vector can depend on such factors as the choice of the target cell, the level of expression desired, and the like.

[0179] Expression vectors contemplated include, but are not limited to, viral vectors based on vaccinia virus, poliovirus, adenovirus, adeno-associated virus, SV40, herpes simplex virus, human immunodeficiency virus, retrovirus (e.g., Murine Leukemia Virus, spleen necrosis virus, and vectors derived from retroviruses such as Rous Sarcoma Virus, Harvey Sarcoma Virus, avian leukosis virus, a lentivirus, human immunodeficiency virus, myeloproliferative sarcoma virus, and mammary tumor virus) and other recombinant vectors. Other vectors contemplated for eukaryotic target cells include, but are not limited to, the vectors pXT1, pSG5, pSVK3, pBPV, pMSG, and pSVLSV40 (Pharmacia). Other vectors can be used so long as they are compatible with the host cell.

[0180] In some examples, a vector can comprise one or more transcription and/or translation control elements. Depending on the host/vector system utilized, any of a number of suitable transcription and translation control elements, including constitutive and inducible promoters, transcription enhancer elements, transcription terminators, etc. can be used in the expression vector. The vector can be a self-inactivating vector that either inactivates the viral sequences or the components of the CRISPR machinery or other elements.

[0181] Non-limiting examples of suitable eukaryotic promoters (i.e., promoters functional in a eukaryotic cell) include those from cytomegalovirus (CMV) immediate early, herpes simplex virus (HSV) thymidine kinase, early and late SV40, long terminal repeats (LTRs) from retrovirus, human elongation factor-1 promoter (EF1), a hybrid construct comprising the cytomegalovirus (CMV) enhancer fused to the chicken beta-actin promoter (CAG), murine stem cell virus promoter (MSCV), phosphoglycerate kinase-1 locus promoter (PGK), and mouse metallothionein-I.

[0182] For expressing small RNAs, including guide RNAs used in connection with Cas endonuclease, various promoters such as RNA polymerase III promoters, including for example U6 and H1, can be advantageous. Descriptions of and parameters for enhancing the use of such promoters are known in art, and additional information and approaches are regularly being described; see, e.g., Ma, H. et al., Molecular Therapy—Nucleic Acids 3, e161 (2014) doi:10.1038/mtna.2014.12.

[0183] The expression vector can also contain a ribosome binding site for translation initiation and a transcription terminator. The expression vector can also comprise appropriate sequences for amplifying expression. The expression vector can also include nucleotide sequences encoding non-native tags (e.g., histidine tag, hemagglutinin tag, green fluorescent protein, etc.) that are fused to the site-directed polypeptide, thus resulting in a fusion protein.

[0184] A promoter can be an inducible promoter (e.g., a heat shock promoter, tetracycline-regulated promoter, steroid-regulated promoter, metal-regulated promoter, estrogen receptor-regulated promoter, etc.). The promoter can be a constitutive promoter (e.g., CMV promoter, UBC promoter). In some cases, the promoter can be a spatially restricted and/or temporally restricted promoter (e.g., a tissue specific promoter, a cell type specific promoter, etc.).

[0185] The nucleic acid encoding a genome-targeting nucleic acid of the disclosure and/or a site-directed polypeptide can be packaged into or on the surface of delivery vehicles for delivery to cells. Delivery vehicles contemplated include, but are not limited to, nanospheres, liposomes, quantum dots, nanoparticles, polyethylene glycol particles, hydrogels, and micelles. As described in the art, a variety of targeting moieties can be used to enhance the preferential interaction of such vehicles with desired cell types or locations.

[0186] Introduction of the complexes, polypeptides, and nucleic acids of the disclosure into cells can occur by viral or bacteriophage infection, transfection, conjugation, protoplast fusion, lipofection, electroporation, nucleofection, calcium phosphate precipitation, polyethyleneimine (PEI)-mediated transfection, DEAE-dextran mediated transfection, liposome-mediated transfection, particle gun technology, calcium phosphate precipitation, direct micro-injection, nanoparticle-mediated nucleic acid delivery, and the like.

[0187] Therapeutic Approach

[0188] Provided herein are methods for treating a patient with Dyslipidemias. An aspect of such method is an ex vivo cell-based therapy. For example, a biopsy of the patient's liver is performed. Then, a liver specific progenitor cell or primary hepatocyte is isolated from the biopsied material. Next, the chromosomal DNA of these progenitor cells or primary hepatocytes is corrected using the materials and methods described herein. Finally, the progenitor cells or primary hepatocytes are implanted into the patient. Any source or type of cell may be used as the progenitor cell.

[0189] Another aspect of such method is an ex vivo cell-based therapy. For example, a patient specific induced pluripotent stem cell (iPSC) can be created. Then, the chromosomal DNA of these iPS cells can be edited using the materials and methods described herein. Next, the genome-edited iPSCs can be differentiated into other cells. Finally, the differentiated cells are implanted into the patient.

[0190] Yet another aspect of such method is an ex vivo cell-based therapy. For example, a mesenchymal stem cell can be isolated from the patient, which can be isolated from the patient's bone marrow or peripheral blood. Next, the chromosomal DNA of these mesenchymal stem cells can be edited using the materials and methods described herein. Next, the genome-edited mesenchymal stem cells can be differentiated into any type of cell, e.g., hepatocytes. Finally, the differentiated cells, e.g., hepatocytes are implanted into the patient.

[0191] One advantage of an ex vivo cell therapy approach is the ability to conduct a comprehensive analysis of the therapeutic prior to administration. Nuclease-based therapeutics can have some level of off-target effects. Performing gene editing ex vivo allows one to characterize the edited cell population prior to implantation. The present disclosure includes sequencing the entire genome of the edited cells to ensure that the off-target effects, if any, can be in genomic locations associated with minimal risk to the patient. Furthermore, populations of specific cells, including clonal populations, can be isolated prior to implantation.

[0192] Another advantage of ex vivo cell therapy relates to genetic modification in iPSCs compared to other primary cell sources. iPSCs are prolific, making it easy to obtain the large number of cells that will be required for a cell-based therapy. Furthermore, iPSCs are an ideal cell type for performing clonal isolations. This allows screening for the correct genomic modification, without risking a decrease in viability. In contrast, other primary cells, such as hepatocytes, are viable for only a few passages and difficult to clonally expand. Thus, manipulation of iPSCs for the treatment of Dyslipidemias can be much easier, and can shorten the amount of time needed to make the desired genetic modification.

[0193] Methods can also include an in vivo based therapy. Chromosomal DNA of the cells in the patient is edited using the materials and methods described herein.

[0194] Although certain cells present an attractive target for ex vivo treatment and therapy, increased efficacy in delivery may permit direct in vivo delivery to such cells. Ideally the targeting and editing would be directed to the relevant cells. Cleavage in other cells can also be prevented by the use of promoters only active in certain cells and or developmental stages. Additional promoters are inducible, and therefore can be temporally controlled if the nuclease is delivered as a plasmid. The amount of time that delivered RNA and protein remain in the cell can also be adjusted using treatments or domains added to change the half-life. In vivo treatment would eliminate a number of treatment steps, but a lower rate of delivery can require higher rates of editing. In vivo treatment can eliminate problems and losses from ex vivo treatment and engraftment.

[0195] An advantage of in vivo gene therapy can be the ease of therapeutic production and administration. The same therapeutic approach and therapy will have the potential to be used to treat more than one patient, for example a number of patients who share the same or similar genotype or allele. In contrast, ex vivo cell therapy typically requires using a patient's own cells, which are isolated, manipulated and returned to the same patient.

[0196] Also provided herein is a cellular method for editing the ANGPTL4 gene in a cell by genome editing. For example, a cell can be isolated from a patient or animal. Then, the chromosomal DNA of the cell can be edited using the materials and methods described herein.

[0197] The methods provided herein, regardless of whether a cellular or ex vivo or in vivo method, can involve reducing (knock-down) or eliminating (knock-out) the expression of the ANGPTL4 gene by introducing one or more insertions, deletions or mutations within or near the ANGPTL4 gene or other DNA sequences that encode regulatory elements of the ANGPTL4 gene.

[0198] For example, the knock-down or knock-out strategy can involve disrupting the reading frame in the ANGPTL4 gene by introducing random insertions or deletions (indels) that arise due to the imprecise NHEJ repair pathway. This can be achieved by inducing one single stranded break or double stranded break in the gene of interest with one or more CRISPR endonucleases and a gRNA (e.g., crRNA+tracrRNA, or sgRNA), or two or more single stranded breaks or double stranded breaks in the gene of interest with two or more CRISPR endonucleases and two or more sgRNAs. This approach can require development and optimization of sgRNAs for the ANGPTL4 gene.

[0199] Alternatively, the knock-down or knock-out strategy can also involve deletion of one or more segments within or near the ANGPTL4 gene or other DNA sequences that encode regulatory elements of the ANGPTL4 gene. This deletion strategy requires at least a pair of gRNAs (e.g., crRNA+tracrRNA, or sgRNA) capable of binding to two different sites within or near the ANGPTL4 gene and one or more CRISPR endonucleases. The CRISPR endonucleases, configured with the two gRNAs, induce two double stranded breaks at the desired locations. After cleavage, the two ends, regardless of whether blunt or with overhangs, can be joined by NHEJ, leading to the deletion of the intervening segment. NHEJ repair pathways can lead to insertions, deletions or mutations at the joints.

[0200] In addition to the above genome editing strategies, another strategy involves modulating expression, function, or activity of ANGPTL4 by editing in the regulatory sequence.

[0201] In addition to the editing options listed above, Cas9 or similar proteins can be used to target effector domains to the same target sites that can be identified for editing, or additional target sites within range of the effector domain. A range of chromatin modifying enzymes, methylases or demethylases can be used to alter expression of the target gene. One possibility is reducing the expression of the ANGPTL4 protein if a mutation leads to undesirable activity. These types of epigenetic regulation have some advantages, particularly as they are limited in possible off-target effects.

[0202] A number of types of genomic target sites can be present in addition to the coding and splicing sequences.

[0203] The regulation of transcription and translation implicates a number of different classes of sites that interact with cellular proteins or nucleotides. Often the DNA binding sites of transcription factors or other proteins can be targeted for mutation or deletion to study the role of the site, though they can also be targeted to change gene expression. Sites can be added through non-homologous end joining NHEJ or direct genome editing by homology directed repair (HDR). Increased use of genome sequencing, RNA expression and genome-wide studies of transcription factor binding have increased our ability to identify how the sites lead to developmental or temporal gene regulation. These control systems can be direct or can involve extensive cooperative regulation that can require the integration of activities from multiple enhancers. Transcription factors typically bind 6-12 bp-long degenerate DNA sequences. The low level of specificity provided by individual sites suggests that complex interactions and rules are involved in binding and the functional outcome. Binding sites with less degeneracy can provide simpler means of regulation. Artificial transcription factors can be designed to specify longer sequences that have less similar sequences in the genome and have lower potential for off-target cleavage. Any of these types of binding sites can be mutated, deleted or even created to enable changes in gene regulation or expression (Canver, M. C. et al., Nature (2015)).

[0204] Another class of gene regulatory regions having these features is microRNA (miRNA) binding sites. miRNAs are non-coding RNAs that play key roles in post-transcriptional gene regulation. miRNA can regulate the expression of 30% of all mammalian protein-encoding genes. Specific and potent gene silencing by double stranded RNA (RNAi) was discovered, plus additional small noncoding RNA (Canver, M. C. et al., Nature (2015)). The largest class of noncoding RNAs important for gene silencing are miRNAs. In mammals, miRNAs are first transcribed as a long RNA transcript, which can be separate transcriptional units, part of protein introns, or other transcripts. The long transcripts are called primary miRNA (pri-miRNA) that include imperfectly base-paired hairpin structures. These pri-miRNA can be cleaved into one or more shorter precursor miRNAs (pre-miRNAs) by Microprocessor, a protein complex in the nucleus, involving Drosha.

[0205] Pre-miRNAs are short stem loops ˜70 nucleotides in length with a 2-nucleotide 3′-overhang that are exported, into the mature 19-25 nucleotide miRNA:miRNA* duplexes. The miRNA strand with lower base pairing stability (the guide strand) can be loaded onto the RNA-induced silencing complex (RISC). The passenger strand (marked with *), can be functional, but is usually degraded. The mature miRNA tethers RISC to partly complementary sequence motifs in target mRNAs predominantly found within the 3′ untranslated regions (UTRs) and induces posttranscriptional gene silencing (Bartel, D. P. Cell 136, 215-233 (2009); Saj, A. & Lai, E. C. Curr Opin Genet Dev 21, 504-510 (2011)).

[0206] miRNAs can be important in development, differentiation, cell cycle and growth control, and in virtually all biological pathways in mammals and other multicellular organisms. miRNAs can also be involved in cell cycle control, apoptosis and stem cell differentiation, hematopoiesis, hypoxia, muscle development, neurogenesis, insulin secretion, cholesterol metabolism, aging, viral replication and immune responses.

[0207] A single miRNA can target hundreds of different mRNA transcripts, while an individual miRNA transcript can be targeted by many different miRNAs. More than 28645 microRNAs have been annotated in the latest release of miRBase (v.21). Some miRNAs can be encoded by multiple loci, some of which can be expressed from tandemly co-transcribed clusters. The features allow for complex regulatory networks with multiple pathways and feedback controls. miRNAs can be integral parts of these feedback and regulatory circuits and can help regulate gene expression by keeping protein production within limits (Herranz, H. & Cohen, S. M. Genes Dev 24, 1339-1344 (2010); Posadas, D. M. & Carthew, R. W. Curr Opin Genet Dev 27, 1-6 (2014)).

[0208] miRNA can also be important in a large number of human diseases that are associated with abnormal miRNA expression. This association underscores the importance of the miRNA regulatory pathway. Recent miRNA deletion studies have linked miRNA with regulation of the immune responses (Stern-Ginossar, N. et al., Science 317, 376-381 (2007)).

[0209] miRNA also has a strong link to cancer and can play a role in different types of cancer. miRNAs have been found to be downregulated in a number of tumors. miRNA can be important in the regulation of key cancer-related pathways, such as cell cycle control and the DNA damage response, and can therefore be used in diagnosis and can be targeted clinically. MicroRNAs can delicately regulate the balance of angiogenesis, such that experiments depleting all microRNAs suppresses tumor angiogenesis (Chen, S. et al., Genes Dev 28, 1054-1067 (2014)).

[0210] As has been shown for protein coding genes, miRNA genes can also be subject to epigenetic changes occurring with cancer. Many miRNA loci can be associated with CpG islands increasing their opportunity for regulation by DNA methylation (Weber, B., Stresemann, C., Brueckner, B. & Lyko, F. Cell Cycle 6, 1001-1005 (2007)). The majority of studies have used treatment with chromatin remodeling drugs to reveal epigenetically silenced miRNAs.

[0211] In addition to their role in RNA silencing, miRNA can also activate translation (Posadas, D. M. & Carthew, R. W. Curr Opin Genet Dev 27, 1-6 (2014)). Knocking out miRNA sites may lead to decreased expression of the targeted gene, while introducing these sites may increase expression.

[0212] Individual miRNA can be knocked out most effectively by mutating the seed sequence (bases 2-8 of the microRNA), which can be important for binding specificity. Cleavage in this region, followed by mis-repair by NHEJ can effectively abolish miRNA function by blocking binding to target sites. miRNA could also be inhibited by specific targeting of the special loop region adjacent to the palindromic sequence. Catalytically inactive Cas9 can also be used to inhibit shRNA expression (Zhao, Y. et al., Sci Rep 4, 3943 (2014)). In addition to targeting the miRNA, the binding sites can also be targeted and mutated to prevent the silencing by miRNA.

[0213] According to the present disclosure, any of the microRNA (miRNA) or their binding sites may be incorporated into the compositions of the disclosure.

[0214] The compositions may have a region such as, but not limited to, a region comprising the sequence of any of the microRNAs listed in SEQ ID NOs: 632-4,715, the reverse complement of the microRNAs listed in SEQ ID NOs: 632-4,715 or the microRNA anti-seed region of any of the microRNAs listed in SEQ ID NOs: 632-4,715.

[0215] The compositions of the disclosure may comprise one or more microRNA target sequences, microRNA sequences, or microRNA seeds. Such sequences may correspond to any known microRNA such as those taught in US Publication US2005/0261218 and US Publication US2005/0059005. As a non-limiting embodiment, known microRNAs, their sequences and their binding site sequences in the human genome are listed below in SEQ ID NOs: 632-4,715.

[0216] A microRNA sequence comprises a “seed” sequence, i.e., a sequence in the region of positions 2-8 of the mature microRNA, which sequence has perfect Watson-Crick complementarity to the miRNA target sequence. A microRNA seed may comprise positions 2-8 or 2-7 of the mature microRNA. In some aspects, a microRNA seed may comprise 7 nucleotides (e.g., nucleotides 2-8 of the mature microRNA), wherein the seed-complementary site in the corresponding miRNA target is flanked by an adenine (A) opposed to microRNA position 1. In some aspects, a microRNA seed may comprise 6 nucleotides (e.g., nucleotides 2-7 of the mature microRNA), wherein the seed-complementary site in the corresponding miRNA target is flanked by an adenine (A) opposed to microRNA position 1. See for example, Grimson A, Farh K K, Johnston W K, Garrett-Engele P, Lim L P, Bartel D P; Mol Cell. 2007 Jul. 6; 27(1):91-105. The bases of the microRNA seed have complete complementarity with the target sequence.

[0217] Identification of microRNA, microRNA target regions, and their expression patterns and role in biology have been reported (Bonauer et al., Curr Drug Targets 2010 11:943-949; Anand and Cheresh Curr Opin Hematol 2011 18:171-176; Contreras and Rao Leukemia 2012 26:404-413 (2011 Dec. 20. doi: 10.1038/leu.2011.356); Bartel Cell 2009 136:215-233; Landgraf et al, Cell, 2007 129:1401-1414; Gentner and Naldini, Tissue Antigens. 2012 80:393-403).

[0218] For example, if the composition is not intended to be delivered to the liver but ends up there, then miR-122, a microRNA abundant in liver, can inhibit the expression of the sequence delivered if one or multiple target sites of miR-122 are engineered into the polynucleotide encoding that target sequence. Introduction of one or multiple binding sites for different microRNA can be engineered to further decrease the longevity, stability, and protein translation hence providing an additional layer of tenability.

[0219] As used herein, the term “microRNA site” refers to a microRNA target site or a microRNA recognition site, or any nucleotide sequence to which a microRNA binds or associates. It should be understood that “binding” may follow traditional Watson-Crick hybridization rules or may reflect any stable association of the microRNA with the target sequence at or adjacent to the microRNA site.

[0220] Conversely, for the purposes of the compositions of the present disclosure, microRNA binding sites can be engineered out of (i.e. removed from) sequences in which they naturally occur in order to increase protein expression in specific tissues. For example, miR-122 binding sites may be removed to improve protein expression in the liver.

[0221] Specifically, microRNAs are known to be differentially expressed in immune cells (also called hematopoietic cells), such as antigen presenting cells (APCs) (e.g. dendritic cells and macrophages), macrophages, monocytes, B lymphocytes, T lymphocytes, granulocytes, natural killer cells, etc. Immune cell specific microRNAs are involved in immunogenicity, autoimmunity, the immune-response to infection, inflammation, as well as unwanted immune response after gene therapy and tissue/organ transplantation. Immune cells specific microRNAs also regulate many aspects of development, proliferation, differentiation and apoptosis of hematopoietic cells (immune cells). For example, miR-142 and miR-146 are exclusively expressed in the immune cells, particularly abundant in myeloid dendritic cells. Introducing the miR-142 binding site into the 3′-UTR of a polypeptide of the present disclosure can selectively suppress the gene expression in the antigen presenting cells through miR-142 mediated mRNA degradation, limiting antigen presentation in professional APCs (e.g. dendritic cells) and thereby preventing antigen-mediated immune response after gene delivery (see, Annoni A et al., blood, 2009, 114, 5152-5161).

[0222] In one embodiment, microRNAs binding sites that are known to be expressed in immune cells, in particular, the antigen presenting cells, can be engineered into the polynucleotides to suppress the expression of the polynucleotide in APCs through microRNA mediated RNA degradation, subduing the antigen-mediated immune response, while the expression of the polynucleotide is maintained in non-immune cells where the immune cell specific microRNAs are not expressed.

[0223] Many microRNA expression studies have been conducted, and are described in the art, to profile the differential expression of microRNAs in various cancer cells/tissues and other diseases. Some microRNAs are abnormally over-expressed in certain cancer cells and others are under-expressed. For example, microRNAs are differentially expressed in cancer cells (WO2008/154098, US2013/0059015, US2013/0042333, WO2011/157294); cancer stem cells (US2012/0053224); pancreatic cancers and diseases (US2009/0131348, US2011/0171646, US2010/0286232, U.S. Pat. No. 8,389,210); asthma and inflammation (U.S. Pat. No. 8,415,096); prostate cancer (US2013/0053264); hepatocellular carcinoma (WO2012/151212, US2012/0329672, WO2008/054828, U.S. Pat. No. 8,252,538); lung cancer cells (WO2011/076143, WO2013/033640, WO2009/070653, US2010/0323357); cutaneous T cell lymphoma (WO2013/011378); colorectal cancer cells (WO2011/0281756, WO2011/076142); cancer positive lymph nodes (WO2009/100430, US2009/0263803); nasopharyngeal carcinoma (EP2112235); chronic obstructive pulmonary disease (US2012/0264626, US2013/0053263); thyroid cancer (WO2013/066678); ovarian cancer cells (US2012/0309645, WO2011/095623); breast cancer cells (WO2008/154098, WO2007/081740, US2012/0214699), leukemia and lymphoma (WO2008/073915, US2009/0092974, US2012/0316081, US2012/0283310, WO2010/018563).

[0224] Non-limiting examples of microRNA sequences and the targeted tissues and/or cells are described in SEQ ID NOs: 632-4,715.

### Genome Engineering Strategies

[0225] In some aspects, the methods of the present disclosure can involve editing of one or both of the alleles. Gene editing to modify the allele(s) has the advantage of permanently altering the target gene or gene products.

[0226] A step of the ex vivo methods of the present disclosure can comprise editing the hepatocytes isolated from the patient using genome engineering. Alternatively, a step of the ex vivo methods of the present disclosure can comprise editing the patient specific iPSC or mesenchymal stem cell. Likewise, a step of the in vivo methods of the disclosure involves editing the cells in Dyslipidemias patient using genome engineering. Similarly, a step in the cellular methods of the present disclosure can comprise editing the ANGPTL4 gene in a human cell by genome engineering.

[0227] Dyslipidemias patients may exhibit different mutations in the ANGPTL4 gene. Any CRISPR endonuclease may be used in the methods of the present disclosure, each CRISPR endonuclease having its own associated PAM, which may or may not be disease specific.

[0228] For example, expression of the ANGPTL4 gene may be disrupted or eliminated by introducing random insertions or deletions (indels) that arise due to the imprecise NHEJ repair pathway. The target region may be the coding sequences of the ANGPTL4 gene (i.e., exons). Inserting or deleting nucleotides into the coding sequence of a gene may cause a “frame shift” where the normal 3-letter codon pattern is disturbed. In this way, gene expression and therefore protein production can be reduced or eliminated. This approach may also be used to target any intron, intron: exon junction, or regulatory DNA element of the ANGPTL4 gene where sequence alteration may interfere with the expression of the ANGPTL4 gene.

[0229] As another example, NHEJ can also be used to delete segments within or near the gene, either directly or by altering splice donor or acceptor sites through cleavage by one gRNA targeting several locations, or several gRNAs. This can be useful if small random indels are inefficient to knock-out the target gene. Pairs of guide strands have been used for this type of deletions.

[0230] Without a donor present, the ends from a DNA break or ends from different breaks can be joined using the several nonhomologous repair pathways in which the DNA ends are joined with little or no base-pairing at the junction. In addition to canonical NHEJ, there are similar repair mechanisms, such as alt-NHEJ. If there are two breaks, the intervening segment can be deleted or inverted. NHEJ repair pathways can lead to insertions, deletions or mutations at the joints.

[0231] NHEJ can also lead to homology-independent target integration. For example, inclusion of a nuclease target site on a donor plasmid can promote integration of a transgene into the chromosomal double-strand break following in vivo nuclease cleavage of both the donor and the chromosome (Cristea., Biotechnol Bioeng. 2013 March; 110(3):871-80). NHEJ was used to insert a 15-kb inducible gene expression cassette into a defined locus in human cell lines after nuclease cleavage. (See e.g., Maresca, M., Lin, V. G., Guo, N. & Yang, Y., Genome Res 23, 539-546 (2013); Cristea et al. Biotechnology and Bioengineering 2013, 871-80, 10.1002/bit.24733). The integrated sequence may disrupt the reading frame of the ANGPTL4 gene or alter the structure of the gene.

[0232] As a further alternative, homology directed repair (HDR) can also be used to knock-out a gene or alter the gene function. HDR is essentially an error-free mechanism that uses a supplied homologous DNA sequence as a template during DSB repair. The rate of HDR is a function of the distance between the mutation and the cut site so choosing overlapping or nearest target sites is important. Templates can include extra sequences flanked by the homologous regions or can contain a sequence that differs from the genomic sequence, thus allowing sequence editing.

[0233] For example, the HDR knock-out strategy can involve disrupting the structure or function of the ANGPTL4 gene by inserting into the gene or replacing a part of the gene with a non-functional or irrelevant sequence. This can be achieved by inducing one single stranded break or double stranded break in the gene of interest with one or more CRISPR endonucleases and a gRNA (e.g., crRNA+tracrRNA, or sgRNA), or two or more single stranded breaks or double stranded breaks in the gene of interest with one or more CRISPR endonucleases and two or more gRNAs, in the presence of a donor DNA template introduced exogenously to direct the cellular DSB response to HDR (the donor DNA template can be a short single stranded oligonucleotide, a short double stranded oligonucleotide, a long single or double stranded DNA molecule). This approach can require development and optimization of gRNAs and donor DNA molecules for the ANGPTL4 gene.

[0234] Homology directed repair is a cellular mechanism for repairing DSBs. The most common form is homologous recombination. There are additional pathways for HDR, including single-strand annealing and alternative-HDR. Genome engineering tools allow researchers to manipulate the cellular homologous recombination pathways to create site-specific modifications to the genome. It has been found that cells can repair a double-stranded break using a synthetic donor molecule provided in trans. Therefore, by introducing a double-stranded break near a specific mutation and providing a suitable donor, targeted changes can be made in the genome. Specific cleavage increases the rate of HDR more than 1,000 fold above the rate of 1 in 10⁶ cells receiving a homologous donor alone. The rate of homology directed repair (HDR) at a particular nucleotide is a function of the distance to the cut site, so choosing overlapping or nearest target sites is important. Gene editing offers the advantage over gene addition, as editing in situ leaves the rest of the genome unperturbed.

[0235] Supplied donors for editing by HDR vary markedly but can contain the intended sequence with small or large flanking homology arms to allow annealing to the genomic DNA. The homology regions flanking the introduced genetic changes can be 30 bp or smaller, or as large as a multi-kilobase cassette that can contain promoters, cDNAs, etc. Both single-stranded and double-stranded oligonucleotide donors have been used. These oligonucleotides range in size from less than 100 nt to over many kb, though longer ssDNA can also be generated and used. Double-stranded donors can be used, including PCR amplicons, plasmids, and mini-circles. In general, it has been found that an AAV vector can be a very effective means of delivery of a donor template, though the packaging limits for individual donors is <5 kb. Active transcription of the donor increased HDR three-fold, indicating the inclusion of promoter may increase conversion. Conversely, CpG methylation of the donor decreased gene expression and HDR.

[0236] In addition to wild-type endonucleases, such as Cas9, nickase variants exist that have one or the other nuclease domain inactivated resulting in cutting of only one DNA strand. HDR can be directed from individual Cas nickases or using pairs of nickases that flank the target area. Donors can be single-stranded, nicked, or dsDNA.

[0237] The donor DNA can be supplied with the nuclease or independently by a variety of different methods, for example by transfection, nano-particle, micro-injection, or viral transduction. A range of tethering options have been proposed to increase the availability of the donors for HDR. Examples include attaching the donor to the nuclease, attaching to DNA binding proteins that bind nearby, or attaching to proteins that are involved in DNA end binding or repair.

[0238] The repair pathway choice can be guided by a number of culture conditions, such as those that influence cell cycling, or by targeting of DNA repair and associated proteins. For example, to increase HDR, key NHEJ molecules can be suppressed, such as KU70, KU80 or DNA ligase IV.

[0239] In addition to genome editing by NHEJ or HDR, site-specific gene insertions have been conducted that use both the NHEJ pathway and HDR. A combination approach may be applicable in certain settings, possibly including intron/exon borders. NHEJ may prove effective for ligation in the intron, while the error-free HDR may be better suited in the coding region.

[0240] The ANGPTL4 gene contains a number of exons as shown in Table 3. Any one or more of these exons or nearby introns can be targeted in order to create one or more insertions or deletions that disrupt the reading frame and eventually eliminate undesirable ANGPTL4 protein activity.

[0241] In some embodiments, the methods can provide gRNA pairs that make a deletion by cutting the gene twice at locations flanking an unwanted sequence. This sequence may include one or more exons, introns, intron:exon junctions, other DNA sequences encoding regulatory elements of the ANGPTL4 gene or combinations thereof. The cutting can be accomplished by a pair of DNA endonucleases that each makes a DSB in the genome, or by multiple nickases that together make a DSB in the genome.

[0242] Alternatively, the methods can provide one gRNA to make one double-strand cut within a coding or splicing sequence. The double-strand cut can be made by a single DNA endonuclease or multiple nickases that together make a DSB in the genome.

[0243] Splicing donor and acceptors are generally within 100 base pairs of the neighboring intron. In some examples, methods can provide gRNAs that cut approximately +/−100-3100 bp with respect to each exon/intron junction of interest.

[0244] For any of the genome editing strategies, gene editing can be confirmed by sequencing or PCR analysis.

### Target Sequence Selection

[0245] Shifts in the location of the 5′ boundary and/or the 3′ boundary relative to particular reference loci can be used to facilitate or enhance particular applications of gene editing, which depend in part on the endonuclease system selected for the editing, as further described and illustrated herein.

[0246] In a first non-limiting example of such target sequence selection, many endonuclease systems have rules or criteria that can guide the initial selection of potential target sites for cleavage, such as the requirement of a PAM sequence motif in a particular position adjacent to the DNA cleavage sites in the case of CRISPR Type II or Type V endonucleases.

[0247] In another non-limiting example of target sequence selection or optimization, the frequency of off-target activity for a particular combination of target sequence and gene editing endonuclease (i.e. the frequency of DSBs occurring at sites other than the selected target sequence) can be assessed relative to the frequency of on-target activity. In some cases, cells that have been correctly edited at the desired locus can have a selective advantage relative to other cells. Illustrative, but non-limiting, examples of a selective advantage include the acquisition of attributes such as enhanced rates of replication, persistence, resistance to certain conditions, enhanced rates of successful engraftment or persistence in vivo following introduction into a patient, and other attributes associated with the maintenance or increased numbers or viability of such cells. In other cases, cells that have been correctly edited at the desired locus can be positively selected for by one or more screening methods used to identify, sort or otherwise select for cells that have been correctly edited. Both selective advantage and directed selection methods can take advantage of the phenotype associated with the alteration. In some cases, cells can be edited two or more times in order to create a second modification that creates a new phenotype that is used to select or purify the intended population of cells. Such a second modification could be created by adding a second gRNA for a selectable or screenable marker. In some cases, cells can be correctly edited at the desired locus using a DNA fragment that contains the cDNA and also a selectable marker.

[0248] Whether any selective advantage is applicable or any directed selection is to be applied in a particular case, target sequence selection can also be guided by consideration of off-target frequencies in order to enhance the effectiveness of the application and/or reduce the potential for undesired alterations at sites other than the desired target. As described further and illustrated herein and in the art, the occurrence of off-target activity can be influenced by a number of factors including similarities and dissimilarities between the target site and various off-target sites, as well as the particular endonuclease used. Bioinformatics tools are available that assist in the prediction of off-target activity, and frequently such tools can also be used to identify the most likely sites of off-target activity, which can then be assessed in experimental settings to evaluate relative frequencies of off-target to on-target activity, thereby allowing the selection of sequences that have higher relative on-target activities. Illustrative examples of such techniques are provided herein, and others are known in the art.

[0249] Another aspect of target sequence selection relates to homologous recombination events. Sequences sharing regions of homology can serve as focal points for homologous recombination events that result in deletion of intervening sequences. Such recombination events occur during the normal course of replication of chromosomes and other DNA sequences, and also at other times when DNA sequences are being synthesized, such as in the case of repairs of double-strand breaks (DSBs), which occur on a regular basis during the normal cell replication cycle but can also be enhanced by the occurrence of various events (such as UV light and other inducers of DNA breakage) or the presence of certain agents (such as various chemical inducers). Many such inducers cause DSBs to occur indiscriminately in the genome, and DSBs can be regularly induced and repaired in normal cells. During repair, the original sequence can be reconstructed with complete fidelity, however, in some cases, small insertions or deletions (referred to as “indels”) are introduced at the DSB site.

[0250] DSBs can also be specifically induced at particular locations, as in the case of the endonucleases systems described herein, which can be used to cause directed or preferential gene modification events at selected chromosomal locations. The tendency for homologous sequences to be subject to recombination in the context of DNA repair (as well as replication) can be taken advantage of in a number of circumstances, and is the basis for one application of gene editing systems, such as CRISPR, in which homology directed repair is used to insert a sequence of interest, provided through use of a “donor” polynucleotide, into a desired chromosomal location.

[0251] Regions of homology between particular sequences, which can be small regions of “microhomology” that can comprise as few as ten basepairs or less, can also be used to bring about desired deletions. For example, a single DSB can be introduced at a site that exhibits microhomology with a nearby sequence. During the normal course of repair of such DSB, a result that occurs with high frequency is the deletion of the intervening sequence as a result of recombination being facilitated by the DSB and concomitant cellular repair process.

[0252] In some circumstances, however, selecting target sequences within regions of homology can also give rise to much larger deletions, including gene fusions (when the deletions are in coding regions), which may or may not be desired given the particular circumstances.

[0253] The examples provided herein further illustrate the selection of various target regions for the creation of DSBs designed to induce insertions, deletions or mutations that result in reduction or elimination of ANGPTL4 protein activity, as well as the selection of specific target sequences within such regions that are designed to minimize off-target events relative to on-target events.

### Human Cells

[0254] For ameliorating Dyslipidemias or any disorder associated with ANGPTL4, as described and illustrated herein, the principal targets for gene editing are human cells. For example, in the ex vivo methods, the human cells can be somatic cells, which after being modified using the techniques as described, can give rise to differentiated cells, e.g., hepatocytes or progenitor cells. For example, in the in vivo methods, the human cells may be hepatocytes, renal cells or cells from other affected organs.

[0255] By performing gene editing in autologous cells that are derived from and therefore already completely matched with the patient in need, it is possible to generate cells that can be safely re-introduced into the patient, and effectively give rise to a population of cells that will be effective in ameliorating one or more clinical conditions associated with the patient's disease.

[0256] Stem cells are capable of both proliferation and giving rise to more progenitor cells, these in turn having the ability to generate a large number of mother cells that can in turn give rise to differentiated or differentiable daughter cells. The daughter cells themselves can be induced to proliferate and produce progeny that subsequently differentiate into one or more mature cell types, while also retaining one or more cells with parental developmental potential. The term “stem cell” refers then, to a cell with the capacity or potential, under particular circumstances, to differentiate to a more specialized or differentiated phenotype, and which retains the capacity, under certain circumstances, to proliferate without substantially differentiating. In one aspect, the term progenitor or stem cell refers to a generalized mother cell whose descendants (progeny) specialize, often in different directions, by differentiation, e.g., by acquiring completely individual characters, as occurs in progressive diversification of embryonic cells and tissues. Cellular differentiation is a complex process typically occurring through many cell divisions. A differentiated cell may derive from a multipotent cell that itself is derived from a multipotent cell, and so on. While each of these multipotent cells may be considered stem cells, the range of cell types that each can give rise to may vary considerably. Some differentiated cells also have the capacity to give rise to cells of greater developmental potential. Such capacity may be natural or may be induced artificially upon treatment with various factors. In many biological instances, stem cells can also be “multipotent” because they can produce progeny of more than one distinct cell type, but this is not required for “stem-ness.”

[0257] Self-renewal can be another important aspect of the stem cell. In theory, self-renewal can occur by either of two major mechanisms. Stem cells can divide asymmetrically, with one daughter retaining the stem state and the other daughter expressing some distinct other specific function and phenotype. Alternatively, some of the stem cells in a population can divide symmetrically into two stems, thus maintaining some stem cells in the population as a whole, while other cells in the population give rise to differentiated progeny only. Generally, “progenitor cells” have a cellular phenotype that is more primitive (i.e., is at an earlier step along a developmental pathway or progression than is a fully differentiated cell). Often, progenitor cells also have significant or very high proliferative potential. Progenitor cells can give rise to multiple distinct differentiated cell types or to a single differentiated cell type, depending on the developmental pathway and on the environment in which the cells develop and differentiate.

[0258] In the context of cell ontogeny, the adjective “differentiated,” or “differentiating” is a relative term. A “differentiated cell” is a cell that has progressed further down the developmental pathway than the cell to which it is being compared. Thus, stem cells can differentiate into lineage-restricted precursor cells (such as a myocyte progenitor cell), which in turn can differentiate into other types of precursor cells further down the pathway (such as a myocyte precursor), and then to an end-stage differentiated cell, such as a myocyte, which plays a characteristic role in a certain tissue type, and may or may not retain the capacity to proliferate further.

### Induced Pluripotent Stem Cells

[0259] The genetically engineered human cells described herein can be induced pluripotent stem cells (iPSCs). An advantage of using iPSCs is that the cells can be derived from the same subject to which the progenitor cells are to be administered. That is, a somatic cell can be obtained from a subject, reprogrammed to an induced pluripotent stem cell, and then re-differentiated into a progenitor cell to be administered to the subject (e.g., autologous cells). Because the progenitors are essentially derived from an autologous source, the risk of engraftment rejection or allergic response can be reduced compared to the use of cells from another subject or group of subjects. In addition, the use of iPSCs negates the need for cells obtained from an embryonic source. Thus, in one aspect, the stem cells used in the disclosed methods are not embryonic stem cells.

[0260] Although differentiation is generally irreversible under physiological contexts, several methods have been recently developed to reprogram somatic cells to iPSCs. Exemplary methods are known to those of skill in the art and are described briefly herein below.

[0261] The term “reprogramming” refers to a process that alters or reverses the differentiation state of a differentiated cell (e.g., a somatic cell). Stated another way, reprogramming refers to a process of driving the differentiation of a cell backwards to a more undifferentiated or more primitive type of cell. It should be noted that placing many primary cells in culture can lead to some loss of fully differentiated characteristics. Thus, simply culturing such cells included in the term differentiated cells does not render these cells non-differentiated cells (e.g., undifferentiated cells) or pluripotent cells. The transition of a differentiated cell to pluripotency requires a reprogramming stimulus beyond the stimuli that lead to partial loss of differentiated character in culture. Reprogrammed cells also have the characteristic of the capacity of extended passaging without loss of growth potential, relative to primary cell parents, which generally have capacity for only a limited number of divisions in culture.

[0262] The cell to be reprogrammed can be either partially or terminally differentiated prior to reprogramming. Reprogramming can encompass complete reversion of the differentiation state of a differentiated cell (e.g., a somatic cell) to a pluripotent state or a multipotent state. Reprogramming can encompass complete or partial reversion of the differentiation state of a differentiated cell (e.g., a somatic cell) to an undifferentiated cell (e.g., an embryonic-like cell). Reprogramming can result in expression of particular genes by the cells, the expression of which further contributes to reprogramming. In certain examples described herein, reprogramming of a differentiated cell (e.g., a somatic cell) can cause the differentiated cell to assume an undifferentiated state (e.g., is an undifferentiated cell). The resulting cells are referred to as “reprogrammed cells,” or “induced pluripotent stem cells (iPSCs or iPS cells).”

[0263] Reprogramming can involve alteration, e.g., reversal, of at least some of the heritable patterns of nucleic acid modification (e.g., methylation), chromatin condensation, epigenetic changes, genomic imprinting, etc., that occur during cellular differentiation. Reprogramming is distinct from simply maintaining the existing undifferentiated state of a cell that is already pluripotent or maintaining the existing less than fully differentiated state of a cell that is already a multipotent cell (e.g., a myogenic stem cell). Reprogramming is also distinct from promoting the self-renewal or proliferation of cells that are already pluripotent or multipotent, although the compositions and methods described herein can also be of use for such purposes, in some examples.

[0264] Many methods are known in the art that can be used to generate pluripotent stem cells from somatic cells. Any such method that reprograms a somatic cell to the pluripotent phenotype would be appropriate for use in the methods described herein.

[0265] Reprogramming methodologies for generating pluripotent cells using defined combinations of transcription factors have been described. Mouse somatic cells can be converted to ES cell-like cells with expanded developmental potential by the direct transduction of Oct4, Sox2, Klf4, and c-Myc; see, e.g., Takahashi and Yamanaka, Cell 126(4): 663-76 (2006). iPSCs resemble ES cells, as they restore the pluripotency-associated transcriptional circuitry and much of the epigenetic landscape. In addition, mouse iPSCs satisfy all the standard assays for pluripotency: specifically, in vitro differentiation into cell types of the three germ layers, teratoma formation, contribution to chimeras, germline transmission [see, e.g., Maherali and Hochedlinger, Cell Stem Cell. 3(6):595-605 (2008)], and tetraploid complementation.

[0266] Human iPSCs can be obtained using similar transduction methods, and the transcription factor trio, OCT4, SOX2, and NANOG, has been established as the core set of transcription factors that govern pluripotency; see, e.g., Budniatzky and Gepstein, Stem Cells Transl Med. 3(4):448-57 (2014); Barrett et al., Stem Cells Trans Med 3:1-6 sctm.2014-0121 (2014); Focosi et al., Blood Cancer Journal 4: e211 (2014); and references cited therein. The production of iPSCs can be achieved by the introduction of nucleic acid sequences encoding stem cell-associated genes into an adult, somatic cell, historically using viral vectors.

[0267] iPSCs can be generated or derived from terminally differentiated somatic cells, as well as from adult stem cells, or somatic stem cells. That is, a non-pluripotent progenitor cell can be rendered pluripotent or multipotent by reprogramming. In such instances, it may not be necessary to include as many reprogramming factors as required to reprogram a terminally differentiated cell. Further, reprogramming can be induced by the non-viral introduction of reprogramming factors, e.g., by introducing the proteins themselves, or by introducing nucleic acids that encode the reprogramming factors, or by introducing messenger RNAs that upon translation produce the reprogramming factors (see e.g., Warren et al., Cell Stem Cell, 7(5):618-30 (2010). Reprogramming can be achieved by introducing a combination of nucleic acids encoding stem cell-associated genes, including, for example, Oct-4 (also known as Oct-3/4 or Pouf51), Sox1, Sox2, Sox3, Sox 15, Sox 18, NANOG, Klf1, Klf2, Klf4, Klf5, NR5A2, c-Myc, 1-Myc, n-Myc, Rem2, Tert, and LIN28. Reprogramming using the methods and compositions described herein can further comprise introducing one or more of Oct-3/4, a member of the Sox family, a member of the Klf family, and a member of the Myc family to a somatic cell. The methods and compositions described herein can further comprise introducing one or more of each of Oct-4, Sox2, Nanog, c-MYC and Klf4 for reprogramming. As noted above, the exact method used for reprogramming is not necessarily critical to the methods and compositions described herein. However, where cells differentiated from the reprogrammed cells are to be used in, e.g., human therapy, in one aspect the reprogramming is not effected by a method that alters the genome. Thus, in such examples, reprogramming can be achieved, e.g., without the use of viral or plasmid vectors.

[0268] The efficiency of reprogramming (i.e., the number of reprogrammed cells) derived from a population of starting cells can be enhanced by the addition of various agents, e.g., small molecules, as shown by Shi et al., Cell-Stem Cell 2:525-528 (2008); Huangfu et al., Nature Biotechnology 26(7):795-797 (2008) and Marson et al., Cell-Stem Cell 3: 132-135 (2008). Thus, an agent or combination of agents that enhance the efficiency or rate of induced pluripotent stem cell production can be used in the production of patient-specific or disease-specific iPSCs. Some non-limiting examples of agents that enhance reprogramming efficiency include soluble Wnt, Wnt conditioned media, BIX-01294 (a G9a histone methyltransferase), PD0325901 (a MEK inhibitor), DNA methyltransferase inhibitors, histone deacetylase (HDAC) inhibitors, valproic acid, 5′-azacytidine, dexamethasone, suberoylanilide, hydroxamic acid (SAHA), vitamin C, and trichostatin (TSA), among others.

[0269] Other non-limiting examples of reprogramming enhancing agents include: Suberoylanilide Hydroxamic Acid (SAHA (e.g., MK0683, vorinostat) and other hydroxamic acids), BML-210, Depudecin (e.g., (−)-Depudecin), HC Toxin, Nullscript (4-(1,3-Dioxo-1H,3H-benzo[de]isoquinolin-2-yl)-N-hydroxybutanamide), Phenylbutyrate (e.g., sodium phenylbutyrate) and Valproic Acid ((VP A) and other short chain fatty acids), Scriptaid, Suramin Sodium, Trichostatin A (TSA), APHA Compound 8, Apicidin, Sodium Butyrate, pivaloyloxymethyl butyrate (Pivanex, AN-9), Trapoxin B, Chlamydocin, Depsipeptide (also known as FR901228 or FK228), benzamides (e.g., CI-994 (e.g., N-acetyl dinaline) and MS-27-275), MGCD0103, NVP-LAQ-824, CBHA (m-carboxycinnaminic acid bishydroxamic acid), JNJ16241199, Tubacin, A-161906, proxamide, oxamflatin, 3-C1-UCHA (e.g., 6-(3-chlorophenylureido)caproic hydroxamic acid), AOE (2-amino-8-oxo-9, 10-epoxydecanoic acid), CHAP31 and CHAP 50. Other reprogramming enhancing agents include, for example, dominant negative forms of the HDACs (e.g., catalytically inactive forms), siRNA inhibitors of the HDACs, and antibodies that specifically bind to the HDACs. Such inhibitors are available, e.g., from BIOMOL International, Fukasawa, Merck Biosciences, Novartis, Gloucester Pharmaceuticals, Titan Pharmaceuticals, MethylGene, and Sigma Aldrich.

[0270] To confirm the induction of pluripotent stem cells for use with the methods described herein, isolated clones can be tested for the expression of a stem cell marker. Such expression in a cell derived from a somatic cell identifies the cells as induced pluripotent stem cells. Stem cell markers can be selected from the non-limiting group including SSEA3, SSEA4, CD9, Nanog, Fbxl5, Ecat1, Esg1, Eras, Gdf3, Fgf4, Cripto, Dax1, Zpf296, Slc2a3, Rexl, Utfl, and Natl. In one case, for example, a cell that expresses Oct4 or Nanog is identified as pluripotent. Methods for detecting the expression of such markers can include, for example, RT-PCR and immunological methods that detect the presence of the encoded polypeptides, such as Western blots or flow cytometric analyses. Detection can involve not only RT-PCR, but can also include detection of protein markers. Intracellular markers may be best identified via RT-PCR, or protein detection methods such as immunocytochemistry, while cell surface markers are readily identified, e.g., by immunocytochemistry.

[0271] The pluripotent stem cell character of isolated cells can be confirmed by tests evaluating the ability of the iPSCs to differentiate into cells of each of the three germ layers. As one example, teratoma formation in nude mice can be used to evaluate the pluripotent character of the isolated clones. The cells can be introduced into nude mice and histology and/or immunohistochemistry can be performed on a tumor arising from the cells. The growth of a tumor comprising cells from all three germ layers, for example, further indicates that the cells are pluripotent stem cells.

### Hepatocytes

[0272] In some aspects, the genetically engineered human cells described herein are hepatocytes. A hepatocyte is a cell of the main parenchymal tissue of the liver. Hepatocytes make up 70-85% of the liver's mass. These cells are involved in: protein synthesis; protein storage; transformation of carbohydrates; synthesis of cholesterol, bile salts and phospholipids; detoxification, modification, and excretion of exogenous and endogenous substances; and initiation of formation and secretion of bile.

Creating Patient Specific iPSCs

[0273] One step of the ex vivo methods of the present disclosure can involve creating a patient specific iPS cell, patient specific iPS cells, or a patient specific iPS cell line. There are many established methods in the art for creating patient specific iPS cells, as described in Takahashi and Yamanaka 2006; Takahashi, Tanabe et al. 2007. For example, the creating step can comprise: a) isolating a somatic cell, such as a skin cell or fibroblast, from the patient; and b) introducing a set of pluripotency-associated genes into the somatic cell in order to induce the cell to become a pluripotent stem cell. The set of pluripotency-associated genes can be one or more of the genes selected from the group consisting of OCT4, SOX1, SOX2, SOX3, SOX15, SOX18, NANOG, KLF1, KLF2, KLF4, KLF5, c-MYC, n-MYC, REM2, TERT and LIN28.

### Performing a Biopsy or Aspirate of the Patient's Liver or Bone Marrow

[0274] A biopsy or aspirate is a sample of tissue or fluid taken from the body. There are many different kinds of biopsies or aspirates. Nearly all of them involve using a sharp tool to remove a small amount of tissue. If the biopsy will be on the skin or other sensitive area, numbing medicine can be applied first. A biopsy or aspirate may be performed according to any of the known methods in the art. For example, in a biopsy, a needle is injected into the liver through the skin of the belly, capturing the liver tissue. For example, in a bone marrow aspirate, a large needle is used to enter the pelvis bone to collect bone marrow.

### Isolating a Liver Specific Progenitor Cell or Primary Hepatocyte

[0275] Liver specific progenitor cells and primary hepatocytes may be isolated according to any method known in the art. For example, human hepatocytes are isolated from fresh surgical specimens. Healthy liver tissue is used to isolate hepatocytes by collagenase digestion. The obtained cell suspension is filtered through a 100-mm nylon mesh and sedimented by centrifugation at 50 g for 5 minutes, resuspended, and washed two to three times in cold wash medium. Human liver stem cells are obtained by culturing under stringent conditions of hepatocytes obtained from fresh liver preparations. Hepatocytes seeded on collagen-coated plates are cultured for 2 weeks. After 2 weeks, surviving cells are removed, and characterized for expression of stem cells markers (Herrera et al., STEM CELLS 2006; 24: 2840-2850).

### Isolating a Mesenchymal Stem Cell

[0276] Mesenchymal stem cells can be isolated according to any method known in the art, such as from a patient's bone marrow or peripheral blood. For example, marrow aspirate can be collected into a syringe with heparin. Cells can be washed and centrifuged on a Percoll. The cells can be cultured in Dulbecco's modified Eagle's medium (DMEM) (low glucose) containing 10% fetal bovine serum (FBS) (Pittinger M F, Mackay A M, Beck S C et al., Science 1999; 284:143-147).

### Genetically Modified Cells

[0277] The term “genetically modified cell” refers to a cell that comprises at least one genetic modification introduced by genome editing (e.g., using the CRISPR/Cas9 or CRISPR/Cpf1 system). In some ex vivo examples herein, the genetically modified cell can be genetically modified progenitor cell. In some in vivo examples herein, the genetically modified cell can be a genetically modified liver cell. A genetically modified cell comprising an exogenous genome-targeting nucleic acid and/or an exogenous nucleic acid encoding a genome-targeting nucleic acid is contemplated herein.

[0278] The term “control treated population” describes a population of cells that has been treated with identical media, viral induction, nucleic acid sequences, temperature, confluency, flask size, pH, etc., with the exception of the addition of the genome editing components. Any method known in the art can be used to measure transcription of ANGPTL4 gene or protein expression or activity, for example Western Blot analysis of the ANGPTL4 protein or quantifying ANGPTL4 mRNA.

[0279] The term “isolated cell” refers to a cell that has been removed from an organism in which it was originally found, or a descendant of such a cell. Optionally, the cell can be cultured in vitro, e.g., under defined conditions or in the presence of other cells. Optionally, the cell can be later introduced into a second organism or re-introduced into the organism from which it (or the cell from which it is descended) was isolated.

[0280] The term “isolated population” with respect to an isolated population of cells refers to a population of cells that has been removed and separated from a mixed or heterogeneous population of cells. In some cases, the isolated population can be a substantially pure population of cells, as compared to the heterogeneous population from which the cells were isolated or enriched. In some cases, the isolated population can be an isolated population of human progenitor cells, e.g., a substantially pure population of human progenitor cells, as compared to a heterogeneous population of cells comprising human progenitor cells and cells from which the human progenitor cells were derived.

[0281] The term “substantially enhanced,” with respect to a particular cell population, refers to a population of cells in which the occurrence of a particular type of cell is increased relative to pre-existing or reference levels, by at least 2-fold, at least 3-, at least 4-, at least 5-, at least 6-, at least 7-, at least 8-, at least 9, at least 10-, at least 20-, at least 50-, at least 100-, at least 400-, at least 1000-, at least 5000-, at least 20000-, at least 100000- or more fold depending, e.g., on the desired levels of such cells for ameliorating Dyslipidemias.

[0282] The term “substantially enriched” with respect to a particular cell population, refers to a population of cells that is at least about 10%, about 20%, about 30%, about 40%, about 50%, about 60%, about 70% or more with respect to the cells making up a total cell population.

[0283] The terms “substantially enriched” or “substantially pure” with respect to a particular cell population, refers to a population of cells that is at least about 75%, at least about 85%, at least about 90%, or at least about 95% pure, with respect to the cells making up a total cell population. That is, the terms “substantially pure” or “essentially purified,” with regard to a population of progenitor cells, refers to a population of cells that contain fewer than about 20%, about 15%, about 10%, about 9%, about 8%, about 7%, about 6%, about 5%, about 4%, about 3%, about 2%, about 1%, or less than 1%, of cells that are not progenitor cells as defined by the terms herein.

Differentiation of Genome-Edited iPSCs into Other Cell Types

[0284] Another step of the ex vivo methods of the present disclosure can comprise differentiating the genome-edited iPSCs into hepatocytes. The differentiating step may be performed according to any method known in the art. For example, hiPSC are differentiated into definitive endoderm using various treatments, including activin and B27 supplement (Life Technology). The definitive endoderm is further differentiated into hepatocyte, the treatment includes: FGF4, HGF, BMP2, BMP4, Oncostatin M, Dexametason, etc. (Duan et al, STEM CELLS; 2010; 28:674-686, Ma et al, STEM CELLS TRANSLATIONAL MEDICINE 2013; 2:409-419).

Differentiation of Genome-Edited Mesenchymal Stem Cells into Hepatocytes

[0285] Another step of the ex vivo methods of the present disclosure can comprise differentiating the genome-edited mesenchymal stem cells into hepatocytes. The differentiating step may be performed according to any method known in the art. For example, hMSC are treated with various factors and hormones, including insulin, transferrin, FGF4, HGF, bile acids (Sawitza I et al, Sci Rep. 2015; 5: 13320).

Implanting Cells into Patients

[0286] Another step of the ex vivo methods of the present disclosure can comprise implanting the hepatocytes into patients. This implanting step may be accomplished using any method of implantation known in the art. For example, the genetically modified cells may be injected directly in the patient's blood or otherwise administered to the patient.

[0287] Another step of the ex vivo methods of the disclosure involves implanting the progenitor cells or primary hepatocytes into patients. This implanting step may be accomplished using any method of implantation known in the art. For example, the genetically modified cells may be injected directly in the patient's liver or otherwise administered to the patient.

### III. Formulations and Delivery

### Pharmaceutically Acceptable Carriers

[0288] The ex vivo methods of administering progenitor cells to a subject contemplated herein involve the use of therapeutic compositions comprising progenitor cells.

[0289] Therapeutic compositions can contain a physiologically tolerable carrier together with the cell composition, and optionally at least one additional bioactive agent as described herein, dissolved or dispersed therein as an active ingredient. In some cases, the therapeutic composition is not substantially immunogenic when administered to a mammal or human patient for therapeutic purposes, unless so desired.

[0290] In general, the progenitor cells described herein can be administered as a suspension with a pharmaceutically acceptable carrier. One of skill in the art will recognize that a pharmaceutically acceptable carrier to be used in a cell composition will not include buffers, compounds, cryopreservation agents, preservatives, or other agents in amounts that substantially interfere with the viability of the cells to be delivered to the subject. A formulation comprising cells can include e.g., osmotic buffers that permit cell membrane integrity to be maintained, and optionally, nutrients to maintain cell viability or enhance engraftment upon administration. Such formulations and suspensions are known to those of skill in the art and/or can be adapted for use with the progenitor cells, as described herein, using routine experimentation.

[0291] A cell composition can also be emulsified or presented as a liposome composition, provided that the emulsification procedure does not adversely affect cell viability. The cells and any other active ingredient can be mixed with excipients that are pharmaceutically acceptable and compatible with the active ingredient, and in amounts suitable for use in the therapeutic methods described herein.

[0292] Additional agents included in a cell composition can include pharmaceutically acceptable salts of the components therein. Pharmaceutically acceptable salts include the acid addition salts (formed with the free amino groups of the polypeptide) that are formed with inorganic acids, such as, for example, hydrochloric or phosphoric acids, or such organic acids as acetic, tartaric, mandelic and the like. Salts formed with the free carboxyl groups can also be derived from inorganic bases, such as, for example, sodium, potassium, ammonium, calcium or ferric hydroxides, and such organic bases as isopropylamine, trimethylamine, 2-ethylamino ethanol, histidine, procaine and the like.

[0293] Physiologically tolerable carriers are well known in the art. Exemplary liquid carriers are sterile aqueous solutions that contain no materials in addition to the active ingredients and water, or contain a buffer such as sodium phosphate at physiological pH value, physiological saline or both, such as phosphate-buffered saline. Still further, aqueous carriers can contain more than one buffer salt, as well as salts such as sodium and potassium chlorides, dextrose, polyethylene glycol and other solutes. Liquid compositions can also contain liquid phases in addition to and to the exclusion of water. Exemplary of such additional liquid phases are glycerin, vegetable oils such as cottonseed oil, and water-oil emulsions. The amount of an active compound used in the cell compositions that is effective in the treatment of a particular disorder or condition can depend on the nature of the disorder or condition, and can be determined by standard clinical techniques.

### Guide RNA Formulation

[0294] Guide RNAs of the present disclosure can be formulated with pharmaceutically acceptable excipients such as carriers, solvents, stabilizers, adjuvants, diluents, etc., depending upon the particular mode of administration and dosage form. Guide RNA compositions can be formulated to achieve a physiologically compatible pH, and range from a pH of about 3 to a pH of about 11, about pH 3 to about pH 7, depending on the formulation and route of administration. In some cases, the pH can be adjusted to a range from about pH 5.0 to about pH 8. In some cases, the compositions can comprise a therapeutically effective amount of at least one compound as described herein, together with one or more pharmaceutically acceptable excipients. Optionally, the compositions can comprise a combination of the compounds described herein, or can include a second active ingredient useful in the treatment or prevention of bacterial growth (for example and without limitation, anti-bacterial or anti-microbial agents), or can include a combination of reagents of the present disclosure.

[0295] Suitable excipients include, for example, carrier molecules that include large, slowly metabolized macromolecules such as proteins, polysaccharides, polylactic acids, polyglycolic acids, polymeric amino acids, amino acid copolymers, and inactive virus particles. Other exemplary excipients can include antioxidants (for example and without limitation, ascorbic acid), chelating agents (for example and without limitation, EDTA), carbohydrates (for example and without limitation, dextrin, hydroxyalkylcellulose, and hydroxyalkylmethylcellulose), stearic acid, liquids (for example and without limitation, oils, water, saline, glycerol and ethanol), wetting or emulsifying agents, pH buffering substances, and the like.

### Delivery

[0296] Guide RNA polynucleotides (RNA or DNA) and/or endonuclease polynucleotide(s) (RNA or DNA) can be delivered by viral or non-viral delivery vehicles known in the art. Alternatively, endonuclease polypeptide(s) can be delivered by viral or non-viral delivery vehicles known in the art, such as electroporation or lipid nanoparticles. In further alternative aspects, the DNA endonuclease can be delivered as one or more polypeptides, either alone or pre-complexed with one or more guide RNAs, or one or more crRNA together with a tracrRNA.

[0297] Polynucleotides can be delivered by non-viral delivery vehicles including, but not limited to, nanoparticles, liposomes, ribonucleoproteins, positively charged peptides, small molecule RNA-conjugates, aptamer-RNA chimeras, and RNA-fusion protein complexes. Some exemplary non-viral delivery vehicles are described in Peer and Lieberman, Gene Therapy, 18: 1127-1133 (2011) (which focuses on non-viral delivery vehicles for siRNA that are also useful for delivery of other polynucleotides).

[0298] For polynucleotides of the disclosure, the formulation may be selected from any of those taught, for example, in International Application PCT/US2012/069610.

[0299] Polynucleotides, such as guide RNA, sgRNA, and mRNA encoding an endonuclease, may be delivered to a cell or a patient by a lipid nanoparticle (LNP).

[0300] A LNP refers to any particle having a diameter of less than 1000 nm, 500 nm, 250 nm, 200 nm, 150 nm, 100 nm, 75 nm, 50 nm, or 25 nm. Alternatively, a nanoparticle may range in size from 1-1000 nm, 1-500 nm, 1-250 nm, 25-200 nm, 25-100 nm, 35-75 nm, or 25-60 nm.

[0301] LNPs may be made from cationic, anionic, or neutral lipids. Neutral lipids, such as the fusogenic phospholipid DOPE or the membrane component cholesterol, may be included in LNPs as ‘helper lipids’ to enhance transfection activity and nanoparticle stability. Limitations of cationic lipids include low efficacy owing to poor stability and rapid clearance, as well as the generation of inflammatory or anti-inflammatory responses.

[0302] LNPs may also be comprised of hydrophobic lipids, hydrophilic lipids, or both hydrophobic and hydrophilic lipids.

[0303] Any lipid or combination of lipids that are known in the art can be used to produce a LNP. Examples of lipids used to produce LNPs are: DOTMA, DOSPA, DOTAP, DMRIE, DC-cholesterol, DOTAP-cholesterol, GAP-DMORIE-DPyPE, and GL67A-DOPE-DMPE-polyethylene glycol (PEG). Examples of cationic lipids are: 98N₁₂-5, C12-200, DLin-KC2-DMA (KC2), DLin-MC3-DMA (MC3), XTC, MD1, and 7C1. Examples of neutral lipids are: DPSC, DPPC, POPC, DOPE, and SM. Examples of PEG-modified lipids are: PEG-DMG, PEG-CerC14, and PEG-CerC20.

[0304] The lipids can be combined in any number of molar ratios to produce a LNP. In addition, the polynucleotide(s) can be combined with lipid(s) in a wide range of molar ratios to produce a LNP.

[0305] As stated previously, the site-directed polypeptide and genome-targeting nucleic acid can each be administered separately to a cell or a patient. On the other hand, the site-directed polypeptide can be pre-complexed with one or more guide RNAs, or one or more crRNA together with a tracrRNA. The pre-complexed material can then be administered to a cell or a patient. Such pre-complexed material is known as a ribonucleoprotein particle (RNP).

[0306] RNA is capable of forming specific interactions with RNA or DNA. While this property is exploited in many biological processes, it also comes with the risk of promiscuous interactions in a nucleic acid-rich cellular environment. One solution to this problem is the formation of ribonucleoprotein particles (RNPs), in which the RNA is pre-complexed with an endonuclease. Another benefit of the RNP is protection of the RNA from degradation.

[0307] The endonuclease in the RNP can be modified or unmodified. Likewise, the gRNA, crRNA, tracrRNA, or sgRNA can be modified or unmodified. Numerous modifications are known in the art and can be used.

[0308] The endonuclease and sgRNA can be generally combined in a 1:1 molar ratio. Alternatively, the endonuclease, crRNA and tracrRNA can be generally combined in a 1:1:1 molar ratio. However, a wide range of molar ratios can be used to produce a RNP.

### AAV (Adeno Associated Virus)

[0309] A recombinant adeno-associated virus (AAV) vector can be used for delivery. Techniques to produce rAAV particles, in which an AAV genome to be packaged that includes the polynucleotide to be delivered, rep and cap genes, and helper virus functions are provided to a cell are standard in the art. Production of rAAV typically requires that the following components are present within a single cell (denoted herein as a packaging cell): a rAAV genome, AAV rep and cap genes separate from (i.e., not in) the rAAV genome, and helper virus functions. The AAV rep and cap genes may be from any AAV serotype for which recombinant virus can be derived, and may be from a different AAV serotype than the rAAV genome ITRs, including, but not limited to, AAV serotypes described herein. Production of pseudotyped rAAV is disclosed in, for example, international patent application publication number WO 01/83692.

### AAV Serotypes

[0310] AAV particles packaging polynucleotides encoding compositions of the disclosure, e.g., endonucleases, donor sequences, or RNA guide molecules, of the present disclosure may comprise or be derived from any natural or recombinant AAV serotype. According to the present disclosure, the AAV particles may utilize or be based on a serotype selected from any of the following serotypes, and variants thereof including but not limited to AAV1, AAV10, AAV106.1/hu.37, AAV11, AAV114.3/hu.40, AAV12, AAV127.2/hu.41, AAV127.5/hu.42, AAV128.1/hu.43, AAV128.3/hu.44, AAV130.4/hu.48, AAV145.1/hu.53, AAV145.5/hu.54, AAV145.6/hu.55, AAV16.12/hu.11, AAV16.3, AAV16.8/hu.10, AAV161.10/hu.60, AAV161.6/hu.61, AAV1-7/rh.48, AAV1-8/rh.49, AAV2, AAV2.5T, AAV2-15/rh.62, AAV223.1, AAV223.2, AAV223.4, AAV223.5, AAV223.6, AAV223.7, AAV2-3/rh.61, AAV24.1, AAV2-4/rh.50, AAV2-5/rh.51, AAV27.3, AAV29.3/bb.1, AAV29.5/bb.2, AAV2G9, AAV-2-pre-miRNA-101, AAV3, AAV3.1/hu.6, AAV3.1/hu.9, AAV3-11/rh.53, AAV3-3, AAV33.12/hu.17, AAV33.4/hu.15, AAV33.8/hu.16, AAV3-9/rh.52, AAV3a, AAV3b, AAV4, AAV4-19/rh.55, AAV42.12, AAV42-10, AAV42-11, AAV42-12, AAV42-13, AAV42-15, AAV42-1b, AAV42-2, AAV42-3a, AAV42-3b, AAV42-4, AAV42-5a, AAV42-5b, AAV42-6b, AAV42-8, AAV42-aa, AAV43-1, AAV43-12, AAV43-20, AAV43-21, AAV43-23, AAV43-25, AAV43-5, AAV4-4, AAV44.1, AAV44.2, AAV44.5, AAV46.2/hu.28, AAV46.6/hu.29, AAV4-8/r11.64, AAV4-8/rh.64, AAV4-9/rh.54, AAV5, AAV52.1/hu.20, AAV52/hu.19, AAV5-22/rh.58, AAV5-3/rh.57, AAV54.1/hu.21, AAV54.2/hu.22, AAV54.4R/hu.27, AAV54.5/hu.23, AAV54.7/hu.24, AAV58.2/hu.25, AAV6, AAV 6.1, AAV 6.1.2, AAV6.2, AAV7, AAV7.2, AAV7.3/hu.7, AAV8, AAV-8b, AAV-8h, AAV9, AAV9.11, AAV9.13, AAV9.16, AAV9.24, AAV9.45, AAV9.47, AAV9.61, AAV9.68, AAV9.84, AAV9.9, AAVA3.3, AAVA3.4, AAVA3.5, AAVA3.7, AAV-b, AAVC1, AAVC2, AAVC5, AAVCh.5, AAVCh.5R1, AAVcy.2, AAVcy.3, AAVcy.4, AAVcy.5, AAVCy.5R1, AAVCy.5R2, AAVCy.5R3, AAVCy.5R4, AAVcy.6, AAV-DJ, AAV-DJ8, AAVF3, AAVF5, AAV-h, AAVH-1/hu.1, AAVH2, AAVH-5/hu.3, AAVH6, AAVhE1.1, AAVhER1.14, AAVhEr1.16, AAVhEr1.18, AAVhER1.23, AAVhEr1.35, AAVhEr1.36, AAVhEr1.5, AAVhEr1.7, AAVhEr1.8, AAVhEr2.16, AAVhEr2.29, AAVhEr2.30, AAVhEr2.31, AAVhEr2.36, AAVhEr2.4, AAVhEr3.1, AAVhu.1, AAVhu.10, AAVhu.11, AAVhu.11, AAVhu.12, AAVhu.13, AAVhu.14/9, AAVhu.15, AAVhu.16, AAVhu.17, AAVhu.18, AAVhu.19, AAVhu.2, AAVhu.20, AAVhu.21, AAVhu.22, AAVhu.23.2, AAVhu.24, AAVhu.25, AAVhu.27, AAVhu.28, AAVhu.29, AAVhu.29R, AAVhu.3, AAVhu.31, AAVhu.32, AAVhu.34, AAVhu.35, AAVhu.37, AAVhu.39, AAVhu.4, AAVhu.40, AAVhu.41, AAVhu.42, AAVhu.43, AAVhu.44, AAVhu.44R1, AAVhu.44R2, AAVhu.44R3, AAVhu.45, AAVhu.46, AAVhu.47, AAVhu.48, AAVhu.48R1, AAVhu.48R2, AAVhu.48R3, AAVhu.49, AAVhu.5, AAVhu.51, AAVhu.52, AAVhu.53, AAVhu.54, AAVhu.55, AAVhu.56, AAVhu.57, AAVhu.58, AAVhu.6, AAVhu.60, AAVhu.61, AAVhu.63, AAVhu.64, AAVhu.66, AAVhu.67, AAVhu.7, AAVhu.8, AAVhu.9, AAVhu.t 19, AAVLG-10/rh.40, AAVLG-4/rh.38, AAVLG-9/hu.39, AAVLG-9/hu.39, AAV-LK01, AAV-LK02, AAVLK03, AAV-LK03, AAV-LK04, AAV-LK05, AAV-LK06, AAV-LK07, AAV-LK08, AAV-LK09, AAV-LK10, AAV-LK11, AAV-LK12, AAV-LK13, AAV-LK14, AAV-LK15, AAV-LK17, AAV-LK18, AAV-LK19, AAVN721-8/rh.43, AAV-PAEC, AAV-PAEC11, AAV-PAEC12, AAV-PAEC2, AAV-PAEC4, AAV-PAEC6, AAV-PAEC7, AAV-PAEC8, AAVpi.1, AAVpi.2, AAVpi.3, AAVrh.10, AAVrh.12, AAVrh.13, AAVrh.13R, AAVrh.14, AAVrh.17, AAVrh.18, AAVrh.19, AAVrh.2, AAVrh.20, AAVrh.21, AAVrh.22, AAVrh.23, AAVrh.24, AAVrh.25, AAVrh.2R, AAVrh.31, AAVrh.32, AAVrh.33, AAVrh.34, AAVrh.35, AAVrh.36, AAVrh.37, AAVrh.37R2, AAVrh.38, AAVrh.39, AAVrh.40, AAVrh.43, AAVrh.44, AAVrh.45, AAVrh.46, AAVrh.47, AAVrh.48, AAVrh.48, AAVrh.48.1, AAVrh.48.1.2, AAVrh.48.2, AAVrh.49, AAVrh.50, AAVrh.51, AAVrh.52, AAVrh.53, AAVrh.54, AAVrh.55, AAVrh.56, AAVrh.57, AAVrh.58, AAVrh.59, AAVrh.60, AAVrh.61, AAVrh.62, AAVrh.64, AAVrh.64R1, AAVrh.64R2, AAVrh.65, AAVrh.67, AAVrh.68, AAVrh.69, AAVrh.70, AAVrh.72, AAVrh.73, AAVrh.74, AAVrh.8, AAVrh.8R, AAVrh8R, AAVrh8R A586R mutant, AAVrh8R R533A mutant, BAAV, BNP61 AAV, BNP62 AAV, BNP63 AAV, bovine AAV, caprine AAV, Japanese AAV 10, true type AAV (ttAAV), UPENN AAV 10, AAV-LK16, AAAV, AAV Shuffle 100-1, AAV Shuffle 100-2, AAV Shuffle 100-3, AAV Shuffle 100-7, AAV Shuffle 10-2, AAV Shuffle 10-6, AAV Shuffle 10-8, AAV SM 100-10, AAV SM 100-3, AAV SM 10-1, AAV SM 10-2, and/or AAV SM 10-8.

[0311] In some aspects, the AAV serotype may be, or have, a mutation in the AAV9 sequence as described by N Pulicherla et al. (Molecular Therapy 19(6):1070-1078 (2011)), such as but not limited to, AAV9.9, AAV9.11, AAV9.13, AAV9.16, AAV9.24, AAV9.45, AAV9.47, AAV9.61, AAV9.68, AAV9.84.

[0312] In some aspects, the AAV serotype may be, or have, a sequence as described in U.S. Pat. No. 6,156,303, such as, but not limited to, AAV3B (SEQ ID NO: 1 and 10 of U.S. Pat. No. 6,156,303), AAV6 (SEQ ID NO: 2, 7 and 11 of U.S. Pat. No. 6,156,303), AAV2 (SEQ ID NO: 3 and 8 of U.S. Pat. No. 6,156,303), AAV3A (SEQ ID NO: 4 and 9, of U.S. Pat. No. 6,156,303), or derivatives thereof.

[0313] In some aspects, the serotype may be AAVDJ or a variant thereof, such as AAVDJ8 (or AAV-DJ8), as described by Grimm et al. (Journal of Virology 82(12): 5887-5911 (2008). The amino acid sequence of AAVDJ8 may comprise two or more mutations in order to remove the heparin binding domain (HBD). As a non-limiting example, the AAV-DJ sequence described as SEQ ID NO: 1 in U.S. Pat. No. 7,588,772 may comprise two mutations: (1) R587Q where arginine (R; Arg) at amino acid 587 is changed to glutamine (Q; Gln) and (2) R590T where arginine (R; Arg) at amino acid 590 is changed to threonine (T; Thr). As another non-limiting example, may comprise three mutations: (1) K406R where lysine (K; Lys) at amino acid 406 is changed to arginine (R; Arg), (2) R587Q where arginine (R; Arg) at amino acid 587 is changed to glutamine (Q; Gln) and (3) R590T where arginine (R; Arg) at amino acid 590 is changed to threonine (T; Thr).

[0314] In some embodiments, the AAV serotype may be, or have, a sequence as described in International Publication No. WO2015121501, such as, but not limited to, true type AAV (ttAAV) (SEQ ID NO: 2 of WO2015121501), “UPenn AAV10” (SEQ ID NO: 8 of WO2015121501), “Japanese AAV10” (SEQ ID NO: 9 of WO2015121501), or variants thereof.

[0315] According to the present disclosure, AAV capsid serotype selection or use may be from a variety of species. In one example, the AAV may be an avian AAV (AAAV). The AAAV serotype may be, or have, a sequence as described in U.S. Pat. No. 9,238,800, such as, but not limited to, AAAV (SEQ ID NO: 1, 2, 4, 6, 8, 10, 12, and 14 of U.S. Pat. No. 9,238,800), or variants thereof.

[0316] In one example, the AAV may be a bovine AAV (BAAV). The BAAV serotype may be, or have, a sequence as described in U.S. Pat. No. 9,193,769, such as, but not limited to, BAAV (SEQ ID NO: 1 and 6 of U.S. Pat. No. 9,193,769), or variants thereof. The BAAV serotype may be or have a sequence as described in U.S. Pat. No. 7,427,396, such as, but not limited to, BAAV (SEQ ID NO: 5 and 6 of U.S. Pat. No. 7,427,396), or variants thereof.

[0317] In one example, the AAV may be a caprine AAV. The caprine AAV serotype may be, or have, a sequence as described in U.S. Pat. No. 7,427,396, such as, but not limited to, caprine AAV (SEQ ID NO: 3 of U.S. Pat. No. 7,427,396), or variants thereof.

[0318] In other examples, the AAV may be engineered as a hybrid AAV from two or more parental serotypes. In one example, the AAV may be AAV2G9 which comprises sequences from AAV2 and AAV9. The AAV2G9 AAV serotype may be, or have, a sequence as described in United States Patent Publication No. US20160017005.

[0319] In one example, the AAV may be a serotype generated by the AAV9 capsid library with mutations in amino acids 390-627 (VP1 numbering) as described by Pulicherla et al. (Molecular Therapy 19(6):1070-1078 (2011). The serotype and corresponding nucleotide and amino acid substitutions may be, but is not limited to, AAV9.1 (G1594C; D532H), AAV6.2 (T1418A and T1436X; V473D and I479K), AAV9.3 (T1238A; F413Y), AAV9.4 (T1250C and A1617T; F417S), AAV9.5 (A1235G, A1314T, A1642G, C1760T; Q412R, T548A, A587V), AAV9.6 (T1231A; F411D, AAV9.9 (G1203A, G1785T; W595C), AAV9.10 (A1500G, T1676C; M559T), AAV9.11 (A1425T, A1702C, A1769T; T568P, Q590L), AAV9.13 (A1369C, A1720T; N₄₅₇H, T574S), AAV9.14 (T1340A, T1362C, T1560C, G1713A; L447H), AAV9.16 (A1775T; Q592L), AAV9.24 (T1507C, T1521G; W503R), AAV9.26 (A1337G, A1769C; Y446C, Q590P), AAV9.33 (A1667C; D556A), AAV9.34 (A1534G, C1794T; N₅₁₂D), AAV9.35 (A1289T, T1450A, C1494T, A1515T, C1794A, G1816A; Q430L, Y484N, N₉₈K, V6061), AAV9.40 (A1694T, E565V), AAV9.41 (A1348T, T1362C; T450S), AAV9.44 (A1684C, A1701T, A1737G; N₅₆₂H, K567N), AAV9.45 (A1492T, C1804T; N₄₉₈Y, L602F), AAV9.46 (G1441C, T1525C, T1549G; G481R, W509R, L517V), 9.47 (G1241A, G1358A, A1669G, C1745T; S414N, G453D, K557E, T582I), AAV9.48 (C1445T, A1736T; P482L, Q579L), AAV9.50 (A1638T, C1683T, T1805A; Q546H, L602H), AAV9.53 (G1301A, A1405C, C1664T, G1811T; R134Q, S469R, A555V, G604V), AAV9.54 (C1531A, T1609A; L511I, L537M), AAV9.55 (T1605A; F535L), AAV9.58 (C1475T, C1579A; T492I, H527N), AAV.59 (T1336C; Y446H), AAV9.61 (A1493T; N₄₉₈₁), AAV9.64 (C1531A, A1617T; L511D, AAV9.65 (C1335T, T1530C, C1568A; A523D), AAV9.68 (C1510A; P504T), AAV9.80 (G1441A; G481R), AAV9.83 (C1402A, A1500T; P468T, E500D), AAV9.87 (T1464C, T1468C; S490P), AAV9.90 (A1196T; Y399F), AAV9.91 (T1316G, A1583T, C1782G, T1806C; L439R, K528I), AAV9.93 (A1273G, A1421G, A1638C, C1712T, G1732A, A1744T, A1832T; S425G, Q474R, Q546H, P571L, G578R, T582S, D611V), AAV9.94 (A1675T; M559L) and AAV9.95 (T1605A; F535L).

[0320] In one example, the AAV may be a serotype comprising at least one AAV capsid CD8+ T-cell epitope. As a non-limiting example, the serotype may be AAV1, AAV2 or AAV8.

[0321] In one example, the AAV may be a variant, such as PHP.A or PHP.B as described in Deverman. 2016. Nature Biotechnology. 34(2): 204-209.

[0322] In one example, the AAV may be a serotype selected from any of those found in SEQ ID NOs: 4,734-5,302 and in Table 2.

[0323] In one example, the AAV may be encoded by a sequence, fragment or variant as described in SEQ ID NOs: 4,734-5,302.

[0324] General principles of rAAV production are reviewed in, for example, Carter, 1992, Current Opinions in Biotechnology, 1533-539; and Muzyczka, 1992, Curr. Topics in Microbial. and Immunol., 158:97-129). Various approaches are described in Ratschin et al., Mol. Cell. Biol. 4:2072 (1984); Hermonat et al., Proc. Natl. Acad. Sci. USA, 81:6466 (1984); Tratschin et al., Mol. Cell. Biol. 5:3251 (1985); McLaughlin et al., J. Virol., 62:1963 (1988); and Lebkowski et al., 1988 Mol. Cell. Biol., 7:349 (1988). Samulski et al. (1989, J. Virol., 63:3822-3828); U.S. Pat. No. 5,173,414; WO 95/13365 and corresponding U.S. Pat. No. 5,658,776; WO 95/13392; WO 96/17947; PCT/US98/18600; WO 97/09441 (PCT/US96/14423); WO 97/08298 (PCT/US96/13872); WO 97/21825 (PCT/US96/20777); WO 97/06243 (PCT/FR96/01064); WO 99/11764; Perrin et al. (1995) Vaccine 13:1244-1250; Paul et al. (1993) Human Gene Therapy 4:609-615; Clark et al. (1996) Gene Therapy 3:1124-1132; U.S. Pat. Nos. 5,786,211; 5,871,982; and 6,258,595.

[0325] AAV vector serotypes can be matched to target cell types. For example, the following exemplary cell types can be transduced by the indicated AAV serotypes among others.

TABLE 2
Tissue/Cell Types and Serotypes

| Tissue/Cell Type | Serotype |
|---|---|
| Liver | AAV3, AAV5, AAV8, AAV9 |
| Skeletal muscle | AAV1, AAV7, AAV6, AAV8, AAV9 |
| Central nervous system | AAV5, AAV1, AAV4, AAV9 |
| RPE | AAV5, AAV4 |
| Photoreceptor cells | AAV5 |
| Lung | AAV9 |
| Heart | AAV8 |
| Pancreas | AAV8 |
| Kidney | AAV2, AAV8 |
| Hematopoietic stem cells | AAV6 |

[0326] In addition to adeno-associated viral vectors, other viral vectors can be used. Such viral vectors include, but are not limited to, lentivirus, alphavirus, enterovirus, pestivirus, baculovirus, herpesvirus, Epstein Barr virus, papovavirus, poxvirus, vaccinia virus, and herpes simplex virus.

[0327] In some aspects, Cas9 mRNA, sgRNA targeting one or two loci in ANGPTL4 gene, and donor DNA can each be separately formulated into lipid nanoparticles, or are all co-formulated into one lipid nanoparticle.

[0328] In some aspects, Cas9 mRNA can be formulated in a lipid nanoparticle, while sgRNA and donor DNA can be delivered in an AAV vector.

[0329] Options are available to deliver the Cas9 nuclease as a DNA plasmid, as mRNA or as a protein. The guide RNA can be expressed from the same DNA, or can also be delivered as an RNA. The RNA can be chemically modified to alter or improve its half-life, or decrease the likelihood or degree of immune response. The endonuclease protein can be complexed with the gRNA prior to delivery. Viral vectors allow efficient delivery; split versions of Cas9 and smaller orthologs of Cas9 can be packaged in AAV, as can donors for HDR. A range of non-viral delivery methods also exist that can deliver each of these components, or non-viral and viral methods can be employed in tandem. For example, nano-particles can be used to deliver the protein and guide RNA, while AAV can be used to deliver a donor DNA.

### IV. Dosing and Administration

[0330] The terms “administering,” “introducing” and “transplanting” are used interchangeably in the context of the placement of cells, e.g., progenitor cells, into a subject, by a method or route that results in at least partial localization of the introduced cells at a desired site, such as a site of injury or repair, such that a desired effect(s) is produced. The cells e.g., progenitor cells, or their differentiated progeny can be administered by any appropriate route that results in delivery to a desired location in the subject where at least a portion of the implanted cells or components of the cells remain viable. The period of viability of the cells after administration to a subject can be as short as a few hours, e.g., twenty-four hours, to a few days, to as long as several years, or even the life time of the patient, i.e., long-term engraftment. For example, in some aspects described herein, an effective amount of liver progenitor cells is administered via a systemic route of administration, such as an intraperitoneal or intravenous route.

[0331] The terms “individual,” “subject,” “host” and “patient” are used interchangeably herein and refer to any subject for whom diagnosis, treatment or therapy is desired. In some aspects, the subject is a mammal. In some aspects, the subject is a human being.

[0332] When provided prophylactically, progenitor cells described herein can be administered to a subject in advance of any symptom of Dyslipidemias. Accordingly, the prophylactic administration of a progenitor cell population serves to prevent Dyslipidemias.

[0333] A progenitor cell population being administered according to the methods described herein can comprise allogeneic progenitor cells obtained from one or more donors. Such progenitors may be of any cellular or tissue origin, e.g., liver, muscle, cardiac, etc. “Allogeneic” refers to a progenitor cell or biological samples comprising progenitor cells obtained from one or more different donors of the same species, where the genes at one or more loci are not identical. For example, a liver progenitor cell population being administered to a subject can be derived from one more unrelated donor subjects, or from one or more non-identical siblings. In some cases, syngeneic progenitor cell populations can be used, such as those obtained from genetically identical animals, or from identical twins. The progenitor cells can be autologous cells; that is, the progenitor cells are obtained or isolated from a subject and administered to the same subject, i.e., the donor and recipient are the same.

[0334] The term “effective amount” refers to the amount of a population of progenitor cells or their progeny needed to prevent or alleviate at least one or more signs or symptoms of Dyslipidemias, and relates to a sufficient amount of a composition to provide the desired effect, e.g., to treat a subject having Dyslipidemias. The term “therapeutically effective amount” therefore refers to an amount of progenitor cells or a composition comprising progenitor cells that is sufficient to promote a particular effect when administered to a typical subject, such as one who has or is at risk for Dyslipidemias. An effective amount would also include an amount sufficient to prevent or delay the development of a symptom of the disease, alter the course of a symptom of the disease (for example but not limited to, slow the progression of a symptom of the disease), or reverse a symptom of the disease. It is understood that for any given case, an appropriate “effective amount” can be determined by one of ordinary skill in the art using routine experimentation.

[0335] For use in the various aspects described herein, an effective amount of progenitor cells comprises at least 10² progenitor cells, at least 5×10² progenitor cells, at least 10³ progenitor cells, at least 5×10³ progenitor cells, at least 10⁴ progenitor cells, at least 5×10⁴ progenitor cells, at least 10⁵ progenitor cells, at least 2×10⁵ progenitor cells, at least 3×10⁵ progenitor cells, at least 4×10⁵ progenitor cells, at least 5×10⁵ progenitor cells, at least 6×10⁵ progenitor cells, at least 7×10⁵ progenitor cells, at least 8×10⁵ progenitor cells, at least 9×10⁵ progenitor cells, at least 1×10⁶ progenitor cells, at least 2×10⁶ progenitor cells, at least 3×10⁶ progenitor cells, at least 4×10⁶ progenitor cells, at least 5×10⁶ progenitor cells, at least 6×10⁶ progenitor cells, at least 7×10⁶ progenitor cells, at least 8×10⁶ progenitor cells, at least 9×10⁶ progenitor cells, or multiples thereof. The progenitor cells can be derived from one or more donors, or can be obtained from an autologous source. In some examples described herein, the progenitor cells can be expanded in culture prior to administration to a subject in need thereof.

[0336] Modest and incremental decreases in the levels of ANGPTL4 expressed in cells of patients having an ANGPTL4 related disorder can be beneficial for ameliorating one or more symptoms of the disease, for increasing long-term survival, and/or for reducing side effects associated with other treatments. Upon administration of such cells to human patients, the presence of progenitors that are producing decreased levels of ANGPTL4 is beneficial. In some cases, effective treatment of a subject gives rise to at least about 3%, 5% or 7% reduction in ANGPTL4 level relative to total ANGPTL4 in the treated subject. In some examples, the reduction in ANGPTL4 will be at least about 10% of total ANGPTL4. In some examples, the reduction in ANGPTL4 will be at least about 20% to 30% of total ANGPTL4. Similarly, the introduction of even relatively limited subpopulations of cells having significantly reduced levels of ANGPTL4 can be beneficial in various patients because in some situations normalized cells will have a selective advantage relative to diseased cells. However, even modest levels of progenitors with reduced levels of ANGPTL4 can be beneficial for ameliorating one or more aspects of Dyslipidemias in patients. In some examples, about 10%, about 20%, about 30%, about 40%, about 50%, about 60%, about 70%, about 80%, about 90% or more of the liver progenitors in patients to whom such cells are administered are producing decreased levels of ANGPTL4.

[0337] “Administered” refers to the delivery of a progenitor cell composition into a subject by a method or route that results in at least partial localization of the cell composition at a desired site. A cell composition can be administered by any appropriate route that results in effective treatment in the subject, i.e. administration results in delivery to a desired location in the subject where at least a portion of the composition delivered, i.e. at least 1×10⁴ cells are delivered to the desired site for a period of time.

[0338] In one aspect of the method, the pharmaceutical composition may be administered via a route such as, but not limited to, enteral (into the intestine), gastroenteral, epidural (into the dura matter), oral (by way of the mouth), transdermal, peridural, intracerebral (into the cerebrum), intracerebroventricular (into the cerebral ventricles), epicutaneous (application onto the skin), intradermal, (into the skin itself), subcutaneous (under the skin), nasal administration (through the nose), intravenous (into a vein), intravenous bolus, intravenous drip, intraarterial (into an artery), intramuscular (into a muscle), intracardiac (into the heart), intraosseous infusion (into the bone marrow), intrathecal (into the spinal canal), intraperitoneal, (infusion or injection into the peritoneum), intravesical infusion, intravitreal, (through the eye), intracavernous injection (into a pathologic cavity) intracavitary (into the base of the penis), intravaginal administration, intrauterine, extra-amniotic administration, transdermal (diffusion through the intact skin for systemic distribution), transmucosal (diffusion through a mucous membrane), transvaginal, insufflation (snorting), sublingual, sublabial, enema, eye drops (onto the conjunctiva), in ear drops, auricular (in or by way of the ear), buccal (directed toward the cheek), conjunctival, cutaneous, dental (to a tooth or teeth), electro-osmosis, endocervical, endosinusial, endotracheal, extracorporeal, hemodialysis, infiltration, interstitial, intra-abdominal, intra-amniotic, intra-articular, intrabiliary, intrabronchial, intrabursal, intracartilaginous (within a cartilage), intracaudal (within the cauda equine), intracisternal (within the cisterna magna cerebellomedularis), intracorneal (within the cornea), dental intracornal, intracoronary (within the coronary arteries), intracorporus cavernosum (within the dilatable spaces of the corporus cavernosa of the penis), intradiscal (within a disc), intraductal (within a duct of a gland), intraduodenal (within the duodenum), intradural (within or beneath the dura), intraepidermal (to the epidermis), intraesophageal (to the esophagus), intragastric (within the stomach), intragingival (within the gingivae), intraileal (within the distal portion of the small intestine), intralesional (within or introduced directly to a localized lesion), intraluminal (within a lumen of a tube), intralymphatic (within the lymph), intramedullary (within the marrow cavity of a bone), intrameningeal (within the meninges), intramyocardial (within the myocardium), intraocular (within the eye), intraovarian (within the ovary), intrapericardial (within the pericardium), intrapleural (within the pleura), intraprostatic (within the prostate gland), intrapulmonary (within the lungs or its bronchi), intrasinal (within the nasal or periorbital sinuses), intraspinal (within the vertebral column), intrasynovial (within the synovial cavity of a joint), intratendinous (within a tendon), intratesticular (within the testicle), intrathecal (within the cerebrospinal fluid at any level of the cerebrospinal axis), intrathoracic (within the thorax), intratubular (within the tubules of an organ), intratumor (within a tumor), intratympanic (within the aurus media), intravascular (within a vessel or vessels), intraventricular (within a ventricle), iontophoresis (by means of electric current where ions of soluble salts migrate into the tissues of the body), irrigation (to bathe or flush open wounds or body cavities), laryngeal (directly upon the larynx), nasogastric (through the nose and into the stomach), occlusive dressing technique (topical route administration which is then covered by a dressing which occludes the area), ophthalmic (to the external eye), oropharyngeal (directly to the mouth and pharynx), parenteral, percutaneous, periarticular, peridural, perineural, periodontal, rectal, respiratory (within the respiratory tract by inhaling orally or nasally for local or systemic effect), retrobulbar (behind the pons or behind the eyeball), intramyocardial (entering the myocardium), soft tissue, subarachnoid, subconjunctival, submucosal, topical, transplacental (through or across the placenta), transtracheal (through the wall of the trachea), transtympanic (across or through the tympanic cavity), ureteral (to the ureter), urethral (to the urethra), vaginal, caudal block, diagnostic, nerve block, biliary perfusion, cardiac perfusion, photopheresis and spinal.

[0339] Modes of administration include injection, infusion, instillation, and/or ingestion. “Injection” includes, without limitation, intravenous, intramuscular, intra-arterial, intrathecal, intraventricular, intracapsular, intraorbital, intracardiac, intradermal, intraperitoneal, transtracheal, subcutaneous, subcuticular, intraarticular, sub capsular, subarachnoid, intraspinal, intracerebro spinal, and intrasternal injection and infusion. In some examples, the route is intravenous. For the delivery of cells, administration by injection or infusion can be made.

[0340] The cells can be administered systemically. The phrases “systemic administration,” “administered systemically”, “peripheral administration” and “administered peripherally” refer to the administration of a population of progenitor cells other than directly into a target site, tissue, or organ, such that it enters, instead, the subject's circulatory system and, thus, is subject to metabolism and other like processes.

[0341] The efficacy of a treatment comprising a composition for the treatment of Dyslipidemias can be determined by the skilled clinician. However, a treatment is considered “effective treatment,” if any one or all of the signs or symptoms of, as but one example, levels of ANGPTL4 are altered in a beneficial manner (e.g., decreased by at least 10%), or other clinically accepted symptoms or markers of disease are improved or ameliorated. Efficacy can also be measured by failure of an individual to worsen as assessed by hospitalization or need for medical interventions (e.g., progression of the disease is halted or at least slowed). Methods of measuring these indicators are known to those of skill in the art and/or described herein. Treatment includes any treatment of a disease in an individual or an animal (some non-limiting examples include a human, or a mammal) and includes: (1) inhibiting the disease, e.g., arresting, or slowing the progression of symptoms; or (2) relieving the disease, e.g., causing regression of symptoms; and (3) preventing or reducing the likelihood of the development of symptoms.

[0342] The treatment according to the present disclosure can ameliorate one or more symptoms associated with Dyslipidemias by decreasing or altering the amount of ANGPTL4 in the individual.

### V. Features and Properties of the Angiopoietin-Like 4 (ANGPTL4) Gene

[0343] ANGPTL4 has been associated with diseases and disorders such as, but not limited to, Adenocarcinoma, Amyotrophic Lateral Sclerosis, Anoxia, Arteriosclerosis, Congenital arteriovenous malformation, Arthritis, Rheumatoid Arthritis, Atherosclerosis, Malignant neoplasm of breast, Mucinous Adenocarcinoma, Renal Cell Carcinoma, Cardiovascular Diseases, Colorectal Carcinoma, Coronary Arteriosclerosis, Coronary heart disease, Fatty Liver, Hallervorden-Spatz Syndrome, Hyperinsulinism, Hyperphagia, Hypothyroidism, Ischemia, Kidney Neoplasm, Liver neoplasms, Lymphatic Metastasis, Malignant neoplasm of stomach, Metabolic Diseases, Neoplasm Invasiveness, Neoplasm Metastasis, Nephrotic Syndrome, Obesity, Degenerative polyarthritis, Osteosarcoma, Ovarian Carcinoma, Pancreatic Neoplasm, Peripheral Neuropathy, Pheochromocytoma, Kaposi Sarcoma, Schizophrenia, Weight Gain, Malignant neoplasm of tongue, Secondary malignant neoplasm of lung, Secondary malignant neoplasm of bone, Tumor Progression, Hemangioblastoma, Metastatic malignant neoplasm to brain, bone destruction, Dyslipidemias, Renal glomerular disease, Impaired glucose tolerance, Conventional (Clear Cell) Renal Cell Carcinoma, Dermatitis verrucosa, Arteriovenous hemangioma, Adenocarcinoma of colon, Squamous cell carcinoma of tongue, Secondary malignant neoplasm of liver, Metabolic Syndrome X, Malignant Glioma, Tongue Carcinoma, Osteosarcoma of bone, Carcinogenesis, Breast Carcinoma, Secondary malignant neoplasm of lymph node, Stomach Carcinoma, Malignant neoplasm of kidney, Endothelial dysfunction, Schimke immunoosseous dysplasia, Vascular inflammations, Collagen-Induced Hurthle Cell Tumor, Arthritis, Malignant neoplasm of ovary, Squamous cell carcinoma of the head and neck, Sarcoma, Mammary Neoplasms, Tumor Angiogenesis, Colorectal Cancer, Hypoprebetalipoproteinemia Acanthocytosis, Retinitis Pigmentosa And Pallidal Degeneration, Coronary Artery Disease, Liver carcinoma, Steatohepatitis, and Weight Gain Adverse Event. Editing of the ANGPTL4 gene using any of the methods described herein may be used to treat, prevent and/or mitigate the symptoms of the diseases and disorders described herein.

[0344] The activity of ANGPTL4 is most highly expressed in the liver and ANGPTL4 is associated with dyslipidemias, low plasma triglyceride levels, regulator of angiogenesis and modulate tumorigenesis, and severe diabetic retinopathy. Decreased expression of this gene has also been associated with type 2 diabetes. ANGPTL4 has been associated with both proliferative diabetic retinopathy and nonproliferative diabetic retinopathy. Nonproliferative diabetic retinopathy affects proliferation, migration, and tubule formation of endothelial cells and increases vascular leakage. Nonproliferative diabetic retinopathy affects up to 80% of patient who have had diabetes for 20 or more years. Common symptoms of nonproliferative diabetic retinopathy includes blurred vision and darkened or distorted images that differ in each eye. Current treatment of nonproliferative diabetic retinopathy includes light mask treatment to increase oxygen circulation to the retina. Another option for treating nonproliferative diabetic retinopathy levels is reduction of blood pressure.

[0345] Dyslipidemias is a genetic disease characterized by elevated level of lipids in the blood that contributes to the development of clogged arteries (atherosclerosis). These lipids include plasma cholesterol, triglycerides, or high-density lipoprotein. Dyslipidemia increases the risk of heart attacks, stroke, or other circulatory concerns. Current management includes lifestyle changes such as exercise and dietary modifications as well as use of lipid-lowering drugs such as statins. Non-statin lipid-lowering drugs include bile acid sequestrants, cholesterol absorption inhibitors, drugs for homozygous familial hypercholesteremia, fibrates, nicotinic acid, omega-3 fatty acids and/or combination products. Treatment options usually depend on the specific lipid abnormality, although different lipid abnormalities often coexist. Treatment of children is more challenging as dietary changes may be difficult to implement and lipid-lowering therapies have not been proven effective.

[0346] In one embodiment, the target tissue for the compositions and methods described herein is liver tissue.

[0347] In one embodiment, the gene is Angiopoietin-Like 4 (ANGPTL4) which may also be referred to as Hepatic Fibrinogen/Angiopoietin-Related Protein, Peroxisome Proliferator-Activated Receptor (PPAR) Gamma Induced Angiopoietin-Related Protein, Hepatic Angiopoietin-Related Protein, PPARG Angiopoietin Related Protein, Fasting-Induced Adipose Factor, HFARP, Arp4, and PGAR. ANGPTL4 has a cytogenetic location of 19p13.2 and the genomic coordinate are on Chromosome 19 on the forward strand at position 8,363,289-8,374,373. The nucleotide sequence of ANGPTL4 is shown as SEQ ID NO: 5303. CTD-255008.7 is the gene upstream of ANGPTL4 on the forward strand and RAB11B is the gene downstream of ANGPTL4 on the forward strand. ELAVL1 is the gene located on the reverse strand opposite of ANGPTL4. ANGPTL4 has a NCBI gene ID of 51129, Uniprot ID of Q9BY76 and Ensembl Gene ID of ENSG00000167772. ANGPTL4 has 908 SNPs, 35 introns and 37 exons. The exon ID from Ensembl and the start/stop sites of the introns and exons are shown in Table 3.

TABLE 3
Introns and Exons for ANGPTL4

| Exon No. | Exon ID | Start/Stop | Intron No. | Intron based on Exon ID | Start/Stop |
|---|---|---|---|---|---|
| EX1 | ENSE00003651459 | 8,364,169- | INT1 | Intron ENSE00003651459- | 8,364,640- |
| | | 8,364,639 | | ENSE00003586590 | 8,365,953 |
| EX2 | ENSE00003586590 | 8,365,954- | INT2 | Intron ENSE00003586590- | 8,366,065- |
| | | 8,366,064 | | ENSE00003552173 | 8,366,201 |
| EX3 | ENSE00003552173 | 8,366,202- | INT3 | Intron ENSE00003552173- | 8,366,320- |
| | | 8,366,319 | | ENSE00003568477 | 8,371,055 |
| EX4 | ENSE00003568477 | 8,371,056- | INT4 | Intron ENSE00003568477- | 8,371,152- |
| | | 8,371,151 | | ENSE00003527075 | 8,371,240 |
| EX5 | ENSE00003527075 | 8,371,241- | INT5 | Intron ENSE00003527075- | 8,371,523- |
| | | 8,371,522 | | ENSE00003142386 | 8,373,704 |
| EX6 | ENSE00003142386 | 8,373,705- | INT6 | Intron ENSE00001300958- | 8,364,640- |
| | | 8,374,331 | | ENSE00003586590 | 8,365,953 |
| EX7 | ENSE00001300958 | 8,364,151- | INT7 | Intron ENSE00003586590- | 8,366,065- |
| | | 8,364,639 | | ENSE00003552173 | 8,366,201 |
| EX8 | ENSE00003486893 | 8,369,219- | INT8 | Intron ENSE00003552173- | 8,366,320- |
| | | 8,369,332 | | ENSE00003486893 | 8,369,218 |
| EX9 | ENSE00001250851 | 8,373,705- | INT9 | Intron ENSE00003486893- | 8,369,333- |
| | | 8,374,373 | | ENSE00003568477 | 8,371,055 |
| EX10 | ENSE00003099281 | 8,363,411- | INT10 | Intron ENSE00003568477- | 8,371,152- |
| | | 8,363,850 | | ENSE00003527075 | 8,371,240 |
| EX11 | ENSE00003168131 | 8,364,206- | INT11 | Intron ENSE000035270756- | 8,371,523- |
| | | 8,364,578 | | ENSE00001250851 | 8,373,704 |
| EX12 | ENSE00002984907 | 8,363,299- | INT12 | Intron ENSE00003099281- | 8,363,851- |
| | | 8,363,362 | | ENSE00003168131 | 8,364,205 |
| EX13 | ENSE00002993391 | 8,363,774- | INT13 | Intron ENSE00002984907- | 8,363,363- |
| | | 8,363,850 | | ENSE00002993391 | 8,363,773 |
| EX14 | ENSE00003210560 | 8,364,206- | INT14 | Intron ENSE00002993391- | 8,363,851- |
| | | 8,364,635 | | ENSE00003210560 | 8,364,205 |
| EX15 | ENSE00003030882 | 8,363,289- | INT15 | Intron ENSE00003030882- | 8,363,363- |
| | | 8,363,362 | | ENSE00003204867 | 8,363,776 |
| EX16 | ENSE00003204867 | 8,363,777- | INT16 | Intron ENSE00003204867- | 8,363,851- |
| | | 8,363,850 | | ENSE00002981412 | 8,364,205 |
| EX17 | ENSE00002981412 | 8,364,206- | INT17 | Intron ENSE00003158610- | 8,364,640- |
| | | 8,364,609 | | ENSE00003586590 | 8,365,953 |
| EX18 | ENSE00003158610 | 8,364,398- | INT18 | Intron ENSE00003586590- | 8,366,065- |
| | | 8,364,639 | | ENSE00003131038 | 8,374,192 |
| EX19 | ENSE00003131038 | 8,374,193- | INT19 | Intron ENSE00003527075- | 8,371,523- |
| | | 8,374,370 | | ENSE00003059606 | 8,373,704 |
| EX20 | ENSE00003651459 | 8,364,169- | INT20 | Intron ENSE00003059606- | 8,373,956- |
| | | 8,364,639 | | ENSE00002993580 | 8,374,015 |
| EX21 | ENSE00003059606 | 8,373,705- | INT21 | Intron ENSE00003517799- | 8,364,552- |
| | | 8,373,955 | | ENSE00003474923 | 8,364,621 |
| EX22 | ENSE00002993580 | 8,374,016- | INT22 | Intron ENSE00003474923- | 8,364,640- |
| | | 8,374,370 | | ENSE00003612258 | 8,365,953 |
| EX23 | ENSE00003517799 | 8,364,156- | INT23 | Intron ENSE00003612258- | 8,366,065- |
| | | 8,364,551 | | ENSE00003521123 | 8,366,201 |
| EX24 | ENSE00003474923 | 8,364,622- | INT24 | Intron ENSE00003521123- | 8,366,320- |
| | | 8,364,639 | | ENSE00003627348 | 8,369,218 |
| EX25 | ENSE00003612258 | 8,365,954- | INT25 | Intron ENSE00003627348- | 8,369,333- |
| | | 8,366,064 | | ENSE00003609775 | 8,371,055 |
| EX26 | ENSE00003521123 | 8,366,202- | INT26 | Intron ENSE00003609775- | 8,371,152- |
| | | 8,366,319 | | ENSE00003641569 | 8,371,240 |
| EX27 | ENSE00003627348 | 8,369,219- | INT27 | Intron ENSE00003641569- | 8,371,523- |
| | | 8,369,332 | | ENSE00003484985 | 8,373,704 |
| EX28 | ENSE00003609775 | 8,371,056- | INT28 | Intron ENSE00003563344- | 8,364,640- |
| | | 8,371,151 | | ENSE00003496499 | 8,365,953 |
| EX29 | ENSE00003641569 | 8,371,241- | INT29 | Intron ENSE00003496499- | 8,366,065- |
| | | 8,371,522 | | ENSE00003693433 | 8,366,201 |
| EX30 | ENSE00003484985 | 8,373,705- | INT30 | Intron ENSE00003693433- | 8,366,320- |
| | | 8,374,288 | | ENSE00003627348 | 8,369,218 |
| EX31 | ENSE00003563344 | 8,364,169- | INT31 | Intron ENSE00003627348- | 8,369,333- |
| | | 8,364,639 | | ENSE00003074838 | 8,371,055 |
| EX32 | ENSE00003496499 | 8,365,954- | INT32 | Intron ENSE00002977234- | 8,364,640- |
| | | 8,366,064 | | ENSE00003496499 | 8,365,953 |
| EX33 | ENSE00003693433 | 8,366,202- | INT33 | Intron ENSE00003693433- | 8,366,320- |
| | | 8,366,319 | | ENSE00003063934 | 8,371,055 |
| EX34 | ENSE00003074838 | 8,371,056- | INT34 | Intron ENSE00002984907- | 8,363,363- |
| | | 8,371,262 | | ENSE00003496499 | 8,365,953 |
| EX35 | ENSE00002977234 | 8,364,166- | INT35 | Intron ENSE00003627348- | 8,369,333- |
| | | 8,364,639 | | ENSE00003136492 | 8,371,055 |
| EX36 | ENSE00003063934 | 8,371,056- | | | |
| | | 8,371,261 | | | |
| EX37 | ENSE00003136492 | 8,371,056- | | | |
| | | 8,371,230 | | | |

[0348] Table 4 provides information on all of the transcripts for the ANGPTL4 gene based on the Ensembl database. Provided in Table 4 are the transcript ID from Ensembl and corresponding NCBI RefSeq ID for the transcript, the translation ID from Ensembl and the corresponding NCBI RefSeq ID for the protein, the biotype of the transcript sequence as classified by Ensembl and the exons and introns in the transcript based on the information in Table 3.

TABLE 4
Transcript Information for ANGPTL4

| | | | Protein | | | |
|---|---|---|---|---|---|---|
| | Transcript | | NCBI | | | |
| Transcript | NCBI | Translation | RefSeq | Sequence | Exon ID from | Intron ID from |
| ID | RefSeq ID | ID | ID | Biotype | Table 3 | Table 3 |
| ENST00000593998.5 | — | ENSP00000472551 | — | Nonsense | EX1, EX2, EX3, | INT1, INT2, INT4, |
| | | | | mediated | EX4, EX5, EX8, | INT8, INT9, INT19, |
| | | | | decay | EX21, EX22 | INT20 |
| ENST00000595079.5 | — | ENSP00000473025 | — | Nonsense | EX23, EX24, | INT21, INT22, |
| | | | | mediated | EX25, EX26, | INT23, INT24, |
| | | | | decay | EX27, EX28, | INT25, INT26, |
| | | | | | EX29, EX30 | INT27 |
| ENST00000301455.6 | NM_139314 | ENSP00000301455 | NP_647475 | Protein | EX2, EX3, EX4, | INT2, INT4, INT6, |
| | | | | coding | EX5, EX7, EX8, | INT8, INT9, INT11 |
| | | | | | EX9 | |
| ENST00000393962.6 | NM_001039667 | ENSP00000377534 | NP_001034756 | Protein | EX1, EX2, EX3, | INT1, INT2, INT3, |
| | | | | coding | EX4, EX5, EX6 | INT4, INT5 |
| ENST00000601770.1 | — | ENSP00000471345 | — | Protein | EX10, EX11 | INT12 |
| | | | | coding | | |
| ENST00000599192.5 | — | ENSP00000473090 | — | Protein | EX12, EX13, | INT13, INT14 |
| | | | | coding | EX14 | |
| ENST00000601886.1 | — | ENSP00000470307 | — | Protein | EX15, EX16, | INT15, INT16 |
| | | | | coding | EX17 | |
| ENST00000594875.1 | — | ENSP00000472869 | — | Protein | EX2, EX18, | INT17, INT18 |
| | | | | coding | EX19 | |
| ENST00000594348.1 | — | — | — | Retained | EX27, EX31, | INT28, INT29, |
| | | | | intron | EX32, EX33, | INT30, INT31 |
| | | | | | EX34 | |
| ENST00000598255.5 | — | — | — | Retained | EX32, EX33, | INT29, INT32, |
| | | | | intron | EX35, EX36 | INT33 |
| ENST00000597137.5 | — | — | — | Retained | EX12, EX27, | INT29, INT30, |
| | | | | intron | EX32, EX33, | INT34, INT35 |
| | | | | | EX37 | |

[0349] ANGPTL4 has 908 SNPs and the NCBI rs number and/or UniProt VAR number for this ANGPTL4 gene are rs1044250, rs2010871, rs2278236, rs3183953, rs3210978, rs3210979, rs3210980, rs3210981, rs3210982, rs4076317, rs7255436, rs8103829, rs10403918, rs10404615, rs10405340, rs10407466, rs10410586, rs10419021, rs11544610, rs11544611, rs11544612, rs11671291, rs11672433, rs12608519, rs12609364, rs12974716, rs12981217, rs12985515, rs28457642, rs33922743, rs34408253, rs34409703, rs34569037, rs34592831, rs34600793, rs34604919, rs35036141, rs35061979, rs35137994, rs35318686, rs35571542, rs36020364, rs58110091, rs59504871, rs59881559, rs61097060, rs71175844, rs71175845, rs72996747, rs73925320, rs73925321, rs73925322, rs73925323, rs74515352, rs76427759, rs76725574, rs76800055, rs77412070, rs77439987, rs77709814, rs77938377, rs79270436, rs80053726, rs111469695, rs111862083, rs111896377, rs112388943, rs112449784, rs112625532, rs112711963, rs112739024, rs112822112, rs112995875, rs113190871, rs113205228, rs113446232, rs113536886, rs113604983, rs113605673, rs113782571, rs114140751, rs114466156, rs115053761, rs115598253, rs115905780, rs116576031, rs116808569, rs116843064, rs117108806, rs117456113, rs117661189, rs117760119, rs117920931, rs118059146, rs137979566, rs138211096, rs138460722, rs138659378, rs138696635, rs139295817, rs139430426, rs139826338, rs139991923, rs139998264, rs140083349, rs140293585, rs140608642, rs140640857, rs140710941, rs140744493, rs141084256, rs141476988, rs141831018, rs141849130, rs141887872, rs142425932, rs143147728, rs143385506, rs143479307, rs143596863, rs143620129, rs144249274, rs144513924, rs145223309, rs145815588, rs145836344, rs146264942, rs146313907, rs146875081, rs146879059, rs146942305, rs147475768, rs147732674, rs147775362, rs147946080, rs148185134, rs148294821, rs148773347, rs148825938, rs149480839, rs149535838, rs578161217, rs587777517, rs745355866, rs578155510, rs578106822, rs577794015, rs577683372, rs577445388, rs577419152, rs577407041, rs577226091, rs577198392, rs576356545, rs576293992, rs576267013, rs576182168, rs575701155, rs575623167, rs575414693, rs575303746, rs574885694, rs574811101, rs574336620, rs574323582, rs574286276, rs574149049, rs573784947, rs573715358, rs573674636, rs573202488, rs573092895, rs572942625, rs572903620, rs572864571, rs572220137, rs571822427, rs571739094, rs571736569, rs548215531, rs548020198, rs548018510, rs548006644, rs547981454, rs547567158, rs547545579, rs546995038, rs546571341, rs545843393, rs545653176, rs545242730, rs545154847, rs545082727, rs545069613, rs544839860, rs544595009, rs376627891, rs376574356, rs376536780, rs376530345, rs376510163, rs376468420, rs376394055, rs376387254, rs376357875, rs751495371, rs751529988, rs751594959, rs751688415, rs751754980, rs751916372, rs376328756, rs376327761, rs376010695, rs375985409, rs375844570, rs375651388, rs375602410, rs375339090, rs375060464, rs374923101, rs374733561, rs374371487, rs374173687, rs374112292, rs374107672, rs374102774, rs374033592, rs373988883, rs373961655, rs373896493, rs373788196, rs373782424, rs373652079, rs373598394, rs373597368, rs373549197, rs373460471, rs373435482, rs373408048, rs373250836, rs373081558, rs373044593, rs372986082, rs372947448, rs372887943, rs372784090, rs372765322, rs372723650, rs372653113, rs372393315, rs372330978, rs372167639, rs372084670, rs371783266, rs371591957, rs371435952, rs370978676, rs370940440, rs370743736, rs370652586, rs370609928, rs370389963, rs370365380, rs370364569, rs370266861, rs370227494, rs370024099, rs370009734, rs369992745, rs369987040, rs369766671, rs369741166, rs369670581, rs369493168, rs369491394, rs369402168, rs369293464, rs369195097, rs369127747, rs369100580, rs369070552, rs368978546, rs368973748, rs368972947, rs368548994, rs368465469, rs368451562, rs368429780, rs368388293, rs368376759, rs368197529, rs368163095, rs368039480, rs367741798, rs367658171, rs202043145, rs202038040, rs201770562, rs201723781, rs201051543, rs201026877, rs200985871, rs200977507, rs200918932, rs200564277, rs200552010, rs200311316, rs200231114, rs200197036, rs200103926, rs199968545, rs199657129, rs762467580, rs762618223, rs762653036, rs762675357, rs762718985, rs762959339, rs763231211, rs763357381, rs763423702, rs763692209, rs763844262, rs763936498, rs764119177, rs199564844, rs192797137, rs192735332, rs192277193, rs192019697, rs191228041, rs191176825, rs191116083, rs190124261, rs189697096, rs189453683, rs189160695, rs189039241, rs188791711, rs188417596, rs188377889, rs187620880, rs186754194, rs186372928, rs185991068, rs184688830, rs184662869, rs184418952, rs184272415, rs183496427, rs182975938, rs182966593, rs182667386, rs181710838, rs181509171, rs181297901, rs151160001, rs151099448, rs150929819, rs150590640, rs150323938, rs150107136, rs150015993, rs150000287, rs745565367, rs768484549, rs745591536, rs745718138, rs745778800, rs745824395, rs745874949, rs746114692, rs746114842, rs746226153, rs746388842, rs746446625, rs746450280, rs746583639, rs746836957, rs746859256, rs746949358, rs746993217, rs747123651, rs747281592, rs747326940, rs747597003, rs747685487, rs747719288, rs747743645, rs747779826, rs747940485, rs747943066, rs748220039, rs748389626, rs748447910, rs748459315, rs748564829, rs748605385, rs748671142, rs748871006, rs748971072, rs571484337, rs571410658, rs571346609, rs571212669, rs570922459, rs570859875, rs570693970, rs570321458, rs570089916, rs569969146, rs569902721, rs569539753, rs569456219, rs569426719, rs569158664, rs568940181, rs568707187, rs568624939, rs568194180, rs568147306, rs567825222, rs567701211, rs566786911, rs566546788, rs566396320, rs566359636, rs565723492, rs565710166, rs565649339, rs565612903, rs565610978, rs564807785, rs564508947, rs564048738, rs563801019, rs563715530, rs563408134, rs563116750, rs562679010, rs562410250, rs562366524, rs561937723, rs561866264, rs561517050, rs561492424, rs561476457, rs561402585, rs561316361, rs560477827, rs560449868, rs559467845, rs559356885, rs558847919, rs558824775, rs558740076, rs558731591, rs558609878, rs558477027, rs558280430, rs557880920, rs557796680, rs557692663, rs557665532, rs557323891, rs557160330, rs557133449, rs556971203, rs556927255, rs556892249, rs556768919, rs556732933, rs556606496, rs556535720, rs556409219, rs555630095, rs555358335, rs555274215, rs555162667, rs555029682, rs554722430, rs554677296, rs554389583, rs554342647, rs554305598, rs553574877, rs553136370, rs553023848, rs552933209, rs552631089, rs552411566, rs552374363, rs551690472, rs551158887, rs550880702, rs550588376, rs550480671, rs550274777, rs549705441, rs549486572, rs549340582, rs549302857, rs548981208, rs548854697, rs548820918, rs548584031, rs548257009, rs749083717, rs749164838, rs749291750, rs749374489, rs749378028, rs749459035, rs749538025, rs749580602, rs749700391, rs749817478, rs749881519, rs750042693, rs750108927, rs750402576, rs750436115, rs750570618, rs750739671, rs544445624, rs544354903, rs543969685, rs543868361, rs543746203, rs543375556, rs543068483, rs542948988, rs542645367, rs542084407, rs541953344, rs541918431, rs541727459, rs541624403, rs541584992, rs541095748, rs540830411, rs540797164, rs540627576, rs540593601, rs540231431, rs539961163, rs539802272, rs539779534, rs539339103, rs539338202, rs539078315, rs538966577, rs538717548, rs538595978, rs538554190, rs538196297, rs538105024, rs537946426, rs537894715, rs537567274, rs537310571, rs536972613, rs536734443, rs536397015, rs536312979, rs536217715, rs535943947, rs535804231, rs535518369, rs535504650, rs535383853, rs534737418, rs534513746, rs534435434, rs534265654, rs533607742, rs533599788, rs533566419, rs533507337, rs533438541, rs533285976, rs533201887, rs532915280, rs532896676, rs532881239, rs532722600, rs532298618, rs531933760, rs531895900, rs531459224, rs530919343, rs530132494, rs530041183, rs530029296, rs529867384, rs529627406, rs529528365, rs529369646, rs529138023, rs528542780, rs528042596, rs527840376, rs527394500, rs527305732, rs397969670, rs386806578, rs377705072, rs377591321, rs377342328, rs377338425, rs377318488, rs377280817, rs376983647, rs376807083, rs376708909, rs751055396, rs751129667, rs751166545, rs751194272, rs751249880, rs751265588, rs751370400, rs751429634, rs752039272, rs752209196, rs752602300, rs752633223, rs752715503, rs758886725, rs758900275, rs758964428, rs759186510, rs759240085, rs759309735, rs759347146, rs759490625, rs759927604, rs759967878, rs760125334, rs760359340, rs760640256, rs760839946, rs760847575, rs760870765, rs760992944, rs761098321, rs761178782, rs761257386, rs761295713, rs761366263, rs761583091, rs761592536, rs761664225, rs761691527, rs761768072, rs761873948, rs761889493, rs761926858, rs761945791, rs761950596, rs762127484, rs762259435, rs762270935, rs762319805, rs762357241, rs762399326, rs762440462, rs764172514, rs764188393, rs764349572, rs764437255, rs764558601, rs764559506, rs764563916, rs764754051, rs764915999, rs765085157, rs765119888, rs765134618, rs765268915, rs765373026, rs768545199, rs768583490, rs768645905, rs768754343, rs768775458, rs768868188, rs768872819, rs768928584, rs769179227, rs769261817, rs769509680, rs769637836, rs769769905, rs769961302, rs770048173, rs770114461, rs770212821, rs770222749, rs770347271, rs770601171, rs770612433, rs770642532, rs770680793, rs771012831, rs771118296, rs771211700, rs771338375, rs771371331, rs771449485, rs771453273, rs771520428, rs771783684, rs771807474, rs771829106, rs771904358, rs771935375, rs772128054, rs772174229, rs772229037, rs772264777, rs772487616, rs772634881, rs772684930, rs772778640, rs772780624, rs772806118, rs772861267, rs773012073, rs773121891, rs773147922, rs773172996, rs773454416, rs773466374, rs773686683, rs773846071, rs773898763, rs773916176, rs774028182, rs774092063, rs774154527, rs774402134, rs774532632, rs774693784, rs774693998, rs774924877, rs774981801, rs774989734, rs775074055, rs775257978, rs775389766, rs775612741, rs775667046, rs775839013, rs775927845, rs776000614, rs776032253, rs776244357, rs776303264, rs776398253, rs776402882, rs776431827, rs776638002, rs776693616, rs776816866, rs776876737, rs776996548, rs777016329, rs777171576, rs777541240, rs777847610, rs777901836, rs777913903, rs778076080, rs778125140, rs778161135, rs778289533, rs778401052, rs778475399, rs778620967, rs778638369, rs778967804, rs778999061, rs779095513, rs779272884, rs779484845, rs779488814, rs779514049, rs779545823, rs779567401, rs779840915, rs780121474, rs780200649, rs780416714, rs780461101, rs780576421, rs780654441, rs780812775, rs780959712, rs781178060, rs781244444, rs781261070, rs781401609, rs781480545, rs781518361, VAR 032642, VAR 032645, VAR 032647, VAR 032649, VAR 032651, VAR 032653, VAR 032654, VAR 032655, VAR 032657, VAR 032658, VAR 032659, VAR 032660, VAR 032663, VAR 032664, VAR 032665, VAR 032666, VAR 032667, VAR 032668, rs752950532, rs753061344, rs753196795, rs753224836, rs753330042, rs753353884, rs753382552, rs753558114, rs753593917, rs753793844, rs753864074, rs754020483, rs754022089, rs754028435, rs754257420, rs754325406, rs754441151, rs754546802, rs754818405, rs755264528, rs755298834, rs755548817, rs755647037, rs755664193, rs755737249, rs755746801, rs755956389, rs755959138, rs756065414, rs756125612, rs756335494, rs756440132, rs756648967, rs756656067, rs756672782, rs756678209, rs756775279, rs756854279, rs756862277, rs756972923, rs757180447, rs757369139, rs757379628, rs757440743, rs757456587, rs757481474, rs757615320, rs757722789, rs757849242, rs757915624, rs758001199, rs758054099, rs758160705, rs758382862, rs758390511, rs758394227, rs758471942, rs758610618, rs765430634, rs765497773, rs765669768, rs765813017, rs766049937, rs766070708, rs766213750, rs766217470, rs766384776, rs766397887, rs766875709, rs767011433, rs767069589, rs767192627, rs767441712, rs767518522, rs767605224, rs767717361, rs767768173, rs768024878, rs768135470, rs768188475, rs768253869, rs768362135, rs768365112, and rs768374046.

[0350] In one embodiment, the guide RNA used in the disclosure may comprise at least one 20 nucleotide (nt) target nucleic acid sequence listed in Table 5. Provided in Table 5 are the gene symbol and the sequence identifier of the gene (Gene SEQ ID NO), the gene sequence including 1-5 kilobase pairs upstream and/or downstream of the target gene (Extended Gene SEQ ID NO), and the 20 nt target nucleic acid sequence (20 nt Target Sequence SEQ ID NO). In the sequence listing the respective target gene, the strand for targeting the gene (noted by a (+) strand or (−) strand in the sequence listing), the associated PAM type and the PAM sequence are described for each of the 20 nt target nucleic acid sequences (SEQ ID NO: 5305-19006). It is understood in the art that the spacer sequence, where “T” is “U,” may be an RNA sequence corresponding to the 20 nt sequences listed in Table 5.

TABLE 5
Nucleic Acid Sequences

| Gene | Gene | Extended Gene | 20 nt Spacer |
|---|---|---|---|
| Symbol | SEQ ID NO | SEQ ID NO | SEQ ID NO |
| ANGPTL4 | 5303 | 5304 | 5305-19006 |

[0351] In one embodiment, the guide RNA used in the disclosure may comprise at least one spacer sequence that, where “T” is “U”, may be an RNA sequence corresponding to a 20 nucleotide (nt) target sequence such as, but not limited to, any of SEQ ID NO: 5305-19006.

[0352] In one embodiment, the guide RNA used in the disclosure may comprise at least one spacer sequence which, where “T” is “U,” is an RNA sequence corresponding to the 20 nt sequences such as, but not limited to, any of SEQ ID NO: 5305-19006.

[0353] In one embodiment, a guide RNA may comprise a 20 nucleotide (nt) target nucleic acid sequence associated with the PAM type such as, but not limited to, NAAAAC, NNAGAAW, NNGRRT, NNNNGHTT, NRG, or YTN. As a non-limiting example, the 20 nt target nucleic acid sequence for a specific target gene and a specific PAM type may be, where “T” is “U,” the RNA sequence corresponding to any one of the 20 nt nucleic acid sequences in Table 6.

TABLE 6
Nucleic Acid Sequences by PAM Type

| | PAM: | | PAM: | | PAM: | PAM: |
|---|---|---|---|---|---|---|
| | NAAAAC | PAM: | NNGRRT | PAM: | NRG | YTN |
| | Spacer | NNAGAAW | Spacer | NNNNGHTT | Spacer | Spacer |
| Gene | SEQ ID | Spacer SEQ | SEQ ID | Spacer SEQ | SEQ ID | SEQ ID |
| Symbol | NO | ID NO | NO | ID NO | NO | NO |
| ANGPTL4 | 5305-5341 | 5342-5459 | 5460-6105 | 6106-6467 | 6468-13243 | 13244-19006 |

[0354] In one embodiment, a guide RNA may comprise a 22 nucleotide (nt) target nucleic acid sequence associated with the YTN PAM type. As a non-limiting example, the 22 nt target nucleic acid sequence for a specific target gene may comprise a 20 nt core sequence where the 20 nt core sequence, where “T” is “U,” may be the RNA sequence corresponding to SEQ ID NO: 13244-19006. As another non-limiting example, the 22 nt target nucleic acid sequence for a specific target gene may comprise a core sequence where the core sequence, where “T” is “U,” may be a fragment, segment or region of the RNA sequence corresponding to any of SEQ ID NO: 13244-19006.

### VI. Other Therapeutic Approaches

[0355] Gene editing can be conducted using nucleases engineered to target specific sequences. To date there are four major types of nucleases: meganucleases and their derivatives, zinc finger nucleases (ZFNs), transcription activator like effector nucleases (TALENs), and CRISPR-Cas9 nuclease systems. The nuclease platforms vary in difficulty of design, targeting density and mode of action, particularly as the specificity of ZFNs and TALENs is through protein-DNA interactions, while RNA-DNA interactions primarily guide Cas9.

[0356] CRISPR endonucleases, such as Cas9, can be used in the methods of the present disclosure. However, the teachings described herein, such as therapeutic target sites, could be applied to other forms of endonucleases, such as ZFNs, TALENs, HEs, or MegaTALs, or using combinations of nucleases. However, in order to apply the teachings of the present disclosure to such endonucleases, one would need to, among other things, engineer proteins directed to the specific target sites.

[0357] Additional binding domains can be fused to the Cas9 protein to increase specificity. The target sites of these constructs would map to the identified gRNA specified site, but would require additional binding motifs, such as for a zinc finger domain. In the case of Mega-TAL, a meganuclease can be fused to a TALE DNA-binding domain. The meganuclease domain can increase specificity and provide the cleavage. Similarly, inactivated or dead Cas9 (dCas9) can be fused to a cleavage domain and require the sgRNA/Cas9 target site and adjacent binding site for the fused DNA-binding domain. This likely would require some protein engineering of the dCas9, in addition to the catalytic inactivation, to decrease binding without the additional binding site.

### Zinc Finger Nucleases

[0358] Zinc finger nucleases (ZFNs) are modular proteins comprised of an engineered zinc finger DNA binding domain linked to the catalytic domain of the type II endonuclease FokI. Because FokI functions only as a dimer, a pair of ZFNs must be engineered to bind to cognate target “half-site” sequences on opposite DNA strands and with precise spacing between them to enable the catalytically active FokI dimer to form. Upon dimerization of the FokI domain, which itself has no sequence specificity per se, a DNA double-strand break is generated between the ZFN half-sites as the initiating step in genome editing.

[0359] The DNA binding domain of each ZFN is typically comprised of 3-6 zinc fingers of the abundant Cys2-His2 architecture, with each finger primarily recognizing a triplet of nucleotides on one strand of the target DNA sequence, although cross-strand interaction with a fourth nucleotide also can be important. Alteration of the amino acids of a finger in positions that make key contacts with the DNA alters the sequence specificity of a given finger. Thus, a four-finger zinc finger protein will selectively recognize a 12 bp target sequence, where the target sequence is a composite of the triplet preferences contributed by each finger, although triplet preference can be influenced to varying degrees by neighboring fingers. An important aspect of ZFNs is that they can be readily re-targeted to almost any genomic address simply by modifying individual fingers, although considerable expertise is required to do this well. In most applications of ZFNs, proteins of 4-6 fingers are used, recognizing 12-18 bp respectively. Hence, a pair of ZFNs will typically recognize a combined target sequence of 24-36 bp, not including the typical 5-7 bp spacer between half-sites. The binding sites can be separated further with larger spacers, including 15-17 bp. A target sequence of this length is likely to be unique in the human genome, assuming repetitive sequences or gene homologs are excluded during the design process. Nevertheless, the ZFN protein-DNA interactions are not absolute in their specificity so off-target binding and cleavage events do occur, either as a heterodimer between the two ZFNs, or as a homodimer of one or the other of the ZFNs. The latter possibility has been effectively eliminated by engineering the dimerization interface of the FokI domain to create “plus” and “minus” variants, also known as obligate heterodimer variants, which can only dimerize with each other, and not with themselves. Forcing the obligate heterodimer prevents formation of the homodimer. This has greatly enhanced specificity of ZFNs, as well as any other nuclease that adopts these FokI variants.

[0360] A variety of ZFN-based systems have been described in the art, modifications thereof are regularly reported, and numerous references describe rules and parameters that are used to guide the design of ZFNs; see, e.g., Segal et al., Proc Natl Acad Sci USA 96(6):2758-63 (1999); Dreier B et al., J Mol Biol. 303(4):489-502 (2000); Liu Q et al., J Biol Chem. 277(6):3850-6 (2002); Dreier et al., J Biol Chem 280(42):35588-97 (2005); and Dreier et al., J Biol Chem. 276(31):29466-78 (2001).

### Transcription Activator-Like Effector Nucleases (TALENs)

[0361] TALENs represent another format of modular nucleases whereby, as with ZFNs, an engineered DNA binding domain is linked to the FokI nuclease domain, and a pair of TALENs operate in tandem to achieve targeted DNA cleavage. The major difference from ZFNs is the nature of the DNA binding domain and the associated target DNA sequence recognition properties. The TALEN DNA binding domain derives from TALE proteins, which were originally described in the plant bacterial pathogen Xanthomonas sp. TALEs are comprised of tandem arrays of 33-35 amino acid repeats, with each repeat recognizing a single basepair in the target DNA sequence that is typically up to 20 bp in length, giving a total target sequence length of up to 40 bp. Nucleotide specificity of each repeat is determined by the repeat variable diresidue (RVD), which includes just two amino acids at positions 12 and 13. The bases guanine, adenine, cytosine and thymine are predominantly recognized by the four RVDs: Asn-Asn, Asn-Ile, His-Asp and Asn-Gly, respectively. This constitutes a much simpler recognition code than for zinc fingers, and thus represents an advantage over the latter for nuclease design. Nevertheless, as with ZFNs, the protein-DNA interactions of TALENs are not absolute in their specificity, and TALENs have also benefitted from the use of obligate heterodimer variants of the FokI domain to reduce off-target activity.

[0362] Additional variants of the FokI domain have been created that are deactivated in their catalytic function. If one half of either a TALEN or a ZFN pair contains an inactive FokI domain, then only single-strand DNA cleavage (nicking) will occur at the target site, rather than a DSB. The outcome is comparable to the use of CRISPR/Cas9 or CRISPR/Cpf1 “nickase” mutants in which one of the Cas9 cleavage domains has been deactivated. DNA nicks can be used to drive genome editing by HDR, but at lower efficiency than with a DSB. The main benefit is that off-target nicks are quickly and accurately repaired, unlike the DSB, which is prone to NHEJ-mediated mis-repair.

[0363] A variety of TALEN-based systems have been described in the art, and modifications thereof are regularly reported; see, e.g., Boch, Science 326(5959):1509-12 (2009); Mak et al., Science 335(6069):716-9 (2012); and Moscou et al., Science 326(5959):1501 (2009). The use of TALENs based on the “Golden Gate” platform, or cloning scheme, has been described by multiple groups; see, e.g., Cermak et al., Nucleic Acids Res. 39(12):e82 (2011); Li et al., Nucleic Acids Res. 39(14):6315-25(2011); Weber et al., PLoS One. 6(2):e16765 (2011); Wang et al., J Genet Genomics 41(6):339-47, Epub 2014 May 17 (2014); and Cermak T et al., Methods Mol Biol. 1239:133-59 (2015).

### Homing Endonucleases

[0364] Homing endonucleases (HEs) are sequence-specific endonucleases that have long recognition sequences (14-44 base pairs) and cleave DNA with high specificity—often at sites unique in the genome. There are at least six known families of HEs as classified by their structure, including GIY-YIG, His-Cis box, H—N—H, PD-(D/E)xK, and Vsr-like that are derived from a broad range of hosts, including eukarya, protists, bacteria, archaea, cyanobacteria and phage. As with ZFNs and TALENs, HEs can be used to create a DSB at a target locus as the initial step in genome editing. In addition, some natural and engineered HEs cut only a single strand of DNA, thereby functioning as site-specific nickases. The large target sequence of HEs and the specificity that they offer have made them attractive candidates to create site-specific DSBs.

[0365] A variety of HE-based systems have been described in the art, and modifications thereof are regularly reported; see, e.g., the reviews by Steentoft et al., Glycobiology 24(8):663-80 (2014); Belfort and Bonocora, Methods Mol Biol. 1123:1-26 (2014); Hafez and Hausner, Genome 55(8):553-69 (2012); and references cited therein.

### MegaTAL/Tev-mTALEN/MegaTev

[0366] As further examples of hybrid nucleases, the MegaTAL platform and Tev-mTALEN platform use a fusion of TALE DNA binding domains and catalytically active HEs, taking advantage of both the tunable DNA binding and specificity of the TALE, as well as the cleavage sequence specificity of the HE; see, e.g., Boissel et al., NAR 42: 2591-2601 (2014); Kleinstiver et al., G3 4:1155-65 (2014); and Boissel and Scharenberg, Methods Mol. Biol. 1239: 171-96 (2015).

[0367] In a further variation, the MegaTev architecture is the fusion of a meganuclease (Mega) with the nuclease domain derived from the GIY-YIG homing endonuclease I-TevI (Tev). The two active sites are positioned ˜30 bp apart on a DNA substrate and generate two DSBs with non-compatible cohesive ends; see, e.g., Wolfs et al., NAR 42, 8816-29 (2014). It is anticipated that other combinations of existing nuclease-based approaches will evolve and be useful in achieving the targeted genome modifications described herein.

dCas9-FokI or dCpf1-FokI and Other Nucleases

[0368] Combining the structural and functional properties of the nuclease platforms described above offers a further approach to genome editing that can potentially overcome some of the inherent deficiencies. As an example, the CRISPR genome editing system typically uses a single Cas9 endonuclease to create a DSB. The specificity of targeting is driven by a 20 or 24 nucleotide sequence in the guide RNA that undergoes Watson-Crick base-pairing with the target DNA (plus an additional 2 bases in the adjacent NAG or NGG PAM sequence in the case of Cas9 from S. pyogenes). Such a sequence is long enough to be unique in the human genome, however, the specificity of the RNA/DNA interaction is not absolute, with significant promiscuity sometimes tolerated, particularly in the 5′ half of the target sequence, effectively reducing the number of bases that drive specificity. One solution to this has been to completely deactivate the Cas9 or Cpf1 catalytic function—retaining only the RNA-guided DNA binding function—and instead fusing a FokI domain to the deactivated Cas9; see, e.g., Tsai et al., Nature Biotech 32: 569-76 (2014); and Guilinger et al., Nature Biotech. 32: 577-82 (2014). Because FokI must dimerize to become catalytically active, two guide RNAs are required to tether two FokI fusions in close proximity to form the dimer and cleave DNA. This essentially doubles the number of bases in the combined target sites, thereby increasing the stringency of targeting by CRISPR-based systems.

[0369] As further example, fusion of the TALE DNA binding domain to a catalytically active HE, such as I-TevI, takes advantage of both the tunable DNA binding and specificity of the TALE, as well as the cleavage sequence specificity of I-TevI, with the expectation that off-target cleavage can be further reduced.

### VII. Kits

[0370] The present disclosure provides kits for carrying out the methods described herein. A kit can include one or more of a genome-targeting nucleic acid, a polynucleotide encoding a genome-targeting nucleic acid, a site-directed polypeptide, a polynucleotide encoding a site-directed polypeptide, and/or any nucleic acid or proteinaceous molecule necessary to carry out the aspects of the methods described herein, or any combination thereof.

[0371] A kit can comprise: (1) a vector comprising a nucleotide sequence encoding a genome-targeting nucleic acid, (2) the site-directed polypeptide or a vector comprising a nucleotide sequence encoding the site-directed polypeptide, and (3) a reagent for reconstitution and/or dilution of the vector(s) and or polypeptide.

[0372] A kit can comprise: (1) a vector comprising (i) a nucleotide sequence encoding a genome-targeting nucleic acid, and (ii) a nucleotide sequence encoding the site-directed polypeptide; and (2) a reagent for reconstitution and/or dilution of the vector.

[0373] In any of the above kits, the kit can comprise a single-molecule guide genome-targeting nucleic acid. In any of the above kits, the kit can comprise a double-molecule genome-targeting nucleic acid. In any of the above kits, the kit can comprise two or more double-molecule guides or single-molecule guides. The kits can comprise a vector that encodes the nucleic acid targeting nucleic acid.

[0374] In any of the above kits, the kit can further comprise a polynucleotide to be inserted to effect the desired genetic modification.

[0375] Components of a kit can be in separate containers, or combined in a single container.

[0376] Any kit described above can further comprise one or more additional reagents, where such additional reagents are selected from a buffer, a buffer for introducing a polypeptide or polynucleotide into a cell, a wash buffer, a control reagent, a control vector, a control RNA polynucleotide, a reagent for in vitro production of the polypeptide from DNA, adaptors for sequencing and the like. A buffer can be a stabilization buffer, a reconstituting buffer, a diluting buffer, or the like. A kit can also comprise one or more components that can be used to facilitate or enhance the on-target binding or the cleavage of DNA by the endonuclease, or improve the specificity of targeting.

[0377] In addition to the above-mentioned components, a kit can further comprise instructions for using the components of the kit to practice the methods. The instructions for practicing the methods can be recorded on a suitable recording medium. For example, the instructions can be printed on a substrate, such as paper or plastic, etc. The instructions can be present in the kits as a package insert, in the labeling of the container of the kit or components thereof (i.e., associated with the packaging or subpackaging), etc. The instructions can be present as an electronic storage data file present on a suitable computer readable storage medium, e.g. CD-ROM, diskette, flash drive, etc. In some instances, the actual instructions are not present in the kit, but means for obtaining the instructions from a remote source (e.g. via the Internet), can be provided. An example of this case is a kit that comprises a web address where the instructions can be viewed and/or from which the instructions can be downloaded. As with the instructions, this means for obtaining the instructions can be recorded on a suitable substrate.

### VIII. Specific Methods and Compositions

[0378] Accordingly, the present disclosure relates in particular to the following non-limiting methods according to the disclosure: In a first method, Method 1, the present disclosure provides a method for editing an Angiopoietin-like 4 (ANGPTL4) gene in a cell by genome editing comprising the step of introducing into the cell one or more deoxyribonucleic acid (DNA) endonucleases to effect one or more single-strand breaks (SSBs) or double-strand breaks (DSBs) within or near the ANGPTL4 gene or ANGPTL4 regulatory elements that results in one or more permanent insertions, deletions or mutations of at least one nucleotide within or near the ANGPTL4 gene, thereby reducing or eliminating the expression or function of ANGPTL4 gene products.

[0379] In another method, Method 2, the present disclosure provides an ex vivo method for treating a patient having an ANGPTL4 related condition or disorder comprising the steps of: isolating a hepatocyte from a patient; editing within or near an Angiopoietin-like 4 (ANGPTL4) gene or other DNA sequences that encode regulatory elements of the ANGPTL4 gene of the hepatocyte; and implanting the genome-edited hepatocyte into the patient.

[0380] In another method, Method 3, the present disclosure provides the method of Method 2, wherein the editing step comprises introducing into the hepatocyte one or more deoxyribonucleic acid (DNA) endonucleases to effect one or more single-strand breaks (SSBs) or double-strand breaks (DSBs) within or near the ANGPTL4 gene or ANGPTL4 regulatory elements that results in one or more permanent insertions, deletions or mutations of at least one nucleotide within or near the ANGPTL4 gene, thereby reducing or eliminating the expression or function of ANGPTL4 gene products.

[0381] In another method, Method 4, the present disclosure provides an ex vivo method for treating a patient having an ANGPTL4 related condition or disorder comprising the steps of: creating a patient specific induced pluripotent stem cell (iPSC); editing within or near an Angiopoietin-like 4 (ANGPTL4) gene or other DNA sequences that encode regulatory elements of the ANGPTL4 gene of the iPSC; differentiating the genome-edited iPSC into a hepatocyte; and implanting the hepatocyte into the patient.

[0382] In another method, Method 5, the present disclosure provides the method of Method 4, wherein the editing step comprises introducing into the iPSC one or more deoxyribonucleic acid (DNA) endonucleases to effect one or more single-strand breaks (SSBs) or double-strand breaks (DSBs) within or near the ANGPTL4 gene or ANGPTL4 regulatory elements that results in one or more permanent insertions, deletions or mutations of at least one nucleotide within or near the ANGPTL4 gene, thereby reducing or eliminating the expression or function of ANGPTL4 gene products.

[0383] In another method, Method 6, the present disclosure provides an ex vivo method for treating a patient having an ANGPTL4 related condition or disorder comprising the steps of: isolating a mesenchymal stem cell from the patient; editing within or near an Angiopoietin-like 4 (ANGPTL4) gene or other DNA sequences that encode regulatory elements of the ANGPTL4 gene of the mesenchymal stem cell; differentiating the genome-edited mesenchymal stem cell into a hepatocyte; and implanting the hepatocyte into the patient.

[0384] In another method, Method 7, the present disclosure provides the method of Method 6, wherein the editing step comprises introducing into the mesenchymal stem cell one or more deoxyribonucleic acid (DNA) endonucleases to effect one or more single-strand breaks (SSBs) or double-strand breaks (DSBs) within or near the ANGPTL4 gene or ANGPTL4 regulatory elements that results in one or more permanent insertions, deletions or mutations of at least one nucleotide within or near the ANGPTL4 gene, thereby reducing or eliminating the expression or function of ANGPTL4 gene products.

[0385] In another method, Method 8, the present disclosure provides an in vivo method for treating a patient with an ANGPTL4 related disorder comprising the step of editing the Angiopoietin-like 4 (ANGPTL4) gene in a cell of the patient.

[0386] In another method, Method 9, the present disclosure provides the method of Method 8, wherein the editing step comprises introducing into the cell one or more deoxyribonucleic acid (DNA) endonucleases to effect one or more single-strand breaks (SSBs) or double-strand breaks (DSBs) within or near the ANGPTL4 gene or ANGPTL4 regulatory elements that results in one or more permanent insertions, deletions or mutations of at least one nucleotide within or near the ANGPTL4 gene, thereby reducing or eliminating the expression or function of ANGPTL4 gene products.

[0387] In another method, Method 10, the present disclosure provides the method of any one of Methods 8-9, wherein the cell is a hepatocyte.

[0388] In another method, Method 11, the present disclosure provides the method of Method 10, wherein the one or more deoxyribonucleic acid (DNA) endonuclease is delivered to the hepatocyte by local injection, systemic infusion, or combinations thereof.

[0389] In another method, Method 12, the present disclosure provides a method of altering the contiguous genomic sequence of an ANGPTL4 gene in a cell comprising contacting the cell with one or more deoxyribonucleic acid (DNA) endonuclease to effect one or more single-strand breaks (SSBs) or double-strand breaks (DSBs).

[0390] In another method, Method 13, the present disclosure provides the method of Method 12, wherein the alteration of the contiguous genomic sequence occurs in one or more exons of the ANGPTL4 gene.

[0391] In another method, Method 14, the present disclosure provides the method of any one of Methods 1-13, wherein the one or more deoxyribonucleic acid (DNA) endonuclease is selected from any of those listed in SEQ ID NOs: 1-620, and variants having at least 70% homology to any of those listed in SEQ ID NOs: 1-620.

[0392] In another method, Method 15, the present disclosure provides the method of Method 14, wherein the one or more deoxyribonucleic acid (DNA) endonuclease is one or more protein or polypeptide.

[0393] In another method, Method 16, the present disclosure provides the method of Method 14, wherein the one or more deoxyribonucleic acid (DNA) endonuclease is one or more polynucleotide encoding the one or more DNA endonuclease.

[0394] In another method, Method 17, the present disclosure provides the method of Method 16, wherein the one or more deoxyribonucleic acid (DNA) endonuclease is one or more ribonucleic acid (RNA) encoding the one or more DNA endonuclease.

[0395] In another method, Method 18, the present disclosure provides the method of Method 17, wherein the one or more ribonucleic acid (RNA) is one or more chemically modified RNA.

[0396] In another method, Method 19, the present disclosure provides the method of Method 18, wherein the one or more ribonucleic acid (RNA) is chemically modified in the coding region.

[0397] In another method, Method 20, the present disclosure provides the method of any one of Methods 16-19, wherein the one or more polynucleotide or one or more ribonucleic acid (RNA) is codon optimized.

[0398] In another method, Method 21, the present disclosure provides the method of any one of Methods 1-20, wherein the method further comprises introducing into the cell one or more gRNAs or one or more sgRNAs.

[0399] In another method, Method 22, the present disclosure provides the method of Method 21, wherein the one or more gRNAs or one or more sgRNAs comprises a spacer sequence that is complementary to a segment of the coding sequence of the ANGPTL4 gene.

[0400] In another method, Method 23, the present disclosure provides the method of Method 21, wherein the one or more gRNAs or one or more sgRNAs comprises a spacer sequence that is complementary to a sequence flanking the ANGPTL4 gene or other sequence that encodes a regulatory element of the ANGPTL4 gene.

[0401] In another method, Method 24, the present disclosure provides the method of any of the Methods 21-23, wherein the one or more gRNAs or one or more sgRNAs is chemically modified.

[0402] In another method, Method 25, the present disclosure provides the method of any one of Methods 21-24, wherein the one or more gRNAs or one or more sgRNAs is pre-complexed with the one or more deoxyribonucleic acid (DNA) endonuclease.

[0403] In another method, Method 26, the present disclosure provides the method of Method 25, wherein the pre-complexing involves a covalent attachment of the one or more gRNAs or one or more sgRNAs to the one or more deoxyribonucleic acid (DNA) endonuclease.

[0404] In another method, Method 27, the present disclosure provides the method of any one of Methods 14-26, wherein the one or more deoxyribonucleic acid (DNA) endonuclease is formulated in a liposome or lipid nanoparticle.

[0405] In another method, Method 28, the present disclosure provides the method of any one of Methods 21-26, wherein the one or more deoxyribonucleic acid (DNA) endonuclease is formulated in a liposome or lipid nanoparticle which also comprises the one or more gRNAs or one or more sgRNAs.

[0406] In another method, Method 29, the present disclosure provides the method of any one of Methods 12, or 21-23, wherein the one or more deoxyribonucleic acid (DNA) endonuclease is encoded in an AAV vector particle, where the AAV vector serotype is selected from those listed in SEQ ID NOs: 4,734-5,302 and in Table 2.

[0407] In another method, Method 30, the present disclosure provides the method of any of the Methods 21-23, wherein the one or more gRNAs or one or more sgRNAs is encoded in an AAV vector particle, where the AAV vector serotype is selected from those listed in SEQ ID NOs: 4,734-5,302 and in Table 2.

[0408] In another method, Method 31, the present disclosure provides the method of any of the Methods 21-23, wherein the one or more deoxyribonucleic acid (DNA) endonuclease is encoded in an AAV vector particle which also encodes the one or more gRNAs or one or more sgRNAs, where the AAV vector serotype is selected from those listed in SEQ ID NOs: 4,734-5,302 and in Table 2.

[0409] The present disclosure also provides a composition, Composition 1, comprising a single-molecule guide RNA comprising at least a spacer sequence that is an RNA sequence corresponding to any of SEQ ID NOs. 5305-19006.

[0410] In another composition, Composition 2, the present disclosure provides the single-molecule guide RNA of Composition 1, wherein the single-molecule guide RNA further comprises a spacer extension region.

[0411] In another composition, Composition 3, the present disclosure provides the single-molecule guide RNA of Composition 1, wherein the single-molecule guide RNA further comprises a tracrRNA extension region.

[0412] In another composition, Composition 4, the present disclosure provides the single-molecule guide RNA of Compositions 1-3, wherein the single-molecule guide RNA is chemically modified.

[0413] In another composition, Composition 5, the present disclosure provides the single-molecule guide RNA of Compositions 1-4, wherein the single-molecule guide RNA is pre-complexed with a DNA endonuclease.

[0414] In another composition, Composition 6, the present disclosure provides a single-molecule guide RNA of Composition 5, wherein the DNA endonuclease is a Cas9 or Cpf1 endonuclease.

[0415] In another composition, Composition 7, the present disclosure provides the single-molecule guide RNA of Composition 6, wherein the Cas9 or Cpf1 endonuclease is selected from S. pyogenes Cas9, S. aureus Cas9, N. meningitides Cas9, S. thermophilus CRISPR1 Cas9, S. thermophilus CRISPR 3 Cas9, T. denticola Cas9, L. bacterium ND2006 Cpf1 and Acidaminococcus sp. BV3L6 Cpf1, and variants having at least 70% homology to these enzymes.

[0416] In another composition, Composition 8, the present disclosure provides the single-molecule guide RNA of Composition 7, wherein the Cas9 or Cpf1 endonuclease comprises one or more nuclear localization signals (NLSs).

[0417] In another composition, Composition 9, the present disclosure provides the single-molecule guide RNA of Composition 8, wherein at least one NLS is at or within 50 amino acids of the amino-terminus of the Cas9 or Cpf1 endonuclease and/or at least one NLS is at or within 50 amino acids of the carboxy-terminus of the Cas9 or Cpf1 endonuclease.

[0418] In another composition, Composition 10, the present disclosure provides the single-molecule guide RNA of Composition 9, wherein the Cas9 or Cpf1 endonuclease is codon optimized for expression in a eukaryotic cell.

[0419] In another composition, Composition 11, the present disclosure provides a DNA encoding the single-molecule guide RNA of Compositions 1-3.

[0420] In another composition, Composition 12, the present disclosure provides a DNA encoding the CRISPR/Cas system of Compositions 8-10.

[0421] In another composition, Composition 13, the present disclosure provides a vector comprising the DNA of Compositions 11 or 12.

[0422] In another composition, Composition 14, the present disclosure provides the vector of Composition 13, wherein the vector is a plasmid.

[0423] In another composition, Composition 15, the present disclosure provides the vector of Composition 13, wherein the vector is an AAV vector particle, and the AAV vector serotype is selected from those listed in SEQ ID NOs: 4,734-5,302 and in Table 2.

### IX. Definitions

[0424] The term “comprising” or “comprises” is used in reference to compositions, methods, and respective component(s) thereof, that are essential to the invention, yet open to the inclusion of unspecified elements, whether essential or not.

[0425] The term “consisting essentially of” refers to those elements required for a given aspect. The term permits the presence of additional elements that do not materially affect the basic and novel or functional characteristic(s) of that aspect of the invention.

[0426] The term “consisting of” refers to compositions, methods, and respective components thereof as described herein, which are exclusive of any element not recited in that description of the aspect.

[0427] The singular forms “a,” “an,” and “the” include plural references, unless the context clearly dictates otherwise.

[0428] Certain numerical values presented herein are preceded by the term “about.” The term “about” means numerical values within +10% of the recited numerical value.

[0429] When a range of numerical values is presented herein, it is contemplated that each intervening value between the lower and upper limit of the range, the values that are the upper and lower limits of the range, and all stated values with the range are encompassed within the disclosure. All the possible sub-ranges within the lower and upper limits of the range are also contemplated by the disclosure.

[0430] The details of one or more embodiments of the invention are set forth in the accompanying description below. Although any materials and methods similar or equivalent to those described herein can be used in the practice or testing of the present disclosure, the preferred materials and methods are now described. Other features, objects and advantages of the invention will be apparent from the description. In the description, the singular forms also include the plural unless the context clearly dictates otherwise. Unless defined otherwise, all technical and scientific terms used herein have the same meaning as commonly understood by one of ordinary skill in the art to which this invention belongs. In the case of conflict, the present description will control.

[0431] Any numerical range recited in this specification describes all sub-ranges of the same numerical precision (i.e., having the same number of specified digits) subsumed within the recited range. For example, a recited range of “1.0 to 10.0” describes all sub-ranges between (and including) the recited minimum value of 1.0 and the recited maximum value of 10.0, such as, for example, “2.4 to 7.6,” even if the range of “2.4 to 7.6” is not expressly recited in the text of the specification. Accordingly, the Applicant reserves the right to amend this specification, including the claims, to expressly recite any sub-range of the same numerical precision subsumed within the ranges expressly recited in this specification. All such ranges are inherently described in this specification such that amending to expressly recite any such sub-ranges will comply with written description, sufficiency of description, and added matter requirements, including the requirements under 35 U.S.C. § 112(a) and Article 123(2) EPC. Also, unless expressly specified or otherwise required by context, all numerical parameters described in this specification (such as those expressing values, ranges, amounts, percentages, and the like) may be read as if prefaced by the word “about,” even if the word “about” does not expressly appear before a number. Additionally, numerical parameters described in this specification should be construed in light of the number of reported significant digits, numerical precision, and by applying ordinary rounding techniques. It is also understood that numerical parameters described in this specification will necessarily possess the inherent variability characteristic of the underlying measurement techniques used to determine the numerical value of the parameter.

[0432] The details of one or more aspects of the present disclosure are set forth in the accompanying description below. Although any materials and methods similar or equivalent to those described herein can be used in the practice or testing of the present disclosure, the preferred materials and methods are now described. Other features, objects and advantages of the disclosure will be apparent from the description. In the description, the singular forms also include the plural unless the context clearly dictates otherwise. Unless defined otherwise, all technical and scientific terms used herein have the same meaning as commonly understood by one of ordinary skill in the art to which this disclosure belongs. In the case of conflict, the present description will control.

[0433] The present invention is further illustrated by the following non-limiting examples.

### X. Examples

[0434] The invention will be more fully understood by reference to the following examples, which provide illustrative non-limiting aspects of the invention.

[0435] The examples describe the use of the CRISPR system as an illustrative genome editing technique to create defined therapeutic genomic deletions, insertions, or replacements, termed “genomic modifications” herein, in the ANGPTL4 gene that lead to permanent deletion or mutation of the ANGPLT4 gene, that reduce or eliminate the ANGPTL4 protein activity. Introduction of the defined therapeutic modifications represents a novel therapeutic strategy for the potential amelioration of Dyslipidemias, as described and illustrated herein.

### Example 1—CRISPR/SpCas9 Target Sites for the ANGPTL4 Gene

[0436] Regions of the ANGPTL4 gene are scanned for target sites. Each area is scanned for a protospacer adjacent motif (PAM) having the sequence NRG. gRNA 20 bp spacer sequences corresponding to the PAM are then identified, as shown in SEQ ID NOs: 6,468-13,243 of the Sequence Listing.

### Example 2—CRISPR/SaCas9 Target Sites for the ANGPTL4 Gene

[0437] Regions of the ANGPTL4 gene are scanned for target sites. Each area is scanned for a protospacer adjacent motif (PAM) having the sequence NNGRRT. gRNA 20 bp spacer sequences corresponding to the PAM are then identified, as shown in SEQ ID NOs: 5,460-6,105 of the Sequence Listing.

### Example 3—CRISPR/StCas9 Target Sites for the ANGPTL4 Gene

[0438] Regions of the ANGPTL4 gene are scanned for target sites. Each area is scanned for a protospacer adjacent motif (PAM) having the sequence NNAGAAW. gRNA 20 bp spacer sequences corresponding to the PAM are then identified, as shown in SEQ ID NOs: 5,342-5,459 of the Sequence Listing.

### Example 4—CRISPR/TdCas9 Target Sites for the ANGPTL4 Gene

[0439] Regions of the ANGPTL4 gene are scanned for target sites. Each area is scanned for a protospacer adjacent motif (PAM) having the sequence NAAAAC. gRNA 20 bp spacer sequences corresponding to the PAM are then identified, as shown in SEQ ID NOs: 5,305-5,341 of the Sequence Listing.

### Example 5—CRISPR/NmCas9 Target Sites for the ANGPTL4 Gene

[0440] Regions of the ANGPTL4 gene are scanned for target sites. Each area is scanned for a protospacer adjacent motif (PAM) having the sequence NNNNGATT. gRNA 20 bp spacer sequences corresponding to the PAM are then identified, as shown in SEQ ID NOs: 6,106-6,467 of the Sequence Listing.

### Example 6—CRISPR/Cpf1 Target Sites for the ANGPTL4 Gene

[0441] Regions of the ANGPTL4 gene are scanned for target sites. Each area is scanned for a protospacer adjacent motif (PAM) having the sequence TTN or YTN. gRNA 22 bp spacer sequences corresponding to the PAM are then identified, as shown in SEQ ID NOs: 13,244-19,006 of the Sequence Listing.

### Example 7—Bioinformatics Analysis of the Guide Strands

[0442] Candidate guides are then screened and selected in a single process or multi-step process that involves both theoretical binding and experimentally assessed activity at both on and off-target sites. By way of illustration, candidate guides having sequences that match a particular on-target site, such as a site within the ANGPTL4 gene, with adjacent PAM can be assessed for their potential to cleave at off-target sites having similar sequences, using one or more of a variety of bioinformatics tools available for assessing off-target binding, as described and illustrated in more detail below, in order to assess the likelihood of effects at chromosomal positions other than those intended.

[0443] Candidates predicted to have relatively lower potential for off-target activity can then be assessed experimentally to measure their on-target activity, and then off-target activities at various sites. Preferred guides have sufficiently high on-target activity to achieve desired levels of gene editing at the selected locus, and relatively lower off-target activity to reduce the likelihood of alterations at other chromosomal loci. The ratio of on-target to off-target activity is often referred to as the “specificity” of a guide.

[0444] For initial screening of predicted off-target activities, there are a number of bioinformatics tools known and publicly available that can be used to predict the most likely off-target sites; and since binding to target sites in the CRISPR/Cas9 or CRISPR/Cpf1 nuclease system is driven by Watson-Crick base pairing between complementary sequences, the degree of dissimilarity (and therefore reduced potential for off-target binding) is essentially related to primary sequence differences: mismatches and bulges, i.e. bases that are changed to a non-complementary base, and insertions or deletions of bases in the potential off-target site relative to the target site. An exemplary bioinformatics tool called COSMID (CRISPR Off-target Sites with Mismatches, Insertions and Deletions) (available on the web at crispr.bme.gatech.edu) compiles such similarities. Other bioinformatics tools include, but are not limited to, autoCOSMID, and CCTop.

[0445] Bioinformatics are used to minimize off-target cleavage in order to reduce the detrimental effects of mutations and chromosomal rearrangements. Studies on CRISPR/Cas9 systems suggested the possibility of high off-target activity due to nonspecific hybridization of the guide strand to DNA sequences with base pair mismatches and/or bulges, particularly at positions distal from the PAM region. Therefore, it is important to have a bioinformatics tool that can identify potential off-target sites that have insertions and/or deletions between the RNA guide strand and genomic sequences, in addition to base-pair mismatches. Bioinformatics tools based upon the off-target prediction algorithm CCTop were used to search genomes for potential CRISPR off-target sites (CCTop is available on the web at crispr.cos.uni-heidelberg.de/). COSMID output ranked lists of the potential off-target sites based on the number and location of mismatches, allowing more informed choice of target sites, and avoiding the use of sites with more likely off-target cleavage.

[0446] Additional bioinformatics pipelines are employed that weigh the estimated on- and/or off-target activity of gRNA targeting sites in a region. Other features that may be used to predict activity include information about the cell type in question, DNA accessibility, chromatin state, transcription factor binding sites, transcription factor binding data, and other CHIP-seq data. Additional factors are weighed that predict editing efficiency, such as relative positions and directions of pairs of gRNAs, local sequence features and micro-homologies.

### Example 8—Testing of Preferred Guides in Cells for On-Target Activity

[0447] To identify a large spectrum of pairs of gRNAs able to edit the cognate DNA target region, an in vitro transcribed (IVT) gRNA screen was conducted. The relevant genomic sequence was submitted for analysis using a gRNA design software. The resulting list of gRNAs were narrowed to a list of about 200 gRNAs based on uniqueness of sequence (only gRNAs without a perfect match somewhere else in the genome were screened) and minimal predicted off targets. This set of gRNAs were in vitro transcribed., and transfected using Lipofectamine MessengerMAX into HEK293T cells that constitutively express Cas9. Cells were harvested 48 hours post transfection, the genomic DNA was isolated, and cutting efficiency was evaluated using TIDE analysis (FIGS. 2-4).

[0448] gRNA with significant activity can then be followed up in cultured cells to measure alteration of the ANGPTL4 gene. Off-target events can be followed again. A variety of cells can be transfected and the level of gene editing and possible off-target events measured. These experiments allow optimization of nuclease and donor design and delivery.

TABLE 7
gRNA sequences and cutting efficiencies in HEK293T cells

| SEQ ID | | | | Final | |
|---|---|---|---|---|---|
| NO: | Guide Name | Guide Sequence (20mer) | PAM | Indel | R² |
| 11072 | Angptl4_Int1_Int3_T7 | GTCTGCCCCTCGATGCTCTC | CGG | 98.9 | 0.9887 |
| 7367 | Angptl4_Up_Ex1_Int1_T65 | GGAGCACCGCTCATCCTCTT | AGG | 98.5 | 0.9845 |
| 7607 | Angptl4_Int1_Int3_T86 | TGAGCCTTGAGTTGTGTCTG | GGG | 98 | 0.991 |
| 10698 | Angptl4_Up_Ex1_Int1_T32 | GCGTCTCCAGTCCTCGCACC | TGG | 97.9 | 0.9889 |
| 7679 | Angptl4_Int1_Int3_T3 | TGGCCACCGGAGAGCATCGA | GGG | 97.8 | 0.9912 |
| 7385 | Angptl4_Up_Ex1_Int1_T11 | GCGCGGCGACTTGGACTGCA | CGG | 97.7 | 0.9884 |
| 7328 | Angptl4_Up_Ex1_Int1_T31 | AATCGGATCACAGTCGTGTG | AGG | 97 | 0.9829 |
| 10726 | Angptl4_Up_Ex1_Int1_T90 | GCGCACGGACTCCTGCAGCT | CGG | 96.9 | 0.9897 |
| 11581 | Angptl4_Int3_Int4_T30 | GGATTGCCAGGAGCTGTTCC | AGG | 96.4 | 0.9785 |
| 7379 | Angptl4_Up_Ex1_Int1_T24 | CTGAGCGCTCAGTAGCACGG | CGG | 96.2 | 0.9836 |
| 7427 | Angptl4_Up_Ex1_Int1_T133 | GGCGCGGAGAACCAGCCCTG | GGG | 96.1 | 0.9612 |
| 8551 | Angptl4_Int4_Int6_T4 | CACTAGAAACACCTACCGTG | GGG | 95.9 | 0.9764 |
| 10999 | Angptl4_Int1_Int3_T91 | CCCTCCCCAGACACAACTCA | AGG | 95.6 | 0.9666 |
| 7372 | Angptl4_Up_Ex1_Int1_T79 | GGTGGCGGCGCAGAGCATCA | GGG | 95.5 | 0.9638 |
| 10724 | Angptl4_Up_Ex1_Int1_T77 | GAGATGAATGTCCTGGCGCA | CGG | 95.3 | 0.9857 |
| 11006 | Angptl4_Int1_Int3_T72 | GATCCAGCAACTCTTCCACA | AGG | 95.3 | 0.9654 |
| 7623 | Angptl4_Int1_Int3_T6 | CCCTTGATCCTAGGGTTACC | TGG | 95.3 | 0.9665 |
| 10707 | Angptl4_Up_Ex1_Int1_T152 | AGGCTACCTAAGAGGATGAG | CGG | 95 | 0.9829 |
| 10705 | Angptl4_Up_Ex1_Int1_T40 | CCGCTCCCAGGCTACCTAAG | AGG | 94.9 | 0.9613 |
| 10702 | Angptl4_Up_Ex1_Int1_T115 | GTCCCCGAATCCCCGCTCCC | AGG | 94.8 | 0.9668 |
| 11873 | Angptl4_Int4_Int6_T3 | GTAATTCAGAGGCGCCACGA | TGG | 94.5 | 0.9588 |
| 7678 | Angptl4_Int1_Int3_T12 | GGCCACCGGAGAGCATCGAG | GGG | 94.3 | 0.9429 |
| 10762 | Angptl4_Up_Ex1_Int1_T69 | CCTGCAGGTACGTGTCCCCA | GGG | 94.2 | 0.9511 |
| 11599 | Angptl4_Int3_Int4_T9 | GTGAACTGCAAGATGACCTC | AGG | 94 | 0.9624 |
| 8254 | Angptl4_Int3_Int4_T20 | AATCCCTGGGCAGCCCTGAA | GGG | 93.9 | 0.9728 |
| 7413 | Angptl4_Up_Ex1_Int1_T60 | CCCGGCTCTCAGGGGCTAAC | GGG | 93.8 | 0.95 |
| 11606 | Angptl4_Int3_Int4_T1 | TAGGGTGTGTTAGTCCACCA | GGG | 93.4 | 0.9721 |
| 11605 | Angptl4_Int3_Int4_T2 | GTAGGGTGTGTTAGTCCACC | AGG | 92.5 | 0.9658 |
| 7333 | Angptl4_Up_Ex1_Int1_T38 | CGCTTGGTTGCAGAAGCCGC | TGG | 92.1 | 0.9721 |
| 10790 | Angptl4_Up_Ex1_Int1_T89 | CCTGGGCTTCCCTGCGTCAA | GGG | 92.1 | 0.9265 |
| 7326 | Angptl4_Up_Ex1_Int1_T106 | GTGTGAGGATCCGCTCAGCT | CGG | 92 | 0.9356 |
| 7389 | Angptl4_Up_Ex1_Int1_T44 | CAGGACATTCATCTCGTCCC | AGG | 92 | 0.9503 |
| 8271 | Angptl4_Int3_Int4_T8 | GGACTAACACACCCTACCTG | AGG | 91.9 | 0.9509 |
| 11064 | Angptl4_Int1_Int3_T30 | CCAAGCCTGCCCGAAGAAAG | AGG | 91.7 | 0.9189 |
| 7448 | Angptl4_Up_Ex1_Int1_T19 | GGAGCCCATCCCTTGACGCA | GGG | 91.4 | 0.9346 |
| 7351 | Angptl4_Up_Ex1_Int1_T45 | GGGGACTCTCGGGGACGTTG | GGG | 91.3 | 0.9325 |
| 7609 | Angptl4_Int1_Int3_T45 | TCTGAGCCTTGAGTTGTGTC | TGG | 90.3 | 0.9832 |
| 8542 | Angptl4_Int4_Int6_T16 | TGAAGTCCACTGAGCCATCG | TGG | 90.1 | 0.967 |
| 7406 | Angptl4_Up_Ex1_Int1_T62 | GGACCCCTCGGTTCCCTGAC | AGG | 89.9 | 0.909 |
| 10717 | Angptl4_Up_Ex1_Int1_T86 | GTGCTACTGAGCGCTCAGGG | CGG | 89.2 | 0.9449 |
| 11578 | Angptl4_Int3_Int4_T25 | AGGGCTGCCCAGGGATTGCC | AGG | 89.2 | 0.9265 |
| 8259 | Angptl4_Int3_Int4_T11 | GAACAGCTCCTGGCAATCCC | TGG | 89 | 0.9283 |
| 7341 | Angptl4_Up_Ex1_Int1_T75 | GGACTGGAGACGCGGAGGAC | CGG | 88.8 | 0.9445 |
| 10716 | Angptl4_Up_Ex1_Int1_T16 | GCCGTGCTACTGAGCGCTCA | GGG | 88.5 | 0.8964 |
| 7387 | Angptl4_Up_Ex1_Int1_T17 | TCGTCCCAGGACGCAAAGCG | CGG | 88.5 | 0.9802 |
| 7415 | Angptl4_Up_Ex1_Int1_T109 | AGGGTCCACCCGGCTCTCAG | GGG | 88.3 | 0.9227 |
| 7340 | Angptl4_Up_Ex1_Int1_T59 | GACTGGAGACGCGGAGGACC | GGG | 88 | 0.9263 |
| 7355 | Angptl4_Up_Ex1_Int1_T56 | GCGGGGATTCGGGGACTCTC | GGG | 87.6 | 0.8763 |
| 10761 | Angptl4_Up_Ex1_Int1_T81 | GCCTGCAGGTACGTGTCCCC | AGG | 87.5 | 0.8789 |
| 7674 | Angptl4_Int1_Int3_T28 | GGGGCAGACACTCACGGTGC | AGG | 87.5 | 0.9037 |
| 11602 | Angptl4_Int3_Int4_T10 | CTGCAAGATGACCTCAGGTA | GGG | 87.5 | 0.9125 |
| 7671 | Angptl4_Int1_Int3_T24 | AGGCGGCTGACATTGTGAGC | CGG | 87.1 | 0.9492 |
| 8553 | Angptl4_Int4_Int6_T9 | CCCACTAGAAACACCTACCG | TGG | 86.8 | 0.9108 |
| 7643 | Angptl4_Int1_Int3_T27 | CCAAACTAGGATGGGACGGG | AGG | 85.4 | 0.9765 |
| 10708 | Angptl4_Up_Ex1_Int1_T15 | GAGGATGAGCGGTGCTCCGA | CGG | 84.9 | 0.8702 |
| 11069 | Angptl4_Int1_Int3_T32 | GATGGCCCAGCCAGTTGACC | CGG | 84.8 | 0.848 |
| 8268 | Angptl4_Int3_Int4_T24 | TTGCAGTTCACCAAAAATGG | CGG | 84.6 | 0.8973 |
| 10746 | Angptl4_Up_Ex1_Int1_T23 | GTCCGCCTGTCAGGGAACCG | AGG | 84.2 | 0.8798 |
| 10753 | Angptl4_Up_Ex1_Int1_T118 | CCCGTTAGCCCCTGAGAGCC | GGG | 83.4 | 0.9378 |
| 10692 | Angptl4_Up_Ex1_Int1_T71 | TGTGATCCGATTCTTTCCAG | CGG | 82.3 | 0.8565 |
| 7414 | Angptl4_Up_Ex1_Int1_T80 | ACCCGGCTCTCAGGGGCTAA | CGG | 82 | 0.8524 |
| 7409 | Angptl4_Up_Ex1_Int1_T101 | AGGGGCTAACGGGAGGTCGG | TGG | 81.8 | 0.8694 |
| 10748 | Angptl4_Up_Ex1_Int1_T74 | CCGCCTGTCAGGGAACCGAG | GGG | 81.5 | 0.8335 |
| 8552 | Angptl4_Int4_Int6_T8 | CCACTAGAAACACCTACCGT | GGG | 81.1 | 0.8207 |
| 7417 | Angptl4_Up_Ex1_Int1_T88 | TCAGGGTCCACCCGGCTCTC | AGG | 80.6 | 0.9398 |
| 10786 | Angptl4_Up_Ex1_Int1_T85 | GGTGCGCAACTGTGGCTCCC | TGG | 80.5 | 0.8208 |
| 10759 | Angptl4_Up_Ex1_Int1_T130 | TGAGGTCCTTCACAGCCTGC | AGG | 80.1 | 0.9029 |
| 7352 | Angptl4_Up_Ex1_Int1_T8 | CGGGGACTCTCGGGGACGTT | GGG | 79.6 | 0.9492 |
| 7421 | Angptl4_Up_Ex1_Int1_T120 | TGCAGGCTGTGAAGGACCTC | AGG | 79.3 | 0.832 |
| 7378 | Angptl4_Up_Ex1_Int1_T34 | AGCGCTCAGTAGCACGGCGG | TGG | 79.1 | 0.8648 |
| 7405 | Angptl4_Up_Ex1_Int1_T127 | CCCCTCGGTTCCCTGACAGG | CGG | 78.3 | 0.8253 |
| 11059 | Angptl4_Int1_Int3_T41 | CAAGCACCTAGACCATGAGG | TGG | 78.3 | 0.7999 |
| 7416 | Angptl4_Up_Ex1_Int1_T100 | CAGGGTCCACCCGGCTCTCA | GGG | 77.9 | 0.9225 |
| 11594 | Angptl4_Int3_Int4_T29 | CTATTTGAAATCCAGCCTCA | GGG | 77.8 | 0.933 |
| 8265 | Angptl4_Int3_Int4_T7 | AAAAATGGCGGAGACCCCTG | AGG | 77.4 | 0.7876 |
| 11878 | Angptl4_Int4_Int6_T2 | AGTGGACTTCAACCGGCCCT | GGG | 77.1 | 0.8442 |
| 11073 | Angptl4_Int1_Int3_T4 | TGCCCCTCGATGCTCTCCGG | TGG | 77 | 0.7997 |
| 11884 | Angptl4_Int4_Int6_T12 | CCTGGGAAGCCTACAAGGCG | GGG | 76.8 | 0.957 |
| 7680 | Angptl4_Int1_Int3_T2 | GTGGCCACCGGAGAGCATCG | AGG | 76.6 | 0.779 |
| 8549 | Angptl4_Int4_Int6_T19 | ATCCCCAAACCCCGCCTTGT | AGG | 76.1 | 0.8272 |
| 7356 | Angptl4_Up_Ex1_Int1_T52 | AGCGGGGATTCGGGGACTCT | CGG | 75.8 | 0.9291 |
| 7655 | Angptl4_Int1_Int3_T40 | CCTCATGGTCTAGGTGCTTG | TGG | 75.8 | 0.8936 |
| 7411 | Angptl4_Up_Ex1_Int1_T92 | GGCTCTCAGGGGCTAACGGG | AGG | 75.6 | 0.8034 |
| 7608 | Angptl4_Int1_Int3_T57 | CTGAGCCTTGAGTTGTGTCT | GGG | 75.5 | 0.8753 |
| 10752 | Angptl4_Up_Ex1_Int1_T138 | TCCCGTTAGCCCCTGAGAGC | CGG | 75.1 | 0.9018 |
| 7425 | Angptl4_Up_Ex1_Int1_T55 | CCCTGGGGACACGTACCTGC | AGG | 73.6 | 0.7617 |
| 11892 | Angptl4_Int4_Int6_T24 | CCCACGGTAGGTGTTTCTAG | TGG | 73.6 | 0.7834 |
| 7676 | Angptl4_Int1_Int3_T39 | CATCGAGGGGCAGACACTCA | CGG | 73.4 | 0.7336 |
| 7400 | Angptl4_Up_Ex1_Int1_T134 | CCAGCGCGCTCAGCTGACTG | CGG | 73.2 | 0.8554 |
| 7373 | Angptl4_Up_Ex1_Int1_T50 | CGGTGGCGGCGCAGAGCATC | AGG | 72.9 | 0.8436 |
| 8547 | Angptl4_Int4_Int6_T37 | CCCCGCCTTGTAGGCTTCCC | AGG | 72.4 | 0.8356 |
| 7339 | Angptl4_Up_Ex1_Int1_T27 | ACTGGAGACGCGGAGGACCG | GGG | 72.3 | 0.9061 |
| 7645 | Angptl4_Int1_Int3_T26 | AGGCCAAACTAGGATGGGAC | GGG | 72.3 | 0.8369 |
| 10723 | Angptl4_Up_Ex1_Int1_T103 | CTGGGACGAGATGAATGTCC | TGG | 71.6 | 0.8241 |
| 7377 | Angptl4_Up_Ex1_Int1_T47 | GCTCAGTAGCACGGCGGTGG | CGG | 68.6 | 0.691 |
| 10738 | Angptl4_Up_Ex1_Int1_T68 | GTCAGCTGAGCGCGCTGGAG | CGG | 68.5 | 0.7164 |
| 7410 | Angptl4_Up_Ex1_Int1_T82 | CTCAGGGGCTAACGGGAGGT | CGG | 67.6 | 0.7226 |
| 7612 | Angptl4_Int1_Int3_T55 | CCACCTTGTGGAAGAGTTGC | TGG | 67.2 | 0.9037 |
| 7656 | Angptl4_Int1_Int3_T37 | GCTTGGCCACCTCATGGTCT | AGG | 65.1 | 0.682 |
| 7660 | Angptl4_Int1_Int3_T15 | GGCAGCCTCTTTCTTCGGGC | AGG | 64.9 | 0.9611 |
| 10740 | Angptl4_Up_Ex1_Int1_T43 | GAGCGGCGCCTGAGCGCGTG | CGG | 64.1 | 0.796 |
| 11593 | Angptl4_Int3_Int4_T21 | ACTATTTGAAATCCAGCCTC | AGG | 62.7 | 0.9137 |
| 7331 | Angptl4_Up_Ex1_Int1_T129 | CAGAAGCCGCTGGAAAGAAT | CGG | 62.2 | 0.6479 |
| 10770 | Angptl4_Up_Ex1_Int1_T143 | GTGGCTCTCCTGGCTTGGAA | GGG | 60.3 | 0.6144 |
| 7384 | Angptl4_Up_Ex1_Int1_T42 | CGCGGCGACTTGGACTGCAC | GGG | 59.8 | 0.6803 |
| 11595 | Angptl4_Int3_Int4_T31 | TATTTGAAATCCAGCCTCAG | GGG | 59.3 | 0.6754 |
| 7359 | Angptl4_Up_Ex1_Int1_T112 | GTAGCCTGGGAGCGGGGATT | CGG | 56.8 | 0.9482 |
| 7433 | Angptl4_Up_Ex1_Int1_T145 | CAAGCCAGGAGAGCCACTAG | GGG | 56.7 | 0.5905 |
| 8258 | Angptl4_Int3_Int4_T16 | AACAGCTCCTGGCAATCCCT | GGG | 56.6 | 0.5655 |
| 8264 | Angptl4_Int3_Int4_T26 | ATGGCGGAGACCCCTGAGGC | TGG | 55.5 | 0.679 |
| 7403 | Angptl4_Up_Ex1_Int1_T21 | AGGCGGACCCGCACGCGCTC | AGG | 55.1 | 0.6217 |
| 7386 | Angptl4_Up_Ex1_Int1_T2 | GGACGCAAAGCGCGGCGACT | TGG | 52.9 | 0.8676 |
| 7358 | Angptl4_Up_Ex1_Int1_T87 | TAGCCTGGGAGCGGGGATTC | GGG | 51.6 | 0.8533 |
| 7659 | Angptl4_Int1_Int3_T23 | CCTCTTTCTTCGGGCAGGCT | TGG | 51.5 | 0.9797 |
| 7428 | Angptl4_Up_Ex1_Int1_T104 | GGGCGCGGAGAACCAGCCCT | GGG | 51.4 | 0.8241 |
| 7620 | Angptl4_Int1_Int3_T17 | TTTGCAGATGCTGAATTCGC | AGG | 50.8 | 0.6549 |
| 7666 | Angptl4_Int1_Int3_T49 | GTCAACTGGCTGGGCCATCT | CGG | 50.1 | 0.5007 |
| 10743 | Angptl4_Up_Ex1_Int1_T9 | CGCGTGCGGGTCCGCCTGTC | AGG | 49.8 | 0.8856 |
| 7461 | Angptl4_Up_Ex1_Int1_T144 | TCTCGCTATTTTGCTTTAGG | TGG | 48.9 | 0.6905 |
| 8269 | Angptl4_Int3_Int4_T34 | ATCTTGCAGTTCACCAAAAA | TGG | 48.9 | 0.9798 |
| 10736 | Angptl4_Up_Ex1_Int1_T36 | CCGCAGTCAGCTGAGCGCGC | TGG | 48.3 | 0.8254 |
| 7667 | Angptl4_Int1_Int3_T29 | GTGAGCCGGGTCAACTGGCT | GGG | 47.6 | 0.8367 |
| 7668 | Angptl4_Int1_Int3_T8 | TGTGAGCCGGGTCAACTGGC | TGG | 47.6 | 0.8578 |
| 10684 | Angptl4_Up_Ex1_Int1_T7 | AAACCGTCCTCGGGCGCGGC | GGG | 46.7 | 0.5542 |
| 7432 | Angptl4_Up_Ex1_Int1_T61 | CAGGAGAGCCACTAGGGGCG | CGG | 46.4 | 0.7605 |
| 7449 | Angptl4_Up_Ex1_Int1_T66 | GGGAGCCCATCCCTTGACGC | AGG | 46.4 | 0.6033 |
| 7353 | Angptl4_Up_Ex1_Int1_T20 | TCGGGGACTCTCGGGGACGT | TGG | 46.2 | 0.9454 |
| 7397 | Angptl4_Up_Ex1_Int1_T37 | CCGCGTGTTCGCGCAGCCCC | TGG | 46.1 | 0.5716 |
| 11054 | Angptl4_Int1_Int3_T35 | CCCATCCTAGTTTGGCCTCC | TGG | 44.3 | 0.4817 |
| 10715 | Angptl4_Up_Ex1_Int1_T6 | CGCCGTGCTACTGAGCGCTC | AGG | 43.1 | 0.7811 |
| 7349 | Angptl4_Up_Ex1_Int1_T64 | CTCGGGGACGTTGGGGTTCC | AGG | 42.9 | 0.4435 |
| 10741 | Angptl4_Up_Ex1_Int1_T30 | AGCGGCGCCTGAGCGCGTGC | GGG | 41.2 | 0.4823 |
| 10695 | Angptl4_Up_Ex1_Int1_T91 | AGCGGCTTCTGCAACCAAGC | GGG | 40.5 | 0.4502 |
| 7338 | Angptl4_Up_Ex1_Int1_T76 | CTGGAGACGCGGAGGACCGG | GGG | 39.2 | 0.3916 |
| 7673 | Angptl4_Int1_Int3_T51 | GCAGACACTCACGGTGCAGG | CGG | 37.6 | 0.3966 |
| 10744 | Angptl4_Up_Ex1_Int1_T18 | GCGTGCGGGTCCGCCTGTCA | GGG | 37.3 | 0.3912 |
| 7408 | Angptl4_Up_Ex1_Int1_T67 | CGGGAGGTCGGTGGACCCCT | CGG | 37.1 | 0.8681 |
| 7669 | Angptl4_Int1_Int3_T1 | ACATTGTGAGCCGGGTCAAC | TGG | 35 | 0.3932 |
| 7357 | Angptl4_Up_Ex1_Int1_T39 | AGCCTGGGAGCGGGGATTCG | GGG | 34 | 0.9363 |
| 7360 | Angptl4_Up_Ex1_Int1_T72 | TCTTAGGTAGCCTGGGAGCG | GGG | 33.4 | 0.973 |
| 10773 | Angptl4_Up_Ex1_Int1_T139 | TGGCTTGGAAGGGTATGGAC | AGG | 32.2 | 0.3415 |
| 11886 | Angptl4_Int4_Int6_T10 | AAGCCTACAAGGCGGGGTTT | GGG | 30.9 | 0.5345 |
| 10731 | Angptl4_Up_Ex1_Int1_T22 | CCAGGGGCTGCGCGAACACG | CGG | 30.8 | 0.9455 |
| 10791 | Angptl4_Up_Ex1_Int1_T83 | GGCTTCCCTGCGTCAAGGGA | TGG | 30.4 | 0.4445 |
| 11058 | Angptl4_Int1_Int3_T34 | CCACAAGCACCTAGACCATG | AGG | 29.7 | 0.2997 |
| 10709 | Angptl4_Up_Ex1_Int1_T14 | ATGAGCGGTGCTCCGACGGC | CGG | 28.4 | 0.9857 |
| 10779 | Angptl4_Up_Ex1_Int1_T119 | TATGGACAGGAGTGGGGCGT | GGG | 27.6 | 0.3019 |
| 7439 | Angptl4_Up_Ex1_Int1_T111 | TGTCCATACCCTTCCAAGCC | AGG | 26.4 | 0.9022 |
| 11877 | Angptl4_Int4_Int6_T11 | CAGTGGACTTCAACCGGCCC | TGG | 26.1 | 0.3249 |
| 11053 | Angptl4_Int1_Int3_T33 | CCTCCCGTCCCATCCTAGTT | TGG | 25.9 | 0.2823 |
| 7370 | Angptl4_Up_Ex1_Int1_T33 | ATCAGGGCTGCCCCGGCCGT | CGG | 25.8 | 0.9716 |
| 7391 | Angptl4_Up_Ex1_Int1_T46 | GCTGCAGGAGTCCGTGCGCC | AGG | 24.2 | 0.9825 |
| 11596 | Angptl4_Int3_Int4_T6 | TCAGGGGTCTCCGCCATTTT | TGG | 23.1 | 0.9596 |
| 10694 | Angptl4_Up_Ex1_Int1_T124 | CAGCGGCTTCTGCAACCAAG | CGG | 23 | 0.2903 |
| 10789 | Angptl4_Up_Ex1_Int1_T132 | CCCTGGGCTTCCCTGCGTCA | AGG | 22.9 | 0.9314 |
| 7347 | Angptl4_Up_Ex1_Int1_T70 | ACGTTGGGGTTCCAGGTGCG | AGG | 21.5 | 0.2735 |
| 10720 | Angptl4_Up_Ex1_Int1_T3 | AGTCGCCGCGCTTTGCGTCC | TGG | 20.5 | 0.9268 |
| 7362 | Angptl4_Up_Ex1_Int1_T137 | CCTCTTAGGTAGCCTGGGAG | CGG | 20.4 | 0.9553 |
| 10794 | Angptl4_Up_Ex1_Int1_T96 | AAGGGATGGGCTCCCCCCTT | AGG | 20 | 0.8714 |
| 10729 | Angptl4_Up_Ex1_Int1_T125 | GGACTCCTGCAGCTCGGCCA | GGG | 19.6 | 0.2123 |
| 10683 | Angptl4_Up_Ex1_Int1_T26 | AAAACCGTCCTCGGGCGCGG | CGG | 19.2 | 0.093 |
| 7670 | Angptl4_Int1_Int3_T50 | GGCGGCTGACATTGTGAGCC | GGG | 18.2 | 0.9899 |
| 7364 | Angptl4_Up_Ex1_Int1_T110 | CTCATCCTCTTAGGTAGCCT | GGG | 17.8 | 0.9517 |
| 10711 | Angptl4_Up_Ex1_Int1_T10 | GAGCGGTGCTCCGACGGCCG | GGG | 17.8 | 0.9014 |
| 11885 | Angptl4_Int4_Int6_T15 | GAAGCCTACAAGGCGGGGTT | TGG | 16.2 | 0.9826 |
| 7336 | Angptl4_Up_Ex1_Int1_T4 | GACCGGGGGTAAGACCCGCT | TGG | 15 | 0.1513 |
| 10710 | Angptl4_Up_Ex1_Int1_T28 | TGAGCGGTGCTCCGACGGCC | GGG | 14.5 | 0.9163 |
| 10685 | Angptl4_Up_Ex1_Int1_T12 | AACCGTCCTCGGGCGCGGCG | GGG | 13.8 | 0.1514 |
| 7647 | Angptl4_Int1_Int3_T13 | CCAGGAGGCCAAACTAGGAT | GGG | 12.9 | 0.1327 |
| 7462 | Angptl4_Up_Ex1_Int1_T98 | GGGTCTCGCTATTTTGCTTT | AGG | 11.1 | 0.9314 |
| 106969 | Angptl4_Up_Ex1_Int1_T95 | AACCAAGCGGGTCTTACCCC | CGG | 10.8 | 0.1083 |
| 10747 | Angptl4_Up_Ex1_Int1_T35 | TCCGCCTGTCAGGGAACCGA | GGG | 7.4 | 0.0776 |
| 7354 | Angptl4_Up_Ex1_Int1_T29 | CGGGGATTCGGGGACTCTCG | GGG | 7.3 | 0.0797 |
| 7605 | Angptl4_Int1_Int3_T85 | GCCTTGAGTTGTGTCTGGGG | AGG | 7 | 0.0701 |
| 10728 | Angptl4_Up_Ex1_Int1_T113 | CGGACTCCTGCAGCTCGGCC | AGG | 5.5 | 0.9774 |
| 11607 | Angptl4_Int3_Int4_T3 | AGGGTGTGTTAGTCCACCAG | GGG | 4.2 | 0.9789 |
| 10730 | Angptl4_Up_Ex1_Int1_T135 | GACTCCTGCAGCTCGGCCAG | GGG | 3.5 | 0.0349 |
| 10766 | Angptl4_Up_Ex1_Int1_T51 | CGCGCCCCTAGTGGCTCTCC | TGG | 3.2 | 0.9802 |
| 10787 | Angptl4_Up_Ex1_Int1_T107 | GTGCGCAACTGTGGCTCCCT | GGG | 2 | 0.0026 |
| 7342 | Angptl4_Up_Ex1_Int1_T78 | TGCGAGGACTGGAGACGCGG | AGG | 1.3 | 0.013 |
| 10754 | Angptl4_Up_Ex1_Int1_T102 | GTTAGCCCCTGAGAGCCGGG | TGG | 0.7 | 0.9857 |
| 11601 | Angptl4_Int3_Int4_T42 | ACTGCAAGATGACCTCAGGT | AGG | 0 | 0.3853 |
| 7346 | Angptl4_Up_Ex1_Int1_T123 | GGGGTTCCAGGTGCGAGGAC | TGG | | |
| 7361 | Angptl4_Up_Ex1_Int1_T136 | CTCTTAGGTAGCCTGGGAGC | GGG | | |
| 7380 | Angptl4_Up_Ex1_Int1_T58 | GCCCTGAGCGCTCAGTAGCA | CGG | | |
| 10721 | Angptl4_Up_Ex1_Int1_T13 | GTCGCCGCGCTTTGCGTCCT | GGG | | |
| 10765 | Angptl4_Up_Ex1_Int1_T5 | CTGGTTCTCCGCGCCCCTAG | TGG | | |
| 10785 | Angptl4_Up_Ex1_Int1_T142 | GGGGGCGGGGTGCGCAACTG | TGG | | |
| 10792 | Angptl4_Up_Ex1_Int1_T41 | GCTTCCCTGCGTCAAGGGAT | GGG | | |
| 7458 | Angptl4_Up_Ex1_Int1_T126 | CCTCCTCGGCTTCCTAAGGG | GGG | | |
| 10797 | Angptl4_Up_Ex1_Int1_T73 | GCTCCCCCCTTAGGAAGCCG | AGG | | |
| 11890 | Angptl4_Int4_Int6_T13 | GGTTTGGGGATCCCCACGGT | AGG | | |

### Example 9—Testing of Preferred Guides in Cells for Off-Target Activity

[0449] The gRNAs having the best on-target activity from the IVT screen in the above example are tested for off-target activity using Hybrid capture assays, GUIDE Seq and whole genome sequencing, in addition to other methods.

### Example 10—In Vivo Testing in Relevant Animal Model

[0450] After the CRISPR-Cas9/guide combinations have been assessed, the lead formulations will be tested in vivo in an animal model.

[0451] Culture in human cells allows direct testing on the human target and the background human genome, as described above.

[0452] Preclinical efficacy and safety evaluations can be observed through engraftment of modified mouse or human hepatocytes in a mouse model. The modified cells can be observed in the months after engraftment.

### XI. Equivalents and Scope

[0453] Those skilled in the art will recognize, or be able to ascertain using no more than routine experimentation, many equivalents to the specific embodiments in accordance with the disclosure described herein. The scope of the present disclosure is not intended to be limited to the above Description, but rather is as set forth in the appended claims.

[0454] Claims or descriptions that include “or” between one or more members of a group are considered satisfied if one, more than one, or all of the group members are present in, employed in, or otherwise relevant to a given product or process unless indicated to the contrary or otherwise evident from the context. The disclosure includes embodiments in which exactly one member of the group is present in, employed in, or otherwise relevant to a given product or process. The disclosure includes embodiments in which more than one, or the entire group members are present in, employed in, or otherwise relevant to a given product or process.

[0455] In addition, it is to be understood that any particular embodiment of the present disclosure that falls within the prior art may be explicitly excluded from any one or more of the claims. Since such embodiments are deemed to be known to one of ordinary skill in the art, they may be excluded even if the exclusion is not set forth explicitly herein. Any particular embodiment of the compositions of the disclosure (e.g., any antibiotic, therapeutic or active ingredient; any method of production; any method of use; etc.) can be excluded from any one or more claims, for any reason, whether or not related to the existence of prior art.

[0456] It is to be understood that the words which have been used are words of description rather than limitation, and that changes may be made within the purview of the appended claims without departing from the true scope and spirit of the disclosure in its broader aspects.

[0457] While the present invention has been described at some length and with some particularity with respect to the several described embodiments, it is not intended that it should be limited to any such particulars or embodiments or any particular embodiment, but it is to be construed with references to the appended claims so as to provide the broadest possible interpretation of such claims in view of the prior art and, therefore, to effectively encompass the intended scope of the invention.

### Note Regarding Illustrative Examples

[0458] While the present disclosure provides descriptions of various specific aspects for the purpose of illustrating various aspects of the present invention and/or its potential applications, it is understood that variations and modifications will occur to those skilled in the art. Accordingly, the invention or inventions described herein should be understood to be at least as broad as they are claimed, and not as more narrowly defined by particular illustrative aspects provided herein.

[0459] Any patent, publication, or other disclosure material identified herein is incorporated by reference into this specification in its entirety unless otherwise indicated, but only to the extent that the incorporated material does not conflict with existing descriptions, definitions, statements, or other disclosure material expressly set forth in this specification. As such, and to the extent necessary, the express disclosure as set forth in this specification supersedes any conflicting material incorporated by reference. Any material, or portion thereof, that is said to be incorporated by reference into this specification, but which conflicts with existing definitions, statements, or other disclosure material set forth herein, is only incorporated to the extent that no conflict arises between that incorporated material and the existing disclosure material. Applicants reserve the right to amend this specification to expressly recite any subject matter, or portion thereof, incorporated by reference herein.

1. A method for editing an Angiopoietin-like 4 (ANGPTL4) gene in a cell by genome editing comprising the step of introducing into the cell one or more deoxyribonucleic acid (DNA) endonucleases to effect one or more single-strand breaks (SSBs) or double-strand breaks (DSBs) within or near the ANGPTL4 gene or ANGPTL4 regulatory elements that results in one or more permanent insertions, deletions or mutations of at least one nucleotide within or near the ANGPTL4 gene, thereby reducing or eliminating the expression or function of ANGPTL4 gene products.

2. An ex vivo method for treating a patient having an ANGPTL4 related condition or disorder comprising the steps of:
(a) isolating a hepatocyte from a patient;
(b) editing within or near an Angiopoietin-like 4 (ANGPTL4) gene or other DNA sequences that encode regulatory elements of the ANGPTL4 gene of the hepatocyte; and
(c) implanting said genome-edited hepatocyte into the patient.

3. The method of claim 2, wherein the editing step comprises introducing into the hepatocyte one or more deoxyribonucleic acid (DNA) endonucleases to effect one or more single-strand breaks (SSBs) or double-strand breaks (DSBs) within or near the ANGPTL4 gene or ANGPTL4 regulatory elements that results in one or more permanent insertions, deletions or mutations of at least one nucleotide within or near the ANGPTL4 gene, thereby reducing or eliminating the expression or function of ANGPTL4 gene products.

4. An ex vivo method for treating a patient having an ANGPTL4 related condition or disorder comprising the steps of:
(a) creating a patient specific induced pluripotent stem cell (iPSC);
(b) editing within or near an Angiopoietin-like 4 (ANGPTL4) gene or other DNA sequences that encode regulatory elements of the ANGPTL4 gene of the iPSC;
(c) differentiating the genome-edited iPSC into a hepatocyte; and
(d) implanting said hepatocyte into the patient.

5. The method of claim 4, wherein the editing step comprises introducing into the iPSC one or more deoxyribonucleic acid (DNA) endonucleases to effect one or more single-strand breaks (SSBs) or double-strand breaks (DSBs) within or near the ANGPTL4 gene or ANGPTL4 regulatory elements that results in one or more permanent insertions, deletions or mutations of at least one nucleotide within or near the ANGPTL4 gene, thereby reducing or eliminating the expression or function of ANGPTL4 gene products.

6. An ex vivo method for treating a patient having an ANGPTL4 related condition or disorder comprising the steps of:
(a) isolating a mesenchymal stem cell from the patient;
(b) editing within or near an Angiopoietin-like 4 (ANGPTL4) gene or other DNA sequences that encode regulatory elements of the ANGPTL4 gene of the mesenchymal stem cell;
(c) differentiating the genome-edited mesenchymal stem cell into a hepatocyte; and
(d) implanting the hepatocyte into the patient.

7. The method of claim 6, wherein the editing step comprises introducing into the mesenchymal stem cell one or more deoxyribonucleic acid (DNA) endonucleases to effect one or more single-strand breaks (SSBs) or double-strand breaks (DSBs) within or near the ANGPTL4 gene or ANGPTL4 regulatory elements that results in one or more permanent insertions, deletions or mutations of at least one nucleotide within or near the ANGPTL4 gene, thereby reducing or eliminating the expression or function of ANGPTL4 gene products.

8. An in vivo method for treating a patient with an ANGPTL4 related disorder comprising the step of editing the Angiopoietin-like 4 (ANGPTL4) gene in a cell of the patient.

9. The method of claim 8, wherein the editing step comprises introducing into the cell one or more deoxyribonucleic acid (DNA) endonucleases to effect one or more single-strand breaks (SSBs) or double-strand breaks (DSBs) within or near the ANGPTL4 gene or ANGPTL4 regulatory elements that results in one or more permanent insertions, deletions or mutations of at least one nucleotide within or near the ANGPTL4 gene, thereby reducing or eliminating the expression or function of ANGPTL4 gene products.

10. The method of claim 8, wherein the cell is a hepatocyte.

11. The method of claim 10, wherein the one or more deoxyribonucleic acid (DNA) endonuclease is delivered to the hepatocyte by local injection, systemic infusion, or combinations thereof.

12. A method of altering the contiguous genomic sequence of an ANGPTL4 gene in a cell comprising contacting said cell with one or more deoxyribonucleic acid (DNA) endonuclease to effect one or more single-strand breaks (SSBs) or double-strand breaks (DSBs).

13. The method of claim 12, wherein the alteration of the contiguous genomic sequence occurs in one or more exons of the ANGPTL4 gene.

14. The method of claim 1, wherein the one or more deoxyribonucleic acid (DNA) endonuclease is selected from any of those listed in SEQ ID NOs: 1-620, and variants having at least 70% homology to any of those listed in SEQ ID NOs: 1-620.

15. The method of claim 14, wherein the one or more deoxyribonucleic acid (DNA) endonuclease is one or more protein or polypeptide.

16. The method of claim 14, wherein the one or more deoxyribonucleic acid (DNA) endonuclease is one or more polynucleotide encoding the one or more DNA endonuclease.

17. The method of claim 16, wherein the one or more deoxyribonucleic acid (DNA) endonuclease is one or more ribonucleic acid (RNA) encoding the one or more DNA endonuclease.

18. The method of claim 17, wherein the one or more ribonucleic acid (RNA) is one or more chemically modified RNA.

19. The method of claim 18, wherein the one or more ribonucleic acid (RNA) is chemically modified in the coding region.

20. The method of claim 16, wherein the one or more polynucleotide or one or more ribonucleic acid (RNA) is codon optimized.

21. The method of claim 1, wherein the method further comprises introducing into the cell one or more gRNAs or one or more sgRNAs.

22. The method of claim 21, wherein the one or more gRNAs or one or more sgRNAs comprises a spacer sequence that is complementary to a segment of the coding sequence of the ANGPTL4 gene.

23. The method of claim 21, wherein the one or more gRNAs or one or more sgRNAs comprises a spacer sequence that is complementary to a sequence flanking the ANGPTL4 gene or other sequence that encodes a regulatory element of the ANGPTL4 gene.

24. The method of claim 21, wherein said one or more gRNAs or one or more sgRNAs is chemically modified.

25. The method of claim 21, wherein said one or more gRNAs or one or more sgRNAs is pre-complexed with the one or more deoxyribonucleic acid (DNA) endonuclease.

26. The method of claim 25, wherein the pre-complexing involves a covalent attachment of said one or more gRNAs or one or more sgRNAs to the one or more deoxyribonucleic acid (DNA) endonuclease.

27. The method of claim 14, wherein the one or more deoxyribonucleic acid (DNA) endonuclease is formulated in a liposome or lipid nanoparticle.

28. The method of claim 21, wherein the one or more deoxyribonucleic acid (DNA) endonuclease is formulated in a liposome or lipid nanoparticle which also comprises the one or more gRNAs or one or more sgRNAs.

29. The method of claim 12, wherein the one or more deoxyribonucleic acid (DNA) endonuclease is encoded in an AAV vector particle, where the AAV vector serotype is selected from the group consisting of any of those listed in SEQ ID NOs: 4,734-5,302 and in Table 2.

30. The method of claim 21, wherein the one or more gRNAs or one or more sgRNAs is encoded in an AAV vector particle, where the AAV vector serotype is selected from the group consisting of any of those listed in SEQ ID NOs: 4,734-5,302 and in Table 2.

31. The method of claim 21, wherein the one or more deoxyribonucleic acid (DNA) endonuclease is encoded in an AAV vector particle which also encodes the one or more gRNAs or one or more sgRNAs, where the AAV vector serotype is selected from the group consisting of any of those listed in SEQ ID NOs: 4,734-5,302 and in Table 2.

32. A single-molecule guide RNA comprising at least a spacer sequence that is an RNA sequence corresponding to any of SEQ ID NOs. 5305-19006.

33. The single-molecule guide RNA of claim 32, wherein the single-molecule guide RNA further comprises a spacer extension region.

34. The single-molecule guide RNA of claim 32, wherein the single-molecule guide RNA further comprises a tracrRNA extension region.

35. The single-molecule guide RNA of claim 32, wherein the single-molecule guide RNA is chemically modified.

36. The single-molecule guide RNA from claim 32, pre-complexed with a DNA endonuclease.

37. The single-molecule guide RNA of claim 36, wherein the DNA endonuclease is a Cas9 or Cpf1 endonuclease.

38. The single-molecule guide RNA of claim 37, wherein the Cas9 or Cpf1 endonuclease is selected from the group consisting of S. pyogenes Cas9, S. aureus Cas9, N. meningitides Cas9, S. thermophilus CRISPR1 Cas9, S. thermophilus CRISPR 3 Cas9, T. denticola Cas9, L. bacterium ND2006 Cpf1 and Acidaminococcus sp. BV3L6 Cpf1, and variants having at least 70% homology to said enzymes.

39. The single-molecule guide RNA of claim 38, wherein the Cas9 or Cpf1 endonuclease comprises one or more nuclear localization signals (NLSs).

40. The single-molecule guide RNA of claim 39, wherein at least one NLS is at or within 50 amino acids of the amino-terminus of the Cas9 or Cpf1 endonuclease and/or at least one NLS is at or within 50 amino acids of the carboxy-terminus of the Cas9 or Cpf1 endonuclease.

41. A DNA encoding the single-molecule guide RNA of claim 32.

42. A DNA encoding the single-molecule guide RNA of claim 36.

43. A vector comprising the DNA of claim 41.

44. The vector of claim 43, wherein the vector is a plasmid.

45. The vector of claim 43, wherein the vector is an AAV vector particle, said AAV vector serotype is selected from the group consisting of any of those listed in SEQ ID NOs: 4,734-5,302 and in Table 2.

The application's sequence listing, which the Patent Office published only in electronic form, follows.

SEQUENCE LISTING (19041 sequences)

SEQ ID NO: 1 - protein, 1368 aa, Streptococcus pyogenes [sequence omitted]

SEQ ID NO: 2 - DNA, 4107 bp, Streptococcus pyogenes
atggataagaaatactcaataggcttagatatcggcacaaatagcgtcggatgggcggtgatcactgatgaatataaggttccgtctaaaaagttcaaggttctgggaaatacagaccgccacagtatcaaaaaaaatcttataggggctcttttatttgacagtggagagacagcggaagcgactcgtctcaaacggacagctcgtagaaggtatacacgtcggaagaatcgtatttgttatctacaggagattttttcaaatgagatggcgaaagtagatgatagtttctttcatcgacttgaagagtcttttttggtggaagaagacaagaagcatgaacgtcatcctatttttggaaatatagtagatgaagttgcttatcatgagaaatatccaactatctatcatctgcgaaaaaaattggtagattctactgataaagcggatttgcgcttaatctatttggccttagcgcatatgattaagtttcgtggtcattttttgattgagggagatttaaatcctgataatagtgatgtggacaaactatttatccagttggtacaaacctacaatcaattatttgaagaaaaccctattaacgcaagtggagtagatgctaaagcgattctttctgcacgattgagtaaatcaagacgattagaaaatctcattgctcagctccccggtgagaagaaaaatggcttatttgggaatctcattgctttgtcattgggtttgacccctaattttaaatcaaattttgatttggcagaagatgctaaattacagctttcaaaagatacttacgatgatgatttagataatttattggcgcaaattggagatcaatatgctgatttgtttttggcagctaagaatttatcagatgctattttactttcagatatcctaagagtaaatactgaaataactaaggctcccctatcagcttcaatgattaaacgctacgatgaacatcatcaagacttgactcttttaaaagctttagttcgacaacaacttccagaaaagtataaagaaatcttttttgatcaatcaaaaaacggatatgcaggttatattgatgggggagctagccaagaagaattttataaatttatcaaaccaattttagaaaaaatggatggtactgaggaattattggtgaaactaaatcgtgaagatttgctgcgcaagcaacggacctttgacaacggctctattccccatcaaattcacttgggtgagctgcatgctattttgagaagacaagaagacttttatccatttttaaaagacaatcgtgagaagattgaaaaaatcttgacttttcgaattccttattatgttggtccattggcgcgtggcaatagtcgttttgcatggatgactcggaagtctgaagaaacaattaccccatggaattttgaagaagttgtcgataaaggtgcttcagctcaatcatttattgaacgcatgacaaactttgataaaaatcttccaaatgaaaaagtactaccaaaacatagtttgctttatgagtattttacggtttataacgaattgacaaaggtcaaatatgttactgaaggaatgcgaaaaccagcatttctttcaggtgaacagaagaaagccattgttgatttactcttcaaaacaaatcgaaaagtaaccgttaagcaattaaaagaagattatttcaaaaaaatagaatgttttgatagtgttgaaatttcaggagttgaagatagatttaatgcttcattaggtacctaccatgatttgctaaaaattattaaagataaagattttttggataatgaagaaaatgaagatatcttagaggatattgttttaacattgaccttatttgaagatagggagatgattgaggaaagacttaaaacatatgctcacctctttgatgataaggtgatgaaacagcttaaacgtcgccgttatactggttggggacgtttgtctcgaaaattgattaatggtattagggataagcaatctggcaaaacaatattagattttttgaaatcagatggttttgccaatcgcaattttatgcagctgatccatgatgatagtttgacatttaaagaagacattcaaaaagcacaagtgtctggacaaggcgatagtttacatgaacatattgcaaatttagctggtagccctgctattaaaaaaggtattttacagactgtaaaagttgttgatgaattggtcaaagtaatggggcggcataagccagaaaatatcgttattgaaatggcacgtgaaaatcagacaactcaaaagggccagaaaaattcgcgagagcgtatgaaacgaatcgaagaaggtatcaaagaattaggaagtcagattcttaaagagcatcctgttgaaaatactcaattgcaaaatgaaaagctctatctctattatctccaaaatggaagagacatgtatgtggaccaagaattagatattaatcgtttaagtgattatgatgtcgatcacattgttccacaaagtttccttaaagacgattcaatagacaataaggtcttaacgcgttctgataaaaatcgtggtaaatcggataacgttccaagtgaagaagtagtcaaaaagatgaaaaactattggagacaacttctaaacgccaagttaatcactcaacgtaagtttgataatttaacgaaagctgaacgtggaggtttgagtgaacttgataaagctggttttatcaaacgccaattggttgaaactcgccaaatcactaagcatgtggcacaaattttggatagtcgcatgaatactaaatacgatgaaaatgataaacttattcgagaggttaaagtgattaccttaaaatctaaattagtttctgacttccgaaaagatttccaattctataaagtacgtgagattaacaattaccatcatgcccatgatgcgtatctaaatgccgtcgttggaactgctttgattaagaaatatccaaaacttgaatcggagtttgtctatggtgattataaagtttatgatgttcgtaaaatgattgctaagtctgagcaagaaataggcaaagcaaccgcaaaatatttcttttactctaatatcatgaacttcttcaaaacagaaattacacttgcaaatggagagattcgcaaacgccctctaatcgaaactaatggggaaactggagaaattgtctgggataaagggcgagattttgccacagtgcgcaaagtattgtccatgccccaagtcaatattgtcaagaaaacagaagtacagacaggcggattctccaaggagtcaattttaccaaaaagaaattcggacaagcttattgctcgtaaaaaagactgggatccaaaaaaatatggtggttttgatagtccaacggtagcttattcagtcctagtggttgctaaggtggaaaaagggaaatcgaagaagttaaaatccgttaaagagttactagggatcacaattatggaaagaagttcctttgaaaaaaatccgattgactttttagaagctaaaggatataaggaagttaaaaaagacttaatcattaaactacctaaatatagtctttttgagttagaaaacggtcgtaaacggatgctggctagtgccggagaattacaaaaaggaaatgagctggctctgccaagcaaatatgtgaattttttatatttagctagtcattatgaaaagttgaagggtagtccagaagataacgaacaaaaacaattgtttgtggagcagcataagcattatttagatgagattattgagcaaatcagtgaattttctaagcgtgttattttagcagatgccaatttagataaagttcttagtgcatataacaaacatagagacaaaccaatacgtgaacaagcagaaaatattattcatttatttacgttgacgaatcttggagctcccgctgcttttaaatattttgatacaacaattgatcgtaaacgatatacgtctacaaaagaagttttagatgccactcttatccatcaatccatcactggtctttatgaaacacgcattgatttgagtcagctaggaggtgactga

SEQ ID NO: 3 - DNA, 4107 bp, Streptococcus pyogenes
atggacaagaagtactccattgggctcgctatcggcacaaacagcgtcggctgggccgtcattacggacgagtacaaggtgccgagcaaaaaattcaaagttctgggcaataccgatcgccacagcataaagaagaacctcattggcgccctcctgttcgactccggggagacggccgaagccacgcggctcaaaagaacagcacggcgcagatatacccgcagaaagaatcggatctgctacctgcaggagatctttagtaatgagatggctaaggtggatgactctttcttccataggctggaggagtcctttttggtggaggaggataaaaagcacgagcgccacccaatctttggcaatatcgtggacgaggtggcgtaccatgaaaagtacccaaccatatatcatctgaggaagaagcttgtagacagtactgataaggctgacttgcggttgatctatctcgcgctggcgcatatgatcaaatttcggggacacttcctcatcgagggggacctgaacccagacaacagcgatgtcgacaaactctttatccaactggttcagacttacaatcagcttttcgaagagaacccgatcaacgcatccggagttgacgccaaagcaatcctgagcgctaggctgtccaaatcccggcggctcgaaaacctcatcgcacagctccctggggagaagaagaacggcctgtttggtaatcttatcgccctgtcactcgggctgacccccaactttaaatctaacttcgacctggccgaagatgccaagcttcaactgagcaaagacacctacgatgatgatctcgacaatctgctggcccagatcggcgaccagtacgcagacctttttttggcggcaaagaacctgtcagacgccattctgctgagtgatattctgcgagtgaacacggagatcaccaaagctccgctgagcgctagtatgatcaagcgctatgatgagcaccaccaagacttgactttgctgaaggcccttgtcagacagcaactgcctgagaagtacaaggaaattttcttcgatcagtctaaaaatggctacgccggatacattgacggcggagcaagccaggaggaattttacaaatttattaagcccatcttggaaaaaatggacggcaccgaggagctgctggtaaagcttaacagagaagatctgttgcgcaaacagcgcactttcgacaatggaagcatcccccaccagattcacctgggcgaactgcacgctatcctcaggcggcaagaggatttctacccctttttgaaagataacagggaaaagattgagaaaatcctcacatttcggataccctactatgtaggccccctcgcccggggaaattccagattcgcgtggatgactcgcaaatcagaagagaccatcactccctggaacttcgaggaagtcgtggataagggggcctctgcccagtccttcatcgaaaggatgactaactttgataaaaatctgcctaacgaaaaggtgcttcctaaacactctctgctgtacgagtacttcacagtttataacgagctcaccaaggtcaaatacgtcacagaagggatgagaaagccagcattcctgtctggagagcagaagaaagctatcgtggacctcctcttcaagacgaaccggaaagttaccgtgaaacagctcaaagaagactatttcaaaaagattgaatgtttcgactctgttgaaatcagcggagtggaggatcgcttcaacgcatccctgggaacgtatcacgatctcctgaaaatcattaaagacaaggacttcctggacaatgaggagaacgaggacattcttgaggacattgtcctcacccttacgttgtttgaagatagggagatgattgaagaacgcttgaaaacttacgctcatctcttcgacgacaaagtcatgaaacagctcaagaggcgccgatatacaggatgggggcggctgtcaagaaaactgatcaatgggatccgagacaagcagagtggaaagacaatcctggattttcttaagtccgatggatttgccaaccggaacttcatgcagttgatccatgatgactctctcacctttaaggaggacatccagaaagcacaagtttctggccagggggacagtcttcacgagcacatcgctaatcttgcaggtagcccagctatcaaaaagggaatactgcagaccgttaaggtcgtggatgaactcgtcaaagtaatgggaaggcataagcccgagaatatcgttatcgagatggcccgagagaaccaaactacccagaagggacagaagaacagtagggaaaggatgaagaggattgaagagggtataaaagaactggggtcccaaatccttaaggaacacccagttgaaaacacccagcttcagaatgagaagctctacctgtactacctgcagaacggcagggacatgtacgtggatcaggaactggacatcaatcggctctccgactacgacgtggctgctatcgtgccccagtcttttctcaaagatgattctattgataataaagtgttgacaagatccgataaagctagagggaagagtgataacgtcccctcagaagaagttgtcaagaaaatgaaaaattattggcggcagctgctgaacgccaaactgatcacacaacggaagttcgataatctgactaaggctgaacgaggtggcctgtctgagttggataaagccggcttcatcaaaaggcagcttgttgagacacgccagatcaccaagcacgtggcccaaattctcgattcacgcatgaacaccaagtacgatgaaaatgacaaactgattcgagaggtgaaagttattactctgaagtctaagctggtctcagatttcagaaaggactttcagttttataaggtgagagagatcaacaattaccaccatgcgcatgatgcctacctgaatgcagtggtaggcactgcacttatcaaaaaatatcccaagcttgaatctgaatttgtttacggagactataaagtgtacgatgttaggaaaatgatcgcaaagtctgagcaggaaataggcaaggccaccgctaagtacttcttttacagcaatattatgaattttttcaagaccgagattacactggccaatggagagattcggaagcgaccacttatcgaaacaaacggagaaacaggagaaatcgtgtgggacaagggtagggatttcgcgacagtccggaaggtcctgtccatgccgcaggtgaacatcgttaaaaagaccgaagtacagaccggaggcttctccaaggaaagtatcctcccgaaaaggaacagcgacaagctgatcgcacgcaaaaaagattgggaccccaagaaatacggcggattcgattctcctacagtcgcttacagtgtactggttgtggccaaagtggagaaagggaagtctaaaaaactcaaaagcgtcaaggaactgctgggcatcacaatcatggagcgatcaagcttcgaaaaaaaccccatcgactttctcgaggcgaaaggatataaagaggtcaaaaaagacctcatcattaagcttcccaagtactctctctttgagcttgaaaacggccggaaacgaatgctcgctagtgcgggcgagctgcagaaaggtaacgagctggcactgccctctaaatacgttaatttcttgtatctggccagccactatgaaaagctcaaagggtctcccgaagataatgagcagaagcagctgttcgtggaacaacacaaacactaccttgatgagatcatcgagcaaataagcgaattctccaaaagagtgatcctcgccgacgctaacctcgataaggtgctttctgcttacaataagcacagggataagcccatcagggagcaggcagaaaacattatccacttgtttactctgaccaacttgggcgcgcctgcagccttcaagtacttcgacaccaccatagacagaaagcggtacacctctacaaaggaggtcctggacgccacactgattcatcagtcaattacggggctctatgaaacaagaatcgacctctctcagctcggtggagactaa

SEQ ID NO: 4 - DNA, 4140 bp, Streptococcus pyogenes
atggacaagaagtactccattgggctcgatatcggcacaaacagcgtcggctgggccgtcattacggacgagtacaaggtgccgagcaaaaaattcaaagttctgggcaataccgatcgccacagcataaagaagaacctcattggcgccctcctgttcgactccggggagacggccgaagccacgcggctcaaaagaacagcacggcgcagatatacccgcagaaagaatcggatctgctacctgcaggagatctttagtaatgagatggctaaggtggatgactctttcttccataggctggaggagtcctttttggtggaggaggataaaaagcacgagcgccacccaatctttggcaatatcgtggacgaggtggcgtaccatgaaaagtacccaaccatatatcatctgaggaagaagcttgtagacagtactgataaggctgacttgcggttgatctatctcgcgctggcgcatatgatcaaatttcggggacacttcctcatcgagggggacctgaacccagacaacagcgatgtcgacaaactctttatccaactggttcagacttacaatcagcttttcgaagagaacccgatcaacgcatccggagttgacgccaaagcaatcctgagcgctaggctgtccaaatcccggcggctcgaaaacctcatcgcacagctccctggggagaagaagaacggcctgtttggtaatcttatcgccctgtcactcgggctgacccccaactttaaatctaacttcgacctggccgaagatgccaagcttcaactgagcaaagacacctacgatgatgatctcgacaatctgctggcccagatcggcgaccagtacgcagacctttttttggcggcaaagaacctgtcagacgccattctgctgagtgatattctgcgagtgaacacggagatcaccaaagctccgctgagcgctagtatgatcaagcgctatgatgagcaccaccaagacttgactttgctgaaggcccttgtcagacagcaactgcctgagaagtacaaggaaattttcttcgatcagtctaaaaatggctacgccggatacattgacggcggagcaagccaggaggaattttacaaatttattaagcccatcttggaaaaaatggacggcaccgaggagctgctggtaaagcttaacagagaagatctgttgcgcaaacagcgcactttcgacaatggaagcatcccccaccagattcacctgggcgaactgcacgctatcctcaggcggcaagaggatttctacccctttttgaaagataacagggaaaagattgagaaaatcctcacatttcggataccctactatgtaggccccctcgcccggggaaattccagattcgcgtggatgactcgcaaatcagaagagaccatcactccctggaacttcgaggaagtcgtggataagggggcctctgcccagtccttcatcgaaaggatgactaactttgataaaaatctgcctaacgaaaaggtgcttcctaaacactctctgctgtacgagtacttcacagtttataacgagctcaccaaggtcaaatacgtcacagaagggatgagaaagccagcattcctgtctggagagcagaagaaagctatcgtggacctcctcttcaagacgaaccggaaagttaccgtgaaacagctcaaagaagactatttcaaaaagattgaatgtttcgactctgttgaaatcagcggagtggaggatcgcttcaacgcatccctgggaacgtatcacgatctcctgaaaatcattaaagacaaggacttcctggacaatgaggagaacgaggacattcttgaggacattgtcctcacccttacgttgtttgaagatagggagatgattgaagaacgcttgaaaacttacgctcatctcttcgacgacaaagtcatgaaacagctcaagaggcgccgatatacaggatgggggcggctgtcaagaaaactgatcaatgggatccgagacaagcagagtggaaagacaatcctggattttcttaagtccgatggatttgccaaccggaacttcatgcagttgatccatgatgactctctcacctttaaggaggacatccagaaagcacaagtttctggccagggggacagtcttcacgagcacatcgctaatcttgcaggtagcccagctatcaaaaagggaatactgcagaccgttaaggtcgtggatgaactcgtcaaagtaatgggaaggcataagcccgagaatatcgttatcgagatggcccgagagaaccaaactacccagaagggacagaagaacagtagggaaaggatgaagaggattgaagagggtataaaagaactggggtcccaaatccttaaggaacacccagttgaaaacacccagcttcagaatgagaagctctacctgtactacctgcagaacggcagggacatgtacgtggatcaggaactggacatcaatcggctctccgactacgacgtggatcatatcgtgccccagtcttttctcaaagatgattctattgataataaagtgttgacaagatccgataaaaatagagggaagagtgataacgtcccctcagaagaagttgtcaagaaaatgaaaaattattggcggcagctgctgaacgccaaactgatcacacaacggaagttcgataatctgactaaggctgaacgaggtggcctgtctgagttggataaagccggcttcatcaaaaggcagcttgttgagacacgccagatcaccaagcacgtggcccaaattctcgattcacgcatgaacaccaagtacgatgaaaatgacaaactgattcgagaggtgaaagttattactctgaagtctaagctggtctcagatttcagaaaggactttcagttttataaggtgagagagatcaacaattaccaccatgcgcatgatgcctacctgaatgcagtggtaggcactgcacttatcaaaaaatatcccaagcttgaatctgaatttgtttacggagactataaagtgtacgatgttaggaaaatgatcgcaaagtctgagcaggaaataggcaaggccaccgctaagtacttcttttacagcaatattatgaattttttcaagaccgagattacactggccaatggagagattcggaagcgaccacttatcgaaacaaacggagaaacaggagaaatcgtgtgggacaagggtagggatttcgcgacagtccggaaggtcctgtccatgccgcaggtgaacatcgttaaaaagaccgaagtacagaccggaggcttctccaaggaaagtatcctcccgaaaaggaacagcgacaagctgatcgcacgcaaaaaagattgggaccccaagaaatacggcggattcgattctcctacagtcgcttacagtgtactggttgtggccaaagtggagaaagggaagtctaaaaaactcaaaagcgtcaaggaactgctgggcatcacaatcatggagcgatcaagcttcgaaaaaaaccccatcgactttctcgaggcgaaaggatataaagaggtcaaaaaagacctcatcattaagcttcccaagtactctctctttgagcttgaaaacggccggaaacgaatgctcgctagtgcgggcgagctgcagaaaggtaacgagctggcactgccctctaaatacgttaatttcttgtatctggccagccactatgaaaagctcaaagggtctcccgaagataatgagcagaagcagctgttcgtggaacaacacaaacactaccttgatgagatcatcgagcaaataagcgaattctccaaaagagtgatcctcgccgacgctaacctcgataaggtgctttctgcttacaataagcacagggataagcccatcagggagcaggcagaaaacattatccacttgtttactctgaccaacttgggcgcgcctgcagccttcaagtacttcgacaccaccatagacagaaagcggtacacctctacaaaggaggtcctggacgccacactgattcatcagtcaattacggggctctatgaaacaagaatcgacctctctcagctcggtggagacagcagggctgaccccaagaagaagaggaaggtgtga

SEQ ID NO: 5 - DNA, 4200 bp, Streptococcus pyogenes
atggacaagaagtactccattgggctcgatatcggcacaaacagcgtcggctgggccgtcattacggacgagtacaaggtgccgagcaaaaaattcaaagttctgggcaataccgatcgccacagcataaagaagaacctcattggcgccctcctgttcgactccggggagacggccgaagccacgcggctcaaaagaacagcacggcgcagatatacccgcagaaagaatcggatctgctacctgcaggagatctttagtaatgagatggctaaggtggatgactctttcttccataggctggaggagtcctttttggtggaggaggataaaaagcacgagcgccacccaatctttggcaatatcgtggacgaggtggcgtaccatgaaaagtacccaaccatatatcatctgaggaagaagcttgtagacagtactgataaggctgacttgcggttgatctatctcgcgctggcgcatatgatcaaatttcggggacacttcctcatcgagggggacctgaacccagacaacagcgatgtcgacaaactctttatccaactggttcagacttacaatcagcttttcgaagagaacccgatcaacgcatccggagttgacgccaaagcaatcctgagcgctaggctgtccaaatcccggcggctcgaaaacctcatcgcacagctccctggggagaagaagaacggcctgtttggtaatcttatcgccctgtcactcgggctgacccccaactttaaatctaacttcgacctggccgaagatgccaagcttcaactgagcaaagacacctacgatgatgatctcgacaatctgctggcccagatcggcgaccagtacgcagacctttttttggcggcaaagaacctgtcagacgccattctgctgagtgatattctgcgagtgaacacggagatcaccaaagctccgctgagcgctagtatgatcaagcgctatgatgagcaccaccaagacttgactttgctgaaggcccttgtcagacagcaactgcctgagaagtacaaggaaattttcttcgatcagtctaaaaatggctacgccggatacattgacggcggagcaagccaggaggaattttacaaatttattaagcccatcttggaaaaaatggacggcaccgaggagctgctggtaaagcttaacagagaagatctgttgcgcaaacagcgcactttcgacaatggaagcatcccccaccagattcacctgggcgaactgcacgctatcctcaggcggcaagaggatttctacccctttttgaaagataacagggaaaagattgagaaaatcctcacatttcggataccctactatgtaggccccctcgcccggggaaattccagattcgcgtggatgactcgcaaatcagaagagaccatcactccctggaacttcgaggaagtcgtggataagggggcctctgcccagtccttcatcgaaaggatgactaactttgataaaaatctgcctaacgaaaaggtgcttcctaaacactctctgctgtacgagtacttcacagtttataacgagctcaccaaggtcaaatacgtcacagaagggatgagaaagccagcattcctgtctggagagcagaagaaagctatcgtggacctcctcttcaagacgaaccggaaagttaccgtgaaacagctcaaagaagactatttcaaaaagattgaatgtttcgactctgttgaaatcagcggagtggaggatcgcttcaacgcatccctgggaacgtatcacgatctcctgaaaatcattaaagacaaggacttcctggacaatgaggagaacgaggacattcttgaggacattgtcctcacccttacgttgtttgaagatagggagatgattgaagaacgcttgaaaacttacgctcatctcttcgacgacaaagtcatgaaacagctcaagaggcgccgatatacaggatgggggcggctgtcaagaaaactgatcaatgggatccgagacaagcagagtggaaagacaatcctggattttcttaagtccgatggatttgccaaccggaacttcatgcagttgatccatgatgactctctcacctttaaggaggacatccagaaagcacaagtttctggccagggggacagtcttcacgagcacatcgctaatcttgcaggtagcccagctatcaaaaagggaatactgcagaccgttaaggtcgtggatgaactcgtcaaagtaatgggaaggcataagcccgagaatatcgttatcgagatggcccgagagaaccaaactacccagaagggacagaagaacagtagggaaaggatgaagaggattgaagagggtataaaagaactggggtcccaaatccttaaggaacacccagttgaaaacacccagcttcagaatgagaagctctacctgtactacctgcagaacggcagggacatgtacgtggatcaggaactggacatcaatcggctctccgactacgacgtggatcatatcgtgccccagtcttttctcaaagatgattctattgataataaagtgttgacaagatccgataaaaatagagggaagagtgataacgtcccctcagaagaagttgtcaagaaaatgaaaaattattggcggcagctgctgaacgccaaactgatcacacaacggaagttcgataatctgactaaggctgaacgaggtggcctgtctgagttggataaagccggcttcatcaaaaggcagcttgttgagacacgccagatcaccaagcacgtggcccaaattctcgattcacgcatgaacaccaagtacgatgaaaatgacaaactgattcgagaggtgaaagttattactctgaagtctaagctggtctcagatttcagaaaggactttcagttttataaggtgagagagatcaacaattaccaccatgcgcatgatgcctacctgaatgcagtggtaggcactgcacttatcaaaaaatatcccaagcttgaatctgaatttgtttacggagactataaagtgtacgatgttaggaaaatgatcgcaaagtctgagcaggaaataggcaaggccaccgctaagtacttcttttacagcaatattatgaattttttcaagaccgagattacactggccaatggagagattcggaagcgaccacttatcgaaacaaacggagaaacaggagaaatcgtgtgggacaagggtagggatttcgcgacagtccggaaggtcctgtccatgccgcaggtgaacatcgttaaaaagaccgaagtacagaccggaggcttctccaaggaaagtatcctcccgaaaaggaacagcgacaagctgatcgcacgcaaaaaagattgggaccccaagaaatacggcggattcgattctcctacagtcgcttacagtgtactggttgtggccaaagtggagaaagggaagtctaaaaaactcaaaagcgtcaaggaactgctgggcatcacaatcatggagcgatcaagcttcgaaaaaaaccccatcgactttctcgaggcgaaaggatataaagaggtcaaaaaagacctcatcattaagcttcccaagtactctctctttgagcttgaaaacggccggaaacgaatgctcgctagtgcgggcgagctgcagaaaggtaacgagctggcactgccctctaaatacgttaatttcttgtatctggccagccactatgaaaagctcaaagggtctcccgaagataatgagcagaagcagctgttcgtggaacaacacaaacactaccttgatgagatcatcgagcaaataagcgaattctccaaaagagtgatcctcgccgacgctaacctcgataaggtgctttctgcttacaataagcacagggataagcccatcagggagcaggcagaaaacattatccacttgtttactctgaccaacttgggcgcgcctgcagccttcaagtacttcgacaccaccatagacagaaagcggtacacctctacaaaggaggtcctggacgccacactgattcatcagtcaattacggggctctatgaaacaagaatcgacctctctcagctcggtggagacgcggccgcagatccaaaaaagaagagaaaggtagatccaaaaaagaagagaaaggtagatccaaaaaagaagagaaaggtagatacggccgcatag

SEQ ID NO: 6 - DNA, 4326 bp, Streptococcus pyogenes
atggacaagaagtactccattgggctcgctatcggcacaaacagcgtcggctgggccgtcattacggacgagtacaaggtgccgagcaaaaaattcaaagttctgggcaataccgatcgccacagcataaagaagaacctcattggcgccctcctgttcgactccggggagacggccgaagccacgcggctcaaaagaacagcacggcgcagatatacccgcagaaagaatcggatctgctacctgcaggagatctttagtaatgagatggctaaggtggatgactctttcttccataggctggaggagtcctttttggtggaggaggataaaaagcacgagcgccacccaatctttggcaatatcgtggacgaggtggcgtaccatgaaaagtacccaaccatatatcatctgaggaagaagcttgtagacagtactgataaggctgacttgcggttgatctatctcgcgctggcgcatatgatcaaatttcggggacacttcctcatcgagggggacctgaacccagacaacagcgatgtcgacaaactctttatccaactggttcagacttacaatcagcttttcgaagagaacccgatcaacgcatccggagttgacgccaaagcaatcctgagcgctaggctgtccaaatcccggcggctcgaaaacctcatcgcacagctccctggggagaagaagaacggcctgtttggtaatcttatcgccctgtcactcgggctgacccccaactttaaatctaacttcgacctggccgaagatgccaagcttcaactgagcaaagacacctacgatgatgatctcgacaatctgctggcccagatcggcgaccagtacgcagacctttttttggcggcaaagaacctgtcagacgccattctgctgagtgatattctgcgagtgaacacggagatcaccaaagctccgctgagcgctagtatgatcaagcgctatgatgagcaccaccaagacttgactttgctgaaggcccttgtcagacagcaactgcctgagaagtacaaggaaattttcttcgatcagtctaaaaatggctacgccggatacattgacggcggagcaagccaggaggaattttacaaatttattaagcccatcttggaaaaaatggacggcaccgaggagctgctggtaaagcttaacagagaagatctgttgcgcaaacagcgcactttcgacaatggaagcatcccccaccagattcacctgggcgaactgcacgctatcctcaggcggcaagaggatttctacccctttttgaaagataacagggaaaagattgagaaaatcctcacatttcggataccctactatgtaggccccctcgcccggggaaattccagattcgcgtggatgactcgcaaatcagaagagaccatcactccctggaacttcgaggaagtcgtggataagggggcctctgcccagtccttcatcgaaaggatgactaactttgataaaaatctgcctaacgaaaaggtgcttcctaaacactctctgctgtacgagtacttcacagtttataacgagctcaccaaggtcaaatacgtcacagaagggatgagaaagccagcattcctgtctggagagcagaagaaagctatcgtggacctcctcttcaagacgaaccggaaagttaccgtgaaacagctcaaagaagactatttcaaaaagattgaatgtttcgactctgttgaaatcagcggagtggaggatcgcttcaacgcatccctgggaacgtatcacgatctcctgaaaatcattaaagacaaggacttcctggacaatgaggagaacgaggacattcttgaggacattgtcctcacccttacgttgtttgaagatagggagatgattgaagaacgcttgaaaacttacgctcatctcttcgacgacaaagtcatgaaacagctcaagaggcgccgatatacaggatgggggcggctgtcaagaaaactgatcaatgggatccgagacaagcagagtggaaagacaatcctggattttcttaagtccgatggatttgccaaccggaacttcatgcagttgatccatgatgactctctcacctttaaggaggacatccagaaagcacaagtttctggccagggggacagtcttcacgagcacatcgctaatcttgcaggtagcccagctatcaaaaagggaatactgcagaccgttaaggtcgtggatgaactcgtcaaagtaatgggaaggcataagcccgagaatatcgttatcgagatggcccgagagaaccaaactacccagaagggacagaagaacagtagggaaaggatgaagaggattgaagagggtataaaagaactggggtcccaaatccttaaggaacacccagttgaaaacacccagcttcagaatgagaagctctacctgtactacctgcagaacggcagggacatgtacgtggatcaggaactggacatcaatcggctctccgactacgacgtggctgctatcgtgccccagtcttttctcaaagatgattctattgataataaagtgttgacaagatccgataaagctagagggaagagtgataacgtcccctcagaagaagttgtcaagaaaatgaaaaattattggcggcagctgctgaacgccaaactgatcacacaacggaagttcgataatctgactaaggctgaacgaggtggcctgtctgagttggataaagccggcttcatcaaaaggcagcttgttgagacacgccagatcaccaagcacgtggcccaaattctcgattcacgcatgaacaccaagtacgatgaaaatgacaaactgattcgagaggtgaaagttattactctgaagtctaagctggtctcagatttcagaaaggactttcagttttataaggtgagagagatcaacaattaccaccatgcgcatgatgcctacctgaatgcagtggtaggcactgcacttatcaaaaaatatcccaagcttgaatctgaatttgtttacggagactataaagtgtacgatgttaggaaaatgatcgcaaagtctgagcaggaaataggcaaggccaccgctaagtacttcttttacagcaatattatgaattttttcaagaccgagattacactggccaatggagagattcggaagcgaccacttatcgaaacaaacggagaaacaggagaaatcgtgtgggacaagggtagggatttcgcgacagtccggaaggtcctgtccatgccgcaggtgaacatcgttaaaaagaccgaagtacagaccggaggcttctccaaggaaagtatcctcccgaaaaggaacagcgacaagctgatcgcacgcaaaaaagattgggaccccaagaaatacggcggattcgattctcctacagtcgcttacagtgtactggttgtggccaaagtggagaaagggaagtctaaaaaactcaaaagcgtcaaggaactgctgggcatcacaatcatggagcgatcaagcttcgaaaaaaaccccatcgactttctcgaggcgaaaggatataaagaggtcaaaaaagacctcatcattaagcttcccaagtactctctctttgagcttgaaaacggccggaaacgaatgctcgctagtgcgggcgagctgcagaaaggtaacgagctggcactgccctctaaatacgttaatttcttgtatctggccagccactatgaaaagctcaaagggtctcccgaagataatgagcagaagcagctgttcgtggaacaacacaaacactaccttgatgagatcatcgagcaaataagcgaattctccaaaagagtgatcctcgccgacgctaacctcgataaggtgctttctgcttacaataagcacagggataagcccatcagggagcaggcagaaaacattatccacttgtttactctgaccaacttgggcgcgcctgcagccttcaagtacttcgacaccaccatagacagaaagcggtacacctctacaaaggaggtcctggacgccacactgattcatcagtcaattacggggctctatgaaacaagaatcgacctctctcagctcggtggagacagcagggctgaccccaagaagaagaggaaggtggaggccagcggttccggacgggctgacgcattggacgattttgatctggatatgctgggaagtgacgccctcgatgattttgaccttgacatgcttggttcggatgcccttgatgactttgacctcgacatgctcggcagtgacgcccttgatgatttcgacctggacatgctgattaactctagatga

SEQ ID NO: 7 - DNA, 4359 bp, Streptococcus pyogenes
atgcccaagaagaagaggaaggtgggaagggggatggacaagaagtactccattgggctcgctatcggcacaaacagcgtcggctgggccgtcattacggacgagtacaaggtgccgagcaaaaaattcaaagttctgggcaataccgatcgccacagcataaagaagaacctcattggcgccctcctgttcgactccggggagacggccgaagccacgcggctcaaaagaacagcacggcgcagatatacccgcagaaagaatcggatctgctacctgcaggagatctttagtaatgagatggctaaggtggatgactctttcttccataggctggaggagtcctttttggtggaggaggataaaaagcacgagcgccacccaatctttggcaatatcgtggacgaggtggcgtaccatgaaaagtacccaaccatatatcatctgaggaagaagcttgtagacagtactgataaggctgacttgcggttgatctatctcgcgctggcgcatatgatcaaatttcggggacacttcctcatcgagggggacctgaacccagacaacagcgatgtcgacaaactctttatccaactggttcagacttacaatcagcttttcgaagagaacccgatcaacgcatccggagttgacgccaaagcaatcctgagcgctaggctgtccaaatcccggcggctcgaaaacctcatcgcacagctccctggggagaagaagaacggcctgtttggtaatcttatcgccctgtcactcgggctgacccccaactttaaatctaacttcgacctggccgaagatgccaagcttcaactgagcaaagacacctacgatgatgatctcgacaatctgctggcccagatcggcgaccagtacgcagacctttttttggcggcaaagaacctgtcagacgccattctgctgagtgatattctgcgagtgaacacggagatcaccaaagctccgctgagcgctagtatgatcaagcgctatgatgagcaccaccaagacttgactttgctgaaggcccttgtcagacagcaactgcctgagaagtacaaggaaattttcttcgatcagtctaaaaatggctacgccggatacattgacggcggagcaagccaggaggaattttacaaatttattaagcccatcttggaaaaaatggacggcaccgaggagctgctggtaaagcttaacagagaagatctgttgcgcaaacagcgcactttcgacaatggaagcatcccccaccagattcacctgggcgaactgcacgctatcctcaggcggcaagaggatttctacccctttttgaaagataacagggaaaagattgagaaaatcctcacatttcggataccctactatgtaggccccctcgcccggggaaattccagattcgcgtggatgactcgcaaatcagaagagaccatcactccctggaacttcgaggaagtcgtggataagggggcctctgcccagtccttcatcgaaaggatgactaactttgataaaaatctgcctaacgaaaaggtgcttcctaaacactctctgctgtacgagtacttcacagtttataacgagctcaccaaggtcaaatacgtcacagaagggatgagaaagccagcattcctgtctggagagcagaagaaagctatcgtggacctcctcttcaagacgaaccggaaagttaccgtgaaacagctcaaagaagactatttcaaaaagattgaatgtttcgactctgttgaaatcagcggagtggaggatcgcttcaacgcatccctgggaacgtatcacgatctcctgaaaatcattaaagacaaggacttcctggacaatgaggagaacgaggacattcttgaggacattgtcctcacccttacgttgtttgaagatagggagatgattgaagaacgcttgaaaacttacgctcatctcttcgacgacaaagtcatgaaacagctcaagaggcgccgatatacaggatgggggcggctgtcaagaaaactgatcaatgggatccgagacaagcagagtggaaagacaatcctggattttcttaagtccgatggatttgccaaccggaacttcatgcagttgatccatgatgactctctcacctttaaggaggacatccagaaagcacaagtttctggccagggggacagtcttcacgagcacatcgctaatcttgcaggtagcccagctatcaaaaagggaatactgcagaccgttaaggtcgtggatgaactcgtcaaagtaatgggaaggcataagcccgagaatatcgttatcgagatggcccgagagaaccaaactacccagaagggacagaagaacagtagggaaaggatgaagaggattgaagagggtataaaagaactggggtcccaaatccttaaggaacacccagttgaaaacacccagcttcagaatgagaagctctacctgtactacctgcagaacggcagggacatgtacgtggatcaggaactggacatcaatcggctctccgactacgacgtggctgctatcgtgccccagtcttttctcaaagatgattctattgataataaagtgttgacaagatccgataaagctagagggaagagtgataacgtcccctcagaagaagttgtcaagaaaatgaaaaattattggcggcagctgctgaacgccaaactgatcacacaacggaagttcgataatctgactaaggctgaacgaggtggcctgtctgagttggataaagccggcttcatcaaaaggcagcttgttgagacacgccagatcaccaagcacgtggcccaaattctcgattcacgcatgaacaccaagtacgatgaaaatgacaaactgattcgagaggtgaaagttattactctgaagtctaagctggtctcagatttcagaaaggactttcagttttataaggtgagagagatcaacaattaccaccatgcgcatgatgcctacctgaatgcagtggtaggcactgcacttatcaaaaaatatcccaagcttgaatctgaatttgtttacggagactataaagtgtacgatgttaggaaaatgatcgcaaagtctgagcaggaaataggcaaggccaccgctaagtacttcttttacagcaatattatgaattttttcaagaccgagattacactggccaatggagagattcggaagcgaccacttatcgaaacaaacggagaaacaggagaaatcgtgtgggacaagggtagggatttcgcgacagtccggaaggtcctgtccatgccgcaggtgaacatcgttaaaaagaccgaagtacagaccggaggcttctccaaggaaagtatcctcccgaaaaggaacagcgacaagctgatcgcacgcaaaaaagattgggaccccaagaaatacggcggattcgattctcctacagtcgcttacagtgtactggttgtggccaaagtggagaaagggaagtctaaaaaactcaaaagcgtcaaggaactgctgggcatcacaatcatggagcgatcaagcttcgaaaaaaaccccatcgactttctcgaggcgaaaggatataaagaggtcaaaaaagacctcatcattaagcttcccaagtactctctctttgagcttgaaaacggccggaaacgaatgctcgctagtgcgggcgagctgcagaaaggtaacgagctggcactgccctctaaatacgttaatttcttgtatctggccagccactatgaaaagctcaaagggtctcccgaagataatgagcagaagcagctgttcgtggaacaacacaaacactaccttgatgagatcatcgagcaaataagcgaattctccaaaagagtgatcctcgccgacgctaacctcgataaggtgctttctgcttacaataagcacagggataagcccatcagggagcaggcagaaaacattatccacttgtttactctgaccaacttgggcgcgcctgcagccttcaagtacttcgacaccaccatagacagaaagcggtacacctctacaaaggaggtcctggacgccacactgattcatcagtcaattacggggctctatgaaacaagaatcgacctctctcagctcggtggagacagcagggctgaccccaagaagaagaggaaggtggaggccagcggttccggacgggctgacgcattggacgattttgatctggatatgctgggaagtgacgccctcgatgattttgaccttgacatgcttggttcggatgcccttgatgactttgacctcgacatgctcggcagtgacgcccttgatgatttcgacctggacatgctgattaactctagatga

SEQ ID NO: 8 - protein, 1409 aa, Streptococcus thermophiles
MLFNKCIIISINLDFSNKEKCMTKPYSIGLDIGTNSVGWAVITDNYKVPSKKMKVLGNTSKKYIKKNLLGVLLFDSGITAEGRRLKRTARRRYTRRRNRILYLQEIFSTEMATLDDAFFQRLDDSFLVPDDKRDSKYPIFGNLVEEKVYHDEFPTIYHLRKYLADSTKKADLRLVYLALAHMIKYRGHFLIEGEFNSKNNDIQKNFQDFLDTYNAIFESDLSLENSKQLEEIVKDKISKLEKKDRILKLFPGEKNSGIFSEFLKLIVGNQADFRKCFNLDEKASLHFSKESYDEDLETLLGYIGDDYSDVFLKAKKLYDAILLSGFLTVTDNETEAPLSSAMIKRYNEHKEDLALLKEYIRNISLKTYNEVFKDDTKNGYAGYIDGKTNQEDFYVYLKNLLAEFEGADYFLEKIDREDFLRKQRTFDNGSIPYQIHLQEMRAILDKQAKFYPFLAKNKERIEKILTFRIPYYVGPLARGNSDFAWSIRKRNEKITPWNFEDVIDKESSAEAFINRMTSFDLYLPEEKVLPKHSLLYETFNVYNELTKVRFIAESMRDYQFLDSKQKKDIVRLYFKDKRKVTDKDIIEYLHAIYGYDGIELKGIEKQFNSSLSTYHDLLNIINDKEFLDDSSNEAIIEEIIHTLTIFEDREMIKQRLSKFENIFDKSVLKKLSRRHYTGWGKLSAKLINGIRDEKSGNTILDYLIDDGISNRNFMQLIHDDALSFKKKIQKAQIIGDEDKGNIKEVVKSLPGSPAIKKGILQSIKIVDELVKVMGGRKPESIVVEMARENQYTNQGKSNSQQRLKRLEKSLKELGSKILKENIPAKLSKIDNNALQNDRLYLYYLQNGKDMYTGDDLDIDRLSNYDIDHIIPQAFLKDNSIDNKVLVSSASNRGKSDDFPSLEVVKKRKTFWYQLLKSKLISQRKFDNLTKAERGGLLPEDKAGFIQRQLVETRQITKHVARLLDEKFNNKKDENNRAVRTVKIITLKSTLVSQFRKDFELYKVREINDFHHAHDAYLNAVIASALLKKYPKLEPEFVYGDYPKYNSFRERKSATEKVYFYSNIMNIFKKSISLADGRVIERPLIEVNEETGESVWNKESDLATVRRVLSYPQVNVVKKVEEQNHGLDRGKPKGLFNANLSSKPKPNSNENLVGAKEYLDPKKYGGYAGISNSFAVLVKGTIEKGAKKKITNVLEFQGISILDRINYRKDKLNFLLEKGYKDIELIIELPKYSLFELSDGSRRMLASILSTNNKRGEIHKGNQIFLSQKFVKLLYHAKRISNTINENHRKYVENHKKEFEELFYYILEFNENYVGAKKNGKLLNSAFQSWQNHSIDELCSSFIGPTGSERKGLFELTSRGSAADFEFLGVKIPRYRDYTPSSLLKDATLIHQSVTGLYETRIDLAKLGEG

SEQ ID NO: 9 - DNA, 4167 bp, Streptococcus thermophiles
atgactaagccatactcaattggacttgatattggaacgaatagtgttggatgggctgtaataactgataattacaaggttccgtctaaaaaaatgaaagtcttaggaaatacgagtaaaaagtatatcaaaaagaacctgttaggtgtattactctttgactctggaatcacagcagaaggaagaagattgaagcgtactgcaagaagacgttatactagacgccgtaatcgtatcctttatttgcaggaaatttttagcacggagatggctacattagatgatgctttctttcaaagacttgacgattcgtttttagttcctgatgataaacgtgatagtaagtatccgatatttggaaacttagtagaagaaaaagtctatcatgatgaatttccaactatctatcatttaaggaaatatttagcagatagtactaaaaaagcagatttgcgtctagtttatcttgcattggctcatatgattaaatatagaggtcacttcttaattgaaggagagtttaattcaaaaaataatgatattcagaagaattttcaagactttttggacacttataatgctatttttgaatcggatttatcacttgagaatagtaaacaacttgaggaaattgttaaagataagattagtaaattagaaaagaaagatcgtattttaaaactcttccctggggagaagaattcggggattttttcagagtttctaaagttgattgtaggaaatcaagctgattttaggaaatgttttaatttagacgaaaaagcctccttacatttttccaaagaaagctatgatgaagatttagagactttgttaggttatattggagatgattacagtgatgtctttctcaaagcaaagaaactttatgatgctattcttttatcgggttttctgactgtaactgataatgagacagaagcacctctctcttctgctatgataaagcgatataatgaacacaaagaagatttagcgttactaaaggaatatataagaaatatttcactaaaaacgtataatgaagtatttaaagatgacaccaaaaatggttatgctggttatattgatggaaaaacaaatcaggaagatttctacgtatatctaaaaaacctattggctgaatttgaaggtgcggattattttcttgaaaaaattgatcgagaagattttttgagaaagcaacgtacatttgacaatggttcgataccatatcagattcatcttcaagaaatgagagcaattcttgataagcaagctaaattttatcctttcttggctaaaaataaagaaagaatcgagaagattttaaccttccgaattccttattatgtaggtccacttgcgagagggaatagtgattttgcctggtcaataagaaaacgaaatgaaaaaattacaccttggaattttgaggacgttattgacaaagaatcttcggcagaggctttcattaatcgaatgactagttttgatttgtatttgccagaagagaaggtacttccaaagcatagtctcttatacgaaacttttaatgtatataatgaattaacaaaagttagatttattgccgaaagtatgagagattatcaatttttagatagtaagcagaagaaagatattgttagactttattttaaagataaaaggaaagttactgataaggatattattgaatatttacatgcaatttatgggtatgatggaattgaattaaaaggcatagagaaacagtttaattctagtttatctacttatcacgatcttttaaatattattaatgataaagagtttttggatgatagttcaaatgaagcgattatcgaagaaattatccatactttgacaatttttgaagatagagagatgataaaacaacgtctttcaaaatttgagaatatattcgataaatccgttttgaaaaagttatctcgtagacattacactggctggggtaagttatctgctaagcttattaatggtattcgagatgaaaaatctggtaatactattcttgattacttaattgatgatggtatttctaaccgtaatttcatgcaacttattcacgatgatgctctttcttttaaaaagaagatacagaaagcacaaattattggtgacgaagataaaggtaatattaaagaggtcgttaagtctttgccaggtagtcctgcgattaaaaaaggtattttacaaagcataaaaattgtagatgaattggtcaaagtaatgggaggaagaaaacccgagtcaattgttgttgagatggctcgtgaaaatcaatataccaatcaaggtaagtctaattcccaacaacgcttgaaacgtttagaaaaatctctcaaagagttaggtagtaagatacttaaggaaaatattcctgcaaaactttctaaaatagacaataacgcacttcaaaatgatcgactttacttatactatcttcaaaatggaaaagatatgtataccggagatgatttagatattgatagattaagtaattatgatattgatcatattattcctcaagcttttttgaaagataattctattgacaataaagtacttgtttcatctgctagtaaccgtggtaaatcagatgattttccaagtttagaggttgtcaaaaaaagaaagacattttggtatcaattattgaaatcaaaattaatttctcaacgaaaatttgataatctgacaaaagctgaacggggaggattgttacctgaggacaaagctggttttattcaacgccagttggttgaaacacgtcaaataacaaaacatgtagctcgtttacttgatgagaaatttaataataaaaaagatgaaaataatagagcggtacgaacagtaaaaattattaccttgaaatctaccttagtttctcaatttcgtaaggattttgaactttataaagttcgtgaaatcaatgattttcatcatgctcatgatgcttacttgaatgccgttatagcaagtgctttacttaagaaataccctaaactagagccagaatttgtgtacggtgattatccaaaatacaatagttttagagaaagaaagtccgctacagaaaaggtatatttctattcaaatatcatgaatatctttaaaaaatctatttctttagctgatggtagagttattgaaagaccacttattgaggtaaatgaggagaccggcgaatccgtttggaataaagaatctgatttagcaactgtaaggagagtactctcttatccgcaagtaaatgttgtgaaaaaagttgaggaacagaatcacggattggatagaggaaaaccaaagggattgtttaatgcaaatctttcctcaaagccaaaaccaaatagtaatgaaaatttagtaggtgctaaagagtatcttgaccccaaaaagtatggggggtatgctggaatttctaattcttttgctgttcttgttaaagggacaattgaaaaaggtgctaagaaaaaaataacaaatgtactagaatttcaaggtatttctattttagataggattaattatagaaaagataaacttaattttttacttgaaaaaggttataaagatattgagttaattattgaactacctaaatatagtttatttgaactttcagatggttcacgtcgtatgttggctagtattttgtcaacgaataataagaggggagagattcacaaaggaaatcagatttttctttcacagaagtttgtgaaattactttatcatgctaagagaataagtaacacaattaatgagaatcatagaaaatatgttgagaaccataaaaaagagtttgaagaattattttactacattcttgagtttaatgagaattatgttggagctaaaaagaatggtaaacttttaaactctgcctttcaatcttggcaaaatcatagtatagatgaactctgtagtagttttataggacctaccggaagtgaaagaaaggggctatttgaattaacctctcgtggaagtgctgctgattttgaatttttaggtgttaaaattccaaggtatagagactataccccatcatccctattaaaagatgccacacttattcatcaatctgttacaggcctctatgaaacacgaatagaccttgccaaactaggagagggttaa

SEQ ID NO: 10 - DNA, 3366 bp, Streptococcus thermophilus
atgagcgacctggtgctgggcctggacatcggcatcggcagcgtgggcgtgggcatcctgaacaaggtgaccggcgagatcatccacaagaacagtcgcatcttccctgctgctcaggctgagaacaacctggtgcgccgcaccaaccgccagggtcgccggcttgctcgccgcaagaagcaccggcgcgtgcgcctgaaccgcctgttcgaggagagcggcctgatcaccgacttcaccaagatcagcatcaacctgaacccctaccagctgcgcgtgaagggcctgaccgacgagctgagcaacgaggagctgttcatcgccctgaagaacatggtgaagcaccgcggcatcagctacctggacgacgccagcgacgacggcaacagcagcgtgggcgactacgcccagatcgtgaaggagaacagcaagcagctggagaccaagacccccggccagatccagctggagcgctaccagacctacggccagctgcgcggcgacttcaccgtggagaaggacggcaagaagcaccgcctgatcaacgtgttccccaccagcgcctaccgcagcgaggccctgcgcatcctgcagacccagcaggagttcaacccccagatcaccgacgagttcatcaaccgctacctggagatcctgaccggcaagcgcaagtactaccacggccccggcaacgagaagagccgcaccgactacggccgctaccgcaccagcggcgagaccctggacaacatcttcggcatcctgatcggcaagtgcaccttctaccccgacgagttccgcgccgccaaggccagctacaccgcccaggagttcaacctgctgaacgacctgaacaacctgaccgtgcccaccgagaccaagaagctgagcaaggagcagaagaaccagatcatcaactacgtgaagaacgagaaggccatgggccccgccaagctgttcaagtacatcgccaagctgctgagctgcgacgtggccgacatcaagggctaccgcatcgacaagagcggcaaggccgagatccacaccttcgaggcctaccgcaagatgaagaccctggagaccctggacatcgagcagatggaccgcgagaccctggacaagctggcctacgtgctgaccctgaacaccgagcgcgagggcatccaggaggccctggagcacgagttcgccgacggcagcttcagccagaagcaggtggacgagctggtgcagttccgcaaggccaacagcagcatcttcggcaagggctggcacaacttcagcgtgaagctgatgatggagctgatccccgagctgtacgagaccagcgaggagcagatgaccatcctgacccgcctgggcaagcagaagaccaccagcagcagcaacaagaccaagtacatcgacgagaagctgctgaccgaggagatctacaaccccgtggtggccaagagcgtgcgccaggccatcaagatcgtgaacgccgccatcaaggagtacggcgacttcgacaacatcgtgatcgagatggcccgcgagaccaacgaggacgacgagaagaaggccatccagaagatccagaaggccaacaaggacgagaaggacgccgccatgctgaaggccgccaaccagtacaacggcaaggccgagctgccccacagcgtgttccacggccacaagcagctggccaccaagatccgcctgtggcaccagcagggcgagcgctgcctgtacaccggcaagaccatcagcatccacgacctgatcaacaacagcaaccagttcgaggtggaccacatcctgcccctgagcatcaccttcgacgacagcctggccaacaaggtgctggtgtacgccaccgccaaccaggagaagggccagcgcaccccctaccaggccctggacagcatggacgacgcctggagcttccgcgagctgaaggccttcgtgcgcgagagcaagaccctgagcaacaagaagaaggagtacctgctgaccgaggaggacatcagcaagttcgacgtgcgcaagaagttcatcgagcgcaacctggtggacacccgctacgccagccgcgtggtgctgaacgccctgcaggagcacttccgcgcccacaagatcgacaccaaggtgagcgtggtgcgcggccagttcaccagccagctgcgccgccactggggcatcgagaagacccgcgacacctaccaccaccacgccgtggacgccctgatcattgcggcttctagccagctgaacctgtggaagaagcagaagaacaccctggtgagctacagcgaggaccagctgctggacatcgagaccggcgagctgatcagcgacgacgagtacaaggagagcgtgttcaaggccccctaccagcacttcgtggacaccctgaagagcaaggagttcgaggacagcatcctgttcagctaccaggtggacagcaagttcaaccgcaagatcagcgacgccaccatctacgccacccgccaggccaaggtgggcaaggacaaggccgacgagacctacgtgctgggcaagatcaaggacatctacacccaggacggctacgacgccttcatgaagatctacaagaaggacaagagcaagttcctgatgtaccgccacgacccccagaccttcgagaaggtgatcgagcccatcctggagaactaccccaacaagcagatcaacgataaaggcaaggaggtgccctgcaaccccttcctgaagtacaaggaggagcacggctacatccgcaagtacagcaagaagggcaacggccccgagatcaagagcctgaagtactacgacagcaagctgggcaaccacatcgacatcacccccaaggacagcaacaacaaggtggtgctgcagagcgtgagcccctggcgcgccgacgtgtacttcaacaagaccaccggcaagtacgagatcctgggcctgaagtacgccgacctgcagtttgataagggcaccggcacctacaagatcagccaggagaagtacaacgacatcaagaagaaggagggcgtggacagcgacagcgagttcaagttcaccctgtacaagaacgaccttctgctggtgaaggacaccgagaccaaggagcaacagctgttccgcttcctgagccgcaccatgcccaagcagaagcactacgtggagctgaagccctacgacaagcagaagttcgagggcggcgaggccctgatcaaggtgctgggcaacgtggccaacagcggccagtgcaagaagggcctgggcaagagcaacatcagcatctacaaggtgcgcaccgacgtgctgggcaaccagcacatcatcaagaacgagggcgacaagcccaagctggacttctaa

SEQ ID NO: 11 - DNA, 3366 bp, Streptococcus thermophilus
atgagcgacctggtgctgggcctggccatcggcatcggcagcgtgggcgtgggcatcctgaacaaggtgaccggcgagatcatccacaagaacagtcgcatcttccctgctgctcaggctgagaacaacctggtgcgccgcaccaaccgccagggtcgccggcttgctcgccgcaagaagcaccggcgcgtgcgcctgaaccgcctgttcgaggagagcggcctgatcaccgacttcaccaagatcagcatcaacctgaacccctaccagctgcgcgtgaagggcctgaccgacgagctgagcaacgaggagctgttcatcgccctgaagaacatggtgaagcaccgcggcatcagctacctggacgacgccagcgacgacggcaacagcagcgtgggcgactacgcccagatcgtgaaggagaacagcaagcagctggagaccaagacccccggccagatccagctggagcgctaccagacctacggccagctgcgcggcgacttcaccgtggagaaggacggcaagaagcaccgcctgatcaacgtgttccccaccagcgcctaccgcagcgaggccctgcgcatcctgcagacccagcaggagttcaacccccagatcaccgacgagttcatcaaccgctacctggagatcctgaccggcaagcgcaagtactaccacggccccggcaacgagaagagccgcaccgactacggccgctaccgcaccagcggcgagaccctggacaacatcttcggcatcctgatcggcaagtgcaccttctaccccgacgagttccgcgccgccaaggccagctacaccgcccaggagttcaacctgctgaacgacctgaacaacctgaccgtgcccaccgagaccaagaagctgagcaaggagcagaagaaccagatcatcaactacgtgaagaacgagaaggccatgggccccgccaagctgttcaagtacatcgccaagctgctgagctgcgacgtggccgacatcaagggctaccgcatcgacaagagcggcaaggccgagatccacaccttcgaggcctaccgcaagatgaagaccctggagaccctggacatcgagcagatggaccgcgagaccctggacaagctggcctacgtgctgaccctgaacaccgagcgcgagggcatccaggaggccctggagcacgagttcgccgacggcagcttcagccagaagcaggtggacgagctggtgcagttccgcaaggccaacagcagcatcttcggcaagggctggcacaacttcagcgtgaagctgatgatggagctgatccccgagctgtacgagaccagcgaggagcagatgaccatcctgacccgcctgggcaagcagaagaccaccagcagcagcaacaagaccaagtacatcgacgagaagctgctgaccgaggagatctacaaccccgtggtggccaagagcgtgcgccaggccatcaagatcgtgaacgccgccatcaaggagtacggcgacttcgacaacatcgtgatcgagatggcccgcgagaccaacgaggacgacgagaagaaggccatccagaagatccagaaggccaacaaggacgagaaggacgccgccatgctgaaggccgccaaccagtacaacggcaaggccgagctgccccacagcgtgttccacggccacaagcagctggccaccaagatccgcctgtggcaccagcagggcgagcgctgcctgtacaccggcaagaccatcagcatccacgacctgatcaacaacagcaaccagttcgaggtggctgccatcctgcccctgagcatcaccttcgacgacagcctggccaacaaggtgctggtgtacgccaccgccgctcaggagaagggccagcgcaccccctaccaggccctggacagcatggacgacgcctggagcttccgcgagctgaaggccttcgtgcgcgagagcaagaccctgagcaacaagaagaaggagtacctgctgaccgaggaggacatcagcaagttcgacgtgcgcaagaagttcatcgagcgcaacctggtggacacccgctacgccagccgcgtggtgctgaacgccctgcaggagcacttccgcgcccacaagatcgacaccaaggtgagcgtggtgcgcggccagttcaccagccagctgcgccgccactggggcatcgagaagacccgcgacacctaccaccaccacgccgtggacgccctgatcattgcggcttctagccagctgaacctgtggaagaagcagaagaacaccctggtgagctacagcgaggaccagctgctggacatcgagaccggcgagctgatcagcgacgacgagtacaaggagagcgtgttcaaggccccctaccagcacttcgtggacaccctgaagagcaaggagttcgaggacagcatcctgttcagctaccaggtggacagcaagttcaaccgcaagatcagcgacgccaccatctacgccacccgccaggccaaggtgggcaaggacaaggccgacgagacctacgtgctgggcaagatcaaggacatctacacccaggacggctacgacgccttcatgaagatctacaagaaggacaagagcaagttcctgatgtaccgccacgacccccagaccttcgagaaggtgatcgagcccatcctggagaactaccccaacaagcagatcaacgataaaggcaaggaggtgccctgcaaccccttcctgaagtacaaggaggagcacggctacatccgcaagtacagcaagaagggcaacggccccgagatcaagagcctgaagtactacgacagcaagctgggcaaccacatcgacatcacccccaaggacagcaacaacaaggtggtgctgcagagcgtgagcccctggcgcgccgacgtgtacttcaacaagaccaccggcaagtacgagatcctgggcctgaagtacgccgacctgcagtttgataagggcaccggcacctacaagatcagccaggagaagtacaacgacatcaagaagaaggagggcgtggacagcgacagcgagttcaagttcaccctgtacaagaacgaccttctgctggtgaaggacaccgagaccaaggagcaacagctgttccgcttcctgagccgcaccatgcccaagcagaagcactacgtggagctgaagccctacgacaagcagaagttcgagggcggcgaggccctgatcaaggtgctgggcaacgtggccaacagcggccagtgcaagaagggcctgggcaagagcaacatcagcatctacaaggtgcgcaccgacgtgctgggcaaccagcacatcatcaagaacgagggcgacaagcccaagctggacttctaa

SEQ ID NO: 12 - DNA, 3399 bp, Streptococcus thermophilus
atgagcgacctggtgctgggcctggacatcggcatcggcagcgtgggcgtgggcatcctgaacaaggtgaccggcgagatcatccacaagaacagtcgcatcttccctgctgctcaggctgagaacaacctggtgcgccgcaccaaccgccagggtcgccggcttgctcgccgcaagaagcaccggcgcgtgcgcctgaaccgcctgttcgaggagagcggcctgatcaccgacttcaccaagatcagcatcaacctgaacccctaccagctgcgcgtgaagggcctgaccgacgagctgagcaacgaggagctgttcatcgccctgaagaacatggtgaagcaccgcggcatcagctacctggacgacgccagcgacgacggcaacagcagcgtgggcgactacgcccagatcgtgaaggagaacagcaagcagctggagaccaagacccccggccagatccagctggagcgctaccagacctacggccagctgcgcggcgacttcaccgtggagaaggacggcaagaagcaccgcctgatcaacgtgttccccaccagcgcctaccgcagcgaggccctgcgcatcctgcagacccagcaggagttcaacccccagatcaccgacgagttcatcaaccgctacctggagatcctgaccggcaagcgcaagtactaccacggccccggcaacgagaagagccgcaccgactacggccgctaccgcaccagcggcgagaccctggacaacatcttcggcatcctgatcggcaagtgcaccttctaccccgacgagttccgcgccgccaaggccagctacaccgcccaggagttcaacctgctgaacgacctgaacaacctgaccgtgcccaccgagaccaagaagctgagcaaggagcagaagaaccagatcatcaactacgtgaagaacgagaaggccatgggccccgccaagctgttcaagtacatcgccaagctgctgagctgcgacgtggccgacatcaagggctaccgcatcgacaagagcggcaaggccgagatccacaccttcgaggcctaccgcaagatgaagaccctggagaccctggacatcgagcagatggaccgcgagaccctggacaagctggcctacgtgctgaccctgaacaccgagcgcgagggcatccaggaggccctggagcacgagttcgccgacggcagcttcagccagaagcaggtggacgagctggtgcagttccgcaaggccaacagcagcatcttcggcaagggctggcacaacttcagcgtgaagctgatgatggagctgatccccgagctgtacgagaccagcgaggagcagatgaccatcctgacccgcctgggcaagcagaagaccaccagcagcagcaacaagaccaagtacatcgacgagaagctgctgaccgaggagatctacaaccccgtggtggccaagagcgtgcgccaggccatcaagatcgtgaacgccgccatcaaggagtacggcgacttcgacaacatcgtgatcgagatggcccgcgagaccaacgaggacgacgagaagaaggccatccagaagatccagaaggccaacaaggacgagaaggacgccgccatgctgaaggccgccaaccagtacaacggcaaggccgagctgccccacagcgtgttccacggccacaagcagctggccaccaagatccgcctgtggcaccagcagggcgagcgctgcctgtacaccggcaagaccatcagcatccacgacctgatcaacaacagcaaccagttcgaggtggaccacatcctgcccctgagcatcaccttcgacgacagcctggccaacaaggtgctggtgtacgccaccgccaaccaggagaagggccagcgcaccccctaccaggccctggacagcatggacgacgcctggagcttccgcgagctgaaggccttcgtgcgcgagagcaagaccctgagcaacaagaagaaggagtacctgctgaccgaggaggacatcagcaagttcgacgtgcgcaagaagttcatcgagcgcaacctggtggacacccgctacgccagccgcgtggtgctgaacgccctgcaggagcacttccgcgcccacaagatcgacaccaaggtgagcgtggtgcgcggccagttcaccagccagctgcgccgccactggggcatcgagaagacccgcgacacctaccaccaccacgccgtggacgccctgatcattgcggcttctagccagctgaacctgtggaagaagcagaagaacaccctggtgagctacagcgaggaccagctgctggacatcgagaccggcgagctgatcagcgacgacgagtacaaggagagcgtgttcaaggccccctaccagcacttcgtggacaccctgaagagcaaggagttcgaggacagcatcctgttcagctaccaggtggacagcaagttcaaccgcaagatcagcgacgccaccatctacgccacccgccaggccaaggtgggcaaggacaaggccgacgagacctacgtgctgggcaagatcaaggacatctacacccaggacggctacgacgccttcatgaagatctacaagaaggacaagagcaagttcctgatgtaccgccacgacccccagaccttcgagaaggtgatcgagcccatcctggagaactaccccaacaagcagatcaacgataaaggcaaggaggtgccctgcaaccccttcctgaagtacaaggaggagcacggctacatccgcaagtacagcaagaagggcaacggccccgagatcaagagcctgaagtactacgacagcaagctgggcaaccacatcgacatcacccccaaggacagcaacaacaaggtggtgctgcagagcgtgagcccctggcgcgccgacgtgtacttcaacaagaccaccggcaagtacgagatcctgggcctgaagtacgccgacctgcagtttgataagggcaccggcacctacaagatcagccaggagaagtacaacgacatcaagaagaaggagggcgtggacagcgacagcgagttcaagttcaccctgtacaagaacgaccttctgctggtgaaggacaccgagaccaaggagcaacagctgttccgcttcctgagccgcaccatgcccaagcagaagcactacgtggagctgaagccctacgacaagcagaagttcgagggcggcgaggccctgatcaaggtgctgggcaacgtggccaacagcggccagtgcaagaagggcctgggcaagagcaacatcagcatctacaaggtgcgcaccgacgtgctgggcaaccagcacatcatcaagaacgagggcgacaagcccaagctggacttcagcagggctgaccccaagaagaagaggaaggtgtga

SEQ ID NO: 13 - DNA, 3459 bp, Streptococcus thermophilus
atgagcgacctggtgctgggcctggacatcggcatcggcagcgtgggcgtgggcatcctgaacaaggtgaccggcgagatcatccacaagaacagtcgcatcttccctgctgctcaggctgagaacaacctggtgcgccgcaccaaccgccagggtcgccggcttgctcgccgcaagaagcaccggcgcgtgcgcctgaaccgcctgttcgaggagagcggcctgatcaccgacttcaccaagatcagcatcaacctgaacccctaccagctgcgcgtgaagggcctgaccgacgagctgagcaacgaggagctgttcatcgccctgaagaacatggtgaagcaccgcggcatcagctacctggacgacgccagcgacgacggcaacagcagcgtgggcgactacgcccagatcgtgaaggagaacagcaagcagctggagaccaagacccccggccagatccagctggagcgctaccagacctacggccagctgcgcggcgacttcaccgtggagaaggacggcaagaagcaccgcctgatcaacgtgttccccaccagcgcctaccgcagcgaggccctgcgcatcctgcagacccagcaggagttcaacccccagatcaccgacgagttcatcaaccgctacctggagatcctgaccggcaagcgcaagtactaccacggccccggcaacgagaagagccgcaccgactacggccgctaccgcaccagcggcgagaccctggacaacatcttcggcatcctgatcggcaagtgcaccttctaccccgacgagttccgcgccgccaaggccagctacaccgcccaggagttcaacctgctgaacgacctgaacaacctgaccgtgcccaccgagaccaagaagctgagcaaggagcagaagaaccagatcatcaactacgtgaagaacgagaaggccatgggccccgccaagctgttcaagtacatcgccaagctgctgagctgcgacgtggccgacatcaagggctaccgcatcgacaagagcggcaaggccgagatccacaccttcgaggcctaccgcaagatgaagaccctggagaccctggacatcgagcagatggaccgcgagaccctggacaagctggcctacgtgctgaccctgaacaccgagcgcgagggcatccaggaggccctggagcacgagttcgccgacggcagcttcagccagaagcaggtggacgagctggtgcagttccgcaaggccaacagcagcatcttcggcaagggctggcacaacttcagcgtgaagctgatgatggagctgatccccgagctgtacgagaccagcgaggagcagatgaccatcctgacccgcctgggcaagcagaagaccaccagcagcagcaacaagaccaagtacatcgacgagaagctgctgaccgaggagatctacaaccccgtggtggccaagagcgtgcgccaggccatcaagatcgtgaacgccgccatcaaggagtacggcgacttcgacaacatcgtgatcgagatggcccgcgagaccaacgaggacgacgagaagaaggccatccagaagatccagaaggccaacaaggacgagaaggacgccgccatgctgaaggccgccaaccagtacaacggcaaggccgagctgccccacagcgtgttccacggccacaagcagctggccaccaagatccgcctgtggcaccagcagggcgagcgctgcctgtacaccggcaagaccatcagcatccacgacctgatcaacaacagcaaccagttcgaggtggaccacatcctgcccctgagcatcaccttcgacgacagcctggccaacaaggtgctggtgtacgccaccgccaaccaggagaagggccagcgcaccccctaccaggccctggacagcatggacgacgcctggagcttccgcgagctgaaggccttcgtgcgcgagagcaagaccctgagcaacaagaagaaggagtacctgctgaccgaggaggacatcagcaagttcgacgtgcgcaagaagttcatcgagcgcaacctggtggacacccgctacgccagccgcgtggtgctgaacgccctgcaggagcacttccgcgcccacaagatcgacaccaaggtgagcgtggtgcgcggccagttcaccagccagctgcgccgccactggggcatcgagaagacccgcgacacctaccaccaccacgccgtggacgccctgatcattgcggcttctagccagctgaacctgtggaagaagcagaagaacaccctggtgagctacagcgaggaccagctgctggacatcgagaccggcgagctgatcagcgacgacgagtacaaggagagcgtgttcaaggccccctaccagcacttcgtggacaccctgaagagcaaggagttcgaggacagcatcctgttcagctaccaggtggacagcaagttcaaccgcaagatcagcgacgccaccatctacgccacccgccaggccaaggtgggcaaggacaaggccgacgagacctacgtgctgggcaagatcaaggacatctacacccaggacggctacgacgccttcatgaagatctacaagaaggacaagagcaagttcctgatgtaccgccacgacccccagaccttcgagaaggtgatcgagcccatcctggagaactaccccaacaagcagatcaacgataaaggcaaggaggtgccctgcaaccccttcctgaagtacaaggaggagcacggctacatccgcaagtacagcaagaagggcaacggccccgagatcaagagcctgaagtactacgacagcaagctgggcaaccacatcgacatcacccccaaggacagcaacaacaaggtggtgctgcagagcgtgagcccctggcgcgccgacgtgtacttcaacaagaccaccggcaagtacgagatcctgggcctgaagtacgccgacctgcagtttgataagggcaccggcacctacaagatcagccaggagaagtacaacgacatcaagaagaaggagggcgtggacagcgacagcgagttcaagttcaccctgtacaagaacgaccttctgctggtgaaggacaccgagaccaaggagcaacagctgttccgcttcctgagccgcaccatgcccaagcagaagcactacgtggagctgaagccctacgacaagcagaagttcgagggcggcgaggccctgatcaaggtgctgggcaacgtggccaacagcggccagtgcaagaagggcctgggcaagagcaacatcagcatctacaaggtgcgcaccgacgtgctgggcaaccagcacatcatcaagaacgagggcgacaagcccaagctggacttcgcggccgcagatccaaaaaagaagagaaaggtagatccaaaaaagaagagaaaggtagatccaaaaaagaagagaaaggtagatacggccgcatag

SEQ ID NO: 14 - DNA, 3585 bp, Streptococcus thermophilus
atgagcgacctggtgctgggcctggccatcggcatcggcagcgtgggcgtgggcatcctgaacaaggtgaccggcgagatcatccacaagaacagtcgcatcttccctgctgctcaggctgagaacaacctggtgcgccgcaccaaccgccagggtcgccggcttgctcgccgcaagaagcaccggcgcgtgcgcctgaaccgcctgttcgaggagagcggcctgatcaccgacttcaccaagatcagcatcaacctgaacccctaccagctgcgcgtgaagggcctgaccgacgagctgagcaacgaggagctgttcatcgccctgaagaacatggtgaagcaccgcggcatcagctacctggacgacgccagcgacgacggcaacagcagcgtgggcgactacgcccagatcgtgaaggagaacagcaagcagctggagaccaagacccccggccagatccagctggagcgctaccagacctacggccagctgcgcggcgacttcaccgtggagaaggacggcaagaagcaccgcctgatcaacgtgttccccaccagcgcctaccgcagcgaggccctgcgcatcctgcagacccagcaggagttcaacccccagatcaccgacgagttcatcaaccgctacctggagatcctgaccggcaagcgcaagtactaccacggccccggcaacgagaagagccgcaccgactacggccgctaccgcaccagcggcgagaccctggacaacatcttcggcatcctgatcggcaagtgcaccttctaccccgacgagttccgcgccgccaaggccagctacaccgcccaggagttcaacctgctgaacgacctgaacaacctgaccgtgcccaccgagaccaagaagctgagcaaggagcagaagaaccagatcatcaactacgtgaagaacgagaaggccatgggccccgccaagctgttcaagtacatcgccaagctgctgagctgcgacgtggccgacatcaagggctaccgcatcgacaagagcggcaaggccgagatccacaccttcgaggcctaccgcaagatgaagaccctggagaccctggacatcgagcagatggaccgcgagaccctggacaagctggcctacgtgctgaccctgaacaccgagcgcgagggcatccaggaggccctggagcacgagttcgccgacggcagcttcagccagaagcaggtggacgagctggtgcagttccgcaaggccaacagcagcatcttcggcaagggctggcacaacttcagcgtgaagctgatgatggagctgatccccgagctgtacgagaccagcgaggagcagatgaccatcctgacccgcctgggcaagcagaagaccaccagcagcagcaacaagaccaagtacatcgacgagaagctgctgaccgaggagatctacaaccccgtggtggccaagagcgtgcgccaggccatcaagatcgtgaacgccgccatcaaggagtacggcgacttcgacaacatcgtgatcgagatggcccgcgagaccaacgaggacgacgagaagaaggccatccagaagatccagaaggccaacaaggacgagaaggacgccgccatgctgaaggccgccaaccagtacaacggcaaggccgagctgccccacagcgtgttccacggccacaagcagctggccaccaagatccgcctgtggcaccagcagggcgagcgctgcctgtacaccggcaagaccatcagcatccacgacctgatcaacaacagcaaccagttcgaggtggctgccatcctgcccctgagcatcaccttcgacgacagcctggccaacaaggtgctggtgtacgccaccgccgctcaggagaagggccagcgcaccccctaccaggccctggacagcatggacgacgcctggagcttccgcgagctgaaggccttcgtgcgcgagagcaagaccctgagcaacaagaagaaggagtacctgctgaccgaggaggacatcagcaagttcgacgtgcgcaagaagttcatcgagcgcaacctggtggacacccgctacgccagccgcgtggtgctgaacgccctgcaggagcacttccgcgcccacaagatcgacaccaaggtgagcgtggtgcgcggccagttcaccagccagctgcgccgccactggggcatcgagaagacccgcgacacctaccaccaccacgccgtggacgccctgatcattgcggcttctagccagctgaacctgtggaagaagcagaagaacaccctggtgagctacagcgaggaccagctgctggacatcgagaccggcgagctgatcagcgacgacgagtacaaggagagcgtgttcaaggccccctaccagcacttcgtggacaccctgaagagcaaggagttcgaggacagcatcctgttcagctaccaggtggacagcaagttcaaccgcaagatcagcgacgccaccatctacgccacccgccaggccaaggtgggcaaggacaaggccgacgagacctacgtgctgggcaagatcaaggacatctacacccaggacggctacgacgccttcatgaagatctacaagaaggacaagagcaagttcctgatgtaccgccacgacccccagaccttcgagaaggtgatcgagcccatcctggagaactaccccaacaagcagatcaacgataaaggcaaggaggtgccctgcaaccccttcctgaagtacaaggaggagcacggctacatccgcaagtacagcaagaagggcaacggccccgagatcaagagcctgaagtactacgacagcaagctgggcaaccacatcgacatcacccccaaggacagcaacaacaaggtggtgctgcagagcgtgagcccctggcgcgccgacgtgtacttcaacaagaccaccggcaagtacgagatcctgggcctgaagtacgccgacctgcagtttgataagggcaccggcacctacaagatcagccaggagaagtacaacgacatcaagaagaaggagggcgtggacagcgacagcgagttcaagttcaccctgtacaagaacgaccttctgctggtgaaggacaccgagaccaaggagcaacagctgttccgcttcctgagccgcaccatgcccaagcagaagcactacgtggagctgaagccctacgacaagcagaagttcgagggcggcgaggccctgatcaaggtgctgggcaacgtggccaacagcggccagtgcaagaagggcctgggcaagagcaacatcagcatctacaaggtgcgcaccgacgtgctgggcaaccagcacatcatcaagaacgagggcgacaagcccaagctggacttcagcagggctgaccccaagaagaagaggaaggtggaggccagcggttccggacgggctgacgcattggacgattttgatctggatatgctgggaagtgacgccctcgatgattttgaccttgacatgcttggttcggatgcccttgatgactttgacctcgacatgctcggcagtgacgcccttgatgatttcgacctggacatgctgattaactctagatga

SEQ ID NO: 15 - DNA, 3606 bp, Streptococcus thermophilus
atgcccaagaagaagaggaaggtgagcgacctggtgctgggcctggccatcggcatcggcagcgtgggcgtgggcatcctgaacaaggtgaccggcgagatcatccacaagaacagtcgcatcttccctgctgctcaggctgagaacaacctggtgcgccgcaccaaccgccagggtcgccggcttgctcgccgcaagaagcaccggcgcgtgcgcctgaaccgcctgttcgaggagagcggcctgatcaccgacttcaccaagatcagcatcaacctgaacccctaccagctgcgcgtgaagggcctgaccgacgagctgagcaacgaggagctgttcatcgccctgaagaacatggtgaagcaccgcggcatcagctacctggacgacgccagcgacgacggcaacagcagcgtgggcgactacgcccagatcgtgaaggagaacagcaagcagctggagaccaagacccccggccagatccagctggagcgctaccagacctacggccagctgcgcggcgacttcaccgtggagaaggacggcaagaagcaccgcctgatcaacgtgttccccaccagcgcctaccgcagcgaggccctgcgcatcctgcagacccagcaggagttcaacccccagatcaccgacgagttcatcaaccgctacctggagatcctgaccggcaagcgcaagtactaccacggccccggcaacgagaagagccgcaccgactacggccgctaccgcaccagcggcgagaccctggacaacatcttcggcatcctgatcggcaagtgcaccttctaccccgacgagttccgcgccgccaaggccagctacaccgcccaggagttcaacctgctgaacgacctgaacaacctgaccgtgcccaccgagaccaagaagctgagcaaggagcagaagaaccagatcatcaactacgtgaagaacgagaaggccatgggccccgccaagctgttcaagtacatcgccaagctgctgagctgcgacgtggccgacatcaagggctaccgcatcgacaagagcggcaaggccgagatccacaccttcgaggcctaccgcaagatgaagaccctggagaccctggacatcgagcagatggaccgcgagaccctggacaagctggcctacgtgctgaccctgaacaccgagcgcgagggcatccaggaggccctggagcacgagttcgccgacggcagcttcagccagaagcaggtggacgagctggtgcagttccgcaaggccaacagcagcatcttcggcaagggctggcacaacttcagcgtgaagctgatgatggagctgatccccgagctgtacgagaccagcgaggagcagatgaccatcctgacccgcctgggcaagcagaagaccaccagcagcagcaacaagaccaagtacatcgacgagaagctgctgaccgaggagatctacaaccccgtggtggccaagagcgtgcgccaggccatcaagatcgtgaacgccgccatcaaggagtacggcgacttcgacaacatcgtgatcgagatggcccgcgagaccaacgaggacgacgagaagaaggccatccagaagatccagaaggccaacaaggacgagaaggacgccgccatgctgaaggccgccaaccagtacaacggcaaggccgagctgccccacagcgtgttccacggccacaagcagctggccaccaagatccgcctgtggcaccagcagggcgagcgctgcctgtacaccggcaagaccatcagcatccacgacctgatcaacaacagcaaccagttcgaggtggctgccatcctgcccctgagcatcaccttcgacgacagcctggccaacaaggtgctggtgtacgccaccgccgctcaggagaagggccagcgcaccccctaccaggccctggacagcatggacgacgcctggagcttccgcgagctgaaggccttcgtgcgcgagagcaagaccctgagcaacaagaagaaggagtacctgctgaccgaggaggacatcagcaagttcgacgtgcgcaagaagttcatcgagcgcaacctggtggacacccgctacgccagccgcgtggtgctgaacgccctgcaggagcacttccgcgcccacaagatcgacaccaaggtgagcgtggtgcgcggccagttcaccagccagctgcgccgccactggggcatcgagaagacccgcgacacctaccaccaccacgccgtggacgccctgatcattgcggcttctagccagctgaacctgtggaagaagcagaagaacaccctggtgagctacagcgaggaccagctgctggacatcgagaccggcgagctgatcagcgacgacgagtacaaggagagcgtgttcaaggccccctaccagcacttcgtggacaccctgaagagcaaggagttcgaggacagcatcctgttcagctaccaggtggacagcaagttcaaccgcaagatcagcgacgccaccatctacgccacccgccaggccaaggtgggcaaggacaaggccgacgagacctacgtgctgggcaagatcaaggacatctacacccaggacggctacgacgccttcatgaagatctacaagaaggacaagagcaagttcctgatgtaccgccacgacccccagaccttcgagaaggtgatcgagcccatcctggagaactaccccaacaagcagatcaacgataaaggcaaggaggtgccctgcaaccccttcctgaagtacaaggaggagcacggctacatccgcaagtacagcaagaagggcaacggccccgagatcaagagcctgaagtactacgacagcaagctgggcaaccacatcgacatcacccccaaggacagcaacaacaaggtggtgctgcagagcgtgagcccctggcgcgccgacgtgtacttcaacaagaccaccggcaagtacgagatcctgggcctgaagtacgccgacctgcagtttgataagggcaccggcacctacaagatcagccaggagaagtacaacgacatcaagaagaaggagggcgtggacagcgacagcgagttcaagttcaccctgtacaagaacgaccttctgctggtgaaggacaccgagaccaaggagcaacagctgttccgcttcctgagccgcaccatgcccaagcagaagcactacgtggagctgaagccctacgacaagcagaagttcgagggcggcgaggccctgatcaaggtgctgggcaacgtggccaacagcggccagtgcaagaagggcctgggcaagagcaacatcagcatctacaaggtgcgcaccgacgtgctgggcaaccagcacatcatcaagaacgagggcgacaagcccaagctggacttcagcagggctgaccccaagaagaagaggaaggtggaggccagcggttccggacgggctgacgcattggacgattttgatctggatatgctgggaagtgacgccctcgatgattttgaccttgacatgcttggttcggatgcccttgatgactttgacctcgacatgctcggcagtgacgcccttgatgatttcgacctggacatgctgattaactctagatga

SEQ ID NO: 16 - DNA, 3366 bp, Streptococcus thermophilus
atgagtgacttagttttaggacttgatatcggtataggttctgttggtgtaggtatccttaacaaagtgacaggagaaattatccataaaaactcacgcatcttcccagcagctcaagcggaaaataacctagtacgtagaacgaatcgtcaaggaagacgcttgacacgacgtaaaaaacatcgtagagttcgtttaaatcgtctatttgaggaaagtggattaatcaccgattttacgaagatttcaattaatcttaacccatatcaattacgagttaagggcttgaccgatgaattgtctaatgaagaactgtttatcgctcttaaaaatatggtgaaacaccgtgggattagttacctcgatgatgctagtgatgacggaaattcatcaataggagactatgcacaaattgttaaggaaaatagtaaacaattagaaactaagacaccgggacagatacagttggaacgctaccaaacatatggtcaattacgtggtgattttactgttgagaaagatggcaaaaaacatcgcttgattaatgtctttccaacatcagcttatcgttcagaagccttaaggatactgcaaactcaacaagaatttaatccacagattacagatgaatttattaatcgttatctcgaaattttaactggaaaacggaaatattatcatggacccggaaatgaaaagtcacggactgattatggtcgttacagaacgagtggagaaactttagacaatatttttggaattctaattgggaaatgtacattttatccagacgagtttagagcagcaaaagcttcctacacggctcaagaattcaatttgctaaatgatttgaacaatctaacagttcctactgaaaccaaaaagttgagcaaagaacagaagaatcaaatcattaattatgtcaaaaatgaaaaggcaatggggccagcgaaactttttaaatatatcgctaagttactttcttgtgatgttgcagatatcaagggataccgtatcgacaaatcaggtaaggctgagattcatactttcgaagcctatcgaaaaatgaaaacgcttgaaaccttagatattgagcaaatggatagagaaacgcttgataaattagcctatgtcttaacattaaacactgagagggaaggtattcaagaagccttagaacatgaatttgctgatggtagctttagccagaagcaagttgacgaattggttcaattccgcaaagcaaatagttccatttttggaaaaggatggcataatttttctgtcaaactgatgatggagttaattccagaattgtatgagacgtcagaagagcaaatgactatcctaacacgacttggaaaacaaaaaacgacttcgtcttcaaataaaacaaaatatatagatgaaaaactattaactgaagaaatctataatcctgttgttgctaagtctgttcgccaggctataaaaatcgtaaatgcggcgattaaagaatacggagactttgacaatattgtcatcgaaatggctcgtgaaacaaatgaagatgatgaaaagaaagctattcaaaagattcaaaaagccaacaaagatgaaaaagatgcagcaatgcttaaggctgctaaccaatataatggaaaggctgaattaccacatagtgttttccacggtcataagcaattagcgactaaaatccgcctttggcatcagcaaggagaacgttgcctttatactggtaagacaatctcaatccatgatttgataaataattctaatcagtttgaagtagatcatattttacctctttctatcacattcgatgatagccttgcaaataaggttttggtttatgcaactgctaaccaagaaaaaggacaacgaacaccttatcaggctttagatagtatggatgatgcgtggtctttccgtgaattaaaagcttttgtacgtgagtcaaaaacactttcgaacaagaaaaaagaatacctccttacagaagaagatatttcaaagtttgatgttcgaaagaaatttattgaacgaaatcttgtagatacaagatacgcttcaagagttgtcctcaatgcccttcaagaacactttagagctcacaagattgatacaaaagtttccgtggttcgtggccaatttacatctcaattgagacgccattggggaattgagaagactcgtgatacttatcatcaccatgctgtcgatgcattgattattgccgcctcaagtcagttgaatttgtggaaaaaacaaaagaatacccttgtaagttattcagaagaccaactccttgatattgaaacaggtgaacttattagtgatgatgagtacaaggaatctgtgttcaaagccccttatcaacattttgttgatacattgaagagtaaagaatttgaagacagtatcttattctcttatcaagtggattctaagtttaatcgtaaaatatcagatgccactatttatgcgacaagacaggctaaagtaggaaaagataaggcggatgaaacttatgtcttagggaaaatcaaagatatttatactcaggatggttatgatgcctttatgaagatttataagaaggataagtcaaaattcctcatgtatcgtcacgacccacaaacctttgagaaagttatcgagccaattttagagaactatcctaataagcaaataaatgaaaaagggaaagaggtaccatgtaatcctttcctaaaatataaagaagaacatggctatattcgtaaatatagtaaaaaaggcaatggtcctgaaatcaagagtcttaaatactatgatagtaagctaggcaatcatattgatattactccgaaggatagtaacaataaagttgtcttacagtcagtttctccatggagagcggatgtctatttcaataagactactggaaaatacgaaatcctcggattgaaatatgctgatttacaatttgaaaaagggacaggaacatataagatttcccaggaaaaatacaatgacattaagaaaaaagagggtgtagattctgattcagaattcaagtttacactttataaaaatgatttgttactcgttaaagatacagaaacaaaagaacaacagcttttccgttttctttctcgaactatgcctaaacaaaagcattatgttgaattaaaaccttatgataaacagaaatttgaaggaggtgaggcgttaattaaagtgttgggtaacgttgctaatagtggtcaatgcaaaaaagggctaggaaaatcaaatatttctatttataaggtaagaacagatgtcctaggaaatcagcatatcatcaaaaatgagggtgataagcctaagctagatttttaa

SEQ ID NO: 17 - DNA, 4167 bp, Streptococcus thermophilus; identical to SEQ ID NO: 9

SEQ ID NO: 18 - DNA, 3249 bp, Neisseria meningitidis
atggccgccttcaagcccaaccccatcaactacatcctgggcctggacatcggcatcgccagcgtgggctgggccatggtggagatcgacgaggacgagaaccccatctgcctgatcgacctgggtgtgcgcgtgttcgagcgcgctgaggtgcccaagactggtgacagtctggctatggctcgccggcttgctcgctctgttcggcgccttactcgccggcgcgctcaccgccttctgcgcgctcgccgcctgctgaagcgcgagggtgtgctgcaggctgccgacttcgacgagaacggcctgatcaagagcctgcccaacactccttggcagctgcgcgctgccgctctggaccgcaagctgactcctctggagtggagcgccgtgctgctgcacctgatcaagcaccgcggctacctgagccagcgcaagaacgagggcgagaccgccgacaaggagctgggtgctctgctgaagggcgtggccgacaacgcccacgccctgcagactggtgacttccgcactcctgctgagctggccctgaacaagttcgagaaggagagcggccacatccgcaaccagcgcggcgactacagccacaccttcagccgcaaggacctgcaggccgagctgatcctgctgttcgagaagcagaaggagttcggcaacccccacgtgagcggcggcctgaaggagggcatcgagaccctgctgatgacccagcgccccgccctgagcggcgacgccgtgcagaagatgctgggccactgcaccttcgagccagccgagcccaaggccgccaagaacacctacaccgccgagcgcttcatctggctgaccaagctgaacaacctgcgcatcctggagcagggcagcgagcgccccctgaccgacaccgagcgcgccaccctgatggacgagccctaccgcaagagcaagctgacctacgcccaggcccgcaagctgctgggtctggaggacaccgccttcttcaagggcctgcgctacggcaaggacaacgccgaggccagcaccctgatggagatgaaggcctaccacgccatcagccgcgccctggagaaggagggcctgaaggacaagaagagtcctctgaacctgagccccgagctgcaggacgagatcggcaccgccttcagcctgttcaagaccgacgaggacatcaccggccgcctgaaggaccgcatccagcccgagatcctggaggccctgctgaagcacatcagcttcgacaagttcgtgcagatcagcctgaaggccctgcgccgcatcgtgcccctgatggagcagggcaagcgctacgacgaggcctgcgccgagatctacggcgaccactacggcaagaagaacaccgaggagaagatctacctgcctcctatccccgccgacgagatccgcaaccccgtggtgctgcgcgccctgagccaggcccgcaaggtgatcaacggcgtggtgcgccgctacggcagccccgcccgcatccacatcgagaccgcccgcgaggtgggcaagagcttcaaggaccgcaaggagatcgagaagcgccaggaggagaaccgcaaggaccgcgagaaggccgccgccaagttccgcgagtacttccccaacttcgtgggcgagcccaagagcaaggacatcctgaagctgcgcctgtacgagcagcagcacggcaagtgcctgtacagcggcaaggagatcaacctgggccgcctgaacgagaagggctacgtggagatcgaccacgccctgcccttcagccgcacctgggacgacagcttcaacaacaaggtgctggtgctgggcagcgagaaccagaacaagggcaaccagaccccctacgagtacttcaacggcaaggacaacagccgcgagtggcaggagttcaaggcccgcgtggagaccagccgcttcccccgcagcaagaagcagcgcatcctgctgcagaagttcgacgaggacggcttcaaggagcgcaacctgaacgacacccgctacgtgaaccgcttcctgtgccagttcgtggccgaccgcatgcgcctgaccggcaagggcaagaagcgcgtgttcgccagcaacggccagatcaccaacctgctgcgcggcttctggggcctgcgcaaggtgcgcgccgagaacgaccgccaccacgccctggacgccgtggtggtggcctgcagcaccgtggccatgcagcagaagatcacccgcttcgtgcgctacaaggagatgaacgccttcgacggtaaaaccatcgacaaggagaccggcgaggtgctgcaccagaagacccacttcccccagccctgggagttcttcgcccaggaggtgatgatccgcgtgttcggcaagcccgacggcaagcccgagttcgaggaggccgacacccccgagaagctgcgcaccctgctggccgagaagctgagcagccgccctgaggccgtgcacgagtacgtgactcctctgttcgtgagccgcgcccccaaccgcaagatgagcggtcagggtcacatggagaccgtgaagagcgccaagcgcctggacgagggcgtgagcgtgctgcgcgtgcccctgacccagctgaagctgaaggacctggagaagatggtgaaccgcgagcgcgagcccaagctgtacgaggccctgaaggcccgcctggaggcccacaaggacgaccccgccaaggccttcgccgagcccttctacaagtacgacaaggccggcaaccgcacccagcaggtgaaggccgtgcgcgtggagcaggtgcagaagaccggcgtgtgggtgcgcaaccacaacggcatcgccgacaacgccaccatggtgcgcgtggacgtgttcgagaagggcgacaagtactacctggtgcccatctacagctggcaggtggccaagggcatcctgcccgaccgcgccgtggtgcagggcaaggacgaggaggactggcagctgatcgacgacagcttcaacttcaagttcagcctgcaccccaacgacctggtggaggtgatcaccaagaaggcccgcatgttcggctacttcgccagctgccaccgcggcaccggcaacatcaacatccgcatccacgacctggaccacaagatcggcaagaacggcatcctggagggcatcggcgtgaagaccgccctgagcttccagaagtaccagatcgacgagctgggcaaggagatccgcccctgccgcctgaagaagcgccctcctgtgcgctaa

SEQ ID NO: 19 - DNA, 3249 bp, Neisseria meningitidis
atggccgccttcaagcccaaccccatcaactacatcctgggcctggccatcggcatcgccagcgtgggctgggccatggtggagatcgacgaggacgagaaccccatctgcctgatcgacctgggtgtgcgcgtgttcgagcgcgctgaggtgcccaagactggtgacagtctggctatggctcgccggcttgctcgctctgttcggcgccttactcgccggcgcgctcaccgccttctgcgcgctcgccgcctgctgaagcgcgagggtgtgctgcaggctgccgacttcgacgagaacggcctgatcaagagcctgcccaacactccttggcagctgcgcgctgccgctctggaccgcaagctgactcctctggagtggagcgccgtgctgctgcacctgatcaagcaccgcggctacctgagccagcgcaagaacgagggcgagaccgccgacaaggagctgggtgctctgctgaagggcgtggccgacaacgcccacgccctgcagactggtgacttccgcactcctgctgagctggccctgaacaagttcgagaaggagagcggccacatccgcaaccagcgcggcgactacagccacaccttcagccgcaaggacctgcaggccgagctgatcctgctgttcgagaagcagaaggagttcggcaacccccacgtgagcggcggcctgaaggagggcatcgagaccctgctgatgacccagcgccccgccctgagcggcgacgccgtgcagaagatgctgggccactgcaccttcgagccagccgagcccaaggccgccaagaacacctacaccgccgagcgcttcatctggctgaccaagctgaacaacctgcgcatcctggagcagggcagcgagcgccccctgaccgacaccgagcgcgccaccctgatggacgagccctaccgcaagagcaagctgacctacgcccaggcccgcaagctgctgggtctggaggacaccgccttcttcaagggcctgcgctacggcaaggacaacgccgaggccagcaccctgatggagatgaaggcctaccacgccatcagccgcgccctggagaaggagggcctgaaggacaagaagagtcctctgaacctgagccccgagctgcaggacgagatcggcaccgccttcagcctgttcaagaccgacgaggacatcaccggccgcctgaaggaccgcatccagcccgagatcctggaggccctgctgaagcacatcagcttcgacaagttcgtgcagatcagcctgaaggccctgcgccgcatcgtgcccctgatggagcagggcaagcgctacgacgaggcctgcgccgagatctacggcgaccactacggcaagaagaacaccgaggagaagatctacctgcctcctatccccgccgacgagatccgcaaccccgtggtgctgcgcgccctgagccaggcccgcaaggtgatcaacggcgtggtgcgccgctacggcagccccgcccgcatccacatcgagaccgcccgcgaggtgggcaagagcttcaaggaccgcaaggagatcgagaagcgccaggaggagaaccgcaaggaccgcgagaaggccgccgccaagttccgcgagtacttccccaacttcgtgggcgagcccaagagcaaggacatcctgaagctgcgcctgtacgagcagcagcacggcaagtgcctgtacagcggcaaggagatcaacctgggccgcctgaacgagaagggctacgtggagatcgccgctgccctgcccttcagccgcacctgggacgacagcttcaacaacaaggtgctggtgctgggcagcgaggctcagaacaagggcaaccagaccccctacgagtacttcaacggcaaggacaacagccgcgagtggcaggagttcaaggcccgcgtggagaccagccgcttcccccgcagcaagaagcagcgcatcctgctgcagaagttcgacgaggacggcttcaaggagcgcaacctgaacgacacccgctacgtgaaccgcttcctgtgccagttcgtggccgaccgcatgcgcctgaccggcaagggcaagaagcgcgtgttcgccagcaacggccagatcaccaacctgctgcgcggcttctggggcctgcgcaaggtgcgcgccgagaacgaccgccaccacgccctggacgccgtggtggtggcctgcagcaccgtggccatgcagcagaagatcacccgcttcgtgcgctacaaggagatgaacgccttcgacggtaaaaccatcgacaaggagaccggcgaggtgctgcaccagaagacccacttcccccagccctgggagttcttcgcccaggaggtgatgatccgcgtgttcggcaagcccgacggcaagcccgagttcgaggaggccgacacccccgagaagctgcgcaccctgctggccgagaagctgagcagccgccctgaggccgtgcacgagtacgtgactcctctgttcgtgagccgcgcccccaaccgcaagatgagcggtcagggtcacatggagaccgtgaagagcgccaagcgcctggacgagggcgtgagcgtgctgcgcgtgcccctgacccagctgaagctgaaggacctggagaagatggtgaaccgcgagcgcgagcccaagctgtacgaggccctgaaggcccgcctggaggcccacaaggacgaccccgccaaggccttcgccgagcccttctacaagtacgacaaggccggcaaccgcacccagcaggtgaaggccgtgcgcgtggagcaggtgcagaagaccggcgtgtgggtgcgcaaccacaacggcatcgccgacaacgccaccatggtgcgcgtggacgtgttcgagaagggcgacaagtactacctggtgcccatctacagctggcaggtggccaagggcatcctgcccgaccgcgccgtggtgcagggcaaggacgaggaggactggcagctgatcgacgacagcttcaacttcaagttcagcctgcaccccaacgacctggtggaggtgatcaccaagaaggcccgcatgttcggctacttcgccagctgccaccgcggcaccggcaacatcaacatccgcatccacgacctggaccacaagatcggcaagaacggcatcctggagggcatcggcgtgaagaccgccctgagcttccagaagtaccagatcgacgagctgggcaaggagatccgcccctgccgcctgaagaagcgccctcctgtgcgctaa

SEQ ID NO: 20 - DNA, 3282 bp, Neisseria meningitidis
atggccgccttcaagcccaaccccatcaactacatcctgggcctggacatcggcatcgccagcgtgggctgggccatggtggagatcgacgaggacgagaaccccatctgcctgatcgacctgggtgtgcgcgtgttcgagcgcgctgaggtgcccaagactggtgacagtctggctatggctcgccggcttgctcgctctgttcggcgccttactcgccggcgcgctcaccgccttctgcgcgctcgccgcctgctgaagcgcgagggtgtgctgcaggctgccgacttcgacgagaacggcctgatcaagagcctgcccaacactccttggcagctgcgcgctgccgctctggaccgcaagctgactcctctggagtggagcgccgtgctgctgcacctgatcaagcaccgcggctacctgagccagcgcaagaacgagggcgagaccgccgacaaggagctgggtgctctgctgaagggcgtggccgacaacgcccacgccctgcagactggtgacttccgcactcctgctgagctggccctgaacaagttcgagaaggagagcggccacatccgcaaccagcgcggcgactacagccacaccttcagccgcaaggacctgcaggccgagctgatcctgctgttcgagaagcagaaggagttcggcaacccccacgtgagcggcggcctgaaggagggcatcgagaccctgctgatgacccagcgccccgccctgagcggcgacgccgtgcagaagatgctgggccactgcaccttcgagccagccgagcccaaggccgccaagaacacctacaccgccgagcgcttcatctggctgaccaagctgaacaacctgcgcatcctggagcagggcagcgagcgccccctgaccgacaccgagcgcgccaccctgatggacgagccctaccgcaagagcaagctgacctacgcccaggcccgcaagctgctgggtctggaggacaccgccttcttcaagggcctgcgctacggcaaggacaacgccgaggccagcaccctgatggagatgaaggcctaccacgccatcagccgcgccctggagaaggagggcctgaaggacaagaagagtcctctgaacctgagccccgagctgcaggacgagatcggcaccgccttcagcctgttcaagaccgacgaggacatcaccggccgcctgaaggaccgcatccagcccgagatcctggaggccctgctgaagcacatcagcttcgacaagttcgtgcagatcagcctgaaggccctgcgccgcatcgtgcccctgatggagcagggcaagcgctacgacgaggcctgcgccgagatctacggcgaccactacggcaagaagaacaccgaggagaagatctacctgcctcctatccccgccgacgagatccgcaaccccgtggtgctgcgcgccctgagccaggcccgcaaggtgatcaacggcgtggtgcgccgctacggcagccccgcccgcatccacatcgagaccgcccgcgaggtgggcaagagcttcaaggaccgcaaggagatcgagaagcgccaggaggagaaccgcaaggaccgcgagaaggccgccgccaagttccgcgagtacttccccaacttcgtgggcgagcccaagagcaaggacatcctgaagctgcgcctgtacgagcagcagcacggcaagtgcctgtacagcggcaaggagatcaacctgggccgcctgaacgagaagggctacgtggagatcgaccacgccctgcccttcagccgcacctgggacgacagcttcaacaacaaggtgctggtgctgggcagcgagaaccagaacaagggcaaccagaccccctacgagtacttcaacggcaaggacaacagccgcgagtggcaggagttcaaggcccgcgtggagaccagccgcttcccccgcagcaagaagcagcgcatcctgctgcagaagttcgacgaggacggcttcaaggagcgcaacctgaacgacacccgctacgtgaaccgcttcctgtgccagttcgtggccgaccgcatgcgcctgaccggcaagggcaagaagcgcgtgttcgccagcaacggccagatcaccaacctgctgcgcggcttctggggcctgcgcaaggtgcgcgccgagaacgaccgccaccacgccctggacgccgtggtggtggcctgcagcaccgtggccatgcagcagaagatcacccgcttcgtgcgctacaaggagatgaacgccttcgacggtaaaaccatcgacaaggagaccggcgaggtgctgcaccagaagacccacttcccccagccctgggagttcttcgcccaggaggtgatgatccgcgtgttcggcaagcccgacggcaagcccgagttcgaggaggccgacacccccgagaagctgcgcaccctgctggccgagaagctgagcagccgccctgaggccgtgcacgagtacgtgactcctctgttcgtgagccgcgcccccaaccgcaagatgagcggtcagggtcacatggagaccgtgaagagcgccaagcgcctggacgagggcgtgagcgtgctgcgcgtgcccctgacccagctgaagctgaaggacctggagaagatggtgaaccgcgagcgcgagcccaagctgtacgaggccctgaaggcccgcctggaggcccacaaggacgaccccgccaaggccttcgccgagcccttctacaagtacgacaaggccggcaaccgcacccagcaggtgaaggccgtgcgcgtggagcaggtgcagaagaccggcgtgtgggtgcgcaaccacaacggcatcgccgacaacgccaccatggtgcgcgtggacgtgttcgagaagggcgacaagtactacctggtgcccatctacagctggcaggtggccaagggcatcctgcccgaccgcgccgtggtgcagggcaaggacgaggaggactggcagctgatcgacgacagcttcaacttcaagttcagcctgcaccccaacgacctggtggaggtgatcaccaagaaggcccgcatgttcggctacttcgccagctgccaccgcggcaccggcaacatcaacatccgcatccacgacctggaccacaagatcggcaagaacggcatcctggagggcatcggcgtgaagaccgccctgagcttccagaagtaccagatcgacgagctgggcaaggagatccgcccctgccgcctgaagaagcgccctcctgtgcgcagcagggctgaccccaagaagaagaggaaggtgtga

SEQ ID NO: 21 - DNA, 3342 bp, Neisseria meningitidis
atggccgccttcaagcccaaccccatcaactacatcctgggcctggacatcggcatcgccagcgtgggctgggccatggtggagatcgacgaggacgagaaccccatctgcctgatcgacctgggtgtgcgcgtgttcgagcgcgctgaggtgcccaagactggtgacagtctggctatggctcgccggcttgctcgctctgttcggcgccttactcgccggcgcgctcaccgccttctgcgcgctcgccgcctgctgaagcgcgagggtgtgctgcaggctgccgacttcgacgagaacggcctgatcaagagcctgcccaacactccttggcagctgcgcgctgccgctctggaccgcaagctgactcctctggagtggagcgccgtgctgctgcacctgatcaagcaccgcggctacctgagccagcgcaagaacgagggcgagaccgccgacaaggagctgggtgctctgctgaagggcgtggccgacaacgcccacgccctgcagactggtgacttccgcactcctgctgagctggccctgaacaagttcgagaaggagagcggccacatccgcaaccagcgcggcgactacagccacaccttcagccgcaaggacctgcaggccgagctgatcctgctgttcgagaagcagaaggagttcggcaacccccacgtgagcggcggcctgaaggagggcatcgagaccctgctgatgacccagcgccccgccctgagcggcgacgccgtgcagaagatgctgggccactgcaccttcgagccagccgagcccaaggccgccaagaacacctacaccgccgagcgcttcatctggctgaccaagctgaacaacctgcgcatcctggagcagggcagcgagcgccccctgaccgacaccgagcgcgccaccctgatggacgagccctaccgcaagagcaagctgacctacgcccaggcccgcaagctgctgggtctggaggacaccgccttcttcaagggcctgcgctacggcaaggacaacgccgaggccagcaccctgatggagatgaaggcctaccacgccatcagccgcgccctggagaaggagggcctgaaggacaagaagagtcctctgaacctgagccccgagctgcaggacgagatcggcaccgccttcagcctgttcaagaccgacgaggacatcaccggccgcctgaaggaccgcatccagcccgagatcctggaggccctgctgaagcacatcagcttcgacaagttcgtgcagatcagcctgaaggccctgcgccgcatcgtgcccctgatggagcagggcaagcgctacgacgaggcctgcgccgagatctacggcgaccactacggcaagaagaacaccgaggagaagatctacctgcctcctatccccgccgacgagatccgcaaccccgtggtgctgcgcgccctgagccaggcccgcaaggtgatcaacggcgtggtgcgccgctacggcagccccgcccgcatccacatcgagaccgcccgcgaggtgggcaagagcttcaaggaccgcaaggagatcgagaagcgccaggaggagaaccgcaaggaccgcgagaaggccgccgccaagttccgcgagtacttccccaacttcgtgggcgagcccaagagcaaggacatcctgaagctgcgcctgtacgagcagcagcacggcaagtgcctgtacagcggcaaggagatcaacctgggccgcctgaacgagaagggctacgtggagatcgaccacgccctgcccttcagccgcacctgggacgacagcttcaacaacaaggtgctggtgctgggcagcgagaaccagaacaagggcaaccagaccccctacgagtacttcaacggcaaggacaacagccgcgagtggcaggagttcaaggcccgcgtggagaccagccgcttcccccgcagcaagaagcagcgcatcctgctgcagaagttcgacgaggacggcttcaaggagcgcaacctgaacgacacccgctacgtgaaccgcttcctgtgccagttcgtggccgaccgcatgcgcctgaccggcaagggcaagaagcgcgtgttcgccagcaacggccagatcaccaacctgctgcgcggcttctggggcctgcgcaaggtgcgcgccgagaacgaccgccaccacgccctggacgccgtggtggtggcctgcagcaccgtggccatgcagcagaagatcacccgcttcgtgcgctacaaggagatgaacgccttcgacggtaaaaccatcgacaaggagaccggcgaggtgctgcaccagaagacccacttcccccagccctgggagttcttcgcccaggaggtgatgatccgcgtgttcggcaagcccgacggcaagcccgagttcgaggaggccgacacccccgagaagctgcgcaccctgctggccgagaagctgagcagccgccctgaggccgtgcacgagtacgtgactcctctgttcgtgagccgcgcccccaaccgcaagatgagcggtcagggtcacatggagaccgtgaagagcgccaagcgcctggacgagggcgtgagcgtgctgcgcgtgcccctgacccagctgaagctgaaggacctggagaagatggtgaaccgcgagcgcgagcccaagctgtacgaggccctgaaggcccgcctggaggcccacaaggacgaccccgccaaggccttcgccgagcccttctacaagtacgacaaggccggcaaccgcacccagcaggtgaaggccgtgcgcgtggagcaggtgcagaagaccggcgtgtgggtgcgcaaccacaacggcatcgccgacaacgccaccatggtgcgcgtggacgtgttcgagaagggcgacaagtactacctggtgcccatctacagctggcaggtggccaagggcatcctgcccgaccgcgccgtggtgcagggcaaggacgaggaggactggcagctgatcgacgacagcttcaacttcaagttcagcctgcaccccaacgacctggtggaggtgatcaccaagaaggcccgcatgttcggctacttcgccagctgccaccgcggcaccggcaacatcaacatccgcatccacgacctggaccacaagatcggcaagaacggcatcctggagggcatcggcgtgaagaccgccctgagcttccagaagtaccagatcgacgagctgggcaaggagatccgcccctgccgcctgaagaagcgccctcctgtgcgcgcggccgcagatccaaaaaagaagagaaaggtagatccaaaaaagaagagaaaggtagatccaaaaaagaagagaaaggtagatacggccgcatag

SEQ ID NO: 22 - DNA, 3468 bp, Neisseria meningitidis
atggccgccttcaagcccaaccccatcaactacatcctgggcctggccatcggcatcgccagcgtgggctgggccatggtggagatcgacgaggacgagaaccccatctgcctgatcgacctgggtgtgcgcgtgttcgagcgcgctgaggtgcccaagactggtgacagtctggctatggctcgccggcttgctcgctctgttcggcgccttactcgccggcgcgctcaccgccttctgcgcgctcgccgcctgctgaagcgcgagggtgtgctgcaggctgccgacttcgacgagaacggcctgatcaagagcctgcccaacactccttggcagctgcgcgctgccgctctggaccgcaagctgactcctctggagtggagcgccgtgctgctgcacctgatcaagcaccgcggctacctgagccagcgcaagaacgagggcgagaccgccgacaaggagctgggtgctctgctgaagggcgtggccgacaacgcccacgccctgcagactggtgacttccgcactcctgctgagctggccctgaacaagttcgagaaggagagcggccacatccgcaaccagcgcggcgactacagccacaccttcagccgcaaggacctgcaggccgagctgatcctgctgttcgagaagcagaaggagttcggcaacccccacgtgagcggcggcctgaaggagggcatcgagaccctgctgatgacccagcgccccgccctgagcggcgacgccgtgcagaagatgctgggccactgcaccttcgagccagccgagcccaaggccgccaagaacacctacaccgccgagcgcttcatctggctgaccaagctgaacaacctgcgcatcctggagcagggcagcgagcgccccctgaccgacaccgagcgcgccaccctgatggacgagccctaccgcaagagcaagctgacctacgcccaggcccgcaagctgctgggtctggaggacaccgccttcttcaagggcctgcgctacggcaaggacaacgccgaggccagcaccctgatggagatgaaggcctaccacgccatcagccgcgccctggagaaggagggcctgaaggacaagaagagtcctctgaacctgagccccgagctgcaggacgagatcggcaccgccttcagcctgttcaagaccgacgaggacatcaccggccgcctgaaggaccgcatccagcccgagatcctggaggccctgctgaagcacatcagcttcgacaagttcgtgcagatcagcctgaaggccctgcgccgcatcgtgcccctgatggagcagggcaagcgctacgacgaggcctgcgccgagatctacggcgaccactacggcaagaagaacaccgaggagaagatctacctgcctcctatccccgccgacgagatccgcaaccccgtggtgctgcgcgccctgagccaggcccgcaaggtgatcaacggcgtggtgcgccgctacggcagccccgcccgcatccacatcgagaccgcccgcgaggtgggcaagagcttcaaggaccgcaaggagatcgagaagcgccaggaggagaaccgcaaggaccgcgagaaggccgccgccaagttccgcgagtacttccccaacttcgtgggcgagcccaagagcaaggacatcctgaagctgcgcctgtacgagcagcagcacggcaagtgcctgtacagcggcaaggagatcaacctgggccgcctgaacgagaagggctacgtggagatcgccgctgccctgcccttcagccgcacctgggacgacagcttcaacaacaaggtgctggtgctgggcagcgaggctcagaacaagggcaaccagaccccctacgagtacttcaacggcaaggacaacagccgcgagtggcaggagttcaaggcccgcgtggagaccagccgcttcccccgcagcaagaagcagcgcatcctgctgcagaagttcgacgaggacggcttcaaggagcgcaacctgaacgacacccgctacgtgaaccgcttcctgtgccagttcgtggccgaccgcatgcgcctgaccggcaagggcaagaagcgcgtgttcgccagcaacggccagatcaccaacctgctgcgcggcttctggggcctgcgcaaggtgcgcgccgagaacgaccgccaccacgccctggacgccgtggtggtggcctgcagcaccgtggccatgcagcagaagatcacccgcttcgtgcgctacaaggagatgaacgccttcgacggtaaaaccatcgacaaggagaccggcgaggtgctgcaccagaagacccacttcccccagccctgggagttcttcgcccaggaggtgatgatccgcgtgttcggcaagcccgacggcaagcccgagttcgaggaggccgacacccccgagaagctgcgcaccctgctggccgagaagctgagcagccgccctgaggccgtgcacgagtacgtgactcctctgttcgtgagccgcgcccccaaccgcaagatgagcggtcagggtcacatggagaccgtgaagagcgccaagcgcctggacgagggcgtgagcgtgctgcgcgtgcccctgacccagctgaagctgaaggacctggagaagatggtgaaccgcgagcgcgagcccaagctgtacgaggccctgaaggcccgcctggaggcccacaaggacgaccccgccaaggccttcgccgagcccttctacaagtacgacaaggccggcaaccgcacccagcaggtgaaggccgtgcgcgtggagcaggtgcagaagaccggcgtgtgggtgcgcaaccacaacggcatcgccgacaacgccaccatggtgcgcgtggacgtgttcgagaagggcgacaagtactacctggtgcccatctacagctggcaggtggccaagggcatcctgcccgaccgcgccgtggtgcagggcaaggacgaggaggactggcagctgatcgacgacagcttcaacttcaagttcagcctgcaccccaacgacctggtggaggtgatcaccaagaaggcccgcatgttcggctacttcgccagctgccaccgcggcaccggcaacatcaacatccgcatccacgacctggaccacaagatcggcaagaacggcatcctggagggcatcggcgtgaagaccgccctgagcttccagaagtaccagatcgacgagctgggcaaggagatccgcccctgccgcctgaagaagcgccctcctgtgcgcagcagggctgaccccaagaagaagaggaaggtggaggccagcggttccggacgggctgacgcattggacgattttgatctggatatgctgggaagtgacgccctcgatgattttgaccttgacatgcttggttcggatgcccttgatgactttgacctcgacatgctcggcagtgacgcccttgatgatttcgacctggacatgctgattaactctagatga

SEQ ID NO: 23 - DNA, 3489 bp, Neisseria meningitidis
atgcccaagaagaagaggaaggtggccgccttcaagcccaaccccatcaactacatcctgggcctggccatcggcatcgccagcgtgggctgggccatggtggagatcgacgaggacgagaaccccatctgcctgatcgacctgggtgtgcgcgtgttcgagcgcgctgaggtgcccaagactggtgacagtctggctatggctcgccggcttgctcgctctgttcggcgccttactcgccggcgcgctcaccgccttctgcgcgctcgccgcctgctgaagcgcgagggtgtgctgcaggctgccgacttcgacgagaacggcctgatcaagagcctgcccaacactccttggcagctgcgcgctgccgctctggaccgcaagctgactcctctggagtggagcgccgtgctgctgcacctgatcaagcaccgcggctacctgagccagcgcaagaacgagggcgagaccgccgacaaggagctgggtgctctgctgaagggcgtggccgacaacgcccacgccctgcagactggtgacttccgcactcctgctgagctggccctgaacaagttcgagaaggagagcggccacatccgcaaccagcgcggcgactacagccacaccttcagccgcaaggacctgcaggccgagctgatcctgctgttcgagaagcagaaggagttcggcaacccccacgtgagcggcggcctgaaggagggcatcgagaccctgctgatgacccagcgccccgccctgagcggcgacgccgtgcagaagatgctgggccactgcaccttcgagccagccgagcccaaggccgccaagaacacctacaccgccgagcgcttcatctggctgaccaagctgaacaacctgcgcatcctggagcagggcagcgagcgccccctgaccgacaccgagcgcgccaccctgatggacgagccctaccgcaagagcaagctgacctacgcccaggcccgcaagctgctgggtctggaggacaccgccttcttcaagggcctgcgctacggcaaggacaacgccgaggccagcaccctgatggagatgaaggcctaccacgccatcagccgcgccctggagaaggagggcctgaaggacaagaagagtcctctgaacctgagccccgagctgcaggacgagatcggcaccgccttcagcctgttcaagaccgacgaggacatcaccggccgcctgaaggaccgcatccagcccgagatcctggaggccctgctgaagcacatcagcttcgacaagttcgtgcagatcagcctgaaggccctgcgccgcatcgtgcccctgatggagcagggcaagcgctacgacgaggcctgcgccgagatctacggcgaccactacggcaagaagaacaccgaggagaagatctacctgcctcctatccccgccgacgagatccgcaaccccgtggtgctgcgcgccctgagccaggcccgcaaggtgatcaacggcgtggtgcgccgctacggcagccccgcccgcatccacatcgagaccgcccgcgaggtgggcaagagcttcaaggaccgcaaggagatcgagaagcgccaggaggagaaccgcaaggaccgcgagaaggccgccgccaagttccgcgagtacttccccaacttcgtgggcgagcccaagagcaaggacatcctgaagctgcgcctgtacgagcagcagcacggcaagtgcctgtacagcggcaaggagatcaacctgggccgcctgaacgagaagggctacgtggagatcgccgctgccctgcccttcagccgcacctgggacgacagcttcaacaacaaggtgctggtgctgggcagcgaggctcagaacaagggcaaccagaccccctacgagtacttcaacggcaaggacaacagccgcgagtggcaggagttcaaggcccgcgtggagaccagccgcttcccccgcagcaagaagcagcgcatcctgctgcagaagttcgacgaggacggcttcaaggagcgcaacctgaacgacacccgctacgtgaaccgcttcctgtgccagttcgtggccgaccgcatgcgcctgaccggcaagggcaagaagcgcgtgttcgccagcaacggccagatcaccaacctgctgcgcggcttctggggcctgcgcaaggtgcgcgccgagaacgaccgccaccacgccctggacgccgtggtggtggcctgcagcaccgtggccatgcagcagaagatcacccgcttcgtgcgctacaaggagatgaacgccttcgacggtaaaaccatcgacaaggagaccggcgaggtgctgcaccagaagacccacttcccccagccctgggagttcttcgcccaggaggtgatgatccgcgtgttcggcaagcccgacggcaagcccgagttcgaggaggccgacacccccgagaagctgcgcaccctgctggccgagaagctgagcagccgccctgaggccgtgcacgagtacgtgactcctctgttcgtgagccgcgcccccaaccgcaagatgagcggtcagggtcacatggagaccgtgaagagcgccaagcgcctggacgagggcgtgagcgtgctgcgcgtgcccctgacccagctgaagctgaaggacctggagaagatggtgaaccgcgagcgcgagcccaagctgtacgaggccctgaaggcccgcctggaggcccacaaggacgaccccgccaaggccttcgccgagcccttctacaagtacgacaaggccggcaaccgcacccagcaggtgaaggccgtgcgcgtggagcaggtgcagaagaccggcgtgtgggtgcgcaaccacaacggcatcgccgacaacgccaccatggtgcgcgtggacgtgttcgagaagggcgacaagtactacctggtgcccatctacagctggcaggtggccaagggcatcctgcccgaccgcgccgtggtgcagggcaaggacgaggaggactggcagctgatcgacgacagcttcaacttcaagttcagcctgcaccccaacgacctggtggaggtgatcaccaagaaggcccgcatgttcggctacttcgccagctgccaccgcggcaccggcaacatcaacatccgcatccacgacctggaccacaagatcggcaagaacggcatcctggagggcatcggcgtgaagaccgccctgagcttccagaagtaccagatcgacgagctgggcaaggagatccgcccctgccgcctgaagaagcgccctcctgtgcgcagcagggctgaccccaagaagaagaggaaggtggaggccagcggttccggacgggctgacgcattggacgattttgatctggatatgctgggaagtgacgccctcgatgattttgaccttgacatgcttggttcggatgcccttgatgactttgacctcgacatgctcggcagtgacgcccttgatgatttcgacctggacatgctgattaactctagatga

SEQ ID NO: 24 - DNA, 3249 bp, Neisseria meningitidis
atggctgccttcaaacctaattcaatcaactacatcctcggcctcgatatcggcatcgcatccgtcggctgggcgatggtagaaattgacgaagaagaaaaccccatccgcctgattgatttgggcgtgcgcgtatttgagcgtgccgaagtaccgaaaacaggcgactcccttgccatggcaaggcgtttggcgcgcagtgttcgccgcctgacccgccgtcgcgcccaccgcctgcttcggacccgccgcctattgaaacgcgaaggcgtattacaagccgccaattttgacgaaaacggcttgattaaatccttaccgaatacaccatggcaacttcgcgcagccgcattagaccgcaaactgacgcctttagagtggtcggcagtcttgttgcatttaatcaaacatcgcggctatttatcgcaacggaaaaacgagggcgaaactgccgataaggagcttggcgctttgcttaaaggcgtagccggcaatgcccatgccttacagacaggcgatttccgcacaccggccgaattggctttaaataaatttgagaaagaaagcggccatatccgcaatcagcgcagcgattattcgcatacgttcagccgcaaagatttacaggcggagctgattttgctgtttgaaaaacaaaaagaatttggcaatccgcatgtttcaggcggccttaaagaaggtattgaaaccctactgatgacgcaacgccctgccctgtccggcgatgccgttcaaaaaatgttggggcattgcaccttcgaaccggcagagccgaaagccgctaaaaacacctacacagccgaacgtttcatctggctgaccaagctgaacaacctgcgtattttagagcaaggcagcgagcggccattgaccgataccgaacgcgccacgcttatggacgagccatacagaaaatccaaactgacttacgcacaagcccgtaagctgctgggtttagaagataccgcctttttcaaaggcttgcgctatggtaaagacaatgccgaagcctcaacattgatggaaatgaaggcctaccatgccatcagccgtgcactggaaaaagaaggattgaaagacaaaaaatccccattaaacctttctcccgaattacaagacgaaatcggcacggcattctccctgttcaaaaccgatgaagacattacaggccgtctgaaagaccgtatacagcccgaaatcttagaagcgctgttgaaacacatcagcttcgataagttcgtccaaatttccttgaaagcattgcgccgaattgtgcctctaatggaacaaggcaaacgttacgatgaagcctgcgccgaaatctacggagaccattacggcaagaagaatacggaagaaaagatttatctgccgccgattcccgccgacgaaatccgcaaccccgtcgtcttgcgcgccttatctcaagcacgtaaggtcattaacggcgtggtacgccgttacggctccccagctcgtatccatattgaaactgcaagggaagtaggtaaatcgtttaaagaccgcaaagaaattgagaaacgccaagaagaaaaccgcaaagaccgggaaaaagccgccgccaaattccgagagtatttccccaattttgtcggagaacccaaatccaaagatattctgaaactgcgcctgtacgagcaacaacacggcaaatgcctgtattcgggcaaagaaatcaacttaggccgtctgaacgaaaaaggctatgtcgaaatcgaccatgccctgccgttctcgcgcacatgggacgacagtttcaacaataaagtactggtattgggcagcgaaaaccaaaacaaaggcaatcaaaccccttacgaatacttcaacggcaaagacaacagccgcgaatggcaggaatttaaagcgcgtgtcgaaaccagccgtttcccgcgcagtaaaaaacaacggattctgctgcaaaaattcgatgaagacggctttaaagaacgcaatctgaacgacacgcgctacgtcaaccgtttcctgtgtcaatttgttgccgaccgtatgcggctgacaggtaaaggcaagaaacgtgtctttgcatccaacggacaaattaccaatctgttgcgcggcttttggggattgcgcaaagtgcgtgcggaaaacgaccgccatcacgccttggacgccgtcgtcgttgcctgctcgaccgttgccatgcagcagaaaattacccgttttgtacgctataaagagatgaacgcgtttgacggtaaaaccatagacaaagaaacaggagaagtgctgcatcaaaaaacacacttcccacaaccttgggaatttttcgcacaagaagtcatgattcgcgtcttcggcaaaccggacggcaaacccgaattcgaagaagccgataccctagaaaaactgcgcacgttgcttgccgaaaaattatcatctcgccccgaagccgtacacgaatacgttacgccactgtttgtttcacgcgcgcccaatcggaagatgagcgggcaagggcatatggagaccgtcaaatccgccaaacgactggacgaaggcgtcagcgtgttgcgcgtaccgctgacacagttaaaactgaaagacttggaaaaaatggtcaatcgggagcgcgaacctaagctatacgaagcactgaaagcacggctggaagcacataaagacgatcctgccaaagcctttgccgagccgttttacaaatacgataaagcaggcaaccgcacccaacaggtaaaagccgtacgcgtagagcaagtacagaaaaccggcgtatgggtgcgcaaccataacggtattgccgacaacgcaaccatggtgcgcgtagatgtgtttgagaaaggcgacaagtattatctggtaccgatttacagttggcaggtagcgaaagggattttgccggatagggctgttgtacaaggaaaagatgaagaagattggcaacttattgatgatagtttcaactttaaattctcattacaccctaatgatttagtcgaggttataacaaaaaaagctagaatgtttggttactttgccagctgccatcgaggcacaggtaatatcaatatacgcattcatgatcttgatcataaaattggcaaaaatggaatactggaaggtatcggcgtcaaaaccgccctttcattccaaaaataccaaattgacgaactgggcaaagaaatcagaccatgccgtctgaaaaaacgcccgcctgtccgttaa

SEQ ID NO: 25 - DNA, 4188 bp, Treponema denticola
atgaaaaaggaaattaaggattattttctcggattggatgtaggaaccggatcggttggttgggcagttactgatactgactataaactcttaaaggctaatcgtaaagacctttggggaatgaggtgttttgagacggcggaaactgcggaagtgagaaggcttcacaggggggctaggcgccgtattgagagaagaaaaaaaagaataaagctgcttcaagagcttttttcccaagaaattgcaaaaacagatgagggatttttccaaagaatgaaggaaagccctttctatgcagaagacaagactatattacaggaaaacactctttttaatgataaagattttgccgataagacctaccataaagcctatcctaccataaaccatctgataaaggcttggattgaaaacaaggtaaagccggatccaaggttattatacttagcctgtcataatattataaaaaaaagaggtcattttttattcgagggcgatttcgattcagaaaatcagtttgatacttctatacaagccctttttgaatatctgcgtgaagatatggaagtcgatattgatgccgatagccaaaaagtaaaagagattttaaaggatagctctttaaaaaattccgaaaaacaaagccgcctaaataagattttaggactgaaaccctccgacaaacaaaaaaaagctattactaatttaatatcaggcaacaaaataaactttgccgatctttatgataatccggatttaaaggatgcggagaaaaatagtatatctttttcgaaagatgattttgatgctttgagtgatgatcttgcttccattctaggagattcttttgagcttttattaaaagcaaaggctgtatataactgctcggttctttccaaggtaataggcgatgaacagtatctttcttttgcaaaggtaaaaatatatgaaaagcataaaaccgatttgactaaattaaaaaatgttataaaaaagcatttcccaaaagattataaaaaagtattcggatacaataaaaacgaaaaaaataacaacaattactccggatatgtaggcgtatgtaaaaccaagagtaaaaaactaattataaacaattctgtaaatcaagaagatttttacaaatttttaaaaactatcctttcagcaaaatccgagataaaggaagtaaatgatatattgaccgaaattgaaacagggacttttttacctaaacagatatctaaaagcaatgcggagattccttatcaattacgcaagatggagctggaaaaaatattatcaaacgcagaaaaacatttttcctttttaaaacaaaaagatgaaaaaggtttatctcacagtgaaaagattataatgcttttaacatttaagattccttattatattggacctataaacgataaccataaaaaattttttcccgatagatgctgggtagtaaaaaaagaaaaatcgccttccggtaaaactactccatggaacttttttgatcatatcgataaagaaaaaacagctgaagcatttattacaagcagaaccaatttttgcacatatttagtaggggaatccgttttaccaaaaagttctcttttatattccgagtataccgttttaaatgaaatcaacaatttacagattatcattgacggaaaaaatatctgcgatattaaactaaaacaaaaaatatacgaagatttatttaaaaaatataaaaagattacacaaaaacaaatttcaacttttatcaaacacgaaggtatttgcaataaaactgatgaagtaattattctaggtatcgataaagaatgtacatcttcgttaaaatcatatatagaacttaaaaacatattcggaaagcaagtagatgaaatttctacaaagaatatgcttgaagaaattatacgatgggctactatctatgatgaaggagaaggcaaaacaatacttaaaacaaaaataaaagccgaatatggaaaatattgttctgatgaacagatcaaaaaaattctaaatcttaaattttcaggttggggccgcttgtcacgcaaattccttgaaaccgtcacatcagaaatgccgggttttagcgaaccggtaaatataataactgcaatgcgggaaactcaaaataatttaatggagttgcttagcagtgaatttacatttactgaaaatattaaaaagataaattcgggatttgaagatgctgaaaagcaattttcatatgacggtttggttaagcctctgtttttatcaccatcggtaaaaaaaatgttgtggcagactctaaagcttgtaaaagaaatatcgcatattacccaagcccctcctaaaaaaatatttatagaaatggcaaagggtgcagagcttgaacctgcgaggactaagacaagattaaaaattttacaagacttatacaataactgtaaaaatgatgcggatgcttttagttccgagataaaagacctttcaggtaaaatagaaaatgaagataatttaaggcttcgaagcgacaaactttatctttattacacgcagcttggaaagtgcatgtattgcggtaaaccgattgaaataggccatgtatttgatacaagcaactatgatatagatcatatttatccccaatccaagattaaagatgacagtataagtaatcgggttttagtatgcagcagctgcaataaaaataaggaagataaatatcctttgaagtctgaaattcaatcaaagcaaaggggcttttggaattttttacaacgaaataactttataagccttgaaaaattgaataggttaacaagggccactccaatctcggatgacgaaacggcaaaattcattgccagacagcttgtagaaacaagacaggcgacaaaagtagctgcaaaagtattagaaaaaatgtttcccgaaactaagattgtttattctaaagctgaaaccgtatcaatgtttagaaataaattcgatattgtaaaatgcagagaaataaacgattttcatcatgctcatgatgcatatttaaatattgttgtcggaaatgtatataatacaaaatttacaaataatccttggaactttataaaggagaaacgggataatccaaagattgccgatacttacaattattataaagtttttgattatgatgtaaaaagaaataatattacggcatgggaaaaaggaaaaacaattatcactgtgaaggatatgcttaaaagaaatacccctatttatacacgccaagccgcctgcaaaaaaggagaactctttaaccaaaccattatgaaaaaaggattgggccagcatcctctaaaaaaagaaggtcctttttctaatatttcaaaatatgggggctataataaagtctctgctgcatattatactcttatagaatacgaagaaaaagggaataaaatacgaagcttagaaaccatccctctatatttggtaaaagacattcaaaaagatcaagatgtattaaagagttacttaacagatctgctagggaaaaaagaatttaagattttggttcctaaaataaaaatcaactccctcttaaaaattaacggtttcccttgtcatataacagggaaaaccaatgattctttcttactgcgtccggctgttcagttttgctgttcaaataatgaagttctttattttaaaaaaattataagattcagtgaaataagaagtcaaagagaaaagataggaaaaacaatttctccttatgaagacttatcctttagatcttatatcaaagaaaatttatggaaaaagacaaaaaatgatgaaataggagaaaaggagttttatgaccttcttcaaaagaagaatttggaaatctatgatatgcttttaacaaaacataaggatactatttataaaaaaagacctaactctgcaactattgatatcttagtcaaaggaaaagaaaagtttaaatctttaataatcgaaaatcagtttgaagttattttagagattttaaaactgttttctgccactagaaatgtatcagacttacaacatataggcggaagcaaatattcaggagttgcaaagataggaaataaaatatctagtcttgataactgtattttaatttaccaatcaataacaggtatttttgaaaaaaggattgatttgttaaaggtatga

SEQ ID NO: 26 - DNA, 4188 bp, Treponema denticola
atgaagaaggagatcaaggactacttcctgggcctggacgtgggcaccggcagcgtgggctgggccgtgaccgacaccgactacaagctgctgaaggccaaccgcaaggacctgtggggcatgcgctgcttcgagactgctgagaccgccgaggtgcgccggctgcaccgcggtgctcgccggcgcatcgagcgccgcaagaagcgcatcaagctgctgcaggagctgttcagccaggagatcgccaagaccgacgagggcttcttccagcgcatgaaggagagccccttctacgccgaggacaagaccatcctgcaggagaacaccctgttcaacgacaaggacttcgccgacaagacctaccacaaggcctaccccaccatcaaccacctgatcaaggcctggatcgagaacaaggtgaagcccgaccctcgcctgctgtacctggcctgccacaacatcatcaagaagcgcggccacttcctgttcgagggcgacttcgacagcgagaaccagttcgacaccagcatccaggccctgttcgagtacctgcgcgaggacatggaggtggacatcgacgccgacagccagaaggtgaaggagatcctgaaggacagcagcctgaagaacagcgagaagcagagccgcctgaacaagatcctgggcctgaagcccagcgacaagcagaagaaggccatcaccaacctgatcagcggcaacaagatcaacttcgccgacctgtacgacaaccccgacctgaaggacgccgagaagaacagcatcagcttcagcaaggacgacttcgacgccctgagcgacgacctggccagcatcctgggcgacagcttcgagctgctgctgaaggccaaggccgtgtacaactgcagcgtgctgagcaaggtgatcggcgacgagcagtacctgagcttcgccaaggtgaagatctacgagaagcacaagaccgaccttaccaagctgaagaacgtgatcaagaagcacttccccaaggactacaagaaggtgttcggctacaacaagaacgagaagaacaacaacaactacagcggctacgtgggcgtgtgcaagaccaagagcaagaagctgatcatcaacaacagcgtgaaccaggaggacttctacaagttcctgaagaccatcctgagcgccaagagcgagatcaaggaggtgaacgacatcctgaccgagatcgagaccggcaccttcctgcccaagcagatcagcaagagcaacgccgagatcccctaccagctgcgcaagatggagctggagaagatcctgagcaacgccgagaagcacttcagcttcctgaagcagaaggacgagaagggcctgagccacagcgagaagatcatcatgctgctgaccttcaagatcccctactacatcggccccatcaacgacaaccacaagaagttcttccccgaccgctgctgggtggtgaagaaggagaagagccccagcggcaagaccaccccctggaacttcttcgaccacatcgacaaggagaagaccgccgaggccttcatcaccagccgcaccaacttctgcacatacctggtgggcgagagcgtgctgcccaagagcagcctgctgtacagcgagtacaccgtgctgaacgagatcaacaacctgcagatcatcatcgacggcaagaacatctgcgacatcaagctgaagcagaagatctacgaggacctgttcaagaagtacaagaagatcacccagaagcagatcagcaccttcatcaagcacgagggcatctgcaacaagaccgacgaggtgatcatcctgggcatcgacaaggagtgcaccagcagcctgaagagctacatcgagctgaagaacatcttcggcaagcaggtggacgagatcagcaccaagaacatgctggaggagatcatccgctgggccaccatctacgacgagggcgagggcaagaccatcctgaagaccaagatcaaggccgagtacggcaagtactgcagcgacgagcagatcaagaagatcctgaacctgaagttcagcggctggggccgcctgagccgcaagttcctggagaccgtgaccagcgagatgcccggcttcagcgagcccgtgaacatcatcaccgccatgcgcgagacccagaacaacctgatggagctgctgagcagcgagttcaccttcaccgagaacatcaagaagatcaacagcggcttcgaggacgccgagaagcagttcagctacgacggcctggtgaagcccctgttcctgagccccagcgtgaagaagatgctgtggcagaccctgaagctggtgaaggagatcagccacatcacccaggctcctcctaagaagatcttcatcgagatggccaagggcgccgagctggagcctgctcgcaccaagacccgcctgaagatcctgcaggacctgtacaacaactgcaagaacgacgccgacgcattcagcagcgagatcaaggacctgagcggcaagatcgagaacgaggacaacctgcgcctgcgcagcgacaagctgtacctgtactacacccagctgggcaagtgcatgtactgcggcaagcccatcgagatcggccacgtgttcgacaccagcaactacgacatcgaccacatctacccccagagcaagatcaaggacgacagcatcagcaaccgcgtgctggtgtgcagcagctgcaacaagaacaaggaggacaagtaccctctgaagagcgagatccagagcaagcagcgcggcttctggaacttcctgcagcgcaacaacttcatcagcctggagaagctgaaccgcctgacccgcgccacccccatcagcgacgacgagaccgccaagttcatcgcccgccagctggtggagactcgccaagctaccaaggtggccgccaaggtgctggagaagatgttccccgagaccaagatcgtgtacagcaaggccgagaccgtgagcatgttccgcaacaagttcgacatcgtgaagtgccgcgagatcaacgacttccaccacgcccacgacgcctacctgaacatcgtggtgggcaacgtgtacaacaccaagttcaccaacaacccctggaatttcattaaggagaagcgcgacaaccccaagatcgccgacacctacaactactacaaggtgttcgactacgacgtgaagcgcaacaacatcaccgcctgggagaagggcaagaccatcatcaccgtgaaggacatgctgaagcgcaacacccccatctacacccgccaggccgcctgcaagaagggcgagctgttcaaccagaccatcatgaagaagggcctgggccagcaccccctgaagaaggagggccccttcagcaacatcagcaagtacggcggctacaacaaggtgagcgccgcctactacaccctgatcgagtacgaggagaagggcaacaagatccgcagcctggagaccatccccctgtacctggtgaaggacatccagaaggaccaggacgtgctgaagagctacctgaccgacctgctgggcaagaaggagttcaagatcctggtgcccaagatcaagatcaacagcctgctgaagatcaacggcttcccctgccacatcaccggcaagaccaacgacagcttcctgctgcgccccgccgtgcagttctgctgcagcaacaacgaggtgctgtacttcaagaagatcatccgcttcagcgagatccgcagccagcgcgagaagatcggcaagaccatcagcccctacgaggacctgagcttccgcagctacatcaaggagaacctgtggaagaagaccaagaacgacgagatcggcgagaaggagttctacgacctgctgcagaagaagaacctggagatctacgacatgctgctgaccaagcacaaggacaccatctacaagaagcgccccaacagcgccaccatcgacatcctggtgaagggcaaggagaagttcaagagcctgatcatcgagaaccagttcgaggtgatcctggagatcctgaagctgttcagcgccacccgcaacgtgagcgacctgcagcacatcggcggcagcaagtacagcggcgtggccaagatcggcaacaagatcagcagcctggacaactgcatcctgatctaccagagcatcaccggcatcttcgagaagcgcatcgacctgctgaaggtgtaa

SEQ ID NO: 27 - DNA, 4188 bp, Treponema denticola
atgaagaaggagatcaaggactacttcctgggcctggccgtgggcaccggcagcgtgggctgggccgtgaccgacaccgactacaagctgctgaaggccaaccgcaaggacctgtggggcatgcgctgcttcgagactgctgagaccgccgaggtgcgccggctgcaccgcggtgctcgccggcgcatcgagcgccgcaagaagcgcatcaagctgctgcaggagctgttcagccaggagatcgccaagaccgacgagggcttcttccagcgcatgaaggagagccccttctacgccgaggacaagaccatcctgcaggagaacaccctgttcaacgacaaggacttcgccgacaagacctaccacaaggcctaccccaccatcaaccacctgatcaaggcctggatcgagaacaaggtgaagcccgaccctcgcctgctgtacctggcctgccacaacatcatcaagaagcgcggccacttcctgttcgagggcgacttcgacagcgagaaccagttcgacaccagcatccaggccctgttcgagtacctgcgcgaggacatggaggtggacatcgacgccgacagccagaaggtgaaggagatcctgaaggacagcagcctgaagaacagcgagaagcagagccgcctgaacaagatcctgggcctgaagcccagcgacaagcagaagaaggccatcaccaacctgatcagcggcaacaagatcaacttcgccgacctgtacgacaaccccgacctgaaggacgccgagaagaacagcatcagcttcagcaaggacgacttcgacgccctgagcgacgacctggccagcatcctgggcgacagcttcgagctgctgctgaaggccaaggccgtgtacaactgcagcgtgctgagcaaggtgatcggcgacgagcagtacctgagcttcgccaaggtgaagatctacgagaagcacaagaccgaccttaccaagctgaagaacgtgatcaagaagcacttccccaaggactacaagaaggtgttcggctacaacaagaacgagaagaacaacaacaactacagcggctacgtgggcgtgtgcaagaccaagagcaagaagctgatcatcaacaacagcgtgaaccaggaggacttctacaagttcctgaagaccatcctgagcgccaagagcgagatcaaggaggtgaacgacatcctgaccgagatcgagaccggcaccttcctgcccaagcagatcagcaagagcaacgccgagatcccctaccagctgcgcaagatggagctggagaagatcctgagcaacgccgagaagcacttcagcttcctgaagcagaaggacgagaagggcctgagccacagcgagaagatcatcatgctgctgaccttcaagatcccctactacatcggccccatcaacgacaaccacaagaagttcttccccgaccgctgctgggtggtgaagaaggagaagagccccagcggcaagaccaccccctggaacttcttcgaccacatcgacaaggagaagaccgccgaggccttcatcaccagccgcaccaacttctgcacatacctggtgggcgagagcgtgctgcccaagagcagcctgctgtacagcgagtacaccgtgctgaacgagatcaacaacctgcagatcatcatcgacggcaagaacatctgcgacatcaagctgaagcagaagatctacgaggacctgttcaagaagtacaagaagatcacccagaagcagatcagcaccttcatcaagcacgagggcatctgcaacaagaccgacgaggtgatcatcctgggcatcgacaaggagtgcaccagcagcctgaagagctacatcgagctgaagaacatcttcggcaagcaggtggacgagatcagcaccaagaacatgctggaggagatcatccgctgggccaccatctacgacgagggcgagggcaagaccatcctgaagaccaagatcaaggccgagtacggcaagtactgcagcgacgagcagatcaagaagatcctgaacctgaagttcagcggctggggccgcctgagccgcaagttcctggagaccgtgaccagcgagatgcccggcttcagcgagcccgtgaacatcatcaccgccatgcgcgagacccagaacaacctgatggagctgctgagcagcgagttcaccttcaccgagaacatcaagaagatcaacagcggcttcgaggacgccgagaagcagttcagctacgacggcctggtgaagcccctgttcctgagccccagcgtgaagaagatgctgtggcagaccctgaagctggtgaaggagatcagccacatcacccaggctcctcctaagaagatcttcatcgagatggccaagggcgccgagctggagcctgctcgcaccaagacccgcctgaagatcctgcaggacctgtacaacaactgcaagaacgacgccgacgcattcagcagcgagatcaaggacctgagcggcaagatcgagaacgaggacaacctgcgcctgcgcagcgacaagctgtacctgtactacacccagctgggcaagtgcatgtactgcggcaagcccatcgagatcggccacgtgttcgacaccagcaactacgacatcgctgctatctacccccagagcaagatcaaggacgacagcatcagcaaccgcgtgctggtgtgcagcagctgcgccaagaacaaggaggacaagtaccctctgaagagcgagatccagagcaagcagcgcggcttctggaacttcctgcagcgcaacaacttcatcagcctggagaagctgaaccgcctgacccgcgccacccccatcagcgacgacgagaccgccaagttcatcgcccgccagctggtggagactcgccaagctaccaaggtggccgccaaggtgctggagaagatgttccccgagaccaagatcgtgtacagcaaggccgagaccgtgagcatgttccgcaacaagttcgacatcgtgaagtgccgcgagatcaacgacttccaccacgcccacgacgcctacctgaacatcgtggtgggcaacgtgtacaacaccaagttcaccaacaacccctggaatttcattaaggagaagcgcgacaaccccaagatcgccgacacctacaactactacaaggtgttcgactacgacgtgaagcgcaacaacatcaccgcctgggagaagggcaagaccatcatcaccgtgaaggacatgctgaagcgcaacacccccatctacacccgccaggccgcctgcaagaagggcgagctgttcaaccagaccatcatgaagaagggcctgggccagcaccccctgaagaaggagggccccttcagcaacatcagcaagtacggcggctacaacaaggtgagcgccgcctactacaccctgatcgagtacgaggagaagggcaacaagatccgcagcctggagaccatccccctgtacctggtgaaggacatccagaaggaccaggacgtgctgaagagctacctgaccgacctgctgggcaagaaggagttcaagatcctggtgcccaagatcaagatcaacagcctgctgaagatcaacggcttcccctgccacatcaccggcaagaccaacgacagcttcctgctgcgccccgccgtgcagttctgctgcagcaacaacgaggtgctgtacttcaagaagatcatccgcttcagcgagatccgcagccagcgcgagaagatcggcaagaccatcagcccctacgaggacctgagcttccgcagctacatcaaggagaacctgtggaagaagaccaagaacgacgagatcggcgagaaggagttctacgacctgctgcagaagaagaacctggagatctacgacatgctgctgaccaagcacaaggacaccatctacaagaagcgccccaacagcgccaccatcgacatcctggtgaagggcaaggagaagttcaagagcctgatcatcgagaaccagttcgaggtgatcctggagatcctgaagctgttcagcgccacccgcaacgtgagcgacctgcagcacatcggcggcagcaagtacagcggcgtggccaagatcggcaacaagatcagcagcctggacaactgcatcctgatctaccagagcatcaccggcatcttcgagaagcgcatcgacctgctgaaggtgtaa

SEQ ID NO: 28 - protein, 1053 aa, Streptococcus aureas
MKRNYILGLDIGITSVGYGIIDYETRDVIDAGVRLFKEANVENNEGRRSKRGARRLKRRRRHRIQRVKKLLFDYNLLTDHSELSGINPYEARVKGLSQKLSEEEFSAALLHLAKRRGVHNVNEVEEDTGNELSTKEQISRNSKALEEKYVAELQLERLKKDGEVRGSINRFKTSDYVKEAKQLLKVQKAYHQLDQSFIDTYIDLLETRRTYYEGPGEGSPFGWKDIKEWYEMLMGHCTYFPEELRSVKYAYNADLYNALNDLNNLVITRDENEKLEYYEKFQIIENVFKQKKKPTLKQIAKEILVNEEDIKGYRVTSTGKPEFTNLKVYHDIKDITARKEIIENAELLDQIAKILTIYQSSEDIQEELTNLNSELTQEEIEQISNLKGYTGTHNLSLKAINLILDELWHTNDNQIAIFNRLKLVPKKVDLSQQKEIPTTLVDDFILSPVVKRSFIQSIKVINAIIKKYGLPNDIIIELAREKNSKDAQKMINEMQKRNRQTNERIEEIIRTTGKENAKYLIEKIKLHDMQEGKCLYSLEAIPLEDLLNNPFNYEVDHIIPRSVSFDNSFNNKVLVKQEENSKKGNRTPFQYLSSSDSKISYETFKKHILNLAKGKGRISKTKKEYLLEERDINRFSVQKDFINRNLVDTRYATRGLMNLLRSYFRVNNLDVKVKSINGGFTSFLRRKWKFKKERNKGYKHHAEDALIIANADFIFKEWKKLDKAKKVMENQMFEEKQAESMPEIETEQEYKEIFITPHQIKHIKDFKDYKYSHRVDKKPNRELINDTLYSTRKDDKGNTLIVNNLNGLYDKDNDKLKKLINKSPEKLLMYHHDPQTYQKLKLIMEQYGDEKNPLYKYYEETGNYLTKYSKKDNGPVIKKIKYYGNKLNAHLDITDDYPNSRNKVVKLSLKPYRFDVYLDNGVYKFVTVKNLDVIKKENYYEVNSKCYEEAKKLKKISNQAEFIASFYNNDLIKINGELYRVIGVNNDLLNRIEVNMIDITYREYLENMNDKRPPRIIKTIASKTQSIKKYSTDILGNLYEVKSKKHPQIIKKG

SEQ ID NO: 29 - DNA, 3162 bp, Streptococcus aureas
atgaaaaggaattatatcttaggattagatatcggaattacatcagtgggttatggaattattgattatgaaactagagatgtcatagatgcgggcgtacgtttatttaaagaggctaatgttgaaaataatgaaggacgacgatcaaaaagaggtgccagaaggcttaagaggcgtcgtagacatagaatacaaagagtaaagaaacttttatttgattacaatttgttgacagatcatagtgagctaagtggaatcaatccttacgaggcgcgcgtaaagggattaagtcaaaaattaagtgaagaggaattttctgcggcattgctacatttagcaaagcgtagaggtgtacataatgttaatgaagtggaagaagatacaggtaatgaattatccactaaagaacaaatttcaagaaatagtaaagcgttagaagagaagtatgttgcagaattacagttggaacgtttgaaaaaagacggtgaagtgagaggttcgattaaccgtttcaaaacatctgactatgtaaaagaagcaaagcagttattaaaagtacaaaaagcatatcatcaacttgatcaatcatttatagacacttatattgatttattggaaacaagaagaacatattatgagggaccaggtgaaggtagcccatttggatggaaagatattaaagaatggtatgaaatgttaatgggacattgtacgtatttcccagaagaattacgtagtgtgaaatatgcctataatgctgatttatataatgcgctgaatgatttgaacaacttggttattacacgagatgagaatgagaagctagagtattatgaaaaattccaaattatcgagaatgtctttaaacaaaagaaaaagccgacgcttaaacaaattgcgaaggaaatcttggtgaatgaagaagacatcaaaggctatcgtgtcacaagtacaggtaaaccagaatttacaaacttgaaagtttatcacgatatcaaagatattacagcaagaaaagaaattatcgagaatgcagagctactcgatcaaatagctaaaatattaactatttaccagtcatcagaagatatacaagaagaattaacaaacctaaattcagaattgacacaagaagagattgaacaaatttcaaacttgaaaggttatacaggaactcataacctttcactaaaggcaataaatttaatattagacgaattgtggcatacgaacgataatcaaatagctattttcaatcgtttgaaacttgtacctaaaaaggtagatttaagccaacaaaaagaaattcctactactttagttgatgattttatactgtctccagtagtgaaacgttcatttatacaatctattaaagttattaacgctattattaaaaaatacggtttgccaaatgatattattattgaacttgcgagagaaaagaattctaaagatgcacaaaaaatgattaatgaaatgcagaagagaaatcgtcaaacgaatgaacgtattgaggaaattataagaacgacaggtaaagaaaatgctaaatatttaattgaaaaaattaagctgcacgatatgcaagaagggaaatgtttatactcgttagaagcaatccctctagaagatttacttaataatccattcaattacgaagtagaccatatcattccacgttctgtttctttcgataactctttcaataataaagtgttggtgaaacaagaagaaaatagtaaaaaaggtaatagaacgccatttcaatatttaagttcttcagattctaaaataagttatgagacattcaaaaagcatattttaaatcttgctaaaggcaaaggtagaatctctaagacgaaaaaagaatatttgttagaagaacgagatatcaatcgcttcagtgtccaaaaagattttattaaccgtaacttagtagatacacgctatgcgacaagagggttaatgaacttattaagatcttattttagagtgaataacttagatgtcaaagtgaaatcgattaatggcggattcacaagtttcttaagaaggaaatggaagttcaaaaaagaaagaaataagggctacaaacaccatgctgaagatgcactgattattgcgaacgctgattttattttcaaagaatggaaaaaactagataaagctaaaaaagtgatggaaaatcaaatgtttgaagaaaagcaagctgaaagtatgcctgaaattgagactgagcaagagtataaagaaatttttataacgcctcatcaaattaaacatattaaggattttaaagattataaatattcacatagagttgataaaaagccgaatagagagttaataaatgatacattatattctacgagaaaagatgacaagggtaatacattaatcgttaataacttaaatggtttatacgataaagataatgataaattgaaaaaattaattaataaatcacctgaaaaattattgatgtatcatcatgatccacaaacatatcaaaaattaaaattgatcatggaacaatatggcgatgagaaaaatccgctttataaatattatgaagaaacaggcaattacttaacaaaatatagtaaaaaagataacggaccagtcatcaaaaaaattaaatattatggtaacaagctaaatgcgcatttagatattacggatgattatccaaatagcagaaataaagtagtaaaactttcattaaaaccatatcgctttgatgtttatttagataatggggtatataaatttgtgacagttaaaaatttagatgttatcaaaaaagaaaactactatgaagttaattcaaagtgttatgaagaagcaaaaaaactgaagaaaattagtaatcaagcagaatttatcgcaagtttttacaataatgacttgattaagattaacggagaattatatagagtcataggtgtaaataatgatctacttaacagaattgaagtaaatatgatagacatcacatatagagaatatttagagaacatgaatgataaaagaccacctagaataattaaaacaatagcaagcaaaacacaatctattaaaaagtattctacagatattctaggcaatctttatgaagtgaagagtaaaaagcatcctcaaatcataaagaaaggatga

SEQ ID NO: 30 - protein, 1629 aa, Francisella tularensis
MNFKILPIAIDLGVKNTGVFSAFYQKGTSLERLDNKNGKVYELSKDSYTLLMNNRTARRHQRRGIDRKQLVKRLFKLIWTEQLNLEWDKDTQQAISFLFNRRGFSFITDGYSPEYLNIVPEQVKAILMDIFDDYNGEDDLDSYLKLATEQESKISEIYNKLMQKILEFKLMKLCTDIKDDKVSTKTLKEITSYEFELLADYLANYSESLKTQKFSYTDKQGNLKELSYYHHDKYNIQEFLKRHATINDRILDTLLTDDLDIWNFNFEKFDFDKNEEKLQNQEDKDHIQAHLHHFVFAVNKIKSEMASGGRHRSQYFQEITNVLDENNHQEGYLKNFCENLHNKKYSNLSVKNLVNLIGNLSNLELKPLRKYFNDKIHAKADHWDEQKFTETYCHWILGEWRVGVKDQDKKDGAKYSYKDLCNELKQKVTKAGLVDFLLELDPCRTIPPYLDNNNRKPPKCQSLILNPKFLDNQYPNWQQYLQELKKLQSIQNYLDSFETDLKVLKSSKDQPYFVEYKSSNQQIASGQRDYKDLDARILQFIFDRVKASDELLLNEIYFQAKKLKQKASSELEKLESSKKLDEVIANSQLSQILKSQHTNGIFEQGTFLHLVCKYYKQRQRARDSRLYIMPEYRYDKKLHKYNNTGRFDDDNQLLTYCNHKPRQKRYQLLNDLAGVLQVSPNFLKDKIGSDDDLFISKWLVEHIRGFKKACEDSLKIQKDNRGLLNHKINIARNTKGKCEKEIFNLICKIEGSEDKKGNYKHGLAYELGVLLFGEPNEASKPEFDRKIKKFNSIYSFAQIQQIAFAERKGNANTCAVCSADNAHRMQQIKITEPVEDNKDKIILSAKAQRLPAIPTRIVDGAVKKMATILAKNIVDDNWQNIKQVLSAKHQLHIPIITESNAFEFEPALADVKGKSLKDRRKKALERISPENIFKDKNNRIKEFAKGISAYSGANLTDGDFDGAKEELDHIIPRSHKKYGTLNDEANLICVTRGDNKNKGNRIFCLRDLADNYKLKQFETTDDLEIEKKIADTIWDANKKDFKFGNYRSFINLTPQEQKAFRHALFLADENPIKQAVIRAINNRNRTFVNGTQRYFAEVLANNIYLRAKKENLNTDKISFDYFGIPTIGNGRGIAEIRQLYEKVDSDIQAYAKGDKPQASYSHLIDAMLAFCIAADEHRNDGSIGLEIDKNYSLYPLDKNTGEVFTKDIFSQIKITDNEFSDKKLVRKKAIEGFNTHRQMTRDGIYAENYLPILIHKELNEVRKGYTWKNSEEIKIFKGKKYDIQQLNNLVYCLKFVDKPISIDIQISTLEELRNILTTNNIAATAEYYYINLKTQKLHEYYIENYNTALGYKKYSKEMEFLRSLAYRSERVKIKSIDDVKQVLDKDSNFIIGKITLPFKKEWQRLYREWQNTTIKDDYEFLKSFFNVKSITKLHKKVRKDFSLPISTNEGKFLVKRKTWDNNFIYQILNDSDSRADGTKPFIPAFDISKNEIVEAIIDSFTSKNIFWLPKNIELQKVDNKNIFAIDTSKWFEVETPSDLRDIGIATIQYKIDNNSRPKVRVKLDYVIDDDSKINYFMNHSLLKSRYPDKVLEILKQSTIIEFESSGFNKTIKEMLGMKLAGIYNETSNN

SEQ ID NO: 31 - DNA, 4890 bp, Francisella tularensis
atgaatttcaaaatattgccaatagcaatagatttaggtgttaaaaatactggtgtctttagcgcattttatcaaaaaggaacttctcttgagagattggataataaaaatggcaaagtatatgaactatcaaaagattcttatactttattgatgaataatagaacagcaagaagacatcaaagaagagggatagatagaaagcagctagtcaaaaggctctttaagcttatttggacagagcagctaaatttagagtgggataaagacactcaacaagcaattagctttttatttaatcgtagaggttttagttttattactgatggttattcgcctgaatatttaaatattgttccagagcaagtaaaagcgatacttatggatatatttgatgattacaacggtgaagatgatttagacagttatttaaaattagctactgagcaagaaagcaaaatttctgaaatttataacaagctaatgcaaaaaatattagagtttaaattaatgaaattatgtactgatattaaggatgataaagtaagtactaaaacgcttaaagaaatcacaagctatgaatttgagttattagctgattatttagcaaactatagcgagagtttaaaaacacaaaaatttagttatacagataaacaaggtaatttaaaagagctaagctactatcatcatgataaatataatattcaagaatttctaaagcgacatgctactataaatgatcgaattttagatactcttttaactgatgatttagatatttggaattttaattttgagaaatttgattttgataagaatgaagaaaagcttcagaatcaggaagataaagatcatatacaagcgcatttacatcattttgtttttgcagtaaataaaataaaaagtgaaatggcaagtggtggtcgtcatcgtagccaatattttcaagagataacaaatgtgctagatgaaaataatcatcaagagggatatctcaagaatttctgtgaaaatttgcataataaaaaatattcaaatttaagtgttaaaaatttagttaatctaattggtaacctaagtaatttagagctaaaaccgctaagaaaatattttaatgacaaaattcacgcaaaagctgatcattgggatgagcaaaagtttacagaaacttattgccactggatattaggagagtggcgagtaggtgtcaaagatcaagataagaaagatggcgctaaatatagttataaagatctgtgtaatgaattaaaacaaaaagttactaaggctggtttggtagattttttattagagttagatccatgtagaactataccaccatatctggataacaataaccgtaaaccaccaaaatgtcaaagtttgattttaaatccgaagtttttagataatcaatatccaaactggcaacaatatttacaagaattaaagaaactacaaagtattcaaaattatttagacagttttgaaactgatttaaaagtcttaaagtcaagtaaagatcaaccatattttgttgaatacaagagttcaaatcagcaaatagcaagtggtcaaagagattataaagatttagatgctcgaatattacagtttatatttgatagggtaaaagctagtgatgagttgcttttgaatgagatttattttcaggctaaaaaacttaaacaaaaagctagctctgagttagaaaaactcgagtcgagcaaaaagctagatgaagttatagcaaatagtcaactatcacagatactaaagtctcaacatacaaatggtatttttgaacagggtacttttttgcatttggtttgtaaatattataaacaaagacaaagagcgagagactctaggctatatattatgcctgaatatcgttatgataaaaaactacataaatataacaatacaggcaggtttgatgatgataatcagctgctaacatattgtaatcataagccaagacaaaaaagataccaattgttaaatgatttagctggggtgttgcaggtatcacctaattttttgaaagataaaattggttctgatgatgatctatttattagcaaatggttggtagagcatattagaggatttaaaaaagcttgtgaagatagtttaaaaatacaaaaagacaatagaggattattaaatcataaaataaatatagctaggaatacaaaaggcaaatgtgaaaaagaaatatttaatttaatatgtaaaatagaaggttcagaagataaaaaaggtaattacaagcatggtttagcttacgaattaggagtacttttatttggtgaacctaatgaagctagtaaacctgagttcgatagaaaaattaaaaaatttaactcaatatacagttttgcacagattcaacaaattgcttttgcagagcgtaaaggcaatgctaacacttgtgcagtttgtagtgctgataatgctcatagaatgcaacaaattaagatcactgagcctgtagaggacaataaagataagataatcttaagtgccaaagctcagagactaccagcgattccaactagaatagttgacggtgcggttaagaaaatggcaactatattagctaaaaatatagttgatgataattggcagaatatcaaacaagttttatcagcaaaacatcagttacatatacctattatcacagaatcaaatgcttttgagtttgaaccagcattagctgatgtaaaaggtaagagcctaaaagataggagaaaaaaagcattagagagaataagtcctgaaaatatattcaaggataaaaacaatagaataaaagaatttgctaaaggtatatcagcatatagtggtgctaatttaactgatggcgattttgatggtgcaaaagaagaattagatcatataatacctcgttcacataaaaaatacggtactctaaatgatgaagcaaatctaatttgtgtaactcgtggtgataataaaaataaaggtaatagaattttctgcctacgtgatcttgcagataactataaactaaaacagtttgagacaactgatgatttagaaattgaaaagaagatagctgatacaatctgggatgctaacaagaaagattttaaatttggtaattatcgtagttttattaacctaacaccacaagagcagaaagcatttcgtcacgcgctatttctggctgatgaaaatcctatcaaacaagcagtcataagagcgataaataatcgtaatcgtacatttgtaaatggcactcaacgctattttgcagaagtactggcaaacaatatctatctaagggctaaaaaagaaaatctaaatacagataaaatttcatttgattattttggtattccaactataggtaatggtagaggtattgctgaaatccgtcaactttatgaaaaagttgatagtgatatacaagcttatgcaaaaggtgataaacctcaagctagctactctcacctaatagatgcgatgctggctttttgtattgctgctgatgaacacagaaatgatggaagtataggtctagaaatcgataaaaattatagtttatatccattagataaaaatacaggagaagtctttaccaaagatatttttagtcaaattaaaattactgataatgagtttagcgataaaaaattagtaagaaaaaaagctatagagggctttaacacgcatagacaaatgactagagatggcatttatgcagaaaattacctaccaatactaatccataaagaactaaatgaagttagaaaaggctatacttggaaaaatagtgaagaaataaaaatattcaaaggtaaaaagtacgatatacaacaattgaataaccttgtgtattgtctaaaatttgtagataaacctatatctatagatatacaaattagtaccttagaagagttaagaaatatattaacaacaaataatatagctgctacagcagaatactattatataaatctaaaaacccaaaaattacatgagtattatatcgaaaactataatactgccttaggttataaaaaatacagtaaagaaatggagtttttgagaagcttagcttatcgtagcgaaagggtaaaaattaaatcaatagatgatgtaaagcaggttttggataaggatagtaactttatcatcggtaagattactttaccatttaaaaaagagtggcaaagactatatcgtgagtggcaaaatacaactatcaaagatgattatgagtttttaaaatcattctttaatgttaaaagtattactaagttgcataaaaaagttagaaaagatttctctttacctatttctacaaatgaaggtaaattcctggtcaaaagaaaaacatgggataacaattttatctatcagatattaaatgattctgattctagagcagacggaacaaagccatttattccagcttttgacatttctaaaaatgaaatagtcgaagccataattgattcatttacatcaaaaaatattttttggctgcctaaaaatatagaattacaaaaggtggataataaaaacatttttgctatagatactagtaaatggttcgaagtagaaacacctagtgatcttagagacattggaatagcaacaattcaatacaagatagataataattctcgccctaaagtcagagttaaacttgattatgttatcgatgatgatagtaagataaattattttatgaatcattctttattaaaatcaagatatcctgacaaagttttagaaattttaaaacaatcaactattatagaatttgaaagttcaggttttaataaaactatcaaagaaatgcttggtatgaaattagcaggtatttataatgaaacatctaataattag

SEQ ID NO: 32 - DNA, 3903 bp, Francisella tularensis
  Francisella tularensis subsp. novicida (strain U112)
atgtcaatttatcaagaatttgttaataaatatagtttaagtaaaactctaagatttgagttaatcccacagggtaaaacacttgaaaacataaaagcaagaggtttgattttagatgatgagaaaagagctaaagactacaaaaaggctaaacaaataattgataaatatcatcagttttttatagaggagatattaagttcggtttgtattagcgaagatttattacaaaactattctgatgtttattttaaacttaaaaagagtgatgatgataatctacaaaaagattttaaaagtgcaaaagatacgataaagaaacaaatatctgaatatataaaggactcagagaaatttaagaatttgtttaatcaaaaccttatcgatgctaaaaaagggcaagagtcagatttaattctatggctaaagcaatctaaggataatggtatagaactatttaaagccaatagtgatatcacagatatagatgaggcgttagaaataatcaaatcttttaaaggttggacaacttattttaagggttttcatgaaaatagaaaaaatgtttatagtagcaatgatattcctacatctattatttataggatagtagatgataatttgcctaaatttctagaaaataaagctaagtatgagagtttaaaagacaaagctccagaagctataaactatgaacaaattaaaaaagatttggcagaagagctaacctttgatattgactacaaaacatctgaagttaatcaaagagttttttcacttgatgaagtttttgagatagcaaactttaataattatctaaatcaaagtggtattactaaatttaatactattattggtggtaaatttgtaaatggtgaaaatacaaagagaaaaggtataaatgaatatataaatctatactcacagcaaataaatgataaaacactcaaaaaatataaaatgagtgttttatttaagcaaattttaagtgatacagaatctaaatcttttgtaattgataagttagaagatgatagtgatgtagttacaacgatgcaaagtttttatgagcaaatagcagcttttaaaacagtagaagaaaaatctattaaagaaacactatctttattatttgatgatttaaaagctcaaaaacttgatttgagtaaaatttattttaaaaatgataaatctcttactgatctatcacaacaagtttttgatgattatagtgttattggtacagcggtactagaatatataactcaacaaatagcacctaaaaatcttgataaccctagtaagaaagagcaagaattaatagccaaaaaaactgaaaaagcaaaatacttatctctagaaactataaagcttgccttagaagaatttaataagcatagagatatagataaacagtgtaggtttgaagaaatacttgcaaactttgcggctattccgatgatatttgatgaaatagctcaaaacaaagacaatttggcacagatatctatcaaatatcaaaatcaaggtaaaaaagacctacttcaagctagtgcggaagatgatgttaaagctatcaaggatcttttagatcaaactaataatctcttacataaactaaaaatatttcatattagtcagtcagaagataaggcaaatattttagacaaggatgagcatttttatctagtatttgaggagtgctactttgagctagcgaatatagtgcctctttataacaaaattagaaactatataactcaaaagccatatagtgatgagaaatttaagctcaattttgagaactcgactttggctaatggttgggataaaaataaagagcctgacaatacggcaattttatttatcaaagatgataaatattatctgggtgtgatgaataagaaaaataacaaaatatttgatgataaagctatcaaagaaaataaaggcgagggttataaaaaaattgtttataaacttttacctggcgcaaataaaatgttacctaaggttttcttttctgctaaatctataaaattttataatcctagtgaagatatacttagaataagaaatcattccacacatacaaaaaatggtagtcctcaaaaaggatatgaaaaatttgagtttaatattgaagattgccgaaaatttatagatttttataaacagtctataagtaagcatccggagtggaaagattttggatttagattttctgatactcaaagatataattctatagatgaattttatagagaagttgaaaatcaaggctacaaactaacttttgaaaatatatcagagagctatattgatagcgtagttaatcagggtaaattgtacctattccaaatctataataaagatttttcagcttatagcaaagggcgaccaaatctacatactttatattggaaagcgctgtttgatgagagaaatcttcaagatgtggtttataagctaaatggtgaggcagagcttttttatcgtaaacaatcaatacctaaaaaaatcactcacccagctaaagaggcaatagctaataaaaacaaagataatcctaaaaaagagagtgtttttgaatatgatttaatcaaagataaacgctttactgaagataagtttttctttcactgtcctattacaatcaattttaaatctagtggagctaataagtttaatgatgaaatcaatttattgctaaaagaaaaagcaaatgatgttcatatattaagtatagatagaggtgaaagacatttagcttactatactttggtagatggtaaaggcaatatcatcaaacaagatactttcaacatcattggtaatgatagaatgaaaacaaactaccatgataagcttgctgcaatagagaaagatagggattcagctaggaaagactggaaaaagataaataacatcaaagagatgaaagagggctatctatctcaggtagttcatgaaatagctaagctagttatagagtataatgctattgtggtttttgaggatttaaattttggatttaaaagagggcgtttcaaggtagagaagcaggtctatcaaaagttagaaaaaatgctaattgagaaactaaactatctagttttcaaagataatgagtttgataaaactgggggagtgcttagagcttatcagctaacagcaccttttgagacttttaaaaagatgggtaaacaaacaggtattatctactatgtaccagctggttttacttcaaaaatttgtcctgtaactggttttgtaaatcagttatatcctaagtatgaaagtgtcagcaaatctcaagagttctttagtaagtttgacaagatttgttataaccttgataagggctattttgagtttagttttgattataaaaactttggtgacaaggctgccaaaggcaagtggactatagctagctttgggagtagattgattaactttagaaattcagataaaaatcataattgggatactcgagaagtttatccaactaaagagttggagaaattgctaaaagattattctatcgaatatgggcatggcgaatgtatcaaagcagctatttgcggtgagagcgacaaaaagttttttgctaagctaactagtgtcctaaatactatcttacaaatgcgtaactcaaaaacaggtactgagttagattatctaatttcaccagtagcagatgtaaatggcaatttctttgattcgcgacaggcgccaaaaaatatgcctcaagatgctgatgccaatggtgcttatcatattgggctaaaaggtctgatgctactaggtaggatcaaaaataatcaagagggcaaaaaactcaatttggttatcaaaaatgaagagtattttgagttcgtgcagaataggaataactaa

SEQ ID NO: 33 - protein, 1300 aa, Francisella tularensis
  Francisella tularensis subsp. novicida (strain U112)
MSIYQEFVNKYSLSKTLRFELIPQGKTLENIKARGLILDDEKRAKDYKKAKQIIDKYHQFFIEEILSSVCISEDLLQNYSDVYFKLKKSDDDNLQKDFKSAKDTIKKQISEYIKDSEKFKNLFNQNLIDAKKGQESDLILWLKQSKDNGIELFKANSDITDIDEALEIIKSFKGWTTYFKGFHENRKNVYSSNDIPTSIIYRIVDDNLPKFLENKAKYESLKDKAPEAINYEQIKKDLAEELTFDIDYKTSEVNQRVFSLDEVFEIANFNNYLNQSGITKFNTIIGGKFVNGENTKRKGINEYINLYSQQINDKTLKKYKMSVLFKQILSDTESKSFVIDKLEDDSDVVTTMQSFYEQIAAFKTVEEKSIKETLSLLFDDLKAQKLDLSKIYFKNDKSLTDLSQQVFDDYSVIGTAVLEYITQQIAPKNLDNPSKKEQELIAKKTEKAKYLSLETIKLALEEFNKHRDIDKQCRFEEILANFAAIPMIFDEIAQNKDNLAQISIKYQNQGKKDLLQASAEDDVKAIKDLLDQTNNLLHKLKIFHISQSEDKANILDKDEHFYLVFEECYFELANIVPLYNKIRNYITQKPYSDEKFKLNFENSTLANGWDKNKEPDNTAILFIKDDKYYLGVMNKKNNKIFDDKAIKENKGEGYKKIVYKLLPGANKMLPKVFFSAKSIKFYNPSEDILRIRNHSTHTKNGSPQKGYEKFEFNIEDCRKFIDFYKQSISKHPEWKDFGFRFSDTQRYNSIDEFYREVENQGYKLTFENISESYIDSVVNQGKLYLFQIYNKDFSAYSKGRPNLHTLYWKALFDERNLQDVVYKLNGEAELFYRKQSIPKKITHPAKEAIANKNKDNPKKESVFEYDLIKDKRFTEDKFFFHCPITINFKSSGANKFNDEINLLLKEKANDVHILSIDRGERHLAYYTLVDGKGNIIKQDTFNIIGNDRMKTNYHDKLAAIEKDRDSARKDWKKINNIKEMKEGYLSQVVHEIAKLVIEYNAIVVFEDLNFGFKRGRFKVEKQVYQKLEKMLIEKLNYLVFKDNEFDKTGGVLRAYQLTAPFETFKKMGKQTGIIYYVPAGFTSKICPVTGFVNQLYPKYESVSKSQEFFSKFDKICYNLDKGYFEFSFDYKNFGDKAAKGKWTIASFGSRLINFRNSDKNHNWDTREVYPTKELEKLLKDYSIEYGHGECIKAAICGESDKKFFAKLTSVLNTILQMRNSKTGTELDYLISPVADVNGNFFDSRQAPKNMPQDADANGAYHIGLKGLMLLGRIKNNQEGKKLNLVIKNEEYFEFVQNRNN

SEQ ID NO: 34 - DNA, 3924 bp, Acidaminococcus sp.
  Acidaminococcus sp. (strain BV3L6)
atgacccaatttgaaggttttaccaatttataccaagtttcgaagacccttcgttttgaactgattccccaaggaaaaacactcaaacatatccaggagcaagggttcattgaggaggataaagctcgcaatgaccattacaaagagttaaaaccaatcattgaccgcatctataagacttatgctgatcaatgtctccaactggtacagcttgactgggagaatctatctgcagccatagactcctatcgtaaggaaaaaaccgaagaaacacgaaatgcgctgattgaggagcaagcaacatatagaaatgcgattcatgactactttataggtcggacggataatctgacagatgccataaataagcgccatgctgaaatctataaaggactttttaaagctgaacttttcaatggaaaagttttaaagcaattagggaccgtaaccacgacagaacatgaaaatgctctactccgttcgtttgacaaatttacgacctatttttccggcttttatgaaaaccgaaaaaatgtctttagcgctgaagatatcagcacggcaattccccatcgaatcgtccaggacaatttccctaaatttaaggaaaactgccatatttttacaagattgataaccgcagttccttctttgcgggagcattttgaaaatgtcaaaaaggccattggaatctttgttagtacgtctattgaagaagtcttttcctttcccttttataatcaacttctaacccaaacgcaaattgatctttataatcaacttctcggcggcatatctagggaagcaggcacagaaaaaatcaagggacttaatgaagttctcaatctggctatccaaaaaaatgatgaaacagcccatataatcgcgtccctgccgcatcgttttattcctctttttaaacaaattctttccgatcgaaatacgttatcctttattttggaagaattcaaaagcgatgaggaagtcatccaatccttctgcaaatataaaaccctcttgagaaacgaaaatgtactggagactgcagaagcccttttcaatgaattaaattccattgatttgactcatatctttatttcccataaaaagttagaaaccatctcttcagcgctttgtgaccattgggataccttgcgcaatgcactttacgaaagacggatttctgaactcactggcaaaataacaaaaagtgccaaagaaaaagttcaaaggtcattaaaacatgaggatataaatctccaagaaattatttctgctgcaggaaaagaactatcagaagcattcaaacaaaaaacaagtgaaattctttcccatgcccatgctgcacttgaccagcctcttcccacaacattaaaaaaacaggaagaaaaagaaatcctcaaatcacagctcgattcgcttttaggcctttatcatcttcttgattggtttgctgtcgatgaaagcaatgaagtcgacccagaattctcagcacggctgacaggcattaaactagaaatggaaccaagcctttcgttttataataaagcaagaaattatgcgacaaaaaagccctattcggtggaaaaatttaaattgaattttcaaatgccaacccttgcctctggttgggatgtcaataaagaaaaaaataatggagctattttattcgtaaaaaatggtctctattaccttggtatcatgcctaaacagaaggggcgctataaagccctgtcttttgagccgacagaaaaaacatcagaaggattcgataagatgtactatgactacttcccagatgccgcaaaaatgattcctaagtgttccactcagctaaaggctgtaaccgctcattttcaaactcataccacccccattcttctctcaaataatttcattgaacctcttgaaatcacaaaagaaatttatgacctgaacaatcctgaaaaggagcctaaaaagtttcaaacggcttatgcaaagaagacaggcgatcaaaaaggctatagagaagcgctttgcaaatggattgactttacgcgggattttctctctaaatatacgaaaacaacttcaatcgatttatcttcactccgcccttcttcgcaatataaagatttaggggaatattacgccgaactgaatccgcttctctatcatatctccttccaacgaattgctgaaaaggaaatcatggatgctgtagaaacgggaaaattgtatctgttccaaatctacaataaggattttgcgaagggccatcacgggaaaccaaatctccacaccctgtattggacaggtctcttcagtcctgaaaaccttgcgaaaaccagcatcaaacttaatggtcaagcagaattgttctatcgacctaaaagccgcatgaagcggatggcccatcgtcttggggaaaaaatgctgaacaaaaaactaaaggaccagaagacaccgattccagataccctctaccaagaactgtacgattatgtcaaccaccggctaagccatgatctttccgatgaagcaagggccctgcttccaaatgttatcaccaaagaagtctcccatgaaattataaaggatcggcggtttacttccgataaatttttcttccatgttcccattacactgaattatcaagcagccaatagtcccagtaaattcaaccagcgtgtcaatgcctaccttaaggagcatccggaaacgcccatcattggtatcgatcgtggagaacgcaatctaatctatattaccgtcattgacagtactgggaaaattttggagcagcgttccctgaataccatccagcaatttgactaccaaaaaaaattggacaacagggaaaaagagcgtgttgccgcccgtcaagcctggtccgtcgtcggaacgatcaaagaccttaaacaaggctacttgtcacaggtcatccatgaaattgtagacctgatgattcattaccaagctgttgtcgtccttgaaaacctcaacttcggatttaaatcaaaacggacaggcattgccgaaaaagcagtctaccaacaatttgaaaagatgctaatagataaactcaactgtttggttctcaaagattatcctgctgagaaagtgggaggcgtcttaaacccgtatcaacttacagatcagttcacgagctttgcaaaaatgggcacgcaaagcggcttccttttctatgtaccggccccttatacctcaaagattgatcccctgactggttttgtcgatccctttgtatggaagaccattaaaaatcatgaaagtcggaagcatttcctagaaggatttgatttcctgcattatgatgtcaaaacaggtgattttatcctccattttaaaatgaatcggaatctctctttccagagagggcttcctggcttcatgccagcttgggatattgttttcgaaaagaatgaaacccaatttgatgcaaaagggacgcccttcattgcaggaaaacgaattgttcctgtaatcgaaaatcatcgttttacgggtcgttacagagacctctatcccgctaatgaactcattgcccttctggaagaaaaaggcattgtctttagagacggaagtaatatattacccaaacttttagaaaatgatgattctcatgcaattgatacgatggtcgccttgattcgcagtgtactccaaatgagaaacagcaatgccgcaacgggggaagactacatcaactctcccgttagggatctgaacggggtgtgtttcgacagtcgattccaaaatccagaatggccaatggatgcggatgccaacggagcttatcatattgccttaaaagggcagcttcttctgaaccacctcaaagaaagcaaagatctgaaattacaaaacggcatcagcaaccaagattggctggcctacattcaggaactgagaaactga

SEQ ID NO: 35 - protein, 1307 aa, Acidaminococcus sp.
  Acidaminococcus sp. (strain BV3L6)
MTQFEGFTNLYQVSKTLRFELIPQGKTLKHIQEQGFIEEDKARNDHYKELKPIIDRIYKTYADQCLQLVQLDWENLSAAIDSYRKEKTEETRNALIEEQATYRNAIHDYFIGRTDNLTDAINKRHAEIYKGLFKAELFNGKVLKQLGTVTTTEHENALLRSFDKFTTYFSGFYENRKNVFSAEDISTAIPHRIVQDNFPKFKENCHIFTRLITAVPSLREHFENVKKAIGIFVSTSIEEVFSFPFYNQLLTQTQIDLYNQLLGGISREAGTEKIKGLNEVLNLAIQKNDETAHIIASLPHRFIPLFKQILSDRNTLSFILEEFKSDEEVIQSFCKYKTLLRNENVLETAEALFNELNSIDLTHIFISHKKLETISSALCDHWDTLRNALYERRISELTGKITKSAKEKVQRSLKHEDINLQEIISAAGKELSEAFKQKTSEILSHAHAALDQPLPTTLKKQEEKEILKSQLDSLLGLYHLLDWFAVDESNEVDPEFSARLTGIKLEMEPSLSFYNKARNYATKKPYSVEKFKLNFQMPTLASGWDVNKEKNNGAILFVKNGLYYLGIMPKQKGRYKALSFEPTEKTSEGFDKMYYDYFPDAAKMIPKCSTQLKAVTAHFQTHTTPILLSNNFIEPLEITKEIYDLNNPEKEPKKFQTAYAKKTGDQKGYREALCKWIDFTRDFLSKYTKTTSIDLSSLRPSSQYKDLGEYYAELNPLLYHISFQRIAEKEIMDAVETGKLYLFQIYNKDFAKGHHGKPNLHTLYWTGLFSPENLAKTSIKLNGQAELFYRPKSRMKRMAHRLGEKMLNKKLKDQKTPIPDTLYQELYDYVNHRLSHDLSDEARALLPNVITKEVSHEIIKDRRFTSDKFFFHVPITLNYQAANSPSKFNQRVNAYLKEHPETPIIGIDRGERNLIYITVIDSTGKILEQRSLNTIQQFDYQKKLDNREKERVAARQAWSVVGTIKDLKQGYLSQVIHEIVDLMIHYQAVVVLENLNFGFKSKRTGIAEKAVYQQFEKMLIDKLNCLVLKDYPAEKVGGVLNPYQLTDQFTSFAKMGTQSGFLFYVPAPYTSKIDPLTGFVDPFVWKTIKNHESRKHFLEGFDFLHYDVKTGDFILHFKMNRNLSFQRGLPGFMPAWDIVFEKNETQFDAKGTPFIAGKRIVPVIENHRFTGRYRDLYPANELIALLEEKGIVFRDGSNILPKLLENDDSHAIDTMVALIRSVLQMRNSNAATGEDYINSPVRDLNGVCFDSRFQNPEWPMDADANGAYHIALKGQLLLNHLKESKDLKLQNGISNQDWLAYIQELRN

SEQ ID NO: 36 - DNA, 3741 bp, Lachnospiraceae bacterium
  Lachnospiraceae bacterium (strain ND2006)
atgcttaagaatgttggaattgataggttagatgttgaaaaagggagaaaaaatatgtctaaattagagaagtttacaaattgttactctttgtcaaaaacacttcgttttaaggcgattcctgttggaaaaacccaagaaaatattgataataaaagattgcttgtcgaggatgaaaaacgtgcagaagattataagggggttaaaaaattacttgataggtattatttatcatttattaatgatgttcttcattccattaaactaaagaatttaaataattatatttcgttgtttagaaagaaaactcggacggaaaaagaaaacaaagaattagaaaatttagagataaatttacgtaaagaaatcgctaaggcttttaagggtaatgaaggttataaatctttatttaagaaggatattatcgagacgatattgcctgaatttcttgatgataaagatgaaattgctttggttaattcatttaatggatttacaacggcatttaccggtttttttgataatagggaaaatatgttttcggaagaagctaaatcaacctcaattgcttttcgttgtattaatgagaatttaacaagatatatatcaaatatggatatatttgaaaaagttgatgcaattttcgataagcatgaagtacaggaaataaaagaaaaaattctaaacagtgattatgatgttgaagatttcttcgaaggagaattttttaattttgttcttacgcaagaaggtatcgatgtttataacgctataattggtggctttgtgacagaatccggagaaaaaataaaaggattaaatgaatatattaatttatataatcagaaaactaagcaaaaattaccgaagtttaagcctttatataaacaggttttatcagatagagagtcactttctttttatggcgaaggttatacatctgatgaggaagttttagaagtatttagaaatactcttaataagaattcagaaatattttcttcaattaagaaattggaaaagttatttaaaaacttcgatgaatattcaagtgcaggaattttcgtaaaaaatggaccggctatttctacaatttctaaggatatatttggagagtggaatgtaattagagacaaatggaatgcggagtacgatgatatacatttaaaaaagaaggctgtagtaacagaaaaatatgaagatgacaggcgtaaatcattcaaaaaaataggaagtttttcattggagcagttgcaagaatacgctgatgctgatctatctgtggtagagaagttaaaagaaatcattatccaaaaagtggatgagatatataaagtttatggctcgtcagaaaaattgttcgatgctgattttgtactagaaaaatcgttaaaaaagaatgatgcagttgtagcaataatgaaagatttactagattctgtgaagtcttttgaaaattatataaaagccttttttggagagggaaaagaaacaaatcgagatgaatcattttatggtgattttgttttggcatatgacattcttttgaaagtggatcatatttatgatgcaatacgaaattatgtgacacaaaaaccgtattcgaaagataagtttaaattatattttcaaaacccgcaatttatggggggctgggataaggataaagagacagactatagggcaactatacttagatatggctcaaagtattacttggcgattatggataaaaaatatgctaagtgcttgcaaaaaatagataaggatgatgtaaatggaaactatgaaaaaataaattataagttgcttccaggacctaataagatgcttccaaaggtgttttttagtaagaagtggatggcttattataatccgtcggaagatattcaaaaaatatataaaaatggaacatttaaaaaaggagatatgtttaatttaaatgattgtcataaattaattgatttctttaaggattcaatcagtcggtatccgaaatggagtaacgcatatgattttaacttttctgagaccgagaaatataaggatatagcaggtttttacagagaggttgaagaacaaggatataaagtatcatttgaaagtgcgtctaaaaaagaagttgataaattggtagaagaaggaaaattatacatgttccaaatttataataaagacttttcggataaaagtcatggaacgccaaatcttcatacaatgtattttaagttgctgtttgatgaaaataatcatggtcaaattaggctttctggtggtgctgagctattcatgcgacgtgcaagtttgaaaaaggaagaattagttgtgcatcctgccaatagcccgatagcgaataaaaacccggataatccaaagaaaacgactacgttgtcatatgatgtatacaaggacaaaagattttcggaagatcagtatgagttgcatatacctattgcaataaataaatgccctaaaaatatatttaagataaatacagaggttagagtgctgctgaagcatgatgataatccttatgttataggaattgataggggggagagaaatttactttacattgtggtggttgatggtaagggtaatattgtggagcaatattcgctgaatgaaataattaataattttaatggaattagaattaagacggattaccattcacttttggataaaaaggagaaggaaagatttgaagctcgtcaaaattggacgtctatagaaaacattaaagaactaaaagccggatatattagtcaggttgttcataagatatgtgagttggtagaaaaatatgatgcggtaattgcacttgaagatttgaattctggttttaagaatagtcgagttaaagttgaaaagcaagtatatcagaaatttgaaaaaatgctgattgataaacttaactatatggtagataagaaatctaatccttgcgctacgggtggtgctctgaaaggctatcaaattactaacaagtttgagagttttaagtcgatgagtacacaaaatggttttattttttatattccggcgtggttgactagcaaaattgatccgtcaacaggatttgtaaatttgttgaaaacaaagtatacgagcattgcagattcaaagaaatttataagttcttttgacagaattatgtatgtacctgaagaagatttattcgagtttgcattagattataagaatttttctcggacagacgcggattatataaaaaaatggaaactctatagctatggtaacaggattagaatatttagaaatcctaaaaaaaataatgtatttgattgggaagaggtatgtcttacatcagcctataaggaactttttaataaatatgggattaattatcagcaaggagatatacgagctctcttatgtgaacagagtgataaggcattctatagctcttttatggcattaatgtcactcatgctgcaaatgagaaatagtataacaggtaggacggatgtagattttttgatttcaccagtaaaaaattctgacggtattttttatgattccagaaattatgaagctcaggaaaatgcaatattaccgaaaaatgcagatgctaatggggcttataatatcgcaagaaaagttttgtgggctataggtcagtttaaaaaggctgaagatgaaaaacttgataaggttaaaattgcaatatcaaataaggaatggctcgaatatgcgcaaacaagtgttaagcattga

SEQ ID NO: 37 - protein, 1228 aa, Lachnospiraceae bacterium
  Lachnospiraceae bacterium (strain ND2006)
MSKLEKFTNCYSLSKTLRFKAIPVGKTQENIDNKRLLVEDEKRAEDYKGVKKLLDRYYLSFINDVLHSIKLKNLNNYISLFRKKTRTEKENKELENLEINLRKEIAKAFKGNEGYKSLFKKDIIETILPEFLDDKDEIALVNSFNGFTTAFTGFFDNRENMFSEEAKSTSIAFRCINENLTRYISNMDIFEKVDAIFDKHEVQEIKEKILNSDYDVEDFFEGEFFNFVLTQEGIDVYNAIIGGFVTESGEKIKGLNEYINLYNQKTKQKLPKFKPLYKQVLSDRESLSFYGEGYTSDEEVLEVFRNTLNKNSEIFSSIKKLEKLFKNFDEYSSAGIFVKNGPAISTISKDIFGEWNVIRDKWNAEYDDIHLKKKAVVTEKYEDDRRKSFKKIGSFSLEQLQEYADADLSVVEKLKEIIIQKVDEIYKVYGSSEKLFDADFVLEKSLKKNDAVVAIMKDLLDSVKSFENYIKAFFGEGKETNRDESFYGDFVLAYDILLKVDHIYDAIRNYVTQKPYSKDKFKLYFQNPQFMGGWDKDKETDYRATILRYGSKYYLAIMDKKYAKCLQKIDKDDVNGNYEKINYKLLPGPNKMLPKVFFSKKWMAYYNPSEDIQKIYKNGTFKKGDMFNLNDCHKLIDFFKDSISRYPKWSNAYDFNFSETEKYKDIAGFYREVEEQGYKVSFESASKKEVDKLVEEGKLYMFQIYNKDFSDKSHGTPNLHTMYFKLLFDENNHGQIRLSGGAELFMRRASLKKEELVVHPANSPIANKNPDNPKKTTTLSYDVYKDKRFSEDQYELHIPIAINKCPKNIFKINTEVRVLLKHDDNPYVIGIDRGERNLLYIVVVDGKGNIVEQYSLNEIINNFNGIRIKTDYHSLLDKKEKERFEARQNWTSIENIKELKAGYISQVVHKICELVEKYDAVIALEDLNSGFKNSRVKVEKQVYQKFEKMLIDKLNYMVDKKSNPCATGGALKGYQITNKFESFKSMSTQNGFIFYIPAWLTSKIDPSTGFVNLLKTKYTSIADSKKFISSFDRIMYVPEEDLFEFALDYKNFSRTDADYIKKWKLYSYGNRIRIFRNPKKNNVFDWEEVCLTSAYKELFNKYGINYQQGDIRALLCEQSDKAFYSSFMALMSLMLQMRNSITGRTDVDFLISPVKNSDGIFYDSRNYEAQENAILPKNADANGAYNIARKVLWAIGQFKKAEDEKLDKVKIAISNKEWLEYAQTSVKH

SEQ ID NO: 38 - protein, 1064 aa, Bradyrhizobium sp.
  Bradyrhizobium sp. BTAi1
MKRTSLRAYRLGVDLGANSLGWFVVWLDDHGQPEGLGPGGVRIFPDGRNPQSKQSNAAGRRLARSARRRRDRYLQRRGKLMGLLVKHGLMPADEPARKRLECLDPYGLRAKALDEVLPLHHVGRALFHLNQRRGLFANRAIEQGDKDASAIKAAAGRLQTSMQACGARTLGEFLNRRHQLRATVRARSPVGGDVQARYEFYPTRAMVDAEFEAIWAAQAPHHPTMTAEAHDTIREAIFSQRAMKRPSIGKCSLDPATSQDDVDGFRCAWSHPLAQRFRIWQDVRNLAVVETGPTSSRLGKEDQDKVARALLQTDQLSFDEIRGLLGLPSDARFNLESDRRDHLKGDATGAILSARRHFGPAWHDRSLDRQIDIVALLESALDEAAIIASLGTTHSLDEAAAQRALSALLPDGYCRLGLRAIKRVLPLMEAGRTYAEAASAAGYDHALLPGGKLSPTGYLPYYGQWLQNDVVGSDDERDTNERRWGRLPNPTVHIGIGQLRRVVNELIRWHGPPAEITVELTRDLKLSPRRLAELEREQAENQRKNDKRTSLLRKLGLPASTHNLLKLRLWDEQGDVASECPYTGEAIGLERLVSDDVDIDHLIPFSISWDDSAANKVVCMRYANREKGNRTPFEAFGHRQGRPYDWADIAERAARLPRGKRWRFGPGARAQFEELGDFQARLLNETSWLARVAKQYLAAVTHPHRIHVLPGRLTALLRATWELNDLLPGSDDRAAKSRKDHRHHAIDALVAALTDQALLRRMANAHDDTRRKIEVLLPWPTFRIDLETRLKAMLVSHKPDHGLQARLHEDTAYGTVEHPETEDGANLVYRKTFVDISEKEIDRIRDRRLRDLVRAHVAGERQQGKTLKAAVLSFAQRRDIAGHPNGIRHVRLTKSIKPDYLVPIRDKAGRIYKSYNAGENAFVDILQAESGRWIARATTVFQANQANESHDAPAAQPIMRVFKGDMLRIDHAGAEKFVKIVRLSPSNNLLYLVEHHQAGVFQTRHDDPEDSFRWLFASFDKLREWNAELVRIDTLGQPWRRKRGLETGSEDATRIGWTRPKKWP

SEQ ID NO: 39 - protein, 1035 aa, Candidatus Puniceispirillum marinum
MRRLGLDLGTNSIGWCLLDLGDDGEPVSIFRTGARIFSDGRDPKSLGSLKATRREARLTRRRRDRFIQRQKNLINALVKYGLMPADEIQRQALAYKDPYPIRKKALDEAIDPYEMGRAIFHINQRRGFKSNRKSADNEAGVVKQSIADLEMKLGEAGARTIGEFLADRQATNDTVRARRLSGTNALYEFYPDRYMLEQEFDTLWAKQAAFNPSLYIEAARERLKEIVFFQRKLKPQEVGRCIFLSDEDRISKALPSFQRFRIYQELSNLAWIDHDGVAHRITASLALRDHLFDELEHKKKLTFKAMRAILRKQGVVDYPVGFNLESDNRDHLIGNLTSCIMRDAKKMIGSAWDRLDEEEQDSFILMLQDDQKGDDEVRSILTQQYGLSDDVAEDCLDVRLPDGHGSLSKKAIDRILPVLRDQGLIYYDAVKEAGLGEANLYDPYAALSDKLDYYGKALAGHVMGASGKFEDSDEKRYGTISNPTVHIALNQVRAVVNELIRLHGKPDEVVIEIGRDLPMGADGKRELERFQKEGRAKNERARDELKKLGHIDSRESRQKFQLWEQLAKEPVDRCCPFTGKMMSISDLFSDKVEIEHLLPFSLTLDDSMANKTVCFRQANRDKGNRAPFDAFGNSPAGYDWQEILGRSQNLPYAKRWRFLPDAMKRFEADGGFLERQLNDTRYISRYTTEYISTIIPKNKIWVVTGRLTSLLRGFWGLNSILRGHNTDDGTPAKKSRDDHRHHAIDAIVVGMTSRGLLQKVSKAARRSEDLDLTRLFEGRIDPWDGFRDEVKKHIDAIIVSHRPRKKSQGALHNDTAYGIVEHAENGASTVVHRVPITSLGKQSDIEKVRDPLIKSALLNETAGLSGKSFENAVQKWCADNSIKSLRIVETVSIIPITDKEGVAYKGYKGDGNAYMDIYQDPTSSKWKGEIVSRFDANQKGFIPSWQSQFPTARLIMRLRINDLLKLQDGEIEEIYRVQRLSGSKILMAPHTEANVDARDRDKNDTFKLTSKSPGKLQSASARKVHISPTGLIREG

SEQ ID NO: 40 - protein, 1358 aa, Acidaminococcus sp.
MGKMYYLGLDIGTNSVGYAVTDPSYHLLKFKGEPMWGAHVFAAGNQSAERRSFRTSRRRLDRRQQRVKLVQEIFAPVISPIDPRFFIRLHESALWRDDVAETDKHIFFNDPTYTDKEYYSDYPTIHHLIVDLMESSEKHDPRLVYLAVAWLVAHRGHFLNEVDKDNIGDVLSFDAFYPEFLAFLSDNGVSPWVCESKALQATLLSRNSVNDKYKALKSLIFGSQKPEDNFDANISEDGLIQLLAGKKVKVNKLFPQESNDASFTLNDKEDAIEEILGTLTPDECEWIAHIRRLFDWAIMKHALKDGRTISESKVKLYEQHHHDLTQLKYFVKTYLAKEYDDIFRNVDSETTKNYVAYSYHVKEVKGTLPKNKATQEEFCKYVLGKVKNIECSEADKVDFDEMIQRLTDNSFMPKQVSGENRVIPYQLYYYELKTILNKAASYLPFLTQCGKDAISNQDKLLSIMTFRIPYFVGPLRKDNSEHAWLERKAGKIYPWNFNDKVDLDKSEEAFIRRMTNTCTYYPGEDVLPLDSLIYEKFMILNEINNIRIDGYPISVDVKQQVFGLFEKKRRVTVKDIQNLLLSLGALDKHGKLTGIDTTIHSNYNTYHHFKSLMERGVLTRDDVERIVERMTYSDDTKRVRLWLNNNYGTLTADDVKHISRLRKHDFGRLSKMFLTGLKGVHKETGERASILDFMWNTNDNLMQLLSECYTFSDEITKLQEAYYAKAQLSLNDFLDSMYISNAVKRPIYRTLAVVNDIRKACGTAPKRIFIEMARDGESKKKRSVTRREQIKNLYRSIRKDFQQEVDFLEKILENKSDGQLQSDALYLYFAQLGRDMYTGDPIKLEHIKDQSFYNIDHIYPQSMVKDDSLDNKVLVQSEINGEKSSRYPLDAAIRNKMKPLWDAYYNHGLISLKKYQRLTRSTPFTDDEKWDFINRQLVETRQSTKALAILLKRKFPDTEIVYSKAGLSSDFRHEFGLVKSRNINDLHHAKDAFLAIVTGNVYHERFNRRWFMVNQPYSVKTKTLFTHSIKNGNFVAWNGEEDLGRIVKMLKQNKNTIHFTRFSFDRKEGLFDIQPLKASTGLVPRKAGLDVVKYGGYDKSTAAYYLLVRFTLEDKKTQHKLMMIPVEGLYKARIDHDKEFLTDYAQTTISEILQKDKQKVINIMFPMGTRHIKLNSMISIDGFYLSIGGKSSKGKSVLCHAMVPLIVPHKIECYIKAMESFARKFKENNKLRIVEKFDKITVEDNLNLYELFLQKLQHNPYNKFFSTQFDVLTNGRSTFTKLSPEEQVQTLLNILSIFKTCRSSGCDLKSINGSAQAARIMISADLTGLSKKYSDIRLVEQSASGLFVSKSQNLLEYL

SEQ ID NO: 41 - protein, 1358 aa, Acidaminococcus sp.; identical to SEQ ID NO: 40
  Acidaminococcus sp. D21

SEQ ID NO: 42 - protein, 1138 aa, Acidothermus cellulolyticus
MGGSEVGTVPVTWRLGVDVGERSIGLAAVSYEEDKPKEILAAVSWIHDGGVGDERSGASRLALRGMARRARRLRRFRRARLRDLDMLLSELGWTPLPDKNVSPVDAWLARKRLAEEYVVDETERRRLLGYAVSHMARHRGWRNPWTTIKDLKNLPQPSDSWERTRESLEARYSVSLEPGTVGQWAGYLLQRAPGIRLNPTQQSAGRRAELSNATAFETRLRQEDVLWELRCIADVQGLPEDVVSNVIDAVFCQKRPSVPAERIGRDPLDPSQLRASRACLEFQEYRIVAAVANLRIRDGSGSRPLSLEERNAVIEALLAQTERSLTWSDIALEILKLPNESDLTSVPEEDGPSSLAYSQFAPFDETSARIAEFIAKNRRKIPTFAQWWQEQDRTSRSDLVAALADNSIAGEEEQELLVHLPDAELEALEGLALPSGRVAYSRLTLSGLTRVMRDDGVDVHNARKTCFGVDDNWRPPLPALHEATGHPVVDRNLAILRKFLSSATMRWGPPQSIVVELARGASESRERQAEEEAARRAHRKANDRIRAELRASGLSDPSPADLVRARLLELYDCHCMYCGAPISWENSELDHIVPRTDGGSNRHENLAITCGACNKEKGRRPFASWAETSNRVQLRDVIDRVQKLKYSGNMYWTRDEFSRYKKSVVARLKRRTSDPEVIQSIESTGYAAVALRDRLLSYGEKNGVAQVAVFRGGVTAEARRWLDISIERLFSRVAIFAQSTSTKRLDRRHHAVDAVVLTTLTPGVAKTLADARSRRVSAEFWRRPSDVNRHSTEEPQSPAYRQWKESCSGLGDLLISTAARDSIAVAAPLRLRPTGALHEETLRAFSEHTVGAAWKGAELRRIVEPEVYAAFLALTDPGGRFLKVSPSEDVLPADENRHIVLSDRVLGPRDRVKLFPDDRGSIRVRGGAAYIASFHHARVFRWGSSHSPSFALLRVSLADLAVAGLLRDGVDVFTAELPPWTPAWRYASIALVKAVESGDAKQVGWLVPGDELDFGPEGVTTAAGDLSMFLKYFPERHWVVTGFEDDKRINLKPAFLSAEQAEVLRTERSDRPDTLTEAGEILAQFFPRCWRATVAKVLCHPGLTVIRRTALGQPRWRRGHLPYSWRPWSADPWSGGTP

SEQ ID NO: 43 - protein, 1045 aa, Acidovorax avenae
MQKEKPLAYRLALDLGSTSLGWAVLRLSAPGEPSAVIRAGSRIFSDGRNPKDGSSLAVTRRAARAMRRRRDRLLKRKARMLAALERHGFFPQDEAARKALEKLNPYGLRARGLESALKPEEFGRALFHLNQRRGFQSNRKTDRKDSDSGALKQAIGTLRAQMHESGCRTVGEWFWKVRMERKPEGVKGQGVRARYRETPFTTDEGKKRIDKRYDLYVDRAMVAQEFDALWAAQATFAPALFNEAARAELRDILLHQRKLRPVQPGRCTLVPEEPRALLALPSTQRFRIYQEVNHLRVLHDELREEALTLAQRDQIVALLERQAKVTFTAMRKALGFSALFNLEDAKRDGLKGNATTAALGKKDLFGPLWAGFDTALQDEIVTQLMTEESEPRLIAWLQEHTGVDEARAQAIANAGLPEGYGSLGRTALARIVPELQRDVITYDKAVQAAGFAHHSDLGFSFEHDADEVERIGERTIASTGEIKPVFAFKQLPYYGRALQRHVAFAKENPRNDEERYGKIANPTVHIGLNQVRVVVNALMCRYGRPTEVVIELARDLKQSREQKLEAQQRQADNQKRNARIRRSIAEVLGISEERVRTLDIQKWILWEELSHDAADRRCPYSGVQISASMLLGERVEIEHILPFSMTLDDSLNNRTVALREANRIKRNRTPWDARTDFEAHGWSYDGILQRAERMPQRKRHRFAPDGYERWLGEDKDFLARALNDTRYLSRVAAEYLRLVCPGSATRVIPGQMTALLRGKFGLNDVLGLDGEKNRNDHRHHAVDACVIGVTDQRMMQRFAQANAQAREDGLTRLVEDMPLPWPTYRAHVERAVRHIWVSHKPDHGFEGAMMEETSYGILRDGTIKQRRKADGSAGREISRLIRITEPSQPQRHGVDAEGRPLPYKGYVGGSNYCLEITVNDKGKWEGQVISTFDAYRIVREGGLRQLRHSTQGQNGQALAMRLVIGDSVRLEVDEQERVMRIVKINGNNGQVFMAPVHEANVDARNSDKNEAFAYTSKIAGSFQKTKARQVTISPIGELRDPGFKG

SEQ ID NO: 44 - protein, 1131 aa, Acidovorax ebreus
MAQHVFGLDIGIASVGWAILGEQRIIDLGVRCFDKAETAKEGDPLNLTRRQARLLRRRLYRRAWRLTQLSRLLKRKGLIADAKLFAKAPSYGDSAWELRRQGLDRLLTPLEWARVIYHQCKHRGFHWTSKAEEAKADSDAEGGRVKQGLAHTKALMQAKNYRSAAEMVLAEFPDAQRNKRGQYDKALSRVLLGEELALLFATQRRLGNPHASDFFEKLILGDGDRKSGLFWQQKPALSGADLLKMLGKCTFEKGEYRAPKASFSVERHVWLTRLNNLRIVVDGRSRPLNEAERQAALLLPYQTETSKYKTLKNAFIKAGLWGDGVRFGGLAYPSQAQIDAEKTKDPEDQFLVKLPAWHELRKAFKAAGHEALWQQISTPALDGDPTLLDQIATVLSVYKDGAEVVQQLRQLALPEPAASIAVLEKISFDKFSSLSLKALRRIVPLMQSGLRYDEAVAQIPEYGHHSQRIEPGAAKHLYLPPFYEAQRKYAGKGDHIGSMQFRDDADIPRNPVVLRALNQARKVVNALIREYGSPIAVNIEMARDLSRPLDERNKVKRAQEEFRDRNDRARSEFERDFGYKPKAAAFEKWMLYREQLGQCAYSQQPLDIQRVLDDHNYAQVDHALPYSRSYDDSKNNKVLVLTHENQNKGNRTAFEYLTSFPDGEDGERWRTFVAWVQGNKAYRMAKRNRLLRKNYGVDESKGFIDRNLNDTRYICKFFKNYVEEHLQLAARADGDTARRCVVVNGQLTAFLRARWGLTKVRGDSDRHHALDAAVVAACTHGMVKALADYSRRKEISFLQEGFPDPETGEILNPAAFDRARQHFPEPWTHFAHELKARLFTDDLAALREDMQRLGSYTTEDLGRLRTLFVSRAPQRRSGGAVHKETIYAQPESLKQQGGVIEKILLTSLKLQDFDKLLNPESNDHFVEPHRNERLYAAIRQRLEQFGGRADKAFGPDNLFHKPDKNNQPTGPVVRSIKLVRGKQTGIPIRGGLAKNDSMLRVDIFTKAGKFHLVPVYVHHRVTGLPNRAIVAFKDEDEWTLIDESFAFLFSVYPNDYVKVTLKKEQQSGYYSGADRSTGAMNLWAHDRAASVGKDGLIRGIGVKTALSVEKFNVDVLGRIYLAPPETRSGLA

SEQ ID NO: 45 - protein, 1056 aa, Actinobacillus minor
  Actinobacillus minor NM305
MKALNYILGLDLGIASVGWAVVEIDQNELPIRLIDLGVRTFERAEVPKTGDSLALARRLARSSRRLVRRRAVRLLKAKRLLKQEGILQADDFHSSHLKPLPNNPWELRVKGLNHLLDRKEWAAVLLHLLKHRGYLSQRKNESKTDNKELGALLKGVSENRQLLQAQAFSTPAEIAIKKFQQEEGHIRNQRGAYSHTFDRNDLLAELRLLFQKQREFNNPYTSQSLEQAIAELLMWQKPALSGEAILKMLGKCTFEPSEYKAPKNSYSAEYFVWLTKLNNLRILENGADRGLTAEERQLLINQPFEKAKFTYAQARKLLELSDLAIFKGVRYGKDNAESATLMEMKAWHAIRKALESNGLKTEWNGLKTKPELLDKIGTAFSIYKTDEDISQYLNGELSPAVLNALLENLSFDKFIRLSLQSLAKILPLMEQGLRYDEACKQVYGDHYGKKEQLELRFLPKIPVEDIRNPVVLRTLSQARKVINGVVRLYGSPARIHIETGREVGKSFSERRDISKRQEENRNERQRAVEKFKEFFPHFVGEPKAKDILKMRLYEQQHGKCLYSGKELDLNRLLEKGYVEIDHALPFSRTWDDSFNNKVLVLASENQNKGNQTPYEWLNGKENAERWKLFQALVNGSRFPYSKKQRILTKYLDEDGFRERNLNDTRYVARFLCNFIEDNMQLVGQGKKRVFASNGQITALLRRSWGIQKVREDNDRHHAVDAVVVACSTRALQKKITDYVRYKEMNVFTGEKIDQETGEIIKFHFPEPWKFFRQEVEIRVFSETPAEDVVIALPDRPQANHEFIQPLFVSRAPTRKMTGQGHMETIKSAKRLAEGLSVSRVPLTQLKLKDLENMVNREREKALYEALKVRLEKFNNDPAKAFADPFYKKGGQQVKAVRVEQVQKSGVLVRQENGVADNASMVRVDVFIKGGKYFLVPIYTWQVAKGILPNRAATQGKEEEYWDIMDETAIFQFSLYQNDLIKLVTKKKTIFGYFNGLNRATSNINIKEHDLDKSKGKDGIYLEVGVKLALSLEKYQVDELGKNIQPCRSMKKRPPVR

SEQ ID NO: 46 - protein, 1054 aa, Actinobacillus pleuropneumoniae
  Actinobacillus pleuropneumoniae serovar 10 str. D13039
MKLTPLNYILGLDLGIASVGWAVVEIDEQENPLGLIDVGVRTFDRAEVAKTGESLALARRLARSSRRLVKRRADRIKKVKRLLKSENILLSADEQLPNDVWQLRVKGLDQKLERQEWAAVLLHLLKHRGYLSQRKNESKSENKELGALRSGVAANHQILQSAEYRTPAEIAVKKFHVEEGHIRNQRGAYTHTFSRLDLLAEIELLFTRQTELGNPHTSAKLLENLTALLMWQKPALAGEAILKMLGKCTFEPTEYKAAKNSYSAERFVWLTKLNNLRILEQGAERALTDNERFALLDQPYEKAKFTYAQARTMLALPDEAIFKGVRYQGEDKKAVETKTILMEMKAYHQIRKALENADLKAEWNELKNNSELLDDIGTAFSLHKTDEDICRYLDGKLSESILNALLENLNFDKFIQLSLKALQQILPLMLQGQRYDEAVSAIYGDHYGKKSAEINRLLPTIPADEIRNPVVLRTLTQARKVINAVVRLYGSPARIHIETGREVGKSYQDRKKLEKQQEDNRKHRESAVQKFKEYFPNFVGEPKGKDILKMRLYELQQAKCLYSGKSLELHRLLEKGYVEVDHALPFSRTWDDSFNNKVLVLANENQNKGNLTPYEWLDGKNNSEPWQNFVARVQTSGFSHTKKQRILSHKLDEKGFIERNLNDTRYVVRFLCNFIADNMLLTGKGKRKVFASNGQITALLRGRWGLQKVRDDNDRHHALDAVVVACSTVAMQQKITRFVRYEEGNVFSGERIDRETGEIIPLHFPSPWAFFRENVEIRIFSENPKLELENRLPDYPQYNHEFVQPLFVSRMPTRKMTGQGHMETVKSAKRLDEGLSVLKVPLTQLKLNDLERMVNREREMALYESLKVRLEQFDNDPAKAFAEPFYKKGGALVKAVRVEQTQKSGVLVRDGNGVADNASMVRVDVFTKAGKYFLVPIYTWQVAKGILPNKAVTANVDEIDWLEMDESYQFIFTMYPNDLVKVKLKKEEFFGYYGGLDRATGAIVIKEHDLEKSKGRQGIYRIGVKLALSFEKYQVDELGKNIRPCRPTKRQHVR

SEQ ID NO: 47 - protein, 1062 aa, Actinobacillus succinogenes
MNLNYILGLDLGIASVGWAVVEIDEQENPQRLIDVGVRTFDRAEVLKTGESLALARRLARSSRRLVKRRAERIKKAKRLLKAENLLLSADEILPNEAWQLRVKGLDQKLERQEWAAVLLHLLKHRGYLSQRKNESKSENKELGALLSGVAINHQILQSAEYRTPAEIAVNKFQAEEGHIRNQRGAYTHTFSRLDLLAEMELLFQRQATLGNPHTSTKLLENLTALLMWQKPALAGEAILKMLGKCTFEPTEYKAAKNSYSAERFVWLTKLNNLRILEQGAERALTDNERFALLDQPYEKAKLTYAQVRTLLGLSDEAIFKGLRYQGEDKKAVETKTTLMEVKAYHQIRKALEGLDLKAEWNELKNNPALLDEIGTAFSLYKTDDDIHRYLDGKLSESVLNALLENLNFDKFIQLSLKALQQILPLMLQGQRYDEAVSAIYGDHYGKKSDEIDRLLPNIPTDEIRNPVVLRTLTQARKVINAVVRLYGSPARIHIETGREVGKSYQDRKKLEKQQEENRKQRENAVKKFKEYFPNFVGEPKGKDILKMRLYELQQAKCLYSGKSLELYRLLEKGYVEVDHALPFSRTWDDSFNNKVLVLANENQNKGNATPYEWLDGKNNSEGWQHFVARVQTSGFSYAKKQRVLIQELDEKSFIERNLNDTRYVARFLCNHIADNMLLTGKGKRKVFASNGQITALLRGCWGLQKVRENNDRHHALDAVVVACSTKSMQDKITKFVKYKEGRLFKDKKDGVYKGERINRETGEIISLHFPTPWKFFKENVEIRIFSENPKLELENRLPDYPQYNHEFVQPLFVSRMPTRKMTGQGHMETVKSAKRLDKGLSVLKVPLTQLKLSDLERMVNREREMALYEALKECLEQFGNDPAKAFAEPFYKKGGALVKAVRVEQTQKSGVLVRNGNGVADNATGSIVRVDVFTKGGKYFLVPIYTWQVAKGILPNKAVIQGKDESEWEEMDENAVFQFSMHKNDLIKVKTKKGEIFGYFNGLDRATGSIEIEEHDLEKSKGKNGSHRGLGVKTAFFLEKYQVDELGKNIRPCRPTKRQHVR

SEQ ID NO: 48 - protein, 1054 aa, Actinobacillus suis
MKLTPLNYILGLDLGIASVGWAVVEIDEQENPLGLIDVGVRTFDRAEVPKTGESLALARRLARSARRLVKRRADRIKKAKRLLKAENILLSADEHLPNDVWQLRVKGLDQKLERQEWAAVLLHLLKHRGYLSQRKNESKSENKELGALLSGVETNHQILQSAEYRTPAEIAVKKFHVEDGHIRNQRGAYTHTFSRLDLLAEMELLFQRQTDLGNPHTSAKLLENLTALLMWQKPALAGEAILKMLGKCTFEPTEYKAAKNSYSAERFVWLTKLNNLRILEQGAERALTDNERFALLDQPYEKAKFTYAQARTMLALPDEAIFKGVRYQGEDKKAVETKTILMEMKAYHQIRKALENADLKAEWNELKNNSELLDDIGTAFSLHKTDEDICRYLDGKLSESILNALLENLNFDKFIQLSLKALQQILPLMLQGQRYDEAVSAIYGDHYGKKSAEINRLLPTIPADEIRNPVVLRTLTQARKVINAVVRLYGSPARIHIETGREVGKSYQDRKKLEKQQEDNRKQRESAVKKFKEYFPNFVGEPKGKDILKMRLYELQQAKCLYSGKSLELHRLLEKGYVEVDHALPFSRTWDDSFNNKVLVLANENQNKGNLTPYEWLDGKNNSEHWQNFVARVQTSGFSHTKKQRILSHKLDEKGFIERNLNDTRYVARFLCNFIADNMLLTGKGKRKVFASNGQITALLRGRWGLQKVRDDNDRHHALDAVVVACSTVVMQQKITRFVRYEEGNVFSGERIDRETGEIIPLHFPSPWAFFRENVEIRIFSENPKLELENRLPDYPQYNHEFVQPLFVSRMPTRKMTGQGHMETVKSAKRLDEGLSVLKVPLTQLKLSDLERMVNREREVTLYESLKARLEQFGNDPAKAFAEPFHKKGGAVVKAVRVEQTQKSGVLVRDGNGVADNASMVRVDVFTKGGKYFLVPIYTWQVAKGILPNKAVTANVDEIDWLEMDESYQFIFTMYPNDLVKVKLKKEEFFGYYGGLDRATGAIVIKEHDLEKSKGKQGIYRIGVKLALSFEKYQVDELGKNIRPCRPTKRQHVR

SEQ ID NO: 49 - protein, 1105 aa, Actinomyces coleocanis
  Actinomyces coleocanis DSM 15436
MDNKNYRIGIDVGLNSIGFCAVEVDQHDTPLGFLNLSVYRHDAGIDPNGKKTNTTRLAMSGVARRTRRLFRKRKRRLAALDRFIEAQGWTLPDHADYKDPYTPWLVRAELAQTPIRDENDLHEKLAIAVRHIARHRGWRSPWVPVRSLHVEQPPSDQYLALKERVEAKTLLQMPEGATPAEMVVALDLSVDVNLRPKNREKTDTRPENKKPGFLGGKLMQSDNANELRKIAKIQGLDDALLRELIELVFAADSPKGASGELVGYDVLPGQHGKRRAEKAHPAFQRYRIASIVSNLRIRHLGSGADERLDVETQKRVFEYLLNAKPTADITWSDVAEEIGVERNLLMGTATQTADGERASAKPPVDVTNVAFATCKIKPLKEWWLNADYEARCVMVSALSHAEKLTEGTAAEVEVAEFLQNLSDEDNEKLDSFSLPIGRAAYSVDSLERLTKRMIENGEDLFEARVNEFGVSEDWRPPAEPIGARVGNPAVDRVLKAVNRYLMAAEAEWGAPLSVNIEHVREGFISKRQAVEIDRENQKRYQRNQAVRSQIADHINATSGVRGSDVTRYLAIQRQNGECLYCGTAITFVNSEMDHIVPRAGLGSTNTRDNLVATCERCNKSKSNKPFAVWAAECGIPGVSVAEALKRVDFWIADGFASSKEHRELQKGVKDRLKRKVSDPEIDNRSMESVAWMARELAHRVQYYFDEKHTGTKVRVFRGSLTSAARKASGFESRVNFIGGNGKTRLDRRHHAMDAATVAMLRNSVAKTLVLRGNIRASERAIGAAETWKSFRGENVADRQIFESWSENMRVLVEKFNLALYNDEVSIFSSLRLQLGNGKAHDDTITKLQMHKVGDAWSLTEIDRASTPALWCALTRQPDFTWKDGLPANEDRTIIVNGTHYGPLDKVGIFGKAAASLLVRGGSVDIGSAIHHARIYRIAGKKPTYGMVRVFAPDLLRYRNEDLFNVELPPQSVSMRYAEPKVREAIREGKAEYLGWLVVGDELLLDLSSETSGQIAELQQDFPGTTHWTVAGFFSPSRLRLRPVYLAQEGLGEDVSEGSKSIIAGQGWRPAVNKVFGSAMPEVIRRDGLGRKRRFSYSGLPVSWQG

SEQ ID NO: 50 - protein, 1113 aa, Actinomyces georgiae
  Actinomyces georgiae F0490
MSASSQNVERIRYKVGIDVGLRSIGFCAVQVDADDRPVKLLNTVVHVHDAGVSPADAKKADTRKLVSGVARRTRRLYRTRKRRLVDLDRQLDGLGWPLVDPARFADPREPWFAREKLVSGRVDDADERKELLSVALRHIAHHRGWRNPYSTVESLQADAPPSEFLQGLNQRVSEKLGTELDPGLTQGQLVAKLLHRFPNAKIRGPEGILRGKLHQSDNAGELRLICRTQGLDCHITEELVRLVFQAKSPKANKEMRKRIGRDQLPGQGAHIRAEKAHPVFQRFRIVAVLANLRIREAHVDRRLTAEEMRTLTDFLLGLAGSEQPTWEELADNLNIERHQLRGTAKASVDGAPALRFPPIDATTDRIYASKLKWLAEWWRQADEERRGYMVDALSNSGGSEDEPYLDDEIAEMLEQASEEDQAKLDSLHLPGGRASYCLDTLRRLTDAMLGGGLDLFEARKAVFHVDDDWAPPTDPIGAPVGNPPVDRVLKHVARWLEAATGRWGAPQTINIEHVREGLGSEKAARELTRMNDRRRRNNQKLVEEMGEKLGMSGRIRRSDRMRYEAIRRQNCECLYCGQPITYQTMEMDHIVPRAGAASTNSRSNLAAVCRRCNHQKGKLPFAVWAESQDSPAEVRLQDAVQRVRHWLRDAGMGQKELQALRVQVIARLKSKRPDEEFDGRSMESIAWMANELRARVEAQYRGSGTTVRVYRGALTAEARKASGFEGRVNLIGGRGKDRFDRRHHAMDALVIALMNQSVAQTLALRLNMRDSQWLTQSEQTWRQFHGAPGEAARKWEAWDRDMRDASDLFNLALDGGRIPITENVRLRVGNGRVHEDGVIRFKPEYEVKGKTIKGGEARLLGDSLPSEQIDRAETPALWTALTRLPEYDRKSGLPENPDRVIRVNGAVVQATDRIRFFGTPASVAVRGGYAKLGESIHHARIYRINGKTPKYAMIRVYTIDLMRLNHEDIFTAVLKPSTISMRCAEKKLKYAIAEGNAEQIGWLVEGDQLELDAAAYAKGVGADLMREYPMATCWRVAGFPDEAKLRLRPVLLAAEGMGEDAPKFMREVLENQGWRPAVNALLSPGSVRVVRRNVLGEPRFKSSGHLPTTVDLV

SEQ ID NO: 51 - protein, 1101 aa, Actinomyces naeslundii
  Actinomyces naeslundii str. Howell 279
MWYASLMSAHHLRVGIDVGTHSVGLATLRVDDHGTPIELLSALSHIHDSGVGKEGKKDHDTRKKLSGIARRARRLLHHRRTQLQQLDEVLRDLGFPIPTPGEFLDLNEQTDPYRVWRVRARLVEEKLPEELRGPAISMAVRHIARHRGWRNPYSKVESLLSPAEESPFMKALRERILATTGEVLDDGITPGQAMAQVALTHNISMRGPEGILGKLHQSDNANEIRKICARQGVSPDVCKQLLRAVFKADSPRGSAVSRVAPDPLPGQGSFRRAPKCDPEFQRFRIISIVANLRISETKGENRPLTADERRHVVTFLTEDSQADLTWVDVAEKLGVHRRDLRGTAVHTDDGERSAARPPIDATDRIMRQTKISSLKTWWEEADSEQRGAMIRYLYEDPTDSECAEIIAELPEEDQAKLDSLHLPAGRAAYSRESLTALSDHMLATTDDLHEARKRLFGVDDSWAPPAEAINAPVGNPSVDRTLKIVGRYLSAVESMWGTPEVIHVEHVRDGFTSERMADERDKANRRRYNDNQEAMKKIQRDYGKEGYISRGDIVRLDALELQGCACLYCGTTIGYHTCQLDHIVPQAGPGSNNRRGNLVAVCERCNRSKSNTPFAVWAQKCGIPHVGVKEAIGRVRGWRKQTPNTSSEDLTRLKKEVIARLRRTQEDPEIDERSMESVAWMANELHHRIAAAYPETTVMVYRGSITAAARKAAGIDSRINLIGEKGRKDRIDRRHHAVDASVVALMEASVAKTLAERSSLRGEQRLTGKEQTWKQYTGSTVGAREHFEMWRGHMLHLTELFNERLAEDKVYVTQNIRLRLSDGNAHTVNPSKLVSHRLGDGLTVQQIDRACTPALWCALTREKDFDEKNGLPAREDRAIRVHGHEIKSSDYIQVFSKRKKTDSDRDETPFGAIAVRGGFVEIGPSIHHARIYRVEGKKPVYAMLRVFTHDLLSQRHGDLFSAVIPPQSISMRCAEPKLRKAITTGNATYLGWVVVGDELEINVDSFTKYAIGRFLEDFPNTTRWRICGYDTNSKLTLKPIVLAAEGLENPSSAVNEIVELKGWRVAINVLTKVHPTVVRRDALGRPRYSSRSNLPTSWTIE

SEQ ID NO: 52 - protein, 1144 aa, Actinomyces sp.
  Actinomyces sp. ICM47
MSMIDSSENVPGIRYRVGIDVGLKSIGFCAVEVDRNDQPVRMLNSMVFIHDAGVDPNENKAAKSRKLTAGVARRTRRLYRTRHQRLVNLDRVLSKEFGWPLPDLTSFKDPREPWHVRAGLLEGYIADDEKRKEALSIALRHIARHRGWRNPYAKVETLLQPSEPSDFLKGLNDRISEELGRAFPADATPGQLVDTYLAHPDYVGRAGTPKLRGPQGILAGKLHQSDNAQEIRGICDVQRIEPAERDRLIRVVFEAKSPKGSAKERGLVGYDELPGQGRHVRAEKAHPAFQLFRMVSVLANLRIREGREERPLTPDELEDLVDFINQVSLKQEVTWQDLADKLRIERADLRGTAKASFDGSPVLRNPPTDVTTEKIMACKVKWLKEWWKEADDEQRGYMVDAFSNSGGSEDGTDVNDEVAELLEQATEDDQLEFEKISLPQGRAAYSLDSLRRLTDRMLRDGVDLHTARRLEFNVGDDWKPAVEPIGAPTGNPAVDRVLKQVSRWLHAATERWGEPTVINIEHARDGLGSERVARELMRENEKRRKANASAVAEMAAKLKLSGKVHRSDQIRYFALQRQNCQCLYCGAPITYTTAEMDHIVPRADGSSTNDRSNLAAVCRTCNHMKGKIPFAVWASSDKANQGVSLTGALERVNMWQRDSGMSPRQLKQLQREVCARLKSKKPDQEFDGRSMESVAWMAVELRTRIEGFYRSRDEESVPSVGVYRGQLTAEARRASGFESRVNLIGGRGKTRFDRRHHAMDALVIALMNPSVSRTLALRLNMRDAQRLTGVEETWKHFYGKPGEASKRFESWRESMLRGVELFNIALSDNAIPFVENIRLRVGSSVIHDATVHSFCPPKTPDGKQIITKGYGEQHSLGSAMPVELIDRAETPALWTALTRCPDFDPKKGLPENPQRTISVNGTRVGPTELVNFFEFSKSGPKACLKVRGGYVDLSGAIHHARIYRIAGKKTAYAMIRVFQVDLLRLKDHDVFTTPLKPSTISMRTAEPKIREALANGTATQIGWLVEGDELVIDTSKYSGGFIGEVLARYPEATSWRVAGFMTPAKLRIKPILLSKEGFVDETQAALLGVEVTSEAIQKTVDRPGWLPAVNVLFGAGGVRVIRRNCLGEERYHSSASLPVSMTLE

SEQ ID NO: 53 - protein, 1095 aa, Actinomyces sp.
  Actinomyces sp. oral taxon 175 str. F0384
MPAHHLRVGIDVGTHSVGLATLRVDDQGTPIELLSALSHIHDSGIGKEGQKDHDTRKKLSGVARRTRHLLRNRRERLQQLDKVLVDLGFPIPKPEEYPDLSERTDPYRVWRVRARLVEETLPEELRGPAISMAVRHIARHRGWRNPYSKVESLLSPAEESSFMKALRKRIMTKTGEVLDDDITPGQAMAQVALTHKIYMRGPEGILGKLHQSDNANEIRKICARQGISSDVCKQLLRAVFKAESPRGSAVSRVAPDPLPGQGSFRRAPKCDPEFQRFRIISIVANLRISETKGENRPLTVDERRQVVAFLMEDSQADLTWVDVAEKLRVSRQALRGTAMLTADGERSAAQPPIDVTDQIMRKTKISALKTWWDKADAERRGAMVRYLYEGLEDSECAEVIAKLPEKDHAKLDSLHLPAGRAAYSRESLTALSDHMLETTNDLHEARKRLFGVDDSWAPPAEPVGAPVGNPSVDRTLKIVARYLSAVESIWGTPEVIHVEHVRDGFTSERTAEERDKANRSRHNDNQKAIEKIQHDYGKEGYISRGDIVRFHALKLQGSACLYCGTTIGYHTCQLDHIVPQAGPGSNNRRGNLVAVCERCNHSKSNTPFAVWAQKCGIPHVGVKEAISRVNGWVEHNHSTSSGDLTRLKKEVIARLRRTQKDPEIDERSMESVAWMANELHHRIAAAYPETTVMVYRGSITAAARKAASIESRINLIGEKGRKDRLDRRHHAVDASVVALMEPSVAKTLAERSSLRGEQRLTGQEQTWKQYTGLTVGARERFEAWRGHMHRLTELFNESLAADEVYVTQNIRLRLSDGSAHTVKASKLVSHRLGDGLTVQQIDRACTPALWCALTREIDFDEKNGLPAREDRVIRVHGQEISSADCIQVFSKRKKTKSDRDEAPFGAIAVRGGFVEIGSSIHHARIYRIEGEKPAYAMLRVFTHDLLSQRHGDLFSAVIPPQSISMRCAATELRQAISEGRATYLGWIVSGDELHIPVETFTTHKIGSFLKDYPNTTRWRICGYDSETMLILKPRILSAEGLNNSSDIAEYVIKNKGWRVAINKLAKVHPTVVRRDALGRPRHSSRSNLPVTWSIE

SEQ ID NO: 54 - protein, 1181 aa, Actinomyces sp.
  Actinomyces sp. oral taxon 180 str. F0310
MLHCIAVIRVPPSEEPGFFETHADSCALCHHGCMTYAANDKAIRYRVGIDVGLRSIGFCAVEVDDEDHPIRILNSVVHVHDAGTGGPGETESLRKRSGVAARARRRGRAEKQRLKKLDVLLEELGWGVSSNELLDSHAPWHIRKRLVSEYIEDETERRQCLSVAMAHIARHRGWRNSFSKVDTLLLEQAPSDRMQGLKERVEDRTGLQFSEEVTQGELVATLLEHDGDVTIRGFVRKGGKATKVHGVLEGKYMQSDLVAELRQICRTQRVSETTFEKLVLSIFHSKEPAPSAARQRERVGLDELQLALDPAAKQPRAERAHPAFQKFKVVATLANMRIREQSAGERSLTSEELNRVARYLLNHTESESPTWDDVARKLEVPRHRLRGSSRASLETGGGLTYPPVDDTTVRVMSAEVDWLADWWDCANDESRGHMIDAISNGCGSEPDDVEDEEVNELISSATAEDMLKLELLAKKLPSGRVAYSLKTLREVTAAILETGDDLSQAITRLYGVDPGWVPTPAPIEAPVGNPSVDRVLKQVARWLKFASKRWGVPQTVNIEHTREGLKSASLLEEERERWERFEARREIRQKEMYKRLGISGPFRRSDQVRYEILDLQDCACLYCGNEINFQTFEVDHIIPRVDASSDSRRTNLAAVCHSCNSAKGGLAFGQWVKRGDCPSGVSLENAIKRVRSWSKDRLGLTEKAMGKRKSEVISRLKTEMPYEEFDGRSMESVAWMAIELKKRIEGYFNSDRPEGCAAVQVNAYSGRLTACARRAAHVDKRVRLIRLKGDDGHHKNRFDRRNHAMDALVIALMTPAIARTIAVREDRREAQQLTRAFESWKNFLGSEERMQDRWESWIGDVEYACDRLNELIDADKIPVTENLRLRNSGKLHADQPESLKKARRGSKRPRPQRYVLGDALPADVINRVTDPGLWTALVRAPGFDSQLGLPADLNRGLKLRGKRISADFPIDYFPTDSPALAVQGGYVGLEFHHARLYRIIGPKEKVKYALLRVCAIDLCGIDCDDLFEVELKPSSISMRTADAKLKEAMGNGSAKQIGWLVLGDEIQIDPTKFPKQSIGKFLKECGPVSSWRVSALDTPSKITLKPRLLSNEPLLKTSRVGGHESDLVVAECVEKIMKKTGWVVEINALCQSGLIRVIRRNALGEVRTSPKSGLPISLNLR

SEQ ID NO: 55 - protein, 1103 aa, Actinomyces sp.
  Actinomyces sp. oral taxon 181 str. F0379
MTKINDDLRYRVGIDVGLKSIGFCAVEVDENDQPLRLLNSMVFVHDAGVDPNENKAAKSRKLTAGVARRTQRGTAQNRRRLAELDRALSEELNWPLPNLEDFEDSYEPWHTRAELVEHYIKDDAERAEALAIAIRHIARHRGWRNPYLSVDSLLTPQEPSKFLRGLNERVTQALGREFPADATPGQLICAYIDSPKYAETQGIRGDSGILSGKLHQFDNVGEIRKICEVQRLDHDVFKLLVRKVFFAKSPRGSAAGLVGHDQIPGQGKYIRAEKAHPDFQLFRIVAVLTNLRIREGKAERCLTPDELRGLVDYILEVQLKQQVTWADLADNLGIERTDLRGTARASFDGSPALRFPPTDVTAEKIMASKVKWLKDWWDKADSERRGFMVDALSNSGGSTGDNDIDDEVAALLEAATEDEQAELEKIQLPQGRAAYSLDSLRRLTKRMLEEGVDLHTARKEEFNVDDDWRPEPEPIEAPVGNPAVDRVLKQVARWLNMATDRWGVPDVINIEHTRDGLGSEKVARELLRESQKRQDLNQKDMDKMIRELGISGKARRSSLIKYQAIQRQNSMCLYCGTEIGFETAEMDHIVPRALSGSTNDRSNLAAVCRACNHQKGAVPFAVWATSGEAHAGVSLEDAIKRVRLWQKGPGMSPKQHKAFQNEVISRLKSRKPDEEFDGRSMESVAWMAVELRTRIDGYYRKVNSDSVPKVGIYRGQLTAEARKASGFENRVNLIGGKGKTRFDRRHHAMDALVIAMMNQSVSQTLALRVNMRESQRITGQEETWKNFYGKPGQASERFEKWREGMLRAVELFNIELAKNAIPFHENVRLRVGSSKVHDDTVRKFIHAKLGEALSVAMIDCAETPALWTALTRLPDFDPKDGLPEDLSREIYIHSRKITADEQLNFFNSPSACLKVRGGYVEIGSSIHHARVYRIDGKKTTYSMVRVFATDLVKMTHEDVFTTPLKPSTISMRTADPKIRKALADGTATQIGWLVEGDELQLETDKYSGGLIGEVLAEYPQLTSWRVAGFYGVTQLRLRPYMLAAEGIPSDASESLRKVIEGKGWLPAINALLSSGCVKVVRRNCLGEPRFNAKSSLPVSQLLR

SEQ ID NO: 56 - protein, 1120 aa, Actinomyces sp.
  Actinomyces sp. oral taxon 848 str. F0332
MNAMKQYNAGIDVGINSVGFAAIEVDSKGLPLNILNNMVVLHDSGVDPGTAKTGATRLANSGTARRTRKLIARRRKRLQKLDRYIEVQGWPLVDFSSLPDPYTPWKIRAKLTQDRLEGEEQGRGLSIALRHMARHRGWRNPYEGVESLHSPKEASKQFKDLKDRVTKVSGVIFDEDATPAEVVCDIGLSPKQRLRSAPSAKYKEGATLADEPVGGKSKEGLLGGKLMQSDNANELRKIGIVQGLSNEKVNEIIDQVFASESPKGQAGKRAKKDELPGQEQYVRALRAHLAFQRFRIVAAVANLRILEAEPKHERLLSQSEKDKVIEFLMSADGDDGVTWSDVAEELGIERECLSGTAKRGADGERPSSFPPTNSTNISIVRSKVKPLIEWWRKASDDEQATLVTALSNADELTDDQPSAETVRQFLSSPDEQSQEKIDKISLPKGRAAYSVNSLERLTRRMLKDSVDLFEARKREFGVDNNWTPTPDSIGEPVGNPAVDRVLKIVNRWLLAVTRKWGPPKVVNIEHVRVGFTSAAQTRKYEEENKTNRERNLAILEELRDKFGTSGKIRREDITRFAALRRQNCQCAYCGEAITFFDCEMDHIVPRKGPGSTNTRNNLVAICERCNKSKSNMPFSLWAQNCDIPGVSVEAVIDRVRTWIKDPELNPKQYNNFKKDVIERLRKTVDDDAIDNRSIESVAWMATELADRIGSHFRTAGANTKVRVYRGWLTSEARKASGFEGKINLIGGRGKTRLDRRHHAMDAATIALMRQSVAQTLVERASIRESDRLRRVVSSSWKDYRGADRDKQFSYGSWLNSMNALAELFNRAIDADGIPVTQNLRLRLGNGEAHDATIRSLEKKRVGASWTIGEIDRASTPQLWLALTRQEDFDQNDGLPANASRELRVKNHWFHAEENVTLFPTKSAAIAVRGGYAEIGNTIHHARLYKLPGKKLTYGMIRVFAIDLLCAWHTDLFSSPLLPESISLRTAETKVRRAVEDGAAMYIGWLVDGDEIVLDPETKAFKSNKIGEYLCEFPGTKRWKVDGFPDKEKLRLRPLQLAGEGLPEDVSAGTEEILGPKGNGWRVAINALFKSSQLVVVRRTALGMVRKLSRRHLPLTTRLRG

SEQ ID NO: 57 - protein, 1114 aa, Actinomyces turicensis
  Actinomyces turicensis ACS-279-V-Col4
MQFHFYMVYVTMKGMNDKDASQQLRYRVGIDVGTHSIGFCAVEVDESGMPIQLLNSMVHKHDSGIDPGGNDTATTRLAEAGVARRTRRLIRRRKKRLQELDAFIEECGWPLVDLATITDARSPWRIRAHLATEHIDDEAEQGKLLSIALRHMARHRGWRSPYARISSLHIQADPSEQLKALAQRVSEKTGISLTADQTPAQLISVYLDVFETGKLRGPEGILGGKLMQSDNANELRRIATVQGLDNDLLKKIIGFVFAAESPKGSAAKRVGKDVLPGAHGLRAEKAHPAFQQFRIVSIVQNLRIKEGTGLRALTSEETEIVVDFLNQAGLTEAPTWEEVADNLEIPRSHLKGTATEGFDGIAPSTRPPFDVTSQKILNGKLKKLSAWWKDADYDHRCAMVNALSNVGSDDEGSLADDDVREFLSDFTDEELEALDKVELPGGRAAYSVDSLEKLTNTMLSEGCDLHSARKIAFGVDDSWTPPAEPIGQPVGNPAVDRVLKQVARWISAATNQWGTPESVNIEHVRDALGSEKASREYQRSLQTRRIRNEKLFAEMRERLDIGGKPRRSELTRYLALQRQNCQCLYCGMPITYTDAEMDHIVPRKGAASTNTRENFAAVCRACNHQKSNLPFAVWAEKTERPGVSVKEAYKRVSDMRIEPGMNGRQMNEFRKAIRLRLTTKHADAEIDGRSLESVAWMANELRHRIEGFYRSAENDVTVRVFRGAVTAEGRRASGFESRVNLIGGKGKTRLDRRHHAMDALTIALMEPGIAQTIALRMNMRESQRVLGEQETWKSFTGGSDTARKRWEHWCEEMLRASELFNVFLAEDRIPICQNKRLRLGSSAVHKAIVQPFEASDKRIVSDAMPVELIDRASTPALWTALTRDPDFDPKEGLPANPSRTIRLHDKRLGPNETVEFFPTAAACLAIRGGYCEIGAGIHHARIFRISGKKTTYAMLRVYQCDLVRFQKENLLTVELPANTISVRTAVPKLREALAHGTAEQIGWLVVGDELKIDLSGFTTGQIETFNETYPQATRWEVTGFPTKTQLRLKPLLIASEGLADDVPDDIVKIVKGPGWWPAIDKLLKIGNVVLYRRDTHGKPRVVSHRSLPLSSKLQ

SEQ ID NO: 58 - protein, 1101 aa, Akkermansia muciniphila
MSRSLTFSFDIGYASIGWAVIASASHDDADPSVCGCGTVLFPKDDCQAFKRREYRRLRRNIRSRRVRIERIGRLLVQAQIITPEMKETSGHPAPFYLASEALKGHRTLAPIELWHVLRWYAHNRGYDNNASWSNSLSEDGGNGEDTERVKHAQDLMDKHGTATMAETICRELKLEEGKADAPMEVSTPAYKNLNTAFPRLIVEKEVRRILELSAPLIPGLTAEIIELIAQHHPLTTEQRGVLLQHGIKLARRYRGSLLFGQLIPRFDNRIISRCPVTWAQVYEAELKKGNSEQSARERAEKLSKVPTANCPEFYEYRMARILCNIRADGEPLSAEIRRELMNQARQEGKLTKASLEKAISSRLGKETETNVSNYFTLHPDSEEALYLNPAVEVLQRSGIGQILSPSVYRIAANRLRRGKSVTPNYLLNLLKSRGESGEALEKKIEKESKKKEADYADTPLKPKYATGRAPYARTVLKKVVEEILDGEDPTRPARGEAHPDGELKAHDGCLYCLLDTDSSVNQHQKERRLDTMTNNHLVRHRMLILDRLLKDLIQDFADGQKDRISRVCVEVGKELTTFSAMDSKKIQRELTLRQKSHTDAVNRLKRKLPGKALSANLIRKCRIAMDMNWTCPFTGATYGDHELENLELEHIVPHSFRQSNALSSLVLTWPGVNRMKGQRTGYDFVEQEQENPVPDKPNLHICSLNNYRELVEKLDDKKGHEDDRRRKKKRKALLMVRGLSHKHQSQNHEAMKEIGMTEGMMTQSSHLMKLACKSIKTSLPDAHIDMIPGAVTAEVRKAWDVFGVFKELCPEAADPDSGKILKENLRSLTHLHHALDACVLGLIPYIIPAHHNGLLRRVLAMRRIPEKLIPQVRPVANQRHYVLNDDGRMMLRDLSASLKENIREQLMEQRVIQHVPADMGGALLKETMQRVLSVDGSGEDAMVSLSKKKDGKKEKNQVKASKLVGVFPEGPSKLKALKAAIEIDGNYGVALDPKPVVIRHIKVFKRIMALKEQNGGKPVRILKKGMLIHLTSSKDPKHAGVWRIESIQDSKGGVKLDLQRAHCAVPKNKTHECNWREVDLISLLKKYQMKRYPTSYTGTPR

SEQ ID NO: 59 - protein, 1113 aa, Alcanivorax pacificus
  Alcanivorax pacificus W11-5
MRYRVGLDLGTASVGAAVFSMDEQGNPMELIWHYERLFSEPLVPDMGQLKPKKAARRLARQQRRQIDRRASRLRRIAIVSRRLGIAPGRNDSGVHGNDVPTLRAMAVNERIELGQLRAVLLRMGKKRGYGGTFKAVRKVGEAGEVASGASRLEEEMVALASVQNKDSVTVGEYLAARVEHGLPSKLKVAANNEYYAPEYALFRQYLGLPAIKGRPDCLPNMYALRHQIEHEFERIWATQSQFHDVMKDHGVKEEIRNAIFFQRPLKSPADKVGRCSLQTNLPRAPRAQIAAQNFRIEKQMADLRWGMGRRAEMLNDHQKAVIRELLNQQKELSFRKIYKELERAGCPGPEGKGLNMDRAALGGRDDLSGNTTLAAWRKLGLEDRWQELDEVTQIQVINFLADLGSPEQLDTDDWSCRFMGKNGRPRNFSDEFVAFMNELRMTDGFDRLSKMGFEGGRSSYSIKALKALTEWMIAPHWRETPETHRVDEEAAIRECYPESLATPAQGGRQSKLEPPPLTGNEVVDVALRQVRHTINMMIDDLGSVPAQIVVEMAREMKGGVTRRNDIEKQNKRFASERKKAAQSIEENGKTPTPARILRYQLWIEQGHQCPYCESNISLEQALSGAYTNFEHILPRTLTQIGRKRSELVLAHRECNDEKGNRTPYQAFGHDDRRWRIVEQRANALPKKSSRKTRLLLLKDFEGEALTDESIDEFADRQLHESSWLAKVTTQWLSSLGSDVYVSRGSLTAELRRRWGLDTVIPQVRFESGMPVVDEEGAEITPEEFEKFRLQWEGHRVTREMRTDRRPDKRIDHRHHLVDAIVTALTSRSLYQQYAKAWKVADEKQRHGRVDVKVELPMPILTIRDIALEAVRSVRISHKPDRYPDGRFFEATAYGIAQRLDERSGEKVDWLVSRKSLTDLAPEKKSIDVDKVRANISRIVGEAIRLHISNIFEKRVSKGMTPQQALREPIEFQGNILRKVRCFYSKADDCVRIEHSSRRGHHYKMLLNDGFAYMEVPCKEGILYGVPNLVRPSEAVGIKRAPESGDFIRFYKGDTVKNIKTGRVYTIKQILGDGGGKLILTPVTETKPADLLSAKWGRLKVGGRNIHLLRLCAE

SEQ ID NO: 60 - protein, 1029 aa, Alicycliphilus denitrificans
  Alicycliphilus denitrificans BC
MRSLRYRLALDLGSTSLGWALFRLDACNRPTAVIKAGVRIFSDGRNPKDGSSLAVTRRAARAMRRRRDRLLKRKTRMQAKLVEHGFFPADAGKRKALEQLNPYALRAKGLQEALLPGEFARALFHINQRRGFKSNRKTDKKDNDSGVLKKAIGQLRQQMAEQGSRTVGEYLWTRLQQGQGVRARYREKPYTTEEGKKRIDKSYDLYIDRAMIEQEFDALWAAQAAFNPTLFHEAARADLKDTLLHQRPLRPVKPGRCTLLPEEERAPLALPSTQRFRIHQEVNHLRLLDENLREVALTLAQRDAVVTALETKAKLSFEQIRKLLKLSGSVQFNLEDAKRTELKGNATSAALARKELFGAAWSGFDEALQDEIVWQLVTEEGEGALIAWLQTHTGVDEARAQAIVDVSLPEGYGNLSRKALARIVPALRAAVITYDKAVQAAGFDHHSQLGFEYDASEVEDLVHPETGEIRSVFKQLPYYGKALQRHVAFGSGKPEDPDEKRYGKIANPTVHIGLNQVRMVVNALIRRYGRPTEVVIELARDLKQSREQKVEAQRRQADNQRRNARIRRSIAEVLGIGEERVRGSDIQKWICWEELSFDAADRRCPYSGVQISAAMLLSDEVEVEHILPFSKTLDDSLNNRTVAMRQANRIKRNRTPWDARAEFEAQGWSYEDILQRAERMPLRKRYRFAPDGYERWLGDDKDFLARALNDTRYLSRVAAEYLRLVCPGTRVIPGQLTALLRGKFGLNDVLGLDGEKNRNDHRHHAVDACVIGVTDQGLMQRFATASAQARGDGLTRLVDGMPMPWPTYRDHVERAVRHIWVSHRPDHGFEGAMMEETSYGIRKDGSIKQRRKADGSAGREISNLIRIHEATQPLRHGVSADGQPLAYKGYVGGSNYCIEITVNDKGKWEGEVISTFRAYGVVRAGGMGRLRNPHEGQNGRKLIMRLVIGDSVRLEVDGAERTMRIVKISGSNGQIFMAPIHEANVDARNTDKQDAFTYTSKYAGSLQKAKTRRVTISPIGEVRDPGFKG

SEQ ID NO: 61 - protein, 1029 aa, Alicycliphilus sp.; identical to SEQ ID NO: 60

SEQ ID NO: 62 - protein, 1146 aa, Alicyclobacillus hesperidum
  Alicyclobacillus hesperidum URH17-3-68
MAYRLGLDIGITSVGWAVVALEKDESGLKPVRIQDLGVRIFDKAEDSKTGASLALPRREARSARRRTRRRRHRLWRVKRLLEQHGILSMEQIEALYAQRTSSPDVYALRVAGLDRCLIAEEIARVLIHIAHRRGFQSNRKSEIKDSDAGKLLKAVQENENLMQSKGYRTVAEMLVSEATKTDAEGKLVHGKKHGYVSNVRNKAGEYRHTVSRQAIVDEVRKIFAAQRALGNDVMSEELEDSYLKILCSQRNFDDGPGGDSPYGHGSVSPDGVRQSIYERMVGSCTFETGEKRAPRSSYSFERFQLLTKVVNLRIYRQQEDGGRYPCELTQTERARVIDCAYEQTKITYGKLRKLLDMKDTESFAGLTYGLNRSRNKTEDTVFVEMKFYHEVRKALQRAGVFIQDLSIETLDQIGWILSVWKSDDNRRKKLSTLGLSDNVIEELLPLNGSKFGHLSLKAIRKILPFLEDGYSYDVACELAGYQFQGKTEYVKQRLLPPLGEGEVTNPVVRRALSQAIKVVNAVIRKHGSPESIHIELARELSKNLDERRKIEKAQKENQKNNEQIKDEIREILGSAHVTGRDIVKYKLFKQQQEFCMYSGEKLDVTRLFEPGYAEVDHIIPYGISFDDSYDNKVLVKTEQNRQKGNRTPLEYLRDKPEQKAKFIALVESIPLSQKKKNHLLMDKRAIDLEQEGFRERNLSDTRYITRALMNHIQAWLLFDETASTRSKRVVCVNGAVTAYMRARWGLTKDRDAGDKHHAADAVVVACIGDSLIQRVTKYDKFKRNALADRNRYVQQVSKSEGITQYVDKETGEVFTWESFDERKFLPNEPLEPWPFFRDELLARLSDDPSKNIRAIGLLTYSETEQIDPIFVSRMPTRKVTGAAHKETIRSPRIVKVDDNKGTEIQVVVSKVALTELKLTKDGEIKDYFRPEDDPRLYNTLRERLVQFGGDAKAAFKEPVYKISKDGSVRTPVRKVKIQEKLTLGVPVHGGRGIAENGGMVRIDVFAKGGKYYFVPIYVADVLKRELPNRLATAHKPYSEWRVVDDSYQFKFSLYPNDAVMIKPSREVDITYKDRKEPVGCRIMYFVSANIASASISLRTHDNSGELEGLGIQGLEVFEKYVVGPLGDTHPVYKERRMPFRVERKMN

SEQ ID NO: 63 - protein, 1052 aa, Aminomonas paucivorans
  Aminomonas paucivorans DSM 12260
MIGEHVRGGCLFDDHWTPNWGAFRLPNTVRTFTKAENPKDGSSLAEPRRQARGLRRRLRRKTQRLEDLRRLLAKEGVLSLSDLETLFRETPAKDPYQLRAEGLDRPLSFPEWVRVLYHITKHRGFQSNRRNPVEDGQERSRQEEEGKLLSGVGENERLLREGGYRTAGEMLARDPKFQDHRRNRAGDYSHTLSRSLLLEEARRLFQSQRTLGNPHASSNLEEAFLHLVAFQNPFASGEDIRNKAGHCSLEPDQIRAPRRSASAETFMLLQKTGNLRLIHRRTGEERPLTDKEREQIHLLAWKQEKVTHKTLRRHLEIPEEWLFTGLPYHRSGDKAEEKLFVHLAGIHEIRKALDKGPDPAVWDTLRSRRDLLDSIADTLTFYKNEDEILPRLESLGLSPENARALAPLSFSGTAHLSLSALGKLLPHLEEGKSYTQARADAGYAAPPPDRHPKLPPLEEADWRNPVVFRALTQTRKVVNALVRRYGPPWCIHLETARELSQPAKVRRRIETEQQANEKKKQQAEREFLDIVGTAPGPGDLLKMRLWREQGGFCPYCEEYLNPTRLAEPGYAEMDHILPYSRSLDNGWHNRVLVHGKDNRDKGNRTPFEAFGGDTARWDRLVAWVQASHLSAPKKRNLLREDFGEEAERELKDRNLTDTRFITKTAATLLRDRLTFHPEAPKDPVMTLNGRLTAFLRKQWGLHKNRKNGDLHHALDAAVLAVASRSFVYRLSSHNAAWGELPRGREAENGFSLPYPAFRSEVLARLCPTREEILLRLDQGGVGYDEAFRNGLRPVFVSRAPSRRLRGKAHMETLRSPKWKDHPEGPRTASRIPLKDLNLEKLERMVGKDRDRKLYEALRERLAAFGGNGKKAFVAPFRKPCRSGEGPLVRSLRIFDSGYSGVELRDGGEVYAVADHESMVRVDVYAKKNRFYLVPVYVADVARGIVKNRAIVAHKSEEEWDLVDGSFDFRFSLFPGDLVEIEKKDGAYLGYYKSCHRGDGRLLLDRHDRMPRESDCGTFYVSTRKDVLSMSKYQVDPLGEIRLVGSEKPPFVL

SEQ ID NO: 64 - protein, 1361 aa, Anaerococcus tetradius
  Anaerococcus tetradius ATCC 35098
MGNYYLGLDIGTNSVGWAVTDENYNIERFKKKNMWGIRLFDEAKTAESRRIHRQARRMRQRKIQRLNLLMELFDVEISKVDESFFIRKKESDLHYEDKSQDSRYALFNDKEFNDKDYHNKYPTIFHLIMDLIENDEKKDIRLLYLACHYLIKNRGHFIFEGQKFDVNSSLNNNINKLKSHLDQFYNICLDFDNDKLIEILVNQNLNISEKSKKIKELLRKTNLEVGIANLIAGGSIKLSNMFDDDELKNLDYNSLSFKNSNFDEGRELFEEVLEDRFELVEILKDIHDASVLETMLSSASISPDGGKYISSSMINSYNKHKRDLKLLKKIIKKYKKSEYDNIFRDENIKNNYLSYTRTGINKNKKVQAEDNTDSDGFYKYIVKILKDIKENDSDEDIKYILSEIDKKNFVPKQRTKENSVIPYQLREIELRKIIDNQSKYHKFLNEVDEKGISVKEKIISLLTFRIPYYIGPLNPSYNEEKNFTTSWVKRLAKGKVTPWNFEDMVDIDASREAFIENKLNKCSFLLDETVLPKDSLLYQEYMVLNELNNLKINGQSINTDLKKSIYEELFKKYKKVTRKRLISYIKEKENMSGDIVITGIDGDFKQGLKSYIAFKDIIGEKIDDDIYRKEVEKIIRDISLYGDDKSFIQKKIKNENKLDLSDDQISKIAKLKFKDWGRFSKKLLVGIKASDKNTGEIDNIIGFMRNYNYNIMQLMANVFTFKDEIEKLNSKYYTDEKINIDYLDDLYLSSPAKRMLWQSFQIVDEIKNIKNSDPKKIFIEMARSKEDKPTRKMSRKSRLEKLYTDSKKQFIKLFGPDEYDKLNNEIKNKSESDFRWDNLYLYYTQFGRCMYSLDPIDLEELSNKNLYDQDHIYPKSKIYDDSIENRVLVKKQLNLDKSNEYPIPDRVLNKDKNKLLAFWKMLNEKELIGDKKYARLIRKSPFTDEELGDFIARQLVETRQATKETANMLKRLCPDSKIVYVKAKNVSDFRRKFDILKCRSINDLHHAHDAYLNIVVGNVFDTKFTSNPLNFIKNNSKNRSYNLEKIYDYDVIRNEKIAWLAERKEENQDGSIATVLKNLSKNDIRVTRRTYIKCEDLFDENIVRKGNGKFPIKENNNKSDTNKYGGYSGIKNAYFVLLEDEKHNRILEAIPSFIYKKEKNGEKGSVINYLQNILGIKSAKILRDKIKIGSLLKIDKFPYNLAGKSGNGILISGGVQLILDKNTSKYIKKIENYKYKLDENKDYQINIFDKLSKEENIKLFDLFVDKFENSIYKNRVNIKLKEIKLARPKFEHLSIEEQIKTLTQMLILFGRENNAVNLEYIGLPKNTGKTKINKKINNKDIKIINQSITGLYETEEDLANI

SEQ ID NO: 65 - protein, 1552 aa, Anaerophaga sp.
  Anaerophaga sp. HS1
MFSQRNNPYCELLQNVKQLYKEKFGKTNQVDNSIIYGFMKRILGLDLGTNSIGWALVENDENDRKGKIIGMGSRIIPMDMSELDNFNKGASISKTAERTRLRMTRRLRERHLLRRARLHRILNIMGFLPEHYRNSIDFIDKKGCFFEGQEPKIAYKPDKNSEQFCFLFTSSFHEMLEDFRKFQPELIQNRKKVPYDWTIYYLRKKALTQKISKEELAWIILNFNTKRGYYHLRGEDEDNQDNKKIKEFRALKVVNVTEREGANSSGKKWYDMELENGWVYSRQSNLPPNLEGKTIELIVSYTLDNNGNIKKDKNGKEKYSLSMPGEEDWNLVKIKTENDLKTSKKSVGEYIYDHLLKNPDQKIRGKLISTIERKFYKEELSRILKTQMNFYEELKNRELYQKCVEELYPNNKSHQQTLLQKDFIHLIVEDIIFYQRPLKSKRAFVNNCPLEYRVYVDKKSGELIKSGVKCIPKSHPLFQEFRLWQYVRNLRIYERERMVNGRLMVNVDVTNELLPDEEHIVRLFDLLNDRKSFKQDDVLRFVGIKSPKDRKRYSWNYPEDKELPGNETRHLILAWLKKVDGVPEDWLDPEKLKALWHLLYSVTDREEIIKGLHSFAKKYELPDTFVEHFKKIPRLEREYGSFSEKAIKKLLPLMRMGKYWKAEEIPADLLEKAQKIIDAEADDRISDEVREKLLHLKDISQLKGLPLWQASYLVYGRHSETGEVVKWRTSEDLEKYILQFKQHSLRNPVVEQVILEALRVVKDIWEHYGEGKEGFFNEIHVEIGRELKNPADKRKKITSQIQENENTNLRIKALLEELFNDPSVKNVRPYSPAQQEILRIYEDGVLNGQKEIPDDILKISKMARPSKSQLVKYKLWLEQKYRSPYTGEIIPLSQLFTSAYEIEHIIPQARYFDDSFSNKVICEAEVNREKGHQLAFEFITKRGGDEIELNFGKKVTILNVEEYQKFVKDHYGRSLRSLSKMRKLLMEDIPDDFIDRQLNDSRYISKVVRNLLSNIVRAEDENSLVSKHLITCTGGVTTRLKHEWGLNDVWNELITPRFVRLNKMGKEKFGEWINKKGKQVFQIQMPLELQKGFNKKRIDHRHHALDALVVACASRSHVNYLNNDSARANASETRYDLRNKLCYKDKTDSNGNYRWKFYKPWESFTEEAKNRLAGTVVSFKSNRRIMTRSSNRYFKWVDTSEGKKKKLVRQIKGDNQAIRKPLHKDTVLGKVSLRKEKKVSLSKAIDLWESIVDKPLKKRIQSLREQGYDKKLLLKYFKDRNNQFNGQDISRVNIYFFDNNLAARRVTLDASFNSEKRIDGITDSGIKKILYAHLQNEKYHGKKDEKGNEISPYELAFSPEGLEEMNANIKKLNGGKPHCPIYKVRLAETIGEKFKLGEKGNKNKKYVEAAKGTNLFFAVYVDEKGVRSFETIPFSVALERRKQKLAVVPEENENKEKLLFYLSPNDLVYVPDEDEKLIDYRQLSINPTRIYKMVSSSGTQCFFIPHFVASPIVQTMELGPNNKSERAWDGQMIKNVCYKLSVDRLGNVKIEK

SEQ ID NO: 66 - protein, 1515 aa, Anaerophaga thermohalophila
  Anaerophaga thermohalophila DSM 12881
MKRILGLDLGTNSIGWALVESDEEQKSGKIQGIGSRIIPMDQNELDNFNKGNTVSQTAERTRLRMVRRLRERHLLRRERLHRVLKEIGFLPEHYLEQIDFTEKPGGFLPGKEPKIAYKPDNFKDKYDFLFQDSYHEMLSDFQDKNPEFIQKRKKVPQDWTIYYLRKKALTAKITKEELAWIILNFNQKRGYYQLRGEDEDVAKNTKKEEFHALKVVKVKEREDSEGASGKWYDIELENGWVYPRQSNIRPDWEGKILELIVTYNLDKDGNIKTDKEGNEKRSFRMPNKDDWTLRKKRTENEIEKSGKTVGEYIYDNLLDAPDLKIRGKLVSTIERKYYRSELEQILTAQKKYHPELSNSELFNKCISNLYPNNDIHRKALLSKDFVHLIINDIIFYQRPLKSKRSTVSNCPLEYRVYVDKVTGEKKKVPLKCIPKSHPLYQEFRLWQYVKNLRLFEKERFENGRLLTNVDVTEQFLPDEDKYVELFEFLNGRKTFKQDDILKFAGIKSAKDRVKYYWNYPQEKEYPGNETRYLIESRLKKIENVPDEWLNYEKIEELWHLLYSVTDKVEIEKGLQSFAAKYQLPDLFVEVFKGFPRMEREYGAFSKKAIKKLLPLMRMGKYWKLENINPDLIEKVQKIIDGEADDNINDGIRERFSEINEMSDLRGMPLWKASYLVYGRHSEAAEVIRWRTSADLDQYIKDFKQHALRNPIVEQVVLEALRVVKDVWNYFGEGREKFFDEIHVEIGRDLKNPADKRQKIANQIQENENTNLRIKALLVELFNDPEVQNVRPYSPVQQQLLKIYEDGVLNAERDIPDDIQKISRMANPTRNQLIRYKLWLEQKYRSPYTGEIIPLNKLFTSEYEVEHIIPRARYFDDSFSNKIISEAEVNRKKDRMLAFEFIKKLGGSTIDLNYGKKVSVLTVEEYQQFVKDHYGINPHSRLKMQKLLMDEIPESFIERQLNDSRYISKMVRNLLSNIVREENENSPVAKQLITCSGSITNTLKQEWGLNDVWNTIITPRFERLNKMGEQKYGEWVNKEGKPVFQIQMPLELQKGFNKKRIDHRHHALDALIVASATRSHVNYLSNEAAKTNAKDTRFDLRNRLCYKEKRGQNRNFTWRFYKPWNTFTEDAKNALNDIVVSFKSNHRVINKSTNRYFKWENLPGGMKKKRLVRQEKGDNWAIRQSLHKDTVLGKVSLRKVKPVSLSVALDSWNNIVDKALKKKIRSLKDQGYDKKLMLKYFKDRRNEYNGENISRVNVYYFDEEMAARRVDLDTSFNSEKRIEGITDSGIKKIIYAHLKNEKYHGQKDDKGKDISPYELAFSPEGIAEMNANIKQLNGGKPHCPIYKVRLAEPVGEKFQLGETGNKTEKLVEVAKGTNLFFGVYANDEGVRSFATVPFYLAVEREKQGLPAVPQENENGDQLLFWLSPNDLVYVPSEEDAHFANPKQIELDNSRIYKMVSSTGTQCFFIPHFVATPIVQTIELGPNNKSERAWDGQMIKKVCYKLSVDRLGNVEIE

SEQ ID NO: 67 - protein, 1168 aa, Azospirillum lipoferum
MARPAFRAPRREHVNGWTPDPHRISKPFFILVSWHLLSRVVIDSSSGCFPGTSRDHTDKFAEWECAVQPYRLSFDLGTNSIGWGLLNLDRQGKPREIRALGSRIFSDGRDPQDKASLAVARRLARQMRRRRDRYLTRRTRLMGALVRFGLMPADPAARKRLEVAVDPYLARERATRERLEPFEIGRALFHLNQRRGYKPVRTATKPDEEAGKVKEAVERLEAAIAAAGAPTLGAWFAWRKTRGETLRARLAGKGKEAAYPFYPARRMLEAEFDTLWAEQARHHPDLLTAEAREILRHRIFHQRPLKPPPVGRCTLYPDDGRAPRALPSAQRLRLFQELASLRVIHLDLSERPLTPAERDRIVAFVQGRPPKAGRKPGKVQKSVPFEKLRGLLELPPGTGFSLESDKRPELLGDETGARIAPAFGPGWTALPLEEQDALVELLLTEAEPERAIAALTARWALDEATAAKLAGATLPDFHGRYGRRAVAELLPVLERETRGDPDGRVRPIRLDEAVKLLRGGKDHSDFSREGALLDALPYYGAVLERHVAFGTGNPADPEEKRVGRVANPTVHIALNQLRHLVNAILARHGRPEEIVIELARDLKRSAEDRRREDKRQADNQKRNEERKRLILSLGERPTPRNLLKLRLWEEQGPVENRRCPYSGETISMRMLLSEQVDIDHILPFSVSLDDSAANKVVCLREANRIKRNRSPWEAFGHDSERWAGILARAEALPKNKRWRFAPDALEKLEGEGGLRARHLNDTRHLSRLAVEYLRCVCPKVRVSPGRLTALLRRRWGIDAILAEADGPPPEVPAETLDPSPAEKNRADHRHHALDAVVIGCIDRSMVQRVQLAAASAEREAAAREDNIRRVLEGFKEEPWDGFRAELERRARTIVVSHRPEHGIGGALHKETAYGPVDPPEEGFNLVVRKPIDGLSKDEINSVRDPRLRRALIDRLAIRRRDANDPATALAKAAEDLAAQPASRGIRRVRVLKKESNPIRVEHGGNPSGPRSGGPFHKLLLAGEVHHVDVALRADGRRWVGHWVTLFEAHGGRGADGAAAPPRLGDGERFLMRLHKGDCLKLEHKGRVRVMQVVKLEPSSNSVVVVEPHQVKTDRSKHVKISCDQLRARGARRVTVDPLGRVRVHAPGARVGIGGDAGRTAMEPAEDIS

SEQ ID NO: 68 - protein, 1068 aa, Bacillus cereus
  Bacillus cereus BAG4X12-1
MRYVLGLDIGIASCGWAVINQEKERIEDLGVRIFDKAENPKDGKSLAAPRRDARSTRRTLRRKKHRMQRIKILLVKQGLLFKTELNHLYESATEFDVWNLRLDALERKLHPKEFARVLIHLAKRRGFKSNRKETTLSENGQILESISENQQIMEQQNYRTVGEMILKDKKFENHKRNKDGTYIGTVTRQQLQDEIQMIFHTQRLYKNDYATEEFESSYLEIWASQRPYASKDQIEKMIGYCTLEPKEKRTPKASWSFQYFVALQTINNLRLISKDKIEELSFEEKKQIMNLALEKPIVKYIDIRKLLSIPNDFQFNSLSYSADTVDTTLENKRCIELKEYHSINKVYKQVYGKNTPNLLPIDYDTIAYGLTIFKDDKDILEYLQNKYVNAKGKPIKNLAKKTYDDTFIQALLNLNFTKMGHLSFKALKNIIPFLEEGLSYDKACEKAGYNFKGTSYTERTKYLPVIPQNTNPVVHRALSQTRKVINAIIKKYGSPNAIHIETARELSKTFQERKEIDSRYQDNSKKNEHAIHKLKELGNINPSGINIVKFKLWSEQDGRCMYSGKYIEPHRLFEEGYTEVDHILPYSRSLDDSYNNKILTLGTENQRKGNKTPYEYMGNTSIWDEFETRVQSNKKINFKKQQKLLLQNFSYAREQEFIERNLNDTRYATIYLTSLIQQHLIFSESSSKKKVRTVSGIITSHLRSRWGFNKDRKEGHIHHALDAVIVAVTSNHMIQRVTKYYKLKELNKNLQAKQLPFPEPWEGFRLELEARISPNTQQYLKGIHFKNYADVNLSDIKPIFVSRMPKRSITGELHQETIRKFLGYNEKGKVLTAIKTKLEDIPFDANGDFPMYGKETDLYTYNAIKERYLSHEKDKRKSFQEPLYKPTKSGEIGPLIKSIKIMDTRTIVNPVNQGKGVVYNSKIARTDVFKKEDKYYLIPIYTIDLLKNILPHKAITAGKGYEDWTTIDSSFTFLFSLFPNDLIQIVPSKNKTIKARTTVSKKEILLPSLTGYFKGVHSGTAGITVETHDGSVIANVGSKQLLLFEKYQVDVLGHYTKIKEEKRMGMAI

SEQ ID NO: 69 - protein, 1078 aa, Bacillus cereus
  Bacillus cereus BAG4X2-1
MRYVLGLDIGIASCGWAVINQEKERIEDLGVRIFDKAENPKDGKSLAAPRRDARSTRRTLRRKKHRMQRIKVLLVKHGLLSKTELDHLYESATEVDVWNLRLDALERKLYPKEFARILIHLAKRRGFKSNRKETTLSENGQILESISENQQIMEKQNYRTVGEMILKDKKFENHKRNKNGTYVGTVTRQQLQDEIQMIFHAQRLYKNDYATEEFESSYLEIWASQRPYASKDQIEKMIGYCTLEPKEKRAPKASWSFQYFVALQTINNLRLISKDRIEELSFEEKKQIMNLALEKSIVKYIDIRKLLSVPNEFQFNSLSYSADTVDTAVESRKCIELKEYHSINKVYKQIYGENALNLLPKYYDTIAYGLTIFKDDKDILEYLQNKYVNAKGKPISNFANKTYDDTFIQALLNLNFTKMGHLSFKALKNIIPFLEEGLSYDKACEKAGYNFKGTSYTEQTKYLPVIPQNTNPVVHRALSQTRKVINAIIKKYGSPNAIHIETARELSKTFQERKEIDSMYQDNSKKNEHAIHKLKELGNINPSGINIVKFKLWNEQDGRCMYSGKYIEPHRLFEEGYTEVDHILPYSRSLDDSYNNKTLTLGTENQRKGNKIPYEYMGNTSIWNDFETRVQSNKKINKKKQQKLLLQHFSYAREQEFIERNLNDTRYATIYLSSLIQQHLIFSESSRKKKVHTVSGIITSHLRSRWGFNKDRKEGHIHHALDAVIVAVTSDHMIQRVTKYYKLKELNRNLQAKRMPFPEPWEGFRLELEARISPNTQQYLKGLRFKNYADVNLSEIKSIFVSRMPKHSITGELHQETIRKFIGYNEKGKVLTAIKTKLEDIPFDANGDFPMYGKESDLYTYNAIKERYLSHKKDKRKSFQEPLYKPTKSGGIGPLIKSIKIMDTRTIVNPVNQGKGVVYNSKIARTDVFKKEEKYYLIPIYTIDLMKNILPQKAITAGKGYEDWTTIDPSFTFLFSLFPNDLIQIVPSKNKTIKARTTVSKKEVLLPSLTGYFKGVHSGTAGITVETHDGSVIANVGSKQLLLIEKYQVDVLGNYTKIKEEKRIGLTTYNDNKKIAAC

SEQ ID NO: 70 - protein, 1069 aa, Bacillus cereus
  Bacillus cereus Rock1-15
MNYDIGLRIGITSCGWSIINKDLERIEDLGVRVFEKAENPDGTASAAPRREARKSRRKHRRKKHRIERIKRLIVQHDLLSKKELDSLYLSPFNIDVWNLQVEALERKLDNREFARVLIHLVQRRGFQTIRKSVEIQEEGKLLENVSENERIMKVNGYKTVGEMFSKHEKFTHHKRNKDGSYTSVVTRSLLLKEIKTIFNSQRILGNVFSTQKLESDYLYIWGSQRPTLTYEQLMSMVGNCIYEKKEKRAPKTSWAFQYFSLLQKINKLKVSDDNTLRKLSKEERDIVIELAFKKKNVSFVDIRKALKLNDNTKFNHLTYSHVVETKKVEKATFIELKGYHLIKKQLKDRNVELTQELQPKDYDAIAAASTFFKNDIEFRDYLRNQYLDSNGKRKSNIANKVFEDKVIAAVFELNFSKVCHLSFKSLYKLIPHLEKGLDYKEAILCAGYNFRDENKRDKKLFLPVIQQETNPVVHRALTQARKVINAIIREYGSPNTIRFVVANDLAKTYKQRKELESTLKKNRAENEKIKTKLLSMGIINPTGMDIVKYKLWYEQSGICLYTGRQMELSSLFKPGYSIVNHIIPYNRSFDDTYHNRVLTLTETKYEKGNKIPFEYFGAEETCWNEYEKRVSTSKKIHDKKREKLLIRNFDIEYENEMISNNVFDTHYIGSYFEKYIDEHLQFKKSTKKQKVFSIHGNMVAHLHSRWGFNKNSREIYLNHAVDAAIVAVLTDQLIRNIADYYRRDNILEQKGSLKFPEPWKSFSIELEARISPQVRDLIKKLNLDSYLDVDILHIKPVFISKKPRRKVNGEAHKSTIRSLIGINEIGKTVTCIKTRLEDIPFDENGDFPMYGKDTDKYTYTAIKERYLEFNKDKEKAFSTPLYKLKRNGEPGNQIKSVKIIDTRNIVNKVNQGKGIAYNSNIIRVDVFSRDQKYYVVPIYLRDFIKGSLPNKIITAAKGFMQWPETDNSYTFLFSIFPNDLIKVVPKEGKFIKAKNENKENINLTEILGYFKGLDSSTGAFTLESHDGSLLARGIGTKNLLLIEKYQVDVLGRYNKVGNEERQDIKIQQN

SEQ ID NO: 71 - protein, 1088 aa, Bacillus smithii
  Bacillus smithii 7_3_47FAA
MNYKMGLDIGIASVGWAVINLDLKRIEDLGVRIFDKAEHPQNGESLALPRRIARSARRRLRRRKHRLERIRRLLVSENVLTKEEMNLLFKQKKQIDVWQLRVDALERKLNNDELARVLLHLAKRRGFKSNRKSERNSKESSEFLKNIEENQSILAQYRSVGEMIVKDSKFAYHKRNKLDSYSNMIARDDLEREIKLIFEKQREFNNPVCTERLEEKYLNIWSSQRPFASKEDIEKKVGFCTFEPKEKRAPKATYTFQSFIVWEHINKLRLVSPDETRALTEIERNLLYKQAFSKNKMTYYDIRKLLNLSDDIHFKGLLYDPKSSLKQIENIRFLELDSYHKIRKCIENVYGKDGIRMFNETDIDTFGYALTIFKDDEDIVAYLQNEYITKNGKRVSNLANKVYDKSLIDELLNLSFSKFAHLSMKAIRNILPYMEQGEIYSKACELAGYNFTGPKKKEKALLLPVIPNIANPVVMRALTQSRKVVNAIIKKYGSPVSIHIELARDLSHSFDERKKIQKDQTENRKKNETAIKQLIEYELTKNPTGLDIVKFKLWSEQQGRCMYSLKPIELERLLEPGYVEVDHILPYSRSLDDSYANKVLVLTKENREKGNHTPVEYLGLGSERWKKFEKFVLANKQFSKKKKQNLLRLRYEETEEKEFKERNLNDTRYISKFFANFIKEHLKFADGDGGQKVYTINGKITAHLRSRWDFNKNREESDLHHAVDAVIVACATQGMIKKITEFYKAREQNKESAKKKEPIFPQPWPHFADELKARLSKFPQESIEAFALGNYDRKKLESLRPVFVSRMPKRSVTGAAHQETLRRCVGIDEQSGKIQTAVKTKLSDIKLDKDGHFPMYQKESDPRTYEAIRQRLLEHNNDPKKAFQEPLYKPKKNGEPGPVIRTVKIIDTKNKVVHLDGSKTVAYNSNIVRTDVFEKDGKYYCVPVYTMDIMKGTLPNKAIEANKPYSEWKEMTEEYTFQFSLFPNDLVRIVLPREKTIKTSTNEEIIIKDIFAYYKTIDSATGGLELISHDRNFSLRGVGSKTLKRFEKYQVDVLGNIHKVKGEKRVGLAAPTNQKKGKTVDSLQSVSD

SEQ ID NO: 72 - protein, 1069 aa, Bacillus thuringiensis
MNYDIGLRIGITSCGWSIINKDLERIEDLGVRVFEKAENPDGTASAAPRREARKSRRKHRRKKHRIERIKRLIVQHDLLSKKELDSLYLSPFNIDVWNLRVEALERKLDNREFARVLIHLVQRRGFQTIRKSVEIQEEGKLLENVSENERIMKVNGYKTVGEMFSKHEKFTHHKRNKDGSYTSVVTRSLLLKEIKTIFNSQRILGNVFSTQKLESDYLYIWGSQRPTLTYEQLMSMVGNCIYEKKEKRAPKTSWAFQYFSLLQKINKLKVSDDNTLRKLSKEERDIVIELAFKKKNVSFVDIRKALKLNDNTKFNHLTYSHVVETKKVEKATFIELKGYHLIKKQLKDRNVELTQELQPKDYDAIAAASTFFKNDIEFRDYLRNQYLDSNGKRKSNIANKVFEDKVIAAVFELNFSKVCHLSFKSLYKLIPHLEKGLDYKEAILCAGYNFRDENKRDKKLFLPVIQQETNPVVHRALTQARKVINAIIREYGSPNTIRFVVANDLAKTYKQRKELESTLKKNRAENEKIKTKLLSMGIINPTGMDIVKYKLWYEQSGICLYTGRQMELSSLFKPGYSIVNHIIPYNRSFDDTYHNRVLTLTETKYEKGNKIPFEYFGAEETCWNEYEKRVSTSKKIHDKKREKLLIRNFDIEYENEMISNNVFDTHYIGSYFEKYIDEHLQFKKSTKKQKVFSIHGNMVAHLHSRWGFNKNSREIYLNHAVDAAIVAVLTDQLIRNIADYYRRDNILEQKGSLKFPEPWKSFSIELEARISPQVRDLIKKLNLDSYLDVDILHIKPVFISKKPRRKVNGEAHKSTIRSLIGINEIGKTVTCIKTRLEDIPFDENGDFPMYGKDTDKYTYTAIKERYLEFNKDKEKAFSTPLYKLKRNGEPGNQIKSVKIIDTRNIVNKVNQGKGIAYNSNIIRVDVFSRDQKYYVVPIYLRDFIKGSLPNKIITAAKGFMQWPETDNSYTFLFSIFPNDLIKVVPKEGKFIKAKNENKENINLTEILGYFKGLDSSTGAFTLESHDGSLLARGIGTKNLLLIEKYQVDVLGRYNKVGNEERQDIKIQQN

SEQ ID NO: 73 - protein, 1509 aa, Bacteroides coprophilus
  Bacteroides coprophilus DSM 18228
MKKTLGLDLGTNSIGWAVINSNIDSEGKEKLVGISSCGSRIIPMDATTLGDFGKGNTKSPVAERTRLRGIRRLLERSLLRRERLHRVLSVMGFLPEHYASQLDRYGKFLPETEPKLAWYKDDSGRYQFLFQKSFHEMLEDFRQHQPELVAGEKKIPYDWTIYYLRKKALSQEITKEELAWILLNFNQKRGYYQLRGEEEQEENNKSVEYHALKVVSVEDSGERKGKDIWYNVTLENGWVYRRASNIPLDWTGKVKEFVVTTELDDAGNPKKDKEGNVKRSFRAPKEDDWGLLKTRTQAQIDESGKTVGTYIYESLLCMPNQKIRGKLVRTIERKYYKDELRQILVKQSEFHAALQDHNLLLSCIEELYPNNEAHRRLLSASSFIYFLIEDILFYQRPLKSQKGLIDNCPYESHIYKDKKDGSLHHVPLKCVSKSHPLFQEFRLWQFLSNLRIYQRERMMDGSLKLDVDVTREFLPSEEDYVKLFDWLNERKEISQKFLLAYKPFGLKKNEQANYRWNYVEDKSYPCNETRAEIKSRLSKAGVPEEFLTEEKEEALWHILYSISDKKELTKALGTFAAKNCLNESFVEVFAKIPPFESNYAAYSLKAIRKLLALMRMGKYWNEQAIDRQTRDRIEKILTGEYDETIRSRVREKAMLLTDISSFRGLPLWLACYIVYDRHSESKELVKWETPADIDHFLSKFKQNSLRNPIVEQVITESLRTVRDIWKQEGKIDEIHVELGREMKNPAKERARITAQVQENENTNLRIKALLAEFMNPEFEIENVHPYSPGQQEILRIYEDGVLSGIAEKDLPDDITAILKKFRENDVKKRPTTSEVLRYKLWLEQRYRSPYTGRVIPLGKLFTPAYEIEHVIPQSRYFDDSISNKVICESAVNKLKDNCLGYEFIKKHSGEMVELGNGETVPVFSVEEYERFVKESYFGNSKKMKKLLLEDIPDSFIERQLNDSRYISRVVTSLLSNLVCEEGEQDGLSKNVIVCTGGITDRLKKDWGVQEVWNRIILPRFLRLNEITGRTDFTSTSVNGHLLPALPLYLQKGFNKKRIDHRHHAMDAIVIACANRNIVNYLNNSSARKNSEISRYDLQRLLCEKVKTDANGNYKWILRKPWETFTQDVYAALTNIVVSFKQNLRVINRTTNYYQHYNEAGEKRMIPQTKGDRWAIRKPMHKDTVYGEVNLRKEKTLPLRDVVKNPSIVVDKSLKNKLYELLKSQYDLKAIAKYFETHQDVWADVNLKKIKVYYFTKETNERFFATRKSLDPSFDQKKIEEEVTDTGVQKILLHHLQQNNNDPDMAFSPDGIDRMNQNMTILNDGKWHQPIYKVRTYEKADKFAVGESGNKAKKFVEAAKGTNLFFAVYESVQEDEAIGKQVCKRTFATIPLNEVIKRKKQGLPAAPEDLNGNLPKFVLSPNDLVYLPTEEERNSSRIIQPLDRERIYKMVSSSGSQCFFIKVFVANSIWDKNEYSSLNKMERAITNEMIKEICVPIKIDRLGNVSLIQI

SEQ ID NO: 74 - protein, 1504 aa, Bacteroides coprosuis
  Bacteroides coprosuis DSM 18011
MKKVLGLDIGTNSVGWAVVNQNDKGEFLSIEKIGSRIIPMSQDVMDKFGAGQTESSTAQRTQYRGVRRLRERSLLRRERLHRVLHILHFLPQHYDAAIGWNKKENKTYGKFLPGVEVNIPWVATDQGHQFIFMDSYAEMLKDLKQHQPHLFEKSSTPVPLDWTIYYLRKKALTQAISKEELAWILLNFNQKRGYYQLRGEEVEDNTKREEFYALKVVKVELDKDNTSAKTWYKVHLENGFIYPCPSDTPIDSWVGMVKDFIVTTTLEKDGSEKRTADGEIKRSFRAPKEDDWTLLKKKTESELEKSGKQVGAFIYDTLLSNPDQKIIGGLIKTIERKYYKKELEQILETQQKFIAELSDKKLFQACAEELYPLNDSHRENLLERDFKHLFVQDIIFYHRPLKTKKSLISNCTYEYRTFYKNGEKQISPIKCIAKSNPLFQEFRVWQFVQNLRILQRQRSEGDSIKYNVDVTAEFLKDENDIANLFTWLNERKVIKQDQLLKSYFKLKVNKETKELDYRWNYVDDKNKEYPCNATRTHILSFLEKCKEEKRIEDDRFVYSLWHLLYSVVEPIELRGALAKFAEREHLHPSFVDVFAQFPPLEKEYGSYSEKAIKRLLPLMRMGDYWHEDKIDVKTKQRIQRIIDGEADDDITHRSREKVENLRSITDFKGLPLWKAGYVVYNRHSESGELTKWKTPHELSNYIQNEFKQYSLRNPIVEQIVLETLRVVHDLWVKHGDFSEIHLELGRDIKNSSDKRKRMAERQQENENSRQRVLEMLIDLKKEAAFADLNPYSPSQQEKLRIVEDGVLRSNIEIPKDIEKITKSAKPTSRELTKYRLWLDQKYRSPYTGQPISLAQLFTSKYEIEHVIPQAKYFDDSFTNKVICESEVNKEKGSMLAHEFILKNGGSTVNVGGRQVQVLKNDAYVELINRLYGKNNPVKAKKLLAEDIDEVVGDFSERQLNDTRYISRVVQKLLSNIVREEDEQESTSKHVIGCSGQVTTALKKDWGLNDIWNKIIQPRFERLNEMTATEDYGVWQSPNHFQIRVPEEIQKGFTKKRIDHRHHAMDALVIACATRSHINYISNRSGQDRNAKFETTRTDLRSKLCYKENSSGNNYNYIFNKPWDTFTQDAHRALENIVVSHKQNLRVLTKTNNYTQFINKDGKKDLQKQVKGDHFAVRKPMHQETIYGRVSIRSIKEVALKKALENWKQIVDRTLKDKIRELIGAYGKYDAQTILKYFKDRDYKFNNLKINRVEVYEYDHNCAAVRKSIGDDLTIKQIERITDESIRKILMNHLSNYDDNLKEAFSPEGLMEMNKNIKELNGGKNHQPIYKVRLFEDLGSKFPLGVSHNNPDKYAIAAKGTNLFFGIYEDQEGKRMFDSIPLNIVIDRLKEKKSPVPETYNESKLKFHLSPNDLVYVPTDEEQKQPELVDVDHLSDEQKGRVYKAVSFTGNRAFFVNHRVSKVIHDYVEFGTKNKIENDDDKRSLKHICWKLKVNRLGEITDVKR

SEQ ID NO: 75 - protein, 1504 aa, Bacteroides dorei
  Bacteroides dorei DSM 17855
MKNIVGLDLGTNSIGWAVVNGSVNDDGSEQLVKIQASGSRIIPMDAAMIGDFNKGNSISQTAERTRLRGVRRLSERYLLRRERLHRILDILGFLPFHFAQDLDRHGKIVKGKEPKLAWRKNEAGQFEFIFQDSFKEMLEDFKLNYPNLITDDKKVPYDWTIYYLRKKGLTSKISKEELAWILLNFNQKRGYYQLRGEEEEENKDKLVEFYALKVVAVEDSGEKKGKDIWYNVHLENGWVYRRTSNMSLDWVGKTKEFIVTTDLEKDGTPKKDKEGNVKRSFRAPKEDDWSLVKKKTEADIDQTHKTVGAYIYDTLLGNPSQKIRGRLVRTIERKYYKEELKLILEKQKEFHLELQDRALYAACIEELYPINEAHRNNVGNRDFTYLFLEDILFYQRPLKSKKSLIDNCPYEENQGLDKETGEIKSFPVKCIAKSHPLFQEFRLWQFIINLRIYRKDLAQDVDVTNELLKTEEDYVALFDWLNGKKEIDQKAFLKYPVFGLKKEIENYRWNYVQDKPYPCNETRSLMLARLEKCDISIEFLTKENEEALWHILYSVEDKNEIVKALQKFADKHDLNASFVDVFQKFPPFKKEYGSYSAKAIKKLLPLMRMGKYWSENSIDKGTRERIDKIITGEYDEKIENRVREKAIHLADVSDFKGLPLWLVCYIVYGRHSEAKEIIQWKSPADIDSYLRSFKQHSLRNPIVEQIIIETLRVVRDIWKQVGNIDEIHVELGREMKNPADKRKKMTQQMSENENTNLRIKYLLTEFLNPEYEVENVRPYSPSQQDILRIYEEGVLNSVSDLPEEISDILKKFTETDLKKRPSRSEVLRYKLWLEQKYRSPYTGEVIPLGKLFTPAYEIEHVIPQSYYFDDSFSNKVICEAEVNKLKSNLLGHEFIVKHHGEIVELPFGKKVRIFTVDEYEQFVKDNYSRTRSKMKKLLMDDIPEEFVTRQLNDSRYISKVVKSLLSNIVREKGEEEAISKNVIPCTGGVTDRLKKDWGINEVWNKIILPRFQRLNELTGTNKFTTKNVGIQEIPTMPLELQKGFNKKRIDHRHHAMDAIIIACANRNIINYLNNKSATAKAELSRYDLQKMLCDKAKTDNNGNYKWVIRKPWASFTQDTYLALENIIVSFKQNLRVINKATNRFLHYNEEGKKIFVKQGKGDNWAIRKSMHKDTVFGEVNLRRIKTVALNEAMKNPQSIVVKDFKRKLLELWNLGFDAKRIKKYFEDNRETWSDINLSKIEVYYFSKDTKDRFFATRKPLDTSFDRKKIENNITDTGIQKILLRHLELKDNNPDIAFSPDGIDEMNRNIIQLNNGKYHQPIIKIRWYEQADKFAVGQTGNKSSKFVEAAKGTNLFFAVYESNILDKKTNTIIKKRNYATIPLNVAIERQKQGLPVAPEDENGNDPIFVLSPNDLVYLPTDDELANGIIAQPLDRGRIYKMVSSSGEQCFFIKHIVANVLVDKFEFSPLNKMERALTGEMIKMICIPIKVDRLGNVLESSSSYKK

SEQ ID NO: 76 - protein, 1509 aa, Bacteroides eggerthii
  Bacteroides eggerthii 1_2_48FAA
MKTILGLDLGTNSVGWAVINSVIKEQAERIWIEMAGSRIIPMDAAVLGDFDKGNSISQTSERTRLRGARRLRERQLLRRERLHKVLNILGFLPNHYLEYIDFEKHPGKFLADAEPKLAWVKDEQGKYTFLFQAAFDEMLADFAIHQPSLVSGDKKIPYDWTIYYLRKKALTEMISKEELAWILLNFNQKRGYYQLRGEEEEDNAGKSVEFYALKVLTVEATDEKKGRDVWYNVHLENGWIYRRSSSVPLDWEGQVKEFIVTTDLNPDGTPKLDKYGEVKRSFRAPKEDDWMLIKKRTEADIANTHKTVGAYIYDTLLQKPQQKIIGKLVKTVERKLYRDELSLILQKQCAFHAELQDRALYARCVEALYPSNEVRRKNIANRDFVYLLMDDILFYQRPLKTKKSLIANCPYEENEYVDRETGEIKKTPLKCIAKSHPLFQEFRLWNFLSNIRIYQKEKEINGTLHLDVDVTAEFLKTEDDYVALFDWLNSRKEIEQKTFLKYPKFGLKKEISNYRWNYVEDKQYPCNETRHAILSSLEKANVCIDFLSNEKEVALWHILYSVSDKQEIEKALRTFAAKNGLDESFVEAFKKFPPFKSEYGAYSAKAIKKMLPLMRCGKYWDVSSIDDTTKERIKKIVTGEYDERISVKVRDKVMNLSDISCFRRLPLWLACYIVYNRHSEDKEAVKWESPADIDAYLASFKQHSLRNPIVEQVITETLRVVRDIWKQVGRIDEIHIELGREMKNPADKRKRMTAQILENENANLRIKALLAEFMNPEYEIENVRPYSPSQQEILRIYEDTVLHAEDQLPEEIDAILKKFNSSKVPTKSEFLRYKLWLEQKYRSPYTGELIPLGKLFTAAYEIEHVIPQSRYFDDSFSNKVICESAVNKLKDNQLGYEFIKNHHGQKVEVGFGKSVEIFSVDSYERFVKEQYAKSAVKMKKLLMDDIPEQFIERQLNDSRYISKVIKGLLSNIVREKNDSGEYEPEAVSKNIVVCTGSVTDRLKRDWGMNDVWNSIVYPRFERLNSLTDTQSFGHWENKSGKKVFQTELPLEYQKGFSKKRIDHRHHAMDAIVIACATRNHVNYLSNESASRNAKISRYDLQRLLCDKNRTDDNGNYKWVIKKPWDTFTQDAREVLSKIVVSLKQNLRIINKTTNVYRHLDATGNRVYEKQKTGDSWAIRKPMHKDTVFGAVNLRKVKVVRLSVALDTPAMIVDKRVKNKVFELLSYKYDKKRIEKYFKENAFLWKELDLAKVAVYYFTEATTEPLVAVRKPLDSTFNEKKIKESVTDTGIQKILLNHLCTKEGKPDLAFSAEGIEEMNRNLLQLNNGKSHQPIYKVRVYEPRGNKFSVGVLGNKGTKWVEAAKGTNLFFAIYITEDGKRTYETIPLNVVIEREKQGLVPVPDRNKKGDKLLFWLSPNDLVYLPTEEEREFGRINEPIDRGRIYKMVSCTGNEGHFIPANVANPIVPVIELGSNNKAQRAWTNEMIKDICIPIKVDRLGHIIEVKYRIDE

SEQ ID NO: 77 - protein, 1526 aa, Bacteroides faecis
  Bacteroides faecis MAJ27
MKKILGLDLGTNSIGWAVLNAADDNSLKYIEAAGSRIIPMDAAILGDFDRGNSISQTAERTRIRGMRHLRERYLLRRARLHRILNLLGFLPFHYAQDIDRYGNFSADMEPKIAWCKNLEGELEFIFIESFNEMLEDFRKNQPELVADNKKVPYDWVIYYLRKKALEKKISKEELAWILLNFNQKRGYYQLRGEDDDESMKTAKTRQYFDKQIIKNIIDTNQTYKGQRILIVELQNGDKGKIFKKEIPDWIGQEKNIIVTVDIDKDGNDKYEESGSLSCRFKIPTDAEWESEWKLIKMKTQKDLDESNKTVGTYIYDSILQNPTQKVRGKLVRTIERKYYKAELKQILEKQTEFHSELQDKDLYIECLNELYSNNDTHRNAITDRDFVYLFMNDILFYQRPLKSKKSLIDNCPYERNIYIDKETGEIKYSPIKCIAKSHPLFQEFRLWKFISSIRIYQRESVVEVVDKQLDLFSSQSTSVQKLVTDVDVTDKFLTCENDYVALFEWLNKKKIIDQKEFLKYRPFGLKGDIDNYRWNYVEDKSYPCNETHAMILTYFAKAGISEDILTKEMEEALWHILYSVEDRQEITKALRTFASKYHLSDSFVKVFSNIPPFKKEYGSYSAKAIKKLLSLMRMGKYWSEDAIDVNTRERIDKIVTGEYDEKIRDRVREKTIRLNDIRHFRALPDWLACYVVYDRHSETREITEWKSPEEIDEYIRNFKQHSLRNPIVEQVITETLRTVRDIWKQVGCIDEIHVELGREMKNPADKRKRITSQIIENENANLRVKALLTEFVNSEFEIENVRPYSLSQQDILRIYEDGVLNSVAEVPGDIAGILKKFNENDAKKRPTTSEILRYKLWLEQKYRSPYTGEMIPLSKLFTSAYEIEHVIPQSRYFDDSFSNKVICEAEVNKLKDNALGYEFIKKHHGEKVELGFGKIVEIFSVSVYEQFVKDNYSRNRGKMKKLLMDEIPEQFIERQLNDSRYISKVVKTLLSNVVREKAEQEAVSKNVIVCTGGVTDRLKKDWGINDVWNKIVLPRFLRLNELTNSTNFTAKNAAGNEIPAMPLELQKGFNKKRIDHRHHAMDAIVIACANRNIVNYLNNESASRKAKISRHDLQAILCDKVRTDDKGNYQWRVKKPWDTFTQDVYVALENIIVSFKQNLRVINKTSNYYWHYENGKKVLVKQVKGDSWAIRKPMHKDTVFGEVNLRKVKSVSLNEALKNPQFIVEKDLKRQLLSLLQQNFDIKKIKKYFEEHKDIWSDISLSKMNIYYFTKETKDRYFATRKPLDASFDKKKIESCITDTGIQQILLRHLELKENDPERAFSPDGIDEMNRNIIQLNKGKGHHPIAKVRVYEKADKFEVGQRGNKSSKFVEAAKGTNLFFAVYETEYPDEKTNSIVRKRNYATIPLNIAIERQKRGLSTAPEDEKGNVPSFVLSPNDLVYLPTSEDIVNGHITQPIDKSRIYKMVSSSGSQCFFIKHNIANIIVDKYEFSPLNKMERAISNEMIKEICIPVKVDRLGNIVKLGKSE

SEQ ID NO: 78 - protein, 1509 aa, Bacteroides fluxus
  Bacteroides fluxus YIT 12057
MKTILGLDLGTNSVGWAVINSVIKEQAERIWIEMAGSRIIPMDAAVLGDFDKGNSISQTSERTRLRGVRRLRERQLLRRERLHKVLNILGFLPNHYLEYIDFEKHPGKFLSDAEPKLPWVKDEQGKYTFLFQAAFDEMLADFAIHQPSLVSGDKKIPYDWTIYYLRKKALTEMISKEELAWILLNFNQKRGYYQLRGEEEEDNAGKSVEFYALKVLTVEATDEKKGRDVWYNVHLENGWIYRRSSSVPLDWEGQIKEFIVTTDLNPDSTPKLDKYGEVKRSFRAPKEDDWMLIKKRTEADIANTHKTVGAYIYDTLLQKPQQKIIGKLVKTVERKLYRDELSLILQKQCAFHAELQDRTLYARCVEALYPNNEVQRRNIANRDFVYLLMDDVLFYQRPLKTKKSLIANCPYEENEYVDRETGEIKKAPLKCIAKSHPLFQEFRLWNFLSNIRIYQKEKEINGTLHLDVDVTAEFLKTEDDYVALFDWLNSRKEIEQKTFLKYPKFGLKKEISNYRWNYVEDKQYPCNETRHAILSRLEKANVCIDFLSNEKEVALWHILYSVSDKQEIEKALRTFAAKNGLDESFVEAFKKFPPFKSEYGAYSAKAIKKLLPLMRCGKYWDVSSIDDTTKERIKKIVAGEYDERIAVKVRDKVMNLSDISCFKRLPLWLACYIVYNRHSEDKEAVKWESPADIDAYLASFKQHSLRNPIVEQVITETLRVVRDIWKQVGRIDEIHIELGREMKNPADKRKRMTAQILENENANLRIKALLAEFMNPEYEIENVRPYSPSQQEILRIYEDMVLHAEDQLPEEIDAILKKFNSSKVPTKSEFLRYKLWLEQKYRSPYTGELIPLGKLFTAAYEIEHVIPQSRYFDDSFSNKVICESAVNKLKDNQLGYEFIKNHHGQKVEVGFGKSVEIFSVDSYERFVKEQYAKSAVKMKKMLMDDIPEQFIERQLNDSRYISKVIKGLLSNIVREKNDSGEYEPEAVSKNIVVCTGSVTDRLKRDWGMNDVWNSIVYPRFERLNSLTDTQSFGHWENKSGKKVFQTELPLEYQKGFSKKRIDHRHHAMDAIVIACATRNHVNYLSNESASRNAKISRYDLQRLLCDKSRTDDNGNYKWVIKKPWDTFTQDAREVLSKIVVSLKQNLRIINKTTNVYRHLDATGNRVYEKQKTGDSWAIRKPMHKDTVFGAVNLRKVKVVRLSVALDAPTMIVDKRVKNKVFELLSYKYDKKRIEKYFKENAVLWKELDLARVAVYYFTEATTEPLVAVRKPLDSTFNEKKIKESVTDTGIQKILLNHLCTKEGKPDLAFSAEGIEEMNRNLLQLNNGKRHQPIYKVRVYEPRGNKFSVGVLGNKGTKWVEAAKGTNLFFAIYITEDGKRTYETIPLNMVIEREKQGLAPVPDKNEKGDKLLFWLSPNDLVYLPTEEELEFGRINEPIDRGRIYKMVSSSGNQCFFIPQSISNAIIPTKELGANNKAERSWDGAMIKNICIPVKVDRLGRIIEVKYRINE

SEQ ID NO: 79 - protein, 1436 aa, Bacteroides fragilis
MKRILGLDLGTNSIGWALVNEAENKDERSSIVKLGVRVNPLTVDELTNFEKGKSITTNADRTLKRGMRRNLQRYKLRRETLTEVLKEHKLITEDTILSENGNRTTFETYRLRAKAVTEEISLEEFARVLLMINKKRGYKSSRKAKGVEEGTLIDGMDIARELYNNNLTPGELCLQLLDAGKKFLPDFYRSDLQNELDRIWEKQKEYYPEILTDVLKEELRGKKRDAVWAICAKYFVWKENYTEWNKEKGKTEQQEREHKLEGIYSKRKRDEAKRENLQWRVNGLKEKLSLEQLVIVFQEMNTQINNSSGYLGAISDRSKELYFNKQTVGQYQMEMLDKNPNASLRNMVFYRQDYLDEFNMLWEKQAVYHKELTEELKKEIRDIIIFYQRRLKSQKGLIGFCEFESRQIEVDIDGKKKIKTVGNRVISRSSPLFQEFKIWQILNNIEVTVVGKKRKRRKLKENYSALFEELNDAEQLELNGSRRLCQEEKELLAQELFIRDKMTKSEVLKLLFDNPQELDLNFKTIDGNKTGYALFQAYSKMIEMSGHEPVDFKKPVEKVVEYIKAVFDLLNWNTDILGFNSNEELDNQSYYKLWHLLYSFEGDNTPTGNGRLIQKMTELYGFEKEYATILANVSFQDDYGSLSAKAIHKILPHLKEGNRYDVACVYAGYRHSESSLTREEIANKVLKDRLMLLPKNSLHNPVVEKILNQMVNVINVIIDIYGKPDEIRVELARELKKNAKEREELTKSIAQTTKAHEEYKTLLQTEFGLTNVSRTDILRYKLYKELESCGYKTLYSNTYISREKLFSKEFDIEHIIPQARLFDDSFSNKTLEARSVNIEKGNKTAYDFVKEKFGESGADNSLEHYLNNIEDLFKSGKISKTKYNKLKMAEQDIPDGFIERDLRNTQYIAKKALSMLNEISHRVVATSGSVTDKLREDWQLIDVMKELNWEKYKALGLVEYFEDRDGRQIGRIKDWTKRNDHRHHAMDALTVAFTKDVFIQYFNNKNASLDPNANEHAIKNKYFQNGRAIAPMPLREFRAEAKKHLENTLISIKAKNKVITGNINKTRKKGGVNKNMQQTPRGQLHLETIYGSGKQYLTKEEKVNASFDMRKIGTVSKLAYRDALLKRLYENDNDPKKAFAGKNSLDKQPIWLDKEQMRKVPEKVKIVTLEAIYTIRKEISPDLKVDKVIDVGVRKILIDRLNEYGNDAKKAFSNLDENPIWLNKEKGISIKRVTISGISNAQSLHVKKDKDGKPILDENGRNIPVDFVNTGNNHHVAVYYRPVIDKRGQLVVDEAGNPKYELEEVVVSFFEAVTRANLGQPIIDKDYKTTEGWQFLFSMKQNEYFVFPNEKTGFNPKEIDLLDVENYGLISPNLFRVQKFSLKNYVFRHHLETTIKDTSSILRGITWIDFRSSKGLDTIVKVRVNHIGQIVSVGEY

SEQ ID NO: 80 - protein, 1436 aa, Bacteroides sp.
MKRILGLDLGTNSIGWALVNEAENKDERSSIVKLGVRVNPLTVDELTNFEKGKSITTNADRTLKRGMRRNLQRYKLRRETLTEVLKEHKLITEDTILSENGNRTTFETYRLRAKAVTEEISLEEFARVLLMINKKRGYKSSRKAKGVEEGTLIDGMDIARELYNNNLTPGELCLQLLDAGKKFLPDFYRSDLQNELDRIWEKQKEYYPEILTDVLKEELRGKKRDAVWAICAKYFVWKENYTEWNKEKGKTEQQEREHKLEGIYSKRKRDEAKRENLQWRVNGLKEKLSLEQLVIVFQEMNTQINNSSGYLGAISDRSKELYFNKQTVGQYQMEMLDKNPNASLRNMVFYRQDYLDEFNMLWEKQAVYHKELTEELKKEIRDIIIFYQRRLKSQKGLIGFCEFESRQIEVDIDGKKKIKTVGNRVISRSSPLFQEFKIWQILNNIEVTVVGKKRKRRKLKENYSALFEELNDAEQLELNGSRRLCQEEKELLAQELFIRDKMTKSEVLKLLFDNPQELDLNFKTIDGNKTGYALFQAYSKMIEMSGHEPVDFKKPVEKVVEYIKAVFDLLNWNTDILGFNSNEELDNQPYYKLWHLLYSFEGDNTPTGNGRLIQKMTELYGFEKEYATILANVSFQDDYGSLSAKAIHKILPHLKEGNRYDVACVYAGYRHSESSLTREEIANKVLKDRLMLLPKNSLHNPVVEKILNQMVNVINVIIDIYGKPDEIRVELARELKKNAKEREELTKSIAQTTKAHEEYKTLLQTEFGLTNVSRTDILRYKLYKELESCGYKTLYSNTYISREKLFSKEFDIEHIIPQARLFDDSFSNKTLEARSVNIEKGNKTAYDFVKEKFGESGADNSLEHYLNNIEDLFKSGKISKTKYNKLKMAEQDIPDGFIERDLRNTQYIAKKALSMLNEISHRVVATSGSVTDKLREDWQLIDVMKELNWEKYKALGLVEYFEDRDGRQIGRIKDWTKRNDHRHHAMDALTVAFTKDVFIQYFNNKNASLDPNANEHAIKNKYFQNGRAIAPMPLREFRAEAKKHLENTLISIKAKNKVITGNINKTRKKGGVNKNMQQTPRGQLHLETIYGSGKQYLTKEEKVNASFDMRKIGTVSKSAYRDALLKRLYENDNDPKKAFAGKNSLDKQPIWLDKEQMRKVPEKVKIVTLEAIYTIRKEISPDLKVDKVIDVGVRKILIDRLNEYGNDAKKAFSNLDKNPIWLNKEKGISIKRVTISGISNAQSLHVKKDKDGKPILDENGRNIPVDFVNTGNNHHVAVYYRPVIDKRGQLVVDEAGNPKYELEEVVVSFFEAVTRANLGLPIIDKDYKTTEGWQFLFSMKQNEYFVFPNEKTGFNPKEIDLLDVENYGLISPNLFRVQKFSLKNYVFRHHLETTIKDTSSILRGITWIDFRSSKGLDTIVKVRVNHIGQIVSVGEY

SEQ ID NO: 81 - protein, 1512 aa, Bacteroides nordii
  Bacteroides nordii CL02T12C05
MKNILGLDLGTNSIGWAVINSEEDGPIVKKRIELAGSRIIPMDAAVLGNFDSGVTKSQTAERTSFRSIRRLRERQLLRRERLHKVLQILGFLPEHYVNDIDFENHPGKIKRNTEPKLPWRKNSMGQFEFIFQDSFEAMLTDFATHQPVFVSEGKKVPYDWTLYYLRKKALTEGISKEELAWLILNFNQKRGYYQLRGEEEEEQSNKLVEFYALRVVKVEATDDKKGKDTWYNVHLENGWIYRRTSNIPLDWEGKVKEFIVTTDLNEDGTPKLDKYGEVKRSFRAPKEDDWTLIKKKTESDIANSHKTVGCYIYDALLQNPHQKIKGRLVRTVERKFYKEELRLILEKQLSFHPELQDRDLYRACIDALYVSNEAHKNNISGRDFVYLFIDDIIFYQRPLKTKKSLIDNCPYEENQYMDRETGEVKQAPIKCIAKSHPLFQEFRLWQFISNIRIYQRERVLDDGKLETDVDVTPDFLKTEDDYTTLFEWFNDRKEVDQKAFLKNPQFGLKKTFTEYRWNYVEDKSYPCNETRNAILNGLQKAGVSADFLSREVEEALWHILYSVEDKIEIESALRKFASKHDLDDRFADVFKKLPPFKKEYGAYSAKAIKKLLPLMRIGKYWELSNIDDKTKERIDKIITGEWDENIHDRVREKAIKLSDITDFKGLPLWLSCYVVYNRHSEARAIAKWESPEDIDSYLRLFRQHSLRNPIVEQVITETLRTVRDIWKRVGQIDEIHVELGREIKNPADKRAKMTAQIVENENTNLRIKALLAEFINSEYEIENVRPYSSNQQEKLKIYEDTVLNGVKEIPEDINTILKKFRESDLKKRPTKSDFLHYKLWLEQKYCSPYTGRIIPLGKLFTSAYEIEHIIPQAHYFDDSFSNKVICEAEVNGLKDKKLGYEFIKHNPGKMVEIGFGKPPVRIFSVEEYERFVKENYSGIKNKMNKLLMDDIPETFIERQLNDSRYISKVVKSLLSNIVREKDSNGEYEPEAISKNVIVCTGSVTDRLKRDWGVNDVWNSIIYPRFERLNELTGSQQFGCWENKEGKRVFQTAVPLEMQKGFSKKRIDHRHHAMDAIVIACATRNHINYLSNESASKKAKISRTDLQRLLCTKCRTDDNGNYKWIVKKPWPAFTQDIRKALENITVSFKQNLRVINKTTNYYVHFDESGKKVLEKQINGDSWAIRKPMHKDTVFGKVNLQKVKEVRLSLALDTPKMIVDKKLKEKVLQLYSYKYDKKRIDKYFKENASLWKDLNLSKVAVYYFTNDSTEPLVAVRKPLDTSFNAKKIKESVTDTGIQKILLNHLSNNQDDPNLAFSPDGIDKMNKNLTALNDGKYHQPIYKVRVCEPQGNKFSVGTSGNKTSKYVEAAKGTNLFFAVYQTEDGKRSYETIPLNVVIEREKLGWTPVPENNNNGDKLLFWLSPNDLVYVPTADELNNGMRLDNMDKGRIYKMISCSGPQCFFIPQNVSNAIIPVIELGANNKAEKSWNNEMIKVVCVPIRVDRLGCITQINNQK

SEQ ID NO: 82 - protein, 1436 aa, Bacteroides sp.
  Bacteroides sp. 2_1_16
MKRILGLDLGTNSIGWALVNEAENKDERSSIVKLGVRVNPLTVDELTNFEKGKSITTNADRTLKRGMRRNLQRYKLRRETLTEVLKEHKLITEDTILSENGNRTTFETYRLRAKAVTEEISLEEFARVLLMINKKRGYKSSRKAKGVEEGTLIDGMDIARELYNNNLTPGELCLQLLDAGKKFLPDFYRSDLQNELDRIWEKQKEYYPEILTDVLKEELRGKKRDAVWAICAKYFVWKETYTEWNKEKGKTEQQEREHKLEGIYSKRKRDEAKRENLQWRVNGLKEKLSLEQLVIVFQEMNTQINNSSGYLGAISDRSKELYFNKQTVGQYQMEMLDKNPNASLRNMVFYRQDYLDEFNMLWEKQAVYHKELTEELKKEIRDIIIFYQRRLKSQKGLIGFCEFESRQIEVDIDGKKKIKTVGNRVISRSSPLFQEFKIWQILNNIEVTVVGKKRKRRKLKENYSAIFEELNDAEQLELNGSRRLCQEEKELLAQELFVRDKMTKSEVLKLLFDNPQELDLNFKTIDGNKTGYALFQAYSKMIEMSGHEPVDFKKPVEKVVEYIKAVFDLLNWNTDILGFNSNEELDNQSYYKLWHLLYSFEGDNTPTGNGRLIQKMTELYGFEKEYATILANVSFQDDYGSLSAKAIHKILPHLKEGNRYDVACVYAGYRHSESSLTREEIANKVLKDRLMLLPKNSLHNPVVEKILNQMVNVINVIIDIYGKPDEIRVELARELKKNAKEREELTKSIAQTTKANEEYKTLLQTEFGLTNVSRTDILRYKLYKELESCGYKTLYSNTYISREKLFSKEFDIEHIIPQARLFDDSFSNKTLEARSVNIEKGNKTAYDFVKEKFGESGADNSLEHYLNNIEDLFKSGKISKTKYNKLKMAEQDIPDGFIERDLRNTQYIAKKALSMLNEISHRVVATSGSVTDKLREDWQLIDVMKELNWEKYKALGLVEYFEDRDGRQIGRIKDWTKRNDHRHHAMDALTVAFTKDVFIQYFNNKNASLDPNANEHAIKNKYFQNGRAIAPMPLREFRAEAKKHLENTLISIKAKNKVITGNINKTRKKGGVNKNMQQTPRGQLHLETIYGSGKQYLTKEEKVNASFDMRKIETVSKSAYRDALLKRLYENDNDPKKAFAGKNSLDKQPIWLDKEQMRKVPEKVKIVTLEAIYTIRKEISPDLKVDKVIDVGVRKILIDRLNEYGNDAKKAFSNLDKNPIWLNKEKGISIKRVTISGISNAQSLHVKKDKDGKPILDENGRNIPVDFVNTGNNHHVAVYYRPVIDKRGQLVVDEAGNPKYELEEVVVSFFEAVTRANLGLPIIDKDYKTTEGWQFLFSMKQNEYFVFPNEKIGFNPKEIDLLDVENYGLISPNLFRVQKFSLKNYVFRHHLETTIKDTSSILRGITWIDFRSSKGLDTIVKVRVNHIGQIVSVGEY

SEQ ID NO: 83 - protein, 1517 aa, Bacteroides sp.
  Bacteroides sp. 20_3
MKKIVGLDLGTNSIGWALINAYINKEHLYGIEACGSRIIPMDAAILGNFDKGNSISQTADRTSYRGIRRLRERHLLRRERLHRILDLLGFLPKHYSDSLNRYGKFLNDIECKLPWVKDETGSYKFIFQESFKEMLANFTEHHPILIANNKKVPYDWTIYYLRKKALTQKISKEELAWILLNFNQKRGYYQLRGEEEETPNKLVEYYSLKVEKVEDSGERKGKDTWYNVHLENGMIYRRTSNIPLDWEGKTKEFIVTTDLEADGSPKKDKEGNIKRSFRAPKDDDWTLIKKKTEADIDKIKMTVGAYIYDTLLQKPDQKIRGKLVRTIERKYYKNELYQILKTQSEFHEELRDKQLYIACLNELYPNNEPRRNSISTRDFCHLFIEDIIFYQRPLKSKKSLIDNCPYEENRYIDKESGEIKHASIKCIAKSHPLYQEFRLWQFIVNLRIYRKETDVDVTQELLPTEADYVTLFEWLNEKKEIDQKAFFKYPPFGFKKTTSNYRWNYVEDKPYPCNETHAQIIARLGKAHIPKAFLSKEKEETLWHILYSIEDKQEIEKALHSFANKNNLSEEFIEQFKNFPPFKKEYGSYSAKAIKKLLPLMRMGKYWSIENIDNGTRIRINKIIDGEYDENIRERVRQKAINLTDITHFRALPLWLACYLVYDRHSEVKDIVKWKTPKDIDLYLKSFKQHSLRNPIVEQVITETLRTVRDIWQQVGHIDEIHIELGREMKNPADKRARMSQQMIKNENTNLRIKALLTEFLNPEFGIENVRPYSPSQQDLLRIYEEGVLNSILELPEDIGIILGKFNQTDTLKRPTRSEILRYKLWLEQKYRSPYTGEMIPLSKLFTPAYEIEHIIPQSRYFDDSLSNKVICESEINKLKDRSLGYEFIKNHHGEKVELAFDKPVEVLSVEAYEKLVHESYSHNRSKMKKLLMEDIPDQFIERQLNDSRYISKVVKSLLSNIVREENEQEAISKNVIPCTGGITDRLKKDWGINDVWNKIVLPRFIRLNELTESTRFTSINTNNTMIPSMPLELQKGFNKKRIDHRHHAMDAIIIACANRNIVNYLNNVSASKNTKITRRDLQTLLCHKDKTDNNGNYKWVIDKPWETFTQDTLTALQKITVSFKQNLRVINKTTNHYQHYENGKKIVSNQSKGDSWAIRKSMHKETVHGEVNLRMIKTVSFNEALKKPQAIVEMDLKKKILAMLELGYDTKRIKNYFEENKDTWQDINPSKIKVYYFTKETKDRYFAVRKPIDTSFDKKKIKESITDTGIQQIMLRHLETKDNDPTLAFSPDGIDEMNRNILILNKGKKHQPIYKVRVYEKAEKFTVGQKGNKRTKFVEAAKGTNLFFAIYETEEIDKDTKKVIRKRSYSTIPLNVVIERQKQGLSSAPEDENGNLPKYILSPNDLVYVPTQEEINKGEVVMPIDRDRIYKMVDSSGITANFIPASTANLIFALPKATAEIYCNGENCIQNEYGIGSPQSKNQKAITGEMVKEICFPIKVDRLGNIIQVGSCILTN

SEQ ID NO: 84 - protein, 1424 aa, Bacteroides sp.
  Bacteroides sp. 3_1_19
MKRILGLDLGTNSIGWALVNEAETDEEVSSIIRLGVRVNPLTVDETQNFEKGKSITTNAERTLKRSMRRNLQRYKLRRDALVEFLKELGFITDETILSEQGNRTTFETCRLRAKAAEEEISLEELSRVLLMINKKRGYKSSRKVKKEEDGVLIDGMEIAKKLYEEDLTPGQLCSQLLESGKKVLPDFYHSDLQEELDRIWSVQKQFHPDVFCDAAKEEIKGKNRSQTWAILANYFVWKEEVVGWNDREAKNETIEKECKLVGLKRTTKGYELKKENYRWRAQALTEQLGLEEIAVVLQEINGQINASSGYLGAISDRSKVLYFNHQTVGQYQMAELDKNPHASLRNMVFYRQDYLDEFDRIWEKQAEFHKELTAELKKEIRDMIIFYQRRLKSQKGLISFCEFERLEIVVEKDGKKQTKVIGCKVIPRSHPLFQEFKVWQTLNDIKVLGREKKRNALSASESRALYPEEKEILARELAIKENMKKADVLKLLFENPQELDLNFKQIDGNRTGFSLFSAYSKMIEKYGYEPLDFKKPADEIIGQLRTIFTDLGWNTNLFTIDLTKEGKELEMQPYFRLWHLLYSFEGDNTSTGNGKLIEKIMQLCGVEKEYAVELASLSFQDDYGSLSAKAIKRILPYLKEGNLYDVACEYAGYRHSKSSLTKEEIENKVLKGKLEVLPKNSLRNPVVEKILSQMVNVINTIIDTYGKPDEIRVELARELKKSAKEREELTKAIAKSTREHEEIRKLLQDEFGMMNVSRNDIIRYKLYEELKDNGYKTLYSNQYIPKEKIFSKEIDIEHIIPQSRLFDDSLSNKTLEYKAINIEKGNKTAYDFVKEKYGEEGLQQYINRCESLFNDKKAKLRKLKMEQKDIPDGFIDRDLRNTQYIAKKALAMLNEICRRVVATTGSITDQLREDWQLVDVMKELNLPKYEALGFVETYEDKDGRKIKRIKDWTKRNDHRHHAMDALTVAFTKDAFIQYFNNKNAAQDSGNRNHTNIIGIKTRYFDKGRALPPIPLEQFRIEAKQHLEKLLVSIKAKNKVVTVNVNRTKKRKGENTKIQQTPRGQLHLETVYGSHKQYVTKIEKVNASFDAAKIATVSKRAYRNALLKRLETFGNDPKKAFTGKNALEKNPLYADKYQTIRVPEKVQTVEFETIYTIRKPVDPALNVDKVVDVKVRAILERRLKEYGGDPKKAFVNFWENPIWLNKEKGISIKRVSIRGINNAQSIHVKKDKNGNPIWDENGKQIPVDFVNTGNNHHVAIYRKPVLDKKGQVTFDEDGNLMYELDEVVVPFFEAVTRANLGLPIIDKDYRKSEGWQFLFSMKQNEYFVFPNEKTGFNPKEVDLLNPDNYAMISPNLFRVQTMSKVMYGNNVVRDYKFRHHLETTVKDMKELKDIAYKQYKTLSFGNSVVKIRINHIGQIVSVGEY

SEQ ID NO: 85 - protein, 1510 aa, Bacteroides sp.
  Bacteroides sp. D2
MKRILGLDLGTNSIGWALVDSEEQRILGMGSRIIPMDQGVLDTFSGGNPVETQTAARTAYRGTRRLRERALLRRERLIRVLNMMKFLPEHYASQIDFEKRLGQFFDEKEPKLAWKQNDEGRFEFIFQQSFNEMIEEFKNKGVVREDKKIPYDWTIYYLRKKALSQEIEKEELAWILLNFNQKRGYYQLRGEEEEENPNKLVEYYSLKIVDVIADEKPNSKGDIWYSLHLENGWIYRRSSKIPLFGWKDKTRDFIVTTDLNDDGTVKKDKEGIEKRSFRAPSENDWVLLKKKTESDIEKSHKTVGAYVYETLLQNPMQKVRGKLVRTIERKFYKDELKQILEKQREFHPELRDEDLYNDCVRELYRSNETYQFILSKRDFVHLFLDDILFYQRPLRSQKSAIGDCILEFKTYKDKDGNNIKEYLKVISKSNPLYQEFRIWQWLYNLKIYRKEDDEDVTLQFIANIEDKEQLFDFLSNRKSIEQKPLLEYLIKAKGLKKQVKTEAYRWNYVEDKIYPCSETKTMISTRLAKVENIPDNFFTKEIEQKLWHIIYSVTDKNEFEKALRTFAKKYDLDIASFVDNFKKIPPFKNEYGSFSEKAIKKLLPLMRLGKYWKWNDIDNNTQNRISKIITGEYDEEIKDIVREKSIALTNENDFQGLQLWLAQYLVYGRHSEADIAGKWHSVADLEKYLNEFKQHSLRNPIVEQIITETLRVVRDIWRKYGQGAENFFSEIHVELGRDMKNTADERKKIVNVVTENENTNLRIKALLMELKNNSDGKLEVENVRPYSPTQQDILKIYEEYAISTGLDNEKDEKVKEDIKKISRVAQPTTTELQRYKLWLEQKYCSPYTGKVIPLGKLFTEEYQIEHIIPKSRYYDDSFSNKVICEAAVNKLKDKCLGLEFIKNYHGQIVETGFGQKVTIFDEEAYQNFVKQHYAYNRSKRTKLLLEEIPEKMIERQMNDTRYISKFVLPLLSNLVRAEENDNGVNSKNVLPVNGKITTMLKQDWGLNDVWNDLILPRFVRMNELAKTIAFTSWNEQHQKYLPTVPLELSKGFQKKRIDHRHHAMDALVIACATRDHVNLLNNKHANTDTIRYDLQRKLRLFERVTYIDPQTKNNVTKDIPKEFKKPWDNFTVDARNELEKIIVSFKQNLRIINKATNIYTKYENGKKIKVGQKGLNWAIRKPLHKETVFAKVSLRKRKTVRLSEALKDWKKIVDKKLKQEIKRLTCQYGKFDVDTILRYFKDRKYQFGEVDVSKVKMYYFDEENAAVRKNVDTSFTEKFIQGSVTDTGIQKILLNHLEAKGNKVEIAFSPEGIEEMNKNIIQLNEGKLHLPIFKVRVYETIGNKFSVGVKGNKKDKYVEAAKGTNLFFAIYVDENGIRSYETIPLNIVIERLKQGLSVVPEKNRKEHSLLFYLSPNDLVYVPIEDERENIHAVNLDQLNNEQRKRIYKMVSCTGSECHFVPYYVASPIVNKVEYSSLNKIGRSLTGEMIKDVCIKLKVDRLGNVKGISGL

SEQ ID NO: 86 - protein, 1436 aa, Bacteroides sp.
  Bacteroides sp. D2
MKRILGLDLGTNSIGWALVDEAENKDERSSIVKLGVRVNPLTVDELTNFEKGKSITTNADRTLKRGMRRNLQRYKLRRETLMEVLKEHKLITEDTILSENGNRTTFETYRLRAKAATEKISLEEFARVLLMINKKRGYKSCRKAKGAEEGTLIDGMDIARELYNNNLTPGELCLQLLDAGKKYLPDFYRSDLQNELDRIWEKQKEYYPEILTEVLKEELRGKKRDAVWAICAKSFVWEEYYTEWNKEKGKTEQQEREHKLEGIYSKRKRDEAKRENLQWRVNGLKEKLSLEQLVIVLQEMNIQINNSSGYLGAISDRSKELYFNKQTVGQYQMEMLDKNPNASLRNMVFYRQDYLDEFNTLWEKQAEYHKELTGELKKEIRDIVIFYQRRLKSQKGLVGFCEFESRQIEVEIDGKKKIKTVGNRVIPRSSPLFQEFKIWQILNNIEVTVVGKKGKRRKQKDNSPTLFDGLDDTEQLELNGSRYLYQEEKELLAQELFVRDKMTKSDVLKLLFDNPQELDLNFKTIDGNKTGYTLFQAYSKMIEMSGHEPVDFKKTVEKVVEHVKAVFDLLNWNTDILGFNSNEELDNQSYYKLWHLLYSFEGDNTPTGNARLVQKITELYGFEKEYAIILANVTFQDDYGSLSAKAIHKILPHLKEGNRYDVACAYAGYKHSESSLTKEEIANKALKDRLTLLPKNNLRNPVVEKILNQMVNVINAIIDTYGKPDEIRVELARELKKNAKEREELTKFIAETTRKHEEFKILLQSEFGLTNVSRTDILRYKLYKELESCGYKTLYSNTYIPREKLFSKEFDIEHIIPQARLFDDSFSNKTLEARSINLEKGNKTAYDFVKEKFGESGADNSLDHYLNNIEDLFKSGKISKTKYNKLKMAEQDIPDGFINRDLRNTQYIAKKALSMLNEISRRVVATSGTITDKLRQDWQLVDVMKELNWEKYKALGLVEYFEDKDGRQIGRIKDWTKRNDHRHHAMDALTVAFTKDIFIQYFNNKNASLNSNTNEYAIKNKYFQNGRAIAPIPLREFRVEAKKHLENTLISIKAKNKVVTGNINKTKKRGGVNKYLQQTPRGQLHLETIYGSGKQYLTKEEKVNASFDMKKIATVSKSAYRDVLLKRLHENDNDPKKAFTGKNSLDKQPIWLDKEQTRKVPEKVKTVTLETIYTVRKEISPDLKVDKVIDAGVRKILTGRLNEYGNDAKKAFSNLDENPIWLNKEKGISIKRVTISGISNAQSLHVKKDKDGKPILDEDSRNIPVDFVNTGNNHHVAVYRRPVIDKRGQLVIDEAGNPKYELEEVVVSFFEAVTRANLGQPIIDKDYKTSEGWQFLFSMKQNEYFVFPNEKTGFNPKEIDLLDAENYGVISPNLFRVQKFAHKNYVFRHHLETTIKDTSSILKGITWIDFRSSKGLDAIVKVRVNHIGQIVSVGEY

SEQ ID NO: 87 - protein, 1508 aa, Bacteroides uniformis
  Bacteroides uniformis CL03T00C23
MRTILGLDLGTNSIGWAVINSVIKEQTERIWIEMAGSRIIPMDAAILGDFDKGNSISQTAERTRFRGVRRLRERQLLRRERLHKVLKILGFLPEHYLKGIDFEKHTGKFLSGSEPKLPWVKDRWGKYSFLFQTAFNEMLADFAKHQPSLVFDGKKIPYDWTVYYLRKKALTEMISKEELAWILLNFNQKRGYYQLRGEEEEDNAGKSVEFYALKVLSVEATDEKKGRDIWYNVHLENGWVYRRSSNVPLDWEGRVKEFIVTTDLNPDGTPKLDKYGEVKRSFRAPKEDDWMLIKKRTEADITGTHKTIGSYIYDALLQEPQQKIIGKLVKTVERKFYKEELNFILQKQCAFHAELQDRDLYMRCIEALYPGNEVQRRNIANRDFIYLLIDDVLFYQRPLKTKKSLIANCPYEENEYVNRKTGEIKTAPLKCIAKSHPLFQEFRLWYFLSNIRVYQKEREVNGTLHLDVDVTTEFLKTEDDYVALFDWLNSRKEIDQKAFLRYPAFGLKKEINNYRWNYVEDKFYPCNETRHAILSRLEKAGIGIDFLSDEKETALWHILYSVSDKQEIEKALATFAVKNGLNESFVEVFKKFPPFKSEYGAYSAKAIKKLLPLMRCGKYWDMSLIDGTTKERIERIIAGECDESIGAKVREKAMNLSDISCFKRLPLWLACYVVYNRHSEDKEITKWETPADIDAYLAAFKQHSLRNPIVEQVITETLRVVRDIWKQVGKIDEIRIELGREMKNPADKRKRMTTQILENENANLRIKALLAEFVNPEYGVENVRPYSPSQQEILRIYEDAVLKGEEQIPEDIDVILKKFNTSKLPTKSEFLRYKLWLEQKYRSPYTGELIPLAKLFTAAYEIEHVIPQSRYFDDSFSNKVICESAVNKLKDNQLGYEFIKNHHGQKVEVGFGKTVEIFSVDSYERFVKEQYAKSGIKMKKLLMDDIPEQFIERQLNDSRYISKVVKGLLSNIVREKNDSGEYEPEAVSKNILVCTGSVTDRLKKDWGMNDVWNSIVSPRFERLNALTETQCFGHWENKDGKKVFQTAVPLEYQKGFSKKRIDHRHHAMDAIVIACATRNHVNYLNNESASRNAKISRYDLQRLLCDKSRGDGNGNYRWIIKKPWTTFTQDAREALSGIIVSLKQNLRIINKTTNIYQHFDANGTRVYEKQKIGDSWAIRKPMHKDTVFGAVNLRKVKVVRLSVALDTPSMIVNKRVKNKVLELLSYKYDKKKIEKYFKENAFLWKELDIAKVAVYYFTENTTEPLVAVRKSLDSTFNEKKIASVTDTGIQKILLNHLKSKEGKAELAFSAEGIEEMNRNLLQLNDGKGHQPIYKVRVYEPRGNKFKVGVLGNKGAKWVEAAKGTNLFFAIYITEDGNRTYETIPLNWVIEREKQGLVPVPDRNEKGDKLLFWLSPNDLVYLPTEEERDFGRINEPIDRGRIYKMVSSSGNQCFFIPQSISNAIISTKELGSNNKAEKSWDGEMIKNICIPVKVDRLGRIIEVKYRVNE

SEQ ID NO: 88 - protein, 1504 aa, Bacteroides vulgatus
  Bacteroides vulgatus CL09T03C04
MKNIVGLDLGTNSIGWAVVNGSVNDDGSEQLVKIQASGSRIIPMDAAMIGDFNKGNSISQTAERTRLRGVRRLSERYLLRRERLHRILDILGFLPFHFAQDLDRHGKIVKGKEPKLAWRKNEAGQFEFIFQDSFKEMLEDFKLNHPNLITDDKKVPYDWTIYYLRKKGLTSKISKEELAWILLNFNQKRGYYQLRGEEEEENKNKLVEFYALKVVAVEDSGEKKGKDIWYNVHLENGWVYRRTSNMPLDWVGKTKEFIVTTDLEKDGTPKKDKEGNVKRSFRAPKEDDWSLLKKKTEADIDQTHKTVGVYIYDTLLGNPSQKIRGRLVRTIERKYYKEELKQILEKQKEFHLELQDRALYAACIEELYPINEAHRNNVGNRDFTYLFLEDILFYQRPLKSKKSLIDNCPYEENQGLDKETGEIKSFPVKCIAKSHPLFQEFRLWQFIVNLRIYRKDLAQDVDVTNELLKTEEDYVALFDWLNGKKEIDQKAFLKYPVFGLKKEIENYRWNYVQDKPYPCNETRSLMLARLEKCDISIEFLTKENEEALWHILYSVEDKNEIVKALQKFADKHDLNASFVDVFQKFPPFKKEYGSYSAKAIKKLLPLMRMGKYWSENSIDKGTRERIDKIITGEYDEKIENRVREKAIHLADVSDFKGLPLWLVCYIVYGRHSEAKEITQWKSPADIDSYLRSFKQHSLRNPIVEQIIIETLRVVRDIWKQVGNIDEIHVELGREMKNPADKRKKMTQQMSENENTNLRIKYLLTEFLNPEYEVENVRPYSPSQQDILRIYEEGVLNSVSDLPEEISDILKKFTETDLKKRPSRSEILRYKLWLEQKYRSPYTGEVIPLGKLFTPAYEIEHVIPQSCYFDDSFSNKVICEAEVNKLKSNLLGHEFIVKHHGEIVELPFGKKVRIFTVDEYEQFVKDNYSRTRSKMKKLLMDDIPEEFVTRQLNDSRYISKVVKSLLSNIVREKGEEEAISKNVIPCTGGVTDRLKKDWGINEVWNKIILPRFQRLNELTGTNKFTTKNVGIQEIPTMPLELQKGFNKKRIDHRHHAMDAIIIACANRNIINYLNNESATAKAELSRYDLQKMLCDKAKTDNNGNYKWVIRKPWASFTQDTYLALENIIVSFKQNLRVINKATNRFLHYNEEGKKIFVKQGKGDNWAIRKSMHKDTVFGEVNLRRIKTVALNEAMKNPQSIVVKDFKRKLLELWNLGFDAKRIKKYFEDNRETWSDINLSKIEVYYFSKDTKDRFFATRKPLDTSFDRKKIENNITDTGIQKILLRHLELKDNNPDIAFSPDGIDEMNRNIIQLNNGKYHQPIIKIRWYEQADKFAVGQTGNKFSKFVEAAKGTNLFFAVYESNILDKKTNTIIKKRNYATIPLNVAIERQKQGLPVAPEDENGNDPIFVLSPNDLVYLPTDDELANGIIAQPLDRGRIYKMVSCTGNEGHFIPARIANPILQTIELGSNNKAQKAWTDEMIKEICMPIKVDRLGNVLESSSSYKK

SEQ ID NO: 89 - protein, 1434 aa, Unknown
  Description of Unknown: Bacteroidetes oral taxon 274 str. F0058 polypeptide
MKNILGLDLGTNSIGWAYVKQAQNDSEKSEIAELGVRVNPLTVDEKTNFEKGKPISTNADRTLKRGARRNLQRYKLRRQELIELLKDYQVISDKTILAEDGKETTFETLRLRVKSAKEQVSLEELARILLMINKKRGYKSSRKAKNEDEGQLIDGMEIARRLYDENLTTGQLSLQLLKEGKKSLPDYYRSDLQHELDKVWNFQKQFHPDILTDEFYTSIQGKGQKATRESFSSKYGIDTAENKGSREEKKLQAYQWRADATHKELTKEELAFVITEINNNINNSSGYLGAISDRSKELIFANETVGEYLWKQIQNDPHTSLKNQVFYRQDYFDEFERIWETQSGFYPQILTESLKNELRDILIFYQRKLKSQKALVSICEFESKEIPLKDKQGNPISKNGIPVTKLVGPKVAPKSSPLFQEFKIWQNLNNVLVRPKGSRKRKVTTNQQSTLLEGQEPVFELNLEQKELLFEELNLKGNLKTDYCLELIGYSAKEWEMNYPTLEGNKTNKALYEAYLKIIDSEGYDAKKLLKVKTDKDDINLDDIKVSASEIKTMISDIFNELGINTKILDFDAELERKQFEAQASYRLWHLLYSYEGDDSKSGNELLYRLLEDKFGFKREHSKTLANVSLLSDYGNLSTKAIRTIYPYIKENKFSTACELAGYRHSKLSISKEENENRTLKDTLDVLKKNSLRQPVVEKILNQMINLINELIEKHSEKDEKGNIVKYFKFDEIHIELARELKKNAEERRELDSKVREGKDRNEKIITILKSEFGLPYPTKNDITRYRLYEELKDNGYKDLYTNTYIPREKLFSKEIDIEHIIPKSRLFNDSFSNKTICYRQDNLNKGERTAYDYIEGLGKTQLDEYLNRVENLYTNKFITKAKYRNLLKKESEIGDGFIERDLRETQYIAKKAKEMLLQITRHVVSTTGSITDRLRDDWELVNVMRELNLPKYKVLGLTEIQERKNGQTVEVITDWTKRNDHRHHAMDALTVAFTKHSHIQYLNFLNARKDEKHKEYSNIMGIQQLETEKTTDKDGKDRRVFKTPIPNFRQVAKEHLESILISHKTKNKVVTRATNKIAGSKKQQETLSPRGQLHKETVYGKYRRYVQKEEKIGSKFDLQTIERVANPLYKRLLTKRLEENGGDPKKAFTGKNALAKSPIYLDETQTQQLPEKVKLVWLETDFSIRKDITPDNFKDEKSIDKVLDEGIKRILKDRLKSFDGDAKRAFTDLEQNPIWLNKEKGIAIKRVTISGVSNAEPLHTKKDHLGNEIFDDTGKPIPVDYVSTGNNHHIAIYRDENGNLQEKAVSFFEAVTRANQGLPTVDKTYNQHLGWQFLFTMKQNEMFVFPNKETGFDPQEIDLLDPKNKKLISPNLFRVQKISTKNYFFRHHLETSVETHNALNGVTYKSQLGLNGITDIIKVRINHLGDIVHIGEY

SEQ ID NO: 90 - protein, 1153 aa, Barnesiella intestinihominis
  Barnesiella intestinihominis YIT 11860
MKNILGLDLGLSSIGWSVIRENSEEQELVAMGSRVVSLTAAELSSFTQGNGVSINSQRTQKRTQRKGYDRYQLRRTLLRNKLDTLGMLPDDSLSYLPKLQLWGLRAKAVTQRIELNELGRVLLHLNQKRGYKSIKSDFSGDKKITDYVKTVKTRYDELKEMRLTIGELFFRRLTENAFFRCKEQVYPRQAYVEEFDCIMNCQRKFYPDILTDETIRCIRDEIIYYQRPLKSCKYLVSRCEFEKRFYLNAAGKKTEAGPKVSPRTSPLFQVCRLWESINNIVVKDRRNEIVFISAEQRAALFDFLNTHEKLKGSDLLKLLGLSKTYGYRLGEQFKTGIQGNKTRVEIERALGNYPDKKRLLQFNLQEESSSMVNTETGEIIPMISLSFEQEPLYRLWHVLYSIDDREQLQSVLRQKFGIDDDEVLERLSAIDLVKAGFGNKSSKAIRRILPFLQLGMNYAEACEAAGYNHSNNYTKAENEARALLDRLPAIKKNELRQPVVEKILNQMVNVVNALMEKYGRFDEIRVELARELKQSKEERSNTYKSINKNQRENEQIAKRIVEYGVPTRSRIQKYKMWEESKHCCIYCGQPVDVGDFLRGFDVEVEHIIPKSLYFDDSFANKVCSCRSCNKEKNNRTAYDYMKSKGEKALSDYVERVNTMYTNNQISKTKWQNLLTPVDKISIDFIDRQLRESQYIARKAKEILTSICYNVTATSGSVTSFLRHVWGWDTVLHDLNFDRYKKVGLTEVIEVNHRGSVIRREQIKDWSKRFDHRHHAIDALTIACTKQAYIQRLNNLRAEEGPDFNKMSLERYIQSQPHFSVAQVREAVDRILVSFRAGKRAVTPGKRYIRKNRKRISVQSVLIPRGALSEESVYGVIHVWEKDEQGHVIQKQRAVMKYPITSINREMLDKEKVVDKRIHRILSGRLAQYNDNPKEAFAKPVYIDKECRIPIRTVRCFAKPAINTLVPLKKDDKGNPVAWVNPGNNHHVAIYRDEDGKYKERTVTFWEAVDRCRVGIPAIVTQPDTIWDNILQRNDISENVLESLPDVKWQFVLSLQQNEMFILGMNEEDYRYAMDQQDYALLNKYLYRVQKLSKSDYSFRYHTETSVEDKYDGKPNLKLSMQMGKLKRVSIKSLLGLNPHKVHISVLGEIKEIS

SEQ ID NO: 91 - protein, 1352 aa, Belliella baltica
MKKILGLDLGTTSIGWAFIKEPEKDVVGSEIVDMGVRIVPLSSDEENDFAKGNTISINADRTLKRGARRNLQRFKQRRNALLEIFKEKKLISTNFKYAEDGPSSTFSTLNLRAKAAKEKIELQDLVKVLLQINKKRGYKSSRKAKSEEDDGSAIDSMGIAKELYENDLTPGQWVYEALQKGRKNVPDFYRSDLQEEFKKIVNYQSEFFPDIFNASFVEDWMGKASTPTKQYFNKKGVQLAENKGKREERRLQEYKWRAEAVNFKIDLSEIALILSQINSQISNSSGYLGAISDRSKELYFKNLTVGQYLYQQIKKNPHTRLKGQVFYRQDYLDEFERIWSVQSSFYPQLNDALKREVRDITIFFQRRLKSQKHLISNCEFEDHHKVVPKSHPVFQEFRIWQNLNNLLLIKKDNLNEKFDLELESKIALANELAFKRELNVKDALKILGLKPNEWEFNFTKIEGNRTNQAFFDAFAKIIELEDGEPIDLGDLKADDILDQFSEAFLRIGIDTELLQVNSDIEGAEYEKQSYIQFWHLLYSSEDDQKLKLNLIRKFGFKPEHAKILASISLQDDHASLSSRAIKKILPHLQSGLIYDKACTYAGYNHSSSFTKDENEKRELRAELELLKKNSLRNPVVEKILNQMINVVNAILKDPELGRPDEIRVEMARELKANAEQRKNMTSNIASATRDHDKYREILKSEFGLKRVTKNDLLRYKLWLETDGISLYTGKPIEASKLFSKEYDIEHIIPKARLFDDSFSNKTICERQLNIDKANVTAFSFLQNKLSADEFEQYQSRVKSLYGKLSKAKIQKLLMANDKIPEDFIARQLQETRYISKKAKEILFEISRRVSVTTGTITDKLREDWGLVEIMKELNWEKYDKLGLTYTIEGKHGERLNKIKDWSKRNDHRHHAMDALTVALTKPAYIQYLNNLNAKGLNNKKGTEVFAIEQKYLKRENGKLCFIPPIENIRSEAKKHLSRILVSYKAKNKVVTINKNKTKSKAGLNEQIALTPRGQLHKETVYGKSFHYSTKFEKIGASFNVQKINTVAKKEEREALLKRLAENGNDPKKAFTGKNTLNKMPIYLDLGKNIKLSEKVKTVVLEQNYTIRKNIDPDLKVDKVIDVGIKRILESRLEEFGGNAKLAFSNLEENPIWLNKEKGISIKRVKISGVSNVESLHVKKDHFGEPILDQEGNEIPVDFVSTGNNHHVAIYEDENGNLQEEVVSFFEAVVRQNQGLPIIKKNHTLGWKFLFTLKQNEYFVFPSDDFVPADVDLMDEQNYHLISPNLFRVQKIARKNYVFNNHLETKAVDNDLLKSKKELSKITYHFYQTPEHLRGIIKIRINHLGKIIQIGEY

SEQ ID NO: 92 - protein, 1415 aa, Bergeyella zoohelcum
  Bergeyella zoohelcum ATCC 43767
MKHILGLDLGTNSIGWALIERNIEEKYGKIIGMGSRIVPMGAELSKFEQGQAQTKNADRRTNRGARRLNKRYKQRRNKLIYILQKLDMLPSQIKLKEDFSDPNKIDKITILPISKKQEQLTAFDLVSLRVKALTEKVGLEDLGKIIYKYNQLRGYAGGSLEPEKEDIFDEEQSKDKKNKSFIAFSKIVFLGEPQEEIFKNKKLNRRAIIVETEEGNFEGSTFLENIKVGDSLELLINISASKSGDTITIKLPNKTNWRKKMENIENQLKEKSKEMGREFYISEFLLELLKENRWAKIRNNTILRARYESEFEAIWNEQVKHYPFLENLDKKTLIEIVSFIFPGEKESQKKYRELGLEKGLKYIIKNQVVFYQRELKDQSHLISDCRYEPNEKAIAKSHPVFQEYKVWEQINKLIVNTKIEAGTNRKGEKKYKYIDRPIPTALKEWIFEELQNKKEITFSAIFKKLKAEFDLREGIDFLNGMSPKDKLKGNETKLQLQKSLGELWDVLGLDSINRQIELWNILYNEKGNEYDLTSDRTSKVLEFINKYGNNIVDDNAEETAIRISKIKFARAYSSLSLKAVERILPLVRAGKYFNNDFSQQLQSKILKLLNENVEDPFAKAAQTYLDNNQSVLSEGGVGNSIATILVYDKHTAKEYSHDELYKSYKEINLLKQGDLRNPLVEQIINEALVLIRDIWKNYGIKPNEIRVELARDLKNSAKERATIHKRNKDNQTINNKIKETLVKNKKELSLANIEKVKLWEAQRHLSPYTGQPIPLSDLFDKEKYDVDHIIPISRYFDDSFTNKVISEKSVNQEKANRTAMEYFEVGSLKYSIFTKEQFIAHVNEYFSGVKRKNLLATSIPEDPVQRQIKDTQYIAIRVKEELNKIVGNENVKTTTGSITDYLRNHWGLTDKFKLLLKERYEALLESEKFLEAEYDNYKKDFDSRKKEYEEKEVLFEEQELTREEFIKEYKENYIRYKKNKLIIKGWSKRIDHRHHAIDALIVACTEPAHIKRLNDLNKVLQDWLVEHKSEFMPNFEGSNSELLEEILSLPENERTEIFTQIEKFRAIEMPWKGFPEQVEQKLKEIIISHKPKDKLLLQYNKAGDRQIKLRGQLHEGTLYGISQGKEAYRIPLTKFGGSKFATEKNIQKIVSPFLSGFIANHLKEYNNKKEEAFSAEGIMDLNNKLAQYRNEKGELKPHTPISTVKIYYKDPSKNKKKKDEEDLSLQKLDREKAFNEKLYVKTGDNYLFAVLEGEIKTKKTSQIKRLYDIISFFDATNFLKEEFRNAPDKKTFDKDLLFRQYFEERNKAKLLFTLKQGDFVYLPNENEEVILDKESPLYNQYWGDLKERGKNIYVVQKFSKKQIYFIKHTIADIIKKDVEFGSQNCYETVEGRSIKENCFKLEIDRLGNIVKVIKR

SEQ ID NO: 93 - protein, 1430 aa, Bergeyella zoohelcum
  Bergeyella zoohelcum CCUG 30536
MKHILGLDLGTNSIGWAVVKEAQNDNEQSEIVDVGVRVNPLTTDEKTNFEKGKPISTNADRTLKRSARRNLQRYKLRRKELIELLKEHQLISTDTILTENGKGTTFQTLELRAKSAKEKISLEELARVFLTINKKRGYKSSRKAKNEDEGQLIDGMEIAKRLYEENLTTGQLSLQLLKEGKKSLPDYYRSDLQFELDKVWNFQKQFHSDILTDEFYAQLKGKGQRATSALFLAKYQIYTAENKGSREDKKLQAYQWRVDALSKELTREQLAFVITEINNNLNNSSGYLGAISDRSKELYFNNETVGEYLWKQIAANPHTSLKNQVFYRQDYLDEFEQIWKTQSAFYPEILTDELKKELRDVVIFYQRKLKSQKSLVSFCEFENKEIEIKKEDGTSTKKVIGLKVAPKSSPLFQEFKIWQNLNNVLIRKKGSKTKKVAKNQQAVLFEEEKTISELDLEAKQALFNELNLKGNLKADYCLEILGYSPKEWEMNYSVLEGNRTNKALYEAYLKITDLEGYDAKNHLKVKLNKDEVELDDLKVPASEIKDMVQAIFKEAGINTDILHFNAELDGKDFENQASYQLWHLLYSYEGDDSKSGNELLYKLLETKFGFKKEYAQILANVSLSDDYGSLSTKAMRKIHPYIKENKFSTACELAGYRHSKHSLTKEENDNRVLKDSLEVLKKNSLRQPVVEKILNQMINLVNALLKKYRTENPNFKFDEIRIELARELKKNAEERANMTANINKAKTEHEKIIKILKNEFGLPNPTRNDIIRYRLYEELKANGYKDLYTNIKIPQEKLFTKEIDIEHIIPKSRVFDDSFSNKTLSFRKTNLDKGERTAFDYMESKFGADKLEEYVARVEDLYKNNIISKAKYQKLLKKESEIGDGFVERDLRETQYIAKKAKEILLQITPNVLSTSGGITDRLREDWDLINVMKELNLPKYRALGLTQMEDRKYGQQVEVITDWTKRNDHRHHAMDALTVAFTKHNHIQYLNYLNARKNEKHKEHSNIMGIQQLETIKVTDKNGNEKRVFKAPMPNFRQVTKAFLENILISHKAKNKVVTKNKNKVAGSNKVQEVLTPRGQLHKETVYGKYQYYVQKEEKIGAKFDLETIKKVANPLYQSLLKKRLEENGGDPKKAFTGKNSLAKNPIYLDDTQTEQLPEKVKLVWLENSFSIRKDITPENFKDEKLIDKILDEGVKRILKERLQSFGNDAKKAFSDLDKNPIWLNKEKGITIKRVTISGVANAEPLHTKKDHLGKEILDKEGKPIPVDFISTGSNHHVAVYRDEKGNLQEKVVSVFEAVVRANQGLPIIDKTYNQHLGWEFLFTMKQNEMFVFPNESTGFNPNDIDLLDPKNKRIISPNLFRVQKFSKLQYGNSFVREFVFRHHLETTVEDRKELQGITYKQMKNSTFFNDIIKVRINHLGDIVSIGEY

SEQ ID NO: 94 - protein, 1420 aa, Bifidobacterium bifidum
MSRKNYVDDYAISLDIGNASVGWSAFTPNYRLVRAKGHELIGVRLFDPADTAESRRMARTTRRRYSRRRWRLRLLDALFDQALSEIDPSFLARRKYSWVHPDDENNADCWYGSVLFDSNEQDKRFYEKYPTIYHLRKALMEDDSQHDIREIYLAIHHMVKYRGNFLVEGTLESSNAFKEDELLKLLGRITRYEMSEGEQNSDIEQDDENKLVAPANGQLADALCATRGSRSMRVDNALEALSAVNDLSREQRAIVKAIFAGLEGNKLDLAKIFVSKEFSSENKKILGIYFNKSDYEEKCVQIVDSGLLDDEEREFLDRMQGQYNAIALKQLLGRSTSVSDSKCASYDAHRANWNLIKLQLRTKENEKDINENYGILVGWKIDSGQRKSVRGESAYENMRKKANVFFKKMIETSDLSETDKNRLIHDIEEDKLFPIQRDSDNGVIPHQLHQNELKQIIKKQGKYYPFLLDAFEKDGKQINKIEGLLTFRVPYFVGPLVVPEDLQKSDNSENHWMVRKKKGEITPWNFDEMVDKDASGRKFIERLVGTDSYLLGEPTLPKNSLLYQEYEVLNELNNVRLSVRTGNHWNDKRRMRLGREEKTLLCQRLFMKGQTVTKRTAENLLRKEYGRTYELSGLSDESKFTSSLSTYGKMCRIFGEKYVNEHRDLMEKIVELQTVFEDKETLLHQLRQLEGISEADCALLVNTHYTGWGRLSRKLLTTKAGECKISDDFAPRKHSIIEIMRAEDRNLMEIITDKQLGFSDWIEQENLGAENGSSLMEVVDDLRVSPKVKRGIIQSIRLIDDISKAVGKRPSRIFLELADDIQPSGRTISRKSRLQDLYRNANLGKEFKGIADELNACSDKDLQDDRLFLYYTQLGKDMYTGEELDLDRLSSAYDIDHIIPQAVTQNDSIDNRVLVARAENARKTDSFTYMPQIADRMRNFWQILLDNGLISRVKFERLTRQNEFSEREKERFVQRSLVETRQIMKNVATLMRQRYGNSAAVIGLNAELTKEMHRYLGFSHKNRDINDYHHAQDALCVGIAGQFAANRGFFADGEVSDGAQNSYNQYLRDYLRGYREKLSAEDRKQGRAFGFIVGSMRSQDEQKRVNPRTGEVVWSEEDKDYLRKVMNYRKMLVTQKVGDDFGALYDETRYAATDPKGIKGIPFDGAKQDTSLYGGFSSAKPAYAVLIESKGKTRLVNVTMQEYSLLGDRPSDDELRKVLAKKKSEYAKANILLRHVPKMQLIRYGGGLMVIKSAGELNNAQQLWLPYEEYCYFDDLSQGKGSLEKDDLKKLLDSILGSVQCLYPWHRFTEEELADLHVAFDKLPEDEKKNVITGIVSALHADAKTANLSIVGMTGSWRRMNNKSGYTFSDEDEFIFQSPSGLFEKRVTVGELKRKAKKEVNSKYRTNEKRLPTLSGASQP

SEQ ID NO: 95 - protein, 1138 aa, Bifidobacterium dentium
MLCRCHRRYRIGIDVGLMSVGLAAIEVDETGFPIRILNIQSVIHDGGIDPQLGKKKSISRKAISGVARRTRRMRRRKVVRLRQLDATLESLGFPIVEPDSLDTWEIWLTRAKLASSYIQDDETRKEDVSIALRHIARHRGWRNPYSNVESLFVDVAPSEQYEELRRKAEEKLGTSLSGNPTSAEIVECILKRQVGEVQLRTRSRKGVNGNAVEKEGLLPTKLMQSDNAAEIRRIFKVQRIDDETGRKLLRAVFKACSPKGSVERRVGRDALAPGLPRALKASLAFQEYRIANVLTNLVISEDGTKRKLTIAEKQRVFGFLSSNETDDITWIDVAEKLGLERRQIQGVGCLTADGEERISSTPPRNITALHIHSAKPVIREKLVAWWKAASPTVRETMVELLSNTVDIDRVREDMDYSSAVAFIDSLGDEELTALDSVDLLSGRAAYSRQTLKQLTERMLNTDDDLHEARKAVFGVDDNWKPPVDAISTSVGNPAVDRVLKIVNRYLLACQKRWRNPQSVQIEHVRESFSSVAKAKETERVQGERARYRNDLRRELCEQEGLNKIRESDIRRWESVQRQNGTCLYCGSPITFRTCEMDHIVPRKGVGSTNTRVNLAAACAACNKLKSNTAFSVWARTEGAANRKVSQRDAIERVKTFIFNKSVPPREQRAFKQAVISRLRQAESDPAIDNRSIESVAWMADELHRRIEAYFNQDADVSGNTPATQVWVFQGRVTALARKASGIEGRIHFAGEWKKTRLDRRHHAVDAAVIAMMNHSAAQTLVERDSLRLSQWITRKPETWKNYPFSEGQKKTRFKEWLDCMNALLDLLNDALDSDRVPVTRCQRMSLGNSQAHAATIRKMKRVELFSPMDADLIRRASTPALYCALTRLPEYSPEKGLPENRGREIVLNGRHIRSTETVDFFASGAAQLMVRNGSAEIGDSIHHMRIYRYRKTGAKSQEYVYGMIRVFQIDLLHASSENLFAVQLPSQSVSVRYGDKNVVQAIQEGRAEYLGHIVPNDEILISYEGVRMKDSEKIGAYANDFSGTASELAQRRHWVVVGSDVSKLALRPSYLSEEGLENSGSESERLSKQTRKVIEGKGWVVAVNILAKYHPVVIRRNALGEPRFRTNSGMPVSWRWDR

SEQ ID NO: 96 - protein, 1187 aa, Bifidobacterium longum
MLSRQLLGASHLARPVSYSYNVQDNDVHCSYGERCFMRGKRYRIGIDVGLNSVGLAAVEVSDENSPVRLLNAQSVIHDGGVDPQKNKEAITRKNMSGVARRTRRMRRRKRERLHKLDMLLGKFGYPVIEPESLDKPFEEWHVRAELATRYIEDDELRRESISIALRHMARHRGWRNPYRQVDSLISDNPYSKQYGELKEKAKAYNDDATAAEEESTPAQLVVAMLDAGYAEAPRLRWRTGSKKPDAEGYLPVRLMQEDNANELKQIFRVQRVPADEWKPLFRSVFYAVSPKGSAEQRVGQDPLAPEQARALKASLAFQEYRIANVITNLRIKDASAELRKLTVDEKQSIYDQLVSPSSEDITWSDLCDFLGFKRSQLKGVGSLTEDGEERISSRPPRLTSVQRIYESDNKIRKPLVAWWKSASDNEHEAMIRLLSNTVDIDKVREDVAYASAIEFIDGLDDDALTKLDSVDLPSGRAAYSVETLQKLTRQMLTTDDDLHEARKTLFNVTDSWRPPADPIGEPLGNPSVDRVLKNVNRYLMNCQQRWGNPVSVNIEHVRSSFSSVAFARKDKREYEKNNEKRSIFRSSLSEQLRADEQMEKVRESDLRRLEAIQRQNGQCLYCGRTITFRTCEMDHIVPRKGVGSTNTRTNFAAVCAECNRMKSNTPFAIWARSEDAQTRGVSLAEAKKRVTMFTFNPKSYAPREVKAFKQAVIARLQQTEDDAAIDNRSIESVAWMADELHRRIDWYFNAKQYVNSASIDDAEAETMKTTVSVFQGRVTASARRAAGIEGKIHFIGQQSKTRLDRRHHAVDASVIAMMNTAAAQTLMERESLRESQRLIGLMPGERSWKEYPYEGTSRYESFHLWLDNMDVLLELLNDALDNDRIAVMQSQRYVLGNSIAHDATIHPLEKVPLGSAMSADLIRRASTPALWCALTRLPDYDEKEGLPEDSHREIRVHDTRYSADDEMGFFASQAAQIAVQEGSADIGSAIHHARVYRCWKTNAKGVRKYFYGMIRVFQTDLLRACHDDLFTVPLPPQSISMRYGEPRVVQALQSGNAQYLGSLVVGDEIEMDFSSLDVDGQIGEYLQFFSQFSGGNLAWKHWVVDGFFNQTQLRIRPRYLAAEGLAKAFSDDVVPDGVQKIVTKQGWLPPVNTASKTAVRIVRRNAFGEPRLSSAHHMPCSWQWRHE

SEQ ID NO: 97 - protein, 1124 aa, Bifidobacterium longum
  Bifidobacterium longum subsp. longum 2-2B
LTGHSGHTFWPTSSSPPIQLEQEKRPLPQRNTSQNGHTFWPITRERCFMRGKRYRIGIDVGLNSVGLAAVEVSDENSPVRLLNAQSVIHDGGVDPQKNKEAITRKNMSGVARRTRRMRRRKRERLHKLDMLLGKFGYPVIEPESLDKPFEEWHVRAELATRYIEDDELRRESISIALRHMARHRGWRNPYRQVDSLISDNPYSKQYGELKEKAKAYNDDATAAEEESTPAQLVVAMLDAGYAEAPRLRWRTGSKKPDAEGYLPVRLMQEDNANELKQIFRVQRVPADEWKPLFRSVFYAVSPKGSAEQRVGQDPLAPEQARALKASLAFQEYRIANVITNLRIKDASAELRKLTVDEKQSIYDQLVSPSSEDITWSDLCDFLGFKRSQLKGVGSLTEDGEERISSRPPRLTSVQRIYESDNKIRKPLVAWWKSASDNEHEAMIRLLSNTVDIDKVREDVAYASAIEFIDGLDDDALTKLDSVDLPSGRAAYSVETLQKLTRQMLTTDDDLHEARKTLFNVTDSWRPPADPIGEPLGNPSVDRVLKNVNRYLMNCQQRWGNPVSVNIEHVRSSFSSVAFARKDKREYEKNNEKRSIFRSSLSEQLRADEQMEKVRESDLRRLEAIQRQNGQCLYCGRTITFRTCEMDHIVPRKGVGSTNTRTNFAAVCAECNRMKSNTPFAIWARSEDAQTRGVSLAEAKKRVTMFTFNPKSYAPREVKAFKQAVIARLQQTEDDAAIDNRSIESVAWMADELHRRIDWYFNAKQYVNSASIDDAEAETMKTTVSVFQGRVTASARRAAGIEGKIHFIGQQSKTRLDRRHHAVDASVIAMMNTAAAQTLMERESLRESQRLIGLMPGERSWKEYPYEGTSRYESFHLWLDNMDVLLELLNDALDNDRIAVMQSQRYVLGNSIAHDATIHPLEKVPLGSAMSADLIRRASTPALWCALTRLPDYDEKEGLPEDSHREIRVHDTRYSADDEMGFFASQAAQIAVQEGSADIGSAIHHARVYRCWKTNAKGVRKYFYGMIRVFQTDLLRACHDDLFTVPLPPQSISMRYGEPRVVQALQSGNAQYLGSLVVGDEIEMDFPVSMLMVRLASIYNSSRSLVEGTLHGNIGLLMDSLTRRS

SEQ ID NO: 98 - protein, 1138 aa, Bifidobacterium sp.
MNSVGLAAVEVSDENSPVRLLNAQSVIHDGGVDPQKNKEAITRKNMSGVARRTRRMRRRKRERLHKLDMLLGKFGYPVIEPESLDKPFEEWHVRAELATRYIEDDELRRESISIALRHMARHRGWRNPYRQVDSLISDNPYSKQYGELKEKAKAYNDDATAAEEESTPAQLVVAMLDAGYAEAPRLRWRTGSKKPDAEGYLPVRLMQEDNANELKQIFRVQRVPADEWKPLFRSVFYAVSPKGSAEQRVGQDPLAPEQARALKASLAFQEYRIANVITNLRIKDASAELRKLTVDEKQSIYDQLVSPSSEDITWSDLCDFLGFKRSQLKGVGSLTEDGEERISSRPPRLTSVQRIYESDNKIRKPLVAWWKSASDNEHEAMIRLLSNTVDIDKVREDVAYASAIEFIDGLDDDALTKLDSVDLPSGRAAYSVETLQKLTRQMLTTDDDLHEARKTLFNVTDSWRPPADPIGEPLGNPSVDRVLKNVNRYLMNCQQRWGNPVSVNIEHVRSSFSSVAFARKDKREYEKNNEKRSIFRSSLSEQLRADEQMEKVRESDLRRLEAIQRQNGQCLYCGRTITFRTCEMDHIVPRKGVGSTNTRTNFAAVCAECNRMKSNTPFAIWARSEDAQTRGVSLAEAKKRVTMFTFNPKSYAPREVKAFKQAVIARLQQTEDDAAIDNRSIESVAWMADELHRRIDWYFNAKQYVNSASIDDAEAETMKTTVSVFQGRVTASARRAAGIEGKIHFIGQQSKTRLDRRHHAVDASVIAMMNTAAAQTLMERESLRESQRLIGLMPGERSWKEYPYEGTSRYESFHLWLDNMDVLLELLNDALDNDRIAVMQSQRYVLGNSIAHDATIHPLEKVPLGSAMSADLIRRASTPALWCALTRLPDYDEKEGLPEDSHREIRVHDTRYSADDEMGFFASQAAQIAVQEGSADIGSAIHHARVYRCWKTNAKGVRKYFYGMIRVFQTDLLRACHDDLFTVPLPPQSISMRYGEPRVVQALQSGNAQYLGSLVVGDEIEMDFSSLDVDGQIGEYLQFFSQFSGGNLAWKHWVVDGFFNQTQLRIRPRYLAAEGLAKAFSDDVVPDGVQKIVTKQGWLPPVNTASKTAVRIVRRNAFGEPRLSSAHHMPCSWQWRHE

SEQ ID NO: 99 - protein, 1151 aa, Bifidobacterium sp.
  Bifidobacterium sp. 12_1_47BFAA
MRGKRYRIGIDVGLNSVGLAAVEVSDENSPVRLLNAQSVIHDGGVDPQKNKEAITRKNMSGVARRTRRMRRRKRERLHKLDMLLGKFGYPVIEPESLDKPFEEWHVRAELATRYIEDDELRRESISIALRHMARHRGWRNPYRQVDSLISDNPYSKQYGELKEKAKAYNDDATAAEEESTPAQLVVAMLDAGYAEAPRLRWRTGSKKPDAEGYLPVRLMQEDNANELKQIFRVQRVPADEWKPLFRSVFYAVSPKGSAEQRVGQDPLAPEQARALKASLAFQEYRIANVITNLRIKDASAELRKLTVDEKQSIYDQLVSPSSEDITWSDLCDFLGFKRSQLKGVGSLTEDGEERISSRPPRLTSVQRIYESDNKIRKPLVAWWKSASDNEHEAMIRLLSNTVDIDKVREDVAYASAIEFIDGLDDDALTKLDSVDLPSGRAAYSVETLQKLTRQMLTTDDDLHEARKTLFNVTDSWRPPADPIGEPLGNPSVDRVLKNVNRYLMNCQQRWGNPVSVNIEHVRSSFSSVAFARKDKREYEKNNEKRSIFRSSLSEQLRADEQMEKVRESDLRRLEAIQRQNGQCLYCGRTITFRTCEMDHIVPRKGVGSTNTRTNFAAVCAECNRMKSNTPFAIWARSEDAQTRGVSLAEAKKRVTMFTFNPKSYAPREVKAFKQAVIARLQQTEDDAAIDNRSIESVAWMADELHRRIDWYFNAKQYVNSASIDDAEAETMKTTVSVFQGRVTASARRAAGIEGKIHFIGQQSKTRLDRRHHAVDASVIAMMNTAAAQTLMERESLRESQRLIGLMPGERSWKEYPYEGTSRYESFHLWLDNMDVLLELLNDALDNDRIAVMQSQRYVLGNSIAHDATIHPLEKVPLGSAMSADLIRRASTPALWCALTRLPDYDEKEGLPEDSHREIRVHDTRYSADDEMGFFASQAAQIAVQEGSADIGSAIHHARVYRCWKTNAKGVRKYFYGMIRVFQTDLLRACHDDLFTVPLPPQSISMRYGEPRVVQALQSGNAQYLGSLVVGDEIEMDFSSLDVDGQIGEYLQFFSQFSGGNLAWKHWVVDGFFNQTQLRIRPRYLAAEGLAKAFSDDVVPDGVQKIVTKQGWLPPVNTASKTAVRIVRRNAFGEPRLSSAHHMPCSWQWRHE

SEQ ID NO: 100 - protein, 1092 aa, Brevibacillus laterosporus
  Brevibacillus laterosporus GI-9
MAYTMGIDVGIASCGWAIVDLERQRIIDIGVRTFEKAENPKNGEALAVPRREARSSRRRLRRKKHRIERLKYMFVRNGLAVDIQHLEQTLRSQNEIDVWQLRVDGLDRMLTQKEWLRVLIHLAQRRGFQSNRKTDGSSEDGQVLVNVTENDRLMEEKDYRTVAEMMVKDEKFSDHKRNKNGNYHGVVSRASLLVEIHTLFESQRQHHNFLASKDFELEYINIWSSQRPVATKDQIEKMIGTCTFLPKEKRAPKASWHFQYFMLLQTINHIRITNAQGTRPLNKEEIEQVVNMALTKSKVSYHDIRKVLDLSEEYQFVGLDYGKEDEKKKVESKETIIKLDDYHKLNKIFNEVELAKGETWEAVDYDTVAYALTFFKDDEDIRDYLQNKYKDSKNRLVKNVANKEYTNELIEKVSTLSFRKVGHLSLKALRKIIPFLEQGMTYDKACQAAGFNFQGISKKKRSVVLPVIDQISNPVVNRALTQTRKVINALIKKYGSPETIHIETARELSKRFDERKNITKDYKENRDKNERAKKHLSELGIINPTGLDIVKYKLWCEQQGRCMYSNQPISFERLRESGYTEVDHIIPYSRSMNDSYNNRVLVMTRENREKSNQTPYEYMGNDTQRWDEFEQRVTTNPQIKKEKRQNLLLKGFTNRRELEMLERNLNDTRHITKYLSHFISTNLEFSPSDKKKKVVNTSGRITSHLRSRWGLEKNREQNDLHHAMDAVVIAVTSDSFIQQVTNYYKRKERRELNGDDKFPLPWKFFREEVIARLSPNPKEQIEALPNHFYSEDELADLQPIFVSRMPKRSITGEAHQAQFRRVVGKTKEGKNITAKKTALVDISYDKNGDFNMYGRETDPATYEAIKERYLEFGGNAKKAFSTDLHKPKKDGTKGPLIKSVRIMENKTLVHPVNKGKGVVYNSSIVRTDVFQRKEKYYLLPVYVTDVTKGKLPNKVIAAKKGYDDWIEVDDSFTFLYSLYPNDLIFIRQNPKKKISLKKRIESHSISDSKEVQEILTYYKGVDSSTAAIEFITHDGSYYAKGVGVQNLDCFEKYQVDILGNYSKVKGEKRLELETSDNNHKGKDVNSIKSTSR

SEQ ID NO: 101 - protein, 1428 aa, Burkholderiales bacterium
  Burkholderiales bacterium 1_1_47
MGKTHIIGVGLDLGGTYTGTFITSHPSDEAEHRDHSSAFTVVNSEKLSFSSKSRTAVRHRVRSYKGFDLRRRLLLLVAEYQLLQKKQTLAPEERENLRIALSGYLKRKGYARTEAETDTSVLESLDPSVFSSAPSFTNFFNDSEPLNIQWEAIANSPETTKALNKELSGQKEADFKKYIKTSFPEYSAKEILANYVEGRRAILDASKYIANLQSLGHKHRSKYLSDILQDMKRDSRITRLSEAFGSTDNLWRIIGNISNLQERAVRWYFNDAKFEQGQEQLDAVKLKNVLVRALKYLRSDDKEWSASQKQIIQSLEQSGDVLDVLAGLDPDRTIPPYEDQNNRRPPEDQTLYLNPKALSSEYGEKWKSWANKFAGAYPLLTEDLTEILKNTDRKSRIKIRSDVLPDSDYRLAYILQRAFDRSIALDECSIRRTAEDFENGVVIKNEKLEDVLSGHQLEEFLEFANRYYQETAKAKNGLWFPENALLERADLHPPMKNKILNVIVGQALGVSPAEGTDFIEEIWNSKVKGRSTVHSICNAIENERKTYGPYFSEDYKFVKTALKEGKTEKELSKKFAAVIKVLKMVSEVVPFIGKELRLSDEAQSKFDNPYSLAQLYNLIETERNGFSKVSLAAHLENAWRMTMTDGSAQCCRLPADCVRPFDGFIRKAIDRNSWEVAKRIAEEVKKSVDFTNGTVKIPVAIEANSFNFTASLTDLKYIQLKEQKLKKKLEDIQRNEENQEKRWLSKEERIRADSHGICAYTGRPLDDVGEIDHIIPRSLTLKKSESIYNSEVNLIFVSAQGNQEKKNNIYLLSNLAKNYLAAVFGASDLSQITNEIESTVLQLKAAGRLGYFDLLSEKERACARHALFLNSDSEARRAVIDVLGSRRKASVNGTQAWFVRSIFSKVRQALAAWTQETGNELIFDAISVPAADSSEMRKRFAEYRPEFRKPKVQPVASHSIDAMCIYLAACSDPFKTKRMGSQLAIYEPINFDNLFTGSCQVIQNTPRNFSDKTNIANSPIFKETIYAERFLDIIVSRGEIFIGYPSNMPFEEKPNRISIGGKDPFSILSVLGAYLDKAPSSEKEKLTIYRVVKNKAFELFSKVAGSKFTAEEDKAAKILEALHFVTVKQDVAATVSDLIKSKKELSKDSIENLAKQKGCLKKVEYSSKEFKFKGSLIIPAAVEWGKVLWNVFKENTAEELKDENALRKALEAAWPSSFGTRNLHSKAKRVFSLPVVATQSGAVRIRRKTAFGDFVYQSQDTNNLYSSFPVKNGKLDWSSPIIHPALQNRNLTAYGYRFVDHDRSISMSEFREVYNKDDLMRIELAQGTSSRRYLRVEMPGEKFLAWFGENSISLGSSFKFSVSEVFDNKIYTENAEFTKFLPKPREDNKHNGTIFFELVGPRVIFNYIVGGAASSLKEIFSEAGKERS

SEQ ID NO: 102 - protein, 1442 aa, Caenispirillum salinarum
  Caenispirillum salinarum AK4
MPVLSPLSPNAAQGRRRWSLALDIGEGSIGWAVAEVDAEGRVLQLTGTGVTLFPSAWSNENGTYVAHGAADRAVRGQQQRHDSRRRRLAGLARLCAPVLERSPEDLKDLTRTPPKADPRAIFFLRADAARRPLDGPELFRVLHHMAAHRGIRLAELQEVDPPPESDADDAAPAATEDEDGTRRAAADERAFRRLMAEHMHRHGTQPTCGEIMAGRLRETPAGAQPVTRARDGLRVGGGVAVPTRALIEQEFDAIRAIQAPRHPDLPWDSLRRLVLDQAPIAVPPATPCLFLEELRRRGETFQGRTITREAIDRGLTVDPLIQALRIRETVGNLRLHERITEPDGRQRYVPRAMPELGLSHGELTAPERDTLVRALMHDPDGLAAKDGRIPYTRLRKLIGYDNSPVCFAQERDTSGGGITVNPTDPLMARWIDGWVDLPLKARSLYVRDVVARGADSAALARLLAEGAHGVPPVAAAAVPAATAAILESDIMQPGRYSVCPWAAEAILDAWANAPTEGFYDVTRGLFGFAPGEIVLEDLRRARGALLAHLPRTMAAARTPNRAAQQRGPLPAYESVIPSQLITSLRRAHKGRAADWSAADPEERNPFLRTWTGNAATDHILNQVRKTANEVITKYGNRRGWDPLPSRITVELAREAKHGVIRRNEIAKENRENEGRRKKESAALDTFCQDNTVSWQAGGLPKERAALRLRLAQRQEFFCPYCAERPKLRATDLFSPAETEIDHVIERRMGGDGPDNLVLAHKDCNNAKGKKTPHEHAGDLLDSPALAALWQGWRKENADRLKGKGHKARTPREDKDFMDRVGWRFEEDARAKAEENQERRGRRMLHDTARATRLARLYLAAAVMPEDPAEIGAPPVETPPSPEDPTGYTAIYRTISRVQPVNGSVTHMLRQRLLQRDKNRDYQTHHAEDACLLLLAGPAVVQAFNTEAAQHGADAPDDRPVDLMPTSDAYHQQRRARALGRVPLATVDAALADIVMPESDRQDPETGRVHWRLTRAGRGLKRRIDDLTRNCVILSRPRRPSETGTPGALHNATHYGRREITVDGRTDTVVTQRMNARDLVALLDNAKIVPAARLDAAAPGDTILKEICTEIADRHDRVVDPEGTHARRWISARLAALVPAHAEAVARDIAELADLDALADADRTPEQEARRSALRQSPYLGRAISAKKADGRARAREQEILTRALLDPHWGPRGLRHLIMREARAPSLVRIRANKTDAFGRPVPDAAVWVKTDGNAVSQLWRLTSVVTDDGRRIPLPKPIEKRIEISNLEYARLNGLDEGAGVTGNNAPPRPLRQDIDRLTPLWRDHGTAPGGYLGTAVGELEDKARSALRGKAMRQTLTDAGITAEAGWRLDSEGAVCDLEVAKGDTVKKDGKTYKVGVITQGIFGMPVDAAGSAPRTPEDCEKFEEQYGIKPWKAKGIPLA

SEQ ID NO: 103 - protein, 984 aa, Campylobacter coli
  Campylobacter coli 1098
MARILAFDIGISSIGWAFSENDELKDCGVRIFTKAENPKTGESLALPRRLARSARKRLARRKARLNHLKHLIANEFKLNYEDYQSFDESLAKAYKGSLISPYELRFRALNELLSKQDFARVILHIAKRRGYDDIKNNGDEEKSEILKAIKQNEEKLVNYQSVGEYLYKEYFQKFKENSKEFINVRNKKESYERCIAQSFLKDELKLIFQKQREFGFSFSKKFEEEVLSVAFYKRALKDFSHLVGNCSFFTDEKRAPKNSPLAFMFVALTRIINLLNNLKNTEGILYTKDDLNALLNEVLKNGTLTYKQTKKLLGLSDDYEFKGEKGTYFIEFKKYKEFIKALGEHNLSQDDLNEIAKDITLIKDEIKLKKALAKYDLNQNQIDSLSKLEFKDHLNISFKALKLITPLMLEGKKYDEACNELNLKVAINEDKKDFLPAFNETYYKDEVTNPVVLRAIKEYRKVLNALLKKYGKVHKINIELAREVGKNYSQRAKIEKEQNENYKAKKDAELECEKLGLKINSKNILKLRLFKEQKEFCAYSGEKIKISDLQDEKMLEIDHIYPYSRSFDDSYMNKVLVFTKQNQEKLNQTPFEAFGNDSAKWQKIEVLAKNLPTKKQKRILDKNYKDKEQKNFKDRNLNDTRYIARLVLNYTKDYLDFLPLSDDENTKLNDTQKGSKVHVEAKSGMLTSALRHTWGFSAKDRNNHLHHAIDAVIIAYANNSIVKAFSDFKKEQESNSAELYAKKISELDYKNKRKFFEPFSGFRQKVLDKIDEIFVSKPERKKPSGALHEETFRKEEEFYQSYGGKEGVLKALELGKIRKVNGKIVKNGDMFRVDIFKHKKTNKFYAVPIYTMDFALKVLPNKAVARSKKGEIKDWILMDENYEFCFSLYKDSLILIQTKDMQEPEFVYYNAFTSSTVSLIVSKHDNKFETLSKNQKILFKNANEKEVIAKSIGIQNLKVFEKYIVSALGEVTKAEFRQREDFKK

SEQ ID NO: 104 - protein, 984 aa, Campylobacter coli
  Campylobacter coli 111-3
MARILAFDIGISSIGWAFSENDELKDCGVRIFTKAENPKTGESLALPRRLARSARKRLARRKARLNHLKHLIANEFKLNYEDYQSFDESLAKAYKGSLISPYELRFRALNELLSKQDFARVILHIAKRRGYDDIKNNGDEEKSEILKAIKQNEEKLVNYQSVGEYLYKEYFQKFKENSKEFINVRNKKESYERCIAQSFLKDELKLIFQKQREFGFSFSKKFEEEVLSVAFYKRALKDFSHLVGNCSFFTDEKRAPKNSPLAFMFVALTRIINLLNNLKNTEGILYTKDDLNTLLNEVLKNGTLTYKQTKKLLGLSDDYEFKGEKGTYFIEFKKYKEFIKALGEHNLSQDNLNEIAKDITLIKDEIKLKKALAKYDLNQNQIDSLSKLEFKDHLNISFKALKLITPLMLEGKKYDEAYNELNLKVAINEDKKDFLPAFNETYYKDEVTNPVVLRAIKEYRKVLNALLKKYGKVHKINIELAREVGKNHSQRAKIEKEQNENYKAKKDAELECEKLGLKINSKNILKLRLFKEQKEFCAYSGEKIKISDLQDEKMLEIDHIYPYSRSFDDSYMNKVLVFTKQNQEKLNQTPFEAFGNDSAKWQKIEVLAKNLPTKKQKRILDKNYKDKEQKDFKDRNLNDTRYIARLVLNYTKDYLDFLPLSDDENTKLNDTQKGSKVHVEAKSGMLTSALRHTWGFSAKDRNNHLHHAIDAVIIAYANNSIVKAFSDFKKEQESNSAELYAKKISELDYKNKRKFFEPFSGFRQKVLDKIDEIFVSKPERKKPSGALHEETFRKEEEFYQSYGGKEGVLKALELGKIRKVNGKIVKNGDMFRVDIFKHKKTNKFYAVPIYTMDFALKVLPNKAVARSKKGEIKDWILMDENYEFCFSLYKDSLILIQTKDMQEPELVYFNAFTSSTVSLIVSKHDNKFETLSKNQKILFKNANEKEVIAKSIGIQNLKVFEKYIVSALGEVTKAEFRQREDFKK

SEQ ID NO: 105 - protein, 987 aa, Campylobacter coli
  Campylobacter coli 132-6
MARILAFDIGISSIGWAFSENDELKDCGVRIFTKAENPKTGESLALPRRLARSARKRLARRKARLNHLKHLIANEFKLNYEDYQSFDESLAKAYKGSLISPYELRFRALNELLSKQDFARVILHIAKRRGYDDIKNNGDEEKSEILKAIKQNEEKLVNYQSVGEYLYKEYFQKFKENSKEFINVRNKKESYERCIAQSFLKDELKLIFQKQREFGFSFSKKFEEEVLSVAFYKRALKDFSHLVGNCSFFTDEKRAPKNSPLAFMFVALTRIINLLNNLKNTEGILYTKDDLNTLLNEVLKNGTLTYKQTKKLLGLSDDYEFKGEKGTYFIEFKKYKEFIKALGEHNLSQDNLNEIAKDITLIKDEIKLKKALAKYDLNQNQIDSLSKLEFKDHLNISFKALKLITPLMLEGKKYDEAYNELNLKVAINEDKKDFLPAFNETYYKDEVTNPVVLRAIKEYRKVLNALLKKYGKVHKINIELAREVGKNHSQRAKIEKEQNENYKAKKDAELECEKLGLKINSKNILKLRLFKEQKEFCAYSGEKIKISDLQDEKMLEIDHIYPYSRSFDDSYMNKVLVFTKQNQEKLNQTPFEAFGNDSAKWQKIEVLAKNLPTKKQKRILDKNYKDKEQKDFKDRNLNDTRYIARLVLNYTKDYLDFLPLSDDENTKLNDTQKGSKVHVEAKSGMLTSALRHTWGFSAKDRNNHLHHAIDAVIIAYANNSIVKAFSDFKKEQESNSAELYAKKISELDYKNKRKFFEPFSGFRQKVLDKIDEIFVSKPERKKPSGALHEETFRKEEEFYQSYGGKEGVLKALELGKIRKVNGKIVKNGDMFRVDIFKHKKTNKFYAVPIYTMDFALKVLPNKAVARSKKGEIKDWILMDENYEFCFSLYKDSLILIQTKDMQEPELVYFNAFTSSTVSLIVSKHDNKFETLSKNQKILFKNANEKEVIAKSIGIQNLKVFEKYIVSALGEVTKAEFRQREDFKNELR

SEQ ID NO: 106 - protein, 984 aa, Campylobacter coli
  Campylobacter coli 151-9
MARILAFDIGISSIGWAFSENDELKDCGVRIFTKAENPKTGESLALPRRLARSARKRLARRKARLNHLKHLIANEFKLNYEDYQSFDESLAKAYKGSLISPYELRFRALNELLSKQDFARVILHIAKRRGYDDIKNNGDEEKSEILKAIKQNEEKLVNYQSVGEYLYKEYFQKFKENSKEFINVRNKKESYERCIAQSFLKDELKLIFQKQREFGFSFSKKFEEEVLSVAFYKRALKDFSHLVGNCSFFTDEKRAPKNSPLAFMFVALTRIINLLNNLKNTEGILYTKDDLNTLLNEVLKNGTLTYKQTKKLLGLSDDYEFKGEKGTYFIEFKKYKEFIKALGEHNLSQDNLNEIAKDITLIKDEIKLKKALAKYDLNQNQIDSLSKLEFKDHLNISFKALKLITPLMLEGKKYDEAYNELNLKVAINEDKKDFLPAFNETYYKDEVTNPVVLRAIKEYRKVLNALLKKYGKVHKINIELAREVGKNHSQRAKIEKEQNENYKAKKDAELECEKLGLKINSKNILKLRLFKEQKEFCAYSGEKIKISDLQDEKMLEIDHIYPYSRSFDDSYMNKVLVFTKQNQEKLNQTPFEAFGNDSAKWQKIEVLAKNLPTKKQKRILDKNYKDKEQKDFKDRNLNDTRYIARLVLNYTKDYLDFLPLSNDENTKLNDTQKGSKVHVEAKSGMLTSALRHTWGFSAKDRNNHLHHAIDAVIIAYANNSIVKAFSDFKKEQESNSAELYAKKISELDYKNKRKFFEPFSGFRQKVLDKIDEIFVSKPERKKPSGALHEETFRKEEEFYQSYGGKEGVLKALELGKIRKVNGKIVKNGDMFRVDIFKHKKTNKFYAVPIYTMDFALKVLPNKAVARSKKGEIKDWILMDENYEFCFSLYKDSLILIQTKDMQEPELVYFNAFTSSTVSLIVSKHDNKFETLSKNQKILFKNANEKEVIAKSIGIQNLKVFEKYIVSALGEVTKAEFRQREDFKK

SEQ ID NO: 107 - protein, 984 aa, Campylobacter coli
  Campylobacter coli 1909
MARILAFDIGISSIGWAFSENDELKDCGVRIFTKAENPKTGESLALPRRLARSARKCLARRKARLNHLKHLIANEFKLNYEDYQSFDESLAKAYKGSLISPYELRFRALNELLSKQDFARVILHIAKRRGYDDIKNNGDEEKSEILKAIKQNEEKLVNYQSVGEYLYKEYFQKFKENSKEFINVRNKKESYERCIAQSFLKDELKLIFQKQREFGFSFSKKFEEEVLSVAFYKRALKDFSHLVGNCSFFTDEKRAPKNSPLAFMFVALTRIINLLNNLKNTEGILYTKDDLNALLNEVLKNGTLTYKQTKKLLGLSDDYEFKGEKGTYFIEFKKYKEFIKALGEHNLSQDDLNEIAKDITLIKDEIKLKKALAKYDLNQNQIDSLSKLEFKDHLNISFKALKLITPLMLEGKKYDEACNELNLKVAINEDKKDFLPAFNETYYKDEVTNPVVLRAIKEYRKVLNALLKKYGKVHKINIELAREVGKNHSQRAKIEKEQNENYKAKKDAELECEKLGLKINSKNILKLRLFKEQKEFCAYSGEKIKISDLQDEKMLEIDHIYPYSRSFDDSYMNKVLVFTKQNQEKLNQTPFEAFGNDSAKWQKIEVLAKNLPTKKQKRILDKNYKDKEQKNFKDRNLNDTRYIARLVLNYTKDYLDFLPLSDDENTKLNDTQKGSKVHVEAKSGMLTSALRHTWGFSAKDRNNHLHHAIDAVIIAYANNSIVKAFSDFKKEQESNSAELYAKKISELDYKNKRKFFEPFSGFRQKVLDKIDEIFVSKPERKKPSGALHEETFRKEEEFYQSYGGKEGVLKALELGKIRKVNGKIVKNGDMFRVDIFKHKKTNKFYAVPIYTMDFALKVLPNKAVARSKKGEIKDWILMDENYEFCFSLYKDSLILIQTKDMQEPEFVYYNAFTSSTVSLIVSKHDNKFETLSKNQKILFKNANEKEVIAKSIGIQNLKVFEKYIVSALGEVTKAEFRQREDFKK

SEQ ID NO: 108 - protein, 965 aa, Campylobacter coli
  Campylobacter coli 1957
MKIIGFNLGIANIGWALRENDEIIDCGVRVFDIPENPKNGNSLALERRENKARMKIVKRKKARMLATKTFLKKELNVDLSKLFLIGSTQSIYELRTKALSSLISKEELSAIILHIAKHRGYDDSALKNENGTIIEALNKNKEAMLKFKSVGEYFYKNFVQNKEVKKIRNTTEDYSNSVPRSLLKQELDLILDKQKELGLIKNADFKEKLFEIIFFKRPLKDFSNKIGNCIFFENEKRAAKNTISACEFVALGKVVNLLKSIEKDIGIVYEKDSINEIMSIILDKTSISYKKIRDILNLPQDINFKGLDYSKNNAENSKLVDLKKLNEFKKALGDGFANLDKDILDSIATDITLTKDTATLKEKLKNYNVLNAEQIEKLSELVFNDHINLSLKALKQIIPLMYEGKRYDEACELCNFTIAKNQEKNEYLPLFEKTRFAKDISSPVVIRAICEFRKLLNDIIRRYGSVHKIHLELTRDFGISFNDRKKIIKEIEQNEQSRIKALETIKELKLEETSKNIQIVRLFEDQKGICPYSGLKMDLKCLDELVIDYIRPYNRSLDDSYSNKILTFKKLNDLKQGKTPFEAFGEDEKLWAEINERIKEYNGKKRFKIFDKFFKDKKPFDFTEQTLQDTRWLTKLVASYLNEYLLFLPINEDENTALGYGEKGSKQHVVLSSGMITQMLRNFWYLGFKNHKDYKNNAMDAIIVAFTTNSIIFAFNNFKKELDLAKAEFYANKISESDYLLKRKFLPPFSGFKEQALEKVKNIFVSHSLKIKNKGTLHELTPLKIKELKNTYGDLDLAVKLGKIRKYNDKYYANAKGSLVRTDLFADKENKFHAVSIYKADFSTKKLPNKTPATTSNGETKEGIEMNENYNFCMSLYKNTPISVKIKGMKEPIICYYHGFNTSGSKITYKKHDNNYHNLSEDEMVVFRKNDKESIVVGKILEIKKYSISPSGELSLIENEERKWF

SEQ ID NO: 109 - protein, 984 aa, Campylobacter coli
  Campylobacter coli 2692
MARILAFDIGISSIGWAFSENDELKDCGVRIFTKAENPKTGESLALPRRLARSARKRLARRKARLNHLKHLIANEFKLNYEDYQSFDESLAKAYKGSLISPYELRFRALNELLSKQDFARVILHIAKRRGYDDIKNSDDKEKGAILKAIKQNEEKLTNYQSVGEYLYKEYFQKFKENSKEFTNVRNKKESYERCIAQSFLKDELKLIFKKQREFGFSFSKKFEEEVLSVAFYKRALKDFSHLVGNCSFFTDEKRAPKNSPLAFMFVALTRIINLLNNLKNTEGILYTKDDLNALLNEVLKNGTLTYKQTKKLLGLSDDYEFKGEKGTYFIEFKKYKEFIKALGDHSLSQDDLNEIAKDITLIKDEIKLKKALAKYDLNQNQIDSLSKLEFKDHLNISFKALKLITPLMLEGKKYDEACNELNLKVAINEDKKDFLPAFNETYYKDEVTNPVVLRAIKEYRKVLNALLKKYGKVHKINIELAREVGKNYSQRAKIEKEQNENYKAKKDAELECEKLGLKINSKNILKLRLFKEQKEFCAYSGEKIKISDLQDEKMLEIDHIYPYSRSFDDSYMNKVLVFTKQNQEKLNQTPFEAFGNDSAKWQKIEVLAKNLPTKKQKRILDKNYKDKEQKDFKDRNLNDTRYIARLVLNYTKDYLDFLPLSDDENTKLNDTQKGSKVHVEAKSGMLTSALRHTWGFSAKDRNNHLHHAIDAVIIAYANNSIVKAFSDFKKEQESNSAELYAKKISELDYKNKRKFFEPFSGFRQKVLDKIDEIFVSKPERKKPSGALHEETFRKEEEFYQSYGGKEGVLKALELGKIRKVNGKIVKNGDMFRVDIFKHKKTNKFYAVPIYTMDFALKVLPNKAVARSKKGEIKDWILMDENYEFCFSLYKDSLILIQTKDMQEPEFVYYNAFTSSTVSLIVSKHDNKFETLSKNQKILFKNANEKEVIAKSIGIQNLKVFEKYIVSALGEVTKAEFRQREDFKK

SEQ ID NO: 110 - protein, 984 aa, Campylobacter coli
  Campylobacter coli 59-2
MARILAFDIGISSIGWAFSENDELKDCGVRIFTKAENPKTGESLALPRRLARSARKRLARRKARLNHLKHLIANEFKLNYEDYQSFDESLAKAYKGSLISPYELRFRALNELLSKQDFARVILHIAKRRGYDDIKNNGDEEKGKILKAIKQNEEKLVNYQSVGEYLYKEYFQKFKENSKEFINVRNKKESYERCITQSFLKYELKLIFQKQREFGFSFSKKFEEEVLSVAFYKRALKDFSHLVGNCSFFSDEKRAPKNSPLAFMFVALTRIINLLNNLKNTEGILYTKDDLNALLNEVLKNGTLTYKQTKKLLGLSDDYEFKGEKGTYFIEFKKYKEFIKALGEHNLSQDDLNEIAKDITLIKDEIKLKKALAKYDLNQNQIDSLSKLEFKDHLNISFKALKLITPLMLEGKKYDEACNELNLKVAINEDKKDFLPAFNETYYKDEVTNPVVLRAIKEYRKVLNALLKKYGKVHKINIELAREVGKNYSQRAKIEKEQNENYKAKKDAELECEKLGLKINSKNILKLRLFKEQKEFCAYSGEKIKISDLQDEKMLEIDHIYPYSRSFDDSYMNKVLVFTKQNQEKLNQTPFEAFGNDSAKWQKIEVLAKNLPTKKQKRILDKNYKDKEQKNFKDRNLNDTRYIARLVLNYTKDYLDFLPLSDDENTKLNDTQKGSKVHVEAKSGMLTSALRHTWGFSAKDRNNHLHHAIDAVIIAYANNSIVKAFSDFKKEQESNSAELYAKKISELDYKNKRKFFEPFSGFRQKVLDKIDEIFVSKPERKKPSGALHEETFRKEEEFYQSYGGKEGVLKALELGKIRKVNGKIVKNGDMFRVDIFKHKKTNKFYAVPIYTMDFALKVLPNKAVARSKKGEIKDWILMDENYEFCFSLYKDSLILIQTKDMQEPEFVYYNAFTSSTVSLIVSKHDNKFETLSKNQKILFKNANEKEVIAKSIGIQNLKVFEKYIVSALGEVTKAEFRQREDFKK

SEQ ID NO: 111 - protein, 965 aa, Campylobacter coli
  Campylobacter coli 67-8
MKIIGFNLGIANIGWALRENDEIIDCGVRVFDIPENPKNGNSLALERRENKARMKIVKRKKARMLATKTFLKKELNVDLSKLFLIGSTQSIYELRTKALSSLISKEELSAIILHIAKHRGYDDSALKNENGTIIEALNKNKEAMLKFKSVGEYFYKNFVQNKEVKKIRNTTEDYSNSVPRSLLKQELDLILDKQKELGLIKNADFKAKLFEIIFFKRPLKDFSNKIGNCIFFENEKRAAKNTISACEFVALGKVVNLLKSIEKDIGIVYEKDSINEIMSIILDKTSISYKKIRDILNLPQDINFKGLDYSKNNAENSKLVDLKKLNEFKKALGDGFANLDKDILDSIATDITLTKDTATLKEKLKNYNVLNAEQIEKLSELVFNDHINLSLKALKQIIPLMYEGKRYDEACELCNFTIAKNQEKNEYLPLFEKTRFAKDISSPVVIRAICEFRKLLNDIIRRYGSVHKIHLELTRDFGISFNDRKKIIKEIEQNEQSRIKALETIKELKLEETSKNIQIVRLFEDQKGICPYSGLKMDLKCLDELVIDYIRPYNRSLDDSYSNKVLTFKKLNDLKQGKTPFEAFGEDEKLWAEINERIKEYNGKKRFKIFDKFFKDKKPFDFTEQTLQDTRWLTKLVASYLNEYLSFLPISEDENTALGYGEKGSKQHVVLSSGMITQMLRNFWYLGFKNHKNYKNNAMDAIIVAFTTNSIIFAFNNFKKELDLAKAEFYANKISESDYLLKRKFLPPFSGFKEQALEKVKNIFVSHSLKIKNKGTLHELTPLKIKELKNTYGDLDLAVKLGKIRKYNDKYYANTKGSLVRTDLFVDKENKFHAVSIYKADFSTKKLPNKTPATTSNGETKEGIEMNENYNFCMSLYKNTPVSVKIKGMKEPIICYYHGFNTSGSKITYKKHDNNYHNLSEDEMVVFRKNDKESIVVGKILEIKKYSISPSGELSLIENEKRKWF

SEQ ID NO: 112 - protein, 965 aa, Campylobacter coli
  Campylobacter coli 80352
MKIIGFNLGIANIGWALRENDEIIDCGVRVFDIPENPKNGNSLALERRENKARMKIVKRKKARMLATKTFLKKELNVDLSKLFLIGSTQSIYELRTKALSSLISKEELSAIILHIAKHRGYDDSALKNENGTIIEALNKNKEAMLKFKSVGEYFYKNFVQNKEVKKIRNTTEDYSNSVPRSLLKQELDLILDKQKELGLIKNADFKAKLFEIIFFKRPLKDFSNKIGNCIFFENEKRAAKNTISACEFVALGKVVNLLKSIEKDIGIVYEKDSINEIMSIILDKTSISYKKIRDILNLPQDINFKGLDYSKNNVENSKLVDLKKLNEFKKALGDGFTNLDKDILDSIATDITLTKDTATLKEKLKNYNVLNAEQIEKLSELVFNDHINLSLKALKQIIPLMYEGKRYDEACELCNFTIAKNQEKNEYLPLFEKTRFAKDISSPVVIRAICEFRKLLNDIIRRYGSVHKIHLELTRDFGISFNDRKKIIKEIEQNEQSRIKALETIKELKLEETSKNIQIVRLFEDQKGICPYSGLKMDLKCLDELVIDYIRPYNRSLDDSYSNKVLTFKKLNDLKQGKTPFEAFGEDEKLWAEINERIKEYNGKKRFKIFDKFFKDKKPFDFTEQTLQDTRWLTKLVASYLNEYLSFLPISEDENTALGYGEKGSKQHVILSSGMITQMLRNFWYLGFKNHKDYKNNAMDAIIVAFTTNSIIFTFNNFKKELDLAKAEFYANKISESDYLLKRKFLPPFSGFKEQALEKVKNIFVSHSLKIKNKGTLHELTPLKIKELKNTYGDLDLAVKLGKIRKYNDKYYANAKGSLVRTDLFADKENKFHAVSIYKADFSTKKLPNKTPATTSNGETKEGIEMNENYNFCMSLYKNTPISVKIKGMKEPIICYYHGFNTSGSKITYKKHDNNYHNLSEDEMVVFRKNDKESIVVGKILEIKKYSISPSGELSLIENEERKWF

SEQ ID NO: 113 - protein, 987 aa, Campylobacter coli
  Campylobacter coli 80352
MARILAFDIGISSIGWAFSENDELKDCGVRIFTKAENPKTGESLALPRRLARSARKRLARRKARLNHLKHLIANEFKLNYEDYQSFDESLAKAYKGSLISPYELRFRALNELLSKQDFARVILHIAKRRGYDDIKNSDDKEKGAILKAIKQNEEKLANYQSVGEYLYKEYFQKFKENSKEFTNVRNKKESYERCIAQSFLKDELKLIFKKQREFGFSFSKKFEEEVLSVAFYKRALKDFSHLVGNCSFFTDEKRAPKNSPLAFMFVALTRIINLLNNLKNTEGILYTKDDLNALLNEVLKNGTLTYKQTKKLLGLSDDYEFKGEKGTYFIEFKKYKEFIKALGDHSLSQDDLNEIAKDITLIKDEIKLKKALAKYDLNQNQIDSLSKLEFKDHLNISFKALKLITPLMLEGKKYDEACNELNLKVAINEDKKDFLPAFNETYYKDEVTNPVVLRAIKEYRKVLNALLKKYGKVHKINIELAREVGKNYSQRAKIEKEQNENYKAKKDAELECEKLGLKINSKNILKLRLFKEQKEFCAYSGEKIKISDLQDEKMLEIDHIYPYSRSFDDSYMNKVLVFTKQNQEKLNKTPFEAFGNDSTKWQKIEVLAKNLPEKKQKRILDKNYKDKEQKDFKDRNLNDTRYIARLVLNYTKDYLDFLPLSDDENTKLNDTQKGSKVHVEAKSGMLTSALRHTWGFSTKDRNNHLHHAIDAVIIAYANNSIVKAFSDFKKEQESNSAELYAKKISELDYKNKRKFFEPFSGFRQKVLDKIDEIFVSKPERKKPSGALHEETFRKEEEFYQSYGGKEGVLKALELGKIRKVNGKIVKNGDMFRVDIFKHKKTNKFYAVPIYTMDFALKVLPNKAVARSKKGEIKDWILMDENYEFCFSLYKDSLILIQTKDMQEPEFVYYNAFTSSTVSLIVSKHDNKFETLSKNQKILFKNANEKEVIAKSIGIQNLKVFEKYIVSALGEVTKAEFRQREDFKNELR

SEQ ID NO: 114 - protein, 984 aa, Campylobacter jejuni
MAKILAFDIGISSIGWAFSENDELKDCGVRIFTKAENPKTGESLALPRRIARSARKRLARRKARLNHLKHLIANEFKLNYEDYQSFDEILAKAYKGSLISPYELRFRALNELLSKQDFARVILHIAKRRGYDDIKNNGDEEKGKILKAIKQNEEKLANYQSVGEYLYKEYFQKFKENSKEFINVRNKKESYERCIAQSFLKDELKLIFKKQREFGFSFSKKFEEEVLSVAFYKRALKDFSHLVGNCSFFTDEKRAPKNSPLAFMFVALTRIINLLNNLKNTLYTKDDLNALLNEVLKNGTLTYKQTKKLLGLSDDYEFKGEKGNYFIEFKKYKEFIKALGEHSLSQDDLNEIAKDITLIKDEIKLKKALAKYDLNENQIDNLSKLEFKDHLNISFKALKLITPLMLEGKKYDEACNELTLKVAINEDKKDFLPAFNETYYKDEVTNPVVLRAIKEYRKVLNALLKKYGKVHKINIELAREVGKNHSQRAKIEKEQNENYKAKKDAELECEKLGLKINSKNILKLRLFKEQKEFCVYSGEKIKLSDLQDEKMLEIDHIYPYSRSFDDSYMNKVLVFTKQNQEKLNQTPFEAFGNDSAKWQKIEVLAKNLPTKKQKRILDKNYKDKEQKDFKDRNLNDTRYIARLVLNYTKDYLDFLPLSDDENTKLNDTQKGSKVHVEAKSGMLTSALRHTWGFSTKDRNNHLHHAIDAVIIAYANNSIVKAFSDFKKEQESNTAELYAKKISELDYKNKRKFFEPFSGFRQKVLDKIDEIFVSKPERKKPSGALHEETFRKEEEFYQSYGGKEGVLKALELGKIRKVNGKIVKNGDMFRVDIFKHKKTNKFYAVPIYTMDFALKVLPNKAVARSKKGEIKDWILMDENYEFCFSLYKDSLILIQTKDMQEPEFVYYNAFTSSTVSLIVSKHDNKFETLSKNQKILFKNANEKEVIAKSIGIQNLKVFEKYIVSALGEVTKAEFRQREEFKNELR

SEQ ID NO: 115 - protein, 987 aa, Campylobacter jejuni
  Campylobacter jejuni subsp. jejuni 110-21
MARILAFDIGISSIGWAFSENDELKDCGVRIFTKAENPKTGESLALPRRLARSARKRLARRKARLNHLKHLIANEFKLNYEDYQSFDESLAKAYKGSLISPYELRFRALNELLSKQDFARVILHIAKRRGYDNIKNSDNEEKSEILKAIKQNEEKLVNYQSVGEYLYKEYFQKFKENSKEFINVRNKKESYERCIAQSFLKDELKLIFQKQREFGLSFSKKFEEEVLSVAFYKRALKDFSHLVGNCSFFTDEKRAPKNSPLAFMFVALTRIINLLNNLKNTEGILYTKDDLNTLLNEVLKNGTLTYKQTKKLLGLSDDYEFKGEKGTYFIEFKKYKEFIKALGDHSLSQDDLNEIAKDITLIKDEIKLKKALAKYDLNQNQIDSLSKLEFKDHLNISFKALKLITPLMLEGKKYDEACNELNLKVVINEDKKDFLPAFNETYYKDEVTNPVVLRAIKEYRKVLNALLKKYGKVHKINIELAREVGKNHSQRAKIEKEQNENYKAKKDAELECEKLGLKINNKNILKLRLFKEQKEFCAYSGEKIKLSDLQDEKMLEIDHIYPYSRSFDDSYMNKVLVFTKQNQEKLNKTPFEAFGNDSTKWQKIEVLAKNLPTKKQKRILDKNYKDKEQKDFKDRNLNDTRYIARLVLNYTKDYLDFLPLSDDENTKLNDIQKGSKVHVEAKSGMLTSALRHTWGFSTKDRNNHLHHAIDAVIIAYANNSIVKAFSDFKKEQESNSAELYAKKISELDYKNKRKFFEPFSGFRQKVLDKIDEIFVSKPERKKPSGALHEETFRKEEEFYQSYGGKEGVLKALELGKIRKVNGKIVKNGDMFRVDIFKHKKTNKFYAVPIYTMDFALKVLPNKAVVQGKDKKSGLIKDWILMDENYEFCFSLYKDSLILIQTKDMQEPEFVYYNAFTSSTVSLIVSKHDNKFETLSKNQKILFKNANEKEVIAKSIGIQNLKVFEKYIVSALGEVTKAEFRQREDFKK

SEQ ID NO: 116 - protein, 987 aa, Campylobacter jejuni
  Campylobacter jejuni subsp. jejuni 129-258
MARILAFDIGISSIGWAFSENDELKDCGVRIFTKAENPKTGESLALPRRLARSARKRLARRKARLNHLKHLIANEFKLNYEDYQSFNESLAKAYKGSLISPYELRFRALNELLSKQDFARVILHIAKRRGYDDIKNSDDKEKGAILKVIKQNEEKLANYQSVGEYLYKEYFQKFKENSKEFTNVRNKKESYERCIAQSFLKDELKLIFQKQREFGFSFSKKFEEEVLSVAFYKRALKDFSHLVGNCSFFTDEKRAPKNSPLAFMFVALTRIINLLNNLKNTEGILYTKDDLNALLNEVLKNGTLTYKQTKKLLGLSDDYEFKGEKGTYFIEFKKYKEFIKALGDHSLSQDDLNEIAKDITLIKDEIKLKKALAKYDLNQNQIDSLSKLEFKDHLNISFKALKLITPLMLEGKKYDEACNELNLKVAINEDKKDFLPAFNETYYKDEVTNPVVLRAIKEYRKVLNALLKKYGKVHKINIELAREVGKNYSQRAKIEKEQNENYKAKKDAELECEKLGLKINSKNILKLRLFKEQKEFCAYSGEKIKISDLQDEKMLEIDHIYPYSRSFDDSYMNKVLVFTKQNQEKLNQTPFEAFGNDSAKWQKIEVLAKNLPTKKQKRILDKNYKDKEQKDFKDRNLNDTRYIARLVLNYTKDYLDFLPLSDDENTKLNDTQKGSKVHVEAKSGMLTSALRHTWGFSAKDRNNHLHHAIDAVIIAYANNSIVKAFSDFKKEQESNSAELYAKKISELDYKNKRKFFEPFSGFRQKVLDKIDEIFVSKPERKKPSGALHEETFRKEEEFYQSYGGKEGVLKALELGKIRKVNGKIVKNGDMFRVDIFKHKKTNKFYAVPIYTMDFALKVLPNKAVARSKKGEIKDWILMDENYEFCFSLYKDSLILIQTKDMQEPELVYFNAFTSSTVSLIVSKHDNKFETLSKNQKILFKNANEKEVIAKSIGIQNLKVFEKYIVSALGEVTKAEFRQREDFKNELR

SEQ ID NO: 117 - protein, 987 aa, Campylobacter jejuni
  Campylobacter jejuni subsp. jejuni 1336
MARILAFDIGISSIGWAFSENDELKDCGVRIFTKAENPKTGESLALPRRLARSARKRLARRKARLNHLKHLIANEFKLNYEDYQSFDESLAKAYKGSLISPYELRFRALNELLSKQDFARVILHIAKRRGYDDIKNNGDEEKGKILKAIKQNEEKLVSYQSVGEYLYKEYFQKFKENSKEFINVRNKKESYERCIAQSFLKDELKLIFQKQREFGFSFSKKFEEEVLSVAFYKRALKDFSHLVGNCSFLLMKKERQKNSPLAFMFVALTRIINLLNNLKNTEGILYTKDDLNTLLNEALKNGTLTYKQTKKLLGLSNDYEFKGEKGTYFIEFQKYKEFVKALGEHNLSQDDLNEIAKDITLIKDEIKLKKALAKYDLNQNQIDSLSKLEFKDHLNISFKALKLITPLMLEGKKYDEACNELNLKVAINEDKKDFLPAFNETYYKDEVTNPVVLRAIKEYRKVLNALLKKYGKVHKINIELAREVGKNHSQRAKIEKEQNENYKAKKDAELECEKLGLKINSKNILKLRLFKEQKEFCVYSGEKIKISDLQDEKMLEIDHIYPYSRSFDDSYMNKVLVFTKQNQEKLNKTPFETFGNDRVKWQKIEVLAKNLPTKKQKRILDKNYKDKEQKDFKDRNLNDTRYIARLVLNYTKDYLDFLPLSDDENTKLNDTQKGSKVHVEAKSGMLTSTLRHTWGFSTKDRNNHLHHAIDAAIIAYANNSIVKAFSDFKKEQESNTAELYAKKISELDYKNKRKFFEPFSGFRQKLLDKIDEIFVSKPERKKPSGALHEETFRKEEEFYQSYGGKEGVLKALELGKIRKVNGKMVKNGDMFRVDIFKHKKTNKFYAVPIYTMDFALKVLPNKAVVQGKDKKSGLIKDWILMDENYEFCFSLYKDSLILIQTKDMQEPELVYYERLDSSNASLTVSKHDNKFETLSKNQKILFKNANEKEVIAKSIGIQNLKVFEKYIVSALGEVTKAEFRQREDFKK

SEQ ID NO: 118 - protein, 984 aa, Campylobacter jejuni
  Campylobacter jejuni subsp. jejuni 140-16
MARILAFDIGISSIGWAFSENDELKDCGVRIFTKVENPKTGESLALPRRLARSARKRLARRKARLNHLKHLIANEFKLNYEDYQSFDESLAKAYKGSLISPYELRFRALNELLSKQDFARVILHIAKRRGYDDIKNSDDKEKGAILKAIKQNEEKLANYQSVGEYLYKEYFQKFKENSKEFTNVRNKKESYERCIAQSFLKDELKLIFKKQREFGFSFSKKFEEEVLSVAFYKRALKDFSHLVGNCSFFTDEKRAPKNSPLAFMFVALTRIINLLNNLKNTEGILYTKDDLNALLNEVLKNGTLTYKQTKKLLGLSDDYEFKGEKGTYFIEFKKYKEFIKALGEHNLSQDDLNEIAKDITLIKDEIKLKKALAKYDLNQNQIDSLSKLEFKDHLNISFKALKLITPLMLEGKKYDEACNELNLKVAINEDKKDFLPAFNETYYKDEVTNPVVLRAIKEYRKVLNALLKKYGKVHKINIELAREVGKNHSQRAKIEKEQNENYKAKKDAELECEKLGLKINSKNILKLRLFKEQKEFCAYSGEKIKISDLQDEKMLEIDHIYPYSRSFDDSYMNKVLVFTKQNQEKLNKTPFEAFGNDSAKWQKIEVLAKNLPTKKQKRILDKNYKDKEQKDFKDRNLNDTRYIARLVLNYTKDYLDFLPLSDDENTKLNDTQKGSKVHVEAKSGMLTSALRHTWGFSTKDRNNHLHHAIDAVIIAYANNSIVKAFSDFKKEQESNSAELYAKKISELDYKNKRKFFEPFSGFRQKVLDKIDEIFVSKPERKKPSGALHEETFRKEEEFYQSYGGKEGVLKALELGKIRKVNGKIVKNGDMFRVDIFKHKKTNKFYAVPIYTMDFALKVLPNKAVARSKKGEIKDWILMDENYEFCFSLYKDSLILIQTKDMQEPEFVYYNAFTSSTVSLIVSKHDNKFETLSKNQKILFKNANEKEVIAKSIGIQNLKVFEKYIVSALGEVTKAEFIQREDFKK

SEQ ID NO: 119 - protein, 984 aa, Campylobacter jejuni
  Campylobacter jejuni subsp. jejuni 1577
MARILAFDIGISSIGWAFSENDELKDCGVRIFTKVENPKTGESLALPRRLARSARKRLARRKVRLNHLKHLIANEFKLNYEDYQSFDESLAKAYKGSLISPYELRFRALNELLSKQDFARVILHIAKRRGYDDIKNSDDKEKGAILKAIKQNEEKLANYQSVGEYLYKEYFQKFKENSKEFTNVRNKKESYERCIAQSFLKDELKLIFKKQREFGFSFSKKFEEEVLSVAFYKRALKDFSHLVGNCSFFTDEKRAPKNSPLAFMFVALTRIINLLNNLKNTEGILYTKDDLNALLNEVLKNGTLTYKQTKKLLGLSDDYEFKGEKGTYFIEFKKYKEFIKALGEHNLSQDDLNEIAKDITLIKDEIKLKKALAKYDLNQNQIDSLSKLEFKDHLNISFKALKLITPLMLEGKKYDEACNELNLKVAINEDKKDFLPAFNETYYKDEVTNPVVLRAIKEYRKVLNALLKKYGKVHKINIELAREVGKNHSQRAKIEKEQNENYKAKKDAELECEKLGLKINSKNILKLRLFKEQKEFCAYSGEKIKISDLQDEKMLEIDHIYPYSRSFDDSYMNKVLVFTKQNQEKLNKTPFEAFGNDSAKWQKIEVLAKNLPTKKQKRILDKNYKDKEQKDFKDRNLNDTRYIARLVLNYTKDYLDFLPLSDDENTKLNDTQKGSKVHVEAKSGMLTSALRHTWGFSTKDRNNHLHHAIDAVIIAYANNSIVKAFSDFKKEQESNSAELYAKKISELDYKNKRKFFEPFSGFRQKVLDKIDEIFVSKPERKKPSGALHEETFRKEEEFYQSYGGKEGVLKALELGKIRKVNGKIVKNGDMFRVDIFKHKKTNKFYAVPIYTMDFALKVLPNKAVARSKKGEIKDWILMDENYEFCFSLYKDSLILIQTKDMQEPEFVYYNAFTSSTVSLIVSKHDNKFETLSKNQKILFKNANEKEVIAKSIGIQNLKVFEKYIVSALGEVTKAEFRQREDFKK

SEQ ID NO: 120 - protein, 987 aa, Campylobacter jejuni
  Campylobacter jejuni subsp. jejuni 1854
MARILAFDIGISSIGWAFSENDELKDCGVRIFTKAENPKTGESLALPRRLARSARKRLARRKARLNHLKHLIANEFKLNYEDYQSFDESLAKAYKGSLISPYELRFRALNELLSKQDFARVILHIAKRRGYDDIKNSDDKEKGAILKAIKQNEEKLANYQSVGEYLYKEYFQKFKENSKEFTNVRNKKESYERCIAQSFLKDELKLIFKKQREFGFSFSKKFEEEVLSVAFYKRALKDFSHLVGNCSFFTDEKRAPKNSPLAFMFVALTRIINLLNNLKNTEGILYTKDDLNTLLNEVLKNGTLTYKQTKKLLGLSDDYEFKGEKGTYFIEFKKYKEFIKSLGDHSLSQDDLNEIAKDITLIKDEIKLKKALAKYDLNQNQIDSLSKLEFKDHLNISFKALKLITPLMLEGKKYDEACNELNLKVAINEDKKDFLPAFNETYYKDEVTNPVVLRAIKEYRKVLNALLKKYGKVHKINIELAREVGKNHSQRAKIEKEQNENYKAKKDAELECEKLGLKINSKNILKLRLFKEQKEFCAYSGEKIKISDLQDEKMLEIDHIYPYSRSFDDSYMNKVLVFTKQNQEKLNQTPFEAFGNDSAKWQKIEVLAKNLPTKKQKRILDKNYKDKEQKNFKDRNLNDTRYIARLVLNYTKDYLDFLPLSDDENTKLNDTQKGSKVHVEAKSGMLTSALRHTWGFSAKDRNNHLHHAIDAVIIAYANNSIVKAFSDFKKEQESNSAELYAKKISELDYKNKRKFFEPFSGFRQKVLDKIDEIFVSKPERKKPSGALHEETFRKEEEFYQSYGGKEGVLKALELGKIRKVNGKIVKNGDMFRVDIFKHKKTNKFYAVPIYTMDFALKVLPNKAVARSKKGEIKDWILMDENYEFCFSLYKDSLILIQTKDMQEPEFVYYNAFTSSTVSLIVSKHDNKFETLSKNQKILFKNANEKEVIAKSIGIQNLKVFEKYIVSALGEVTKAEFRQREDFKNELR

SEQ ID NO: 121 - protein, 984 aa, Campylobacter jejuni
  Campylobacter jejuni subsp. jejuni 1997-10
MARILAFDIGISSIGWAFSENDELKDCGVRIFTKAENPKTGESLALPRRLARSARKRLARRKARLNRLKHLIANEFKLNYEDYQSFDESLAKAYKGSLISPYELRFRALNELLSKQDFARVILHIAKRRGYDDIKNSDDKEKGAILKAIKQNEEKLANYQSVGEYLYKEYFQKFKENSKEFTNVRNKKESYERCIAQSFLKDELKLIFKKQREFGFSFSKKFEEEVLSVAFYKRALKDFSHLVGNCSFFTDEKRAPKNSPLAFMFVALTRIINLLNNLKNTEGILYTKDDLNALLNEVLKNGTLTYKQTKKLLGLSDDYEFKGEKGTYFIEFKKYKEFIKALGDHSLNQDDLNEIAKDITLIKDEIKLKKALAKYDLNQNQIDSLSKLEFKDHLNISFKALKLITPLMLEGKKYDEACNELNLKVAINEDKKDFLPAFNETYYKDEVTNPVVLRAIKEYRKVLNALLKKYGKVHKINIELAREVGKNYSQRAKIEKEQNENYKAKKDAELECEKLGLKINSKNILKLRLFKEQKEFCVYSGEKIKISDLQDEKMLEIDHIYPYSRSFDDSYMNKVLVFTKQNQEKLNQTPFEAFGNDSAKWQKIEVLAKNLPTKKQKRILDKNYKDKEQKDFKDRNLNDTRYIARLVLNYTKDYLDFLPLSDDENTKLNDTQKGSKVYVEAKSGMLTSALRHTWGFSTKDRNNHLHHAIDAVIIAYANNSIVKAFSDFKKEQESNSAELYAKKISELDYKNKRKFFEPFSGFRQKVLDKIDEIFVSKPERKKPSGALHEETFRKEEEFYQSYGGKEGVLKALELGKIRKVNGKIVKNGDMFRVDIFKHKKTNKFYAVPIYTMDFALKVLPNKAVARSKKGEIKDWILMDENYEFCFSLYKDSLILIQTKDMQEPEFVYYNAFTSSTVSLIVSKHDNKFETLSKNQKILFKNANEKEVIAKSIGIQNLKVFEKYIVSALGEVTKAEFRQREDFKK

SEQ ID NO: 122 - protein, 987 aa, Campylobacter jejuni
  Campylobacter jejuni subsp. jejuni 2008-1025
MARILAFDIGISSIGWAFSENDELKDCGVRIFTKAENPKTGESLALPRRLARSARKRLARRKARLNHLKHLIANEFKLNYEDYQSFDESLAKAYKGSLISPYELRFRALNELLSKQDFARVILHIAKRRGYDDIKNNGDEEKSEILKAIKQNEEKLVNYQSVGEYLYKEYFQKFKENSKEFINVRNKKESYERCIAQSFLKDELKLIFQKQREFGFSFSKKFEEEVLSVAFYKRALKDFSHLVGNCSFFTDEKRAPKNSPLAFMFVALTRIINLLNNLKNTEGILYTKDDLNTLLNEVLKNGTLTYKQTKKLLGLSDDYEFKGEKGTYFIEFKKYKEFIKALGEHNLSQDNLNEIAKDITLIKDEIKLKKALAKYDLNQNQIDSLSKLEFKDHLNISFKALKLITPLMLEGKKYDEAYNELNLKVAINEDKKDFLPAFNETYYKDEVTNPVVLRAIKEYRKVLNALLKKYGKVHKINIELAREVGKNHSQRAKIEKEQNENYKAKKDAELECEKLGLKINSKNILKLRLFKEQKEFCAYSGEKIKISDLQDEKMLEIDHIYPYSRSFDDSYMNKVLVFTKQNQEKLNQTPFEAFGNDSAKWQKIEVLAKNLPTKKQKRILDKNYKDKEQKDFKDRNLNDTRYIARLVLNYTKDYLDFLPLSDDENTKLNDTQKGSKVHVEAKSGMLTSALRHTWGFSAKDRNNHLHHAIDAVIIAYANNSIVKAFSDFKKEQESNSAELYAKKISELDYKNKRKFFEPFSGFRQKVLDKIDEIFVSKPERKKPSGALHEETFRKEEEFYQSYGGKEGVLKALELGKIRKVNGKIVKNGDMFRVDIFKHKKTNKFYAVPIYTMDFALKVLPNKAVVQGKDKKSGLIKDWILMDENYEFCFSLYKDSLILIQTKDMQEPELVYFNAFTSSTVSLIVSKHDNKFETLSKNQKILFKNANEKEVIAKSIGIQNLKVFEKYIVSALGEVTKAEFRQREDFKK

SEQ ID NO: 123 - protein, 984 aa, Campylobacter jejuni
  Campylobacter jejuni subsp. jejuni 2008-872
MARILAFDIGISSIGWAFSENDELKDCGVRIFTKVENPKTGESLALPRRLARSARKRLARRKARLNHLKHLIANEFKLNYEDYQSFDESLAKAYKGSLISPYELRFRALNELLSKQDFARVILHIAKRRGYDDIKNSDDKEKGAILKAIKQNEEKLANYQSVGEYLYKEYFQKFKENSKEFTNVRNKKESYERCIAQSFLKDELKLIFKKQREFGFSFSKKFEEEVLSVAFYKRALKDFSHLVGNCSFFTDEKRAPKNSPLAFMFVALTRIINLLNNLKNTEGILYTKDDLNALLNEVLKNGTLTYKQTKKLLGLSDDYEFKGEKGTYFIEFKKYKEFIKALGEHNLSQDDLNEIAKDITLIKDEIKLKKALAKYDLNQNQIDSLSKLEFKDHLNISFKALKLITPLMLEGKKYDEACNELNLKVAINEDKKDFLPAFNETYYKDEVTNPVVLRAIKEYRKVLNALLKKYGKVHKINIELAREVGKNHSQRAKIEKEQNENYKAKKDAELECEKLGLKINSKNILKLRLFKEQKEFCAYSGEKIKISDLQDEKMLEIDHIYPYSRSFDDSYMNKVLVFTKQNQEKLNKTPFEAFGNDSAKWQKIEVLAKNLPTKKQKRILDKNYKDKEQKDFKDRNLNDTRYIARLVLNYTKDYLDFLPLSDDENTKLNDTQKGSKVHVEAKSGMLTSALRHTWGFSTKDRNNHLHHAIDAVIIAYANNSIVKAFSDFKKEQESNSAELYAKKISELDYKNKRKFFEPFSGFRQKVLDKIDEIFVSKPERKKPSGALHEETFRKEEEFYQSYGGKEGVLKALELGKIRKVNGKIVKNGDMFRVDIFKHKKTNKFYAVPIYTMDFALKVLPNKAVARSKKGEIKDWILMDENYEFCFSLYKDSLILIQTKDMQEPEFVYYNAFTSSTVSLIVSKHDNKFETLSKNQKILFKNANEKEVIAKSIGIQNLKVFEKYIVSALGEVTKAEFRQREDFKK

SEQ ID NO: 124 - protein, 987 aa, Campylobacter jejuni
  Campylobacter jejuni subsp. jejuni 2008-979
MARILAFDIGISSIGWAFSENDELKDCGVRIFTKAENPKTGESLALPRRLARSARKRLARRKARLNHLKHLIANEFKLNYEDYQSFDESLAKAYKGSLISPYELRFRALNELLSKQDFARVILHIAKRRGYDDIKNSDDKEKGAILKAIKQNEEKLVNYQSVGEYLYKEYFQKFKENSKEFTNVRNKKESYERCIAQSFLKDELKLIFKKQREFGFSFSKKFEEEVLSVAFYKRALKDFSHLVGNCSFFTDEKRAPKNSPLAFMFVALTRIINLLNNLKNTEGILYTKDDLNALLNEVLKNGTLTYKQTKKLLGLSDDYEFKGEKGTYFIEFKKYKEFIKALGDHSLSQDDLNEIAKDITLIKDEIKLKKALAKYDLNQNQIDSLSKLEFKDHLNISFKALKLITPLMLEGKKYDEACNELNLKVAINEDKKDFLPAFNETYYKDEVTNPVVLRAIKEYRKVLNALLKKYGKVHKINIELAREVGKNYSQRAKIEKEQNENYKAKKDAELECEKLGLKINSKNILKLRLFKEQKEFCAYSGEKIKISDLQDEKMLEIDHIYPYSRSFDDSYMNKVLVFTKQNQEKLNQTPFEAFGNDSAKWQKIEVLAKNLPTKKQKRILDKNYKDKEQKDFKDRNLNDTRYIARLVLNYTKDYLDFLPLSDDENTKLNDTQKGSKVHVEAKSGMLTSALRHTWGFSAKDRNNHLHHAIDAVIIAYANNSIVKAFSDFKKEQESNSAELYAKKISELDYKNKRKFFEPFSGFRQKVLDKIDEIFVSKPERKKPSGALHEETFRKEEEFYQSYGGKEGVLKALELGKIRKVNGKIVKNGDMFRVDIFKHKKTNKFYAVPIYTMDFALKVLPNKAVARSEKGEIKDWILMDENYEFCFSLYKDSLILIQTKDMQEPELVYFNAFTSSTVSLIVSKHDNKFETLSKNQKILFKNANEKEVIAKSIGIQNLKVFEKYIVSALGEVTKAEFRQREDFKNELR

SEQ ID NO: 125 - protein, 965 aa, Campylobacter jejuni
  Campylobacter jejuni subsp. jejuni 2008-988
MKIIGFNLGIANIGWALRENDEIIDCGVRVFDIPENPKNGNSLALERRENKARMKIVKRKKARMLATKTFLKKELNVDLSKLFLIGSTQSIYELRAKALSSLISKEELSAIILHIAKHRGYDDSALKNENGTIIEALNKNKETMLKFKSVGEYFYKNFVQNKEVKKIRNTTEDYSNSVPRSLLKQELDLILDKQKELGLIKNADFKEKLFEIIFFKRPLKDFSNKIGNCIFFENEKRAAKNTISACEFVALGKVVNLLKSIEKDIGIVYEKDSINEIMSIILDKTSISYKKIRDILNLPQEINFKGLDYSKNNVENSKLVDLKKLNEFKKALGDGFANLDKDILDSIATDITLTKDTATLKEKLKNYNVLNAEQIEKLSELVFNDHINLSLKALKQIIPLMYEGKRYDEACELCNFTIAKNQEKSEYLPLFEKTRFAKDISSPVVIRAICEFRKLLNDIIRRYGSVHKIHLELTRDFGISFSDRKKIIKEIEQNEQSRIKALETIKELKLEETSKNIQIVRLFEDQKGICPYSGLKMDLNRLDELVIDYIRPYNRSLDDSYSNKVLTFKKLSDLKQGKTPFEAFGEDEKLWAEINERIKEYNGKKRFKIFDKFFKDKKPFDFTEQTLQDTRWLTKLVASYLNEYLSFLPISEDENTALGYGEKGSKQHVILSSGMITQMLRNFWYLGFKNHKDYKNNAMDAIIVAFTTNSIIFAFNNFKKELDLAKAEFYANKISESDYLLKRKFLPPFSGFKEQALEKVKNIFVSHSLKIKNKGTLHDLTPLKIKELKNTYGDLDLAVKLGKIRKYNDKYYANANGSLVRADLFVDKKNKFHAVSIYKADFSTKKLPNKTPATTSNGETKEGIEMNENYNFCMSLYKNTPISVKIKGMKEPIICYYHGFNTSGSKITYKKHDNNYHNLSEDEMVVFRKNDKESIAVGKILEIKKYSISPSGELSLIENEERKWF

SEQ ID NO: 126 - protein, 984 aa, Campylobacter jejuni
  Campylobacter jejuni subsp. jejuni 2008-988
MARILAFDIGISSIGWAFSENDELKDCGVRIFTKVENPKTGESLALPRRLARSARKRLARRKARLNHLKHLIANEFKLNYEDYQSFDESLAKAYKGSLISPYELRFRALNELLSKQDFARVILHIAKRRGYDDIKNSDDKEKGAILKAIKQNEEKLANYQSVGEYLYKEYFQKFKENSKEFTNVRNKKESYERCIAQSFLKDELKLIFKKQREFGFSFSKKFEEEVLSVAFYKRALKDFSHLVGNCSFFTDEKRAPKNSPLAFMFVTLTRIINLLNNLKNTEGILYTKDDLNALLNEVLKNGTLTYKQTKKLLGLSDDYEFKGEKGTYFIEFKKYKEFIKALGEHNLSQDDLNEIAKDITLIKDEIKLKKALAKYDLNQNQIDSLSKLEFKDHLNISFKALKLITPLMLEGKKYDEACNELNLKVAINEDKKDFLPAFNETYYKDEVTNPVVLRAIKEYRKVLNALLKKYGKVHKINIELAREVGKNHSQRAKIEKEQNENYKAKKDAELECEKLGLKINSKNILKLRLFKEQKEFCAYSGEKIKISDLQDEKMLEIDHIYPYSRSFDDSYMNKVLVFTKQNQEKLNKTPFEAFGNDSAKWQKIEVLAKNLPTKKQKRILDKNYKDKEQKDFKDRNLNDTRYIARLVLNYTKDYLDFLPLSDDENTKLNDTQKGSKVHVEAKSGMLTSALRHTWGFSTKDRNNHLHHAIDAVIIAYANNSIVKAFSDFKKEQESNSAELYAKKISELDYKNKRKFFEPFSGFRQKVLDKIDEIFVSKPERKKPSGALHEETFRKEEEFYQSYGGKEGVLKALELGKIRKVNGKIVKNGDMFRVDIFKHKKTNKFYAVPIYTMDFALKVLPNKAVARSKKGEIKDWILMDENYEFCFSLYKDSLILIQTKDMQEPEFVYYNAFTSSTVSLIVSKHDNKFETLSKNQKILFKNANEKEVIAKSIGIQNLKVFEKYIVSALGEVTKAEFRQREDFKK

SEQ ID NO: 127 - protein, 961 aa, Campylobacter jejuni
  Campylobacter jejuni subsp. jejuni 260.94
MARILAFDIGISSIGWAFSENDELKDCGVRIFTKAENPKTGESLALPRRLARSARKRLARRKARLNHLKHLIANEFKLNYEDYQSFDESLAKAYKGSLISPYELRFRALNELLSKQDFARVILHIAKRRGYDDIKNNGDEEKGKILKAIKQNEEKLVNYQSVGEYLYKEYFQKFKENSKEFINVRNKKESYERCITQSFLKYELKLIFQKQREFGFSFSKKFEEEVLSVAFYKRALKDFSHLVGNCSFFSDEKRAPKNSPLAFMFVALTRIINLLNNLKNTEGILYTKDDLNALLNEVLKNGTLTYKQTKKLLGLSDDYEFKGEKGTYFIEFKKYKEFIKALGEHNLSQDDLNEIAKDITLIKDEIKLKKALAKYDLNQNQIDSLSKLEFKDHLNIGFKALKLITPLMLEGKKYDEACNELNLKVAINEDKKDFLPAFNETYYKDEVTNPVVLRAIKEYRKVLNALLKKYGKVHKINIELAREVGKNHSQRAKIEKEQNENYKAKKDAELECEKLGLKINSKNILKLRLFKEQKEFCAYSGEKIKLSDLQDEKMLEIDHIYPYSRSFDDSYMNKVLVFTKQNQEKLNKTPFEAFGNDNVKWQKIEVLAKNLPEKKQKRILDKNYKDKEQKDFKDRNLNDTRYIARLVLNYTKDYLDFLPLSDDENTKLKGSKVHVEAKSGMLTSALRHTWGFSTKDRNNHLHHAIDAAIIAYANNSIVKDFSDFKKEQESNSAELYAKKISELDYKNKRKFFEPFSGFRQKVLDKIDEIFVSKPERKKPSGALHEETFRKEEEFYQSYGGKEGVLKALELGKIRKVNGKIVKNGDMFRVDIFKHKKTNKFYAVPIYTMDFALKVLPNKAVARSKKGEIKDWILMDENYEFCFSLYKDSLILIQTKDMQEPELVYFNAFTSSTVSLIVSKHDNKFETLSKNLKVFEKYIVSALGEVTKAEFRQREDFKNELR

SEQ ID NO: 128 - protein, 985 aa, Campylobacter jejuni
  Campylobacter jejuni subsp. jejuni 414
MAKILAFDIGISSIGWAFVENDELKDCGVRIFTKAENPKTGESLALPRRLARSARKRLARRKARLNHLKHLIANEFKLNYEDYQSFDESLAKAYKGTLISPYELRFKALNELLSKQDLARVILHIAKRRGYDNIKNSDDKEKGAILKAVKENEEKLANYKSVGEYLYKEYFQKFKENSKEFINVRNKKESYERCIAQSFLKDELKLIFQKQREFGFNFSKKFEEEVLSVAFYKRALKDFSHLVGNCSFFVDEKRAPKNSPLAFEFVALTRIVNLLNNLNKNNSYIKDDLNALLSEVLKNGTLTYKQTKKILGLSDDYEFKGQKGNYFIEFKKYKEFIKALCEHNLNQDDLNEIAKDITLVKDETKLKKALAKYDLNQNQIENLSKIEFKDHLNISFKALKLIVPLMREGKKYDEVCNELNLKTAINEDKKEFLPAFNETYYKDEVNNPVVLRAIKEYRKVLNSLLKKYGKVHKINIELAREVGKNHRERSKIEKEQNENFKAKKDAELECEKLGLKINSKNILKLRLFKEQKEFCVYSGEKIKISDLQDEKMLEIDHIYPYSRSFDDSYMNKVLVFTKQNQEKLNKTPFEAFGKDDVKWQKIETLAKNLPAKKQKRILDKNYKDKEQKDFKDRNLNDTRYIARLVLNYTKDYLEFLPLSDDENIKLNDTQKGSKVHVEAKSGMLTSVLRHTWGFSTKDRNNHLHHAIDAVIIAYANASVVKAFSDFKKEQENYTAELYAKKINELDFKNKRKFFEPFSNFRQKVLEKIDEIFVSKPERKKPSGALHEETFYKEEEFYKEYGGKEGVLKALELGKIRKVNGKIVSNANMFRVDIFKYKKTNKFYAVPIYTMDFALGILPNKAVVGGKDKQGIIKDWLLMDENYEFCFSLYKDSLILLQTKDMQEPELVYFKSFKSSTAGLVVSKHDNKFENLNENQKKLFKSANEKKVVAEGIGIQNLKVFEKYIVSALGEITKAEIKERENFKKK

SEQ ID NO: 129 - protein, 984 aa, Campylobacter jejuni
  Campylobacter jejuni subsp. jejuni 51037
MARILAFDIGISSIGWAFSENDELKDCGVRIFTKAENPKTGESLALPRRLARSARKRLARRKARLNHLKHLIANEFKLNYEDYQSFDESLAKAYKGSLISPYELRFRALNELLSKQDFARVILHIVKRRGYDDIKNSDDKEKGTILKAIKQNEEKLANYQSVGEYLYKEYFQKFKENSKEFTNVRNKKESYERCIAQSFLKDELKLIFKKQREFGFSFSKKFEEEVLSVAFYKRALKDFSHLVGNCSFFTDEKRAPKNSPLAFMFVALTRIINLLNNLKNTEGILYTKDDLNTLLNEVLKNGTLTYKQTKKLLGLSDDYEFKGEKGTYFIEFKKYKEFIKALGEHNLSQDDLNEIAKDITLIKDEIKLKKALAKYDLNQNQIDSLSKLEFKDHLNISFKALKLITPLMLEGKKYDEACNELNLKVAINEDKKDFLPAFNETYYKDEVTNPVVLRAIKEYRKVLNALLKKYGKVHKINIELAREVGKNYSQRAKIEKEQNENYKAKKDAELECEKLGLKINSKNILKLRLFKEQKEFCAYSGEKIKISDLQDEKMLEIDHIYPYSRSFDDSYMNKVLVFTKQNQEKLNQTPFEAFGNDSAKWQKIEVLAKNLPTKKQKRILDKNYKDKEQKDFKDRNLNDTRYIARLVLNYTKDYLDFLPLSDDENTKLNDTQKGSKVHVEAKSGMLTSALRHTWGFSAKDRNNHLHHAIDAVIIAYANNSIVKAFSDFKKEQESNSAELYAKKISELDYKNKRKFFEPFSGFRQKVLDKIDEIFVSKPERKKPSGALHEETFRKEEEFYQSYGGKEGVLKALELGKIRKVNGKIVKNGDMFRVDIFKHKKTNKFYAVPIYTMDFALKVLPNKAVARSKKGEIKDWILMDENYEFCFSLYKDSLILIQTKDMQEPEFVYYNAFTSSTVSLIVSKHDNKFETLSKNQKILFKNANEKEVIAKSIGIQNLKVFEKYIVSALGEVTKAEFRQREDFKK

SEQ ID NO: 130 - protein, 984 aa, Campylobacter jejuni
  Campylobacter jejuni subsp. jejuni 51494
MARILAFDIGISSIGWAFSENDELKDCGVRIFTKAENPKTGESLALPRRLARSARKRLARRKARLNHLKHLIANEFKLNYEDYQSFDESLAKAYKGSLISPYELRFRALNELLSKQDFARVILHIAKRRGYDDIKNSDDKEKGAILKAIKQNEEKLANYQSVGEYLYKEYFQKFKENSKEFTNVRNKKESYERCIAQSFLKDELKLIFKKQREFGFSFSKKFEEEVLSVAFYKRALKDFSHLVGNCSFFTDEKRAPKNSPLAFMFVALTRIINLLNNLKNTEGILYTKDDLNTLLNEVLKNGTLTYKQTKKLLGLSDDYEFKGEKGTYFIEFKKYKEFIKALGEHNLSQDDLNEIAKDITLIKDEIKLKKALAKYDLNQNQIDSLSKLEFKDHLNISFKALKLITPLMLEGKKYDEACNELNLKVAINEDKKDFLPAFNETYYKDEVTNPVVLRAIKEYRKVLNALLKKYGKVHKINIELAREVGKNYSQRAKIEKEQNENYKAKKDAELECEKLGLKINSKNILKLRLFKEQKEFCAYSGEKIKISDLQDEKMLEIDHIYPYSRSFDDSYMNKVLVFTKQNQEKLNKTPFEAFGNDSTKWQKIEVLAKNLPEKKQKRILDKNYKDKEQKDFKDRNLNDTRYIARLVLNYTKDYLDFLPLSDDENTKLNDTQKGLKVHVEAKSGMLTSALRHTWGFSAKDRNNHLHHAIDAVIIAYANNSIVKAFSDFKKEQESNSAELYAKKISELDYKNKRKFFEPFSGFRQKVLDKIDEIFVSKPERKKPSGALHEETFRKEEEFYQSYGGKEGVLKALELGKIRKVNGKIVKNGDMFRVDIFKHKKTNKFYAVPIYTMDFALKVLPNKAVARSKKGEIKDWILMDENYEFCFSLYKDSLILIQTKDMQEPEFVYYNAFTSSTVSLIVSKHDNKFETLSKNQKILFKNANEKEVIAKSIGIQNLKVFEKYIVSALGEVTKAEFRQREDFKK

SEQ ID NO: 131 - protein, 987 aa, Campylobacter jejuni
  Campylobacter jejuni subsp. jejuni 53161
MARILAFDIGISSIGWAFSENDELKDCGVRIFTKAENPKTGESLALPRRLARSARKRLARRKARLNHLKHLIANEFKLNYEDYQSFDEGLAKAYKGSLISPYELRFRALNELLSKQDFARVILHIAKRRGYDDIKNNGDEEKSEILKAIKQNEEKLVNYQSVGEYLYKEYFQKFKENSKEFINVRNKKESYERCIAQSFLKDELKLIFQKQREFGFSFSKKFEEEVLSVAFYKRALKDFSHLVGNCSFFTDEKRAPKNSPLAFMFVALTRIINLLNNLKNTEGILYTKDDLNTLLNEVLKNGTLTYKQTKKLLGLSDDYEFKGEKGTYFIEFKKYKEFIKALGEHNLSQDNLNEIAKDITLIKDEIKLKKALAKYDLNQNQIDSLSKLEFKDHLNISFKALKLITPLMLEGKKYDEAYNELNLKVAINEDKKDFLPAFNETYYKDEVTNPVVLRAIKEYRKVLNALLKKYGKVHKINIELAREVGKNHSQRAKIEKEQNENYKAKKDAELECEKLGLKINSKNILKLRLFKEQKEFCAYSGEKIKISDLQDEKMLEIDHIYPYSRSFDDSYMNKVLVFTKQNQEKLNQTPFEAFGNDSAKWQKIEVLAKNLPTKKQKRILDKNYKDKEQKDFKDRNLNDTRYIARLVLNYTKDYLDFLPLSDDENTKLNDTQKGSKVHVEAKSGMLTSALRHTWGFSAKDRNNHLHHAIDAVIIAYANNSIVKAFSDFKKEQESNSAELYAKKISELDYKNKRKFFEPFSGFRQKVLDKIDEIFVSKPERKKPSGALHEETFRKEEEFYQSYGGKEGVLKALELGKIRKVNGKIVKNGDMFRVDIFKHKKTNKFYAVPIYTMDFALKVLPNKAVVQGKDKKSGLIKDWILMDENYEFCFSLYKDSLILIQTKDMQEPELVYFNAFTSSTVSLIVSKHDNKFETLSKNQKILFKNANEKEVIAKSIGIQNLKVFEKYIVSALGEVTKAEFRQREDFKK

SEQ ID NO: 132 - protein, 984 aa, Campylobacter jejuni
  Campylobacter jejuni subsp. jejuni 60004
MARILAFDIGISSIGWAFSENDELKDCGVRIFTKAENPKTGESLALPRRLARSARKRLARRKARLNHLKHLIANEFKLNYEDYQSFDESLAKAYKGSLISPYELRFRALNELLSKQDFARVILHIAKRRGYDDIKNNGDEEKGKILKAIKQNEEKLVNYQSVGEYLYKEYFQKFKENSKEFINVRNKKESYERCITQSFLKYELKLIFQKQREFGFSFSKKFEEEVLSVAFYKRALKDFSHLVGNCSFFTDEKRAPKNSPLAFMFVALTRIINILNNLKNTEGILYTKDDLNALLNEVLKNGTLTYKQTKKLLGLSDDYEFKGEKGTYFIEFKKYKEFIKALGEHNLSQDDLNEIAKDITLIKDEIKLKKALAKYDLNQNQIDSLSKLEFKDHLNISFKALKLITPLMLEGKKYDEACNELNLKVAINEDKKDFLPAFNETYYKDEVTNPVVLRAIKEYRKILNALLKKYGKVHKINIELAREVGKNHSQRAKIEKEQNENYKAKKDAEIECEKLGLKINSKNILKLRLFKEQKEFCAYSGEKIKISDLQDEKMLEIDHIYPYSRSFDDSYMNKVLVFTKQNQEKLNQTPFEAFGNDSAKWQKIEVLAKNLPTKKQKRILDKNYKDKEQKDFKDRNLNDTRYIARLVLNYTKDYLDFLPLSDDENTKLNDTQKGSKVHVEAKSGMLTSALRHTWGFSAKDRNNHLHHAIDAVIIAYANNSIVKAFSDFKKEQESNSAELYAKKISELDYKNKRKFFEPFSGFRQKVLDKIDEIFVSKPERKKPSGALHEETFRKEEEFYQSYGGKEGVLKALELGKIRKVNGKIVKNGDMFRVDIFKHKKTNKFYAVPIYTMDFALKVLPNKAVARSKKGEIKDWILMDENYEFCFSLYKDSLILIQTKDMQEPEFVYYNAFTSSTVSLIVSKHDNKFETLSKNQKILFKNANEKEVIAKSIGIQNLKVFEKYIVSALGEVTKAEFRQREDFKK

SEQ ID NO: 133 - protein, 984 aa, Campylobacter jejuni
MARILAFDIGISSIGWAFSENDELKDCGVRIFTKAENPKTGESLALPRRLARSARKRLARRKARLNHLKHLIANEFKLNYEDYQSFDESLAKAYKGSLISPYELRFRALNELLSKQDFARVILHIAKRRGYDDIKNNGDEEKSEILKAIKQNEEKLVNYQSVGEYLYKEYFQKFKENSKEFINVRNKKESYERCITQSFLKDELKLIFQKQREFGFSFSKKFEEEVLSVAFYKRALKDFSHLVGNCSFFTDEKRAPKNSPLAFMFVALTRIINILNNLKNTEGILYTKDDLNALLNEVLKNGTLTYKQTKKLLGLSDDYEFKGEKGTYFIEFKKYKEFIKALGEHNLSQDDLNEIAKDITLIKDEIKLKKALAKYDLNQNQIDSLSKLEFKDHLNISFKALKLITPLMLEGKKYDEACNELNLKVAINEDKKDFLPAFNETYYKDEVTNPVVLRAIKEYRKILNALLKKYGKVHKINIELAREVGKNHSQRAKIEKEQNENYKAKKDAEIECEKLGLKINSKNILKLRLFKEQKEFCAYSGEKIKLSDLQDEKMLEIDHIYPYSRSFDDSYMNKVLVFTKQNQEKLNKTPFEAFGNDSTKWQKIEVLAKNLPEKKQKRILDKNYKDKEQKDFKDRNLNDTRYIARLVLNYTKDYLDFLPLSDDENTKLNDTQKGSKVHVEAKSGMLTSALRHTWGFSAKDRNNHLHHAIDAAIIAYANNSIVKAFSDFKKEQESNSVELYAKKISELDYKNKRKFFEPFSGFRQKVLDKIDEIFVSKPERKKPSGALHEETFRKEEEFYQSYGGKEGVLKALELGKIRKVNGKIVKNGDMFRVDIFKHKKTNKFYAVPIYTMDFALKVLPNKAVARSKKGEIKDWILMDENYEFCFSLYKDSLILIQTKDMQEPELVYFNAFTSSTVSLIVSKHDNKFETLSKNQKILFKNANEKEVIAKSIGIQNLKVFEKYIVSALGEVTKAEFRQREDFKK

SEQ ID NO: 134 - protein, 984 aa, Campylobacter jejuni
  Campylobacter jejuni subsp. jejuni 84-25
MVRILAFDIGISSIGWAFSENDELKDCGVRIFTKVENPKTGESLALPRRLARSARKRLARRKARLNHLKHLIANEFKLNYEDYQSFDESLAKAYKGSLISPYELRFRALNELLSKQDFARVILHIAKRRGYDDIKNSDDKEKGAILKAIKQNEEKLANYQSVGEYLYKEYFQKFKENSKEFTNVRNKKESYERCIAQSFLKDELKLIFKKQREFGFSFSKKFEEEVLSVAFYKRALKDFSHLVGNCSFFTDEKRAPKNSPLAFMFVALTRIINLLNNLKNTEGILYTKDDLNALLNEVLKNGTLTYKQTKKLLGLSDDYEFKGEKGTYFIEFKKYKEFIKALGEHNLSQDDLNEIAKDITLIKDEIKLKKALAKYDLNQNQIDSLSKLEFKDHLNISFKALKLITPLMLEGKKYDEACNELNLKVAINEDKKDFLPAFNETYYKDEVTNPVVLRAIKEYRKVLNALLKKYGKVHKINIELAREVGKNHSQRAKIEKEQNENYKAKKDAELECEKLGLKINSKNILKLRLFKEQKEFCAYSGEKIKISDLQDEKMLEIDHIYPYSRSFDDSYMNKVLVFTKQNQEKLNKTPFEAFGNDSAKWQKIEVLAKNLPTKKQKRILDKNYKDKEQKDFKDRNLNDTRYIARLVLNYTKDYLDFLPLSDDENTKLNDTQKGSKVHVEAKSGMLTSALRHTWGFSTKDRNNHLHHAIDAVIIAYANNSIVKAFSDFKKEQESNSAELYAKKISELDYKNKRKFFEPFSGFRQKVLDKIDEIFVSKPERKKPSGALHEETFRKEEEFYQSYGGKEGVLKALELGKIRKVNGKIVKNGDMFRVDIFKHKKTNKFYAVPIYTMDFALKVLPNKAVARSKKGEIKDWILMDENYEFCFSLYKDSLILIQTKDMQEPEFVYYNAFTSSTVSLIVSKHDNKFETLSKNQKILFKNANEKEVIAKSIGIQNLKVFEKYIVSALGEVTKAEFRQREDFKK

SEQ ID NO: 135 - protein, 984 aa, Campylobacter jejuni
  Campylobacter jejuni subsp. jejuni 87459
MARILAFDIGISSIGWAFSENDELKDCGVRIFTKAENPKTGESLALPRRLARSARKRLARRKARLNHLKHLIANEFKLNYEDYQSFDESLAKAYKGSLISPYELRFRALNELLSKQDFARVILHIAKRRGYDDIKNSDDKEKGAILKAIKQNEEKLANYQSVGEYLYKEYFQKFKENSKEFTNVRNKKESYERCIAQSFLKDELKLIFKKQREFGFSFSKKFEEEVLSVAFYKRALKDFSHLVGNCSFFTDEKRAPKNSPLAFMFVALTRIINLLNNLKNTEGILYTKDDLNTFLNEVLKNGTLTYKQTKKLLGLSDDYEFKGEKGTYFIEFKKYKEFIKALGDHNLSQDDLNEIAKDITLIKDEIKLKKALAKYDLNQNQIDSLSKLEFKDHLNISFKALKLITPLMLEGKKYDEACNELNLKVAINEDKKDFLPAFNETYYKDEVTNPVVLRAIKEYRKVLNALLKKYGKVHKINIELAREVGKNHSQRAKIEKEQNENYKAKKDAELECEKLGLKINSKNILKLRLFKEQKEFCAYSGEKIKISDLQDEKMLEIDHIYPYSRSFDDSYMNKVLVFTKQNQEKLNKTPFEAFGNDSAKWQKIEVLAKNLPTKKQKRILDKNYKDKEQKDFKDRNLNDTRYIARLVLNYTKDYLDFLPLSDDENTKLNDTQKGSKVHVEAKSGMLTSALRHTWGFSTKDRNNHLHHAIDAVIIAYANNSIVKAFSDFKKEQESNSAELYAKKISELDYKNKRKFFEPFSGFRQKVLDKIDEIFVSKPERKKPSGALHEETFRKEEEFYQSYGGKEGVLKALELGKIRKVNGKIVKNGDMFRVDIFKHKKTNKFYAVPIYTMDFALKVLPNKAVARSKKGEIKDWILMDENYEFCFSLYKDSLILIQTKDMQEPEFVYYNAFTSSTVSLIVSKHDNKFETLSKNQKILFKNANEKEVIAKSIGIQNLKVFEKYIVSALGEVTKAEFRQREDFKK

SEQ ID NO: 136 - protein, 984 aa, Campylobacter jejuni
  Campylobacter jejuni subsp. jejuni ATCC 33560
MARILAFDIGISSIGWAFSENDELKDCGVRIFTKAENPKTGESLALPRRLARSARKRLARRKARLNHLKHLIANEFKLNYEDYQSFDESLAKAYKGSLISPYELRFRALNELLSKQDFARVILHIAKRRGYDDIKNSDDKEKGAILKAIKQNEEKLANYQSVGEYLYKEYFQKFKENSKEFTNVRNKKESYERCIAQSFLKDELKLIFKKQREFGFSFSKKFEEEVLSVAFYKRALKDFSHLVGNCSFFTDEKRAPKNSPLAFMFVALTRIINLLNNLKNTEGILYTKDDLNALLNEVLKNGTLTYKQTKKLLGLSDDYEFKGEKGTYFIEFKKYKEFIKALGDHSLSQDDLNEIAKDITLIKDEIKLKKALAKYDLNQNQIDSLSKLEFKDHLNISFKALKLITPLMLEGKKYDEACNELNLKVAINEDKKDFLPAFNETYYKDEVTNPVVLRAIKEYRKVLNALLKKYGKVHKINIELAREVGKNYSQRAKIEKEQNENYKAKKDAELECEKLGLKINSKNILKLRLFKEQKEFCAYSGEKIKISDLQDEKMLEIDHIYPYSRSFDDSYMNKVLVFTKQNQEKLNQTPFEAFGNDSAKWQKIEVLAKNLPTKKQKRILDKNYKDKEQKNFKDRNLNDTRYIARLVLNYTKDYLDFLPLSDDENTKLNDTQKGSKVHVEAKSGMLTSALRHTWGFSAKDRNNHLHHTIDAVIIAYANNSIVKAFSDFKKEQESNSAELYAKKISELDYKNKRKFFEPFSGFRQKVLDKIDEIFVSKPERKKPSGALHEETFRKEEEFYQSYGGKEGVLKALELGKIRKVNGKIVKNGDMFRVDIFKHKKTNKFYAVPIYTMDFALKVLPNKAVARSKKGEIKDWILMDENYEFCFSLYKDSLILIQTKDMQEPEFVYYNAFTSSTVSLIVSKHDNKFETLSKNQKILFKNANEKEVIAKSIGIQNLKVFEKYIVSALGEVTKAEFRQREDFKK

SEQ ID NO: 137 - protein, 987 aa, Campylobacter jejuni
  Campylobacter jejuni subsp. jejuni CF93-6
MARILAFDIGISSIGWAFSENDELKDCGVRIFTKVENPKTGESLALPRRLARSARKRLARRKARLNHLKHLIANEFKLNYEDYQSFDESLAKAYKGSLISPYELRFRALNELLSKQDFARVILHIAKRRGYDDIKNSDDKEKGAILKAIKQNEEKLANYQSVGEYLYKEYFQKFKENSKEFTNVRNKKESYERCIAQSFLKDELKLIFKKQREFGFSFSKKFEEEVLSVAFYKRALKDFSHLVGNCSFFTDEKRVPKNSPLAFMFVALTRIINLLNNLKNTEGILYTKDDLNALLNEVLKNGTLTYKQTKKLLGLSDDYEFKGEKGTYFIEFKKYKEFIKALGEHNLSQDDLNEIAKDITLIKDEIKLKKALAKYDLNQNQIDSLSKLEFKDHLNISFKALKLITPLMLEGKKYDEACNELNLKVAINEDKKDFLPAFNETYYKDEVTNPVVLRAIKEYRKVLNALLKKYGKVHKINIELAREVGKNHSQRAKIEKEQNENYKAKKDAELECEKLGLKINSKNILKLRLFKEQKEFCAYSGEKIKISDLQDEKMLEIDHIYPYSRSFDDSYMNKVLVFTKQNQEKLNQTPFEAFGNDSAKWQKIEVLAKNLPTKKQKRILDKNYKDKEQKNFKDRNLNDTRYIARLVLNYTKDYLDFLPLSDDENTKLNDTQKGSKVHVEAKSGMLTSALRHTWGFSAKDRNNHLHHAIDAVIIAYANNSIVKAFSDFKKEQESNSAELYAKKISELDYKNKRKFFEPFSGFRQKVLDKIDEIFVSKPERKKPSGALHEETFRKEEEFYQSYGGKEGVLKALELGKIRKVNGKIVKNGDMFRVDIFKHKKTNKFYGVPIYTMDFALKVLPNKAVARSKKGEIKDWILMDENYEFCFSLYKDSLILIQTKDMQEPEFVYYNAFTSSTVSLIVSKHDNKFETLSKNQKILFKNANEKEVIAKSIGIQNLKVFEKYIVSALGEVTKAEFRQREDFKNELR

SEQ ID NO: 138 - protein, 984 aa, Campylobacter jejuni
  Campylobacter jejuni subsp. jejuni CG8486
MARILAFDIGISSIGWAFSENDELKDCGVRIFTKAENPKTGESLALPRRLARSARKRLARRKARLNHLKHLIANEFKLNYEDYQSFDESLAKAYKGSLISPYELRFRALNELLSKQDFARVILHIAKRRGYDDIKNSDDKEKGAILKAIKQNEEKLANYQSVGEYLYKEYFQKFKENSKEFTNVRNKKESYERCIAQSFLKDELKLIFKKQREFGFSFSKKFEEEVLSVAFYKRALKDFSHLVGNCSFFTDEKRAPKNSPLAFMFVALTRIINLLNNLKNTEGILYTKDDLNALLNEVLKNGTLTYKQTKKLLGLSDDYEFKGEKGTYFIEFKKYKEFIKALGDHSLSQDDLNEIAKDITLIKDEIKLKKALAKYDLNQNQIDSLSKLEFKDHLNISFKALKLITPLMLEGKKYDEACNELNLKVAINEDKKDFLPAFNETYYKDEVTNPVVLRAIKEYRKVLNALLKKYGKVHKINIELAREVGKNYSQRAKIEKEQNENYKAKKDAELECEKLGLKINSKNILKLRLFKEQKEFCAYSGEKIKISDLQDEKMLEIDHIYPYSRSFDDSYMNKVLVFTKQNQEKLNQTPFEAFGNDSAKWQKIEVLAKNLPTKKQKRILDKNYKDKEQKDFKDRNLNDTRYIARLVLNYTKDYLDFLPLSDDENTKLNDTQKGSKVHVEAKSGMLTSALRHTWGFSAKDRNNHLHHAIDAVIIAYANNSIVKAFSDFKKEQESNSAELYAKKISELDYKNKRKFFEPFSGFRQKVLDKIDEIFVSKPERKKPSGALHEETFRKEEEFYQSYGGKEGVLKALELGKIRKVNGKIVKNGDMFRVDIFKHKKTNKFYAVPIYTMDFALKVLPNKAVARSKKGEIKDWILMDENYEFCFSLYKDSLILIQTKDMQEPEFVYYNAFTSSTVSLIVSKHDNKFETLSKNQKILFKNANEKEVIAKSIGIQNLKVFEKYIVSALGEVTKAEFRQREDFKK

SEQ ID NO: 139 - protein, 984 aa, Campylobacter jejuni
  Campylobacter jejuni subsp. jejuni HB93-13
MARILAFDIGISSIGWAFSENDELKDCGVRIFTKVENPKTGESLALPRRLARSARKRLARRKARLNHLKHLIANEFKLNYEDYQSFDESLAKAYKGSLISPYELRFRALNELLSKQDFARVILHIAKRRGYDDIKNSDDKEKGAILKAIKQNEEKLANYQSVGEYLYKEYFQKFKENSKEFTNVRNKKESYERCIAQSFLKDELKLIFKKQREFGFSFLKKFEEEVLSVAFYKRALKDFSHLVGNCSFFTDEKRAPKNSPLAFMFVALTRIINLLNNLKNTEGILYTKDDLNALLNEVLKNGTLTYKQTKKLLGLSDDYEFKGEKGTYFIEFKKYKEFIKALGEHNLSQDDLNEIAKDITLIKDEIKLKKALAKYDLNQNQIDSLSKLEFKDHLNISFKALKLITPLMLEGKKYDEAYNELNLKVAINEDKKDFLPAFNETYYKDEVTNPVVLRAIKEYRKVLNALLKKYGKVHKINIELAREVGKNHSQRAKIEKEQNENYKAKKDAELECEKLGLKINSKNILKLRLFKEQKEFCAYSGEKIKISDLQDEKMLEIDHIYPYSRSFDDSYMNKVLVFTKQNQEKLNQTPFEAFGNDSAKWQKIEVLAKNLPTKKQKRILDKNYKDKEQKDFKDRNLNDTRYIARLVLNYTKDYLDFLPLSDDENTKLNDTQKGSKVHVEAKSGMLTSALRHTWGFSAKDRNNHLHHAIDAVIIAYANNSIVKAFSDFKKEQESNSAELYAKKISELDYKNKRKFFEPFSGFRQKVLDKIDEIFVSKPERKKPSGALHEETFRKEEEFYQSYGGKEGVLKALELGKIRKVNGKIVKNGDMFRVDIFKHKKTNKFYAVPIYTMDFALKVLPNKAVARSKKGEIKDWILMDENYEFCFSLYKDSLILIQTKDMQEPELVYFNAFTSSTVSLIVSKHDNKFETLSKNQKILFKNANEKEVIAKSIGIQNLKVFEKYIVSALGEVTKAEFRQREDFKK

SEQ ID NO: 140 - protein, 987 aa, Campylobacter jejuni
  Campylobacter jejuni subsp. jejuni LMG 23210
MARILAFDIGISSIGWAFSENDELKDCGVRIFTKAENPKTGESLALPRRLARSARKRLARRKARLNHLKHLIANEFKLNYEDYQSFDESLAKAYKGSLISPYELRFRALNELLSKQDFARVILHIAKRRGYDDIKNSDDKEKGAILKAIKQNEEKLANYQSVGEYLYKEYFQKFKENSKEFTNVRNKKESYERCIAQSFLKDELKLIFKKQREFGFSFSKKFEEEVLSVAFYKRALKDFSHLVGNCSFFTDEKRAPKNSPLAFMFVALTRIINLLNNLKNTEGILYTKDDLNALLNEVLKNGTLTYKQTKKLLGLSDDYEFKGEKGTYFIEFKKYKEFIKALGDHSLSQDDLNEIAKDITLIKDEIKLKKALVKYDLNQNQIDSLSKLEFKDHLNISFKALKLITPLMLEGKKYDEACNELNLKVAINEDKKDFLPAFNETYYKDEVTNPVVLRAIKEYRKVLNALLKKYGKVHKINIELAREVGKNYSQRAKIEKEQNENYKAKKDAELECEKLGLKINSKNILKLRLFKEQKEFCAYSGEKIKISDLQDEKMLEIDHIYPYSRSFDDSYMNKVLVFTKQNQEKLNQTPFEAFGNDSAKWQKIEVLAKNLPTKKQKRILDKNYKDKEQKDFKDRNLNDTRYIARLVLNYTKDYLDFLPLSDDENTKLNDTQKGSKVHVEAKSGMLTSALRHTWGFSAKDRNNHLHHAIDAVIIAYANNSIVKAFSDFKKEQESNSAELYAKKISELDYKNKRKFFEPFSGFRQKVLDKIDEIFVSKPERKKPSGALHEETFRKEEEFYQSYGGKEGVLKALELGKIRKVNGKIVKNGDMFRVDIFKHKKTNKFYAVPIYTMDFALKVLPNKAVARSKKGEIKDWILMDENYEFCFSLYKDSLILIQTKDMQEPELVYFNAFTSSTVSLIVSKHDNKFETLSKNQKILFKNANEKEVIAKSIGIQNLKVFEKYIVSALGEVTKAEFRQREDFKNELR

SEQ ID NO: 141 - protein, 984 aa, Campylobacter jejuni
  Campylobacter jejuni subsp. jejuni LMG 23211
MARILAFDIGISSIGWAFSENDELKDCGVRIFTKAENPKTGESLALPRRLARSARKRLARRKARLNHLKHLIANEFKLNYEDYQSFDESLAKAYKGSLISPYELRFRALNELLSKQDFARVILHIAKRRGYDDIKNNGDEEKSEILKAIKQNEEKLVNYQSVGEYLYKEYFQKFKENSKEFINVRNKKESYERCITQSFLKDELKLIFQKQREFGFSFSKKFEEEVLSVAFYKRALKDFSHLVGNCSFFTDEKRAPKNSPLAFMFVALTRIINLLNNLKNTEGILYTKDDLNALLNEVLKNGTLTYKQTKKLLGLSDDYEFKGEKGTYFIEFKKYKEFIKALDEHSLSQDDLNEIAKDITLIKDEIKLKKALAKYDLNQNQIDSLSKLEFKDHLNISFKALKLITPLMLEGKKYDEACNELNLKVAINEDKKDFLPAFNETYYKDEVTNPVVLRAIKEYRKILNALLKKYGKVHKINIELAREVGKNHSQRAKIEKEQNENYKAKKDAEIECEKLGLKINSKNILKLRLFKEQKEFCAYSGEKIKISDLQDEKMLEIDHIYPYSRSFDDSYMNKVLVFTKQNQEKLNKTPFEAFGNDGVKWQKIEVLAKNLPEKKQKRILDKNYKDKEQKDFKDRNLNDTRYIARLVLNYTKDYLDFLPLSDDENTKLNDTQKGSKVHVEAKSGMLTSALRHTWGFSTKDRNNHLHHAIDAAIIAYANNSIVKAFSDFKKEQESNSAELYAKKISELDYKNKRKFFEPFSGFRQKVLDKIDEIFVSKPERKKPSGALHEETFRKEEEFYQSYGGKEGVLKALELGKIRKVNGKIVKNGDMFRVDIFKHKKTNKFYAVPIYTMDFALKVLPNKAVARSKKGEIKDWILMDENYEFCFSLYKDSLILIQTKDMQEPELVYFNAFTSSTVSLVVSKHDNKFETLSKNQKILFKNANEKEVIAKSIGIQNLKVFEKYIVSALGEVTKAEFRQREDFKK

SEQ ID NO: 142 - protein, 984 aa, Campylobacter jejuni
  Campylobacter jejuni subsp. jejuni LMG 23263
MARILAFDIGISSIGWAFSENDELKDCGVRIFTKAENPKTGESLALPRRLARSARKRLARRKARLNHLKHLIANEFKLNYEDYQSFDESLAKAYKGSLISPYELRFRALNELLSKQDFARVILHIVKRRGYDDIKNSDDKEKGAILKAIKQNEEKLANYQSVGEYLYKEYFQKFKENSKEFTNVRNKKESYERCIAQSFLKDELKLIFKKQREFGFSFSKKFEEEVLSVAFYKRALKDFSHLVGNCSFFTDEKRAPKNSPLAFMFVALTRIINLLNNLKNTEGILYTKDDLNTLLNEVLKNGTLTYKQTKKLLGLSDDYEFKGEKGTYFIEFKKYKEFIKALGDHSLSQDDLNEIAKDITLIKDEIKLKKALAKYDLNQNQIDSLSKLEFKDHLNISFKALKLITPLMLEGKKYDEACNELNLKVAINEDKKDFLPAFNETYYKDEVTNPVVLRAIKEYRKVLNALLKKYGKVHKINIELAREVGKNHSQRAKIEKEQNENYKAKKDAEFECEKLGLKINSKNILKLRLFKEQKEFCAYSGEKIKISDLQDEKMLEIDHIYPYSRSFDDSYMNKVLVFTKQNQEKLNKTPFEAFGNDSAKWQKIEVLAKNLPTKKQKRILDKNYKDKEQKDFKDRNLNDTRYIARLVLNYTKDYLDFLPLSDDENTKLNDTQKGSKVHVEAKSGMLTSALRHTWGFSTKDRNNHLHHAIDAVIIAYANNSIVKAFSDFKKEQESNSAELYAKKISELDYKNKRKFFEPFSGFRQKVLDKIDEIFVSKPERKKPSGALHEETFRKEEEFYQSYGGKEGVLKALELGKIRKVNGKIVKNGDMFRVDIFKHKKTNKFYAVPIYTMDFALKVLPNKAVARSKKGEIKDWILMDENYEFCFSLYKDSLILIQTKDMQEPEFVYYNAFTSSTVSLIVSKHDNKFETLSKNQKILFKNANEKEVIAKSIGIQNLKVFEKYIVSALGEVTKAEFRQREDFKK

SEQ ID NO: 143 - protein, 984 aa, Campylobacter jejuni
  Campylobacter jejuni subsp. jejuni LMG 23264
MARILAFDIGISSIGWAFSENDELKDCGVRIFTKVENPKTGESLALPRRLARSARKRLARRKARLNHLKHLIANEFKLNYEDYQSFDESLAKAYKGSLISPYELRFRALNELLSKQDFARVILHIAKRRGYDDIKNSDDKEKGAILKAIKQNEEKLANYQSVGEYLYKEYFQKFKENSKEFTNVRNKKESYERCIAQSFLKDELKLIFKKQREFGFSFSKKFEEEVLSVAFYKRALKDFSHLVGNCSFFTDEKRAPKNSPLAFMFVALTRIINLLNNLKNTEGILYTKDDLNALLNEVLKNGTLTYKQTKKLLGLSDDYEFKGEKGTYFIEFKKYKEFIKALGEHNLSQDDLNEIAKDITLIKDEIKLKKALAKYDLNQNQIDSLSKLEFKDHLNISFKALKLITPLMLEGKKYDEACNELNLKVAINEDKKDFLPAFNETYYKDEVTNPVVLRAIKEYRKVLNALLKKYGKVHKINIELAREVGKNHSQRAKIEKEQNENYKAKKDAELECEKLGLKINSKNILKLRLFKEQKEFCAYSGEKIKISDLQDEKMLEIDHIYPYSRSFDDSYMNKVLVFTKQNQEKLNKTPFEAFGNDSAKWQKIEVLAKNLPTKKQKRILDKNYKDKEQKDFKDRNLNDTRYIARLVLNYTKDYLDFLPLSNDENTKLNDTQKGSKVHVEAKSGMLTSALRHTWGFSTKDRNNHLHHAIDAVIIAYANNSIVKAFSDFKKEQESNSAELYAKKISELDYKNKRKFFEPFSGFRQKVLDKIDEIFVSKPERKKPSGALHEETFRKEEEFYQSYGGKEGVLKALELGKIRKVNGKIVKNGDMFRVDIFKHKKTNKFYAVPIYTMDFALKVLPNKAVARSKKGEIKDWILMDENYEFCFSLYKDSLILIQTKDMQEPEFVYYNAFTSSTVSLIVSKHDNKFETLSKNQKILFKNANEKEVIAKSIGIQNLKVFEKYIVSALGEVTKAEFRQREDFKK

SEQ ID NO: 144 - protein, 987 aa, Campylobacter jejuni
  Campylobacter jejuni subsp. jejuni LMG 23269
MARILAFDIGISSIGWAFSENDELKDCGVRIFTKAENPKTGESLALPRRLARSARKRLARRKARLNHLKHLIANEFKLNYEDYQSFDESLAKAYKGSLISPYELRFRALNELLSKQDFARVILHIAKRRGYDDIKNNGDEEKSEILKAIKQNEEKLVNYQSVGEYLYKEYFQKFKENSKEFINVRNKKESYERCIAQSFLKDELKLIFQKQREFGFSFSKKFEEEVLSVAFYKRALKDFSHLVGNCSFFTDEKRAPKNSPLAFMFVALTRIINLLNNLKNTEGILYTKDDLNTLLNEVLKNGTLTYKQTKKLLGLSDDYEFKGEKGTYFIEFKKYKEFIKALGEHNLSQDNLNEIAKDITLIKDEIKLKKALAKYDLNQNQIDSLSKLEFKDHLNISFKALKLITPLMLEGKKYDEAYNELNLKVAINEDKKDFLPAFNETYYKDEVTNPVVLRAIKEYRKVLNALLKKYGKVHKINIELAREVGKNHSQRAKIEKEQNENYKAKKDAELECEKLGLKINSKNILKLRLFKEQKEFCAYSGEKIKISDLQDEKMLEIDHIYPYSRSFDDSYMNKVLVFTKQNQEKLNQTPFEAFGNDSAKWQKIEVLAKNLPTKKQKRILDKNYKDKEQKDFKDRNLNDTRYIARLVLNYTKDYLDFLPLSDDENTKLNDTQKGSKVHVEAKSGMLTSALRHTWGFSAKDRNNHLHHAIDAVIIAYANNSIVKAFSDFKKEQESNSAELYAKKISELDYKNKRKFFEPFSGFRQKVLDKIDEIFVSKPERKKPSGALHEETFRKEEEFHQSYGGKEGVLKALELGKIRKVNGKIVKNGDMFRVDIFKHKKTNKFYAVPIYTMDFALKVLPNKAVVQGKDKKSGLIKDWILMDENYEFCFSLYKDSLILIQTKDMQEPELVYFNAFTSSTVSLIVSKHDNKFETLSKNQKILFKNANEKEVIAKSIGIQNLKVFEKYIVSALGEVTKAEFRQREDFKK

SEQ ID NO: 145 - protein, 987 aa, Campylobacter jejuni
  Campylobacter jejuni subsp. jejuni LMG 23357
MARILAFDIGISSIGWAFSENDELKDCGVRIFTKAENPKTGESLALPRCLARSARKRLARRKARLNHLKHLIANEFKLNYEDYQSFDESLAKAYKGSLISPYELRFRALNELLSKQDFARVILHIAKRRGYDDIKNNGDEEKGEILKAIKQNEEKLVSYQSVGEYLYKEYFQKFKENSKEFINVRNKKESYERCIAQSFLKDELKLIFQKQRKFGFSFSKKFEEEVLSVAFYKRALKDFSHLVGNCSFFTDEKRAPKNSPLAFMFVALTRIINLLNNLKNTEGILYTKDDLNTLLNEVLKNGTLTYKQTKKLLGLSNDYEFKGEKGTYFIEFQKYKEFVKALGEHNLSQDDLNEIAKDITLIKDEIKLKKALAKYDLNQNQIDSLSKLEFKDHLNISFKALKLITPLMLEGKKYDEACNELNLKVAINEDKKDFLPAFNETYYKDEVTNPVVLRAIKEYRKVLNALLKKYGKVHKINIELAREVGKNHSQRAKIEKEQNENYKAKKDAELECEKLGLKINSKNILKLRLFKEQKEFCVYSGEKIKISDLQDEKMLEIDHIYPYSRSFDDSYMNKVLVFTKQNQEKLNKTPFETFGNDRVKWQKIEVLAKNLPTKKQKRILDKNYKDKEQKDFKDRNLNDTRYIARLVLNYTKDYLDFLPLSDDENTKLNDTQKGSKVHVEAKSGMLTSTLRHTWGFSTKDRNNHLHHAIDAAIIAYANNSIVKAFSDFKKEQESNTAELYAKKISELDYKNKRKFFEPFSGFRQKLLDKIDEIFVSKPERKKPSGALHEETFRKEEEFYQSYGGKEGVLKALELGKIRKVNGKIVSNGDMFRVDIFKHKKTNKFYAVPIYTMDFALKVLPNKAVVQGKDKKSGLIKDWILMDENYEFCFSLYKDSLILIQTKDMQEPELVYYERLDSSNASLTVSKHDNKFETLSKNQKILFKNANEKEVIAKSIGIQNLKVFEKYIVSALGEVTKAEFRQREDFKK

SEQ ID NO: 146 - protein, 984 aa, Campylobacter jejuni
  Campylobacter jejuni subsp. jejuni NCTC 11168 = ATCC 700819
MARILAFDIGISSIGWAFSENDELKDCGVRIFTKVENPKTGESLALPRRLARSARKRLARRKARLNHLKHLIANEFKLNYEDYQSFDESLAKAYKGSLISPYELRFRALNELLSKQDFARVILHIAKRRGYDDIKNSDDKEKGAILKAIKQNEEKLANYQSVGEYLYKEYFQKFKENSKEFTNVRNKKESYERCIAQSFLKDELKLIFKKQREFGFSFSKKFEEEVLSVAFYKRALKDFSHLVGNCSFFTDEKRAPKNSPLAFMFVALTRIINLLNNLKNTEGILYTKDDLNALLNEVLKNGTLTYKQTKKLLGLSDDYEFKGEKGTYFIEFKKYKEFIKALGEHNLSQDDLNEIAKDITLIKDEIKLKKALAKYDLNQNQIDSLSKLEFKDHLNISFKALKLVTPLMLEGKKYDEACNELNLKVAINEDKKDFLPAFNETYYKDEVTNPVVLRAIKEYRKVLNALLKKYGKVHKINIELAREVGKNHSQRAKIEKEQNENYKAKKDAELECEKLGLKINSKNILKLRLFKEQKEFCAYSGEKIKISDLQDEKMLEIDHIYPYSRSFDDSYMNKVLVFTKQNQEKLNQTPFEAFGNDSAKWQKIEVLAKNLPTKKQKRILDKNYKDKEQKNFKDRNLNDTRYIARLVLNYTKDYLDFLPLSDDENTKLNDTQKGSKVHVEAKSGMLTSALRHTWGFSAKDRNNHLHHAIDAVIIAYANNSIVKAFSDFKKEQESNSAELYAKKISELDYKNKRKFFEPFSGFRQKVLDKIDEIFVSKPERKKPSGALHEETFRKEEEFYQSYGGKEGVLKALELGKIRKVNGKIVKNGDMFRVDIFKHKKTNKFYAVPIYTMDFALKVLPNKAVARSKKGEIKDWILMDENYEFCFSLYKDSLILIQTKDMQEPEFVYYNAFTSSTVSLIVSKHDNKFETLSKNQKILFKNANEKEVIAKSIGIQNLKVFEKYIVSALGEVTKAEFRQREDFKK

SEQ ID NO: 147 - protein, 983 aa, Campylobacter jejuni
  Campylobacter jejuni subsp. jejuni NW
MARILAFDIGISSIGWAFSENDELKDCGVRIFTKAENPKTGESLALPRRLARSARKRLARRKARLNHLKHLIANEFKLNYEDYQSFDESLAKAYKGSLISPYELRFRALNELLSKQDFARVILHIAKRRGYDDIKNSDDKEKGAILKAIKQNEEKLANYQSVGEYLYKEYFQKFKENSKEFTNVRNKKESYERCIAQSFLKDELKLIFKKQREFGFSFSKKFEEEVLSVAFYKRALKDFSHLVGNCSFFTDEKRAPKNSPLAFMFVALTRIINLLNNLKNTEGILYTKDDLNALLNEVLKNGTLTYKQTKKLLGLSDDYEFKGEKGTYFIEFKKYKEFIKALGEHNLSQDDLNEIAKDITLIKDEIKLKKALAKYDLNQNQIDSLSKLEFKDHLNISFKALKLVTPLMLEGKKYDEACNELNLKVAINEDKKDFLPAFNETYYKDEVTNPVVLRAIKEYRKVLNALLKKYGKVHKINIELAREVGKNHSQRAKIEKEQNENYKAKKDAELECEKLGLKINSKNILKLRLFKEQKEFCAYSGEKIKISDLQDEKMLEIDHIYPYSRSFDDSYMNKVLVFTKQNQEKLNQTPFEAFGNDSAKWQKIEVLAKNLPTKKQKRILDKNYKDKEQKNFKDRNLNDTRYIARLVLNYTKDYLDFLPLSDDENTKLNDTQKGSKVHVEAKSGMLTSALRHTWGFSAKDRNNHLHHAIDAVIIAYANNSIVKAFSDFKKEQESNSAELYAKKISELDYKNKRKFFEPFSGFRQKVLDKIDEIFVSKPERKKPSGALHEETFRKEEFYQSYGGKEGVLKALELGKIRKVNGKIVKNGDMFRVDIFKHKKTNKFYAVPIYTMDFALKVLPNKAVARSKKGEIKDWILMDENYEFCFSLYKDSLILIQTKDMQEPEFVYYNAFTSSTVSLIVSKHDNKFETLSKNQKILFKNANEKEVIAKSIGIQNLKVFEKYIVSALGEVTKAEFRQREDFKK

SEQ ID NO: 148 - protein, 987 aa, Campylobacter jejuni
MARILAFDIGISSIGWAFSENDELKDCGVRIFTKAENPKTGESLALPRRLARSARKRLARRKARLNHLKHLIANEFKLNYEDYQSFDESLAKAYKGSLISPYELRFRALNELLSKQDFARVILHIAKRRGYDDIKNNGDEEKSEILKAIKQNEEKLVNYQSVGEYLYKEYFQKFKENSKEFINVRNKKESYERCIAQSFLKDELKLIFQKQREFGFSFSKKFEEEVLSVAFYKRALKDFSHLVGNCSFFTDEKRAPKNSPLAFMFVALTRIINLLNNLKNTEGILYTKDDLNTLLNEVLKNGTLTYKQTKKLLGLSDDYEFKGEKGTYFIEFKKYKEFIKALGEHNLSQDNLNEIAKDITLIKDEIKLKKALAKYDLNQNQIDSLSKLEFKDHLNISFKALKLITPLMLEGKKYDEAYNELNLKVAINEDKKDFLPAFNETYYKDEVTNPVVLRAIKEYRKVLNALLKKYGKVHKINIELAREVGKNHSQRAKIEKEQNENYKAKKDAELECEKLGLKINSKNILKLRLFKEQKEFCAYSGEKIKISDLQDEKMLEIDHIYPYSRSFDDSYMNKVLVFTKQNQEKLNQTPFEAFGNDSAKWQKIEVLAKNLPTKKQKRILDKNYKDKEQKDFKDRNLNDTRYIARLVLNYTKDYLDFLPLSDDENTKLNDTQKGSKVHVEAKSGMLTSALRHTWGFSAKDRNNHLHHAIDAVIIAYANNSIVKAFSDFKKEQESNSAELYAKKISELDYKNKRKFFEPFSGFRQKVLDKIDEIFVSKPERKKPSGALHEETFRKEEEFYQSYGGKEGVLKALELGKIRKVNGKIVKNGDMFRVDIFKHKKTNKFYPVPIYTMDFALKVLPNKAVVQGKDKKSGLIKDWILMDENYEFCFSLYKDSLILIQTKDMQEPELVYFNAFTSSTVSLIVSKHDNKFETLSKNQKILFKNANEKEVIAKSIGIQNLKVFEKYIVSALGEVTKAEFRQREDFKK

SEQ ID NO: 149 - protein, 1003 aa, Campylobacter lari
MRILGFDIGINSIGWAFVENDELKDCGVRIFTKAENPKNKESLALPRRNARSSRRRLKRRKARLIAIKRILAKELKLNYKDYVAADGELPKAYEGSLASVYELRYKALTQNLETKDLARVILHIAKHRGYMNKNEKKSNDAKKGKILSALKNNALKLENYQSVGEYFYKEFFQKYKKNTKNFIKIRNTKDNYNNCVLSSDLEKELKLILEKQKEFGYNYSEDFINEILKVAFFQRPLKDFSHLVGACTFFEEEKRACKNSYSAWEFVALTKIINEIKSLEKISGEIVPTQTINEVLNLILDKGSITYKKFRSCINLHESISFKSLKYDKENAENAKLIDFRKLVEFKKALGVHSLSRQELDQISTHITLIKDNVKLKTVLEKYNLSNEQINNLLEIEFNDYINLSFKALGMILPLMREGKRYDEACEIANLKPKTVDEKKDFLPAFCDSIFAHELSNPVVNRAISEYRKVLNALLKKYGKVHKIHLELARDVGLSKKAREKIEKEQKENQAVNAWALKECENIGLKASAKNILKLKLWKEQKEICIYSGNKISIEHLKDEKALEVDHIYPYSRSFDDSFINKVLVFTKENQEKLNKTPFEAFGKNIEKWSKIQTLAQNLPYKKKNKILDENFKDKQQEDFISRNLNDTRYIATLIAKYTKEYLNFLLLSENENANLKSGEKGSKIHVQTISGMLTSVLRHTWGFDKKDRNNHLHHALDAIIVAYSTNSIIKAFSDFRKNQELLKARFYAKELTSDNYKHQVKFFEPFKSFREKILSKIDEIFVSKPPRKRARRALHKDTFHSENKIIDKCSYNSKEGLQIALSCGRVRKIGTKYVENDTIVRVDIFKKQNKFYAIPIYAMDFALGILPNKIVITGKDKNNNPKQWQTIDESYEFCFSLYKNDLILLQKKNMQEPEFAYYNDFSISTSSICVEKHDNKFENLTSNQKLLFSNAKEGSVKVESLGIQNLKVFEKYIITPLGDKIKADFQPRENISLKTSKKYGLR

SEQ ID NO: 150 - protein, 1430 aa, Capnocytophaga canimorsus
MKHILGLDLGTNSIGWAVVKEAQNDNEQSEIVDVGVRVNPLTTDEKTNFEKGKPISTNADRTLKRSARRNLQRYKLRRKELIELLKEHQLISTDTILTENGKGTTFQTLELRAKSAKEKISLEELARVFLTINKKRGYKSSRKAKNEDEGQLIDGMEIAKRLYEENLTTGQLSLQLLKEGKKSLPDYYRSDLQFELDKVWNFQKQFHSHILTDEFYAQLKGKGQRATSALFLAKYQIYTAENKGSREDKKLQAYQWRVDALSKELTREQLAFVITEINNNLNNSSGYLGAISDRSKELYFNNETVGEYLWKQIAANPHTSLKNQVFYRQDYLDEFEQIWKTQSAFYPEILTDELKKELRDVVIFYQRKLKSQKSLVSFCEFENKEIEIKKEDGTSTKKVIGLKVAPKSSPLFQEFKIWQNLNNVLIRKKGSKTKKVDKNQQAVLFEEEKTIFELDLEAKQALFNELNLKGNLKAYYCLEILGYSPKEWEMNYSVLEGNRTNKALYEAYLKITDLEGYDAKNHLKVKLNKDEVELDDLKVPASEIKDMVQAIFKEAGINTDILHFNAELDGKDFENQASYQLWHLLYSYEGDDSKSGNELLYKLLETKFGFKKEYAQILANVSLSDDYGSLSTKAMRKIHPYIKENKFSTACELAGYRHSKHSLTKEENDNRVLKDSLEVLKKNSLRQPVVEKILNQMINLVNALLKKYRTENPNFKFDEIRIELARELKKNAEERANMTVNINKAKTEHEKIIKILKNEFGLPNPTRNDIIRYRLYEELKANGYKDLYTNEYIEKQDLFTKNIDIEHIIPKSRVFDDSFSNKTLSFRKTNLDKGERTAFDYIESKFGADKLEEYVARVEDLYKNNIISKAKYQKLLKKESEIGDGFVERDLRETQYIAKKAKEILLQITPNVLSTSGGITDRLREDWDLINVMKELNLPKYRALGLTQMEDRKYGQQVEVIIDWTKRNDHRHHAMDALTVAFTKHNHIQYLNYLNARKNEKHREHSNIMGIQQLETIKVTDKNGNEKRVFKAPMPNFRQVTKAFLENVLISHKAKNKVVTKNKNKVAGSNKVQEVLTPRGQLHKETVYGKYQYYVQKEEKIGGKFDLETIKKVANPLYQSLLKKRLEENGGDPKKAFTGKNSLAKNPIYLDDAQTEQLPEKVKLVWLENSFSIRKDITPENFKDEKLIDKILDEGVKRILKERLQSFGNDAKKAFSDLDKNPIWLNKEKGIAIKRVAISGVANAEPLHTKKDHLGKEILDKEGKSIPVDFISTGNNHHVAVYRDEKGNLQEKVVSVFEAVVRANQGLPIIDKTYNQHLGWEFLFTMKQNEMFVFSNESTGFNPNDIDLLDPKNKKIISPNLFRVQKFSKLQYGNSFVREFVFRHHLETTVEDRKELQGITYKQMKNSAFFNDIIKVRINHLGGIVSVGEY

SEQ ID NO: 151 - protein, 1436 aa, Capnocytophaga gingivalis
  Capnocytophaga gingivalis ATCC 33624
MKYIKYILGLDIGSNSIGWALIQLDLLQKTKRIIAAGSRIIPMDQKVLSDFGKGITISPTAQRTSYRNARHCRERHLLRRERLHRVLHILGFLPTHYDKQIDFSKRYGKFVDNTEPKIAYNEGKFLFMDSFQEMLSDFKSHQPDLFYTKKNGEESKIPYDWTIYYLRKKALSQKISKEELAWIILNFNQKRGYYQLREEEGNKENDFEIISSKIISVIKKDKDKKYNKYWYDIILENGLVYQAAFYNDFVYNWINQDREFIIERTSLKNGAEKVKLSYLPTFDEIDKMDKKEQDKYYKKIKIKTENSIGNKTVGCYIYDHILQNPNEKIKGKLVRTIERKYYKEELKAILEKQIALQPELFTDQLLADCIRELYSKNEAQQRNLAARDFVHLLVEDIIFYQRPLRRQKSTLANCSLESRSYIDKDSHTRKEAPLKVCPKSNPYYQEFRVLQWLQNLKIYEIDSDQEVTHQFIKTLEDKQQLFEFLMAQKEIDCEELLKYFLNQTYPNAKEKALKSELKKWKDTYRWNYVYDIGEKSSKKYPMNETRYELKRHLEKVANLPDDFLSSEVEYLLWHLIYSVKDKVAYEKGLKKFAQKHHLDKDSFVESFKKFNPYPSEYGSFSEKAIRKLLPLMRFGAHWDFNHIDKNTQKRIEDLITGVENEEIRTILREKAEKYQLEKETDFQDLPLWLAQYIVYNRHAEASSLEKWTSVNDLETYLNEFKQHSLRNPIVEQVVMETLRVVRDIWQQYGQGQASFFNEIHIELGRELKKTAKEREKLSKQNQKNEDINLSIKEKLKELEKYNTRAYSITHQEKYKLWLEQKHISPYTGQIISPENLFTDNYEIEHIIPQSRFFDDSLSNKVVCESIVNKAPYKDRQLGLEFIKNQGGRIVKELSKENKTIKIFTEEQYRTFIKEHYSNNPEKTKKLLLEEIPEKMVARQMNDTCYISKFISEILSKIVRSDEQDEGVHSKNVILCTGKITSILRQDWGLNDIWDNLILPRFERMNNLLQKEKFTIYSIEKQKKIPVVPINDQFKSFQKKRIDHRHHAMDAIIIACTTREHINYINNQHALEKEKDKKEKQEERDKLREKLCIKKYNNRSEGNYSWIFKKPWDTFTQEVRVALEDIVVSFKQNLRVINKATNYYERWVEENGKYIKKMVKQEGTNWAIRKPLHEETISGKIYLDREKITKNDILTATRKTVDSSFDDKRIKKITDTGIQKILLNYLKYKGSPEIAFSPEGLEELNKNLSIYNDGKPHKPIYKVRIYEKGSGRFALGEKGRKYKKYVQGASNLYFGIYQGAKRSFATIPLNEVIERQKQGLPSVPEYNEKGDLLLFSLSPNDLVYVPIEGEIIENIDFRNLSKEQKERIYNVNDFSSTCYFTPNRIAKAIFPKEVDLQRKGDKLSGSYDTKTASLEGIQIKEVCIKLKVDRLGNISKA

SEQ ID NO: 152 - protein, 1426 aa, Capnocytophaga ochracea
MKNILGLDLGTTSIGFAHIVEDENKEKSEIKELGVRIVSLTTDEQSDFEKGKSITTNANRTLKHGARLNLDRYQQRRKYLIDLLQKANLITPSSILAENGKNTTHSTWQLRAKAVTERIEKEEFARILLAINKKRGYKSSRKAKTEDEGQAIDGMAIAKRLYDENLTPGQLSLQLLQQNKKLLPDFYRSDLQKEFDLVWNFQKQFYPDILTDIFYKELQGKGKDATSKAFSKRYHFDTTENKGSKESVRLQAYQWRAEAISKQLSKEEVAYVLTEINNNLNNASGYLGAISDRSKELYFNRQTVGQYLYAKLQENRHNSLKNKVFYRQDYLDEFERIWETQASFHKELTDELKKQIRDVVIFYQRKPKSQKGLISFCEFESKEIEIEKDGKTITKNIGARVVPKSSPLFQEFKIWQILNNVICKRKGIRKKKISAKTTQLDLLNESSQTIFSLDMECKQLLFDELNLKGDLKSDKVLKLLGYSPQEWEINYNQLEGNRTQKALYEAYLKIVEMEAHDVKDILQIKSAKDDWSLDESPLSASEIREKVKAIFQTLGICTKILYFDPLLPVKEFEEQDSYQLWHLLYSYESDDSTSGNETLYRILEKKYAFKREHARILANVALQDDYGSLSTKAIRKIYPNIKENQYSTACEKAGYKHSKLSLTTEELEARELKNIIPLLKKNALRNPVVEKILNQMINVVNALIEKNSERDAEGKITKYFHFDEIRIELARELKKNAQKRYEMTQNINKAKLEHQKISEILQKEFGIKNPTKSDIIRYRLYQELEHNGYKELYTNAPIARDMLFSKNIEIEHIVPKARVFDDSFSNKTLTFHRINSDKGEYTAFDYITSLNSEEELNQYLTRVENAYKTKSISPTKYKNLLKKASEIGDDFINRDLRDTQYIAKKAKEILFQVTKNVLSTSGSITDRLREDWGLVDVMKELNMPKYQSLGLTEVEERKDGNKVTVIKNWTKRNDHRHHAMDALTVAFTKPSYIQYLNHLNARKDENNKNYSVILAIEEKETIKVPTNNGKNKRVFIEPIPNFRQVAKKHLEEIFISHKAKNKVVTKNTNKPAGTDKQQITLTPRGQLHKETIYGKYQYYINKEEKIGVKFDERTIAKVSNPVYREALLKRLQANDNDPKKAFAGKNALSKNPIYLDESKTKTLPEKVNLTYLEEDFSIRKDISPDNFKDLKSIEKVIDQGVKRILIKRLQAYDNDPKKAFVDLEKNPIWLNKEKGIAIKRVTISGVNNAQPLHIGKDHLGKTTLNKEGKEIPVDYVSTGNNHHVAIYRDKEGNLQEQIVSFFDAVVRAQQGIPIIDKTYKQAEGWQFLFTMKQNEMFVFPNATTGFNPAEIDLLDPKNKKLISPNLFRVQKIATKDYFFRHHLETNVETDNILKNVTWKREGLSGLKDIVKVRINHLGDIVSIGEY

SEQ ID NO: 153 - protein, 1437 aa, Capnocytophaga sp.
  Capnocytophaga sp. CM59
MKYIKYILGLDIGSNSIGWALIQLDLLQKTKRIIATGSRIIPMDQKVLSDFGKGITISPTAQRTSYRNARHCRERHLLRRERLHRVLHILGFLPTHYDKQIDFSKRYGKFVDNTEPKIAYNERKFLFMDSFQEMLADFKIHQPDLFYTKKNGEESKIPYDWTIYYLRKKALSRKISKEELAWIILNFNQKRGYYQLREEEEENKENDFEIISSKIISVIKKDKDKKYNKYWYDIILENGLVYQAAFYNDFVYNWINQDREFIIERISLKNGTEKVKLSYLPTFDEIDKMDKKEQDKYYKKIKIKTENSIGNKTVGCYIYDHILQNPNEKIKGKLVRTIERKYYKEELKAILEKQVALQPELFTDQLFADCIRELYSKNEAQQRNLAARDFVHLFVEDIIFYQRSLRRQKSTLANCSLESRSYIDKDSHTRKEAPLKVCPKSNPYYQEFRVLQWLQNLKIYEIDTDQEVTHEFIKTLEDKQQFFDFLMNQKEIDCEELLKYFLNQTYPNAREKALKSELKKWKDTYRWNYVYDIGEKSSKKYPMNETRYELKRHLEKVANLPDDFLSSEVEYLLWHLIYSVKDKVAYEKGLKTFAQKHHLDKDSFVESFKKFKPYPSEYGSFSEKAIRKLLPLMRFGSYWDFNHIDKNTQKRIEDLITGVENEEIRTILREKAEKYQLEKETDFQDLPLWLAQYIVYNRHAEASSLEKWTSVNDLETYLNEFKQYSLRNPIVEQVVMETLRVVRDIWQQYGQGQASFFDEIHIELGRELKKTAKEREKLSKQNQKNEDINLSIKEKLKELEKYNTRAYSITHQEKYKLWLEQKHISPYTGQIISPENLFTDNYEIEHIIPQSRFFDDSLSNKVVCESIVNKAPYKDRQLGLEFIKNQGGRIVKELSTENKTIKIFTEEQYRTFIKEHYSNNPEKTKKLLLEEIPEKMVARQMNDTCYISKFISEILSKIVRSDEQDEGVHSKNVILCTGKITSALKQDWGVNDVWNDLILPRFERMNDLTQSTLFTTYNEKYQKYLPTVPMEYSNGFQKKRIDHRHHAMDAIIIACATREHINYINNQHALEKGKDKKEKQKEHDKLREKLCIKKDNKGSEENYSWIFKKPWDTFTQEVQAALEGIVVSFKQNLRVINKATNYYERWVEENGKYIKKMVKQEGTNWAIRKPLHEETISGKIYLDREEITKNDILTATRKTVDSSFDEKRIKKITDTGIQKILLNYLKYKGSPEIAFSPEGLEELNKNLSIYNDGKPHKPIYKVRIYEKGSGRFALGEKGRKYKKYVQGAPNLYFGIYQGANKRSFATIPLNEVIERQKQGRPSIPEYNEKGDPLLFSLSPNDLVYVPVEGEIIEDIDFQNLSKEQKERIYNVNDFSSTCYFTPNRIAKAIFPKEVDLQRKGDKLPGSYDTKTASLEGIQIKEVCIKLKIDRLGNISKA

SEQ ID NO: 154 - protein, 1471 aa, Capnocytophaga sp.
  Capnocytophaga sp. oral taxon 324 str. F0483
MCKYFYIKNFITFVLSKSIIPMKHILGLDLGSNSIGWAFVQQDFENKQGKIIATGSRIIPMDQGILGDFERGNTVSQTAERTTYRSTRRLRERHLLRRERLHRVLHILGFLPPHYDAQIDFTKRYGKFIDNAEPKIAYNNGNFIFMNSFNEMIEDFKKHQPQLFYKKSNGEESKIPYDWTIYYLRKKALSQKITQQELAWLILHFNQKRGYYQLRGEEETENPNKEVAFHSLKVVDVEAEAPNKKGEIWYTIRLENGWIYRRTSKIPLDDWKGKTRDFIVTTDLNDDGTIKVDKEGKEKRSFRAPDENDWNLLKKKTEHDIDFSGKTVGAYIYDHLLQNPNQKIKGKLVRTIERKYYKDELKAILAKQIALQPELFTETLLADCIRELYRKNETQQQNLLSKDFLHLFVEDIIFYQRPLRSKKSTIANCTLEKRSYIDKETNERKDAPIKVCAKSNPYYQEFRVLQWLQNLRIYEIETDREVTAEFIETPQDCEALFNFLMSQKEIDNKGLLKYFLFAKNPQIKDKAAKSELKKWLTTYRWNYVYDAADNSSKKYPMNETGYELQRYLQKVEGLPANFLTFDITYQLWHLLYSVKDKVEFEKALKKFAKKKQLDKTSFVDSFKNFKPYPNEYGSFSEKAIKKLLPLMRFGNHWDFNRIDVSTQKRIDDLINGVANEDIRTIIREKAEKYQLNSETCFQDLPLWLAQYVVYNRHAEATDIEKWTSVSDLEAYLEDFKQHSLRNPIVEQVVTETLRVVRDIWQQYGGGQANFFDEIHIELGRELKKTAEERKQLSDKNQENESTNLRIKKLLAELKEDASIQNVRPYSLVQQELLKIYEEGVFSATDEVEEDIQKIRKKAEPSKADLQRYKLWLEQKYKSPYTGEVISLTKLFTEEYEIEHIIPQSRYYDDSLSNKVICESAVNKLKTNQLGLEFIQNHHGEKVRITANKEVTIFTEEQYKEFVKKHYANNSAKQQKLLLNEIPEKMVARQLNDTRYISKYISEILSKIVRSDEKDEGVNSKNIIPCTGKITTALKQDWGLNDVWNKLILPRFERMNQLTQTQLFTSYNDRLQKNLPTVPIEYSQGFQKKRIDHRHHAMDALVIACATREHINYMNNQHALDKSKDKKEKQQSRIDLRTILCEKKNNNWQFKKPWSTFTQEAKEALEHIVVSFKQNLRVINKATNYYEKWEEKNGVLVKKKVKQEGTNWAIRKPLHKETVSGKIVLDRKIGKDKILTATRKAVDITFTEKIISSITDTGIQKILLNYLKYKGSPEVAFSTEGLEELNKNIAQYNNGKKHQPIYKVRIFEEGSKFPLGETGAKATKYVEAAKGTNLFFGVYQGKGKRTYATIPLNEVIERQKQGLPSVPERNEKGEPLLFSLSPNDLVYVPMEGEIAETIDFNNLSKEQKERIYKTVSFTGNQCFFVQEAVATPIVNKMEYSPLNKMERDILGTMIKEVCIKLKVDRLGNITKA

SEQ ID NO: 155 - protein, 1450 aa, Capnocytophaga sp.
  Capnocytophaga sp. oral taxon 326 str. F0382
MKRILGLDLGSNSIGWAFVEQDFENKQGKIIATGSRIIPMDQGILGDFEKGNTVSQTAERTTYRSMRRLRERHLLRRERLHRVLHILGFLPPHYDAQIDFTKRYGKFIDNAEPKIAYNNGNFIFMNSFNEMIEDFKKYQPQLFYKKSNGEESKIPYDWTIYYLRKKVLSQKITQQELAWLILHFNQKRGYYQLRGEEETENPNKEVAFHSLKVVDVEAEAPNKKGEIWYTIRLENGWIYRRTSKIPLDDWKGKTRDFIVTTDLNDDGTIKVDKEGKEKRSFRAPDENDWNLLKKKTEHDIDFSGKTVGAYIYDHLLQNPNQKIKGKLVRTIERKYYKDELKAILAKQIALQPELFTETLLADCIRELYRKNETQQQNLLSKDFLHLFVEDIIFYQRPLRSKKSTIANCTLEKRSYIDKETNERKDTFIKVCAKSNPYYQEFRVLQWLQNLRIYEIETDREVTAEFIETAEDYEALFNFLMSQKEIDNEGLLKYFLFAKNPQIKDKVAKSELKKWLTTYRWNYVYDAADNSSKKYPMNETGYDLQRYLQKVEGLPANFLTFDITYRLWHLLYSVKDKVEFEKALKKFAQEYQLDEASFVDSFKNFKPYPNEYGSFSEKAIKKLLPLMRFGNHWDFNRIDVSTQKRIDDLINGVANDEIRTIIREKAEKYQLNSESCFQGLPLWLAQYVVYNRHAEATDIEKWTSVSDLETYLEDFKQHSLRNPIVEQVVTETLRVVRDIWQQYGGGQANFFDEIHIELGRELKKTAEERKQLSNRNQENENTNLRIKKLLAELKEDASIQNVRPYSPVQQELLKIYEEGVFSSTDQVEEDIQKIRKKAEPTTPEIQRYKLWLEQKYKSPYTGEVISLTKLFTEEYEIEHIIPQSRYYDDSLSNKVICESAVNKLKTNQLGLEFIQNHHGEKVRITGNKEVTIFTEEQYKEFVKKHYANNSAKQQKLLLNEIPEKMVARQLNDTRYISKYISEILSKIVRSDEKDEGVNSKNVIPCTGKITTALKQDWGLNDVWNELILPRFERMNQLTQTQLFTSYNDRFQKNLPTVPIEYSQGFQKKRIDHRHHAMDALVIACATREHINYMNNQHALDKNKDKKEKQQSRIDLRTILCEKKNNNWQFKKPWSTFTQETKEALEHIVVSFKQNLRVINKATNYYEKWEEKNGVLVKKKVKQEGTNWAIRKPLHKETVSGKIVLDRKIGKDKILTATRKEVDITFTEKIISSITDTGIQKILLNYLNYKGSPEVAFSAEGLEELNKNIAQYNDGKKHQPIYKVRIFEEGSKFPLGETGAKATKFVEAAKGTNLFFGVYQGKEKRSYATIPLNEVIERQKQGLPSVPERNEKGEPLLFSLSPNDLVYVPMEGEIAETIDFNNLSKEQKERIYKTVSFTGNQCFFVQEAVATPIVNKMEYSPLNKMERDILGTMIKEVCIKLKVDRLGNITKA

SEQ ID NO: 156 - protein, 1435 aa, Capnocytophaga sp.
  Capnocytophaga sp. oral taxon 329 str. F0087
MKNILGLDLGTTSIGFAHIVEDENKEKSEIKELGVRIVSLATDEQSDFEKGKSISTNANRTLKHGARLNLDRYQQRRKFLIDLLQKANLITSASILAENGKNTTHSTWQLRAKAVTERIEKEEFARVLLAINKKRGYKNSRKTKTEDEGQAIDGMAIAKCLYDENLTPGQLSLQLLQQNKKLLPDFYRSDLQKEFDLVWNLQKQFYPDILTDSFYKELQGKGKDATSKAFSKRYHFDTAENKGSKESVRLQAYQWRAEAISKQLSKEEVAYVLTEINNNLNNSSGYLGAISDRSKELYFNRQTVGQYLYAQLQENRHNSLKNKVFYRQDYLDEFERIWETQASFHKELTDELKKQIRDVVIFYQRKLKSQKGLVSFCEFESKEIEIEKDGKAITKSIGARVVPKSSPLFQEFKIWQILNNVTCKRKGIRKKKSSAKSTELDLFNEPSQSIFSLDMECKQLLFDELNLKGDLKSDKVLKLLGYSPQEWEINYNQLEGNRTQKSLYEAYLKIIEIEGYEVKDILQIKSTKDDWSLDESPLSASEIRERVKVIFQTLGICTKILYFDPLLPVKEFEQQYSYQLWHLLYSYESDDSTSGNETLYRILEKKYAFKREHATILANVALQDDYGSLSTKAIRKIYPYIKENQYSTACELAGYKHSKLSLTTEELEARELKNIIPLLKKNALRNPVVEKILNQMINVVNALIEKNSERDAEGKITKYFHFDEIRIELARELKKNAQERYEMTQNINKAKLEHQKISEKLQKQFGIKNPTKSDIIRYRLYQELEHNGYKELYTNTYIAPDVLFSKNIDIEHIVPKARVFDDSFSNKTLAFKEFNIKKGESTAFDYITSLNCEGELNQYLTRVENAYKTKSISLTKYKNLLKKASEIGDGFINRDLRDTQYIAKKAKEILFQVTKNVLSTSGSITDRLREDWGLVDVMKELNMPKYQSLGLTEVEERKDGNKVTVIKDWTKRNDHRHHAMDALTVAFTKPSYIQYLNHLNARKDENNKNYSVILAIEKKETIKVPINNGKNKRVFIEPILNFRQVAKKHLEEIFISHKAKNKVVTKNINKPAGTDKQQITLTPRGQLHKETIYGKYQYYVNKEEKVGVKFDERTITKVSNPLYREALLKRLQANDNDPKKAFAGKNALSKNPIYLDEAKTKTLPEKVNLTYLEEDFSIRKDISPDNFKDLKSIEKVIDQGVKRILIKRLQAYDNDPKKAFVDLEKNPIWLNKEKGIAIKRVTISGVSNAQPLHIGKDHLGKTTLNKEGKEVPVDYVSTGNNHHVAIYRDKEGNLQEQIVSFFEAVVRAQQGLPIIDKNYKQAEGWQFMFTMKQNEMFVFPNEATGFNPAEIDLLDPKNKKLISPNLFRVQTISIVKYGNSVVRDFKFRHHLETTLQDDKILQGITFQQIKSLEPLRNIVKVRINHLGDIVNIGEY

SEQ ID NO: 157 - protein, 1426 aa, Capnocytophaga sp.
  Capnocytophaga sp. oral taxon 335 str. F0486
MKNILGLDLGTTSIGFTHIVEDENKEKSEIKELGVRIVSLTTDEQSDFEKGKSISTNANRTLKHGARLNLDRYQQRRKFLIDLLQKANLITSSSILAENGKNTTHSTWQLRAKAVTERIEKEEFARVLLAINKKRGYKSSRKAKTEDEGQAIDGMAIAKRLYDENLTPGQLSLQLLQQNKKLLPDFYRSDLQKEFDLVWNFQKQFYPDILTDSFYKELQGKGKDATSKAFSKRYHFDTAENKGSRESVRLQAYQWRAEAISKQLSKEEVAYVLTEINNNLNNASGYLGAISDRSKELYFNRQTVGQYLYAQLQENKHNSLKNKVFYRQDYLDEFERIWETQASFHKELTEELKKQIRDVVIFYQRKLKSQKGLISFCEFESKEIEIEKDGKTITKSIGARVVPKSSPLFQEFKIWQILNNVTCKRKGIRKKKSSAKSTELDLFNEPSQTIFSLDMECKQLLFEELNLKGDLKSDKVLKLLGYSPQEWEINYNQLEGNRTQKALYEAYLKIVEMEAHDVKDILQIKSTKDDWALEESPLSASEIRERVKAIFQTLGICTKILYFDPLLPVKEFEEQDSYQLWHLLYSYESDDSTSGNETLYRILEKKYAFKREHATILANVTLQDDYGSLSTKAIRKIYPYIKENQYSTACEKAGYKHSKLSLTTEELEARELKNIIPLLKKNALRNPVVEKILNQMINVVNALIEKNSERDAEGKITKYFHFDEIRIELARELKKNAQERYEMTQNINKAKLEHQKISGILQKEFGIKNPTKSDITRYRLYQELAHNGYNDLYTNTYIPKELLFSKNIDIEHIVSKARVFDDSFSNKTLAFREFNIKKGESTAFDYITSLNNEEELNQYLNRVENAYKTKNISPAKYKNLLKKASEIGDGFINRDLRDTQYIAKKAKEILFQVTKNVLSTSGSITDRLREDWGLVDVMKELNMPKYQSLGLTEVEERKEGNKVTVIKNWTKRNDHRHHAMDALTVAFTKPSYIQYLNHLNARKDKNNKNYSVILAIEEKETIKVPTNNGKNKRVFIEPIPNFRQVAKKHLEEIFISHKAKNKVVTKNTNKPAGTDKQQITLTPRGQLHKETVYGKYQYYVNKEEKIGVKFDKETIAKVSNPVYREALLKRLQANDNDPKKAFAGKNALSKNPIYLDEAKTKTLTEKVNLTYLEEDFSIRKDISPDNFKDLKSIEKVIDQGVKRILIKRLQDYDNDPKKAFVDLEKNPIWLNKEKGIAIKRVTISGVNNAQPLHIGKDHLGKTTLNKEGKEIPVDYVSTGNNHHVAIYRDKEGNLQEQIVSFFEAVVGAQQGLPIVDKTYKQAEGWQFLFTMKQNEMFVFPNEATGFNPAEIDLLDPKNKKQISPNLFRVQKIATKDYFFRHHLETNVDTDNVLKNTTWKREGLSGLKDIVKVRINHLGDIVSIGEY

SEQ ID NO: 158 - protein, 1432 aa, Capnocytophaga sp.
  Capnocytophaga sp. oral taxon 380 str. F0488
MKNILGLDLGTTSIGFAHIVEDENKEKSEIKELGVRIVSLTTDEQSDFEKGKSITTNANRTLKHGARLNLDRYQQRRKYLIDLLHKANLITPSSILAENGKNTTHSTWQLRAKAVTERIEKEEFARILLAINKKRGYKSSRKAKTEDEGQAIDGMAIAKRLYDENLTPGQLSLQLLQQNKKLLPDFYRSDLQKEFDLVWNFQKQFYPDILTDIFYKELQGKGKDATSKAFSKRYHFDTAENKGSKESVRLQAYQWRAEAVSKQLSKEEVAYVLTEINNNLNNASGYLGAISDRSKELYFNRQTVGQYLYAQLQENRHNSLKNKVFYRQDYLDEFERIWETQALFHKELTDELKKQIRDVVIFYQRKPKSQKGLISFCEFESKEIEIEKDGKTITKNIGARVVPKSSPLFQEFKIWQILNNVICKRKGIRKKKISAKTTQLDLLNESSQTIFSLDMECKQLLFDELNLKGDLKSDKVLKLLGYSPQEWEINYNQLEGNRTQKALYEAYLKIVEMEAHDVKDILQIKSTKDDWSLDESPLSASEIRESVKAIFQALGICTKILYFDPLLPVKDFEEQDSYQLWHLLYSYESDDSTSGNETLYRILEKKYAFKREHARILANVALQDDYGSLSTKAIRKIYPNIKENQYSTACEMAGYKHSKLSLTTEELEARELKNIIPLLKKNALRNPVVEKILNQMINVVNALIEKNSERDAEGKITKYFHFDEIRIELARELKKNAQKRYEMTQNINKAKSEHQKISEILQKEFGIKNPTKSDIIRYRLYKELEHNGYKELYTNTYIAPDVLFSKNIDIEHIVPKARVFDDSFSNKTLAFKDFNIKKGESTAFDYITSLKNEEKLNQYLARVENAYKTKNISPAKYKNLLKKASEIGDGFINRDLRDTQYIAKKAKEILFQVTKNVLSTSGSITDRLREDWSLVDVMKELNMPKYQSLGLTEVEERKDGNKVTVIKDWTKRNDHRHHAMDALTVAFTKPSYIQYLNHLNARKDENNKNYSVILAIEKKETIKVPTNNGKNKRVFIEPIPNFRQVAKKHLEEIFISHKAKNKVVTKNTNKPAGTNKQQITLTPRGQLHKETIYGKYQYYVNKEEKVGVKFDKETIAKVSNPLYREALLKRLQANDNDPKKAFTGKNALSKNPIYLDEAKTKTLPEKVNLTYLEEDFSVRKKIVPKNPTSKEFVPNLKSIEKVVDEGVRNILIERLRVYNNDPEKAFVDLEKNPIWLNKEKGIAIKRVTISGVNNAQPLHIGKDHLGKTTLNKEGKEIPVDYVSTGNNHHVAIYRDKEGNLQEQIVSFFEAVVRTQQGLPIIDKTYKQEEGWQFLFTMKQNEMFVFPNEATGFNPAEIDLLDPKNKKQISPNLFRVQKIATKDYFFRHHLETNVETDNVLKNTTWKREGLSGLKDIVKVRINHLGDIVSIGEY

SEQ ID NO: 159 - protein, 1450 aa, Capnocytophaga sp.
  Capnocytophaga sp. oral taxon 412 str. F0487
MKHILGLDLGSNSIGWAFVQQDFENKQGKIIATGSRIIPMDQGILGDFERGNTVSQTAERTTYRNTRRLRERHLLRRERLHRVLHILGFLPPHYDSQIDFTKRYGKFIDNAEPKIAYNNGNFIFMNSFNEMIEDFKKYQPQLFYKKSNGEESKIPYDWTIYYLRKKALSQKITQQELAWLILHFNQKRGYYQLRGEEETENPNKEVAFHSLEVVDVEAEAPNKKGEIWYTIRLENGWIYRRTSKIPLDDWKGKTRDFIVTTDLNDDGTIKLDKEGKEKRSFRAPDENDWNLLKKKTEHDIDFSGKTVGAYIYDHLLQNPNQKIKGKLVRTIERKYYKDELKAILAKQIALQPELFTETLLADCIRELYRKNETQQQNLLSKDFLHLFVEDIIFYQRPLRSKKSTIANCTLEKRSYIDKETNERKDTPIKVCAKSNPYYQEFRVLQWLQNLRIYEIETDREVTAEFIETAQDNEALFNFLMSQKEIDNESLLKYFLFAKNPQIKDKVAKSELKKWLTTYRWNYVYDAADNSSKKYPMNETGYELQQYLQKVEGLPANFLTFDITYRLWHLLYSVKDKVEFEKALKKFAQEYQLDEASFVDSFKNFKPYPNEYGSFSEKAIKKLLPLMRFGNHWDFNRIDVSTQKRIDDLINGVANDEIRTIIREKAEKYQLNSETCFQGLPLWLAQYVVYNRHAEAADIEKWTSVNDLEAYLEDFKQHSLRNPIVEQVITETLRVVRDIWQRYGGGQANFFDEIHIELGRELKKTAEERKQLSNRNQENENTNLRIKKLLAELKEDASIQNVRPYSPVQQELLKIYEEGVFSATDEVEEDIQKIRKKAEPTTPEIQRYKLWLEQKYKSPYTGEVISLTKLFTEEYEIEHIIPQSRYYDDSLSNKVICESAVNKLKTNQLGLEFIQNHHGEKVRITANKEVTIFTEEQYKEFVKKHYANNSAKQQKLLLNEIPEKMVARQLNDTRYISKYISEILSKIVRSDEKDEGVNSKNIIPCTGKITTALKQDWGLNDVWNELILPRFERMNQLTQTQLFTSYNDRFQKNLPTVPIEYSQGFQKKRIDHRHHAMDALVIACATREHINYMNNQHALDKSKDKKEKQQSRIDLRTILCEKKNNNWQFKKPWSTFTQEAQEALEHIVVSFKQNLRVINKATNYYEKWEEKNGVLVKKKVKQEGTNWAIRKPLHKETVSGKIVLDRKIGKDKILTATRKSVDITFTEKIISSITDTGIQKILLNYLKYKGSPEVAFSAEGLEELNKNIAQYNDGKKHQPIYKVRIFEEGSKFPLGETGAKATKYVEAAKGTNLFFGVYQGKGKRTYATIPLNEVIERQKQGLPSVPERNEKGEPLLFSLSPNDLVYVPMEGEIAETIDFNNLSKEQKERIYKTVSFTGNQCFFVQEAVATPIVNKIEYSPLNKMERDILGTMIKEVCIKLKVDRLGNITKA

SEQ ID NO: 160 - protein, 1426 aa, Capnocytophaga sputigena
  Capnocytophaga sputigena ATCC 33612
MKNILGLDLGITSISFAHIVEDENKEKSEIKELGVRIVSLTTDEQSDFEKGKSITTNANRTLKHGARLNLDRYQQRRKYLIDLLQKANLITSSSILAENGKNTTHSTWQLRAKAVTERIEKEEFARVLLAINKKRGYKSSRKAKTEDEGQAIDGMAIAKRLYDENLTPGQLSLQLLQQNKKLLPDFYRSDLQREFDLVWNFQKQFYPDILTDSFYKELQGKGKDATSKAFSKRYHFDTAENKGSKESVRLQAYQWRAEAISKQLSKEEVAYVLTEINNNLNNASGYLGAISDRSKELYFNRQTVGQYLYAQLQENRHNSLKNKVFYRQDYLDEFERIWETQASFHKELTDELKKQIRDVVIFYQRKLKSQKGLISFCEFESKEIEIEKDGKTITKTIGARVVPKSSPLFQEFKIWQILNNVTCKRKGIRKKKSSAKSTELDLFNEPSQTIFSLDMECKQLLFDELNLKGDLKSDKVLKLLGYSPQEWEINYNQLEGNRTQKALYEAYLKIVEMEAHDVKDILQIKSAKDDWSLDESPLSASEIKEKVKDIFQALGICTKILYFDPLLPVKEFEKQDSYQLWHLLYSYESDDSTSGNETLYRILEKKYAFKREHARILANVALQDDYGSLSTKAIRKIYPNIKENQYSKACELAGYKHSKLSLTTEELEARELKNIIPLLKKNALRNPVVEKILNQMINVVNALIEKNSERDAEGKITKYFHFDEIRIELARELKKNAQKRYEMTQNINKAKLEHQKISEILQKKFGIKNPTKSDIIRYRLYQELEHNGYKELYTNAPIARDMLFSKNIEIEHIVPKARVFDDSFSNKTLTFHRINSNKGEYTAFDYITSLNSEEELNQYLTRVENAYKTKSISLTKYKNLLKKASEIGDGFINRDLRDTQYIAKKAKEILFQVTKNVLSTSGSITDRLREDWGLVDVMKELNMPKYQSLGLTEVEERKEGNKVTVIKNWTKRNDHRHHAMDALTVAFTKPSYIQYLNHLNARKDENNKNYSVILAIEEKETIKVPTNNGKNKRVFIEPIPNFRQVAKKHLEEIFISHKAKNKVVTKNVNKPAGTDKQQITLTPRGQLHKETIYGKYQYYVNKEEKVGVKFDERTITKVSNPLYREALLKRLQANDNDPKKAFTGKNALSKNPIYLDETKTKTLPEKVNLTYLEEDFSIRKDISPDNFKDLKSIEKVIDQGVKRILIKRLQDYDNDPKKAFVDLEKNPIWLNKEKGIAIKRVTISGVSNAQPLHIGKDHLGKTTLNKEGNEIPVDYVSTGNNHHVAIYRDKEGNLQEQIVSFFEAVVRTQQGLPIIDKTYKQEEGWQFLFTMKQNEMFVFPNATTGFNPAEIDLLDPKNKKLISPNLFRVQKIATKDYFFRHHLETNVETDNVLKNTTWKREGLSGLKDIVKVRINHLGDIVSIGEY

SEQ ID NO: 161 - protein, 1140 aa, Catellicoccus marimammalium
  Catellicoccus marimammalium M35/04/3
MKNMTKVNVGLDVGISSAGWSVINAETNQILESGVRLFSGSDADENVNRRNQRQGRRLFRRRKLRIQEAKKYLENVFQLKDIEPKDEWNPYEIRVRALNEKVSKEELSIALLNIVKHRGISYELEDVTDEEGTNTQSFQSGLDYNRRLLKTKTVGEIQYDRLQKYGQVRGQIQTEDGLLINIFPTKNYVEEVERILETQKKYHPEIDDVFIEKIISFVTRKREYFVGPGNEKSRTDYGIYRENGETLDNLFEILIGKDKFYPEEYRAAGSSYTAQIFNLLNDLNNLRIPTTEDHHLTKAQKEEIITELKNTSRLSGGMLKLISKVTKAPKEEISGYRKDEKDKPDLHSLAYYRKQKNMLEKEGIQIADFSEELLDELATMMTLNTEPGEIRKQLNKITNQYDILTPEVIEVLVKNHTAFVATSNHKWHRFSLKLMKEFIPELLETSKEQSTILCERGFIQNRASYLDENHHFNYAELRENLYNPVVRKSTCEMLKVFTAIQEKYPNIQNVIVELPRETNEDEQKRKIKKINDNNAKRKKEILKEAQAQSGLSEEALEEKLLKTKGLYLKLMLWYEQEGKCVYSGQEIPLSDLLQNKGGYEVDHIIPISISFDDRLCNKVLVRQQLNSQKSNQTPFEYMTTHTDGHLSFHELKELVGKNKRFSKEKRELLLAEIYSNDIETRKRFINRNLVDTSYTARIVLNALQQYKKENQLSMNVSVVRGAMTNILRKKVKLDKTRETFHHHAIDASLMAVIPNIEFFKERKEWLPKSANEEVVEVEVSEEETMPEKEFKVKMRLPESFIQDVQILQRNSFAKEEVSGPQTRERNLKIKFSHQVDQKMNRKVADDTIYGTRQAQLGKDKKEETYVIGKIKDIYNYDEYVRFKKRYDKNKESFLMYHHDPQTFEKLEEILAQYPEYIEDEKGKKKKVSPFALYREENGPVTKYAKKNNGPVIKQLKYYDSKLNRKIDISHKYSTKNRQVVLQSLKPYRTDVYRNQDTGEYTLVGIDQNDGKFVNGHYGIPKSRYEEIKANNKLSEHDEFVFSLYKNSMVKVIDENGESIVVRYLSRSMPNRKNNAEIKPVEKYQFEDGEVVPVYGKCRKQMQTVFVKKGWTLLKGNTDILGNTYFVEKESENPKKMIDDK

SEQ ID NO: 162 - protein, 1329 aa, Catenibacterium mitsuokai
  Catenibacterium mitsuokai DSM 15897
IVDYCIGLDLGTGSVGWAVVDMNHRLMKRNGKHLWGSRLFSNAETAANRRASRSIRRRYNKRRERIRLLRAILQDMVLEKDPTFFIRLEHTSFLDEEDKAKYLGTDYKDNYNLFIDEDFNDYTYYHKYPTIYHLRKALCESTEKADPRLIYLALHHIVKYRGNFLYEGQKFNMDASNIEDKLSDIFTQFTSFNNIPYEDDEKKNLEILEILKKPLSKKAKVDEVMTLIAPEKDYKSAFKELVTGIAGNKMNVTKMILCEPIKQGDSEIKLKFSDSNYDDQFSEVEKDLGEYVEFVDALHNVYSWVELQTIMGATHTDNASISEAMVSRYNKHHDDLKLLKDCIKNNVPNKYFDMFRNDSEKSKGYYNYINRPSKAPVDEFYKYVKKCIEKVDTPEAKQILNDIELENFLLKQNSRTNGSVPYQMQLDEMIKIIDNQAEYYPILKEKREQLLSILTFRIPYYFGPLNETSEHAWIKRLEGKENQRILPWNYQDIVDVDATAEGFIKRMRSYCTYFPDEEVLPKNSLIVSKYEVYNELNKIRVDDKLLEVDVKNDIYNELFMKNKTVTEKKLKNWLVNNQCCSKDAEIKGFQKENQFSTSLTPWIDFTNIFGKIDQSNFDLIENIIYDLTVFEDKKIMKRRLKKKYALPDDKVKQILKLKYKDWSRLSKKLLDGIVADNRFGSSVTVLDVLEMSRLNLMEIINDKDLGYAQMIEEATSCPEDGKFTYEEVERLAGSPALKRGIWQSLQIVEEITKVMKCRPKYIYIEFERSEEAKERTESKIKKLENVYKDLDEQTKKEYKSVLEELKGFDNTKKISSDSLFLYFTQLGKCMYSGKKLDIDSLDKYQIDHIVPQSLVKDDSFDNRVLVVPSENQRKLDDLVVPFDIRDKMYRFWKLLFDHELISPKKFYSLIKTEYTERDEERFINRQLVETRQITKNVTQIIEDHYSTTKVAAIRANLSHEFRVKNHIYKNRDINDYHHAHDAYIVALIGGFMRDRYPNMHDSKAVYSEYMKMFRKNKNDQKRWKDGFVINSMNYPYEVDGKLIWNPDLINEIKKCFYYKDCYCTTKLDQKSGQLFNLTVLSNDAHADKGVTKAVVPVNKNRSDVHKYGGFSGLQYTIVAIEGQKKKGKKTELVKKISGVPLHLKAASINEKINYIEEKEGLSDVRIIKDNIPVNQMIEMDGGEYLLTSPTEYVNARQLVLNEKQCALIADIYNAIYKQDYDNLDDILMIQLYIELTNKMKVLYPAYRGIAEKFESMNENYVVISKEEKANIIKQMLIVMHRGPQNGNIVYDDFKISDRIGRLKTKNHNLNNIVFISQSPTGIYTKKYKL

SEQ ID NO: 163 - protein, 1419 aa, Chryseobacterium sp.
  Chryseobacterium sp. CF314
MMIKNILGLDLGTNSIGWALIKQNFENKYGEILGMGSRIIPMSQDVLGEFGKGNSVSQTAARTGYRGVRRLRERFLLRRERLHRVLNVLNFLPEHYASQIDFEKRFGKFKYETEPKLAYNNDGFFFKNSFDEMLGDFKDHQFHLLENGRKVPYDWTIYYLRKKALSQKIEKEELAWILLNFNQKRGYYQLRGEDFEEEKDRVFVRLKVDRVVDSGENIKGKILYDVYFENGWKYEKQIVKTEDWIGRTKEFIVTESILKNGDTKRTFKAVDSEKDWIAIKTKTEQEIDKSHKTVGAYIYEALLQNPKQKIKGKLVRTIERKFYREELKKILERQKEFHPELQSDDLYNDCIRELYRNNEAHQITLSKKDFVHLLLNDLIFYQRPLRSQKSSVSNCTLEFRKYKDENGVEHAQYLKTIPKSNPYYQEFRVWQWMFNLNIYRKDDDTNVTKEFLSSTEDYETLFEFLNNRKEVDQKALLRHFKLNEKTHRWNYVEDKKYPCNETKTMISTRLEKVENYPSDFLTREMEQNIWHIIYSVNDKIEYEKALKSFAHKNNLDENSFFEAFKKFPPFKSEYGSFSEKAIKKLLPLLRLGKYWNWESIDRKSQGRIEKIITGEFDGNIKDKVREKAIHLTAENDFQGLQLWLAQYIVYGRHSEASMIGKWNSADDLEEFLKGFKQHSLRNPIVEQVITETLRVVKDIWLKYGNGAKDFFSEIHIELGREMKQTKDERVDATKRITENENTNLRIKALLAEMMNDNSVENIRPYSPMQQEILKIYEDGILKSDIEIDDDILKISKTAQPSSSDLKRYKLWLEQRYKSPYTGQIIPLNKLFTSEYEIEHIIPQSRYFDDSFSNKIICESAVNKLKDNYIGLGFIKQFGGMIVECGFGKSVEIFKAEEYEDFVKKHYANNRSKRNKLLLEEIPEKMIDRQLNDTRHISKYISGVLSNIVRQEDGTDEGVNSKNIVPGNGKITTQLKQDWGLNDVWNELILPRFERMNQLTNSTDFTSWNKNHQKFLPTVPIEFSKGFSKKRIDHRHHAMDALVIACATKDHINLLNNQSAKSDTKRYDLKRKLMKFERVVYSHSKTGEKIEKEVPKQFLKPWDNFTVDAKNKMETIIVSFKQNLRVINKATNHYEKWIEKDGIKRKELIKQEGTNWAIRKPMHKETVSGKVDLPGIKIPKGKILTATRKSLDTSFDLKTINSITDTGIQKILKNYLEFKGSSELAFSPEGIEDMNKNIEKFNDGKPHQSINKVRIFELGSKFSVGQTGNKKDKYVEAAKGTNLFFAVYEDKNGKRSYETIPLNEVIERQKQGLDSVSFKNKEDFLLCPNDLVYVPSEDELENIYNIDFKNLTTEKTGNIYKVVSFSGNQIFFIRQDIAISIVNKAEFSTLNKMERAIDGSMIKENCIKLKIDRLGNIAKI

SEQ ID NO: 164 - protein, 1021 aa, Clostridium cellulolyticum
MKYTLGLDVGIASVGWAVIDKDNNKIIDLGVRCFDKAEESKTGESLATARRIARGMRRRISRRSQRLRLVKKLFVQYEIIKDSSEFNRIFDTSRDGWKDPWELRYNALSRILKPYELVQVLTHITKRRGFKSNRKEDLSTTKEGVVITSIKNNSEMLRTKNYRTIGEMIFMETPENSNKRNKVDEYIHTIAREDLLNEIKYIFSIQRKLGSPFVTEKLEHDFLNIWEFQRPFASGDSILSKVGKCTLLKEELRAPTSCYTSEYFGLLQSINNLVLVEDNNTLTLNNDQRAKIIEYAHFKNEIKYSEIRKLLDIEPEILFKAHNLTHKNPSGNNESKKFYEMKSYHKLKSTLPTDIWGKLHSNKESLDNLFYCLTVYKNDNEIKDYLQANNLDYLIEYIAKLPTFNKFKHLSLVAMKRIIPFMEKGYKYSDACNMAELDFTGSSKLEKCNKLTVEPIIENVTNPVVIRALTQARKVINAIIQKYGLPYMVNIELAREAGMTRQDRDNLKKEHENNRKAREKISDLIRQNGRVASGLDILKWRLWEDQGGRCAYSGKPIPVCDLLNDSLTQIDHIYPYSRSMDDSYMNKVLVLTDENQNKRSYTPYEVWGSTEKWEDFEARIYSMHLPQSKEKRLLNRNFITKDLDSFISRNLNDTRYISRFLKNYIESYLQFSNDSPKSCVVCVNGQCTAQLRSRWGLNKNREESDLHHALDAAVIACADRKIIKEITNYYNERENHNYKVKYPLPWHSFRQDLMETLAGVFISRAPRRKITGPAHDETIRSPKHFNKGLTSVKIPLTTVTLEKLETMVKNTKGGISDKAVYNVLKNRLIEHNNKPLKAFAEKIYKPLKNGTNGAIIRSIRVETPSYTGVFRNEGKGISDNSLMVRVDVFKKKDKYYLVPIYVAHMIKKELPSKAIVPLKPESQWELIDSTHEFLFSLYQNDYLVIKTKKGITEGYYRSCHRGTGSLSLMPHFANNKNVKIDIGVRTAISIEKYNVDILGNKSIVKGEPRRGMEKYNSFKSN

SEQ ID NO: 165 - protein, 1065 aa, Clostridium perfringens
  Clostridium perfringens C str. JGS1495
MNKDINYALGLDIGITSVGWAVINLDLNRIEDLGVRIFNAAENPKDGSSLALPRRLARGRRRLLRRKAYRVERVRKLIVKNNILTKEELEGLFKNKEVIDVWEARVKGLDYKLSREEWAKILINFCKRRGFKSNRKNETKDKEAGQILSSISYNIEKMKETNSRTIGEYIYNEVKNSDDSYAPLRNKFGEYKMCVSRDVLREEIHTLFEKQRELGNNFASDEIEDKYFEIFNSQRPFSNFEDLEKLVGFCTFERKKHKRAPKHCISSEEFTLYEGINKLSIIKDGEKRKLSEEERTLVVNEAFNKKEIKYTTLRKLLGLSEDELFSTLTYSIDKDISKTENTKFVSLKGYHEIKRAIEKGVSKKAWQDIENNRNLLNDIAYVLTLGKTDDEIEKQLRLRNVPEELFESLLDMSFSKFNNLSIYALEKILPFMKEGYQYNEACEKAGYNFKAIYEGVRTKKLPVIEIDEIVNPVVNRALAQTRKVINSVIDKYGSPVRINIELARDLAKNFKDRKLIEKEQKENRANLDKIRENLRELMDKEPTAVEVLKYRLWEQQRGECAYTQSQIALERLFSPGYCEIDHIIPFSRSFDDSLSNKILVLGSENQRKGNKIPYEYFGEDSERWNSFEIWVKGSYLNYKKKANLLKKKFTEEEQRDWKARNLQDTKYICRYISNFVNNRLEFKESENKQKVITVNGRATAYLRSRWGLNKVREDGDKHHALDAAVVGVTTQGMVQKISKYSKAHELYTVRKNDEFVDVETGECVDVDEYKEIRKDILPRPWRGFSEELKLRLSDNPLEELKKLPIETYNEEFIKENVKPIFVSRVPFRKISGKLFKETIYSERAFKDGYFVSKKSLVDLKRGDLDNFYNYECDKKLYDAISERMKEFNYNGKKAFESPFRKPTKSGKEGPVVRSVKIKSAAPFKDGIPMNEGLVAKEGMVRIDIYEKEGKYFVVPVYRYQLAKGIVPKRAAIAGKSELKWPIMDQTYNFKFSIFKNDLIEIKYAKKDGYFGYYDGFDRHTASLVIENHDNSDRYRGIGVKTGVVEFNKYEVDVLGNYHKVNLGGN

SEQ ID NO: 166 - protein, 1065 aa, Clostridium perfringens
  Clostridium perfringens D str. JGS1721
MNKDINYALGLDIGITSVGWAVINLDLNRIEDLGVRIFNAAENLKDGSSLALPRRLARGRRRLLRRKAYRVERVRKLILKNNILTKEELEGLFKNKEVIDVWEARVKGLDYKLSREEWAKILINFCKRRGFKSNRKNEAKDKEAGQILSSISYNIEKMKETNSRTIGEYIYNEVKNSEDSYAPLRNKFGEYKMCVSRDVIREEIHTLFEKQRELGNNFASDEIEDKYFEIFNSQRPFSNFEDLEKLVGFCTFERKKHKRAPKHCISSEEFTLYEGINKLSIIKDGEKRKLSEEERTLVVNEAFNKKEIKYTTLRKLLGLSEEELFSTLTYSIDKDISKTENTKFVSLKGYHEIKRAIEKGVSKKAWQDIENNRNLLNDIAYVLTLGKTDDEIEKQLRLRNVPEELFESLLDMSFNKFNNLSIYALEKILPFMKEGYQYNEACEKAGYNFKAIYEGVRTKKLPVIEIDEIVNPVVNRALAQTRKVINSVIDKYGSPVRINIELARDLAKNFKDRKLIEKEQKENRANLDKIRENLRELMDKEPTVVEVLKYRLWEQQRGECAYTQSQIPLERLFSPGYCEIDHIIPFSRSFDDSLSNKILVLGSENQRKGNRTPYEYFGEDSERWNSFEIWVKGSYLNYKKKANLLKKKFSEEEQRDWKARNLQDTKYICRYISNFVNNRLEFKESENKQKVITVNGRATAYLRSRWGLNKVREDGDKHHALDAAVVGVTTQGMVQKISKYSKAHELYTVRKNDEFVDVETGECVDVDEYKEIRKDILPRPWRGFSEELKLRLSDNPLEELKKSPIETYNEEFIKENVKPIFVSRVPFRKISGKLFKETIYSERAFKDGYFVSKKSLVDLKRGDLDNFYNYECDKKLYDAISERMKEFNYNGKKAFESPFRKPTKSGKEGPVVRSVKIKSAVPFKDGIPMNEGLVAKEGMVRIDIYEKEGKYFVVPVYRYQLAKGIVPKRAAIAKKDELKWPIMDQTYNFKFSIYKNDLIEVKYDKKGVYFGYYDGFDRNSASLTIEKHDNSERYRSIGLKVGVLEINKYEVDVLGNYHKVKLGGN

SEQ ID NO: 167 - protein, 1116 aa, Clostridium spiroforme
  Clostridium spiroforme DSM 1552
MVEFLLKEMKIMGRLVLGLDIGITSVGYGVIDIDKNEFVDYGVRLFKEGTAINNEERRSKRGARRLKRRKTNRIADMKKLLERNGLIDEQYTALNNPYEIRKKGLKNKLSNYELATAILHITKNRGTCLESNADETQDEESTKNILSKNALELKDKYICEIQLARLEESGKIRGINNNFKTEDYLKELSKILENQDLEKETIDKIKEIVARRRRYDQGPGSEKSPTPYGSYRMENGELVHVNLIDMMRGKCSVFPDQLRAPQQSYSAELFNLLNDLNNLKINGEKLSSTEKQKIIDFVNEKGGITVKQLLKLIDVGITEISGFRIDKNEKPLITEFKGYKKVLKVFKNYNQESLLNDKSIVDTIMDINTKIKSIDERSDQLKQVLPSLDTSIINDLASIKGVSGYHSLSLKALNLINNEMLKTEMNQMQVLHQLDIFDKNRVSLKGQRQIYADDNAILSPVAKRAHRETFKVINKLRSIYGEFDSIVIETTRDKNTQDQKKRIKNNQKNYEERNTEVNNFLKEAGYNPENINAKTKMKIRLYIEQDAKSAYTLQDINLKELIEDEKAYEIDHIIPISISLDDSFNNKVLTTHDENQEKGNLTPISAFLKGKFHNGNLNTYKVFIQNNKNLNRKKKEYLLCEDDITRYEVVQNFINRNLVDTSYACRTVMNTLVHYFKDNEINTKVHTIKGQATSTFRKRIGLIKDREEDYFHHAIDALIVASLKKMNLINSYLMKVDFNEMYDEETGEIFNVLPDNSYLDEKYISFVSNLKNIYEESNKYIRGVMIKEKMTYPLIKVSHKIDTKPNRKISDDTIYSTRNVDNQDMLVERIKNIYDPKENAANTLINDIINDNTDKYIMYHKDPQTFDKIKAIVLNHFNEFKTDKNCYIVTKEGLYKLKGTSPLALYYEEFGPITKYAKKNNGPTIHSMKFYSEKLGNHLSITHKYSTVNKKVITKQISPYRTDFYQSPEGKYKFVTVRYKDVAYNAKKDKYIIDHSWYREQKKLKKIADEWIFVCSVHRDELIGIMKADGQKRIFDSSTESDGETLYHDAKTYEILKFTATNNDITGRFEVKPIYCYCKKQLMVSIGTCRKIQKFATDVLGNLYIVKDNVLKLEFK

SEQ ID NO: 168 - protein, 1338 aa, Coprococcus catus
  Coprococcus catus GD/7
MKQEYFLGLDMGTGSLGWAVTDSTYQVMRKHGKALWGTRLFESASTAEERRMFRTARRRLDRRNWRIQVLQEIFSEEISKVDPGFFLRMKESKYYPEDKRDAEGNCPELPYALFVDDNYTDKNYHKDYPTIYHLRKMLMETTEIPDIRLVYLVLHHMMKHRGHFLLSGDISQIKEFKSTFEQLIQNIQDEELEWHISLDDAAIQFVEHVLKDRNLTRSTKKSRLIKQLNAKSACEKAILNLLSGGTVKLSDIFNNKELDESERPKVSFADSGYDDYIGIVEAELAEQYYIIASAKAVYDWSVLVEILGNSVSISEAKIKVYQKHQADLKTLKKIVRQYMTKEDYKRVFVDTEEKLNNYSAYIGMTKKNGKKVDLKSKQCTQADFYDFLKKNVIKVIDHKEITQEIESEIEKENFLPKQVTKDNGVIPYQVHDYELKKILDNLGTRMPFIKENAEKIQQLFEFRIPYYVGPLNRVDDGKDGKFTWSVRKSDARIYPWNFTEVIDVEASAEKFIRRMTNKCTYLVGEDVLPKDSLVYSKFMVLNELNNLRLNGEKISVELKQRIYEELFCKYRKVTRKKLERYLVIEGIAKKGVEITGIDGDFKASLTAYHDFKERLTDVQLSQRAKEAIVLNVVLFGDDKKLLKQRLSKMYPNLTTGQLKGICSLSYQGWGRLSKTFLEEITVPAPGTGEVWNIMTALWQTNDNLMQLLSRNYGFTNEVEEFNTLKKETDLSYKTVDELYVSPAVKRQIWQTLKVVKEIQKVMGNAPKRVFVEMAREKQEGKRSDSRKKQLVELYRACKNEERDWITELNAQSDQQLRSDKLFLYYIQKGRCMYSGETIQLDELWDNTKYDIDHIYPQSKTMDDSLNNRVLVKKNYNAIKSDTYPLSLDIQKKMMSFWKMLQQQGFITKEKYVRLVRSDELSADELAGFIERQIVETRQSTKAVATILKEALPDTEIVYVKAGNVSNFRQTYELLKVREMNDLHHAKDAYLNIVVGNAYFVKFTKNAAWFIRNNPGRSYNLKRMFEFDIERSGEIAWKAGNKGSIVTVKKVMQKNNILVTRKAYEVKGGLFDQQIMKKGKGQVPIKGNDERLADIEKYGGYNKAAGTYFMLVKSLDKKGKEIRTIEFVPLYLKNQIEINHESAIQYLAQERGLNSPEILLSKIKIDTLFKVDGFKMWLSGRTGNQLIFKGANQLILSHQEAAILKGVVKYVNRKNENKDAKLSERDGMTEEKLLQLYDTFLDKLSNTVYSIRLSAQIKTLTEKRAKFIGLSNEDQCIVLNEILHMFQCQSGSANLKLIGGPGSAGILVMNNNITACKQISVINQSPTGIYEKEIDLIKL

SEQ ID NO: 169 - protein, 1384 aa, Coriobacterium glomerans
MKLRGIEDDYSIGLDMGTSSVGWAVTDERGTLAHFKRKPTWGSRLFREAQTAAVARMPRGQRRRYVRRRWRLDLLQKLFEQQMEQADPDFFIRLRQSRLLRDDRAEEHADYRWPLFNDCKFTERDYYQRFPTIYHVRSWLMETDEQADIRLIYLALHNIVKHRGNFLREGQSLSAKSARPDEALNHLRETLRVWSSERGFECSIADNGSILAMLTHPDLSPSDRRKKIAPLFDVKSDDAAADKKLGIALAGAVIGLKTEFKNIFGDFPCEDSSIYLSNDEAVDAVRSACPDDCAELFDRLCEVYSAYVLQGLLSYAPGQTISANMVEKYRRYGEDLALLKKLVKIYAPDQYRMFFSGATYPGTGIYDAAQARGYTKYNLGPKKSEYKPSESMQYDDFRKAVEKLFAKTDARADERYRMMMDRFDKQQFLRRLKTSDNGSIYHQLHLEELKAIVENQGRFYPFLKRDADKLVSLVSFRIPYYVGPLSTRNARTDQHGENRFAWSERKPGMQDEPIFPWNWESIIDRSKSAEKFILRMTGMCTYLQQEPVLPKSSLLYEEFCVLNELNGAHWSIDGDDEHRFDAADREGIIEELFRRKRTVSYGDVAGWMERERNQIGAHVCGGQGEKGFESKLGSYIFFCKDVFKVERLEQSDYPMIERIILWNTLFEDRKILSQRLKEEYGSRLSAEQIKTICKKRFTGWGRLSEKFLTGITVQVDEDSVSIMDVLREGCPVSGKRGRAMVMMEILRDEELGFQKKVDDFNRAFFAENAQALGVNELPGSPAVRRSLNQSIRIVDEIASIAGKAPANIFIEVTRDEDPKKKGRRTKRRYNDLKDALEAFKKEDPELWRELCETAPNDMDERLSLYFMQRGKCLYSGRAIDIHQLSNAGIYEVDHIIPRTYVKDDSLENKALVYREENQRKTDMLLIDPEIRRRMSGYWRMLHEAKLIGDKKFRNLLRSRIDDKALKGFIARQLVETGQMVKLVRSLLEARYPETNIISVKASISHDLRTAAELVKCREANDFHHAHDAFLACRVGLFIQKRHPCVYENPIGLSQVVRNYVRQQADIFKRCRTIPGSSGFIVNSFMTSGFDKETGEIFKDDWDAEAEVEGIRRSLNFRQCFISRMPFEDHGVFWDATIYSPRAKKTAALPLKQGLNPSRYGSFSREQFAYFFIYKARNPRKEQTLFEFAQVPVRLSAQIRQDENALERYARELAKDQGLEFIRIERSKILKNQLIEIDGDRLCITGKEEVRNACELAFAQDEMRVIRMLVSEKPVSRECVISLFNRILLHGDQASRRLSKQLKLALLSEAFSEASDNVQRNVVLGLIAIFNGSTNMVNLSDIGGSKFAGNVRIKYKKELASPKVNVHLIDQSVTGMFERRTKIGL

SEQ ID NO: 170 - protein, 1099 aa, Corynebacterium accolens
  Corynebacterium accolens ATCC 49725
MSLSYRVGIDVGTYSLGCTAIEVDDNDQPVNILSSVSLIHDSGLDPDQQKRAVTRLASSGVARRTRRLYRRRRRRMINLEKFLTSQGWETRPFEHYSDPYLPWNARVALVNGYISDDAQRGMYLSIAFRHIANHRGWRNPYWKVSSLYSPDKPSDAFEQIRKELEESTGHKIPETVTVGQLISFAQFGKDRLRGGGKKKDEKKPQEQVNQAVISARLHQIDHAREINEICRVQKIDDALRKQILDLVFAAESPKGAQIGRVGKDPLQPKLPRALKASDAFQQYRIVALAGNLRIYRDGVSTPLDRDEKLIVFNYLINLSHKEEPSWLKVAEVLNIDRGQLHGTATMTDDGERAGAAPPVHDTNRTILGCKIKPLVHWWEGANDDERAAMLKALSNSEVEDFDSPAGAQTQAFFANLDESEQEKLDSLHLPIGRAAYSEDTLMRLTSRMLDENLDLYEARLAEFDIPKDWAPPAPRIGEPVGNPAVDRVLKGVARWLEAAADEWGAPKSVVIEHVRDGFISKSKANEIDRANNARHKRNRELFKQMQENLGIDGKLRSSDLWRYQSVQRQNCQCAYCGSPITYTTCEMDHIVPRAGEGSTNTRDNLVATCHRCNLAKKNIPFAVWAAQTNIPGVSVKEALDRTRHWSEDSGMTSKDFKKFRKNVCDRLKRTVVDEPLDARSMESVAWMANELRGRVAQRFQEENTVVNVYRGELTAEARRAAGISDKLRFIDGTGKSRLDRRHHAVDAAVVAFTQNYVAETLAIRSNKKREAQLLQAAEQWKEFTGSDAEHRAAWNAWLPKMQKLAVLLQKALDEDRIAVTSNLRLRLGNGRAHEDSIGELKTIRVGDAISVTDIDRASSEALWCALTREPDFDENNGLPENPDRRIRIHGTWYDAEDDIEVFPVGAGAIKVRGGYAELSRFHHARIYKIPGKKAPVYCMLRVYNADLIRHRHEDLFSVEIKPQTMSVRQAEPKLRKALAENTAEYLGWLVTDDELVIDTSNFNTGQIAEMQSELGQVRRWRLDGFYSPSTLRLRPLQMSAEGLREDTSIGAKKIIDRPGWLPAINKLFGEGHVTVVRRDALGRARLTSNAHLPISWKAE

SEQ ID NO: 171 - protein, 1099 aa, Corynebacterium accolens
  Corynebacterium accolens ATCC 49726
MSLLYRVGIDVGTYSLGCTAIEVDDNDQPVSILSSVSLIHDSGLDPDQQKRAVTRLASSGVARRTRRLYRRRRRRMVKLENFLTAQGWETLPFERYSDPYLPWHARVALVNGYISDDTQRGQYLSIAFRHIANHRGWRNPYWKVSSLYSPDKPSDAFEQIRKELEASTGRQIPETATVGQLISFAQFGKDRLRGGGKQKDKKKPQEQVNQAVISARLHQIDHAREINEICRVQKIDDTLRKQILDLVFAAESPKGAQKGRVGKDPLQPKLFRALKASDAFQQYRIAALTGNLRIYRNGVTVPLDRDEKLIVFNYLVNLPKKEEPSWLKIAEILNIDRGQLRGTATMTDDGERAGATPPVHDTNRTILDSKVKPLAHWWENASDDERAAMLKSLSNSEVEDFDSPAGAQVQAFFADLDETEQEKLDSLHLPMGRAAYSEDTLMRLTNRMLDENLDLYEARLAEFGIPKDWAPPAPRIGEPVGNPAVDRVLKGVARWLEAAADEWGAPKSVVIEHVRDGFVSKSKAIEIDRANNNRHKRNRELFQKMQENLGIEGKVRSSDLWRYQSVQRQNCQCAYCGSPITYTTCEMDHIVPRAGEGSTNTRDNLVATCHRCNLAKKNIPFAVWAEKSTIPGVSVKEALDRTRHWSEDSGMSKKDFQKFRKNVCERLNRTVVDEPLDARSMESVAWMANELRGRVAQRFQEENTTVNVYRGALTAEARRAAGITDKLRFIDGTGKSRLDRRHHAVDAAVVAFIHNYVAETLAIRSNKKREAQLLQGTSQWKEFTGSDDKHRAVWNAWIPKMQKLAVLLQIALDEDRIVVTSNLRLRLGNGRAHEDTISELKTIRVGDAISVTDIDRASSEALWCALTREPDFDEKDGLPENPNRRIRVHGTWYDAEDEIEVFPVGAGAIKVRGGYAKLSRFHHARVYKIPGKKAPIYCMLRVYNTDLVQHRHEDLFSVELKPQTMSVRQAEPKLRKALAENTAEYLGWLVTDDELIIDTSTFRTGLIEEMQSEFGLVRRWRLDGFDSPSLLTLRPLHMSAEGLPDDCALGSRKIIDTKGWRVSINKVFNAGNTTVVRRDALGRARLTSNAHLPISWKEE

SEQ ID NO: 172 - protein, 1084 aa, Corynebacterium diphtheriae
MKYHVGIDVGTFSVGLAAIEVDDAGMPIKTLSLVSHIHDSGLDPDKIKSAVTRLASSGIARRTRRLYRRKRRRLQQLDKFIQRQGWPVIELEDYSDPLYPWKVRAELAASYIADEKERGEKLSVALRHIARHRGWRNPYAKVSSLYLPDEPSDAFKAIREEIKRASGQPVPETATVGQMVTLCELGTLKLRGEGGVLSARLQQSDHAREIQEICRMQEIGQELYRKIIDVVFAAESPKGSASSRVGKDPLQPGKNRALKASDAFQRYRIAALIGNLRVRVDGEKRILSVEEKNLVFDHLVNLAPKKEPEWVTIAEILGIDRGQLIGTATMTDDGERAGARPPTHDTNRSIVNSRIAPLVDWWKTASALEQHAMVKALSNAEVDDFDSPEGAKVQAFFADLDDDVHAKLDSLHLPVGRAAYSEDTLVRLTRRMLADGVDLYTARLQEFGIEPSWTPPAPRIGEPVGNPAVDRVLKTVSRWLKSATKTWGAPERVIIEHVREGFVTEKRAREMDGDMRRRAARNAKLFQEMQEKLNVQGKPSRADLWRYQSVQRQNCQCAYCGSPITFSNSEMDHIVPRAGQGSTNTRENLVAVCHRCNQSKGNTPFAIWAKNTSIEGVSVKEAVERTRHWVTDTGMRSTDFKKFTKAVVERFQRATMDEEIDARSMESVAWMANELRSRVAQHFASHGTTVRVYRGSLTAEARRASGISGKLEFLDGVGKSRLDRRHHAIDAAVIAFTSDYVAETLAVRSNLKQSQAHRQEAPQWREFTGKDAEHRAAWRVWCQKMEKLSALLTEDLRDDRVVVMSNVRLRLGNGSAHEETIGKLSKVKLGSQLSVSDIDKASSEALWCALTREPDFDPKDGLPANPERHIRVNGTHVYAGDNIGLFPVSAGSIALRGGYAELGSSFHHARVYKITSGKKPAFAMLRVYTIDLLPYRNQDLFSVELKPQTMSMRQAEKKLRDALATGNAEYLGWLVVDDELVVDTSKIATDQVKAVEAELGTIRRWRVDGFFGDTRLRLRPLQMSKEGIKKESAPELSKIIDRPGWLPAVNKLFSEGNVTVVRRDSLGRVRLESTAHLPVTWKVQ

SEQ ID NO: 173 - protein, 1084 aa, Corynebacterium diphtheriae
MKYHVGIDVGTFSVGLAAIEVDDAGMPIKTLSLVSHIHDSGLDPDKMKSAVTRLASSGIARRTRRLYRRKRRRLQQLDKFIQRQGWPVIELEDYSDPLYPWKVRAELAASYIADEKERGEKLSVALRHIARHRGWRNPYAKVSSLYLPDEPSDAFKSIREEIKRASGQPVPETATVGQMVTLCELGTLKLRGEGGVLSARLQQSDHAREIQEICRMQEIGQELYRKIIDVVFAAESPKGSASSRVGKDPLQPGKNRALKASDAFQRYRIAALIGNLRVRVDGEKRILSVEEKNLVFDHLVNLAPKKEPEWVTIAEILGIDRGQLIGTATMTDDGERAGARPPTHDTNRSIVNSRIAPLVDWWKTASALEQHAMVKALSNAEVDDFDSPEGAKVQAFFADLDDDVHAKLDSLHLPVGRAAYSEDTLVRLTRRMLADGVDLYTARLQEFGIEPSWTPPAPRIGEPVGNPAVDRVLKTVSRWLESATKTWGAPERVIIEHVREGFVTEKRAREMDGDMRRRAARNAKLFQEMQEKLNVQGKPSRADLWRYQSVQRQNCQCAYCGSPITFSNSEMDHIVPRAGQGSTNTRENLVAVCHRCNQSKGNTPFAIWAKNTSIEGVSVKEAVERTRHWVTDTGMRSTDFKKFTKAVVERFQRATMDEEIDARSMESVAWMANELRSRVAQHFASHGTTVRVYRGSLTAEARRASGISGKLEFLDGVGKSRLDRRHHAIDAAVIAFTSDYVAETLAVRSNLKQSQAHRQEAPQWREFTGKDAEHRAAWRVWCQKMEKLSALLTEDLRDDRVVVMSNVRLRLGNGSAHEETIGKLSKVKLGSQLSVSDIDKASSEALWCALTREPDFDPKDGLPANPERHIRVNGTHVYAGDNIGLFPVSAGSIALRGGYAELGSSFHHARVYKITSGKKPAFAMLRVYTIDLLPYRNQDLFSVELKPQTMSMRQAEKKLRDALATGNAEYLGWLVVDDELVVDTSKIATDQVKAVEAELGTIRRWRVDGFFGDTRLRLRPLQMSKEGIKKESAPELSKIIDRPGWLPAVNKLFSEGNVTVVRRDSLGRVRLESTAHLPVTWKVQ

SEQ ID NO: 174 - protein, 1084 aa, Corynebacterium diphtheriae
MKYHVGIDVGTFSVGLAAIEVDDAGMPIKTLSLVSHIHDSRLDPDKIKSAVTRLASSGIARRTRRLYRRKRRRLQQLDKFIQRQGWPVIELEDYSDPLYPWKVRAELAASYIADEKERGEKLSVALRHIARHRGWRNPYAKVSSLYLPDEPSDAFKAIREEIKRASGQPVPETATVGQMVTLCELGTLKLRGEGGVLSARLQQSDHAREIQEICRMQEIGQELYRKIIDVVFAAESPKGSASSRVGKDPLQPGKNRALKASDAFQRYRIAALIGNLRVRVDGEKRILSVEEKNLVFDHLVNLAPKKEPEWVTIAEILGIDRGQLIGTATMTDDGERAGARPPTHDTNRSIVNSRIAPLVDWWKTASALEQHAMVKALSNAEVDDFDSPEGAKVQAFFADLDDDVHAKLDSLHLPVGRAAYSEDTLVRLTRRMLADGVDLYTARLQEFGIEPSWTPPAPRIGEPVGNPAVDRVLKTVSRWLESATKTWGAPERVIIEHVREGFVTEKRAREMDGDMRRRAARNAKLFQEMQEKLNIQGKPSRADLWRYQSVQRQNCQCAYCGSPITFSNSEMDHIVPRAGQGSTNTRENLVAVCHRCNQSKGNTPFAIWAKNTSIEGVSVKEAVERTRHWVTDTGMRSTDFKKFTKAVVERFQRVTMDEEIDARSMESVAWMANELRSRVAQHFASRGTTVRVYRGSLTAEARRASGISGKLEFLDGVGKSRLDRRHHAIDAAVIAFTSDYVAETLAVRSNLKQSQAHRQEAPQWREFTGKDAEHRAAWRVWCQKMEKLSALLTEDLRDDRVVVMSNVRLRLGNGSAHEETIGKLSKVKLGSQLSVSDIDKASSEALWCALTREPDFDPKDGLPANPERHIRVNGTHVYAGDNIGLFPVSAGSIALRGGYAELGSSFHHARVYKITSGKKPAFAMLRVYTIDLLPYRNQDLFSVELKPQTMSMRQAEKKLRDALATGNAEYLGWLVVDDELVVDTSKIATDQVKAVEAELGTIRRWRVDGFFGDTRLRLRPLQMSKEGIKKESAPELSKIIDRPGWLPAVNKLFSEGNVTVVRRDSLGRVRLESTAHLPVTWKVQ

SEQ ID NO: 175 - protein, 1084 aa, Corynebacterium diphtheriae
  Corynebacterium diphtheriae bv. intermedius str. NCTC 5011
MKYHVGIDVGTFSVGLAAIEVDDAGMPIKTLSLVSHIHDSGLDPDEIKSAVTRLASSGIARRTRRLYRRKRRRLQQLDKFIQRQGWPVIELEDYSDPLYPWKVRAELAASYIADEKERGEKLSVALRHIARHRGWRNPYAKVSSLYLPDGPSDAFKAIREEIKRASGQPVPETATVGQMVTLCELGTLKLRGEGGVLSARLQQSDHAREIQEICRMQEIGQELYRKIIDVVFAAESPKGSASSRVGKDPLQPGKNRALKASDAFQRYRIAALIGNLRVRVDGEKRILSVEEKNLVFDHLVNLAPKKEPEWVTIAEILGIDRGQLIGTATMTDDGERAGARPPTHDTNRSIVNSRIAPLVDWWKTASALEQHAMVKALSNAEVDDFDSPEGAKVQAFFADLDDDVHAKLDSLHLPVGRAAYSEDTLVRLTRRMLADGVDLYTARLQEFGIEPSWTPPAPRIGEPVGNPAVDRVLKTVSRWLESATKTWGAPERVIIEHVREGFVTEKRAREMDGDMQRRAARNAKLFQEMQEKLNVQGKPSRADLWRYQSVQRQNCQCAYCGSPITFSNSEMDHIVPRAGQGSTNTRENLVAVCHRCNQSKGNTPFAIWAKNTSIEGVSVKEAVERTRHWVTDTGMRSPDFKKFTKAVVERFQRATMDEEIDARSMESVAWMANELRSRVAQHFASHGTTVRVYRGSLTAEARRASGISGKLKFFDGVGKSRLDRRHHAIDAAVIAFTSDYVAETLAVRSNLKQSQAHRQEAPQWREFTGKDAEHRAAWRVWCQKMEKLSALLTEDLRDDRVVVMSNVRLRLGNGSAHKETIGKLSKVKLGSQLSVSDIDKASSEALWCALTREPDFDPKEGLPANPERHIRVNGTHVYAGDNIGLFPVSAGSIALRGGYAELGSSFHHARVYKITSGKKPAFAMLRVYTIDLLPYRNQDLFSVELKPQTMSMRQAEKKLRDALATGNAEYLGWLVVDDELVVDTSKIATDQVKAVEAELGTIRRWRVDGFFSPSKLRLRPLQMSKEGIKKESAPELSKIIDRPGWLPAVNKLFSDGNVTVVRRDSLGRVRLESTAHLPVTWKVQ

SEQ ID NO: 176 - protein, 1084 aa, Corynebacterium diphtheriae
MKYHVGIDVGTFSVGLAAIEVDDAGMPIKTLSLVSHIHDSGLDPDKIKSAVTRLASSGIARRTRRLYRRKRRRLQQLDKFIQRQGWPVIELEDYSDPLYPWKVRAELAASYIADEKERGEKLSVALRHIARHRGWRNPYAKVSSLYLPDEPSDAFKAIREEIKRASGQPVPETATVGQMVTLCELGTLKLRGEGGVLSARLQQSDHAREIQEICRMQEIGQELYRKIIDVVFAAESPKGSASSRVGKDPLQPGKNRALKASDAFQRYRIAALIGNLRVRVDGEKRILSVEEKNLVFDHLVNLAPKKEPEWVTIAEILGIDRGQLIGTATMTDDGERAGARPPTHDTNRSIVNSRIAPLVDWWKTASALEQHAMVKALSNAEVDDFDSPEGAKVQAFFADLDDDVHAKLDSLHLPVGRAAYSEDTLVRLTRRMLADGVDLYTARLQEFGIEPSWTPPAPRIGEPVGNPAVDRVLKTVSRWLESATKTWGAPERVIIEHVREGFVTEKRAREMDGDMRRRAARNAKLFQEMQEKLNVQGKPSRADLWRYQSVQRQNCQCAYCGSPITFSNSEMDHIVPRAGQGSTNTRENLVAVCHRCNQSKGNTPFAIWAKNTSIEGVSVKEAVERTRHWVTDTGMRSTDFKKFTKAVVERFQRATMDEEIDARSMESVAWMANELRSRVAQHFASHGTTVRVYRGSLTAEARRASGISGKLEFLDGVGKSRLDRRHHAIDAAVIAFTSDYVAETLAVRSNLKQSQAHRQEAPQWREFTGKDAEHRAAWRVWCQKMEKLSALLTEDLRDDRVVVMSNVRLRLGNGSAHEETIGKLSKVKLGSQLSVSDIDKASSEALWCALTREPDFDPKDGLPANPERHIRVNGTHVYAGDNIGLFPVSAGSIALRGGYAELGSSFHHARVYKITSGKKPAFAMLRVYTIDLLPYRNQDLFSVELKPQTMSMRQAEKKLRDALATGNAEYLGWLVVDDELVVDTSKIATDQVKAVEAELGTIRRWRVDGFFGDTRLRLRPLQMSKEGIKKESAPELSKIIDRPGWLPAVNKLFSEGNVTVVRRDSLGRVRLESTAHLPVTWKVQ

SEQ ID NO: 177 - protein, 1084 aa, Corynebacterium diphtheriae
MKYHVGIDVGTFSVGLAAIEVDDAGMPIKTLSLVSHIHDSGLDPDEIKSAVTRLASSGIARRTRRLYRRKRRRLQQLDKFIQRQGWPVIELEDYSDPLYPWKVRAELAASYIADEKERGEKLSVALRHIARHRGWRNPYAKVSSLYLPDGPSDAFKAIREEIKRASGQPVPETATVGQMVTLCELGTLKLRGEGGVLSARLQQSDHAREIQEICRMQEIGQELYRKIIDVVFAAESPKGSASSRVGKDPLQPGKNRALKASDAFQRYRIAALIGNLRVWVDGEKRILSVEEKNLVFDHLVNLTPKKEPEWVTIAEILGIDRGQLIGTATMTDDGERAGARPPTHDTNRSIVNSRIAPLVDWWKTASALEQHAMVKALSNAEVDDFDSPERAKVQAFFADLDDDVHAKLDSLHLPVGRAAYSEDTLVRLTRRMLSDGVDLYTARLQEFGIEPSWTPPTPRIGEPVGNPAVDRVLKTVSRWLESATKTWGAPERVIIEHVREGFVTEKRAREMDGDMRRRAARNAKLFQEMQEKLNVQGKPSRADLWRYQSVQRQNCQCAYCGSPITFSNSEMDHIVPRAGQGSTNTRENLVAVCHRCNQSKGNTPFAIWAKNTSIEGVSVKEAVERTRHWVTDTGMRSTDFKKFTKAVVERFQRATMDEEIDARSMESVAWMANELRSRVAQHFASHGTTVRVYRGSLTAEARRASGISGKLEFLDGVGKSRLDRRHHAIDAAVIAFTSDYVAETLAVRSNLKQSQAHRQEAPQWREFTGKDAEHRATWRVWCQKMEKLSALLTEDLRDDRVVVMSNVRLRLGNGSAHEETIGKLSKVKLGSQLSVSDIDKASSEALWCALTREPDFDPKDGLPANPERHIRVNGTHVYAGDNIGLFPVSAGSIALRGGYAELGSSFHHARVYKITSGKKPAFAMLRVYTIDLLPYRNQDLFSVELKPQTMSMRQAEKKLRDALATGNAEYLGWLVVDDELVVDTSKIATDQVKAVEAELGTIRRWRVDGFFGDTRLRLRPLQMSKEGIKKESAPELSKIIDRPGWLPAVNKLFSEGNVTVVRRDSLGRVRLESTAHLPVTWKVQ

SEQ ID NO: 178 - protein, 1084 aa, Corynebacterium diphtheriae
MKYHVGIDVGTFSVGLAAIEVDDAGMPIKTLSLVSHIHDSGLDPDEIKSAVTRLASSGIARRTRRLYRRKRRRLQQLDKFIQRQGWPVIELEDYSDPLYPWKVRAELAASYIADEKERGEKLSVALRHIARHRGWRNPYAKVSSLYLPDGPSDAFKAIREEIKRASGQPVPETATVGQMVTLCELGTLKLRGEGGVLSARLQQSDYAREIQEICRMQEIGQELYRKIIDVVFAAESPKGSASSRVGKDPLQPGKNRALKASDAFQRYRIAALIGNLRVRVDGEKRILSVEEKNLVFDHLVNLTPKKEPEWVTIAEILGIDRGQLIGTATMTDDGERAGARPPTHDTNRSIVNSRIAPLVDWWKTASALEQHAMVKALSNAEVDDFDSPEGAKVQAFFADLDDDVHAKLDSLHLPVGRAAYSEDTLVRLTRRMLSDGVDLYTARLQEFGIEPSWTPPTPRIGEPVGNPAVDRVLKTVSRWLESATKTWGAPERVIIEHVREGFVTEKRAREMDGDMRRRAARNAKLFQEMQEKLNVQGKPSRADLWRYQSVQRQNCQCAYCGSPITFSNSEMDHIVPRAGQGSTNTRENLVAVCHRCNQSKGNTPFAIWAKNTSIEGVSVKEAVERTRHWVTDTGMRSTDFKKFTKAVVERFQRATMDEEIDARSMESVAWMANELRSRVAQHFASHGTTVRVYRGSLTAEARRASGISGKLKFFDGVGKSRLDRRHHAIDAAVIAFTSDYVAETLAVRSNLKQSQAHRQEAPQWREFTGKDAEHRAAWRVWCQKMEKLSALLTEDLRDDRVVVMSNVRLRLGNGSAHKETIGKLSKVKLSSQLSVSDIDKASSEALWCALTREPGFDPKEGLPANPERHIRVNGTHVYAGDNIGLFPVSAGSIALRGGYAELGSSFHHARVYKITSGKKPAFAMLRVYTIDLLPYRNQDLFSVELKPQTMSMRQAEKKLRDALATGNAEYLGWLVVDDELVVDTSKIATDQVKAVEAELGTIRRWRVDGFFSPSKLRLRPLQMSKEGIKKESAPELSKIIDRPGWLPAVNKLFSDGNVTVVRRDSLGRVRLESTAHLPVTWKVQ

SEQ ID NO: 179 - protein, 1084 aa, Corynebacterium diphtheriae
MKYHVGIDVGTFSVGLAAIEVDDAGMPIKTLSLVSHIHDSGLDPDKMKSAVTRLASSGIARRTRRLYRRKRRRLQQLDKFIQRQGWPVIELEDYSDPLYPWKVRAELAASYIADEKERGEKLSVALRHIARHRGWRNPYAKVSSLYLPDEPSDAFKSIREEIKRASGQPVPETATVGQMVTLCELGTLKLRGEGGVLSARLQQSDHAREIQEICRMQEIGQELYRKIIDVVFAAESPKGSASSRVGKDPLQPGKNRALKASDSFQRYRIAALISNLRVRVDGEKRILSVEEKNLVFDHLVNLAPKKEPEWVTIAEILGIDRGQLIGTATMTDDGERAGARPPTHDTNRSIVNSRIAPLVDWWKTASALEQHAMVKALSNAEVDDFDSPEGAKVQAFFADLDDDVHAKLDSLHLPVGRAAYSEDTLVRLTRRMLADGVDLYTARLQEFGIEPSWTPPAPRIGEPVGNPAVDRVLKTVSRWLESATKTWGAPERVIIEHVRDGFVTEKRAREMDGDMRRRAARNAKLFQEMQEKLNVQGKPSRADLWRYQSVQRQNCQCAYCGSPITFSNSEMDHIVPRAGQGSTNTRENLVAVCHRCNQSKGNTPFAIWAKNTSIEGVSVKEAVERTRHWVTDTGMRSTDFKKFTKAVVERFQRATMDEEIDARSMESVAWMANELRSRVAQHFASHGTTVRVYRGSLTAEARRASGISGKLEFLDGVGKSRLDRRHHAIDAAVIAFTSDYVAETLAVRSNLKQSQAHRQEAPQWREFTGKDAEHRAAWRVWCQKMEKLSALLTEDLRDDRVVVMSNVRLRLGNGSAHEETIGKLSKVKLGSQLSVSDIDKASSEALWCALTREPDFDPKDGLPANPERHIRVNGTHVYAGDNIGLFPVSAGSIALRGGYAELGSSFHHARVYKITSGKKPAFAMLRVYTIDLLPYRNQDLFSVELKPQTMSMRQAEKKLRDALATGNAEYLGWLVVDDELVVDTSKIATDQVKAVEAELGTIRRWRVDGFFGDTRLRLRPLQMSKEGIKKELAPELSKIIDRPGWLPAVNKLFSEGNVTVVRRDSLGRVRLESTAHLPVTWKVQ

SEQ ID NO: 180 - protein, 1089 aa, Corynebacterium matruchotii
  Corynebacterium matruchotii ATCC 14266
MNSANVNYRVGIDVGSYSLGMAAIAIDDDGKPTEILSAISLIHDSGVDPDSAKSAATRLATSGIARRTRRLYRRKRKRLAKLDKFISSQGWPLKEFEKYEDPFYPWRVRAELATTAITDQQELGEKLSIALRHIARHRGWRNPYSKVTALYTVTEPSDAFLAMQEECAKQLGRTIPETITVGQLVTGMNLGKTRLRGENSLLAARPRQSDNANEIHTIAKVQGLSNELVRQIIDHVFAAESPKGSAAEQVGKDPLQPTKKRALKASDAFQQYRIAALIGNLRIRGGKGNRRLTTEETRLVFDYLRSLPAKQEPTWQLVAEQLKIDRGNLVGTAIMTDDGERAGAKPPVHDTNRIMENTKIKPLATWWKSADADARAAMVKALSNAEVDDFDSQAGAQVQEFFFGISDEDQEKLDGLHLPIGRAAYSEDTLDRLTKRMIGEGMDLYEARQAEFKISNDWAPPAPEIGERVGNPAVDRVLKATARWLNAAERQWGAPKSVNIEHVRAAFMSESSARELDRDNQQRAKRNVKVVAEMQEKLGIEGRPSRADVWRFQSIQRQNGKCAYCGAEISFKNSEMDHIIPQAGEGSTNTRDNLVAVCRECNSSKSNIAFAVWAENTSRPGVSVQKAIERTHHWVTDSGLRKPEFDKFRKQVCDRLRRKATDEPIDARSLESVAWMANELRSRIAQKFKDGDTKVRVYKGALTAEARRASGISGKLEFVDGKGKSRLDRRHHAVDAAVVAFTSNYVAETLALRSNMKFDQELRRKAPQWREFTGSDHVHQVEWTKWKYRMQALAELLNNALVQDRIVVMHNLRLRLGNGAAHEDTIGKLTRLKVGDAISTTDIDRASSEALWCALTRDPDYDPKTGLPENPNRTIRIHGTHLTASDEITVFPVAAASIPIRDGFAKLGSNYHHVRLFRVPSGKKYKYCLMQVYTVDLLKFRKEDLFTVELKPQTISVRTCEALLRKALANGTAEYLGWLVSDDELLIDTSSFDTPGIVKLREEYGPVNRWRLAGLTSVTRLNLRPLYLSKEGLKPNVNPEIKKIIDNRSWIITVNKLFSSGHVKIIRRDALGRPRLHSAAHLPICWEVK

SEQ ID NO: 181 - protein, 1069 aa, Corynebacterium matruchotii
  Corynebacterium matruchotii ATCC 33806
MAAIAIDDDGKPTEILSAISLIHDSGVDPDSAKSAATRLATSGIARRTRRLYRRKRKRLAKLDKFISSQGWPLKEFEKYEDPFYPWRVRAELATTAITDQQELGEKLSIALRHIARHRGWRNPYSKVTALYTVTEPSDAFLAMQEECAKQLGRTIPETITVGQLVTGMNLGKTRLRGENSLLAARPRQSDNANEIHTIAKVQGLSNELVRQIIDHVFAAESPKGSAAEQVGKDPLQPTKKRALKASDAFQQYRIAALIGNLRIRGGKGNRRLTTEETRLVFDYLRSLPAKQEPTWQLVAEQLKIDRGNLVGTAIMTDDGERAGAKPPVHDTNRIMENTKIKPLATWWKSADADARAAMVKALSNAEVDDFDSQAGAQVQEFFFGISDEDQEKLDGLHLPIGRAAYSEDTLDRLTKRMIGEGMDLYEARQAEFKISNDWAPPAPEIGERVGNPAVDRVLKATARWLNAAERQWGAPKSVNIEHVRAAFMSESSARELDRDNQQRAKRNVKVVAEMQEKLGIEGRPSRADVWRFQSIQRQNGKCAYCGAEISFKNSEMDHIIPQVGEGSTNTRDNLVAVCRECNSSKSNIAFAVWAENTSRPGVSVQKAIERTHHWVTDSGLRKPEFDKFRKQVCDRLRRKATDEPIDARSLESVAWMANELRSRIAQKFKDGDTKVRVYKGALTAEARRASGISGKLEFVDGKGKSRLDRRHHAVDAAVVAFTSNYVAETLALRSNMKFDQELRRKAPQWREFTGSDHVHQVEWTKWKYRMQALAELLNNALVQDRIVVMHNLRLRLGNGAAHEDTIGKLTRLKVGDAISTTDIDRASSEALWCALTRDPDYDPKTGLPENPNRTIRIHGTHLTASDEITVFPVAAASIPIRDGFAKLGSNYHHVRLFRVPSGKKYKYCLMQVYTVDLLKFRKEDLFTVELKPQTISVRTCEALLRKALANGTAEYLGWLVSDDELLIDTSSFDTPGIVKLREEYGPVNRWRLAGLTSVTRLNLRPLYLSKEGLKPNVNPEIKKIIDNRSWIITVNKLFSSGHVKIIRRDALGRPRLHSAAHLPICWEVK

SEQ ID NO: 182 - protein, 1079 aa, Dinoroseobacter shibae
MRLGLDIGTSSIGWWLYETDGAGSDARITGVVDGGVRIFSDGRDPKSGASLAVDRRAARAMRRRRDRYLRRRATLMKVLAETGLMPADPAEAKALEALDPFALRAAGLDEPLPLPHLGRALFHLNQRRGFKSNRKTDRGDNESGKIKDATARLDMEMMANGARTYGEFLHKRRQKATDPRHVPSVRTRLSIANRGGPDGKEEAGYDFYPDRRHLEEEFHKLWAAQGAHHPELTETLRDLLFEKIFFQRPLKEPEVGLCLFSGHHGVPPKDPRLPKAHPLTQRRVLYETVNQLRVTADGREARPLTREERDQVIHALDNKKPTKSLSSMVLKLPALAKVLKLRDGERFTLETGVRDAIACDPLRASPAHPDRFGPRWSILDADAQWEVISRIRRVQSDAEHAALVDWLTEAHGLDRAHAEATAHAPLPDGYGRLGLTATTRILYQLTADVVTYADAVKACGWHHSDGRTGECFDRLPYYGEVLERHVIPGSYHPDDDDITRFGRITNPTVHIGLNQLRRLVNRIIETHGKPHQIVVELARDLKKSEEQKRADIKRIRDTTEAAKKRSEKLEELEIEDNGRNRMLLRLWEDLNPDDAMRRFCPYTGTRISAAMIFDGSCDVDHILPYSRTLDDSFPNRTLCLREANRQKRNQTPWQAWGDTPHWHAIAANLKNLPENKRWRFAPDAMTRFEGENGFLDRALKDTQYLARISRSYLDTLFTKGGHVWVVPGRFTEMLRRHWGLNSLLSDAGRGAVKAKNRTDHRHHAIDAAVIAATDPGLLNRISRAAGQGEAAGQSAELIARDTPPPWEGFRDDLRVRLDRIIVSHRADHGRIDHAARKQGRDSTAGQLHQETAYSIVDDIHVASRTDLLSLKPAQLLDEPGRSGQVRDPQLRKALRVATGGKTGKDFENALRYFASKPGPYQAIRRVRIIKPLQAQARVPVPAQDPIKAYQGGSNHLFEIWRLPDGEIEAQVITSFEAHTLEGEKRPHPAAKRLLRVHKGDMVALERDGRRVVGHVQKMDIANGLFIVPHNEANADTRNNDKSDPFKWIQIGARPAIASGIRRVSVDEIGRLRDGGTRPI

SEQ ID NO: 183 - protein, 1332 aa, Dolosigranulum pigrum
  Dolosigranulum pigrum ATCC 51524
MQKNYTIGLDIGTNSVGWAVMKDDYTLIRKRMKVLGNTDIKKIKKNFWGVRLFDEGETAKETRLKRGTRRRYQRRRNRLIYLQDIFQQPMLAIDENFFHRLDDSFFVPDDKSYDRHPIFGSLEEEVAYHNTYPTIYHLRKHLADNPEKADLRLVYTALAHIVKYRGHFLIEGELNTENTSISETFEQFLDTYSDIFKEQLVGDISKVEEILSSKQSRSRKHEQIMALFPNENKLGNFGRFMMLIVGNTSNFKPVFDLDDEYKLKLSDETYEEDLDTLLGMTDDVFLDVFMAAKNVYDAVEMSAIISTDTGNSKAVLSNQMINFYDEHKVDLAQLKQFFKTHLPDKYYECFSDPSKNGYAGYIDGKTNQEDFYKYIEKVMKTIKSDKKDYFLDKIDREVFLRKQRSFYNSVIPHQIHLQEMQAILDRQSQYYPFLAENRDKIESLVTFRIPYYVGPLTVSDQSEFAWMERQSDEPIRPWNFDEIVNKERSAEKFIERMTNMDTYLLEEKVLPKRSLLYQTFEVYNELTKVRYTNEQGKTEKLNRQQKAEIIETLFKQKNRVREKDIANYLEQYGYVDGTDIKGVEDKFNASLSTYNDLAKIDGAKAYLDDPEYADVWEDIIKILTIFEDKAMRKKQLQTYSDTLSPEILKKLERKHYTGWGRFSKKLINGLRDEGSNKTILDYLKSDEGSSGPTNRNFMQLIRDNTLSFKKKIEDAQTIEDTTHIYDTVAELPGSPAIKKGIRQALKIVEEIIDIIGYEPENIVVEMARESQTTKKGKDLSKERLEKLTEAIKEFDGPSDVKVKDLKNENLRNDRLYLYYLQNGRDMYTNEPLDINNLSKYDIDHIIPQSFTTDNSIDNKVLVSRTKNQGNKSDDVPSINIVHKMKPFWRQLHKAGLISDRKFKNLTKAEHGGLTEADRAHFLNRQLVETRQITKHVANLLDSQYNTAEEQRINIVLLKSSMTSRFRKEFKLYKVREINDYHHGHDAYLNAVVATTIMKVYPNLKPQFVYGQYKKTSMFKEEKATARKHFYSNITKFFKKEKVVNEETGEILWDTERHLSTIKRVLSWKQMNIVKKVEKQKGQLWKETIYPKGDSSKLIPVKEGMDPQKYGGLSQVSEAFAVVITHEKGKKKQLKSDLISIPIVDQKAYEQHPTAYLEEAGYNNPTVLHELFKYQLFELEDGSRRMIASAKEFQKGNQMVLPLELVELLYHANRYDKVKFPDSIEYVHDNLAKFDDLLEYVIDFSNKYINADKNVQKIQKIYKEHGTEDVELTVESFVNLMTFTAMGAPATFKFYGESITRSRYTSITEFRGSTLIFQSITGLYETRYKLEDN

SEQ ID NO: 184 - protein, 1340 aa, Dorea longicatena
  Dorea longicatena DSM 13814
MEQEYYLGLDMGTGSVGWAVTDSEYHVLRKHGKALWGVRLFESASTAEERRMFRTSRRRLDRRNWRIEILQEIFAEEISKKDPGFFLRMKESKYYPEDKRDINGNCPELPYALFVDDDFTDKDYHKKFPTIYHLRKMLMNTEETPDIRLVYLAIHHMMKHRGHFLLSGDINEIKEFGTTFSKLLENIKNEELDWNLELGKEEYAVVESILKDNMLNRSTKKTRLIKALKAKSICEKAVLNLLAGGTVKLSDIFGLEELNETERPKISFADNGYDDYIGEVENELGEQFYIIETAKAVYDWAVLVEILGKYTSISEAKVATYEKHKSDLQFLKKIVRKYLTKEEYKDIFVSTSDKLKNYSAYIGMTKINGKKVDLQSKRCSKEEFYDFIKKNVLKKLEGQPEYEYLKEELERETFLPKQVNRDNGVIPYQIHLYELKKILGNLRDKIDLIKENEDKLVQLFEFRIPYYVGPLNKIDDGKEGKFTWAVRKSNEKIYPWNFENVVDIEASAEKFIRRMTNKCTYLMGEDVLPKDSLLYSKYMVLNELNNVKLDGEKLSVELKQRLYTDVFCKYRKVTVKKIKNYLKCEGIISGNVEITGIDGDFKASLTAYHDFKEILTGTELAKKDKENIITNIVLFGDDKKLLKKRLNRLYPQITPNQLKKICALSYTGWGRFSKKFLEEITAPDPETGEVWNIITALWESNNNLMQLLSNEYRFMEEVETYNMGKQTKTLSYETVENMYVSPSVKRQIWQTLKIVKELEKVMKESPKRVFIEMAREKQESKRTESRKKQLIDLYKACKNEEKDWVKELGDQEEQKLRSDKLYLYYTQKGRCMYSGEVIELKDLWDNTKYDIDHIYPQSKTMDDSLNNRVLVKKKYNATKSDKYPLNENIRHERKGFWKSLLDGGFISKEKYERLIRNTELSPEELAGFIERQIVETRQSTKAVAEILKQVFPESEIVYVKAGTVSRFRKDFELLKVREVNDLHHAKDAYLNIVVGNSYYVKFTKNASWFIKENPGRTYNLKKMFTSGWNIERNGEVAWEVGKKGTIVTVKQIMNKNNILVTRQVHEAKGGLFDQQIMKKGKGQIAIKETDERLASIEKYGGYNKAAGAYFMLVESKDKKGKTIRTIEFIPLYLKNKIESDESIALNFLEKGRGLKEPKILLKKIKIDTLFDVDGFKMWLSGRTGDRLLFKCANQLILDEKIIVTMKKIVKFIQRRQENRELKLSDKDGIDNEVLMEIYNTFVDKLENTVYRIRLSEQAKTLIDKQKEFERLSLEDKSSTLFEILHIFQCQSSAANLKMIGGPGKAGILVMNNNISKCNKISIINQSPTGIFENEIDLLKI

SEQ ID NO: 185 - protein, 1380 aa, Eggerthella sp.
  Eggerthella sp. YY7918
MNLRHVGNYNIGLDMGTASVGWAAIDEQGELLHFKGKPTWGSRLFDSANTAATARMPRGQRRRYIRRRWRLDLLQKFFSEEMAEKDPEFFIRLRQSSLWPEDREGGHTAYHWPLFNDSDFNEKEYYEKFPTIFHLRQWLMETDEKADIRLIYLAFHNIVKHRGNFLQENNDSLSAQNANMRESLESFCIALEEWCDEKELTCSCDPQKLEHLFKEVKYRSDIRDGFAALLGLACSGENEVDVKAMAKEMGKAIVGYKADFSKIFTECDKEGSSFRLSDDEGPEAFLDICPDDGIALFEAIQMVYSSFILTGMLTEKGLSLSKISAYNQYGQDLESLKALVKEYVPNEYSSFFRGPTYSGSTEYDPSKAQGYTRYNLGPSKKGSGAKPMAYEDFKKSVEQLFANTNAINDERYKEMMGRFAEEKFLRRLRTSDNGRIPFQLNLEEMTAIIINQGKYYPFLLEQQEKLESLVRFRIPYYVGPLTRINARLDSKGNACFAWSKRKDGMDSASIKPWNWDEVIDKHASAQAFIERMTGTCTYLRGEPVLPRCSLLYEEYCVLNELNGARWTQDGDKFIRFDYKDRSDIIEELFKKRRGRIQYAAVADWMKQERSHANVHVSGGQGENAFESRLSSYHFFCNDVFGVDELPGSYVDMVEEIILWSTLFEDRSILREEIQRKYGDVLNEEQIKTICKKRFSGWGRLSRKLLCSLKAQTDNGPKSIMDILQEGDQNNGRVGRAMVFQEILHDEQLGFEQKIEEENTQSMLEGENLLIEDLPGSPAIRRSINQAVRIVDEIVGIAGHAPDNIFIEVTREDDTKKKGKRTTTRYSNIQKALEALKEEGAEALRELKTYKHNELDKRLSLYFMQNGKSLYSGIPLDIRRLSEYQIDHIIPQSYIKDDSYENMALVLPGENQSKADNLLISQDIRIKMKATWTALHKAGLMGDKKYNNLMNSSISDAKMKGFINRQLVETSQSVKLTQMMLSQKYPGAKVRPIKASISSQLRDACDLVKCREANDYHHAHDAYLACQVGRFVLKRHSSMFDNPIGMTKVIRDFVKRQGQEFKRNGKLPAYASRSGFIVQSFMRSGFDAETGELLRDDWNAPFEIARIKRCLNYRDCYISRMPMEDSGAFWDATIYSPKAGKKGALPVKQGLPVEKYGSYSREQFAYFFVYKAYNPKKKAYRLEFEAVPVRVASAVETRENALEEYAKSVAKQAGLEFVEVARPKVYKYQLIELGEDRLYITGKREVRNASQLAFSLDEIDLLKRLAEGEETSSEERERLFDVLIEKYARYAPRLARQLSVDSMSATFETLNAEEQLGILLSLVEIANGKRNMIDLSSAGGSKNAGCMNPTFSSELSSPGSNFTFIDQSVTGMFERRQRLEL

SEQ ID NO: 186 - protein, 1195 aa, Elusimicrobium minutum
MQKNINTKQNHIYIKQAQKIKEKLGDKPYRIGLDLGVGSIGFAIVSMEENDGNVLLPKEIIMVGSRIFKASAGAADRKLSRGQRNNHRHTRERMRYLWKVLAEQKLALPVPADLDRKENSSEGETSAKRFLGDVLQKDIYELRVKSLDERLSLQELGYVLYHIAGHRGSSAIRTFENDSEEAQKENTENKKIAGNIKRLMAKKNYRTYGEYLYKEFFENKEKHKREKISNAANNHKFSPTRDLVIKEAEAILKKQAGKDGFHKELTEEYIEKLTKAIGYESEKLIPESGFCPYLKDEKRLPASHKLNEERRLWETLNNARYSDPIVDIVTGEITGYYEKQFTKEQKQKLFDYLLTGSELTPAQTKKLLGLKNTNFEDIILQGRDKKAQKIKGYKLIKLESMPFWARLSEAQQDSFLYDWNSCPDEKLLTEKLSNEYHLTEEEIDNAFNEIVLSSSYAPLGKSAMLIILEKIKNDLSYTEAVEEALKEGKLTKEKQAIKDRLPYYGAVLQESTQKIIAKGFSPQFKDKGYKTPHTNKYELEYGRIANPVVHQTLNELRKLVNEIIDILGKKPCEIGLETARELKKSAEDRSKLSREQNDNESNRNRIYEIYIRPQQQVIITRRENPRNYILKFELLEEQKSQCPFCGGQISPNDIINNQADIEHLFPIAESEDNGRNNLVISHSACNADKAKRSPWAAFASAAKDSKYDYNRILSNVKENIPHKAWRFNQGAFEKFIENKPMAARFKTDNSYISKVAHKYLACLFEKPNIICVKGSLTAQLRMAWGLQGLMIPFAKQLITEKESESFNKDVNSNKKIRLDNRHHALDAIVIAYASRGYGNLLNKMAGKDYKINYSERNWLSKILLPPNNIVWENIDADLESFESSVKTALKNAFISVKHDHSDNGELVKGTMYKIFYSERGYTLTTYKKLSALKLTDPQKKKTPKDFLETALLKFKGRESEMKNEKIKSAIENNKRLFDVIQDNLEKAKKLLEEENEKSKAEGKKEKNINDASIYQKAISLSGDKYVQLSKKEPGKFFAISKPTPTTTGYGYDTGDSLCVDLYYDNKGKLCGEIIRKIDAQQKNPLKYKEQGFTLFERIYGGDILEVDFDIHSDKNSFRNNTGSAPENRVFIKVGTFTEITNNNIQIWFGNIIKSTGGQDDSFTINSMQQYNPRKLILSSCGFIKYRSPILKNKEG

SEQ ID NO: 187 - protein, 1337 aa, Enterococcus faecalis
  Enterococcus faecalis ATCC 29200
MKKDYVIGLDIGTNSVGWAVMTEDYQLVKKKMPIYGNTEKKKIKKNFWGVRLFEEGHTAEDRRLKRTARRRISRRRNRLRYLQAFFEEAMTDLDENFFARLQESFLVPEDKKWHRHPIFAKLEDEVAYHETYPTIYHLRKKLADSSEQADLRLIYLALAHIVKYRGHFLIEGKLSTENISVKEQFQQFMIIYNQTFVNGESRLVSAPLPESVLIEEELTEKASRTKKSEKVLQQFPQEKANGLFGQFLKLMVGNKADFKKVFGLEEEAKITYASESYEEDLEGILAKVGDEYSDVFLAAKNVYDAVELSTILADSDKKSHAKLSSSMIVRFTEHQEDLKKFKRFIRENCPDEYDNLFKNEQKDGYAGYIAHAGKVSQLKFYQYVKKIIQDIAGAEYFLEKIAQENFLRKQRTFDNGVIPHQIHLAELQAIIHRQAAYYPFLKENQEKIEQLVTFRIPYYVGPLSKGDASTFAWLKRQSEEPIRPWNLQETVDLDQSATAFIERMTNFDTYLPSEKVLPKHSLLYEKFMVFNELTKISYTDDRGIKANFSGKEKEKIFDYLFKTRRKVKKKDIIQFYRNEYNTEIVTLSGLEEDQFNASFSTYQDLLKCGLTRAELDHPDNAEKLEDIIKILTIFEDRQRIRTQLSTFKGQFSAEVLKKLERKHYTGWGRLSKKLINGIYDKESGKTILGYLIKDDGVSKHYNRNFMQLINDSQLSFKNAIQKAQSSEHEETLSETVNELAGSPAIKKGIYQSLKIVDELVAIMGYAPKRIVVEMARENQTTSTGKRRSIQRLKIVEKAMAEIGSNLLKEQPTTNEQLRDTRLFLYYMQNGKDMYTGDELSLHRLSHYDIDHIIPQSFMKDDSLDNLVLVGSTENRGKSDDVPSKEVVKDMKAYWEKLYAAGLISQRKFQRLTKGEQGGLTLEDKAHFIQRQLVETRQITKNVAGILDQRYNANSKEKKVQIITLKASLTSQFRSIFGLYKVREVNDYHHGQDAYLNCVVATTLLKVYPNLAPEFVYGEYPKFQTFKENKATAKAIIYTNLLRFFTEDEPRFTKDGEILWSNSYLKTIKKELNYHQMNIVKKVEVQKGGFSKESIKPKGPSNKLIPVKNGLDPQKYGGFDSPIVAYTVLFTHEKGKKPLIKQEILGITIMEKTRFEQNPILFLEEKGFLRPRVLMKLPKYTLYEFPEGRRRLLASAKEAQKGNQMVLPEHLLTLLYHAKQCLLPNQSESLAYVEQHQPEFQEILERVVDFAEVHTLAKSKVQQIVKLFEANQTADVKEIAASFIQLMQFNAMGAPSTFKFFQKDIERARYTSIKEIFDATIIYQSTTGLYETRRKVVD

SEQ ID NO: 188 - protein, 1337 aa, Enterococcus faecalis
  Enterococcus faecalis ATCC 4200
MKKDYVIGLDIGTNSVGWAVMTEDYQLVKKKMPIYGNTEKKKIKKNFWGVRLFEEGHTAEDRRLKRTARRRISRRRNRLRYLQAFFEEAMTALDENFFARLQESFLVPEDKKWHRHPIFAKLEDEVAYHETYPTIYHLRKKLADSSEQADLRLIYLALAHIVKYRGHFLIEGKLSTENISVKEQFQQFMIIYNQTFVNGESRLVSAPLPESVLIEEELTEKASRTKKSEKVLQQFPQEKANGLFGQFLKLMVGNKADFKKVFGLEEEAKITYASESYEEDLEGILAKVGDEYSDVFLAAKNVYDAVELSTILADSDKKSHAKLSSSMIVRFTEHQEDLKKFKRFIRENCPDEYDNLFKNEQKDGYAGYIAHAGKVSQLKFYQYVKKIIQDIAGAEYFLEKIAQENFLRKQRTFDNGVIPHQIHLAELQAIIHRQAAYYPFLKENQEKIEQLVTFRIPYYIGPLSKGDASTFAWLKRQSEEPIRPWNLQETVDLDQSATAFIERMTNFDTYLSSEKVLPKHSLLYEKFMVFNELTKISYTDDRGIKANFSGKEKEKIFDYLFKTRRKVKKKDIIQFYRNEYNTEIVTLSGLEEDQFNASFSTYQDLLKCGLTRAELDHPDNAEKLEDIIKILTIFEDRQRIRTQLSTFKGQFSAEVLKKLERKHYTGWGRLSKKLINGIYDKESGKTILGYLIKDDGVSKHYNRNFMQLINDSQLSFKNAIQKAQSSEHEETLSETVNELAGSPAIKKGIYQSLKIVDELVAIMGYAPKRIVVEMARENQTTSTGKRRSIQRLKIVEKAMAEIGSNLLKEQPTTNEQLRDTRLFLYYMQNGKDMYTGDELSLHRLSHYDIDHIIPQSFMKDDSLDNLVLVGSTENRGKSDDVPSKEVVKDMKAYWEKLYAAGLISQRKFQRLTKGEQGGLTLEDKAHFIQRQLVETRQITKNVAGILDQRYNANSKEKKVQIITLKASLTSQFRSIFGLYKVREVNDYHHGQDAYLNCVVATTLLKVYPNLAPEFVYGEYPKFQAFKENKATAKAIIYTNLLRFFTEDEPRFTKDGEILWSNSYLKTIKKELNYHQMNIVKKVEVQKGGFSKESIKPKGPSNKLIPVKNGLDPQKYGGFDSPVVAYTVLFTHEKGKKPLIKQEILGITIMEKTRFEQNPILFLEEKGFLRPRVLMKLPKYTLYEFPEGRRRLLASAKEAQKGNQMVLPEHLLTLLYHAKQCLLPNQSESLAYVEQHQPEFQEILERVVDFAEVHTLAKSKVQQIVKLFEANQTADVKEIAASFIQLMQFNAMGAPSTFKFFQKDIERARYTSIKEIFDATIIYQSTTGLYETRRKVVD

SEQ ID NO: 189 - protein, 1337 aa, Enterococcus faecalis
  Enterococcus faecalis D6
MKKDYVIGLDIGTNSVGWAVMTEDYQLVKKKMPIYGNTEKKKIKKNFWGVRLFEEGHTAEDRRLKRTARRRISRRRNRLRYLQAFFEEAMTALDENFFARLQESFLVPEDKKWHRHPIFAKLEDEVAYHETYPTIYHLRKKLADSSEQADLRLIYLALAHIVKYRGHFLIEGKLSTENISVKEQFQQFMIIYNQTFVNGESRLVSAPLPESVLIEEELTEKASRTKKSEKVLQQFPQEKANGLFGQFLKLMVGNKADFKKVFGLEEEAKITYASESYEEDLEGILAKVGDEYSDVFLAAKNVYDAVELSTILADSDKKSHAKLSSSMIVRFTEHQEDLKNFKRFIRENCPDEYDNLFKNEQKDGYAGYITHAGKVSQLKFYQYVKKIIQDIAGAEYFLEKIAQENFLRKQRTFDNGVIPHQIHLAELQAIIHRQAAYYPFLKENQEKIEQLVTFRIPYYVGPLSKGDANTFAWLKRQSEEPIRPWNLQETVDLDQSATAFIERMTNFDTYLPSEKVLPKHSLLYEKFMVFNELTKISYTDDRGIKANFSGKEKEKIFDYLFKTRRKVKKKDIIQFYRNEYNTEIVTLSGLEEDQFNASFSTYQDLLKCGLTRAELDHPDNAEKLEDIIKILTIFEDRQRIRTQLSTFKGQFSAEVLKKLERKHYTGWGRLSKKLINGIYDKESGKTILDYLIKDDGVSKHYNRNFMQLINDSQLSFKNAIQKAQSSEHEETLSETVNELAGSPAIKKGIYQSLKIVDELVAIMGYAPKRIVVEMARENQTTSTGKRRSIQRLKIVEKAMAEIGSNLLKEQPTTNEQLRDTRLFLYYMQNGKDMYTGDELSLHRLSHYDIDHIIPQSFMKDDSLDNLVLVGSTENRGKSDDVPSKEVVKDMKAYWEKLYAAGLISQRKFQRLTKGEQGGLTLEDKAHFIQRQLVETRQITKNVAGILDQRYNAKSKEKKVQIITLKASLTSQFRSIFGLYKVREVNDYHHGQDAYLNCVVATTLLKVYPNLAPEFVYGEYPKFQTFKENKATAKAIIYTNLLRFFTEDEPRFTKDGEILWSNSYLKTIKKELNYHQMNIVKKVEVQKGGFSKESIKPKGPSNKLIPVKNGLDPQKYGGFDSPIVAYTVLFTHEKGKKPLIKQEILGITIMEKTRFEQNPILFLEEKGFLRPRVLMKLPKYTLYQFPEGRRRLLASAKEAQKGNQMVLPEHLLTLLYHAKQCLLPNQSESLAYVEQHQPEFQEILERVVDFAEVHTLAKSKVQQIVKLFEANQTADVKEIAASFIQLMQFNAMGAPSTFKFFQKDIERARYTSIKEIFDATIIYQSTTGLYETRRKVVD

SEQ ID NO: 190 - protein, 1337 aa, Enterococcus faecalis
  Enterococcus faecalis E1Sol
MKKDYVIGLDIGTNSVGWAVMTEDYQLVKKKMPIYGNTEKKKIKKNFWGVRLFEEGHTAEDRRLKRTARRRISRRRNRLRYLQAFFEEAMTDLDENFFARLQESFLVPEDKKWHRHPIFAKLEDEVAYHETYPTIYHLRKKLADSSEQADLRLIYLALAHIVKYRGHFLIEGKLSTENTSVKEQFQQFMVIYNQTFVNGESRLVSAPLPESVLIEEELTEKASRTKKSEKVLQQFPQEKANGLFGQFLKLMVGNKADFKKVFGLEEEAKITYASESYEEDLEGILAKVGDEYSDVFLAAKNVYDAVELSTILADSDKKSHAKLSSSMIVRFTEHQEDLKKFKRFIRENCPDEYDNLFKNEQKDGYAGYIAHAGKVSQLKFYQYVKKIIQDIAGAEYFLEKIAQENFLRKQRTFDNGVIPHQIHLAELQAIIHRQAAYYPFLKENQEKIEQLVTFRIPYYVGPLSKGDASTFAWLKRQSEEPIRPWNLQETVDLDQSATAFIERMTNFDTYLPSEKVLPKHSLLYEKFMVFNELTKISYTDDRGIKANFSGKEKEKIFDYLFKTRRKVKKKDIIQFYRNEYNTEIVTLSGLEEDQFNASFSTYQDLLKCGLTRAELDHPDNAEKLEDIIKILTIFEDRQRIRTQLSTFKGQFSAEVLKKLERKHYTGWGRLSKKLINGIYDKESGKTILDYLVKDDGVSKHYNRNFMQLINDSQLSFKNAIQKAQSSEHEETLSETVNELAGSPAIKKGIYQSLKIVDELVAIMGYAPKRIVVEMARENQTTSTGKRRSIQRLKIVEKAMAEIGSNLLKEQPTTNEQLRDTRLFLYYMQNGKDMYTGDELSLHRLSHYDIDHIIPQSFMKDDSLDNLVLVGSTENRGKSDDVPSKKVVKKMKAYWEKLYAAGLISQRKFQRLTKGEQGGLTLEDKAHFIQRQLVETRQITKNVAGILDQRYNAKSKEKKVQIITLKASLTSQFRSIFGLYKVREVNDYHHGQDAYLNCVVATTLLKVYPNLAPEFVYGEYPKFQAFKENKATAKTIIYTNLMRFFTEDEPRFTKDSEILWSNSYLKTIKKELNYHQMNIVKKVEVQKGGFSKESIKPKGPSNKLIPVKNGLDPQKYGGFDSPVVAYTVLFTHEKGKKPLIKQEILGITIMEKTRFEQNPILFLEEKGFLRPRVLMKLPKYTLYEFPEGRRRLLASAKEAQKGNQMVLPEHLLTLLYHAKQCLLPNQSESLAYVEQHQPEFQEILERVVDFAEVHTLAKSKVQQIVKLFEANQTADVKEIAASFIQLMQFNAMGAPSTFKFFQKDIERARYTSIKEIFDATIIYQSTTGLYETRRKVVD

SEQ ID NO: 191 - protein, 1150 aa, Enterococcus faecalis
  Enterococcus faecalis Fly1
MYSIGLDLGISSVGWSVIDERTGNVIDLGVRLFSAKNSEKNLERRTNRGGRRLIRRKTNRLKDAKKILAAVGFYEDKSLKNSCPYQLRVKGLTEPLSKGEIYKVTLHILKKRGISYLDEDDTEAAKESQDYKEQVRKNAQLLTKYTPGQIQLQRLKENNRVKTGINAQGNYQLNVFKVSAYANELATILKTQQAFYPNELTDDWIALFVQPGIAEEAGLIYRKRPYYHGPGNEANNSPYGRWSDFKKTGQPATNIFDRLIGKDFQGELRASGLSLSAQQYNLLNDLTNLKIDGEIPLSPEQKEYILAELMTKEFTRFGVNDVAKLLGVKKERLSGWRLDKKGKPEIHTLKGYRNWRKIFAESGIDLATLPTETIDCLAKVLTLNTEHEGIENTLAFELPELAESVKLLVLDRYKELSQSVSTQAWHRFSLKTLHLLIPELMNATSEQNTLLEQFQLKSDVRKRYSEYKKLPTKDVLTEIYNPTVNKTVSQAFKVIDALLVKYGKEQIRYITIEMPRDDNEEDEKKRIKELHAKNSQRKNDSQSYFMQKSGWSQEKFQTTIQKNRRFLAKLLYYYEQDGICAYTGLSISPELLVSDSTEIDHIIPISISLDDSINNKVLVLSKANQVKGQQTPYDAWMDGSFKKINGKFSNWDDYQKWVESRHFSHKKENNLLETRNIFDSEQVEKFLARNLNDTRYASRLVLNTLQSFFANHETKVRVVNGSFTHTLRKKWGADLDKTRETHHHHAVDATLCAVTPFVKVSRYHYAVKEETGEKVMREIDFETGEIVDEMSYQEFKKSKKYERKTYQVKWPNFREQLKPVNLHPRIKFSHQVDRKANRKLSDATIYSVREKTEVKTLKSGKQKITTDEYTIGKIKDIYTVDGWEAFKKKQDKLLMKDLDEKTYERLLSIAETTPDFQEVEEKNGKVKRVKRSPFAVYCEENDIPAIQKYAKKNNGPLIRSLKYYDGKLNKHINITKDSQGRPVEKTKNGRKVTLQSLKPYRYDIYQDLETKAYYTVQLYYSDLRFVEGKYGITEKEYMKKVAEQTKGQVVRFCFSLQKNDGLEIEWKDSQRYDVRFYNFQSANSINFKGLEQEMMPAENQFKQKPYNNGAINLNIAKYGKEGKKLRKFNTDILGKKHYLYYEKEPKNIIK

SEQ ID NO: 192 - protein, 1337 aa, Enterococcus faecalis
MKKDYVIGLDIGTNSVGWAVMTEDYQLVKKKMPIYGNTEKKKIKKNFWGVRLFEEGHTAEDRRLKRTARRRISRRRNRLRYLQAFFEEAMTDLDENFFARLQESFLVPEDKKWHRHPIFAKLEDEVAYHETYPTIYHLRKKLADSSEQADLRLIYLALAHIVKYRGHFLIEGKLSTENISVKEQFQQFMIIYNQTFVNGESRLVSAPLPESVLIEEELTEKASRTKKSEKVLQQFPQEKANGLFGQFLKLMVGNKADFKKVFGLEEEAKITYASESYEEDLEGILAKVGDEYSDVFLAAKNVYDAVELSTILADSDKKSHAKLSSSMIVRFTEHQEDLKKFKRFIRENCPDEYDNLFKNEQKDGYAGYIAHAGKVSQLKFYQYVKKIIQDIAGAEYFLEKIAQENFLRKQRTFDNGVIPHQIHLAELQAIIHRQAAYYPFLKENQEKIEQLVTFRIPYYVGPLSKGDASTFAWLKRQSEEPIRPWNLQETVDLDQSATAFIERMTNFDTYLPSEKVLPKHSLLYEKFMVFNELTKISYTDDRGIKANFSGKEKEKIFDYLFKTRRKVKKKDIIQFYRNEYNTEIVTLSGLEEDQFNASFSTYQDLLKCGLTRAELDHPDNAEKLEDIIKILTIFEDRQRIRTQLSTFKGQFSAEVLKKLERKHYTGWGRLSKKLINGIYDKESGKTILDYLVKDDGVSKHYNRNFMQLINDSQLSFKNAIQKAQSSEHEETLSETVNELAGSPAIKKGIYQSLKIVDELVAIMGYAPKRIVVEMARENQTTSTGKRRSIQRLKIVEKAMAEIGSNLLKEQPTTNEQLRDTRLFLYYMQNGKDMYTGDELSLHRLSHYDIDHIIPQSFMKDDSLDNLVLVGSTENRGKSDDVPSKEVVKDMKAYWEKLYAAGLISQRKFQRLTKGEQGGLTLEDKAHFIQRQLVETRQITKNVAGILNQRYNANSKEKKVQIITLKASLTSQFRSIFGLYKVREVNDYHHGQDAYLNCVVATTLLKVYPNLAPEFVYGEYPKFQTFKENKATAKAIIYTNLLRFFTEDEPRFTKDGEILWSNSYLKTIKKELNYHQMNIVKKVEVQKGGFSKESIKPKGPSNKLIPVKNGLDPQKYGGFDSPVVAYTVLFTHEKGKKPLIKQEILGITIMEKTRFEQNPILFLEEKGFLRPRVLMKLPKYTLYEFPEGRRRLLASAKEAQKGNQMVLPEHLLTLLYHAKQCLLPNQSESLAYVEQHQPEFQEILERVVDFAEVHTLAKSKVQQIVKLFEANQTADVKEIAASFIQLMQFNAMGAPSTFKFFQKDIERARYTSIKEIFDATIIYQSTTGLYETRRKVVD

SEQ ID NO: 193 - protein, 1150 aa, Enterococcus faecalis
  Enterococcus faecalis R508
MYSIGLDLGISSVGWSVIDERTGNVIDLGVRLFSAKNSEKNLERRTNRGGRRLIRRKTNRLKDAKKILAAVGFYEDKSLKNSCPYQLRVKGLTEPLSKGEIYKVTLHILKKRGISYLDEDDTEAAKESQDYKEQVRKNAQLLTKYTPGQIQLQRLKENNRVKTGINVQGNYQLNVFKVSAYANELATILKTQQAFYPNELTDDWIALFVQPGIAEEAGLIYRKRPYYHGPGNEANNSPYGRWSDFQKTGEPATNIFDKLIGKDFQGELRASGLSLSAQQYNLLNDLTNLKIDGEVPLSSEQKEYILTELMTKEFTRFGVNDVVKLLGVKKERLSGWRLDKKGKPEIHTLKGYRNWRKIFAEAGIDLATLPTETIDCLAKVLTLNTEREGIENTLAFELPELSESVKLLVLDRYKELSQSISTQSWHRFSLKTLHLLIPELMNATSEQNTLLEQFQLKSDVRKRYSEYKKLPTKDVLAEIYNPTVNKTVSQAFKVIDALLVKYGKEQIRYITIEMPRDDNEEDEKKRIKELHAKNSQRKNDSQSYFMQKSGWSQEKFQTTIQKNRRFLAKLLYYYEQDGICAYTGLPISPELLVSDSTEIDHIIPISISLDDSINNKVLVLSKANQVKGQQTPYDAWMDGSFKKINGKFSNWDDYQKWVESRHFSHKKENNLLETRNIFDSEQVEKFLARNLNDTRYASRLVLNTLQSFFTNQETKVRVVNGSFTHTLRKKWGADLDKTRETHHHHAVDATLCAVTPFVKVSRYHYAVKEETGEKVMREIDFETGEIVNEMSYREFKKSKKYERKTYQVKWPNFREQLKPVNLHPRIKFSHQVDRKANRKLSDATIYSVREKTEVKTLKSGKQKITTDEYTIGKIKDIYTLDGWEAFKKKQDKLLMKDLDEKTYERLLSIAETTPDFQEVEEKNGKVKRVKRSPFAVYCEENDIPAIQKYAKKNNGPLIRSLKYYDGKLNKHINITKDSQGRPVEKTKNGRKVTLQSLKPYRYDIYQDLETKAYYTVQLYYSDLRFVEGKYGITEKEYMKKVAEQTKGQVVRFCFSLQKNDGLEIEWKDSQRYDVRFYNFQSANSINFKGLEQEIMPAENQFKQKPYNNGAINLNIAKYGKEGKKLRKFNTDILGKKHYLFYEKEPKNIIK

SEQ ID NO: 194 - protein, 1150 aa, Enterococcus faecalis
  Enterococcus faecalis T11
MYSIGLDLGISSVGWSVIDERTGNVIDLGVRLFSAKNSEKNLERRTNRGGRRLIRRKTNRLKDAKKILAAVGFYEDKSLKNSCPYQLRVKGLTEPLSKGEIYKVTLHILKKRGISYLDEDDTEAAKESQDYKEQVRENAQLLTKYTPGQIQLQRLKENNRVKTGINAQGNYQLNVFKVSAYANELATILKTQQAFYPNELTDDWIALFVQPGIAEEAGLIYRKRPYYHGPGNEANNSPYGRWSDFKKTGQPATNIFDKLIGKDFQGELRASGLSLSAQQYNLLNDLTNLKIDGEIPLSPEQKEYILAELMTKEFTRFGVNDVVKLLGVKKERLSGWRLDKKGKPEIHTLKGYRNWRKIFAESGIDLAMLPTETIDCLAKILTLNTEREGIENTLAFELPELAESVKLLVLDRYKELSQSVSTQAWHRFSLKTLHLLIPELMNATSEQNTLLEQFQLKSDVRKRYSEYKKLPTKDVLTEIYNPTVNKTVSQAFKVIDALLVKYGKEQIRYITIEMPRDDNEEDEKKRIKELHAKNSQRKNDSQSYFMQKSGWSQEKFQTTIQKNRRFLAKLLYYYEQDGICAYTGLSISPELLVSDSTEIDHIIPISISLDDSINNKVLVLSKANQVKGQQTPYDAWMDGSFKKINGKFSNWDDYQKWVESRHFSHKKENNLLETRNIFDSEQVEKFLARNLNDTRYASRLVLNTLQSFFANQETKVRVVNGSFTHTLRKKWGADLDKTRETHHHHAVDATLCAVTPFVKVSRYHYAVKEETGEKVMREIDFETGEIVDEMSYREFKKSKKYERKTYQVKWPNFREQLKPVNLHPRIKFSHQVDRKANRKLSDATIYSVREKTEVKTLKSGKQKITTDEYTIGKIKDIYTVDGWEAFKKKQDKLLMKDLDEKTYERLLSIAETTPDFQEVEEKNGKVKRVKRSPFAVYCEENDIPAIRKYAKKNNGPLIRSLKYYDGKLNKHINITKDSQGRPVEKTKNGRKVTLQSLKPYRYDIYQDLETKAYYTVQLYYSDLRFVEGKYGITEKEYMKKVAEQTKGQVVRFCFSLQKNDGLEIEWKDSQRYDVRFYNFQSANSINFKGLEQEMMPAENQFKQKPYNNGAINLNIAKYGKEGKKLRKFNTDILGKKHYLYYEKEPKNIIK

SEQ ID NO: 195 - protein, 1150 aa, Enterococcus faecalis
  Enterococcus faecalis TX0012
MYSIGLDLGISSVGWSVIDERTGNVIDLGVRLFSAKNSEKNLERRTNRGGRRLIRRKTNRLKDAKKILAAVGFYEDKSLKNSCPYQLRVKGLTEPLSRGEIYKVTLHILKKRGISYLDEVDTEAAKESQDYKEQVRKNAQLLTKYTPGQIQLQRLKENNRVKTGINAQGNYQLNVFKVSAYANELATILKTQQAFYPNELTDDWIALFVQPGIAEEAGLIYRKRPYYHGPGNEANNSPYGRWSDFQKTGEPATNIFDKLIGKDFQGELRASGLSLSAQQYNLLNDLTNLKIDGEVPLSSEQKEYILTELMTKEFTRFGVNDVVKLLGVKKERLSGWRLDKKGKPEIHTLKGYRNWRKIFAEAGIDLATLPTETIDCLAKVLTLNTEREGIENTLAFELPELSESVKLLVLDRYKELSQSISTQSWHRFSLKTLHLLIPELMNATSEQNTLLEQFQLKSDVRKRYSEYKKLPTKDVLAEIYNPTVNKTVSQAFKVIDALLVKYGKEQIRYITIEMPRDDNEEDEKKRIKELHAKNSQRKNDSQSYFMQKSGWSQEKFQTTIQKNRRFLAKLLYYYEQDGICAYTGLPISPELLVSDSTEIDHIIPISISLDDSINNKVLVLSKANQVKGQQTPYDAWMDGSFKKINGKFSNWDDYQKWVESRHFSHKKENNLLETRNIFDSEQVEKFLARNLNDTRYASRLVLNTLQSFFTNQETKVRVVNGSFTHTLRKKWGADLDKTRETHHHHAVDATLCAVTSFVKVSRYHYAVKEETGEKVMREIDFETGEIVNEMSYWEFKKSKKYERKTYQVKWPNFREQLKPVNLHPRIKFSHQVDRKANRKLSDATIYSVREKTEVKTLKSGKQKITTDEYTIGKIKDIYTLDGWEAFKKKQDKLLMKDLDEKTYERLLSIAETTPDFQEVEEKNGKVKRVKRSPFAVYCEENDIPAIQKYAKKNNGPLIRSLKYYDGKLNKHINITKDSQGRPVEKTKNGRKVTLQSLKPYRYDIYQDLETKAYYTVQLYYSDLRFVEGKYGITEKEYMKKVAEQTKGQVVRFCFSLQKNDGLEIEWKDSQRYDVRFYNFQSANSINFKGLEQEMMPAENQFKQKPYNNGAINLNIAKYGKEGKKLRKFNTDILGKKHYLFYEKEPKNIIK

SEQ ID NO: 196 - protein, 1150 aa, Enterococcus faecalis; identical to SEQ ID NO: 195
  Enterococcus faecalis TX0012

SEQ ID NO: 197 - protein, 1337 aa, Enterococcus faecalis
  Enterococcus faecalis TX0470
MKKDYVIGLDIGTNSVGWAVMTEDYQLVKKKMPIYGNTEKKKIKKNFWGVRLFEEGHTAEDRRLKRTARRRISRRRNRLRYLQAFFEEAMTALDENFFARLQESFLVPEDKKWHRHPIFAKLEDEVAYHETYPTIYHLRKKLADSSEQADLRLIYLALAHIVKYRGHFLIEGKLSTENISVKEQFQQFMIIYNQTFVNGESRLVSTPLPESVLIEEELTEKASRTKKSEKVLQQFPQEKANGLFGQFLKLMVGNKADFKKVFGLEEEAKITYASESYEEDLEGILAKVGDEYSDVFLAAKNVYDAVELSTILADSDKKSHAKLSSSMIVRFTEHQEDLKNFKRFIRENCPDEYDNLFKNEQKDGYAGYITHAGKVSQLKFYQYVKKIIQDIAGAEYFLEKIAQENFLRKQRTFDNGVIPHQIHLAELQAIIHRQAAYYPFLKENQEKIEQLVTFRIPYYVGPLSKGDASTFAWLKRQSEEPIRPWNLQETVDLDQSATAFIERMTNFDTYLPSEKVLPKHSLLYEKFMVFNELTKISYTDDRGIKANFSGKEKEKIFDYLFKTRRKVKKKDIIQFYRNEYNTEIVTLSGLEEDQFNASFSTYQDLLKCGLTRAELDHPDNAEKLEDIIKILTIFEDRQRIRTQLSTFKGQFSAEVLKKLERKHYTGWGRLSKKLINGIYDKESGKTILDYLVKDDGVSKHYNRNFMQLINDSQLSFKNAIQKAQSSEHEETLSETVNELAGSPAIKKGIYQSLKIVDELVAIMGYAPKRIVVEMARENQTTSTGKRRSIQRLKIVEKAMAEIGSNLLKEQPTTNEQLRDTRLFLYYMQNGKDMYTGDELSLHRLSHYDIDHIIPQSFMKDDSLDNLVLVGSTENRGKSDDVPSKEVVKDMKAYWEKLYAAGLISQRKFQRLTKGEQGGLTLEDKAHFIQRQLVETRQITKNVAGILDQRYNAKSKEKKVQIITLKASLTSQFRSIFGLYKVREVNDYHHGQDAYLNCVVATTLLKVYPNLAPEFVYGEYPKFQTFKENKATAKAIIYTNLLRFFTEDEPRFTKDGEILWSNSYLKTIKKELNYHQMNIVKKVEVQKGGFSKESIKPKGPSNKLIPVKNGLDPQKYGGFDSPIVAYTVLFTHEKGKKPLIKQEILGITIMEKTRFEQNPILFLEEKGFLRPRVLMKLPKYTLYEFPEGRRRLLASAKEAQKGNQMVLPEHLLTLLYHAKQCLLPNQSESLAYVEQHQPEFQEILERVVDFAEVHTLAKSKVQQIVKLFEANQTADVKEIAASFIQLMQFNAMGAPSTFKFFQKDIERARYTSIKEIFDATIIYQSTTGLYETRRKVVD

SEQ ID NO: 198 - protein, 1150 aa, Enterococcus faecalis
  Enterococcus faecalis TX1342
MYSIGLDLGVSSVGWSVIDERTGNVIDLGVRLFSAKNSEKNLERRTNRGGRRLIRRKTNRLKDAKKILAAVGFYEDKSLKNSCPYQLRVKGLTEPLSKGEIYKVTLHILKKRGISYLDEDDTEAAKESQDYKEQVRENAQLLTKYTPGQIQLQRLKENNRVKTGINAQGNYQLNVFKVSAYANELATILKTQQAFYPNELTDDWIALFVQPGIAEEAGLIYRKRPYYHGPGNEANNSPYGRWSDFKKTGQPATNIFDKLIGKDFQGELRASGLSLSAQQYNLLNDLTNLKIDGEIPLSPEQKEYILAELMTKEFTRFGINDVAKLLGVKKERLSGWRLDKKGKPEIHTLKGYRNWRKIFAESGIDLATLPTETIDCLAKVLTLNTEREGIENTLAFELPELAESVKLLVLDRYKELSQSVSTQAWHRFSLKTLHLLIPELMNATSEQNTLLEQFQLKSDVRKRYSEYKKLPTKDVLTEIYNPTVNKTVSQAFKVIDALLVKYGKEQIRYITIEMPRDDNEEDEKKRIKELHAKNSQRKNDSQSYFMQKSGWSQEKFQTTIQKNRRFLAKLLYYYEQDGICAYTGLSISPELLVSDSTEIDHIIPISISLDDSINNKVLVLSKANQVKGQQTPYDAWMDGSFKKINGKFSNWDDYQKWVESRHFSHKKENNLLETRNIFDSEQVEKFLARNLNDTRYASRLVLNTLQSFFANQETKVRVVNGSFTHTLRKKWGADLDKTRETHHHHAVDATLCAVTPFVKVSRYHYAVKEETGEKVMREIDFETGEIVDEMSYREFKKSKKYERKTYQVKWPNFREQLKPVNLHPRIKFSHQVDRKANRKLSDATIYSVREKTEVKTLKSGKQKITTDEYTIGKIKDIYTVDGWEAFKKKQDKLLMKDLDEKTYERLLSIAETTPDFQEVEEKNGKVKRVKRSPFAVYCEENDIPAIRKYAKNNNGPLIRSLKYYDGKLNKHINITKDSQGRPVEKTKNGRKVTLQSLKPYRYDIYQDLETKAYYTVQLYYSDLRFVEGKYGITEKEYMKKVAEQTKGQVVRFCFSLQKNDGLEIEWKDSQCYDVRFYNFQSANSINFKGLEQEMMPAENQFKQKPYNNGAINLNIAKYGKEGKKLRKFNTDILGKKHYLYYEKEPKNIIK

SEQ ID NO: 199 - protein, 1337 aa, Enterococcus faecalis
  Enterococcus faecalis TX4244
MKKDYVIGLDIGTNSVGWAVMTEDYQLVKKKMPIYGNTEKKKIKKNFWGVRLFEEGHTAEDRRLKRTARRRISRRRNRLRYLQAFFEEAMTDLDENFFARLQESFLVPEDKKWHRHPIFAKLEDEVAYHETYPTIYHLRKKLADSSEQADLRLIYLALAHIVKYRGHFLIEGKLSTENISVKEQFQQFMIIYNQTFVNGESRLVSAPLPESVLIEEELTEKASRTKKSEKVLQQFPQEKANGLFGQFLKLMVGNKADFKKVFGLEEEAKITYASESYEEDLEGILAKVGDEYSDVFLAAKNVYDAVELSTILADSDKKSHAKLSSSMIVRFTEHQEDLKKFKRFIRENCPDEYDNLFKNEQKDGYAGYIAHAGKVSQLKFYQYVKKIIQDIAGAEYFLEKIAQENFLRKQRTFDNGVIPHQIHLAELQAIIHRQAAYYPFLKENQEKIEQLVTFRIPYYVGPLSKGDASTFAWLKRQSEEPIRPWNLQETVDLDQSATAFIERMTNFDTYLPSEKVLPKHSLLYEKFMVFNELTKISYTDDRGIKANFSGKEKEKIFDYLFKTRRKVKKKDIIQFYRNEYNTEIVTLSGLEEDQFNASFSTYQDLLKCGLTRAELDHPDNAEKLEDIIKILTIFEDRQRIRTQLSTFKGQFSAEVLKKLERKHYTGWGRLSKKLINGIYDKESGKTILGYLIKDDGVSKHYNRNFMQLINDSQLSFKNAIQKAQSSEHEETLSETVNELAGSPAIKKGIYQSLKIVDELVAIMGYAPKRIVVEMARENQTTSTGKRRSIQRLKIVEKAMAEIGSNLLKEQPTTNEQLRDTRLFLYYMQNGKDMYTGDELSLHRLSHYDIDHIIPQSFMKDDSLDNLVLVGSTENLGKSDDVPSKEVVKDMKAYWEKLYAAGLISQRKFQRLTKGEQGGLTLEDKAHFIQRQLVETRQITKNVAGILDQRYNANSKEKKVQIITLKASLTSQFRSIFGLYKVREVNDYHHGQDAYLNCVVATTLLKVYPNLAPEFVYGEYPKFQTFKENKATAKAIIYTNLLRFFTEDEPRFTKDGEILWSNSYLKTIKKELNYHQMNIVKKVEVQKGGFSKESIKPKGPSNKLIPVKNGLDPQKYGGFDSPIVAYTVLFTHEKGKKPLIKQEILGITIMEKTRFEQNPILFLEEKGFLRPRVLMKLPKYTLYEFPEGRRRLLASAKEAQKGNQMVLPEHLLTLLYHAKQCLLPNQSESLAYVEQHQPEFQEILERVVDFAEVHTLAKSKVQQIVKLFEANQTADVKEIAASFIQLMQFNAMGAPSTFKFFQKDIERARYTSIKEIFDATIIYQSTTGLYETRRKVVD

SEQ ID NO: 200 - protein, 1339 aa, Enterococcus faecium
  Enterococcus faecium 1,141,733
MKKEYTIGLDIGTNSVGWSVLTDDYRLVSKKMKVAGNTEKSSTKKNFWGVRLFDEGQTAEARRSKRTARRRLARRRQRILELQKIFAPEILKIDEHFFARLNESFLVLDEKKQSRHPVFATIKQEKSYHQTYPTIYHLRQALADSSEKADIRLVYLAMAHLLKYRGHFLIEGELNTENSSVTETFRQFLSTYNQQFSEADDKQTEKLDEAVDCSFVFTEKMSKTKKAETLLKYFPHEKSNGYLSQFIKLMVGNQGNFKNVFGLEEAKLQFSKETYEEDLEELLEKIGDDYIDLFVQAKNVYDAVLLSEILSDSTKNTRAKLSAGMIRRYDAHKEDLVLLKRFVKENLPKKYRAFFGDNSVNGYAGYIEGHATQEDFYKFVKKELTGIRGSEVFLTKIEQENFLRKQRTFDNGVIPHQIHLTELRAIIANQKKHYPFLKEEQEKLESLLTFKIPYYVGPLAKKQENSPFAWLIRKSEEKIKPWNLPEIVDMEGSAVRFIERMINTDMYMPHNKVLPKNSLLYQKFSIYNELTKVRYQDERGQMNYFSSIEKKEIFHELFEKNRKVTKKDLQEFLYLKYDIKHAELSGIEKAFNASYTTYHDFLTMSENKREMKQWLEDPELASMFEEIIKTLTVFEDREMIKTRLSHHEATLGKHIIKKLTKKHYTGWGRLSKELIQGIRDKQSNKTILDYLINDDDFPHHRNRNFMQLINDDSLSFKKEIKKAQMITDTENLEEIVKELTGSPAIKKGILQSLKIVDEIVGIMGYEPANIVVEMARENQTTGRGLKSSRPRLKALEESLKDFGSQLLKEYPTDNSSLQKDRLYLYYLQNGRDMYTGAPLDIHRLSDYDIDHIIPRSFTTDNSIDNKVLVSSKENRLKKDDVPSEKVVKKMRSFWYDLYSSKLISKRKLDNLTKIKLTEEDKAGFIKRQLVETRQITKHVAGILHHRFNKAEDTNEPIRKVRIITLKSALVSQFRNRFGIYKVREINEYHHAHDAYLNGVVALALLKKYPQLAPEFVYGEYLKFNAHKANKATVKKEFYSNIMKFFESDTPVCDENGEIFWDKSKSIAQVKKVINHHHMNIVKKTEIQKGGFSKETVEPKKDSSKLLPRKNNWDPAKYGGLGSPNVAYTVAFTYEKGKARKRTNALEGITIMEREAFEQSPVLFLKNKGYEQAEIEMKLPKYALFELENGRKRMVASNKEAQKANSFLLPEHLVTLLYHAKQYDEISHKESFDYVNEHHKEFSEVFARVLEFAGKYTLAEKNIEKLEKIYKENQTDDLAKLASSFVNLMQFNAMGAPADFKFFDVTIPRKRYTSLTEIWQSTIIHQSITGLYETRIRMGK

SEQ ID NO: 201 - protein, 1340 aa, Enterococcus faecium
  Enterococcus faecium 1,231,408
MKKEYTIGLDIGTNSVGWSVLTDDYRLVSKKMKVAGNTEKSSTKKNFWGVRLFDEGQTAEARRSKRTARRRLARRRQRILELQKIFAPEILKIDEHFFARLNESFLVPDEKKQSRHPVFATIKQEKSYHQTYPTIYHLRQALADSSEKADIRLVYLAMAHLLKYRGHFLIEGELNTENSSVTETFRQFLSTYNQQFSEAGDKQTEKLDEAVDCSFVFTEKMSKTKKAETLLKYFPHEKSNGYLSQFIKLMVGNQGNFKNVFGLEEEAKLQFSKETYEEDLEELLEKIGDDYIDLFVQAKNVYDAVLLSEILSDSTKNTRAKLSAGMIRRYDAHKEDLVLLKRFVKENLPKKYRAFFGDNSVNGYAGYIEGHATQEAFYKFVKKELTGIRGSEVFLTKIEQENFLRKQRTFDNGVIPHQIHLSELRAIIANQKKHYPFLKEEQEKLESLLTFKIPYYVGPLAKKQENSPFAWLIRKSEEKIKPWNLPEIVDMEGSAVRFIERMINTDMYMPHNKVLPKNSLLYQKFSIYNELTKVRYQDERGQMNYFSSIEKKEIFHELFEKNRKVTKKDLQEFLYLKYDIKHAELSGIEKAFNASYTTYHDFLTMSENKREMKQWLEDPELASMFEEIIKTLTVFEDREMIKTRLSHHEATLGKHIIKKLTKKHYTGWGRLSKELIQGIRDKQSNKTILDYLINDDDFPHHRNRNFMQLINDDSLSFKKEIKKAQMITDTENLEEIVKELTGSPAIKKGILQSLKIVDEIVGIMGYEPANIVVEMARENQTTGRGLKSSRPRLKALEESLKDFGSQLLKEYPTDNSSLQKDRLYLYYLQNGRDMYTGAPLDIHRLSDYDIDHIIPRSFTTDNSIDNKVLVSSKENRLKKDDVPSEKVVKKMRSFWYDLYSSKLISKRKLDNLTKIKLTEEDKAGFIKRQLVETRQITKHVAGILHHRFNKAEDTNDPIRKVRIITLKSALVSQFRNRFGIYKVREINEYHHAHDAYLNGVVALALLKKYPQLAPEFVYGEYLKFNAHKANKATVKKEFYSNIMKFFESDTPVCDENGEIFWDKSKSIAQVKKVINHHHMNIVKKTEIQKGGFSKETVEPKKDSSKLLPRKNNWDPAKYGGLGSPNVAYTVAFTYEKGKARKRTNALEGITIMEREAFEQSPVLFLKNKGYEQAEIEMKLPKYALFELENGRKRMVASNKEAQKANSFLLPEHLVTLLYHAKQYDEISHKESFDYVNEHHKEFSEVFARVLEFAGKYTLAEKNIEKLEKIYKENQTDDLAKLASSFVNLMQFNAMGAPADFKFFDVTIPRKRYTSLTEIWQSTIIHQSITGLYETRIRMGK

SEQ ID NO: 202 - protein, 1339 aa, Enterococcus faecium
  Enterococcus faecium E1133
MKKEYTIGLDIGTNSVGWSVLTDDYRLVSKKMKVAGNTEKSSTKKNFWGVRLFDEGQTAEARRSKRTARRRLARRRQRILELQKIFAPEILKIDEHFFARLNESFLVLDEKKQSRHPVFATIKQEKSYHQTYPTIYHLRQALADSSEKADIRLVYLAMAHLLKYRGHFLIEGELNTENSSVTETFRQFLSTYNQQFSEADDKQTEKLDEAVDCSFVFTEKMSKTKKAETLLKYFPHEKSNGYLSQFIKLMVGNQGNFKNVFGLEEAKLQFSKETYEEDLEELLEKIGDDYIDLFVQAKNVYDAVLLSEILSDSTKNTRAKLSAGMIRRYDAHKEDLVLLKRFVKENLPKKYRAFFGDNSVNGYAGYIEGHATQEDFYKFVKKELTGIRGSEVFLTKIEQENFLRKQRTFDNGVIPHQIHLTELRAIIANQKKHYPFLKEEQEKLESLLTFKIPYYVGPLAKKQENSPFAWLIRKSEEKIKPWNLPEIVDMEGSAVRFIERMINTDMYIPHNKVLPKNSLLYQKFSIYNELTKVRYQDERGQMNYFSSIEKKEIFHELFEKNRKVTKKDLQEFLYLKYDIKHAELSGIEKAFNASYTTYHDFLTMSENKREMKQWLEDPELASMFEEIIKTLTVFEDREMIKTRLSHHEATLGKHIIKKLTKKHYTGWGRLSKELIQGIRDKQSNKTILDYLINDDDFPHHRNRNFMQLINDDSLSFKKEIKKAQMITDTENLEEIVKELTGSPAIKKGILQSLKIVDEIVGIMGYEPANIVVEMARENQTTGRGLKSSRPRLKALEESLKDFGSQLLKEYPTDNSSLQKDRLYLYYLQNGRDMYTGAPLDIHRLSDYDIDHIIPRSFTTDNSIDNKVLVSSKENRLKKDDVPSEKVVKKMRSFWYDLYSSKLISKRKLDNLTKIKLTEEDKAGFIKRQLVETRQITKHVAGILHHRFNKAEDTNEPIRKVRIITLKSALVSQFRNRFGIYKVREINEYHHAHDAYLNGVVALALLKKYPQLAPEFVYGEYLKFNAHKANKATVKKEFYSNIMKFFESDTPVCDENGEIFWDKSKSIAQVKKVINHHHMNIVKKTEIQKGGFSEETVEPKKDSSKLLPRKNNWDPAKYGGLGSPNVAYTVAFTYEKGKARKRTNALEGITIMEREAFEQSPVLFLKNKGYEQAEIEMKLPKYALFELENGRKRMVASNKEAQKANSFLLPEHLVTLLYHAKQYDEISHKESFDYVNEHHKEFSEVFARVLEFAGKYTLAEKNIEKLEKIYKENQTDDLAKLASSFVNLMQFNAMGAPADFKFFDVTIPRKRYTSLTEIWQSTIIHQSITGLYETRIRMGK

SEQ ID NO: 203 - protein, 1340 aa, Enterococcus faecium
  Enterococcus faecium E3083
MKKEYTIGLDIGTNSVGWSVLTDDYRLVSKKMKVAGNTEKSSTKKNFWGVRLFDEGQTAEARRSKRTARRRLARRRQRILELQKIFAPEILKIDEHFFARLNESFLVLDEKKQSRHPVFATIKQEKSYHQTYPTIYHLRQALADSSEKADIRLVYLAMAHLLKYRGHFLIEGELNTENSSVTETFRQFLSTYNQQFSEADDKQTEKLDEAVDCSFVFTEKMSKTKKAETLLKYFPHEKSNGYLSQFIKLMVGNQGNFKNVFGLEEEAKLQFSKETYEEDLEELLEKIGDDYIDLFVQAKNVYDAVLLSEILSDSTKNTRAKLSAGMIRRYDAHKEDLVLLKRFVKENLPKKYRAFFGDNSVNGYAGYIEGHATQEDFYKFVKKELTGIRGSEVFLTKIEQENFLRKQRTFDNGVIPHQIHLTELRAIIANQKKHYPFLKEEQEKLESLLTFKIPYYVGPLAKKQENSPFAWLIRKSEEKIKPWNLPEIVDMEGSAVRFIERMINTDMYIPHNKVLPKNSLLYQKFSIYNELTKVRYQDERGQMNYFSSIEKKEIFHELFEKNRKVTKKDLQEFLYLKYDIKHAELSGIEKAFNASYTTYHDFLTMSENKREMKQWLEDPELASMFEEIIKTLTVFEDREMIKTRLSHHEATLGKHIIKKLTKKHYTGWGRLSKELIQGIRDKQSNKTILDYLINDDDFPHHRNRNCMQLINDDSLSFKKEIKKAQMITDTENLEEIVKELTGSPAIKKGILQSLKIVDEIVGIMGYEPANIVVEMARENQTTGRGLKSSRPRLKALEESLKDFGSQLLKEYPTDNSSLQKDRLYLYYLQNGRDMYTGAPLDIHRLSDYDIDHIIPRSFTTDNSIDNKVLVSSKENRLKKDDVPSEKVVKKMRSFWYDLYSSKLISKRKLDNLTKIKLTEEDKAGFIKRQLVETRQITKHVAGILHHRFNKAEDTNEPIRKVRIITLKSALVSQFRNRFGIYKVREINEYHHAHDAYLNGVVALALLKKYPQLAPEFVYGEYLKFNAHKANKATVKKEFYSNIMKFFESDTPVCDENGEIFWDKSKSIAQVKKVINHHHMNIVKKTEIQKGGFSKETVEPKKDSSKLLPRKNNWDPTKYGGLGSPNVAYTVAFTYEKGKARKRTNALEGITIMEREAFEQSPVLFLKNKGYEQAEIEMKLPKYALFELENGRKRMVASNKEAQKANSFLLPEHLVTLLYHAKQYDEISHKESFDYVNEHHKEFSEVFARVLEFAGKYTLAEKNIEKLEKIYKENQTDDLAKLASSFVNLMQFNAMGAPADFKFFDVTIPRKRYTSLTEIWQSTIIHQSITGLYETRIRMGK

SEQ ID NO: 204 - protein, 1340 aa, Enterococcus faecium
  Enterococcus faecium PC4.1
MKKEYTIGLDIGTNSVGWSVLTDDYRLVSKKMKVAGNTEKSSTKKNFWGVRLFDEGQTAEARRSKRTARRRLARRRQRILELQKIFAPEILKIDEHFFARLNESFLVLDEKKQSRHPVFATIKQEKSYHQTYPTIYHLRQALADSSEKADIRLVYLAMAHLLKYRGHFLIEGELNTENSSVTETFRQFLSTYNQQFSEADDKQTEKLDEAVDCSFVFTEKMSKTKKAETLLKYFPHEKSNGYLSQFIKLMVGNQGNFKNVFGLEEEAKLQFSKETYEEDLEELLEKIGDDYIDLFVQAKNVYDAVLLSEILSDSTKNTRAKLSAGMIRRYDAHKEDLVLLKRFVKENLPKKYRAFFGDNSVNGYAGYIEGHATQEDFYKFVKKELTGIRGSEVFLTKIEQENFLRKQRTFDNGVIPHQIHLTELRAIIANQKKHYPFLKEEQEKLESLLTFKIPYYVGPLAKKQENSPFAWLIRKSEEKIKPWNLPEIVDMEGSAVRFIERMINTDMYIPHNKVLPKNSLLYQKFSIYNELTKVRYQDERGQMNYFSSIEKKEIFHELFEKNRKVTKKDLQEFLYLKYDIKHAELSGIEKAFNASYTTYHDFLTMSENKREMKQWLEDPELASMFEEIIKTLTVFEDREMIKTRLSHHEATLGKHIIKKLTKKHYTGWGRLSKELIQGIRDKQSNKTILDYLINDDDFPHHRNRNFMQLINDDSLSFKKEIKKAQMITDTENLEEIVKELTGSPAIKKGILQSLKIVDEIVGIMGYEPANIVVEMARENQTTGRGLKSSRPRLKALEESLKDFGSQLLKEYPTDNSSLQKDRLYLYYLQNGRDMYTGAPLDIHRLSDYDIDHIIPRSFTTDNSIDNKVLVSSKENRLKKDDVPSEKVVKKMRSFWYDLYSSKLISKRKLDNLTKIKLTEEDKAGFIKRQLVETRQITKHVAGILHHRFNKAEDTNEPIRKVRIITLKSALVSQFRNRFGIYKVREINEYHHAHDAYLNGVVALALLKKYPQLAPEFVYGEYLKFNAHKANKATVKKEFYSNIMKFFESDTPVCDENGEIFWDKSKSIAQVKKVINHHHMNIVKKTEIQKGGFSKETVEPKKDSSKLLPRKNNWDPAKYGGLGSPNVAYTVAFTYEKGKARKRTNALEGITIMEREAFEQSPVLFLKNKGYEQAEIEMKLPKYALFELENGRKRMVASNKEAQKANSFLLPEHLVTLLYHAKQYDEISHKESFDYVNEHHKEFSEVFARVLEFAGKYTLAEKNIEKLEKIYKENQTDDLAKLASSFVNLMQFNAMGAPADFKFFDVTIPRKRYTSLTEIWQSTIIHQSITGLYETRIRMGK

SEQ ID NO: 205 - protein, 1340 aa, Enterococcus faecium
  Enterococcus faecium TX1330
MKKEYTIGLDIGTNSVGWSVLTDDYRLVSKKMKVAGNTEKSSTKKNFWGVRLFDEGQTAEARRSKRTARRRLARRRQRILELQKIFAPEILKIDEHFFARLNESFLVLDEKKQSRHPVFATIKQEKSYHQTYPTIYHLRQALADSSEKADIRLVYLAMAHLLKYRGHFLIEGELNTENSSVTETFRQFLSTYNQQFSEADDKQTEKLDEAVDCSFVFTEKMSKTKKAETLLKYFPHEKSNGYLSQFIKLMVGNQGNFKNVFGLEEEAKLQFSKETYEEDLEELLEKIGDDYIDLFVQAKNVYDAVLLSEILSDSTKNTRAKLSAGMIRRYDAHKEDLVLLKRFVKENLPKKYRAFFGDNSVNGYAGYIEGHATQEDFYKFVKKELTGIRGSEVFLTKIEQENFLRKQRTFDNGVIPHQIHLTELRAIIANQKKHYPFLKEEQEKLESLLTFKIPYYVGPLAKKQENSPFAWLIRKSEEKIKPWNLPEIVDMEGSAVRFIERMNNTDMYIPHNKVLPKNSLLYQKFSIYNELTKVRYQDERGQMNYFSSIEKKEIFHELFEKNRKVTKKDLQEFLYLKYDIKHAELSGIEKAFNASYTTYHDFLTMSENKREMKQWLEDPELASMFEEIIKTLTVFEDREMIKTRLSHHEATLGKHIIKKLTKKHYTGWGRLSKELIQGIRDKQSNKTILDYLINDDDFPHHRNRNFMQLINDDSLSFKKEIKKAQMITDTENLEEIVKELTGSPAIKKGILQSLKIVDEIVGIMGYEPANIVVEMARENQTTGRGLKSSRPRLKALEESLKDFGSQLLKEYPTDNSSLQKDRLYLYYLQNGRDMYTGAPLDIHRLSDYDIDHIIPRSFTTDNSIDNKVLVSSKENRLKKDDVPSEKVVKKMRSFWYDLYSSKLISKRKLDNLTKIKLTEEDKAGFIKRQLVETRQITKHVAGILHHRFNKAEDTNEPIRKVRIITLKSALVSQFRNRFGIYKVREINEYHHAHDAYLNGVVALALLKKYPQLAPEFVYGEYLKFNAHKANKATVKKEFYSNIMKFFESDTPVCDENGEIFWDKSKSIAQVKKVINHHHMNIVKKTEIQKGGFSKETVEPKKDSSKLLPRKNNWDPAKYGGLGSPNVAYTVAFTYEKGKARKRTNALEGITIMEREAFEQSPVLFLKNKGYEQAEIEMKLPKYALFELENGRKRMVASNKEAQKANSFLLPEHLVTLLYHAKQYDEISHKESFDYVNEHHKEFSEVFARVLEFAGKYTLAEKNIEKLEKIYKENQTDDLAKLASSFVNLMQFNAMGAPADFKFFDVTIPRKRYTSLTEIWQSTIIHQSITGLYETRIRMGK

SEQ ID NO: 206 - protein, 1340 aa, Enterococcus faecium
  Enterococcus faecium TX1337RF
MKKEYTIGLDIGTNSVGWSVLTDDYRLVSKKMKVAGNTEKSSTKKNFWGVRLFDEGQTAEARRSKRTARRRLARRRQRILELQKIFAPEILKIDEHFFARLNESFLVLDEKKQSRHPVFATIKQEKSYHQTYPTIYHLRQALADSSEKADIRLVYLAMAHLLKYRGHFLIEGELNTENSSVTETFRQFLSTYNQQFSEADDKQTEKLDEAVDCSFVFTEKMSKTKKAETLLKYFPHEKSNGYLSQFIKLMVGNQGNFKNVFGLEEEAKLQFSKETYEEDLEELLEKIGDDYIDLFVQAKNVYDAVLLSEILSDSTKNTRAKLSAGMIRRYDAHKEDLVLLKRFVKENLPKKYRAFFGDNSVNGYAGYIEGHATQEDFYKFVKKELTGIRGSEVFLTKIEQENFLRKQRTFDNGVIPHQIHLTELRAIIANQKKHYPFLKEEQEKLESLLTFKIPYYVGPLAKKQENSPFAWLIRKSEEKIKPWNLPEIVDMEGSAVRFIERMINTDMYMPHNKVLPKNSLLYQKFSIYNELTKVRYQDERGQMNYFSSIEKKEIFHELFEKNRKVTKKDLQEFLYLKYDIKHAELSGIEKAFNASYTTYHDFLTMSENKREMKQWLEDPELASMFEEIIKTLTVFEDREMIKTRLSHHEATLGKHIIKKLTKKHYTGWGRLSKELIQGIRDKQSNKTILDYLINDDDFPHHRNRNFMQLINDDSLSFKKEIKKAQMITDTENLEEIVKELTGSPAIKKGILQSLKIVDEIVGIMGYEPANIVVEMARENQTTGRGLKSSRPRLKALEESLKDFGSQLLKEYPTDNSSLQKDRLYLYYLQNGRDMYTGAPLDIHRLSDYDIDHIIPRSFTTDNSIDNKVLVSSKENRLKKDDVPSEKVVKKMRSFWYDLYSSKLISKRKLDNLTKIKLTEEDKAGFIKRQLVETRQITKHVAGILHHRFNKAEDTNEPIRKVRIITLKSALVSQFRNRFGIYKVREINEYHHAHDAYLNGVVALALLKKYPQLAPEFVYGEYLKFNAHKANKATVKKEFYSNIMKFFESDTPVCDENGEIFWDKSKSIAQVKKVINHHHMNIVKKTEIQKGGFSKETVEPKKDSSKLLPRKNNWDPAKYGGLGSPNVAYTVAFTYEKGKARKRTNALEGITIMEREAFEQSPVLFLKNKGYEQAEIEMKLPKYALFELENGRKRMVASNKEAQKANSFLLPEHLVTLLYHAKQYDEISHKESFDYVNEHHKEFSEVFARVLEFAGKYTLAEKNIEKLEKIYKENQTDDLAKLASSFVNLMQFNAMGAPADFKFFDVTIPRKRYTSLTEIWQSTIIHQSITGLYETRIRMGK

SEQ ID NO: 207 - protein, 1336 aa, Enterococcus hirae
MTKDYTIGLDIGTNSVGWAVLTDDYQLMKRKMSVHGNTEKKKIKKNFWGARLFDEGQTAEFRRTKRTNRRRLARRKYRLSKLQDLFAEELCKQDDCFFVRLEESFLVPEEKQYKPASIFPTLEEEKEYYQKYPTIYHLRQKLVDSTEKEDLRLVYLALAHLLKYRGHFLFEGDLDTENTSIEESFRVFLEQYSKQSDQPLIVHQPVLTILTDKLSKTKKVEEILKYYPTEKINSFFAQCLKLIVGNQANFKRIFDLEAEVKLQFSKETYEEDLESLLEKIGDEYLDIFLQAKKVHDAILLSEIISSTVKHTKAKLSSGMVERYERHKADLAKFKQFVKENVPQKATVFFKDTTKNGYAGYIKGKTTQEEFYKFVKKELSGVVGSEPFLEKIDQETFLLKQRTYTNGVIPHQVHLIELKAIIDQQKQHYPFLEEAGPKIIALFKFRIPYYVGPLAKEQEASSFAWIERKTAEKINPWNFSEVVDIEKSAMRFIQRMTKQDTYLPTEKVLPKNSLLYQKYMIFNELTKVSYKDERGVKQYFSGDEKQQIFKQLFQKERGKITVKKLQNFLYTHYHIENAQIFGIEKAFNASYSTYHDFMKLAKTNQKAMQEWLEQPEMEPIFEDIVKILTIFEDRQMIKHQLSKYQEVFGEKLLKEFARKHYTGWGRFSAKLIHGIRDRKTNKTILDYLINDDDVPANRNRNLMQLINDEHLSFKEEIAKATVFSKHKSLVDVIQDLPGSPAIKKGIWQSLKIVEELIAIIGYKPKNIVIEMARENQKTHRTSPRLKALENGLKQIGSTLLKEQPTDNKALQKERLYLYYLQNGRDMYTGEPLEIENLHQYEVDHIIPRSFIVDNSIDNKVLVASKQNQKKRDDVPKKQIVNEQRIFWNQLKEAKLISPKKYAYLTKIELTPEDKARFIQRQLVETRQITKHVANILHQSFNQEEEGTDCDGVQIITLKATLTSQFRQTFGLYKVREINPHHHAHDAYLNGFIANVLLKRYPKLAPEFVYGKYVKYSLARENKATAKKEFYSNILKFLESDEPFCDENGEIYWEKSHHLPRIKKVLSSHQVNVVKKVEQQKGGFYKETVNSKEKPDKLIERKNNWDVTKYGGFGSPVIAYAIAFVYAKGKTQKKTRAIEGITIMEQAAFEKDPTTFLKEKGFPQVTEFIKLPKYTLFEFDNGRRRFLASHKESQKGNPFILSDQLVTLLYHAQHYDKITYQESFDYVNTHLSDFSAILTEVLAFAEKYTLADKNIERIQELYEENKYGETSMIAQSFLQLLQFNAIGAPADFKFFGVTIPRKRYTSLTEIWDATIIYQSVTGLYETRIRMGDLWAGEQ

SEQ ID NO: 208 - protein, 1330 aa, Enterococcus italicus
  Enterococcus italicus DSM 15952
MKNDYTIGLDIGTNSVGYSVVTDDYKVISKKMNVFGNTEKKSIKKNFWGVRLFESGQTAQEARMKRTSRRRIARRKNRICYLQEIFQPEMNHLDNNFFYRLNESFLVADDAKYDKHPIFGTLDEEIHFHEQFPTIYHLRKYLADGDEKADLRLVYLAIAHIIKFRGNFLIEGELNTENNSVIELSKVFVQLYNQTLSELEGFQFIDESIDFSEVLTQQLSKSERADNVLKLFPDEKGTGIFAQFIKLIVGNQGNFKKVFQLEEDQKLQLSTDDYEENIENLLAIIGDEYGDIFVAAQNLYQAILLAGILTSTEKTRAKLSASMIQRYEEHAKDLKLLKRFVKEHIPDKYAEIFNDATKNGYAGYIDGKTKEEEFYKYLKTTLVQKSGYQYFIEKIEQENFLRKQRIYDNGVIPHQVHAEELRAILRKQEKYYSFLKENHEKIEQIFKVRIPYYVGPLAKHNEQSRFAWNIRKSDEPIRPWNMNDVVDENASAVAFIERMTIKDIYLNENVLPRHSLIYEKFTVFNELTKVLYADDRGVFQRFSAEEKEDIFEKLFKSERKVTKKKLENYLRIELSISSPSVKGIEEQFNANFGTYLDLKKFDELHPYLDDEKYQDTLEEVIKVLTVFEDRSMIQNQLEQLPLNLSTKTIKALSRRKYTGWGRLSARLIDGIHDKNSGKTILDYLIEDESDSYIVNRNFMQLINDDHLSFKKIIEDSQPYKEQQSAEEIVSELSGSPAIKKGILQSLKIVDELVAIMGYKPKNIVVEMARENQTTGRGKQNSKPRLKGIENGLKEFSDSVLKGSSIDNKQLQNDRLYLYYLQNGKDMYTGHELDIDHLSTYDIDHIIPQSFLTDNSIDNRVLTTSKSNRGKSDNVPSEEVVRKMDRFWRKLLNAKLISERKYTNLTKKELTESDKAGFLKRQLVETRQITKHVATILDSKFNEDSNNRDVQIITLKSALVSEFRKTFNLYKVREINDLHHAHDAYLNAVVALSLLRVYPQLKPEFVYGEYGKNSIHDQNKATIKKQFYSNITRYFASKDYIINDDGEILWNKQETIAQVIKTLGMHQVNVVKKVEIQKGGFSKESIQPKGESQKLIRRKQQWNTKKYGGFDSPVVAYAILLSFDKGKRKARSFKIVGITIQDRESFEGNPILYLSKKDYHNPKVEAILPKYSLFEFENGRRRMVASASETQKGNQLIIPGHLMELLYHSKKIINGKNSDSVSYIQNNKEKFREIFEYIVDFSSKYISADANLNKIEKIFENNFHKASEQEIAKSFINLLTFTAMGAPADFEFFGEKIPRKRYVSISEIIDAVFIHQSITGLYETRVRLTEV

SEQ ID NO: 209 - protein, 1096 aa, Eubacterium dolichum
  Eubacterium dolichum DSM 3991
MMEVFMGRLVLGLDIGITSVGFGIIDLDESEIVDYGVRLFKEGTAAENETRRTKRGGRRLKRRRVTRREDMLHLLKQAGIISTSFHPLNNPYDVRVKGLNERLNGEELATALLHLCKHRGSSVETIEDDEAKAKEAGETKKVLSMNDQLLKSGKYVCEIQKERLRTNGHIRGHENNFKTRAYVDEAFQILSHQDLSNELKSAIITIISRKRMYYDGPGGPLSPTPYGRYTYFGQKEPIDLIEKMRGKCSLFPNEPRAPKLAYSAELFNLLNDLNNLSIEGEKLTSEQKAMILKIVHEKGKITPKQLAKEVGVSLEQIRGFRIDTKGSPLLSELTGYKMIREVLEKSNDEHLEDHVFYDEIAEILTKTKDIEGRKKQISELSSDLNEESVHQLAGLTKFTAYHSLSFKALRLINEEMLKTELNQMQSITLFGLKQNNELSVKGMKNIQADDTAILSPVAKRAQRETFKVVNRLREIYGEFDSIVVEMAREKNSEEQRKAIRERQKFFEMRNKQVADIIGDDRKINAKLREKLVLYQEQDGKTAYSLEPIDLKLLIDDPNAYEVDHIIPISISLDDSITNKVLVTHRENQEKGNLTPISAFVKGRFTKGSLAQYKAYCLKLKEKNIKTNKGYRKKVEQYLLNENDIYKYDIQKEFINRNLVDTSYASRVVLNTLTTYFKQNEIPTKVFTVKGSLTNAFRRKINLKKDRDEDYGHHAIDALIIASMPKMRLLSTIFSRYKIEDIYDESTGEVFSSGDDSMYYDDRYFAFIASLKAIKVRKFSHKIDTKPNRSVADETIYSTRVIDGKEKVVKKYKDIYDPKFTALAEDILNNAYQEKYLMALHDPQTFDQIVKVVNYYFEEMSKSEKYFTKDKKGRIKISGMNPLSLYRDEHGMLKKYSKKGDGPAITQMKYFDGVLGNHIDISAHYQVRDKKVVLQQISPYRTDFYYSKENGYKFVTIRYKDVRWSEKKKKYVIDQQDYAMKKAEKKIDDTYEFQFSMHRDELIGITKAEGEALIYPDETWHNFNFFFHAGETPEILKFTATNNDKSNKIEVKPIHCYCKMRLMPTISKKIVRIDKYATDVVGNLYKVKKNTLKFEFD

SEQ ID NO: 210 - protein, 1114 aa, Eubacterium rectale
MNYTEKEKLFMKYILALDIGIASVGWAILDKESETVIEAGSNIFPEASAADNQLRRDMRGAKRNNRRLKTRINDFIKLWENNNLSIPQFKSTEIVGLKVRAITEEITLDELYLILYSYLKHRGISYLEDALDDTVSGSSAYANGLKLNAKELETHYPCEIQQERLNTIGKYRGQSQIINENGEVLDLSNVFTIGAYRKEIQRVFEIQKKYHPELTDEFCDGYMLIFNRKRKYYEGPGNEKSRTDYGRFTTKLDANGNYITEDNIFEKLIGKCSVYPDELRAAAASYTAQEYNVLNDLNNLTINGRKLEENEKHEIVERIKSSNTINMRKIISDCMGENIDDFAGARIDKSGKEIFHKFEVYNKMRKALLEIGIDISNYSREELDEIGYIMTINTDKEAMMEAFQKSWIDLSDDVKQCLINMRKTNGALFNKWQSFSLKIMNELIPEMYAQPKEQMTLLTEMGVTKGTQEEFAGLKYIPVDVVSEDIFNPVVRRSVRISFKILNAVLKKYKALDTIVIEMPRDRNSEEQKKRINDSQKLNEKEMEYIEKKLAVTYGIKLSPSDFSSQKQLSLKLKLWNEQDGICLYSGKTIDPNDIINNPQLFEIDHIIPRSISFDDARSNKVLVYRSENQKKGNQTPYYYLTHSHSEWSFEQYKATVMNLSKKKEYAISRKKIQNLLYSEDITKMDVLKGFINRNINDTSYASRLVLNTIQNFFMANEADTKVKVIKGSYTHQMRCNLKLDKNRDESYSHHAVDAMLIGYSELGYEAYHKLQGEFIDFETGEILRKDMWDENMSDEVYADYLYGKKWANIRNEVVKAEKNVKYWHYVMRKSNRGLCNQTIRGTREYDGKQYKINKLDIRTKEGIKVFAKLAFSKKDSDRERLLVYLNDRRTFDDLCKIYEDYSDAANPFVQYEKETGDIIRKYSKKHNGPRIDKLKYKDGEVGACIDISHKYGFEKGSKKVILESLVPYRMDVYYKEENHSYYLVGVKQSDIKFEKGRNVIDEEAYARILVNEKMIQPGQSRADLENLGFKFKLSFYKNDIIEYEKDGKIYTERLVSRTMPKQRNYIETKPIDKAKFEKQNLVGLGKTKFIKKYRYDILGNKYSCSEEKFTSFC

SEQ ID NO: 211 - protein, 1391 aa, Eubacterium sp.
  Eubacterium sp. AS15
MENKQYYIGLDVGTNSVGWAVTDTSYNLLRAKGKDMWGARLFDEAKTAVERRTKRTSRRRSEREKARKAMLKELFADEINKVDPNFFIRLEESKFFLDDRSENNRQRYTLFNDAKFTDKDYYEKYKTIFHLRSALINSDEKFDVRLVFLAILNLFSHRGHFLNASLKGDGEIQGVDIFYNDLYEVCEEFEIDLPQISNIDNFEKILSQKGKSRTKILEELSEELSISKKEKIKYSLLKLICGMKIKVVDIYADEDIQEDDKKKDLGFRESDYEKSSLEVKEIIGDDHFELIERAKAVHDIGLLANIIGNSKYLCEARVEAYDNHHKDLQKIKELLKKYDIKAYTDMFRKMTDKNYSAYVGSVNSNIAKERRSVDNRKIEDLYEYIKKIALKNISDDNEDKIEILKKIETGEFLKKQLTASNGVIPNQLQSRELRAILKKAENYLPFLKEKGEKNLTVSEMIIQLFEFQIPYYVGPLDKNPKKDKNANSWAVIPSGGRILPWNFEDKVDVKGSRKEFIEKMVRKCTYLSEEHTLPKQSLLYEKFMVLNEINNIKIDGEKISVEAKQKIYNDLFMKGKKVSQKAIKQELISLNIMSKDSVLSGIDTVCNAYLSSIAKFRGVFDENVNNQSTIDMIEDIIFLKTVYSDEKRFVKEEIVEKYGDEIDKDKIKRILGFKFSNWGNISKSFLELEGADVGTGEIRSIIQSLWETNFNLMELLSSRFTYMDELEKRVKKLEKPLSEWTIEDLDDMYLSSPVKRMIWQSMKIVDEIQTVIGYAPKRIFVEMTRSEGEKVRTKSRKDRLKELYSAIKEDSKQWVKELDAKDESYFRSKKMYLYYLQKGRCMYSGEVIELDKLMDDNLYDIDHIYPRSFVKDDSLDNLVLVKKEINNRKQNDPITPQIQASCQGFWKVLHEQGFISNEKYSRLTRKTQEFSDEEKLSFINRQIVETGQATKCMAQILQKSMGEDVDVVFSKARLVSEFRHKFELFKSRLINDFHHANDAYLNIVVGNSYFVKFTRNPANFIKDARKNPDNPAYKYHMDRFFERDVKSKSEVAWIGQSEGNAGTIAIVKKTMSKNSPLITKKVEEGHGSITKETIVGVKEIKFGRNKVEKADKTPKKANLQAYRPIKTSDERLCNILRYGGRTSISISGYCLVEYVKKRKTIRSLEAIPVYLGRKDSLSEEKLLNYFRYNLNDGGKDSVSDIRLCLPFISTNSLVKIDGYLYYLGGKNDDRIQLYNAYQLKMKKEEVEYIRKIEKAVSMSKFDEIDREKNPVLTEEKNIELYNKIQDKFENTVFSKRMSLVKYNKKDLSFGDFLKNKKSKFEEIDLEKQCKVLYNIIFNLSNLKEVDLSDIGGSKSTGKCRCKKNITNYKEFKLIQQSITGLYSCEKDLMTI

SEQ ID NO: 212 - protein, 1107 aa, Eubacterium ventriosum
  Eubacterium ventriosum ATCC 27560
MGYTVGLDIGVASVGVAVLDENDNIVEAVSNIFDEADTSNNKVRRTLREGRRTKRRQKTRIEDFKQLWETSGYIIPHKLHLNIIELRNKGLTELLSLDELYCVLLSMLKHRGISYLEDADDGEKGNAYKKGLAFNEKQLKEKMPCEIQLERMKKYGKYHGEFIIEINDEKEYQSNVFTTKAYKKELEKIFETQRCNGNKINTKFIKKYMEIYERKREYYIGPGNEKSRTDYGIYTTRTDEEGNFIDEKNIFGKLIGKCSVYPEEYRASSASYTAQEFNLLNDLNNLKINNEKLTEFQKKEIVEIIKDASSVNMRKIIKKVIDEDIEQYSGARIDKKGKEIYHTFEIYRKLKKELKTINVDIDSFTREELDKTMDILTLNTERESIVKAFDEQKFVYEENLIKKLIEFRKNNQRLFSGWHSFSYKAMLQLIPVMYKEPKEQMQLLTEMNVFKSKKEKYVNYKYIPENEVVKEIYNPVVVKSIRTTVKILNALIKKYGYPESVVIEMPRDKNSDDEKEKIDMNQKKNQEEYEKILNKIYDEKGIEITNKDYKKQKKLVLKLKLWNEQEGLCLYSGKKIAIEDLLNHPEFFEIDHIIPKSISLDDSRSNKVLVYKTENSIKENDTPYHYLTRINGKWGFDEYKANVLELRRRGKIDDKKVNNLLCMEDITKIDVVKGFINRNLNDTRYASRVVLNEMQSFFESRKYCNTKVKVIRGSLTYQMRQDLHLKKNREESYSHHAVDAMLIAFSQKGYEAYRKIQKDCYDFETGEILDKEKWNKYIDDDEFDDILYKERMNEIRKKIIEAEEKVKYNYKIDKKCNRGLCNQTIYGTREKDGKIHKISSYNIYDDKECNSLKKMINSGKGSDLLMYNNDPKTYRDMLKILETYSSEKNPFVAYNKETGDYFRKYSKNHNGPKVEKVKYYSGQINSCIDISHKYGHAKNSKKVVLVSLNPYRTDVYYDNDTGKYYLVGVKYNHIKCVGNKYVIDSETYNELLRKEGVLNSDENLEDLNSKNITYKFSLYKNDIIQYEKGGEYYTERFLSRIKEQKNLIETKPINKPNFQRKNKKGEWENTRNQIALAKTKYVGKLVTDVLGNCYIVNMEKFSLVVDK

SEQ ID NO: 213 - protein, 1391 aa, Eubacterium yurii
  Eubacterium yurii subsp. margaretiae ATCC 43715
MENKQYYIGLDVGTNSVGWAVTDTSYNLLRAKGKDMWGARLFEKANTAAERRTKRTSRRRSEREKARKAMLKELFADEINRVDPSFFIRLEESKFFLDDRSENNRQRYTLFNDATFTDKDYYEKYKTIFHLRSALINSDEKFDVRLVFLAILNLFSHRGHFLNASLKGDGDIQGMDVFYNDLVESCEYFEIELPRITNIDNFEKILSQKGKSRTKILEELSEELSISKKDKSKYNLIKLISGLEASVVELYNIEDIQDENKKIKIGFRESDYEESSLKVKEIIGDEYFDLVERAKSVHDMGLLSNIIGNSKYLCEARVEAYENHHKDLLKIKELLKKYDKKAYNDMFRKMTDKNYSAYVGSVNSNIAKERRSVDKRKIEDLYKYIEDTALKNIPDDNKDKIEILEKIKLGEFLKKQLTASNGVIPNQLQSRELRAILKKAENYLPFLKEKGEKNLTVSEMIIQLFEFQIPYYVGPLDKNPKKDNKANSWAKIKQGGRILPWNFEDKVDVKGSRKEFIEKMVRKCTYISDEHTLPKQSLLYEKFMVLNEINNIKIDGEKISVEAKQKIYNDLFVKGKKVSQKDIKKELISLNIMDKDSVLSGTDTVCNAYLSSIGKFTGVFKEEINKQSIVDMIEDIIFLKTVYGDEKRFVKEEIVEKYGDEIDKDKIKRILGFKFSNWGNLSKSFLELEGADVGTGEVRSIIQSLWETNFNLMELLSSRFTYMDELEKRVKKLEKPLSEWTIEDLDDMYLSSPVKRMIWQSMKIVDEIQTVIGYAPKRIFVEMTRSEGEKVRTKSRKDRLKELYNGIKEDSKQWVKELDSKDESYFRSKKMYLYYLQKGRCMYSGEVIELDKLMDDNLYDIDHIYPRSFVKDDSLDNLVLVKKEINNRKQNDPITPQIQASCQGFWKILHDQGFMSNEKYSRLTRKTQEFSDEEKLSFINRQIVETGQATKCMAQILQKSMGEDVDVVFSKARLVSEFRHKFELFKSRLINDFHHANDAYLNIVVGNSYFVKFTRNPANFIKDARKNPDNPVYKYHMDRFFERDVKSKSEVAWIGQSEGNSGTIVIVKKTMAKNSPLITKKVEEGHGSITKETIVGVKEIKFGRNKVEKADKTPKKPNLQAYRPIKTSDERLCNILRYGGRTSISISGYCLVEYVKKRKTIRSLEAIPVYLGRKDSLSEEKLLNYFRYNLNDGGKDSVSDIRLCLPFISTNSLVKIDGYLYYLGGKNDDRIQLYNAYQLKMKKEEVEYIRKIEKAVSMSKFDEIDREKNPVLTEEKNIELYNKIQDKFENTVFSKRMSLVKYNKKDLSFGDFLKNKKSKFEEIDLEKQCKVLYNIIFNLSNLKEVDLSDIGGSKSTGKCRCKKNITNYKEFKLIQQSITGLYSCEKDLMTI

SEQ ID NO: 214 - protein, 1142 aa, Facklamia hominis
  Facklamia hominis CCUG 36813
MYSVGLDIGIASCGYSIINDVNGNIVELGTLLFKSRNSDNNEERRTNRGSRRLINRRRTRLDDGKKLLAEKGFKQDSKLKHVCPYELRVKGLHEKLTQGEIYKVVLHILKKRGISYLDESDENSSGIDGASYKDQVNLNLNLQKELTPGQIQLKRLKENGRIKSGVTFENGYQLNVFSVSAYANELNKILTKQSEYYSEIDQIWIDRFTKNGYRKEAGLVYRKRPYYDGPGNEKNNSIYGRWANFKEDGHPKENIFDQLIGLDSVDSTQVRASASTLTAQKYNLLNDLNNLTIIEDDRKFTTDEKVSIINYLMTQDITRFGPKELAKFYQLEVDQIRGWRIDNKGNPEIHSLKVYRDWKKIFNTSSIDLTSIQTWVVDELANVITLNTEIPSTLATLKIKIPDIDQQILNFVENNFYELKKKTSKNSWHSFSLKTLNILIPELLNTSEEQNTILERLNLKFDLKNKYAEKNQIPVKELLEQIYNPTVTKSVHQSIKLFNEIIEKYGKNNISYVTIEMPRDKNDQDQKDTIKRINKLNSERKNDSEKYFLERSGWDTIRFESALKKPRFAEKLLFYYEQKGKCAYSGQDILAESLLNESCEVDHIIPLSISFDDSIHNKVLVTASSNQEKGQRTPYMAFIDGAKLGQSWDDFVAWVNSCGFHRKKVQNLLYEENIFNPDVQRGFVSRNLNDTRYASRIVLNAIQSFFYKQKDLTKVKVVNGSFTHTLRKKWGSSLDKNRDTYHHHAVDATLCAVTPFINIVKYEFFEEDGIKYMVDLTTGEKVAYSDYKKMKFYDKRAYVPIWDGFIKQLTPANLYPKIKFSHQVDSKWNRKISDATIYSTRKIVETKINKKGVAKETVKDIVIDKIKDIYTPEGWRKFKEKQDKLLMKNFDEKTYNKLIKIAKEYPEKKEVQTSNGKVSLVEVSPFKMYCEEQNVPAIRKYSKKGNGPYIRSLKFYDKELGKHINITKDSYGNDIERTIRNKKIILKNQNSWRTDVYYNSVNNCYELLGIKYCHLKFYRGKYGIPKSIYDELKKEDEISSESVFKFSLYRHDRVRFEKDGEYIEALFGSKNESNKNYLELSPIDKNKWLSKENVKFFGEVAASGRFIKGLKPGIKVIKQSTDYMGHVYAIHQEKLKFVLSDA

SEQ ID NO: 215 - protein, 1512 aa, Fibrobacter succinogenes
MKKILGLDLGTNSIGWAVVNADEITRDDGSRYLKPNGISAAGSRIIPMSADILGDFEKGNSISQTAERTRMRMARRLHERALLRRERLLRVLNLLDFLPKHFADKIDRYGKFTDDSEPKLAWRKNTEGKYEFIFQDAFNEMLAEFKDKQPEIVEEGKKIPYDWTIYYLRKKALEKALSKEELSWILLQFNQKRGYYQLRGEEEEIPQDKKIEYLAQKVVKVEATDQKKGDDVWYNVYLENGMIYRRTSKAPLDWEGKVKEFIVTTEVENDGETPKKDKEGNIKRSFRAPKEDDWTLLKKKTEADIENSHKTVGCYIYDSLLNNPKQKIIGKLVRTVERKFYKEELTQILKKQVELIPELRDDNLYKQCIEELYPINEAHRNTIAKTDFANLFINDILFYQRPLKSKKSQIDNCPYEERIFIDSKTGEKKKVPVKCIAKSNPLFQEFRLWQFIQNLRIYQREKEIDGKLLTDIDITSECLKSEEDYVRLFDWLNDRETIEQEDLLKHLFNTKKSKNKENPYRWNYVEDKVYPCNETRATILKGFSKCGINASVLSPELEMALWHILYSVEDKKEIETALTHFAQKQGWNDDFAKVFSKAKPFKKDYGSYSEKAIKKLLSLMRMGKYWNQDNIDKNTLDRIDKIINGEYDEKISNRVRDNAINLKDISDFRGLPVWLACYIVYDRHSEAKDCTKWNSPEEIDSYLKKFKQHSLRNPIVEQVVTETLRTVRDIWIQEEQIDEIHLELGRDLKNPADKRKKMSENILKNENTNLRIKAMLMEFMNPSMGIENVRPYSPSQQDILRIYEENALDNLTKDDKDFDFISKISKQAQPSKTDIIRYKCWLEQKYRSPYTGKTISLSKLFTPAYEIEHVIPQSLYFDDSFSNKVICEAEVNKLKDRQLGYKFIAEHHGEKVQLSQGEVVEILSVDAYEKFVKENYANNRIKMKKLLMESIPDEFIERQLNDSRYISKVVKGLLSNIVREKIDDENYEPEAVSKNLISCNGAITDRLKKDWGMNDVWNSIILPRFIRMNQITGKDCFTTTNAEGHLIPQMPLELQKGFNKKRIDHRHHAMDAIVIACTTRDHVNLLNNEAAHSKFNATRYQLQRKLRRFEKAVIDGKEREVAKEFLKPWDSFSSDSKNILENIIVSFKQNQRVINKTTNAFLHFDENGKKTFIKQGKGDSWAIRKSMHKDTVFGEINLRKVRSVSLNEAIKVPERVLNKKIKEKILELKNNKIDAKNIKKYIEENHTGGYGIDSSKIDVFYFTKETKERFFATRKTLDTSFNQAKIKDSIADSGIQKILLAHLKSKNGDAEQAFSPDGIDEMNKNIVELNNGKFHQPILKVRVYEKADKFAVGQKGNKKVKFVEAAKGTNLFFAIFEKDGKRSYLTIPLNVMIDCQKQYGNQWKNNIEAYLKEKELVEKDVKLQFILSPNDLVYLPTEGSIDKKRIYKVVSFTNNRLYAIPYAIAKSIVDKNEFTQLNKIEFTDNKESIKDACVPVIIDRLGNVIEFNGKRL

SEQ ID NO: 216 - protein, 1365 aa, Filifactor alocis
MTKEYYLGLDVGTNSVGWAVTDSQYNLCKFKKKDMWGIRLFESANTAKDRRLQRGNRRRLERKKQRIDLLQEIFSPEICKIDPTFFIRLNESRLHLEDKSNDFKYPLFIEKDYSDIEYYKEFPTIFHLRKHLIESEEKQDIRLIYLALHNIIKTRGHFLIDGDLQSAKQLRPILDTFLLSLQEEQNLSVSLSENQKDEYEEILKNRSIAKSEKVKKLKNLFEISDELEKEEKKAQSAVIENFCKFIVGNKGDVCKFLRVSKEELEIDSFSFSEGKYEDDIVKNLEEKVPEKVYLFEQMKAMYDWNILVDILETEEYISFAKVKQYEKHKTNLRLLRDIILKYCTKDEYNRMFNDEKEAGSYTAYVGKLKKNNKKYWIEKKRNPEEFYKSLGKLLDKIEPLKEDLEVLTMMIEECKNHTLLPIQKNKDNGVIPHQVHEVELKKILENAKKYYSFLTETDKDGYSVVQKIESIFRFRIPYYVGPLSTRHQEKGSNVWMVRKPGREDRIYPWNMEEIIDFEKSNENFITRMTNKCTYLIGEDVLPKHSLLYSKYMVLNELNNVKVRGKKLPTSLKQKVFEDLFENKSKVTGKNLLEYLQIQDKDIQIDDLSGFDKDFKTSLKSYLDFKKQIFGEEIEKESIQNMIEDIIKWITIYGNDKEMLKRVIRANYSNQLTEEQMKKITGFQYSGWGNFSKMFLKGISGSDVSTGETFDIITAMWETDNNLMQILSKKFTFMDNVEDFNSGKVGKIDKITYDSTVKEMFLSPENKRAVWQTIQVAEEIKKVMGCEPKKIFIEMARGGEKVKKRTKSRKAQLLELYAACEEDCRELIKEIEDRDERDFNSMKLFLYYTQFGKCMYSGDDIDINELIRGNSKWDRDHIYPQSKIKDDSIDNLVLVNKTYNAKKSNELLSEDIQKKMHSFWLSLLNKKLITKSKYDRLTRKGDFTDEELSGFIARQLVETRQSTKAIADIFKQIYSSEVVYVKSSLVSDFRKKPLNYLKSRRVNDYHHAKDAYLNIVVGNVYNKKFTSNPIQWMKKNRDTNYSLNKVFEHDVVINGEVIWEKCTYHEDTNTYDGGTLDRIRKIVERDNILYTEYAYCEKGELFNATIQNKNGNSTVSLKKGLDVKKYGGYFSANTSYFSLIEFEDKKGDRARHIIGVPIYIANMLEHSPSAFLEYCEQKGYQNVRILVEKIKKNSLLIINGYPLRIRGENEVDTSFKRAIQLKLDQKNYELVRNIEKFLEKYVEKKGNYPIDENRDHITHEKMNQLYEVLLSKMKKFNKKGMADPSDRIEKSKPKFIKLEDLIDKINVINKMLNLLRCDNDTKADLSLIELPKNAGSFVVKKNTIGKSKIILVNQSVTGLYENRREL

SEQ ID NO: 217 - protein, 1347 aa, Finegoldia magna
  Finegoldia magna ACS-171-V-Col3
MKSEKKYYIGLDVGTNSVGWAVTDEFYNILRAKGKDLWGVRLFEKAKTAADTRTFRSGRRRNDRKGMRLQILREIFEDEIKKVDKDFYDRLDESKFWAEDKKVSGKYSLFNDKNFSDKQYFEKFPTIFHLRKYLMEEHGKVDIRYYFLAINQMMKRRGHFLIDGQISHVTDDKPLKEQLILLINDLLKIELEEELMDSIFEILADVNEKRTDKKNNLKELIKGQDFNKQEGNILNSIFESIVTGKAKIKNIISDEDILEKIKEDNKEDFVLTGDSYEENLQYFEEVLQENITLFNTLKSTYDFVILQSILKGKSTLSDAQVERYDEHKKDLEILKKVIKKYDEDGKLFKQVFKEDNGNGYVSYIGYYLNKNKKITAKKKISNIEFTKYVKGILEKQCDCEDEAVKYLLGKIEQENFLLKQISSINSVIPHQIHLFELDKILENLAKNYPSFNNKKEEFTKIEKIRKTFTFRIPYYVGPLNDYHKNNGGNAWIFRNKGEKIRPWNFEKIVDLHKSEEEFIKRMLNQCTYLPEETVLPKSSILYSEYMVLNELNNLRIKGKPLDTDVKLKLIEELFKKKTKVTLKSIRDYMIRNNFADKEDFDNSEKNLEIVSNMKSYIDFNNILGDKFELEMVEDLIEKITIHTGNKTLLKKYIEETYPDLSSSQIQKIINLKYKDWGRLSRKLLDGIKGRNKTDDVNTVINFMRNSSDNLMQIIEGKNYSFNEYIDNLRKKYIPQEISYEVVENLYVSPSVKKMIWQVIRVTEEITKVMGYDPDKIFIEMAKSEEEKKTTISRKNKLLDLYKAIKKDERDSQYEKLLTGLNKLDESELRSKKLYLYYTQMGRDMYTGEKIDLDKLFDSTHYDKDHIIPQSMKKDDSIINNLVLVNKNANQTTKGNIYPVPSSIRNNPDIYNYWKYLMEKEFISKEKYNRLIRNTPLTNEELGVFINRQLVETRQSTKAIKELFEKFYQKSKIIPVKASLASDLRKDMNTLKSREVNDLHHAHDAFLNIVAGDVWNREFTSNPINYVNENREGDKVKYSLSKYFTRPRKSKGKVIWTPEKGRKLIVDTLNKPSVLISNESHVKKGELFNATISGKKDYKKGKIYLPLKKDDRLKDVSKYGGYKAINGAFFFLVEHTKSKKRIRSIELFPLHLLSKFYEDKNTVLDYAINVLQLQDPKIIIDKINYRTEIIIDNFSYLISTKSNDGSITVKPNEQMYWRVDEISNLKKIENKYKKDAILTEEDRKIMESYIDKIYQQFKAGKYKNRRTTDTIIEKYEIIDLDTLDNKQLYQLLVAFISLSYKTSNNAVDFTVIGLGTECGKPRITNLPDNTYLVYKSITGIYEKRIRIK

SEQ ID NO: 218 - protein, 1348 aa, Finegoldia magna
MKSEKKYYIGLDVGTNSVGWAVTDEFYNILRAKGKDLWGVRLFEKADTAANTRIFRSGRRRNDRKGMRLQILREIFEDEIKKVDKDFYDRLDESKFWAEDKKVSGKYSLFNDKNFSDKQYFEKFPTIFHLRKYLMEEHGKVDIRYYFLAINQMMKRRGHFLIDGQISHVTDDKPLKEQLILLINDLLKIELEEELMDSIFEILADVNEKRTDKKNNLKELIKGQDFNKQEGNILNSIFESIVTGKAKIKNIISDEDILEKIKEDNKEDFVLTGDSYEENLQYFEEVLQENITLFNTLKSTYDFLILQSILKGKSTLSDAQVERYDEHKKDLEILKKVIKKYDEDGKLFKQVFKEDNGNGYVSYIGYYLNKNKKITAKKKISNIEFTKYVKGILEKQCDCEDEDVKYLLGKIEQENFLLKQISSINSVIPHQIHLFELDKILENLAKNYPSFNNKKEEFTKIEKIRKTFTFRIPYYVGPLNDYHKNNGGNAWIFRNKGEKIRPWNFEKIVDLHKSEEEFIKRMLNQCTYLPEETVLPKSSILYSEYMVLNELNNLRINGKPLDTDVKLKLIEELFKKKTKVTLKSIRDYMVRNNFADKEDFDNSEKNLEIASNMKSYIDFNNILEDKFDVEMVEDLIEKITIHTGNKKLLKKYIEETYPDLSSSQIQKIINLKYKDWGRLSRKLLDGIKGTKKETEKTDTVINFLRNSSDNLMQIIGSQNYSFNEYIDKLRKKYIPQEISYEVVENLYVSPSVKKMIWQVIRVTEEITKVMGYDPDKIFIEMAKSEEEKKTTISRKNKLLDLYKAIKKDERDSQYEKLLTGLNKLDDSDLRSRKLYLYYTQMGRDMYTGEKIDLDKLFDSTHYDKDHIIPQSMKKDDSIINNLVLVNKNANQTTKGNIYPVPSSIRNNPKIYNYWKYLMEKEFISKEKYNRLIRNTPLTNEELGGFINRQLVETRQSTKAIKELFEKFYQKSKIIPVKASLASDLRKDMNTLKSREVNDLHHAHDAFLNIVAGDVWNREFTSNPINYVKENREGDKVKYSLSKDFTRPRKSKGKVIWTPEKGRKLIVDTLNKPSVLISNESHVKKGELFNATIAGKKDYKKGKIYLPLKKDDRLQDVSKYGGYKAINGAFFFLVEHTKSKKRIRSIELFPLHLLSKFYEDKNTVLDYAINVLQLQDPKIIIDKINYRTEIIIDNFSYLISTKSNDGSITVKPNEQMYWRVDEISNLKKIENKYKKDAILTEEDRKIMESYIDKIYQQFKAGKYKNRRTTDTIIEKYEIIDLDTLDNKQLYQLLVAFISLSYKTSNNAVDFTVIGLGTECGKPRITNLPDNTYLVYKSITGIYEKRIRIK

SEQ ID NO: 219 - protein, 1348 aa, Finegoldia magna
  Finegoldia magna SY403409CC001050417
MKSEKKYYIGLDVGTNSVGWAVTDEFYNILRAKGKDLWGVRLFEKAKTAADTRTFRSGRRRNDRKGVRLQILREIFEDEIKKVDKDFYDRLDESKFWAEDKKVSGKYSLFNDKNFSDKQYFEKFPTIFHLRKYLMEEHGKVDIRYYFLAINQMMKRRGHFLIDGQISHVTDDKPLKQQLILLINDLLKIELEEEFMDSIFEILADVNEKKTEKKNILKELINAQDFNKQEGKILYSIFESIVTGKAKIKNIISDEDILEKIKEDNKEDFVLTGDSYEENLQYFEEVLQENITLFNTLKSAYDFVILQSILKGKSTLSDAQVERYDEHKKDLEILKKVIKKYDEDGKLFKQVFKEDNGNGYVSYIGYYLNKNKKITAKKKISNIEFTKYVKGILEKQCDCEDEDVKYLLGKIEQENFLLKQISSINSVIPHQIHLFELDKILENLAKYYPSFNNKKEEFTKIEKIRKTFTFRIPYYVGPLNDYHKNNGGNAWIFRNKGEKIRPWNFEKIVDLHKSEEEFIKRMLNQCTYLPEETVLPKSSILYSEYMVLNELNNLRINGKPIDTDVKLKLIEELFKKKTKVTLKSIRDYMIRNNFADKEDFDNSEKNLEIVSNMKSYIDFNNILGDKFELEMVEDLIEKITIHTGNKKLLKKYIEETYPDLSSSQIQKIINLKYKDWGRLSRKLLDGITGTNIETGEIDTVINFLRNSSDNLMQIIGSQNYSFNNDIDKLRKKYIPQEISYEVVENLYVSPSVKKMIWQVIRITEEITKVMGYDPDKIFIEMAKSEEGKKTTISRKNKLLALYKAIKKDERDSQYEKLLTGLNKLDDSDLRSRKLYLYYTQMGRDMYTGEKIDLDKLFDSTHYDKDHIIPQSMKKDDSIINNLVLVNKNANQTTKGNIYPVPSSIRNNPKIYNYWKYLMEKEFISKEKYNRLIRNTPLTNEELGGFINRQLVETRQSTKAIKELFEKFYKKSKIIPVKAILASDLRKDMNTLKSREVNDLHHAHDAFLNIVAGDVWNREFTSNPINYVKENREGDKVKYSLSKYFTRPRKSKGKVIWTPEKGRKLIVDTLNKPSVLISNESHVKKGELFNATIAGKKDYKKGKIYLPLKKDDRLQDVSKYGGYKAINGAFFFLVEHTKSKKRIRSIELFPLHLLSKFYEDKNTVLDYAINVLQLQDPKIIIDKINYRTEIIIDNFSYLISTKSNDGSITVKPNEQMYWRVDEISNLKKIENKYKKDAILTEEDRKIMESYIDKIYQQFKAGKYKNRRTTDTIIEKYEIIDLDTLDNKQLYQLLVAFISLSYKTSNNAVDFTVIGLGTECGKPRITNLPDNTYLVYKSITGIYEKRIRIK

SEQ ID NO: 220 - protein, 1516 aa, Flavobacteriaceae bacterium
  Flavobacteriaceae bacterium S85
MLKQQKDKIIGMNKKILGLDLGTNSIGWALVKQDLENKYGEIIGCGSRIIPMSQDVLGKFDAGISISQTAERTNYRSVRKLIQRNTLRRERLHRVLHQLDFLPKHYNDSIDFEKKLGQFKTDKETKLNYFVNQHGKHEFLFKDSFNEMVKEFKEEQPELFYIKNNGKETKIPYDWTIYYLRKKALSKKISKEELSWLVLNFNQKRGYYQLRGEIDEEKEKNKRYEKLYVSEVVKTNNTIKKTGEYLYDIYFDNGWKYEKQTTKPQDWLHKHKEFIITTTTLKNGETKRTFKTVDSEKDWIAIKSKTEQDIKESNKTVGAFIYDTLLKNPTQKIRGSLVKTIERKFYREEFEKILKEQIKHRPEINVNTAIGKENYTKCVTELYPRNEAHANNILTNDFNYLFTKDILFYQRPLKSKKSEIANCQYEYRTYIKKKEKTGKEERVKQPLKATPKSHPLFQEFRLWQFIHNLKIYIRETTVGNKPLFDVDITDTFFTSENDWATLFEYLNNKKEIEQKHVLEYLVSKKIISKSEKTDYRWNYVEDKKYPGNETRVDFINRLKKVENLNVDEFLTSELEFKLWHIIYSVTDKNEYEKALENFAIRQNIDKDSFVNSFKKFPPFKSDYGAYSTKAIKKLLPLMRLGKFWDGSEIPKVVVEKITDIKTRLTSVNYDESLFKKDEKKILETIVDDITPKQLLKSFVKLKGKNHLAGLNTYQACYLVYERHSESSDITQWENPDDIDSFLNHFKQHSLRNPIVEQVVTETLRTVRDIWKYYGNGSPNYFNEIHIELGREMKNPADKRKQMSAKINENENTNQRIKGILQELMNDGVQDIKPYSPSQQEILKIYEEGISQNPNVDYSKVSEDEITKIKKSNNPTLKEIQRYKLWLEQKYISPYTGKPIPLSELFTPAYQIEHIIPQSRYFDNSLSNKIICESEVNEDKSNKTAYEYLKTNGGSIVHGHHLLSLKEYEDHCQHYFKKNRTKLKNLLSEEIPEGFINRQLNDSRYISKLIKGLLSNIVREENEQEATSKNIVPVTGSITSKLKQDWGLNDKWNEIIAPRFKRLNKMTNSNDFGYFDEKINTFRIQVPDAISRGFNKKRIDHRHHTLDALVIACCTKKHIQYLNSLNNEIIKHELKPSILIKNAQGDYTKHFMLPWNNFPIDCKNAIENTIVSFKQNLRVINKTSNKYQSYKDENGNLRLGKDGKPKKGLTKQTKGNNWAVRKAMHEDTFYGEIVDGENKGKLKIKTLLDTSFDVKKIEDKVLDKSIRTILINYLKQDKYKNLSKPHEEAFSPNGIIEMNKNIISLNNNIPHKPIKRVTLKHEKGKKFSIKTLLDKKTKFAKSATGTNVFFCIYKNINGKIKYHTPSFEEIIEIQKQEFEIKYKSKLNVPETLFDKKESFELLFYLQPNDLVYLPNDEELKNRQLIDFNNLNKKQIKRIYKFTDGSGTTANFIPYQVAKVIFNLNKKEQAKSSFKYPIQNEFGVGSPQSKNQKSIEGILIKERCIKLKIDRLGNISKA

SEQ ID NO: 221 - protein, 1473 aa, Flavobacterium branchiophilum
MAKILGLDLGTNSIGWAVVERENIDFSLIDKGVRIFSEGVKSEKGIESSRAAERTGYRSARKIKYRRKLRKYETLKVLSLNRMCPLSIEEVEEWKKSGFKDYPLNPEFLKWLSTDEESNVNPYFFRDRASKHKVSLFELGRAFYHIAQRRGFLSNRLDQSAEGILEEHCPKIEAIVEDLISIDEISTNITDYFFETGILDSNEKNGYAKDLDEGDKKLVSLYKSLLAILKKNESDFENCKSEIIERLNKKDVLGKVKGKIKDISQAMLDGNYKTLGQYFYSLYSKEKIRNQYTSREEHYLSEFITICKVQGIDQINEEEKINEKKFDGLAKDLYKAIFFQRPLKSQKGLIGKCSFEKSKSRCAISHPDFEEYRMWTYLNTIKIGTQSDKKLRFLTQDEKLKLVPKFYRKNDFNFDVLAKELIEKGSSFGFYKSSKKNDFFYWFNYKPTDTVAACQVAASLKNAIGEDWKTKSFKYQTINSNKEQVSRTVDYKDLWHLLTVATSDVYLYEFAIDKLGLDEKNAKAFSKTKLKKDFASLSLSAINKILPYLKEGLLYSHAVFVANIENIVDENIWKDEKQRDYIKTQISEIIENYTLEKSRFEIINGLLKEYKSENEDGKRVYYSKEAEQSFENDLKKKLVLFYKSNEIENKEQQETIFNELLPIFIQQLKDYEFIKIQRLDQKVLIFLKGKNETGQIFCTEEKGTAEEKEKKIKNRLKKLYHPSDIEKFKKKIIKDEFGNEKIVLGSPLTPSIKNPMAMRALHQLRKVLNALILEGQIDEKTIIHIEMARELNDANKRKGIQDYQNDNKKFREDAIKEIKKLYFEDCKKEVEPTEDDILRYQLWMEQNRSEIYEEGKNISICDIIGSNPAYDIEHTIPRSRSQDNSQMNKTLCSQRFNREVKKQSMPIELNNHLEILPRIAHWKEEADNLTREIEIISRSIKAAATKEIKDKKIRRRHYLTLKRDYLQGKYDRFIWEEPKVGFKNSQIPDTGIITKYAQAYLKSYFKKVESVKGGMVAEFRKIWGIQESFIDENGMKHYKVKDRSKHTHHTIDAITIACMTKEKYDVLAHAWTLEDQQNKKEARSIIEASKPWKTFKEDLLKIEEEILVSHYTPDNVKKQAKKIVRVRGKKQFVAEVERDVNGKAVPKKAASGKTIYKLDGEGKKLPRLQQGDTIRGSLHQDSIYGAIKNPLNTDEIKYVIRKDLESIKGSDVESIVDEVVKEKIKEAIANKVLLLSSNAQQKNKLVGTVWMNEEKRIAINKVRIYANSVKNPLHIKEHSLLSKSKHVHKQKVYGQNDENYAMAIYELDGKRDFELINIFNLAKLIKQGQGFYPLHKKKEIKGKIVFVPIEKRNKRDVVLKRGQQVVFYDKEVENPKDISEIVDFKGRIYIIEGLSIQRIVRPSGKVDEYGVIMLRYFKEARKADDIKQDNFKPDGVFKLGENKPTRKMNHNQFTAFVEGIDFKVLPSGKFEKI

SEQ ID NO: 222 - protein, 1459 aa, Flavobacterium columnare
MKFNLGLDIGTNSIGWALVNEDYENKKGKIIAAGSRIIPMTQDILDKFGSGAITETQTALRTDYRSKRKLIQRFLLRRERLHRVLNVLDFLPKHYAESIDFEKYFGKFLPNTEPKLAYNQNQFIFQNSFLEMLKEFQEKHPELLTNNKKIPYDWTIYYLRKKALNQRIEKEELAWLLLQFNQKRGYNQLRDEEEESVPNKQVEFYSLKIIDVVADQPKEGRDKRWYSINLENGWTYRRESKTPLFNWEGKTKDFIVTTDLNQDGSIKKDKEGKEKRSFRAPSEGDWTLLKKKTEKEIYESGKTLGTYIYDALLNTPDLKIKGDFIRTIDRSIYKEELQQIINKQKEYHLELNSSKLYKACLEELYPKNEIYKSALKNKDIAYLFINDILYYQRPLKAPKYNIGKCTYESRTFKKEDKKIREYIPAVAKSHPLFQEFRLWQWIKNLKIYEKLSSDNCTDFFLTNEQDFENLFEFLWNKKEIDHKGILEYLVKTKFPDLKPKQVKTKVKEYRWNYVYDHEKDESKTYPCGETYFLLKNKLDKIYNAQDDFLDKERLYNLWHIIYSVTDKKQYEKALAKFALKNHLDTKSFVNTFKRIPPFKNDYAIYSLKAIKKLLPLMRVGKYWNYDDIDPITKQKIQCIITGEENDTISTLVREKTNHFSNENDFKNLPLWLAGYIVYNSHNESSEIEKWKSPQDIDTFLKKFKQHALRNPIVEQVVTETLRVVRDIWSKKGQGKKDFFNEIHIELGKDLKNPVDKRRKLSSTNTKNESTNTRIKALLIELFTQGVENVKPNSPKHQEILKIFEEGALNSGIEIEEDIIKISNTDQPTKKQLELYILWLEHKYKSPYTGQSIPLSKLFTPNYEIEHIIPRSKYYDDNLSNKVICETEINRLKNNQLGYEFINNHEIREVTLEEGKTIRLLSPEQYWNFVTTYYAKNKAKRENLLLKELPVQMVEKQLNDTRYVSKYVMQLLSKIVRKEDGTDNGINSTNILSISGKMTRALKNDWDLNDVWNDLLLYRFERLNTITKTNLFTTYSEQKQKRMPIVPDQYAKGFHKKRLDHRHHALDAIVIACITRNHINYMNNQNIQGEKLKKNAIEKENYREILQKSRLDIRAQLCEKKYNDNDPTKYNWVFIKPWADFTENTKDILESIIPSFKQNLRIINKTVNYYEKYNENGKKVKVRQIKGDNWAIRKPLHKETISGKVHLSYKTPAKGKILTATRKVLDSSMDFKSIEKITDTGIQKILKNYLEYKKSPELAFSPEGIEELNATITKYNNGFHHKPIYKVRIYEEGVKFPLGNKGNKKSKYVEAEKGTNLFFAIYKDQENNRYFETIPFNDVLETLKKGMSAVPEKNQEENTLVFALSPQDLVFVPTLDEIENPDIVDFKNLTKDQTNRIYKMVSSSGKQCFFIKAEVATSIVNKMEFSTSNKMENSIEGIQIKSNCWKLKLDRLGTITRVIK

SEQ ID NO: 223 - protein, 1535 aa, Flavobacterium columnare
MTKILGLDLGTNSIGWAIRDTENEGINQILDKGARIFSEGVKSENGKEISRAAERTAYRSARKIKYRRKLRKYETLKVLSINGMCPLSVEEVEQWKKSGFKEYPLNPEFLDWLRTNEDKNINPYLFRDKASKQKVTLFELGRALYHIAQRRGFLSNRLDQSAEGVFEEHNPQIQNLIEDLDSSNTILNELKEYYINLGIIDETEKSGFKKDLDEGEKKLKSLYNSLVAITKKNANDIETCKQELIARLNKKEDLGKVKGKIKDISQAMLDRNFKTLGQYFFSLYNKERIRNQYTSREEHYLEEFIIICQTQGIEGINTNEKLPEKKFTGLAKDLYRAIFFQRPLKSQKGLIGKCSFEKNKSRCAVSHPDYEEFRMWSYLNTIKIGTQSEKTLRFLTLEEKLKLVPKFYRKSDFNFEVLAKELVEKGASFGYYKSSKKNEFFYWFNYKPTDSVSACVVSASLENAIGKDWKIKTFEYQTRNTEKNEVTKSVDYKDLWHLLSVATSDTYLYDFAIEKLKLEPKNAKAFSKTKLKKDFASLSLAAIAKILPYLKQGLLYSHAVFMANIENIVDADIWKDEEQQKFIQSKIVELVDNYIVEKSKLELINGLLKIYNTEDKEGRKVYYSKEAESLFEADLRKKLVPFYKANIIIEEHEQEIIFQDLFPILMDQLKKQEFIKIGRLDKQIEAFLEGENEEGQIFCNHTDKLKKLYHPSDIEVFKKKTIKDEWGNEKVVLGSPLTTSIKNPMAMRALHQLRKVLNTLIANDQIDEDTRIHIEMARELNDANKRKGIQDFQNENKKFREEAIKEIKKLYLEECHKDVNPTEDDILRYQLWLEQGKCEIYEEGNNISICDIIGSNPSYDIEHTIPRSISQDNSQMNKTLCSLKFNRSIKKQKMPVELSNYNDILPRIAHWKKEAEELTRQIETISRSIKSAATKVAKDKNIRKRHYLTLKRDYILGKYERFTWEEPKVGFKNSQIPDTGIITKYAQAYLKSYFKRVESVKGGAVAEFRKLWGIQESFIDENWWKHYKDKDRDKHTHHTIDAITIACMPKDKYDLLAHAWRLEDEQDKKAAKVLIEQAKPWKTFKEDIEKIETEILVSHFTPDNVKKQSKSIIKNRGKKVYVLKNELPVNFKNKIEGKDYFKLKFDSKILYKIPKKKEKQTDTFYEELPKNYLNGVEGKDYFKINTTGKTFYKIPIFNQGDTIRGSLHQETTYGAIKLPDIDIETKKPLHTDKGGFILKKDIKGNEIVFFVVRKEISKISENDVQNIVDNVVRKKIENAIANSLITFKIVKKKKVAVIKEGVTIWMREPNIEKGIEGIPIKKVRIITNSVKNPIEIKVHSPLSKSRHKHKQKVYGQNDENYAMALYELDGKREFELINNFNLAKLLKQSQSYYPLHKEKEIKGKKILVPIEKRNNKDVILKRGQQVVFYDKTVENPKDISEIIDFRERIYIIEGLTIQRQKDKKTSKVNEYGIIQLRHFKEARKSEEISKDNFKPDGEFKINENKPTRKMNHNQFTAFVEGIDFKVLPSGKFQKI

SEQ ID NO: 224 - protein, 1354 aa, Flavobacterium psychrophilum
  Flavobacterium psychrophilum JIP02/86
MKKILGLDLGTNSIGWAFINEAENEIEVSSIVNTGVRIVPLTTDEESDFKKGNTISINADRTLKRGARRGLQRFKQRREALLETFNRIKFIATDFVYAETGAATTFSSYQLRAKSAVEAVTKEELVKVLLMLNKKRGYKSSRKAKTAEEGDAIDGMKIAKEIFENNLTPGQWVYNSLSKGGKFIPDFYHSDLQKELEKIVRFQNQFHSEQINDKLLADIQGKSRTQTSQHFSKTLNIPLAENKGTREETKLQHYQWRNEALANELDMKILAFIITEINNQINQSSGYLGAISDRSKELYFNQETVGQYQYKQLQENVHAKLKNQVFYRQDYLDEFEKIWETQAKFHSELNEKLKAEIRDITIFYQRKLKSQKHLVSFCEFEKGHKAIPKSSPLFQEFRIWQNLNNVVVKNETTKEVFELSEELKQLIAEELQFKESMTDVQMLTFCELKKGTHTVNFKKIEGNRTNTSIYKAFEKILEVEGYEIDFSKMKPLEIKETVAPIFETLNINTVILDFDPTIQGNDFDKQPYYQLWHLLYSAEDDDKLKETLKTKFGFKENHLPFILNINLQADYGSLSAKAIKKILPHLMDGHIYDKACLMVGYNHSSSLTTAQNNDRVLKDTLELLKKNSLRNPVVEKILNQMINVINAIMKDPAMGKPDEIRVELARELKANNEQRKKATSDINTATTEHERIRKLLHSEFNIPRVTRNDIIRYKLWLETGGISLYTGNPIKASDLFSKNYDIEHIIPKSRLFDDSFSNKTLCERQLNIDKSNKTAYSFLQEKLSENDFAAYENRVKDLFKTGKIKSYTKYKKLLMADNEIPEGFIDRQLRETQYIAKKAKEILLEVSRNVTATIGSVTDKLRQDWELVDVMKELNWEKYDKLGLTHIEEGKNGERLSKIKDWTKRNDHRHHAMDAITVAFTKPAYIQYLNNLNAKTQGENKANSIIGIENKHLYRDKNNKLRFISPMKNFREEAKKQLESILISYKAKNKVVTKNKNTTKKSGGTNQKIQLTPRGRLHKETVYGKLQQYATKEEKVNASFTEDYIQKVAKKEYREALLKRLEENDNDPKKAFTGKNALNKTPIYISLKDNIIVPEKVKTVWLETDYTIRKDITPDLKIDKVIDVGIKRILQNRLNEFNGDPKKAFVNLGESPIWLNKEKGIAIKRVTISGVSNAQALHTKKDHLGNEILDKNGNPIPVDFISTGNNHHVAIYRDEKGNLQEEVVSFYDAVIRRNLGLSVINKNHEKGWEFLFSMKQNEFFIFPSDGFNPHEIDLLNPNNYHLISPNIFRVQKISTKNYMFNHHLETKAVDGEMLKSKKELSKTSYHFIQTPTNLNGIIKVRINHLGKIVHLGEY

SEQ ID NO: 225 - protein, 1458 aa, Fluviicola taffensis
MTKTILGLDLGTNSIGWALINQDFDNKKGEILGMGSRIIPMTQDIKDEFGKGNSISQTAERTRLRGVRRLIHRTLLRRERLHRVLNIIGFLPEHYANQIDFEKRFGKFKPESEPKISFDGNDVFLFEKSYQEMLVDFKIHQPQLVSNGKKIPHDWTIYYLRKKALSKKIEKEELAWILLNFNQKRGYYQLRGEEEEETPNKLVEFHSLKIVEVNADEPQKGKPEIWYSLVLENGWVYRRASKTPLFDWKDKIREFIVTTEINNDGTVKTDKEGTEKRSFRAPKPEDWTLQKKKTEFELSKSGNEVGAFIYESILQKPNQKIRGKLISTIERKFYKEELKTILKTQLFFHKELKDEKLYNACIEELYKNNEAHRSLLSNKGFEHLFINDILFYQRPLRSKKSQISNCPLEKRTYKKEGIEITEGIKVISKSNPIYQEFRLWQWISNLSLYCIEPTETNVTSTFLNSIEDYENLFEFLNNRKEIEQKHLLKYLLENQGFKGKLLTNELEKFRWNFVADKKYPCNETGSLLHTRLSKVKNISPDFLTKEIEHQLWHIIYSVTDKIEYEQALKTFARKNNLDVDSFFEHFKKIPPFESTYGAYSEKAIKKLLPLIRLGKYWNWEAIDSISKDRISKILSGEYDENIKNRVREKAVHLTSENNFQGLQEWLAKYIVYDRHSEGNDLGKWTSVSDLETYLKEFKQHSLRNPIVEQVITETLRVVKDIWIKHGKGTENFFDEIHVELGREMKNNSEDRKRLTNTITENENTNLRIKALLMEMMNDNDVENVRPYSPSQQEILKIYEDGALNSNIELDDEIVKISKKAEPTKSELQRYKLWLEQKYRSPYTGQVIPLNKLFTSEYEIEHVVPQSRFFDDSFSNKVICESAVNKRKDNQLGLQFIKNHSGEKVELGFGKVVQVFTEEQYLDFVKEHYSKNRSKHNKLLLEEIPEKMIERQLNDTRYISKFVSSILSNIVRSEKDDDGLNSKNILPGNGKITTELKRDWGLNDVWNDLILPRFERMNTITNSDLFTTYNDKYQKHLPTVPFEYSKGFQKKRIDHRHHAMDALVIACATRDHLNLMNNQSAKSELKRYDLQNKLRKKEPYFNQKENKQKEAFKDFIKPWGTFTEDSKNALEKIIISFKQNLRVINKATNSYESYKDEDGNLRIGKDGKPEKGLIKQKGLNWAIRKPLHKDTVSGQINLSRIKLPNGKILTATRKNLDTSFDLKTIENSITDTGIQKILKNYLLSKESPELAFSPEGLEEMNNEIEKYNNGKFHHPINKARIYELGSKFNVGQTGNRRDKFVEAAKGTNLFFAIYQDENKNRSYETIPLNEVIEHQKWRASLPKEEQEKIPLVPVNKLKGTFIFSLSPNDLVYVPSNDELERSASIDFSKLKKEQINRLYKMVSSSGSQCFFVKSEVATSVVNKMEYSSLNKMEKSIDNLMVKEICIKLKIDRLGNISKA

SEQ ID NO: 226 - protein, 1646 aa, Francisella tularensis
MNIKILPIAIDLGAKNTGVFSAFYQKGTSLESLDNKNGKVYELSKDSYTLLMNNRTARRHQRRGIDRKQLVKRLFKLIWTKQLNLEWNKDTQQTISFLLNRRGFSFITDGYSPEYLNIAPEAVKAILMSILDDYNGEDDLDSYLQSATENDSKIDELYNKLLQKALEFKLRKLCIDIKEDKVTTKTLKELSNTEFKLLANYLVDYDRILRTQKFSYTDKQGNLRELNYYHHDKYNIQEFLKRNIIINDVILEKLTDDLDIWNLNFDKFDFEKNLEKLENQEDKDYLQTHLHHFVFAVNKIKSEMASGGRHRSQYFQEITNVLVENNHQEGYLKNFCENLHNKKYSNLSVKNLVNLIGNLSNLELKPLRKYFNDKIHAKADYWDEQKFAETYSDWILGEWRVGAKDKDKKDGAKYSYKNLCDELKQKVGINQDGIINQTKSDFVDFLLELDPCRTIPPYLDNNNRKPPKCQSLILNPKFLDNKYPNWQQYLQELKKLQTVQNYLGNFEIDLKDLKSSKEQPYFVKYKSLNQQIASGQRDYKDLDARVLQFIFDRVKASDELLLNEIYSHAKKLKQNTSSELEKLELCKKLDEVIANSQLSQILKSQHVNGIFEQGTFLHLVCKYYKQRQRARDSRLYIMPEYRYDKKLDKYNNTGRFDDDNQLLTYCNHKPRQKRYQLLNDLAGVLQVSPNFLKDKIGSDDDLFISKWLVEHIRGFKKACEDSLKIQKDNRGLLNHKINIARNTKGKCEKEIFNLICKIEGSEDKKGNYKHGLAYELGVLLFGEPNQASKLEFDRKIKKFNSIYSFAQIQQIAFAERKGNANTCAVCSADNAHRMQQIKVAKPVEGNKDNIILSAKAQRLPAIPTRIVDGAVKKIATILARNIVDDNWDNIKQALSNNQQLHVPIITESNAFEFEPALADIKGKSLKDKRKKALERIDPENVFKDKNNRIKEFAKGISAYSDANLANGDFDGAKEELDHIIPRSHKKYGTLNDEANLICVTREDNQNRGNKAVFLYDLKPNYKLKQFNTTDDLEIEKKIADTIWDASKQDFKFGNYRSFINLTPQEQIAFRHALFLADKNPIKKAVIRAIDNRNRTFVNGTQRYFAEVLANNIYLRAKKENLATNRITFDYFGIETTNSNGRGIADVRKLYEKVDSDIQAYAKGDKPQDSYSHLIDAMIAFCVAADEHKNEGSIGLKMGNQYGLFPTPDKYDENTGEIISWHNDDIFRKIKVSDNQFSDKKLVRKKATEGFNTHRQMTRDGIYGESYLPILIHKNLNEVRKGYNWENSEEIKIFKGKKYDIQQLNNLVYCLKFVDKPISIDIQITTLEELRNILETNNISTTAEYYYINLKTQKLHEYYIENYNTALGYKKYTKEMEFLRSLAYRTERVKIKSIDDVSMILAKDSNFKAGKIELPFKTEWQRLYLEWQNTTIKDNHEFLKSYFSVKNATKQHKKVRKDFSLPISTNEGKLLVKRKTWDNNFIYQILNDSDSRADGTKPFIPAFDISKNEIVETIIKSFTSKNIFWLPKNIELQKVDNKSIFAIDTSRWFEVETPKDLIEIGVSTIQYKIDNNSRPKVRVKLDYVMDDDSKINYFMNHSLLKSRYPDKVLEILKQSTIIEFESSGFNKTIKEMLGMTLAGIYNETSNN

SEQ ID NO: 227 - protein, 1629 aa, Francisella tularensis
MNFKILPIAIDLGVKNTGVFSAFYQKGTSLERLDNKNGKVYELSKDSYTLLMNNRTARRHQRRGIDRKQLVKRLFKLIWTEQLNLEWDKDTQQAISFLFNRRGFSFITDGYSPEYLNIVPEQVKAILMDIFDDYNGEDDLDSYLKLATEQESKISEIYNKLMQKILEFKLRKLCTDIKDDKVSTKTLKEITSYEFELLADYLANYSEILKTQKFSYTDKQGNLKELSYYHHDKYNIQEFLKRHATINIQILDTLLTDDLDIWNFNFEKFDFDKNEEKLQNQEDKDHIQAHLHHFVFAVNKIKSEMASGGRHRSQYFQEITNVLDENNHQEGYLKNFCENLHNKKYSNLSVKNLVNLIGNLSNLELKPLRKYFNDKIHAKADHWDEQKFTETYCHWILGEWRVGVKDQDKKDGAKYSYKDLCNELKQKVTKAGLVDFLLELDPCRTIPPYLDNNNRKPPKCQSLILNPKFLDNQYPNWQQYLQELKKLQSIQNYLESFETDLKVLKSSKDQPYFVEYRSSNQQIASGQRDYKDLDARILQFIFDRVKASDELLLNEIYFQAKKLKQKASSELEKLESSKKLDEVIANSQLSQILKSQHTNGIFEQGTFLHLVCKYYKQRQRARDSRLYIMPEYRYDKKLHKYNNTGRFDDDNQLLTYCNHKPRQKRYQLLNDLAGVLQVSPNFLKDKIGSDDDLFISKWLVEHIRGFKKACEDSLKIQKDNRGLLNHKINIARNTKGKCEKEIFNLICKIEGSEDKKGNYKHGLAYELGVLLFGEPNEASKPEFDRKIKKFNSIYSFAQIQQIAFAERKGNANTCAVCSADNAHRMQQIKITEPVEDNKDKIILSAKAQRLPAITTRIVDGAVKKMATILAKNIVDDNWQNIKQVLSAKHQLHIPIITESNAFEFEPALADVKGKSLKDRRKKALERISPENIFKDKNNRIKEFAKGISAYSGANLTDGDFDGAKEELDHIIPRSHKKYGTLNDEANLICVTRGDNKNKGNRIFCLRDLANNYKLKQFETTDDLEIEKKIADTIWDANKKDFKFGNYRSFINLTPQEQKAFRHALFLADENPIKQAVIRAINNRNRTFVNGTQRYFAEVLANNIYLRAKKENLNTDKISFDYFGIPTIGNGRGIAEIRQLYEKVDSDIQAYAKGDKPQASYSHLIDAMLAFCIAADEHRNDGSIGLEIDKNYSLYPLDKNTGEVFTKDIFSQIKITDNEFSDKKLVRKKATEGFNTHRQMTRDGIYAENYLPILIHKELDEVRKGYTWKNSEEIKIFKGKKYDIQQLNNLLYCLKFVDKPISIDIQISTLEELRNILTTNNIAATAEYYYINLKTQKLHEYYIENYNTALGYKKYTKEMEFLRSLAYRSERVKIKSIDDVKQVLDKDSNFIIGKITLPFKKEWQRLYREWQNITIKDDYEFLKSFFNVKSITKLHKKVRKDFSLPISTNEGKFLVKRKTWDNNFIYQILNDSDSRVDGTKPFIPAFDISKNEIVEAIIDSFTSKNIFWLPKNIELQKVDNKNIFAIDTSKWFEVETPSDLRDIGVATIQYKIDNNSRPKVRVKLDYVIDDDSKINYFTNHSLLKSRYPDKVLEILKQSTIIEFESSGFNKTIKEMLGMTLAGIYNETSNN

SEQ ID NO: 228 - protein, 1629 aa, Francisella novicida
  Francisella novicida FTG
MNFKILPIAIDLGVKNTGVFSAFYQKGTSLERLDNKNGKVYELSKDSYTLLMNNRTARRHQRRGIDRKQLVKRLFKLIWTEQLNLEWDKDTQQAISFLFNRRGFSFITDGYSPEYLNIVPEQVKAILMDIFDDYNGEDDLDSYLKLATEQESKISEIYNKLMQKILEFKLMKLCTDIKDDKVSTKTLKEITSYEFELLADYLANYSESLKTQKFSYTDKQGNLKELSYYHHDKYNIQEFLKRHATINDRILDTLLTDDLDIWNFNFEKFDFDKNEEKLQNQEDKDHIQAHLHHFVFAVNKIKSEMASGGRHRSQYFQEITNVLDENNHQEGYLKNFCENLHNKKYSNLSVKNLVNLIGNLSNLELKPLRKYFNDKIHAKADHWDEQKFTETYCHWILGEWRVGVKDQDKKDGAKYSYKDLCNELKQKVTKAGLVDFLLELDPCRTIPPYLDNNNRKPPKCQSLILNPKFLDNQYPNWQQYLQELKKLQSIQNYLDSFETDLKVLKSSKDQPYFVEYKSSNQQIASGQRDYKDLDARILQFIFDRVKASDELLLNEIYFQAKKLKQKASSELEKLESSKKLDEVIANSQLSQILKSQHTNGIFEQGTFLHLVCKYYKQRQRARDSRLYIMPEYRYDKKLHKYNNTGRFDDDNQLLTYCNHKPRQKRYQLLNDLAGVLQVSPNFLKDKIGSDDDLFISKWLVEHIRGFKKACEDSLKIQKDNRGLLNHKINIARNTKGKCEKEIFNLICKIEGSEDKKGNYKHGLAYELGVLLFGEPNEASKPEFDRKIKKFNSIYSFAQIQQIAFAERKGNANTCAVCSADNAHRMQQIKITEPVEDNKDKIILSAKAQRLPAIPTRIVDGAVKKMATILAKNIVDDNWQNIKQVLSAKHQLHIPIITESNAFEFEPALADVKGKSLKDRRKKALERISPENIFKDKNNRIKEFAKGISAYSGANLTDGDFDGAKEELDHIIPRSHKKYGTLNDEANLICVTRGDNKNKGNRIFCLRDLADNYKLKQFETTDDLEIEKKIADTIWDANKKDFKFGNYRSFINLTPQEQKAFRHALFLADENPIKQAVIRAINNRNRTFVNGTQRYFAEVLANNIYLRAKKENLNTDKISFDYFGIPTIGNGRGIAEIRQLYEKVDSDIQAYAKGDKPQASYSHLIDAMLAFCIAADEHRNDGSIGLEIDKNYSLYPLDKNTGEVFTKDIFSQIKITDNEFSDKKLVRKKAIEGFNTHRQMTRDGIYAENYLPILIHKELNEVRKGYTWKNSEEIKIFKGKKYDIQQLNNLVYCLKFVDKPISIDIQISTLEELRNILTTNNIAATAEYYYINLKTQKLHEYYIENYNTALGYKKYSKEMEFLRSLAYRSERVKIKSIDDVKQVLDKDSNFIIGKITLPFKKEWQRLYREWQNTTIKDDYEFLKSFFNVKSITKLHKKVRKDFSLPISTNEGKFLVKRKTWDNNFIYQILNDSDSRVDGTKPFIPAFDISKNEIVEAIIDSFTSKNIFWLPKNIELQKVDNKNIFAIDTSKWFEVETPSDLRDIGVATIQYKIDNNSRPKVRVKLDYVIDDDSKINYFTNHSLLKSRYPDKVLEILKQSTTIEFESSGFNKTIKEMLGMTLAGIYNETSNN

SEQ ID NO: 229 - protein, 1629 aa, Francisella novicida
  Francisella novicida GA99-3548
MNFKILPIAIDLGVKNTGVFSAFYQKGTSLERLDNKNGKVYELSKDSYTLLMNNRTARRHQRRGIDRKQLVKKLFKLIWTEQLNLEWDKDTQQAISFLFNRRGFSFITDGYSPEYLNIVPEQVKAILMDIFDDYNGEDDLDSYLKLATEQESKISEIYNKLMQKILEFKLRKLCTDIKDDKVSTKTLKEITSYEFELLADYLANYSESLKTQKFSYTDKQGNLKELSYYHHDKYNIQEFLKRHATINDEILDTLLTDDLDIWNFNFEKFDFDKNEEKLQNQEDKDHTQAHLHHFVFAVNKIKSEMASGGRHRGQYFQEITNVLDENNHQEGYLKNFCENLHNKKYSNLSVKNLVNLIGNLSNLELKPLRKYFNDKIHAKADHWDEQKFTETYCHWILGEWRVGLKDQDKKEGAKYSYKDLCNELKQKVTNAGLIDFLLELDPCRTIPPYLDNNNRKPPKCQSLILNPKFLDNQYPNWQQYLQELKKLQIIQDYLESFETDLKVLKSSKDQPYFVEYKSSNQQIASGQRDYKDLDARILQFIFDRVKASDELLLNEIYFQAKKLKQKASSELEKLESSKKLDEVIANSQLSKILKSQHTNGIFEQGTFLHLVCKYYKQRQRARDSRLYIMPEYRYDKKLDKYNNTGRFDDDNQLLTYCNHKPRQKRYQLLNDLAGVLQVSPNFLKDKIGSDDDLFISKWLVEHIRGFKKACEDSLKIQKDNRGLLNHKINIARNTKGKCEKEIFNLICKIEGSEDKKGNYKHGLAYELGVLLFGEPNEASKPEFDRKIKKFNSIYSFAQIQQIAFAERKGNANTCAVCSADNAHRMQQIKITEPVEDNKDKIILSAKAQRLPAIPTRIVDGAVKKMATILAKNIVDDNWQNIKQVLSAKHQLHIPIITESNAFEFEPALADVKGKSLKDRRKKALERISPENIFKDKNNRIKEFAKGISAYSGANLTDGDFDGAKEELDHIIPRSHKKYGTLNDEANLICVTRDDNKNKGNRIFCLHDLANNYKLKQFETTDDLEIEKKIADTIWDASKKDFKFGNYRSFINLTPQEQKAFRHALFLADENPIKQAVIRAINNRNRTFVNGTQRYFAEVLANNIYLRAKKENLNTDKISFDYFGIPTIGNGRGIAEIRQLYEKVDSDIQVYAKGDKPQASYSHLIDAMLAFCIAADEHRNDGSIGLEIDKNYSLYPLDKNTGEVFTKDIFSQIKITDNEFSDKKLVRKKATEGFNTHRQMTRDGIYAENYLPILIHKELDEVRKGYTWKNSEEIKIFKGKKYDIQQLNNLLYCLKFVDKPISIDIQISTLEELRNILTTNNIAATAEYYYINLKTQKLHEYYIENYNTALGYKKYTKEMEFLRSLAYRSERVKIKSIDDVKQVLDKDSNFIIGKITLPFKKEWQRLYREWQNTTIKDDYEFLKSFFNVKSITKLHKKVRKDFSLPISTNEGKFLVKRKTWDNNFIYQILNDSDSRVDGTKPFIPAFDISKNEIVEAIIDSFTSKNIFWLPKNIELQKVDNKNIFAIDTSKWFEVETPSDLRDIGVATIQYKIDNNSRPKVRVKLDYVIDDDSKINYFTNHSLLKSRYPDKVLEILKQSTIIEFESSGFNKTIKEMLGMTLAGIYNETSNN

SEQ ID NO: 230 - protein, 1629 aa, Francisella tularensis; identical to SEQ ID NO: 30

SEQ ID NO: 231 - protein, 1629 aa, Francisella novicida
  Francisella novicida GA99-3549
MNVKILPIAIDLGVKNTGVFSAFYQKGTSLERLDNKNGKVYELSKDSYTLLMNNRTARRHQRRGIDRKQLVKRLFKLIWTEQLNLEWDKDTQQAISFLFNRRGFSFITDGYSPEYLNIVPEQVKAILMDIFDDYNGEDDLDSYLKLATEQESKISEIYNKLMQKILEFKLRKLCTDIKDDKVSTKTLKEITSYEFELLADYLANYSEILKTQKFSYTDKQGNLKELSYYHHDKYNIQEFLKRHATINDEILDTLLTDDLDIWNFNFEKFDFDKNEEKLQNQEDKDHTQAHLHHFVFAVNKIKSEMASGGRHRGQYFQEITNVLDENNHQEGYLKNFCENLHNKKYSNLSVKNLVNLIGNLSNLELKPLRKYFNDKIHAKADHWDEQKFTETYCHWILGEWRVGVKDQDKKDGAKYSYKDLCNELKQKVTKAGLVDFLLELDPCRTIPPYLDNNNRKPPKCQSLILNPKFLDNQYPNWQQYLQELKKLQSIQNYLESFETDLKVLKSSKDQPYFVEYKSSNQQIASGQRDYKDLDARILQFIFDRVKASDELLLNEIYFQAKKLKQKASSELEKLESSKKLDEVIANSQLSQILKSQHTNGIFEQGTFLHLVCKYYKQRQRARDSRLYIMPEYRYDKKLDKYNNTGRFDDDNQLLTYCNHKPRQKRYQLLNDLAGVLQVSPNFLKDKIGSDDDLFISKWLVEHIRGFKKACEDSLKIQKDNRGLLNHKINIARNTKGKCEKEIFNLICKIEGSEDKKGNYKHGLAYELGVLLFGEPNEASKPEFDRKIKKFNSIYSFAQIQQIAFAERKGNANTCAVCSADNAHRMQQIKITEPVEDNKDKIILSAKAQRLPAIPTRIVDGAVKKMATILAKNIVDDNWQNIKQVLSAKHQLHIPIITESNAFEFEPALADVKGKSIKDRRKKALERISPENIFKDKNNRIKEFAKGISAYSGDNLASGDFDGAKEELDHIIPRSHKKYGTLNDEANLICVTRDDNKNKGNRIFCLHDLANNYKLKQFETTDDLEIEKKIADTIWDASKKDFKFGNYRSFINLTPQEQKAFRHALFLADENPIKQAVIRAINNRNRTFVNGTQRYFAEVLANNIYLRAKKENLNTDKISFDYFGIPTIGNGRGIVEIRQLYEKVDSDIQAYAKGDKPQASYSHLIDAMLAFCIAADEHRNDGSIGLEIDKNYSLYPLDKNTGEVFTKDIFSQIKITNNEFSDKKLVRKKATEGFNTHRQMTRDGIYAENYLPILIHKELDEVRKGYTWGNSEELKIHKGKKYDIQQLNNLVYCLKFIDKSISIDIQISTLEELRNILTTNNIATTAEYYYINLKTQKLHEYYIENYNTALGYKKYTKEMEFLRSLAYRSERVKIKSIDDVKQVLDKDSNFIIGKITLPFKKEWQRLYREWQNTTIKDDYEFLKSFFNVKSITKLHKKVRKDFSLPISTNEGKFLVKRKTWDNNFIYQILNDSDSRVDGTKPFIPAFDISKNEIVEAIIDSFTSKNIFWLPKNIELQKVDNKNIFAIDTSKWFEVETPSDLRDIGVATIQYKIDNNSRPKVRVKLDYVIDDDSKINYFTNHSLLKSRYPDKVLEILKQSTIIEFESSGFNKTIKEMLGMTLAGIYNETSNN

SEQ ID NO: 232 - protein, 1323 aa, Fructobacillus fructosus
  Fructobacillus fructosus KCTC 3544
MVYDVGLDIGTGSVGWVALDENGKLARAKGKNLVGVRLFDTAQTAADRRGFRTTRRRLSRRKWRLRLLDELFSAEINEIDSSFFQRLKYSYVHPKDEENKAHYYGGYLFPTEEETKKFHRSYPTIYHLRQELMAQPNKRFDIREIYLAIHHLVKYRGHFLSSQEKITIGSTYNPEDLANAIEVYADEKGLSWELNNPEQLTEIISGEAGYGLNKSMKADEALKLFEFDNNQDKVAIKTLLAGLTGNQIDFAKLFGKDISDKDEAKLWKLKLDDEALEEKSQTILSQLTDEEIELFHAVVQAYDGFVLIGLLNGADSVSAAMVQLYDQHREDRKLLKSLAQKAGLKHKRFSEIYEQLALATDEATIKNGISTARELVEESNLSKEVKEDTLRRLDENEFLPKQRTKANSVIPHQLHLAELQKILQNQGQYYPFLLDTFEKEDGQDNKIEELLRFRIPYYVGPLVTKKDVEHAGGDADNHWVERNEGFEKSRVTPWNFDKVFNRDKAARDFIERLTGNDTYLIGEKTLPQNSLRYQLFTVLNELNNVRVNGKKFDSKTKADLINDLFKARKTVSLSALKDYLKAQGKGDVTITGLADESKFNSSLSSYNDLKKTFDAEYLENEDNQETLEKIIEIQTVFEDSKIASRELSKLPLDDDQVKKLSQTHYTGWGRLSEKLLDSKIIDERGQKVSILDKLKSTSQNFMSIINNDKYGVQAWITEQNTGSSKLTFDEKVNELTTSPANKRGIKQSFAVLNDIKKAMKEEPRRVYLEFAREDQTSVRSVPRYNQLKEKYQSKSLSEEAKVLKKTLDGNKNKMSDDRYFLYFQQQGKDMYTGRPINFERLSQDYDIDHIIPQAFTKDDSLDNRVLVSRPENARKSDSFAYTDEVQKQDGSLWTSLLKSGFINRKKYERLTKAGKYLDGQKTGFIARQLVETRQIIKNVASLIEGEYENSKAVAIRSEITADMRLLVGIKKHREINSFHHAFDALLITAAGQYMQNRYPDRDSTNVYNEFDRYTNDYLKNLRQLSSRDEVRRLKSFGFVVGTMRKGNEDWSEENTSYLRKVMMFKNILTTKKTEKDRGPLNKETIFSPKSGKKLIPLNSKRSDTALYGGYSNVYSAYMTLVRANGKNLLIKIPISIANQIEVGNLKINDYIVNNPAIKKFEKILISKLPLGQLVNEDGNLIYLASNEYRHNAKQLWLSTTDADKIASISENSSDEELLEAYDILTSENVKNRFPFFKKDIDKLSQVRDEFLDSDKRIAVIQTILRGLQIDAAYQAPVKIISKKVSDWHKLQQSGGIKLSDNSEMIYQSATGIFETRVKISDLL

SEQ ID NO: 233 - protein, 1374 aa, Fusobacterium nucleatum
  Fusobacterium nucleatum subsp. vincentii ATCC 49256
MKKQKFSDYYLGFDIGTNSVGWCVTDLDYNVLRFNKKDMWGSRLFDEAKTAAERRVQRNSRRRLKRRKWRLNLLEEIFSDEIMKIDSNFFRRLKESSLWLEDKNSKEKFTLFNDDNYKDYDFYKQYPTIFHLRDELIKNPEKKDIRLIYLALHSIFKSRGHFLFEGQNLKEIKNFETLYNNLISFLEDNGINKSIDKDNIEKLEKIICDSGKGLKDKEKEFKGIFNSDKQLVAIFKLSVGSSVSLNDLFDTDEYKKEEVEKEKISFREQIYEDDKPIYYSILGEKIELLDIAKSFYDFMVLNNILSDSNYISEAKVKLYEEHKKDLKNLKYIIRKYNKENYDKLFKDKNENNYPAYIGLNKEKDKKEVVEKSRLKIDDLIKVIKGYLPKPERIEEKDKTIFNEILNKIELKTILPKQRISDNGTLPYQIHEVELEKILENQSKYYDFLNYEENGVSTKDKLLKTFKFRIPYYVGPLNSYHKDKGGNSWIVRKEEGKILPWNFEQKVDIEKSAEEFIKRMTNKCTYLNGEDVIPKDSFLYSEYIILNELNKVQVNDEFLNEENKRKIIDELFKENKKVSEKKFKEYLLVNQIANRTVELKGIKDSFNSNYVSYIKFKDIFGEKLNLDIYKEISEKSILWKCLYGDDKKIFEKKIKNEYGDILNKDEIKKINSFKFNTWGRLSEKLLTGIEFINLETGECYSSVMEALRRTNYNLMELLSSKFTLQESIDNENKEMNEVSYRDLIEESYVSPSLKRAILQTLKIYEEIKKITGRVPKKVFIEMARGGDESMKNKKIPARQEQLKKLYDSCGNDIANFSIDIKEMKNSLSSYDNNSLRQKKLYLYYLQFGKCMYTGREIDLDRLLQNNDTYDIDHIYPRSKVIKDDSFDNLVLVLKNENAEKSNEYPVKKEIQEKMKSFWRFLKEKNFISDEKYKRLTGKDDFELRGFMARQLVNVRQTTKEVGKILQQIEPEIKIVYSKAEIASSFREMFDFIKVRELNDTHHAKDAYLNIVAGNVYNTKFTEKPYRYLQEIKENYDVKKIYNYDIKNAWDKENSLEIVKKNMEKNTVNITRFIKEEKGELFNLNPIKKGETSNEIISIKPKLYDGKDNKLNEKYGYYTSLKAAYFIYVEHEKKNKKVKTFERITRIDSTLIKNEKNLIKYLVSQKKLLNPKIIKKIYKEQTLIIDSYPYTFTGVDSNKKVELKNKKQLYLEKKYEQILKNALKFVEDNQGETEENYKFIYLKKRNNNEKNETIDAVKERYNIEFNEMYDKFLEKLSSKDYKNYINNKLYTNFLNSKEKFKKLKLWEKSLILREFLKIFNKNTYGKYEIKDSQTKEKLFSFPEDTGRIRLGQSSLGNNKELLEESVTGLFVKKIKL

SEQ ID NO: 234 - protein, 1367 aa, Fusobacterium sp.
  Fusobacterium sp. 1_1_41FAA
MKKQQFSDYYLGFDIGTNSVGWCVTDFNYNVLRFNKKDMWGSRLFDEAKTAAERRVQRNSRRRLKRRKWRLNLLEEIFSDEILKIDSNFFRRLKESSLWLEDKSSKEKFTLFNDDNYKDYDFYKQYPTIFHLRNELIKNPEKKDIRLVYLALHSIFKSRGHFLFEGQNLKDIKNFETLYNNLMAFLEDNDIYKNIDSSYIGNLENIICDSKKGLKDKEKEFKEIFNSDKQLVGFFKLSVGSSVSLNDLFDTDEYKKGEVEKEKISFREQIYEDDKPIYYSILGEKIEFLDIAKSFYDFMVLNNILADSQYISEAKVKLYDEHKRDLKNLKYIIRKYNKENYDKLFKDKNESNYSAYIGLNKEKGKKEVIEKSRLKIDDFAKIIKGYLPKAEKIDEKDRSIFNEILDKIELKTILPKQRISDNGTLPYQIHEAELEKILENQAKYYDFLNHEENGISTKDKLLMTFKFRIPYYVGPLNSYHKNKGGNSWIVRKEEGKILPWNFEQKVDIEKSAEEFIKRMTNKCTYLNGEDVIPKDSFLYSEYIILNELNKVQVNDEFLNKEIKKKIIEDLFKKSKKISEKNFREYLLVNQITNKTVELKGVKDAFNSNYVSYIKFKDIFGDKLNLDIYKEISEKSILWKCLYGDDKKIFEKKIKSVYGDILTKDEIKKINSFKFNTWGRLSEKLLTEIEFIDLETGECYSSVMDALRRTNYNLMELLSSKFTLQENIDNENKEVSEFSYRDLVEESYVSPSLKRAILQTLKIYEEIRKITGRIPKKVFIEMARGGDETMKNKKIPARQEQLKKLYDSCGKDISNFSIDIKEMKNSLNSYDNNSLRQKKLYLYYLQFGKCMYTGKEIDLNRLLQNNDTYDIDHIYPRSKVIKDDSFDNLVLVLKNENAEKSNEYPLKKEIQEKMKSFWKFLKEKNFISDEKYKRLTGKDEFELRGFMARQLVNVRQTTKEAGKILQQIEPEIKIVYSKAEIASSFREMFDFIKVRELNDTHHAKDAYLNIVAGNVYNTKFTEKPYRYLQEIKENYDVKKIYNYDIKNAWDKEKSLEIVKKNMEKNTVNITRFIKEEKGQLFDLNPIRKGETSNEIIAIKPKFYEGSTEKLNEKYGYYKSLNPAYFIYVEHKEKNKIIRSFERVNLVDVNKIKDEKSLIKYLIENKGLIEPKVIKKVYKRQVILINNFPYSIVALDSNKLMDFENLKPLFLERKYEKILKNAIKFLEDNQGKTEEYYKFLYLKKKDRNEKNETIDSVKERYNIEFNEMYDKFLEKLDSKDYKNYINNKKYSELVNVKEKFIKLNLFDKAFTLKSFLDLFNRKTMADFSKVGLTKYLGKIQKISSNVLSKNELHLLEESVTGLFVKKIKL

SEQ ID NO: 235 - protein, 1367 aa, Fusobacterium sp.
  Fusobacterium sp. 3_1_27
MKKQKFSDYYLGFDIGTNSVGWCVTDLDYNVLRFNKKDMWGSRLFDEAKTAAERRVQRNSRRRLKRRKWRLNLLEEIFSDEIMKIDSNFFRRLKESSLWLEDKNSKEKFTLFNDDNYKDYDFYKQYPTIFHLRDELIKNPEKKDIRLIYLALHSIFKSRGHFLFEGQNLKEIKNFETLYNNLISFLEDNGINKSIDKDNIKKLEKIICDSGKGLKDKEKEFKEIFNSDKQLVAIFKLSVGSSVSLNDLFDTDEYKKEEVEKEKISFREQIYEDDKPIYYSILGEKIELLDIAKSFYDFMVLNNILSDSNYISEAKVKLYEEHKKDLKNLKYIIRKYNKENYDKLFKDKNENNYPAYIGLNKEKGKKEVVEKSGLKIDDLIKVIKGYLPKPERIEEKDKIIFNEILNKIELKTILPKQRISDNGTLPYQIHEVELEKILENQSKYYDFLNYEENGVSTKDKLLKTFKFRIPYYVGPLNSYHKDKGGNSWIVRKEEGKILPWNFEQKVDIEKSAEEFIKRMTNKCTYLNGEDVIPKDSFLYSEYIILNELNKVQVNDEFLNEENKRKIIDELFKENKKVSEKKFKEYLLVNQIANRTVELKGIKDSFNSNYVSYIKFKDIFGEKLNLDIYKEISEKSILWKCLYGDDKKIFEKKIKNEYGDILNKDEIKKINSFKFNTWGRLSEKLLTGIEFINLETGECYSSVMEALRRTNYNLMELLSSKFTLQESIDNGNKEMNEVSYRDLIEESYVSPSLKRAILQTLKIYEEIKKITGRVPKKVFIEMARGGDETMKNKKIPARQEQLKKLYDSCGNDIANFSIDIKKMKSSLSSYDNNSLRQKKLYLYYLQFGKCMYTGREIDLDRLLQNNDTYDIDHIYPRSKVIKDDSFDNLVLVLKNENAEKSNEYPVKKEIQEKMKSFWRFLKEKNFISDEKYKRLTGKDDFELRGFMARQLVNVRQTTKEVGKILQQIEPEIKIVYSKAEIASSFREMFDFIKVRELNDTHHAKDAYLNIVAGNVYNTKFTEKPYRYLQEIKENYDVKKIYNYDIKNAWDKENSLEIVKKNMKKNTVNITRFIKEEKGQLFDLNPIKKGETSNEIISIKPKLYNGKEEKLNEKYGYYKSLNPAYFLYVEHKEKNKRIKSFERVNLVDVNNIKDEKSLVKYLIENKKLVEPRLIKKVYKRQVILINDYPYSIVALDSNKLMDFENLKPLFLENKYEKILKNVIKFLEDNQGKSEENYKFIYLKKKDRYEKNETLESVKDRYNLEFNEMYDKFLEKLDSKDYKNYINNKKYKNLLDVKEKFIKLNLFDKAFTLKSFLDLFNRKTMADFSKVGLTKYLGKIQKISSNVLSKNELYLLEESVTGLFVKKIKL

SEQ ID NO: 236 - protein, 1367 aa, Fusobacterium sp.
  Fusobacterium sp. 3_1_36A2
MKKQKFSDYYLGFDIGTNSVGWCVTDLDYNVLRFNKKDMWGSRLFDEAKTAAERRVQRNSRRRLKRRKWRLNLLEEIFSDEIMKIDSNFFRRLKESSLWLEDKNSKEKFTLFNDDNYKDYDFYKQYPTIFHLRDELIKNPEKKDIRLIYLALHSIFKSRGHFLFEGQNLKEIKNFETLYNNLISFLEDNGINKSIDKDNIKKLEKIICDSGKGLKDKEKEFKEIFNSDKQLVAIFKLSVGSSVSLNDLFDTDEYKKEEVEKEKISFREQIYEDDKPIYYSILGEKIELLDIAKSFYDFMVLNNILSDSNYISEAKVKLYEEHKKDLKNLKYIIRKYNKENYDKLFKDKNENNYPAYIGLNKEKGKKEVVEKSGLKIDDLIKVIKGYLPKPERIEEKDKTIFNEILNKIELKTILPKQRISDNGTLPYQIHEVELEKILENQSKYYDFLNYEENGVSTKDKLLKTFKFRIPYYVGPLNSYHKDKGGNSWIVRKEEGKILPWNFEQKVDIEKSAEEFIKRMTNKCTYLNGEDVIPKDSFLYSEYIILNELNKVQVNDEFLNEENKRKIIDELFKENKKVSEKKFKEYLLVNQIANRTVELKGIKDSFNSNYVSYIKFKDIFGEKLNLDIYKEISEKSILWKCLYGDDKKIFEKKIKNEYGDILNKDEIKKINSFKFNTWGRLSEKLLTGIEFINLETGECYSSVMEALRRTNYNLMELLSSKFTLQESIDNGNKEMNEVSYRDLIEESYVSPSLKRAILQTLKIYEEIKKITGRVPKKVFIEMARGGDETMKNKKIPARQEQLKKLYDSCGNDIANFSIDIKKMKSSLSSYDNNSLRQKKLYLYYLQFGKCMYTGREIDLDRLLQNNDTYDIDHIYPRSKVIKDDSFDNLVLVLKNENAEKSNEYPVKKEIQEKMKSFWRFLKEKNFISDEKYKRLTGKDDFELRGFMARQLVNVRQTTKEVGKILQQIEPEIKIVYSKAEIASSFREMFDFIKVRELNDTHHAKDAYLNIVAGNVYNTKFTEKPYRYLQEIKENYDVKKIYNYDIKNAWDKENSLEIVKKNMKKNTVNITRFIKEEKGQLFDLNPIKKGETSNEIISIKPKLYNGKEEKLNEKYGYYKSLNPAYFLYVEHKEKNKRIKSFERVNLVDVNNIKDEKSLVKYLIENKKLVEPRLIKKVYKRQVILINDYPYSIVALDSNKLMDFENLKPLFLENKYEKILKNVIKFLEDNQGKSEENYKFIYLKKKDRYEKNETLESVKDRYNLEFNEMYDKFLEKLDSKDYKNYINNKKYKNLLDVKEKFIKLNLFDKAFTLKSFLDLFNRKTMADFSKVGLTKYLGKIQKISSNVLSKNELYLLEESVTGLFVKKIKL

SEQ ID NO: 237 - protein, 1391 aa, Galbibacter sp.
  Galbibacter sp. ck-I2-15
MKTILGLDLGTNSIGWALVKEAENENEVSDIIKLGVRVNPLTVDELTNFEGGKAYSNNAERTLKRGARRNLQRYKLRRENLIEILLKNGLINKDTALTEVGKETTHQTLKLRSKSANEKVSLEDLAKILLSINKKRGYKSSRKVNAEDDGVAIDGMEVAKLLYDENMTPGEYVLRLLESGKKHLPDFYRSDLQEEFNLVWKKQSEFYPLILTKELFFELHGKNKSQTWAICKEPLGIVGVKLKGSAKEQKFARYRLRKEALTQQIELEHLAIVLQDINNDSNKSSGYLGAISDRSKELFFNKETVGQYQYKQLQKDPNTSLKNQVFYRQDYLDEFEVIWRNQAKFYPQLTNELKQEIRDVVIFYQRKLKSQKNLISFCQFESTQQNYVEKETGKTKIRTIGRRVIPRSSPLFQEFKIWQSLNNLKFVNSESNQIIQFIELEDDVKKVVFDELNLRGDLKPNQVLKILSKYMKIGKLTQWKCNLEEIEGNRTNSALYNVFQMIAEEEGYGFNWGKKSALEIKSELKAIFSSIGINDSILDFDFSKKLDQQLSYQLWHLLYSAEEGNSKITEEDKFTYGNTGVALKKKLHLKFGFKPEYSTLISNLRFTSDYGNLSSKAISKILPFLRDGSDYSKACQYAGYNHSNSLSADELDNRELKPKLELLKKNSLRNPVVEKILNQMVNVVNQVIDNYGKPDEVRIELARELKKSAKERSQMTKNISDATRRNAEIKKYLSKEFGIPNPTKGDVIRYRLWEELASNGYKDLFRDKYIPKEKLFSNEIDIEHIIPKALLFDDSFSNKTLAFKVDNLKKADRTAFDFMSTDFSKDVDSYIGRIETLHKDGKISSSKYKKLMIPKSKLVDGFIERDLRNTQYIAKQARKMLLEVFKTVVPTTGKITDKLREDWDLINVMKELNFPKYKALGLTKKIERFDVGSEKIKSINVIEGWSKRNDHRHHAMDALAVAFTTHNHIQYLNYLNARKDIHHEMHGTIKSIENQIIGKDVMGKRRFIPPISDLRMKAKLQIESILISFKNKNKVVTWSVNKTKLKGKDNYNKRRQLTPRGQLHKETVYGKIKLIDPKPLKLNNKFTLVRASMIVDKVHREIVLQHLSKYDNNSEVAFDSKTIKIDPILIEGIGLKEVVCYEDVFKIRKKISGDNFKNEKHLEKVIDEKVKQILKDRVIKFQGNFKEAFSNLEENPIWLNKSKGIAVKSVAIKGVNNAESLHEGKDHFGDQILDKNKKQIPVDFVSTGNNHHVGIYEDKDGNLQERVVSFFEAVTRVNEGLPIIDKTYNSDIGWKFKFTMKQNEMFVFPSDDFDPNEFDLTDGKNAAKISPNLYRVQKIATKNYMFRHHLETVVTNDLEFTYKSIRSTGWLRNLVKVRINHLGEIVYVGEY

SEQ ID NO: 238 - protein, 1025 aa, Unknown
  Description of Unknown: gamma proteobacterium HdN1 polypeptide
MGGYMPQLMRYRLALDIGSTSIGWAMIRLSMQNEPIAIIRMGVRIFSDGRNPKDGSSLAVTRRVARQMRRRRDRLLKRKTRLLNALVQKKFFPEDADARKALVVLNPYELRKEGLYRQLSGPEFGRALFHISQRRGFLSNRKTDKKDNDSSVLKKAIVDLRQQLEVENCQTIGEWLFKQQQSGKSVRARLRGKTQKDKAYDFYIDRAMIAHEFDTLWVSQAKYDPLLFNEDARAILRDILLYQRPLKPVKPGRCTLIPDESRAPLALPLTQQARIYQELNHLRITTPALGAQALTVAQRNTIAALLEKSDVTFVKIAKALGLTSTTEFNLQDIKRDRLKGNATAIILARNQYFGRRWHDFNADLQNLIVDKLVNEGSETALIEWLKANTDVDESAAERVSGVTLPEGYGSLSVAALRRLLPALKEDVVVYSEAVKRAGFDSHSALSLIEQTGELYQELPYYGEVLQRHVGFGSGDPNDSPERRFGKIANPTVHIGLNELRKIINALIKRYGNPAEVVVELARDLKLSREKRKEIQEEQKQRQDRNEKRIKDACEILGIDPLVIDRGKRREISQKMQLWDELNPKDAANRRCPYTGDQISIEKLLSAEVEIEHILPFSKTLDDSLNNKTVAMRRANRDKGNRTPYEAFGESLNPDYDYDAILQRASLMPREKRKRFASDGYQQWLRDDKDFLSRALNDTAYLSRIAKEYLTLICPPNSVRAIPGRMTAQLRAMFGLNRLLSEGGIKNREDHRHHAIDAAVIGVTDQGLLQKFSRASARTRELQLSRLVDDMPLPWDTYREHVTRALEHLVVSHKPDHGYQGKMHEDTAWGLRDNGQVTRRVRSEDGGPRQRLLENKNVVKINSTRDFSRHGIDEQGQVNAYKGYVGGSNYCIEIWIDEKGKWNSDVVSTFQAYQIVRELGEKAAWQKLRNPLLSLSAKPLVMRLIIDDVVKMQIAGQNKIMRVVKIAQNGQIFFAEHNEANVDARDKDKNNPFKYISKTAGSLQKAGGIHMAISPIGDARPVRYGR

SEQ ID NO: 239 - protein, 1397 aa, Unknown
  Description of Unknown: gamma proteobacterium HTCC5015 polypeptide
MTKNYISPIAIDLGAKFTGVALYQYLEGADCTQEVAKGLLVDDRGNVTWSQEGRRGKRHQVRGYKRRKMAKRLLWLILDSEYGIKREEVTEPLLKFINGLLNRRGYTYISEEVDEESMNVSPLPFSEMMPDYFNSSAPLLEQLAKLLSDKNKLVRFRAEGKIPSNKNEFKKLLDTALDGKYKDEKKELSEAWGNILIASENVLKSTVDGHKSRSEYLANIKEDIKSNEELEKQISSKEIDGFYNLVGHLSNFQLRLLRKYFNDPNMSGVSYWDEKRLEKYFYQWVQGWHTKGGTDEAEKKNIILKTKGAPLLKTLKSLSADLTIPPYEDQNNRRPPKCQSVLLSDEKLTMHYPKWKEWVGQLVKQNDNAYLNENVTLANALHRIVERSRSIDPYQLRLLISITDAEKRNDLAGYKRLKLSLGSEVDEFLLLVKNIVDETKEAREGLWFETENKLFFKCGKTPPRKEKLKSTLLSAVLGKNLSDDEQSSFIEEFWKSGTPKIERRNVRGWCRLASQVQKTYGVYLKEYGLQQLHKLEAGKKLDDKPLALLYKNSGLIASKIGEALNIEPDEVSRFASPHSLAQIFNIIEGDVAGFNKTCRACTYENIWRMQEEKVESLLTNQLLSEIHGERKVPLKSAMCTRLSADSTRPFDGQMASIIEHIARKIAQHKIAQINDVPKEFSIDIPIIIESNQFSFTAELEEIKRGRGSAKAKKAKELGEKSKAGWVSKTERIKTSSEGICPYTGAPLGGSGEIDHIIPRSLTGRTKKTVFNSEANLIYCSSKGNHDKGNRVYVIEQLNDKYLKKQFSTSDVNLIKKKIKTTIQRFTEGGEKLRSFSELSREDQKAFRHALFVPELKSEVTSLLAVKNITRVNGTQAWLAKKIASLLAEHLDKQGRDYTLSAHQIDPWSVSKQRKMLASAEPIWAKKDPQPAASHVVDAVCTFLEALEQPHTASRLKTISSTSFEKTGWRSALIPDLIKVDALDRRPKYRRYNIGSTSLFKDGIYAERFLPILIDENGLMAGYDIDNSLKAKGADVVFESLSPFLLFKGEEVGAQSLSDWQERIDGRYLYMSIDKVKAFDYLQEKVGEKDIAAELLNSIHFTQRKTELRAKFSDDSGKKMKTLDAIRKSLKLTVTVNEIGKRKEKCGFSGTIGIPAKSAWENLLDEPLLETYWGTKMPPQEIWEKVYRKHFPRNIPNQAHRKVRKDFSLPVVDSVSGGFRVKRKTPNGYNYQLLAIDGYSAVGFKKEGDNVDFKSPALVPQIAESKSVTPISSELVHLDKNEIVYFDEWRKIDISDSDLKQFVSSLELAPGSQNRFYIRFTVDEDQFERHFKSALRVNGIQDLDTVNKTFDWNREIPSLLIPPRSNLFLLETGQKITFEYIANGANAEVKKAYSLRRA

SEQ ID NO: 240 - protein, 1186 aa, Gardnerella vaginalis
  Gardnerella vaginalis 1500E
MEGNISYAIGIDVGLNSVGLAAIRLDNNGEPIRILKAMSVIHDAGIDPNGAKESDTRKAISGVARRVRRLYRQRRRRLQKLDFLLHSLGFPVVENKDLDFSDSFIPWIFRAKLADEYIADEKQRKQMLSVAIRHIARHRGWRNPYQSIKSMTQETEYSEFYNELLKNIEKFAPGVGCEGSTPAQLVRDYLLLQQGKASRRLRITTDEKRKNHPNSLNPILPRKLMQSDNMLEILNIFNVQHIDDKYVREQIINAVFYAKSPRGSAENRVGKDAITGKGKRALKASLAFQKYRIISTISNLRIRENSKERCLTIEEKQSVYKLLTTSTDESSKEKSAEAPLYTWIDVADCLGIERYKLRGVGSQIGDGESVGNRPPMLNSELAIIYANNKSLGKSLLTWWLDANRTQEDKEALIEILSNTVDIEAIHDNPEYQDKYGSAIAFIDSMDETEIAALENISLPDGRAAYSLETLDKLNKQMLETDDDLFEARKKLFNLPNNWRPSEAPIAEPTGNPSVDRVLKIVHRFLISAKNRWGNPERINIEHVRSGFKSKKMANSYKELLDKRTKGKENLKAMMRNSLHLGMSDSISDADIRRYEAVQRQNGQCLYCGSEITYHTCELDHIVPRKGPGSTNTRENLVATCSLCNAQKCNTPFSTWCEQSTYCKNHDISVDSAINRVRAFIFPPNSYDKRGANQFKKEVIARLKQKVGDEAFDNRSIESVAWMANELHRRIDWYYNSQNYQTNNGISDITNKAQTNVGVYAGSLTAIARRMSGIDGKLEFFDGRRKTRFDRRHHAVDASVIAMMTPGIAQILAIKCNLRETQLLQGNKVVPGGIDWKEYPTANDQGYQQYANWSVRMNALLKLLNEEMRADRIAVVNSIRLRYNNSSVHQYKVNALLKLHVGDEIDSGTIRRSSTPALYCALTRNPDYDVNNGLPENPNRAILLHDKKLNADDSITFFKAQAVQLFVREGSAEIGSSTHHLRIYEYFKKLKSGKIKKSYGMIRVFQNDLHRHIHEDLFSCDLPEQSISMRYADTEVAHAVQTGNSNYLGYLVPGDEIIVDFSHVKLSGNIGTFVEFLNKIGANCAAYNHWVVVGTDTEKVLILKPSMISSEGIDKLYSNCKRNNFDYSSYEKSINEILVGKGWRVSVNVLAKYNAETIRRNALGEVRWTSRSHLPISWSWNTGENRE

SEQ ID NO: 241 - protein, 1186 aa, Gardnerella vaginalis
  Gardnerella vaginalis 284V
MEGNISYAIGIDVGLNSVGLAAIRLDDYGEPIRILKAMSVIHDAGIDPNGAKESDTRKAISGVARRVRRLYRQRRRRLQKLDFLLQSLGWPVVENKDLDFSDSFIPWIFRAKLADEYIADEEQRKQMLSVAIRHIARHRGWRNPYQSIKSMMQETEYSEFYNELLKNIEKLAPGVGCEGSTPAQLVRDYLLSQQGKASRRLRITTGGRRKNHPHSLDPVLPRKLMQSDNMLEILNIFNVQHIDDKYVREQIINAVFYAESPRGSAENRVGKDAITGKGKRALKASLAFQKYRIISTISNLRIRENSKERCLTIEEKQNVYKLLTTSIDKSSKRKSAEAPLYTWIDVADCLGIERYKLRGVGSQIGDGESVGNRPPMLNSELAILYANNKSLGQSLITWWLASNRTQEDKEALIEILSNTVDIEAIHDNPEYQDKYGSAIAFIDSMNETEIAALENISLPDGRAAYSLETLDELNKQMLETDDDLFEARKKLFNLPNNWRPAEAPIAEPTGNPSVDRVLKIVHRFLISAKNRWGNPERINIEHVRSGFQSKKMANSYKELLDKRTEGKENLKAMMRNSLHLGTSDSISDADIRRYEAVQRQNGQCLYCGSEITYHTCELDHIVPRKGPGSTNTRENLVATCSSCNAQKCNTPFATWCEQSTYCKNHDISADSAINRVRAFIFPPNSYDKRGANQFKKEVIARLKQKVGDEAFDNRSIESVAWMANELHRRIDWYYNSQNYQTNNGISDISNKAQTNVGVYAGSLTAIARRMSGIDGKLEFFDGRRKTRFDRRHHAVDASVIAMMTPGIAQILAIKCNLRETQLLQGNKVVPGGIDWKEYPTANDQGYQQYANWSVRMNALLKLLNEEMRADRIAVVNSIRLRYSNSSVHQYEVNALLKLHVGDEIDSETIRRSSTPALYCALTRNPDYDVNNGFPENPGRTILLHNKKLNADDSITFFKAQAVQLFVREGSAKIGNSIHHLRIYEYFEKLKSGKIKKSYGMIRVFQNDLHRHIHEDLFSCDLPEQSISMRYADTKVAHAVQTGNANYLGYLVPGDEIIVDFSHITLSENIGKFVEFLNKIGADCTAYRHWVVVGTDTEKVLILKPSMISSEGIDKLYSNCERNNFDYSSYEKSINEILAGKGWRVSVNVLAQYKAATIRRNALGEVRWASRSHLPISWSWDTGENRE

SEQ ID NO: 242 - protein, 1186 aa, Gardnerella vaginalis
  Gardnerella vaginalis 5-1
MEGNISYAIGIDVGLNSVGLAAIRLDNNGEPIRILKAMSVIHDAGIDPNGAKESDTRKAISGVARRVRRLYRQRRRRLQKLDFLLHSLGFPVVENKDLDFSDSFTPWIFRAKLADEYIADEKQRKQMLSVAIRHIARHRGWRNPYQSIKSMTQETEYSEFYNELLKNIEKFAPGVSCEGSTPAQLVRDYLLSQQGKASRRLRITTDDRRKNHPNSLDPVLPRKLMQSDNMLEILNIFNVQHIDNKYVREQIINAVFYAKSPRGSAENRVGKDAITGKGKRALKASLAFQKYRIISTISNLRIRENSKERCLTIEEKQSVYKLLTTSTDEYSKEKSAEAPLYTWIDVADCLGIERYKLRGVGSQIEDGESVGNRPPMLNSELAILYANAKSLKQSLITWWLAANRTQEDKEAFIEILSNTVDIEAIHDNPEYQDKYGSVIAFIDSMDETEIAALENISLPNGRAAYSLETLDKLNKQMLETDDDLFEARKKLFNLPNNWRPSEAPIAEPTGNPSVDRVLKIVHRFLISAKNRWGNPERINIEHVRSGFQSKKMANSYKKLLDKRTEGKENLKAMMRNSLHLGTSDSISDADIRRYEAVQRQNGQCLYCGSEITYHTCELDHIVPRKGPGSTNTRENLVATCSSCNAQKCNTPFATWCEESTYCKNHDISVDSAINRVRAFIFPPNSYDKRGASQFKKEVIARLKQKVGDEAFDNRSIESVAWMANELHRRIDWYYNSQNYQTNNGISDITNKAQTNVGVYAGSLTAIARRMSGIDGKLEFFDGRRKTRFDRRHHAVDASVIAMMTPGIAQILAIKCNLRETQLLQGNKVVPGGIDWKEYPTANDQGYQQYANWSVRMNALLELLNEEMRADRIAVVNSIRLRYSNSSVHKDDVHALLKLHVGDEIDSETIRRASTPALYCALTRNPDYDVNNGLPENTDRTILLHDKKLNADDSITFFKSKAAQLFVREGSVEIGNSIHHLRIYEYFEKLKSGKVKKSYGMIRVFQDDLHRYIHEDLFSCDLPEQSISMRYADTKVAHAVQTGNANYLGYLVPGDEIIVDFSHVKLSGYIGEFVEFLNKIGANCAAYKHWVVAGTDDKTTLILKPSMISSEGIDKLYSNCERNNFDYASYEKSIDKILVDKGWRVSVNVLDQYKAATIRRNALGEPRWASRSHLPISWSWDTGENRE

SEQ ID NO: 243 - protein, 1392 aa, Gemella haemolysans
  Gemella haemolysans ATCC 10379
MANKTWYLGLDIGSASVGWAATDTGYKIIRKNKKRLWGVRLFEEAKTAEDRRGYRSSRRRLARRKWRLNLLEELFTSEVKKVDENFFLRLKESQYHYEDKTHKVPYAIFNDKDYTDKDYYKDYPTIYHLRSKLMTEENPDIRKVFLAIHHIIKNRGHFLLQGQSFKDGNLNNLIKELLELDILHVGFEVTEEVVDKIADISLEKKTSKDKLNDIKELYPKEKQLLEVFRLIFGGKTSLDKLFAIDEYKELDAAIKSVSFKEKIYEEVRHDYEQVLSNYIELLDLAKLVYDSIILSDIKKEGKTLSESKVELFEKHRDDLLKLKNLVKNDSKLSEDKKVELYALIFKEDKDKGTNYVNYIRKSEEGKGCNYEDFKKFLVKELAKLEESSVKTEIIKDLELEQFLPLQRTKDNSVVPYQIHKEELVKILDNAARYHSFLNEKDESGYNVREKVIQLLEFRIPYYVGPLNSSKKAKEGGFAWSVRNTGYENTPVTPWNYSKVIDESASAEKFITNLTNKCTYLKGEDVLPKSSLLYSEFALLNELNALKYDGNRISLEARNTIIEKLFKQQGKKVTKTSIKNLLKAEGYIDGKGEITGIDITVKNDLKSYRDFKKILGNKFNSEHVENIILWITLYGESRKLIKAKIESVYGEVYSKDEITKMSRLVYKDWGRFSRKLLTELVSKKLYNEETGECLNIIGAMRQNNILFMELLADRFDYSKQIVEFNKELQEDVTEIAPEILDDLYVSPAVKRSIWQTVRIVEELKKIIGCAPAKIFVETTRSNQEKKKPTDSRKKQLELAYKAVKKDVKELEKEIGTINFDVLNDRLSSVEPSKLKAKKLYLYYTQLGRCMYSEEPINISELFDNNKYDIDHIYPQSKIKDDSFTNTVLVKRESNAAKTDRYPLGSDIQTPSNRRFWKFLKEKGLISDEKYNRLVRTEEFSDEELSGFIARQLVETSQSVKAVASILGELNPETSICYSKAENVSSFRQNFGKIKKGDRDSKNNDQLIKVREINDYHHAKDAYLNVVVGNVYDTKFTRNVFNFIKDKKDGRKYSLNKVFYENVSDSKTVAWEMDKTIHQVEKVMNNNNIMVTRRTSEQKGGLFDATVYKAKVAAKAKDGVYYPLKTSNSVVKDVAKYGGYTSIGIAYYSIFEYTIVNKKGEEKITRIIPIPIYISQNIKDSTALIEFGKSQIFCRAYEKIKDFKLLYRKLCIGSKININNYQYYIGGKSDERFYYDSAIQVTLDKKSEKYLKILSKYQNWKKENKDGELWENITKENNIELYNKLVEKMNSEIFTKKKSNKYNELNSEEIRNNFIKISVEEQAKVLLEILNLLTNKKSIFDLKSIDIKAARGKISFNLTSLIQFSIIEQSITGFYEKEITIIGDKGNDMENNNS

SEQ ID NO: 244 - protein, 1385 aa, Gemella morbillorum
  Gemella morbillorum M424
MKNKTWYLGLGVGPTSIGWAATDSNYKLLRKNKKRLWGVRLFEEAKTAVDRRTFRAERRRLARRKWRISLLEELFAKEVSKNDPNFFLRLKESKYHFEDKSLMNEYILFNDKDYTDKDYYKEYPTIYHLRLSLTTEENPDIRKVYLAVHSMLKNRGHFLLQGQSFNDSNIDSVIKELLELETVKINFEVTDEVIHSLKKIALEKKNLSDKNNDVKKLYPKEKQLQEIFKLVFGGKTSLDKLYDIEEYKELDNSVKSISFKEKVYEEVRPDYEQILSNYIELLDLAKLVYDSIVLADIKKEGKTISESKVELYNKHKDDLANLKKLVKIDSKLSEDKKKEVYFTIFKEDKEKGTNYVNYTHRSQEGKSCSYEDFKKFLKKELEKLEDSPTKTTILEELDLETFLPLQRTKDNSVVPYQIHKEELVKILDNAAKYHSFLAEKDDSGYSTREKVVQLFEFRIPYYIGPLNAHHNTENGGYSWAIRKKGMESVPVTPWNFKDVIDESASAEAFVNNLKNKCAYLSGEDVLPKNSLLYSEYALLNELNALRYEGNRISVEARDVIVTKLFKEQGKKVTKKTIKELLKTEGFIDGKGEIVGIDNIVKNDLKSYRDFKKILADKFDKERVENIILWITLYGESRKLIKEKITKVYGDFYTVDEIEKMSRLTYKDWGILSRKLLTELVSEKLYNEETGECLNIIGAMRQGTILFMELLADKFDYMSQIKNHNKENKDDITEITPDILENLHASPAVKRSIWQTVRIVEELKTIIGCVPTKIFIETTKRNNAPYKVPTLNRNDLVTKYKTIREHEIFELEKELKNTLDFTLNKNRLINEEPSKLKATKLYLYYTQLGRCMYTGKKIDLGELFDNNNKYDIDHIYPQSKVKDGSFNNIVLVTKASNDMKADVFPLKSKFQTKENKIFWRFLKEKKLITEEKYNRLVRTEEFSNGELTGFITRQLVETSQAIKVISNVLRELNPETTICYSKAENVSSFRQSFGKIKEANRKAENNEKLIRVQEINDYYNAKDAYLSIVVGNVYDVKFTRNVHNFIKNNKDARRYSLNGLFYTDVKNANTIAWEMDKTVHVVEKTMNNNNILITRRTSEQKGALYDATLYKAKVAEKAKEGTYYPLKTTDSKIKDVGKYGGFTKIKIAYYSIFEYTLDGKKGKQKITRIVPIPIYISQNIKDDKALLEYAQTRLPGKDLKIKYRKLCIGSLVKINNFNYYIGGKTNNNFTFDSAVQVILDKDSESYIKELAKYLNWKKENKDGKLWESITEDKNIQLYDSLVKKMNTGIFIRKTPNKYTELLTLEVKNKFINIDIDEQVKLLLEILNLLTNKKFTSKLNEIGITASRGVCSFNLSNQSQFSIIEQSVTGVYEKEKLIIEKKKEGIL

SEQ ID NO: 245 - protein, 1003 aa, Gluconacetobacter diazotrophicus
MIDESLTFGIDLGIGSCGWAVLRRPSAFGRKGVIEGMGSWCFDVPETSKERTPTNQIRRSNRLLRRVIRRRRNRMAAIRRLLHAAGLLPSTDSDALKRPGHDPWELRARGLDKPLKPVEFAVVLGHIAKRRGFKSAAKRKATNISSDDKKMLTALEATRERLGRYRTVGEMFARDPDFASRRRNREGKYDRTTARDDLEHEVHALFAAQRRLGQGFASPELEEAFTASAFHQRPMQDSERLVGFCPFERTEKRAAKLTPSFERFRLLARLLNLRITTPDGERPLTVDEIALVTRDLGKTAKLSIKRVRTLIGLEDNQRFTTIRPEDEDRDIVARTGGAMTGTATLRKALGEALWTDMQERPEQLDAIVQVLSFFEANETITEKLREIGLTLAVLDVLLTALDAGVFAKFKGAAHISTKAARNLLPHLEQGRRYDEACTMAGYDHAASRLSHHGQIVAKTQFNALVTEIGESIANPIARKALIEGLKQIWAMRNHWGLPGSIHVELARDVGNSIEKRREIEKHIEKNTALRARERREVHDLLDLEDVNGDTLLRYRLWKEQGGKCLYTGKAIHIRQIAATDNSVQVDHILPWSRFGDDSFNNKTLCLASANQQKKRSTPYEWLSGQTGDAWNAFVQRIETNKELRGFKKRNYLLKNAKEAEEKFRSRNLNDTRYAARLFAEAVKLLYAFGERQEKGGNRRVFTRPGALTAALRQAWGVESLKKQDGKRINDDRHHALDALTVAAVDEAEIQRLTKSFHEWEQQGLGRPLRRVEPPWESFRADVEATYPEVFVARPERRRARGEGHAATIRQVKERECTPIVFERKAVSSLKEADLERIKDGERNEAIVEAIRSWIATGRPADAPPRSPRGDIITKIRLATTIKAAVPVRGGTAGRGEMVRADVFSKPNRRGKDEWYLVPVYPHQIMNRKAWPKPPMRSIVANKDEDEWTEVGPEHQFRFSLYPRSNIEIIRPSGEVIEGYFVGLHRNTGALIPTPVGPDSYVIA

SEQ ID NO: 246 - protein, 1050 aa, Gluconacetobacter diazotrophicus
MGENMIDESLTFGIDLGIGSCGWAVLRRPSAFGRKGVIEGMGSWCFDVPETSKERTPTNQIRRSNRLLRRVIRRRRNRMAAIRRLLHAAGLLPSTDSDALKRPGHDPWELRARGLDKPLKPVEFAVVLGHIAKRRGFKSAAKRKATNISSDDKKMLTALEATRERLGRYRTVGEMFARDPDFASRRRNREGKYDRTTARDDLEHEVHALFAAQRRLGQGFASPELEEAFTASAFHQRPMQDSERLVGFCPFERTEKRAAKLTPSFERFRLLARLLNLRITTPDGERPLTVDEIALVTRDLGKTAKLSIKRVRTLIGLEDNQRFTTIRPEDEDRDIVARTGGAMTGTATLRKALGEALWTDMQERPEQLDAIVQVLSFFEANETITEKLREIGLTLAVLDVLLTALDAGVFAKFKGAAHISTKAARNLLPHLEQGRRYDEACTMAGYDHAASRLSHHGQIVAKTQFNALVTEIGESIANPIARKALIEGLKQIWAMRNHWGLPGSIHVELARDVGNSIEKRREIEKHIEKNTALRARERREVHDLLDLEDVNGDTLLRYRLWKEQGGKCLYTGKAIHIRQIAATDNSVQVDHILPWSRFGDDSFNNKTLCLASANQQKKRSTPYEWLSGQTGDAWNAFVQRIETNKELRGFKKRNYLLKNAKEAEEKFRSRNLNDTRYAARLFAEAVKLLYAFGERQEKGGNRRVFTRPGALTAALRQAWGVESLKKQDGKRINDDRHHALDALTVAAVDEAEIQRLTKSFHEWEQQGLGRPLRRVEPPWESFRADVEATYPEVFVARPERRRARGEGHAATIRQVKERECTPIVFERKAVSSLKEADLERIKDGERNEAIVEAIRSWIATGRPADAPPRSPRGDIITKIRLATTIKAAVPVRGGTAGRGEMVRADVFSKPNRRGKDEWYLVPVYPHQIMNRKAWPKPPMRSIVANKDEDEWTEVGPEHQFRFSLYPRSNIEIIRPSGEVIEGYFVGLHRNTGALTISAHNDPKSIHSGIGTKTLLAISKYQVDRFGRKSPVRKEVRTWHGEACISPTPPG

SEQ ID NO: 247 - protein, 1371 aa, Gordonibacter pamelaeae
  Gordonibacter pamelaeae 7-10-1-b
MNLRNVESYQVGLDIGTGSVGWAVLDDNGDLCRFKGKPTWGSRVFPTAETAAEARVHRGQRRRYDRRRQRIDLLQRFFADEVAKVDPEFFIRLNQARLHPENRDPAHADYRWPLFNGSNFTEKDYYRQFPTIYHLRAHLLKSDEPADIRLVYLALHNIVKHRGNFLHQDNPSLSARNANVGDAVEALCLALDEWCGAHDVECACDEAALAEALGDASLRPGEKRERAEAALGVEKAHKKLAKAVSSAVVGYAAEFGHVFFAESEGSKFALSNDEKVEAYVCPDEGRDLFDAMRAVHSSYVLMGILSEAQGELLSVCKVGEYERYKRDLETLKSLVRAYGPERYDEFFCGPFYEGTRDYDPGKAQGYTKYNLGASKLSHEDFLKEVQKLLKDIGAQADERYADIERAIEAGAFLRRLKTSDNGTIPYQLHLEEMDAIIERQAAFYPFLAQEKDKLKSLVSFRIPYYVGPLTQKNAARDGKGEARFAWSSRKPGMEDARVYPWNWEDVIDKDQSAEDFIRRMTGTCTYLKGEPVLARCSLDYELFCVLNELAGARWTQDGDKSYRFDAADRLGIVEDLFKKRKRVTYEAAEKWLARTHGPESGKSAGGAYHVSGGQGEDAFESQLSSHYDFCKILGVDELSDADEAMAEDIILWNTVFEDRSILKRKIKLAYGDRLGDAQVRKLCQKRYTGWGRLSGELLRGLRSATDNGPKTIMDILLEGDPNHARRMGAAMNLMEILHDDLLEFQAKIDEHNRERALAVGGMSVDEVTGSPALRRGINQALRVVDEIAGIAGKPPAHIYVEVTRDEGARNKGRRTTSRYRALEAALSSIKAQCADVYAELKERDPRALDDERLTLYFMQCGKCMYSGDALDINKLQTYQVDHILPQSYVKDDSFENKVLVRPDTNQRKGDTLLLDERLIARMRGFWRTLRDAELIGEKKFNNLTRTSVSDEQMKKFVSRQLVETGQMVKQVQQLLQARYPESEVQPVKAGVSHQLRVGCALAKSREINDFHHAHDAYLACQVGRFVQYRHSAVYSEPVKMAAVVKQFIKKQAEDYRRTRELPGSDGFIVSSFMTPGFDVKTGEVFRDAWDAGAEIDRIRRCFDYKDCFISRMPEETHGAFWDATIYSPRAAGKTLSLPLKRGLDPRKYGSYSREQFAYFFVYEAVKPKKKQRVLEFAPVPVRVASALANDPDALEDYARELAEAEGLVFERIRRRKVYKYQQIIVGDSRLYVTGREEVRNARQLAFSQDETKLICRIEQGEECEEGELLDLFRSMQRKYLACAPRLARLMKVAEMEEGFIAATASGKREVLLSLTSIAAAHRNSIDLKPIGRKGSSGQMKITFSKELSTNGILFVDSSVTGMFERRCRLGL

SEQ ID NO: 248 - protein, 1054 aa, Haemophilus parainfluenzae
  Haemophilus parainfluenzae ATCC 33392
MENKNLNYILGLDLGIASVGWAVVEIDEKENPLRLIDVGVRTFERAEVPKTGESLALSRRLARSARRLTQRRVARLKKAKRLLKSENILLSTDERLPHQVWQLRVEGLDHKLERQEWAAVLLHLIKHRGYLSQRKNESKSENKELGALLSGVDNNHKLLQQATYRSPAELAVKKFEVEEGHIRNQQGAYTHTFSRLDLLAEMELLFSRQQHFGNPFASEKLLENLTALLMWQKPALSGEAILKMLGKCTFEDEYKAAKNTYSAERFVWITKLNNLRIQENGLERALNDNERLALMEQPYDKNRLFYSQVRSILKLSDEAIFKGLRYSGEDKKAIETKAVLMEMKAYHQIRKVLEGNNLKAEWAELKANPTLLDEIGTAFSLYKTDEDISAYLAGKLSQPVLNALLENLSFDKFIQLSLKALYKLLPLMQQGLRYDEACREIYGDHYGKKTEENHHFLPQIPADEIRNPVVLRTLTQARKVINGVVRLYGSPARIHIETGREVGKSYKDRRELEKRQEENRKQRENAIKEFKEYFPHFAGEPKAKDILKMRLYKQQNAKCLYSGKPIELHRLLEKGYVEVDHALPFSRTWDDSFNNKVLVLANENQNKGNLTPFEWLDGKHNSERWRAFKALVETSAFPYAKKQRILSQKLDEKGFIERNLNDTRYVARFLCNFIADNMHLTGEGKRKVFASNGQITALLRSRWGLAKSREDNDRHHALDAVVVACSTVAMQQKITRFVRFEAGDVFTGERIDRETGEIIPLHFPTPWQFFKQEVEIRIFSDNPKLELENRLPDRPQANHEFVQPLFVSRMPTRKMTGQGHMETVKSAKRLNEGISVIKMPLTKLKLKDLELMVNREREKDLYDTLKARLEAFNDDPAKAFAEPFIKKGGAIVKSVRVEQIQKSGVLVREGNGVADNASMVRVDVFTKGGKYFLVPIYTWQVAKGILPNKAATQYKDEEDWEVMDNSATFKFSLHPNDLVKLVTKKKTILGYFNGLNRATGNIDIKEHDLDKSKGKQGIFEGVGIKLALSFEKYQVDELGKNIRLCKPSKRQPVR

SEQ ID NO: 249 - protein, 1052 aa, Haemophilus sputorum
  Haemophilus sputorum CCUG 13788
MKNTSLNYVLGLDLGISSVGWAVVEIDEKENPLSLIDVGVRTFERAETQKGESLALARRLARSARRLTQRRVARLKKAKRLLKSENILLSTDECLPHQVWQLRVEGLERKLERQEWAAVLLHLIKHRGYLSQRKNESKSENKELGALLSGVANNHKLLQQTTYRTPAELAVKKFEVEEGHIRNQQGSYTHTFSRLDLLSEMELLFSRQQHFGNPFTSEKLLENLTALLMWQKPALSGDAILKMLGKCTFENEYKAAKHTYSAERFIWITKLNNLRIQENGLERALNDNERLALMKQPYEKAKLTYAQVRSILNLSDEAIFKGLRYSGEDKKTSETKTVLMEMKAYHQIRLALEKNDLKTEWAELKVNSSLLDEIGTAFSLYKTDEDISTCLAGKLSQPVLNALLENLNFDKFIQLSLKALHKILPLMQQGLRYDEACAEIYGDHYGKKTEENHLLLPQIPADEIRNPVVLRTLTQARKVINGVVRLYSSPARIHIETGREVGKSYQDRRELEKRQEENRKQREKAISEIKTLFPNFSGEPKAKDILKMRLYYQQNAKCLYSGKPLELHRLLEQGYVEIDHALPFSRTWDDSFNNKVLVLANENQNKGNLTPFEWLDGKNNSERWKAFKALVETSAFPYTKKQRILSQKLDEKGFIERNLNDTRYVARFLCNFIADNMHLTGEGKRKVFASNGQITALLRGRWGLAKSREDNDRHHALDAVVVACSTVSMQQKITRFVRFEEGNVFTGERIDRETGEIIPLHFPAPWKFFREEVEIRIFSDNPKLELENRLIARPQANHEFVQPLFVSRMPTRKMIGQGHMETIKSAKRLNEGLSVIKMLLTKLRLKDLESMVNREREKELYEALKARLEAFNDEPAKAFAEPFMKKGGAIVKSVRVEQVQKSGVLVRDGNGVADNASMVRVDVFTKGGKYFLVPIYTWQVAKGILPNKAVIQGKNEEDWEVMDDATFRFSLHQNDLVKLVTKKKTIFGYFNGLNRATGNIDIKEHDLEKSKVKDGIHQSIGIKLALSFEKYQVDELGKNIRLCKSSKRQAVR

SEQ ID NO: 250 - protein, 1052 aa, Haemophilus parainfluenzae
MENKNLHYILGLDLGIASVGWAVVEIDEKENPLRLIDVGVRTFERAETQKGESLALSRRSARSARRLTQRRVARLKKAKRLLKSENILLSTDERLPHQVWQLRVEGLDRKLERQEWAAVLLHLIKHRGYLSQRKNESKSENKELGALLSGVASNHELLQQATYRTPAELAVKKFEVEEGHIRNQQGAYTHTFSRLDLLAEMELLFSRQQHFGNPFASEKLLENLTALLMWQKPALSGEDILKMLGKCTFEDEYKAAKNTYTAERFVWITKLNNLRIQENGLERALSDNERLMLIEQPYEKAKLTYAQVRSILNLSDDAIFKGVRYSGEDKKAIETKTTLMEMKAYHQIRKVLEGNNLKAEWVALKANPTLLDEIGTAFSLYKTDEDISAYLAGKLSQPVLNALLENLSFDKFIQLSLKALYKLLPLMQQGLRYDEACREIYGDHYGKKTEETHHFLPQIPADEIRNPVVLRTLTQARKVINGVVRLYGSPARIHIETGREVGKSYKDRHELKKRQEENRKQREKTISEIKTLFPNFSGEPKGKDILKMRLYYQQNAKCLYSGKPLELHRLFEQKYVEVDHALPLSRTWDDSFNNKVLVLANENQNKGNLTPFEWLDGKNNSERWRTFKALVETSAFPYAKKQRILSQKLDEKGFIERNLNDTRYVARFLCNFIADNMHLTGEGKRKVFASNGQITALLRRRWGLAKSREDNDRHHALDAVLVACSTVAMQQKITRFVRFKAGDVFTGERIDRETGEIIPLHFPTPWQFFKQEVEIRIFSDNPKLELENRLPDRPQANHEFVQPLFVSRMPTRKMTGQGHMETVKSAKRLNEGISMIKMPLTKLKLKDLELMVNREREKDLYDALKTRLEAFNDDPAKAFAEPFMKKGGAIVKSVRVEQVQKSGVLVRQGNGVADNASMVRVDVFTKDGKYFLVPIYTWQVAKGILPNKAVIQGKDEEDWEDIDDATFQFSLHPNDLISVKTKKDEFLGYFNGLNRHTGGINIRTHDLEKSKGKQGIFEGIGVKIALSFEKYQIDELGKNIRLCKPSKRQPVR

SEQ ID NO: 251 - protein, 1052 aa, Haemophilus sputorum
  Haemophilus sputorum HK 2154
MKNTSLNYVLGLDLGISSVGWAVVEIDEKENPLSLIDVGVRTFERAETQKGESLALARRLARSARRLTQRRVARLKKAKRLLKSENILLSTDECLPHQVWQLRVEGLERKLERQEWAAVLLHLIKHRGYLSQRKNESKSENKELGALLSGVANNHKLLQQTTYRTPAELAVKKFEVEEGHIRNQQGSYTHTFSRLDLLSEMELLFSRQQHFGNPFTSEKLLENLTALLMWQKPALSGDAILKMLGKCTFENEYKAAKHTYSAERFIWITKLNNLRIQENGLERALNDNERLALMKQPYEKAKLTYAQVRSILNLSDEAIFKGLRYSGEDKKTSETKTVLMEMKAYHQIRLALEKNDLKTEWAELKVNSSLLDEIGTAFSLYKTDEDISTCLAGKLSQPVLNALLENLNFDKFIQLSLKALHKILPLMQQGLRYDEACAEIYGDHYGKKTEENHLLLPQIPADEIRNPVVLRTLTQARKVINGVVRLYSSPARIHIETGREVGKSYQDRRELEKRQEENRKQREKAISEIKTLFPNFSGEPKAKDILKMRLYYQQNAKCLYSGKPLELHRLLEQGYVEIDHALPFSRTWDDSFNNKVLVLANENQNKGNLTPFEWLDGKNNSERWKAFKALVETSAFPYTKKQRILSQKLDEKGFIERNLNDTRYVARFLCNFIADNMHLTGEGKRKVFASNGQITALLRGRWGLAKSREDNDRHHALDAVVVACSTVSMQQKITRFVRFEEGNVFTGERIDRETGEIIPLHFPAPWKFFREEVEIRIFSDNPKLELENRLIARPQANHEFVQPLFVSRMPTRKMTGQGHMETIKSAKRLNEGLSVIKMLLTKLRLKDLESMVNREREKELYEALKARLEAFNDEPAKAFAEPFMKKGGAIVKSVRVEQVQKSGVLVRDGNGVADNASMVRVDVFTKGGKYFLVPIYTWQVAKGILPNKAVIQGKNEEDWEVMDDATFRFSLHQNDLVKLVTKKKTIFGYFNGLNRATGNIDIKEHDLEKSKVKDGIHQSIGIKLALSFEKYQVDELGKNIRLCKSSKRQAVR

SEQ ID NO: 252 - protein, 1338 aa, Helcococcus kunzii
  Helcococcus kunzii ATCC 51366
MQDYYLGLDIGTNSVGWAVTDENYNLLRKKGKDLWGVRLFKEAQPATERRGHRSSRRRTIRKSLRKQLLRELFEEEINAIDKDFFLRLDESKYWLEDKKIEGKYSLFNDENFTDKDYYEKFPTIFHLRKALIESDDKEDIRLYFLAINQMMKRRGHFLIDGKLSNVEDITPFKECIQNLINEELDTEIETEFYDKAIKIVSDYSLKKTEKKNLIKDLVKETDSIEDSKKIINIFNLLISGKSKVNGIFDDEEILEKIKEDNKEDFYLTSEKYEENLEYFSQLLDYRFELISSLKSIYDYIILQEVLKGKKYLSYAQVERYKNHKEDLRKLKQLIKKYDKNGKIYYQIFRDENFKKGYVAYLGYYKKNKKNVPVKKCDYDTFSKNIKSTLDKICDKEDPLYIELIDKIEKGGFLLKQIVSTNSVIPHQVHELELDKILENLEKNYPSFKEISDGVSKIDKIKMIFNFRIPYYVGPLNDYHKDKVNSNTWIVKNEGFENENIRPWNFSKIVDEHACEEEFIKRMINECSYIPGEKVLPKSSLLYSEYMVLNELNNLRVNGDKLNPKIKKEIVENIYKKERKVTLKKIRNFLIINNYVDSKVEFSGLSDGIKANMSSYIDFAEILDDNFDNNMVEDLIEQITIHVGNVKLLTEKISNKYPNLEKKQINKIVNLKFKDWARFSRKLLVGIEGTEKETGEINTIIGFLRETNENFMELMSNRYTFSEEISEIKKKYIPNKLSKQIVDDLYVSPAVKKMIWQVLNINDELIKVLGKQPKKIFIEMARGKEEKPEVKDSRKNKLIELYKNLGKEGKEWLNRIEDKTEADFRNRALYLYYTQMGRCMYTGEIIDIERLYDKELYDLDHIIPRKMKKDDSIHKNLVLVTRNSNQYEKKDNYPVPEVIKSRENVRHLWYALKKKGLITEEKYNRLTRINPLSDKELSEFIERQLVETRQTTKVVKDLFENYYTDSKIVTVKAGLVSELRRDFEVLKCREINDLNHAHDAFLNIIVGDVWSKKFTSNPYNFVKKNREKYTLNNIFTKNQKDLRGNEIWNCAEGKKRIIKTLNKPSVLFSVENFEQTGQLFDQNIIGKQDYKEKTSYVPIKGDERLQDISKYGGYRGISGAYFFIVEHTEKNKRVKTIESLPIYMKSYVEENGLLDFCTNEMKLVDPKIIVKKLNYKSEIIVDGFKYLISGKTENRLSLETNEYLYWNHTQTTDIKKILNINEKIELEKYNGDIESERENIIKYIQIILEKFKLKPFIKRRNLPNIEINFADYETEKLLQLLVNLIPLTTKYVSPVDLTVISGSKYAGKVLIPKKISNLNEVIFISKSITGIYESRRRII

SEQ ID NO: 253 - protein, 1007 aa, Helicobacter canadensis
  Helicobacter canadensis MIT 98-5491
MKVLGFDIGINSIGWAFVENNELKDCGVRLFTKAENPKTKESLALPRRNARSSRVRLRRRRSRLLSLKHIISKEFGLHYEDYIALDGNLPKAYTGKIESIYKLRYEALSQAISKEDLARVILHIAKHRGYMNKNQKTSQDSEKGAILSAIKENSNKIKHYQTAGEYFYKELFENLRDGTKEFKNIRNKAMKNEKTGNMESTYYNTILASDLEKELKLILEKQQAYHNYSDTFIKEVLEIAFYQRPLKDFSHLVGSCTFYENEKRACKNSYSAWEFIALGKIINTLESIKKDTGEIFSNEIITQILKEVLDKGSLSYTKLRKMINLDEKVKFKGLKYDKEGVEKTNLIEFKKLKEFKKALGEHNLERKTLDEIATHITLTKDENQLKKQLEQYALSQNQIDALAELDFNDHINLSFKALYEILPLMEKGKRYDEACNELGLKAKTSNQKSEFLPAFCDSIFAQELTNPIVNRAISEYRKVLNRLLKKYGKMHKIHIELARDAGLSKEARNKIEKEQKENKDINDKAEKTCKEFGLKPNAKNILKIKLWREQGEICAYSGKKITIDDLKEDKALEVDHIYPYSRSYDDSYNNKVLVFIKENQLKLNQTPYEAFGSNQEKWSKIQVLAQKLPYKKKNRILDENFKNKDQIEFISRNLNDTRYATSLIAKYTKEYLEFLPLSDDEDISLKSGEKGSKTHVQTMNGMLTSVLRHAWGFSQKDRNNHLHHALDAIIIAYSTNSIIKAFSDFKKNQEILKAKLYAKKLTSEEYKNQSKFTGFEKYRSKILEKLDSIFVSKPPNKNTKGALHEQTFYSYQDILEEYKTQEGLKRALECGKVRKIGTKYVVNDRMVRLDIFKKDNKFYGIPIYTMDFALGVLPNKVVTIGTDKDKIKKEWKTIDETYEFCFSLYKGDLVLIQKKEMQESEFAYYNGFDISSASISLEKHDNKFENLTENQKLLFPKAKEGDVEVRGIGIQGLKVFKKYMVTPLGEIQETRTEARQNIQPRKKHGLR

SEQ ID NO: 254 - protein, 1023 aa, Helicobacter cinaedi
  Helicobacter cinaedi CCUG 18818 = ATCC BAA-847
MKIYSFDIGVASIGWAFIENEVLQDCGIRIFTKAENPKNGASLALPRREARGVRKRLARRRGRLNTIKQLLCKEFGLQLEDYLSNDGELPKAYTASKANPLKSPYELRTLALSQKLDSKDLVRVILHIAKHRGYGNKHAKDSKDTESGKVKKAIEFNRKTLAEKGYRSVGEYLYREFFQQSRISQNNGATEFINVRNKAGNYEHCVAQDMLKEELESILNAQRQFGFSLKQDFESKLLTKIFEQRPLKSFADKVGNCCFIAGEKRAPKDSPSAIEFIALSRTINTLINLSKESGEIYNRAIILQIVESTLKKGEISYKELREIIRLDERLRFKDPRLDYSREIKEAEKVKFLEFKQLKGFKKALGESFTTLAISQLDEIAEHIALIKDRVKLNEKLESYALTKEQREALSNLSFSAHINLSLQALKQILPFMRGDNGEQCLDYDESVEKAGLKALSKDTLKGQMLPPLNEFEPYLSNPVVARALAEYRKVLNVLLKQYGSPHKIHIEYAREAKLSSTERQKYEKEQKDNYAANQAAHKKCQELGLEPSSTNLLKLKLWQEQGGLCLYSGAKITISYLQDPTALQVDHIYPYSRSFDDSYMNKCLVLTKANQEKGNRTPFEAFGTDSAKWGVITTLAQKLPHKKRRRILNTAFNDKEAGFKLRNLNDTSYIARLVADYTETYLEFLPLVESENTTLSKGQKGSKKHIAIVNGVLTSTMRYYLGFASKDRDNHLHHALDAVIIGFMNDSVIKAFSDFKKTQETSKAAYYAHTLSKQEYKKQRAFIQLPSGENFRVSVLEKVESVFVSKPPRKRVRGALHEATFYSPNDPKLLKNYGGTKGVERALALGKMRKVGAKIVSNGAMVRVDIFRHKSSGKFYGVPVYTMDFALGILPNKAVVVGKDQNGVIKDWLEMDSSYEFIFSLYKDDVILVQKKEMQRPELCYFVSFDTSGASIKVAKHDNNFSTLTENQKLLFSNATKEEVVGKSIGIQNLKVFEKWQVSVLGEVKRTQSYPRENISLASKAKK

SEQ ID NO: 255 - protein, 1023 aa, Helicobacter cinaedi
  Helicobacter cinaedi CCUG 18818
MKIYSFDIGVASIGWAFIENEVLQDCGIRIFTKAENPKNGASLALPRREARGVRKRLARRRGRLNTIKQLLCKEFGLQLEDYLSNDGELPKAYTASKANPLKSPYELRTLALSQKLDSKDLVRVILHIAKHRGYGNKHAKDSKDTESGKVKKAIEFNRKTLAEKGYRSVGEYLYREFFQQSRISQNNGATEFINVRNKAGNYEHCVAQDMLKEELESILNAQRQFGFSLKQDFENKLLTKIFEQRPLKSFADKVGNCCFIAGEKRAPKDSPSAIEFIALSRTINTLINLSKESGEIYNRAIILQIVESTLKKGEISYKELREIIRLDERLRFKDPRLDYSREIKEAEKVKFLEFKQLKGFKKALGESFTTLAISQLDEIAEHIALIKDRVKLNEKLESYALTKEQREALSNLSFSAHINLSLQALKQILPFMRGDNGEQCLDYDESVEKAGLKALSKDTLKGQMLPPLNEFEPYLSNPVVARALAEYRKVLNVLLKQYGSPHKIHIEYAREAKLSSTERQKYEKEQKDNYAANQAAHKKCQELGLEPSSTNLLKLKLWQEQGGLCLYSGAKITISYLQDPTALQVDHIYPYSRSFDDSYMNKCLVLTKANQEKGNRTPFEAFGTDSAKWGVITTLAQKLPHKKRRRILNTAFNDKEAGFKLRNLNDTSYIARLVADYTETYLEFLPLVESENTTLSKGQKGSKKHIAIVNGVLTSTMRYYLGFASKDRDNHLHHALDAVIIGFMNDSVIKAFSDFKKTQETSKAAYYAHTLSKQEYKKQRAFIQLPSGENFRVSVLEKVESVFVSKPPRKRVRGALHEATFYSPNDPKLLKNYGGTKGVERALALGKMRKVGAKIVSNGAMVRVDIFRHKSSGKFYGVPVYTMDFALGILPNKAVVVGKDQNGVIKDWLEMDSSYEFIFSLYKDDVILVQKKEMQRPELCYFVSFDTSGASIKVAKHDNNFSTLTENQKLLFSNATKEEVVGKSIGIQNLKVFEKWQVSVLGEVKRTQSYPRENISLASKAKK

SEQ ID NO: 256 - protein, 1023 aa, Helicobacter cinaedi
MKIYSFDIGVASIGWAFIENEVLQDCGIRIFTKAENPKNGASLALPRREARGVRKRLARRRGRLNTIKQLLCKEFGLQLEDYLSNDGELPKAYTASKANPLKSPYELRTLALSQKLDSKDLVRVILHIAKHRGYGNKHAKDSKDTESGKVKKAIEFNRKTLAEKGYRSVGEYLYREFFQQSRISQNNGATEFINVRNKAGNYEHCVAQDMLKEELESILNAQRQFGFSLKQDFENKLLTKIFEQRPLKSFADKVGNCCFIAGEKRTPKDSLSAIEFIALSRTINTLINLSKESGEIYNRAIILQIVESTLKKGEISYKELREIIRLDERLRFKDPRLDYSREIKEAEKVKFLEFKQLKGFKKALGESFTTLARSQLDEIAEHIALIKDRVKLNEKLESYALTKEQREALSNLSFSAHINLSLQALKQILPFMRGDNGEQCLDYDESVEKAGLKALSKDTLKGQMLPPLNEFEPYLSNPVVARALAEYRKVLNALLKQYGSPHKIHIEYAREAKLSSTERQKYEKEQKDNYAANQAAHKKCQELGLEPSSTNLLKLKLWQEQGGLCLYSGAKITISYLQDPTALQVDHIYPYSRSFDDSYMNKCLVLTKANQEKGNRTPFEAFGTDSAKWGVITTLAQKLPHKKRRRILNTAFNDKEAGFKLRNLNDTSYIARLVADYTETYLEFLPLVESENTTLGKGQKGSKKHIAIVNGALTSTMRYYLGFASKDRDNHLHHALDAVIIGFMNDSVIKAFSDFKKTQETSKAAYYAHTLSKQEYKKQRAFIQLPSGENFRASVLEKVESVFVSKPPRKRVRGALHEATFYSPNDPKLLKNYGGTKGVERALALGKMRKVGAKIVSNGAMVRVDIFRHKSSGKFYGVPVYTMDFALGILPNKAVVVGKDKNGVIKDWLEMDSSYEFIFSLYKDDLLLVQKKEMAEPELCYFMSFNSSIAQISVAKHDNNFSTLTKNQKLLFSNATQEDVSGKSIGIQNLQVFEKWQVSVLGEVKRTQSYPRENISLASKAKK

SEQ ID NO: 257 - protein, 1024 aa, Helicobacter mustelae
MIRTLGIDIGIASIGWAVIEGEYTDKGLENKEIVASGVRVFTKAENPKNKESLALPRTLARSARRRNARKKGRIQQVKHYLSKALGLDLECFVQGEKLATLFQTSKDFLSPWELRERALYRVLDKEELARVILHIAKRRGYDDITYGVEDNDSGKIKKAIAENSKRIKEEQCKTIGEMMYKLYFQKSLNVRNKKESYNRCVGRSELREELKTIFQIQQELKSPWVNEELIYKLLGNPDAQSKQEREGLIFYQRPLKGFGDKIGKCSHIKKGENSPYRACKHAPSAEEFVALTKSINFLKNLTNRHGLCFSQEDMCVYLGKILQEAQKNEKGLTYSKLKLLLDLPSDFEFLGLDYSGKNPEKAVFLSLPSTFKLNKITQDRKTQDKIANILGANKDWEAILKELESLQLSKEQIQTIKDAKLNFSKHINLSLEALYHLLPLMREGKRYDEGVEILQERGIFSKPQPKNRQLLPPLSELAKEESYFDIPNPVLRRALSEFRKVVNALLEKYGGFHYFHIELTRDVCKAKSARMQLEKINKKNKSENDAASQLLEVLGLPNTYNNRLKCKLWKQQEEYCLYSGEKITIDHLKDQRALQIDHAFPLSRSLDDSQSNKVLCLTSSNQEKSNKTPYEWLGSDEKKWDMYVGRVYSSNFSPSKKRKLTQKNFKERNEEDFLARNLVDTGYIGRVTKEYIKHSLSFLPLPDGKKEHIRIISGSMTSTMRSFWGVQEKNRDHHLHHAQDAIIIACIEPSMIQKYTTYLKDKETHRLKSHQKAQILREGDHKLSLRWPMSNFKDKIQESIQNIIPSHHVSHKVTGELHQETVRTKEFYYQAFGGEEGVKKALKFGKIREINQGIVDNGAMVRVDIFKSKDKGKFYAVPIYTYDFAIGKLPNKAIVQGKKNGIIKDWLEMDENYEFCFSLFKNDCIKIQTKEMQEAVLAIYKSTNSAKATIELEHLSKYALKNEDEEKMFTDTDKEKNKTMTRESCGIQGLKVFQKVKLSVLGEVLEHKPRNRQNIALKTTPKHV

SEQ ID NO: 258 - protein, 1688 aa, Ignavibacterium album
MEFKKVLGLDIGTNSIGCALLSLPKSIQDYGKGGRLEWLTSRVIPLDADYMKAFIDGKNGLPQVITPAGKRRQKRGSRRLKHRYKLRRSRLIRVFKTLNWLPEDFPLDNPKRIKETISTEGKFSFRISDYVPISDESYREFYREFGYPENEIEQVIEEINFRRKTKGKNKNPMIKLLPEDWVVYYLRKKALIKPTTKEELIRIIYLFNQRRGFKSSRKDLTETAILDYDEFAKRLAEKEKYSAENYETKFVSITKVKEVVELKTDGRKGKKRFKVILEDSRIEPYEIERKEKPDWEGKEYTFLVTQKLEKGKFKQNKPDLPKEEDWALCTTALDNRMGSKHPGEFFFDELLKAFKEKRGYKIRQYPVNRWRYKKELEFIWTKQCQLNPELNNLNINKEILRKLATVLYPSQSKFFGPKIKEFENSDVLHIISEDIIYYQRDLKSQKSLISECRYEKRKGIDGEIYGLKCIPKSSPLYQEFRIWQDIHNIKVIRKESEVNGKKKINIDETQLYINENIKEKLFELFNSKDSLSEKDILELISLNIINSGIKISKKEEETTHRINLFANRKELKGNETKSRYRKVFKKLGFDGEYILNHPSKLNRLWHSDYSNDYADKEKTEKSILSSLGWKNRNGKWEKSKNYDVFNLPLEVAKAIANLPPLKKEYGSYSALAIRKMLVVMRDGKYWQHPDQIAKDQENTSLMLFDKNLIQLTNNQRKVLNKYLLTLAEVQKRSTLIKQKLNEIEHNPYKLELVSDQDLEKQVLKSFLEKKNESDYLKGLKTYQAGYLIYGKHSEKDVPIVNSPDELGEYIRKKLPNNSLRNPIVEQVIRETIFIVRDVWKSFGIIDEIHIELGRELKNNSEERKKTSESQEKNFQEKERARKLLKELLNSSNFEHYDENGNKIFSSFTVNPNPDSPLDIEKFRIWKNQSGLTDEELNKKLKDEKIPTEIEVKKYILWLTQKCRSPYTGKIIPLSKLFDSNVYEIEHIIPRSKMKNDSTNNLVICELGVNKAKGDRLAANFISESNGKCKFGEVEYTLLKYGDYLQYCKDTFKYQKAKYKNLLATEPPEDFIERQINDTRYIGRKLAELLTPVVKDSKNIIFTIGSITSELKITWGLNGVWKDILRPRFKRLESIINKKLIFQDEDDPNKYHFDLSINPQLDKEGLKRLDHRHHALDATIIAATTREHVRYLNSLNAADNDEEKREYFLSLCNHKIRDFKLPWENFTSEVKSKLLSCVVSYKESKPILSDPFNKYLKWEYKNGKWQKVFAIQIKNDRWKAVRRSMFKEPIGTVWIKKIKEVSLKEAIKIQAIWEEVKNDPVRKKKEKYIYDDYAQKVIAKIVQELGLSSSMRKQDDEKLNKFINEAKVSAGVNKNLNTTNKTIYNLEGRFYEKIKVAEYVLYKAKRMPLNKKEYIEKLSLQKMFNDLPNFILEKSILDNYPEILKELESDNKYIIEPHKKNNPVNRLLLEHILEYHNNPKEAFSTEGLEKLNKKAINKIGKPIKYITRLDGDINEEEIFRGAVFETDKGSNVYFVMYENNQTKDREFLKPNPSISVLKAIEHKNKIDFFAPNRLGFSRIILSPGDLVYVPTNDQYVLIKDNSSNETIINWDDNEFISNRIYQVKKFTGNSCYFLKNDIASLILSYSASNGVGEFGSQNISEYSVDDPPIRIKDVCIKIRVDRLGNVRPL

SEQ ID NO: 259 - protein, 1092 aa, Ilyobacter polytropus
MKYSIGLDIGIASVGWSVINKDKERIEDMGVRIFQKAENPKDGSSLASSRREKRGSRRRNRRKKHRLDRIKNILCESGLVKKNEIEKIYKNAYLKSPWELRAKSLEAKISNKEIAQILLHIAKRRGFKSFRKTDRNADDTGKLLSGIQENKKIMEEKGYLTIGDMVAKDPKFNTHVRNKAGSYLFSFSRKLLEDEVRKIQAKQKELGNTHFTDDVLEKYIEVFNSQRNFDEGPSKPSPYYSEIGQIAKMIGNCTFESSEKRTAKNTWSGERFVFLQKLNNFRIVGLSGKRPLTEEERDIVEKEVYLKKEVRYEKLRKILYLKEEERFGDLNYSKDEKQDKKTEKTKFISLIGNYTIKKLNLSEKLKSEIEEDKSKLDKIIEILTFNKSDKTIESNLKKLELSREDIEILLSEEFSGTLNLSLKAIKKILPYLEKGLSYNEACEKADYDYKNNGIKFKRGELLPVVDKDLIANPVVLRAISQTRKVVNAIIRKYGTPHTIHVEVARDLAKSYDDRQTIIKENKKRELENEKTKKFISEEFGIKNVKGKLLLKYRLYQEQEGRCAYSRKELSLSEVILDESMTDIDHIIPYSRSMDDSYSNKVLVLSGENRKKSNLLPKEYFDRQGRDWDTFVLNVKAMKIHPRKKSNLLKEKFTREDNKDWKSRALNDTRYISRFVANYLENALEYRDDSPKKRVFMIPGQLTAQLRARWRLNKVRENGDLHHALDAAVVAVTDQKAINNISNISRYKELKNCKDVIPSIEYHADEETGEVYFEEVKDTRFPMPWSGFDLELQKRLESENPREEFYNLLSDKRYLGWFNYEEGFIEKLRPVFVSRMPNRGVKGQAHQETIRSSKKISNQIAVSKKPLNSIKLKDLEKMQGRDTDRKLYEALKNRLEEYDDKPEKAFAEPFYKPTNSGKRGPLVRGIKVEEKQNVGVYVNGGQASNGSMVRIDVFRKNGKFYTVPIYVHQTLLKELPNRAINGKPYKDWDLIDGSFEFLYSFYPNDLIEIEFGKSKSIKNDNKLTKTEIPEVNLSEVLGYYRGMDTSTGAATIDTQDGKIQMRIGIKTVKNIKKYQVDVLGNVYKVKREKRQTF

SEQ ID NO: 260 - protein, 1354 aa, Indibacter alkaliphilus
  Indibacter alkaliphilus LW1
MKKILGLDLGTTSIGWAFIKEPEKDVVGSEIVDMGVRIVPLSSDEENDFAKGNTISINADRTLKRGARRNLQRFKQRRNALLETFKEKNLIPSNFQYAEDGPSSTFSTLKLRDKAAKEKIELDDFVKVLLQINKKRGYKSSRKAMSEEDEGTAIDSMGIAKELYENDLTPGQWVYEALKNGRKNVPDFYRSDLQEEFKKIVNYQSEFYPDILNTSFVEDWMGKASTPTKQYFNKRGVQLAENKGKREERRLQEYKWRAEAVNFKIDLSEIALILSQINSQISNSSGYLGAISDRSKELYFKNLTVGQYLYQQVKKNPHTRLKGQVFYRQDYLDEFEKIWSVQSSFYPQLNDELKQEVRDVTIFFQRRLKSQKHLISNCEFEEHHKVVPKSHPIFQEFRIWQNLNNLTLIKKDNLNEKCELALEDKTALANELAFKKELSVKDALKVLGLKPSDWEFNFTKIEGNRTNHAFFEAFAKIIELEDGEPIDLGNLKADDILDQFSEAFLRIGIDTELLQVNSDIEGAEYEKQSYIQFWHLLYSSEDDQKLKQNLIRKFGFKPEHAKILASISLQDDHASLSSRAIKKILPHLQSGLIYDKACTYAGYNHSSSFTKDENEKRELRAELELLKKNSLRNPVVEKILNQMINVVNAILKDPNLGRPDEIRVEMARELKANAEQRKNMTSNIASATRDHEKYREILKKEFGLKRVTKNDLLRYKLWLETDGISLYTGKPIEASKLFSKEYDIEHIIPKARLFDDSFSNKTICERQLNIDKANVTAFSFLQNKLSADEFEQYQSRVKSLYGKLSKAKIQKLLMANDKIPEDFIARQLQETRYISKKAKEILFEITMRVSVTTGTITDKLREDWGLVEIMKELNWEKYDKLGLTYTIEGKHGERLNKIKDWNKRNDHRHHAMDALTVALTKPAYIQYLNNLNAKAIGNKKGTEIFAIEQKYLKRENGKLCFIPPIENIRAEAKKHLSKILVSYKAKNKVVTINKNKTKKKAGFNEQTALTPRGQLHKETVYGKSFHYSTKFEKIGASFDAQKINTVAKKEEREALLKRLAENGNDPKKAFTGKNSLNKMPIYLDLGKNIKLSEKVKTVVLEQNYTIRKNIDPDLKVDKVIDVGIKRILESRLEEFGGNAKLAFSNLEENPIWLNKEKGIPIKRVKISGVSNVESLHVKKDHFGEKILDEEGNEIPVDFVSTGNNHHVAIYEDEDGNLQDEVVNFYEAVIRRNQGESIIKYRHEEGWNFLYSIKQNEFFVFPSQDFNPNDFDLLDPKNYDLISPNLYRAQKFSKVMYGNSAVRDYVFRHHLETVLNDVKELKDVAYKQLKSLQYLNGIKKVRLNHLGQIIQVGEY

SEQ ID NO: 261 - protein, 1397 aa, Joostella marina
  Joostella marina DSM 19592
MKKVLGLDLGTNSIGWALVNEATKEEKKEGKSSEIIKLGVRVNPLTVDEKTNFEKGRPLSTNADRTLKRSARRNLQRYKLRRRNLIEILIKNGFITKDTPLTETGKDTTHQTLKLRAKSAKEKVDLKDFAKILLTINKKRGYKSSRKVNSDEDGLAIDGMAVAKHLYEQNLTPGQYVLNLLQKNKKYVPDFYRSDLQEEFKNIWNNQKTYYFDILTDTLFEELKDKNKSQTWAICKKPFDIAGIKQIGKASDKRLERYKWRTEGLTQKLNLEYLAIALQEINNDINKSSGYLGAISDRSKELFFNKETVGENLYRQLVKTPHTSLRNQVFYRQDYLDEFETIWETQAKFYPQLTHTLKEEIRDVIIFYQRKLKSQKSLISFCQFESWEQTYIEKETGKSKTRTVGRKVIPKSSPLFQEFKIWQNLNSLEFRNSDEGEIIEFIKLDEDIRQTVFEELNLRGNLKPNDVLKILGNYISLGKVSQWKCNFEEIEGNRTNAALYNVYQIIAENEGYGFDWAKKTASEINKELKNIFPQLGIDASILDFDFTQANFDKQTSYQLWHLLYSAEEDFKISEEDKVLYGNSSVSLKKKLHQKYGFKPEYTKLLTNISLQPDYGNLSAKAICNILPYLKENNVYSEACDLTGYNHSNFLTAEEQAKRPLKPILELLKKNSLRNPVVEKILNQMVNVVNQVIETYGKPDEIRIELTRELKKSAKERANMTKSIADATRRNDDYRKTIIKEFGIPNPTKSDVVRYRLWQELASRGYKDIFTDTEIKPQELFSNKIDIEHIIPKALLFDDSFSNKTLAFKKDNLKKANRTAYDFIANDYAPNLENYIERVESLHKDRKITRAKRNKLLMLQSKLPDGFIERDLRNSQYITKEAKKMLYEVCRTVVSTSGSITDKLREDWDLINVMKELNFPKYKALGLTEKIERYDIGAEKMKEVEIIEDWNKRNDHRHHAIDALTVAFSTHSHIQYLNHLNARRDEGHKKHAAIIAIESTITEKEGNKKRRFIAPLPNFRLQAKEHIESILVSFKNKNKVVTNNINKTKRIKKDKFNTKVQLTPRGQLHKETIYGKIKQPLEKHIKLNKSFTLEQAKLIIDKRQREKVLNHLEKYAHNSDIAFNSKTLKKNPLLISDEPLKEVLCFEEVFTIRKDISYDNFKNEKQLDKVIDEKVKQALKERINQYNGDFREAFSDIERNPIWLNKAKGICVKRATIKGVSNAEPLHTAKNHLGEEVLTENKEQIPVDYVSTGNNHHVAIYEDEDGNLQEKVVSFYEAVIRVNEGLPIIDKEYNKSLGWTFKFTMKQNEMFVFPSEDFNPTEIDLLDQKNASLISPNLFRVQKFTIKDYFFRHHLETTVENNNTLKNTTWRREGLSGIYGIIKIRLNHLGEIVQVGEY

SEQ ID NO: 262 - protein, 1060 aa, Kingella kingae
  Kingella kingae PYKK081
MAAKSLNYILGLDLGIASCGWAVVEMDEQENPLRLIDVGVRTFEEAENPKDGSSLAETRRLARAQRRLISRRANRMNKLCRLLKQENVLQANDYDEKGLIIGLPNQAWELRAQGLDRKLEPKEWAAVLIHLVKHRGYLSQRKNESQTADKELGALLSGMNHNHQLLQSQSNQYRTPAELAIKQFATQDGHIRNQRGAYTHTFNRLDLQNELNQLFDAQTRLGNPHVSGSLKTAINDLLMNQKAALSGDAILEMLGRCTFEPSEYKAAKNTYSAERFVWLGKLTNLRIQDNGLESALSREQRELLLNEPYNKTKLTYQQVRKLLRLPETAFFKGLRYGKDNAESATFMEMKSYHAIRKSLENKSLKSEWEKLKTQPKLLDLIGTAFSIYKTDDEIAGCLKNQLPENVIIALQGQLNFSNFMELSLKALEKLLPLMEQGLRYDEACTQIYGNRHEKIADKTEKFLPNIPADKLRNPVVLRTLTQARKVINAIIRRYGSPARVHIETGREVGKSFSDRDKLKKQQEENQEQRRRAIDEWKQFFPNAAHEPKAVDILKLRLYQLQQGKCLYSGLPIDVRRLPEKGYVEIDHALPFSRTWDDSFNNKILVLASENQNKGNQTPYEYLRGADNSESWRLFVENVQNCQFSPNKKQKIMAKQLDEKGFLERNLNDTRYVSRFLCQFISEHLHLTGKGKKRVFASNGQITALLRGRWGLSKNREENDRHHAVDAVVVACSTVAMQQKITQFVRYQKGNVFTGERIDKETGEVISIHFPTPWEHFREEVMIRVFDDNPLRTLPEKLPNRPEALHEYVMPLFVSRMPTRKMTGQGHKETIKSAKRLDEKISVLRVPLTQLKLNDLENMVNREREPALYEALKARLEQFKNDPAKAFAEPFFKQGGQQVKAVRVEIVQKSGMLLRKINGVADNGSMVRVDVFEKSGKFYLVPIYAWQVAEGILPNYAVVAHKDESDWILMDESYHFKFALYKNDLLEVQTKKGGIMGYFASLDRATGAITIREHDRDKKKCKDGEHRSIGVKMASSFKKLQVDELGKNIHETRSRKRPNIG

SEQ ID NO: 263 - protein, 1391 aa, Kordia algicida
  Kordia algicida OT-1
MKKILGLDLGTNSIGWALVNEAEHEHEQSSIVKLGVRVNPLSVDEKTNFEKGRPLSINADRTSKRSARRNLQRFKLRRKNLINLLLKHHIISNETILTEVGKNTTHQTLKLRSKATQEKISLEEFARILLSINKKRGYKSSRKEKNEDEGFTIDGMAIAKELYDNQLTPGQYVYNILQDGKNYIPDFYRSDLQAEFDDVWQFQKKFYSSILTDEFYLKLKGQGKENTRKLFLAIHQVYTAENKGKRDAVKLQYYKWRSEAVKKQLSIEEVAYVLVEINNNINKSSGYLGAISDRSKALYFNNETVGEYLYGQLVKNRHNSLRNQVFYRQDYLDEFEKIWETQAKFYDELTNELKQEIRDVVIFYQRKLKSQKHLISDCLFEKHHKAIPKSSPLFQEFKIWQNLNYLEFVHTQSKEKIFFSELDDETRQFVFAELNIRGTLKIKEIKKLIGLETPVYWKSNFDEIEGNRTNQVLYNVYQNIADDLGYGFDWSKKHAFEINAELQAIFKDVGIDTAILNFDASIEENDFDKQKSYQLWHLLYSAEDTDKATEEDKLIYGNINTKLKKQLHQKYGFEAKYGNLLANISLQQDYGNLSAKAIKKILPYLESGNSFYEACTIVGYNPSNSLTKEQQQNRKLKDKLELLPKNSLRNPVVEKILNQKVNLINQLIDEYGKPDEVRIELARELKKSAKQRADLSKHINDATLKNQNIRKTLQKDFGIQNPSKNDVIRYKLYDELKDNGYKTLFTNKYIPKEQLFSKDVDIEHIIPKAILFDDSFSNKTLAYRNVNLAKADATAFDFISSKHLDDLDNYKARVETLFQSKRISKGKYKKLLMTRQNLPEDFIERDLRNSQYIAKKATAMLKEVFRSVVPTSGRITDKLREDWDLVNVMKELNLPKYRTLGLTEFIERKNGNKIEQIIDWTKRNDHRHHAMDALTVAFTTHNHIQYLNNLNVTHGLNGVDTDHEKSRLYAIKQAITKVYIVGKTKKRKFIPPMENFRSHAKNHLEGILISFKNKNKVVTKNKNRTKTKTKGVFNEKIQLTPRGQLHKETIYGHAKKVIVTKEKVSSKFTHEKILQVTKPAYREALLKRLASFKNDPKKAFSGKNALSKNPLYFDITSGKKVPDTVKLSYFENSYVIRKEVNSDNFKNEKSLQKVLDVGIRRILEKRLADYNGNAKEAFSNLEKNPIWKDKEKGVCIKKVRIEALKNAEPLHVKKDHLGKIILDDENKSTPVDFISTGNNHHVAIYEDKDGKLHDKVVSFYEVVSRVNLGLPIIDKSFNSHLDWKFLFSMKQNEMFVFPSEDFNPKEIDIGNPKNNELISKYLFRVQKFSKVTYGNSAVRDYVFRHHLETELIDKKELKGITYYQLKSIGMLEKLVKVRINHIGKIVHIGEY

SEQ ID NO: 264 - protein, 1314 aa, Lactobacillus animalis
  Lactobacillus animalis KCTC 3501
MLKKDYSIGLDIGTNSVGHAVVTDDYKVPTKKMKVFGDTSKKTIKKNMLGVLLFNEGQTAADTRLKRGTRRRYTRRKNRLRYLQEIFAPELAKVDPNFLYRLEESSLVAEDKKYDVYPIFGKREEELLYHDTYKTIYHLRSALANNDQPADLRLVYLALAHIIKYRGNFLLEGEIDLRTTDINKVFAEFSETLNENSDENLGKLDVADIFKNNTFSKTKKSEELLKLSGAKKNQLAHQLFKMMVGNMGSFKKVLGTDEEHKLSFGKDTYEDDLNDLLAEAGDQYLDIFVAAKKVYDAAILASILDVKDTQTKTVFSQAMIERYEEHQKDLIELKRVFKKYLPEKCHDFFSEPKISGYAGYIDGKVSEEDFYKYTKKTLKGIPETEEILQKIDANNYLRKQRTFDNGAIPHQVHLKELVAIVENQGKYYPFLRENKDKFEKILNFRIPYYVGPLARGNSKFAWLTRAGEGKITPYNFDEMIDKETSAEDFIKHMTINDLYLPTEPVLPKHSLLYERYTIFNELAGVRYVTENGEAKYFDAQTKRSIFELFKLDRKVSEKMVIKHLKVVMPAIRIQALKGLDNGKFNASYGTYKDLVDMGVAPELLNDEVNSEKWEDIIKTLTIFEGRKLIKRRLENYRDFLGEDILRKLSRKKYTGWGRLSAKLLDGIYDKKTHKTILDCLMTEDYSQNFMQLINDDNYSFKETIKNAQVIEKEETLAKTVQELPGSPAIKKGILQSLEIVDEIIKVMGYKPKSIVVEMARETQKTHGTRKREDRVQQIVENLKDANELPEKLPSNAELSDERKYLYCLQNGRDMYTGAPLDYDHLQFYDVDHIIPQSFLKDDSIENKVLTIKKENVRKTNGLPSEAVIQKMGSFWKKLLDAGAMTNKKYDNLRRNLHGGLNEKLKERFIERQLVETRQITKYVAQLLDQRLNYDGNGVELDEKIAIVTLKAQLASQFRSEFKLRKVRALNNLHHAHDAYLNAIVANLIMAKYPELEPEFVYGKYRKAKFKGLGKATAKNTLYANVLYFLKENEVYPFWDKARDLPTIKRYLYRAQVNKVRKAERQIGGFSDEMLVPKSDSGKLLPRKEGLDPVKYGGYAKAVESYAVLITADEVKKGKTKKVKTLVNIPIIDSKKYEADPTAYLASRGYTNVTNSFILPKYSLLEDPEGRRRYLASFKEFQKANELILPQHLVELLYWVNAKDGEQKLEDHKAEFKELFDKIMEFADKYVVAPKNSEKIRRLYEENQDATPMELGKNFVELLRYTADGAASDFKFFGENIPRKRYNSAGSLLNGTLIYQSKTGLYETRIDLGKL

SEQ ID NO: 265 - protein, 1377 aa, Lactobacillus brevis
  Lactobacillus brevis subsp. gravesensis ATCC 27305
MESNHDGEQVKYTLGLDIGTSSIGYAAIDKHQKPIRAKGKHVIGVRLFQEGQTAADRRAFRTTRRRLKRRKWRLNLLNRLFDPYLSEVDPNFLPRLRQSNLSPKDDNKHFNGSTLFPDKTDAAFYRQYPTMYHLRYALMTEKRKFDIREVYLAIHHIVKYRGNFLNSATVDSFKTSNIDFTSQFDRLNELYRQVILDEPFQINMDQVDEMTNKLLDNDALKLDTQKQVAKLLPVIYNDKPIDKQYTRIATEFSKAILGYKTKLDVILNLDTQNAKDWVIRLDDEDIDDKLPALVENLDESRQEIVTIIRDLYAQITLNAIVPKGKSLSESMVDKYNDHKDHLDLLMGLIHELGDDSAKGIKLREAYTQYVGKSDDKTLNQDDFYAAIKKNLDEDSKRSPKIQRLIEQASFMPKQRTSANGVIPHQLHQLELDRIIENQGRYYPFLKKPNPNTHKPNGGKYKLDELVAFRIPYYVGPLITKRDQEKTSGADFAWMIRKPGQEGEITPWNFDQKVDRMASANRFIRRMTTKDSYLVAEDVLPDASLIYEKFKALNELNMLKVNDSRLSPSQKQDLFNNLFKKQKTIRTKKLQTYIRTNWELPSVMISGLADPDKFNSSLSTYIDFRDIFGEKVDDPNRQADYEEIIEWSTVFEDRKIYQAKLNQLDWLTEPQRKALLTKRYTGWGRLSKKLLTGLKDQNGDSILDQLWKTNDNFMQIQSRDEFAKQIHDENAKQFHEANNVDDILDDAFTSPQNKKAIRQVDKVVQDVVKAVGYAPDKIAIEFTRSLENNPQRTVSRQRQLQAAYKNIPREIMKSGLMAELGSVADSKKVLSDKLYLYFTQMGKDMYEDKTINIDNLPNYDIDHILPQAFIKDDSIDNRVLISKEENARKSNRVPLKFFGAKRMGFWKDLLNNGLISNRKFQNLTTDPEKISKYSAKGFIHRQLVETSQVIRLVANILGNEYSQAGTTIIEVSAKMNRQLREDFHLIKNRNVNDYHHAMDAYLTAYVGDYLYLRYPKLRPYFVYGDFKKAEDQDLNIRNFNFLHDLKDNESLDKIVDSETGEIVWEKHGSVKQLKKVYHYKFMLVSQEVYTRQDALFNQTIYPASDADKRKLIPIKNSKPVDVYGGYSGNIDAYMAIVRVHGKKEDNYKVVGIPMRAVTKLKKAEKEGHDSYLNAVHEVLKPQFTKKKKNRKTGEITETVDEFDVLLGKVYYRQLIVDGNKKFMLGSSSYQYNAKQLVLSDKAMQVLSKNGKVKSQDENQNLIDVYDEILEKVDQYFELYDQRHYRESLHKGRGIFVNLPLSNQYDGSKLTSYGKYETIDAILNGLHANATMSNLRYLGISSPFGKMQASNGLTIDPDSIICYQSPTGLFERQIKLSDL

SEQ ID NO: 266 - protein, 1371 aa, Lactobacillus buchneri
MKVNNYHIGLDIGTSSIGWVAIGKDGKPLRVKGKTAIGARLFQEGNPAADRRMFRTTRRRLSRRKWRLKLLEEIFDPYITPVDSTFFARLKQSNLSPKDSRKEFKGSMLFPDLTDMQYHKNYPTIYHLRHALMTQDKKFDIRMVYLAIHHIVKYRGNFLNSTPVDSFKASKVDFVDQFKKLNELYAAINPEESFKINLANSEDIGHQFLDPSIRKFDKKKQIPKIVPVMMNDKVTDRLNGKIASEIIHAILGYKAKLDVVLQCTPVDSKPWALKFDDEDIDAKLEKILPEMDENQQSIVAILQNLYSQVTLNQIVPNGMSLSESMIEKYNDHHDHLKLYKKLIDQLADPKKKAVLKKAYSQYVGDDGKVIEQAEFWSSVKKNLDDSELSKQIMDLIDAEKFMPKQRTSQNGVIPHQLHQRELDEIIEHQSKYYPWLVEINPNKHDLHLAKYKIEQLVAFRVPYYVGPMITPKDQAESAETVFSWMERKGTETGQITPWNFDEKVDRKASANRFIKRMTTKDTYLIGEDVLPDESLLYEKFKVLNELNMVRVNGKLLKVADKQAIFQDLFENYKHVSVKKLQNYIKAKTGLPSDPEISGLSDPEHFNNSLGTYNDFKKLFGSKVDEPDLQDDFEKIVEWSTVFEDKKILREKLNEITWLSDQQKDVLESSRYQGWGRLSKKLLTGIVNDQGERIIDKLWNTNKNFMQIQSDDDFAKRIHEANADQMQAVDVEDVLADAYTSPQNKKAIRQVVKVVDDIQKAMGGVAPKYISIEFTRSEDRNPRRTISRQRQLENTLKDTAKSLAKSINPELLSELDNAAKSKKGLTDRLYLYFTQLGKDIYTGEPINIDELNKYDIDHILPQAFIKDNSLDNRVLVLTAVNNGKSDNVPLRMFGAKMGHFWKQLAEAGLISKRKLKNLQTDPDTISKYAMHGFIRRQLVETSQVIKLVANILGDKYRNDDTKIIEITARMNHQMRDEFGFIKNREINDYHHAFDAYLTAFLGRYLYHRYIKLRPYFVYGDFKKFREDKVTMRNFNFLHDLTDDTQEKIADAETGEVIWDRENSIQQLKDVYHYKFMLISHEVYTLRGAMFNQTVYPASDAGKRKLIPVKADRPVNVYGGYSGSADAYMAIVRIHNKKGDKYRVVGVPMRALDRLDAAKNVSDADFDRALKDVLAPQLTKTKKSRKTGEITQVIEDFEIVLGKVMYRQLMIDGDKKFMLGSSTYQYNAKQLVLSDQSVKTLASKGRLDPLQESMDYNNVYTEILDKVNQYFSLYDMNKFRHKLNLGFSKFISFPNHNVLDGNTKVSSGKREILQEILNGLHANPTFGNLKDVGITTPFGQLQQPNGILLSDETKIRYQSPTGLFERTVSLKDL

SEQ ID NO: 267 - protein, 1371 aa, Lactobacillus buchneri
MKVNNYHIGLDIGTSSIGWVAIGEDGKPLRIKGKTAIGARLFQEGNPAADRRMFRTTRRRLSRRKWRLKLLEEIFDPYITPVDSTFFARLKQSNLSPKDSRKEFKGSMLFPDLTDMQYHKDYPTIYHLRHALMTQDEKFDIRMVYLAIHHIVKYRGNFLNSTPVDSFKASKVNFVDQFKKLNELYTAINPEESFQINLANSEDIGHQFLDPSIRKFDKKKQIPKIVPVSVDDKATDKINGKIASEIINAILGYKSKLDVVVQCTPVDSKSWALKFDEEDIDAKLQKILPEMDENQQSIIAILQNLYSQVTLNQIVPNGMSLSESMIEKYNDHHDHLKLYKKIIDQLADPKKKAALKKAYSQYVGDDGKVIEQADFWSSVKKNLDDSDLSKQIMDLIDAEKFMPKQRTSQNGVIPHQLHQRELDEIIEHQSKYYPWLAEINPNKHDLHLAKYKIEELVAFRVPYYVGPMITPDDQAKSAETVFSWMERKGKEAGQITPWNFDEKVDRNASANRFIKRMTTKDTYLIGEDVLPDESLLYEKFKVLNELNMVRVNGKLLKVADKQAIFQDLFENYKHISVKKLQNYIKSKTGLPSDPEISGLSDPEYFNNSLGTYNDFKKLFGNKVDEPDLQDDFEKIVEWSTVFEDKRILREKLNEITWLSDQQKDVLESSRYQGWGRLSKKLLTGIVNDQGERIIDELWNTNKNFMQIQSDNDFAKRIHEANADQMKAVDVEDVLADAYTSPQNKKAIRQVVKVVDDIQKAMGGVAPKYISIEFTRSEDRNPRRTISRQRQLENTLKDTAKSLAKSINPELLSELDNAAKSKKGLTDRLYLYFTQLGKDIYTGKPINIDEISTYDIDHILPQAFVKDDSLNNRVLVSKAINNGKSDNVPVQLFGAKMGHFWKQLAEAGLISKRKLKNLQTDPDTISKYAMHGFIRRQLVETSQVIKLVANILGDKYRNDNTKIIEITARMNHQMRDEFGFIKNREINDYHHAFDAYLTAFLGRYLYHRYIKLRPYFVYGDFKKFKEDKVTMRNFNFLHDLTDDTQEKIADAETGEVIWDRENSIQQLKDVYHYKFMLISHEVYTLRGAMFNQTVYPASDAGKRKLIPIKADRPINVYGGYSGSADAYMAIVRIHNKKGDKYRVVGVPMRARDRLDAAKKVSDADCDRALKDVLTPQLTKTKKSRKTGEITQVVEDFEIVLGKVMYRQLMIDGDKKFMLGSSTYQYNAKQLVLSDQSVKTLASKGRLDPLQESMDYNNVYTEILDKVNQYFSLYDMNKFRHKLNLGFSKFISFPNHNVFDGNTKASSGKREILEEVLNGLHANPTFGNLKDIGITTPFGQLQQPNGILLSDEAKIRYQSPTGLFERTVSLKDL

SEQ ID NO: 268 - protein, 1361 aa, Lactobacillus casei
  Lactobacillus casei BL23
MTKLGKPYGIGVDIGSNSIGFAAVDENSHLIRLKGKTVIGARLFEEGKAAADRRASRTTRRRLSRNRWRLSFLRDFFESHITPTGPNFFMRQKYSEISPKDKARYKYEKRLFNDRTDAEFYQQYPTMYHLRNRLLTDPSKADVREIYFAIHHILKSRGHFLTSGYAKDFNTNKVALNEIFPALQDAYAQVYPDLDITFDENKVNEFKTVLLNEKATPSDTQRALVNLLLAEDGDKDILKQQKQVLTEFAKAVVGLKTKLNVALGTEVDSSEATVWNFSLGQLDDKWAGIESAMTDEGTEILDQIRDLYRARLLNGIVPAGKTLSQAKVDDYAQHHEDLELFKDYLKQLEDDGTAKAIRQLYDRYIDGDDAKPFVREDFVKALTKEVTAHPNAKSPELLERLAQPDFMLKQRNKANGAIPVQMQQRELDQIIKNQSVYYDWLAAPNPVEKHRKSMPYQLDELLNFRIPYYVGPLVTAKEQKAAQGGVFAWMVRKDPDGNITPYNFDEKVDREASANTFIQRMKTTDTYLIGEDVLPKQSLLYQRYEVLNELNNVRVNNEKLSIEQKQQVIRELFERHNSVTIKQFAENLRAHGDYAHIPEIRGLADEKRFLSSLSTYRQLKSLLPDAIDDPAKQADIENIIAWSTVFEDAAIFKTKLKEINWLDSQTITKLSNIRYRGWGQFSHKFLNGLTLGNGHTIIQELFLSNNNLMQILTDETLQKKMTELNADKLKAANINDAIDDAYTSPSNKKALRQVLRVIEDIKRAADGQDPSWLYVETADGGGTPGKRTRARQHQLQEIYANAAHELIDSAVRGELEDKIADKADFNDRLVLYFMQGGRDIYTGTPLNIDQLSSYDIDHILPQSLIKDNSLDNRVLVHAIINREKNATFASTIYAQKMNATWRQWHEAGLISGRKLRNLQMRPDQIDKYASGFVARQLVETRQIIKLTEQIVAAQYPETKIIAVKAGLSHQLREELEFPKNRDVNHYHHAFDAFLAARIGTYLLKRFPNLQAFFTYGKFKKADVKKLRGFNFIRDITHAEDKIVVKDTGEVIWDKKRDVDELDRIYNFKRMLITHEVHFEKADLFKQTVYGAKDSKEAGGKKQLISKKKGYPVDIYGGYTQETGSYLSVVRLTKKAMYAVVKVSTRDAAKLAVAKSISEQKENETLNDIIDEKLSKISKNGKITHELFEVVLPRVGQKTLFKNSKYNLFLVNSDTYMHNYQELWMPREYQKMWKDISLSKYGDAQTEDQLDQIFGFIVSQVNSYFNLYDINQFRKKLNDAADKFATLPMRDTDDMQGKIATIGQLLIGLQANAARSDLRNLDIKTPLGLLQIPNGISLDSDTSVVYQSPTGLLEREVHLSDL

SEQ ID NO: 269 - protein, 1361 aa, Lactobacillus casei
  Lactobacillus casei Lc-10
MTKLGKPYGIGVDIGSNSIGFAAVDENSHLIRLKGKTVIGARLFEEGKAAADRRASRTTRRRLSRNRWRLSFLRDFFESHITPTGPNFFMRQKYSEISPKDKARYKYEKRLFNDRTDAEFYQQYPTMYHLRNRLLTDPSKADVREIYFAIHHILKSRGHFLTSGYAKDFNTNKVALNEIFPALQDAYAQVYPDLDITFDENKVNEFKTVLLNEKATPSDTQRALVNLLLAEDGDKDILKQQKQVLTEFAKAVVGLKTKLNVALGTEVDSSEATVWNFSLGQLDDKWAGIESAMTDEGTEILDQIRDLYRARLLNGIVPAGNTLSQAKVDDYAQHHEDLELFKDYLKQLEDDGTAKAIRQLYDRYIDGDDAKPFVREDFVKALTKEVTAHPNAKSPELLERLAQPDFMLKQRNKANGAIPVQMQQRELDQIIKNQSVYYDWLAAPNPVEKHRKSMPYQLDELLNFRIPYYVGPLVTAKEQKAAQGGVFAWMVRKDPDGNITPYNFDEKVDREASANTFIQRMKTTDTYLIGEDVLPKQSLLYQRYEVLNELNNVRVNNEKLSIEQKQQVIRELFERHNSVTIKQFAENLRAHGDYAHIPEIRGLADEKRFLSSLSTYRQLKSLLPDAIDDPAKQADIENIIAWSTVFEDAAIFKTKLKEINWLDSQTITKLSNIRYRGWGQFSHKFLNGLTLGNGHTIIQELFLSNNNLMQILTDETLQKKMTELNADKLKAANINDAIDDAYTSPSNKKALRQVLRVIEDIKRAADGQDPSWLYVETADGGGTPGKRTRARQHQLQEIYANAAHELIDSAVRGELEDKIADKADFNDRLVLYFMQGGRDIYTGTPLNIDQLSSYDIDHILPQSLIKDNSLDNRVLVHAIINREKNATFASTIYAQKMNATWRQWHEAGLISGRKLRNLQMRPDQIDKYASGFVARQLVETRQIIKLTEQIVAAQYPETKIIAVKAGLSHQLREELEFPKNRDVNHYHHAFDAFLAARIGTYLLKRFPNLQAFFTYGKFKKADVKKLRGFNFIRDITHAEDKIVVKDTGEVIWDKKRDVDELDRIYNFKRMLITHEVHFEKADLFKQTVYGAKDSKEAGGKKQLISKKKGYPVDIYGGYTQETGSYLSVVRLTKKAMYAVVKVSTRDAAKLAVAKSISEQKENETLNDIIDEKLSKISKNGKITHELFEVVLPRVGQKTLFKNSKYNLFLVNSDTYMHNYQELWMPREYQKMWKDISLSKYGDAQTEDQLDQIFGFIVSQVNSYFNLYDINQFRKKLNDAADKFATLPMRDTDDMQGKIATIGQLLIGLQANAARSDLRNLDIKTPLGLLQIPNGISLDSDTSVVYQSPTGLLEREVHLSDL

SEQ ID NO: 270 - protein, 1363 aa, Lactobacillus casei
  Lactobacillus casei M36
MTKLGKPYGIGVDIGSNSIGFAAVDENSHLIRLKGKTVIGARLFEEGKAAADRRASRTTRRRLSRNRWRLSFLRDFFESHITPTDPNFFMRQKYSEISPKDKARYKYEKRLFNDRTDAEFYQQYPTMYHLRNRLLTDPSKADVREIYFAIHHILKSRGHFLTSGYAKDFNTNKVALNEIFPALQDAYAQVYPDLDITFDENKVNEFKTVLLDEKATPSDTQRALVNLLLAEDGDKDILKQQKQVLTEFAKAVVGLKMKLNVALGTEVDSSEATAWNFSLGQLDDKWAGIESAMTDEGTEILDQIRDLYRARLLNGIVPAGKTLSQAKVDDYEQHHEDLELFKDYLKQLEDDGMAKVIRQLYDRYIDGDDAKPFVREDFVKALTKEVTAHPNAKSPELLERLVQPDFMLKQRNKANGAIPVQMQQRELDQIIKNQSVYYDWLAAPNPVEKHRQSMPYQLDELLNFRIPYYVGPLVTAKEQKAAQGGVFAWMVRKDPDGNITPYNFDEKVDREASANTFIQRMKTTDTYLIGEDVLPKQSLLYQSYEVLNELNNVRVNDNKLSFDQKQQVLGELFERHNTVTIKQFVDNLLAHGDYDRIPEVRGLADEKRFLSSLSTYNQLKGILHEAIDDSDKQTDIEKIIAWSTIFEDKAIFKTKLNEISWLTAGMINSLANIRYRGWGQFSHKLLNELTLSTGRTVFEELLISSHNLMQILTDEVLKQKIAELNAHELKASGIYAAIDDAYTSPSNKKALRQVLSVIDDITNAAGQAPNWLYIETADGDGVPGKRTNSRQRKIQEIYANAAQELITGSVRGELEDKIASRADFTDRLVLYFMQGGRDIYTGEPLNIDNLSSYDIDHILPQSLIKDNSLDNRVLVHPLVNREKDTIFASTRFAKQMNGMWRQWHAAGLISSRKLRNLQMRPDEIDKYASGFVARQLVETRQIIKLTEQIVADQYPDAKIIAVKAGLSSQLRKELDFPKNREVNHYHHAFDAFLAARIGTYLLKRYPNLEPFFTYGKFKKTEVKKLKSLKSFNFIRDMTHAKDKIVAKETGEIVWDNASDINELDRIYNFKRMLITHEVRFETASLFKQTLYAAKNSKNRGGSRQLIPKKKGYLVDIYGGYTQETGSYLSVVRLTKKAMYAVVKVSTRDAAKLAVAKSISEQKENETLKKIIDGKLSKTSKKGKTTHQLFEIVLPRVGQKTLFKNSKYNQFLVNSDTYMHNYQELWMPREYQRMWKDILLSNHGDAQLEGQLDQIFKFIVSQVNSYFNLYDINQFRKKIADATDKFAKLPTHDTDNARGKIATIGQLLIGLQANAMRSDLRNLDIKTPFGLLQIGTGITLDLDTSIIYQSPTGLFEREVPLTDL

SEQ ID NO: 271 - protein, 1361 aa, Lactobacillus casei; identical to SEQ ID NO: 268
  Lactobacillus casei group

SEQ ID NO: 272 - protein, 1360 aa, Lactobacillus casei
  Lactobacillus casei T71499
MTKLGKPYGIGVDIGSNSIGFAAVDENSHLIRLKGKTVIGARLFEEGKAAADRRASRTTRRRLSRNRWRLSFLRDFFESHITPTDPNFFMRQKYSEISPKDKARYKYEKRLFNDRTDAEFYQQYPTMYHLRTRLLTDPSKADVREIYFAIHHILKSRGHFLTPGYAKDFNTNKVALNEIFPALQDAYAQVYPDLDITFDENKVNEFKTVLLNEKATPSDTQRALVNLLLAEDGDKDILKQQKQVLTEFAKAVVGLKTKLNVALGTEVDSSEATVWNFSLGQLDDKWAGIESAMTDEGTEILDQIRDLYRARLLNGIVPAGKTLSQAKVDDYAQHHEDLELFKDYLKQLEDDGTAKAIRQLYDRYIDGDDAKPFVREDFVKALTKEVTAHPNAKSPELLERLAQPDFMLKQRNKANGAIPVQMQQRELDQIIKNQSVYYDWLAAPNPVEKHRKSMPYQLDELLNFRIPYYVGPLVTAKEQKAAQGGVFAWMVRKDPDGNITPYNFDEKVDREASANTFIQRMKTTDTYLIGEDVLPKQSLLYQSYEVLNELNNVRVNDNKLSFDQKQQVLGELFERHNTVTIKQFVDNLLAHGDYDRIPEVRGLADEKRFLSSLSTYNQLKGILHEAIDDADKQTDIENIIAWSTIFEDKAIFKTKLNEISWLNAGMINSLANIRYRGWGQFSHKLLNELTLSTGRTVFEELLISSRNLMQILTDEVLKQKIAELNAHELKASGIYAAIDDAYTSPSNKKALRQVLSVIDDITNAAGQAPNWLYIETADGDGVPGKRTNSRQRKIQEIYANAAQELITGSVRGELEDKIASRADFTDRLVLYFMQGGRDIYTGEPLNIDNLSSYDIDHILPQSLIKDNSLDNRVLVHPLVNREKDTIFASTRFAKQMNGMWRQWHAAGLISSRKLRNLQMRPDEIDKYASGFVARQLVETRQIIKLTEQIVADQYPDTKIIAVKAGLSSQLRKELDFPKNREVNHYHHAFDAFLAARIGTYLLKRYPNLEPFFTYGKFKKTEVKKLKSFNFIRDMTHAKDKIVAKETGEIVWDNASDINELDRIYNFKRMLITHEVRFETASLFKQTLYAAKNSKNRGGSRQLIPKKKGYLVDIYGGYTQETGSYLSVVRLTKKAMYAVVKVSTRDAAKLAVAKSISEQKENETLKKIIDGKLSKTSKKGKTTHQLFEIVLPRVGQKTLFKNSKYNQFLVNSDTYMHNYQELWMPREYQRMWKDILLSNHGDAQLEGQLDQIFKFIVSQVNSYFNLYDINQFRKKIADATDKFAKLPTHDTDNARGKIATIGQLLIGLQANAMRSDLRNLDIKTPFGLLQIGTGITLDLDTSIIYQSPTGLFEREVPLTDL

SEQ ID NO: 273 - protein, 1366 aa, Lactobacillus casei
  Lactobacillus casei UCD174
MTKLGKPYGIGVDIGSNSIGFAAVDENSHLIRLKGKTVIGARLFEEGKAAAYRRASRTTRRRLSRNRWRLSFLRDFFESHITPTDPNFFMRQKYSEISPKDKARYKYEKRLFNDRTDAEFYQQYPTMYHLRTRLLTDPSKADVREIYFAIHHILKSRGHFLTPGYAKDFNTNKVALNEIFPALQDAYAQVYPDLDITFDENKVNEFKTVLLNEKATPSDTQRALVNLLLAKEGDRDILKQQKQVLTEFAKAVVGLKTKLNVALGTEVDSSEATAWNFSLGQLDDKWAGIESAMTDEGTEILDQIRDLYRARLLNGIVPAGKTLSQAKVDDYAQHHEDLELFKDYLKQLEDDGTAKAIRQLYDRYIDGDDAKPFVREDFVKALTKEVTAHPNAKSPELLERLAQPDFMLKQRNKANGAIPVQMQQRELDQIIKNQAVYYDWLAAPNPVEKHRQSMTYQLDELLNFRIPYYVGPLVTAKEQKAAQGGVFAWMVRKDPDGNITPYNFDEKVDREASANTFIQRMKTTDTYLIGEDVLPKQSLLYQSYEVLNELNNVRVNDNKLSFDQKQQVLGELFERHNTVTIKQFVDNLLAHGDYDRIPEVRGLADEKRFLSSLSTYNQLKGILHEAIDDADKQTDIENIIAWSTIFEDKAIFKTKLNEISWLNAGMINSLANIRYRGWGQFSHKLLNELTLSTGRTVFEELLISSRNLMQILTDEVLKQKIAELNAHELKASGIYAAIDDAYTSPSNKKALRQVLSVIDDITNAAGQAPNWLYIETADGDGVPGKRTNSRQRKIQEIYANAAQELITGSVRGEFEDKIASRADFTDRLVLYFMQGGRDIYTGEPLNIDNLSSYDIDHILPQSLIKDNSLDNRVLVHPLVNREKDTIFASTRFAKQMNGMWRQWHAAGLISSRKLRNLQMRPDEIDKYASGFVARQLVETRQIIKLTEQIVADQYPDTKIIAVKAGLSSQLRKELDFPKNREVNHYHHAFDAFLAARIGTYLLKRYPNLEPFFTYGKFKKTEVKKLKSLKSLKSFNFIRDMTHAKDKIVAKETGEIVWDNASDINELDRIYNFKRMLITHEVRFETASLFKQTLYAAKNSKNRGGSRQLIPKKKGYLVDIYGGYTQETGSYLSVVRLTKKAMYAVVKVSTRDAAKLAVAKSISEQKENETLKKIIDGKLSKTSKKGKTTHQLFEIVLPRVGQKTLFKNSKYNQFLVNSDTYMHNYQELWMPREYQRMWKDILLSNHGDAQIEGQLDQIFKFIVSQVNSYFNLYDINQFRKKIADATDKFAKLPTHDTDNARGKIATIGQLLIGLQANAMRSDLRNLDIKTPFGLLQIGTGITLDLDTSIIYQSPTGLFEREVPLTDL

SEQ ID NO: 274 - protein, 1389 aa, Lactobacillus casei
MIIRTYELKTITTIAILKMFQLLTGGLSMTKLGKPYGIGVDIGSNSIGFAAVDENSHLIRLKGKTVIGARLFEEGKAAADRRASRTTRRRLSRNRWRLSFLRDFFESHITPTGPNFFMRQKYSEISPKDKARYKYEKRLFNDRTDAEFYQQYPTMYHLRNRLLTDPSKADVREIYFAIHHILKSRGHFLTSGYAKDFNTNKVALNEIFPALQDAYAQVYPDLDITFDENKVNEFKTVLLNEKATPSDTQRALVNLLLAEDGDKDILKQQKQVLTEFAKAVVGLKTKLNVALGTEVDSSEATVWNFSLGQLDDKWAGIESAMTDEGTEILDQIRDLYRARLLNGIVPAGKTLSQAKVDDYAQHHEDLELFKDYLKQLEDDGTAKAIRQLYDRYIDGDDAKPFVREDFVKALTKEVTAHPNAKSPELLERLAQPDFMLKQRNKANGAIPVQMQQRELDQIIKNQSVYYDWLAAPNPVEKHRKSMPYQLDELLNFRIPYYVGPLVTAKEQKAAQGGVFAWMVRKDPDGNITPYNFDEKVDREASANTFIQRMKTTDTYLIGEDVLPKQSLLYQRYEVLNELNNVRVNNEKLSIEQKQQVIRELFERHNSVTIKQFAENLRAHGDYAHIPEIRGLADEKRFLSSLSTYRQLKSLLPDAIDDPAKQADIENIIAWSTVFEDAAIFKTKLKEINWLDSQTITKLSNIRYRGWGQFSHKFLNGLTLGNGHTIIQELFLSNNNLMQILTDETLQKKMTELNADKLKAANINDAIDDAYTSPSNKKALRQVLRVIEDIKRAADGQDPSWLYVETADGGGTPGKRTRARQHQLQEIYANAAHELIDSAVRGELEDKIADKADFNDRLVLYFMQGGRDIYTGTPLNIDQLSSYDIDHILPQSLIKDNSLDNRVLVHAIINREKNATFASTIYAQKMNATWRQWHEAGLISGRKLRNLQMRPDQIDKYASGFVARQLVETRQIIKLTEQIVAAQYPETKIIAVKAGLSHQLREELEFPKNRDVNHYHHAFDAFLAARIGTYLLKRFPNLQAFFTYGKFKKADVKKLRGFNFIRDITHAEDKIVVKDTGEVIWDKKRDVDELDRIYNFKRMLITHEVHFEKADLFKQTVYGAKDSKEAGGKKQLISKKKGYPVDIYGGYTQETGSYLSVVRLTKKAMYAVVKVSTRDAAKLAVAKSISEQKENETLNDIIDEKLSKISKNGKITHELFEVVLPRVGQKTLFKNSKYNLFLVNSDTYMHNYQELWMPREYQKMWKDISLSKYGDAQTEDQLDQIFGFIVSQVNSYFNLYDINQFRKKLNDAADKFATLPMRDTDDMQGKIATIGQLLIGLQANAARSDLRNLDIKTPLGLLQIPNGISLDSDTSVVYQSPTGLLEREVHLSDL

SEQ ID NO: 275 - protein, 1354 aa, Lactobacillus coryniformis
  Lactobacillus coryniformis subsp. coryniformis KCTC 3167
MTLHYNVGLDIGTNSVGYTIVDDNGKILQVKGKNGYGVRVFKEGATAAERRIFRTTHRRLKRRKWRLRLLQDFFEPYILPQDDGFFIRRKESNLVLNDRDEDTASLFNDRSDRDFYQAYPTIYHLRQALMTEKRQFDVREIYLAMHHIIKYRGHFLLNGTVNNFTNNKIDLHSDFEELNALLLNVIPELKFQIDLDHSTMFQTTLLNTTISRSGRQRDLVKSFYNGSDDKQLAKQQKSVATELLKAILGLKAKFHKLFNLDLLETTEWEFSFDAEDIDDKLAKLEPLMTENQQQVMDILQRIFAAITLNGIVPEGKTLSASKVDSYQKHKQDLKLLKAIAQHSDKKTATVLQTAYNEYINGIASKPLKQEDFYKRLTNAVKKSSDPQVADMLALIDQEKFLPKQRTKENGAIPHQLHQLELERIIDNQKDYYPWLAELNPNQARQKVAKYKLSELVAFRVPYYVGPLIEPEVQQATSNAHFAWMARKEAGPITPWNFDQKVDRNVSAERFIKRMTTKDTYLLAEDVLPLHSLLYQRFIVLNELNNVRVNGQKLTKKQKQAVYQDLFKRQPHVTKKQFKSYLVQTGEFAESSKIEGLANETSFNSGLTTENELRKIFGAQLDEARYQVDFEQIIEWATLFEDAKILRTKLAEITWLTTEQIEKLAGIRYRGWGRFSRKLLAGLRDQNGQQIIDLLWDTPNNFMVIVSQAAFSEAITKENEKLIDRRGAQDVITDLYTSPQNKKALRQVLAIVADVQKAMGGVPPQRIFIEFAREDEKNPRRSVERSRQLEKLYQTISNEFLINSEVRQELKEAVDQKVNFKDRLFLYFLQGGVDLYSGKRINIDQLSHYDIDHILPQSFIKDDSLDNRVLVSQKLNRSKSDSVPLSEFANYKFGPAMQAKWLQLKEAGLLSKRKYDNLTLDPTKLSKFAPLGFVNRQLVETRQVIKLAANLLASEETKVVTIKANMTHQVRKELDFPKNRNVNNYHHAFDAYLTAFVGIFLSKRYPKLKPYFTYGDFQKGNKLPDLKNFNFLYELKNKDRSIDSNTGEIIWDKQRDLAYMNKIYNFKKVTVVHEVLTKSGALYNQTLYKASEDKASGRGTKQLIRKKDNMPTELYGGYTGSTSAFMSIVRLWKKDKPYYKVVGIPTRMAAKLANQAQLLDYLTKKFTTRKLVKKTGDYKTTVERFELVVPKVGFNQLVIDGGQPFMLGSATYQYNARELFISKEAVKALNKQLSTHVDLVQVFDEILVQVNRWFPLYDTNGFREKLSHGRDRFMKLNDSFEEKSDTQIDVLNRILIGFHANAARTNLKILGLGTDLGFMTQQAGIRLTEKAILVHQSPSGLFERKVALRDLKGLR

SEQ ID NO: 276 - protein, 1119 aa, Lactobacillus coryniformis
  Lactobacillus coryniformis subsp. torquens KCTC 3535
MGYRIGLDVGITSTGYAVLKTDKNGLPYKILTLDSVIYPRAENPQTGASLAEPRRIKRGLRRRTRRTKFRKQRTQQLFIHSGLLSKPEIEQILATPQAKYSVYELRVAGLDRRLTNSELFRVLYFFIGHRGFKSNRKAELNPENEADKKQMGQLLNSIEEIRKAIAEKGYRTVGELYLKDPKYNDHKRNKGYIDGYLSTPNRQMLVDEIKQILDKQRELGNEKLTDEFYATYLLGDENRAGIFQAQRDFDEGPGAGPYAGDQIKKMVGKDIFEPTEDRAAKATYTFQYFNLLQKMTSLNYQNTTGDTWHTLNGLDRQAIIDAVFAKAEKPTKTYKPTDFGELRKLLKLPDDARFNLVNYGSLQTQKEIETVEKKTRFVDFKAYHDLVKVLPEEMWQSRQLLDHIGTALTLYSSDKRRRRYFAEELNLPAELIEKLLPLNFSKFGHLSIKSMQNIIPYLEMGQVYSEATTNTGYDFRKKQISKDTIREEITNPVVRRAVTKTIKIVEQIIRRYGKPDGINIELARELGRNFKERGDIQKRQDKNRQTNDKIAAELTELGIPVNGQNIIRYKLHKEQNGVDPYTGDQIPFERAFSEGYEVDHIIPYSISWDDSYTNKVLTSAKCNREKGNRIPMVYLANNEQRLNALTNIADNIIRNSRKRQKLLKQKLSDEELKDWKQRNINDTRFITRVLYNYFRQAIEFNPELEKKQRVLPLNGEVTSKIRSRWGFLKVREDGDLHHAIDATVIAAITPKFIQQVTKYSQHQEVKNNQALWHDAEIKDAEYAAEAQRMDADLFNKIFNGFPLPWPEFLDELLARISDNPVEMMKSRSWNTYTPIEIAKLKPVFVVRLANHKISGPAHLDTIRSAKLFDEKGIVLSRVSITKLKINKKGQVATGDGIYDPENSNNGDKVVYSAIRQALEAHNGSGELAFPDGYLEYVDHGTKKLVRKVRVAKKVSLPVRLKNKAAADNGSMVRIDVFNTGKKFVFVPIYIKDTVEQVLPNKAIARGKSLWYQITESDQFCFSLYPGDMVHIESKTGIKPKYSNKENNTSVVPIKNFYGYFDGADIATASILVRAHDSSYTARSIGIAGLLKFEKYQVDYFGRYHKVHEKKRQLFVKRDE

SEQ ID NO: 277 - protein, 1368 aa, Lactobacillus curvatus
  Lactobacillus curvatus CRL 705
MSRPYNIGLDIGTSSIGWSVVDDQSKLVSVRGKYGYGVRLYDEGQTAAERRSFRTTRRRLKRRKWRLGLLREIFEPYITPIDDTFFLRQKQSNLSPKDQRKLYTQTSLFNDRTDRAFYDDYPTIYHLRYRLMTEKRQFDIREIYLAMHHIVKYRGHFLNEAPVSSFKSSEINLVAHFDRLNTIFADLFSESGFQLETDKLAEVKALLLDNQQSASNRQRQALSLIYTPSTNKAVEKQNKAIATELLKAILGLKAKFNVLTGIEAEDVKAWTLTFNAENFDEEMVKLESSLDDNAHQIIESLQELYSGVLLAGIVPENQSLSQAMITKYDDHQKHLKMLKAVREALAPGDRQRLKQAYDQYVDGQENTKAYSKEDFYGDITKALKNNPDHPIVSEIKKLIELDQFMPKQRTKDNGAIPHQLHQQELDRIIENQQQYYPWLAELNPNSKRQTVAKYKLDELVAFRVPYYVGPLITAEQQRQSSDAKFAWLIRKAEGRITPWNFDDKVDRQASANEFIKRMTTTDTYLLAEDVLPKQSLIYQRFEVLNELNGLKIDDQPITTELKQAIFTDLFMQKISVTVKNIQDYLVSEKRYASRPAITGLSDENKFNSRLSTYHDLKMIVGDAVDDVDKQADLEKCIEWSTIFEDGKIYSAKLNEIDWLTDQQRVQLAAKRYRGWGRLSAKLLTQIVNANGQRIMDLLWDTTDNFMRIVHSEDFDKLITEANQMMLAENDVQDVINDLYTSPQNKKALRQILLVVNDIQKAMKGQAPERILIEFAREDEVNSRLSVQRKRQVEQVYQNISNELLNNTEIRNELKDLSNSALSNTRLFLYFMQGGRDMYTGDSLNIDRLSTYDIDHILPQSFIKDNSLDNRVLVSQKMNRSKADQVPTDFTSVELGQKMQIQWEQMLRAGLITKKKYDNLTLNPDHISKYAMKGFINRQLVETRQVIKLATNLLMEQYGEDNIELITVKSGLTHQMRTEFDFPKNRNLNNHHHAFDAYLTAFVGLYLLKRYPKLKPYFVYGEYQKASQQDKWRNFNFLNGLKKDELVDENTEAVIWDKESGLAYLNKIYQFKKILVTRGVHENSGALFNQTLYAAKDDKASGQGGKQLIPAKQDRSTALYGGYSGKTVAYMCIVRIKNKKGDLYKVCGVETSWLAQLKQLTDEDSQKAFLEQKISPQFTKVKKQKGNIIEAVEEFEVIAPHILINQRFFDNGQELTLGSATYKHNEQELILDKTAVKLLNGALPLTQSEELAEQVYDEILDQVMHYFPLYDTNQFRAKLSTGKAAFMKLPWKSQWDGNKMVQVGQQVILDRILIGLHANAAMSDLKVLKMTTPFGMIQQSTGITLSADTQIIYQSPTGLFERRVALRDL

SEQ ID NO: 278 - protein, 1126 aa, Lactobacillus farciminis
  Lactobacillus farciminis KCTC 3681
MADRISLGLDIGVASVGFSVLDIDKGKVIELGARLFSATVAAGNQDRRDMRGARRLLNRNKQRRQDTGKLFKKFGLIDDFDKGSFYDNFNQNLNPYELRVKGLTEQLTKEELAESLYQIVKHRGISYALKDADVDEGGTDYSVSLKINSQELAEKTPAQIQLQRLNDYGKVRGQVVIGDDPDNQKVLLNVFPTSAYEKEAKQIIATQQQFYPESLTDKFTEEYCQILTRKRDYFVGPGNEKSRTDYGIYKTDGRTLDNLFEELIGHDKIYPEELRASAASYTAQLFNVLNDLNNLRILNYEDGKLTKEDKEKIIAEIKNNTTTINMLNVIKKVAGCSKDDIKGFRVNEKDKPEISSMPVYRKIHKDLLKAGVDISDWPVEFIDELSFILTLNTENGEIRKQLNNRLAPKFDFLNADLIQLIIDNKDSFEIKTNNKWHRFSVKTMNKLIPEMMERPVEQMTLLNEMGLVKKDKKRFENNKYLPYKEIAKDIFNPVASKSVREALKIVNAVLKKYGHIDYLVVEMPRDKNLKEEQDNIKEFQNKNKKAKDAAFEAFVKSVGSEQRVKEALSKNRKLQMKMRLWYQQQEIDPYNGKTIDATDLINNPDKFEIDHIIPQSISFYDSINNKTLCFASMNQVKGQKTPYEFMLEGHGQSYDKFKATVMANKNFGKAKRANYLFEENVSDIETRKRFLSRNLVDTRYSSRVVLNSLQDFFREKSADTKVTVIRGKFTSNMRKHWHIDKTRETFHHHAIDASIIAATPFLRMWKKGGTIFPVKVGEESIDIETGEILDDKNFDKAMYEEPYSGFVSEIMNADDRIKFSHQVDKKMNRKVSDATIYSTRTGKLAKDKKDAEYIVAKVKDIYSVDGFKKFKKVYDKDKTKFLLYKYDPRTFSKLERIISDCPDKVEKVQTNGKVKAVDISPFEMYRRDHGMIKKYSKKGNGPAIKQLKYLDKKLGSHIDITPANANGKHVILQSLKPWRTDVYLNHETGEYEIMGIKYSDLKFNKNEGYGIKKDKYLEIKKVEEVSEKSEFMFSLYRKDRVKVQDMKTGESVELLFWSRNFSNKKYAELKPISQAENDKKLPVYGKGRLIKRLIPKNCKIWKVNTTILGDPYYLEKESDSPKDILD

SEQ ID NO: 279 - protein, 1356 aa, Lactobacillus farciminis
  Lactobacillus farciminis KCTC 3681
MTKKEQPYNIGLDIGTSSVGWAVTNDNYDLLNIKKKNLWGVRLFEEAQTAKETRLNRSTRRRYRRRKNRINWLNEIFSEELAKTDPSFLIRLQNSWVSKKDPDRKRDKYNLFIDGPYTDKEYYREFPTIFHLRKELILNKDKADIRLIYLALHNILKYRGNFTYEHQKFNISNLNNNLSKELIELNQQLIKYDISFPDDCDWNHISDILIGRGNATQKSSNILKDFTLDKETKKLLKEVINLILGNVAHLNTIFKTSLTKDEEKLNFSGKDIESKLDDLDSILDDDQFTVLDAANRIYSTITLNEILNGESYFSMAKVNQYENHAIDLCKLRDMWHTTKNEEAVEQSRQAYDDYINKPKYGTKELYTSLKKFLKVALPTNLAKEAEEKISKGTYLVKPRNSENGVVPYQLNKIEMEKIIDNQSQYYPFLKENKEKLLSILSFRIPYYVGPLQSAEKNPFAWMERKSNGHARPWNFDEIVDREKSSNKFIRRMTVTDSYLVGEPVLPKNSLIYQRYEVLNELNNIRITENLKTNPIGSRLTVETKQRIYNELFKKYKKVTVKKLTKWLIAQGYYKNPILIGLSQKDEFNSTLTTYLDMKKIFGSSFMEDNKNYDQIEELIEWLTIFEDKQILNEKLHSSKYSYTPDQIKKISNMRYKGWGRLSKKILMDITTETNTPQLLQLSNYSILDLMWATNNNFISIMSNDKYDFKNYIENHNLNKNEDQNISDLVNDIHVSPALKRGITQSIKIVQEIVKFMGHAPKHIFIEVTRETKKSEITTSREKRIKRLQSKLLNKANDFKPQLREYLVPNKKIQEELKKHKNDLSSERIMLYFLQNGKSLYSEESLNINKLSDYQVDHILPRTYIPDDSLENKALVLAKENQRKADDLLLNSNVIDRNLERWTYMLNNNMIGLKKFKNLTRRVITDKDKLGFIHRQLVQTSQMVKGVANILDNMYKNQGTTCIQARANLSTAFRKALSGQDDTYHFKHPELVKNRNVNDFHHAQDAYLASFLGTYRLRRFPTNEMLLMNGEYNKFYGQVKELYSKKKKLPDSRKNGFIISPLVNGTTQYDRNTGEIIWNVGFRDKILKIFNYHQCNVTRKTEIKTGQFYDQTIYSPKNPKYKKLIAQKKDMDPNIYGGFSGDNKSSITIVKIDNNKIKPVAIPIRLINDLKDKKTLQNWLEENVKHKKSIQIIKNNVPIGQIIYSKKVGLLSLNSDREVANRQQLILPPEHSALLRLLQIPDEDLDQILAFYDKNILVEILQELITKMKKFYPFYKGEREFLIANIENFNQATTSEKVNSLEELITLLHANSTSAHLIFNNIEKKAFGRKTHGLTLNNTDFIYQSVTGLYETRIHIE

SEQ ID NO: 280 - protein, 1313 aa, Lactobacillus fermentum
  Lactobacillus fermentum 28-3-CHN
MHYLDEIFAPHLQEVDENFLRRLKQSNIHPEDPAKNQAFIGKLLFPDLLKKNERGYPTLIKMRDELPVEQRAHYPVTNIYKLREAMINEDRQFDLREVYLAVHHIMKYRGHFLNNASVDKFKVGRIDFYKSFNVLNEAYEELQNGEGSFTIEPSKVEKIGQLLLDTKMRKLNRQKAVAKLLEVKVADKEETKRNKQIATAMSKLVLGYKADFATVAMANGNEWKIDLSSETSEDEIEKFREELSDAQNDILTEITSLFSQIMLNEIVPNGMSISESMMDRYWTHERQLAEVKEYLATQPASARKEFDQVYNKYIGQAPKERGFDLEKGLKKILSKKENWKEIDELLKAGDFLPKQRTSANGVIPHQMHQQELDRIIEKQAKYYPWLATENPATGERDRHQAKYELDQLVSFRIPYYVGPLVTPEVQKATSGAKFAWAKRKEDGEITPWNLWDKIDRAESAEAFIKRMTVKDTYLLNEDVLPANSLLYQKYNVLNELNNVRVNGRRLSVGIKQDIYTELFKKKKTVKVSDVASLVMAKTRGVNKPSVEGLSDPKKFNSNLATYLDLKSIVGDKVDDNRYQTDLENIIEWRSVFEDGEIFADKLTEVEWLTDQQRSALVKKRYKGWGRLSKKLLTGIVDENGQRIIDLMWNTDQNFMQIVNQPVFKEQIDQLNQKAITNDGMTLREWVESVLDGAYTSPQNKKAIWQVVRVVEDIVKAVGNAPKSISIEFARNEGNKGEITRSRRTQLQKLFEDQAHELVKDTSLTEELEKAPDLSDRYYLYFTQGGKDMYTGDPINFDEISTKYDIDHILPQSFVKDDSLDNRVLVSRAENNKKSDRVPAKLYAAKMKPYWNQLLKQGLITQRKFENLTMDVDQNIKYRSLGFVKRQLVETRQVIKLTANILGSMYQEAGTDIIETRAGLTKQLREEFDLPKVREVNDYHHAVDAYLTTFAGQYLNRRYPKLRSFFVYGEYMKFKHGSDLKLRNFNFFHELMEGDKSQGKVVDQQTGELITTRDEVAKSFDRLLNMKYMLVSKEVHDRSDQLYGATIVTAKESGKLTSPIEIKKKRPVDLYGAYTNGTSAFMTIIKFTGNKPKYKVIGVPTTSAVGLKRVGKPGSESYNQELHRIIKSNPKVKKDFEIVVPHVSYSQLIVDDDCKFTLASDTYQHPATQLVLSKESMEIIADDFKFVKENTATADEQLVRVFDEIVNQMNHYFTIFDQRSNRQKVTKARDKFVSLPTESEYEGAKKTQVGKTEVITNLLMGLHANSAQGDLKVLGLSTFGFFQSSGGLNLSEDAMIVYQSPTGLFERRICLKDI

SEQ ID NO: 281 - protein, 1381 aa, Lactobacillus fermentum
  Lactobacillus fermentum ATCC 14931
MDYVKEYHIGLDIGTSSIGWAVTDSQFKLMRIKGKTAIGVRLFEEGKTAAERRTFRTTRRRLKRRKWRLHYLDKIFAPHLQEVDENFLRRLKQSNIHPEDPAKNQAFIGKLLFPDLLKKNERGYPTLIKMRDELPVEQRAHYPVTNIYKLREAMINEDRQFDLREVYLAVHHIVKYRGHFLNNASVDKFKVGRIDFDKSFNVLNEAYEELQNGEGSFTIEPSKVEKIGQLLLDTKMRKLDRQKAVAKLLEVKVADKEETKRNKQIATAMSKLVLGYKADFATVAMANGNEWKIDLSSETSEDEIEKFREELSDAQNDILTEITSLFSQIMLNAIVPNGMSISESMMDRYWTHERQLAEVKEYLATQPASARKEFDQVYNKYIGQVPKEKGFDLEKGLKKILSKKENWKEIDELLKAGDFLPKQRTSANGVIPHQMHQQELDRIIEKQAKYYPWLATENPATGERDRHQAKYELDQLVSFRIPYYVGPLVTPEVQKATSGAKFAWAKRKEDGEITPWNLWDKIDRAESAEAFIKRMTVKDTYLLNEDVLPANSLLYQKYNVLNELNNVRVNGRRLSVGIKQDIYTELFKKKKTVKAGDVASLVMAKTRGVNKPSVEGLSDPKKFNSNLATYLDLKSIMGDKVDDNRYQMDLENIIEWRSVFEDGEIFADKLTEVEWLTDEQRSALVKKRYKGWGRLSKKLLTGIVDENGQRIIDLMWNTDQNFMQIVNQPVFKEQIDQLNQKAITNDGMTLRERVESVLDDAYTSPQNKKAIWQVVRVVEDIVKAVGNAPKSISIEFARNEGNKGEITRSRRTQLQKLFEDQAHELVKDTSLTEELEKAPDLSDRYYFYFTQGGKDMYTGDPINFDEISTKYDIDHILPQSFVKDDSLDNRVLVSRAENNKKSDRVPAKLYAAKMKPYWNQLLKQGLITQRKFENLTMDVDQNIKYRSLGFVKRQLVETRQVIKLTANILGSMYQEAGTDIIETRAGLTKQLREEFDLPKVREVNDYHHAVDAYLTTFAGQYLNRRYPKLRSFFVYGEYMKFKHGSDLKLRNFNFFHELMEGDKSQGKVVDQQTGELITTRDEVAKSFDRLLNMKYMLVSKEVHDRSDQLYGATIVTAKESGKLTSPIEIKKNRPVDLYGAYTNGTSAFMTIIKFTGNKPKYKVIGVPTTSAVGLKRVGKPGSESYNQELHRIIKSNPKVKKDFEIVVPHVSYSQLIVDGDCKFTLASDTYQHPATQLVLSKESMEIIADDFKFVKENPATADEQLVRVFDEIVNQMNHYFTIFDQRSNRQKVTKARDKFVSLPTESEYEGAKKTQVGKTEVITNLLMGLHANAAQGDLKVLGLSTFGFFQSSGGLNLSEDAMIVYQSPTGLFERRICLKDI

SEQ ID NO: 282 - protein, 1327 aa, Lactobacillus florum
  Lactobacillus florum 2F
MTEQQQPYNIGLDIGTSSIGWAVTDQNDKLLHIRGHNGIGVRLFKEGESAAERRGFRTTRRRLSRRRWRLRFLDRIFDAELAKVDPNFLARLKQSNISPLDPNKQMFGNILFDDPQFDDQKFHQQYPTIYHLRSALAQPDAPQADVRLIYLALHHMIKFRGHFLNGAAVEKFHGGQLHLESEFQELNQIFSNQQRDHVQLQTSSLDEVATILKDNQRTPSDRQRELSARLFVPVDKTIDKENKKLATELLKAVLGLKAKFDVILGVEATDPQAFKLQFSSDDFDDKIAELASELTDEANEILTVLQRLYFSLNLADILTNRQTKQVADSISTAMINRYDDHKHHLKMLKELEAQVTQEQRDGLKKAYDEYIDGDKPTIDTFYTNIKKNLDDSELANQIKSLIDLQAFMPKQRSKENGSIPHQLHQRELDQLIEVQGKYYPWLLAAKDKLDALIAFRVPYYVGPMIDPNQSDDPQNTKFAWMVRKEAGEITPWNFEEKVDKTSSATNFIKRMTTTDTYLLGEPVLPKNSLLYQQFTVLNELNKLKVNGKALTVDQKKYLYEHVCKKQRRVTLKKLSDCLMARGDFPMGAIFTGTTDQKNMNNTLKTYQDFQEIFGDEIDNPDRQVDFEKMIEWSAIFEDREIFKLKLAELNWLTSEQLERVSKKRYQGWGRLSQKLLTHIVNENGERIIDQLWNTNQNFMEIMGQDSVKQAIQEHNGANVAQTGINETIDELYTSPQNKKAIRQILLVVDDIKKAVGYAPANIMMEFAREDRDDHRLIASRARQLEKTYQEISKNWFDNESVTQELKDQIKNKTKFTDRLYLYFIQGGIDLYTGHPLNIDQLSSYDIDHILPQSFLLDNSLNNRVLTSQAENRVHKEDRLPGETVANKMRPTWKMMREQGLMTQRKYNNLTLKPDQISKFNNRGQFINRQLVETRQVIKLAADIMSQKYQADQTKVVTVKANLTHHMREKFNFYKSRNVNDYHHAFDAYLTLFVGNWLLKEYPKLQPYFVYGDFAKTGTNNLKSFNFLYRFERDHKLNDKGAIDTDKDQQLGYMKRIYRFKKMLVTKQLETNEGALYGQTLYPAPKNDKKTRNLINSKKNRPSDIYGGYSNENGSFLTLVKLKKGSKYDYRLVAVPVSKISEIKESELATIEKAIAPQFLKSSGKYRDFQVVLSKILINQKVIDDGMIFTIGSKSYKHNAKQVVLSDNSIQIVSTLSRISDKEKLITVFDEIVDITSKYLPWYKVNDVEKTKMLFRQMQDIDEMKKIIDNSLIGLHCNASITDLGKVGLSKYWGRFVLTAGISLTVDAQLIYQSPTGLFEHRVKVSDL

SEQ ID NO: 283 - protein, 1391 aa, Lactobacillus gasseri
  Lactobacillus gasseri JV-V03
MTKIKNEYIVGLDVGTNSCGWVAMDFQNTILRMHGKTAIGSHLFDAGNSAADRRAFRTTRRRIKRRKWRLKLLEEIFDPYMTEVDPYFFARLKESGLSPLDKRKNVSSIVFPTALEDKKFYCNYPTIYHLRYDLMSEDKKFDLREIYLAIHHIVKYRGNFLYNTPVKDFEASKIDVKDSLEKLNELYERLDSEFTVELDSSNALEIEKIIRDKKVFKINKVKSIHQLLSLKTENKERTKLIKDVSKQIINAILGYKTKFETILLKNISKDEADDWEFKLTDVDADNKFENLIGDLNENEQEILLEIRNLANAITLSNIVEEGKTLSESMIDKYNKHSDDLELLKQVISDHPDRDKAKKLALAYDLYVNNRHGKLLQAKDVLGSKKTLSKEDFYKEVKKNLDDSKASQEILDTIALDSFMPKQRTNENGVIPYQLHQLELDRIIKNQGKYYPFLKEVNPVSSHLKEAPYKLDELIRFRVPYYVGPLISPNESTKNKQTKKNQNFAWMIRKEQGQITPWNFDQKVDRMASANKFIKRMTTKDTYLLGEDVLPANSLLYQKFTVLNELNNIKINGKRISVPLKEELYNNLFKKNSTVTTNKLKSYLKENYNLINVEIKGLADEKKFNSGLTTYNKLRNLKIFDQQLDDLNYDKDFERIIEWSTIFEDKAIYKDKLKTIKWLSDRQIDKLSKIRMQGWGQLSKKLLSQLTDNNGQTIIEQLWDSQNNFMQIVNQSDFKDAIAVANQNLLVNTSVEDILNEAYTSPANKKAIRQVVKVVDDIVKAASGKVPKQIAIEFTRDADDKAKISQTRANKLRKVYKELSNELASETIRNELERVAKDQKLLKDKYYLYFMQLGRDAYTGEPINIDDLGQYDIDHILPQSFIKDDSLENRVLVKKAVNNGKSDNVPVKLYGNRMAADLGMTIRHMWEKWKDQGLITKTKYNNLIIDPDKINKYESSGFIHRQLVETSQIIKLVSTILQSKYPDTEIIVVKARYNHYLRKHLNLYKSREVNDYHHAIDAYLSAICGNLLYQVYPYLRPFFVYGQYKKFSSDPKKEKIIYDKTRKYNFISQIFENKSNDIISLETKKKVFDKKDIIEKLKHAYNYKYMLVSRETETHDQEMFKMTVYPRLSRDTKKSRNLISKKKDMPTEIYGGYTNNSDAYMVIARINKKKGTEYRVFGVPMRELVNLRKAEKNGRYNAYLKQVLEPEIMYSKNGKKNKTISSFEIVKAKVPYKQVILDGDKKFMLASSTYVQNAKQLTLSQNSMQAITDNCENDTEEEKALEEKALIEAYDEILTNIDKYLPLFDINKFREKLHAGREKFINLSLDVKKDTILQVLNGLHDNAVMPKIKSLGLSTPLGFMQFSSGVPLSENAKLIYQSPTGLFEKRVKISDL

SEQ ID NO: 284 - protein, 1386 aa, Lactobacillus hominis
  Lactobacillus hominis CRBIP 24.179
MTKITEDYIVGLDIGTNSCGWVAMDSKNTILRMHGKTAIGSHLFDAGNSAADRRAFRTTRRRIKRRKWRLKLLEEIFDSHLAKVDPYFFARLKESGLSPLDTRKNVSSIIYPTSLEDKKFYVDNPTIYHLRYKLMTEDRKFDLREVYLAIHHIVKYRGNFLYNTPVKAFEASKIDVKGSLKKLNELYEGLDSEFNVELDSNNALEIENIIRDKKIFKINKVKEINQLLSLKTEDKERTKLMKDVSKQIVNAILGYKTKFETILLKDVSKDEADDWEFKLTDVDADNKFENLIGDLNENEQEILLVIRKLANAITLSNIVEEGKTLSESMKDKYKKHSDDLKLLKQVISDHPDRDKAKKLALAYDLYVNNRHGKILQAKDILEKKKTLSKEDFYKEIKKNLDDSKESQEILDAISLDSFMPKQRTNENGVIPYQLHQLELDKIIENQGKYYPFLKEVNPVSSHLKQAPYKLDELIRFRVPYYVGPLISPNESTKNKQTKKNQNFAWMIRKEQGQITPWNFDQKVDRMASANKFIKRMTTIDTYLLGEDVLPANSLLYQKFTVLNELNNVKINGKRISVPLKQELYNNLFKKNSTVTTNKLKSYLKENYKLIKVEIKGLSDEKKFNSGLTTYNKLKNLKIFDQQIDDPNYNKDFERIIEWSTIFEDKAIYKEKLKTIDWLSDRQIDKLSKIRMQGWGQLSKKLLSQLTDNNGQTIIEQLWDSQNNFMQIVNQADFKDAIAVANQNLLVDTSVEDILNEAYTSPANKKAIRQVVKVVDDIVKATSGKVPKQIAIEFTRDADDNAKISQSRANKLRKVYKEMSNELASETIRNELERVAKDQKLLKDKHYLYFMQLGRDAYTGELIDIDNLEQYDIDHVLPQSFIKDDSLENRVLVKKAVNNGKSDNVPVKLYGNRMATDLGMTIRHMWEKWKEQGLITKTKYNNLIIDPDKINKYESSGFIHRQLVETSQIIKLVSTILQSKYPDTEIIVVKARYNHYLRKRLNLYKSREVNDYHHAIDAYLSAICGNLLYQVYPYLRPFFVYGQYKKFSSEPEKEKIIYDKTRRYNFISQIFENKDNDIISRETKKKVFDKKDIIEKLKRAYNYKYMLVSRETETHDQEMFKMTVYPRLSRDTKKSRNLIPKKKDMPTEIYGGYTNNSDAYMIIARINKKKGPEYRVFGVPMRELVNLRKAEKNGHYKAYLKQVLEPEIMYSKNGKKNKTISSFEIVKAKVPYKQVILDGDKKFMLASSTYVQNAKQLTLSQYSMQAITDNCENDTEEEKALVEAYDEILTNIDKYLPLFDINKFREKLHAGREKFVDLPLAEKKETILQVLNGLHDNAVMPKIKSLGLSTPLGFMQFHTGVSLSENAKLIYQSPTGLFEKRLKISDL

SEQ ID NO: 285 - protein, 1369 aa, Lactobacillus iners
  Lactobacillus iners LactinV 11V1-d
MNNNYYLGLDLGTNSVGWAVTDDHYNIIKFHGKHMWGMRLFEEAETAKDRRLHRQARRRRQRLVERINLLEELFDKEISKVDQGFFARKKESDLHFEDKTTKSEYALFNDKSYTDRDYYKQYPTIFHLIMDLIENDKKRDIRLVYLACHYLIKHRGHFIFDGKNFTVDNSFENLLDKLITYLKDNDDITLSFPKDQLINIFKNSNLNSTEKSDQLKPFFGRTNLEKGIIKLLSGGKQDLSNMFRDETLKNSNYKNLKFSDNRFDDERDGYAADLGDRIDLLILLKQIYDASILESMMSQARVSIDGHKYISSAKVCAYEKHKSDLKRLKSLIKKYLPSEYNNIFRKITEKDNYVAYSKSNITNNKREKALKYVKYVDFTKYLTKKLKTIKTQDAEDDQEIFEIKGELEKQSFLPKQRTLDNSIIPYQLHLMELKKILDNQSKYYDFLLAKDDQEGITVKDKIISLLTFRLPYYIGPVNPAVHGKFAWVKRLANGKVTPWNYKEKIDIDASHEEFIKTKLSKCSFLIGCDVLPKNSLLYQKYMVLSELNTIKFNGVNISEKLKDDIYQNLFKNIQKVTKKRLQNYIKEHENIIGDVIVTGIDNAFKQGLVSYLKFKKIIGDKVDDDRYQKVLEKIIRDITLYDECAGKKIKKEYKDSDLFTEDELNKIVKLTFNDWGRLSAELLDQLEGEDTVSGETGKIIEFMQKHNYNLMQLMSKKFTFKSKIDEINKSYYQHDKFNYKSMIDSLYVSPATKRILWQSLKVVHEISKIMKHDPEKIFIEMARSKEDHPKRKLSRKADLKQVYKDSKKQIISIIGKDKYQDLSNELDNKDDRDLRWDNLYLYYTQLGRSMYSLKPIDISELMNKNLYDQDHIFPKSKKYDDSIENRVLVEKELNVKKSDIYPISDANIIPQKIKGQVESFWKMLYDHKLIGDKKYARLIRSKAFTDDELAGFIARQLVETRQATKETADLLKRLCPKSRIVYAKAQNASIFRQKFDIPKSRTINDLHHAQDAYLNIVVGNIFDTKFTQDPRNFIKNTKDSRNYNLEKIYDYNVERNNYVAWIAPDGETNGTIANVKCNLSTKDFRVTRPSFYKKGALFNQNLSRKGSNLAPIKEHSPKSNPLKYGGYSGKNNSFFVVVAGKDNKGKDIVKLIPVNTLIYNKMLHCDYKAKQELLTSYVANNFAINNFRIVKDDIKMYSLVKIDGAYYYLVGGTDERIEVKNAMQLLLSKDSIKAVKILEKESKDQFANIKNYKDIDIKLGRTFNEVVSKYTNSVFGKSMLISDKYRKDIFKSVEKSILEFNHLDTIGKADNLLKFVTLMRPSGSAHSLKMVGLIERIRKSNVISNFNEFKLINQSVTGLFENEEDLLKL

SEQ ID NO: 286 - protein, 1391 aa, Lactobacillus jensenii
  Lactobacillus jensenii 269-3
MKEIKDYIIGLDIGTNSCGYVVTDKQNNILKLKGKTAIGARLFKEGEAAADRRAFRTTRRRLARRRWRLSLLEEIFDEEMNKVDPSFFRRLKESDYSPKDRRKQFNSIVFESSEADKAFYEKYPTIYHLRNALMHDNQKHDLREIFLAVHHIVKYRGNFLREDSVKAFKAAKFTLQGEDGIGPVDKLNDLLKEIYIEAAPELATDNLSKIEDIIKDKKLYKQDKLKQIANLLPKAVDSKDKAKLNKDIAKQVANALMGYMFRLDTLFSFTDVDVKDYKLKFSDANIDESLDALTSLLTDAQIEFVLELQSIYNTIVLNEIVPDGMSLSESMVKKYDDHKKDLKLYKEYIDSLSDQKKAKQLEAAYALYVNYRKADLLAAKKLFEKKKIGDKKFVDVISNFEVFGKFVSDNLDDSELANKIKARLDLGEFLPKQRTNQNGVIPYQLHQVELTQILEKQGKYYPFLITPNPVESHRNNAPYEISELVSFRVPYYVGPLIDNQSIKDKQNKNKFAWMVRQKQGQITPWNFEEMVDTTESANQFIKRMTRKDTYLLAEDVLPKSSLIYQKFMILDELNRIKIDGKKLTSKLKHDIFEKLFKKQKSINLDNLKNYLLAEGNIPGLIEGLSDGINFNNSFSTYIDYRNIFGDEIDNPNKQADFEKMIEWSTVFEDRKIFKRKLKEITWLTPEQIKQVSSKRYSGWGRLSKKLLTQITDENGVNILQRLWNEPETLTEVLANPVIKRKISEANSLFVQINKVENILDDAYTSPQNKKAIRQVIRVVDDIIAAAHGKKPSQIAIEFARSSQNKAKVPDTRKKQLDKIYNKISSEILDSSIKNELKNLKSNKYLSKDKLFLYFKQMGRDAYTGDKLSLDQLQNYDIDHIFPRSFIKDDSLDNRVLTQKPINAKKSDYGIPALEFGNKYVPDLGITVKEMWKLWQENGLISKSKLINLCTNPKKIGSKRASGFINRQLVETSQVIKLVAIILQAEFPDTEIIEVKALQNTTLRESFHLYKNRSVNDYHHAIDAYLTTIVGNYLYQVYPKLRPYFVYGQFKKFNQEKNIDILKRLKNFNFLRQLIFNTDDNIYISGTKEIVFNKKDIIHKLETAYGYKYMNISRECYQETSSLFNQTLYAHNSSVKNSLIPKKKGLPTEIYGGYSGNKDSFFVLVKIVKKRTNLYRIVGIPTRELAKLNSSNNYNQALNKIVESKLCLKETESFKILIKRLLYGTLIVDNGQKFRIGSFKEKHNVQQLVLQLKSMKYIKFYIDGGQNYFTDVERKKLEKQDRDKCLLYVFDDIMNVVNKRFTLFDMSKYEKDGDSLREKFNCLDFNDKVSILSDLLKAFHANSDRTSITKLKITNLGRHQAGKNGITLTTNAQIIYQSPTGLFERRIKIKDL

SEQ ID NO: 287 - protein, 1395 aa, Lactobacillus jensenii
  Lactobacillus jensenii 27-2-CHN
MKEIKDYIIGLDIGTNSCGYVVTDKQNNILKLKGKTAIGARLFKEGQAAADRRSFRTTRRRLARRHWRLGLLEEIFDPEMEKIDPNFFRRLKESDYSPKDSRKQFNAIVFKSIKADKRFYKKYPTIYHLRNALMHDNQKHDLREIFMAVHHIVKYRGNFLREDSVNAFKAAKFSLRGEDGIGPVDKLNDLLKEIYSEYSPELATNNLSKIEDIIKDKNLYKQDKLKQVATLLIKEADSKDKAKLNKDIAKQVANSFMGYMFRLDTLFSLTDVDVKDYKLKFSDANIDESLDDLTSLLTDAQIEFVLELQSIYNTIVLNEIVPDGMSLSESMIKKYDDHKEDLKIFKEYIDSLSDQKKAKKLLSAYNLYVNYRKSDLVEAKNLFKNKKVGDKNFADVISNFEVFGKFVSDNLDDSELANKIKARLDLGEFLPKQRTNQNGVIPYQLHQVELTQILEKQGKYYPFLITPNPVESHRNNAPYEISELVSFRVPYYVGPLIDNQSIKDKQNKNKFAWMVRQKQGQITPWNLEEMVDTTESANQFIKRMTRKDTYLLAEDVLPKSSLVYQKFMILDELNRIKIDGKKLTSELKHDIFEKLFKKQKSINLDNLKNYLLVEGNIPGLIEGLSDGINFNNSFSTYIDYRNIFGDEIDNPNKQADFEKMIEWSTVFEDRKIFKRKLKEITWLTSEQIKQVSSKRYSGWGRLSKKLLTQITDENGVNILQRLWNEPETLTEVLANPVIKRKIVEANSSFTKAKDMKDILVEAYTSPQNKKAIRQVMRVVDDIIAAAHGKKPSQIAIEFAREDQDNPQMTKSRKAQLDQIYAKISDEFLDDAVKNELKNMKDNKPLAKDKVFLYFKQMGRDAYSGEKLSLDNLQDYDIDHIYPQSFIKDDSFDNRVLVQRAYNNGKSDNVPVLLFGNKIAAGLGITIRQMWKKWLELGLISKRKFNNLITDPEKISRNMASGFVNRQLVETSQVIKLVANILQAKLPDTEIIEVKASYNSILRKEFNLYKSREVNDYHHAIDAYLTTIVGNYLYQVYPKLRPYFVYGQFKKFGKAENQEDDPVKKIKKFNFIYQLIWGKDDAICISHTNQQVFSKKDIIDKLTTAYNFKYMNISHAVYTRNNNMFKQTLFPIIERTTAKTKSLIPKKLDRPTDIYGGYSNNNDAYLALVKVDKKRGSEYRVVGIPMRAAAMLKASKNYDEDLRKVIEPMVMFDKNGKAKRGIEGFRVLVGKMPFKQAVLDGNKKFMLTGTVDTPNLKQLVLSQQNMKYILDYIEDVDCRKHKFGDKVQNPDKCLLEVFDEIIEIVDKYFELFDSRDFREKLRNSRNKFIKLEASKKADTILAILKGLQAKSTRATIKELNISDFGRIITSSISPEAQLIYQSPTGLFERRVKVKDL

SEQ ID NO: 288 - protein, 1375 aa, Lactobacillus johnsonii
MTKIKDDYIVGLDIGTDSCGWVAMNSNNDILKLQGKTAIGSRLFEGGKSAAERRLFRTTHRRIKRRRWRLKLLEEFFDPYMAEVDPYFFARLKESGLSPLDKRKTVSSIVFPTSAEDKKFYDDYPTIYHLRYKLMTEDEKFDLREVYLAIHHIIKYRGNFLYNTSVKDFKASKIDVKSSIEKLNELYENLGLDLNVEFNISNTAEIEKVLKDKQIFKRDKVKKIAELFAIKTDNKEQSKRIKDISKQVANAVLGYKTRFDTIALKEISKDELSDWNFKLSDIDADSKFEALMGNLDENEQAILLTIKELFNEVTLNGIVEDGNTLSESMINKYNDHRDDLKLLKEVIENHIDRKKAKELALAYDLYVNNRHGQLLQAKKKLGKIKPRSKEDFYKVVNKNLDDSRASKEIKKKIELDSFMPKQRTNANGVIPYQLQQLELDKIIENQSKYYPFLKEINPVSSHLKEAPYKLDELIRFRVPYYVGPLISPNESTKDIQTKKNQNFAWMIRKEEGRITPWNFDQKVDRIESANKFIKRMTTKDTYLFGEDVLPANSLLYQKFTVLNELNNIRINGKRISVDLKQEIYENLFKKHTTVTVKKLENYLKENHNLVKVEIKGLADEKKFNSGLTTYNRFKNLNIFDNQIDDLKYRNDFEKIIEWSTIFEDKSIYKEKLRSIDWLNEKQINALSNIRLQGWGRLSKKLLAQLHDHNGQTIIEQLWDSQNNFMQIVTQADFKDAIAKANQNLLVATSVEDILNNAYTSPANKKAIRQVIKVVDDIVKAASGKVPKQIAIEFTRDADENPKRSQTRGSKLQKVYKDLSTELASKTIAEELNEAIKDKKLVQDKYYLYFMQLGRDAYTGEPINIDEIQKYDIDHILPQSFIKDDALDNRVLVSRAVNNGKSDNVPVKLFGNEMAANLGMTIRKMWEEWKNIGLISKTKYNNLLTDPDHINKYKSAGFIRRQLVETSQIIKLVSTILQSRYPNTEIITVKAKYNHYLREKFDLYKSREVNDYHHAIDAYLSAICGNLLYQNYPNLRPFFVYGQYKKFSSDPDKEKAIFNKTRKFSFISQLLKNKSENSKEIAKKLKRAYQFKYMLVSRETETRDQEMFKMTVYPRFSHDTVKAPRNLIPKKMGMSPDIYGGYTNNSDAYMVIVRIDKKKGTEYKILGIPTRELVNLKKAEKEDHYKSYLKEILTPRILYNKNGKRDKKITSFEIVKSKIPYKQVIQDGDKKFMLGSSTYVYNAKQLTLSTESMKAITNNFDKDSDENDALIKAYDEILDKVDKYLPLFDINKFREKLHSGREKFIKLSLEDKKDTILKVLEGLHDNAVMTKIPTIGLSTPLGFMQFPNGVILSENAKLIYQSPTGLFKKSVKISDL

SEQ ID NO: 289 - protein, 1382 aa, Lactobacillus mucosae
  Lactobacillus mucosae LM1
MDIGTNSIGWTAIDDHFSLLRVKGKNAIGVRTFKEGETAADRRGFRTARRRLSRRRWRLQFLDEFFAPYLAEVDPNFLARLKQSDISAKDPAKNQEYMGKLLFPDQEAASDGNGYPTLIQMRKAMPAEKAADFPVFNIYQLRYALMNEKRKFDLREIYLAVHHIVKYRGNFLNNTSVDKFKADQIDFNKSFETLNDLFRQVQPIAPFQIDLTKVDELGKLLLDTKQKKLDRQKAVAKLLPLIEDGTDKEIVKAHQQTAREISKLILGYKAKVGLILQNNLDQTLDMSTENSDDQLMQIAEELDDYQMELINQLSLLYSQIMLNEIVPNGETVSASMLNRYYKHRCQLKELKDYGAAQDKKTREQLDHLYAEYIGQIPKDSKFDFTKDLKKLMDKSDLGQKIKDEIEAGDYLPKQRTSANGVIPHQMHQQELDQIIENQKEYYPWLAEPNPVEKNIKNAKYKLDQLVSFRVPYYVGPMITLADQQKTSKASFAWAVRKKAGKITPWNFYDMIDREKSANNFIKRMTNKDTYLLSEDVLPASSLLYQKFTVLNELNNIRVNGRKLQPALKQAIYTDLFQKRKTVNLKTLTNFLAIHEPTLTKPKIEGLSNGRSFNSSLGTYIDMSKILGDSLDDLNYRDDIEKIIEWSTVFEDSEIYGVKLQEIQWLTNEQREKLVRKRYQGWGRLSKKLLTGITDENGQRIIDLMWDTSKNFMQIVHQPVFEEQIAELNQQLLQDADKAPLEVVDDILADAYTSPQNKKAIRQVVKVVADVVKAVGNAPASISIEFARNEDRNKELKNSRRHSIEKLYHETAEKLVKQTNLLEELGNVKDLNDRYYLYFTQAGRDMYDGTPINIDEISTHYEIDHILPQSFLKDNSLDNRVLVKKSENAAKSDRVPAKLYGAKMRAFWKQLKESQLISNRKYLNLTTDPEQVDKYQMQGFVHRQLVETRQIIKLAANIFGSLYPDSAVIETRAELTKQLREKFSLYKVRDVNDYHHAVDAYLTAFAGHYLYQRYPKLRPMFVYGDYAKIYADDLKRLRSVNLFHDLEKDQYNSGTAVNPETKEKIVDVDWLSDYVSKIQHFKYMLISKAVYTQHGQLYGATILPVAQVDKISAPIGIKDDKPVDIYGAYTNEVAAYMAIVRVNGKKPKYKVVSVPVRMLQRLKMAEQKGHDQYMQTLHDVLLRNFTSLKKNRKTGLKEAVVKDFDVLVPCVRYNQLVIDGDTKFTLGSATYQHNAKQLVLCNHSLETLANNFEYVRKHPDEADERMIMLYDDILDQVNHYFTLYDKNKFREKLNAGRDKYLKLPTFSQFENNKKTAIGKSEAIINILRGLHANAAITNLKCLGVSTPFGQLQSPSGIELSENAKLVYQSPTGLFSREVLLKDL

SEQ ID NO: 290 - protein, 1362 aa, Lactobacillus paracasei
  Lactobacillus paracasei subsp. paracasei 8700:2
MTKLGKPYGIGVDIGSNSIGFAAVDENSHLIRLKGKTVIGARLFEEGKAAAKRRAGRTTRRRLSRNRWRLSFLRDFFESHITPTDPNFFMRQKYSEISPKDKARYKYEKRLFNDRTDAEFYQQYSTMYHLRNRLMTDPSRADVREIYFAIHHILKSRGHFLTPGDAKDFNTNDVALDEIFPALQDAYAQVYPDLGITFDEDKANEFKTILLNEIATSIDTQRALVKLLLAEEDDKDILKQQKQVLTEFAKAVVGLKTKLNLALGTEVDSSEATAWNFSLGQLDDKWAGIESAMTDEGTEILDQIRDLYRARLLNGIVPTGKTLSQAKVDDYTQHHEDLQLFKAYLKQLEDDGTAKAIRQLYDRYIDGDDAAPFLRENFVKALTKDVTAHPNTKSPELLERLAQPDFMLKQRNKANGAIPVQMQQRELDQIIKNQAVYYDWLAAPNPVEKHRKSMPYQLDELLNFRIPYYVGPLVTAKEQKAAQGGVFAWMVRKDPEGNITPYNFDEKVDREASANTFIQRMKTTDTYLIGEDVLPKQSLLYQRYEVLNELNNVRVNNEKLSIEQKQQVIRELFERHNSVTIKQFAENLRAHGDYAHIPEIRGLADEKRFLSSLSTYRQLKSLLPEAIDDPAKQADIENIIAWSTVFEDAAIFKTKLKEISWLGSEAITKLSNIRYRGWGQFSRKFLNGLTLGNGHTIIQELLLSTNNLMQILTDETLQKKMTELNADKLKTANINDAIDNAYTSPSNKKALRQVLRVVDDIKRAADGQDPSWLYVETADGGGTPGKRTRARQHQLQEIYANAAHELIDTAVRGELEDKISDKADFNDRLVLYFMQGGRDIYTGAPLNIDQLSSYDIDHILPQSLIKDNSLDNRVLVHAIINREKNATFASTIYAQKMNATWRQWHEAGLISGRKLRNLQMRPDQIDKYASGFVARQLVETRQIIKLTEQIVAAQYPDTKIIAVKAGLSHQLREELEFPKNRDVNHYHHAFDAFLAARIGTYLLKRFPNLQAFFTYGKFTKADVKKLRGFNFIRDITHAEDKIVAKDTGEVVWDKQRDVDELDRIYNFKRMLITHEVRFETADLFKQTVYGARDSKEAGGSKQLIPKKKGYPVDIYGGYFRENTAYLAVVKVTKKTETIFKVVKIATSQVAALNKARSRSTAEELSVLTELLKPKFSKVGKNGKITDTPFEVVLPRVPREQLFYNAKYGFFMVNSDTMFHNFQEIWVSRSDQKILQQIRKAKIDYPNVDQDLDNLFHNLADQIVKYFDLYSIAGFKEKISQSQNTFNDLAVDDTDQSVGKITVINELLKGAQANGMTGSLKVLKISTPFGFTQDKSGVLTKDSSIIYQSPTGLFERSVRLTDL

SEQ ID NO: 291 - protein, 1382 aa, Lactobacillus pentosus
  Lactobacillus pentosus IG1
MKKIVNYNLGLDIGTSSIGYAAIDDQGRPVRHQNKTVMGVRLFKEGKTAESTRIFRGTRRRLSHRHWRLGYLDRIFDNEIAKVDENFLPRLKASKRARSDEKRSFRGSLLFPETGDDAYYQKYPTIYHLRYALITQKKQFDIRLIYLALHHMIKYRGNFLDTTPVSAFNIHDIDLTDQFASLNDCYQLLDMDFEFQFDLNNIEQVQKLLLDETLSKTKRQAAVSKVLVMSTGNKAFDDQQNGIASEFIKALLGGPFDLSKILNLSVADVKSWKLHMTDKDVDDTLNSLVEELDENHKQIVNLLQMIYSQVMMLGLLNGQQSISASMIERYDDHAKHWAALKKLLPALGEQEQSTIIHAYTAYTGHSRTKQLSRAEFYTKVNSILKKHENIAEATGLIELIDRNEFMPKQRDAVNGVIPHQLHQRELQLIIQNQQKYYPFLAAKAYPDADETMIEQLLSFRVPYYAGPLVDRDFINESSDQEQAMQNTKFSWLKRREAGEITPWNFEQKVDVQETANRFIKRLTTKDTYLMTEDVLPKESLIYQRFEVLNELNAIRINDRRLTAENKQLAFQQLFMAGNTKNVSIKKFRNFVFDSLKFPEKVKITGFAGQHNFLAKLSTYHDFKKIFGERVDHTDLQPDFERIVEWCTIFEDRHIYREKLKEIQWLSQSEIDQLVLIRNHGWGRLSKRLLTGIRDSDGRTVMDQLWFGTDNFMRIISQSDFAAAIANENRTQLNQHGLEDVLDSAFMSPQNKKAIRQVLKVVDDIEQTLGCPPKKVMIEFTRSPDKKKQRTVTRLEKVQQAYKAVADQLAGQSIVSELDQYANTHSKLSDTYYLYFMQLGRDLYSGKPIDIDSPMLDDDHILPRAFMKDNSLDNRALTEKPINNTKAAKFPSKVFGQQKEVTDFWKLLRRCGLMSNIKEKHLYLDPDNVDKWTRRGFIHRQLVETSQVIKIVANILNDRYQQSQTEVLEVPARLGTELRECFGWYKVREVNDYHHVFDAYLAAFIGNYLYRRYPKLQPYFVYGNFAELNKAQLKNIKSFNFLYNITDNKRVVKDIETGQTLWDDQIRQQIQHIYEYKYMLTSHEAFTQHKELYGQTIYPRREFKPGTLKAIKQDQPQELYGGYKNLTAAYMCIVKIQARKRRAAEYRVVRVATESLSALQQAKRLGVQAYERCLRQELVRNNEILRTNADPNSAPREFEVLLDRVLCHQMIISDGQKYLLGSHAYKINCMQLVLSNNSMKILSTSIVKLKQMTNEPLVQVYREILDVVNKYFTLYDVNSFRENLNQFFDKFRTLPITNEYESSKSGKKLIHRGQLETLTLILRGLHANSDKVQYGDQSTLLGGFQTKDGIKLSKDSVIQYTSPAGLNVRTVKLRDLEQKEAQK

SEQ ID NO: 292 - protein, 1361 aa, Lactobacillus pentosus
  Lactobacillus pentosus KCA1
MNEPYGVGLDIGTNSVGWTVVDMNGRVRKVKGKTALGARLFKEGATAEDRRGFRTTRRRLKRVKWRLRLLREFFDQPISKIDPNFFARRKYSDISPRDPNYNGLAKTLFNDRTDKEFYDDYATIYHLRDKLMTSNRKFDIREIYLAIHHIVKYRGNFLRTGPASQYGSASLHLATSFQKLNDLFAQSEETLNLKLVTDEALLQQIQQILVRTDLSRSEQQRQIWPLMAVLTGASAAEKKRQKNVVVELSKALVGLKAKMNVVTLTEVDAAVVKDWTFTMEESQDKLPEIEEQLSEVGQQIMDEVIQLYASVNLAQLIPAGKRFSQHMVEKYKHHEKNLELLKAYIHSQSDSKRGREIRATYDRYIDGVDSKPVTQEMFYKDLMKYVEADATSNHLAAEIKDEIDSEQFMPKLRTKQNGSIPYQVQQYELDQIISHQKKYYPWLGEENPVAERRGKFPYKLDELVGFRVPYYVGPLITKEDQQATSGAGFAWMVRKADGPITPWNFDQKVDRIASATAFIQRMQTTDTYLIGEDVLPARSLIYQRFMVLNELNNMRVEDRKLAPQQKQRLYNQVFKQHQHVSVKNIQQNLMDAGEYRKTPQITGLADPKGFNSSLSTYHDFKKILLEAIADEHKRADIEKIILWSTTFEDSAIFKQKLEEVAWLTDAQRKQLSGLRYRGWGQLSHKLLTAFKDDKGRSIMDGLWETSDNFMQLRKQPAIETQIKEANQANLTDADIQDTINELYTSPQNKKAIREVMLVLDDIKNAMHGQTPSWIFVEAARGGGVAGRRTQSRSSQIVEAYKGTAKEIVSEKVQHELNEKIKAKADFNTRLVLYFLQNGRDLYTNEAINIDRLSEYDIDHILPQSLVKDDSLDNRVLTSARINREKNDTFASEKFGRKMGAQWRELHRNGLMTQRKLKHLLMRPDEISKHATDFINRQLVETRQVIKLVEELISSEYPAASIVAVKANLTHQFRQTFNFPKLREVNDYHHAFDASLTAFIGMYLLKQYPKLERFFVYGKFAKQPINLTRFNIIRKLAVAEKPIANIETGEILWDKTADIKYFEKLYNYKRLLVTHEVRENYGAMFKQTLFKASYNKSKTLVPKKNHMETSVYGGYSNQETAYLAIVRIPFKSGFKFIVVGIPTRMVAKIKHYQSLGATLNQATHKVIEPKFTKISRKTKQTVISDYEVVLPKVYLDQVVRDQVKGQMYRFSLGSDKEYHNVQELYLPLSIQQAFVGHYDESDDQRSNDLVKVYDAALKQLQRYFPLHLSRNFDQVASQAHQSFEGLKNNVQTSDKQLGKKEVLNSLFVGLHANATRSNLSVLGMSKDFGRIKSNGITLTDQAEIIYQSPTGLFERKVALKDL

SEQ ID NO: 293 - protein, 1358 aa, Lactobacillus pentosus
  Lactobacillus pentosus MP-10
MNEPYGVGLDIGTNSVGWTVVDMNGRVRKVKGKTALGARLFKEGATAEDRRGFRTTRRRLKRVKWRLRLLREFFDQPISKIDPNFFARRKYSDISPRDPNYNGLAKTLFNDRTDQEFYHDYPTIYHLRDKLMTSDRKFDIREIYLAIHHIVKYRGNFLRTGPASQYGSASLHLATSFQKLNDLFAQSEESLNFKLVTDEAQLQQIQQILVRTDLSRSEQQRQIWPLMVVLMGATAAEKKRQKDFAKELANALVGLKAKLNVVTLTNVDTTVVKDWTFTLEESQDKLPEIEEQLSEVGQQIMDEVIQLYASVNLAQLIPAGKRFSQHMVEKYNHHEKNLELLKAYIHSQSDSKRGREIRATYDRYIDGVKSKPVTQEMFYKDLMKYVEADATSNHLAAEIKDEIDSEQFMPKLRTKQNGSIPYQVQQYELDQIISHQKKYYPWLGEENPVAERRGKFPYKLDELVGFRVPYYVGPLITKEDQQATSGAGFAWMVRKADGPITPWNFDQKVDRIASATAFIQRMQTTDTYLIGEDVLPARSLIYQRFMVLNELNNMRVEDQKLAPRQKQRLYNQVFKQHQHVSVKNIQQNLMDAGEYRETPKITGLADPKGFNSSLSTYHDFKKILPEAIADEHKRADIEKIILWSTTFEDSAIFKQKLEEVAWLTDAQRKQLSGLRYRGWGQLSHKLLTAFKDDNGRSVMDGLWETSDNFMQLRKQPAIETQIKEANQANLTDADIQDTINELYTSPQNKKAIREVMLVLDDIKNAMHGQTPSWIFIEAARGGGVAGRRTQSRSKQIVEAYKSTAKEIVSEKVQHELNEKIKAKADFNTRLVLYFLQNGRDLYTNEAINIDRLSEYDIDHILPQSLVKDDSLDNRVLTSARINREKNDTFASEKFGRKMGAQWRELHRNGLMTQRKLKHLLMRPDEISKHATDFINRQLVETRQVIKLVEELISSEYPSASIVAVKANLTHQFRQTFNFPKLREVNDYHHAFDASLTAFIGMYLLKQYPKLERFFVYGKFAKQPINLTRFNVIRKLAVAEEPIANIETGEILWDKTADIKCFEKLYNYKRLLVTHEVRENYGAMFDQTIFKATDSRKRLIQKKKGFATETYGGYTGRTLAYLAIVKVVTNKDTQYQVVGIPTTMVTQIQQLEASGLTSKQAVTKAIGAMINENNKKLQSYEVLLPKVRFEQVVRDEVKGHIHRFALGTDTYYHNIQELYLPLTIQRAFLGKRNDTDAQTEQNLLTVFETTLAQVNRYFPLYEMNKFKQILNSAQEKFAALPTKNKTVKNKLVTGKDGVLNNLFIGLHANASLGDLKILGMKIGFGKLQVPGGLKLTDQAEIIYQSPTGLFERKVALKDL

SEQ ID NO: 294 - protein, 1358 aa, Lactobacillus plantarum
MKEPYGVGLDIGTNSVGWTVVDASGHVRKIKGQTGIGVRLFKEGAAAADRRGFRTTRRRLKRVKWRLRLLREFFDQPISKVDINFFARRKYSDVSPRDPNYNGLEKTLFNDRSDQDFYHDYPTIYHLREALMTQHRKFDVREIYLAIHHIVKYRGNFLRNDAATAYRSGTLDLQQHFETLNHLFSQADLELNLNLTTDVALLDSIKQTLVRTDISRSDRQKLIMPLLAVLTGATTAEKKRQKAVVTEFAKALVGNKTKIDVLTLTDIDATEAKDWAFSLEENQDKLPGIEDRFSEVGQQIIDEVIRLYASVNLAQLIPEGKRFSQSMVEKYKRHGEDLKLLKAYIRSQSDAKRGRAIRATYDQYIDGVKSKQVTQEAFQKALGKFVDADVDLNSWAAQIKQAIDSEQFMPKLRTKQNGAIPYQVQQNELDQIISNQKEYYPWLGEENPVIKRRGKFPYKLDELFGFRVPYYVGPLITKEMQAATANAGFAWMVRKADGPITPWNFDDKVDRVASATAFIQRMQTTDTYLIGEEVLPARSLIYQRFMVLNELNNIRVDDGQLTPRQKQRLYNQVFKKHKRVTAKNIQDNLVAAREFPTAPRITGLADPKVFNSSLSTYHDLKQVLPEAMSDVRKQADIEKIILWSTIFEDSTIFKQKLTEISWLTAAQLKQLGQLRYRGWGQLLRKLLTGLKDDNNRSIMDGLWETNANFMQLRSQPAIENQIKSANQANLTTADLQDTINELYTSPQNKKAIREVMVVLADIKDAMHGQTPNWIFVEAARGGGVAGRRTQSRSKQIVAAYQGTAQAIVRDQVQRELKEKIKNKANFNTRLVLYFLQNGRDLYTGDAINIDRLSEYDIDHILPQSLVKDDSLDNRVLTNARINREKNDTFASEKFGKKMGAKWKEMHRMGLMTKRKLDHLLMRPDEISKYATGFINRQLVETRQVIKLVEELINAEYPSTAIVSVKANLTHQFRQTFDFPKIREVNDYHHAFDAALTAFIGTYLLKRYPKLERFFVYGKFAKQPVNLTRFNVIRKLAKTDTPITDIDTGEVLWDKLTDIKYFETLYDYKRLLVTREVSENYGAMFDQTLLKASDNGKRLIRKKQSFDTAIYGGYTGKTLAYMAIVKVSTKKDVQYQVVGVPTTMVTQIEQLEQQGMTNKQAVTKVIEPLIAANNKKMLTYEVLLPKVRFEQVVRDRIKGQTHRFALGTDTYYHNIQELYLPLTLQRAFLGKQNESEVQLNQNLLTVFDATLAQVNRYFPLYEMNKFKKILNSARDQIELLEAKNQFVKNKLVLGKQGILTNMFIGLHANASYGDLKVLGVKIDFGKLQVPGGIKLTGDAEIIYQSPTGLFERKIALKDL

SEQ ID NO: 295 - protein, 1363 aa, Lactobacillus rhamnosus
MTKLNQPYGIGLDIGSNSIGFAVVDANSHLLRLKGETAIGARLFREGQSAADRRGSRTTRRRLSRTRWRLSFLRDFFAPHITKIDPDFFLRQKYSEISPKDKDRFKYEKRLFNDRTDAEFYEDYPSMYHLRLHLMTHTHKADPREIFLAIHHILKSRGHFLTPGAAKDFNTDKVDLEDIFPALTEAYAQVYPDLELTFDLAKADDFKAKLLDEQATPSDTQKALVNLLLSSDGEKEIVKKRKQVLTEFAKAITGLKTKFNLALGTEVDEADASNWQFSMGQLDDKWSNIETSMTDQGTEIFEQIQELYRARLLNGIVPAGMSLSQAKVADYGQHKEDLELFKTYLKKLNDHELAKTIRGLYDRYINGDDAKPFLREDFVKALTKEVTAHPNEVSEQLLNRMGQANFMLKQRTKANGAIPIQLQQRELDQIIANQSKYYDWLAAPNPVEAHRWKMPYQLDELLNFHIPYYVGPLITPKQQAESGENVFAWMVRKDPSGNITPYNFDEKVDREASANTFIQRMKTTDTYLIGEDVLPKQSLLYQKYEVLNELNNVRINNECLGTDQKQRLIREVFERHSSVTIKQVADNLVAHGDFARRPEIRGLADEKRFLSSLSTYHQLKEILHEAIDDPTKLLDIENIITWSTVFEDHTIFETKLAEIEWLDPKKINELSGIRYRGWGQFSRKLLDGLKLGNGHTVIQELMLSNHNLMQILADETLKETMTELNQDKLKTDDIEDVINDAYTSPSNKKALRQVLRVVEDIKHAANGQDPSWLFIETADGTGTAGKRTQSRQKQIQTVYANAAQELIDSAVRGELEDKIADKASFTDRLVLYFMQGGRDIYTGAPLNIDQLSHYDIDHILPQSLIKDDSLDNRVLVNATINREKNNVFASTLFAGKMKATWRKWHEAGLISGRKLRNLMLRPDEIDKFAKGFVARQLVETRQIIKLTEQIAAAQYPNTKIIAVKAGLSHQLREELDFPKNRDVNHYHHAFDAFLAARIGTYLLKRYPKLAPFFTYGEFAKVDVKKFREFNFIGALTHAKKNIIAKDTGEIVWDKERDIRELDRIYNFKRMLITHEVYFETADLFKQTIYAAKDSKERGGSKQLIPKKQGYPTQVYGGYTQESGSYNALVRVAEADTTAYQVIKISAQNASKIASANLKSREKGKQLLNEIVVKQLAKRRKNWKPSANSFKIVIPRFGMGTLFQNAKYGLFMVNSDTYYRNYQELWLSRENQKLLKKLFSIKYEKTQMNHDALQVYKAIIDQVEKFFKLYDINQFRAKLSDAIERFEKLPINTDGNKIGKTETLRQILIGLQANGTRSNVKNLGIKTDLGLLQVGSGIKLDKDTQIVYQSPSGLFKRRIPLADL

SEQ ID NO: 296 - protein, 1361 aa, Lactobacillus rhamnosus
  Lactobacillus rhamnosus HN001
MTKLNQPYGIGLDIGSNSIGFAVVDANSHLLRLKGETAIGARLFREGQSAAERRESRTTRRRLSRTRWRLSFLRDFFAPHITKIDPDFFLRQKYSEISPKDKDRFKYEKRLFNDRTDAEFYEDYPSMYHLRLHLMTHTHKADPREIFLAIHHILKSRGHFLTPGAAKDFNTDKVDLEDIFPALTEAYAQVYPDLELTFDLAKADDFKAKLLDEQATPSDTQKALVNLLLSSDGEKEIVKKRKQVLTEFAKAITGLKTKFNLALGTEVDEADASNWQFSMGQLDDKWSNIETSMTDQGTEIFEQIQEHYRARLLNGIVPAGMSLSQAKVADYGQHKEDLELFKTYLKKLNDHELAKTIRGLYDRYINGDDAKPFLREDFVKALTKEVTAHPNEVSEQLLNRMGQANFMLKQRTKANGAIPVQLQQRELDQIIANQSKYYDWLAKPNPVEKHRASKPYQLDELLTFRIPYYVGPLITPKEQAESRENVFAWMIRKDPSGNITPYNFDEKVDCPASANMFIQRMKNTDTYLIGEDVLPKRSLLYQKYEVLNELNNVSIDGRRLGADQKQRLIREVFERHSSVTIKQVAENLVAHGDFAKRPEIRGLADEKRFLSSLSTYHQLKKILHEAIDDPTKEHDIENIITWSTVFEDAAIFKTELAKISWLDSDTIKALSNIRYRGWGQFSRKLLDGLKLGNGHTVIQELMLSNHNLMQILTDETLKTTMAELNQDKLKADDIEDVINDAYTSPSNKKALRQVLRVVEDIKHAANGQDPSWLYIETADGPGTAGKRTQSRQKQIQTVYANAAQELIDSAVRGELEDKIADKASFTDRLVLYFMQGGRDIYTGAPLNIDQLSHYDIDHILPQSLIKDDSLDNRVLVNATINREKNNVFASTLFASKMAATWRKWHEAGLISGRKLRNLMLRPDEIDKFAHGFVARQLVETRQIIKLTEQIAAAQYPNTKIIAVKAGLSHQLREELDFPKNRDVNHYHHAFDAFLAARIGTYLLKRYPKLAPFFTYGEFAKVDVKKFREFNFIGALTHAKKNIVAKDTGEIVWDKERDIQELDRIYNFKRMLITHEVYFETADLFKQTIYAAKDSKERGGSKQLIPKKQGYPTQVYGGYTRENTAYLAVVKTVEKKADVYRVVRIATSQVAALKEARAQSTVKERELLKKFLTTKFTKIGKNGKKAITPFDIVIPRVPREQLFHNKRYGFFMVNSDTLMHNYQELWMSRSDQQILSKLVKSAKTVENGQVGRLFENIVEQINKYFPLYDINQFRKKLDQSKDIFSKLPLEGNGTTSGKRETIQNILTGAGTGAKNGDLKNLGIKTPFGFLQVPSGIVLDDDTTLIYQSPTGMLNRIVRLSEL

SEQ ID NO: 297 - protein, 1361 aa, Lactobacillus rhamnosus
  Lactobacillus rhamnosus R0011
MTKLNQPYGIGLDIGSNSIGFAVVDANSHLLRLKGETAIGARLFREGQSAAERRESRTTRRRLSRTRWRLSFLRDFFAPHITKIDPDFFLRQKYSEISPKDKDRFKYEKRLFNDRTDAEFYEDYPSMYHLRLHLMTHTHKADPREIFLAIHHILKSRGHFLTPGAAKDFNTDKVDLEDIFPALTEAYAQVYPDLELTFDLAKADDFKAKLLDEQATPSDTQKALVNLLLSSDGEKEIVKKRKQVLTEFAKAITGLKTKFNLALGTEVDEADASNWQFSMGQLDDKWSNIETSMTDQGTEIFEQIQELYRARLLNGIVPAGMSLSQAKVADYGQHKEDLELFKTYLKKLNDHELAKTIRGLYDRYINGDDAKPFLREDFVKALTKEVTAHPNEVSEQLLNRMGQANFMLKQRTKANGAIPVQLQQRELDQIIANQSKYYDWLAKPNPVEKHRASKPYQLDELLTFRIPYYVGPLITPKEQAESRENVFAWMIRKDPSGNITPYNFDEKVDCPASANMFIQRMKNTDTYLIGEDVLPKRSLLYQKYEVLNELNNVSIDGRRLGADQKQRLIREVFERHSSVTIKQVAENLVAHGDFAKRPEIRGLADEKRFLSSLSTYHQLKKILHEAIDDPTKEHDIENIITWSTVFEDAAIFKTELAKISWLDSDTIKALSNIRYRGWGQFSRKLLDGLKLGNGHTVIQELMLSNHNLMQILTDETLKTTMAELNQDKLKADDIEDVINDAYTSPSNKKALRQVLRVVEDIKHAANGQDPSWLYIETADGPGTAGKRTQSRQKQIQTVYANAAQELIDSAVRGELEDKIADKASFTDRLVLYFMQGGRDIYTGAPLNIDQLSHYDIDHILPQSLIKDDSLDNRVLVNATINREKNNVFASTLFASKMAATWRKWHEAGLISGRKLRNLMLRPDEIDKFAHGFVARQLVETRQIIKLTEQIAAAQYPNTKIIAVKAGLSHQLREELDFPKNRDVNHYHHAFDAFLAARIGTYLLKRYPKLAPFFTYGEFAKVDVKKFREFNFIGALTHAKKNIVAKDTGEIVWDKERDIQELDRIYNFKRMLITHEVYFETADLFKQTIYAAKDSKERGGSKQLIPKKQGYPTQVYGGYTRENTAYLAVVKTVEKKADVYRVVRIATSQVAALKEARAQSTVKERELLKKFLTTKFTKIGKNGKKAITPFDIVIPRVPREQLFHNKRYGFFMVNSDTLMHNYQELWMSRSDQQILSKLVKSAKTVENGQVGRLFENIVEQINKYFPLYDINQFRKKLDQSKDIFSKLPLEGNGTTSGKRETIQNILTGAGTGAKNGDLKNLGIKTPFGFLQVPSGIVLDDDTTLIYQSPTGMLNRIVRLSEL

SEQ ID NO: 298 - protein, 1375 aa, Lactobacillus ruminis
  Lactobacillus ruminis ATCC 25644
MRKNQEPYNIGLDIGTSSIGWSIMNDNFDLMRVKGKKGIGVRLYNEGQSAAERRMHRTARRRYGRRKWRLRLLEDFFDEHMAEVDDTFFARLKDSNISPKDDKKYRKSLLFPKSKGVTYQDDGEFYKKYPTMYHLRYALMTEHRKFDLREIYLAFHHMVKYRGNFLYDTSVDSFEAKNLDIKGKFDEINDLLSSYTDFYVDNSNAALVESILLEKNTTRKDKSKKIAKLLHVEDKEKGKNKKAKDLATQISNAVLGLKCNFHLIFELQQKYSFDLCSEKTEENIAKLSEVLDENQKMLLMILKEVQDQVMLNAFVPSGMSLSEAMMQKYDDYGEQLKIYHELEHSVSDDSAAKLRGAYRDYNDNIIKRIDGDNKKDTFYKRVKNILTKISKEYVDQDVLESCGKLKKLIDENKLFIRQRTAANGVLPHQLHQIEMRKIIDNQKEYYPWLAEPNPNEKRRVYSKYKVEELIAFRIPYYVGPLVDPNNADKNKEARFSWMVRKKDGEITPWNFYDKVDWAESANNFIERMKSKDTYLLGEDVVPKESMLYQKYEVLNELNNLRINDSGLSDSFEDVKLKQAIYNDLFKKQKIVKITDLQNYLVQNHKYLVKPKISGLADENRFLSSLSTYSDLKTIFGDKVDDRTYFNDFEKMVEYSTVFEDGHDYNQKLDEYTWLTKEEKYKIGKKRYRGWGKLSKKLLTGLRDKNNHTIMDNLWETNRNFMQIQTADEFSKQIAEENERHLKGSVSDAINDMYTSPANKKAIRQVLRVVDDIQKAMGYAPSSISLEFAREDGPSVRTVSRANRMKSIYEKYASEVSEEVMKDLDGVIKDKKGLNDRLYLYFEQQGKDMYSGHPLDFDKVISGQEYDIDHILPQAVIKDDSLDNRVLTTKALNNDVKSKGVPCRMFNGMHSFWKNLYDKGFISRRKFNNLTTNPENIDKYKMKGFVNRQLVETRQIIKLVANVLNDKYQNDDVDIIEVRAELTHDVRKHFKFYKNRNVNDYHHAFDAYLTSFIGHYLFKKYPNLRPLFDYNDFMKVSDNVFKQLRGNNFLGEFLNKTGDIISTDGNFVLNKEEMINKLNKAYAFKKILVTKEVGQRTGAMFNETRYPAPNSRKAALKYRRMPKPDSLISVKDYKNTDIYGGYSGKNDAYMVIVDMGKQYMVVGVPVRYTEKLDKLRIKHSELYRDELRKVLSRDKTLLDSKGNVKRFDIVLDRVLYGQLIEDGNELFTLGSSKYKRNFRQLFLDKQCIEILDSSATPQPTDEELIWVYDQILDKVDKYFELYDINRQRETLRKGRAAFCSLPNISMKKDDVTKKKILNEILVALHANESESNCEKIGKKVFGRLQVPGGIKLSKEAKLIYQSPTGLFERVVYLKDL

SEQ ID NO: 299 - protein, 1339 aa, Lactobacillus salivarius
  Lactobacillus salivarius SMXD51
MERYHIGLDIGTSSIGWAVIGDDFKIKKKKGKNLIGTRLFNEGATAAERRGFRTQRRRLNRRKWRLKLLEEIFDPYMAEVDEYFFARLKSSNLSPKDSNKKYLGSLLFPDKSDSNFYDKYPTIYHLRRDLMEKDEKFDLREIYLAIHHIVKYRGNFLEKVPAKNYKNSGASIGFLLEEVNSLYKDIIGDESIAILNSEKFEDVEKIILDEETRNLDKQKSVGKLLVEDKKKKNIVTAFSKAIFGYKFNIEDLLLIENDEKNKLTFNDENIDDIFNELSHSLDDKQMDLLTKTREIYFKFKLNMIVPTGYTLSESMIEKYEMHKAHLKMYKEFINTLNTKDRKILKNAYSDYINTEKAKAANAQENFYKTVKKIIKDNNSDTAKKIIVLIDEGNFMPKQRTGENGVIPHQLHQIELDRIIENQAKYYPWLAEANPVEKNRKFAKYKLDELVTFRVPYYVGPLIDKTESNKNEKETKFAWMVRKAKGTITPWNFENLVDRTESANRFIKRMTSKDTYIIGEDVLPASSLLYEKFKVLNELNNIKVNEKKLDIEQKQDIYLNLFTTAKNVTKKSLATYLNCSADSISGLSDGEKFNSSLSSYIDLKAILGNIVDDCNKNEDLEKIIEYSTVFEDGNIYKEKLSEISWLTDEQIEKLSNIHFKGWGRLSKKLLTQITNENGERIIDALWNTSNNFMQIINDESIQAKLAEINGKYAGKSDLEDILSEAYTSPQNKKAIRQVMKVVEDIEKAMQCEPTSISIEFTRKKQKSRLTNTRYKKISDVYEKIADEVISEYELRKLQSELDSNANNMRDRYYLYFMQLGRDMYTGEKINIDELHQRYDIDHILPQSFIKDDSINNRVLTRKDVNNKEKSDKTAADLYAVEMSDFWRKLRKQGLITEQKYKNLLTKSDSIDKYAKKGFIKRQLVETSQVVKLVANILQDKYSDTKIIEVRAKLNSNLREEYKLIKNRAVNDYHHAIDGYLTTFIGQYLYKTYPKLRSYFVYNDFKKLDSNYLKHMKKFNFLWQLQDDKTIDIYDNVNNKFVLNVPEMKKYIQKIYNYKYMLVSKEVTTKNGAFYDQTKYNAKTVNLIPIKKNKPTNIYGGYKGKVSSYMMLVKIRKKKEVIYKFVGVPRLWTDELDRLKDTTERKILLNEIAKNSLSKTEQDFEVILDKVYYGQLIIDGNQKYTLGSSEYKYNAMQLHLSKHALEVLAKENVKDAEITDKDLVSVYEEILSVVNKYFELYDINKFRQKLNEGLEIFRKLPVYNVYESNKIKQVGKFEVLNRILMGLHANAMITDLKVLGIKTKLGQMQVNGGIKLSPDAKLIYQSPTGIFSRAVRVKDLG

SEQ ID NO: 300 - protein, 1331 aa, Lactobacillus sanfranciscensis
MNKQPYNIGLDIGTSSVGWSATELDNRLLHIKGHNGIGVRLFKEGESAADRRGFRTTRRRLARRKWRLRLLNEIFATEIAKVDPSFFARLKQSNVSPKDPNKTMFENILFDDENLDDQKFHHDYKTIYHLRQAIINHPEQKFDIRLIYLAMHHIIKYRGHFLNQANVQDFKGGKIDLEKSFKALNDIFENQGRDLRLVTDKANQYVKVLSDNAKTRSDRKKELSKLLYVPIDKDTDKNSKKVTGEILKAILGNKAKFDVIFGIEVENPKEWVLTFNSDDFDDKIEGLSSQMTDEDSEILLILKELYFALNLSDILNNSVTDKNAKTLSEAMINRYDDHKNQLAMLKKVIDSSDKKHAKELKEAYSAYIDGENNKKISFEDLKKRIQKNLVDSELSQKINDLLDHDYFLPKQRSKENGAIPHQLQQQELDQIIESQKQYYPFLAELNPNEKRSRQAKYKLDELVAFRVPYYVGPMVEVTDSNQENNGKFAWMIRKEQGEITPWNFDEKVDRTETATKFITRMTTTDTYLIGEPVLPKNSLLYQKFVVLNELNNLKINQEIITPGQKQYLYEHVMKKNKRVTLKKIADALVIKGDYPYAPEVKGTTDQKNLNNGLTTYIDLAKIFGNELDDVDREADFEKIIEWSTIFEDQHIFALKLQELKWLTEKQRNQVVKLRYQGWGKLSKELLAGLVDDNGQRIIDLLWSDNQNFMQIVNQKSFKESIADHNGAHLEEKNLKDVINDLYTSPQNKKAIRQVILVVDDIINAVGYEPANIMMEFAREDSNDHRLTNSRSRQLENVYKDITNSWFDNDSVKDELEDKIKNKDKFTDRLYLYFTQGGKDLYTGEPLNIDDLSSYDIDHILPQSFILDNSLDNRVLTSQRNNRVSKEDQLPGELFGTKMHAFWKRLKAAHLISNKKYYNLTLTPNSISKFNNQGRFINRQLVETRQVIKLAAEILHNRYSEEKGTNIVTIKANLTHHMREKFNFYKNRNVNDYHHAFDAYLTAFVGNWLLQQYPKLKPYFVYGDFAKTEINNLKSFNMLYKFEQAHQLNEKDGKIAKDADALLGYMKNVYHFKKMLVTKKLETNHGALFKQTLYPSPAHDIKKRQLIKPKDNRPTDIYGGYTHEERKYMSLVKVIGKKDNEYRMANVPLLKINKNNDIKEILKSQFSNKKFEIVLPKVLKNQLFSENGALFVIGSKGYKYNANQLVLSDLDMKLLNDLSNNKSIDEVTINQLFKNIVDSTNKYMPLYEIKNLNEVVEKFNNLEFNDKKKTITDFLLATHANPTMSNLKNIGLPSYFGRFTSGNAGIKLSENANVIYQSPTGLFSRKVKISDF

SEQ ID NO: 301 - protein, 1419 aa, Lactobacillus sp.
  Lactobacillus sp. 66c
MAKPQNYTIGLDIGTNSVGWTVTDDQNNILRIKSKKAIGARLFEEGKVAAERRSFRTTRRRLSRRKWRIKLLEELFDEEISKVDPNFFARSHESWISPKDKRERYSAIVFPTPEEDKKFHNEYPTIYHLRDRLMKDDQKHDIREIYVAIHHIMKYRGNFLHDESIETYRSGMSSLGGGDERTILNTKILDDLNDAFADNLATQGISVNSASADQINEIVTSGHLNVDSQKAIAKLLLPTTLSSDDKKQDKKIKKLATDAAKNVASAWLGYKANFAAILNIQEVDKDKKKIYSFALQGADEEDKVETLESVLSQDQIEIVDRIIRIRHAIVLGEIIPVGMTLSEAMIEKYDQHAKDLKNLKTVIRNLKDRKNAVKLQAIYDLYVNNRHADTAKAMKLAGVKKRTELLEPEEFNKSIEKLLDDSPVSAEIKKRIAEKDFLPLQRSNSNGVIPNQLHQIELDEIIKKQSKYYPFLGETNEHASADVARKAPTKLDQLLTFRVPYYVGPLITKEEQEEQDGHSFAWMIRKNPKDHEKITPWNFDEKVDRMASATQFIKRMTTKDTYLLGEDVLPSSSLKYQLFTVLNELNNLRINHKKLTREEKEQVIEDLFKKYKTVKADKFKNYWQKGHAGLDVKIQGMADPEKFNSTMSTYIDLQKIFGDQLDDAQRQNDFEKIIEYSTIFEDRKILGEKLRADFVWLSEDQIKRLCRLRLQGWGRLSLKLLTRLTDADGQNVLERLLNSNDNFMQIVKDPVIKAKIEQKNQKLLRADWSENATESILDEAYTSPQNKKAIRQVMRVVHDIVKACDGNLPAKFAIEFARSQDDDPKRTVARADRLQKIYAQISDEVVSQGVKDQLSGMKSLKDRYYLYFMQGGRDAYTGKPLNIDRLSDYDIDHIMPQSFIKDDSLDNRVLVTRAVNNQKSDNVPVLLYGNHLVADLGITIREMWDRWQKSGMISKRKLANLLTDPATLSEYRAEGFINRQLVETSQVIKLTATILQSEFPDSKIIEVPAKYNSILRKQFDLYKSREVNDYHHAIDAYLSTIVGNYLYQVYPNLRRLFVYGEFKKFSHGEEESSHQAVRRVKSMNFLDDLLRGKHGDDIYCRVTGEVIFSRKDIISKLKQAYSFKQMLVTQEVFTKKSALFDQTVYPSPARDSKTRSGLIPRKQGMDTEIYGGYSGNKDAYFVLAQVVKSKGHTLQVVGVPIRALRALANCSNYSEQLLKIVKAQVLFNKKTGKAKKGISDVRILLDKIPYRQPVLDGSAFYMLGSSTYKYNLKQISLSQQSMKYILDYIDDPNFNKHEMTKIDQQNEKECLLSVYDEILDKMDKYLSLYDINGFRKKLHVGRDKFIKLEVEKQAEAIKNVLRGFHANSDMTKLSDLGLSTSLGFMQASDGIKLSDNAVFIYQSPTGLFERRVKVSDLLK

SEQ ID NO: 302 - protein, 1289 aa, Lactobacillus versmoldensis
  Lactobacillus versmoldensis KCTC 3814
MRRRYRRRRNRLNWLDELFADELAKIDPSFLLRMKNSWVSKKESTRKRDPYNLFIDEKYNDVDYFNQYPTIFHLRKELITEDKKVDIRLIYLAIHNIIKYRGNFTLENQNFDISQLSSNFSQQISDFFALFSDFGVIMPEDFDPDKISDILLNPNLSPSGKVSEAIATISPKTNVKAKIKIILLLLVGNNGDLKKLFDLETTEKIAVKLSSRHIDSELPIILSELNEQQENIITIANSIFGSIILKDFLGDETSISAAKVISFEDHKQDLQKLKTMWRETSNKEAVKAGKKAYEDYIGHEDSETFYKKIKKFLEKAQPVDLANKALAEIELENYLPKQRNRNNTVIPYQLNENELIAILDHQEKYYPFLKENRDKILSLLTFRIPYYVGPLQDSNNNRFSWMTRKASGAIRPWNFSEKVNVEQSSNDFIKRMRSTDTYLIGEPVLPKKSLIYQCYEVLSELNNTRVKDGSSNPKRLDVTIKQRIYNEIFKNQKSVSVKVLQNWLIKESYFKSPEISGLADKKKYLSSLSTYIDFKKIFGQRFVDDPVNSPQLEELAEWLTLFEDKKILLIKLQNSKYSYDQATINKLSTMRYQGTGKLSKKLLVDLKTTKKSIGKSGAESLSILDLMWSTKDNFMQIIHDADYTFEQQIKEFNYDTEDELTPLEKVANLHGSPALKRGLNQSIKVVADIVKFMGHDPEKIFIEFTRSDDFSKLTISRYRRIKKQYLEIAKAIKKIPAEFKDIKEYQTQLEENKGKLASERLMLYFLQCGHSLYSNKPIDLNMINSSKYHVDHILPQSYIKDDSLENKALVLASENENKIDNMLISHDIIATNLPRWQALKDQNLMGSKKFADLTRTTVTENQKKGFIQRQLVQTSQIVKNITLILNDLYKNTSCIETRATLSSEFRKAFSNFDETTYHYQFPEFVKNRDVNDFHHAQDAFLACVIGEYQLKKYPKDNLRLVYDQYSKFLDSLKKDTRKKNGRMPRYTQNGFIIGSMFNGKTYVDDNGEIIWDQKIKESIRKTFNYHQFNVVRQTIEQHGKLFNDTIQPHSDRYKLIPLKTNRDPAIYGGYNNDNNAYSVVLDVDGKKKINGIPIRIANQLKSDELDLSSWLENNIKHKKPMTILIDKVPKYQRIINEETGDLLITSANEVINNVQLFLPSMYTALISLLDSTKTEMYSKLLSNYEANILIDIYDYLLTKLKNNYPLYRKEWAKLAEHRDDFIESDLVTQASTLQQLIKFMHADPSNVNLKFGNFKGNRFGRKNGNIKLSKTDFIYESPTGLFKSIKHID

SEQ ID NO: 303 - protein, 1372 aa, Legionella pneumophila
  Legionella pneumophila 130b
MESSQILSPIGIDLGGKFTGVCLSHLEAFAELPNHANTKYSVILIDHNNFQLSQAQRRATRHRVRNKKRNQFVKRVALQLFQHILSRDLNAKEETALCHYLNNRGYTYVDTDLDEYIKDETTINLLKELLPSESEHNFIDWFLQKMQSSEFRKILVSKVEEKKDDKELKNAVKNIKNFITGFEKNSVEGHRHRKVYFENIKSDITKDNQLDSIKKKIPSVCLSNLLGHLSNLQWKNLHRYLAKNPKQFDEQTFGNEFLRMLKNFRHLKGSQESLAVRNLIQQLEQSQDYISILEKTPPEITIPPYEARTNTGMEKDQSLLLNPEKLNNLYPNWRNLIPGIIDAHPFLEKDLEHTKLRDRKRIISPSKQDEKRDSYILQRYLDLNKKIDKFKIKKQLSFLGQGKQLPANLIETQKEMETHFNSSLVSVLIQIASAYNKEREDAAQGIWFDNAFSLCELSNINPPRKQKILPLLVGAILSEDFINNKDKWAKFKNFWNTHKIGRTSLKSKCKEIEEARKNSGNAFKIDYEEALNHPEHSNNKALIKIIQTIPDIIQAIQSHLGHNDSQALIYHNPFSLSQLYTILETKRDGFHKNCVAVTCENYWRSQKTEIDPEISYASRLPADSVRPFDGVLARMMQRLAYEIAMAKWEQIKHIPDNSSLLIPIYLEQNRFEFEESFKKIKGGSSDKTLEQAIEKQNIQWEEKFQRIINASMNICPYKGASIGGQGEIDHIYPRSLSKKHFGVIFNSEANLIYCSSQGNREKKEEHYLLEHLSPLYLKHQFGTDNVSDIKNFISQNVANIKKYISFHLLTPEQQKAARHALFLDYDDEAFKTITKFLMSQQKARVNGTQKFLGKQIMEFLSTLADSKQLQLEFSIKQITAEEVHDHRELLSKQEPKLVKSRQQSFPSHAIDATLTMSIGLKEFPQFSQELDNSWFINHLMPDEVHLNPVRSKEKYNKPNISSTPLFKDSLYAERFIPVWVKGETFAIGFSEKDLFEIKPSNKEKLFTLLKTYSTKNPGESLQELQAKSKAKWLYFPINKTLALEFLHHYFHKEIVTPDDTTVCHFINSLRYYTKKESITVKILKEPMPVLSVKFESSKKNVLGSFKHTIALPATKDWERLFNHPNFLALKANPAPNPKEFNEFIRKYFLSDNNPNSDIPNNGHNIKPQKHKAVRKVFSLPVIPGNAGTMMRIRRKDNKGQPLYQLQTIDDTPSMGIQINEDRLVKQEVLMDAYKTRNLSTIDGINNSEGQAYATFDNWLTLPVSTFKPEIIKLEMKPHSKTRRYIRITQSLADFIKTIDEALMIKPSDSIDDPLNMPNEIVCKNKLFGNELKPRDGKMKIVSTGKIVTYEFESDSTPQWIQTLYVTQLKKQP

SEQ ID NO: 304 - protein, 1372 aa, Legionella pneumophila
MESSQILSPIGIDLGGKFTGVCLSHLEAFAELPNHANTKYSVILIDHNNFQLSQAQRRATRHRVRNKKRNQFVKRVALQLFQHILSRDLNAKEETALCHYLNNRGYTYVDTDLDEYIKDETTINLLKELLPSESEHNFIDWFLQKMQSSEFRKILVSKVEEKKDDKELKNAVKNIKNFITGFEKNSVEGHRHRKVYFENIKSDITKDNQLDSIKKKIPSVCLSNLLGHLSNLQWKNLHRYLAKNPKQFDEQTFGNEFLRMLKNFRHLKGSQESLAVRNLIQQLEQSQDYISILEKTPPEITIPPYEARTNTGMEKDQSLLLNPEKLNNLYPNWRNLIPGIIDAHPFLEKDLEHTKLRDRKRIISPSKQDEKRDSYILQRYLDLNKKIDKFKIKKQLSFLGQGKQLPANLIETQKEMETHFNSSLVSVLIQIASAYNKEREDAAQGIWFDNAFSLCELSNINPPRKQKILPLLVGAILSEDFINNKDKWAKFKIFWNTHKIGRTSLKSKCKEIEEARKNSGNAFKIDYEEALNHPEHSNNKALIKIIQTIPDIIQAIQSHLGHNDSQALIYHNPFSLSQLYTILETKRDGFHKNCVAVTCENYWRSQKTEIDPEISYASRLPADSVRPFDGVLARMMQRLAYEIAMAKWEQIKHIPDNSSLLIPIYLEQNRFEFEESFKKIKGSSSDKTLEQAIEKQNIQWEEKFQRIINASMNICPYKGASIGGQGEIDHIYPRSLSKKHFGVIFNSEVNLIYCSSQGNREKKEEHYLLEHLSPLYLKHQFGTDNVSDIKNFISQNVANIKKYISFHLLTPEQQKAARHALFLDYDDEAFKTITKFLMSQQKARVNGTQKFLGKQIMEFLSTLADSKQLQLEFSIKQITAEEVHDHRELLSKQEPKLVKSRQQSFPSHAIDATLTMSIGLKEFPQFSQELDNSWFINHLMPDEVHLNPVRSKEKYNKPNISSTPLFKDSLYAERFIPVWVKGETFAIGFSEKDLFEIKPSNKEKLFTLLKTYSTKNPGESLQELQAKSKAKWLYFPINKTLALEFLHHYFHKEIVTPDDTTVCHFINSLRYYTKKESITVKILKEPMPVLSVKFESSKKNVLGSFKHTIALPATKDWERLFNHPNFLALKANPAPNPKEFNEFIRKYFLSDNNPNSDIPNNGHNIKPQKHKAVRKVFSLPVIPGNAGTMMRIRRKDNKGQPLYQLQTIDDTPSMGIQINEDRLVKQEVLMDAYKTRNLSTIDGINNSEGQAYATFDNWLTLPVSTFKPEIIKLEMKPHSKTRRYIRITQSLADFIKTIDEALMIKPSDSIDDPLNMPNEIVCKNKLFGNELKPRDGKMKIVSTGKIVTYEFESDSTPQWIQTLYVTQLKKQP

SEQ ID NO: 305 - protein, 1355 aa, Leuconostoc gelidum
  Leuconostoc gelidum KCTC 3527
MTYSIGLDIGTGSVGWAVIGDDYRLKRAKGKNLIGVRLFDSATTAAERRGYRTTRRRLSRRHWRLRLLNDIFASDLAEQDENFLPRLKYSWVNPDDEQNPQLNSDVANGALFGSSETDKAFHKNYPTIYHLRHELMTDTAKHDLREVYLAIHHIVKYRGNFLNTADKINAENSFNVDLFIAALDEYNEFLETPITSIKDAQLFSDKLTDINARNKSVRVENAMSETYDDKSKIFKAILTALVGNTANFQTIFDLSDLEKDEAKNFKFKLDLEDVETKLDVVRAKLSDEQNAFLEAVLIAYDGITLKMILGDYKSISQSMIESYKSHQRDWKYIKNNVRLNEQKIEPDKNSVKFFKLDPKKLIYPSNLAYLQVISSNEDEHRKGLDYFKTAIQDADILQRIENDTFLPRQRTKRNGVLPYQLHLAELEQIIKKQSKYYPFLANIYTQDNKTENKLIGLLKFRVPYYVGPLVEAEKVTGDGKNHWLIKKELQENTPITPFNFDDVVDKDKSGEQFIKRITGTDSYLIGEPTLPENSLLYQKYNVLQELNNVRNERHQRLPIKVKQDIFEHVFKIDKNVNAKKVMAYLKLNGYGDFQIAGLSDTRTGKFNSNLSSYNYFVDLLGREKTEKIREDRLEEIIEIQTVFEDKILVAKRLSNLDFLTPQEKSKLSAKHYTGWGRLSQKLLTTQFIKTALSEAGDIIPQSHSIIDLLYYTDKNLMEILNDKTFNVRNWLTEQNKGTESGNSLYDQIDALAGPKDIKRGITQVFSIIDDIKKAMGSNPETVYLEFARETQTSRLTNSRLNRVQEIYNSPELKTEFAYLAKKLEAETKESIHDDRLYLYYLQEGRDMYTGKEIPFDQISSNYDIDHIIPQAFTKDDSLDNRVLVNRATNARKSNSPTFTNDIIDNRKSWWQSLVKRGLMSKEKFERLTDKRKTFSENQTNHFIARQLVETRQIIKNVADLIKNNYDGTQAVAIRASLTGEMRRYLDWPKNRDMNDYHHAHDALMMATVGKYVDRRGFFDNGSVSDGAGNAYNLYTKDWLVAARVGTRNDSQRVNPYGFIVGSMNSKAVRQQVNKETGEIVWGNENLDYLRHVLSYKKILVTRRLSGSSGRLYAETLFSPNPKAKLIAQKANRSVALYGGFTKAESAYTALVEFNKKGDRSYKLIKVPMAIANRVNDKQITVTAYIASLNLRDFSRVVLEHLPLGTLIRESDGSEFYAASSEYKHNAKELWAPKEILRSSKKLDKATADNLIDIFDFLTNDKTISNFKFYEKDLLHLKNVRDKFVEASDEIKIKVLSDVIYELHNDAGWRDPFKHIQEKPAWTMLQVKGGIKLSEKAAIVYQSPTGLFETITIVGE

SEQ ID NO: 306 - protein, 1337 aa, Listeria innocua
  Listeria innocua ATCC 33091
MKNMKKPYTIGLDIGTNSVGWAVLTDQYDLVKRKMKIAGDSEKKQIKKNFWGVRLFDEGQTAADRRMARTARRRIERRRNRISYLQGIFAEEMSKTDANFFCRLSDSFYVDNEKRNSRHPFFATIEEEVEYHKNYPTIYHLREELVNSSEKADLRLVYLALAHIIKYRGNFLIEGALDTQNTSVDGIYKQFIQTYNQVFASGIEDGSLKKLEDNKDVAKILVEKVTRKEKLERILKLYPGEKSAGMFAQFISLIVGSKGNFQKPFDLIEKSDIECAKDSYEEDLESLLALIGDEYAELFVAAKNAYSAVVLSSIITVAETETNAKLSASMIERFDTHEEDLGELKAFIKLHLPKHYEEIFSNTEKHGYAGYIDGKTKQADFYKYMKMTLENIEGADYFIAKIEKENFLRKQRTFDNGAIPHQLHLEELEAILHQQAKYYPFLKENYDKIKSLVTFRIPYFVGPLANGQSEFAWLTRKADGEIRPWNIEEKVDFGKSAVDFIEKMTNKDTYLPKENVLPKHSLCYQKYLVYNELTKVRYINDQGKTSYFSGQEKEQIFNDLFKQKRKVKKKDLELFLRNMSHVESPTIEGLEDSFNSSYSTYHDLLKVGIKQEILDNPVNTEMLENIVKILTVFEDKRMIKEQLQQFSDVLDGVVLKKLERRHYTGWGRLSAKLLMGIRDKQSHLTILDYLMNDDGLNRNLMQLINDSNLSFKSIIEKEQVTTADKDIQSIVADLAGSPAIKKGILQSLKIVDELVSVMGYPPQTIVVEMARENQTTGKGKNNSRPRYKSLEKAIKEFGSQILKEHPTDNQELRNNRLYLYYLQNGKDMYTGQDLDIHNLSNYDIDHIVPQSFITDNSIDNLVLTSSAGNREKGDDVPPLEIVRKRKVFWEKLYQGNLMSKRKFDYLTKAERGGLTEADKARFIHRQLVETRQITKNVANILHQRFNYEKDDHGNTMKQVRIVTLKSALVSQFRKQFQLYKVRDVNDYHHAHDAYLNGVVANTLLKVYPQLEPEFVYGDYHQFDWFKANKATAKKQFYTNIMLFFAQKDRIIDENGEILWDKKYLDTVKKVMSYRQMNIVKKTEIQKGEFSKATIKPKGNSSKLISRKTNWDPMKYGGLDSPNMAYAVVIEYAKGKNKLVFEKKIIRVTIMERKAFEKDEKAFLEEQGYRQPKVLAKLPKYTLYECEEGRRRMLASANEAQKGNQQVLPNHLVTLLHHVANCEVSDGKSLDYIESNREMFAELLAHVSEFAKRYTLAEANLNKINQLFEQNKEGDIKAIAQSFVDLMAFNAMGAPASFKFFETTIERKRYNNLKELLNSTIIYQSITGLYESRKRLDD

SEQ ID NO: 307 - protein, 1334 aa, Listeria innocua
MKKPYTIGLDIGTNSVGWAVLTDQYDLVKRKMKIAGDSEKKQIKKNFWGVRLFDEGQTAADRRMARTARRRIERRRNRISYLQGIFAEEMSKTDANFFCRLSDSFYVDNEKRNSRHPFFATIEEEVEYHKNYPTIYHLREELVNSSEKADLRLVYLALAHIIKYRGNFLIEGALDTQNTSVDGIYKQFIQTYNQVFASGIEDGSLKKLEDNKDVAKILVEKVTRKEKLERILKLYPGEKSAGMFAQFISLIVGSKGNFQKPFDLIEKSDIECAKDSYEEDLESLLALIGDEYAELFVAAKNAYSAVVLSSIITVAETETNAKLSASMIERFDTHEEDLGELKAFIKLHLPKHYEEIFSNTEKHGYAGYIDGKTKQADFYKYMKMTLENIEGADYFIAKIEKENFLRKQRTFDNGAIPHQLHLEELEAILHQQAKYYPFLKENYDKIKSLVTFRIPYFVGPLANGQSEFAWLTRKADGEIRPWNIEEKVDFGKSAVDFIEKMTNKDTYLPKENVLPKHSLCYQKYLVYNELTKVRYINDQGKTSYFSGQEKEQIFNDLFKQKRKVKKKDLELFLRNMSHVESPTIEGLEDSFNSSYSTYHDLLKVGIKQEILDNPVNTEMLENIVKILTVFEDKRMIKEQLQQFSDVLDGVVLKKLERRHYTGWGRLSAKLLMGIRDKQSHLTILDYLMNDDGLNRNLMQLINDSNLSFKSIIEKEQVTTADKDIQSIVADLAGSPAIKKGILQSLKIVDELVSVMGYPPQTIVVEMARENQTTGKGKNNSRPRYKSLEKAIKEFGSQILKEHPTDNQELRNNRLYLYYLQNGKDMYTGQDLDIHNLSNYDIDHIVPQSFITDNSIDNLVLTSSAGNREKGDDVPPLEIVRKRKVFWEKLYQGNLMSKRKFDYLTKAERGGLTEADKARFIHRQLVETRQITKNVANILHQRFNYEKDDHGNTMKQVRIVTLKSALVSQFRKQFQLYKVRDVNDYHHAHDAYLNGVVANTLLKVYPQLEPEFVYGDYHQFDWFKANKATAKKQFYTNIMLFFAQKDRIIDENGEILWDKKYLDTVKKVMSYRQMNIVKKTEIQKGEFSKATIKPKGNSSKLIPRKTNWDPMKYGGLDSPNMAYAVVIEYAKGKNKLVFEKKIIRVTIMERKAFEKDEKAFLEEQGYRQPKVLAKLPKYTLYECEEGRRRMLASANEAQKGNQQVLPNHLVTLLHHAANCEVSDGKSLDYIESNREMFAELLAHVSEFAKRYTLAEANLNKINQLFEQNKEGDIKAIAQSFVDLMAFNAMGAPASFKFFETTIERKRYNNLKELLNSTIIYQSITGLYESRKRLDD

SEQ ID NO: 308 - protein, 1334 aa, Listeria monocytogenes
MKNPYTIGLDIGTNSVGWAVLTNQYDLVKRKMKVAGNSDKKQIKKNFWGVRLFDDGQTAVDRRMNRTARRRIERRRNRISYLQEIFAVEMANIDANFFCRLNDSFYVDSEKRNSRHPFFATIEEEVAYHKNYRTIYHLREELVNSSEKADLRLVYLALAHIIKYRGNFLIEGALDTKNTSVDGVYEQFIQTYNQVFMSNIEEGTLAKVEENIEVANILAGKFTRREKFERILQLYPGEKSTGMFAQFISLIVGSKGNFQKVFDLIEKTDIECAKDSYEEDLEALLAIIGDEYAELFVAAKNTYNAVVLSSIITVTATETNAKLSASMIERFDAHEKDLGELKAFIKLHLPKQYQEIFNNAAIDGYAGYIDGKTKQVDFYKYLKTILENIEGADYFIAKIEEENFLRKQRTFDNGAIPHQLHLEELEAIIHQQAKYYPFLREDYEKIKSLVTFRIPYFVGPLAKGQSEFAWLTRKADGEIRPWNIEEKVDFGKSAVDFIEKMTNKDTYLPKENVLPKHSLCYQKYMVYNELTKVRYIDDQGKTNYFSGQEKQQIFNDLFKQKRKVKKKDLELFLRNINHIESPTIEGLEDSFNASYATYHDLLKVGMKQEILDNPLNTEMLEDIVKILTVFEDKPMIKEQLQQFSDVLDGGVLKKLERRHYTGWGRLSAKLLVGIREKQSHLTILDYLMNDDGLNRNLMQLINDSNLSFKSIIEKEQVSTTDKDLQSIVADLAGSPAIKKGILQSLKIVDELVSIMGYPPQTIVVEMARENQTTGKGKNNSKPRYKSLEKAIKEFGSKILKEHPTDNQELKNNRLYLYYLQNGKDMYTGQELDIHNLSNYDIDHIVPQSFITDNSIDNLVLTSSAGNREKGGDVPPLEIVRKRKVFWEKLYQGNLMSKRKFDYLTKAERGGLTDADKARFIHRQLVETRQITKNVANILHQRFNNETDNHGNTMEQVRIVTLKSALVSQFRKQFQLYKVREVNDYHHAHDAYLNGVVANTLLKVYPQLEPEFVYGEYHQFDWFKANKATAKKQFYTNIMLFFGQKERIIDENGEILWDKKYLETIKKVLDYRQMNIVKKTEIQKGEFSKATIKPKGNSSKLIPRKENWDPMKYGGLDSPNMAYAVIIEHAKGKKKLIFEKKIIRITIMERKMFEKDEEAFLEEKGYRHPKVLTKLPKYTLYECEKGRRRMLASANEAQKGNQLVLSNHLVSLLYHAKNCEASDGKSLKYIEAHRETFSELLAQVSEFATRYTLADANLSKINNLFEQNKEGDIQAIAQSFVDLMAFNAMGAPASFKFFEATIDRKRYTNLKELLSSTIIYQSITGLYESRKRLDD

SEQ ID NO: 309 - protein, 1334 aa, Listeria monocytogenes
  Listeria monocytogenes FSL J1-194
MKNPYTIGLDIGTNSVGWAVLTDQYDLVKRKMKVAGNSDKKQIKKNFWGVRLFDDGQTAVDRRMNRTARRRIERRRNRISYLQEIFAVEMANIDANFFCRLNDSFYVDSEKRNSRHPFFATIEEEVAYHKNYRTIYHLREELVNSSEKADLRLVYLALAHIIKYRGNFLIEGALDTKNTSVDEVYKQFIQTYNQVFMSNIEEGALAKVEENTEVASILAGKFTRREKFERILRLYPGEKSTGMFAQFISLIVGNKGNFQKVFNLVEKTDIECAKDSYEEDLEALLAIIGDEYAELFVAAKNTYNAVVLSSIITVTATETNAKLSASMIERFDAHEKELGELKAFIKLHLPKQYQEIFNNAEIDGYAGYIDGKTKQVDFYKYLKTTLENVEGADYFITKIEEENFLRKQRTFDNGVIPHQLHLEELEAILHQQAKYYPFLREGYDKIKSLVTFRIPYFVGPLANGQSEFAWLTRKDDGEIRPWNIEEKVDFGKSAVDFIEKMTNKDTYLPKENVLPKHSLCYQKYMVYNELTKIRYIDDQGKTNYFSGREKQQIFNDLFKQKRKVKKKDLELFLRNINHIESPTIEGLEDSFNASYATYHDLLKVGLKQEILDNPLNTEILEDIVKILTVFEDKRMIKEQLEQFSDVLDGVVLKKLERRHYTGWGRLSAKLLVGIRDKQSHLTILDYLMNDDGLNRNLMQLINDSNLSFKSIIEKEQVSTTDKDLQSIVADLAGSPAIKKGILQSLKIVDELVSIMGYPPQTIVVEMARENQTTGKGKNNSKPRYKSLEKAIKDFGSQILKEHPTDNQELKNNRLYLYYLQNGKDIYTGQELDIHNLSNYDIDHIVPQSFITDNSIDNLVLTSSAGNREKGGDVPPLEIVRKRKVFWEKLYQGNLMSKRKFDYLTKAERGGLTEADKARFIHRQLVETRQITKNVANILHQRFNKETDNHGNTMEQVRIVTLKSALVSQFRKQFQLYKVREVNDYHHAHDAYLNGVVANTLLKVYPQLEPEFVYGEYHQFDWFKANKATAKKQFYTNIMLFFAQKERIIDENGEILWDKKYLETIKKVLDYRQINIVKKTEIQKGEFSKATIKPKGNSSKLIPRKENWDPMKYGGLDSPNMAYAVIIEHAKGKKKIVIEKKLIQINIMERKMFEKDEEAFLEEKGYHQPKVLTKLPKYTLYECEKGRRRMLSSANEAQKGNQLVLSNHLVSLLYHAKNCEASDGKSLKYIEAHRETFSELLAQVSEFATKYTLADANLSKINNLFEQNKEGDIKAIAQSFVDLMAFNAMGAPASFKFFEATIDRKRYTNLKELLSSTIIYQSITGLYESRKRLDD

SEQ ID NO: 310 - protein, 1334 aa, Listeria monocytogenes
  Listeria monocytogenes FSL J1-208
MKNPYTIGLDIGTNSVGWAVLTDQYDLVKRKMKVAGNSDKKQIKKNFWGVRLFDEGETAADRRMNRTARRRIERRRNRISYLQEIFALEMANIDANFFCRLNDSFYVDSEKRNSRHPFFATIEEEVAYHKNYRTIYHLREELVNSSEKADLRLVYLALAHIIKYRGNFLIEGALDTKNTSVDGVYKQFIQTYNQVFISNIEEGTLAKMEENTTVADILAGKFTRKEKLERILQLYPGEKSTGMFAQFISLIVGSKGNFQKVFDLVEKTDIECAKDSYEEDLEALLAIIGDEYAELFVAAKNTYNAVVLSSIITVTDTETNAKLSASMIERFDAHEKDLSELKAFIKLHLPKQYEEIFSNVAIDGYAGYIDGKTKQVDFYKYLKTLLENIEGADYFIAKIEEENFLRKQRTFDNGAIPHQLHLEELEAILHQQAKYYPFLKEAYDKIKSLVTFRIPYFVGPLANGQSDFAWLTRKADGEIRPWNIEEKVDFGKSAVDFIEKMTNKDTYLPKENVLPKHSLYYQKYMVYNELTKVRYIDDQGKTNYFSGQEKQQIFNDYFKQKRKVSKKDLEQFLRNMSHIESPTIEGLEDSFNSSYATYHDLLKVGIKQEVLENPLNTEMLEDIVKILTVFEDKRMIKEQLQQFSDVLDGAVLKKLERRHYTGWGRLSAKLLVGIRDKQSHLTILDYLMNDDGLNRNLMQLINDSNLSFKSIIEKEQVSTTDKDLQSIVADLAGSPAIKKGILQSLKIVDELVSIMGYPPQTIVVEMARENQTTVKGKNNSRPRYKSLEKAIKEFGSQILKEHPTDNQELRNNRLYLYYLQNGKDMYTGQELDIHNLSNYDIDHIVPQSFITDNSIDNLVLTSSAGNREKGDDVPPLEIVRKRKVFWEKLFQGNLMSKRKFDYLTKAERGGLTEADKATFIHRQLVETRQITKNVANILHQRFNNETDNHGNNMEQVRIVMLKSALVSQFRKQFQLYKVREVNDYHHAHDAYLNGVVANTLLKVYPQLEPEFVYGEYHQFDWFKANKATAKKQFYTNIMLFFAQKERIIDENGEILWDKKYLETIKKVLDYRQMNIVKKTEIQKGEFSKATIKPKGNSSKLIPRKENWDPMKYGGLDSPNMAYAVIIEHAKGKKKVVFEKKIIRITIMERKAFEKDEKSFLEKQGYRQPKVLTKLPKYTLYECENGRRRMLASANEAQKGNQQVLKGQLITLLHHAKNCEASDGKSLDYIESNREMFGELLAHVSEFAKRYTLADANLSKINQLFEQNKDNDIKVIAQSFVNLMAFNAMGAPASFKFFEATIERKRYTNLKELLSATIIYQSITGLYEARKRLDG

SEQ ID NO: 311 - protein, 1334 aa, Listeria monocytogenes
  Listeria monocytogenes FSL N3-165
MKKPYTIGLDIGTNSVGWAVLTDQYDLVKRKMKISGDSEKKQIKKNFWGVRLFEKGETAAKRRMSRTARRRIERRRNRISYLQEIFAIQMNEVDDNFFNRLKESFYAESDKKYNRHPFFGTVEEEVAYYKDFPTIYHLRKELIDSQKKADLRLVYLALAHIIKYRGHFLIEGALDTKNTSIDEMFKQFLQIYNQVFANDIEEASLKKTEKNQEVAQILAEKFTRKDKLDKILSLYPGEKTTGVFAQFVNIIVGSTGKFKKHFNLHEKKDINCAEDTYDTDLESLLAIIGDEFAEVFVAAKNAYNAVVLSNIITVTDSTTRAKLSASLIERFENHKEDLKKMKRFVRTYLPEKYDEIFDDTEKHGYAGYISGKTKQADFYKYMKATLEKIEGADYFIAKIEEENFLRKQRTFDNGVIPHQLHLEELEAILHQQAKYYPFLREDYEKIKSLVTFRIPYFVGPLAKGQSEFAWLTRKADGEIRPWNIEEKVDFGKSAVDFIEKMTNKDTYLPKENVLPKHSLCYQKYMVYNELTKVRYIDDQGKTNYFSGQEKQQIFNDLFKQKRKVKKKDLELFLRNINQIESPTIEGLEDSFNASYATYHDLLKVGMKQEILDNPLNTEMLEDIVKILTVFEDKRMIKEQLQQFSDVLDGTVLKKLERRHYTGWGRLSAKLLVGIRDKQSHLTILDYLMNDDGLNRNLMQLINDSNLSFKSIIEKEQVSTTDKDLQSIVAELAGSPAIKKGILQSLKIVDELVSVMGYPPQTIVVEMARENQTTNKGKNNSKPRYKSLEKAIKEFGSQILKEHPTDNQELKNNRLYLYYLQNGKDMYTGQELDIHNLSNYDIDHIVPQSFITDNSVDNLVLTSSAGNREKGDNVPPLEIVQKRKIFWEKLYQGNLMSKRKFDYLTKAERGGLTEADKARFIHRQLVETRQITKNVANILHQRFNYKTDGNKDTMETVRIVTLKSALVSQFRKQFQFYKVREVNDYHHAHDAYLNGVVANTLLKVYPQLEPEFVYGEYHQFGWFKANKATAKKQFYTNIMLFFAQKDRIIDENGEILWDKRYLETVKKVLGYRQMNIVKKTEIQKGEFSNVTPNPKGKSNKLIPRKKDWDPIKYGGFDGSKMAYAIIIEYEKQKRKVRIEKKLIQINIMEREAFEKDEKTFLEEKGYHQPKVLIKVPKYTLYECKNGRRRMLGSANEAHKGNQMLLPNHLMALLYHAEKYEAIDGESLAYIEVHRALFDELLAYISEFARKYTLSNDRLDEINMLYERNKDGDVKSIAESFVSLKKFNAFGVHQDFSFFGTKIERKRDRKLNELLNSTIIYQSITGLYESRKRLDN

SEQ ID NO: 312 - protein, 1334 aa, Listeria monocytogenes
  Listeria monocytogenes FSL R2-503
MKNPYTIGLDIGTNSVGWAVLTDQYDLVKRKMKVAGNSDKKQIKKNFWGVRLFDDGQTAVDRRMNRTARRRIERRRNRISYLQEIFAVEMANIDANFFCRLNDSFYVDSEKRNSRHPFFATIEEEVAYHKNYRTIYHLREELVNSSEKADLRLVYLALAHIIKYRGNFLIEGALDTKNTSVDEVYKQFIQTYNQVFMSNIEEGALAKVEENTEVASILAGKFTRREKFERILRLYPGEKSTGMFAQFISLIVGNKGNFQKVFNLVEKTDIECAKDSYEEDLEALLAIIGDEYAELFVAAKNTYNAVVLSSIITVTATETNAKLSASMIERFDAHEKELGELKAFIKLHLPKQYQEIFNNAEIDGYAGYIDGKTKQVDFYKYLKTTLENVEGADYFITKIEEENFLRKQRTFDNGVIPHQLHLEELEAILHQQAKYYPFLREGYDKIKSLVTFRIPYFVGPLANGQSEFAWLTRKDDGEIRPWNIEEKVDFGKSAVDFIEKMTNKDTYLPKENVLPKHSLCYQKYMVYNELTKIRYIDDQGKTNYFSGREKQQIFNDLFKQKRKVKKKDLELFLRNINHIESPTIEGLEDSFNASYATYHDLLKVGLKQEILDNPLNTEILEDIVKILTVFEDKRMIKEQLEQFSDVLDGVVLKKLERRHYTGWGRLSAKLLVGIRDKQSHLTILDYLMNDDGLNRNLMQLINDSNLSFKSIIEKEQVSTTDKDLQSIVADLAGSPAIKKGILQSLKIVDELVSIMGYPPQTIVVEMARENQTTGKGKNNSKPRYKSLEKAIKDFGSQILKEHPTDNQELKNNRLYLYYLQNGKDIYTGQELDIHNLSNYDIDHIVPQSFITDNSIDNLVLTSSAGNREKGGDVPPLEIVRKRKVFWEKLYQGNLMSKRKFDYLTKAERGGLTEADKARFIHRQLVETRQITKNVANILHQRFNKETDNHGNTMEQVRIVTLKSALVSQFRKQFQLYKVREVNDYHHAHDAYLNGVVANTLLKVYPQLEPEFVYGEYHQFDWFKANKATAKKQFYTNIMLFFAQKERIIDENGEILWDKKYLETIKKVLDYRQINIVKKTEIQKGEFSKATIKPKGNSSKLIPRKENWDPVKYGGLDSPNMAYAVIIEHAKGKKKIVIEKKLIQINIMERKMFEKDEEAFLEEKGYHQPKVLTKLPKYTLYECEKGRRRMLSSANEAQKGNQLVLSNHLVSLLYHAKNCEASDGKSLKYIEAHRETFSELLAQVSEFATKYTLADANLSKINNLFEQNKEGDIKAIAQSFVDLMAFNAMGAPASFKFFEATIDRKRYTNLKELLSSTIIYQSITGLYESRKRLDD

SEQ ID NO: 313 - protein, 1334 aa, Listeria monocytogenes
  Listeria monocytogenes serotype 1/2a str. F6854
MKNPYTIGLDIGTNSVGWAVLTNQYDLVKRKMKVAGNSDKKQIKKNFWGVRLFDDGQTAVDRRMNRTARRRIERRRNRISYLQEIFAVEMANIDANFFCRLNDSFYVDSEKRNSRHPFFATIEEEVAYHDNYRTIYHLREKLVNSSEKADLRLVYLALAHIIKYRGNFLIEGALDTKNTSVDEVYKQFIETYNQVFMSNIEEGALAKVEENIEVANILAGKFTRREKFERILQLYPGEKSTGMFAQFISLIVGSKGNFQKVFDLIEKTDIECAKDSYEEDLETLLAIIGDEYAELFVAAKNTYNAVVLSSIITVTDTETNAKLSASMIERFDAHEKDLVELKAFIKLNLPKQYEEIFSNAAIDGYAGYIDGKTKQVDFYKYLKTILENIEGSDYFIAKIEEENFLRKQRTFDNGAIPHQLHLEELEAIIHQQAKYYPFLKEDYDKIKSLVTFRIPYFVGPLANGQSEFAWLTRKADGEIRPWNIEEKVDFGKSAVDFIEKMTNKDTYLPKENVLPKHSLCYQKYMVYNELTKIRYIDDQGKTNYFSGREKQQVFNDLFKQKRKVKKKDLELFLRNINHIESPTIEGLEDSFNASYATYHDLLKVGMKQEILDNPLNTEMLEDIVKILTVFEDKPMIKEQLQQFSDVLDGGVLKKLERRHYTGWGRLSAKLLVGIREKQSHLTILDYLMNDDGLNRNLMQLINDSNLSFKSIIEKEQVSTTDKDLQSIVAELAGSPAIKKGILQSLKIVDELVSIMGYPPQTIVVEMARENQTTGKGKNNSKPRYKSLEKAIKEFGSQILKEHPTDNQELKNNRLYLYYLQNGKDMYTGQELDIHNLSNYDIDHIVPQSFITDNSIDNLVLTSSAGNREKGGDVPPLEIVRKRKVFWEKLYQGNLMSKRKFDYLTKAERGGLTEADKARFIHRQLVETRQITKNVANILYQRFNKETDNHGNTMEQVRIVTLKSALVSQFRKQFQLYKVREVNGYHHAHDAYLNGVVANTLLKVYPQLEPEFVYGEYHQFDWFKANKATAKKQFYTNIMLFFAQKERIIDENGEILWDKKYLETIKKVLDYRQMNIVKKTEIQKGEFSKATIKPKGNSSKLIPRKENWDPMKYGGLDSPNMAYAVIIEHAKGKKKIVIEKKLIQINIMERKMFEKDEEAFLEEKGYRHPKVLTKLPKYTLYECEKGRRRMLASANEAQKGNQLVLSNHLVSLLYHAKNCEASDGKSLKYIEAHRETFSELLAQVSEFATRYTLADANLSKINNLFEQNKEGDIKAIAQSFVDLMAFNAMGAPASFKFFEATIDRKRYTNLKELLSSTIIYQSITGLYESRKRLDD

SEQ ID NO: 314 - protein, 1087 aa, Listeriaceae bacterium
  Listeriaceae bacterium TTU M1-001
MKKLVLGLDIGVASVGWGIIDAENGDVVDTGVRLFSSRDASENESRRTSRQSRRLSRRKKHRRERIKQLLLAHDMDICDIVNENPYELRVKGLNEKLEVSEIYVALTHLAKRRGVSYLDDVVEEGGTIKSEHLNKNMEEIKSGKMPCEIQLERFEKYGQVRGMIEINQDTEESSFLVNIFRTSDYIKEAKTILATQQKFHKQITNEFIDEYIHIMASKRDYFIGPGNEKSRTDYGVYRTNGDTWDNLFEILIGKCSVFPEETRAARSSYVAQEFNLLNDLNNLKISNLESGKLSASQKHDIVEKVKNSKKFGTKDLLKYIASVCECKIEDIGGCRVDKNRKPIMHTFENYRKVHNALNEAGVDLRLSETDYDELMKIMTLNSETLEIKKQCKEKLPQLTEDYLNVCLVLNKKGAFSGWHALSLKAMKLMMPELYGTSKNQMQIIHTMQLGKAYLKPLNQQKYLNSEAILEEIYNPIAARSIRQTIKVTNAILKKYGHLDSVIIEMPRDYQTSEDERKMIEKMQKENEKEKKAALKRAREEYPFPDEAFRNHKELATKLRLWYQQDQFCVYSGRKISVVDLVRNPNQFEIDHIIPQSVSLDDSLNNKVLCFSEENQKKGQQTPFYYHKGKSGNWTYEQYKLFVEKLFDKKKISNKKRELLLFEEDINKWDVRRGFIARNLVDTRYASRVILNSYQQYFGNHEMGTKVKVVRGKFTSQLRKKWRIFKDRNESHSHHAIDALIVAATANLRLWKKNTLGVSDEGKVYDKETGEILPFEKLTESEYNEMMNKEPYLNFKTKLQNIETKVKYSYRVSKKVNRKISDATIYSTRERDGIDYIVGKIKNIYDVKTYKDQFLKRYKKNKEQFLMYQHDPQTFAILENIMATYQDAENPFLAYKKEYGVIRKYSKKGGGSPVTSLKFIDKVLGQKIDLTAKNQAALPKNKKVVLQSITPYRADVYYDEIDKRYHLIGVKYSLFSFSKQGYVINPIAYQKLLEKEQIHSEMKFCFSLYREDIIEFGEDPDSLTRYRFWSKNESGKNKIEVKPIEKPNFEKQTVLTITKKIKILNKYQTDVLGNSFKAQEEKDPRNIE

SEQ ID NO: 315 - protein, 1345 aa, Marinilabilia sp.
  Marinilabilia sp. AK2
MKKILGLDLGTTSIGWAFIKEPEKDVVGSEIVDMGVRIVALSSDEENDFAKGNTISINADRTLKRGARRNLQRFKLRRDALLEIFKEMKLIPSNFKYAEDGPSSTFSTLKLRDKAAKEKIELDDLVKVLLQINKKRGYRSSRKAKSEEDDGSAIDSMGIAKELYENDLTPGQWVFEALQKGRKNVPDFYRSDLQEEFKKIVNYQSEFYPDVLNSSFVEDWMGKASTPTKQYFNKKGVHLAENKGKREERRLQEYNWRAVAVNSKIDLSEIALILSQINSQISNSSGYLGAISDRSKELYFKNQTVGQYLYQQIKINPHTRLKGQVFYRQDYLDEFEKIWSVQSGFHPQLNDALKKEIRDITIFFQRRLKSQKHLISNCEFEDYHKVVPKSHPIFQEFRIWQNLNNLTLIKKDNLNEKSELALEDKIALANELAFKREQSVKDALNILGLKSSEWEFNFTKIEGNRTNHAFFEAFAKIIEIEDGEPLDLGNLKADDILDQFSEAFLRIGIDPGLLQVNNDIEGPNYEKQPYIQFWHLLYSSEDDQKLKQNLIKKFGFKPDHAKILASISLQDDHASLSSRAIKKILPHLQSGLIYDKACTYAGYNHSSSFTKEENEKRELSSELDLLKKNSLRNPVVEKILNQMINVVNAILKDPNLGKPDEIRVEMARELKANAEQRKNMTSNIASATRDHEKYREILKKEFGLKRVTKNDLLRYKLWLETDGISLYTGKPIEASKLFSKEYDIEHIIPKTRLFDDSFSNKTICERQLNIDKANVTAFSFLQNKLSGDEFEQYQSRVKSLFGKLSKAKIQKLLMANDKIPEDFIARQLQETRYISKKAKEILFEITRRVSVTTGTITDKLREDWGLVEIMKELNWEKYDKLGLTYTIEGKHGERLNKIKDWSKRNDHRHHAMDALTVALTKPAYIQYLNNLNAKELNGKKSTEIFAIEQKYLKRENGKLCFIPPVENIRTEAKKHLSKVLISYKAKNKVVTINKNRTNKKAGFNEQIALTPRGQLHKETVYGKAFHYSTKFEKIGASFDVQKINAVAKKEEREALLKRLAENGDDPKKAFTGKNSLSKMPIYLDLKRNIKLPEKVKTVVLEQNYTIRKNIDPDLKLDKVIDVGVKRILENRLKEFGGNAKLALSNLDENPIWLNKEKGITIKRVKISGVSNVESLHVKKDHFGEPILDQVGNEIPVDFVSTGNNHHVAIYEDEKGNLQEEVVSFFEAVVRQNQGLPIINKNHSLGWKFLFTLKQNEYFVFPSDDFDPTDVDLMDEENYHLISPNLFRVQKFTTKDYFFRHHLETTVEDKSELKGVSFKRLGLPGLNCIKKIRINHLGKIIQVGEY

SEQ ID NO: 316 - protein, 1352 aa, Megasphaera sp.
  Megasphaera sp. UPII 135-E
MKKRNREEYYVGLDIGTSSVGWAVATPDYRIPKFRGHKMWGSRLFAEGKRAAERRQFRTNRRRLARRRDRLQILEELFAEEMAKVDNTFFMRLKESKFFLEDKTVKEKHILFSTDKFDADRFYKDNPTIYHVRKRLMEEEPQDIRELFLAVHHILKYRGHFLFAGSLEQNGASIEELVRTLLGKQGLAILDDTIDSNEMVNILKNTGETKSDRKKDVQELWNPLKDKVKKAQAAEMAGLVLGLKSDISKLFANSDYKDLDSSIKNINFSSGDYEEKRDDYANSIGDDIVLLDTMKALYDTLILSQILQGKRSISAAKVEDYNTHKEQLRALKAILKPHKRLYNEMFRENNKKDLSNYVAYISSYSEGKRVNREGFYKYVQAVLKQVDDSDSKQAILEAIRLETFLPLLRVKDNAVIPHQIHQAELEAILETARKKYNFLNDVSDGVSVKDKIIQLFTFRIPYYVGPLNPHSGETVADRKQGTGWVVRKQRGKVYPWNFADMVDVKASAEAFITNLTNKCTYLIGEDVLPKRSLLYSEFMLLNELNMIKYDGHELPVAIKQLYIEQVFKQEHKKQTKGRVLDFLKRNGLITGSATAVITGMDDAIKGDLQSYRDMVRIFGAGFDHSMAERIIRWVTLFGEAKDILENKIREVYGNSISDSQMRAIKKLKYADWGRLSQAFLIAVKGCDKSGVERNIITCLRASSQNLMEILSDQGTYIKQIKAWNHQHTTNMMDTLDYQLVDDLYVAPSVKRSIWQSLCIVEELVKIMGQAPKKIFVEVTRTKQAEKTKKDSRKKRLVELYTAIGKEGAAWKKEIEAHQAGDFRRKKLYLYYTQMGRCMYSNEPIAMDALFTSAYDIDHIYPQSLTKDGSWDNLVLVKSQLNKEKSDQYPLRPAIREKNKAHWQYLCRAGFISEKKYERLMRTTELTAEELSGFIARQLVETSQATKAVTGLLERIYTNTEICFVKAETVSQFRHQHNFIKIRELNNYHHAKDAYLNIVVGNVYHEKFTKNPWEFIARSTERRPYNLNRMYDFDLLKQGRVIWQVPKSLETVQAMMKSNDVRITKKLLVQKGELYDATITKAHKAKEGTYFPLKGADARLRDVHRYGGYEKIKIAYYSVFSCREKASNTIHTLIIPIPVYKAGLLQTEADLTAYAWQTKQKTKPIKDIYSAITPIYKKLCINTVVKIDGFKYFLGGKTGDYMWLDPAIPVVLDEQAAAYLKAISKVGRADDVENTAQAIDLITAEANEAFYDVLLKKMEAKIFAKAYQTIVEKLASETARERFRELSIGAQCSCLLEILNLLANNKTTFTFFKDKMGVTMSRRKQPMDLTKLEECIVYETSITGLYEKAVSLL

SEQ ID NO: 317 - protein, 1080 aa, Methylocystis sp.
  Methylocystis sp. ATCC 49242
MRVLGLDGGIASIGWALIEIFEDHEPSDGRIIDTGAWMFDAPEEKSQTGTKLKSELRRIFRGQRRVIRRRRQRMNEVRRILHRHGLLSSDNRDALKQPGLDPWKIRAEGIDRLLSPIEFAVALGHIARHRGFKSNSKGAKTSDLDAESSRMKKAVGETREKLARFGSPAKLLVEDEGFVLRQTKLKSGALETVRRFRNRDGDYSRSLLRDDLAAEVRALFRAQARLQSTFAKVELEAEFTQAAFFQRPLQDSERLVGPCPFEPAEKRSPKRGYSFELFRFLSRLNHLTLREGSEERTLTVEELRTAAADFGGVAKFTFSTLRKRLALPDIAIFVGIKADDEKKLDVVARSGEAATGTARLRRVVIDALGELAWGALISAPERLDKITEIITFRSDLDRIRAGLIEAGFDTPLIEAIVRAAADGKLDAFTGVGHISAKAARNIIPGLMRGMTYDKACAAAGYDHTASRERDAFDVGMHGKEALKKILQEERISRELVGSPSARKALIEAVKQVKAIIEKYGVPDRIHVELARDVGKSIEERRDIHFGIEKRSRQKDKLRELFGKEVGHLPQDGERGKEELLRFELWNEQMGRCLYTDEYINPKQLVASDNSVQVDHILPWSRFGDDSYLNKTLCTAKANQDKKGRTPYEWFRADKPEAEWDAFVARVESIQFMKGLKKRNYKLKNAEEAAEKFRSRNLNDTRWTCRLLAEALKQLYPKGEKDKDGKERRRVFTRPGALTNRLRRAWSLQRRKKSEKGERIADDRHHALDAIIVAATTESLLIRATREVQDIERKGLHYDLTKNITQPWPGFADEALDAVEKVFVARAERRRARGKAHDATIRHIAVRDDEAKVYERKKVGDIKLGDLIRVKDAERNAPLIENLRKWIEAGSPRDNPPLSPKGDPVSKVRLVTKNKVNITLDTGNPERLATVDRGEMARVDVFRKANRKGKYEYYLVPIYPHEIATMETPPMRAVQGGGDDDKWPEIDSTFEFLWSINQLSLLELTKPDGEVIRSYFRSLDRNTGALTVSGIANSTATRKGIGTRTLIDFKKLHVDRLGQIFEVERELRTWRGETWRGKDCI

SEQ ID NO: 318 - protein, 1082 aa, Methylosinus trichosporium
  Methylosinus trichosporium OB3b
MRVLGLDAGIASLGWALIEIEESNRGELSQGTIIGAGTWMFDAPEEKTQAGAKLKSEQRRTFRGQRRVVRRRRQRMNEVRRILHSHGLLPSSDRDALKQPGLDPWRIRAEALDRLLGPVELAVALGHIARHRGFKSNSKGAKTNDPADDTSKMKRAVNETREKLARFGSAAKMLVEDESFVLRQTPTKNGASEIVRRFRNREGDYSRSLLRDDLAAEMRALFTAQARFQSAIATADLQTAFTKAAFFQRPLQDSEKLVGPCPFEVDEKRAPKRGYSFELFRFLSRLNHVTLRDGKQERTLTRDELALAAADFGAAAKVSFTALRKKLKLPETTVFVGVKADEESKLDVVARSGKAAEGTARLRSVIVDALGELAWGALLCSPEKLDKIAEVISFRSDIGRISEGLAQAGCNAPLVDALTAAASDGRFDPFTGAGHISSKAARNILSGLRQGMTYDKACCAADYDHTASRERGAFDVGGHGREALKRILQEERISRELVGSPTARKALIESIKQVKAIVERYGVPDRIHVELARDVGKSIEEREEITRGIEKRNRQKDKLRGLFEKEVGRPPQDGARGKEELLRFELWSEQMGRCLYTDDYISPSQLVATDDAVQVDHILPWSRFADDSYANKTLCMAKANQDKKGRTPYEWFKAEKTDTEWDAFIVRVEALADMKGFKKRNYKLRNAEEAAAKFRNRNLNDTRWACRLLAEALKQLYPKGEKDKDGKERRRVFSRPGALTDRLRRAWGLQWMKKSTKGDRIPDDRHHALDAIVIAATTESLLQRATREVQEIEDKGLHYDLVKNVTPPWPGFREQAVEAVEKVFVARAERRRARGKAHDATIRHIAVREGEQRVYERRKVAELKLADLDRVKDAERNARLIEKLRNWIEAGSPKDDPPLSPKGDPIFKVRLVTKSKVNIALDTGNPKRPGTVDRGEMARVDVFRKASKKGKYEYYLVPIYPHDIATMKTPPIRAVQAYKPEDEWPEMDSSYEFCWSLVPMTYLQVISSKGEIFEGYYRGMNRSVGAIQLSAHSNSSDVVQGIGARTLTEFKKFNVDRFGRKHEVERELRTWRGETWRGKAYI

SEQ ID NO: 319 - protein, 1123 aa, Mobiluncus curtisii
  Mobiluncus curtisii subsp. holmesii ATCC 35242
MFVYLNSPRGFGPATFLTDLPHFCIIFGNNDFMDNRKYHVGIDVGTNSVGFAAVEVGDSGSPIRFLNTMVVIHDSGVDPEQKKYAITRLASAGTARRTRRLYRTRRQRLRELDDFISNELGYPLVNLENFADPYEPWKVRADLATIKLPADELPEAMSIALRHMARHRGWRSPYQRVEALHLHAEISEEFSALKKRVMEKTGDVFSDDATPAEVLVDLMGRQKIRGADGMLSGKLRQSDNANELRKIASVQGIDDETLNRIIDRVFFSRSPKGKASERVGMDALPGQGSKPRALKAMPSFQKFRIVSVICNLRIKDSGDDNRPLSMEEKEQLIGYLMSSTTDDHVTWTDVAELLHVKRSNLQGTAKEGPDGERPYTRPPVNSAWSKIKDSKIKSLVALWKTGDVDVQSAIVEALSNASVLEDARPGADIVVAYLESLDDKELESLDKVGLPAGRASYSEDSLERLTERMLQDDCDLFEARKREFGVSDDWKPPADPIYAPVGNPGVDRVLKIVNRLLMAAEREWGAPTQINIEHVRSGFSSELMQREFERENERRRAQNEEAVKAILTEKGGNSHVSKYDIIRYYAVKRQNCQCLYCGTPITFSDCELDHIVPRKGVGSTNSRVNLAAACRSCNRDKSNLPFAVWAGKTSNFDVSIDGAVSRVKQWQRSQNEGAREFRAFQNEVISRLLKTTEDPEIDSRSLESVAWMARELHHRVEYYFQSKGAQTQVSVYRGAVTAQARKSSGLEDKVKMIGGGGKTRLDRRHHAMDAATIALMTPGISTTLSEKNNLRDAQKFTGQSETWKDYCGRTETAREHFAVWKSNMERLTDLFNDKLENDAIPVVQPLRLRLSDSKAHDDGIGKLDSKKLGSVWSLADIDRAATPQIWTALTRCDDFDPTKGLPENANRVIRAQGVKYESEDNIPVFPSNVAAIAVRDGYAEIGSTIHHARIYRIDDGKKIFYSMIRVFAVDLLKHQAEDLFTVKLPPSAISIRTCEDSLRRALSNGTAEYLGWLVPGDEIIVDTSDKAFHTGQIGDLLRNFPVNSFRLTGFPSNSRLRLKPVLLAGEGLRDDAEDSIKKILSGQGWRPAINVLFSKGKPRIVRRNSLGIERPSSNNGLPFSWEA

SEQ ID NO: 320 - protein, 1091 aa, Mobiluncus mulieris
  Mobiluncus mulieris 28-1
MDSRKYRVGIDVGTNSVGFAAVEEDDSGSPTRFLNTMVVIHDSGVDPEQKKYAITRLASAGTARRTRRLYRTRRQRLRELDDFISNELGYPLVNLENFADPYEPWKVRADLATTKLPNDELPEAMSIALRHMARHRGWRSPYQRVEALHLHAEISKEFAALKERVVEKTGDVFSDDATPAEVLVDLMGRQKVRGADGVLSGKLRQSDNANELRKIASVQGIDDETLNRIIDRVFSSKSPKGKASERVGMDALPGQGSKPRALKAMPSFQKFRVVSVICNLRIKDSGGDARPLSMEEKEKLIDYLMSSTTDDHVTWTDVADLLHVKRSQLQGTAKEGFDGERPYTRPPVNSTWSKIKDSKIKSLVALWKTGDVDVQSAIVEALSNASVLEDSRPGADIVVAYLESLDDKELESLDKVGLPAGRASYSEDSLERLTERMLRDDCDLFEARKREFNVADDWKPPADPIYAPVGNPGVDRVLKIVNRLLMAAEREWGAPTQINIEHVRSGFSSELMQREFERENERRRAQNEEAVKAILTEKGGNSRVSKYDITRYYAVKRQHCQCLYCGTPITFSDCELDHIVPRKGVGSTNTRVNLAAACRSCNRDKSNLPFAVWAGKASNFDVSIDDAVSRVKQWQRSQNEGVREFRAFQNEVISRLLKTTEDPEIDSRSLESVAWMARELHHRVEYYFQSKGAQTQVSVYRGAVTAQARKSSGLEDKVKMIGGGGKTRLDRRHHAMDAATIALMTPGISTTLSEKNNLRDAQKFTGQSETWKDYCGRTETARKHFAVWKSNMERLTDLFNDKLENDAIPVVQPLRLRLSNSKAHDDGIGKLDSKKLGSVWSLADIDRAATPQIWTALTRCDDFDPTKGLPENANRVIRAQGVKYESEDNIPVFPSNVAAIAVRDGYAEIGSTIHHARIYRIDDGKKTFYSMIRVFAVDLLKHQAEDLFTVKLPPSAISIRTCEDSLRRALSNGTAEYLGWLVPGDEIIVDTSDKAFHTGQIGDLLRNFPVNSFRLTGFPSNSRLRLKPVLLAGEGLRDDAEDSIKKILLGQGWRPAINVLFSKGKPRIVRRNSLGIERPSSNNGLPFSWEA

SEQ ID NO: 321 - protein, 1091 aa, Mobiluncus mulieris
  Mobiluncus mulieris FB024-16
MDSRKYRVGIDVGTNSVGFAAVEEDDSGSPTRFLNTMVVIHDSGVDSEQKKYAITRLASAGTARRTRRLYRTRRQRLRELDDFISNELGYPLVNLENFADPYEPWKVRADLATTKLPNDELPEAMSIALRHMARHRGWRSPYQRVEALHLHAEISKEFAALKERVVEKTGDVFSDDATPAEVLVDLMGRQKVRGADGVLSGKLRQSDNANELRKIASVQGIDDETLNRIIDRVFSSKSPKGKASERVGMDALPGQGSKPRALKAMPSFQKFRVVSVICNLRIKDSGGDARPLSMEEKEKLIDYLMSSTTDDHVTWTDVADLLHVKRSQLQGTAKEGFDGERPYTRPPVNSTWSKIKDSKIKSLVALWKTGDVDVQSAIVEALSNASVLEDSRPGADIVVAYLESLDDKELESLDKVGLPAGRASYSEDSLERLTERMLRDDCDLFEARKREFNVADDWKPPADPIYAPVGNPGVDRVLKIVNRLLMAAEREWGAPTQINIEHVRSGFSSELMQREFERENERRRAQNEEAVKAILTEKGGNSRVSKYDITRYYAVKRQHCQCLYCGTPITFSDCELDHIVPRKGVGSTNTRVNLAAACRSCNRDKSNLPFAVWAGKASNFDVSIDDAVSRVKQWQRSQNEGVREFRAFQNEVISRLLKTTEDPEIDSRSLESVAWMARELHHRVEYYFQSKGAQTQVSVYRGAVTAQARKSSGLEDKVKMIGGGGKTRLDRRHHAMDAATIALMTPGISTTLSEKNNLRDAQKFTGQSETWKDYCGRTETARKHFAVWKSNMERLTDLFNDKLENDAIPVVQPLRLRLSNSKAHDDGIGKLDSKKLGSVWSLADIDRAATPQIWTALTRCDDFDPTKGLPENANRVIRAQGVKYESEDNIPVFPSNVAAIAVRDGYAEIGSTIHHARIYRIDDGKKTFYSMIRVFAVDLLKHQAEDLFTVKLPPSAISIRTCEDSLRRALSNGTAEYLGWLVPGDEIIVDTSDKAFHTGQIGDLLRNFPVNSFRLTGFPSNSRLRLKPVLLAGEGLRDDAEDSIKKILLGQGWRPAINVLFSKGKPRIVRRNSLGIERPSSNNGLPFSWEA

SEQ ID NO: 322 - protein, 1473 aa, Mucilaginibacter paludis
  Mucilaginibacter paludis DSM 18603
MKNILGLDLGTNSIGWALIEKDTDQKNGNILGTGSRIIPMSQDIKDEFGKGNSISQTADRTKFRSVRRLRERHLLRRERLHRVLNVLGFLPKHYADQIDFKKRLGKLVNETEPKLVYDNKNFIFKKSFEAMLSDFNQHQPLLLADGKKVPFDWTIYYLRKKALTEKIEKEELAWLILNFNQKRGYYQLRGEEEEENPNKMVAFHSLKIVEVIADESQKGKAETWYSLILENGWIYRRSSKTPLYDWKGKQRDFIVTTDLNDDGSIKTDKEGLEKRSFRAPVEDDWTLVKKKTEQEINRSHKTVGTYIYENLLQDPKQKIKGKLVRTIEREFYKDELKMILKNQQKFHPELNDEHLYINCVRELYRNNQAHQTILSKKDFVHLFIDDIIFYQRPLRSQKSSISNCTLEFRKYKNENGTDQTDYLKAIPKSHPLFQEFRLWQWIYNLGIYQKEDDTNVTDELIKNIDGYQDLFDFLNNKKEIRQDILIKFLVEQTGLKGKPLSSVVAKYRWNFVEDKIYPCNETGTQIRTRLAKVENTPEDFLTAETEIKLWHIIYSVNDKADYEKALKTFAEKHNLDTHSFVENFKKFPPFKSEYGSFSEKAIKKLLPLIRLGKYWSWENIDKKTQERIEKILTGEFDEAIKSRVRDKAIHLTEEDHFQGLQLWLASYVVYGRHSEADNLDKWHTVADLEDYLAEFRQHSLRNPIVEQVITETLRVVKDIWLQYGQGAKDFFSEIHIELAREMKNTGDERKRLTSLVTDNENTNLRIKVLLSELLNDGNVENVRPYSPMQQEALKIFEDGVLNSDIEIEDDILKISKMAQPTNTELKRYKLWLEQKYRSPYTGQIIPLNRLFTADYEIEHIIPQSRFFDDSFSNKIICESAVNQLKDKQLGLEFIKNHSGTIVKLGMGKTAKILDVESYNEFVKGNYTKNISKRNKLMLEEIPDKMIERQLNDTRYISKFIISALSNIVRSESNDDGFNSKNVLPGNGKITSRLKQDWGMNDIWNELILPRFERMNKITDSAVFTAWNENNQKFLPIVPLEFSKGFQKKRIDHRHHALDALVIAASTREHINLLNNEHAKSDKRFDLNRKLRKFEKVAYNDPKTGKRIEKEVPTIFLKPWETFTVDAKNSLESIIVSFKQNLRVINRATNYSESYNDENGALRLGKDGNPLKEKIKQSKGDSWAIRKPMHKDFVYGKVHLQNVKLPKDKFITAIRKSLDVTFDLKRIETITDTGIQKILKNYLHSKENKVELAFSPEGIEDMNQHIERYNDGKKHQPIHKVRVFEIGSRFSLGESGNKKTKFVEAAKGTNLFFAVYQDDNKGKRNYETIPLNIVIERQKLGLHSVPTEDAKGGKLLFHLSPNDMVYVPTSEELEDNLASVNIKRLNTAQRKRIYKVEKASGVECYFIRQDIAYLIKNYDAKTKIGELESQNKLQTTMTDDRLKITDVCVKLNIDRLGSIAETFLGNQYGASKKT

SEQ ID NO: 323 - protein, 1233 aa, Mycoplasma canis
  Mycoplasma canis PG 14
MEKKRKVTLGFDLGIASVGWAIVDSETNQVYKLGSRLFDAPDTNLERRTQRGTRRLLRRRKYRNQKFYNLVKRTEVFGLSSREAIENRFRELSIKYPNIIELKTKALSQEVCPDEIAWILHDYLKNRGYFYDEKETKEDFDQQTVESMPSYKLNEFYKKYGYFKGALSQPTESEMKDNKDLKEAFFFDFSNKEWLKEINYFFNVQKNILSETFIEEFKKIFSFTRDISKGPGSDNMPSPYGIFGEFGDNGQGGRYEHIWDKNIGKCSIFTNEQRAPKYLPSALIFNFLNELANIRLYSTDKKNIQPLWKLSSVDKLNILLNLFNLPISEKKKKLTSTNINDIVKKESIKSIMISVEDIDMIKDEWAGKEPNVYGVGLSGLNIEESAKENKFKFQDLKILNVLINLLDNVGIKFEFKDRNDIIKNLELLDNLYLFLIYQKESNNKDSSIDLFIAKNESLNIENLKLKLKEFLLGAGNEFENHNSKTHSLSKKAIDEILPKLLDNNEGWNLEAIKNYDEEIKSQIEDNSSLMAKQDKKYLNDNFLKDAILPPNVKVTFQQAILIFNKIIQKFSKDFEIDKVVIELAREMTQDQENDALKGIAKAQKSKKSLVEERLEANNIDKSVFNDKYEKLIYKIFLWISQDFKDPYTGAQISVNEIVNNKVEIDHIIPYSLCFDDSSANKVLVHKQSNQEKSNSLPYEYIKQGHSGWNWDEFTKYVKRVFVNNVDSILSKKERLKKSENLLTASYDGYDKLGFLARNLNDTRYATILFRDQLNNYAEHHLIDNKKMFKVIAMNGAVTSFIRKNMSYDNKLRLKDRSDFSHHAYDAAIIALFSNKTKTLYNLIDPSLNGIISKRSEGYWVIEDRYTGEIKELKKEDWTSIKNNVQARKIAKEIEEYLIDLDDEVFFSRKTKRKTNRQLYNETIYGIATKTDEDGITNYYKKEKFSILDDKDIYLRLLREREKFVINQSNPEVIDQIIEIIESYGKENNIPSRDEAINIKYTKNKINYNLYLKQYMRSLTKSLDQFSEEFINQMIANKTFVLYNPTKNTTRKIKFLRLVNDVKINDIRKNQVINKFNGKNNEPKAFYENINSLGAIVFKNSANNFKTLSINTQIAIFGDKNWDIEDFKTYNMEKIEKYKEIYGIDKTYNFHSFIFPGTILLDKQNKEFYYISSIQTVRDIIEIKFLNKIEFKDENKNQDTSKTPKRLMFGIKSIMNNYEQVDISPFGINKKIFE

SEQ ID NO: 324 - protein, 1233 aa, Mycoplasma canis; identical to SEQ ID NO: 323
  Mycoplasma canis PG 14

SEQ ID NO: 325 - protein, 1233 aa, Mycoplasma canis
  Mycoplasma canis UF31
MEKKRKVTLGFDLGIASIGWAIVDSETNQVYKLGSRLFDAPDTNLERRTQRGTRRLLRRRKYRNQKFYNLVKRTEVFGLSSREAIENRFRELSIKYPNIIELKTKALSQEVCPDEIAWILHDYLKNRGYFYDEKETKEDFDQQTVESMPSYKLNEFYKKYGYFKGALSQPTESEMKDNKDLKEAFFFDFSNKEWLKEINYFFNVQKNILSETFIEEFKKIFSFTRDISKGPGSDNMPSPYGIFGEFGDNGQGGRYEHIWDKNIGKCSIFTNEQRAPKYLPSALIFNFLNELANIRLYSTDKKNIQPLWKLSSIDKLNILLNLFNLPISEKKKKLTNANINDIVKKESTKSIMLSVEDIDMIKDEWAGKEPNVYGVGLSGLNIEESAKENKFKFQDLKILNVLINLLDNVGIKFEFKDRNDIIKNLELLDNLYLFLIYQKESNNKDSSIDLFIAKNELLNIENLKLKLKEFLLGAGNEFENHNSKTHSLSKKAIDAILPKLLDNNEGWNLEAIKNYDEEIKSQIEDNSSLMAKQDKKYLNDNFLKDAILPPNVKVTFQQAILIFNKIIQKFSKDFEIDKVVIELAREMTQDQENDALKGIAKAQKSKKSLVEERLEANNIDKSVFNDKYEKLIYKIFLWISQDFKDPYTGAQISTNEIVNNKVEIDHIIPYSLCFDDSSANKVLVHKQSNQEKSNSLPYEYIKQGHSGWNWDEFTKYVKRVFVNNVDSILSKKERLKKSENLLTTSYDGYDKLGFLARNLNDTRYATILFRDQLNNYAEHHLIDNKKMFKVIAMNGAVTSFIRKNMSYDNKLRLKDRSDFSHHAYDAAIIALFSNKTKTLYNLIDPSLNGIISKRSEGYWVIEDRYTGEIKELKKEDWTSIKNNVQARKIAKEIEEYLIDLDDEVFFSRKTKRKTNRQLYNETIYGIAAKTDEDGITNYYKKEKFSILDDKDIYLRLLREREKFVINQSNPEVIDQIIEIIESYGKENNIPSRDEAINIKYTKNKINYNLYLKQYMRSLTKSLDQFSEEFINQMIANKTFVLYNPTKNTTRKIKFLRLVNDVKINDIRKNQVINKFNGKNNEPKAFYENINSLGAIVFKNSANNFKTLSINTQIAIFGDKNWDIEDFKTYNMEKIEKYKEIYGIDKTYNFHSFIFPGTILLDKQNKEFYYISSIQTVRDIIEIKFLNKIEFKDENKNPDTSKTPKRLMFGIKSIMNNYEQVDISPFGINKKIFE

SEQ ID NO: 326 - protein, 1233 aa, Mycoplasma canis
  Mycoplasma canis UF33
MEKKRKVTLGFDLGIASVGWAIVDSETNQVYKLGSRLFDAPDTNLERRTQRGTRRLLRRRKYRNQKFYNLVKRTEVFGLSSREAIENRFRELSIKYPNIIELKTKALSQEVCPDEIAWILHDYLKNRGYFYDEKETKEDFDQQTVESMPSYKLNEFYKKYGYFKGALSQPTESEMKDNKDLKEAFFFDFSNKEWLKEINYFFNVQKNILSETFIEEFKKIFSFTRDISKGPGSDNMPSPYGIFGEFGDNGQGGRYEHIWDKNIGKCSIFTNEQRAPKYLPSALIFNFLNELANIRLYSTDKKNIQPLWKLSSVDKLNILLNLFNLPISEKKKKLTSTNINDIVKKESIKSIMISVEDIDMIKDEWAGKEPNVYGVGLSGLNIEENAKENKFKFQDLKILNVLINLLDNVGIKFEFKDRNDIIKNLELLDNLYLFLIYQKESNNKDSSIDLFIAKNKSLNIENLKLKLKEFLLGAGNEFENHNSKSHSLSKKAIDAILPKLLDNNEGWNLEAIKNYDEEIKSQIEDNSSLMAKQDKKYLNDNFLKDAILPPNVKVTFQQAILIFNKIIQKFSKDFEIDKVVIELAREMTQDQENDALKGMAKAQKSKKSLVEERLEANNIDKSVFNDKYEKLIYKIFLWISQDFKDPYTGAQISVNEIVNNKVEIDHIIPYSLCFDDSSANKVLVHKQSNQEKSNSLPYEYIKQGHSGWNWDEFTKYVKRVFVNNVDSILSKKERLKKSENLLTTSYDGYDKLGFLARNLNDTRYATILFRDQLNNYAEHHLIDNKKMFKVIAMNGAVTSFIRKNMSYDNKLRLKDRSDFSHHAYDAAIIALFSNKTKTLYNLIDPSLNGIISKRSEGYWVIEDRYTGEIKELKKEDWTSIKNNVQARKIAKEIEEYLIDLDDEVFFSRKTKRKTNRQLYNETIYGIAAKTDEDGITNYYKKEKFSILDDKDIYLRLLREREKFVINQSNPEVIDQIIEIIESYGKENNIPSRDEAINIKYTKNKINYNLYLKQYMRSLTKSLDKFSEEFINQMIANKTFVLYNPTKNTTRKIKFLRLVNDVKINDIRKNQVINKFNGKNNEPKAFYENINSLGAIVFKNSANNFKTLSINTQIAIFGDKNWDIEDFKTYNMEKIEKYKEIYGIDKTYNFHSFIFPGTILLDKQNKEFYYISSIQTVRDIIEIKFLNKIEFKDENKNQDTSKTPKRLMFGIKSIMNNYEQVDISPFGINKKIFE

SEQ ID NO: 327 - protein, 1233 aa, Mycoplasma canis
  Mycoplasma canis UFG1
MEKKRKVTLGFDLGIASVGWAIVDSETNQVYKLGSRLFDAPDTNLERRTQRGTRRLLRRRKYRNQKFYNLVKRTEVFGLSSREAIENRFRELSIKYPNIIELKTKALSQEVCPDEIAWILHDYLKNRGYFYDEKETKEDFDQQTVESMPSYKLNEFYKKYGYFKGALSQPTESEMKDNKDLKEAFFFDFSNKEWLKEINYFFNVQKNILSETFIEEFKKIFSFTRDISKGPGSDNMPSPYGIFGEFGDNGQGGRYEHIWDKNIGKCSIFTNEQRAPKYLPSALIFNFLNELANIRLYSTDKKNIQPLWKLSSVDKLNILLNLFNLPISEKKKKLTSTNINDIVKKESIKSIMLSVEDIDMIKYEWAGKEPNVYGVGLSGLNIEESAKENKFKFQDLKILNVLINLLDNVGIKFEFKDRNDIIKNLELLDNLYLFLIYQKESNNKDSSIDLFIAKNKSLNIENLKLKLKEFLLGAGNEFENHNSKTHSLSKKAIDAILPKLLDNNEGWNLEAIKNYDEEIKSQIEDNSSLMAKQDKKYLNDNFLKDAILPPNVKVTFQQAILIFNKIIQKFSKDFEIDKVVIELAREMTQDQENDALKGIAKAQKSKKSLVEERLEANNIDKSVFDDKYEKLIYKIFLWISQDFKDPYTGAKISANEIVNNKVEIDHIIPYSLCFDDSSANKVLVHKQSNQEKSNSLPYEYIKQGHSGWNWDEFTKYVKRVFVNNVDSILSKKERLKKSENLLTTSYDGYDKLGFLARNLNDTRYATILFRDQLNNYAEHHLIDNKKMFKVIAMNGAVTSFIRKNMSYDNKLRLKDRSDFSHHAYDAAIIALFSNKTKTLYNLIDPSLNGIISKRSEGYWVIEDRYTGEIKELKKEDWTSIKNNVQARKIAKEIEEYLIDLDDEVFFSRKTKRKTNRQLYNETIYGIAAKTDEDGITNYYKKEKFSILDDKDIYLRLLREREKFVINQSNPEVIDQIIEIIESYGKENNIPSRDEAINIKYTKNKINYNLYLKQYMRSLTKSLDQFSEEFINQMIANKTFVLYNPTKNTTRKIKFLRLVNDVKINDIRKNQVINKFNGKNNEPKAFYENINSLGAIVFKNSANNFKTLSINTQIAIFGDKNWDIEDFKTYNMEKIEKYKEIYGIDKTYNFHSFIFPGTILLDKQNKEFYYISSIQTVRDIIEIKFLNKIEFKDENKNQDTSKTPKRLMFGIKSIMNNYEQVDISPFGINKKIFE

SEQ ID NO: 328 - protein, 1233 aa, Mycoplasma canis
  Mycoplasma canis UFG4
MEKKRKVTLGFDLGIASVGWAIVDSETNQVYKLGSRLFDAPDTNLERRTQRGTRRLLRRRKYRNQKFYNLVKRTEVFGLSSREAIENRFRELSIKYPNIIELKTKALSQEVCPDEIAWILHDYLKNRGYFYDEKETKEDFDQQTIESMPSYKLNEFYKKYGYFKGALSQPTESEMKDNKDLKEAFFFDFSNKEWLKEINYFFNVQKNILSETFIEEFKKIFSFTRDISKGPGSDNMPSPYGIFGEFGDNGQGGRYEHIWDKNIGKCSIFTNEQRAPKYLPSALIFNFLNELANIRLYSTDKKNIQPLWKLSSIDKLNILLNLFNLPISEKKKKLTSANINDIVKKESTKSIMLSVEDIDMIKDEWAGKEPNVYGVGLSGLNIEESAKENKFKFQDLKILNVLINLLDNVGIKFEFKDRNDIIKNLELLDNLYLFLIYQKESNNKDSSIDLFIAKNESLNIENLKLKLKEFLLGAGNEFENHNSKTHSLSKKAIDAILPKLLDNNEGWNLEAIKNYDEEIKSQIEDNSFLMAKQDKKYLNDNFLKDAILPPNVKVTFQQAILIFNKIIQKFSKDFEIDKVVIELAREMTQDQENDALKGIAKAQKSKKSLVEERLEANNIDKSVFNEKYEKLIYKIFLWISQDFKDPYTGAKISANEIVDNKVEIDHIIPYSLCFDDSSANKVLVHKQSNQEKSNSLPYEYIKQGHSGWNWDEFTKYVKRVFVNNVDSILSKKERLKKSENLLTTSYDGYDKLGFLARNLNDTRYATILFRDQLNNYAEHHLIDDKKMFKVIAMNGAVTSFIRKNMSYDNKLRLKNRNDFSHHAYDAAIIALFSNKTKTLYNLIDPSLNGIISKRSEGYWVIEDRYTGEIKELKKEDWTSIKNNVQARKIAKEIEEYLIDLDDEVFFSRKTKRKTNRQLYNETIYGIAAKTDEDGITNYYKKEKLSILDDKDIYLRLLREREKFVINQSNPEVIDQIIEIIESYGKENNIPSRDEAINIKYTKNKINYNLYLKQYMRSLTKSLDQFSEEFINQMIANKTFVLYNPTKNTTRKIKFLRLVNDVKINDIRKNQVINKFNGKNNEPKAFYENINSLGAIVFKNSANNFKTLSINTQIAIFGDKNWDIEDFKTYNMEKIEKYKEIYGIDKTYNFHSFIFPGTILLDKQNKEFYYISSIQTVRDIIEIKFLNKIEFKDENKNQDTSKTPKRLMFGIKSIMNNYEQVDISPFGINKKIFE

SEQ ID NO: 329 - protein, 1239 aa, Mycoplasma cynos
MEEKRKVTLGFDLGVASVGWAIVDSETNEVYKLGSRLFDIPDTNIDRRAKRGSRRLVRRRSYRNQKFYNLIKRTKTFGFLDKEAIEKEFVLLSIKYPNIIELKVKGLQEEVSKSEAVWILHDYLKNRGYFYDDKEEKDDLENPSIESMPSYKLYEFYKEYGYFKGALSSPTESEKNKDSDLEKAIFFNFSNKEWTKEINHFFKIQKNIFSEDFKAKFMEFFSFIRDISKGPGSENMPSQYSIFGKYGDDGMGGKYQHIWDKNIGKCSIFKDKVRAPKYLPSALFFNLLNELSNIRLYSVDKREKSVLWRLSSKDKINIILNILQIILFKNDGKISNLDINKIVKNESIKSIILNEIDLDLIKDMWFEKEPNVYGIGLSGLNIEENKKENRFKFQDLKIFSVFIDLLKKSNINIEFNNEKDIIHNLKLLDELYFFLITQKYSRDKYGSIKKFILNNKSFNIDNLDEKLNIFLSISDDEFDNHNSKTHSLSKEAIYFIFPKLLHNNEGWNLEAIKNYDIDVREEISKHSFGIKKQDKKYLDDAFLDDAILPPSVKVTIKQSILIFNKIIKKFSNKFQIDNVVIELAREMTQEKEMDAQKSLNRLKKSRKKIIEERLNANNIDSKMFRDKTGEISPNYIYKIYLWISQNFKDPYTGENISANDILKNNVEIDHIIPYSLCFDDSSSNKVLVFKHSNQSKGNFLPFDMISTFSENSVWNWKEYTQYVEKTFKTNLESILDKKERVKKADNLLTSSYDGYDKLGFLARNLNDTRYATILFRDQLINYSENHLIDSKKMFKVIAMNGGVTSFIRKNMSFDSGLKVKDRSIFSHHAYDAAIIALFSNKTKILYNLINPSLDGIISKRSEGYWVLEDRLTGEIRKLNYNDWQSIKNNVEVKKIAREIESHLSNLDNVVMFSRKSKRKTNKELYNETLYGIATRIDENGIKNYYKKEKFNILEDENIYLRLLNERENFIINRSNPEVIDAIIEIFETIDKNKIPARDVAKNIKYTDNKIKYNLYLKDYMRKLVDEFPDKFRKDFIEQMIAKKIFILFNPIKNTTRKIKSLRSINNNKIEDIRKKQVLEKFNTAKNEPRSFYESLNSLGAIIFKNNLNIYKKMSISSQIATFGDKNWKIDDINTYNKEKLNKYKEIYGIDETYDFYSFIFPGTILLDEKNKEFLYISSIQTLKDKIELKFLDRIEFEKKNVNSNLKPKIKREIISTKKLMSDYKIIKISPLGINKKIFE

SEQ ID NO: 330 - protein, 1269 aa, Mycoplasma gallisepticum
MNNSIKSKPEVTIGLDLGVGSVGWAIVDNETNIIHHLGSRLFSQAKTAEDRRSFRGARRLIRRRKYKLKRFINLIWKYNSYFGFKNKEDILNNYQEQQKLHNTVLNLKLEALNAKIDPKALSWILHDYLKNRGHFYEDNRDFNVYPTEELANYFGEYGYYKGIIDSKEDNDDKLEEGLTKYKFSNQHWLEEIKKVLSNQTGLPEKFKEEYESLFSYVRNYSEGPGSINSVSPYGIYHLDEKEGKVVQKYNNIWDKTIGKCSIFPDEYRAPKNSPIAMIFNEINELSTIRSYSIYLTGWFINQEFKKAYLNKLLDLLIKTNSEKPIDARQFKKLREETIAESIGKETLKDVEREEKLEKEDHKWKLKGLKLNTNGKIQYNDLSSLAKFVHKLKQHLKLDFLLEDQYTTLDKINFLQSLFVYLGKHLRYSNRVDSANLKEFSDSNKLFERVLQEQKDDLFKLFEQTDKDDEKILAQTHSLSTKAMLLAITRMTNLDNDEDNQKNNDKGWNFEAIKNFDQKFIDITKKNNNLSLKQDKRYLDDRFINDAILSPGVKRILREATKVFNAILKQFSEEYDVTKVVIELARELSEEKELENTKNYEKLIKKNSDKISERLEALDIAEDKIEDILKSPTKSYKVLLWLQQDHIDPYSQKEIAFEDILTKTEKTEIDHIIPYSISFDDSSSNKLLVLAESNQAKSNQTPYEFITSGNAGIKWEDYEAYCRKFKDGDTSLLDSTQRSKKFAKMMKTDTSSKYDIGFLARNLNDTRYATIVFRDALKDYANNHLVEDKPMFKVVCINGGVTSFLRKNFDKSWYAKKDRDKNIHHAVDASIISIFSNETKTLFNQLTQFADYKLFKNTDGSWKKIDPKTGVVTEVTDENWKQIRVRNQVSEIAKVINKCIQDSNIERKARYSRKIENKTNISLFNDTVYSAKKVGYEDQIKRKNLKTLDIHESAEENKNSKVKKQFVYRKLVNVSLLNNDKLADLFAEKEDILMYRANPWVINLAEQIFNEYTENKKIKSQNVFEKYMLDLTKEFPEKFSEAFVKSMLRNKTAIIYNVEKKVVHRIKRLKILSSELKENKLSNVIIRSKNESGTKLSYQDTINSIALMIMRSIDPTAKKQYIRVPLNTLNLHLGDQDFDLHNIDAYLKKPKFVKYLKANEIGDEYKPWRVLTSGTLLIHKKDKKLMYISSFQNLKDVIEIKNLIETEYKENDDSDPKKKKKANRFLMTLSTILNDYILLDAKDNFDILGLSKNRIDEILNSKLGLDKITK

SEQ ID NO: 331 - protein, 1224 aa, Mycoplasma gallisepticum
MNNSIKSKPEVTIGLDLGVGSVGWAIVDNETNIIHHLGSRLFSQAKTAEDRRSFRGARRLIRRRKYKLKRFINLIWKYNSYFGFKNKEDILNNYQEQQKLHNTVLNLKLEALNAKIDPKALSWILHDYLKNRGHFYEDNRDFNVYPTEELANYFGEYGYYKGIIDSKEDNDDKLEEGLTKYKFSNQHWLEEIKKVLSNQTGLPEKFKEEYESLFSYVRNYSEGPGSINSVSPYGIYHLDEKEGKVVQKYNNIWDKTIGKCSIFPDEYRAPKNSPIAMIFNEINELSTIRSYSIYLTGWFINQEFKKAYLNKLLDLLIKTNSEKPIDARQFKKLREETIAESIGKETLKDVEREEKLEKEDHKWKLKGLKLNTNGKIQYNDLSSLAKFVHKLKQHLKLDFLLEDQYTTLDKINFLQSLFVYLGKHLRYSNRVDSANLKEFSDSNKLFERVLQEQKDDLFKLFEQTDKDDEKILAQTHSLSTKAMLLAITRMTNLDNDEDNQKNNDKGWNFEAIKNFDQKFIDITKKNNNLSLKQDKRYLDDRFINDAILSPGVKRILREATKVFNAILKQFSEEYDVTKVVIELARELSEEKELENTKNYEKLIKKNSDKISERLEALDIAEDKIEDILKSPTKSYKVLLWLQQDHIDPYSQKEIAFEDILTKTEKTEIDHIIPYSISFDDSSSNKLLVLAESNQAKSNQTPYEFITSGNAGIKWEDYEAYCRKFKDGDTSLLDSTQRSKKFAKMMKTDTSSKYDIGFLARNLNDTRYATIVFRDALKDYANNHLVEDKPMFKVVCINGGVTSFLRKNFDKSWYAKKDRDKNIHHAVDASIISIFSNETKTLFNQLTQFADYKLFKNTDGSWKKIDPKTGVVTEVTDENWKQIRVRNQVSEIAKVINKCIQDSNIERKARYSRKIENKTNISLFNDTVYSAKKVGYEDQIKRKNLKTLDIHESAEENKNSKVKKQFVYRKLVNVSLLNNDKLADLFAEKEDILMYRANPWVINLAEQIFNEYTENKKIKSQNVFEKYMLDLTKEFPEKFSEAFVKSMLRNKTAIIYNVEKKVVHRIKRLKILSSELKENKLSNVIIRSKNESGTKLSYQDTINSIALMIMRSIDPTAKKQYIRVPLNTLNLHLGDQDFDLHNIDAYLKKPKFVKYLKANEIGDEYKPWRVLTSGTLLIHKKDKKLMYISSFQNLKDVIEIKNLIETEYKENDDSDPKKRRKQIGS

SEQ ID NO: 332 - protein, 1269 aa, Mycoplasma gallisepticum
MNNSIKSKPEVTIGLDLGVGSVGWAIVDNETNIIHHLGSRLFSQAKTAEDRRSFRGVRRLIRRRKYKLKRFVNLIWKYNSYFGFKNKEDILNNYQEQQKLHNTVLNLKSEALNAKIDPKALSWILHDYLKNRGHFYEDNRDFNVYPTKELAKYFDKYGYYKGIIDSKEDNDNKLEEELTKYKFSNKHWLEEVKKVLSNQTGLPEKFKEEYESLFSYVRNYSEGPGSINSVSPYGIYHLDEKEGKVVQKYNNIWDKTIGKCNIFPDEYRAPKNSPIAMIFNEINELSTIRSYSIYLTGWFINQEFKKAYLNKLLDLLIKTNGEKPIDARQFKKLREETIAESIGKETLKDVENEEKLEKEDHKWKLKGLKLNTNGKIQYNDLSSLAKFVHKLKQHLKLDFLLEDQYATLDKINFLQSLFVYLGKHLRYSNRVDSANLKEFSDSNKLFERILQKQKDGLFKLFEQTDKDDEKILAQTHSLSTKAMLLAITRMTNLDNDEDNQKNNDKGWNFEAIKNFDQKFIDITKKNNNLSLKQNKRYLDDRFINDAILSPGVKRILREATKVFNAILKQFSEEYDVTKVVIELARELSEEKELENTKNYKKLIKKNGDKISEGLKALGISEDEIKDILKSPTKSYKFLLWLQQDHIDPYSLKEIAFDDIFTKTEKFEIDHIIPYSISFDDSSSNKLLVLAESNQAKSNQTPYEFISSGNAGIKWEDYEAYCRKFKDGDSSLLDSTQRSKKFAKMMKTDTSSKYDIGFLARNLNDTRYATIVFRDALEDYANNHLVEDKPMFKVVCINGSVTSFLRKNFDDSSYAKKDRDKNIHHAVDASIISIFSNETKTLFNQLTQFADYKLFKNTDGSWKKIDPKTGVVTEVTDENWKQIRVRNQVSEIAKVIEKYIQDSNIERKARYSRKIENKTNISLFNDTVYSAKKVGYEDQIKRKNLKTLDIHESAKENKNSKVKRQFVYRKLVNVSLLNNDKLADLFAEKEDILMYRANPWVINLAEQIFNEYTENKKIKSQNVFEKYMLDLTKEFPEKFSEFLVKSMLRNKTAIIYDDKKNIVHRIKRLKMLSSELKENKLSNVIIRSKNQSGTKLSYQDTINSLALMIMRSIDPTAKKQYIRVPLNTLNLHLGDHDFDLHNMDAYLKKPKFVKYLKANEIGDEYKPWRVLTSGTLLIHKKDKKLMYISSFQNLNDVIEIKNLIETEYKENDDSDSKKKKKANRFLMTLSTILNDYILLDAKDNFDILGLSKNRIDEILNSKLGLDKIVK

SEQ ID NO: 333 - protein, 1269 aa, Mycoplasma gallisepticum; identical to SEQ ID NO: 332
  Mycoplasma gallisepticum str. F

SEQ ID NO: 334 - protein, 1270 aa, Mycoplasma gallisepticum
MNNSIKSKPEVTIGLDLGVGSVGWAIVDNETNIIHHLGSRLFSQAKTAEDRRSFRGVRRLIRRRKYKLKRFVNLIWKYNSYFGFKNKEDILNNYQEQQKLHNTVLNLKLEALNAKIDPKALSWILHDYLKNRGHFYEDNRDFNVYPTEELANYFDEFGYYKGIIDSKNDDDDKLEEGLTKYKFSNQHWLEEVKKVLSNQTGLPEKFKEEYESLFSYVRNYSEGPGSINSVSPYGIYHLDEKEGKVVQKYNNIWDKTIGKCSIFPDEYRAPKNSPIAMIFNEINELSTIRSYSIYLTGWFINQEFKKAYLNKLLDLLIKTNSEKPIDARQFKKLREETIAESIGKETLKDVESEEKLEKDDHKWKLKGLKLNTNGKIQYNDLSSLAKFVHKLKQHLKLDFLLEDQYTPLDKINFLQSLYVYLGKHLRYSNRVDSANLKEFSDSSRLFERVLQEQKDGLFKLFEQTDKDDEKILTQTHSLSTKAMLLAITRMTNLDNDEDNQKNNDKGWNFEAIKNFDQKFIDITKTNNNLSLKQDKRYLDDQFINDAILSPGVKRILREATKVFNAILKQFSEEYDVTKVVIELARELSEEKELENTKNYKKLIKKNGDKISEGLKALGIAEDKIEEILKSPTKSYKVLLWLQQDHIDPYSQKEIAFDDILTKTEKTEIDHIIPYSISFDDSSSNKLLVLAESNQAKSNQTPYEFINSGKAEITWEVYEAYCHKFKNGDSSLLDSTQRSKKFAKMMKTDTSSKYDIGFLARNLNDTRYATIVFRDALKDYANNHLVEDKPMFKVVCINGGVTSFLRKNFDPKSWYAKKDRDKNIHHAVDASIISIFSNETKTLFNQLTKFADYKLFKNTDGSWKKIDPKTGVVSEVTDENWKQIRVRNQVSEIAKVIDKYIQDSNIERKARYSRKIENKTNISLFNDTVYSAKKVGYEDQIKRKNLKTLDIHESAEENKNSKVKKQFVYRKLVNVSLLNNDKLADLFAEKEDILMYRANPWVINLAEQIFNEYTENKKIKSQNVFEKYMLDLTKEFPEKFSEAFVKSMIRNKTAIIYNVEKDVVHRIKRLKILSSELKENKWSNVIIRSKNESGTKLSYQDTINSIALMIMRSIDPTAKKQYIRVPLNTLNLHLGDQDFDLHNIDAYLKKPKFVKYLKANEIGDEYKPWRVLTSGTLLIHKKDKKLMYISSFQNLNDLIEIKNLIETEYKENVDSDPKKKKKASQILRSLSVILNDYILLDAKYNFDILGLSKNKIDEILNSKLDLDKIAK

SEQ ID NO: 335 - protein, 1236 aa, Mycoplasma mobile
MYFYKNKENKLNKKVVLGLDLGIASVGWCLTDISQKEDNKFPIILHGVRLFETVDDSDDKLLNETRRKKRGQRRRNRRLFTRKRDFIKYLIDNNIIELEFDKNPKILVRNFIEKYINPFSKNLELKYKSVTNLPIGFHNLRKAAINEKYKLDKSELIVLLYFYLSLRGAFFDNPEDTKSKEMNKNEIEIFDKNESIKNAEFPIDKIIEFYKISGKIRSTINLKFGHQDYLKEIKQVFEKQNIDFMNYEKFAMEEKSFFSRIRNYSEGPGNEKSFSKYGLYANENGNPELIINEKGQKIYTKIFKTLWESKIGKCSYDKKLYRAPKNSFSAKVFDITNKLTDWKHKNEYISERLKRKILLSRFLNKDSKSAVEKILKEENIKFENLSEIAYNKDDNKINLPIINAYHSLTTIFKKHLINFENYLISNENDLSKLMSFYKQQSEKLFVPNEKGSYEINQNNNVLHIFDAISNILNKFSTIQDRIRILEGYFEFSNLKKDVKSSEIYSEIAKLREFSGTSSLSFGAYYKFIPNLISEGSKNYSTISYEEKALQNQKNNFSHSNLFEKTWVEDLIASPTVKRSLRQTMNLLKEIFKYSEKNNLEIEKIVVEVTRSSNNKHERKKIEGINKYRKEKYEELKKVYDLPNENTTLLKKLWLLRQQQGYDAYSLRKIEANDVINKPWNYDIDHIVPRSISFDDSFSNLVIVNKLDNAKKSNDLSAKQFIEKIYGIEKLKEAKENWGNWYLRNANGKAFNDKGKFIKLYTIDNLDEFDNSDFINRNLSDTSYITNALVNHLTFSNSKYKYSVVSVNGKQTSNLRNQIAFVGIKNNKETEREWKRPEGFKSINSNDFLIREEGKNDVKDDVLIKDRSFNGHHAEDAYFITIISQYFRSFKRIERLNVNYRKETRELDDLEKNNIKFKEKASFDNFLLINALDELNEKLNQMRFSRMVITKKNTQLFNETLYSGKYDKGKNTIKKVEKLNLLDNRTDKIKKIEEFFDEDKLKENELTKLHIFNHDKNLYETLKIIWNEVKIEIKNKNLNEKNYFKYFVNKKLQEGKISFNEWVPILDNDFKIIRKIRYIKFSSEEKETDEIIFSQSNFLKIDQRQNFSFHNTLYWVQIWVYKNQKDQYCFISIDARNSKFEKDEIKINYEKLKTQKEKLQIINEEPILKINKGDLFENEEKELFYIVGRDEKPQKLEIKYILGKKIKDQKQIQKPVKKYFPNWKKVNLTYMGEIFKK

SEQ ID NO: 336 - protein, 1265 aa, Mycoplasma ovipneumoniae
  Mycoplasma ovipneumoniae SC01
MHNKKNITIGFDLGIASIGWAIIDSTTSKILDWGTRTFEERKTANERRAFRSTRRNIRRKAYRNQRFINLILKYKDLFELKNISDIQRANKKDTENYEKIISFFTEIYKKCAAKHSNILEVKVKALDSKIEKLDLIWILHDYLENRGFFYDLEEENVADKYEGIEHPSILLYDFFKKNGFFKSNSSIPKDLGGYSFSNLQWVNEIKKLFEVQEINPEFSEKFLNLFTSVRDYAKGPGSEHSASEYGIFQKDEKGKVFKKYDNIWDKTIGKCSFFVEENRSPVNYPSYEIFNLLNQLINLSTDLKTTNKKIWQLSSNDRNELLDELLKVKEKAKIISISLKKNEIKKIILKDFGFEKSDIDDQDTIEGRKIIKEEPTTKLEVTKHLLATIYSHSSDSNWININNILEFLPYLDAICIILDREKSRGQDEVLKKLTEKNIFEVLKIDREKQLDFVKSIFSNTKFNFKKIGNFSLKAIREFLPKMFEQNKNSEYLKWKDEEIRRKWEEQKSKLGKTDKKTKYLNPRIFQDEIISPGTKNTFEQAVLVLNQIIKKYSKENIIDAIIIESPREKNDKKTIEEIKKRNKKGKGKTLEKLFQILNLENKGYKLSDLETKPAKLLDRLRFYHQQDGIDLYTLDKINIDQLINGSQKYEIEHIIPYSMSYDNSQANKILTEKAENLKKGKLIASEYIKRNGDEFYNKYYEKAKELFINKYKKNKKLDSYVDLDEDSAKNRFRFLTLQDYDEFQVEFLARNLNDTRYSTKLFYHALVEHFENNEFFTYIDENSSKHKVKISTIKGHVTKYFRAKPVQKNNGPNENLNNNKPEKIEKNRENNEHHAVDAAIVAIIGNKNPQIANLLTLADNKTDKKFLLHDENYKENIETGELVKIPKFEVDKLAKVEDLKKIIQEKYEEAKKHTAIKFSRKTRTILNGGLSDETLYGFKYDEKEDKYFKIIKKKLVTSKNEELKKYFENPFGKKADGKSEYTVLMAQSHLSEFNKLKEIFEKYNGFSNKTGNAFVEYMNDLALKEPTLKAEIESAKSVEKLLYYNFKPSDQFTYHDNINNKSFKRFYKNIRIIEYKSIPIKFKILSKHDGGKSFKDTLFSLYSLVYKVYENGKESYKSIPVTSQMRNFGIDEFDFLDENLYNKEKLDIYKSDFAKPIPVNCKPVFVLKKGSILKKKSLDIDDFKETKETEEGNYYFISTISKRFNRDTAYGLKPLKLSVVKPVAEPSTNPIFKEYIPIHLDELGNEYPVKIKEHTDDEKLMCTIK

SEQ ID NO: 337 - protein, 1314 aa, Mycoplasma synoviae
MLRLYCANNLVLNNVQNLWKYLLLLIFDKKIIFLFKIKVILIRRYMENNNKEKIVIGFDLGVASVGWSIVNAETKEVIDLGVRLFSEPEKADYRRAKRTTRRLLRRKKFKREKFHKLILKNAEIFGLQSRNEILNVYKDQSSKYRNILKLKINALKEEIKPSELVWILRDYLQNRGYFYKNEKLTDEFVSNSFPSKKLHEHYEKYGFFRGSVKLDNKLDNKKDKAKEKDEEEESDAKKESEELIFSNKQWINEIVKVFENQSYLTESFKEEYLKLFNYVRPFNKGPGSKNSRTAYGVFSTDIDPETNKFKDYSNIWDKTIGKCSLFEEEIRAPKNLPSALIFNLQNEICTIKNEFTEFKNWWLNAEQKSEILKFVFTELFNWKDKKYSDKKFNKNLQDKIKKYLLNFALENFNLNEEILKNRDLENDTVLGLKGVKYYEKSNATADAALEFSSLKPLYVFIKFLKEKKLDLNYLLGLENTEILYFLDSIYLAISYSSDLKERNEWFKKLLKELYPKIKNNNLEIIENVEDIFEITDQEKFESFSKTHSLSREAFNHIIPLLLSNNEGKNYESLKHSNEELKKRTEKAELKAQQNQKYLKDNFLKEALVPLSVKTSVLQAIKIFNQIIKNFGKKYEISQVVIEMARELTKPNLEKLLNNATNSNIKILKEKLDQTEKFDDFTKKKFIDKIENSVVFRNKLFLWFEQDRKDPYTQLDIKINEIEDETEIDHVIPYSKSADDSWFNKLLVKKSTNQLKKNKTVWEYYQNESDPEAKWNKFVAWAKRIYLVQKSDKESKDNSEKNSIFKNKKPNLKFKNITKKLFDPYKDLGFLARNLNDTRYATKVFRDQLNNYSKHHSKDDENKLFKVVCMNGSITSFLRKSMWRKNEEQVYRFNFWKKDRDQFFHHAVDASIIAIFSLLTKTLYNKLRVYESYDVQRREDGVYLINKETGEVKKADKDYWKDQHNFLKIRENAIEIKNVLNNVDFQNQVRYSRKANTKLNTQLFNETLYGVKEFENNFYKLEKVNLFSRKDLRKFILEDLNEESEKNKKNENGSRKRILTEKYIVDEILQILENEEFKDSKSDINALNKYMDSLPSKFSEFFSQDFINKCKKENSLILTFDAIKHNDPKKVIKIKNLKFFREDATLKNKQAVHKDSKNQIKSFYESYKCVGFIWLKNKNDLEESIFVPINSRVIHFGDKDKDIFDFDSYNKEKLLNEINLKRPENKKFNSINEIEFVKFVKPGALLLNFENQQIYYISTLESSSLRAKIKLLNKMDKGKAVSMKKITNPDEYKIIEHVNPLGINLNWTKKLENNN

SEQ ID NO: 338 - protein, 1304 aa, Mycoplasma synoviae
  Mycoplasma synoviae 53
MLNNVQNLWKYLLLLIFDKKIIFLFKIKVILIRRYMENNNKEKIVIGFDLGVASVGWSIVNAETKEVIDLGVRLFSEPEKADYRRAKRTTRRLLRRKKFKREKFHKLILKNAEIFGLQSRNEILNVYKDQSSKYRNILKLKINALKEEIKPSELVWILRDYLQNRGYFYKNEKLTDEFVSNSFPSKKLHEHYEKYGFFRGSVKLDNKLDNKKDKAKEKDEEEESDAKKESEELIFSNKQWINEIVKVFENQSYLTESFKEEYLKLFNYVRPFNKGPGSKNSRTAYGVFSTDIDPETNKFKDYSNIWDKTIGKCSLFEEEIRAPKNLPSALIFNLQNEICTIKNEFTEFKNWWLNAEQKSEILKFVFTELFNWKDKKYSDKKFNKNLQDKIKKYLLNFALENFNLNEEILKNRDLENDTVLGLKGVKYYEKSNATADAALEFSSLKPLYVFIKFLKEKKLDLNYLLGLENTEILYFLDSIYLAISYSSDLKERNEWFKKLLKELYPKIKNNNLEIIENVEDIFEITDQEKFESFSKTHSLSREAFNHIIPLLLSNNEGKNYESLKHSNEELKKRTEKAELKAQQNQKYLKDNFLKEALVPLSVKTSVLQAIKIFNQIIKNFGKKYEISQVVIEMARELTKPNLEKLLNNATNSNIKILKEKLDQTEKFDDFTKKKFIDKIENSVVFRNKLFLWFEQDRKDPYTQLDIKINEIEDETEIDHVIPYSKSADDSWFNKLLVKKSTNQLKKNKTVWEYYQNESDPEAKWNKFVAWAKRIYLVQKSDKESKDNSEKNSIFKNKKPNLKFKNITKKLFDPYKDLGFLARNLNDTRYATKVFRDQLNNYSKHHSKDDENKLFKVVCMNGSITSFLRKSMWRKNEEQVYRFNFWKKDRDQFFHHAVDASIIAIFSLLTKTLYNKLRVYESYDVQRREDGVYLINKETGEVKKADKDYWKDQHNFLKIRENAIEIKNVLNNVDFQNQVRYSRKANTKLNTQLFNETLYGVKEFENNFYKLEKVNLFSRKDLRKFILEDLNEESEKNKKNENGSRKRILTEKYIVDEILQILENEEFKDSKSDINALNKYMDSLPSKFSEFFSQDFINKCKKENSLILTFDAIKHNDPKKVIKIKNLKFFREDATLKNKQAVHKDSKNQIKSFYESYKCVGFIWLKNKNDLEESIFVPINSRVIHFGDKDKDIFDFDSYNKEKLLNEINLKRPENKKFNSINEIEFVKFVKPGALLLNFENQQIYYISTLESSSLRAKIKLLNKMDKGKAVSMKKITNPDEYKIIEHVNPLGINLNWTKKLENNN

SEQ ID NO: 339 - protein, 1401 aa, Myroides injenensis
  Myroides injenensis M09-0166
MKRILGLDLGTTSIGWAYVHEAENVNETSSIQKVGVRVNPLTTEEQTNFEKGKPITTNASRTLARSARRNLQRYKLRRDNLIQILKENNWINNTTSLTETGNHSTFETYELRNKAASEKLTLDQLSRVLLMLNKKRGYKSSRKVNSKEEGQLIDGMEVAKKLYHEQLTPGQLSLQLMNQGVKKLPDYYRSDLNQELESIWNFQQQFYPNILTDKFKEEINGKGLTSTSSAFWNIYNFNTAENKGSRDEKKKQALQWRSEALSKQLSKEIVAYIIADLNGQIYNSSGYLGAISDRSKELYFNNLTVGQYLFKQLKSNPHTSLKNQVFYRQDYLNEFEKIWETQSKFYPKELTAALKREIRDVIIFYQRKLKSQKGLISFCEFEQKQKTINGKTKTIGHRVIPKSSPLFQEFKIWQQLHNVVLRNKKTNEIVSLADEQKVHLFEELNLKGKLKSNQVLKLIENKPKDWELNYTELEGNNTNKALYNAYLDILDIEGYDVRNELKVKLNKDDIELSDLDVNASEIKEMIFSVFKHLGINTEILEFDATLEDKVFEKQASYQLWHLLYSYEEDNSPTGLDRLYNLLHKKFGFKLNHAKLIGNVLFQDDYGSLSSKAIKNIFPYITENNYYTACELAGYKHSKHSLTKEENETRELKNRLTILPKNSLRNPVVEKIINQMINVVNTLIDEENNILIAQGKEPNFQFDEIRIELARELKKNAKEREELTKSINKSKTDHEKIIKILQKEDGIKNPTRNDIVRFKLYSELKNNGYKDLYTNEYIERKDIFTKEYDIEHIIPQSKLFDDSFSNKTLVRRNVNLKKGNQTAYDFILCEYGQEKANEFETRITNLYNLGKDEGISKSKFKKLLMQESEIGNGFIERDLRETQYIAKKAKSLLLEITRNVISTSGSITDRLREDWGLINVMKELNLQKYRDAGLTEFVKMKDGNKKEVIIDWTKRNDHRHHAMDALTIAFTKHNHIQYLNHLNARKNVNNELHNNIIAIEKLETTLVSDERGNKKRIFKEPIANFRTIAKSHLEAILVSHKAKNKVVTKNINKISGKKISQQTLTPRGQLHKETIYGKIRQYVSKQEKVGPKFTIEVIEQVSNPTYRNLLLKRLEENNNDPKKAFGGKNSLNKNPIYINLEKNIKVPEVLKLVWLEDNYTIRKEISPDLKIDKVIDQGVKQILQNRLAQYKGDSKLAFSNLDANPIWLNEDKGIAIKRVTISGIATAQPLHRKKDHLGQPILDHNGQEIPVDFISTGNNHHVAIYEDENGKLQESVVSHFEAVERVNQKLPIIDKTFNQHLGWKFLFTMKQNELFLFPSDDFNPNEIDLFDKQNYTVISKHLFRIQKLSTKDYSFRHHLETNVEEIKDLKTITWRREGLNGIQNIIKVRTNHLGEIIHIGEY

SEQ ID NO: 340 - protein, 1466 aa, Myroides odoratus
  Myroides odoratus DSM 2801
MKNILGLDLGTNSIGWALVKEDFENKQGEILGLGSRIIPMSQDILGEFGRGNSISQTADRTGYRGVRRLRERHLLRRERLHRVLNILGFLPNHYAKEIDFTKRLGKFINHAEPKLSFDKEFIFKDSFNEMLKDFQQNQPGFIINKHGEEALVPYDWTIYYLRKKALTQKIDKEELAWILLNFNQKRGYYQLRGEEEEENTNKLVEFYSLKIIDVIADNEVNKKGEVWYSLHLENGWIYRRSSKISLVDWKDKVRDFIVTTDVNDDGSEKLDKDGVVKRSFRAPSADDWTLLKKKTEQDIDNSNKTVGAYIYENLLLNPKQKIKGKLVRTIERKFYKDELKQILEKQKEFHQELQNEQLLQDCVRELYKYNEQHQQMLESKDFVHLFLNDIIFYQRPLRSQKSLISNCTLEKRVSRDGVVFPIKVISKSNPYYQEFRLLQWLQNLAIYRKDDDVNVTQEFLNSIESWENLLQFLNAKKEIKQEQLIKFLLEQKGLKGNSLKTAILTYRWNYVTDKVYPMNETRSLIQDKLKKVENVATDFLSFDNEMALWHIIYSVNDKIEYEKALAKFASKHNLDEISFVESFKKFPPFKSDYGSFSEKAIKKLLPLMRFGSVWNKNNIVPSVLDRIDKILTGEYDEKIKIRVREKAEQFQLNQIEDFQNLPLWLAQYVVYDRHSEAEIAGKWNSVKDLENYLKEFKQHSLRNPIVEQIITETLRVVKDIWQQYGNGVQNFFDEIHIELGREMKNTADERKRITNSVTENENTNLRIKALLVELKEDTNIENVRPHSPMQQEILKIYEEGVLNAVENIDEDILKISKTAQPSKSELIRYKLWLEQKYQSPYTGEMIPLSRLFTSDYEIEHVIPQSRYFDDSLSNKVICEAAVNKRKDNQLGLEFIKNHHSEKIELGNGRTAQVLEVEAYESFVKKNYDKNRGKRNKLLLEDVPEKMIERQLNDTRYISKFVTHLLSNIVRKDEVNSKDDGINSKNIIPGNGKITSQLKQDWGLNDVWNELILPRFERMNNLTNSTDFTSTNTNGKIIPTVPLEYSKGFSKKRIDHRHHALDALVIALATRDHVNLLNNESALPKKDRTKEEQKSFRFDLQVNLRNKEKYFNVKEGREKEKFTTFKKPWNTLTQDTRDALENMVVSFKQNLRVINKATNYYESYTDENGNLRLDKYGNPKKELISQKGTNWAIRKSLHKETVSGQIHLDRVKVTKGKIVTATRKSLDSSFNEKSIESITDTGIQKILRNYLKAKDNKPDVAFSPEGIEELNKSISVYNEGKNHQPIIKVRIFEQGSKFPVGETGNKIAKFVEAAKGTNLFFGIYQDKTGKRSYDTIPLNLVIERLKQGLSPVPETNEKGHQLLFHLSPNDLVYVPTIDDNEQLDSNRVYKFTDSSDTTCNFIPSNISAIIFNINSKEQEKRGINYPIQNELGVGSPQSKNQKSFDGFMIKEVCIKLKVDRLGNISKT

SEQ ID NO: 341 - protein, 1077 aa, Neisseria bacilliformis
  Neisseria bacilliformis ATCC BAA-1200
MQQKPQRYILGLDLGIASVGWACVWADENEHPTGLLDCGVRTFERAEVPKTGDSLALARRQARSVRRLIRRRAHRLLRLRRLLKREGVLLSADFNENGLVRGLPIDAWALRVAGLDRKLSNKEWAAVLLHLVKHRGYLSQRKNETQSKDKELGRLLAGVNGNREALQNRSDEYRTAAELAVKKFAAENNGSLRNKGGDYSHTFDRKDLQRELHLLFERQRALDNPFTSSEMEAAVDELLMKQRSALQGEAVLKMLGRCTFEPSEYKAAKNTYSAERFVWLTKLNNLRIQYNGEERALSEAERRLLLDEPYQKAKLTYKQVRTILELPESAVFKGLRYGHGEDGLKAESGTLMEMKAYHAVRKALKDAGLEGEWENRIRNPELLDAIGTAFSLYKTDEDIRANLAAFRLSENVLEALLAGLNFDKFVHLSLKALAKILPLMEQGMRYDEACKEAYGDHYGAKEQEDHRLLPPFVADDIRNPVVFRTLTQARKIVNEIVRRYGSPLRVHIETGREVGKSFSDRKEIEKRQEENRKERERAAAHFKELFPNFAGEPKAQDILKLRLYEQQHGKCLYSGKEIDLRRLPEKGYVEIDHALPFSRTWDDSFNNKVLVLGKENQDKRNRTPYEYLDGKGNSGAWRAFAERVSGCRFPYAKKQRLLTQKLDEKTEQGFLERNLNDTRYVARFLCQFIEEKMHLEGAGKKRVFASNGQITALLRGFWGLKKVREENDRHHALDAVVVACSSVSMQQKITRHFRYREELEHIDRETGEVIHGFPQPWEFFRQEVMTRVFSDDPVSELAEKLDSRPEAVHEFVTPLFVSRAPHRKVTGQGHLETIRSAKRLDEKISVVKLPLTQLKTKDIERIVGYPNREPALYDALAARLAAFKDDPAKAFSEPFYKTGKDGKCGVLVKAVRVENVQKSGLLVRKDESGKMQGVADNATMVRVDVFGKNGKNYLVPVYAWQVEKGELPNRAVVAYADEEDWDEMDDSFEFKFSLYPNDLVEVVTKKDKFFGYYSGFNRATGAINIKEHDLSKSKVKNGVYEGIGVKTAQSFQKYQVDTLGKTIRLCKPEKRMGFKKK

SEQ ID NO: 342 - protein, 1082 aa, Neisseria cinerea
  Neisseria cinerea ATCC 14685
MAAFKPNPMNYILGLDIGIASVGWAIVEIDEEENPIRLIDLGVRVFERAEVPKTGDSLAAARRLARSVRRLTRRRAHRLLRARRLLKREGVLQAADFDENGLIKSLPNTPWQLRAAALDRKLTPLEWSAVLLHLIKHRGYLSQRKNEGETADKELGALLKGVADNTHALQTGDFRTPAELALNKFEKESGHIRNQRGDYSHTFNRKDLQAELNLLFEKQKEFGNPHVSDGLKEGIETLLMTQRPALSGDAVQKMLGHCTFEPTEPKAAKNTYTAERFVWLTKLNNLRILEQGSERPLTDTERATLMDEPYRKSKLTYAQARKLLDLDDTAFFKGLRYGKDNAEASTLMEMKAYHAISRALEKEGLKDKKSPLNLSPELQDEIGTAFSLFKTDEDITGRLKDRVQPEILEALLKHISFDKFVQISLKALRRIVPLMEQGNRYDEACTEIYGDHYGKKNTEEKIYLPPIPADEIRNPVVLRALSQARKVINGVVRRYGSPARIHIETAREVGKSFKDRKEIEKRQEENRKDREKSAAKFREYFPNFVGEPKSKDILKLRLYEQQHGKCLYSGKEINLGRLNEKGYVEIDHALPFSRTWDDSFNNKVLALGSENQNKGNQTPYEYFNGKDNSREWQEFKARVETSRFPRSKKQRILLQKFDEDGFKERNLNDTRYINRFLCQFVADHMLLTGKGKRRVFASNGQITNLLRGFWGLRKVRAENDRHHALDAVVVACSTIAMQQKITRFVRYKEMNAFDGKTIDKETGEVLHQKAHFPQPWEFFAQEVMIRVFGKPDGKPEFEEADTPEKLRTLLAEKLSSRPEAVHKYVTPLFISRAPNRKMSGQGHMETVKSAKRLDEGISVLRVPLTQLKLKDLEKMVNREREPKLYEALKARLEAHKDDPAKAFAEPFYKYDKAGNRTQQVKAVRVEQVQKTGVWVHNHNGIADNATIVRVDVFEKGGKYYLVPIYSWQVAKGILPDRAVVQGKDEEDWTVMDDSFEFKFVLYANDLIKLTAKKNEFLGYFVSLNRATGAIDIRTHDTDSTKGKNGIFQSVGVKTALSFQKYQIDELGKEIRPCRLKKRPPVR

SEQ ID NO: 343 - protein, 1081 aa, Neisseria flavescens
  Neisseria flavescens SK114
MTAFKPNPINYILGLDIGIASVGWAMVEIDEEENPIRLIDLGVRVFERAEVPKTGDSLAAARRLARSVRRLTRRRAHRLLRARRLLKREGVLQAADFDENGLIKSLPNTPWQLRAAALDRKLTPLEWSAVLLHLIKHRGYLSQRKNEGETADKELGALLKGVADNAHALQTGDFRTPAELAVNKFEKESGHIRNQRGDYSHTFSRKDLQAELVLLFEKQKEFGNPHISDGLKEGIETLLMAQRPALSGDAVQKMLGYCTFEPTEPKAAKNTYTAERFIWLTKLNNLRILEQGSERPLTDTERATLIDMPYKNKLTYAKARELLGLDDTAFFKGLRYGKDNAESATLMEMKAYHAIRRALEKEGLKDKKSPLSLSPELQDEIGTAFSLFKTDEDITGRLKGCLQPEILDALLKHINFDKFVQISLKALRRIVPLMEQGKRYDEACAETYGDHYGEKNSEEMLYLPPIPADEIRNPVVLRALSQARKVINGVVRRYGSPARIHIETAREVGKSFKDRKEIEKRQEENRKDREKAAAKFREYFPNFVGEPKSKDILKLRLYEQQHGKCLYSGKAIDIRRLNGKGYVEIDHALPFSRTWDDSFNNKVLVLGSENQNKGNRTPYEYLNGKDNSREWLEFKARVETSRFPHSKKQRVLLQKFDEKGFKERNLNDTRYVNRFLCQFVADHMQLTGKGKRRVFASNGQITNLLRGFWGLHKVRAENDRHHALDAVVVACSTVAMQQKITCFVRYKEMNAFDGKTVDKETGEVLHQKTHFPQPWEFFAQEVMIRVFGKPDGKPEFEEADTPEKLRALLAEKLSSRPEAVHEYVTPLFVSRAPNRKMSGAHKDTLRSAKRFVKHNEKISVKRVWLTEIKLADLENMVNYKNGREIELYEALKARLGAYGGNAKQAFDPKDNPFYKKGGQLVKAVRVEKTQESGVLLNKKNAYTIADNGDMVRVDVFCKVDKKGKNQYFIVPIYAWQVAENILPDIDCKGYRIDDSYTFCFSLHKYDLIAFQKDEKSKVEFAYYINCDSSNGRFYLAWHDKGSKEQQFRISTQNLVLMQKYQIDELGKEIRPCRLKKRPPVR

SEQ ID NO: 344 - protein, 1082 aa, Neisseria lactamica
MAAFKPNPMNYILGLDIGIASVGWAMVEIDKEENPIRLIDLGVRVFERAEVPKTGDSLAMARRLARSVRRLTRRRAHRLLRARRLLKREGVLQDADFDENGLVKSLPNTPWQLRAAALDRKLTCLEWSAVLLHLIKHRGYLSQRKNEGETADKELGALLKGVADNAHALQTGDFRTPAELALNKFEKESGHIRNQRGDYSHTFSRKDLQAELNLLFEKQKEFSNPHVSDSLKEGIETLLMAQRPALSGDAVQKMLGHCTFEPAEPKAAKNTYTAERFIWLTKLNNLRILEQGSERPLTDTERATLMDEPYRKSKLTYAQARKLLGLEDTAFFKGLRYGKDNAEAPTLMEMKAYHAISRALEKEGLKDKKSPLNLSTELQDEIGTAFSLFKTDKDITGRLKDRVQPEILEALLKHISFDKFVQISLKALRRIVPLMEQGKRYDEACAEIYGDHYCKKNAEEKIYLPPIPADEIRNPVVLRALSQARKVINCVVRRYGSPARIHIETAREVGKSFKDRKEIEKRQEENRKDREKAAAKFREYFPNFVGEPKSKDILKLRLYEQQHGKCLYSGKEINLVRLNEKGYVEIDHALPFSRTWDDSFNNKVLVLGSENQNKGNQTPYEYFNGKDNSREWQEFKARVETSRFPRSKKQRILLQKFDEEGFKERNLNDTRYVNRFLCQFVADHILLTGKGKRRVFASNGQITNLLRGFWGLRKVRAENDRHHALDAVVVACSTVAMQQKITRFVRYKEMNAFDGKTIDKETGEVLHQKAHFPQPWEFFAQEVMIRVFGKPDGKPEFEEADTPEKLRTLLAEKLSSRPEAVHEYVTPLFVSRAPNRKMSGQGHMETVKSAKRLDEGISVLRVPLTQLKLKGLEKMVNREREPKLYDALKAQLETHKDNPAKAFAEPFYKYDKAGNRTQQVKAVRIEQVQKTGVWVRNHNGIADNATMVRVDVFEKGGKYYLVPIYSWQVAKGILPDRAVVAFKDEEDWTVMDDSFEFRFVLYANDLIKLTAKKNEFLGYFVSLNRATGAIDIRTHDTDSTKGKNGIFQSVGVKTALSFQKNQIDELGKEIRPCRLKKRPPVR

SEQ ID NO: 345 - protein, 1082 aa, Neisseria meningitidis
MAAFKPNPINYILGLDIGIASVGWAMVEIDEDENPICLIDLGVRVFERAEVPKTGDSLAMARRLARSVRRLTRRRAHRLLRARRLLKREGVLQAADFDENGLIKSLPNTPWQLRAAALDRKLTPLEWSAVLLHLIKHRGYLSQRKNEGETADKELGALLKGVADNAHALQTGDFRTPAELALNKFEKESGHIRNQRGDYSHTFSRKDLQAELNLLFEKQKEFGNPHISDGLKEGIETLLMTQRPALSGDAVQKMLGHCTFEPAEPKAAKNTYTAERFIWLTKLNNLRILEQGSERPLTDTERTTLIDEPYRKSKLTYAQARKLLELDNTAFFKGLRYGKDNAEASTLMEMKAYHAISRALEKEGLKDKKSPLNLSPELQDEIGTAFSLFKTDEDITGRLKDRVQPEILEALLKHISFDKFVQISLKALRRIVPLMEQGKRYDEACAEIYGDHYGKKNTEEKIDLPPIPADEIRNPVVLRALSQARKVINGVVRRYGSPARIHIETAREVGKSFKDRKEIEKRQEENRKDREKAATKFREYFPNFVGEPKSKDILKLRLYEQQHGKCLYSGKEINLGRLNEKGYVEIDHALPFSRTWDDSFNNKVLVLGSENQNKGNQTPYEYFNGKDNSREWQEFKARVETSRFPRSKKQRILLQKFDEEGFKERNLNDTRYVNRFLCQFVADHMLLTGKGKRRVFASNGQITNLLRGFWGLRKVRAENDRHHALDAVVVACSTVAMQQKITRFVRYKEMNAFDGKTIDKETGEVLHQKTHFPQPWEFFAQEVMIRVFGKPDGKPEFEEADTPEKLRTLLAEKLSSRPEAVHEYVTPLFVSRAPNRKMSGQGHMETVKSAKRLDEGVSVLRVPLTQLKLKDLEKMVNREREPKLYEALKARLEAHKDDPAKAFAEPFYKYDKAGNRTQQVKAVRVEQVQKTGVWVRNHNGIADNATMVRVDVFEKGDKYYLVPIYSWQVAKGILPDRAVVQGKDEEDWQLIDDSFNFKFSLHPNDLVEVITKKARMFGYFASCHRGTGNINIRIHDLDHKIGKNGILEGIGVKTALSFQKYQIDELGKEIRPCRLKKRPPVR

SEQ ID NO: 346 - protein, 1082 aa, Neisseria meningitidis
  Neisseria meningitidis 2007056
MAAFKPNPINYILGLDIGIASVGWAMVEIDEDENPICLIDLGVRVFERAEVPKTGDSLAMARRLARSVRRLTRRRAHRLLRARRLLKREGVLQAADFDENGLIKSLPNTPWQLRAAALDRKLTPLEWSAVLLHLIKHRGYLSQRKNEGETADKELGALLKGVADNAHALQTGDFRTPAELALNKFEKESGHIRNQRGDYSHTFSRKDLQAELILLFEKQKEFGNPHVSGGLKEGIETLLMTQRPALSGDAVQKMLGHCTFEPAEPKAAKNTYTAERFIWLTKLNNLRILEQGSERPLTDTERATLMDEPYRKSKLTYAQARKLLGLEDTAFFKGLRYGKDNAEASTLMEMKAYHAISRALEKEGLKDKKSPLNLSPELQDEIGTAFSLFKTDEDITGRLKDRIQPEILEALLKHISFDKFVQISLKALRRIVPLMEQGKRYDEACAEIYGDHYGKKNTEEKIYLPPIPADEIRNPVVLRALSQARKVINGVVRRYGSPARIHIETAREVGKSFKDRKEIEKRQEENRKDREKAAAKFREYFPNFVGEPKSKDILKLRLYEQQHGKCLYSGKEINLGRLNEKGYVEIDHALPFSRTWDDSFNNKVLVLGSENQNKGNQTPYEYFNGKDNSREWQEFKARVETSRFPRSKKQRILLQKFDEDGFKERNLNDTRYVNRFLCQFVADRMRLTGKGKKRVFASNGQITNLLRGFWGLRKVRAENDRHHALDAVVVACSTVAMQQKITRFVRYKEMNAFDGKTIDKETGEVLHQKTHFPQPWEFFAQEVMIRVFGKPDGKPEFEEADTPEKLRTLLAEKLSSRPEAVHEYVTPLFVSRAPNRKMSGQGHMETVKSAKRLDEGVSVLRVPLTQLKLKDLEKMVNREREPKLYEALKARLEAHKDDPAKAFAEPFYKYDKAGNRTQQVKAVRVEQVQKTGVWVRNHNGIADNATMVRVDVFEKGDKYYLVPIYSWQVAKGILPDRAVVQGKDEEDWQLIDDSFNFKFSLHPNDLVEVITKKARMFGYFASCHRGTGNINIRIHDLDHKIGKNGILEGIGVKTALSFQKYQIDELGEEIRPCRLKKRPPVR

SEQ ID NO: 347 - protein, 1082 aa, Neisseria meningitidis
  Neisseria meningitidis 63049
MAAFKPNPINYILGLDIGIASVGWAMVEIDEEENPIRLIDLSVRVFERAEVPKTGDSLAMARRLARSVRRLTRRRAHRLLRARRLLKREGVLQAADFDENGLIKSLPNTPWQLRAAALDRKLTPLEWSAVLLHLIKHRGYLSQRKNEGETADKELGALLKGVADNAHALQTGDFRTPAELALNKFEKESGHIRNQRGDYSHTFSRKDLQAELILLFEKQKEFGNPHVSGGLKEGIETLLMTQRPALSGDAVQKMLGHCTFEPAEPKAAKNTYTAERFVWLTKLNNLRILEQGSERPLTDTERATLMDEPYRKSKLTYAQARKLLGLEDTAFFKGLRYGKDNAEASTLMEMKAYHAISRALEKEGLKDKKSPLRLSPELQDEIGTAFSLFKTDEDITGRLKDRVQPEILEALLKHISFDKFVQISLKALRRIVPLMEQGKRYDEACAEIYGDHYGKKNAEEKIYLPPIPADEIRNPVVLRALSQARKVINGVVRRYGSPARIHIETAREVGKSFKDRKEIEKRQEENRKDREKAAAKFREYFPNFVGEPKSKDILKLRLYEQQHGKCLYSGKEINLGRLNEKGYVEIDHALPFSRTWDDSFNNKVLVLGSENQNKGNQTPYEYFNGKDNSREWQEFKARVETSRFPRSKKQRILLQKFDEDGFKERNLNDTRYVNRFLCQFVADRMRLTGKGKKRVFASNGQITNLLRGFWGLRKVRAENDRHHALDAVVVACSTVAMQQKITRFVRYKEMNAFDGKTIDKETGEVLHQKTHFPQPWEFFAQEVMIRVFGKPDGKPEFEEADTPEKLRTLLAEKLSSRPEAVHEYVTPLFVSRAPNRKMSGQGHMETVKSAKRLDEGVSVLRVPLTQLKLKDLEKMVNREREPKLYEALKARLEAHKDDPAKAFAEPFYKYDKAGNRTQQVKAVRVEQVQKTGVWVRNHNGIADNATMVRVDVFEKGDKYYLVPIYSWQVAKGILPDRAVVQGKDEEDWQLIDDSFNFKFSLHPNDLVEVITKKARMFGYFASCHRGTGNINIRIHDLDHKIGKNGILEGIGVKTALSFQKYQIDELGKEIRPCRLKKRPPVR

SEQ ID NO: 348 - protein, 1082 aa, Neisseria meningitidis
MAAFKPNSINYILGLDIGIASVGWAMVEIDEEENPIRLIDLGVRVFERAEVPKTGDSLAMARRLARSVRRLTRRRAHRLLRTRRLLKREGVLQAANFDENGLIKSLPNTPWQLRAAALDRKLTPLEWSAVLLHLIKHRGYLSQRKNEGETADKELGALLKGVAGNAHALQTGDFRTPAELALNKFEKESGHIRNQRSDYSHTFSRKDLQAELILLFEKQKEFGNPHVSGGLKEGIETLLMTQRPALSGDAVQKMLGHCTFEPAEPKAAKNTYTAERFIWLTKLNNLRILEQGSERPLTDTERATLMDEPYRKSKLTYAQARKLLGLEDTAFFKGLRYGKDNAEASTLMEMKAYHAISRALEKEGLKDKKSPLNLSPELQDEIGTAFSLFKTDEDITGRLKDRIQPEILEALLKHISFDKFVQISLKALRRIVPLMEQGKRYDEACAEIYGDHYGKKNTEEKIYLPPIPADEIRNPVVLRALSQARKVINGVVRRYGSPARIHIETAREVGKSFKDRKEIEKRQEENRKDREKAAAKFREYFPNFVGEPKSKDILKLRLYEQQHGKCLYSGKEINLGRLNEKGYVEIDHALPFSRTWDDSFNNKVLVLGSENQNKGNQTPYEYFNGKDNSREWQEFKARVETSRFPRSKKQRILLQKFDEDGFKERNLNDTRYVNRFLCQFVADRMRLTGKGKKRVFASNGQITNLLRGFWGLRKVRAENDRHHALDAVVVACSTVAMQQKITRFVRYKEMNAFDGKTIDKETGEVLHQKTHFPQPWEFFAQEVMIRVFGKPDGKPEFEEADTLEKLRTLLAEKLSSRPEAVHEYVTPLFVSRAPNRKMSGQGHMETVKSAKRLDEGVSVLRVPLTQLKLKDLEKMVNREREPKLYEALKARLEAHKDDPAKAFAEPFYKYDKAGNRTQQVKAVRVEQVQKTGVWVRNHNGIADNATMVRVDVFEKGDKYYLVPIYSWQVAKGILPDRAVVQGKDEEDWQLIDDSFNFKFSLHPNDLVEVITKKARMFGYFASCHRGTGNINIRIHDLDHKIGKNGILEGIGVKTALSFQKYQIDELGKEIRPCRLKKRPPVR

SEQ ID NO: 349 - protein, 1082 aa, Neisseria meningitidis
  Neisseria meningitidis 92045
MAAFKPNPINYILGLDIGIASVGWAMVEIDEEENPIRLIDLGVRVFERAEVPKTGDSLAMARRLARSVRRLTRRRAHRLLRARRLLKREGVLQAADFDENGLIKSLPNTPWQLRAAALDRKLTPLEWSAVLLHLIKHRGYLSQRKNEGETADKELGALLKGVADNAHALQTGDFRTPAELALNKFEKECGHIRNQRGDYSHTFSRKDLQAELNLLFEKQKEFGNPHVSGGLKEGIETLLMTQRPALSGDAVQKMLGHCTFEPAEPKAAKNTYTAERFIWLTKLNNLRILEQGSERPLTDTERATLMDEPYRKSKLTYAQARKLLGLEDTAFFKGLRYGKDNAEASTLMEMKAYHAISRALEKEGLKDKKSPLNLSPELQDEIGTAFSLFKTDEDITGRLKDRIQPEILEALLKHISFDKFVQISLKALRRIVPLMEQGKRYDEACAEIYGDHYGKKNTEEKIYLPPIPADEIRNPVVLRALSQARKVINGVVRRYGSPARIHIETAREVGKSFKDRKEIEKRQEENRKDREKAAAKFREYFPNFVGEPKSKDILKLRLYEQQHGKCLYSGKEINLVRLNEKGYVEIDHALPFSRTWDDSFNNKVLVLGSENQNKGNQTPYEYFNGKDNSREWQEFKARVETSRFPRSKKQRILLQKFDEEGFKERNLNDTRYVNRFLCQFVADHILLTGKGKRRVFASNGQITNLLRGFWGLRKVRAENDRHHALDAVVVACSTVAMQQKITRFVRYKEMNAFDGKTIDKETGEVLHQKTHFPQPWEFFAQEVMIRVFGKPDGKPEFEEADTPEKLRTLLAEKLSSRPEAVHEYVTPLFVSRAPNRKMSGQGHMETVKSAKRLDEGVSVLRVPLTQLKLKDLEKMVNREREPKLYEALKARLEAHKDDPAKAFAEPFYKYDKAGNRTQQVKAVRVEQVQKTGVWVRNHNGIADNATMVRVDVFEKGGKYYLVPIYSWQVAKGILPDRAVVQGKDEEDWQLIDDSFNFKFSLHPNDLVEVITKKARMFGYFASCHRGTGNINIRIHDLDHKIGKNGILEGIGVKTALSFQKYQIDELGKEIRPCRLKKRPPVR

SEQ ID NO: 350 - protein, 1081 aa, Neisseria meningitidis
  Neisseria meningitidis 93003
MAAFKPNPINYILGLDIGIASVGWAMVEIDEEENPIRLIDLGVRVFERAEVPKTGDSLAMARRLARSVRRLTRRRAHRLLRARRLLKREGVLQAADFDENGLIKSLPNTPWQLRAAALDRKLTPLEWSAVLLHLIKHRGYLSQRKNEGETADKELGALLKGVADNAHALQTGDFRTPAELALNKFEKESGHIRNQRGDYSHTFSRKDLQAELILLFEKQKEFGNPHVSGGLKEGIETLLMTQRPALSGDAVQKMLGHCTFEPAEPKAAKNTYTAERFIWLTKLNNLRILEQGSERPLTDTERATLMDEPYRKSKLTYAQARKLLGLEDTAFFKGLRYGKDNAEASTLMEMKAYHAISRALEKEGLKDKKSPLNLSPELQDEIGTAFSLFKTDEDITGRLKDRVQPEILEALLKHISFDKFVQISLKALRRIVPLMEQGKRYDEACAEIYGDHYGKKNTEEEIYLPPITADEIRNPVVLRALSQARKVINAVVRRYGSPARIHIETAREVGKSFKDRKEIEKRQEENRKDREKAAAKFREYFPNFVGEPKSKDILKLRLYEQQHGKCLYSGKEINLVRLNEKGYVEIDHALPFSRTWDDSFNNKVLVLGSENQNKGNQTPYEYFNGKENSREWQEFKARVETSRFPRSKKQRILLQKFDEDGFKERNLNDTRYVNRFLCQFVADRMRLTGKGKKRVFASNGQITNLLRGFWGLHKVRAENDRHHALDAVVVACSTIAMQQKITRFVRYKEMNAFDGKTIDKETGEVLHQKAHFPQPWEFFAQEVMIRVFGKPDGKPEFEEADTPEKLRTLLAEKLSSRPEAVHEYVTPLFVSRAPNRKMSGQGHMETVKSAKRLDEGISVLRVPLTQLKLKDLEKMVNRAREPKLYEALKARLEAHKDDPAKAFAEPFYKYDKAGNRTQQVKAVRVEQVQKTGVWVRNHNGIADNATMVRVDVFEKAGKYYLVPIYSWQVAKGILPDRAVVAYADEEDWTVIDESFRFKFVLYSNDLIKVQLKKDSFLGYFSGLDRATGAISLREHDLEKSKGKDGMHRIGVKTALSFQKYQIDEMGKEIRPCRLKKRPPVR

SEQ ID NO: 351 - protein, 1081 aa, Neisseria meningitidis
  Neisseria meningitidis 93004
MAAFKPNPINYILGLDIGIASVGWAMVEIDEDENPICLIDLGVRVFERAEVPKTGDSLAMARRLARSVRRLTRRRAHRLLRARRLLKREGVLQAADFDENGLIKSLPNTPWQLRAAALDRKLTPLEWSAVLLHLIKHRGYLSQRKNEGETADKELGALLKGVADNAHALQTGDFRTPAKLALNKFEKESGHIRNQRGDYSHTFSRKDLQAELNLLFEKQKEFGNPHISDGLKEGIETLLMTQRPALSGDAVQKMLGHCTFEPTEPKAAKNTYTAERFVWLTKLNNLRILEQGSEQPLTDTQRAKLMDEPYRKSKLTYAQARKLLGLEDTAFFKGLRYGKDNAEASTLMEMKAYHAISRALEKEGLKDKKSPLNLSPELQDEIGTAFSLFKTDEDITGRLKDRVQPEILEALLKHISFDKFVQISLKALRRIVPLMEQGKRYNEACAEIYGDHYGKKNTEEKIYLPPIPADEIRNPVVLRALSQARKVINGVVRRYGSPARIHIETAREVGKSFKDRKEIEKRQEENRKDREKAAAKFQEYFPNFVGEPKSKDILKLRLYEQQHGKCLYSGKEINLGRLNEKGYVEIDHALPFSRTWDDSFNNKVLVLGSENQNKGNQTPYEYFNGKDNSREWQEFKARVETSRFPRSKKQRILLQKFDEDGFKERNLNDTRYVNRFLCQFVADRMRLTGKGKKRVFASNGQITNLLRGFWGLRKVRAENDRHHALDAVVVACSTVAMQQKITRFVRYKEMNAFDGKTIDKETGEVLHQKTHFPQPWEFFAQEVMIRVFGKPDGKPEFEEADTPEKLRTLLAEKLSSRPEAVHEYVTPLFVSRAPNRKMSGQGHMETVKSAKRLDEGVSVLRVPLTQLKLKDLEKMVNREREPKLYEALKARLEAHKDDPAKAFAEPFYKYDKAGNRTQQVKAVRVEQVQKTGVWVRNHNGIADNATMVRVDVFEKGDKYYLVPIYSWQVAKGILPDRAVVAYADEEDWTVIDESFRFKFVLYSNDLIKVQLKKDSFLGYFSGLDRATGAISLREHDLEKSKGKDGMHRIGVKTALSFQKYQIDEMGKEIRPCRLKKRPPVR

SEQ ID NO: 352 - protein, 1082 aa, Neisseria meningitidis
  Neisseria meningitidis 96023
MAAFKPNPINYILGLDIGIASVGWAMVEIDEDENPICLIDLGVRVFERAEVPKTGDSLAMARRLARSVRRLTRRRAHRLLRARRLLKREGVLQAADFDENGLIKSLPNTPWQLRAAALDRKLTPLEWSAVLLHLIKHRGYLSQRKNEGETADKELGALLKGVADNAHALQTGDFRTPAELALNKFEKESGHIRNQRGDYSHTFSRKDLQAELILLFEKQKEFGNPHVSGGLKEGIETLLMTQRPALSSDAVQKMLGHCTFEPAEPKAAKNTYTAERFIWLTKLNNLRILEQGSERPLTDTERATLMDEPYRKSKLTYAQARKLLGLEDTAFFKGLRYGKDNAEASTLMEMKAYHAISRALEKEGLKDKKSPLNLSPELQDEIGTAFSLFKTDEDITGRLKDRIQPEILEALLKHISFDKFVQISLKALRRIVPLMEQGKRYDEACAEIYGDHYGKKNTEEKIYLPPIPADEIRNPVVLRALSQARKVINGVVRRYGSPARIHIETAREVGKSFKDRKEIEKRQEENRKDREKAAAKFREYFPNFVGEPKSKDILKLRLYEQQHGKCLYSGKEINLGRLNEKGYVEIDHALPFSRTWDDSFNNKVLVLGSENQNKGNQTPYEYFNGKDNSREWQEFKARVETSRFPRSKKQRILLQKFDEDGFKERNLNDTRYVNRFLYQFVADRMRLTGKGKKRVFASNGQITNLLRGFWGLRKVRAENDRHHALDAVVVACSTVAMQQKITRFVRYKEMNAFDGKTIDKETGEVLHQKTHFPQPWEFFAQEVMIRVFGKPDGKPEFEEADTPEKLRTLLAEKLSSRPEAVHEYVTPLFVSRAPNRKMSGQGHMETVKSAKRLDEGVSVLRVPLTQLKLKDLEKMVNREREPKLYEALKARLEAHKDDPAKAFAEPFYKYDKAGNRTQQVKAVRVEQVQKTGVWVRNHNGIADNATMVRVDVFEKGDKYYLVPIYSWQVAKGILPDRAVVQGKDEEDWQLIDDSFNFKFSLHPNDLVEVITKKARMFGYFASCHRGTGNINIRIHDLDHKIGKNGILEGIGVKTALSFQKYQIDELGKEIRPCRLKKRPPVR

SEQ ID NO: 353 - protein, 1081 aa, Neisseria meningitidis
  Neisseria meningitidis 98008
MAAFKPNPINYILGLDIGIASVGWAMVEIDEDENPICLIDLGVRVFERAEVPKTGDSLAAARRLARSVRRLTRRRAHRLLRARRLLKREGVLQAADFDENGLIKSLPNTPWQLRSAALDRKLTPLEWSAVLLHLIKHRGYLSQRKNEGETADKELGALLKGVANNAHALQTGDFRTPAELALNKFEKESGHIRNQRGDYSHTFSRKDLQAELILLFEKQKEFGNPHVSGGLKEGIETLLMTQRPALSGDAVQKMLGHCTFEPAEPKAAKNTYTAERFIWLTKLNNLRILEQGSERPLTDTERATLMDEPYRKSKLTYAQARKLLGLEDTAFFKGLRYGKDNAEASTLMEMKAYHAISRALEKEGLKDKKSPLNLSPELQDEIGTAFSLFKTDEDITGRLKDRIQPEILEALLKHISFDKFVQISLKALRRIVPLMEQGKRYDEACAEIYGDHYGKKNTEEKIYLPPIPADEIRNPVVLRALSQARKVINGVVRRYGSPARIHIETAREVGKSFKDRKEIEKRQEENRKDREKAAAKFREYFPNFVGEPKSKDILKLRLYEQQHGKCLYSGKEINLGRLNEKGYVEIDHALPFSRTWDDSFNNKVLVLGSENQNKGNQTPYEYFNGKDNSREWQEFKARVETSRFPRSKKQRILLQKFDEDGFKERNLNDTRYVNRFLCQFVADRMRLTGKGKKRVFASNGQITNLLRGFWGLRKVRAENDRHHALDAVVVACSTVAMQQKITRFVRYKEMNAFDGKTIDKETGEVLHQKTHFPQPWEFFAQEVMIRVFGKPDGKPEFEEADTPEKLRTLLAEKLSSRPEAVHEYVTPLFVSRAPNRKMSGQGHMETVKSAKRLDEGVSVLRVPLTQLKLKDLEKMVNREREPKLYEALKARLEAHKDDPAKAFAEPFYKYDKAGNRTQQVKAVRVEQVQKTGVWVRNHNGIADNATMVRVDVFEKAGKYYLVPIYSWQVAKGILPDRAVVAYADEEGWTVIDESFRFKFVLYSNDLIKVQLKKDSFLGYFSGLDRATGAISLREHDLEKSKGKDGMHRIGVKTALSFQKYQIDEMGKEIRLCRLKKRPPVR

SEQ ID NO: 354 - protein, 1082 aa, Neisseria meningitidis
MAAFKPNPINYILGLDIGIASVGWAMVEIDEEENPIRLIDLGVRVFERAEVPKTGDSLAMVRRLARSVRRLTRRRAHRLLRARRLLKREGVLQAADFDENGLIKSLPNTPWQLRAAALDRKLTPLEWSAVLLHLIKHRGYLSQRKNEGETADKELGALLKGVADNAHALQTGDFRTPAELALNKFEKESGHIRNQRGDYSHTFSRKDLQAELILLFEKQKEFGNPHISGGLKEGIETLLMTQRPALSGDAVQKMLGHCTFEPAEPKAAKNTYTAERFIWLTKLNNLRILEQGSERPLTDTERATLMDEPYRKSKLTYAQARKLLGLEDTAFFKGLRYGKDNAEASTLMEMKAYHAISRALEKEGLKDKKSPLNLSPELQDEIGTAFSLFKTDEDITGRLKDRIQPEILEALLKHISFDKFVQISLKALRRIVPLMEQGKRYDEACAEIYGDHYGKKNTEEKIYLPPIPADEIRNPVVLRALSQARKVINGVVRRYGSPARIHIETAREVGKSFKDRKEIEKRQEENRKDREKAAAKFREYFPNFVGEPKSKDILKLRLYEQQHGKCLYSGKEINLGRLNEKGYVEIDHALPFSRTWDDSFNNKVLVLGSENQNKGNQTPYEYFNGKDNSREWQEFKARVETSRFPRSKKQRILLQKFDEDGFKERNLNDTRYVNRFLCQFVADRMRLTGKGKKRVFASNGQITNLLRGFWGLRKVRAENDRHHALDAVVVACSTVAMQQKITRFVRYKEMNAFDGKTIDKETGEVLHQKTHFPQPWEFFAQEVMIRVFGKPDGKPEFEEADTPEKLRTLLAEKLSSRPEAVHEYVTPLFVSRAPNRKMSGQGHMETVKSAKRLDEGVSVLRVPLTQLKLKDLEKMVNREREPKLYEALKARLEAHKDDPAKAFAEPFYKYDKAGNRTQQVKAVRVEQVQKTGVWVRNHNGIADNATMVRVDVFEKGDKYYLVPIYSWQVAKGILPDRAVVQGKDEEDWQLIDDSFNFKFSLHPNDLVEVITKKARMFGYFASCHRGTGNINIRIHDLDHKIGKNGILEGIGVKTALSFQKYQIDELGKEIRPCRLKKRPPVR

SEQ ID NO: 355 - protein, 1082 aa, Neisseria meningitidis
  Neisseria meningitidis alpha275
MAAFKPNPINYILGLDIGIASVGWAMVEIDEDENPICLIDLGVRVFERAEVPKTGDSLAAARRLARSVRRLTRRRAHRLLRARRLLKREGVLQAADFDENGLIKSLPNTPWQLRAAALDRKLTPLEWSAVLLHLIKHRGYLSQRKNEGETADKELGALLKGVADNAHALQTGDFRTPAELALNKFEKESGHIRNQRGDYSHTFSRKDLQAELILLFEKQKEFGNPHVSGGLKEGIETLLMTQRPALSGDAVQKMLGHCTFEPAEPKAAKNTYTAERFIWLTKLNNLRILEQGSERPLTDTERATLMDEPYRKSKLTYAQARKLLGLEDTAFFKGLRYGKDNAEASTLMEMKAYHAISRALEKEGLKDKKSPLNLSPELQDEIGTAFSLFKTDEDITGRLKDRVQPEILEALLKHISFDKFVQISLKALRRIVPLMEQGKRYDEACAEIYGDHYGKKNTEEKIYLPPIPADEIRNPVVLRALSQARKVINGVVRRYGSPARIHIETAREVGKSFKDRKEIEKRQEENRKDREKAAAKFREYFPNFVGEPKSKDILKLRLYEQQHGKCLYSGKEINLGRLNEKGYVEIDHALPFSRTWDDSFNNKVLVLGSENQNKGNQTPYEYFNGKDNSREWQEFKARVETSRFPRSKKQRILLQKFDEDGFKERNLNDTRYVNRFLCQFVADRMRLTGKGKKRVFASNGQITNLLRGFWGLRKVRAENDRHHALDAVVVACSTVAMQQKITRFVRYKEMNAFDGKTIDKETGEVLHQKTHFPQPWEFFAQEVMIRVFGKPDGKPEFEEADTPEKLRTLLAEKLSSRPEAVHEYVTPLFVSRAPNRKMSGQGHMETVKSAKRLDEGVSVLRVPLTQLKLKDLEKMVNREREPKLYEALKARLEAHKDDPAKAFAEPFYKYDKAGNRTQQVKAVRVEQVQKTGVWVRNHNGIADNATMVRVDVFEKGDKYYLVPIYSWQVAKGILPDRAVVQGKDEEDWQLIDDSFNFKFSLHPNDLVEVITKKARMFGYFASCHRGTGNINIRIHDLDHKIGKNGILEGIGVKTALSFQKYQIDELGKEIRPCRLKKRPPVR

SEQ ID NO: 356 - protein, 1082 aa, Neisseria meningitidis
  Neisseria meningitidis ATCC 13091
MAAFKPNPINYILGLDIGIASVGWAMVEIDEEENPIRLIDLGVRVFERAEVPKTGDSLAMARRLARSVRRLTRRRAHRLLRTRRLLKREGVLQAANFDENGLIKSLPNTLWQLRAAALDRKLTPLEWSAVLLHLIKHRGYLSQRKNEGETADKELGALLKGVAGNAHALQTGDFRTPAELALNKFEKESGHIRNQRGDYSHTFSRKDLQAELNLLFEKQKEFGNPHISDGLKEGIETLLMTQRPALSGDAVQKMLGHCTFEPTEPKAAKNTYTTERFIWLTKLNNLRILEQGSERPLTDTERATLMDEPYRKSKLTYAQARKLLELDDIAFFKGLRYGKDNAEASTLMEMKAYHAISRALEKEGLKDKKSPLNLSPELQDEIGTAFSLFKTDEDITGRLKDRIQPEILEALLKHINFDKFVQISLKALRRIVPLMEQGKRYDEACAEIYGDHYGKKNTEEKIDLPPIPADEIHNPVVLRALSQARKVINGVVRRYGSPARIHIETAREVGKSFKDRKEIEKRQEENRKDREKAAAKFREYFPNFVGEPKSKDILKLRLYEQQHGKCLYSGKEINLGRLNEKGYVEIDHALPFSRTWDDSFNNKVLVLGSENQNKGNQTPYEYFNGKDNSREWQEFKARVETSRFPRSKKQRILLQKFDEDGFKERNLNDTRYVNRFLCQFVADRMRLTGKGKKRVFASNGQITNLLRGFWGLRKVRAENDRHHALDAVVVACSTVAMQQKITRFVRYKEMNAFDGKTIDKETGEVLHQKTHFPQPWEFFAQEVMIRVFGKPDGKPEFEEADTPEKLRTLLTEKLSSRPEAVHEYVTPLFVSRAPNRKMSGQGHMETVKSAKRLDEGISVLRVPLTQLKLKDLEKMVNREREPKLYEALKARLEAHKDDPAKAFAEPFYKYDKAGNRTQQVKAMRVEQVQKTGVWVRNHNGIADNATMVRVDVFEKGDKYYLVPIYSWQVAKGILPDRAVVQGKDEEDWQLIDDSFNFKFSLHPNDLVEVITKKARMFGYFASCHRGTGNINIRIHDLDHKIGKNGILEGIGVKTALSFQKYQIDELGKEIRPCRLKKRPPVR

SEQ ID NO: 357 - protein, 1081 aa, Neisseria meningitidis
  Neisseria meningitidis N1568
MAAFKPNPINYILGLDIGIASVGWAMVEIDEEENPIRLIDLGVRVFERAEVPKTGDSLAMARRLARSVRRLTRRRAHRLLRARRLLKREGVLQAADFDENGLIKSLPNTPWQLRAAALDRKLTPLEWSAVLLHLIKHRGYLSQRKNEGETADKELGALLKGVADNAHALQTGDFRTPAELALNKFEKECGHIRNQRGDYSHTFSRKDLQAELNLLFEKQKEFGNPHVSGGLKEGIETLLMTQRPALSGDAVQKMLGHCTFEPAEPKAAKNTYTAERFIWLTKLNNLRILEQGSERPLTDTERATLMDEPYRKSKLTYAQARKLLSLEDTAFFKGLRYGKDNAEASTLMEMKAYHTISRALEKEGLKDKKSPLNLSPELQDEIGTAFSLFKTDEDITGRLKDRIQPEILEALLKHISFDKFVQISLKALRRIVPLMEQGKRYDEACAEIYGDHYGKKNTEEKIYLPPIPADEIRNPVVLRALSQARKVINGVVRRYGSPARIHIETAREVGKSFKDRKEIEKRQEENRKDREKAAAKFREYFPNFVGEPKSKDILKLRLYEQQHGKCLYSGKEINLGRLNEKGYVEIDHALPFSRTWDDSFNNKVLVLGSENQNKGNQTPYEYFNGKDNSREWQEFKARVETSRFPRSKKQRILLQKFDEDGFKERNLNDTRYVNRFLCQFVADRMRLTGKGKKRVFASNGQITNLLRGFWGLRKVRAENDRHHALDAVVVACSTVAMQQKITRFVRYKEMNAFDGKTIDKETGEVLHQKTHFPQPWEFFAQEVMIRVFGKPDGKPEFEEADTPEKLRTLLAEKLSSRPEAVHEYVTPLFVSRAPNRKMSGQGHMETVKSAKRLDEGVSVLRVPLTQLKLKDLEKMVNREREPKLYEALKARLEAHKDDPAKAFAEPFYKYDKAGNRTQQVKAVRVEQVQKTGVWVRNHNGIADNATMVRVDVFEKGDKYYLVPIYSWQVAKGILPDRAVVAYADEEDWTVIDESFRFKFVLYSNDLIKVQLKKDSFLGYFSGLDRATGAISLREHDLEKSKGKDGMHRIGVKTALSFQKYQIDEMGKEIRPCRLKKRPPVR

SEQ ID NO: 358 - protein, 1081 aa, Neisseria meningitidis
  Neisseria meningitidis NM140
MAAFKPNPINYILGLDIGIASVGWAMVEIDEDENPICLIDLGVRVFERAEVPKTGDSLAAARRLARSVRRLTRRRAHRLLRARRLLKREGVLQAADFDENGLIKSLPNTPWQLRSAALDRKLTPLEWSAVLLHLIKHRGYLSQRKNEGETADKELGALLKGVADNAHALQTGDFRTPAELALNKFEKESGHIRNRRGDYSHTFSRKDLQAELDLLFEKQKEFGNPHISDDLKEGIETLLMTQRPALSGDAVQKMLGHCTFEPTEPKAAKNTYTAERFVWLTKLNNLRILEQGSERPLTDTERATLMDEPYRKSKLTYAQARKLLELDDTAFFKGLRYGKDNAEASTLMEMKAYHAISRALEKEGLKDKKSPLNLSPELQDEIGTAFSLFKTDEDITGRLKDRVQPEILEVLLKHISFDKFVQISLKALRRIVPLMEQGKRYDEACAEIYGDHDGKKNTEEKIYLPPIPADEIRNPVVLRALSQARKVINAVVRRYGSPARIHIETAREVGKSFKDRKEIEKRQEENRKDREKAAAKFREYFPNFVGEPKSKDILKLRLYEQQHGKCLYSGKEINLGRLNEKGYVEIDHALPFSRTWDDSFNNKVLVLGSENQNKGNQTPYEYFNGKDNSREWQEFKARVETSRFPRSKKQRILLQKFDEEGFKERNLNDTRYVNRFLCQFVADHMLLTGKGKRRVFASNGQITNLLRGFWGLRKVRAENNRHHALDAVVVACSTVAMQQKITRFVRYKEMNAFDGKTIDKETGEVLHQKTHFPQPWEFFAQEVMIRVFGKPDGKPEFEEADTPEKLRTLLAEKLSSRPEAVHEYVTPLFVSRAPNRKMSGQGHMETVKSAKRLDEGVSVLRVPLTQLKLKDLEKMVNREREPKLYEALKARLEAHKDDPAKAFAEPFYKYDKAGNRTQQVKAVRVEQVQKTGVWVRNHNGIADNATMVRVDVFEKAGKYYLVPIYSWQVAKGILPDRAVVAYADEEGWTVIDESFRFKFVLYSNDLIKVQLKKDSFLGYFSGLDRATGAISLREHDLEKSKGKDGMHRIGVKTALSFQKYQIDEMGKEIRLCRLKKRPPVR

SEQ ID NO: 359 - protein, 1082 aa, Neisseria meningitidis
  Neisseria meningitidis NM220
MAAFKPNPINYILGLDIGIASVGWAMVEIDEEENPIRLIDLGVRVFERAEVPKTGDSLAMARRLARSVRRLTRRRAHRLLRARRLLKREGVLQAADFDENGLIKSLPNTPWQLRAAALDRKLTPLEWSAVLLHLIKHRGYLSQRKNEGETADKELGALLKGVANNAHALQTGDFRTPAELALNKFEKESGHIRNQRGDYSHTFSRKDLQAELILLFEKQKEFGNPHVSGGLKEGIETLLMTQRPALSGDAVQKMLGHCTFEPAEPKAAKNTYTAERFIWLTKLNNLRILEQGSERPLTDTERATLMDEPYRKSKLTYAQARKLLGLEDTAFFKGLRYGKDNAEASTLMEMKAYHAISRALEKEGLKDKKSPLNLSSELQDEIGTAFSLFKTDEDITGRLKDRVQPEILEALLKHISFDKFVQISLKALRRIVPLMEQGKRYDEACAEIYGDHYGKKNTEEKIYLPPIPADEIRNPVVLRALSQARKVINGVVRRYGSPARIHIETAREVGKSFKDRKEIEKRQEENRKDREKAAAKFREYFPNFVGEPKSKDILKLRLYEQQHGKCLYSGKEINLVRLNEKGYVEIDHALPFSRTWDDSFNNKVLVLGSENQNKGNQTPYEYFNGKDNSREWQEFKARVETSRFPRSKKQRILLQKFDEDGFKECNLNDTRYVNRFLCQFVADHILLTGKGKRRVFASNGQITNLLRGFWGLRKVRAENDRHHALDAVVVACSTVAMQQKITRFVRYKEMNAFDGKTIDKETGKVLHQKTHFPQPWEFFAQEVMIRVFGKPDGKPEFEEADTPEKLRTLLAEKLSSRPEAVHEYVTPLFVSRAPNRKMSGAHKDTLRSAKRFVKHNEKISVKRVWLTEIKLADLENMVNYKNGREIELYEALKARLEAYGGNAKQAFDPKDNPFYKKGGQLVKAVRVEKTQESGVLLNKKNAYTIADNGDMVRVDVFCKVDKKGKNQYFIVPIYAWQVAENILPDIDCKGYRIDDSYTFCFSLHKYDLIAFQKDEKSKVEFAYYINCDSSNGRFYLAWHDKGSKEQQFRISTQNLVLIQKYQVNELGKEIRPCRLKKRPPVR

SEQ ID NO: 360 - protein, 1082 aa, Neisseria meningitidis
  Neisseria meningitidis NM233
MAAFKPNPINYILGLDIGIASVGWAMVEIDEEENPIRLIDLGVRVFERAEVPKTGDSLAMARRLARSVRRLTRRRAHRLLRARRLLKREGVLQAADFDENGLIKSLPNTPWQLRAAALDRKLTPLEWSAVLLHLIKHRGYLSQRKNEGETADKELGALLKGVANNAHALQTGDFRTPAELALNKFEKESGHIRNQRGDYSHTFSRKDLQAELILLFEKQKEFGNPHVSGGLKEGIETLLMTQRPALSGDAVQKMLGHCTFEPAEPKAAKNTYTAERFIWLTKLNNLRILEQGSERPLTDTERATLMDEPYRKSKLTYAQARKLLGLEDTAFFKGLRYGKDNAEASTLMEMKAYHAISRALEKEGLKDKKSPLNLSSELQDEIGTAFSLFKTDEDITGRLKDRVQPEILEALLKHISFDKFVQISLKALRRIVPLMEQGKRYDEACAEIYGDHYGKKNTEEKIYLPPIPADKIRNPVVLRALSQARKVINGVVRRYGSPARIHIETAREVGKSFKDRKEIEKRQEENRKDREKAAAKFREYFPNFVGEPKSKDILKLRLYEQQHGKCLYSGKEINLVRLNEKGYVEIDHALPFSRTWDDSFNNKVLVLGSENQNKGNQTPYEYFNGKDNSREWQEFKARVETSRFPRSKKQRILLQKFDEDGFKECNLNDTRYVNRFLCQFVADHILLTGKGKRRVFASNGQITNLLRGFWGLRKVRAENDRHHALDAVVVACSTVAMQQKITRFVRYKEMNAFDGKTIDKETGKVLHQKTHFPQPWEFFAQEVMIRVFGKPDGKPEFEEADTPEKLRTLLAEKLSSRPEAVHEYVTPLFVSRAPNRKMSGAHKDTLRSAKRFVKHNEKISVKRVWLTEIKLADLENMVNYKNGREIELYEALKARLEAYGGNAKQAFDPKDNPFYKKGGQLVKAVRVEKTQESGVLLNKKNAYTIADNGDMVRVDVFCKVDKKGKNQYFIVPIYAWQVAENILPDIDCKGYRIDDSYTFCFSLHKYDLIAFQKDEKSKVEFAYYINCDSSNGRFYLAWHDKGSKEQQFRISTQNLVLIQKYQVNELGKEIRPCRLKKRPPVR

SEQ ID NO: 361 - protein, 1082 aa, Neisseria meningitidis
MAAFKPNPINYILGLDIGIASVGWAMVEIDEDENPICLIDLGVRVFERAEVPKTGDSLAMARRLARSVRRLTRRRAHRLLRARRLLKREGVLQAADFDENGLIKSLPNTPWQLRAAALDRKLTPLEWSAVLLHLIKHRGYLSQRKNEGETADKELGALLKGVADNAHALQTGDFRTPAELALNKFEKESGHIRNQRGDYSHTFSRKDLQAELILLFEKQKEFGNPHVSGGLKEGIETLLMTQRPALSSDAVQKMLGHCTFEPAEPKAAKNTYTAERFIWLTKLNNLRILEQGSERPLTDTERATLMDEPYRKSKLTYAQARKLLGLEDTAFFKGLRYGKDNAEASTLMEMKAYHAISRALEKEGLKDKKSPLNLSPELQDEIGTAFSLFKTDEDITGRLKDRIQPEILEALLKHISFDKFVQISLKALRRIVPLMEQGKRYDEACAEIYGDHYGKKNTEEKIYLPPIPADEIRNPVVLRALSQARKVINGVVRRYGSPARIHIETAREVGKSFKDRKEIEKRQEENRKDREKAAAKFREYFPNFVGEPKSKDILKLRLYEQQHGKCLYSGKEINLGRLNEKGYVEIDHALPFSRTWDDSFNNKVLVLGSENQNKGNQTPYEYFNGKDNSREWQEFKARVETSRFPRSKKQRILLQKFDEDGFKERNLNDTRYVNRFLCQFVADRMRLTGKGKKRVFASNGQITNLLRGFWGLRKVRAENDRHHALDAVVVACSTVAMQQKITRFVRYKEMNAFDGKTIDKETGEVLHQKTHFPQPWEFFAQEVMIRVFGKPDGKPEFEEADTPEKLRTLLAEKLSSRPEAVHEYVTPLFVSRAPNRKMSGQGHMETVKSAKRLDEGVSVLRVPLTQLKLKDLEKMVNREREPKLYEALKARLEAHKDDPAKAFAEPFYKYDKAGNRTQQVKAVRVEQVQKTGVWVRNHNGIADNATMVRVDVFEKGDKYYLVPIYSWQVAKGILPDRAVVQGKDEEDWQLIDDSFNFKFSLHPNDLVEVITKKARMFGYFASCHRGTGNINIRIHDLDHKIGKNGILEGIGVKTALSFQKYQIDELGKEIRPCRLKKRPPVR

SEQ ID NO: 362 - protein, 1082 aa, Neisseria meningitidis
MAAFKPNPINYILGLDIGIASVGWAMVEIDEDENPICLIDLGVRVFERAEVPKTGDSLAMARRLARSVRRLTRRRAHRLLRARRLLKREGVLQAADFDENGLIKSLPNTPWQLRAAALDRKLTPLEWSAVLLHLIKHRGYLSQRKNEGETADKELGALLKGVADNAHALQTGDFRTPAELALNKFEKESGHIRNQRGDYSHTFSRKDLQAELILLFEKQKEFGNPHVSGGLKEGIETLLMTQRPALSGDAVQKMLGHCTFEPAEPKAAKNTYTAERFIWLTKLNNLRILEQGSERPLTDTERATLMDEPYRKSKLTYAQARKLLGLEDTAFFKGLRYGKDNAEASTLMEMKAYHAISRALEKEGLKDKKSPLNLSPELQDEIGTAFSLFKTDEDITGRLKDRIQPEILEALLKHISFDKFVQISLKALRRIVPLMEQGKRYDEACAEIYGDHYGKKNTEEKIYLPPIPADEIRNPVVLRALSQARKVINGVVRRYGSPARIHIETAREVGKSFKDRKEIEKRQEENRKDREKAAAKFREYFPNFVGEPKSKDILKLRLYEQQHGKCLYSGKEINLGRLNEKGYVEIDHALPFSRTWDDSFNNKVLVLGSENQNKGNQTPYEYFNGKDNSREWQEFKARVETSRFPRSKKQRILLQKFDEDGFKERNLNDTRYVNRFLCQFVADRMRLTGKGKKRVFASNGQITNLLRGFWGLRKVRAENDRHHALDAVVVACSTVAMQQKITRFVRYKEMNAFDGKTIDKETGEVLHQKTHFPQPWEFFAQEVMIRVFGKPDGKPEFEEADTPEKLRTLLAEKLSSRPEAVHEYVTPLFVSRAPNRKMSGQGHMETVKSAKRLDEGVSVLRVPLTQLKLKDLEKMVNREREPKLYEALKARLEAHKDDPAKAFAEPFYKYDKAGNRTQQVKAVRVEQVQKTGVWVRNHNGIADNATMVRVDVFEKGDKYYLVPIYSWQVAKGILPDRAVVQGKDEEDWQLIDDSFNFKFSLHPNDLVEVITKKARMFGYFASCHRGTGNINIRIHDLDHKIGKNGILEGIGVKTALSFQKYQIDELGKEIRPCRLKKRPPVR

SEQ ID NO: 363 - protein, 1089 aa, Neisseria sp.
  Neisseria sp. oral taxon 014 str. F0314
MTAFKPNPLNYILGLDIGIASVGWAMVEIDDKENPVRLIDLGVRVFERAEMPKTGDSLAAARRLARSVRRLTRRRAHRLLRARRLLKHEGVLKPEDFDENGLVKPLPYIPKQPRNTPWQLRAAALDRKLTPLEWAAVLLHLVKHRGYLSQRKNEGETDDKELGALLKGVADNTHALQAGNFRTPAELALNKFEKESGHIRNQRGDYSHTFSRKDLQAELVLLFEKQKEFGNPYVSDDLKNGIENLLMTQRPALSGDAIQKMLGHCTFEPAEPKAAKNTYTAERFIWLTKLNNLRILNQGNERPLTDAERTTLMDEPYKKSKLTYAQARKLLDLDDTAFFKGLRYGKDNAESATLMEMKAYHAISRALEKEGLKDKKSPLSLSPELQDEIGTAFSLFKTDEEITGRLKGCLQPEILDALLKHISFDKFVQISLKALRRIVPLMEQGKRYDEACAEIYGDHHGRRNSEETLYLPPIPADEIRNPVVLRALSQARKVINGVGRRYGSPARIHIETAREVGKSFKDRKEIEKRQEENRKDREKAAAEFQEYFPNFVGEPKSKDILKLRLYRQQNCKCLYSGKEINLGRLNEKGYVEIDHALPFSRTWDDSFNNKVLVLGSENQNKGNRTPYEYLNGKDNSREWQEFKARVETSRFPHSKKQRILLQKFDEEGFKERNLNDTRYVNRFLCKFVADHMQLTGKGKRRVFASNGQITNLLRGFWGLRKVRAENDRHHALDAVVVACSTVAMQQRITRFVRYKEMNAFDGKTVDKETGEVLHQKTHFPQPWEFFAQEVMIRVFGKPDGKPELEEADTPEKLRALLAEKLSSRPEAVHEYVAPLFVSRAPNRKMSGQGHMETIKSPKRLDEGISVVRVPLTQLKLKDLEKMVNREREPKLYEALKARLEAHKDDPAKAFAEPFYKQDKAGNRTQQVKAVRIEQVQKTGVWVRNQNGIADNATMVRVDVFEKGGKYYLVPIYSWQVAKGILPDKAIIAFKDEEEWQLIDDSFNFKFPLHPNDLVEVITKKARIFGYFASCHRGTGNINIRIHDLDNKVGKNGILEGIGVKTALSFQKYQIDELGKEIRPCRLKKRPPVR

SEQ ID NO: 364 - protein, 1097 aa, Neisseria wadsworthii
  Neisseria wadsworthii 9715
MKKQPQRYILGLDLGIASVGWALILVDGAENPVGLLDCGVRTFERAEVPKTGDSLALARRQARSVRRLIRRRAHRLLRLRRLLKREGILSAADFNSDGLPNLPIDAWQLRVAGLERKLTNQEWAAVLLHLVKHRGYLSQRKSETQTENKELGRLLAGVAENSKLLSESSEQYRTPAELAVKLFAEQSGHLRNKGGEYTHTFNRLDLQKELHLLFERQYALGNPFASAELQSKVDELLMTQRSALQGEAVLKMLGKCTFEPSEYKAAKNTYSAERFIWLTKLNNLRILYNGEERALDEGDRKKLLDEPYKKAKLTYKQVRSILNLPESAVFKGLRYGKDSDGLKAENGTLMEMKAYHKIRTILDKAGLKGEWENRIRNPEILDKIGTAFSLYKTDEDIQAALADLRLPENVLDALLAGLNFDKFIQLSLKALRNILPLMERGIRYDEACKEVYGDHRALAESKNQVLLPPIPADEIRNPVVLRTLTQARKVINAIIRRYGSPQRVHIETARELGKSKQERDKIDRKNKENQNDRNRLASDIRKHFNFEPTPKDILKLRLYEQQHGKCLYSDLREEKGECLYTGNVIELHRLFEDGYVEIDHALPLSRTWDNSLNNKVLVLKSSNQNKGNKTPYEWLDGANNSRRWREFQARVQGCHFPYVKKQRIQTAKLDSKAEQGFLERNLNDTRYISKFMCQFITANLRLAETSNALMEEVAGENPYWKERKRQRVFAPSGSIIALLRGLWGLKKVREDNDRHHALDAIVVACSTVSMQQKITKAMQRRETLETVDSETGEVKTRIPQPWDFFRQEVMIRVFSDSPREELAEKLNSRPEALHDFVSPLFVSRAPNRKMTGQGHLETVKSAKRLSENISVVRKPLTALKLKDIENIVGYPDREPALYQALRERLLAHKDDPVKAFADKPFYKPAKDGGQGSLVKAVRIIENTKHGLKIRNGITDTNGDMVRTDVYQKTDKKGKRQYFIVPVYAWQVEKNELPTVDCKGYEIDDNYEFCFSLYKYDLIEIQNPNDINQELRAYYINCDSSDGRFWLAYHDKSAKEQQFRISTQNQPIIKKYQVDTLGKEIRLCKAEKRTALNGKKKK

SEQ ID NO: 365 - protein, 1426 aa, Niabella soli
  Niabella soli DSM 19437
MPRKNILGLDLGTTSIGFAKIIEDDDYQCSSVELIGVRVNPLTTDEQTNFEKGKPVSVNADRTLKRGMRRNLDRYQLRRDYLIEILRTHHIITADTKLAEDGKNTTHTTYALRALAATAEIPLEAFVRVLLAINKKRGYKSSRKAKNEDEGQLIDGMAIARRLYEESLTPGQFSYQLLKEGKKYLPDFYRSDLNTELNKVWNFQKQFYPEILTDEFKRHLEGKGQRATAVAFWGQHGFSMAENKGSREEKKLHAYKWRSEAAHKQLTKEEVAFVITEINNDLNKSSGYLGAISDRSKELFFNKQTVGQYLHQQLKENPHTRLKGQVFYRQDYLDEFETIWEMQAKFYSALTLELKEEVRDVVIFYQRKLKSQMGLISLCEFESKEIEIEKNGEKAKKRIGLRVAPKSSPLFQEFKIWQVLNNLEFRNKKTKEVFVPEMAAKQQLFDELNIKGNLLASEAIKILGYKTKDWEANYHTLEGNRTNKSLYDAWLKILELEGYDENLLKLSGSDDIDVSKIEKPALEIRQMVLAVFEVLGISGAILDFDAEADGKAFEQQPAYQLWHLLYSAEDDGKKYSQEDIFTYGHDNIGLKKKLCEKFGFRPEHTKILVNVVFSDDYGNLSSKAMRRIYPFIKELTYDKACAEAGYRHSAASLTKEEIAARPLQNRLDLLKKNELRSPVVEKILNQMVNVVNTLVDDENQNRKARGLSEDFHFDEIRIELARELKKNAKERAEMTTNINTAKQSHEKIIRILQTEFGVPNPSRNDIVRYKLYEELKNNGYKDLYTNTYISRDILFSKQIDVDHIIPQMSLFDDSFSNKTVVFRKDNQDKGNKTAYDYILGKYGEQALEEYISRITSLFELGKKNKEEGIGKAKFQKLQKRLVDIGDGFIERDLRESQYIAKKANNMLYAICRSVVSTSGEITARLREDWDLVNVMQEINLPKFRALGLTEMVEKKDGAQKERITDWTKRNDHRHHAMDALAIAFTRHSHIQYLNHLNARKDEANKWHPVVSKIEEKETVLIYDDLGNRKRKFKAPMPNFREVVKEHLENVLISHKAKNKVVTKNKNKIKTVRGEKVKTELTPRGQLHKETIYGRYRYYESKEEKIGPKFDAEMIGMVTNPQYKKLLLERLAANGNDPKKAFWGKNALNKNPLYVDEARQELLPEKILLRWLNDDYSIRKDVTPENLKDIKTIEKILDKGVKKILLKRLADFGNDPKKAFSDLDKNPIWQNEAKRIAIKRVTISGIKNAAPLHHKKDHLGNDILDEKGKQIPSSFVSTGNNHHVAIYRDAEGNLQERVVSLFDAVQLVNGGEPVIDKEYNKGIGWQFLFTMKQNEMFVFPDEKTGFNPREVDLLSSGNRKLISPNLFRVQKLASKNYFFRHHLETSVEEKKELKNIAYKPQLGLNALSNIVKVRINHIGEIVSVGEY

SEQ ID NO: 366 - protein, 1132 aa, Nitratifractor salsuginis
MKKILGVDLGITSFGYAILQETGKDLYRCLDNSVVMRNNPYDEKSGESSQSIRSTQKSMRRLIEKRKKRIRCVAQTMERYGILDYSETMKINDPKNNPIKNRWQLRAVDAWKRPLSPQELFAIFAHMAKHRGYKSIATEDLIYELELELGLNDPEKESEKKADERRQVYNALRHLEELRKKYGGETIAQTIHRAVEAGDLRSYRNHDDYEKMIRREDIEEEIEKVLLRQAELGALGLPEEQVSELIDELKACITDQEMPTIDESLFGKCTFYKDELAAPAYSYLYDLYRLYKKLADLNIDGYEVTQEDREKVIEWVEKKIAQGKNLKKITHKDLRKILGLAPEQKIFGVEDERIVKGKKEPRTFVPFFFLADIAKFKELFASIQKHPDALQIFRELAEILQRSKTPQEALDRLRALMAGKGIDTDDRELLELFKNKRSGTRELSHRYILEALPLFLEGYDEKEVQRILGFDDREDYSRYPKSLRHLHLREGNLFEKEENPINNHAVKSLASWALGLIADLSWRYGPFDEIILETTRDALPEKIRKEIDKAMREREKALDKIIGKYKKEFPSIDKRLARKIQLWERQKGLDLYSGKVINLSQLLDGSADIEHIVPQSLGGLSTDYNTIVTLKSVNAAKGNRLPGDWLAGNPDYRERIGMLSEKGLIDWKKRKNLLAQSLDEIYTENTHSKGIRATSYLEALVAQVLKRYYPFPDPELRKNGIGVRMIPGKVTSKTRSLLGIKSKSRETNFHHAEDALILSTLTRGWQNRLHRMLRDNYGKSEAELKELWKKYMPHIEGLTLADYIDEAFRRFMSKGEESLFYRDMFDTIRSISYWVDKKPLSASSHKETVYSSRHEVPTLRKNILEAFDSLNVIKDRHKLTTEEFMKRYDKEIRQKLWLHRIGNTNDESYRAVEERATQIAQILTRYQLMDAQNDKEIDEKFQQALKELITSPIEVTGKLLRKMRFVYDKLNAMQIDRGLVETDKNMLGIHISKGPNEKLIFRRMDVNNAHELQKERSGILCYLNEMLFIFNKKGLIHYGCLRSYLEKGQGSKYIALFNPRFPANPKAQPSKFTSDSKIKQVGIGSATGIIKAHLDLDGHVRSYEVFGTLPEGSIEWFKEESGYGRVEDDPHH

SEQ ID NO: 367 - protein, 1166 aa, Nitrobacter hamburgensis
MHVEIDFPHFSRGDSHLAMNKNEILRGSSVLYRLGLDLGSNSLGWFVTHLEKRGDRHEPVALGPGGVRIFPDGRDPQSGTSNAVDRRMARGARKRRDRFVERRKELIAALIKYNLLPDDARERRALEVLDPYALRKTALTDTLPAHHVGRALFHLNQRRGFQSNRKTDSKQSEDGAIKQAASRLATDKGNETLGVFFADMHLRKSYEDRQTAIRAELVRLGKDHLTGNARKKIWAKVRKRLFGDEVLPRADAPHGVRARATITGTKASYDYYPTRDMLRDEFNAIWAGQSAHHATITDEARTEIEHIIFYQRPLKPAIVGKCTLDPATRPFKEDPEGYRAPWSHPLAQRFRILSEARNLEIRDTGKGSRRLTKEQSDLVVAALLANREVKFDKLRTLLKLPAEARFNLESDRRAALDGDQTAARLSDKKGFNKAWRGFPPERQIAIVARLEETEDENELIAWLEKECALDGAAAARVANTTLPDGHCRLGLRAIKKIVPIMQDGLDEDGVAGAGYHIAAKRAGYDHAKLPTGEQLGRLPYYGQWLQDAVVGSGDARDQKEKQYGQFPNPTVHIGLGQLRRVVNDLIDKYGPPTEISIEFTRALKLSEQQKAERQREQRRNQDKNKARAEELAKFGRPANPRNLLKMRLWEELAHDPLDRKCVYTGEQISIERLLSDEVDIDHILPVAMTLDDSPANKIICMRYANRHKRKQTPSEAFGSSPTLQGHRYNWDDIAARATGLPRNKRWRFDANAREEFDKRGGFLARQLNETGWLARLAKQYLGAVTDPNQIWVVPGRLTSMLRGKWGLNGLLPSDNYAGVQDKAEEFLASTDDMEFSGVKNRADHRHHAIDGLVTALTDRSLLWKMANAYDEEHEKFVIEPPWPTMRDDLKAALEKMVVSHKPDHGIEGKLHEDSAYGFVKPLDATGLKEEEAGNLVYRKAIESLNENEVDRIRDIQLRTIVRDHVNVEKTKGVALADALRQLQAPSDDYPQFKHGLRHVRILKKEKGDYLVPIANRASGVAYKAYSAGENFCVEVFETAGGKWDGEAVRRFDANKKNAGPKIAHAPQWRDANEGAKLVMRIHKGDLIRLDHEGRARIMVVHRLDAAAGRFKLADHNETGNLDKRHATNNDIDPFRWLMASYNTLKKLAAVPVRVDELGRVWRVMPN

SEQ ID NO: 368 - protein, 1044 aa, Nitrosomonas sp.
  Nitrosomonas sp. AL212
MLHKMRYRLALDLGSTSLGWAMVRLNANQQPCAVIKAGVRIFSNGRNPKDGSSLAVTRREARSMRRRRDRLLKRKARMMRTLIEYGFFPANETQRKALENLNPYALRAKGLDEALTPSEFARALFHINQRRGFKSNRKTDKKDSDSGALKTAIKQLHSVLDPQGNDGKPRTVGELLYKRFTDLSKLPKDRTVRARYRQDKIVKDDGKTKIDKYYDLYIDRAMIEQEFDALWKKQSELNPILFTENARADLKDVLLYQRSLKPVKPGRCTFMSEEERAPLALPSTQRFRMYQEVNNLRILREGLKEESLTLQQRDDLINALEKNNRRTFTQIKKLLGVGGSVQFNFEDPKREELKGNTTSAILGKSEHFGEAWFAFNEAKQDAIVLQLIKEENEAKLVRWLQDETGIDEKRAEVIANAGLPEGYGSLCIEALARILPELRRDVVTYDKAVQAAGFEHHSKLNRNEEIPDITFKIESIDRNSGEIKQFHLHKELPYYGEYLQRHVGFGSGKPEDSIEKRYGKIANPTVHIGLNQVRVVVNALIKRYGHPSEIIVEVARDLKQSKDRRDEENKRQAENQKRNERLRKDIADILGISEERVRRDDIEKMILWEELSFDPADRRCPYSGVQVSTVMLLSDEVEVEHILPFSQTLDDSLNNKTVALRQANRIKGNRTPWEAFGTSNISGFDYSGILTRAELMPKAKRYRFAEDGYQRWLKDDAGFLARALNDTRHLSKIAREYMSLICPNTRVIPGQMTAMLRRNFGLNDVLGLNGEKNRNDHRHHAVDACVIAVTDQGLLQRFAAASASARERQLNRLVENMPLPWESYREHVRRAIDGIWVSHRPDHSHEGAMHNDTAYGLRGNGRVSFHKMVEGKREYIEDNLKVIEITDTKAIDRHGLLPTGKPRPYKGYKGDSNYCIEIVRNEKGRWEGEIISTFDAYQLVRKYGIVQLRYPVLSVSGKPLVMRLIRNDFVRLEHEGITRTLRVCKMREDGQVALADVTEANVDARTRTKEICYVFKTGGSLQKAKARRITISPIGELRDPGFKE

SEQ ID NO: 369 - protein, 1498 aa, Odoribacter laneus
  Odoribacter laneus YIT 12061
METTLGIDLGTNSIGLALVDQEEHQILYSGVRIFPEGINKDTIGLGEKEESRNATRRAKRQMRRQYFRKKLRKAKLLELLIAYDMCPLKPEDVRRWKNWDKQQKSTVRQFPDTPAFREWLKQNPYELRKQAVTEDVTRPELGRILYQMIQRRGFLSSRKGKEEGKIFTGKDRMVGIDETRKNLQKQTLGAYLYDIAPKNGEKYRFRTERVRARYTLRDMYIREFEIIWQRQAGHLGLAHEQATRKKNIFLEGSATNVRNSKLITHLQAKYGRGHVLIEDTRITVTFQLPLKEVLGGKIEIEEEQLKFKSNESVLFWQRPLRSQKSLLSKCVFEGRNFYDPVHQKWIIAGPTPAPLSHPEFEEFRAYQFINNIIYGKNEHLTAIQREAVFELMCTESKDFNFEKIPKHLKLFEKFNFDDTTKVPACTTISQLRKLFPHPVWEEKREEIWHCFYFYDDNTLLFEKLQKDYALQTNDLEKIKKIRLSESYGNVSLKAIRRINPYLKKGYAYSTAVLLGGIRNSFGKRFEYFKEYEPEIEKAVCRILKEKNAEGEVIRKIKDYLVHNRFGFAKNDRAFQKLYHHSQAITTQAQKERLPETGNLRNPIVQQGLNELRRTVNKLLATCREKYGPSFKFDHIHVEMGRELRSSKTEREKQSRQIRENEKKNEAAKVKLAEYGLKAYRDNIQKYLLYKEIEEKGGTVCCPYTGKTLNISHTLGSDNSVQIEHIIPYSISLDDSLANKTLCDATFNREKGELTPYDFYQKDPSPEKWGASSWEEIEDRAFRLLPYAKAQRFIRRKPQESNEFISRQLNDTRYISKKAVEYLSAICSDVKAFPGQLTAELRHLWGLNNILQSAPDITFPLPVSATENHREYYVITNEQNEVIRLFPKQGETPRTEKGELLLTGEVERKVFRCKGMQEFQTDVSDGKYWRRIKLSSSVTWSPLFAPKPISADGQIVLKGRIEKGVFVCNQLKQKLKTGLPDGSYWISLPVISQTFKEGESVNNSKLTSQQVQLFGRVREGIFRCHNYQCPASGADGNFWCTLDTDTAQPAFTPIKNAPPGVGGGQIILTGDVDDKGIFHADDDLHYELPASLPKGKYYGIFTVESCDPTLIPIELSAPKTSKGENLIEGNIWVDEHTGEVRFDPKKNREDQRHHAIDAIVIALSSQSLFQRLSTYNARRENKKRGLDSTEHFPSPWPGFAQDVRQSVVPLLVSYKQNPKTLCKISKTLYKDGKKIHSCGNAVRGQLHKETVYGQRTAPGATEKSYHIRKDIRELKTSKHIGKVVDITIRQMLLKHLQENYHIDITQEFNIPSNAFFKEGVYRIFLPNKHGEPVPIKKIRMKEELGNAERLKDNINQYVNPRNNHHVMIYQDADGNLKEEIVSFWSVIERQNQGQPIYQLPREGRNIVSILQINDTFLIGLKEEEPEVYRNDLSTLSKHLYRVQKLSGMYYTFRHHLASTLNNEREEFRIQSLEAWKRANPVKVQIDEIGRITFLNGPLC

SEQ ID NO: 370 - protein, 1389 aa, Oenococcus kitaharae
  Oenococcus kitaharae DSM 17330
MARDYSVGLDIGTSSVGWAAIDNKYHLIRAKSKNLIGVRLFDSAVTAEKRRGYRTTRRRLSRRHWRLRLLNDIFAGPLTDFGDENFLARLKYSWVHPQDQSNQAHFAAGLLFDSKEQDKDFYRKYPTIYHLRLALMNDDQKHDLREVYLAIHHLVKYRGHFLIEGDVKADSAFDVHTFADAIQRYAESNNSDENLLGKIDEKKLSAALTDKHGSKSQRAETAETAFDILDLQSKKQIQAILKSVVGNQANLMAIFGLDSSAISKDEQKNYKFSFDDADIDEKIADSEALLSDTEFEFLCDLKAAFDGLTLKMLLGDDKTVSAAMVRRFNEHQKDWEYIKSHIRNAKNAGNGLYEKSKKFDGINAAYLALQSDNEDDRKKAKKIFQDEISSADIPDDVKADFLKKIDDDQFLPIQRTKNNGTIPHQLHRNELEQIIEKQGIYYPFLKDTYQENSHELNKITALINFRVPYYVGPLVEEEQKIADDGKNIPDPTNHWMVRKSNDTITPWNLSQVVDLDKSGRRFIERLTGTDTYLIGEPTLPKNSLLYQKFDVLQELNNIRVSGRRLDIRAKQDAFEHLFKVQKTVSATNLKDFLVQAGYISEDTQIEGLADVNGKNFNNALTTYNYLVSVLGREFVENPSNEELLEEITELQTVFEDKKVLRRQLDQLDGLSDHNREKLSRKHYTGWGRISKKLLTTKIVQNADKIDNQTFDVPRMNQSIIDTLYNTKMNLMEIINNAEDDFGVRAWIDKQNTTDGDEQDVYSLIDELAGPKEIKRGIVQSFRILDDITKAVGYAPKRVYLEFARKTQESHLTNSRKNQLSTLLKNAGLSELVTQVSQYDAAALQNDRLYLYFLQQGKDMYSGEKLNLDNLSNYDIDHIIPQAYTKDNSLDNRVLVSNITNRRKSDSSNYLPALIDKMRPFWSVLSKQGLLSKHKFANLTRTRDFDDMEKERFIARSLVETRQIIKNVASLIDSHFGGETKAVAIRSSLTADMRRYVDIPKNRDINDYHHAFDALLFSTVGQYTENSGLMKKGQLSDSAGNQYNRYIKEWIHAARLNAQSQRVNPFGFVVGSMRNAAPGKLNPETGEITPEENADWSIADLDYLHKVMNFRKITVTRRLKDQKGQLYDESRYPSVLHDAKSKASINFDKHKPVDLYGGFSSAKPAYAALIKFKNKFRLVNVLRQWTYSDKNSEDYILEQIRGKYPKAEMVLSHIPYGQLVKKDGALVTISSATELHNFEQLWLPLADYKLINTLLKTKEDNLVDILHNRLDLPEMTIESAFYKAFDSILSFAFNRYALHQNALVKLQAHRDDFNALNYEDKQQTLERILDALHASPASSDLKKINLSSGFGRLFSPSHFTLADTDEFIFQSVTGLFSTQKTVAQLYQETK

SEQ ID NO: 371 - protein, 1389 aa, Oenococcus kitaharae; identical to SEQ ID NO: 370
  Oenococcus kitaharae DSM 17330

SEQ ID NO: 372 - protein, 1399 aa, Olsenella uli
MNLRNTTDEYNIGLDMGTNSVGWAVTDKAGAIAHFKGKPTLGSRLFDAAQTAAGARIHRSQRRRYVRRRWRLDLLQSLFQDEVSKVDSEFFCRLRQSRLYVGDREKGHADYTWPIFNDSDFNEVDYYKRFPTIYHLRKWLMETDEKADIRLIYLATHNIVKHRGNFLRENNKSLSSRDANPAQAVKSLRLALNDWCSERDYECAWKGEEDDGAIDEAILNVLADGEKGRSDQAKEIAKLTGVDCGDAKQSKQCNEAIAKAIVGLKVEMKNIFGEFPAEKTSYIYLSSDEDVEAVRESCPDDSGELFQALCKLYSAYILQELLSYADPSGQTISANMVAKYKQYGRDLRLLKELTRTYAPQKYDLFFRGETYAGSSDYVVDEARGYTRYNLGTTKANYDDFQKSVKELFKGTDALQDERYQEMMVAFGEQKFLRRLKTSDNGSIYYQLHLEELHTILENQGKHYPFLLSEEDKIESLVSFRIPYYVGPLTRKNAAIGHDGKERFAWSSRKDGMEHAVITPWNWEEIIDRDKSAEDFIMRMTGDCTYLQGEPVLPKCSLLYEEFCALNEFNGAHWTVDGDDERRFDAAQRERIMCDLFRRTRSVTYNKVSDWLERKYNFTGARVRGGQGEHGFESKLGSYIFFCKDVFKTDGLDEADYTMIEQIILWSTLFEDRDILKRKIEEAYGGDRLTSEQIKVICKKRFTGWGRLSKRLLTDIKVNTDTGRKSIMDVLREGNPNNGQRSRTMVFMEVLRDEDLGFQKAIDGLNRDYFREHNNGLMDVNDLPGSPAIRRSINQAVRIVDEIASIARKEPTNIFIEVTREEDDPRKKGKRTKRRYDAIKSALEKFKKDDPSLWKELCEKAPGDMDERLSLYFMQRGKCMYSGRPIKIEELHTGKYEVDHIIPRSYIKDDSFENKVLVYREENQHKTDALLIDSSIRQKMGGYWRMLHDAKLVGDKKFRNLFRNHIDDKAMKGFVARQIVETSQMVKLVQTLFEARYPNTRIVPVKAGISHDLREAAGLVKCREANDFHHAHDAFLACRIGLFIQKRHPSVYDNPIGLARIMRDYARMQAREYKKSHCLAHTQGFIVNSFLSSGFDEETGEIFKDDWDAKAEVEGIRRVLNCRQCFISRMPVEGDTRYGGRYWGETIYSPKGKHKHEIPLKQGLDPNLYGGYSDLLYSYFLIYEASDVSSGERVLRFIGIPTSIAARMANQKRLEEYVSRLALQENLEHVRMVRKIMKKQLIEVDNCRLLVTAADAVTNATELAFSLDEMKIISTCAKCINGADPSAIDKIGNAQDSFFDNLKRRGSDRCALLFSQLKLDKLSQNFYMISSDDKSKILISILDRIRAKSNSVDLSLVGGAKHAAQMKFDFNAKLNNPASSFVLIDQSVTGMFERRTRIGL

SEQ ID NO: 373 - protein, 1535 aa, Ornithobacterium rhinotracheale
MNTILGLDLGTNSIGWALIKVLNDKTRLPLEIIDLGVVVIPTDQRTLDKFSKGESISKTAERTKQKGVRKLYERKKLRRERLHRVLNILGFLPEHYSKKIDFKKHLGQFFGNSQPKISYVENDHGKHEFIFMDSYREMLKEFSKHNIKNVPYDWTIYYLRKKALSQKISKEELAWVILNFNKKRGYYQFRDDNADENKENKIEKYYALKVTNVKKEDAQNYTITLENGWIYKNKSKISLLDWVGSTKEFISTEKFDNKGNIIKKKNGEDDRTLKLVDSEKDWIAIKKSTEDRIENYGKTVGTYLYEHLLKDPNQKLNGELINIIDRKFYKNELKQILEKQKEFHPELLNEDLFQKSIIELYPKNSTRQKELKNKDLCYLLIDDVIYYQRDLKKKNSTINKCSFESREYYLNGEKQIQKINCIAKSKPLYQEFRTLQFIKNLKVYEIIDGLEKDITSKLLPDFETKEHFFEWLNDKEKIDQLQLLSYKCFDLHDNVKNDLIAKGIKRPTEKAIRTELLEKYRWNYSKDNDRNFLLNETRFKILKYLKKVDKKLTLTNEQIESLWLLLYSAKDERELKNGLQKFSEKNKLPKKFSDIFISFPPFKKEYGAYSEKALKKLLSLVRFGKYWSFNKIDNNIQNKIMNILNGEVDDSISDRVREKTILLQDKNDFQDLPLWLASYVAYNRFSEVSEIKYWDSPDKIEFLKQHSIGNPIVEKIINETLKLIKDIWVIHGKSCKNFFSEIHIELSREIKSSSKKRAQITNNNTKNQKLNNLIKSLLIEMASDTKYENVTPYSPSQQEILKIYDEGIYSKEENSEKIKEINKIRNNNKISKSDITKYKLWLEQGYISPYTGKIIPLTKLFTAKYQKEHIIPQTKFFDDSFNNKVICEAEVNKLKDNSLAMNFIKAKGGKAVKLSDGETVTILNQEEYKQLVRTSFKKNSIKLRNLLLEEIPDTFTKRQLNDTKYISKLVLSLLSNIVREKGELESTAKRIVSTNGQITSILRNDWGLNNIWNKLITPRFERLNNINKNKIYGNWENKKGKNVFQINYLNDNLSTLNTKRIDHRHHALDALIVACTTRNHINFLNNQYAKSRNQRHDLRAKLKRRETITTEGSKKQVFKDFIKPWESFTQDALKKLETTIVNFKVNKRIINKTINWYKKWEKQKDGTYKKIQKKQTKGDAWAIRKPLHIDTIYGIVCKKLPLKSALENYKNIIDENLKHKIKELKEVNKFDNNQIINFFKECNFIFEDNNIQKVEVYDFKDNRDKTILSSSRQLIDESFTPKKIGKVLDPTIRNILLKHLNSTKYNNKFDSDGNPIKPEKLAFSPEGLKDLNKNIKHLNNNKEHQPIKRVKLFETLGNKIKVGYTQQKNKKFAETATGTNLFLGIYSDNNKRDFKTIPLILAIQREKEGLNPCPDTDEKGNQLLFSLSPNELVFVPNNEERKNPNLVDFENLSKDQIDRIYKFVSCTGSEAYFVPSRTAKPIIENENGTNNKSQRIIEFNEKTSIKNEKNEPVLIKTICWKIEVNRLGKIIKVIK

SEQ ID NO: 374 - protein, 1443 aa, Parabacteroides johnsonii
  Parabacteroides johnsonii DSM 18315
MIKLLYLEKLKQYTMKKILGLDLGTSSIGWALVNEAENSDEVSSIIKLGVRVNPLTVDEMQNFEKGKSITTNADRTLKRSMRRNLQRYKLRRDALIELLKKVGFITDKTILSEQGNRTTFETYRLRAKAAEEEISLKELARVLLMINKKRGYKSSRKAKGEEEGALIDGMEIAKKLYDEDLTPGQLCLQLLESGKKFFPDFYRSDLQEEFNKIWDFQKQFNLFSFCDVAKEEVKGKNKSQTWAILAKYFVETKKVNVWNEHEAQTENREEVYKLVGLKRTVKGEELKKENYRWRVQALTEQLDLEKIAVVLQEINGQISASSGYLGAISDRSKVLYFNRQTVGQYQMAELNKNPNMSLRNMVFYRQDYLDEFNVIWEKQAEFHKELTPELKKEIRDIIIFYQRRLKSQKGLISFCEFENREVVVEKEGKKQTKIIGCKVIPRSHPLFQEFKIWQTLNNIEVFVGEKKGKRKKSNVSSDLFGDTEDALITEGRRFLYQEEKKILAKELSIKKGLTKAEILRLLFENPQELDINFKQIDGNQTGFALFSAYSNMIEKYGYEPLDFKKPAEDLISQLKTVFTDLGWNTDLLFIDLDKENKEWEKQPYFRLWHLLYSFEGDNTPTGNGKLIEKIMQLCGIEKEYAIELANVSLQDDYGSLSAKAIKKILLYLKEGNQYDMACEYAGYRHSKSSLTKEEIENKVLKDKLEILPKNSLRNPVVEKILNQMVNVINTVMEVYGRPDEIRVELARELKKSAKEREELTKAVAKNTREHEEIRKVLQSEFGMINVSRNDIIRYKLYEELKDNGYKTLYSNQYIPREKLFSKEIDIEHIIPQSRLFDDSLSNKTLEYKSINIEKGNKTAYDFVKEKYGEEGLQQYLNRCENLCKDKKAKLRKLKMELNEIPDGFIDRDLRNTQYIAKKALSMLTEICRRVVATTGSITDKLREDWQLVDVMKELNLPKYEALGLVEVYEDKDGRKIKRIKDWTKRNDHRHHAMDALTVAFTKDVFIQYFNNKNAAWESDSKEHTNIVGIKTRYFESGKAVPPIPLGQFRVEAKCHLENLLVSIKAKNKVVTTNVNCIKKKGGTYKNTQQTPRGQLHLETIYGSHNQYVTKIEKVNASFDAVKIATVSKQDYRNALLKRLEVFGNDPKKAFTGKNSLEKNPIYLDRAQTIQVPDKVQTVELETAYTIRKPVDPTLNVDKVVDKKIRLILEQRLKEYGGDAKKAFVNLDENPIWLNEEKGISIKRVTIRGISKAQALHDKKDKDGNFILDETGKRIPVDFVNTGNNHHVAIYRKPVLDKKGQVIFDDEGNPMYELDEDVVPFFEAVTRANLGIPIIDKDYKKSEGWQFLFSMKQNEYFVFPNEKTGFNPKEVDLLDPDNYAMISPNLFRVQKIGLNDYTFRHHLETTIQNDLKFITWIRCGKSGIKDIVKVRINHIGQIVSVGEY

SEQ ID NO: 375 - protein, 1424 aa, Parabacteroides sp.
  Parabacteroides sp. D13
MKRILGLDLGTNSIGWALVNEAETDEEVSSIIRLGVRVNPLTVDETQNFEKGKSITTNAERTLKRSMRRNLQRYKLRRDALVEFLKELGFITDETILSEQGNRTTFETCRLRAKAAEEEISLEELSRVLLMINKKRGYKSSRKVKKEEDGVLIDGMEIAKKLYEEDLTPGQLCSQLLESGKKVLPDFYRSDLQEELDRIWSVQKQFHPDVFCDAAKEEIKGKNRSQTWAILANYFVWKEEVVGWNDREAKNETIEKECKLVGLKRTTKGYELKKENYRWRAQALTEQLGLEEIAVVLQEINGQINASSGYLGAISDRSKVLYFNHQTVGQYQMAELDKNPHASLRNMVFYRQDYLDEFDRIWEKQAEFHKELTAELKKEIRDMIIFYQRRLKSQKGLISFCEFERLEIVVEKDGKKQTKVIGCKVIPRSHPLFQEFKVWQTLNDIKVLGREKKRNALSASESRALYPEEKEILARELAIKENMKKADVLKLLFENPQELDLNFKQIDGNRTGFSLFSAYSKMIEKYGYEPLDFKKPADEIIGQLRTIFTDLGWNTNLFTIDLTKEGKELEMQPYFRLWHLLYSFEGDNTSTGNGKLIEKIMQLCGVEKEYAVELASLSFQDDYGSLSAKAIKRILPYLKEGNLYDVACEYAGYRHSKSSLTKEEIENKVLKGKLEVLPKNSLRNPVVEKILSQMVNVINTIIDTYGKPDEIRVELARELKKSAKEREELTKAIAKSTREHEEIRKLLQDEFGMMNVSRNDIIRYKLYEELKDNGYKTLYSNQYIPKEKIFSKEIDIEHIIPQSRLFDDSLSNKTLEYKAINIEKGNKTAYDFVKEKYGEEGLQQYINRCESLFNDKKAKLRKLKMEQKDIPDGFIDRDLRNTQYIAKKALAMLNEICRRVVATTGSITDQLREDWQLVDVMKELNLPKYEALGFVETYEDKDGRKIKRIKDWTKRNDHRHHAMDALTVAFTKDAFIQYFNNKNAAQDSGNRNHTNIIGIKTRYFDKGRALPPIPLEQFRIEAKQHLEKLLVSIKAKNKVVTVNVNRTKKRKGENTKIQQTPRGQLHLETVYGSHKQYVTKIEKVNASFDAAKIATVSKRAYRNALLKRLETFGNDPKKAFTGKNALEKNPLYADKYQTIRVPEKVQTVEFETIYTIRKPVDPALNVDKVVDVKVRAILERRLKEYGGDPKKAFVNFWENPIWLNKEKGISIKRVSIRGINNAQSIHVKKDKNGNPIWDENGKQIPVDFVNTGNNHHVAIYRKPVLDKKGQVTFDEDGNLMYELDEVVVPFFEAVTRANLGLPIIDKDYRKSEGWQFLFSMKQNEYFVFPNEKTGFNPKEVDLLNPDNYAMISPNLFRVQTMSKVMYGNNVVRDYKFRHHLETTVKDMKELKDIAYKQYKTLSFGNSVVKIRINHIGQIVSVGEY

SEQ ID NO: 376 - protein, 1428 aa, Parasutterella excrementihominis
  Parasutterella excrementihominis YIT 11859
MGKTHIIGVGLDLGGTYTGTFITSHPSDEAEHRDHSSAFTVVNSEKLSFSSKSRTAVRHRVRSYKGFDLRRRLLLLVAEYQLLQKKQTLAPEERENLRIALSGYLKRRGYARTEAETDTSVLESLDPSVFSSAPSFTNFFNDSEPLNIQWEAIANSPETTKALNKELSGQKEADFKKYIKTSFPEYSAKEILANYVEGRRAILDASKYIANLQSLGHKHRSKYLSDILQDMKRDSRITRLSEAFGSTDNLWRIIGNISNLQERAVRWYFNDAKFEQGQEQLDAVKLKNVLVRALKYLRSDDKEWSASQKQIIQSLEQSGDVLDVLAGLDPDRTIPPYEDQNNRRPPEDQTLYLNPKALSSEYGEKWKSWANKFAGAYPLLTEDLTEILKNTDRKSRIKIRSDVLPDSDYRLAYILQRAFDRSIALDECSIRRTAEDFENGVVIKNEKLEDVLSGHQLEEFLEFANRYYQETAKAKNGLWFPENALLERADLHPPMKNKILNVIVGQALGVSPAEGTDFIEEIWNSKVKGRSTVRSICNAIENERKTYGPYFSEDYKFVKTALKEGKTEKELSKKFAAVIKVLKMVSEVVPFIGKELRLSDEAQSKFDNLYSLAQLYNLIETERNGFSKVSLAAHLENAWRMTMTDGSAQCCRLPADCVRPFDGFIRKAIDRNSWEVAKRIAEEVKKSVDFTNGTVKIPVAIEANSFNFTASLTDLKYIQLKEQKLKKKLEDIQRNEENQEKRWLSKEERIRADSHGICAYTGRPLDDVGEIDHIIPRSLTLKKSESIYNSEVNLIFVSAQGNQEKKNNIYLLSNLAKNYLAAVFGTSDLSQITNEIESTVLQLKAAGRLGYFDLLSEKERACARHALFLNSDSEARRAVIDVLGSRRKASVNGTQAWFVRSIFSKVRQALAAWTQETGNELIFDAISVPAADSSEMRKRFAEYRPEFRKPKVQPVASHSIDAMCIYLAACSDPFKTKRMGSQLAIYEPINFDNLFTGSCQVIQNTPRNFSDKTNIANSPIFKETIYAERFLDIIVSRGEIFIGYPSNMPFEEKPNRISIGGKDPFSILSVLGAYLDKAPSSEKEKLTIYRVVKNKAFELFSKVAGSKFTAEEDKAAKILEALHFVTVKQDVAATVSDLIKSKKELSKDSIENLAKQKGCLKKVEYSSKEFKFKGSLIIPAAVEWGKVLWNVFKENTAEELKDENALRKALEAAWPSSFGTRNLHSKAKRVFSLPVVATQSGAVRIRRKTAFGDFVYQSQDTNNLYSSFPVKNGKLDWSSPIIHPALQNRNLTAYGYRFVDHDRSISMSEFREVYNKDDLMRIELAQGTSSRRYLRVEMPGEKFLAWFGENSISLGSSFKFSVSEVFDNKIYTENAEFTKFLPKPREDNKHNGTIFFELVGPRVIFNYIVGGAASSLKEIFSEAGKERS

SEQ ID NO: 377 - protein, 1037 aa, Parvibaculum lavamentivorans
MERIFGFDIGTTSIGFSVIDYSSTQSAGNIQRLGVRIFPEARDPDGTPLNQQRRQKRMMRRQLRRRRIRRKALNETLHEAGFLPAYGSADWPVVMADEPYELRRRGLEEGLSAYEFGRAIYHLAQHRHFKGRELEESDTPDPDVDDEKEAANERAATLKALKNEQTTLGAWLARRPPSDRKRGIHAHRNVVAEEFERLWEVQSKFHPALKSEEMRARISDTIFAQRPVFWRKNTLGECRFMPGEPLCPKGSWLSQQRRMLEKLNNLAIAGGNARPLDAEERDAILSKLQQQASMSWPGVRSALKALYKQRGEPGAEKSLKFNLELGGESKLLGNALEAKLADMFGPDWPAHPRKQEIRHAVHERLWAADYGETPDKKRVIILSEKDRKAHREAAANSFVADFGITGEQAAQLQALKLPTGWEPYSIPALNLFLAELEKGERFGALVNGPDWEGWRRTNFPHRNQPTGEILDKLPSPASKEERERISQLRNPTVVRTQNELRKVVNNLIGLYGKPDRIRIEVGRDVGKSKREREEIQSGIRRNEKQRKKATEDLIKNGIANPSRDDVEKWILWKEGQERCPYTGDQIGFNALFREGRYEVEHIWPRSRSFDNSPRNKTLCRKDVNIEKGNRMPFEAFGHDEDRWSAIQIRLQGMVSAKGGTGMSPGKVKRFLAKTMPEDFAARQLNDTRYAAKQILAQLKRLWPDMGPEAPVKVEAVTGQVTAQLRKLWTLNNILADDGEKTRADHRHHAIDALTVACTHPGMTNKLSRYWQLRDDPRAEKPALTPPWDTIRADAEKAVSEIVVSHRVRKKVSGPLHKETTYGDTGTDIKTKSGTYRQFVTRKKIESLSKGELDEIRDPRIKEIVAAHVAGRGGDPKKAFPPYPCVSPGGPEIRKVRLTSKQQLNLMAQTGNGYADLGSNHHIAIYRLPDGKADFEIVSLFDASRRLAQRNPIVQRTRADGASFVMSLAAGEAIMIPEGSKKGIWIVQGVWASGQVVLERDTDADHSTTTRPMPNPILKDDAKKVSIDPIGRVRPSND

SEQ ID NO: 378 - protein, 1058 aa, Pasteurella multocida
  Pasteurella multocida subsp. gallicida X73
MQTTNLSYILGLDLGIASVGWAVVEINENEDPIGLIDVGVRIFERAEVPKTGESLALSRRLARSTRRLIRRRAHRLLLAKRFLKREGILSTTDLEKGLPNQAWELRVAGLERRLSAIEWGAVLLHLIKHRGYLSKRKNESQTNNKELGALLSGVAQNHQLLQSDDYRTPAELALKKFAKEEGHIRNQRGAYTHTFNRLDLLAELNLLFAQQHQFGNPHCKEHIQQYMTELLMWQKPALSGEAILKMLGKCTHEKNEFKAAKHTYSAERFVWLTKLNNLRILEDGAERALNEEERQLLINHPYEKSKLTYAQVRKLLGLSEQAIFKHLRYSKESAESATFMELKAWHAIRKALENQGLKDTWQDLAKKPDLLDEIGTAFSLYKTDEDIQQYLEGKLPDSVINALLVSLNFDKFIELSLKSLRKILPLMEQGKRYDQACHEIYGHHYGEKNQQISQLLPVIPTQEIRNPVVLRTLSQARKVINAIIRQYGSPARVHIETGRELGKSFKERREIQKQQEDNRTKRESAVQKFKELFSDFSSEPKSKDILKFRLYEQQHGKCLYSGKEINIHRLNEKGYVEIDHALPFSRTWDDSFNNKVLVLASENQNKGNQTPYEWLQGKINSERWKNFVALVLGSQCSAAKKQRLLTQVIDDNKFIDRNLNDTRYIARFLSNYIQENLLLVGKNKKNVFTPNGQITALLRSRWGLIKVRENNDRHHALDAIVVACATPSMQQKITRFIRFKEVHPYKIENRYEMVDQESGEIISPHFPEPWAYFRQEVNIRVFDNHPDTVLKEMLPDRPQANHQFVQPLFVSRAPTRKMSGQGHMETIKSAKRLAEGISVLRIPLTQLKPNLLENMVNKEREPALYVGLKARLAEFNQDPAKAFATPFYKQGGQQVKAIRVELVQKSGVLVRQGNGVADNAPGSIVRTDVFIKNNKFFLVPIYTWQVAKGILPNKAIVAHKNEDEWEEMDEGAKFKFSIFPNDLIELRTKTECFLGYYIGPDRHNGSISLREHDSEISKGNAGVYRVGVKLALSLEKYHIDELGKNRRICRPHQRRPVR

SEQ ID NO: 379 - protein, 1056 aa, Pasteurella multocida
  Pasteurella multocida subsp. multocida str. P52VAC
MQTTNLSYILGLDLGIASVGWAVVEINENEDPIGLIDVGVRIFERAEVPKTGESLALSRRLARSTRRLIRRRARRLLLAKRFLKREGILSTTDLEKGLPNQAWELRVAGLERRLSAIEWGAVLLHLIKHRGYLSKRKNESQTNNKELGALLSGVAQNHQLLQSDDYRTPAELALKKFAKEEGHIRNQRGAYTHTFNRLDLLAELNLLFAQQHQFGNPHCKEHIQQYMTELLMWQKPALSGEAILKMLGKCTHEKNEFKAAKHTYSAERFVWLTKLNNLRILEDGAERALNEEERQLLINHPYEKSKLTYAQVRKLLGLSEQAIFKHLRYSKENAESATFMELKAWHAIRKALENQGLKDTWQDLAKKPDLLDEIGTAFSLYKTDEDIQQYLTNKVPNSVINALLVFLNFDKFIELALKSLRKILPLMEQGKRYDQACREIYGHHYGEANQKTSQLLPAIPAQEIRNPVVLRTLSQARKVINAIIRQYGSPARVHIETGRELGKSFKERREIQKQQEDNRTKRESAVQKFKELFSDFSSEPKSKDILKFRLYEQQHGKCLYSGKEINIHRLNEKGYVEIDHALPFSRTWDDSFNNKVLVLASENQNKGNQTPYEWLQGKINSERWKNFVALVLGSQCSAAKKQRLLTQVIDDNKFIDRNLNDTRYIARFLSNYIQENLLLVGKNKKNVFTPNGQITALLRSRWGLIKIRENNDRHHALDAIVVACATPSMQQKITRFIRFKEVHPYKIENRYEMVDQESGEIISPHFPEPWAYFRQEVNIRVFDNHPDTVLKEMLPDRPQANHQFVQPLFVSRAPTRKMSGQGHMETIKSAKRLAEGISVLRIPLTQLKPNLLENMVNKEREPALYAGLKARLAEFNQDPAKAFTTPFYKQGGQQVKAIRVEQVQKSGVLVRENNGVADNASIVRTDVFIKNNKFFLVPIYTWQVAKGILPNKAIVAHKNEDEWEEMDEGAKFKFSLFPNDLVELKTKKEYFFGYYIGLDRATGNISLKEHDGEISKGKDGVYRVGVKLALSFEKYQVDELGKNRQICRPQQRQPVR

SEQ ID NO: 380 - protein, 1056 aa, Pasteurella multocida
MQTTNLSYILGLDLGIASVGWAVVEINENEDPIGLIDVGVRIFERAEVPKTGESLALSRRLARSTRRLIRRRAHRLLLAKRFLKREGILSTIDLEKGLPNQAWELRVAGLERRLSAIEWGAVLLHLIKHRGYLSKRKNESQTNNKELGALLSGVAQNHQLLQSDDYRTPAELALKKFAKEEGHIRNQRGAYTHTFNRLDLLAELNLLFAQQHQFGNPHCKEHIQQYMTELLMWQKPALSGEAILKMLGKCTHEKNEFKAAKHTYSAERFVWLTKLNNLRILEDGAERALNEEERQLLINHPYEKSKLTYAQVRKLLGLSEQAIFKHLRYSKENAESATFMELKAWHAIRKALENQGLKDTWQDLAKKPDLLDEIGTAFSLYKTDEDIQQYLTNKVPNSVINALLVSLNFDKFIELSLKSLRKILPLMEQGKRYDQACREIYGHHYGEANQKTSQLLPAIPAQEIRNPVVLRTLSQARKVINAIIRQYGSPARVHIETGRELGKSFKERREIQKQQEDNRTKRESAVQKFKELFSDFSSEPKSKDILKFRLYEQQHGKCLYSGKEINIHRLNEKGYVEIDHALPFSRTWDDSFNNKVLVLASENQNKGNQTPYEWLQGKINSERWKNFVALVLGSQCSAAKKQRLLTQVIDDNKFIDRNLNDTRYIARFLSNYIQENLLLVGKNKKNVFTPNGQITALLRSRWGLIKARENNNRHHALDAIVVACATPSMQQKITRFIRFKEVHPYKIENRYEMVDQESGEIISPHFPEPWAYFRQEVNIRVFDNHPDTVLKEMLPDRPQANHQFVQPLFVSRAPTRKMSGQGHMETIKSAKRLAEGISVLRIPLTQLKPNLLENMVNKEREPALYAGLKARLAEFNQDPAKAFATPFYKQGGQQVKAIRVEQVQKSGVLVRENNGVADNASIVRTDVFIKNNKFFLVPIYTWQVAKGILPNKAIVAHKNEDEWEEMDEGAKFKFSLFPNDLVELKTKKEYFFGYYIGLDRATGNISLKEHDGEISKGKDGVYRVGVKLALSFEKYQVDELGKNRQICRPQQRQPVR

SEQ ID NO: 381 - protein, 1364 aa, Pediococcus acidilactici
  Pediococcus acidilactici DSM 20284
MGDRKYNLGLDIGTSSIGFAAVDENNQPIRVKGKTAIGVRLFEEGKTAADRRGFRTTRRRLSRRRWRINLLNEIFDAHLAEVDPTFLARLKESNRSNLDPKKSFQGSLLFPERKDYQFYEEYPTIYHLRKALMEKDRKFDFREIYLAVHHIIKYRGNFLNGTPMRSFKVENIELDTLFDQLNQLYAEIVPDNELAFDLAQVADVKDVLSSTTIYKMDKKKQLVKMMLLPASNKALQSENKKIVTQFVNAILNYKFKLDVLLQVETDADWSLKLNDEGADDKLEEFTGDLDENRLEIIDLLQRLHNWFSLNEITKDGNSLSAAMVEKYENHHHHLGLLKKVIENHPDAKKAKALKETYTAYVGKTDDKTQNQDDFYKAVEKNLDDSPDAKEIKRLIQLDQFMPKQRTGQNGAIPHQLHQQELDQIIEKQSKYYPFLAEPNPNVKRRKDAPYKLDELIAFKIPYYVGPLVTPEEQAQNGENVFAWMKRKAAGPITPWNFDEKVDRMESANRFIRRMTTKDTYLFGEDVLPAESMIYQKFVVLNELNNLKINGRHLSLKDKQDVYNDLFKQQKTVSIKALQNYYVTKKKAATAPTVGGLADPKKFLSSLSTYIDFKNMFGERVNDPQFQEDLEQIVEWSTIFEDRGIFKAKLQALGWLSEKQIQQLVAKRYKGWGRLSKKLLTGLKNAEGYSILDEMWRSTGNFMQIQSRPEFAALIQQANEKQFEGNDPDNVWENIENILGDAYTSPQNKKAIRQVVKVVQDIEKAVGNPPEKIAIEFTREAAANPQRTQSRLRTLEKLYESAEEVVDAGLTAELAEFKENKHVLSDKYYLYFTQLGRDVYTGDTISLDKLNDYDVDHILPQSFIKDDSLDNRVLTIRAVNNGKSDNVPAKMFGKKMGSFWRYLLDNGMISKRKYNNLITDPDNISKYAQKGFINRQLVETSQVIKLTANILNGIYDKDTEIIEVPAKMNSQMRKMFDLVKVREVNDYHHAFDAYLTIFIGNYLYKCYPKLQPYFVYDNFKKFGNKEDIGHKRFNFLGKIEREKKVVAPETGEILWSNVAPNETIKQIKKVYDYKFMIVSREITTRRAELFNQTVYPKNYHGKLIPIKEDRPTDLYGGYSGNTDAYLAIVALEDKKKGKYFKVVGIPTRVAAKLEKLKQQDSQQYLQALHKVIAPQFTKSTKKGIKKTEFEIVLDKVHYRQLVQDGPVKMMLGSSTYKYNAKQLVLSEKALQVIADDRKFDETQKDDNLIAVYDEILSIVNQSFDLYDINGFRKKLNDNRDQFIDLPAETKYEGRKVVAHGKREMILEILKGLHANAAFGNLKPIGFSTAFGQLQVPNGIILSKNAILIHQSPSGLFERKIKLSDL

SEQ ID NO: 382 - protein, 1366 aa, Pediococcus acidilactici
  Pediococcus acidilactici MA18/5M
MGDRKYNLGLDIGTSSIGFAAVDENNQPIRVKGKTAIGVRLFEEGKTAADRRGFRTTRRRLSRRRWRINLLNEIFDAHLAEVDPTFLARLKESNRSNLDPKKSFQGSLLFPERKDYQFYEEYPTIYHLRKALMEEDRKFDIREIYLAVHHIIKYRGNFLNGTPMRSFKVENIELDTLFDQLNQLYAEIVPDNELAFDLAQVADVKDVLSSTTIYKMDKKKQLVKMMLLPASNKALQSENKKIVTQFVNAILNYKFKLDVLLQVETDADWSLKLNDEGADDKLEEFTGDLDENRLEIIDLLQRLHNWFSLNEITKDGNSLSAAMVEKYENHHHHLGLLKKVIENHPDAKKAKALKETYTAYVGKTDDKTQNQDDFYKAVEKNLDDSPDAKEIKRLIQLDQFMPKQRTGQNGAIPHQLHQQELDQIIEKQSKYYPFLAEPNPNVKRRKDAPYKLDELIAFKIPYYVGPLVTPEEQAQNKENVFAWMKRKAAGPITPWNFDEKVDRMESANRFIRRMTTKDTYLFGEDVLPAESMIYQKFVVLNELNNLKINGRHLSLKDKQDVYNDLFKQQKTVSIKALQNYYVTKKKAATAPTVGGLADPKKFLSSLSTYIDFKNMFGERVNDPQFQEDLEQIVEWSTIFEDRGIFKAKLQALGWLSEKQIQQLVAKRYKGWGRLSKKLLTGLKNAEGYSILDEMWRSTENFMQIQTRPEFAALIQQANEKQFEGNDPNNVWENIESILGDAYTSPQNKKAIRQVVKVVQDIEKAVGNPPEKIAIEFTREAAANPQRTQSRLRTLEKLYESAEEVVDAGLTAELAEFKENKHVLSDKYYLYFTQLGRDVYTGDTISLDKLNDYDVDHILPQSFIKDDSLDNRVLTIRAVNNGKSDNVPAKMFGKKMGSFWRYLLDNGMISKRKYNNLITDPDNISKYAQKGFINRQLVETSQVIKLTANILNGIYDKDTEIIEVPAKMNSQMRKMFDLVKVREVNDYHHAFDAYLTIFIGKYLYKCYPKLRPYFVYGKFKKFGDNEDIEVGDGRFNFLNRIERLKNVTDPETGEILWSNVAPNETIKQIKKVYNYKFMLVSRETTTRRAELFNQTVYPKNYRGKLIPIKEDRPTDLYGGYSGNTDAYLAIVALEDKKKGKYFKVVGIPTRAAAKLEKLKQQDSQQYLQALHKVIAPQFTKSTKKGIKKTEFEIVLDKVHYRQLVQDGPVKMMLGSSTYKYNAKQLVLSEKALQVIADDRKFDETQKDDNLIAVYDEILSIVNQSFDLYDINGFRKKLNDNRDQFIDLPAETKYEGRKVVAHGKREMILEILKGLHANAAFGNLKPIGFSTAFGQLQVPNGIILSKNAILIHQSPSGLFERKIKLSDL

SEQ ID NO: 383 - protein, 1364 aa, Peptoniphilus duerdenii
  Peptoniphilus duerdenii ATCC BAA-1640
MKNLKEYYIGLDIGTASVGWAVTDESYNIPKFNGKKMWGVRLFDDAKTAEERRTQRGSRRRLNRRKERINLLQDLFATEISKVDPNFFLRLDNSDLYREDKDEKLKSKYTLFNDKDFKDRDYHKKYPTIHHLIMDLIEDEGKKDIRLLYLACHYLLKNRGHFIFEGQKFDTKNSFDKSINDLKIHLRDEYNIDLEFNNEDLIEIITDTTLNKTNKKKELKNIVGDTKFLKAISAIMIGSSQKLVDLFEDGEFEETTVKSVDFSTTAFDDKYSEYEEALGDTISLLNILKSIYDSSILENLLKDADKSKDGNKYISKAFVKKFNKHGKDLKTLKRIIKKYLPSEYANIFRNKSINDNYVAYTKSNITSNKRTKASKFTKQEDFYKFIKKHLDTIKETKLNSSENEDLKLIDEMLTDIEFKTFIPKLKSSDNGVIPYQLKLMELKKILDNQSKYYDFLNESDEYGTVKDKVESIMEFRIPYYVGPLNPDSKYAWIKRENTKITPWNFKDIVDLDSSREEFIDRLIGRCTYLKEEKVLPKASLIYNEFMVLNELNNLKLNEFLITEEMKKAIFEELFKTKKKVTLKAVSNLLKKEFNLTGDILLSGTDGDFKQGLNSYIDFKNIIGDKVDRDDYRIKIEEIIKLIVLYEDDKTYLKKKIKSAYKNDFTDDEIKKIAALNYKDWGRLSKRFLTGIEGVDKTTGEKGSIIYFMREYNLNLMELMSGHYTFTEEVEKLNPVENRELCYEMVDELYLSPSVKRMLWQSLRVVDEIKRIIGKDPKKIFIEMARAKEAKNSRKESRKNKLLEFYKFGKKAFINEIGEERYNYLLNEINSEEESKFRWDNLYLYYTQLGRCMYSLEPIDLADLKSNNIYDQDHIYPKSKIYDDSLENRVLVKKNLNHEKGNQYPIPEKVLNKNAYGFWKILFDKGLIGQKKYTRLTRRTPFEERELAEFIERQIVETRQATKETANLLKNICQDSEIVYSKAENASRFRQEFDIIKCRTVNDLHHMHDAYLNIVVGNVYNTKFTKNPLNFIKDKDNVRSYNLENMFKYDVVRGSYTAWIADDSEGNVKAATIKKVKRELEGKNYRFTRMSYIGTGGLYDQNLMRKGKGQIPQKENTNKSNIEKYGGYNKASSAYFALIESDGKAGRERTLETIPIMVYNQEKYGNTEAVDKYLKDNLELQDPKILKDKIKINSLIKLDGFLYNIKGKTGDSLSIAGSVQLIVNKEEQKLIKKMDKFLVKKKDNKDIKVTSFDNIKEEELIKLYKTLSDKLNNGIYSNKRNNQAKNISEALDKFKEISIEEKIDVLNQIILLFQSYNNGCNLKSIGLSAKTGVVFIPKKLNYKECKLINQSITGLFENEVDLLNL

SEQ ID NO: 384 - protein, 1087 aa, Phascolarctobacterium succinatutens
  Phascolarctobacterium succinatutens YIT 12067
MLRMKYAIGLDIGIASVGYAVLALDHEENPWGIIRLGSRIFDVAENPKDGASLALPRREARSVRRRLRRHHHRLERIKNLLINTEFITKDELLHLYDGNLSDVYELRVKALDYSVTNAELTRILLHLAQRRGFKSNRKSDANDKEAGQLLEAVSANAKRMQENHYRTVGEMFYKDDLFSKYKRNKGGTYLTTVHRDMIAAEARTILEKQFALGNNICTQDFIDKYLSILLSQRQFDEGPGEPSPYAGNQIANMIGKCTFEPNEYRAAKASYSFERFNLLQKVNHLRLLLEGKSIALDNEQRKKIIALAHDKADLRYSHIRKALGLDEKVLFNTITYNDDVSVIEKKTKFNFLQAYHQIKKVLAEDMQKLTTEQLDNIGQILSTYKSDNKRTEELSALGLEKKIIDALLGINGLSKFAHLSLKALRKINPYLEEGKIYNEACTAAGYDFKAHANTQKTELLPAYKEEMDDITSPVARRAIAQSIKVINAIIREQKGSPLYINIELAREMAKGFDERTQIDKANKENQAKNERIMERIRTEFHKANPTGMDLIKLKLWEEQDGRSPYSQKAISINRLFEPGYVDIDHIVPYSISFDDSFKNKVLVFSDENRDKGNRLPIAYLQSKFGAKAAENFMIWVQSNIKDYKKRQKLLKREITEEDINKFKERNLQDTKTISRFLYNYINDYLLFAPSDTGKKKRVTAVNGTITAYLRKRWGINKIRANGDKHHAVDAVVIACTTDKMIKDLSSFSRYHELEYTHTDTESFLVNSLTGEILKRFPYPWEDFRPELMARLSDNPADALRKLNLIFYHGIDLSTIKPIFVSRMPRHKVTGAAHKATIKSARCLDNGIVICKTSLQNLKLDKEGEIANYYAPESDTILYNALKERLRSYDNKPAKAFAEPFYKPKADGTPGPLVKKVKVYEKSTLNVAVQQNTAVADNDSMVRVDVFHVKGNGYYLVPIYIADTLKKELPNKAIVAYKPYADWPVMDDSNFIFSLYPNDLIKFEHKNSVKFAKVNKESTLNDFYSTKSEIVYFKGCNINTGAITIINHENTYVVSSLGVKTLPSLEKYQADVLGNYTKVKKEVRKPFR

SEQ ID NO: 385 - protein, 1333 aa, Planococcus antarcticus
  Planococcus antarcticus DSM 14505
MKNYTIGLDIGVASVGWVCIDENYKILNYNNRHAFGVHEFESAESAAGRRLKRGMRRRYNRRKKRLQLLQSLFDSYITDSGFFSKTDSQHFWKNNNEFENRSLTEVLSSLRISSRKYPTIYHLRSDLIESNKKMDLRLVYLALHNLVKYRGHFLQEGNWSEAASAEGMDDQLLELVTRYAELENLSPLDLSESQWKAAETLLLNRNLTKTDQSKELTAMFGKEYEPFCKLVAGLGVSLHQLFPSSEQALAYKETKTKVQLSNENVEEVMELLLEEESALLEAVQPFYQQVVLYELLKGETYVAKAKVSAFKQYQKDMASLKNLLDKTFGEKVYRSYFISDKNSQREYQKSHKVEVLCKLDQFNKEAKFAETFYKDLKKLLEDKSKTSIGTTEKDEMLRIIKAIDSNQFLQKQKGIQNAAIPHQNSLYEAEKILRNQQAHYPFITTEWIEKVKQILAFRIPYYIGPLVKDTTQSPFSWVERKGDAPITPWNFDEQIDKAASAEAFISRMRKTCTYLKGQEVLPKSSLTYERFEVLNELNGIQLRTTGAESDFRHRLSYEMKCWIIDNVFKQYKTVSTKRLLQELKKSPYADELYDEHTGEIKEVFGTQKENAFATSLSGYISMKSILGAVVDDNPAMTEELIYWIAVFEDREILHLKIQEKYPSITDVQRQKLALVKLPGWGRFSRLLIDGLPLDEQGQSVLDHMEQYSSVFMEVLKNKGFGLEKKIQKMNQHQVDGTKKIRYEDIEELAGSPALKRGIWRSVKIVEELVSIFGEPANIVLEVAREDGEKKRTKSRKDQWEELTKTTLKNDPDLKSFIGEIKSQGDQRFNEQRFWLYVTQQGKCLYTGKALDIQNLSMYEVDHILPQNFVKDDSLDNLALVMPEANQRKNQVGQNKMPLEIIEANQQYAMRTLWERLHELKLISSGKLGRLKKPSFDEVDKDKFIARQLVETRQIIKHVRDLLDERFSKSDIHLVKAGIVSKFRRFSEIPKIRDYNNKHHAMDALFAAALIQSILGKYGKNFLAFDLSKKDRQKQWRSVKGSNKEFFLFKNFGNLRLQSPVTGEEVSGVEYMKHVYFELPWQTTKMTQTGDGMFYKESIFSPKVKQAKYVSPKTEKFVHDEVKNHSICLVEFTFMKKEKEVQETKFIDLKVIEHHQFLKEPESQLAKFLAEKETNSPIIHARIIRTIPKYQKIWIEHFPYYFISTRELHNARQFEISYELMEKVKQLSERSSVEELKIVFGLLIDQMNDNYPIYTKSSIQDRVQKFVDTQLYDFKSFEIGFEELKKAVAANAQRSDTFGSRISKKPKPEEVAIGYESITGLKYRKPRSVVGTKR

SEQ ID NO: 386 - protein, 1197 aa, Porphyromonas sp.
  Porphyromonas sp. oral taxon 279 str. F0450
MLMSKHVLGLDLGVGSIGWCLIALDAQGDPAEILGMGSRVVPLNNATKAIEAFNAGAAFTASQERTARRTMRRGFARYQLRRYRLRRELEKVGMLPDAALIQLPLLELWELRERAATAGRRLTLPELGRVLCHINQKRGYRHVKSDAAAIVGDEGEKKKDSNSAYLAGIRANDEKLQAEHKTVGQYFAEQLRQNQSESPTGGISYRIKDQIFSRQCYIDEYDQIMAVQRVHYPDILTDEFIRMLRDEVIFMQRPLKSCKHLVSLCEFEKQERVMRVQQDDGKGGWQLVERRVKFGPKVAPKSSPLFQLCCIYEAVNNIRLTRPNGSPCDITPEERAKIVAHLQSSASLSFAALKKLLKEKALIADQLTSKSGLKGNSTRVALASALQPYPQYHHLLDMELETRMMTVQLTDEETGEVTEREVAVVTDSYVRKPLYRLWHILYSIEEREAMRRALITQLGMKEEDLDGGLLDQLYRLDFVKPGYGNKSAKFICKLLPQLQQGLGYSEACAAVGYRHSNSPTSEEITERTLLEKIPLLQRNELRQPLVEKILNQMINLVNALKAEYGIDEVRVELARELKMSREERERMARNNKDREERNKGVAAKIRECGLYPTKPRIQKYMLWKEAGRQCLYCGRSIEEEQCLREGGMEVEHIIPKSVLYDDSYGNKTCACRRCNKEKGNRTALEYIRAKGREAEYMKRINDLLKEKKISYSKHQRLRWLKEDIPSDFLERQLRLTQYISRQAMAILQQGIRRVSASEGGVTARLRSLWGYGKILHTLNLDRYDSMGETERVSREGEATEELHITNWSKRMDHRHHAIDALVVACTRQSYIQRLNRLSSEFGREDKKKEDQEAQEQQATETGRLSNLERWLTQRPHFSVRTVSDKVAEILISYRPGQRVVTRGRNIYRKKMADGREVSCVQRGVLVPRGELMEASFYGKILSQGRVRIVKRYPLHDLKGEVVDPHLRELITTYNQELKSREKGAPIPPLCLDKDKKQEVRSVRCYAKTLSLDKAIPMCFDEKGEPTAFVKSASNHHLALYRTPKGKLVESIVTFWDAVDRARYGIPLVITHPREVMEQVLQRGDIPEQVLSLLPPSDWVFVDSLQQDEMVVIGLSDEELQRALEAQNYRKISEHLYRVQKMSSSYYVFRYHLETSVADDKNTSGRIPKFHRVQSLKAYEERNIRKVRVDLLGRISLL

SEQ ID NO: 387 - protein, 1485 aa, Prevotella bivia
  Prevotella bivia JCVIHMP010
MKNILGLDLGTNSIGWAKISIDDNGKYIKDSIKLGSRIIPMSQDVLSNFSKGVTLSQTSERTSFRGARRLRERTLLRRERLHRILHLLGFLPKHYEKAIGWDRNDNKTYGKFINHAEPKLAWCKDNNGKMRFLFMDSFHDMLSEFSEKHPELLANGKKIPLDWTIYYLRKKALYKAITKEELAWILLNFNQKRGYYQLRGEEDRDSEANKKEYLELKVIGVEATGEKKGNDIWYNIHLENGWIYRRSSKNPLNDWLGKVKSFIVTTDLDADGNPKKDKDGNIKRSFRAPSEGDWTLIKKRTESLLENSGQTVGQFIYNHILEEPSAKIRGNFIRTIERKYYKDELKAILEKQKEFHHELSSESLLTECAKELYKRNIAHQEVLLKKGIIHLLLNDILFYQRPLKIKKSLIDNCPYENYKYVDKKSGDIKVKSIKCIAKSNPFFQEFRLWQFVSNLRLYRKSDDKDVTSEHLVTTDDYANLFTYLNNRKDIKQSVLLKEYFKIKKVKTINGAEYPVRWNYIDDDNKTYPCNETRYDILHALSKTELKSEWLTPERTYRLWHLLYSIESKEETKKALNKLNLSDDFTEAFLTIKPFKKEYGSYSEKAIKKLLSLMRMGYLWSEDEAIKQVGAEIEKTIEGELPDYVLQRLEKSQHNYNKISDFSGLPLWLASYIIYGRHSEAKEIIHWDNPESMMAYIKDFRQHSMRNPIVEQCVLETLRTVHDIWKEIGHIDEIHIELGREMKSTSEQRKAITQNVLHNQNTNIRIKLLLQELKNDNNITGVRPYSPMQQEILRIYEEGALQGLTKEDKDYNDILKISQTAQPTSNELTRYKLWLEQKYRSPYTGKAISLSKLFTSAYQIEHVIPQSRYFDDSLSNKVICESEVNTLKKAMLGMEFIKTCGGQKVHCTLLGDVEIYNEEDYKAFVNEHYSNNRTKRNKLLMEDIPQEFINRQLNDSRYISKMVKQLLSAIVRGQEEVEATSKFVIPCTGGITDRLKKDWGLNDIWNNLVSPRFQRMNALTGSEYFGHWENKEGKRVFQTTMPIQLQQGFSKKRIDHRHHAMDALVIACASRNIISYLNNETAQDTERRRDLRQKLCDKGGSVRKPWDSFTQDTQYALKDIIVTFKNYVRIINKATNYYEHYKTDGKKGMISQKGDELWAIRKPMHKETVFGKVNLRRPKRVSLSKAIDSVDIICNRKLKKYIKARLNEGLQKKQILNIFKELNNVWEGIDVNKIDIWEMSNDKEPMVATRKQLDTSFDEKKIRSISDTGIQKILLNYLITKNNNPELAFTPEGIQEMNSNISEYNDHKKHQPIYKVRVTEPLGAKYPIGTMGNNPKKFVEAQAGTNLYFAIYEDKEGKRNYDTIPLNIAAERLNQQLSPVPETNENNTPLKFYLSPNDLVYVPSEEERHSGNNIQLDKNRIYKMVSSTSKRCFFIHHRVAISLVDKKEFSAQNKMERSIDNEQVMIKSVCWKLITDRLGNIIKVIK

SEQ ID NO: 388 - protein, 1457 aa, Prevotella buccae
  Prevotella buccae ATCC 33574
MKTILGLDLGTNSIGWAKVSVDDYGNYLHDIKLGSRIIPMSQDVLGNFDSGVTVSQTAQRTEFRSKRRLVQRNLQRRERLHRVLHVLDFLPAHYDAAIGWDRTEAVTYGKFLNHAEPKLAWEELGNGKRRFLFMDSFHEMVADFARCQPALVADGKKIPLDWTIYYLRKKALTQAITKEELAWILLNFNQKRGYYQLRGEEEEENPTKQEEYYELKVVSVEATDSRKGNDTWYNVHLENGWIYRRSSKISLDDWVGKVKQFIVTTEYEKDGATLKTDKEGYVKRSFRAPNENDWGLRKKRTETLLEMSGKTVGAFIYDHLLQEPADKIRGNFIRTIERHYYKAELEAILAEQCKYHIELRDKEMLEACARELYLNNLPHQRSLMKKDMTYLLLYDLIFYQRPLKSKKALIANCPYEYYEYVDKETGEIKRQNIKCIAKSNPYFQEFRLWQFVLNLRLFDRVEDKEVTANYLPTADDHARLFTYLNDRKEINQETLLKDYFKLKKVKIGNEKEYPIRWNYIEDKEKKYPCNETRYELLMALDRAGIEHKWLDDNNLEYRLWHLLYSVEVKSESETALRKLKNDDAFVNSFLKVKPFKKEYGAYSEKAIKRLLAVMRKGFLWNEQDICDETRKRIEIIIKGDVDEKVKERMGHAAYSFDRVSDFQGLPEWLACYVVYGRHSEAMDIQHWDSPERLMAYINNFKQYSLRNPIVEQCILETLRTVHDIWKETGQIDEIHVELGREMKSTSEERARRTQNVLRNENTNLRIKSLLIELKNDTDICNVHPYSPMQQEILRIYEEGALQELNREDEDFEEISKISQMSQPSGKELNRYKLWLEQKYRSPYTGKAISLAKLFTPAYQIEHVIPQSRYFDDSFTNKVICEAEVNTLKSNLLGYEFIKKHGGEIIHCTTLGDVRIFSESEYKAFVMDHYANNKSKKDKLLMEDIPQEFLSRQMNDSRYISKVVKTLLSNIVRMADESEATSKSVIVCTGGVTDRLKKDWGLNDVWNSIVYSRFERLNRLTGTEAFGHWENKDGKRVFQTSMPLELQRGFRKKRIDHRHHAMDALVIACASRNIVNYLNNESANNPKKREDLRRQLCDKNRVIRKPWETFTQDAYNALENVVVSFKNYVRVINKATNRYEHYDENGKKRFVQQKGSELWAIRKPMHKETYYGHVNLRRKELVTLQKALDDIPSICDKKLRDYISALVEKHFNKRQLLAHFKSTDYYWQKQYVNKVYVWTFSDDIKPLVATRKLLDTSFDAKRIGTITDTGIQKILRNYLEAKGGNATLAFTPEGIAEMNQNISKYNDGKPHQPILKVRITEPMGAKYRVGQTGNKMAKYVEAQSGTNLYFAIYEDSEGKRSYTTVPLDEVAERLKQRLSPVPEKDENDVPLKFYLSPNDLVYVPTEEELQLRECKLNKDRIYKMVSSTGNECHFIPYYVANVIYNKGGFNMQMHRPQS

SEQ ID NO: 389 - protein, 1218 aa, Prevotella buccalis
  Prevotella buccalis ATCC 35310
MNKRILGLDTGTNSLGWAVVDWDEHAQSYELIKYGDVIFQEGVKIEKGIESSKAAERSGYKAIRKQYFRRRLRKIQVLKVLVKYHLCPYLSDDDLRQWHLQKQYPKSDELMLWQRTSDEEGKNPYYDRHRCLHEKLDLTVEADRYTLGRALYHLTQRRGFLSNRLDTSADNKEDGVVKSGISQLSTEMEEAGCEYLGDYFYKLYHEQGNKVRIRQRYTDRKKHYQHEFDAICEKQELSSELIEDLQRAIFFQLPLKSQRHGVGRCTFERGKPRCADSHPDYEEFRMLCFVNNIQVKGPHDLELRPLTYEEREKIEHLFFRKSKPNFDFEDIAKELAGKKNYAWIHDKEERAYKFNYRMTQGVPGCPTTAQLKSIFGDDWKTGIAETYTLIQKKNGSKSLQEMVDDVWNVLYSFSSVEKLKEFAHHKLQLDEENAEKFAKIKLSHSFAALSLKAIRKFLPFLRKGMYYTHASFFANIPTIVGKEIWNNEQSRKYIMENVGELVFNYQPKHRDVQGTIEMLIKDFLANNFELPAGATDKLYHPSMIETYPHALRNEFGILQLGSPRTNAIRNPMAMRSLHVLRRVVNQLLKESIIDENTEVHVEYARELNDANKRRAIADRQKEQDKQHKKYGDEIRKLYKEETGKDIEPTQTDVLKFQLWEEQNHYCLYTGEQIGITDFIGSNPKFDIEHTIPQSVGGDSTQMNLTLCDNRFNREVKKAKLPTELANHEEILTRIEPWKNKYEQLVKERDKQRTFAGMDKAVKDIRIQKRHKLQMEIDYWRGKYERFTMTEVPEGFSRRQGTGIGLISRYAGLYLKSLFHQADSRNKSNVYVVKGVATAEFRKMWGLQSEYEKKCRDNHSHHCMDAITIACIGKREYDLMAEYYHMEETFRQGRGSKPKFSKPWATFTEDVLNIYKNLLVVHDTPNNMPKHTKKYVQTSKGKVLAQGDTARGSLHLDTYYGAIERDGEIRYVVRRPLSSFTNPKELENIVDETVKRTIKEAIADKNFKQAIAEPIYMNEDKGILIKKVRCFANSVKQPINIRQHRDLSKKEYKQQYHVMNENNYLLAIYEGLVKNKVVREFEIVSYIEAAKYYKRSQDRNIFSSIVPTHSTKYGLPLKTKLLMGQQVLMFEENPDEIQVDNTKDLVKRLYKVVGIEKDGRIKFKHHQEARKEGLTIYSTPYKNNDDYVPIFRQSIKNINILVDGIDFNIDILGKVTLKE

SEQ ID NO: 390 - protein, 1422 aa, Prevotella denticola
  Prevotella denticola CRIS 18C-A
MTQKVLGLDLGTNSIGSSVRNLDLSDDLKGQLEFFSSDIFRSSVNKESNGREYSLAAQRSAHSRSRGLNEARRRKLWATLDLLIKYGFCPMSPESLMRWRTYDKQRGLFREYPIDDKNFNAWILLDFDGDGKPDYSSPYQLRRELVIRQFDFDQPIERYKLGRALYHIAQHRGFKSSKGETLSQQETNSKQSLTDDTADVAGEMKASEEKLSKGLSTYMKENNLLTVGAAFAQLEDEGVRVRNNNDYRAIRSQFQREIETIFKFQQGLSVENELYERLVSEKKNIGTIFYKRPLRSQRGNVGKCTLERTKPRCAIGHPLFEKFRAWTLINNIKVRMSEEEQAEQLPMKLRFELYNDCFLAFVRAEFKFEDIRKYLEKRLGVHFSYNDKTINYKDSTSVAGCPITARFRKLLGEDWESFHVDGQKQRQAHGKNNASFHTVSYSTNDIWHFCYDAEEPEAVLSFAQDNLKWEKKKAEELVRIWSAIPQGYAMLSQKAIRNINKMLILGLKYSDAVLLAKVPEIVEITDGEILSVTEDYHRVEAQVGYEKQINNIVNALIAKYKSASEEYRFADHNYEYQLDKSDEKDIIKQIESNIGTRKWSLLDADEQTDILQKVRDKYQNFFRSHERKFVESPKLGECFEEYLMKKFPMVEGERWKKLYHPSQIAIYRPVPANKDRSALRLGNPDIGAIKNPTVLRVLNTLRKRVNQLLDDGIISPDETRVVVETARELNDANRKWALDTYNRIRHDENEKIKKILAEFYPKRDNISTVDIDKARYVIDQREMDYFTEAKTYHKDIKKYKLWLEQGGQCMYTGRTINLSNLFDPNSFDVEHTIPESISFDSSDMNLTLCDAHYNRFIKKNHIPADLPNYDKSVVIDGKEYSPIKPRLQRWADRVERLNRNVEYWRGQARRAQNKDRKDQCMREMHLWKMELEYWTKKLERFTITEVTDEFKNSQLVDTRVITRHAVLYLKSIFPHVDVQRGDVTAKFRKILGIQSVDEKKDRSLHSHHAIDATTLTIIPGAAKRERMLELFAKIEEVNKMLSFSGNEDRTGLKQELDGLKNQLNKEVKACRIGHNVSEIGTFINDNIIINHHVKNQALTPVRRRLRKRGHIVGGMDNPRWQTGDALRGEIHKASYYGAITQYAKDKEGKVLMKEGRPQINPTIKFVIRRELKYKKSSTDSGFASWDDLGKAIVDKELFALMKGQFPEGTSFKDACEQGIYMIKKGKNGEVDTKLYRIRHIRCKTKQKNALKIKEQAYKSEKEYKRYFYAAVGDLYAMCCYTNGKTREFKIYSLYDISCHRKVGVEDIPEFITDKKGNRLMLDYKLHTGDMILLYKENPEELYDLDNVSLSKLLYKINGFENDGLRIRMVNHLVAKEAMGESVKDYAKLPDIIRCGVKTIKFLVMGENRDFVIKNGKISFNHR

SEQ ID NO: 391 - protein, 1375 aa, Prevotella histicola
  Prevotella histicola F0411
MKKILGLDLGTTSIGWALVYESENTDEKSSIVRLGVRVNPLSVDEKGNFEKGKAITTNADRQQTHGARINLQRYKLRRENLKDCLQKQGWIGTEALCEEGKTSTFETYMLRAKAAEEEISLHELCRVLFMMNKKRGYKSNRKANNKEDGKLFDGMTVAKKLYEEHLTPAEYSFQLLSSGKKFKQEYYRSDLKEEFDRIWNEQQKYYPEILTDDFKQQLQGKSKGNTSKIFLGKYGIYSADLKGLDRKLQPLKWRVEALKQQVDKEVLAFVISDLNGQIASTSGLLGAISDRSKELYFNKQTVGQYLWTSLKETPHVSIKNKPFYRQDYLDEFEKIWETQATYHKELTPELKQEIRDIIIFYQRPLKSKKGLISVCELEQRKVKVTIDGKEKEISIGPKVAPKSSPMFQEFRIWQNLNNILLIDKGNNSIHPLYEEEKNLLYEELSVKEKLSKAEALKVLNKNSKQWDLNYKEIEGNRTQAVLYDCYNRIIVMTGHEEYNFKKLKASEIRSYVKTTFTGLGFNTDILEFDSSLTGHELEKQPMYQLWHLLYSYESDNSRTGNDALLRKLETAFGFPKEYAAVLSDVVFEDSYGNLSVKAMRKILPHLQAGLNYSQACEEAGYKHSRRSLTKNELDQKEYKEKLELLPKNSLHNPVVEKILNQMINVINAVIDEYGKPDEIRIELARELKIGAAERENMTRSINQGNAENKRIREILEKEFALSYISRNDIIKYKLYEELKSNGFKTLYSDTYISKDKLFSKDFDIEHIIPKARLFDDSLSNKTIEARDVNIAKSNKTAFDFISEKYDQQGIEAYKKKLDILLQDGSISKAKYNRLLMKEADIPSGFIDRDLRDTQYIAKKAYEILSDLVRNVTPTTGAVTSRLREDWQLVDVMKELNFEKYQKLGLVEVIEDRDGRKIKRIKDWTKRNDHRHHAMDALTIAFTKPSYIQYLNNLNARSDKNSSIYGIENKELHREDNKLRFNAPLPINEFRAEARRHLKSILVSVKAKNKVMTQNVNVIKTKHGVIKKVQLTPRGELHNATFYGTKKRPIIKMVKVGAALDEVTIKKVSSSFIREALLDRLHEYNGDAKKAFTGRNSIDKNPIYIDEEHKKTVPALVKTIEWEMYHPTRKLISPDLKIDKVIDKGIREILKTRLAKFNGDAQKAFSNLDENPIYKDEAKKITLKRVSLEGVSSVIPLHTLKDREGKLVVGKDGKPVLGDYVQTSNNHHIAFYMDENGNLQDNVVSFFEAAERKSQGVPVIDKNYNHDKGWNFLFTMKQNEYFVFPNEVTGFNPSEVDLMDEANYSIISPNLYRVQKMSKASGRDYWFRHHLEAMLNDDPKLRNSMFKRITSLKALEGIVKVRINCIGKIVAVGEYD

SEQ ID NO: 392 - protein, 1380 aa, Prevotella intermedia
MKRILGLDLGTTSIGWALVNEAENNNEASSIVRLGVRVNPLTVDEKSNFEKGKAITTNADRQLRHGARINLQRYKLRRQNLHDCLQKQGWLGTEAMYEEGKASTFETYKLRAKAAEEEISLHEFARVLFMLNKKRGYKSNRKANNKEDGQLFDGMTIAKKLYEEHLTPAEYSLQLLNKGKKFTQGYYRSDLNAELERIWDEQKKYYPEILTDEFKQQLEGKTKTNTSKIFLAKYGIYSADLKGLDRKFQPLKWRVEALQQQVDKEVLAFVISDLKGQIANTSGLLGAISDRSKELYFNKQTVGQYLWASLEENPHISIKNKPFYRQDYLDEFEKIWETQAAFHKQLTPELKQEIRDIIIFYQRPLKSKKSLISVCELEQRKVKATIDGKEKEITIGPKVAPKSSPVFQEFRIWQNLNNVLLIDNDTNEKRPLDEVERNLLYKELSIKAKLSKTEALKILNKKGKQWDLNYRELEGNRTQAILFDCYNRIITLTGHEECDFKKIKASEIRHYVSTIFKNLGFSTEILDFDPSLKKHELEKQPMYQLWHLLYSYESDNSRTGNESLLRKLETTFGFPEEYATVLCDVVFEEDYGNLSVKAMREILPYLQAGNDYSQACAYAGYNHSRHSLTKEELDQKVYKERLELLPKNSLRNPVVEKILNQMINVINAIIDEYGKPDEIRIEMARELKSSAADRKKTTHAISQGNAENQRIREILEKEFSLSYISRNDIIKYKLYEELEPNYYKTLYSDTYITKDKLFSKDFDIEHIIPKARLFDDSFSNKTLEARNINLEKSNKTAFDFIKEKYGEDGAEAYKKKLDMLLENDAISRPKYNNLLRAEADIPSDFINRDLRNTQYIAKKACEILGELVKTVTPTTGKITNRLREDWQLVDVMKELNFEKYEKLGLTEIVEDRDGRKIKRIKDWTKRNDHRHHAMDALAIAFTKPSFIQYLNNLNARSNKGDSIYAIENKELHYEEGKLRFNAPIPVNEFRAEAKRHLSAILVSIKAKNKVMTQNVNKIKTKHGIIKKIQLTPRGPLHNETIYGTKMRPIIKMVKVGAALDEATINKVSSPAIREALLKRLNEYSGNAKKAFTGKNTLEKNPIYLNAGRTKTVPSLVKTVEWESFHPTRKLIDKDLNVDKVVDKGIREILKARLEEFNGDAKKAFSNLEENPIYLDEAKKIALKRVSIEGVLSAIPLHTLKNQAGKPITGKDGKPVLGNYVQTSNNHHIAFYYDEDGNLQDNAVSFFEAAERKSQGIPVIDKDYNRDKGWRFLFTMKQNEYFVFPNEATGFIPSEVDLTDEANYGIISPNLYRVQKVSRIDKGTSASRDYWFRHHLETILNDDAKLKNLAFKRIRGLLELKDIIKVRINSTGKIVAVGEYD

SEQ ID NO: 393 - protein, 1425 aa, Prevotella micans
  Prevotella micans F0438
MIQKIFGLDLGTNSIGSSVRNLELGENLTEQLEFFSSDIFGSSVSKNSNGREYSLAGNRSAHRRSRGLNEARRRKLWATLDLLIEHGLCPMSPDSLMQWRTYDKQKGLYRQYPIEDKDFNAWIMLDFNGDGKPDYSSPYQLRRELVVRQFDFDQPIERYKLGRALYHIAQHRGFKSSKGETIADQEKNEKKPIAEEGADIANEMKASETKLSKGLVAYMQENHLKTVGEAFAKLEDERVRIRNNESYRAIRSQYQDEIKEIFTYQKKLSVESELYERLTSEKKGVGTIFYKRPLRSQRGNVGKCTLERNKPRCPIGRPEFEEFRAWTLINNIKIRETAGEPYKQLPIKLRQELLKDCFLSKVKADFKFEDIRKYIEKRLGLSFSNDDKTINYKDSVSIAACPVTVRMKKLLGENWANCRIDGEKRRQAHGKNNNNEHIVSYTEEDIWHVCYNAEDPEEVSNFARKALHWDENKIKELVRLWTSIPQGYAMLSLKAIRNINRMLLLGLKYSDAVLLAKLPDIVPVSDEDILAITKEFLQLEDKLNQEKQINNIVNSLIANYKSKLEENRFADHNYQYQLGEGDDEDINTQIKSHIGAKLWVQIGADEQTKIFQAVRSKYQDFFKSYKRKFVESPKLGELLVAFLTEKFPNVKSKQWERLYHPSQIAIYRPIPVDNDRSKLRLGNPNIGAIKNPTVMRVLNTLRRRVNQLLDDGVISPDETRVVVETARELNDANTKWALDRYNRIRRDENEKIRKILKELNPTTNSISEQDIDKARYIFEQCETDFYTDGKVPYYNKDIKKYKLWLEQGGQCLYTGQTINLTNLFNPNAFDMEHTIPKSISFDNSDQNLTLCESYYNRFIKKNNIPTDMPNYDKDVTINGKEYTAIKPRLQRWKERVDRLSRNVDFWKGQARRAQDKDRKDECIREKHLWDMELAYWKGKLERFTMTDVTDGFKNSQLVDTRVITRHAVLYLKSIFNHVEVQRGETTAEFRKILGLQSIDEKKDRSLHSHHAIDATMLTVIPSAAKRDRMLELFYKIEETKKALKNYNDNNKTGLNLELKGLEEKLDKEKKDCRVGRRVNDLDRFINENIIVSHHTKDQALTPAHRRLRKRGKIVGGKEHPRWQTGDSLRGEIHKASYYGAITQFAKDANGKVLMKDGQAQIDPTIYYVIRRELKYKRSTQDSGFTNWEDLEKVIVDTDLFGLMKGQFPEGTSFKDACEQGFYMIKKGKNGEGDVKTHRIRHVRCKAVKTALRIKEQTYKSSKDYKQFFYAAVGDLYVMCYYTDGKKRDFKIYSLYDISNHRKSGTEDIPKFITDKKGNHLPLDYKLRTGDMVLLYKDNPEELKDLDQVNLKRRLYKVNRFESEGLIILLTHHLSTTTERGCSIGKIENYQNLPTAIRCGIKTIKFLIMGKHRDFVIRNGNIEFKH

SEQ ID NO: 394 - protein, 1506 aa, Prevotella nigrescens
  Prevotella nigrescens ATCC 33563
MKTILGLDLGPNSIGWAKVEVDDEGNYLRNIKLGSRIIPMTQDMLGDFDKGVKVSQTAIRTDFRGNRRLIERHLLRRERLHRVLHALKFLPKHYEDAIGWDRNEPATYGKFVNNSEPKLAWERQEDGSMRFLFMESFNEMVADFAQNQPSLVSDGKKIPLDWTIYYLRKKALTRPIKKEELAWILLNFNQKRGYYQLRGEEEEDNLTKRKEYYKLKVVGVEADGAPKGGKTWYNIHLENGWTARCQSKIPLDDWVGKVKEYIVTTEYEDDGKTPKCDKEGKVKRSFKSPEKDDWQLIKTRTEKFIDDSNKTVGAFIYDYLLEKPFDKIRGKYIRTIERKYYKNELREILREQTKYHEGLHSLEALKICAEELYKNNQQHQEYLLKKDMTFLLLNDLIFYQRPLKSKKSLIADCPYEVYKYDDKLTGKKGQKKIKCIAKSNPYYQEFRLWQFIANLRLFSVTDGKEVTAEYLKTEEDYVRLFSFLNDRKDIKQETFLRSFLKLKKESIGSEKIYPIRWNYIEDANKSYPCNATRHELLLAFDRADIPRELLDVEEREYRLWHLLYSIEAKEETESALRKLKANKAFGDLNIDDAFVNSFLKIKPFEKEYGAYSEKAIKKLLAVMRRGSLWKEADICEATKQNIAKILQNDIDEKLKKKIEAAVSSFNKLSDFQGLPTWLACYVVYGRHSEAAQIQCWQSPEDLKTYINKFKQHSLRNPIVEQCLLETLRTVYDIWKDAGQIDEIHIELGRNMKSTAEQRARKTKDILRNENTNLRIKNLLVELKNDDKIENVRPYSPSQQEILRIYEEGALQELSKEDEMFEDISKISKMAQPSPTELSRYKLWLEQKYRSPYTGRVIPLSKLFTTAYQIEHIIPQSRYFDDSFNNKVICESEVNSLKDNMLGYEFIKECGGRIVHCTLLGDVKIFTKEEYKDFVTKHYIDNTYKRDKLLLEDIPQEFSARQLNDSRYISKMVQTVLSNIVRAENEQEATSKFVVSCNGAITNRLKKDWGLNDVWSSIVCPRFKRLNEITKTNAFGHWEDKAGKHVFQTTVPLELQRGFSKKRIDHRHHAMDALVIACASRNIVNYLNNESANSPEKREDLRKKLCDEKRKIRKPWKTFTQDAREALSDVVVSFKNYVRVINKATNYYEHYSSSGNKVMISQKGNDMWAIRKPLHKESVFGRVNLCRKVIVSLKKALENIPAICDKTLRDYINALVEKHFNTRQLLAHFKSINYRLNRQCVEKVEVWQFSDEKIEMVARRKSLDTSFDDKQISSITDTGIQKILLNYLQTKDGNAEIAFTPEGIEEMNKNISLYNDGKAHQPILKVRVATPKGMKYPVGQTGNKATKFVVAEKGTNLYFAIYENELGVRSYDTIPLNIVVERLKEGLSPVPQANEADIPLKFYLSPNDLVYVPTKENEDELCRDRIYKFVDSSGTTANFVPHTSANTIYNVDKEYAEKCCNGAVFLNEYGLGSPQSKNQRALTGEMIKEICWKLKVDRLGNIIKVIK

SEQ ID NO: 395 - protein, 1380 aa, Prevotella nigrescens
  Prevotella nigrescens F0103
MKRILGLDLGTTSIGWALVNEAESNNEASSIVRLGVRVNPLTVDEKSNFEKGKAITTNADRQLRHGARINLQRYKLRRQNLHDCLQKQGWLGTEAMYEEGKASTFETYKLRAKAAEEEISLHEFARVLFMLNKKRGYKSNRKANNKEDGQLFDGMTIAKKLYEEHLTPAEYSLQLLNKGKKFTQGYYRSDLNAELERIWDEQKKYYPEILTDEFKQQLEGKTKTNTSKIFLAKYGIYSADLKGLDRKLQPLKWRVEALKQQVDKEVLAFVISDLKGQIANTSGLLGAISDRSKELYFNKQTVGQYLWASLEENPHISIKNKPFYRQDYLDEFEKIWETQATFHKQLTPELKQEIRDIIIFYQRPLKSKKSLISVCELEQRKVKATIDGKEKEITIGPKVAPKSSPVFQEFRIWQNLNNVLLIDNDTNEKRPLDEDERYLLYKELSIKAKLSKTEALKILNKKGKQWDLNYKELEGNRTQAILFDCYNRIITLTGHEECDFKKIKASEIRHYVSTIFKNLGFSTEILDFDPSLEKHELEKQPMYQLWHLLYSYESDNSRTGNESLLRKLETTFGFPEEYATVLCDVVFEEDYGNLSVKAMRKILPYLQAGNDYSQACAYAGYNHSRHSLTKEELDQKVYKERLELLPKNSLRNPVVEKILNQMINVINAIIDEYGKPDEIRIEMARELKSSAADRKKTTHAINQGNDENQCIREILEKEFALSYISRNDIIKYKLYEELKPNGFKTLYSDTYIPKDKLFSKDFDIEHIIPKARLFDDSYSNKTLEARDINLAKSNKTAFDFVKEKYGEQGAEAYKKKLDMLLGNNVISKPKYNKLLMTEADIPSDFINRDLRNTQYIARKACEILGELVRTVTPTTGKITNRLREDWQLVDVMKELNFEKYEKLGLTEIVEDRDGRKIKRIKDWTKRNDHRHHAMDALAIAFTKPSYIQYLNNLNARSNKGDSIYAIENKELHYEEGKLRFNAPIPVNVFRAEAKRHLSAILVSIKAKNKVMTQNVNKIKTKHGIIKKIQLTPRGPLHNETIYGTKMRPIIKKVKVGAALDEATINKVSSPAIREVLLKRLNEYSGNAKKAFTGKNTLDKNPIYLNAERTKTVPASVKTVEWENYHPIRKPITPDLKVDKVIDKGIGEILKARLEEFNGDAKKAFSNLEENPIYLDQTKKIALKRVSIEGVLSTIPLHTLKNQAGKPIMGKDGKPVLGNYVQTSNNHHIAFYYDEDGNLQDNAVSFFEAAERKSQGISVIDKDYNRDKGWRFLFTMKQNEYFVFPNEATGFIPSEVDLTDEANYGIISPNLYRVQKMSRIEKGTSVSRDYWFRHHLETILNDDSRLKNSAFKRINSLKPLEGIIKVRINSIGKIVAVGEYD

SEQ ID NO: 396 - protein, 1391 aa, Prevotella oralis
  Prevotella oralis ATCC 33269
MKKILGLDLGTTSIGWALVNEKENNEELSSIIRLGVRVNPLTVDEKSNFEKGKDITTNADRTKCRSARRNLQRFKLRREALADCLKRHGLMTDETPLCETNNSIIFKTYSNRAKAVCEKIALDDFVRVLFMINKKRGYKSSRKLNTDDEGTLVDGMDVAKLLYNEQITPGEYLLRLFKKGKKTRPDFYLSDLKAELERIWDFQRTFYPEILCNALKEDLKGKSRTQSSAIFYAKYKVSTAKIAGKDKRLQELTWRTDALRKQLTIDEVAYVICSINGEVNGSSQRLSMISDRSKLLYFNHQTIGQYLMQRLEENPNAGLKNIIFYRQDYEDEFNDIWNSQATYHKELTPELKKEVKDIIFYQRGLKSCKWLINYCELEHEEIEVKTPEGKLRKITIGSKTCPKSSPLFQEFKIWQVLNNLQVSPLNSRRKAKRKKDEEPSLFSDEDMNTACRYLNEEEKLTLFKELSIKKELKKKDALKLLFENYKELDLNYKVISGNVTMANLYRAFQDIISLTGNGEFDFQAMPAEEAEKTVEEIFGGLGYKTAFLHFDASLHDKEFERQPAYRLWHLLYSYAGDQSKTGIEALVKRIQELCGFEPEYARILANISFIPDYGNLSSKAMRKILPYMQDGYEYSEACSKAGYRHSASSLTKEEINKKNYKTHLDEIKRNSLRNPIVEKILNQMVNVVNSVIDTYSNIDEIRIEMARELKKSKPEREDMSFAISKATKETERIKGILEQEFKIQHVTRNDIIRYRLYEELKPNGYKTLYSNTYIPREDLFSKKFDIEHIIPKARLFDDSYSNKTLELRDINIEKGNQTAYDFVLSKYGEEGLYKYEQRVEEFKKNNEQAGTKCRKLLMREADIPSDFLNRDLNDSQYIAKKAHELLREIVPTVTATTGSITNRLREDWKLVNVMKELNWEKYDKLGLTEEYKDKDGNTVRHIKDWTKRNDHRHHAMDALTIAFTKPSFIQYLNNLNARSNRGGSIYGIEQKELERENNKLVFIPPIDPKIFRKQAKEHLSNILISIKAKNKVVTKNVNKTKSKSGTNRKVQLTPRGQLHLETVYGKIRTYKTEEIKVGTKLTEELIAKVADKKIREALMQRLSEYGGNIKKAFQNISKHPIWLNGSHTKHVPEKVKIVFFEDVFTIRKAITPDIKIDKVIDSKIRRILQERLNEFGGEASKAFSNLDENPIWFNRDKGIAIKSVKIRGIAKGTAIRVKKDIHGKTIIGNNGYPVANDYVNTGNNHHVAIFRDKDGNLQEHIVSFYEATARAIQNLPIVDRNYNSEKDWKFLFSMKQNEYFVFPNPNTGFNPSEISLKDEKNYALISPNLFRVQKLSHYYYVFRHHLETNVDTNLQLKDITWKRITAVNNLTGAVKVRIDHLGRIVDVGEYK

SEQ ID NO: 397 - protein, 1204 aa, Prevotella ruminicola
MERILGIDTGTNSLGWAIVDKDENQYHLVAKGTNIFSEGVKIEKGIESSKAAERTEHRSVRKHYWRRKIRKIRLLTILSDNDLCPRLKHEQLRQWRLKKVYPTDDTFMEWQRTEDKAQVNPYKFRYICLTQKLDLSDITQRFILGRALYHLNQRRGFLSNRKEATKESEGTVKEGISSLSKDMKDSGCEYLGEYFYQLYQQGKKIRNHYTARKEHYLKEFKAICSKQELDDALIEKLEKAIFDQRPLKSQKGQVGTCTFEKGKSRCPSSHPLYEDFRMYSFINNIKVQVDTLYDKGERSLTDEEKQLIIPLFKRKSKRTFPFEDIAKKIAGKNNYCYIKSNEEKAYKFNYQMDTQVSGSPVNAQLEEIFGEDWLSSVCEVYTLANNKSRFQIMNDVWHVLFFYDDEDKLKEFAKDRLQLDDELAEKFSKISIPNDYAALSLKAIRKIMPYLRDYGLIYSEAVFLANLVDVLPQHVWGIKEMREAAIENVIDVMHSYDKNNIDGITLEGCVKTFLKERYQVSDDNLKKLYHPSMLDPYPRQRPNDEGVFQLGSPRISSVKNPMAMHSLFRLRKVVNLMLKKGYITPDTKVHIEFSRDLNDANKRWAIQTWQRENEKERERCRKEIEKYIASPSDTDILKYQLWEEQNHKCLYTGDEIRITDFLGDNPKYDIEHTIPRSAGGDSTKMNLTLCSSRFNRDEKKTKLPAELVNHDEILERISNWKEKYEDIDKQIRKISTKGATSKEDKDSKIRRRHYLILQRDYWRGKYQRFTMTEVPEGFSRRQGTDISVISRYARMYLKSVFKQVYIVKGIATSDFRKMWGIQDEYAKKERVNHVHHCIDAITIACIGKAEYDKLADYRHQYDDYLFQGKTKPTFDKPWPSFVIDIKHIQDELLIAHYAKDNLEKFTKKNLRGKDGRIIRDKFGNKLQMKGDTSRNSLHNDKFYGAINHEGEIKYVYRTNIEALDAKSIGNIVDPTVRSIIESAIAIHGSLKAAINKGIWMNEEKHIPIKKVRVFRNDVKKPIELKDQRDLSDKDYKQHYYVTNDGNYMMLIFSKLNNKGREIRQHVVINSLEATEVIKSHKRSQVGKVVWESYYSKEGFDLIYKLKSGTMILLYENNRDEVWDLDIRNLQKRLYIITKMKYDGRIYMMHHQEAREKKDLEEKSGSFKINEDYRPLIVNSYNQFNALVQDLDFEINDLGEIRRLI

SEQ ID NO: 398 - protein, 1424 aa, Prevotella sp.
  Prevotella sp. C561
MTQKVLGLDLGTNSIGSAVRNLDLSDDLQWQLEFFSSDIFRSSVNKESNGREYSLAAQRSAHRRSRGLNEVRRRRLWATLNLLIKHGFCPMSSESLMRWCTYDKRKGLFREYPIDDKDFNAWILLDFNGDGRPDYSSPYQLRRELVTRQFDFEQPIERYKLGRALYHIAQHRGFKSSKGETLSQQETNSKPSSTDEIPDVAGAMKASEEKLSKGLSTYMKEHNLLTVGAAFAQLEDEGVRVRNNNDYRAIRSQFQHEIETIFKFQQGLSVESELYERLISEKKNVGTIFYKRPLRSQRGNVGKCTLERSKPRCAIGHPLFEKFRAWTLINNIKVRMSVDTLDEQLPMKLRLDLYNECFLAFVRTEFKFEDIRKYLEKRLGIHFSYNDKTINYKDSTSVAGCPITARFRKMLGEEWESFRVEGQKERQAHSKNNISFHRVSYSIEDIWHFCYDAEEPEAVLAFAQETLRLERKKAEELVRIWSAMPQGYAMLSQKAIRNINKILMLGLKYSDAVILAKVPELVDVSDEELLSIAKDYYLVEAQVNYDKRINSIVNGLIAKYKSVSEEYRFADHNYEYLLDESDEKDIIRQIENSLGARRWSLMDANEQTDILQKVRDRYQDFFRSHERKFVESPKLGESFENYLTKKFPMVEREQWKKLYHPSQITIYRPVSVGKDRSVLRLGNPDIGAIKNPTVLRVLNTLRRRVNQLLDDGVISPDETRVVVETARELNDANRKWALDTYNRIRHDENEKIKKILEEFYPKRDGISTDDIDKARYVIDQREVDYFTGSKTYNKDIKKYKFWLEQGGQCMYTGRTINLSNLFDPNAFDIEHTIPESLSFDSSDMNLTLCDAHYNRFIKKNHIPTDMPNYDKAITIDGKEYPAITSQLQRWVERVERLNRNVEYWKGQARRAQNKDRKDQCMREMHLWKMELEYWKKKLERFTVTEVTDGFKNSQLVDTRVITRHAVLYLKSIFPHVDVQRGDVTAKFRKILGIQSVDEKKDRSLHSHHAIDATTLTIIPVSAKRDRMLELFAKIEEINKMLSFSGSEDRTGLIQELEGLKNKLQMEVKVCRIGHNVSEIGTFINDNIIVNHHIKNQALTPVRRRLRKKGYIVGGVDNPRWQTGDALRGEIHKASYYGAITQFAKDDEGKVLMKEGRPQVNPTIKFVIRRELKYKKSAADSGFASWDDLGKAIVDKELFALMKGQFPAETSFKDACEQGIYMIKKGKNGMPDIKLHHIRHVRCEAPQSGLKIKEQTYKSEKEYKRYFYAAVGDLYAMCCYTNGKIREFRIYSLYDVSCHRKSDIEDIPEFITDKKGNRLMLDYKLRTGDMILLYKDNPAELYDLDNVNLSRRLYKINRFESQSNLVLMTHHLSTSKERGRSLGKTVDYQNLPESIRSSVKSLNFLIMGENRDFVIKNGKIIFNHR

SEQ ID NO: 399 - protein, 1483 aa, Prevotella sp.
  Prevotella sp. MSX73
MKTILGLDLGTNSIGWAKVSVDDYGNYLHDIKLGSRIIPMSQDVLGNFDSGVTVSQTAQRTEFRSKRRLVQRNLQRRERLHRVLHVLDFLPAHYDAAIGWDRTEAVTYGKFLNHAEPKLAWEELGNGKRRFLFMDSFHEMVADFARCQPALVADGKKIPLDWTIYYLRKKALTQAITKEELAWILLNFNQKRGYYQLRGEEEEENPTKQEEYYELKVVSVEATDSRKGNDTWYNVHLENGWIYRRSSKISLDDWVGKVKQFIVTTEYEKDGTTLKTDKEGNVKRSFRAPNENDWGLRKKRTETLLEMSGKTVGAFIYDHLLQEPADKIRGNFIRTIERHYYKAELEAILAEQCKYHIELRDKEMLEACARELYLNNLPHQRSLMKKDMTYLLLYDLIFYQRPLKSKKALIANCPYEYYEYVDKETGEIKRQNIKCIAKSNPYFQEFRLWQFVLNLRLFDRVEDKEVTANYLPTADDHARLFTYLNDRKEINQETLLKDYFKLKKVKIGNEKEYPIRWNYIEDKEKKYPCNETRYELLMALDRAGIEHKWLDDNNLEYRLWHLLYSVEVKSESETALRKLKNDDAFVNSFLKVKPFKKEYGAYSEKAIKRLLAVMRKGFLWNEQDICDETRKRIEIIIKGDVDEKVKERMGHAAYSFDRVSDFQGLPEWLACYVVYGRHSEAMDIQRWDSPERLMAYINNFKQYSLRNPIVEQCILETLRTVHDIWKETGQIDEIHVELGREMKSTSEERARRTQNVLRNENTNLRIKSLLIELKNDTDICNVHPYSPMQQEILRIYEEGALQELNREDEDFEEISKISQMSQPSGKELNRYKLWLEQKYRSPYTGKAISLAKLFTPAYQIEHVIPQSRYFDDSFTNKVICEAEVNTLKSNLLGYEFIKKHGGEIIHCTTLGDVRIFSESEYKAFVMDHYANNKSKKDKLLMEDIPQEFLSRQMNDSRYISKVVKTLLSNIVRMADESEATSKSVIVCTGGVTDRLKKDWGLNDVWNSIVYSRFERLNRLTGTEAFGHWENKDGKRVFQTSMPLELQRGFRKKRIDHRHHAMDALVIACASRNIVNYLNNESANNPKKREDLRRQLCDKNRVIRKPWETFTQDAYNALENVVVSFKNYVRVINKATNRYEHYDENGKKRFVQQKGSELWAIRKPMHKETYYGHVNLRRKELVTLQKALDDIPSICDKKLRDYISALVEKHFNKRQLLAHFKSTDYYWQKQYVNKVYVWTFSDDIKPLVATRKLLDTSFDAKRIGTITDTGIQKILRNYLEAKGGNATLAFTPEGIVEMNQNISKYNDGKPHQPILKVRITEPMGAKYRVGQTENKMAKYVEAQSGTNLYFAIYEDSEGKRSYTTVPLDEVAERLKQRLSPVPEKDENDVPLKFYLSPNDLVYVPTEEELQLRECKLNKDRIYKMVSSTGSECHFIPYYVANVIYNKVEFEAKNKIGRALTGEMIKAVCWKLEIDRLGNILKVIK

SEQ ID NO: 400 - protein, 1375 aa, Prevotella sp.
  Prevotella sp. oral taxon 306 str. F0472
MKKILGLDLGTTSIGWALVNESENKDEQSSIVRLGVRVIPLTVDEKGNFEKGKAITTNADRQQVHAARINLQRYKLRRENLRDCLQKQGWIGSEPMCEDGKSSTFETYKLRAKAAVEEVSLHEFARVLFMLNKKRGYKSNRKANDKEEGKLFDGMTIAKKLYEEHLTPAEYSLQLLNTGRKFTPEYYRSDLIEEFEKIWNEQQKYYPEILTDEFKQQLEGKAKSNTSKLFLGKYGIYSADTKGLDRRLQPLKWRVEAMKQQVDKDVLAFVISDLKGQIANTSGLLGAISDRSKELYFSKQTIGQYLWASLQENPHISIKNQPFYRQDYLDEFEKIWETQATYHKELTSELKQEIRDIIIFYQRPLKSKKNLIAVCELEQRKVKVTVDGKEKEITIGPKIAPKSSPMFQEFRIWQNLNNILLLDHETNSKRPLYEEERNLLYEELSVKEKLSKTEALKVLGKKSKQWDLNYKELEGNRTQAVLYDCYNRIIVMSGHEECNFKKLKASDIRHYVKMIFKNLAFNTDILCFDSSLKGHELERQPMCQLWHLLYSYEGDNSRTGNDALLRKLETSFGFPKEYAAVLADVIFEDSYGNLSVKAMRNILPHLQAGKDYSQACEEAGYKHSRRSLTKEELNQKVYKEKLELLPKNSLHNPVVEKILNQMVNVINAVIEEYGKPDEIRIELARDLKIGAAERENMTRSINQGNAENKRIREILEKEFALSYLSRNDIIKYKLYEELKSNGFKTLYSDTYISKDKLFSKDFDIEHIIPKARLFDDSLSNKTIEARDVNIAKSNKTAFDFILERYGEQGVKTYKTKLLRLLEDGAISNKKYNNLLKTEADIPSGFIDRDLRNTQYIAKKAYEILSELVKIVTPTTGSVTNRLREDWQLVDVMKELNFEKYQKLGLADVIEDRDGRKVKRIKDWTKRNDHRHHAMDALTIAFTKPSYIQYLNNLNARSDKSSSIYGIEVKELHREEGKFRFNAPLPINEFRAEAKRHLKSVLVSIKAKKKVMTQNVNKIKTKHGIIKKVQLTPRGELHNATYYGTKKRPLVRMVKVGAALDEATIKRVCSPAIRAALLKRLNAYNGDAKEAFTGRNSIDKNPIYLDIEQTKLVPVLVKTIEWGMYHPIRKRITPDLKIDKVIDKGIREKLKARLAEFNGDAQKAFSNLDENPIYMDEAKRITLKRVSIEGVLSAIPLHTLKDKAGKPVIGSDGKPVFGDYVQTSNNHHIAFYIDDKGNLQDNPVSFFEAAERKSQGVPVIDRRYNCDKGWHFVFTMKQNEYFVFPNEATGFIPSEVDLLDEANYCIISPNLYRVQKLSKASGRDYWFRHHLETMLNDDLRLKNSTFKRIQSLKGLEDIVKVRINSIGKIVAVGKYD

SEQ ID NO: 401 - protein, 1216 aa, Prevotella stercorea
  Prevotella stercorea DSM 18206
MTKILGIDTGTNSLGWAIVDKTADNYNLLDKGVNIFQEGVKIEKGIESSKAAERTEHRATRVRYYRIKLRKIRLLRILSDNHLCPPLSQEELSTWRLKKVYPKNELFMQWQRTDDDTEKTPYAYRHKCIHEKLDLSDVTDRYILGRAFYHIIQRRGFLSNRKEQGGEDSGKVKEGISTLTHEMNEAGYEYLGDYFYALYNKGEKIRKHYTARNEHFLSEFKAICEKQDLEKELGSEVVRNIEKAIFDQRPLKSQKGQVGKCVFEKNKTKCPSSHPMYEEFRMLTFINNIKIKTPNDDVLRPLNTGEREKIMPLFFRKSKKQFDFEDITKKLAPKKMYGFYKKEEDAEMPFLFNYPMDTSVSGCPVTAALKDVFGDDWITAICETYTLGEGKSRFDIVNDIWHALYFYSDKDKLAEFAINRLQLSEDEAKIFSEISLPADYASLSLKAICKILPYLRRGLIYSHAVFLGNLCEVMPKYEWSIKEMRETIIDNIIMEMDKCDTKDKRTFEVCIKDYLKGQYNVSDNSLKKLYHPSMIETYPRVQYTNEHGVYQLGSPRIDSVRNPMAMRSMFRLRKLVNRLLVEGKIDQNTEVHIEFARELNDANKRNAIALFVKENQSANDEARKQIITLFKKETGTDIEPTDKDILKYVLWEEQNHICLYTGKQIRISDFIGANPKFDIEHTIPRSVGGDSTKMNLTLCDSRFNREVKKTKLPVELPNHDEIMERIKEWKKNYELLDIQIRKNKKLSKGATTKEQKDTIIRKRHLLELRRDYWRGKYERFTMESVPEGFSRRQGTDISVISKYARLYLKSLFNRVYTVKGIATSDFRKIWGIQDIYSKKERINHVHHCIDAIVIACIGLDEYNKLGAYYHDEENNKWYGMSKASFKKPWATFVEDIKKIQDEILVYHYTPDNMPKQGRRRIKIDGKKILCKGDAARGSLHNDTYYGAIENDGAVKYVKRIDLASLEEKDVKNIVDDTVRSIIEAAIKEKGFKDAMASTIWMNEEKRVPIKKVRCFTPSITKPLNIRKQRDVSIKEYKQQYHVANDSNYLLALYIGTDNKGKEKREFEIVNILQAAQYYRTSNDKEVVDRHIVPIKSEHDYPFAYTLKIGTMVLLYEKSPNEVWDATIKERNRRLYKVTGLSTMRMKGRNGEYAYATVKLIHNEEARPSKDIKAKNGEYEQGEEFRPAIIMLHTQLNALVQGYDFEINELGEIRRLR

SEQ ID NO: 402 - protein, 1234 aa, Prevotella tannerae
  Prevotella tannerae ATCC 51259
MPNFWSIFTENLQTYLMKTRILGLDTGTNSLGWAVVDRDENNQYTPICRGDLIFTEGVKQEKGIEFSLAAERTSYRASRRHYFRRRLRKVEVLKVLVKHKLCPPLSDEALNRWHTKKEYPLDEDFILWQRTNEADNKNPYHDRHICLHRKLNLKDSQTDRYTLGRALYHLTQRRGFLSNRLDQNEEAEETGKVKSAISELSKEMKEAGCEFLGDYFYLLYRTEGNRVRIRSRYTDREKHYLQEFKEICRVQELDEDLAKALEKTIFFQRPLKSQRQGVGKCTMEKGHSRCAVSHPLYEEYRLLCYLNNIRIKTPSDDRLRPLNAEEREKITPLFYKEKNFDFEKIAKKLAGKTPFGWIRDAEDWPYQFNYRMTQEAPACPTTAQLIKVFGEDWKAALAETYTMSAKQDGTLKTEDEICTDIWNVLYSFSSKEKLKEFGLKKLQLDEVQAKAFSEIRLTRDFASLSLKAIRKILFFLRTGEDYSKAIFLANIPTIVGEEIWNDIERRSRLLYKVDLALRPQEERDAEEHRTIAERIKAAVAAEVPDAPIDLLYHPSMIEAYPDAKRNERFDCYQLGSPKTNAVRNPMAMRSLHMVRKVINHLLRKHIIDEKTEIHIEYARELNDANKRQAIADWQRELSKRHTAYAQNIRQLYKAETGLVIEPTKADILKYQLWEEQQHVCLYTGKKIGIADFLGANPKFDIEHTIPRSRGGDSTQENLTLCESKFNRDIKRDKLPTELANYEEILARIEHWKKQCYALKLKRDGIRTHSGLEKSIKDSRIRRRHLVGLEYGYLKGKYDRFTMKEVPEGFSRRQGAGIGLISKYAGLFLKSLFKDPKNPNRSNVYVVKGAITAEFRKLWGLQQADEAKSRENHTHHCIDAYTIACIGPCEYAALAAYYRSDEEFKYGRRREKPQFEKPWPTFTEDLLKLQEELLIVHQTTDKLGKRDRRKVKTPRGKFLTGGDSARGRLHQETYYGAINYDGNIKYVVRKPLDSLTEKDLDKIVDETVMGIVKGAVEAKGSLKEALADGIYMNKEKGILIKRVRIFSDVSEPINLKQLRDVSTKEYKRHIHLRKDENYLFAIYEGIDKKKNKKQTETATVDYLDAAKFYKDSKRRDKANSLVGDYSKKNKLPLKCILKKRQMVLFYEHSPEEIRFKDKKDLSRRLYIVTSIAKDGRVKFLHHQAATATGIQSSPSPFTNDGEHQPYYRLSASNIKVLVAGIDFDINILGEITPKL

SEQ ID NO: 403 - protein, 1487 aa, Prevotella timonensis
  Prevotella timonensis CRIS 5C-B1
MKNILGLDLGSNSVGWALVKVEENGNPIGSIKMGSRIIPMSQDILGSFEKGDTVSQTAQRTLYRGKRRLIERHVLRRERLCRVLHIMNFLPAHFDRLLGWDKTDNKTYGKFIDDSEPKLAWRQNKNEMGKMEFVFMDSFHEMLSDFAKHQPQLIANGKKVPLDWTIYYLRKKALTQLISKEELAWILLNFNKKRGYYQLRGEEEEEQPTKKEEYKVLKVISVDADEGQKGNGIWYNIHLEDGGIYKKKSDIPLYDWVGKTLQLIVVTTYEKDGKTPKIFDSGKQNPSYRLPKEDDWGLVKKRTESQLQSSGKTVGAFIYDNILSKPDDKIRGNLVRTIERKYYKKELIEILQQQAKYHDELHNQNLLESCAKELYAHNDVHYNEVIKSNMINLLVNDIIFYQRPLKSKKSLIANCKYESYEYVDKETGEIKEMPIKCIAKSNPYYQEFRLWQFIHNLRLSDVVTREDVTAQYLSTPQDYCNLFTYLNDRKEIKQDILLKDFFKIKKVQIDKEKVFPIEWNYIKDATKSYPCNETRYELLSALKRAGMDKQWLDDTPNMQYRLWHLLYSVEEKEESAKALRKLYDDDKFVTSFLKIKPFNKCYGAYSEKAIKRLLTLMRMGKAWNEQAIDAKTLKCIQQIITDNVDSKLKEKIDDSRYVLHHVSDFQGLPTYLASYVIYGRHSEVTDIQCWDSPEDLLKFIRDFKQHSLRNPIVEQVILETLRVVYDIWKAEKHIDEIHVEVAREMKLTAQQRNEANLRNLNNEATNLRIKYLLEELKNDTFIKDVRPLSPIHQEKMRIYEQAVLGNLNKQDKDYDDIIKISKKEHPTNAELIRYKLWLEQRYCSPYTGKAISLSKLFTTAYEIEHIIPQSRYFDNSFNNKVICEAEVNKAKGNMLGYEFIKKQGGQKIYCTQLGKAVTILKEEAYKQFVNEHYAHNKRKRDNLLAENIPESFSSRQLNDTRYITKTIMSLLSNVVRQQSEEEATAKNLLPSSGSVTDRLKNDWGLKDVWNTIVTPRFERLNKLSGTNDFGEMKEENGNRYFQTNVPLEYEKGFKKKRIDHRHHAMDALVIACTTRNMVNYISNANANSPKQREDLRQLLCDKNRIINKPWDTFTQDALKALNDIVVSFKNNVRIINRATNRYQRYDKNGKKIIFSQKGDDMWAIRKSMHKETVFGRVNLIRKEVLPIAKALDNISAICNAQLRAYVNDLVDKHFNKKQLVAHFKSLNYKWNRQDVSKVEVWISSDNKTPMVAVRKPLDTSFDKKKIASITDTGIQTILLNYLESKGGDASVAFAPEGIQEMNSNIELYNNGKAHKPIKNVRLSEPLGAKYQVGERGAKTKKYVEADKGTNLFFAIYEDEEGKRYYYSVPLREAIERQKQKLSPVPEYNEKGVALKFYLSPNDLVYVPTEEERTMGTCHIDKARIYKMVSSTGCSCYFVPSTFAKVIVDKVELQSLNKMEKAITDECIKEVCWKLKVDRLGNIINVIK

SEQ ID NO: 404 - protein, 1218 aa, Prevotella timonensis
  Prevotella timonensis CRIS 5C-B1
MNKRILGLDTGTNSLGWAVVDWDEHAQSYELIKYGDVIFQEGVKIEKGIESSKAAERSGYKAIRKQYFRRRLRKIQVLKVLVKYHLCPYLSDDDLRQWHLQKQYPKSDELMLWQRTSDEEGKNPYYDRHRCLHEKLDLTVEADRYTLGRALYHLTQRRGFLSNRLDTSADNKEDGVVKSGISQLSTEMEEAGCEYLGDYFYKLYDAQGNKVRIRQRYTDRNKHYQHEFDAICEKQELSSELIEDLQRAIFFQLPLKSQRHGVGRCTFERGKPRCADSHPDYEEFRMLCFVNNIQVKGPHDLELRPLTYEEREKIEPLFFRKSKPNFDFEDIAKALAGKKNYAWIHDKEERAYKFNYRMTQGVPGCPTIAQLKSIFGDDWKTGIAETYTLIQKKNGSKSLQEMVDDVWNVLYSFSSVEKLKEFAHHKLQLDEESAEKFAKIKLSHSFAALSLKAIRKFLPFLRKGMYYTHASFFANIPTIVGKEIWNKEQNRKYIMENVGELVFNYQPKHREVQGTIEMLIKDFLANNFELPAGATDKLYHPSMIETYPNAQRNEFGILQLGSPRTNAIRNPMAMRSLHILRRVVNQLLKESIIDENTEVHVEYARELNDANKRRAIADRQKEQDKQHKKYGDEIRKLYKEETGKDIEPTQTDVLKFQLWEEQNHHCLYTGEQIGITDFIGSNPKFDIEHTIPQSVGGDSTQMNLTLCDNRFNREVKKAKLPTELANHEEILTRIEPWKNKYEQLVKERDKQRTFAGMDKAVKDIRIQKRHKLQMEIDYWRGKYERFTMTEVPEGFSRRQGTGIGLISRYAGLYLKSLFHQADSRNKSNVYVVKGVATAEFRKMWGLQSEYEKKCRDNHSHHCMDAITIACIGKREYDLMAEYYRMEETFKQGRGSKPKFSKPWATFTEDVLNIYKNLLVVHDTPNNMPKHTKKYVQTSIGKVLAQGDTARGSLHLDTYYGAIERDGEIRYVVRRPLSSFTKPEELENIVDETVKRTIKEAIADKNFKQAIAEPIYMNEEKGILIKKVRCFAKSVKQPINIRQHRDLSKKEYKQQYHVMNENNYLLAIYEGLVKNKVVREFEIVSYIEAAKYYKRSQDRNIFSSIVPTHSTKYGLPLKTKLLMGQLVLMFEENPDEIQVDNTKDLVKRLYKVVGIEKDGRIKFKYHQEARKEGLPIFSTPYKNNDDYAPIFRQSINNINILVDGIDFTIDILGKVTLKE

SEQ ID NO: 405 - protein, 1496 aa, Prevotella veroralis
  Prevotella veroralis F0319
MKTILGLDLGTNSIGWAKVCVDDNGNYLRDIKLGSRIIPMSQDVLGNFDKGVTESQTSVRTGFRGVRRIRERSLLRRERLHRVLHVLGYLPPHYDSAIGWNKNEPSTYGKFLNHGEPKLAWEHKEDGSMRFLFMESFHEMMADFAKSQPSLVSDGKKIPLDWTIYYLRKKALSQPIRKEELAWLLLNFNQKRGYYQLRGEEDDDNPTKCEEYYELKVVGIEADEEGKNGNTWYNVKLENGWIYRRQSKIPLDDWIGKVREFIVTTEYEKDGITLKKDKNGDVKRSFRSPSEDDWGLRKKRTEKLLDSSKMTVGAFVYDHLLAEPSDKIRGKFIRTIERKYYKKELYAILCEQSKYHEELRSGDYLNKCAEELYKNNQPHRNSLLTKDLAYLLLEDLIFYQRPLKTKKSLIAECPYEAYKYVDKETGEIKRQGIKCIAKSNPYYQEFRLWQFISNLRLFNKADDKEVTADYLPTQDDYVRLFAYLNDRKEINQETLLKEFFKLKKITVNSEKVFPIRWNYIEDKEKKYPCNETRHELLLALDRARIDHSWLEKPGQEYRLWHLLYSVESKEETKEALRKLKDDDAFVESFLKVKPFKREYGAYSEKAIKKLLAVMRMGSLWRETDICDTTKGNITKILQGEIDEKLKEKISASVSSYNQLSDFQGLPVWLACYVVYGRHSEAAEIQHWKTPESLLAYINGFKQHSLRNPIVEQCILETLRTVHDIWKEVGHIDEIHVELGRNMKSTADQRARISENVLRNENTNLRIKSLLLELKNDPNIKDVRPYSPMQQEKLRIYEEGVLQELTKDDKDFTEITKISTMAQPSAKELQRYKLWLEQKYRSPYTGKSISLTKLFTSAYQIEHVIPQSRYFDDSFSNKVICESEVNSLKDNMLGYEFIKNHGGEIIHCTMLGDVKVLSESEYKAFVNDHYAHNKRKRENLLLEDIPQEFLNRQMNDSRYISKVVKALLSNIVRAEGEEEATSKFVVSCSGGITDRLKKDWGLNDVWNKIVYPRFERLNRLTGTEAFGQWENKDGKRVFQTAVPLELQRGFNKKRIDHRHHAMDALVIACTSRNIINYLNNESANNPKKREDLRQKLCDKNRTIRKPWETFTQDATAALEDVIVSFKNYVRIINKATNYYERYDVEGKKVIAEQRGDDMWAIRKPMHEATYYGRVNLRRKKKVNLRVALENISSICDNKLRIYINGLVEKGFNTKQILDKFKNTNDHFSMQKIDKVEIWQFTNEEEKLVATRKPLDTSFDTKKIASITDTGIQTILLNYLETKGGDSTIAFTPEGIVEMNQNISKYNNGKEHMPILKVRLYTKLGKKIPVGQTGCKAKQFVIAEAGTNLYFAIYEDEEGKRSYRTIPLNEVVERLKQGLSPVPEKNDKDVHLKFYLSPNDLVYVPIEDEHESLAKDHIYKFVDSSGTTANFIPHRSANVIFELNKKDAEKFCSGSIIQNEYGVGSSQSKNQKAITGEMIKAVCRKLEVDRLGNVIKVI

SEQ ID NO: 406 - protein, 1062 aa, Ralstonia syzygii
  Ralstonia syzygii R24
MAEKQHRWGLDIGTNSIGWAVIALIEGRPAGLVATGSRIFSDGRNPKDGSSLAVERRGPRQMRRRRDRYLRRRDRFMQALINVGLMPGDAAARKALVTENPYVLRQRGLDQALTLPEFGRALFHLNQRRGFQSNRKTDRATAKESGKVKNAIAAFRAGMGNARTVGEALARRLEDGRPVRARMVGQGKDEHYELYIAREWIAQEFDALWASQQRFHAEVLADAARDRLRAILLFQRKLLPVPVGKCFLEPNQPRVAAALPSAQRFRLMQELNHLRVMTLADKRERPLSFQERNDLLAQLVARPKCGFDMLRKIVFGANKEAYRFTIESERRKELKGCDTAAKLAKVNALGTRWQALSLDEQDRLVCLLLDGENDAVLADALREHYGLTDAQIDTLLGLSFEDGHMRLGRSALLRVLDALESGRDEQGLPLSYDKAVVAAGYPAHTADLENGERDALPYYGELLWRYTQDAPTAKNDAERKFGKIANPTVHIGLNQLRKLVNALIQRYGKPAQIVVELARNLKAGLEEKERIKKQQTANLERNERIRQKLQDAGVPDNRENRLRMRLFEELGQGNGLGTPCIYSGRQISLQRLFSNDVQVDHILPFSKTLDDSFANKVLAQHDANRYKGNRGPFEAFGANRDGYAWDDIRARAAVLPRNKRNRFAETAMQDWLHNETDFLARQLTDTAYLSRVARQYLTAICSKDDVYVSPGRLTAMLRAKWGLNRVLDGVMEEQGRPAVKNRDDHRHHAIDAVVIGATDRAMLQQVATLAARAREQDAERLIGDMPTPWPNFLEDVRAAVARCVVSHKPDHGPEGGLHNDTAYGIVAGPFEDGRYRVRHRVSLFDLKPGDLSNVRCDAPLQAELEPIFEQDDARAREVALTALAERYRQRKVWLEELMSVLPIRPRGEDGKTLPDSAPYKAYKGDSNYCYELFINERGRWDGELISTFRANQAAYRRFRNDPARFRRYTAGGRPLLMRLCINDYIAVGTAAERTIFRVVKMSENKITLAEHFEGGTLKQRDADKDDPFKYLTKSPGALRDLGARRIFVDLIGRVLDPGIKGD

SEQ ID NO: 407 - protein, 1066 aa, Rhodopseudomonas palustris
MSERVVRRILGIDLGIASCGWGVVDISGAGGGIIATGVRCFDAPLIDKTGEPKSATRRTARGQRRIVRRRRQRMNGVRRLLCEFGLLPDPRPDALNQAMRRISTASAAAQVTPWTLRAAAHQRLLSNEELAVVLGHIARHRGFRSNAKNEAGANAADETSKMKKAMEATREGLAKYHAFGDMIANDPKFANRKRNRDKDYSHTAKRSDLEDEVRAILRAQLRFGSAAATETLAQTFADVAFFQRPLQDSEDRVGDCPFEPGQKRAARRAPSFELFRFLSRLANLKLAVGRSPERRLTAEEIALAAKGFGETKKTITFKSLREALDLDPNARFSGIGKDKEASLDVVARTGGAAYGTKTLKDALGDAPWRSLSRTPETLDRIAEILSFREDITSIRNGLEDLGLDSLVVEALMQAAANGDFKEFTRAGHISARAARNIIPGLREGLVYSEACARVGYDHAARLSVPLDQVGSPVTRKALSEALKQVRAVAREYGPIDYFHIELARSVGKSAEERKQLTDGIEARNVEKAKRRKQAEEHLGRAPSDDELLRYELAKEQNFKCIYSGDAIDPAGVAANDTRYQVDHILPWSRFGDDSYLNKTLCTARSNQNKRGRTPFEWFEADKTDVEWMEYVARVENLQEVKGRKKRNYSIKDAAAIEDKFKARNLTDTQWATRLLADELSRMFPPRECERAICGRADGGNDGLTIVEERRVFTRPGAITSKLRRAWGLEGLKKQDGKRVEDDRHHAVDALVLAATTESLLQRLTVEVQRREREGRPDDIFHCAEPWRGFRADVRRTVYGSETMPGIFVSRAERRRARGKAHDATIKQIREIEGERLVFERKPVEKLTDKDLEKIPIPKPYGQVSDPKRLRDELVESLRAWIAAGKPKDRPPLSPKGDVIRKVRIQTNDKVSVEINGGTVDRGDMARVDVFRKKNKKAVWEYYVVPIYPHQIVALNDPPDRAVIAYAEDKDWKEIDSSYEFLWSLFGLSYVEISKANGECIDGYFRGLHRGTGAASVCKHISLGKDATVSGIGLKTLASFKKFTIDRLGRKFEIPREVRTWRGEACT

SEQ ID NO: 408 - protein, 1064 aa, Rhodopseudomonas palustris
MSECVTRRILGIDLGIASCGWGVIEVGEASGSIIASGVRCFDAPLIDKTGEPKSATRRTARGQRRIIRRRRQRMNAVRRLLAEFGVLTGRSPDALHQALLRLSQSVAGSQVTPWTLRAAAHERKLTNDELAVVLGHIARHRGFRSNSKNDGGANAADETSKMKKAMETTREGLARYHSFGAMIASDPKFADRKRNRDKDYSHTAKRSDLEDEVRTIFRSQTRFGSLVASEKLSQAFADAAFFQRPLQDSEDMVGSCPFEPGQKRTARRAPSFELFRFLSRLANLKLTVGRAPERRLTPDEIALAAKGFGETKKSITFKSLREALDLDPNARFSGVAKEKESTLDVAARTGGAAYGTKTLKDALGDAPWRSLSRMPEKLDRIAEILSFREDMKAIRNGLEEVGLDGLVVDALMQATANGDFKDFTRAAHISALAARNIIPGLREGLVYSDACTRVGYDHAARPAVPLSQIGSPVTRKALSEALKQVRAVAREYGPIDYFHIELARSIGKSAEERKKLTDGIEARNVEKEKRRKEAAEHLGRAPSDDELLRYELAKEQNFKCIYSGDPIDPAGISANDTRYQVDHILPWSRFGDDSYVNKTLCTARSNQNKRGRTPFEWFDADKTEAEWMEYSARVEDLKEVKGRKKRNYSIKDAASVEDKFKARNLTDTQWATRLLADELKRMFPPRECERVVTVRADGGNDGLSIVEERRVFTRPGAITSKLRRAWGLEGLKKQDGKRVEDDRHHAVDALVLAATTESLLNRLTVEVQQREREGRQDDIFHCSQPWPGFRVDVQRTVYGSETMPGIFVSRAERRRARGKAHDATVKQIRDIDGERIVFERKPIEKLTDKDLERIPVPEPYGKAADPKKLRDELVENLRAWIAAGKPKDKPPRSPKGDIIRKVRIETKDKVAVEINGGTVDRGDMARVDVFRKKNKKGVWEFYVIPIYPHQIVASALPPNRAVIAYKAESEWTAIDGCFEFAWSLNPMSYLELVKSNGELIEGYFRSMDRTTGAINLSPMSTNSETIRSIGVKTLSSFRKFTVDRLGRKFEIPREVRTWRGEACT

SEQ ID NO: 409 - protein, 1173 aa, Rhodospirillum rubrum
  Rhodospirillum rubrum ATCC 11170
MRPIEPWILGLDIGTDSLGWAVFSCEEKGPPTAKELLGGGVRLFDSGRDAKDHTSRQAERGAFRRARRQTRTWPWRRDRLIALFQAAGLTPPAAETRQIALALRREAVSRPLAPDALWAALLHLAHHRGFRSNRIDKRERAAAKALAKAKPAKATAKATAPAKEADDEAGFWEGAEAALRQRMAASGAPTVGALLADDLDRGQPVRMRYNQSDRDGVVAPTRALIAEELAEIVARQSSAYPGLDWPAVTRLVLDQRPLRSKGAGPCAFLPGEDRALRALPTVQDFIIRQTLANLRLPSTSADEPRPLTDEEHAKALALLSTARFVEWPALRRALGLKRGVKFTAETERNGAKQAARGTAGNLTEAILAPLIPGWSGWDLDRKDRVFSDLWAARQDRSALLALIGDPRGPTRVTEDETAEAVADAIQIVLPTGRASLSAKAARAIAQAMAPGIGYDEAVTLALGLHHSHRPRQERLARLPYYAAALPDVGLDGDPVGPPPAEDDGAAAEAYYGRIGNISVHIALNETRKIVNALLHRHGPILRLVMVETTRELKAGADERKRMIAEQAERERENAEIDVELRKSDRWMANARERRQRVRLARRQNNLCPYTSTPIGHADLLGDAYDIDHVIPLARGGRDSLDNMVLCQSDANKTKGDKTPWEAFHDKPGWIAQRDDFLARLDPQTAKALAWRFADDAGERVARKSAEDEDQGFLPRQLTDTGYIARVALRYLSLVTNEPNAVVATNGRLTGLLRLAWDITPGPAPRDLLPTPRDALRDDTAARRFLDGLTPPPLAKAVEGAVQARLAALGRSRVADAGLADALGLTLASLGGGGKNRADHRHHFIDAAMIAVTTRGLINQINQASGAGRILDLRKWPRTNFEPPYPTFRAEVMKQWDHIHPSIRPAHRDGGSLHAATVFGVRNRPDARVLVQRKPVEKLFLDANAKPLPADKIAEIIDGFASPRMAKRFKALLARYQAAHPEVPPALAALAVARDPAFGPRGMTANTVIAGRSDGDGEDAGLITPFRANPKAAVRTMGNAVYEVWEIQVKGRPRWTHRVLTRFDRTQPAPPPPPENARLVMRLRRGDLVYWPLESGDRLFLVKKMAVDGRLALWPARLATGKATALYAQLSCPNINLNGDQGYCVQSAEGIRKEKIRTTSCTALGRLRLSKKAT

SEQ ID NO: 410 - protein, 1059 aa, Rhodovulum sp.
  Rhodovulum sp. PH10
MGIRFAFDLGTNSIGWAVWRTGPGVFGEDTAASLDGSGVLIFKDGRNPKDGQSLATMRRVPRQSRKRRDRFVLRRRDLLAALRKAGLFPVDVEEGRRLAATDPYHLRAKALDESLTPHEMGRVIFHLNQRRGFRSNRKADRQDREKGKIAEGSKRLAETLAATNCRTLGEFLWSRHRGTPRTRSPTRIRMEGEGAKALYAFYPTREMVRAEFERLWTAQSRFAPDLLTPERHEEIAGILFRQRDLAPPKIGCCTFEPSERRLPRALPSVEARGIYERLAHLRITTGPVSDRGLTRPERDVLASALLAGKSLTFKAVRKTLKILPHALVNFEEAGEKGLDGALTAKLLSKPDHYGAAWHGLSFAEKDTFVGKLLDEADEERLIRRLVTENRLSEDAARRCASIPLADGYGRLGRTANTEILAALVEETDETGTVVTYAEAVRRAGERTGRNWHHSDERDGVILDRLPYYGEILQRHVVPGSGEPEEKNEAARWGRLANPTVHIGLNQLRKVVNRLIAAHGRPDQIVVELARELKLNREQKERLDRENRKNREENERRTAILAEHGQRDTAENKIRLRLFEEQARANAGIALCPYTGRAIGIAELFTSEVEIDHILPVSLTLDDSLANRVLCRREANREKRRQTPFQAFGATPAWNDIVARAAKLPPNKRWRFDPAALERFEREGGFLGRQLNETKYLSRLAKIYLGKICDPDRVYVTPGTLTGLLRARWGLNSILSDSNFKNRSDHRHHAVDAVVIGVLTRGMIQRIAHDAARAEDQDLDRVFRDVPVPFEDFRDHVRERVSTITVAVKPEHGKGGALHEDTSYGLVPDTDPNAALGNLVVRKPIRSLTAGEVDRVRDRALRARLGALAAPFRDESGRVRDAKGLAQALEAFGAENGIRRVRILKPDASVVTIADRRTGVPYRAVAPGENHHVDIVQMRDGSWRGFAASVFEVNRPGWRPEWEVKKLGGKLVMRLHKGDMVELSDKDGQRRVKVVQQIEISANRVRLSPHNDGGKLQDRHADADDPFRWDLATIPLLKDRGCVAVRVDPIGVVTLRRSNV

SEQ ID NO: 411 - protein, 1405 aa, Riemerella anatipestifer
MKTILGLDLGTNSIGWALVKEAENSNEKSEIIKLGVRVNPLTVDEKTNFEAGRPLSTNADRTAKRSARRNLQRYKLRRKNLIDLLIKNQLIDKDTPLTEIGKNTTHQTLELRAKAARERIELEDLARVFLAINKKRGYRSSRKVNNEEEGQAVDGMAVAKKLYDENLTPGQYAYELLSKGKKYVPDFYRSDLQAEFNAIWEYQKQFYADILDDELYNALKGQGQQNSRKRFLAIKGVYTAENKGKRDDVKLRHYKWRSEAISKKINIEEVAYVLVEINNDLNKSSGYLGAISDRSKELYFNKETVGENLWKQIQKNPHTSLKNQVFYRQDYLDEFEQIWETQAQFHPQLTLALKEQIRDVIIFYQRKLKSQKGLLSFCQFESWEIERKDENGNVILNKTTQLPKRQTVGRRVAPKSSPLFQEFKIWQNINNLEVTKISEGASKNKKETETLSDDERKLLFEELNLRGNLSQKEVLQILGLKDKEYKTNFSEGLEGNRTNAALFNIYQQIAENEGYGFDWSKKSAQEIKEELKAVFPQIGIQADILDFNANLDGKEFENQASYQLWHLLYSAEEDDKINEEDQIIYGNSAVSLKKKLCEKFGFTPEYAKWIANVSLQDDYGNLSTKAMRKIIPYLIDGNDYSEACALAGYNHSNSLTKEENDNRELLDKLELLPKNSLRNPVVEKILNQMVNVVNQVIETYGKPDEVRIELARELKKSAEKRAEMTKSINEATRRNEDIKKLITKDFGIPNPTKSDVVRYRLWEELAPLAYKDVFTGKQIKKEDLFSSKIDIEHIIPKALLFDDSFSNKTLVFRETNLKKADRTAYDFIESDYNATLDDYIQRVETLYNNTKGTISKGKRNKLLMAQKNLPDGFIERDLRNSQYIAKKAKAMLYQVFKDVNVTSGSITDRLREDWDLINVMKELNFPKYKALGLTEIEERYDIGQEKTKRVEVITDWTKRNDHRHHAMNALTVAFTTSSHIQYLNYLNARKNESHKEHKNIKGIENKITHKQKDKRKFIPPMPNFREEAKKHIETILVSIKNKNKVYTKNINKTKKKSGHNTKEQLTPRGQLHKETVYGKSKRPMSKPTKINKNFSLEQAQLIINVQEKELVLRHLAQFDNNPAVAFDTKTLKKMPLLKNGEPLKEVLCFEEIFTIRKDITPDLKIEKVVDEKIKAILEQRKKDFGGNAKEAFSDLDKNPIWLNKKKGICIKRVTITGVSNAEALHHQKDHLGREILDDNGNPIPADFVSTGNNHHLAVYLDSEGKLQDNIVSFYEAVVRTSQGLPVVDKGLNKDLGWKFLFSLKQNEMFVFPNDDFDINDFDLLDDKKAELISKHLYRVQKISKVSAGNSFVRDIVFRHHLETTVKEVKELKDISYIQLKSLEGLRNIKKVRINHIGKIVQVGEY

SEQ ID NO: 412 - protein, 1400 aa, Riemerella anatipestifer
MKTILGLDLGTNSIGWALVKETENSNEKSEIIKLGVRVNPLTVDEKTNFEAGRPLSTNADRTAKRSARRNLQRYKLRRKNLIDLLIKHRLIDKDTPLTEIGKNTTHQTLELRAKAARERIELEDLARVFLAINKKRGYRSSRKVNNEEEGQVVDGMAVAKKLYDENLTPGQYAYELLSKGKKYVPDFYRSDLQAEFDSIWEYQKQFYADILDDELYNALKGQGQQNSRKRFLAIKGVYTAENKGKRDEVKLQHYKWRSEAITQKLSIEEVAYVLVEINNDLNKSSGYLGAISDRSKELYFNKETVGENLWKQIQKNPHTSLKNQVFYRQDYLDEFEQIWETQAQFHPQLTLALKEQIRDVVIFYQRKLKSQKGLLSFCQFESWEIERKDENGNVILNKTTQLPKRQTVGRRVAPKSSPLFQEFKIWQNINNLEIAKISDGNSKNKKETEALSDDERKLLFEELNLRGNLSQKEVLQILGLKDKEYKTNFPEGLEGNRTNAALFNIYQQIAENEGYGDWTKKSAQEIKEELKAVFPQIGIQADILDFNAELDGKEFENQASYQLWHLLYSAEEDDKINEEDQIIYGNSAVSLKKKLCEKFGFTPEYAKWIANVSLQDDYGNLSTKAMRKIIPYLIDGNDYSEACALAGYNHSNSLTKEENDNRERLNKLELLPKNSLRNPVVEKILNQMVNVVNQVIETYGKPDEVRIELARELKKSAEERAEMTKGINEATRRNEDIKKLITKNFGIPNPTKNDVVRYRLWEELAPLAYKDVFTGRQIKKEDLFSSKIDIEHIIPKALLFDDSFSNKTLAFRETNLKKADRTAYGFIESDYNATLDDYIQRVETLYNNAKGTISKGKRNKLLMAQKNLPDGFIERDLRNSQYIAKKAKSMIEKVFNDVNVTSGSITDRLREDWDLINVMKELNFPKYKALGLTEIEERYDIGQEKTKKVEVITDWTKRNDHRHHAMDALTVAFTTKSHVQYLNNLNTIHSLKGDEVDLELSKLYGLKNTITEVVNKKRKFIPPMPNFREEAKKHIETILVSIKNKNKVYTKNINKTKKESGYHTKEQLTPRGQLHKETVYGKSKRPMNKPTKINKNFSLEQAQLIINVQEKELVLRHLAQFDNNPAVAFDTKTLKKMPLLKNGEPLKEVLCFEEIFTIRKDITPDLKIEKVVDEKIKAILEQRKKDFGGNAKEAFSDLDKNPIWLNKEKGICIKRVTITGVSNAEALHHQKDHLGREILDDNGNPIPADFVSTGNNHHVAIYEDEKGKLQEKVVSLYEAVARANQGLPVVDKGLNEDLGWKFLFTMKQNEMFVFPNDDFDVNDIDLLDENNAKIISQHLFRVQKLATKNYMFRHHLETNVQEVKELNDIAYKSIRSTEPLKNIKKVRINHIGKIVQVGEY

SEQ ID NO: 413 - protein, 1140 aa, Roseburia intestinalis
  Roseburia intestinalis L1-82
MRENGSDERRRNMDEKMDYRIGLDIGIASVGWAVLQNNSDDEPVRIVDLGVRIFDTAEIPKTGESLAGPRRAARTTRRRLRRRKHRLDRIKWLFENQGLINIDDFLKRYNMAGLPDVYQLRYEALDRKLTDEELAQVLLHIAKHRGFRSTRKAETAAKENGAVLKATDENQKRMQEKGYRTVGEMIYLDEAFRTGCSWSEKGYILTPRNKAENYQHTMLRAMLVEEVKEIFSSQRRLGNEKATEELEEKYLEIMTSQRSFDLGPGMQPDGKPSPYAMEGFSDRVGKCTFLGDQGELRGAKGTYTAEYFVALQKINHTKLVNQDGETRNFTEEERRALTLLLFTQKEVKYAAVRKKLGLPEDILFYNLNYKKAATKEEQQKENQNTEKAKFIGMPYYHDYKKCLEERVKYLTENEVRDLFDEIGMILTCYKNDDSRTERLAKLGLVPIEMEGLLAYTPTKFQHLSMKAMRNIIPFLEKGMTYDKACEEAGYDFKADSKGTKQKLLTGENVNQTINEITNPVVKRSVSQTVKVINAIIRTYGSPQAINIELAREMSKTFEERRKIKGDMEKRQKNNEDVKKQIQELGKLSPTGQDILKYRLWQEQQGICMYSGKTIPLEELFKPGYDIDHILPYSITFDDSFRNKVLVTSQENRQKGNRTPYEYMGNDEQRWNEFETRVKTTIRDYKKQQKLLKKHFSEEERSEFKERNLTDTKYITTVIYNMIRQNLEMAPLNRPEKKKQVRAVNGAITAYLRKRWGLPQKNRETDTHHAMDAVVIACCTDGMIQKISRYTKVRERCYSKGTEFVDAETGEIFRPEDYSRAEWDEIFGVHIPKPWETFRAELDVRMGDDPKGFLDTHSDVALELDYPEYIYENLRPIFVSRMPNHKVTGAAHADTIRSPRHFKDEGIVLTKTALTDLKLDKDGEIDGYYNPQSDLLLYEALKKQLLLYGNDAKKAFAQDFHKPKADGTEGPVVRKVKIQKKQTMGVFVDSGNGIAENGGMVRIDVFRVNGKYYFVPVYTADVVKKVLPNRASTAHKPYGEWKVMEDKDFLFSLYSRDLIHIKSKKDIPIKMVNGGMEGIKETYAYYIGADISAANIQGIAHDSRYKFRGLGIQSLDVLEKCQIDVLGHVSVVRSEKRMGFS

SEQ ID NO: 414 - protein, 1128 aa, Roseburia intestinalis
  Roseburia intestinalis M50/1
MDEKMDYRIGLDIGIASVGWAVLQNNSDDEPVRIVDLGVRIFDTAEIPKTGESLAGPRRAARTTRRRLRRRKHRLDRIKWLFENQGLINIDDFLKRYNMAGLPDVYQLRYEALDRKLTDEELAQVLLHIAKHRGFRSTRKAETAAKENGAVLKATDENQKRMQEKGYRTVGEMIYLDEAFRIGCSWSEKGYILTPRNKAENYQHTMLRAMLVEEVKEIFSSQRRLGNKKATEELEEKYLEIMTSQRSFDLGPGMQPDGKPSPYAMEGFSDRVGKCTFLGDQGELRGAKGTYTAEYFVALQKINHTKLVNQDGETRNFTEEERRALTLLLFTQKEVKYAAVRKKLGLPEDILFYNLNYKKAATKEEQQKENQNTEKAKFIGMPYYHDYKKCLEERVKYLTENEVRDLFDEIGMILTCYKNDDSRTERLAKLGLVPIEMEGLLAYTPTKFQHLSMKAMRNIIPFLEKGMTYDKACEEAGYDFKADSKGTKQKLLTGENVNQTINEITNPVVKRSVSQTVKVINAIIRTYGSPQAINIELAREMSKTFEERRKIKGDMEKRQKNNEDVKKQIQELGKLSPTGQDILKYRLWQEQQGICMYSGKTIPLEELFKPGYDIDHILPYSITFDDSFRNKVLVTSQENRQKGNRTPYEYMGNDEQRWNEFETRVKTTIRDYKKQQKLLKKHFSEEERSEFKERNLTDTKYITTVIYNMIRQNLEMAPLNRPEKKKQVRAVNGAITAYLRKRWGLPQKNRETDTHHAMDAVVIACCTDGMIQKISRYTKVRERCYSKGTEFVDAETGEIFRPEDYSRAEWDEIFGVHIPKPWETFRAELDVRMGDDPKGFLDTHSDVALELDYPEYIYENLRPIFVSRMPNHKVTGAAHADTIRSPRHFKDEGIVLTKTALTDLKLDKDGEIDGYYNPQSDLLLYEALKKQLLLYGNDAKKAFAQDFHKPKADGTEGPVVRKVKIQKKQTMGVFVDSGNGIAENGGMVRIDVFRVNGKYYFVPVYTADVVKKVLPNRASTANKPYSEWRTMEDKDFLFSLYSRDLVHIKSKKGIPIKNVDGSLGESKEVYAYYIGADISGAKIEGKAHDSRYTFRGIGVQKLELIEKCQVDILGHISTVKNEKRMGFS

SEQ ID NO: 415 - protein, 1152 aa, Roseburia inulinivorans
  Roseburia inulinivorans DSM 16841
MNAEHGKEGLLIMEENFQYRIGLDIGITSVGWAVLQNNSQDEPVRITDLGVRIFDVAENPKNGDALAAPRRDARTTRRRLRRRRHRLERIKFLLQENGLIEMDSFMERYYKGNLPDVYQLRYEGLDRKLKDEELAQVLIHIAKHRGFRSTRKAETKEKEGGAVLKATTENQKIMQEKGYRTVGEMLYLDEAFHTECLWNEKGYVLTPRNRPDDYKHTILRSMLVEEVHAIFAAQRAHGNQKATEGLEEAYVEIMTSQRSFDMGPGLQPDGKPSPYAMEGFGDRVGKCTFEKDEYRAPKATYTAELFVALQKINHTKLIDEFGTGRFFSEEERKTIIGLLLSSKELKYGTIRKKLNIDPSLKFNSLNYSAKKEGETEEERVLDTEKAKFASMFWTYEYSKCLKDRTEEMPVGEKADLFDRIGEILTAYKNDDSRSSRLKELGLSGEEIDGLLDLSPAKYQRVSLKAMRKMQPYLEDGLIYDKACEAAGYDFRALNDGNKKHLLKGEEINAIVNDITNPVVKRSVSQTIKVINAIIQKYGSPQAVNIELAREMSKNFQDRTNLEKEMKKRQQENERAKQQIIELGKQNPTGQDILKYRLWNDQGGYCLYSGKKIPLEELFDGGYDIDHILPYSITFDDSYRNKVLVTAQENRQKGNRTPYEYFGADEKRWEDYEASVRLLVRDYKKQQKLLKKNFTEEERKEFKERNLNDTKYITRVVYNMIRQNLELEPFNHPEKKKQVWAVNGAVTSYLRKRWGLMQKDRSTDRHHAMDAVVIACCTDGMIHKISRYMQGRELAYSRNFKFPDEETGEILNRDNFTREQWDEKFGVKVPLPWNSFRDELDIRLLNEDPKNFLLTHADVQRELDYPGWMYGEEESPIEEGRYINYIRPLFVSRMPNHKVTGSAHDATIRSARDYETRGVVITKVPLTDLKLNKDNEIEGYYDKDSDRLLYQALVRQLLLHGNDGKKAFAEDFHKPKADGTEGPVVRKVKIEKKQTSGVMVRGGTGIAANGEMVRIDVFRENGKYYFVPVYTADVVRKVLPNRAATHTKPYSEWRVMDDANFVFSLYSRDLIHVKSKKDIKTNLVNGGLLLQKEIFAYYTGADIATASIAGFANDSNFKFRGLGIQSLEIFEKCQVDILGNISVVRHENRQEFH

SEQ ID NO: 416 - protein, 1156 aa, Ruminococcus albus
  Ruminococcus albus 8
MGNYYLGLDVGIGSIGWAVINIEKKRIEDFNVRIFKSGEIQEKNRNSRASQQCRRSRGLRRLYRRKSHRKLRLKNYLSIIGLTTSEKIDYYYETADNNVIQLRNKGLSEKLTPEEIAACLIHICNNRGYKDFYEVNVEDIEDPDERNEYKEEHDSIVLISNLMNEGGYCTPAEMICNCREFDEPNSVYRKFHNSAASKNHYLITRHMLVKEVDLILENQSKYYGILDDKTIAKIKDIIFAQRDFEIGPGKNERFRRFTGYLDSIGKCQFFKDQERGSRFTVIADIYAFVNVLSQYTYTNNRGESVFDTSFANDLINSALKNGSMDKRELKAIAKSYHIDISDKNSDTSLTKCFKYIKVVKPLFEKYGYDWDKLIENYTDTDNNVLNRIGIVLSQAQTPKRRREKLKALNIGLDDGLINELTKLKLSGTANVSYKYMQGSIEAFCEGDLYGKYQAKFNKEIPDIDENAKPQKLPPFKNEDDCEFFKNPVVFRSINETRKLINAIIDKYGYPAAVNIETADELNKTFEDRAIDTKRNNDNQKENDRIVKEIIECIKCDEVHARHLIEKYKLWEAQEGKCLYSGETITKEDMLRDKDKLFEVDHIVPYSLILDNTINNKALVYAEENQKKGQRTPLMYMNEAQAADYRVRVNTMFKSKKCSKKKYQYLMLPDLNDQELLGGWRSRNLNDTRYICKYLVNYLRKNLRFDRSYESSDEDDLKIRDHYRVFPVKSRFTSMFRRWWLNEKTWGRYDKAELKKLTYLDHAADAIIIANCRPEYVVLAGEKLKLNKMYHQAGKRITPEYEQSKKACIDNLYKLFRMDRRTAEKLLSGHGRLTPIIPNLSEEVDKRLWDKNIYEQFWKDDKDKKSCEELYRENVASLYKGDPKFASSLSMPVISLKPDHKYRGTITGEEAIRVKEIDGKLIKLKRKSISEITAESINSIYTDDKILIDSLKTIFEQADYKDVGDYLKKTNQHFFTTSSGKRVNKVTVIEKVPSRWLRKEIDDNNFSLLNDSSYYCIELYKDSKGDNNLQGIAMSDIVHDRKTKKLYLKPDFNYPDDYYTHVMYIFPGDYLRIKSTSKKSGEQLKFEGYFISVKNVNENSFRFISDNKPCAKDKRVSITKKDIVIKLAVDLMGKVQGENNGKGISCGEPLSLLKEKN

SEQ ID NO: 417 - protein, 1341 aa, Ruminococcus lactaris
  Ruminococcus lactaris ATCC 29176
MGKGYYVGLDMGTGSVGWAVTDESYQILRRHGKAMWGVRLFESAKTAEERRMFRTGRRRLDRRGWRIEILQEIFAEEISRVDPGFFLRMKESKYYPEDKRDIQGNCPELPYTLFVDKTFTDKDFHKKYPTIYHLRKMLMETEDTPDMRLVYLALHHMMKHRGHFLLSGDISQVTEFKNTFNQFIENIRNEEMDFEIELDESAVQMIEETLKDKNLTRSAKKSKLVKGLNAKNVRDKAFLTLLSGGTVKLSDLFGMEELNEGERPKISFADNGYEEYAAVVEMELGELYYIVESAKAVYDWAILSDILGGSTSVSDAKVRAYEKHKADLKYLKAVVKEYFPKEVYNAVFVESSDKLNNYPAYIGMTKKNGKKVSLEGKRCSREEFMDFLKKNIVVKLPDEEAKMYLQSELEKDSFLPKQVNKDNGVIPYQVHKYELKKILDNLGDKIPFLKENAEKIEKLFSFRIPYYVGPLRTGNGENSKFAWAERKSTEKIYPWNFENVIDVEQSAENFIRRMTNKCTYLIGEDVLPKDSLLYSKFMVLNELNNLRLDGQKISVELKQKIYRDVFCRSRKVTQKKLKSYLIREGIAGKNVELTGIDGDFKGSLTAYHDFKEKLIDVELTQKEKEEIILNIVLFGDDKKLLKQRLKKKFPQLTEKQINTVTALSYKGWGRLSKKLLEEVTVPAPETGEVWNIITALWETNDNFMQLLSKEYQFSDRIEEFNEEKADPEVSYQTIEDLYVSPAVKRQIWQTLQIIQEIEKVMGEKPKRVFVEMAREKQENKRTESRKKTLSDLYTKCKKEEPEWIEALCTSLEKHEEHQLRSDKLYLYYTQKGRCMYSGEPIDLEDLWDNTKYDIDHIYPQSKTMDDSLKNRVLVKKEYNAKKSDTYPIAADIQKKMMPFWKSLLTGGFIPKEKYDRLVRNNPLDANELAGFIERQIVETRQSTKAVAEILKKILPDTEIVYVKAKTVSKFRQDFDFIKVRDMNDLHHAKDAYLNIVVGNVYFVKFTKNAAWFVKENPGRTYNLEKMFIWDVARDGEIAWKAGKSGSIVQVRAMMEKNHILVTRRSYEVKGGLFDQQILKKGKGQVPVKESDERLRDIGKYGGYNKAAGVYFMLVSSKDKKGKEQRTIEFVPIYLKDRVEKDMESARNYLMEERGLREPKILIKKIKIDTLFKVDGFYMWLSGRTSNQLIFKGANQLILSKEDMKTLKKVVKYIQRQKEDKNVKISMRDGITEEELLKLYETFLDKIRHSIYGARLSSQEKTLVNGKEKFIDLSVEAKCQVLYEILHLFQCQSGAANLKMIGGPASAGILVMNNNISKCKNISIVNQSPTGIYEKEIDLLRV

SEQ ID NO: 418 - protein, 1471 aa, Scardovia wiggsiae
  Scardovia wiggsiae F0424
MGYKAPRNDKGEIDYGVGLDLGNGSVGWVAMDKDYHLIRARGHELIGARLFDPANSAENRRESRTTRRRLSRRRWRLRMLDSLFASELAKIDPNFLARRKYSWVHPKDEQNHENWYGSIIFGSKEQDKQFYKDYPTIYHLRKKLTEDTERHDIREIYVAIHHIVKYRGHFLREGEINSENLFDPEGFVELIKDVIKLNNSYDESTPIFEASPADVSEALLNEHTSRSGRIEDTLDKLDFSVSRVDKHELKGMRDAAKAVIGAIVGNTADFSKIFNLDNLDKDSKDNLKLKFADSNFDEKYGGVVGSGLLDETQIELVDRIHAVYDAVALKGILGDAHTISEAKVESYEKHRKNWKLIKEELRTKENKDEVDLWYGDLSGRQYKNPPDPEKGPDEGSKKDSPIRDSDQKQNLIKKANDYFTELIDDSQLSEEQKNCLKNDINNGQLFPVQRSSDNGVIPYQIHLNELRRIIENQKQYYPFLAETFIRKTAEGKSYEENKIVALLKFRVPYYVGPLVSKEDMEEHSSGNSAYHWMARNPGRGEAITPWNFDEVVDKDESGARFISRLTGTDTYLLGEPTLPQHSLLYEEYMVLSELNNVRLNVRQGNHWSDKNRQRLSYKQKEFLIENLFKEHKTVTRKRAEDCLSSMGCGEVQLFGLSDEKKFASSLSSYITLKKILGKAFVDDSGNSAILERIIEVQTVFEDREPLTHQLSLIDSLTVEQRKQLAKIHYTGWGKLSRKLLTSKKGSYKIHSQNEIMRTQHSIIDIMRGDSLNLIEIIRDKKIGIGEWIDNENLDRETGESDVSRLESVFEGIVMSPRVKRGVVQAVRVIDDLAKAIGNPPQRIFIEMADEVQASQRTVSRLSRLKALYGSPSLQKEFNDLKDLRKSLNETKDADLQEDRLYLYYIQLGKDLYTGKEISIDSLSSAYDIDHIVPQALTQDDSIDNRVLVSRKENARKTDSYLYTPDLIKNMRPLWGKLLAAGLMSQKKYDALTRVDDFKDREKQRFVQRSLVETRQIMKNVSTILRTYYGEDTNVVTLKSSITHDMRKYLGFPYKNRDINDYHHAQDALCISAAGQFMLNRHFVSGGEVTDGASNAYNMYLAEYLQEFRDAKARGERKRSTAFGFVVGSMSSKDDEKRTDHRTGEIVWSETNAEYLRKVMNYKKMLITQKVGDVKTRALYDETRYGHKESSAKSIKFDNLRRDTSLYGGFSGASTAYMMLVEYKKKNKLVSITAQEASLLAVADQKNDTVSVMDGILASHGLSGAKILLPKIVTGQLLDYSDALVTLQSASELNTARQMWLPRNDYNDIDIILKSKDIEDAAHKLGYDSDTVHVLRRIQKLFEAVFRVAESQFPLHQLSKDQQEEILRDPQNYGFGSAVKLLGGLLKALHANAENTNLAGLVKVLHGDKEYSDDGKAKEFKKFGFSPRWRRISNPTGFTLSDSDTFIYQSPSGIFEQRVTVKELKEKADKQK

SEQ ID NO: 419 - protein, 1178 aa, Scardovia inopinata
  Scardovia inopinata F0304
MGKRHNSNMAKKKISYRIGIDVGLNSTGLAAIEVDDDGAPIRILNTMSVIHDGGVDPDAAKVRGTRLAISGIARRTRRMRRRRAKRLDRLEQILEKYGYTDTEPVLEEPYGPWICRAELADGFINDDEQRRMMIGIAIRHIARHRGWRNPYQNVRALLNIDDSDLSEEYKNLKEKVQDQINDGKDLPNFTPSQLVRDYLDNFSGQPAARIRTGKAGPRGNRRDAVGILPQRMRQSDYAYELQRIFDMQKIGRDEAQELLMAVFEAKSPKGSAEKRIGKDPLTGKKRALKASLAFQKYRIVATITNLRIKTGTGSERMLSPTELNDIYTYLLRVQDDNHLPTWEDICEEVLHIGRYQLAGIGKTFEGGERISNMPPVIQTSLAIHGLSEGTLAEKLTKWWDKADDDSRESMIKLLSNTVDIDRVNEVDENFASALDFIDSLDDEELTKLDKIALPRGRAAYSEEALNKLTADMLNTGDDLFSARQRIYHVNNSWRPPQPPIGEPLGNPAVDRVLKITNRYLMNCLNRWGQPRRVTIEHTRSGFTSVKQATEHQKISDKRAEYRRDIVKQLEEAGVESVHEYDIRRWEAVQRQNGQCLYCGRDITFKTCEMDHIVPRKGPGSTNTRTNFAAVCPECNRMKSNIPFASWAETKEAKDRGVSLDKAIKQVRFFNFTKNEYSPQAQRNFKKSMIERLKQKTSDEPLDNRSIESVSWMADELYKRIDWYFNHEQYETSKKAINDDKDNLSGTQVVVYPGSITAEARNAAGLGGNIHFIGGRYKTRLDRRHHAVDACVIAMMEPGIARILTERNQLRQAQRLTARIEDDEVNWKDYPTENTAGYNKYQAWSDRMHALLEYMNNALDYDKIPVVRWERLQLGNRSAHEDTIHPLKKLPLSHEISAIDINHASTPALYEALVSLPDFSEQDGLPADPSRQINVNGERYSGDDLVSFFNSNAAQIAIQGGSAELGTAFHHARIYRCWTVGKNGKKKIFFGMIRVYQHDLLHAKNEDLFTYPLKRSSVSMRYAKKEVVHAILSGNAEYVGYLCVGDELVLDLKGDKSNDEGGSRLSGQVGEFVQKFEEDSKVNSQIVNRWTVDGFPDEAKLRLRPSMFAGEGLKNMKSELVENAAIKNILSKTGWRVSVDVISKKSPVVLRRNAFGEPRWKTNAGLPVSYRWQDTETKE

SEQ ID NO: 420 - protein, 1063 aa, Simonsiella muelleri
  Simonsiella muelleri ATCC 29453
MEKFHYVLGLDLGIASVGWAAIEIDKETETSIGLLDCGVRTFERAEVPKTGDSLAKARREARSTRRLIRRRSHRLLRLKRLLKREIFRQPETFKDLPINAWQLRVKGLDSRLNEYEWAAVLLHLVKHRGYLSQRKSEMSETDSKSEMGRLLAGVAENHQLLQQEQYRTPAELALKKFVKHFRNKGGDYAHTFNRLDLQAELHLLFQKQRELGNPFTSPELERQVDDLLMTQRSALQGDAILKMLGHCGFEPEQFKAAKNTFSAERFIWLTKLNNLRIQDQGKERALTADERTKLLDEPYKKSKLTYAQVRKLLSLPQTAIFKGLRYDLEHDKKAENSTLMEMKSYHNIRQTLEKSGLKTEWQSIATQPEILDAIGTAFSIYKTDEDISHELKTCRLPENVLNELLKNINFDGFIQLSLTALRKILPLMEQGYRYDEACTQIYGNHHSGSLQQESKQFLPHIPIDDVRNPVVFRTLTQARKVVNAIIRRYGSPARVHIEMARELGKSKSDRDRIEKQQQKNKKERENAVAKFKEDFPDFVGEPRGKDILKMRLYEQQHGKCLYSGHDIDINRLNEKGYVEIDHALPFSRTWDDSQNNKVLVLGSENQNKRNQTPDEYLDGANNSQRWLEFQARVQTCHFSYGKKQRIQLAKLDDETEKGFLERNLNDTRYIARFMCQFVQENLYLTGKGKRLVFASNGGMTATLRNLWGLRKVREDNDRHHALDAIVVACSTASMQQKITKAFQRHESIEYVDTETGEVKFRIPQPWDFFRQEVMIRVFSDQPCEDLVEKLSARPEALHDNVTPLFVSRAPNRKMSGQGHLETIKSAKRLSEENSMVKKPLTTLKLKDIPEIVGYPSREPQLYAALKTRLETHDDDPIKAFAKPFYKPNKNGELGALVRSVRVKGVQNTGVMVHDGKGIADNATMVRVDVYTKAGKNYLVPVYVWQVAQGILPNRAVTSGKSEADWDLIDESFEFKFSLSRGDLVEMISNKGRIFGYYNGLDRANGSIGIREHDLEKSKGKDGVHRVGVKTATAFNKYHVDPLGKEIHRCSSEPRPTLKIKSKK

SEQ ID NO: 421 - protein, 1327 aa, Solobacterium moorei
  Solobacterium moorei F0204
MEGQMKNNGNNLQQGNYYLGLDVGTSSVGWAVTDTDYNVLKFRGKSMWGARLFDEASTAEERRTHRGNRRRLARRKYRLLLLEQLFEKEIRKIDDNFFVRLHESNLWADDKSKPSKFLLFNDTNFTDKDYLKKYPTIYHLRSDLIHNSTEHDIRLVFLALHHLIKYRGHFIYDNSANGDVKTLDEAVSDFEEYLNENDIEFNIENKKEFINVLSDKHLTKKEKKISLKKLYGDITDSENINISVLIEMLSGSSISLSNLFKDIEFDGKQNLSLDSDIEETLNDVVDILGDNIDLLIHAKEVYDIAVLTSSLGKHKYLCDAKVELFEKNKKDLMILKKYIKKNHPEDYKKIFSSPTEKKNYAAYSQTNSKNVCSQEEFCLFIKPYIRDMVKSENEDEVRIAKEVEDKSFLTKLKGTNNSVVPYQIHERELNQILKNIVAYLPFMNDEQEDISVVDKIKLIFKFKIPYYVGPLNTKSTRSWVYRSDEKIYPWNFSNVIDLDKTAHEFMNRLIGRCTYTNDPVLPMDSLLYSKYNVLNEINPIKVNGKAIPVEVKQAIYTDLFENSKKKVTRKSIYIYLLKNGYIEKEDIVSGIDIEIKSKLKSHHDFTQIVQENKCTPEEIERIIKGILVYSDDKSMLRRWLKNNIKGLSENDVKYLAKLNYKEWGRLSKTLLTDIYTINPEDGEACSILDIMWNTNATLMEILSNEKYQFKQNIENYKAENYDEKQNLHEELDDMYISPAARRSIWQALRIVDEIVDIKKSAPKKIFIEMAREKKSAMKKKRTESRKDTLLELYKSCKSQADGFYDEELFEKLSNESNSRLRRDQLYLYYTQMGRSMYTGKRIDFDKLINDKNTYDIDHIYPRSKIKDDSITNRVLVEKDINGEKTDIYPISEDIRQKMQPFWKILKEKGLINEEKYKRLTRNYELTDEELSSFVARQLVETQQSTKALATLLKKEYPSAKIVYSKAGNVSEFRNRKDKELPKFREINDLHHAKDAYLNIVVGNVYDTKFTEKFFNNIRNENYSLKRVFDFSVPGAWDAKGSTFNTIKKYMAKNNPIIAFAPYEVKGELFDQQIVPKGKGQFPIKQGKDIEKYGGYNKLSSAFLFAVEYKGKKARERSLETVYIKDVELYLQDPIKYCESVLGLKEPQIIKPKILMGSLFSINNKKLVVTGRSGKQYVCHHIYQLSINDEDSQYLKNIAKYLQEEPDGNIERQNILNITSVNNIKLFDVLCTKFNSNTYEIILNSLKNDVNEGREKFSELDILEQCNILLQLLKAFKCNRESSNLEKLNNKKQAGVIVIPHLFTKCSVFKVIHQSITGLFEKEMDLLK

SEQ ID NO: 422 - protein, 1179 aa, Sphaerochaeta globosa
MSKKVSRRYEEQAQEICQRLGSRPYSIGLDLGVGSIGVAVAAYDPIKKQPSDLVFVSSRIFIPSTGAAERRQKRGQRNSLRHRANRLKFLWKLLAERNLMLSYSEQDVPDPARLRFEDAVVRANPYELRLKGLNEQLTLSELGYALYHIANHRGSSSVRTFLDEEKSSDDKKLEEQQAMTEQLAKEKGISTFIEVLTAFNTNGLIGYRNSESVKSKGVPVPTRDIISNEIDVLLQTQKQFYQEILSDEYCDRIVSAILFENEKIVPEAGCCPYFPDEKKLPRCHFLNEERRLWEAINNARIKMPMQEGAAKRYQSASFSDEQRHILFHIARSGTDITPKLVQKEFPALKTSIIVLQGKEKAIQKIAGFRFRRLEEKSFWKRLSEEQKDDFFSAWTNTPDDKRLSKYLMKHLLLTENEVVDALKTVSLIGDYGPIGKTATQLLMKHLEDGLTYTEALERGMETGEFQELSVWEQQSLLPYYGQILTGSTQALMGKYWHSAFKEKRDSEGFFKPNTNSDEEKYGRIANPVVHQTLNELRKLMNELITILGAKPQEITVELARELKVGAEKREDIIKQQTKQEKEAVLAYSKYCEPNNLDKRYIERFRLLEDQAFVCPYCLEHISVADIAAGRADVDHIFPRDDTADNSYGNKVVAHRQCNDIKGKRTPYAAFSNTSAWGPIMHYLDETPGMWRKRRKFETNEEEYAKYLQSKGFVSRFESDNSYIAKAAKEYLRCLFNPNNVTAVGSLKGMETSILRKAWNLQGIDDLLGSRHWSKDADTSPTMRKNRDDNRHHGLDAIVALYCSRSLVQMINTMSEQGKRAVEIEAMIPIPGYASEPNLSFEAQRELFRKKILEFMDLHAFVSMKTDNDANGALLKDTVYSILGADTQGEDLVFVVKKKIKDIGVKIGDYEEVASAIRGRITDKQPKWYPMEMKDKIEQLQSKNEAALQKYKESLVQAAAVLEESNRKLIESGKKPIQLSEKTISKKALELVGGYYYLISNNKRTKTFVVKEPSNEVKGFAFDTGSNLCLDFYHDAQGKLCGEIIRKIQAMNPSYKPAYMKQGYSLYVRLYQGDVCELRASDLTEAESNLAKTTHVRLPNAKPGRTFVIIITFTEMGSGYQIYFSNLAKSKKGQDTSFTLTTIKNYDVRKVQLSSAGLVRYVSPLLVDKIEKDEVALCGE

SEQ ID NO: 423 - protein, 1426 aa, Sphingobacterium spiritivorum
  Sphingobacterium spiritivorum ATCC 33861
MKHILGLDLGTNSIGWALIKQDFENKQGEILGMGSRIIPMSQDILGDFGKGNSVSQTAERTKYRSVRRLRERFLLRRERLHRILNVLGFLPEHYASQIDFTKRFGKFKEETEPKLVYSNEGFIFKKSFEEMLSDFKTHQPQLLEDNKKIPYDWTIYYLRKKALSRKIEKEELAWILLNFNQKRGYYQLRGEEEEENPNKLIEFYSLKIVDVLADEPQKGKSDIWYSLILENGWIYRRSSKTPLFDWKEKTRDFIVTIDLNDDGSVKTDKEGNEKRSFRAPGENDWTLVKKKTEQEIDSSRKTVGTYIYETLLKNPKQKIKGKLVRTIERKFYKTELKQILEKQKEFHPELRQDDLYSDCVRELYKNNEAHQLTLSKKDFVHLFMEDIIFYQRPLGSQKSSISNCTLEFRKYKDENGTEHTQYLKAIPKSNPYYQEFRIWQWMYNLNIYKKEDDTNVTKDFLNTKADFESLFEFLNNRKEVDQKALLKHFKLNDKTHRWNYVEDKKYPCNETKTMILSRLDKVENISDDFLTREMEQKIWHIIYSVNDKVEYEKALKSFAGKNNLEDNSFFEAFKKFPPFKSEYGAFSEKAIKKLLPLMRMGKFWNYNNISEQSKSRIQKIITGEYDENIKDKVREKAIHLTTETDFQGLQLWLVQYIVYGRHSEAAMLGKWNSADDLEEFLKEFKQHSLRNPIVEQVITETLRVVKDIWQKYGNGAKDFFREIHIELGREMKLPAEERERLTRQISENENTNFRIKALLAEMMDDNSVENVRPFSPMQQEILKIYEEGVLNSDIEIEDDILKISKTAQPSSSDLKRYKLWLEQKYKSPYTGQIIPLNKLFTPEYEIEHIIPQSRYFDDSFTNKIICESAVNKLKDNYIGLEFIKKLGGSIVECGNGKSVAILKHDAYEDFIKKHYANNRSKRNKLLLEDIPEKMIERQMNDTRYISKYISGVLSNIVRVEDGTDEGVNSKNIVPGNGKITTQLKQDWGLNDVWNDLILPRFERMNHLTNSTDFTAWNENHQKFLPTVPVEFSKGFSKKRIDHRHHALDALVIACATKDHVNLLNNQSAKSDTKRYDLKKKLMKFEKVAYNHPQTGERIEREAPKQFLKPWETFTIDAKNHLETIIVSFKQNLRVINKATNYYEKYVEKEGTKVKERVEQKGTNWAIRKPMHKETVSGKIDLPRIKVPKGKILTATRKSLDTSFNLKTIGSITDTGIQKILKNYLQYKDNNPELAFSPEGIEDMNKNIEKFNNGKAHQSISKVRVFELGSKFPLGQSGNKKEKYVEAAKGTNLFFAIYQDKNGKRSYETIPLNEVIERQKQGLSVVDLKGVDDFYLSPNDLVYVPSEDELENISMIDFNKMSSERIYKVVSFTGNQIFFVRQDIATSVVNKAEFSTLNKMERAIDGTMIKETCVKLQIDRLGNISKI

SEQ ID NO: 424 - protein, 1110 aa, Sphingobium sp.
  Sphingobium sp. AP49
MAEGKKRIWRLGADLGANSLGWAAIELSAPVNGKPIAILAAGSRIFSDGRDPKSGASLAVDRRDARAMRRRRDRFKQRQKALIKYLIADGLFPADEAARNAMAAIDPYAVRARALDEALSLPELGRALFHLNQRRGFKSNRKADRKADDDAGKIAIGIDRTRDAIAEDEADAGAEPGSWTFGKWLHERRLKGQSVRTRLRPESGEDAKGDGYDFYPDRALMEEEFDAIWAAQAPHHPDVLTNDVHDRLHEIIFYQRPLKAPQVGMCSLIPGDRRLPKAHPLFQRRRLLEELNALMIVRPGEVAQRLTREERDILLLKLKDKNKVSFATLRKALKLDPDARFNKESEDRTDLKGDEVAAVMGSKTRFGNLWVHLSIEAQWDVLARLDAVESDAEDAAFCAWLVETYALTPEQARAVANAPLPPGYGRFGETATRKLIEALRDGKKDDRVLVYSEAVTEAGLGHHSDRRTGEVFEDAKGRPQLPYYGVALERHIMPGTGDPSDPEEMRVGRLTNPTVHIGLNQLRRILNVLIRAYGPPAEIAIELARELKLTDEDKKRINRENNDNRIAAERRSEKLLAIGQADSGANRALLKLWEELNPANVLDRRCIYSGRQISIDMLFSAAVEVDHILPFAATLDDSNGNKIVCLREANREKRKRSPHDAWGHSARWDEIAARAAQLPRNKRWRFEPDAMDKFRDEGGFQARHLVDTQYLARLSREYLATLYPEKGEGSGHIWVSPGRLTEMVRRKLGLNDLLPDHNFGGGADQAKNRLDHRHHAIDAVVVAIVDRGMLNAIARASGQEGAEGRERIIIPEPWDGFRDALRETVNRITVSHRTDHGTASKAGLPKGKDATAGRLHNDTAYGFTGDTDAKGNSIVVRRVPLSSFKKLADLDRIRDADLKAALYQHLNGLEGKAFEKALAEFHKLEWHNFGGVRRVRVTEPLTVIPIKDRNGRIYKGYKGDSNYRYDVWELPDGKWVTNWKNEAGEAMSSVISMFDAHQSSEPPRPHPAARKILSLHQNDLLAIEREGEDRKLMRVVKFGQSGQITLAEHQQAGDLKKRDAVSNDDDPFKYFAPTSGGLKKVKARQVRIDEIGRVLDPGFPARTARRKTRG

SEQ ID NO: 425 - protein, 1090 aa, Sphingomonas sp.
  Sphingomonas sp. S17
MDWRLGLDLGANSLGWAALRLDRAGDPIGILAMGSRIFSDGRDPKSGASLAVDRRAARAMRRRRDRFKQRQAALLKYLIRDGLFPADQADRQRLADEDPYALRARALDEELSLFEIGRALFHLNQRRGFQSNRKADRGQDDEAGKIAVGVDRLNQQMEEQGARTLGEFLHQRRRAATDANHIPSVRTRLRPETGEGAKGDGYDFYPSRALIAEEFEEIWAAQAPHYPDTLTQQVHDRLYEIIFHQRPLRAPQVGQCTLVAGETRLPKAHPLFQKRRLLEEINALMIVRPGEIAQRLTPEERDTLYLKLKDKRTVSFATLRKTLKLDSAARFNKESENRTELKGDEVAAELGAKTRLGTRWQHLSGDQQWEVVHRLMALESQADEAAFRDWISQTYDLLPEQAAAVLGARLPQGHGRFGPTATTTLIDSLLHDRTEDGRVVVYSEAVQRSGLGHHSDLRHDRDDEDVTELPYYGVALERHIMPGTAEPTDPEEMRIGRLTNPTVHIGLNQLRHVVNRLIRAYGPPKEIAIELARELKLSEDEKKKRNSENRDNRLAAEGRSKKLEEIRQRDTGANRALLKLWEELNPGNVLDRRCIYTGEQISIDMLFSDRVEVDHILPFAQTLDDSNGNKLLCLREANREKRRRSPYEAWGHTDRWPDIAERASRLPKPKRWRFEPDAMQRFATEDGFLARHLVDTQYLGRLAREYLSWLYPGRGEGSGHVWVSPGRLTEMVRRKLGLNDLLPDHNFGGGADQPKNRLDHRHHAIDALVVAIVDRGMLQAIARASGQDGSEGRERIHIPAPWDGFRDDLRVAVNGIIVSHRPDHGTVAKAGLARGRDQTAGRLHNDTAYGLTGETDAKGNSIVVRRIPLSAIKKPADIARVRDPLLRNALAEFTKGLDGKAFEARIGRFHELGPLLYRGIRRVRVVETLTVIPIRDAEGRAYKGYKGDSNYRYDVWEMPDGKWRCQVVSMFDAHQSTEQARPHPAARKILSLQRNDILAIERTEGDRELVRVVKFSEKQFAVAPPHEGGSLKTRDGNADDPFRYLYPSPNTLKGWRARQVRIDELGRVLDPGFPARKSVRRTRPRAAPVD

SEQ ID NO: 426 - protein, 1084 aa, Sporolactobacillus vineae
  Sporolactobacillus vineae DSM 21990 = SL153
MKYSIGLDIGISSVGWSVINLDRERIELMGARLFDAAENPKNGSSLAAPRRDARSARRRLRRRRYRVGRVRHFIIDRGLVTRGQADQLFDWKDGDLDIWLVRVNALERLLTDREFARVLIHIAKNRGYRSNRKSEAKSGENGQVLSAIKANKELMEEKGYQTVAEMLVNEPETFAGRKRNRGGEYTHVIARSELEHEIRLIFTKQRAFGNRFATEENENTYVKIWAAQRPVATKDDILKKIGDCTFEKGEKRAPKASYAFQYFRALDKLNRLRILSVREPSRNLTDDERNLIVPALFNHDKQKYSDLRKILQLRDDQKFNELFYDPGKSLKENENKTFLSLAEQYKIRKVIRDVQGKDGLLQYRPLDIDTIAYALTVFKDDQDTRDYLSNTFVNGNGKQVLNLANRAFDAELIDGLLSLSFAKFGHLSLKALHKLIPHMEQGLSYYDACKKVGYHDNEQVGKSKQHLLPVIPADEIRNPVVVRSLSQTRKVINAIIKRYGSPTFMYIELAREMGRPYNERRDLEKQYNKNRTVNDSAIEQIHELYPEIGAPRGHDILKYKLWQQQDCKCAYSLEKIPAEKIFEPGYAEVDHIIPYSRSFDDSNSNKVLVLSRMNQEKKNRTPYEWFGGDEHRWNKFESYVNALKVNRKKKSLLTKKNMDTEEEDTFKSRHLNDTRYITRFIKSFVEDNLLFREIEGAKQHVFTVNGAYTSLMRKRWGFNKNREESDLHHSVDAVIIAVSQPFRNEVSRYFKHREISLPQLLKRTWDYFPEPWEGFVKELRARTLQDPEKLKLALESLDLDSYDPEFIDEVKPIFISRMPKRSIKGQIHDETLRRNRGKTKDGFVKIVTRTRLENIKFDKNGDFPMYGRESDPKTYQAIKQRYLENNKDKKKAFIEPLYKPAKNPNNASLIRSVKIEDKANQIVPLRDEAVAYNASIVRTEVYRNKETGKFYLAPVYVSDVFAGREPRRFIRANVPYEQWVNITDKFTFLFNLYPNDVIYIKMKKVKTTKSNINKTISWQESYFYFKGTDIHTGAITIIDHMNSFTDRVGTQGLQLFEKYQVDPLGNLSRVHGETQYGVPALSHS

SEQ ID NO: 427 - protein, 1053 aa, Staphylococcus aureus; identical to SEQ ID NO: 28
  Staphylococcus aureus subsp. aureus

SEQ ID NO: 428 - protein, 1054 aa, Staphylococcus lugdunensis
  Staphylococcus lugdunensis M23590
MNQKFILGLDIGITSVGYGLIDYETKNIIDAGVRLFPEANVENNEGRRSKRGSRRLKRRRIHRLERVKKLLEDYNLLDQSQIPQSTNPYAIRVKGLSEALSKDELVIALLHIAKRRGIHKIDVIDSNDDVGNELSTKEQLNKNSKLLKDKFVCQIQLERMNEGQVRGEKNRFKTADIIKEIIQLLNVQKNFHQLDENFINKYIELVEMRREYFEGPGKGSPYGWEGDPKAWYETLMGHCTYFPDELRSVKYAYSADLFNALNDLNNLVIQRDGLSKLEYHEKYHIIENVFKQKKKPTLKQIANEINVNPEDIKGYRITKSGKPQFTEFKLYHDLKSVLFDQSILENEDVLDQIAEILTIYQDKDSIKSKLTELDILLNEEDKENIAQLTGYTGTHRLSLKCIRLVLEEQWYSSRNQMEIFTHLNIKPKKINLTAANKIPKAMIDEFILSPVVKRTFGQAINLINKIIEKYGVPEDIIIELARENNSKDKQKFINEMQKKNENTRKRINEIIGKYGNQNAKRLVEKIRLHDEQEGKCLYSLESIPLEDLLNNPNHYEVDHIIPRSVSFDNSYHNKVLVKQSENSKKSNLTPYQYFNSGKSKLSYNQFKQHILNLSKSQDRISKKKKEYLLEERDINKFEVQKEFINRNLVDTRYATRELTNYLKAYFSANNMNVKVKTINGSFTDYLRKVWKFKKERNHGYKHHAEDALIIANADFLFKENKKLKAVNSVLEKPEIESKQLDIQVDSEDNYSEMFIIPKQVQDIKDFRNFKYSHRVDKKPNRQLINDTLYSTRKKDNSTYIVQTIKDIYAKDNTTLKKQFDKSPEKFLMYQHDPRTFEKLEVIMKQYANEKNPLAKYHEETGEYLTKYSKKNNGPIVKSLKYIGNKLGSHLDVTHQFKSSTKKLVKLSIKPYRFDVYLTDKGYKFITISYLDVLKKDNYYYIPEQKYDKLKLGKAIDKNAKFIASFYKNDLIKLDGEIYKIIGVNSDTRNMIELDLPDIRYKEYCELNNIKGEPRIKKTIGKKVNSIEKLTTDVLGNVFTNTQYTKPQLLFKRGN

SEQ ID NO: 429 - protein, 1334 aa, Staphylococcus pseudintermedius
MGRKPYILSLDIGTGSVGYACMDKGFNVLKYHDKDALGVYLFDGALTAQERRQFRTSRRRKNRRIKRLGLLQELLAPLVQNPNFYQFQRQFAWKNDNMDFKNKSLSEVLSFLGYESKKYPTIYHLQEALLLKDEKFDPELIYMALYHLVKYRGHFLFDHLKIENLTNNDNMHDFVELIETYENLNNIKLNLDYEKTKVIYEILKDNEMTKNDRAKRVKNMEKKLEQFSIMLLGLKFNEGKLFNHADNAEELKGANQSHTFADNYEENLTPFLTVEQSEFIERANKIYLSLTLQDILKGKKSMAMSKVAAYDKFRNELKQVKDIVYKADSTRTQFKKIFVSSKKSLKQYDATPNDQTFSSLCLFDQYLIRPKKQYSLLIKELKKIIPQDSELYFEAENDTLLKVLNTTDNASIPMQINLYEAETILRNQQKYHAEITDEMIEKVLSLIQFRIPYYVGPLVNDHTASKFGWMERKSNESIKPWNFDEVVDRSKSATQFIRRMTNKCSYLINEDVLPKNSLLYQEMEVLNELNATQIRLQTDPKNRKYRMMPQIKLFAVEHIFKKYKTVSHSKFLEIMLNSNHRENFMNHGEKLSIFGTQDDKKFASKLSSYQDMTKIFGDIEGKRAQIEEIIQWITIFEDKKILVQKLKECYPELTSKQINQLKKLNYSGWGRLSEKLLTHAYQGHSIIELLRHSDENFMEILTNDVYGFQNFIKEENQVQSNKIQHQDIANLTTSPALKKGIWSTIKLVRELTSIFGEPEKIIMEFATEDQQKGKKQKSRKQLWDDNIKKNKLKSVDEYKYIIDVANKLNNEQLQQEKLWLYLSQNGKCMYSGQSIDLDALLSPNATKHYEVDHIFPRSFIKDDSIDNKVLVIKKMNQTKGDQVPLQFIQQPYERIAYWKSLNKAGLISDSKLHKLMKPEFTAMDKEGFIQRQLVETRQISVHVRDFLKEEYPNTKVIPMKAKMVSEFRKKFDIPKIRQMNDAHHAIDAYLNGVVYHGAQLAYPNVDLFDFNFKWEKVREKWKALGEFNTKQKSRELFFFKKLEKMEVSQGERLISKIKLDMNHFKINYSRKLANIPQQFYNQTAVSPKTAELKYESNKSNEVVYKGLTPYQTYVVAIKSVNKKGKEKMEYQMIDHYVFDFYKFQNGNEKELALYLAQRENKDEVLDAQIVYSLNKGDLLYINNHPCYFVSRKEVINAKQFELTVEQQLSLYNVMNNKETNVEKLLIEYDFIAEKVINEYHHYLNSKLKEKRVRTFFSESNQTHEDFIKALDELFKVVTASATRSDKIGSRKNSMTHRAFLGKGKDVKIAYTSISGLKTTKPKSLFKLAESRNEL

SEQ ID NO: 430 - protein, 1334 aa, Staphylococcus pseudintermedius; identical to SEQ ID NO: 429
  Staphylococcus pseudintermedius ED99

SEQ ID NO: 431 - protein, 1112 aa, Staphylococcus simulans
  Staphylococcus simulans ACS-120-V-Sch1
MLVGLKFKQSILFENMENAEDIKESATGSDAISLSDDYYENLSEFLTDEQLNFIESANTFFMGIMLDRILKGATSISAAKVRDYKIFKSQLKLIKDIVYQNKYDKYHEFFVTSKEDMRAYQENPDAKNFGKLSKFDQYLIHSKDQYAKLMKDLKGLVPKEYTEVLNLIDEQKFLVVQNTTDNASIPYQNNVFEAENILRNQQKYYPEITEEMIGKVINLISFRIPYYVGPLTNKNGQSDFAWMIRKSDEQTLPWNFDKVIDKSKSAEKFIRRMTSKCTYLLEEDVLPKHSLLYQEMEVLNELNNVQLRGENEPKHRIHRLDPKVKQFIYHNLFQKKKNVTHKDLITLLQNSEHRNTLNKTSGQKLKVFGTQNDSKFASKLSTYNDMKAILGSVENKRQMIEELVLWITIFEDKAILKQKIGEKYPNITEKQLNQIVKLNYSGWGRLSEKLLTKEVNGRSLIDLMYSTENNFMEIITDKTLGFDCFIKNSNKVKNAKISYKDVAELRTSPALKKGIWNAIKMVREISNLFGAPEKIIIEFATEDQAKGKRQKSRSELWDDLVKKNNLKRNKEFEGLFEELKAYPDLDFSNPKLWLYIHQNGKCMYTKKPIDLERLMSDTNNQLYEIDHILPRTFVKDDSINNKVLVIQSANQKKSGDKMPLEIFDNHVLVPFWKMLYENDLISSSKLSKLMKKEFNDLDKEGFIQRQLVETRQIISHVSDFLTEEYPSTTVVPMKANVVSELRRKFDIPKIRQLNDWHHAVDAYLNGFVYQAARVFYPKVNLFEFNFKWEKVREKWRQLGEFTENNKKREFFLFKRMENYVNEYGEGMISKLIFDLDNFKFNYSRKVESTESAFYKQSAFSPKNTTAQYDSDKNKTAIYKEMKNKRGIVVSYTYVKKDQELIGYGVFNETVFEYVNNADVDMNTRALKIVRKAFPKLDIKKAQYLFSINKGDALLVNGHPFLFVSAYERINGKQLEFDIAMQRKIKQALSPYNNMTEQEKVEFYNQFAEKVIEEFRNSIGLQSRDRKVNLIKNLFNNTEKSNDSMTQSILEVLKMTKVSAERSKELKIRWNGQTPNTFIDTKNNAEIQYKSITGLKTTKPKSIFKLAESKNEL

SEQ ID NO: 432 - protein, 1370 aa, Streptococcus agalactiae
  Streptococcus agalactiae 2603V/R
MNKPYSIGLDIGTNSVGWSIITDDYKVPAKKMRVLGNTDKEYIKKNLIGALLFDGGNTAADRRLKRTARRRYTRRRNRILYLQEIFAEEMSKVDDSFFHRLEDSFLVEEDKRGSKYPIFATLQEEKDYHEKFSTIYHLRKELADKKEKADLRLIYIALAHIIKFRGHFLIEDDSFDVRNTDISKQYQDFLEIFNTTFENNDLLSQNVDVEAILTDKISKSAKKDRILAQYPNQKSTGIFAEFLKLIVGNQADFKKYFNLEDKTPLQFAKDSYDEDLENLLGQIGDEFADLFSAAKKLYDSVLLSGILTVIDLSTKAPLSASMIQRYDEHREDLKQLKQFVKASLPEKYQEIFADSSKDGYAGYIEGKTNQEAFYKYLSKLLTKQEDSENFLEKIKNEDFLRKQRTFDNGSIPHQVHLTELKAIIRRQSEYYPFLKENQDRIEKILTFRIPYYIGPLAREKSDFAWMTRKTDDSIRPWNFEDLVDKEKSAEAFIHRMTNNDFYLPEEKVLPKHSLIYEKFTVYNELTKVRYKNEQGETYFFDSNIKQEIFDGVFKEHRKVSKKKLLDFLAKEYEEFRIVDVIGLDKENKAFNASLGTYHDLEKILDKDFLDNPDNESILEDIVQTLTLFEDREMIKKRLENYKDLFTESQLKKLYRRHYTGWGRLSAKLINGIRDKESQKTILDYLIDDGRSNRNFMQLINDDGLSFKSIISKAQAGSHSDNLKEVVGELAGSPAIKKGILQSLKIVDELVKVMGYEPEQIVVEMARENQTTNQGRRNSRQRYKLLDDGVKNLASDLNGNILKEYPTDNQALQNERLFLYYLQNGRDMYTGEALDIDNLSQYDIDHIIPQAFIKDDSIDNRVLVSSAKNRGKSDDVPSLEIVKDCKVFWKKLLDAKLMSQRKYDNLTKAERGGLTSDDKARFIQRQLVETRQITKHVARILDERFNNELDSKGRRIRKVKIVTLKSNLVSNFRKEFGFYKIREVNNYHHAHDAYLNAVVAKAILTKYPQLEPEFVYGDYPKYNSYKTRKSATEKLFFYSNIMNFFKTKVTLADGTVVVKDDIEVNNDTGEIVWDKKKHFATVRKVLSYPQNNIVKKTEIQTGGFSKESILAHGNSDKLIPRKTKDIYLDPKKYGGFDSPIVAYSVLVVADIKKGKAQKLKTVTELLGITIMERSRFEKNPSAFLESKGYLNIRADKLIILPKYSLFELENGRRRLLASAGELQKGNELALPTQFMKFLYLASRYNESKGKPEEIEKKQEFVNQHVSYFDDILQLINDFSKRVILADANLEKINKLYQDNKENISVDELANNIINLFTFTSLGAPAAFKFFDKIVDRKRYTSTKEVLNSTLIHQSITGLYETRIDLGKLGED

SEQ ID NO: 433 - protein, 1377 aa, Streptococcus agalactiae
  Streptococcus agalactiae 515
MNKPYSIGLDIGTNSVGWSIITDDYKVPAKKMRVLGNTDKEYIKKNLIGALLFDGGNTAADRRLKRTARRRYTRRRNRILYLQEIFAEEMSKVDDSFFHRLEDSFLVEEDKRGSKYPIFATMQEEKYYHEKFPTIYHLRKELADKKEKADLRLVYLALAHIIKFRGHFLIEDDRFDVRNTDIQKQYQAFLEIFDTTFENNHLLSQNVDVEAILTDKISKSAKKDRILAQYPNQKSTGIFAEFLKLIVGNQADFKKHFNLEDKTPLQFAKDSYDEDLENLLGQIGDEFADLFSVAKKLYDSVLLSGILTVTDLSTKAPLSASMIQRYDEHHEDLKHLKQFVKASLPENYREVFADSSKDGYAGYIEGKTNQEAFYKYLLKLLTKQEGSEYFLEKIKNEDFLRKQRTFDNGSIPHQVHLTELRAIIRRQSEYYPFLKENQDRIEKILTFRIPYYVGPLAREKSDFAWMTRKTDDSIRPWNFEDLVDKEKSAEAFIHRMTNNDLYLPEEKVLPKHSLIYEKFTVYNELTKVRFLAEGFKDFQFLNRKQKETIFNSLFKEKRKVTEKDIISFLNKVDGYEGIAIKGIEKQFNASLSTYHDLKKILGKDFLDNTDNELILEDIVQTLTLFEDREMIKKCLDIYKDFFTESQLKKLYRRHYTGWGRLSAKLINGIRNKENQKTILDYLIDDGSANRNFMQLINDDDLSFKPIIDKARTGSHSDNLKEVVGELAGSPAIKKGILQSLKIVDELVKVMGYEPEQIVVEMARENQTTAKGLSRSRQRLTTLRESLANLKSNILEEKKPKYVKDQVENHHLSDDRLFLYYLQNGRDMYTKKALDIDNLSQYDIDHIIPQAFIKDDSIDNRVLVSSAKNRGKSDDVPSIEIVKARKMFWKNLLDAKLMSQRKYDNLTKAERGGLTSDDKARFIQRQLVETRQITKHVARILDERFNNEVDNGKKICKVKIVTLKSNLVSNFRKEFGFYKIREVNDYHHAHDAYLNAVVAKAILTKYPQLEPEFVYGMYRQKKLSKIVHEDKEEKYSEATRKMFFYSNLMNMFKRVVRLADGSIVVRPVIETGRYMGKTAWDKKKHFATVRKVLSYPQNNIVKKTEIQTGGFSKESILAHGNSDKLIPRKTKDIYLDPKKYGGFDSPIVAYSVLVVADIKKGKAQKLKTVTELLGITIMERSRFEKNPSAFLESKGYLNIRDDKLMILPKYSLFELENGRRRLLASAGELQKGNELALPTQFMKFLYLASRYNESKGKPEEIEKKQEFVNQHVSYFDDILQLINDFSKRVILADANLEKINKLYQDNKENIPVDELANNIINLFTFTSLGAPAAFKFFDKIVDRKRYTSTKEVLNSTLIHQSITGLYETRIDLGKLGED

SEQ ID NO: 434 - protein, 1370 aa, Streptococcus agalactiae; identical to SEQ ID NO: 432

SEQ ID NO: 435 - protein, 1378 aa, Streptococcus agalactiae
  Streptococcus agalactiae ATCC 13813
MNKPYSIGLDIGTNSVGWSIITDDYKVPAKKMRVLGNTDKEYIKKNLIGALLFDGGNTAADRRLKRTARRRYTRRRNRILYLQEIFAEEMSKVDDSFFHRLEDSFLVEEDKRGSKYPIFATMQEEKYYHEKFPTIYHLRKELADKKEKADLRLIYLALAHIIKFRGHFLIEDDRFDVRNTDIQKQYQAFLEIFDTTFENNDLLSQNVDVEAILTDKISKSAKKDRILARYPNQKSTGIFAEFLKLIVGNQADFKKHFNLEDKTPLQFAKDSYDEDLENLLGQIGDEFADLFSAAKKLYDSVLLSGILTVIDLSTKAPLSASMIQRYDEHHEDLKHLKQFVKASLPENYREVFADSSKDGYAGYIEGKTSQEAFYKYLLKLLTKQEGSEYLLEKIKNEDFLRKQRTFDNGSIPHQVHLTELRAIIRRQSEYYPFLKENLDRIEKILTFRIPYYVGPLAREKSDFAWMTRKTDDSIRPWNFEDLVDKEKSAEAFIHRMTNNDLYLPEEKVLPKHSLIYEKFTVYNELTKVRFLAEGFKDFQFLNRKQKETIFNSLFKEKRKVTEKDIISFLNKVDGYEGIAIKGIEKQFNASLSTYHDLKKILGKDFLDNTDNELILEDIIQTLTLFEDREMIKKRLDIYKDFFTESQLKKLYRRHYTGWGRLSAKLINGIRNKENQKTILDYLIDDGSANRNFMQLIKDAGLSFKPIIDKARTGSHSDNLKEVVGELAGSPAIKKGILQSLKIVDELVKVMGYEPEQIVVEMARENQTTAKGLSRSRQRLTTLRESLGNLKSNILEEKKPKYVKDQVENHHLSDDRLFLYYLQNGKDMYTDDELDIDNLSQYDIDHIIPQAFIKDDSIDNRVLVSSAKNRGKSDDVPSIEIVKARKMFWKNLLDAKLMSQRKYDNLTKAERGGLTSDDKARFIQRQLVETRQITKHVARILDERFNNELDSKGRRIRKVKIVTLKSNLVSNFRKEFGFYKIREVNNYHHAHDAYLNAVVAKAILTKYPQLEPEFVYGLYRRKKLSKIVREDKEEKYSEATRKMFFYSNLMNMFKRVVRLADGSIVVRPVIETGRYMGKTAWDKKKHFATVRKVLSYPQNNIVKKTEIQTGGFSKESILAHGNSDKLIPRKTKDIYLDPKKYGGFDSPIVAYSVLVVADIKKGKAQKLKTVTELLGITIMERSRFEKNTSAFLESKGYLNIRDDKLMILPKYSLFELENGRRRLLASAGELQKGNELALPTQFMKFLYLASRYNESKGKPEEIEKKQEFVNQHVSYFDDILQLINDFSNRVILADANLEKINKLYQDNKENIPVDELANNIINLFTFTSLGAPAAFKFFDKIVDRKRYTSTKEVLNSTLIHQSITGLYETRIDLGKLGEG

SEQ ID NO: 436 - protein, 1370 aa, Streptococcus agalactiae
  Streptococcus agalactiae CJB111
  MOD_RES (117)..(117): Any amino acid
MNKPYSIGLDIGTNSVGWSIITDDYKVPAKKMRVLGNTDKEYIKKNLIGALLFDGGNTAADRRLKRTARRRYTRRRNRILYLQEIFAEEMSKVDDSFFHRLEDSFLVEEDKRGSKYXIFATLQEEKDYHEKFSTIYHLRKELADKKEKADLRLIYIALAHIIKFRGHFLIEDDSFDVRNTDISKQYQDFLEIFNTTFENNDLLSQNVDVEAILTDKISKSAKKDRILAQYPNQKSTGIFAEFLKLIVGNQADFKKYFNLEDKTPLQFAKDSYDEDLENLLGQIGDEFADLFSAAKKLYDSVLLSGILTVIDLSTKAPLSASMIQRYDEHREDLKQLKQFVKASLPEKYQEIFADSSKDGYAGYIEGKTNQEAFYKYLSKLLTKQEDSENFLEKIKNEDFLRKQRTFDNGSIPHQVHLTELKAIIRRQSEYYPFLKENQDRIEKILTFRIPYYIGPLAREKSDFAWMTRKTDDSIRPWNFEDLVDKEKSAEAFIHRMTNNDFYLPEEKVLPKHSLIYEKFTVYNELTKVRYKNEQGETYFFDSNIKQEIFDGVFKEHRKVSKKKLLDFLAKEYEEFRIVDVIGLDKENKAFNASLGTYHDLEKILDKDFLDNPDNESILEDIVQTLTLFEDREMIKKRLENYKDLFTESQLKKLYRRHYTGWGRLSAKLINGIRDKESQKTILDYLIDDGRSNRNFMQLINDDGLSFKSIISKAQAGSHSDNLKEVVGELAGSPAIKKGILQSLKIVDELVKVMGYEPEQIVVEMARENQTTNQGRRNSRQRYKLLDDGVKNLASDLNGNILKEYPTDNQALQNERLFLYYLQNGRDMYTGEALDIDNLSQYDIDHIIPQAFIKDDSIDNRVLVSSAKNRGKSDDVPSLEIVKDCKVFWKKLLDAKLMSQRKYDNLTKAERGGLTSDDKARFIQRQLVETRQITKHVARILDERFNNELDSKGRRIRKVKIVTLKSNLVSNFRKEFGFYKIREVNNYHHAHDAYLNAVVAKAILTKYPQLEPEFVYGDYPKYNSYKTRKSATEKLFFYSNIMNFFKTKVTLADGTVVVKDDIEVNNDTGEIVWDKKKHFATVRKVLSYPQNNIVKKTEIQTGGFSKESILAHGNSDKLIPRKTKDIYLDPKKYGGFDSPIVAYSVLVVADIKKGKAQKLKTVTELLGITIMERSRFEKNPSAFLESKGYLNIRADKLIILPKYSLFELENGRRRLLASAGELQKGNELALPTQFMKFLYLASRYNESKGKPEEIEKKQEFVNQHVSYFDDILQLINDFSKRVILADANLEKINKLYQDNKENISVDELANNIINLFTFTSLGAPAAFKFFDKIVDRKRYTSTKEVLNSTLIHQSITGLYETRIDLGKLGED

SEQ ID NO: 437 - protein, 1370 aa, Streptococcus agalactiae
  Streptococcus agalactiae COH1
MNKPYSIGLDIGTNSVGYSVVTDDYKVPAKKMRVLGNTDKEYIKKNLIGALLFDGGNTASDRRLKRTARRRYTRRRNRILYLQEIFAEEMSKVDDSFFHRLEDSFLVEDDKRGSKYPIFATMQEEKDYHEKFPTIYHLRKELADKKEKANLRLVYLALAHIIKFRGHFLIEDDSFDVRNTDIQRQYQAFLEIFDTTFENNHLLSQNIDVEGILTDKISKSAKKDRILAQYPNQKSTGIFAEFLKLIVGNQADFKKHFNLEDKTPLQFAKDSYDEDLENLLGQIGDEFADLFSVAKKLYDSVLLSGILTVTDLSTKAPLSASMIQRYDEHREDLKQLKQFVKASLPEKYQEIFTDSSKDGYAGYIEGKTNQGAFYKYLSKLLTKQEGSEYFLEKIKNEDFLRKQRTFDNGSIPHQVHLTELKAIIRRQSEYYPFLKENLDRIEKILTFRIPYYVGPLAREKSDFAWMTRKTDDSIRPWNFEELVDKEASAEAFIHRMTNNDLYLPEEKVLPKHSLIYEKFTVYNELTKVRYKNEQGETYFFDSNIKQEIFDGVFKEHRKVSKKKLLDFLAKEYEEFRIVDVIGLDKENKAFNASLGTYHDLKKILDKDFLDNPDNESILEDIVQTLTLFEDREMIKKRLENYKDLFTESQLKKLYRRHYTGWGRLSAKLINGIRDKESQKTILDYLISDGRANRNFMQLIHDDGLSFKPIIDKAQAGSHSDNLKEVVGELAGSPAIKKGILQSLKIVDELVKVMGYEPEQVVVEMARENQTTNQGRRNTRQRYKLLEEGVKNLASDLNGNILKEYPTDNQALQNERLFLYYLQNGRDMYTGEALDIDNLSQYDIDHIVPQAFIKDDSIDNRVLVSSAKNRGKSDNVPSIDIVKARKAFWKKLLDAKLMSQRKYDNLTKAERGGLTSDDKARFIQRQLVETRQITKHVARILDERFNNELDSKGRRIRKVKIVTLKSNLVSNFRKEFGFYKIREVNDYHHAHDAYLNAVVAKAILTKYPQLEPEFVYGDYPKYNSYKTRKSATEKLFFYSNIMNFFKTKVTLADGTVVVKDDIEVNNDTGEIVWDKKKHFATVRKVLSYPQVNIVKKTEIQTGGFSKESILAHGNSDKLIPRKTKDIYLDPKKYGGFDSPIVAYSVLVVADIKKGKAQKLKTVTELLGITIMERFRFEKNPSAFLESKGYLNIRDDKLMILPKYSLFELENGRRRLLASAGELQKGNELALPTQYMKFLYLASRYNELKGKPEEIEQKQEFVVQHVSYFDDILQIINDFSNRVILADANLEKINKLYQDNKENISVDELANNIINLFTFTSLGAPAAFKFFDKIVDRKRYTSTKEVLNSTLIHQSITGLYETRIDLGKLGED

SEQ ID NO: 438 - protein, 1370 aa, Streptococcus agalactiae
  Streptococcus agalactiae FSL S3-026
MNKPYSIGLDIGTNSVGWSIITDDYKVPAKKMRVLGNTDKEYIKKNLIGALLFDGGNTAADRRLKRTARRRYTRRRNRILYLQEIFAEEMSKVDDSFFHRLEDSFLVEEDKRGSKYPIFATMQEEKYYHEKFPTIYHLRKELADKKEKADLRLIYLALAHIIKFRGHFLIEDDRFDVRNTDIQKQYQAFLEIFDTTFENNDLLSQNVDVEAILTDKISKSAKKDRILARYPNQKSTGIFAEFLKLIVGNQADFKKHFNLEDKTPLQFAKDSYDEDLENLLGQIGDEFADLFSAAKKLYDSVLLSGILTVTDLSTKAPLSASMIQRYDEHREDLKQLKQFVKASLPEKYQEIFADSSKDGYAGYIEGKTNQEAFYKYLSKLLTKQEGSEYLLEKIKNEDFLRKQRTFDNGSIPHQVHLTELRAIIRRQSEYYPFLKENLDRIEKILTFRIPYYVGPLAREKSDFAWMTRKTDDSIRPWNFEDLVDKEKSAEAFIHRMTNNDLYLPEEKVLPKHSLIYEKFTVYNELTKVRFLAEGFKDFQFLNRKQKETIFNSLFKEKRKVTEKDIISFLNKVDGYEGIAIKGIEKQFNASLSTYHDLKKILGKDFLDNTDNELILEDIVQTLTLFEDREMIRKRLDIYKDFFTESQLKKLYRRHYTGWGRLSAKLINGIRNKENQKTILDYLIDDGSANRNFMQLIKDAGLSFKPIIDKARTGSHSDNLKEVVGELAGSPAIKKGILQSLKIVDELVKVMGYEPEQIVVEMARENQTTAKGLSRLRQRLTTLRESLANLKSNILEEKKPKYVKDQVENHHLSDDRLFLYYLQNGKDMYTDDELDIDNLSQYDIDHIIPQAFIKDDSIDNRVLVSSAKNRGKSDDVPSVEIVKDCKVFWKKLLDAKLMSQRKYDNLTKAERGGLTSDDKARFIQRQLVETRQITKHVARILDERFNNELDSKGRRIRKVKIVTLKSNLVSNFRKEFGFYKIREVNNYHHAHDAYLNAVVAKAILTKYPQLEPEFVYGDYPKYNSYKTRKSATEKLFFYSNIMNFFKTKVTLADGTVVVKDDIEVNNDTGEIVWDKKKHFATVRKVLSYPQVNIVKKTEIQTGGFSKESILAHGNSDKLIPRKTKDIYLDPKKYGGFDSPIVAYSVLVVADIKKGKAQKLKTVTELLGITIMERSRFEKNPSAFLESKGYLNIRDDKLMILPKYSLFELENGRRRLLASADELQKGNELALPTQFMKFLYLASRYNELKGKPEEIEQKQEFVVQHVSYFDDILQIINDFSNRVILADANLEKINKLYQDNKENIPVDELANNIINLFTFTSLGAPAAFKFFDKIVDRKRYTSTKEVLNSTLIHQSITGLYETRIDLGKLGED

SEQ ID NO: 439 - protein, 1370 aa, Streptococcus agalactiae
  Streptococcus agalactiae GB00112
MNKPYSIGLDIGTNSVGYSVVTDDYKVPAKKMRVLGNTDKEYIKKNLIGALLFDGGNTASDRRLKRTARRRYTRRRNRILYLQEIFAEEMSKVDDSFFHRLEDSFLVEDDKRGSKYPIFATMQEEKDYHEKFPTIYHLRKELADKKEKADLRLVYLALAHIIKFRGHFLIEDDSFDVRNTDIQRQYQAFLEIFDTTFENNHLLSQNIDVEGILTDKISKSAKKDRILAQYPNQKSTGIFAEFLKLIVGNQADFKKHFNLEDKTPLQFAKDSYDEDLENLLGQIGDEFADLFSVAKKLYDSVLLSGILTVTDLSTKAPLSASMIQRYDEHREDLKQLKQFVKASLPEKYQEIFTDSSKDGYAGYIEGKTNQGAFYKYLSKLLTKQEGSEYFLEKIKNEDFLRKQRTFDNGSIPHQVHLTELKAIIRRQSEYYPFLKENLDRIEKILTFRIPYYVGPLAREKSDFAWMTRKTDDSIRPWNFEELVDKEASAEAFIHRMTNNDLYLPEEKVLPKHSLIYEKFTVYNELTKVRYKNEQGETYFFDSNIKQEIFDGVFKEHRKVSKKKLLDFLAKEYEEFRIVDVIGLDKENKAFNASLGTYHDLKKILDKDFLDNPDNESILEDIVQTLTLFEDREMIKKRLENYKDLFTESQLKKLYRRHYTGWGRLSAKLINGIRDKESQKTILDYLISDGRANRNFMQLIHDDGLSFKPIIDKAQAGSHSDNLKEVVGELAGSPAIKKGILQSLKIVDELVKVMGYEPEQVVVEMARENQTTNQGRRNTRQRYKLLEEGVKNLASDLNGNILKEYPTDNQALQNERLFLYYLQNGRDMYTGEALDIDNLSQYDIDHIVPQAFIKDDSIDNRVLVSSAKNRGKSDNVPSIDIVKARKAFWKKLLDAKLMSQRKYDNLTKAERGGLTSDDKARFIQRQLVETRQITKHVARILDERFNNELDSKGRRIRKVKIVTLKSNLVSNFRKEFGFYKIREVNDYHHAHDAYLNAVVAKAILTKYPQLEPEFVYGDYPKYNSYKTRKSATEKLFFYSNIMNFFKTKVTLADGTVVVKDDIEVNNDTGEIVWDKKKHFATVRKVLSYPQVNIVKKTEIQTGGFSKESILAHGNSDKLIPRKTKDIYLDPKKYGGFDSPIVAYSVLVVADIKKGKAQKLKTVTELLGITIMERFRFEKNPSAFLESKGYLNIRDDKLMILPKYSLFELENGRRRLLASAGELQKGNELALPTQYMKFLYLASRYNELKGKPEEIEQKQEFVVQHVSYFDDILQIINDFSNRVILADANLEKINKLYQDNKENISVDELANNIINLFTFTSLGAPAAFKFFDKIVDRKRYTSTKEVLNSTLIHQSITGLYETRIDLGKLGED

SEQ ID NO: 440 - protein, 1370 aa, Streptococcus agalactiae
  Streptococcus agalactiae H36B
  MOD_RES (9)..(9): Any amino acid
MNKPYSIGXDIGTNSVGWSIITDDYKVPAKKMRVLGNTDKEYIKKNLIGALLFDGGNTAADRRLKRTARRRYTRRRNRILYLQEIFAEEMSKVDDSFFHRLEDSFLVEEDKRGSKYPIFATLQEEKDYHEKFSTIYHLRKELADKKEKADLRLIYIALAHIIKFRGHFLIEDDSFDVRNTDISKQYQDFLEIFNTTFENNDLLSQNVDVEAILTDKISKSAKKDRILAQYPNQKSTGIFAEFLKLIVGNQADFKKYFNLEDKTPLQFAKDSYDEDLENLLGQIGDEFADLFSAAKKLYDSVLLSGILTVIDLSTKAPLSASMIQRYDEHREDLKQLKQFVKASLPEKYQEIFADSSKDGYAGYIEGKTNQEAFYKYLSKLLTKQEDSENFLEKIKNEDFLRKQRTFDNGSIPHQVHLTELKAIIRRQSEYYPFLKENQDRIEKILTFRIPYYIGPLAREKSDFAWMTRKTDDSIRPWNFEDLVDKEKSAEAFIHRMTNNDFYLPEEKVLPKHSLIYEKFTVYNELTKVRYKNEQGETYFFDSNIKQEIFDGVFKEHRKVSKKKLLDFLAKEYEEFRIVDVIGLDKENKAFNASLGTYHDLEKILDKDFLDNPDNESILEDIVQTLTLFEDREMIKKRLENYKDLFTESQLKKLYRRHYTGWGRLSAKLINGIRDKESQKTILDYLIDDGRSNRNFMQLINDDGLSFKSIISKAQAGSHSDNLKEVVGELAGSPAIKKGILQSLKIVDELVKVMGYEPEQIVVEMARENQTTNQGRRNSRQRYKLLDDGVKNLASDLNGNILKEYPTDNQALQNERLFLYYLQNGRDMYTGEALDIDNLSQYDIDHIIPQAFIKDDSIDNRVLVSSAKNRGKSDDVPSLEIVKDCKVFWKKLLDAKLMSQRKYDNLTKAERGGLTSDDKARFIQRQLVETRQITKHVARILDERFNNELDSKGRRIRKVKIVTLKSNLVSNFRKEFGFYKIREVNNYHHAHDAYLNAVVAKAILTKYPQLEPEFVYGDYPKYNSYKTRKSATEKLFFYSNIMNFFKTKVTLADGTVVVKDDIEVNNDTGEIVWDKKKHFATVRKVLSYPQNNIVKKTEIQTGGFSKESILAHGNSDKLIPRKTKDIYLDPKKYGGFDSPIVAYSVLVVADIKKGKAQKLKTVTELLGITIMERSRFEKNPSAFLESKGYLNIRADKLIILPKYSLFELENGRRRLLASAGELQKGNELALPTQFMKFLYLASRYNESKGKPEEIEKKQEFVNQHVSYFDDILQLINDFSKRVILADANLEKINKLYQDNKENISVDELANNIINLFTFTSLGAPAAFKFFDKIVDRKRYTSTKEVLNSTLIHQSITGLYETRIDLGKLGED

SEQ ID NO: 441 - protein, 1377 aa, Streptococcus agalactiae
MNKPYSIGLDIGTNSVGWSIITDDYKVPAKKMRVLGNTDKEYIKKNLIGALLFDGGNTAADRRLKRTARRRYTRRRNRILYLQEIFAEEMSKVDDSFFHRLEDSFLVEEDKRGSKYPIFATMQEEKYYHEKFPTIYHLRKELADKKEKADLRLVYLALAHIIKFRGHFLIEDDRFDVRNTDIQKQYQAFLEIFDTTFENNHLLSQNVDVEAILTDKISKSAKKDRILAQYPNQKSTGIFAEFLKLIVGNQADFKKHFNLEDKTPLQFAKDSYDEDLENLLGQIGDEFADLFSVAKKLYDSVLLSGILTVTDLSTKAPLSASMIQRYDEHHEDLKHLKQFVKASLPENYREVFADSSKDGYAGYIEGKTNQEAFYKYLLKLLTKQEGSEYFLEKIKNEDFLRKQRTFDNGSIPHQVHLTELRAIIRRQSEYYPFLKENQDRIEKILTFRIPYYVGPLAREKSDFAWMTRKTDDSIRPWNFEDLVDKEKSAEAFIHRMTNNDLYLPEEKVLPKHSLIYEKFTVYNELTKVRFLAEGFKDFQFLNRKQKETIFNSLFKEKRKVTEKDIISFLNKVDGYEGIAIKGIEKQFNASLSTYHDLKKILGKDFLDNTDNELILEDIVQTLTLFEDREMIKKCLDIYKDFFTESQLKKLYRRHYTGWGRLSAKLINGIRNKENQKTILDYLIDDGSANRNFMQLINDDDLSFKPIIDKARTGSHSDNLKEVVGELAGSPAIKKGILQSLKIVDELVKVMGYEPEQIVVEMARENQTTAKGLSRSRQRLTTLRESLANLKSNILEEKKPKYVKDQVENHHLSDDRLFLYYLQNGRDMYTKKALDIDNLSQYDIDHIIPQAFIKDDSIDNRVLVSSAKNRGKSDDVPSIEIVKARKMFWKNLLDAKLMSQRKYDNLTKAERGGLTSDDKARFIQRQLVETRQITKHVARILDERFNNEVDNGKKICKVKIVTLKSNLVSNFRKEFGFYKIREVNDYHHAHDAYLNAVVAKAILTKYPQLEPEFVYGMYRQKKLSKIVHEDKEEKYSEATRKMFFYSNLMNMFKRVVRLADGSIVVRPVIETGRYMRKTAWDKKKHFATVRKVLSYPQNNIVKKTEIQTGGFSKESILAHGNSDKLIPRKTKDIYLDPKKYGGFDSPIVAYSVLVVADIKKGKAQKLKTVTELLGITIMERSRFEKNPSAFLESKGYLNIRDDKLMILPKYSLFELENGRRRLLASAGELQKGNELALPTQFMKFLYLASRYNESKGKPEEIEKKQEFVNQHVSYFDDILQLINDFSKRVILADANLEKINKLYQDNKENIPVDELANNIINLFTFTSLGAPAAFKFFDKIVDRKRYTSTKEVLNSTLIHQSITGLYETRIDLGKLGED

SEQ ID NO: 442 - protein, 1370 aa, Streptococcus agalactiae
MNKPYSIGLDIGTNSVGWSIITDDYKVPAKKMRVLGNTDKEYIKKNLIGALLFDGGNTAADRRLKRTARRRYTRRRNRILYLQEIFAEEMSKVDDSFFHRLEDSFLVEEDKRGSKYPIFATMQEEKDYHEKFPTIYHLRKELADKKEKADLRLVYLALAHIIKFRGHFLIEDDRFDVRNTDIQKQYQAFLEIFDTSFENNHLLSQNVDVEAILTDKISKSAKKDRILAQYPNQKSTGIFAEFLKLIVGNQADFKKHFNLEDKTPLQFAKDSYDEDLENLLGQIGDEFADLFSAAKKLYDSVLLSGILTVTDLSTKAPLSASMIQRYDEHREDLKQLKQFVKASLPEKYQEIFADSSKDGYAGYIEGKTNQEAFYKYLSKLLTKQEDSEYFLEKIKNEDFLRKQRTFDNGSIPHQVHLTELKAIIRRQSEYYPFLKENQDKIEKILTFRIPYYVGPLARGNSDFAWMTRKTDDSIRPWNFEDLVDKEKSAEAFIHRMTNNDLYLPEEKVLPKHSLIYEKFTVYNELTKVRYKNEQGETYFFDSNVKQEIFDGVFKEHRKVSKKQLLDFLAKEFEEFRIVDVTGLDKENKAFNASLGTYHDLKKILDKDFLDNPDNESILEDIVQTITLFEDREMIKKRLENYKDLFTESQLKKLYRRHYTGWGRLSAKLINGIRDRESQKTILDYLISDGRANRNFMQLINDDGLSFKSIISKAQSGSHSDNLKEVVGELAGSPAIKKGILQSLKIVDELVKVMGYEPEQIVVEMARENQTTNQGRRNSRQRYKLLEDGVKNLASDLNGDILKEYPTDNQALQNERLFLYYLQNGRDMYTGEALDIDNLSQYDIDHIVPQAFIKDDSIDNRVLVSSAKNRGKSDDVPSIDIVKARKAFWKKLLDAKLISQRKYDNLTKAERGGLTPDDKAGFIQRQLVETRQITKHVARILDERFNNKVDDNNKPIRKVKIVTLKSNLVSNFRKEFGFYKIREVNNYHHAHDAYLNAVVAKAILTKYPQLEPEFVYGDYPKYNSYKTRKSATEKLFFYSNIMNFFKTKVTLADETVVVKDDIEVNNETGEIAWDKKKHFATVRKVLSYPQVNIVKKTEVQTGGFSKESILAHSNSDKLIPRKTKDIYLDPKKYGGFDSPIVAYSVLVLADIKKGKAQKLKTVKELIGITIMERERFEKNPSAFLESKGYLNIRTDKLIILPKYSLFELENGRRRLLASAGELQKGNELALPTQYMKFLYLASRYNESKGKPEEIEKKQEFVNQHVSYFDDILQLINDFSKRVILADANLEKINKLYSDNKDNTPVDELAKNIINLFTFTSLGAPAAFKFFDKSVDRKRYTSTKEVLDSTLIHQSITGLYETRIDLGKLGED

SEQ ID NO: 443 - protein, 1370 aa, Streptococcus agalactiae
  Streptococcus agalactiae STIR-CD-17
MNKPYSIGLDIGTNSVGWSIITDDYKVPAKKMRVLGNTDKEYIKKNLIGALLFDGGNTAADRRLKRTARRRYTRRRNRILYLQEIFAEEMSKVDDSFFHRLEDSFLVEEDKRGSKYPIFATMQEEKDYHEKFPTIYHLRKELADKKEKADLRLVYLALAHIIKFRGHFLIEDDRFDVRNTDIQKQYQAFLEIFDTSFENNHLLSQNVDVEAILTDKISKSAKKDRILAQYPNQKSTGIFAEFLKLIVGNQADFKKHFNLEDKTPLQFAKDSYDEDLENLLGQIGDEFADLFSAAKKLYDSVLLSGILTVTDLSTKAPLSAYMIQRYDEHREDLKQLKQFVKASLPEKYQEIFADSSKDGYAGYIEGKTNQEAFYKYLSKLLTKQEDSEYFLEKIKNEDFLRKQRTFDNGSIPHQVHLTELKAIIRRQSEYYPFLKENQDKIEKILTFRIPYYVGPLARGNSDFAWMTRKTDDSIRPWNFEDLVDKEKSAEAFIHRMTNNDLYLPEEKVLPKHSLIYEKFTVYNELTKVRYKNEQGETYFFDSNVKQEIFDGVFKEHRKVSKKQLLDFLAKEFEEFRIVDVTGLDKENKAFNASLGTYHDLKKILDKDFLDNPDNESILEDIVQTITLFEDREMIKKRLENYKDLFTESQLKKLYRRHYTGWGRLSAKLINGIRDRESQKTILDYLISDGRANRNFMQLINDDGLSFKSIISKAQSGSHSDNLKEVVGELAGSPAIKKGILQSLKIVDELVKVMGYEPEQIVVEMARENQTTNQGRRNSRQRYKLLEDGVKNLASDLNGDILKEYPTDNQALQNERLFLYYLQNGRDMYTGEALDIDNLSQYDIDHIVPQAFIKDDSIDNRVLVSSAKNRGKSDDVPSIDIVKARKAFWKKLLDAKLISQRKYDNLTKAERGGLTPDDKAGFIQRQLVETRQITKHVARILDERFNNKVDDNNKPIRKVKIVTLKSNLVSNFRKEFGFYKIREVNNYHHAHDAYLNAVVAKAILTKYPQLEPEFVYGDYPKYNSYKTRKSATEKLFFYSNIMNFFKTKVTLADETVVVKDDIEVNNETGEIAWDKKKHFATVRKVLSYPQVNIVKKTEVQTGGFSKESILAHSNSDKLIPRKTKDIYLDPKKYGGFDSPIVAYSVLVLADIKKGKAQKLKTVKELIGITIMERERFEKNPSAFLESKGYLNIRTDKLIILPKYSLFELENGRRRLLASAGELQKGNELALPTQYMKFLYLASRYNESKGKPEEIEKKQEFVNQHISYFDDILQLINDFSKRVILADANLEKINKLYSDNKDNTPVDELAKNIINLFTFTSLGAPAAFKFFDKSVDRKRYTSTKEVLDSTLIHQSITGLYETRIDLGKLGED

SEQ ID NO: 444 - protein, 1125 aa, Streptococcus anginosus
  Streptococcus anginosus 1_2_62CV
MNGLVLGLDIGIASVGVGILNKETGEIIHANSRIFPAATADSNVERRGFRQGRRLGRRKKHRSARLNNLFEEFGFITDFSAIPLNLNPYALRVKGLSEELTNEELFIALKNIIKRRGISYLDDASEDGETASNEYGKAVEENRKLLADKTPGQIQLERFEKYGQVRGDFTVVENGENHRLINVFSTSAYKKEAERILRRQQEFNVRISDEFIEAYLTILTGKRKYYHGPGNEKSRTDYGRFRTDGTTLDNIFGILIGKCTFYPDEYRAAKASYTAQEFNLLNDLNNLTVPTETKKLSPEQKRQIVEYARTAKTLGTPTLLKYIAKLVDGSIDDIKGYRIDKSDKPEMHTFDAYRKMRTLDLVNIDALSRETLDDLAHILTLNTESEGILEALNSKMPSTFTKEQIDELIQFRKKNSAVFGKGWHNFSLKLMNELISELYETSEEQMTILTRLGKQRSREISKRTKYIDEKELTEEIYNPVVAKSVRQAIKIINEATKRYGIFDNIVIEMARENNEEDAKKDYIKRQKANQDEKNASMEKAAFQYNGKKELPDSIFHGHKELATKIRLWHQQGERCLYTGKNISIRDLIHNPHQYEIDHILPLSLSFDDGLANKVLVLATANQEKGQRTPFQAIDSMDDAWSYREFKQYVRNSKSLSNKKKDYLLTEEDISKIEVKQKFIERNLVDTRYSSRVVLNTLQEFYKTNDFDTKISVVRGQFTSQLRRKWKIEKSRDTYHHHAVDALIIAASSQLRLWKKQNNPLISYKEGQFVDPETGEILSLTDDEYKELVFRPPYDYFVDTLKSKSFEDSILFSYQVDSKYNRKISDATIYGTRKAQLGKDKQEETYVLGKIKDIYSQKGYEDFIKRYNKDETQFLIYHKDPQTFEKVIEEILKTYPDKELNEKGKEIPCNPFEKYRQENGPIRKYSKKGKGPEIKSLKYYDNKLGNHIDITPVNSQNQVVLQSLKPWRTDVYFNPRTSKYELMGLKYSDLRFEKGSGSYGISPEKYNKVKAKEGVNEDSEFKFTLYKNDLILIKDTETGEQQLFRYGSRNDTSKHYVELKPYEKAKFEGNQQLMNLLGTVAKGGQCLKGINKPNLSIYKVKTDVLGNKYFIKKEGDQPQLNFKKKF

SEQ ID NO: 445 - protein, 1345 aa, Streptococcus anginosus
  Streptococcus anginosus F0211
MDQKYSIGLDIGTNSVGWAVVTDDYKVPAKKMKVLGNTDKQSIKKNLLGALLFDSGETAEATRLKRTARRRYTRRRNRLRYLQEIFAEEMNKVDENFFQRLDDSFLVDEDKRGERHPIFGNIAAEVKYHDDFPTIYHLRKHLADISQKADLRLVYLALAHMIKFRGHFLIEGQLKAENTNVQALFKDFVEVYDKTVEESHLSEMTVDALSILTEKVSKSRRLENLIAHYPAEKKNTLFGNLIALSLGLQPNFKTNFQLSEDAKLQFSKDTYEEDLEGLLGEIGDEYADLFASAKNLYDAILLSGILTVDDNSTKAPLSASMVKRYEEHQKDLKKLKDFIKVNAPDQYNAIFKDKNKKGYAGYIENGVKQDEFYKYLKGILLQINGSGDFLDKIDREDFLRKQRTFDNGSIPHQIHLQEMHAILRRQEEHYPFLKENQDKIEKILTFRIPYYVGPLARKGSRFAWAEYKADEKITPWNFDDILDKEKSAEKFITRMTLNDLYLPEEKVLPKHSLLYETFTVYNELTKVKYVNEQGEAKFFDANMKQEIFDHVFKENRKVTKDKLLNYLNKEFEEFRIVNLTGLDKENKAFNSSLGTYHDLRKILDKSFLDDKANEKTIEDIIQTLTLFEDREMIRQRLQKYSDIFTKAQLKKLERRHYTGWGRLSYKLINGIRNKENKKTILDYLIDDGYANRNFMQLINDDALSFKEEIARAQIIGDVDDIANVVHDLPGSPAIKKGILQSVKIVDELVKVMGHNPANIIIEMARENQMTDKGRRNSQQRLKLLQDSLKNLDNPVNIKNVENQQLQNDRLFLYYIQNGKDMYTGETLDINNLSQYDIDHIIPQAFIKDNSLDNRVLTRSDKNRGKSDDVPSIEVVHEMKSFWSKLLSVKLITQRKFDNLTKAERGGLTEEDKAGFIKRQLVETRQITKHVAQILDERFNTEFDGNKRRIRNVKIITLKSNLVSNFRKEFELYKVREINDYHHAHDAYLNAVVGNALLLKYPQLEPEFVYGEYPKYNSYRSRKSATEKFLFYSNILRFFKKEDIQTNEDGEIAWNKEKHIKILRKVLSYPQVNIVKKTEEQTGGFSKESILPKGESDKLIPRKTKNSYWNPKKYGGFDSPVVAYSILVFADVEKGKSKKLRKVQDMVGITIMEKKRFEKHPVDFLEQRGYRNVRLEKIIKLPKYSLFELENKRRRLLASARELQKGNELVIPQRFTTLLYHSYQIEKNYEPEHREYVEKHKDEFKELLEYISVFSRKYVLADNNLTKIEMLFSKNKDAEVSSLAKSFISLLTFTAFGAPAAFNFFGENIDRKRYTSVTECLNATLIHQSITGLYETRIDLSKLGED

SEQ ID NO: 446 - protein, 1386 aa, Streptococcus anginosus
  Streptococcus anginosus SK1138
MNQKYSIGLDIGTNSVGWAVITDDYKVPAKKMKVLGNTDKQSIKKNLLGALLFDSGETAEATRLKRTARRRYTRRRNRLRYLQEIFAEEMMQVDESFFQRLDDSFLVDEDKRGERHPIFGNIAAEVKYHDEFPTIYHLRKHLADISQKADLRLVYLALAHMIKFRGHFLIEGQLKAENTNVQALFKDFVEVYDKTVEESHLSEITVDALSILTEKVSKSRRLENLIAHYPAEKKNTLFGNLIALFLGLQPNFKTNFQLSEDAKLQFSKDTYEEDLEGLLGEVGDEYADLFASAKNLYDAILLSGILTVDDNSTKAPLSASMVKRYEEHQKDLKKFEDFIKVNALDQYNAIFKDKNKKGYAGYIESGVKQDEFYKYLKGILLQINGSGDFLDKIDREDFLRKQRTFDNGSIPHQIHLQEMHAILRRQGEHYPFLKENQDKIEKILTFRIPYYVGPLARKGSRFAWAEYKADEKITPWNFDDILDKEKSAEKFITRMTLNDLYLPEEKVLPKHSLLYETFTVYNELTKVKYVNEQGEAKFFDANMKQEIFDHVFKENRKVTKDKLLNYLNKEFEEFRIVNLTGLDKENKVFNSSLGTYHDLRKILNKSFLDNKENAQIIEDIIQTLTLFEDREMIRQRLQKYSDIFTKAQLKKLERRHYTGWGRLSYKLINGIRNKENKKTILDYLIDDGYANRNFMQLINDDALSFKEEIAKAQIIGDVDDIANVVHDLPGSPAIKKGILQSVKIVDELVKVMGHNPANIIIEMARENQTTDRGRRNSQQRLKLLQDSLKNLDNPVNIKNVENQQLQNDRLFLYYIQNGKDMYTGETLDINNLSQYDIDHIIPQAYIKDDSFDNRVLTSSSENRGKSDNVPSIEVVCARKADWMRLRKAGLISQRKFDNLTKAERGGLTENDKAGFIKRQLVETRQITKHVAQVLDARFNAKHDENKKVIRDVKIITLKSNLVSQFRKDFKFYKVREINDYHHAHDAYLNAVIGTALLKKYPKLASEFVYGEFKKYDVRKFIAKSDKEIGKATAKYFFYSNLMNFFKKEVKFADGTVVERPDIETSEDGEIAWNKQTDFKIVRKVLSYPQVNIVKKTEVQTHGLDRGKPRGLFNANPSPKPKPDSSENLVGVKRNLDPKKYGGYAGISNSYAVLVKAIIEKGVKKKETMVLEFQGISILDRITFEKDKRAFLLGKGYKDIKKIIELPKYSLFELKDGSRRMLASILSTNNKRGEIHKGNELFVPQKFTTLLYHAKRINNPINKDHIEYVKKHRDDFKELLNYVLEFNEKYVGATKNGERLKEAVADFDSKSNEEICTSFLGAVNSKNAGLFELTSLGSASDFEFLGVKIPRYRDYTPSSLLKDSTLIHQSITGLYETRIDLSKLGED

SEQ ID NO: 447 - protein, 1396 aa, Streptococcus anginosus
  Streptococcus anginosus SK52 = DSM 20563
MTKPYSIGLDIGTNSVGWAVITDDYKVPAKKMKVLGNTNRDYIKKNLLGALLFDGGETAEGRRLKRTARRRYTRRKNRLRYLQEIFAEEMMQVDESFFQRLDDSFLVEEDKQGSKYPIFGTLKEEKEYHKKFKTIYHLREELANSKEKADLRLVYLALAHMIKFRGHFLYEGDLKAENTDVQALFKDFVEEYDKTIEESHLSEITVDALSILTEKVSKSSRLENLIAHYPTEKKNTLFGNLIALSLGLQANFKTNFQLSEDAKLQFSKDTYEEDLEGLLGEVGDEYADLFVSAKNLYDAILLSGILTVDDNSTKAPLSASMVKRYKEHKEELAAFKRFIKEKLPKKYEEIFKDDTKNGYAGYVGADKKLRKRSGKLATEEEFYKYVKGILNKVEGADYFLDKIDREDFLRKQRTFDNGSIPHQIHLQEMHAILRRQGEHYPFLKENQDKIEKILTFRIPYYVGPLARKGSRFAWAEYKADEKITPWNFDDILDKEKSAEKFITRMTLNDLYLPEEKVLPKHSPLYETFTVYNELTKVKYVNEQGEAKFFDTNMKQEIFDHVFKENRKVTKDKLLNYLNKEFEEFRIVNLTGLDKENKAFNASLGTYHDLRKILDKSFLDDKVNEKIIEDIIQTLTLFEDREMIRQRLQKYSDIFTTQQLKELERRHYTGWGRLSYKLINGIRNKENKKTILDYLIDDGYANRNFMQLINDDALSFKEEIARAQIIGDVDDIANVVHDLPGSPAIKKGILQSVKIVDELVKVMGHNPTNIIIEMARENQTTDKGRRNSQQRLKLLQDSLKNLDNPVNIKNVENQQLQNDRLFLYYIQNGKDMYTGETLDINNLSQYDIDHIIPQAFIKDNSLDNRVLTRSDKNRGKSDDVPSIEVVHEMKSFWSKLLSVKLITQRKFDNLTKAERGGLTENDKAGFIKRQLVETRQITKHVAQVLDARFNAKHDENKKVIRDVKIITLKSNLVSQFRKDFKFYKVREINDYHHAHDAYLNAVIGTALLKKYPKLASEFVYGEFKKYDVRKFIAKSDKEIGKATAKYFFYSNLMNFFKKEVKFADGTVVERPDIETSEDGEIAWNKQTDFKIVRKVLSYPQVNIVKKTEVQTHGLDRGKPRGLFNANPSPKPKPDSSENLVGIKRNLDPKKYGGYAGISNSYAVLVKAIIEKGVKKKETMVLEFQGISILDRITFEKDKRAFLLGKGYKDIKKIIELPKYSLFELKDGSRRMLASILSTNNKRGEIHKGNELFVPQKFTTLLYHAKRINNPINKDHIEYVKKHRDDFKELLNYVLEFNEKYVGATKNGERLKEAVADFDSKSNEEICTSFLGAVNSKNAGLFELTSLGSASDFEFLGVKIPRYRDYTPSSLLKDSILIHQSITGLYETRIDLSKLGED

SEQ ID NO: 448 - protein, 1373 aa, Streptococcus bovis
  Streptococcus bovis ATCC 700338
MTKKNYSIGLDIGTNSVGWAVITDDYKVPAKKMKVLGNTDKKYIKKNLLGALLFDSGETAEATRLKRTARRRYTRRKNRLRYLQEIFAEEMTKVDESFFQRLDESFLRWDDDNKKLGRYPIFGNKADVVKYHQEFPTIYHLRKHLADSSEKADLRLVYLALAHMIKFRGHFLIEGELNAENTDVQKIFADFVGVYDRTFDDSHLSEITVDAASILTEKISKSRRLENLIKYYPTEKKNTLFGNLIALALGLQPNFKMNFKLSEDAKLQFSKDSYEEDLGELLGKIGDDYADLFTSAKNLYDAILLSGILIVDDNSTKAPLSASMIKRYVEHQEDLEKLKEFIKANKSELYHDIFKDKNKNGYAGYIENGVKQDEFYKYLKNTLSKIAGSDYFLDKIEREDFLRKQRTFDNGSIPHQIHLQEMHAILRRQGDYYPFLKENQDRIEKILTFRIPYYVGPLARKDSRFSWAEYHSDEKITPWNFDKVIDKEKSAEKFITRMTLNDLYLPEEKVLPKHSHVYETYAVYNELTKIKYVNEQGKDSFFDSNMKQEIFDHVFKENRKVTKEKLLNYLNKEFPEYRIKDLIGLDKENKSFNASLGTYHDLKKILDKAFLDDKVNEEVIEDIIKTLTLFEDKDMIHERLQKYSDIFTADQLKKLERRHYTGWGRLSYKLINGIRNKENNKTILDYLIDDGSANRNFMQLINDDTLPFKQIIQKSQVVGDVDDIEAVVHDLPGSPAIKKGILQSVKIVDELVKVMGDNPDNIVIEMARENQTTNRGRSQSQQRLKKLQNSLKELGSNILNEEKPSYIEDKVENSHLQNDQLFLYYIQNGKDMYTGDELDIDHLSDYDIDHIIPQAFIKDDSIDNRVLTSSAKNRGKSDDVPSLDIVRARKAEWVRLYKSGLISKRKFDNLTKAERGGLTEADKAGFIKRQLVETRQITKHVAQILDARFNTESDENDKVIRDVKVITLKSNLVSQFRKDFEFYKVREINDYHHAHDAYLNAVVGTALLKKYPKLASEFVYGEYKKYDIRKFITNSSDKATAKYFFYSNLMNFFKRVIRYSNGKVIVRPVVEYSKDTEDIAWDKKSNFRTICKVLSYPQVNIVKKVETQTGGFSKESILPKGDSDKLIPRKTKKAYWDTKKYGGFDSPTVAYSVFVVADVEKGKAKKLKTVKELVGISIMERSFFEENPVEFLENKGYHNIREDKLIKLPKYSLFEFEGGKRRLLASASELQKGNEMVIPGHLVKLLYHAQRINSFNSTKYLDYVSAHKKEFEKVLSCVEDFANLYVDVEKNLSKIRAVADSMDNFSIEEISNSFINLLTLTALGAPADFNFLGEKIPRKRYTSTKECLNATLIHQSITGLYETRIDLSKIGEE

SEQ ID NO: 449 - protein, 1375 aa, Streptococcus canis
  Streptococcus canis FSL Z3-227
MEKKYSIGLDIGTNSVGWAVITDDYKVPSKKFKVLGNTNRKSIKKNLMGALLFDSGETAEATRLKRTARRRYTRRKNRIRYLQEIFANEMAKLDDSFFQRLEESFLVEEDKKNERHPIFGNLADEVAYHRNYPTIYHLRKKLADSPEKADLRLIYLALAHIIKFRGHFLIEGKLNAENSDVAKLFYQLIQTYNQLFEESPLDEIEVDAKGILSARLSKSKRLEKLIAVFPNEKKNGLFGNIIALALGLTPNFKSNFDLTEDAKLQLSKDTYDDDLDELLGQIGDQYADLFSAAKNLSDAILLSDILRSNSEVTKAPLSASMVKRYDEHHQDLALLKTLVRQQFPEKYAEIFKDDTKNGYAGYVGIGIKHRKRTTKLATQEEFYKFIKPILEKMDGAEELLAKLNRDDLLRKQRTFDNGSIPHQIHLKELHAILRRQEEFYPFLKENREKIEKILTFRIPYYVGPLARGNSRFAWLTRKSEEAITPWNFEEVVDKGASAQSFIERMTNFDEQLPNKKVLPKHSLLYEYFTVYNELTKVKYVTERMRKPEFLSGEQKKAIVDLLFKTNRKVTVKQLKEDYFKKIECFDSVEIIGVEDRFNASLGTYHDLLKIIKDKDFLDNEENEDILEDIVLTLTLFEDREMIEERLKTYAHLFDDKVMKQLKRRHYTGWGRLSRKMINGIRDKQSGKTILDFLKSDGFSNRNFMQLIHDDSLTFKEEIEKAQVSGQGDSLHEQIADLAGSPAIKKGILQTVKIVDELVKVMGHKPENIVIEMARENQTTTKGLQQSRERKKRIEEGIKELESQILKENPVENTQLQNEKLYLYYLQNGRDMYVDQELDINRLSDYDVDHIVPQSFIKDDSIDNKVLTRSVENRGKSDNVPSEEVVKKMKNYWRQLLNAKLITQRKFDNLTKAERGGLSEADKAGFIKRQLVETRQITKHVARILDSRMNTKRDKNDKPIREVKVITLKSKLVSDFRKDFQLYKVRDINNYHHAHDAYLNAVVGTALIKKYPKLESEFVYGDYKVYDVRKMIAKSEQEIGKATAKRFFYSNIMNFFKTEVKLANGEIRKRPLIETNGETGEVVWNKEKDFATVRKVLAMPQVNIVKKTEVQTGGFSKESILSKRESAKLIPRKKGWDTRKYGGFGSPTVAYSILVVAKVEKGKAKKLKSVKVLVGITIMEKGSYEKDPIGFLEAKGYKDIKKELIFKLPKYSLFELENGRRRMLASATELQKANELVLPQHLVRLLYYTQNISATTGSNNLGYIEQHREEFKEIFEKIIDFSEKYILKNKVNSNLKSSFDEQFAVSDSILLSNSFVSLLKYTSFGASGGFTFLDLDVKQGRLRYQTVTEVLDATLIYQSITGLYETRTDLSQLGGD

SEQ ID NO: 450 - protein, 1345 aa, Streptococcus constellatus
  Streptococcus constellatus subsp. constellatus SK53
MGKPYSIGLDIGTNSVGWAVVTDDYKVPAKKMKVLGNTDKQSIKKNLLGALLFDSGETAEATRLKRTARRRYTRRKNRLRYLQEIFTGEMNKVDENFFQRLDDSFLVDEDKRGEHHPIFGNIAAEVKYHDDFPTIYHLRRHLADTSKKADLRLVYLALAHMIKFRGHFLYEGDLKAENTDVQALFKDFVEEYDKTIEESHLSEITVDALSILTEKVSKSSRLENLIAHYPTEKKNTLFGNLIALSLDLHPNFKTNFQLSEDAKLQFSKDTYEEDLEGFLGEVGDEYADLFASAKNLYDAILLSGILTVDDNSTKAPLSASMVKRYEEHQKDLKKLKDFIKVNAPDQYNAIFKDKNKKGYASYIESGVKQDEFYKYLKGILLKINGSGDFLDKIDREDFLRKQRTFDNGSIPHQIHLQEMHAILRRQGEHYPFLKENQDKIEKILTFRIPYYVGPLARKGSRFAWAEYKADEKITPWNFDDILDKEKSAEKFITRMTLNDLYLPEEKVLPKHSPLYEAFTVYNELTKVKYVNEQGEAKFFDTNMKQEIFDHVFKENRKVTKDKLLNYLNKEFEEFRIVNLTGLDKENKAFNSSLGTYHDLRKILDKSFLDDKANEKTIEDIIQTLTLFEDREMIRQRLQKYSDIFTKAQLKKLERRHYTGWGRLSYKLINGIRNKENKKTILDYLIDDGYANRNFMQLINDDALSFKEEIARAQIIDDVDDIANVVHDLPGSPAIKKGILQSVKIVDELVKVMGHNPANIIIEMARENQTTDKGRRNSQQRLKLLQDSLKNLDNPVNIKNVENQQLQNDRLFLYYIQNGKDMYTGETLDINNLSQYDIDHIIPQAFIKDNSLDNRVLTRSDKNRGKSDDVPSIEVVHEMKSFWSKLLSVKLITQRKFDNLTKAERGGLTEEDKAGFIKRQLVETRQITKHVAQILDERFNTEFDGNKRRIRNVKIITLKSNLVSNFRKEFELYKVREINDYHHAHDAYLNAVVGNALLLKYPQLEPEFVYGEYPKYNSYRSRKSATEKFLFYSNILRFFKKEDIQTNEDGEIAWNKEKHIKILRKVLSYPQVNIVKKTEEQTGGFSKESILPKGESDKLIPRKTKNSYWDPKKYGGFDSPVVAYSILVFADVEKGKSKKLRKVQDMVGITIMEKKRFEKNPVDFLEQRGYRNVRLEKIIKLPKYSLFELENKRRRLLASAKELQKGNELVIPQRFTTLLYHSYRIEKDYEPEHREYVEKHKDEFKELLEYISVFSRKYVLADNNLTKIEMLFSKNKDAEVSSLAKSFISLLTFTAFGAPAAFNFFGENIDRKRYTSVTECLNATLIHQSITGLYETRIDLSKLGED

SEQ ID NO: 451 - protein, 1371 aa, Streptococcus dysgalactiae
MDKKYSIGLDIGTNSVGWAVITDDYKVPSKKFKVLGNTDRHSIKKNLIGALLFDSGETAEATRLKRTARRRYTRRKNRIRYLQEIFSSEMSKVDDSFFHRLEESFLVEEDKKHERHPIFGNIVDEVAYHEKYPTIYHLRKKLADSTDKADLRLIYLALAHMIKFRGHFLIEGDLNPDNSDMDKLFIQLVQTYNQLFEENPINASRVDAKAILSARLSKSRRLENLIAQLPGEKRNGLFGNLIALSLGLTPNFKSNFDLAEDAKLQLSKDTYDDDLDNLLAQIGDQYADLFLAAKNLSDAILLSDILRVNSEITKAPLSASMIKRYDEHHQDLTLLKALVRQQLPEKYKEIFFDQSKNGYAGYIDGGASQEEFYKFIKPILEKMDGTEELLAKLNREDLLRKQRTFDNGSIPHQIHLGELHAILRRQEDFYPFLKDNREKIEKILTFRIPYYVGPLARGNSRFAWMTRKSEETITPWNFEEVVDKGASAQSFIERMTNFDKNLPNEKVLPKHSLLYEYFTVYNELTKVKYVTEGMRKPEFLSGKQKEAIVDLLFKTNRKVTVKQLKEDYFKKIECFDSVEISGVEDRFNASLGTYHDLLKIIKDKDFLDNEENEDILEDIVLTLTLFEDKEMIEERLKKYANLFDDKVMKQLKRRHYTGWGRLSRKLINGIRDKQSGKTILDFLKSDGFANRNFMQLINDDSLTFKEAIQKAQVSGQGHSLHEQIANLAGSPAIKKGILQSVKVVDELVKVMGHKPENIVIEMARENQTTQKGQKNSRERMKRIEEGIKELGSQILKEHPVENTQLQNEKLYLYYLQNGRDMYVDQELDINRLSDYDVDHIVPQSFIKDDSIDNKVLTRSDKNRGKSDNVPSEEVVKKMKNYWRQLLNAKLITQRKFDNLTKAERGGLSELDKAGFIKRQLVETRQITKHVAQILDSRMNTKYDENDKLIREVKVITLKSKLVSDFRKDFQFYKVREINNYHHAHDAYLNAVVGTALIKKYPKLESEFVYGDYKVYDVRKMIAKSEQEIGKATAKRFFYSNIMNFFKTEITLANGEIRKRPLIETNEETGEIVWDKGRDFATVRKVLSMPQVNIVKKTEVQTGALTNESIYARGSFDKLISRKHRFESSKYGGFGSPTVTYSVLVVAKSKVQDGKVKKIKTGKELIGITLLDKLVFEKNPLKFIEDKGYGNVQIDKCIKLPKYSLFEFENGTRRMLASVMANNNSRGDLQKANEMFLPAKLVTLLYHAHKIESSKELEHEAYILDHYNDLYQLLSYIERFASLYVDVEKNISKVKELFSNIESYSISEICSSVINLLTLTASGAPADFKFLGTTIPRKRYGSPQSILSSTLIHQSITGLYETRIDLSQLGGD

SEQ ID NO: 452 - protein, 1371 aa, Streptococcus dysgalactiae
MDKKYSIGLDIGTNSVGWAVITDDYKVPSKKFKVLGNTDRHSIKKNLIGALLFDSGETAEATRLKRTARRRYTRRKNRIRYLQEIFSSEMSKVDDSFFHRLEESFLVEEDKKHERHPIFGNIVDEVAYHEKYPTIYHLRKKLADSTDKADLRLIYLALAHMIKFRGHFLIEGDLNPDNSDVDKLFIQLVQTYNQLFEEKPINASGVDAKAILSARLSKSKRLENLIAQLPGEKKNGLFGNLIALSLGLTPNFKSNFDLAEDAKLQLSKDTYDDDLDNLLAQIGNQYADLFLAAKNLSDAILLSDILRVNSEITKAPLSASMIKRYDEHHQDLTLLKALVRQQLPEKYKEIFFDQSKNGYAGYIDGGASQEEFYKFIKPILEKMDGTEELLAKLNREDLLRKQRTFDNGSIPHQIHLGELHAILRRQEDFYPFLKDNREKIEKILTFRIPYYVGPLARGNSRFAWMTRKSEETITPWNFEEVVDKGASAQSFIERMTNFDKNLPNEKVLPKHSLLYEYFTVYNELTKVKYVTEGMRKPEFLSGKQKEAIVDLLFKTNRKVTVKQLKEDYFKKIECFDSVEISGVEDRFNASLGTYHDLLKIIKDKDFLDNEENEDILEDIVLTLTLFEDKEMIEERLKKYANLFDDKVMKQLKRRHYTGWGRLSRKLINGIRDKQSGKTILDFLKSDGFANRNFMQLINDDSLTFKEAIQKAQVSGQGHSLHEQIANLAGSPAIKKGILQSVKVVDELVKVMGHKPENIVIEMARENQTTQKGQKNSRERMKRIEEGIKELGSQILKEHPVENTQLQNEKLYLYYLQNGRDMYVDQELDINRLSDYDVDHIVPQSFIKDDSIDNKVLTRSDKNRGKSDNVPSEEVVKKMKNYWRQLLNAKLITQRKFDNLTKAERGGLSELDKAGFIKRQLVETRQITKHVAQILDSRMNTKYDENDKLIREVKVITLKSKLVSDFRKDFQFYKVREINNYHHAHDAYLNAVVGTALIKKYPKLESEFVYGDYKVYDVRKMIAKSEQEIGKATAKRFFYSNIMNFFKTEITLANGEIRKRPLIETNEETGEIVWDKGRDFATVRKVLSMPQVNIVKKTEVQTGALTNESIYARGSFDKLISRKHRFESSKYGGFGSPTVTYSVLVVAKSKVQDGKVKKIKTGKELIGITLLDKLVFEKNPLKFIEDKGYGNVQIDKCIKLPKYSLFEFENGTRRMLASVMANNNSRGDLQKANEMFLPAKLVTLLYHAHKIESSKELEHEAYILDHYNDLYQLLSYIERFASLYVDVEKNISKVKELFSNIESYSISEICSSVINLLTLTASGAPADFKFLGTTIPRKRYGSPQSILSSTLIHQSITGLYETRIDLSQLGGD

SEQ ID NO: 453 - protein, 1371 aa, Streptococcus dysgalactiae
MDKKYSIGLDIGTNSVGWAVITDDYKVPSKKFKVLGNTDRHSIKKNLIGALLFDSGETAEATRLKRTARRRYTRRKNRIRYLQEIFSSEMSKVDDSFFHRLEESFLVEEDKKHERHPIFGNIVDEVAYHEKYPTIYHLRKKLADSTDKADLRLIYLALAHMIKFRGHFLIEGDLNPDNSDMDKLFIQLVQTYNQLFEENPINASRVDAKAILSARLSKSRRLENLIAQLPGEKRNGLFGNLIALSLGLTPNFKSNFDLAEDAKLQLSKDTYDDDLDNLLAQIGDQYADLFLAAKNLSDAILLSDILRVNSEITKAPLSASMIKRYDEHHQDLTLLKALVRQQLPEKYKEIFFDQSKNGYAGYIDGGASQEEFYKFIKPILEKMDGTEELLAKLNREDLLRKQRTFDNGSIPHQIHLGELHAILRRQEDFYPFLKDNREKIEKILTFRIPYYVGPLARGNSRFAWMTRKSEETITPWNFEEVVDKGASAQSFIERMTNFDKNLPNEKVLPKHSLLYEYFTVYNELTKVKYVTEGMRKPEFLSGKQKEAIVDLLFKTNRKVTVKQLKEDYFKKIECFDSVEISGVEDRFNASLGTYHDLLKIIKDKDFLDNEENEDILEDIVLTLTLFEDKEMIEERLKKYANLFDDKVMKQLKRRHYTGWGRLSRKLINGIRDKQSGKTILDFLKSDGFANRNFMQLINDDSLTFKEAIQKAQVSGQGHSLHEQIANLAGSPAIKKGILQSVKVVDELVKVMGHKPENIVIEMARENQTTQKGQKNSRERMKRIEEGIKELGSQILKEHPVENTQLQNEKLYLYYLQNGRDMYVDQELDINRLSDYDVDHIVPQSFIKDDSIDNKILTRSDKNRGKSDNVPSEEVVKKMKNYWRQLLNAKLITQRKFDNLTKAERGGLSELDKAGFIKRQLVETRQITKHVAQILDSRMNTKYDENDKLIREVKVITLKSKLVSDFRKDFQFYKVREINNYHHAHDAYLNAVVGTALIKKYTKLESEFVYGDYKVYDVRKMIAKSEQEIGKATAKRFFYSNIMNFFKTEITLANGEIRKRPLIETNEETGEIVWDKGRDFATVRKVLSMPQVNIVKKTEVQTGALTNESIYARGSFDKLISRKHRFESSKYGGFGSPTVTYSVLVVAKSKVQDGKVKKIKTGKELIGMTLLDKLVFEKNPLKFIEDKGYGNVQIDKCIKLPKYSLFEFENGTRRMLASVMANNNSRGDLQKANEMFLPAKLVTLLYHAHKIESSKELEHEAYILDHYNDLYQLLSYIERFASLYVDVEKNISKVKELFSNIESYSISEICSSVINLLTLTASGAPADFKFLGTTIPRKRYGSPQSILSSTLIHQSITGLYETRIDLSQLGGD

SEQ ID NO: 454 - protein, 1371 aa, Streptococcus dysgalactiae
MDKKYSIGLDIGTNSVGWAVITDDYKVPSKKFKVLGNTDRHSIKKNLIGALLFDSGETAEATRLKRTARRRYTRRKNRIRYLQEIFSSEMSKVDDSFFHRLEESFLVEEDKKHERHPIFGNIVDEVAYHEKYPTIYHLRKKLADSTDKADLRLIYLALAHMIKFRGHFLIEGDLNPDNSDMDKLFIQLVQTYNQLFEENPINASRVDAKAILSARLSKSRRLENLIAQLPGEKRNGLFGNLIALSLGLTPNFKSNFDLAEDAKLQLSKDTYDDDLDNLLAQIGDQYADLFLAAKNLSDAILLSDILRVNSEITKAPLSASMIKRYDEHHQDLTLLKALVRQQLPEKYKEIFFDQSKNGYAGYIDGGASQEEFYKFIKPILEKMDGTEELLAKLNREDLLRKQRTFDNGSIPHQIHLGELHAILRRQEDFYPFLKDNREKIEKILTFRIPYYVGPLARGNSRFAWMTRKSEETITPWNFEEVVDKGASAQSFIERMTNFDKNLPNEKVLPKHSLLYEYFTVYNELTKVKYVTEGMRKPEFLSGKQKEAIVDLLFKTNRKVTVKQLKEDYFKKIECFDSVEISGVEDRFNASLGTYHDLLKIIKDKDFLDNEENEDILEDIVLTLTLFEDKEMIEERLKTYAHLFDDKVMKQLKRRHYTGWGRLSRKLINGIRDKQSGKTILDFLKSDGFANRNFIQLIHDDSLTFKEAIQKAQVSGQGHSLHEQIANLAGSPAIKKGILQSVKVVDELVKVMGHKPENIVIEMARENQTTQKGQKNSRERMKRIEEGIKELGSQILKEHPVENTQLQNEKLYLYYLQNGRDMYVDQELDINRLSDYDVDHIVPQSFIKDDSIDNKVLTRSDKNRGKSDDVPSEEVVKKMKNYWRQLLNAKLITQRKFDNLTKAERGGLSELDKAGFIKRQLVETRQITKHVAQILDSRMNTKYDENDKLIREVKVITLKSKLVSDFRKDFQFYKVREINNYHHAHDAYLNAVVGTALIKKYPKLESEFVYGDYKVYDVRKMIAKSEQEIGKATAKRFFYSNIMNFFKTEITLANGEIRKRPLIETNEETGEIVWNKGRDFATVRKVLSMPQVNIVKKTEVQTGALTNESIYARGSFDKLISRKHRFESSKYGGFGSPTVTYSVLVVAKSKVQDGKVKKIKTGKELIGITLLDKLVFEKNPLKFIEDKGYGNVQIDKCIKLPKYSLFEFENGTRRMLASVMANNNSRGDLQKANEMFLPAKLVTLLYHAHKIESSKELEHEAYILDHYNDLYQLLSYIERFASLYVDVEKNISKVKELFSNIESYSISEICSSVINLLTLTASGAPADFKFLGTTIPRKRYGSPQSILSSTLIHQSITGLYETRIDLSQLGGD

SEQ ID NO: 455 - protein, 1348 aa, Streptococcus equi
MKKPYTIALDIGTNSVGWVVVTDDYRVPTKKMKVLGNTERKTIKKNLIGALLFDSGDTAEGTRLKRTARRRYTRRKNRLRYLKEIFTEEMAKVDDGFFQRLEDSFYVLEDKEGNKHPIFANLADEVAYHKKYPTIYHLRKELVDNPQKADLRLIYLAVAHIIKFRGHFLIEGTLSSKNNNLQKSFDHLVDTYNLLFEEQRLLTEGINAKELLSAALSKSKRLENLISLIPGQKKTGIFGNIIALSLGLTPNFKANFGLSKDVKLQLAKDTYADDLDSLLAQIGDQYADLFLAAKNLSDAILLSDILTESDEITRAPLSASMVKRYREHHKDLVTLKTLIKDQLPEKYQEIFLDKTKNGYAGYIEGQVSQEEFYKYLKPILARLDGSEPLLLKIDREDFLRKQRTFDNGSIPHQIHLEELHAILRRQEVFYPFLKDNRKKIESLLTFRIPYYVGPLARGHSRFAWVKRKFDGAIRPWNFEEIVDEEASAQIFIEKMTKNDLYLPNEKVLPKHSLLYETFTVYNELTKVKYATEGMTRPQFLSADQKQAIVDLLFKTNRKVTVKQLKENYFKKIECWDSVEITGVEDSFNASLGTYHDLLKIIQDKDFLDNPDNQKIIEDIILTLTLFEDKKMISKRLDQYAHLFDKVVLNKLERHHYTGWGRLSGKLINGIRDKQSGKTILDFLKADGFANRNFMQLIHDSELSFIDEIAKAQVIGKTEYSKDLVGNLAGSPAIKKGISQTIKIVDELVKIMGYLPQQIVIEMARENQTTAQGIKNARQRMRKLEETAKKLGSNILKEHPVDNSQLQNDKRYLYYLQNGKDMYTGDDLDIDYLSSYDIDHIIPQSFIKNNSIDNKVLTSQGANRGKLDNVPSEAIVRKMKGYWQSLLRAGAISKQKFDNLTKAERGGLTQVDKAGFIQRQLVETRQITKHVAQILDSRFNTEFDDHNKRIRKVHIITLKSKLVSDFRKEFGLYKIRDINHYHHAHDAYLNAVVAKAILGKYPQLAPEFVYGDYPKYNSFKERQKATQKMLFYSNILKFFKDQESLHVNSDGEEIWNANKHLPIIKNVLSIPQVNIVKKTEVQTGGFYKESILSKGNSDKLIPRKNNWDTRKYGGFDSPTVAYSVLVIAKMEKGKAKVLKPVKEMVGITIMERTAFEENPVVFLEARGYREIQEHLIIKLPKYSLFELENGRRRLLASASELQKGNELFLPVDYMTFLYLAAHYHELTGSSEDVLRKKYFVDRHLHYFDDIIQMINDFAERHILASSNLEKINHTYHNNSDLPVNERAENIINVFTFVALGAPAAFKFFDATIDRKRYTSTKEVLNATLIHQSVTGLYETRIDLSQLGEN

SEQ ID NO: 456 - protein, 1377 aa, Streptococcus equinus
  Streptococcus equinus ATCC 9812
MEKTYSIGLDIGTNSVGWAVITDDYKVPAKKMKVLGNTDKKYIKKNLLGALLFDSGETAEATRLKRAARRRYTRRKNRLRYLQEIFAKEMAKVDESFFQRLEESFLTDDDKTFDSHPIFGNKAEEDTYHQEFPTIYHLRKHLADSPEKVDLRLVYLALAHMIKFRGHFLIEGQLNAENTDVQKIFADFVGVYDRTFDDSHLSEITVDAASILTEKISKSRRLENLIKQYPTEKKNTLFGNLVALALGLQPNFKTNFKLSEDAKLQFSKDTYDEDLEELLGKIGDDYADLFTAAKNLYDAILLSGILTVDDNSTKAPLSASMIKRYEEHHEDLEKLKTFIKVNNFDKYHEIFKDKSKNGYAGYIENGVKQDIFYKHLKSIISEKNGGQYFLDKIEREDFLRKQRTFDNGSIPYQIHLQEMRTILRRQGEYYPFLKENQAKIEKILTFRIPYYVGPLARKNSRFAWAKYHSDEPITPWNFDEVVDKEKSAEKFITRMTLNDLYLPEEKVLPKHSYVYETFAVYNELTKIKYVNEQGKSFFFDANMKQEIFDHVFKENRKVTKAKLLSYLNNEFEEFRINDLIGLDKDSKSFNASLGTYHDLKKILDKSFLDDKTNEQIIEDIVLTLTLFEDRDMIHERLQKYSDIFTSQQLKKLERRHYTGWGRLSYKLINGIRNKENNKTILDFLIDDGDANRNFMQLINDDSLSFKTTIQEAQVVGDVDDIEAVVHDLPGSPAIKKGILQSVKIVDELVKVMGHNPQNIVIEMARENQITGYGRNRSNQRLKRLQDSLKEFGSDILSKKKPSYVDSKVENSHLQNDRLFLYYIQNGKDMYTGEELDIDHLSDYDIDHIIPQAFIKDNSIDNRVLTSSAKNRGKSDDVPSIEIVRNRKSYWYKLYKSGLISKRKFDNLTKAERGGLTETDKAGFIKRQLVETRQITKHVAQILDARFNTKCDENDKVIRDVKVITLKSSLVSQFRKEFKFYKVREINDYHHAHDAYLNAVVGTALLKKYPKLAPEFVYGEYKKYDVRKLVAKSSDNHSELGKATAKYFFYSNLMNFFKTEVKYADGRVFERPDIETNADGEVVWNKQRDFNIVRKVLSYPQVNIVKKVEVQTGGFSKESILPKGDSDKLIPRKTKKLQWETQKYGGFDSPTVAYSVLVVADVEKGKTRKLKTVKELVGISIMERSSFEENPVSFLEKKGYHNVQEDKLIKLPKYSLFEFEGGRRRLLASATELQKGNEVVLPQYMVNLLYHSQHVNNSHKPEHLNYVKQHKDEFKDIFNLIISIARINILKPKVVDNLINEFTEYGQEDISSLSESFINLLKFISFGAPGAFKFLKLDVKQSNLRYKSTTEALSATLIHQSVTGLYETRIDLSKLGEE

SEQ ID NO: 457 - protein, 1370 aa, Streptococcus gallolyticus
MTKKNYSIGLDIGTNSVGWAVITDDYKVPAKKMKVLGNTDKKYIKKNLLGALLFDSGETAEATRLKRTARRRYTRRKNRLRYLQEIFAEEMTKVDESFFYRLDESFLTTDEKDFERHPIFGNKAEEDAYHQKFPTIYHLRNYLADSSEKADLRLVYLALAHMIKYRGHFLIEGKLNAENTDVQKLFTDFVGVYDRTFDDSHLSEITVDVASTLTEKISKSRRLENLIKYYPTEKKNTLFGNLIALALGLQPNFKMNFKLSEDAKLQFSKDTYEEDLEELLGKIGDDYADLFTSAKNLYDAILLSGILTVDDNSTKAPLSASMIKRYVEHHEDLEKLKEFIKANKSELYHDIFKDKNKNGYAGYIENGVKQDEFYKYLKNTLSKIDGSDYFLDKIEREDFLRKQRTFDNGSIPHQIHLQEMHAILRRQGDYYPFLKEKQDRIEKILTFRIPYYVGPLVRKDSRFAWAEYRSDEKITPWNFDKVIDKEKSAEKFITRMTLNDLYLPEEKVLPKHSHVYETYAVYNELTKIKYVNEQGKESFFDSNMKQEIFDHVFKENRKVTKEKLLNYLNKEFPEYRIKDLIGLDKENKSFNASLGTYHDLKKILDKAFLDDKVNEEVIEDIIKTLTLFEDKDMIHERLQKYSDIFTANQLKKLERRHYTGWGRLSYKLINGIRNKENNKTILDYLIDDGSANRNFMQLINDDTLPFKQIIQKSQVVGDVDDIEAVVHDLPGSPAIKKGILQSVKIVDELVKVMGDNPDNIVIEMARENQTTNRGRSQSQQRLKKLQSSLKELGSNILNEEKPSYIEDKVENSHLQNDQLFLYYIQNGKDMYTGDELDIDHLSDYDIDHIIPQAFIKDDSIDNRVLTSSAKNRGKSDDVPSLDIVRARKAEWVRLYKSGLISKRKFDNLTKAERGGLTEADKAGFIKRQLVETRQITKHVAQILDARFNTEHDENDKVIRDVKVITLKSNLVSQFRKDFEFYKVREINDYHHAHDAYLNAVVGTALLKKYPKLASEFVYGEYKKYDIRKFITNSSDKATAKYFFYSNLMNFFKTKVKYADGTVFERPIIETNADGEIAWNKQIDFEKVRKVLSYPQVNIVKKVETQTGGFSKESILPKGDSDKLIPRKTKKVYWDTKKYGGFDSPTVAYSVFVVADVEKGKAKKLKTVKELVGISIMERSFFEENPVEFLENKGYHNIREDKLIKLPKYSLFEFEGGRRRLLASASELQKGNEMVLPGYLVELLYHAHRADNFNSTEYLNYVSEHKKEFEKVLSCVEDFANLYVDVEKNLSKIRAVADSMDNFSIEEISNSFINLLTLTALGAPADFNFLGEKIPRKRYTSTKECLTATLIHQSITGLYETRIDLSKLGEE

SEQ ID NO: 458 - protein, 1370 aa, Streptococcus gallolyticus; identical to SEQ ID NO: 457
  Streptococcus gallolyticus subsp. gallolyticus TX20005

SEQ ID NO: 459 - protein, 1371 aa, Streptococcus gallolyticus
MTEKNYSIGLDIGTNSVGWAVITDDYKVPAKKMKVLGNTDKKYIKKNLLGALLFDNGETAEATRLKRTARRRYTRRKNRLRYLQEIFAEEMAKVDESFFYRLDESFLTTDDKDFERHPIFGNKADEIKYHQEFPTIYHLRKHLADSHEKADLRLIYLALAHMIKFRGHFLIEGELNAENTDVQKLFEAFVEVYDRTFDDSNLSEITVDASSILTEKFSKSRRLENLIKHYPTEKKNTLFGNLVALALGLQPNFKTSFKLSEDAKLQFSKDTYEEDLEELIGKIGDEYADLFTSAKNLYDAILLSGILTVADNTTKAPLSASMIKRYNEHQVDLKKLKEFIKNNASDKYDEIFNDKDKNGYAGYIENGVKQDEFYKYLKTTLSKIDGSDYFLDKIEREDFLRKQRTFDNGSIPHQIHLQEMHAILRRQGEHYAFLKENQAKIEKILTFRIPYYVGPLARKNSRFAWAEYHSDEKITPWNFDEIIDKEKSAEKFITRMTLNDLYLPEEKVLPKHSLVYETYTVYNELTKVKYVNEQGKSNFFDANMKQEIFEHVFKENRKVTKDKFLNYLNKEFPEYRIQDLIGLDKENKSFNASLGTYHDLKKILDKSFLDDKTNETIIEDIIQTLTLFEDRDMIRQRLQKYSDIFTPQQLKKLERRHYTGWGRLSYKLINGIRNKENGKSILDYLIDDGYANRNFMQLISDDTLPFKQIIKDAQIIGDIDDVTSVVRELPGSPAIKKGILQSVKIVDELVKVMGHNPDNIVIEMARENQTTNRGRNQSQQRLKKLQDSLKELGSNILNEEKPSYIEGKVENNHLQDDRLFLYYIQNGKDMYTGDELDIDHLSDYDIDHIIPQAFIKDDSIDNRVLTSSAKNRGKSDDVPSLDIVHDRKADWIRLYKSGLISKRKFDNLTKAERGGLTENDKAGFIKRQLVETRQITKHVAQILDSRFNTERDENDKVIRNVKVITLKSNLVSQFRKDFKFYKVREINDYHHAHDAYLNAVVGTALLKKYPKLAPEFVYGEYKKYDIRKFITSSGDKATAKYFFYSNLMNFFKRVIRYSNGKVVVRPVIECSKDTGEIAWNKQTDFEKVRRVLSYPQVNIVKKVETQTGGFSKESILPKGNSDKLIPRKTKKFRWDTPKYGGFDSPNIAYSVFVIADVEKGKAKKLKTVKELVGISIMERSSFEENPVVFLEKKGYQNVQEDNLIKLPKYSLFEFEGGRRRLLASASELQKGNEVVLSRHLVELLYHAHRVNSFNNSEHLKYVSEHKKEFGEVLSCVENFAKSYVDVEKNLGKIRAVADKIDTFSIEDISISFVNLLTLTALGAPADFNFLGEKIPRKRYTSTKECLNATLIHQSITGLYETRIDLSKLGEE

SEQ ID NO: 460 - protein, 1130 aa, Streptococcus gallolyticus
MTNGKILGLDIGIASVGVGIIEAKTGKVVHANSRLFSAANAENNAERRGFRGSRRLNRRKKHRVKRVRDLFEKYEIVTDFRNLNLNPYELRVKGLTEQLTNEELFAALRTISKRRGISYLDDAEDDSTGSTDYAKSIDENRRLLKTKTPGQIQLERLEKYGQLRGNFTVYDENGEAHRLINVFSTSDYEKEARKILETQADYNKKITAEFIDDYVEILTQKRKYYHGPGNEKSRTDYGRFRTDGTTLENIFGILIGKCSFYPDEYRASKASYTAQEYNFLNDLNNLKVPTETGKLSTEQKEALVEFAKSTATLGPAKLLKEIAKILDCKVDEIKGYREDDKGKPDLHTFEPYRKLKFNLDSVNIDDLSREVLDKLADILTLNTEREGIEDAIRHNLPNQFTEGQISEIIKVRKSQSTAFNKGWHSFSAKLMNELIPELYATSDEQMTILTRLEKFKVNKKSSKNTKTIDEKEVTDEIYNPVVAKSVRQTIKIINAAVKKYGDFDKIVIEMPRDKNADDEKKFIDKRNKENKKEKDDALKRAAYLYNGTDKLPDEVFHGNKQLETKIRLWYQQGERCLYSGKPIPIQELVHNSNNFEIDHILPLSLSFDDSLANKVLVYAWTNQEKGQKTPYQVIDSMDAAWSFREMKDYVLKQKGLGKKKRDYLLTTENIDKIEVKKKFIERNLVDTRYASRVVLNSLQSALRELGKDTKISVIRGQFTSQLRRKWKIDKSRETYHHHAVDALIIAASSQLKLWEKQDNPMFVDYGNNQVVDKQTGEILSVSDDEYKELVFQPPYQGFVNMISSKGFEDEILFSYQVDSKYNRKVSDATIYSTRKAKIGKDKKEETYVLGKIKDIYSQNGFDTFIKKYNKDKTQFLMYQKDPLTWENVIEVILRDYPTTKKSEDGKNDVKCNPFEEYRRENGLVCKYSKKGKGTPIKSLKYYDKKLGNCIDITPEGSKNEVVLQSLNPWRADVYFNPETLKYELLGLKYSDLSFEKGTGKYHISQEKYDVIKEKEGIGKKSEFKFTLYRNDLILIKDTASGEQEIYRFLSRTMPNVKHYAELKPYDKEKFDNVQELVEALGEADKVGRCIKGLNKSNLSIYKVRTDVLGNKYFVKKEGDKPKLDFKNNKK

SEQ ID NO: 461 - protein, 1136 aa, Streptococcus gordonii
MNGLVLGLDIGIASVGVGILEKDTGKIIHASSRLFPAATADNNVERRSNRQGRRLNRRKKHRSVRLQDLFEGYGLLTDFSKVSMNLNPYQLRVQGMENQLTNEELFVALKNIVKRRGISYLDDASEDGGTVSSDYGKAVEENRKLLAEKTPGQIQLERFEKYGQLRGDFTVEENGEKHRLINVFSTSAYRKEAERILRKQQEFNSKITDEFIEDYLIILTGKRKYYHGPGNEKSRTDYGRFRTDGTTLDNIFGILIGKCTFYTEEYRASKASYTAQEFNLLNDLNNLTVPTETKKLSEEQKKLIIEYAKSAKTLGASTLLKYIAKMIDASVDQIRGYRVDVNNKPEMHTFEVYRKMQSLETIKVEELPRKVLDELAHILTLNTEREGIEEAINSKLKDIFNRDQVLELVQFRKNNSSLFSKGWHNFSIKLMMELIPELYETSEEQMTILTRLGKQRSKETSKRTKYIDEKELTEEIYNPVVAKSVRQAIKIINEATKKYGIFDNIVIEMARENNEEDAKKDYIKRQKANQDEKNAAMEKAAFQYNGKKELPDNIFHGHKELTTKIRLWHQQGEKCLYTGKNIPISDLIHNQYKYEIDHILPLSLSFDDSLSNKVLVLATANQEKGQRTPFQALDSMDDAWSYREFKSYVKDSKLLSNKKKDYLLTEEDISKIEVKQKFIERNLVDTRYSSRVVLNALQDFYKSHQLDTTISVVRGQFTSQLRRKWGIEKSRETYHHHAVDALIIAASSQLRLWKKHSNPLIAYKEGQFVDSETGEIVSLSDEEYKELVFKAPYDHFVDTLRSKKFEDSILFSYQVDSKYNRKISDATIYATRKAKLDKEKKEYTYTLGKIKDIYALGTKTPSKTGFYKFLDLYKTDKSQFLMYQKDRKTWDEVIEKIIEQYRPFKEYDKNGKEVDFNPFEKYRIGNGPIRKYSKKGNGPEIKSLKYYDILLGKHKNITPDGSRNTVALLSLNPWRTDVYYNSETKKYEFLGLKYADLCFEEGGAYGISEVKYKKIREKEGIGKNSEFKFTLYKNDLILIKDTETNCQQFFRFWSRTGKDNPKSFEKHKIELKPYEKAKFEKGEELKVLGKVPPSSNQFQKNMQIENLSIYKVKTDILGNKHFIKKEGDEPKLKFKK

SEQ ID NO: 462 - protein, 1129 aa, Streptococcus infantarius
  Streptococcus infantarius subsp. infantarius ATCC BAA-102
MSNGKILGLDIGVASVGVGIIDSKTGNVIHANSRLFSAANAENNAERRGFRGARRLTRRKKHRVKRVRDLFEKYDISTDFRNLNLNPYELRVKGLTEQLTNEELFAALRTIAKRRGISYLDDAEDDSTGSSDYAKSIDENRRLLKTKTPGQIQLERLEKYGQLRGNFTVYDENGEAHRLINVFSTSDYKNEARKILETQSNYNKQITDEFIEDYIEILTQKRKYYHGPGNEKSRTDYGRFRTDGTTLENIFGILIGKCSFYPEEYRASKASYTAQEFNFLNDLNNLKVPTETGKLSTEQKEYLVDFAKKSKALGASKLLKEIAKIVDCSVDDIKGYRVDNKDKPDLHTFEPYRKLKFNLSSIDIDELSRETLDKLADILTLNTEREGIEDAIKRNLPSQFTEEQISEIVQIRKNQSSAFNKGWHSFSAKLMNELIPELYVTSEEQMTILTRLEKFKVNKKSSKNTKTIDEKEITDEIYNPVVAKSVRQTIKIINAAVKKYGDFDKIVIEMPRDKNAEDEKKFIDKKQKENKKEKDDSLKRAAFLYNGTDNLPDGVFHGNKELKTKIRLWYQQGERCLYSGKLISIHDLVHNSNKFEIDHILPLSLSFDDSLANKVLVYAWTNQEKGQKTPYQVIDSMDTAWSFREMKDYVLKQKGLGKKKCEYLLTTENIDKIEVKKKFIERNLVDTRYASRVVLNSLQTALKELGKDTKVSVVRGQFTSQLRRKWNIDKSRETYHHHAVDALIIAASSQLKLWQKQENPMFESYGENQVVNKETGEILSISDDKYKELVFQPPYQGFVNTISSKGFEDEILFSYQVDSKFNRKVSDATIYSTRKAKLGKDKKDETYVLGKIKDIYSQDGFDTFIKRYKKDKTQFLMYQKDPLTWENVIEVILRDYPSEKLSEDGKKTVKCNPFEEYRRENGLICKYSKKGNGTPIKSLKYYDKKLGNCIDITPEKSKNRVVLRQISPWRADIYFNLETLKYELMGLKYSDLSFEKGTGKYHISQEKYDAIREKEGIGKKSEFKFTLYRNDLILIKDTLNNCERMLRFGSKNDTSKHYVELKPLEKGTFDSEEEILPVLGKVAKSGQFIKGLNKPNISIYKVRTDVLGNKFFIKKEGDKPKLDFKNNNK

SEQ ID NO: 463 - protein, 1375 aa, Streptococcus infantarius
MEKSYSIGLDIGTNSVGWAVITDDYKVPAKKMKVLGNTDKKYIKKNLLGALLFDSGETAEVTRLKRTARRRYTRRKNRLRYLQEIFAKEMTKVDESFFQRLEESFLTDDDKTFDSHPIFGNKAEEDAYHQKFPTIYHLRKYLADSQEKADLRLVYLALAHMIKYRGHFLIEGELNAENTDVQKLFNVFVETYDKIVDESHLSEIEVDASSILTEKVSKSRRLENLIKQYPTEKKNTLFGNLIALALGLQPNFKTNFKLSEDAKLQFSKDTYEEDLEELLGKVGDDYADLFISAKNLYDAILLSGILTVDDNSTKAPLSASMIKRYVEHHEDLEKLKEFIKINKLKLYHDIFKDKTKNGYAGYIDNGVKQDEFYKYLKTILTKIDDSDYFLDKIERDDFLRKQRTFDNGSIPHQIHLQEMHSILRRQGDYYPFLKENQAKIEKILTFRIPYYVGPLARKDSRFAWANYHSDEPITPWNFDEVVDKEKSAEKFITRMTLNDLYLPEEKVLPKHSHVYETFTVYNELTKIKYVNEQGESFFFDANMKQEIFDHVFKENRKVTKAKLLSYLNNEFEEFRINDLIGLDKDSKSFNASLGTYHDLKKILDKSFLDDKTNGQIIEDIVLTLTLFEDRDMIHERLQKYSDFFTSQQLKKLERRHYTGWGRLSYKLINGIRNKENNKTILDFLIDDGHANRNFMQLINDESLSFKTIIQEAQVVGDVDDIEAVVHDLPGSPAIKKGILQSVKIVDELVKVMGDNPDNIVIEMARENQTTGYGRNKSNQRLKRLQDSLKEFGSDILSKKKPSYVDSKVENSHLQNDRLFLYYIQNGKDMYTGEELDIDRLSDYDIDHIIPQAFIKDNSIDNKVLTSSAKNRGKSDDVPSIEIVRNRRSYWYKLYKSGLISKRKFDNLTKAERGGLTEADKAGFIKRQLVETRQITKHVAQILDARFNTKRDENDKVIRDVKVITLKSNLVSQFRKEFKFYKVREINDYHHAHDAYLNAVVGTALLKKYPKLTPEFVYGEYKKYDVRKLIAKSSDDYSEMGKATAKYFFYSNLMNFFKTEVKYADGRVFERPDIETNADGEVVWNKQKDFDIVRKVLSYPQVNIVKKVEAQTGGFSKESILSKGDSDKLIPRKTKKVYWNTKKYGGFDSPTVAYSVLVVADIEKGKAKKLKTVKELVGISIMERSFFEENPVSFLEKKGYHNVQEDKLIKLPKYSLFEFEGGRRRLLASATELQKGNEVMLPAHLVELLYHAHRIDSFNSTEHLKYVSEHKKEFEKVLSCVENFSNLYVDVEKNLSKVRAAAESMTNFSLEEISASFINLLTLTALGAPADFNFLGEKIPRKRYTSTKECLSATLIHQSVTGLYETRIDLSKLGEE

SEQ ID NO: 464 - protein, 1368 aa, Streptococcus iniae
  Streptococcus iniae 9117
MRKPYSIGLDIGTNSVGWAVITDDYKVPSKKMRIQGTTDRTSIKKNLIGALLFDNGETAEATRLKRTTRRRYTRRKYRIKELQKIFSSEMNELDIAFFPRLSESFLVSDDKEFENHPIFGNLKDEITYHNDYPTIYHLRQTLADSDQKADLRLIYLALAHIIKFRGHFLIEGNLDSENTDVHVLFLNLVNIYNNLFEEDIVETASIDAEKILTSKTSKSRRLENLIAEIPNQKRNMLFGNLVSLALGLTPNFKTNFELLEDAKLQISKDSYEEDLDNLLAQIGDQYADLFIAAKKLSDAILLSDIITVKGASTKAPLSASMVQRYEEHQQDLALLKNLVKKQIPEKYKEIFDNKEKNGYAGYIDGKTSQEEFYKYIKPILLKLDGTEKLISKLEREDFLRKQRTFDNGSIPHQIHLNELKAIIRRQEKFYPFLKENQKKIEKLFTFKIPYYVGPLANGQSSFAWLKRQSNESITPWNFEEVVDQEASARAFIERMTNFDTYLPEEKVLPKHSPLYEMFMVYNELTKVKYQTEGMKRPVFLSSEDKEEIVNLLFKKERKVTVKQLKEEYFSKMKCFHTVTILGVEDRFNASLGTYHDLLKIFKDKAFLDDEANQDILEEIVWTLTLFEDQAMIERRLVKYADVFEKSVLKKLKKRHYTGWGRLSQKLINGIKDKQTGKTILGFLKDDGVANRNFMQLINDSSLDFAKIIKNEQEKTIKNESLEETIANLAGSPAIKKGILQSIKIVDEIVKIMGQNPDNIVIEMARENQSTMQGIKNSRQRLRKLEEVHKNTGSKILKEYNVSNTQLQSDRLYLYLLQDGKDMYTGKELDYDNLSQYDIDHIIPQSFIKDNSIDNTVLTTQASNRGKSDNVPNIETVNKMKSFWYKQLKSGAISQRKFDHLTKAERGALSDFDKAGFIKRQLVETRQITKHVAQILDSRFNSNLTEDSKSNRNVKIITLKSKMVSDFRKDFGFYKLREVNDYHHAQDAYLNAVVGTALLKKYPKLEAEFVYGDYKHYDLAKLMIQPDSSLGKATTRMFFYSNLMNFFKKEIKLADDTIFTRPQIEVNTETGEIVWDKVKDMQTIRKVMSYPQVNIVMKTEVQTGGFSKESIWPKGDSDKLIARKKSWDPKKYGGFDSPIIAYSVLVVAKIAKGKTQKLKTIKELVGIKIMEQDEFEKDPIAFLEKKGYQDIQTSSIIKLPKYSLFELENGRKRLLASAKELQKGNELALPNKYVKFLYLASHYTKFTGKEEDREKKRSYVESHLYYFDEIMQIIVEYSNRYILADSNLIKIQNLYKEKDNFSIEEQAINMLNLFTFTDLGAPSAFKFFNGDIDRKRYSSTNEIINSTLIYQSPTGLYETRIDLSKLGGK

SEQ ID NO: 465 - protein, 1338 aa, Streptococcus macacae
  Streptococcus macacae NCTC 11558
MTKPYSIGLDIGTNSVGWAVVTDGYKVPAKKMKVLGNTDKSHIKKNLLGALLFDSGNTAKDRRLKRTARRRYTRRRNRILYLQEIFAEEMAKADESFFQRLNESFLTNDDKEFDSHPIFGNKAEEEAHHHKFPTIFHLRKHLADSTEKSDLRLIYLALAHMIKFRGHFLIEGQLKAENTNVQTLFDDFVEVYDKTVEESHLSEISVSSILTEKISKSRRLENLIKYYPTEKKNTLFGNLIALSLGLQPNFKTNFKLSEDAKLQFSKDTYEEDLGELLGKIGDNYADLFISAKNLYDAILLSGILTIDDNTTKAPLSASMIKRYEEHQEDLAQLKKFIRQNLPDQYSEVFSDKTKDGYAGYIDGKTNQEAFYKYIKNMLSKTEGADYFLDKIDREDFLRKQRTFDNGSVPHQIHLQEMHAILRRQGEYYPFLKENQDKIEKILTFRIPYYVGPLARKGSRFAWAEYKADKKVTPWNFDDILDKEKSAEEFITRMTLNDLYLPEEKVLPKHSLVYETFNVYNELTKVKYVNEQGKAIFFDANMKQEIFDHVFKENRKVTKDKLLNYLNKEFEEFRIVNLTGLDKENKAFNSSLGTYHDLRKILDKSFLDDKVNEKIIEDIIQTLTLFEDREMIRQRLQKYSDIFTTQQLKKLERRHYTGWGRLSAKLINGIRDKQSNKTILGYLIDDGYSNRNFMQLINDDSLPFKEEIARAQVIGETDDLNQLVSDIAGSPAIKKGILQSLKIVDELVKVMGHNPANIVIEMARENQTTAKGRRSSQQRYKRLEEAIKNLDHDLNHKILKEHPTDNQALQNDRLFLYYLQNGRDMYTEDPLDINRLSDYDIDHIIPQSFIKDDSIDNKVLVSSAKNRGKSDNVPSEDVVNRMRPFWNKLLSCGLISQRKYSNLTKKELKPDDKAGFIKRQLVETRQITKHVAQILDARFNTKRDENKKVIRDVKIITLKSNLVSQFRKDFKFYKVREINDYHHAHDAYLNAVIGKALLDVYPQLEPEFVYGEYPHFHGYKENKATAKKFFYSNIMNFFKKDDIRTDENGEIVWKKDEHISNIKRVLSYPQVNIVKKVEIQTVGQNGGLFDDNPKSPLEVTPSKLVPLKKELNPKKYGGYQKPTTAYPVLLITDTKQLIPISVMNKKQFEQNPVKFLRDRGYQQVGKNDFIKLPKYTLVDIGDGIKRLWASSKEIHKGNQLVVSKKSQILLYHAHHLDSDLSNDYLQNHNQQFDVLFNEIISFSKKCKLGKEHIQKIENVYSNKKNSASIEELAESFIKLLGFTQLGATSPFNFLGVKLNQKQYKGKKDYILPCTEGTLIRQSITGLYETRVDLSKIGED

SEQ ID NO: 466 - protein, 1130 aa, Streptococcus macedonicus
MTNGKILGLDIGIASVGVGIIEAKTGKVVHANSRLFSAANAENNAERRGFRGSRRLNRRKKHRVKRVRDLFEKYGIVTDFRNLNLNPYELRVKGLTEQLTNEELFAALRTISKRRGISYLDDAEDDSTGSTDYAKSIDENRRLLKTKTPGQIQLERLEKYGQLRGNFTVYDENGEAHRLINVFSTSDYEKEARKILETQADYNKKITAEFIDDYVEILTQKRKYYHGPGNEKSRTDYGRFRTDGTTLENIFGILIGKCNFYPDEYRASKASYTAQEYNFLNDLNNLKVPTETGKLSTEQKESLVEFAKNTAILGPAKLLKEIAKILDCKVDEIKGYREDDKGKPDLHTFEPYRKLKFNLDSVNIDYLSREVLDKLADILTLNTEREGIEDAIKRNLPNQFTEEQISEIINVRKSQSTAFNKGWHSFSAKLMNELIPELYATSDEQMTILTRLEKFKVKKKSSKNIKTIDEKEITDEIYNPVVAKSVRQTIKIINAAVKKYGDFDKIVIEMPRDKNADDEKKFINKRNKENKKEKDDALKRAAYLYNGTDKLPDEVFHGNKQLETKIRLWYQQGERCLYSGKPIPIQELVHNSNNFEIDHILPLSLSFDDSLANKVLVYSWTNQEKGQKTPYQVIDSMDAAWSFREMKEYVLKQKGLGKKKRDYLLTTENIDKIEVKKKFIERNLVDTRYASRVVLNSLQSALRELGKDTKVSVVRGQFTSQLRRKWKIDKSRETYHHHAVDALIIAASSQLKLWEKQDNPMFVDYGNNQVVDKQTGEILSVSDNEYKELVFQPPYQGFVNTISSKGFEDEILFSYQVDSKYNRKVSDATIYSTRKAKIGKDKKEETYVLGKIKDIYSQNGFDTFVKKYNKDKTQFLMYQKDPLTWENVIEVILGDYPTTKKSEDGKNDVKCNPFEEYRRENGLICKYSKKGKGTPIKSLKYYDKKLGNCIDITPEESRNKVILQSINPWRADVYFNPETLKYELMGLKYSDLSFEKGTGNYHISQEKYDAIKEKEGIGKKSEFKFTLYRNDLILIKDIASGEQEIYRFLSRTMPNVNHYVELKPYDKEKFDNVQELVEALGEADKVGRCIKSLNKPNISIYKVRTDVLGNKYFVKKEGDKPKLDFKNNKK

SEQ ID NO: 467 - protein, 1134 aa, Streptococcus mitis
  Streptococcus mitis ATCC 6249
MNGLVLGLDIGIASEGVGILEKNSGKIIHANSRLFPAATADNNVERRKNRQARRLNRRKKHRGVRFQDLFEDYGLLTDFSKVSINLNPYRLRVDGLNQQLTNEELFIALKNIVKRRGISYLDDASEDGGAVSSDYGKAVEENRKLLAEQTPGQIQLERFEKYGQVRGDFTVVENGEKLRLINVFSTSAYKKEAERILRKQQEFNNQITDEFIEDYLKILTGKRKYYHGPGNEKSRTDYGRFRTDGTTLDNIFGILIGKCTFYPEEYRASKASYTAQEFNLLNDLNNLTVPTETKKLSEEQKKVIVEYAKEAKTLGASTLLKYIAKMIDASVDQIRGYRVDVNNKPEMHTFEVYRKMQSLETISVGELSRNVLDELAHILTLNTEREGMEEAINTKLKDSFSQDQVLELVQFRKNNSSLFSKGWHNFSLKLMMELIPELYETSEEQMTILTRLGKQKSKETSKRTKYIDEKELTEEIYNPVVAKSVRQAIKIINEATKKHGIFDNIVIEMARENNEEDAKKDYIKRQKANQDEKNAAMEKAAFQYNGKKELPDNIFHGHKELATKIRLWHQQGEKCLYTGKTIPISDLIYNQYKYEIDHILPLSLSFDDSLSNKVLALATANQEKGQRTPFQALDSMDDAWSYREFKSYVKDLKSLSNKKKDYLLTEEDISKIEVKQKFIERNLVDTRYSSRVVLNALQDFYKSHQFDTTISVVRGQFTSQLRRKWGLEKSRETYHHHAVDALIIAASSQLRLWKKQNNPLITYKEGQFVDSQTGEIISLTDDEYKELVFKAPYDHFVDTLSSKTFEDSILFSYQVDSKFNRKISDATIYATRKAKLDKEKKEYTYTLGKIKDIYSLGTKTPSKTGFYKFLDLYNKDKSQFLMFQKDRKTWDEVIEKIMEQYRPFKEYDKTGKLVDFNPFEKYRQENEPIRKYSKKGNGPEIKSLKYYDILLGKHKNITPEGSRNTVALLSLNPWRTDVYYNMETKKYEFLGLKYADLPFEEGGAYGISTETYNELREKEGIGKNSEFKFTLYKNDLILIKDTETNCQQIFRFWSRTGKDNPKSFEKHKIELKPYEKARFEKGEELEVLGKVPPSSNQLQKNMQIENLSIYKVKTDVLGNKHFIKKEGDKPKLKF

SEQ ID NO: 468 - protein, 1392 aa, Streptococcus mitis
  Streptococcus mitis SK321
MNNNNYSIGLDIGTNSVGWAVITDDYKVPSKKMKVLGNTDKHFIKKNLIGALLFDEGATAEDRRFKRTARRRYTRRKNRLRYLQEIFSEEMSKVDSSFFHRLDDSFLVPEDKRGSKYPIFATLAEEKEYHKKFPTIYHLRKHLADSKEKTDLRLIYLALAHMIKYRGHFLYEESFDIKNNDIQKIFSEFISIYDNTFEGSSLSGQNAQVEAIFTDKISKSAKRERILKLFAYEKSTDLFSEFLKLIVGNQADFKKHFDLEEKAPLQFSKDTYDEDLENLLGQIGDDFADLFLVAKKLYDAILLSGILTVTDSSTKAPLSASMIERYENHQKDLAALKQFIQNNLQEKYDEVFSDQSKDGYARYINGKTTQEAFYKYIKNLLSKFEGSDYFLDKIEREDFLRKQRTFDNGSIPHQIHLQEMNAIIRRQGEHYPFLKEYKEKIETILTFRIPYYVGPLARGNRNFAWLTRNSDQAIRPWNFEEIVDQASSAEEFINKMTNYDLYLPEEKVLPKHSLLYETFAVYNELTKVKFISEGLRDYQFLDSGQKKQIVNQLFKEKRKVTEKDIIQYLHNVDGYDGIELKGIEKQFNASLSTYHDLLKIIKDKEFMDDPKNEEILENIVHTLTIFEDREMIKQRLAQYASIFDKKVIKALTRRHYTGWGKLSAKLINGICDKKTGKTILDYLIDDGYSNRNFMQLINDDGLSFKDIIQKAQVVGKTNDVKQVVQELPGSPAIKKGILQSIKLVDELVKVMGHAPESIVIEIARENQTTARGKKNSQQRYKRIEDALKNLAPGLDSNILKEHPTDNIQLQNDRLFLYYLQNGKDMYTGEALDINQLSSYDIDHIVPQAFIKDDSLDNRVLTSSKDNRGKSDNVPSLEVVQKRKAFWQQLLDSKLISEHKFNNLTKAERGGLDERDKVGFIRRQLVETRQITKHVAQILDARFNTEVNEKDKKNRTVKIITLKSNLVSNFRKEFKLYKVREINDYHHAHDAYLNAVVAKAILKKYPKLEPGFVYGDYQKYDIKRYISRSKDPKEVEKATEKYFFYSNLLNFFKEEVHYADGTIVKRENIEYSKDTGEIAWNKEKDFATIKKVLSLPQVNIVKKTEIQTHGLDRGKPRGLFNSNPSPKPSEDRKENLVPIKQGLDPRKYGGYAGISNSYAVLVKAIIEKGAKKQQKTVLEFQGISILDKINFEKNKENYLLEKGYIKILSTITLPKYSLFEFPDGTRRRLASILSTNNKRGEIHKGNELVIPEKYTTLLYHAKNINKTLEPEHLEYVEKHRNDFAKLLEYVLNFNDKYVGALKNGERIRQAFIDWETVDIEKLCFSFIGPRNSKNAGLFELTSQGSASDFEFLGVKIPRYRDYTPSSLLNATLIHQSITGLYETRIDLSKLGED

SEQ ID NO: 469 - protein, 1345 aa, Streptococcus mutans
  Streptococcus mutans 11SSST2
MKKPYSIGLDIGTNSVGWAVVTDDYKVPAKKMKVLGNTDKSHIKKNLLGALLFDSGNTAADRRLKRTARRRYTRRRNRILYLQEIFAEEMSKVDDSFFHRLEDSFLVTEDKRGERHPIFGNLEEEVKYHENFPTIYHLRQYLADNPEKVDLRLVYLALAHIIKFRGHFLIEGKFDTRNNDVQRLFQEFLAVYDNTFENSSLQEQNVQVEEILTDKISKSAKKDRVLKLFPNEKSNGRFAEFLKLIVGNQADFKKHFELEEKAPLQFSKDTYEEELEVLLTQIGDNYAELFLSAKKLYDSILLSGILTVTDVSTKAPLSASMIQRYNEHQMDLAQLKQFIRQKLSDKYNEVFSDVSKDGYAGYIDGKTNQEAFYKYLKGLLNKIEGSGYFLDKIEREDFLRKQRTFDNGSIPHQIHLQEMRAIIRRQAEFYPFLADNQDRIEKILTFRIPYYVGPLARGKSDFAWLSRKSADKITPWNFDEIVDKESSAEAFINRMTNYDLYLPNQKVLPKHSLLYEKFTVYNELTKVKYKTEQGKTAFFDANMKQEIFDGVFKVYRKVTKDKLMDFLEKEFDEFRIVDLTGLDKENKAFNASYGTYHDLRKILDKDFLDNSKNEKILEDIVLTLTLFEDREMIRKRLENYSDLLTKEQVKKLERRHYTGWGRLSAELIHGIRNKESRKTLLDYLIDDGNSNRNFMQLINDDALSFKEEIAKAQVIGETDNLNQVVSDIAGSPAIKKGILQSLKIVDELVKIMGHQPENIVVEMARENQFTNQGRRNSQQRLKGLTDSIKEFGSQILKEHPVENSQLQNDRLFLYYLQNGRDMYTGEELDIDYLSQYDIDHIIPQAFIKDNSIDNRVLTSSKENRGKSDDVPSKDVVRKMKPYWSKLLSAKLITQRKFDNLTKAERGGLTDDDKAGFIKRQLVETRQITKHVARILDERFNTETDENNKKIRQVKIVTLKSNLVSNFRKEFELYKVREINDYHHAHDAYLNAVIGKALLGVYPQLEPEFVYGDYPHFHGHEENKATAKKFFYSNIMNFFKKDDVRTDKNGEIIWKKDEHISNIKKVLSYPQVNIVKKVEEQTGGFSKESILPKGNSDKLIPRKTKKFYWDTKKYGGFDSPIVAYSILVIADIEKGKSKKLKTVKALVGVTIMEKMTFERDPVAFLERKGYRNVQEENIIKLPKYSLFKLENGRKRLLASARELQKGNEIVLPNHLGTLLYHAKNIHKVDEPKHLDYVDKHKDEFKELLDVVSNFSKKYTLAEGNLEKIKELYAQNNGEDLKELSSSFINLLTFTAIGAPAAFKFFDKNIDRKRYTSTTEILNATLIHQSITGLYETRIDLSKLGGD

SEQ ID NO: 470 - protein, 1345 aa, Streptococcus mutans; identical to SEQ ID NO: 469
  Streptococcus mutans 11SSST2

SEQ ID NO: 471 - protein, 1345 aa, Streptococcus mutans
  Streptococcus mutans 11VS1
MKKPYSIGLDIGTNSVGWAVVTDDYKVPAKKMKVLGNTDKSHIKKNLLGALLFDSGNTAEDRRLKRTARRRYTRRRNRILYLQEIFSEEMGKVDDSFFHRLEDSFLVTEDKRGERHPIFGNLEEEVKYHENFPTIYHLRQYLADNPEKVDLRLVYLALAHIIKFRGHFLIEGKFDTRNNDVQRLFQEFLAVYDNTFENSSLQEQNVQVEEILTDKISKSAKKDRVLKLFPNEKSNGRFAEFLKLIVGNQADFKKHFELEEKAPLQFSKDTYEEELEVLLAQIGDNYAELFLSAKKLYDSILLSGILTVTDVSTKAPLSASMIQRYNEHQMDLAQLKQFIRQKLSDKYNEVFSDVSKDGYAGYIDGKTNQEAFYKYLKGLLNKIEGSGYFLDKIEREDFLRKQRTFDNGSIPHQIHLQEMRAIIRRQAEFYPFLADNQDRIEKILTFRIPYYVGPLARGKSDFAWLSRKSADKITPWNFDEIVDKESSAEAFINRMTNYDLYLPNQKVLPKHSLLYEKFTVYNELTKVKYKTEQGKTAFFDANMKQEIFDGVFKVYRKVTKDKLMDFLEKEFDEFRIVDLTGLDKENKVFNASYGTYHDLCKILDKDFLDNSKNEKILEDIVLTLTLFEDREMIRKRLENYSDLLTKEQVKKLERRHYTGWGRLSAELIHGIRNKESRKTILDYLIDDGNSNRNFMQLINDDALSFKEEIAKAQVIGETDNLNQVVSDIAGSPAIKKGILQSLKIVDELVKIMGHQPENIVVEMARENQFTKQGRRNSQQRLKGLTDSIKEFGSQILKEHPVENSQLQNDRLFLYYLQNGRDMYTGEELDIDYLSQYDIDHIIPQAFIKDNSIDNRVLTSSKENRGKSDDVPSKDVVRKMKSYWSKLLSAKLITQRKFDNLTKAERGGLTDDDKAGFIKRQLVETRQITKHVARILDERFYTETDENNKKIRQVKIVTLKSNLVSNFRKEFELYKVREINDYHHAHDAYLNAVIGKALLGVYPQLEPEFVYGDYPHFHGHKENKATAKKFFYSNIMNFFKKDDVRTDKNGEIIWKKDEHISNIKKVLSYPQVNIVKKVEEQTGGFSKESILPKGNSDKLIPRKTKKFYWDTKKYGGFDSPIVAYSILVIADIEKGKSKKLKTVKALVGVTIMEKMTFERDPVAFLERKGYRNVQEENIIKLPKYSLFKLENGRKRLLASARELQKGNEIVLPNHLGTLLYHAKNIHKVDEPKHLDYVDKHKDEFKELLDVVSNFSKKYTLAEGNLEKIKELYAQNNGEDLKELASSFINLLTFTAIGAPATFKFFDKNIDRKRYTSTTEILNATLIHQSITGLYETRIDLSKLGGD

SEQ ID NO: 472 - protein, 1345 aa, Streptococcus mutans
  Streptococcus mutans 14D
MKKPYSIGLDIGTNSVGWAVVTDDYKVPAKKMKVLGNTDKSHIKKNLLGALLFDSGNTAADRRLKRTARRRYTRRRNRILYLQEIFAEEMSKVDDSFFHRLEDSFLVTEDKRGERHPIFGNLEEEVKYHENFPTIYHLRQYLADNPEKVDLRLVYLALAHIIKFRGHFLIEGKFDTRNNDVQRLFQEFLAVYDNTFENSSLQEQNVQVEEILTDKISKSAKKDRVLKLFPNEKSNGRFAEFLKLIVGNQADFKKHFELEEKAPLQFSKDTYEEELEVLLAQIGDNYAELFLSAKKLYDSILLSGILTVTDVSTKAPLSASMIQRYNEHQMDLAQLKQFIRQKLSDKYNEVFSDVSKDGYAGYIDGKTNQEAFYKYLKGLLNKIEGSGYFLDKIEREDFLRKQRTFDNGSIPHQIHLQEMRAIIRRQAEFYPFLADNQDRIEKILTFRIPYYVGPLARGKSDFAWLSRKSADKITPWNFDEIVDKESSAEAFINRMTNYDLYLPNQKVLPKHSLLYEKFTVYNELTKVKYKTEQGKTAFFDANMKQEIFDGVFKVYRKVTKDKLMDFLEKEFDEFRIVDLTGLDKENKAFNASYGTYHDLRKILDKDFLDNSKNEKILEDIVLTLTLFEDREMIRKRLENYSDLLTKEQVKKLERRHYTGWGRLSAELIHGIRNKESRKTILDYLIDDGNSNRNFMQLINDDALSFKEEIAKAQVIGETDNLNQVVSDIAGSPAIKKGILQSLKIVDELVKIMGHQPENIVVEMARENQFTNQGRRNSQQRLKGLTDSIKEFGSQILKEHPVEHSQLQNDRLFLYYLQNGRDMYTGEELDIDYLSQYDIDHIIPQAFIKDNSIDNRVLTSSKENRGKSDDVPSKNVVRKMKSYWSKLLSAKLITQRKFDNLTKAERGGLTDDDKAGFIKRQLVETRQITKHVARILDERFHTETDENNKKIRQVKIVTLKSNLVSNFRKEFELYKVREINDYHHAHDAYLNAVIGKALLGVYPQLEPEFVYGDYPHFHGHKENKATAKKFFYSNIMNFFKKDDVRTDKNGEIIWKKDEHISNIKKVLSYPQVNIVKKVEEQTGGFSKESILPKGNSDKLIPRKTKKFYWDTKKYGGFDSPIVAYSILVIADIEKGKSKKLKTVKALVGVTIMEKMTFERDPVAFLERKGYRNVQEENIIKLPKYSLFKLENGRKRLLASARELQKGNEIVLPNHLGTLLYHAKNIHKVDEPKHLDYVDKHKDEFKELLDVVSNFSKKYTLAEGNLEKIKELYAQNNGEDLKELASSFINLLTFTAIGAPATFKFFDKNIDRKRYTSTTEILNATLIHQSITGLYETRIDLSKLGGD

SEQ ID NO: 473 - protein, 1355 aa, Streptococcus mutans
  Streptococcus mutans 15VF2
MKKSYSIGLDIGTNSVGWAVVTDDYKVPAKKMKVLGNTDKSHIKKNLLGALLFDSGNTAEDRRLKRTARRRYTRRRNRILYLQEIFSEEMGKVDDSFFHRLDESFLTDDDKNFDSHPIFGNKAEEDAYHQKFPTIYHLRKHLADSTEKADLRLVYLALAHMIKFRGHFLIEGELNAENTDVQKLFADFVGVYDRTFDDSHLSEITVDASSILTEKISKSRRLEKLINNYPKEKKNTLFGNLIALSLGLQPNFKTNFKLSEDAKLQFSKDTYEEDLEELLGKIGDDYADLFTLAKNLYDAILLSGILTADDSSTKAPLSASMIKRYAEHHEDLEKLKEFIKANKPELYHDIFKDETKNGYAGYIENGVKQDEFYKYLKNTLSKIAGSDYFLDKIEREDFLRKQRTFDNGSIPHQIHLQEMHAILRRQGDYYPFLKENQDRIEKILTFRIPYYVGPLARKNSRFAWAEYHSDEAVMPWNFDQVIDKESSAQAFIEHMTNNDLYLPNEKVLPKHSPLYEKYTVYNELTKIKYVTEIGEAKFFDANLKQEIFDGLFKHERKVTKKKLRTFLDKNFDEFRIVDIQGLDKETETFNASYATYQDLLKVIKDKVFMDNPENAEILENIVLTLTLFEDREMIKQRLAKYADVFDKKVIDQLARRHYTGWGRLSAKLLNGIRDKQSCKTIMDYLIDDAQSNRNLMQLITDDNLTFKDDIVKAQYVDNSDDLHQVVQSLAGSPAIKKGILQSLKIVDELVKVMGKEPEQIVVEMARENQTTAKGRRNSQQRYKRLKEAIKSLDRDLNHKILKEHPTDNQALQNNRLFLYYLQNGRDMYTGESLDINRLSDYDIDHVIPQAFIKDNSIDNRVLTSSKANRGKSDDVPSEDVVNRMRPFWNKLLSSGLISQRKYNNLTKKELTPDDKAGFIKRQLVETRQITKHVARMLDERFNKEFDDNNKRIRRVKIVTLKSNLVSSFRKEFELYKVREINDYHHAHDAYLNAVVVKALLVKYPKLEPEFVYGEYPKYNSYRERKTATQKMFFYSNIMNMFKSKVKLADDQIVERPMIEVNDETGEIAWDKTKHITTVKKVLSYPQVNIVKKVEEQTIGQNGGLFDDNPKSPLEVIPSKLVPLKKALNPEKYGGYQKPTTAYPILLIVDTKQLIPISVMDKKRFEQNPVKFLKDKGYQQIEKNNFVKLPKYTLVDIGNGIKRLWASSKEVHKGNQLVVSKKSQDLLYHAHHLDNDYSNEYVKNHYQQFDILFNEITSFSKKCKLGKEHIQKIEEAYSKERDSASIEELADGFIKLLGFTQLGATSPFSFLGIKLNQKQYTGKKDYLLPCMEATLIHQSITGLYETRIDLNKLGGD

SEQ ID NO: 474 - protein, 1355 aa, Streptococcus mutans; identical to SEQ ID NO: 473
  Streptococcus mutans 15VF2

SEQ ID NO: 475 - protein, 1345 aa, Streptococcus mutans
  Streptococcus mutans 1SM1
MKKPYSIGLDIGTNSVGWAVVTDDYKVPAKKMKVLGNTDKSHIKKNLLGALLFDSGNTAEDRRLKRTARRRYTRRRNRILYLQEIFSEEMGKVDDSFFHRLEDSFLVTEDKRGERHPIFGNLEEEVKYHENFPTIYHLRQYLADNPEKVDLRLVYLALAHIIKFRGHFLIEGKFDTRNNDVQRLFQEFLAVYDNTFENSSLQEQNVQVEEILTDKISKSAKKDRVLKLFPNEKSNGRFAEFLKLIVGNQADFKKHFELEEKAPLQFSKDTYEEDLEELLGKIGDDYADLFTLAKNLYDAILLSGILTADDSSTKAPLSASMIQRYNEHQMDLAQLKQFIRQKLSDKYNEVFSDVSKDGYAGYIDGKTNQEAFYKYLKGLLNKIEGSGYFLDKIEREDFLRKQRTFDNGSIPHQIHLQEMRAIIRRQAEFYPFLADNQDRIEKILTFRIPYYVGPLARGKSDFAWLSRKSADKITPWNFDEIVDKESSAEAFINRMTNYDLYLPNQKVLPKHSLLYEKFTVYNELTKVKYKTEQGKTAFFDANMKQEIFDGVFKVYRKVTKDKLMDFLEKEFDEFRIVDLTGLDKENKVFNASYGTYHDLCKILDKDFLDNSKNEKILEDIVLTLTLFEDREMIRKRLENYSDLLTKEQVKKLERRHYTGWGRLSAELIHGIRNKESRKTILDYLIDDGNSNRNFMQLINDDALSFKEEIAKAQVIGETDNLNQVVSDIAGSPAIKKGILQSLKIVDELVKIMGHQPENIVVEMARENQFTNQGRRNSQQRLKGLTDSIKEFGSQILKEHPVENSQLQNDRLFLYYLQNGRDMYTGEELDIDYLSQYDIDHIIPQAFIKDNSIDNRVLTSSKENRGKSDDVPSKDVVRKMKSYWSKLLSAKLITQRKFDNLTKAERGGLTDDDKAGFIKRQLVETRQITKHVARILDERFYTETDENNKKIRQVKIVTLKSNLVSNFRKEFELYKVREINDYHHAHDAYLNAVIGKALLGVYPQLEPEFVYGDYPHFHGHKENKATAKKFFYSNIMNFFKKDDVRTDKNGEIIWKKDEHISNIKKVLSYPQVNIVKKVEEQTGGFSKESILPKGNSDKLIPRKTKKFYWDTKKYGGFDSPIVAYSILVIADIEKGKSKKLKTVKALVGVTIMEKMTFERDPVAFLERKGYRNVQEENIIKLPKYSLFKLENGRKRLLASARELQKGNEIVLPNHLGTLLYHAKNIHKVDEPKHLDYVDKHKDEFKELLDVVSNFSKKYTLAEGNLEKIKELYAQNNGEDLKELASSFINLLTFTAIGAPATFKFFDKNIDRKRYTSTTEILNATLIHQSITGLYETRIDLSKLGGD

SEQ ID NO: 476 - protein, 1345 aa, Streptococcus mutans; identical to SEQ ID NO: 475
  Streptococcus mutans 1SM1

SEQ ID NO: 477 - protein, 1350 aa, Streptococcus mutans
  Streptococcus mutans 24
MKKPYSIGLDIGTNSVGWAVVTDDYKVPAKKMKVLGNTDKSHIEKNLLGALLFDSGNTAEDRRLKRTARRRYTRRRNRILYLQEIFSEEMGKVDDSFFHRLEDSFLVTEDKRGERHPIFGNLEEEVKYHENFPTIYHLRQYLADNPEKVDLRLVYLALAHIIKFRGHFLIEGKFDTRNNDVQRLFQEFLAVYDNTFENSSLQEQNVQVEEILTDKISKSAKKDRVLKLFPNEKSNGRFAEFLKLIVGNQADFKKHFELEEKAPLQFSKDTYEEELEVLLAQIGDNYAELFLSAKKLYDSILLSGILTVTDVSTKAPLSASMIQRYNEHQMDLTQLKQFIRQKLSDKYNEVFSDVSKDGYAGYIDGKTNQEAFYKYLKGLLNKIEGSGYFLDKIEREDFLRKQRTFDNGSIPHQIHLQEMRAIIRRQAEFYPFLADNQDRIEKILTFRIPYYVGPLARGKSDFAWLSRKSADKITPWNFDEIVDKESSAEAFINRMTNYDLYLPNQKVLPKHSLLYEKFTVYNELTKVKYKTEQGKTAFFDANMKQEIFDGVFKVYRKVTKDKLMDFLEKEFDEFRIVDLTGLDKENKAFNASYGTYHDLRKILDKDFLDNSKNEKILEDIVLTLTLFEDREMIRKRLKNYSDLLTKEQLKKLERRHYTGWGRLSAELIHGIRNKESRKTILDYLIDDGNSNRNFMQLINDDALSFKEEIAKAQVIGETDNLNQVVSDIAGSPAIKKGILQSLKIVDELVKIMGHQPENIVVEMARENQFTNQGRQNSQQRLKGLTDSIKEFGSQILKEHPVENSQLQNDRLFLYYLQNGRDMYTGEELDIDYLSQYDIDHIIPQAFIKDNSIDNRVLTSSKENRGKSDDVPSEDVVNRMRPFWNKLLSSGLISQRKYNNLTKKELTLDDKAGFIKRQLVETRQITKHVARMLDERFNKEFDDNNKRICKVKIVTLKSNLVSSFRKEFELYKVREINDYHHAHDAYLNAVVVKALLVKYSKLEPEFVYGEYPKYNSYRERKTATQKMFFYSNIMNMFKSKVKLADDQIVERPMIEVNDETGEIAWDKTKHITTVKKVLSYPQVNIVKKVEEQTIGQNGGLFDDNPKSPLEVIPSKLVPLKKALNPEKYGGYQKPTTAYPILLIVDTKQLIPISVMDKKRFEQNPVKFLKDKGYQQIEKNNFVKLPKYTLVDIGNGIKRLWASSKEVHKGNQLVVSKKSQDLLYHAHHLDNDYSNEYVKNHYQQFDILFNEITSFSKKCKLGKEHIQKIEEAYSKERDSASIEELADGFIKLLGFTQLGATSPFSFLGIKLNQKQYTGKKDYLLPCMEATLIHQSITGLYETRIDLSKLGGD

SEQ ID NO: 478 - protein, 1350 aa, Streptococcus mutans; identical to SEQ ID NO: 477
  Streptococcus mutans 24

SEQ ID NO: 479 - protein, 1345 aa, Streptococcus mutans; identical to SEQ ID NO: 472
  Streptococcus mutans 2VS1

SEQ ID NO: 480 - protein, 1345 aa, Streptococcus mutans; identical to SEQ ID NO: 472
  Streptococcus mutans 2VS1

SEQ ID NO: 481 - protein, 1345 aa, Streptococcus mutans; identical to SEQ ID NO: 471
  Streptococcus mutans 3SN1

SEQ ID NO: 482 - protein, 1345 aa, Streptococcus mutans; identical to SEQ ID NO: 471
  Streptococcus mutans 3SN1

SEQ ID NO: 483 - protein, 1345 aa, Streptococcus mutans
  Streptococcus mutans 4SM1
MKKPYSIGLDIGTNSVGWAVVTDDYKVPAKKMKVLGNTDKSHIKKNLLGALLFDSGNTAEDRRLKRTARRRYTRRRNRILYLQEIFSEEMGKVDDSFFHRLEDSFLVTEDKRGERHPIFGNLEEEVKYHENFPTIYHLRQYLADNPEKVDLRLVYLALAHIIKFRGHFLIEGKFDTRNNDVQRLFQEFLAVYDNTFENSSLQEQNVQVEEILTDKISKSAKKDRVLKLFPNEKSNGRFAEFLKLIVGNQADFKKHFELEEKAPLQFSKDTYEEDLEELLGKIGDDYADLFTLAKNLYDAILLSGILTADDSSTKAPLSASMIQRYNEHQMDLAQLKQFIRQKLSDKYNEVFSDVSKDGYAGYIDGKTNQEAFYKYLKGLLNKIEGSGYFLDKIEREDFLRKQRTFDNGSIPHQIHLQEMRAIIRRQAEFYPFLADNQDRIEKILTFRIPYYVGPLARGKSDFAWLSRKSADKITPWNFDEIVDKESSAEAFINRMTNYDLYLPNQKVLPKHSLLYEKFTVYNELTKVKYKTEQGKTAFFDANMKQEIFDGVFKVYRKVTKDKLMDFLEKEFDEFRIVDLTGLDKENKVFNASYGTYHDLCKILDKDFLDNSKNEKILEDIVLTLTLFEDREMIRKRLENYSDLLTKEQVKKLERRHYTGWGRLSAELIHGIRNKESRKTILDYLIDDGNSNRNFMQLINDDALSFKEEIAKAQVIGETDNLNQVVSDIAGSPAIKKGILQSLKIVDELVKIMGHQPENIVVEMARENQFTNQGRRNSQQRLKGLTDSIKEFGSQILKEHPVENSQLQNDRLFLYYLQNGRDMYTGEELDIDYLSQYDIDHIIPQAFIKDNSIDNRVLTSSKENRGKSDDVPSKDVVRKMKPYWSKLLSAKLITQRKFDNLTKAERGGLTDDDKAGFIKRQLVETRQITKHVARILDERFNTETDENNKKIRQVKIVTLKSNLVSNFRKEFELYKVREINDYHHAHDAYLNAVIGKALLGVYPQLEPEFVYGDYPHFHGHEENKATAKKFFYSNIMNFFKKDDVRTDKNGEIIWKKDEHISNIKKVLSYPQVNIVKKVEEQTGGFSKESILPKGNSDKLIPRKTKKFYWDTKKYGGFDSPIVAYSILVIADIEKGKSKKLKTVKALVGVTIMEKMTFERDPVAFLERKGYRNVQEENIIKLPKYSLFKLENGRKRLLASARELQKGNEIVLPNHLGTLLYHAKNIHKVDEPKHLDYVDKHKDEFKELLDVVSNFSKKYTLAEGNLEKIKELYAQNNGEDLKELASSFINLLTFTAIGAPATFKFFDKNIDRKRYTSTTEILNATLIHQSITGLYETRIDLSKLGGD

SEQ ID NO: 484 - protein, 1345 aa, Streptococcus mutans; identical to SEQ ID NO: 483
  Streptococcus mutans 4SM1

SEQ ID NO: 485 - protein, 1345 aa, Streptococcus mutans
  Streptococcus mutans 4VF1
MKKPYSIGLDIGTNSVGWAVVTDDYKVPAKKMKVLGNTDKSHIKKNLLGALLFDSGNTAEDRRLKRTARRRYTRRRNRILYLQEIFSEEMGKVDDSFFHRLEDSFLVTEDKRGERHPIFGNLEEEVKYHENFPTIYHLRQYLADNPEKVDLRLVYLALAHIIKFRGHFLIEGKFDTRNNDVQRLFQEFLAVYDNTFENSSLQEQNVQVEEILTDKISKSAKKDRVLKLFPNEKSNGRFAEFLKLIVGNQADFKKHFELEEKAPLQFSKDTYEEELEVLLAQIGDNYAELFLSAKKLYDSILLSGILTVTDVSTKAPLSASMIQRYNEHQMDLAQLKQFIRQKLSDKYNEVFSDVSKDGYAGYIDGKTNQEAFYKYLKGLLNKIEGSGYFLDKIEREDFLRKQRTFDNGSIPHQIHLQEMRAIIRRQAEFYPFLADNQDRIEKILTFRIPYYVGPLARGKSDFAWLSRKSADKITPWNFDEIVDKESSAEAFINRMTNYDLYLPNQKVLPKHSLLYEKFTVYNELTKVKYKTEQGKTAFFDANMKQEIFDGVFKVYRKVTKDKLMDFLEKEFDEFRIVDLTGLDKENKVFNASYGTYHDLCKILDKDFLDNSKNEKILEDIVLTLTLFEDREMIRKRLENYSDLLTKEQVKKLERRHYTGWGRLSAELIHGIRNKESRKTILDYLIDDGNSNRNFMQLINDDALSFKEEIAKAQVIGETDNLNQVVSDIAGSPAIKKGILQSLKIVDELVKIMGHQPENIVVEMARENQFTKQGRRNSQQRLKGLTDSIKEFGSQILKEHPVENSQLQNDRLFLYYLQNGRDMYTGEELDIDYLSQYDIDHIIPQAFIKDNSIDNRVLTSSKENRGKSDDVPSKDVVRKMKSYWSKLLSAKLITQRKFDNLTKAERGGLTDDDKAGFIKRQLVETRQITKHVARILDERFYTETDENNKKIRQVKIVTLKSNLVSNFRKEFELYKVREINDYHHAHDAYLNAVIGKALLGVYPQLEPEFVYGDYPHFHGHKENKATAKKFFYSNIMNFFKKDDVRTDRNGEIIWKKDEHISNIKKVLSYPQVNIVKKVEEQTGGFSKESILPKGNSDKLIPRKTKKFYWDTKKYGGFDSPIVAYSILVIADIEKGKSKKLKTVKALVGVTIMEKMTFERDPVAFLERKGYRNVQEENIIKLPKYSLFKLENGRKRLLASARELQKGNEIVLPNHLGTLLYHAKNIHKVDEPKHLDYVDKHKDEFKELLDVVSNFSKKYTLAEGNLEKIKELYAQNNGEDLKELASSFINLLTFTAIGAPATFKFFDKNIDRKRYTSTTEILNATLIHQSITGLYETRIDLSKLGGD

SEQ ID NO: 486 - protein, 1345 aa, Streptococcus mutans; identical to SEQ ID NO: 485
  Streptococcus mutans 4VF1

SEQ ID NO: 487 - protein, 1345 aa, Streptococcus mutans
  Streptococcus mutans 5SM3
MKKPYSIGLDIGTNSVGWAVVTDDYKVPAKKMKVLGNTDKSHIEKNLLGALLFDSGNTAEDRRLKRTARRRYTRRRNRILYLQEIFSEEMGKVDDSFFHRLEDFFLVTEDKRGERHPIFGNLEEEVKYHENFPTIYHLRQYLADNPEKVDLRLVYLALAHIIKFRGHFLIEGKFDTRNNDVQRLFQEFLAVYDNTFENSSLQEQNVQVEEILTDKISKSAKKDRVLKLFPNEKSNGRFAEFLKLIVGNQADFKKHFELEEKAPLQFSKDTYEEELEVLLAQIGDNYAELFLSAKKLYDSILLSGILTADDSSTKAPLSASMIQRYNEHQMDLAQLKQFIRQKLSDKYNEVFSDVSKDGYAGYIDGKTNQEAFYKYLKGLLNKIEGSGYFLDKIEREDFLRKQRTFDNGSIPHQIHLQEMRAIIRRQSEFYPFLADNQDRIEKILTFRIPYYVGPLARGKSDFAWLSRKSADKITPWNFDEIVDKESSAEAFINRMTNYDLYLPNQKVLPKHSLLYEKFTVYNELTKVKYKTEQGETAFFDANMKQEIFDGVFKVYRKVTKDKLMDFLEKEFDEFRIVDLTGLDKENKAFNASYGTYHDLRKILDKDFLDNSKNEKILEDIVLTLTLFEDREMIRKRLKNYSDLLTKEQLKKLERRHYTGWGRLSAELIHGIRNKESRKTILDYLIDDGNSNRNFMQLINDDALSFKEEIAKAQVIGETDNLNQVVSDIAGSPAIKKGILQSLKIVDELVKIMGHQPENIVVEMARENQFTNQGRRNSQQRLKGLTDSIKEFGSQILKEHPVENSQLQNDRLFLYYLQNGRDMYTGEELDIDYLSQYDIDHIIPQAFIKDNSIDNRVLTSSKENRGKSDDVPSKDVVRKMKPYWSKLLSAKLITQRKFDNLTKAERGGLTDDDKAGFIKRQLVETRQITKHVARILDERFNTETDENNKKIRQVKIVTLKSNLVSNFRKEFELYKVREINDYHHAHDAYLNAVIGKALLGVYPQLEPEFVYGDYPHFHGHEENKATAKKFFYSNIMNFFKKDDVRTDKNGEIIWKKDEHISNIKKVLSYPQVNIVKKVEEQTGGFSKESILPKGNSDKLIPRKTKKFYWDTKKYGGFDSPIVAYSILVIADIEKGKSKKLKTVKALVGVTIMEKMTFERDPVAFLERKGYRNVQEENIIKLPKYSLFKLENGRKRLLASARELQKGNEIVLPNHLGTLLYHAKNIHKVDEPKHLDYVDKHKDEFKELLDVVSNFSKKYTLAEGNLEKIKELYAQNNGEDLKELASSFINLLTFTAIGAPATFKFFDKNIDRKRYTSTTEILNATLIHQSITGLYETRIDLSKLGGD

SEQ ID NO: 488 - protein, 1345 aa, Streptococcus mutans; identical to SEQ ID NO: 487
  Streptococcus mutans 5SM3

SEQ ID NO: 489 - protein, 1359 aa, Streptococcus mutans
  Streptococcus mutans 66-2A
MKKPYSIGLDIGTNSVGWAVVTDDYKVPAKKMKVLGNTDKSHIKKNLLGALLFDSGNTAEDRRLKRTARRRYTRRRNRILYLQEIFAEEMMQVDESFFQRLDDSFLVEEDKRGSRYPIFGTLKEEKKYHKEFKTIYHLREKLANSTEKADLRLVYLSLAHMIKFRGHFLIEGQLKAENTNVQALFKDFVEVYDKTVEESHLSEMTVDALSILTEKVSKSRRLENLVECYPTEKKNTLFGNLIALSLGLQPNFKTNFQLSEDAKLQFSKDTYEEDLEGLLGEIGDEYADLFASAKNLYDAILLSGILAVDDNTTKAPLSASMVKRYKEHKEELAAFKRFIKEKLPKKYEEIFKDDTKNGYAGYVGADKKLRKRSGKLATEEEFYKYVKGILNKVEGADVWLDKIDREDFLRKQRTFDNGSIPHQIHLQEMHAILRRQGEHYPFLKENQDKIEKILTFRIPYYVGPLVRKGSRFAWAEYKADEKITPWNFDDILDKEKSAEKFITRMTLNDLYLPEEKVLPKHSLLYETFTVYNELTKVKYVNEQGEAKFFDANMKQEIFDHVFKENRKVTKDKLLNYLNKEFEEFRIVNLTGLDKENKVFNSSLGTYHDLRKILNKSFLDNKENEQIIEDIIQTLTLFEDREMIRQRLQKYSDIFTKAQLKKLERRHYTGWGRLSYKLINGIRDKQSNKTILGYLIDDGYSNRNFMQLINDDALSFKEEIAKAQVIGEMDGLNQVVSDIAGSPAIKKGILQSLKIVDELVKVMGHNPANIVIEMARENQTTAKGRRSSQKRYKRLEEAIKNLDHDLNHKILKEHPTDNQALQNDRLFLYYLQNGRDMYTEDPLDINRLSDYDIDHIIPQAFIKDNSIDNRVLTRSDKNRGKSDDVPSEEVVHKMKPFWSKLLSAKLITQRKFDNLTKAERGGLTDDDKAGFIKRQLVETRQITKHVARILDERFNTETDENNKKIRQVKIVTLKSNLVSNFRKEFELYKVREINDYHHAHDAYLNAVIGKALLGVYPQLEPEFVYGDYPHFHGHKENKATAKKFFYSNIMNFFKKGDVRTDKNGEIIWKKDEHISNIKKVLSYPQVNIVKKVEEQTGGFSKESILPKGNSDKLIPRKTKKFYWDTKKYGGFDSPIVAYSILVIADIEKGKSKKLKTVKALVGVTIMEKMTFERDPVAFLERKGYRNVQEENIIKLPKYSLFKLENGRKRLLASARELQKGNEIVLPNHLETLLYHAKNIHKVDEPKHLDYVDKHKDEFKELLDVVSNFSKKYTLAEGNLEKIKELYAQNNGEDLKELASSFINLLTFTAIGAPAAFKFFDKNIDRKRYTSTTEILNATLIHQSITGLYETRIDLNKLGGD

SEQ ID NO: 490 - protein, 1359 aa, Streptococcus mutans; identical to SEQ ID NO: 489
  Streptococcus mutans 66-2A

SEQ ID NO: 491 - protein, 1345 aa, Streptococcus mutans
  Streptococcus mutans 8ID3
MKKPYSIGLDIGTNSVGWAVVTDDYKVPAKKMKVLGNTDKSHIEKNLLGALLFDSGNTAEDRRLKRTARRRYTRRRNRILYLQEIFSEEMGKVDDSFFHRLEDSFLVTEDKRGERHPIFGNLEEEVKYHENFPTIYHLRQYLADNPEKVDLRLVYLALAHIIKFRGHFLIEGKFDTRNNDVQRLFQEFLAVYDNTFENSSLQEQNVQVEEILTDKISKSAKKDRVLKLFPNEKSNGRFAEFLKLIVGNQADFKKHFELEEKAPLQFSKDTYEEELEVLLAQIGDNYAELFLSAKKLYDSILLSGILTVTDVGTKAPLSASMIQRYNEHQMDLAQLKQFIRQKLSDKYNEVFSDVSKDGYAGYIDGKTNQEAFYKYLKGLLNKIEGSGYFLDKIEREDFLRKQRTFDNGSIPHQIHLQEMRAIIRRQAEFYPFLADNQDRIEKLLTFRIPYYVGPLARGKSDFAWLSRKSADKITPWNFDEIVDKESSAEAFINRMTNYDLYLPNQKVLPKHSLLYEKFTVYNELIKVKYKTEQGKTAFFDANMKQEIFDGVFKVYRKVTKDKLMDFLEKEFDEFRIVDLTGLDKENKVFNASYGTYHDLCKILDKDFLDNSKNEKILEDIVLTLTLFEDREMIRKRLENYSDLLTKEQVKKLERRHYTGWGRLSAELIHGIRNKESRKTILDYLIDDGNSNRNFMQLINDDALSFKEEIAKAQVIGETDNLNQVVSDIAGSPAIKKGILQSLKIVDELVKIMGHQPENIVVEMARENQFTNQGRRNSQQRLKGLTDSIKEFGSQILKEHPVENSQLQNDRLFLYYLQNGRDMYTGEELDIDYLSQYDIDHIIPQAFIKDNSIDNRVLTSSKENRGKSDDVPSKDVVRKMKSYWSKLLSAKLITQRKFDNLTKAERGGLTDDDKAGFIKRQLVETRQITKHVARILDERFNTETDENNKKIRQVKIVTLKSNLVSNFRKEFELYKVREINDYHHAHDAYLNAVIGKALLGVYPQLEPEFVYGDYPHFHGHKENKATAKKFFYSNIMNFFKKDDVRTDKNGEIIWKKDEHISNIKKVLSYPQVNIVKKVEEQTGGFSKESILPKGNSDKLIPRKTKKFYWDTKKYGGFDSPIVAYSILVIADIEKGKSKKLKTVKALVGVTIMEKMTFERDPVAFLERKGYRNVQEENIIKLPKYSLFKLENGRKRLLASARELQKGNEIVLPNHLGTLLYHAKNIHKVDEPKHLDYVDKHKDEFKELLDVVSNFSKKYTLAEGNLEKIKELYAQNNGEDLKELASSFINLLTFTAIGAPATFKFFDKNIDRKRYTSTTEILNATLIHQSITGLYETRIDLNKLGGD

SEQ ID NO: 492 - protein, 1345 aa, Streptococcus mutans; identical to SEQ ID NO: 491
  Streptococcus mutans 8ID3

SEQ ID NO: 493 - protein, 1345 aa, Streptococcus mutans
  Streptococcus mutans A19
MKKPYSIGLDIGTNSVGWSVVTDDYKVPAKKMKVLGNTDKSHIEKNLLGALLFDSGNTAEDRRLKRTARRRYTRRRNRILYLQEIFSEEMGKVDDSFFHRLEDSFLVTEDKRGERHPIFGNLEEEVKYHENFPTIYHLRQYLADNPEKVDLRLVYLALAHIIKFRGHFLIEGKFDTRNNDVQRLFQEFLAVYDNTFENSSLQEQNVQVEEILTDKISKSAKKDRVLKLFPNEKSNGRFAEFLKLIVGNQADFKKHFELEEKAPLQFSKDTYEEELEVLLAQIGDNYAELFLSAKKLYDSILLSGILTVTDVGTKAPLSASMIQRYNEHQMDLAQLKQFIRQKLSDKYNEVFSDVSKDGYAGYIDGKTNQEAFYKYLKGLLNKIEGSGYFLDKIEREDFLRKQRTFDNGSIPHQIHLQEMRAIIRRQAEFYPFLADNQDRIEKLLTFRIPYYVGPLARGKSDFAWLSRKSADKITPWNFDEIVDKESSAEAFINRMTNYDLYLPNQKVLPKHSLLYEKFTVYNELTKVKYKTEQGKTAFFDANMKQEIFDGVFKVYRKVTKDKLMDFLEKEFDEFRIVDLTGLDKENKVFNASYGTYHDLCKILDKDFLDNSKNEKILEDIVLTLTLFEDREMIRKRLENYSDLLTKEQVKKLERRHYTGWGRLSAELIHGIRNKESRKTILDYLIDDGNSNRNFMQLINDDALSFKEEIAKAQVIGETDNLNQVVSDIAGSPAIKKGILQSLKIVDELVKIMGHQPENIVVEMARENQFTNQGRRNSQQRLKGLTDSIKEFGSQILKEHPVENSQLQNDRLFLYYLQNGRDMYTGEELDIDYLSQYDIDHIIPQAFIKDNSIDNRVLTSSKENRGKSDDVPSKDVVRKMKSYWSKLLSAKLITQRKFDNLTKAERGGLTDDDKAGFIKRQLVETRQITKHVARILDERFNTETDENNKKIRQVKIVTLKSNLVSNFRKEFELYKVREINDYHHAHDAYLNAVIGKALLGVYPQLEPEFVYGDYPHFHGHKENKATAKKFFYSNIMNFFKKDDVRIDKNGEIIWKKDEHISNIKKVLSYPQVNIVKKVEEQTGGFSKESILPKGNSDKLIPRKTKKFYWDTKKYGGFDSPIVAYSILVIADIEKGKSKKLKTVKALVGVTIMEKMTFERDPVAFLERKGYRNVQEENIIKLPKYSLFKLENGRKRLLASARELQKGNEIVLPNHLGTLLYHAKNIHKVDEPKHLDYVDKHKDEFKELLDVVSNFSKKYTLAEGNLEKIKELYAQNNGEDLKELASSFINLLTFTAIGAPATFKFFDKNIDRKRYTSTTEILNATLIHQSITGLYETRIDLSKLGGD

SEQ ID NO: 494 - protein, 1345 aa, Streptococcus mutans; identical to SEQ ID NO: 493
  Streptococcus mutans A19

SEQ ID NO: 495 - protein, 1345 aa, Streptococcus mutans; identical to SEQ ID NO: 472
  Streptococcus mutans B

SEQ ID NO: 496 - protein, 1345 aa, Streptococcus mutans; identical to SEQ ID NO: 472
  Streptococcus mutans G123

SEQ ID NO: 497 - protein, 1345 aa, Streptococcus mutans
MKKPYSIGLDIGTNSVGWAVVTDDYKVPAKKMKVLGNTDKSHIKKNLLGALLFDSGNTAEDRRLKRTARRRYTRRRNRILYLQEIFSEEMGKVDDSFFHRLDESFLTDDDKNFDSHPIFGNKAEEDAYHQKFPTIYHLRKHLADSTEKADLRLVYLALAHMIKFRGHFLIEGELNAENTDVQKLFADFVGVYDRTFDDSHLSEITVDASSILTEKISKSRRLEKLINNYPKEKKNTLFGNLIALSLGLQPNFKTNFKLSEDAKLQFSKDTYEEELEVLLAQIGDNYAELFLSAKKLYDSILLSGILTVTDVSTKAPLSASMIQRYNEHQMDLAQLKQFIRQKLSDKYNEVFSDVSKDGYAGYIDGKTNQEAFYKYLKGLLNKIEGSGYFLDKIEREDFLRKQRTFDNGSIPHQIHLQEMRAIIRRQAEFYPFLADNQDRIEKILTFRIPYYVGPLARGKSDFAWLSRKSADKITPWNFDEIVDKESSVEAFINRMTNYDLYLPNQKVLPKHSLLYEKFTVYNELTKVKYKTEQGKTAFFDANMKQEIFDGVFKVYRKVTKDKLMDFLEKEFDEFRIVDLTGLDKENKAFNASYGTYHDLRKILDKDFLDNSKNEKILEDIVLTLTLFEDREMIRKRLKNYSDLLTKEQLKKLERRHYTGWGRLSAELIHGIRNKESRKTILDYLIDDGNSNRNFMQLINDDALSFKEEIAKAQVIGETDNLNQVVSDIAGSPAIKKGILQSLKIVDELVKIMGHQPENIVVEMARENQFTNQGRRNSQQRLKGLTDSIKEFGSQILKEHPVENSQLQNDRLFLYYLQNGRDMYTGEELDIDYLSQYDIDHIIPQAFIKDNSIDNRVLTSSKENRGKSDDVPSKDVVRKMKSYWSKLLSAKLITQRKFDNLTKGERGGLTDDDKAGFIKRQLVETRQITKHVARILDERFNTETDENNKKIRQVKIVTLKSNLVSNFRKEFELYKVREINDYHHAHDAYLNAVIGKALLGVYPQLEPEFVYGDYPHFHGHKENKATAKKFFYSNIMNFFKKDDVRTDKNGEIIWKKDEYISNIKKVLSYPQVNIVKKVEEQTGGFSKESILPKGDSDKLIPRKTKKFYWDTKKYGGFDSPIVAYSILVIADIEKGKSKKLKTVKALVGVTIMEKMTFERDPVAFLERKGYRNVQEENIIKLPKYSLFKLENGRKRLLASARELQKGNEIVLPNHLGTLLYHAKNIHKVDEPKHLDYVDKHKDEFKELLDVVSNFSKKYTLAEGNLEKIKELYAQNNGEDLKELASSFINLLTFTAIGAPATFKFFDKNIDRKRYTSTTEILNATLIHQSITGLYETRIDLSKLGGD

SEQ ID NO: 498 - protein, 1345 aa, Streptococcus mutans
MKKPYSIGLDIGTNSVGWAVVTDDYKVPDKKMKVLGNTDKSHIKKNLLGALLFDSGNTAEDRRLKRTARRRYTRRRNRILYLQEIFSEEMGKVDDSFFHRLEDSFLVTEDKRGERHPIFGNLEEEVKYHENFPTIYHLRQYLADNPEKTDLRLVYLALAHIIKFRGHFLIEGKFDTRNNDVQRLFQEFLAVYDNTFENSSLQEQNVQVEEILTDKISKSAKKDRVLKLFPNEKSNGRFAEFLKLIVGNQADFKKHFELEEKAPLQFSKDIYEEELEVLLAQIGDNYAELFLSAKKLYDSILLSGILTVTDVSTKAPLSASMIQRYNEHQMDLAQLKQFIRQKLSDKYNEVFSDVSKDGYAGYIDGKTNQEAFYKYLKGLLNKIEGSGYFLDKIEREDFLRKQRTFDNGSIPHQIHLQEMRAIIRRQAEFYPFLADNQDRIEKILTFRIPYYVGPLARGKSDFAWLSRKSADKITPWNFDEIVDKESSVEAFINRMTNYDLYLPNQKVLPKHSLLYEKFTVYNELTKVKYKTEQGKTAFFDANMKQEIFDGVFKVYRKVTKDKLMDFLEKEFDEFRIVDLTGLDKENKAFNASYGTYHDLRKILDKDFLDNSKNEKILEDIVLTLTLFEDREMIRKRLKNYSDLLTKEQLKKLERRHYTGWGRLSAELIHGIRNKESRKTILDYLIDDGNSNRNFMQLINDDALSFKEEIAKAQVIGETDNLNQVVSDIAGSPAIKKGILQSLKIVDELVKIMGHQPENIVVEMARENQFTNQGRRNSQQRLKGLTDSIKEFGSQILKEHPVENSQLQNDRLFLYYLQNGRDMYTGEELDIDYLSQYDIDHIIPQAFIKDNSIDNRVLTSSKENRGKSDDVPSKDVVRKMKSYWSKLLSAKLITQRKFDNLTKAERGGLTDDDKAGFIKRQLVETRQITKHVARILDERFYTETDENNKKIRQVKIVTLKSNLVSNFRKEFELYKVREINDYHHAHDAYLNAVIGKALLGVYPQLEPEFVYGDYPHFHGHKENKATAKKFFYSNIMNFFKKDDVRTDKNGEIIWKKDEHISNIKKVLSYPQVNIVKKVEEQTGGFSKESILPKGNSDKLIPRKTKKFYWDTKKYGGFDSPIVAYSILVIADIEKGKSKKLKTVKALVGVTIMEKMTFERDPVAFLERKGYRNVQEENIIKLPKYSLFKLENGRKRLLASARELQKGNEIVLPNHLGTLLYHAKNIHKVDEPKHLDYVDKHKDEFKELLDVVSNFSKKYTLAEGNLEKIKELYAQNNGEDLKELASSFINLLTFTAIGAPATFKFFDKNIDRKRYTSTTEILNATLIHQSITGLYETRIDLSKLGGD

SEQ ID NO: 499 - protein, 1345 aa, Streptococcus mutans
  Streptococcus mutans M21
MKKPYSIGLDIGTNSVGWAVVTDDYKVPAKKMKVLGNTDKSHIKKNLLGALLFDSGNTAEDRRLKRTARRRYTRRRNRILYLQEIFSEEMGKVDDSFFHRLEDSFLVTEDKRGERHPIFGNLEEEVKYHENFPTIYHLRQYLADNPEKTDLRLVYLALAHIIKFRGHFLIEGKFDTRNNDVQRLFQEFLAVYDNTFENSSLQEQNVQVEEILTDKISKSAKKDRVLKLFPNEKSNGRFAEFLKLIVGNQADFKKHFELEEKAPLQFSKDIYEEELEVLLAQIGDNYAELFLSAKKLYDSILLSGILTVTDVSTKAPLSASMIQRYNEHQMDLAQLKQFIRQKLSDKYNEVFSDVSKDGYAGYIDGKTNQEAFYKYLKGLLNKIEGSGYFLDKIEREDFLRKQRTFDNGSIPHQIHLQEMRAIIRRQAEFYPFLADNQDRIEKILTFRIPYYVGPLARGKSDFAWLSRKSADKITPWNFDEIVDKESSVEAFINRMTNYDLYLPNQKVLPKHSLLYEKFTVYNELTKVKYKTEQGKTAFFDANMKQEIFDGVFKVYRKVTKDKLMDFLEKEFDEFRIVDLTGLDKENKAFNASYGTYHDLRKILDKDFLDNSKNEKILEDIVLTLTLFEDREMIRKRLKNYSDLLTKEQLKKLERRHYTGWGRLSAELIHGIRNKESRKTILDYLIDDGNSNRNFMQLINDDALSFKEEIAKAQVIGETDNLNQVVSDIAGSPAIKKGILQSLKIVDELVKIMGHQPENIVVEMARENQFTNQGRRNSQQRLKGLTDSIKEFGSQILKEHPVENSQLQNDRLFLYYLQNGRDMYTGEELDIDYLSQYDIDHIIPQAFIKDNSIDNRVLTSSKENRGKSDDVPSKNVVRKMKSYWSKLLSAKLITQRKFDNLTKAERGGLTDDDKAGFIKRQLVETRQITKHVARILDERFHTETDENNKKIRQVKIVTLKSNLVSNFRKEFELYKVREINDYHHAHDAYLNAVIGKALLGVYPQLEPEFVYGDYPHFHGHKENKATAKKFFYSNIMNFFKKDDVRTDKNGEIIWKKDEHISNIKKVLSYPQVNIVKKVEEQTGGFSKESILPKGNSDKLIPRKTKKFYWDTKKYGGFDSPIVAYSILVIADIEKGKSKKLKTVKALVGVTIMEKMTFERDPVAFLERKGYRNVQEENIIKLPKYSLFKLENGRKRLLASARELQKGNEIVLPNHLGTLLYHAKNIHKVDEPKHLDYVDKHKDEFKELLDVVSNFSKKYTLAEGNLEKIKELYAQNNGEDLKELASSFINLLTFTAIGAPATFKFFDKNIDRKRYTSTTEILNATLIHQSITGLYETRIDLSKLGGD

SEQ ID NO: 500 - protein, 1345 aa, Streptococcus mutans; identical to SEQ ID NO: 499
  Streptococcus mutans M21

SEQ ID NO: 501 - protein, 1345 aa, Streptococcus mutans
  Streptococcus mutans M230
MKKPYSIGLDIGTNSVGWAVVTDDYKVPAKKMKVLGNTDKSHIKKNLLGALLFDSGNTAEDRRLKRTARRRYTRRRNRILYLQEIFSEEMGKVDDSFFHRLEDSFLVTEDKRGERHPIFGNLEEEVKYHENFPTIYHLRQYLADNPEKVDLRLVYLALAHIIKFRGHFLIEGKFDTRNNDVQRLFQEFLAVYDNTFENSSLQEQNVQVEEILTDKISKSAKKDRVLKLFPNEKSNGRFAEFLKLIVGNQADFKKHFELEEKAPLQFSKDTYEEELEVLLAQIGDNYAELFLSAKKLYDSILLSGILTVTDVSTKAPLSASMIQRYNEHQMDLAQLKQFIRQKLSDKYNEVFSDVSKDGYAGYIDGKTNQEAFYKYLKGLLNKIEGSGYFLDKIEREDFLRKQRTFDNGSIPHQIHLQEMRAIIRRQAEFYPFLADNQDRIEKILTFRIPYYVGPLARGKSDFAWLSRKSADKITPWNFDEIVDKESSAEAFINRMTNYDLYLPNQKVLPKHSLLYEKFTVYNELTKVKYKTEQGKTAFFDANMKQEIFDGVFKVYRKVTKDKLMDFLEKEFDEFRIVDLTGLDKENKVFNASYGTYHDLCKILDKDFLDNSKNEKILEDIVLTLTLFEDREMIRKRLENYSDLLTKEQVKKLERRHYTGWGRLSAELIHGIRNKESRKTILDYLIDDGNSNRNFMQLINDDALSFKEEIAKAQVIGETDNLNQVVSDIAGSPAIKKGILQSLKIVDELVKIMGHQPENIVVEMARENQFTNQGRQNSQQRLKGLTDSIKEFGSQILKEHPVENSQLQNDRLFLYYLQNGRDMYTGEELDIDYLSQYDIDHIIPQAFIKDNSIDNRVLTSSKENRGKSDDVPSEDVVRKMKSYWSKLLSAKLITQRKFDNLTKAERGGLTDDDKAGFIKRQLVETRQITKHVARILDERFYTETDENNKKIRQVKIVTLKSNLVSNFRKEFELYKVREINDYHHAHDAYLNAVIGKALLGVYPQLEPEFVYGDYPHFHGHKENKATAKKFFYSNIMNFFKKDDVRTDKNGEIIWKKDEHISNIKKVLSYPQVNIVKKVEEQTGGFSKESILPKGNSDKLIPRKTKKFYWDTKKYGGFDSPIVAYSILVIADIEKGKSKKLKTVKALVGVTIMEKMTFERDPVAFLERKGYRNVQEENIIKLPKYSLFKLENGRKRLLASARELQKGNEIVLPNHLGTLLYHAKNIHKVDEPKHLDYVDKHKDEFKELLDVVSNFSKKYTLAEGNLEKIKELYAQNNGEDLKELASSFINLLTFTAIGAPATFKFFDKNIDRKRYTSTTEILNATLIHQSITGLYETRIDLSKLGGD

SEQ ID NO: 502 - protein, 1345 aa, Streptococcus mutans; identical to SEQ ID NO: 501
  Streptococcus mutans M230

SEQ ID NO: 503 - protein, 1345 aa, Streptococcus mutans
  Streptococcus mutans M2A
MKKPYSIGLDIGTNSVGWAVVTDDYKVPAKKMKVLGNTDKSHIKKNLLGALLFDSGNTAEDRRLKRTARRRYTRRRNRILYLQEIFSEEMGKVDDSFFHRLEDSFLVTEDKRGERHPIFGNLEEEVKYHENFPTIYHLRQYLADNPEKTDLRLVYLALAHIIKFRGHFLIEGKFDTRNNDVQRLFQEFLAVYDNTFENSSLQEQNVQVEEILTDKISKSAKKDRVLKLFPNEKSNGRFAEFLKLIVGNQADFKKHFELEEKAPLQFSKDIYEEELEVLLAQIGDNYAELFLSAKKLYDSILLSGILTVTDVSTKAPLSASMIQRYNEHQMDLAQLKQFIRQKLSDKYNEVFSDVSKDGYAGYIDGKTNQEAFYKYLKGLLNKIEGSGYFLDKIEREDFLRKQRTFDNGSIPHQIHLQEMRAIIRRQAEFYPFLADNQDRIEKILTFRIPYYVGPLARGKSDFAWLSRKSADKITPWNFDEIVDKESSVEAFINRMTNYDLYLPNQKVLPKHSLLYEKFTVYNELTKVKYKTEQGKTAFFDANMKQEIFDGVFKVYRKVTKDKLMDFLEKEFDEFRIVDLTGLDKENKAFNASYGTYHDLRKILDKDFLDNSKNEKILEDIVLTLTLFEDREMIRKRLKNYSDLLTKEQLKKLERRHYTGWGRLSAELIHGIRNKESRKTILDYLIDDGNSNRNFMQLINDDALSFKEEIAKAQVIGETDNLNQVVSDIAGSPAIKKGILQSLKIVDELVKIMGHQPENIVVEMARENQFTNQGRRNSQQRLKGLTDSIKEFGSQILKEHPVENSQLQNDRLFLYYLQNGRDMYTGEELDIDYLSQYDIDHIIPQAFIKDNSIDNRVLTSSKENRGKSDDVPSKDVVRKMKSYWSKLLSAKLITQRKFDNLTKAERGGLTDDDKAGFIKRQLVETRQITKHVARILDERFNTETDENNKKIRQVKIVTLKSNLVSNFRKEFELYKVREINDYHHAHDAYLNAVIGKALLGVYPQLEPEFVYGDYPHFHGHKENKATAKKFFYSNIMNFFKKDDVRTDKNGEIIWKKDEHISNIKKVLSYPQVNIVKKVEEQTGGFSKESILPKGNSYKLIPRKTKKFYWDTKKYGGFDSPIVAYSILVIADIEKGKSKKLKTVKALVGVTIMEKMTFERDPVAFLERKGYRNVQEENIIKLPKYSLFKLENGRKRLLASARELQKGNEIVLPNHLGTLLYHAKNIHKVDEPKHLDYVDKHKDEFKELLDVVSNFSKKYTLAEGNLEKIKELYAQNNGEDLKELASSFINLLTFTAIGAPAAFKFFDKNIDRKRYTSTTEILNATLIHQSITGLYETRIDLSKLGGD

SEQ ID NO: 504 - protein, 1345 aa, Streptococcus mutans; identical to SEQ ID NO: 503
  Streptococcus mutans M2A

SEQ ID NO: 505 - protein, 1345 aa, Streptococcus mutans
  Streptococcus mutans N29
MKKPYSIGLDIGTNSVGWAVVTDDYKVPAKKMKVLGNTDKSHIKKNLLGALLFDSGNTAADRRLKRTARRRYTRRRNRILYLQEIFAEEMSKVDDSFFHRLEDSFLVTEDKRGERHPIFGNLEEEVKYHENFPTIYHLRQYLADNPEKVDLRLVYLALAHIIKFRGHFLIEGKFDTRNNDVQRLFQEFLAVYDNTFENSSLQEQNVQVEEILTDKISKSAKKDRVLKLFPNEKSNGRFAEFLKLIVGNQADFKKHFELEEKAPLQFSKDTYEEELEVLLAQIGDNYAELFLSAKKLYDSILLSGILTVTDVSTKAPLSASMIQRYNEHQMDLAQLKQFIRQKLSDKYNEVFSDVSKDGYAGYIDGKTNQEAFYKYLKGLLNKIEGSGYFLDKIEREDFLRKQRTFDNGSIPHQIHLQEMRAIIRRQAEFYPFLADNQDRIEKILTFRIPYYVGPLARGKSDFAWLSRKSADKITPWNFDEIVDKESSAEAFINRMTNYDLYLPNQKVLPKHSLLYEKFTVYNELTKVKYKTEQGKTAFFDANMKQEIFDGVFKVYRKVTKDKLMDFLEKEFDEFRIVDLTGLDKENKAFNASYGTYHDLRKILDKDFLDNSKNEKILEDIVLTLTLFEDREMIRKRLENYSDLLTKEQVKKLERRHYTGWGRLSAELIHGIRNKESRKTILDYLIDDGNSNRNFMQLINDDALSFKEEIAKAQVIGETDNLNQVVSDIAGSPAIKKGILQSLKIVDELVKIMGHQPENIVVEMARENQFTNQGRRNSQQRLKGLTDSIKEFGSQILKEHPVENSQLQNDRLFLYYLQNGRDMYTGEELDIDYLSQYDIDHIIPQAFIKDNSIDNRVLTSSKENRGKSDDVPSKNVVRKMKSYWSKLLSAKLITQRKFDNLTKAERGGLTDDDKAGFIKRQLVETRQITKHVARILDERFHTETDENNKKIRQVKIVTLKSNLVSNFRKEFELYKVREINDYHHAHDAYLNAVIGKALLGVYPQLEPEFVYGDYPHFHGHKENKATAKKFFYSNIMNFFKKDDVRTDKNGEIIWKKDEHISNIKKVLSYPQVNIVKKVEEQTGGFSKESILPKGNSDKLIPRKTKKFYWDTKKYGGFDSPIVAYSILVIADIEKGKSKKLKTVKALVGVTIMEKMTFERDPVAFLERKGYRNVQEENIIKLPKYSLFKLENGRKRLLASARELQKGNEIVLPNHLGTLLYHAKNIHKVDEPKHLDYVDKHKDEFKELLDVVSNFSKKYTLAEGNLEKIKELYAQNNGEDLKELSSSFINLLTFTAIGAPAAFKFFDKNIDRKRYTSTTEILNATLIHQSITGLYETRIDLSKLGGD

SEQ ID NO: 506 - protein, 1345 aa, Streptococcus mutans; identical to SEQ ID NO: 505
  Streptococcus mutans N29

SEQ ID NO: 507 - protein, 1345 aa, Streptococcus mutans
  Streptococcus mutans N3209
MKKPYSIGLDIGTNSVGWAVVTDDYKVPAKKMKVLGNTDKSHIKKNLLGALLFDSGNTAEDRRLKRTTRRRYTRRRNRILYLQEIFSEEMGKVDDSFFHRLEDSFLVTEDKRGERHPIFGNLEEEVKYHENFPTIYHLRQYLADNPEKTDLRLVYLALAHIIKFRGHFLIEGKFDTRNNDVQRLFQEFLAVYDNTFENSSLQEQNVQVEEILTDKISKSAKKDRVLKLFPNEKSNGCFAEFLKLIVGNQADFKKHFELEEKAPLQFSKDTYEEELEVLLAQIGDNYAELFLSAKKLYDSILLSGILTVTDVSTKAPLSASMIQRYNEHQMDLTQLKQFIRQKLSDKYNEVFSDVSKDGYAGYIDGKTNQEAFYKYLKGLLNKIEGSGYFLDKIEREDFLRKQRTFDNGSIPHQIHLQEMRAIIRRQAEFYPFLADNQDRIEKLLTFRIPYYVGPLASGKSDFAWLSRKSADKITPWNFDEIVDKESSAEAFINRMTNYDLYLPNQKVLPKHSLLYEKFTVYNELTKVKYKTEQGKTAFFDANMKQEIFDGVFKVYRKVTKDKLMDFLEKEFDEFRIVDLTGLDKENKVFNASYGTYHDLCKILDKDFLDNSKNEKILEDIVLTLTLFEDREMIRKRLENYSDLLTKEQVKKLERRHYTGWGRLSAELIHGIRNKESRKTILDYLIDDGNSNRNFMQLINDDALSFKEEIAKAQVIGETDNLNQVVSDIAGSPAIKKGILQSLKIVDELVKIMGHQPENIVVEMARENQFTNQGRRNSQQRLKGLTDSIKEFGSQILKEHPVENSQLQNDRLFLYYLQNGRDMYTGEELDIDYLSQYDIDHIIPQAFIKDNSIDNRVLTSSKENRGKSDDVPSKDVVRKMKSYWSKLLSAKLITQRKFDNLTKAERGGLTDDDKAGFIKRQLVETRQITKHVARILDERFNTETDENNKKIRQVKIVTLKSNLVSNFRKEFELYKVREINDYHHAHDAYLNAVIGKALLGVYPQLEPEFVYGDYPHFHGHKENKATAKKFFYSNIMNFFKKDDVRTDKNGEIIWKKDEHISNIKKVLSYPQVNIVKKVEEQTGGFSKESILPKGNSDKLIPRKTKKFYWDTKKYGGFDSPIVAYSILVIADIEKGKSKKLKTVKALVGVTIMEKMTFERDPVAFLERKGYRNVQEENIIKLPKYSLFKLENGRKRLLASARELQKGNEIVLPNHLGTLLYHAKNIHKVDEPKHLDYVDKHKDEFKELLDVVSNFSKKYTLAEGNLEKIKELYAQNNGEDLKELASSFINLLTFTAIGAPATFKFFDKNIDRKRYTSTTEILNATLIHQSITGLYETRIDLSKLGGD

SEQ ID NO: 508 - protein, 1345 aa, Streptococcus mutans; identical to SEQ ID NO: 507
  Streptococcus mutans N3209

SEQ ID NO: 509 - protein, 1345 aa, Streptococcus mutans
  Streptococcus mutans N66
MKKPYSIGLDIGTNSVGWAVVTDDYKVPAKKMKVLGNTDKSHIKKNLLGALLFDSGNTAEDRRLKRTARRRYTRRRNRILYLQEIFSEEMGKVDDSFFHRLEDSFLVTEDKRGERHPIFGNLEEEVKYHENFPTIYHLRQYLADNPEKTDLRLVYLALAHIIKFRGHFLIEGKFDTRNNDVQRLFQEFLAVYDNTFENSSLQEQNVQVEEILTDKISKSAKKDRVLKLFPNEKSNGRFAEFLKLIVGNQADFKKHFELEEKAPLQFSKDIYEEELEVLLAQIGDNYAELFLSAKKLYDSILLSGILTVTDVSTKAPLSASMIQRYNEHQMDLAQLKQFIRQKLSDKYNEVFSDVSKDGYAGYIDGKTNQEAFYKYLKGLLNKIEGSGYFLDKIEREDFLRKQRTFDNGSIPHQIHLQEMRAIIRRQAEFYPFLADNQDRIEKILTFRIPYYVGPLARGKSDFAWLSRKSADKITPWNFDEIVDKESSAEAFINRMTNYDLYLPNQKVLPKHSLLYEKFTVYNELTKVKYKTEQGKTAFFDANMKQEIFDGVFKVYRKVTKDKLMDFLEKEFDEFRIVDLTGLDKENKAFNASYGTYHDLRKILDKDFLDNSKNEKILEDIVLTLTLFEDREMIRKRLKNYSDLLTKEQLKKLERRHYTGWGRLSAELIHGIRNKESRKTILDYLIDDGNSNRNFMQLINDDALSFKEEIAKAQVIGETDNLNQVVSDIAGSLAIKKGILQSLKIVDELVKIMGHQPENIVVEMARENQFTNQGRRNSQQRLKGLTDSIKEFGSQILKEHPVENSQLQNDRLFLYYLQNGRDMYTGEELDIDYLSQYDIDHIIPQAFIKDNSIDNRVLTSSKENRGKSDDVPSKDVVRKMKSYWSKLLSAKLITQRKFDNLTKGERGGLTDDDKAGFIKRQLVETRQITKHVARILDERFNTETDENNKKIRQVKIVTLKSNLVSNFRKEFELYKVREINDYHHAHDAYLNAVIGKALLGVYPQLEPEFVYGDYPHFHGHKENKATAKKFFYSNIMNFFKKDDVRTDKNGEIIWKKDEYISNIKKVLSYPQVNIVKKVEEQTGGFFKESILPKGDSDKLIPRKTKKFYWDTKKYGGFDSPIVAYSILVIADIEKGKSKKLKTVKALVGVTIMEKMTFERDPVAFLERKGYRNVQEENIIKLPKYSLFKLENGRKRLLASARELQKGNEIVLPNHLGTLLYHAKNIHKVDEPKHLDYVDKHKDEFKELLDVVSNFSKKYTLAEGNLEKIKELYAQNNGEDLKELASSFINLLTFTAIGAPATFKFFDKNIDRKRYTSTTEILNATLIHQSITGLYETRIDLSKLGGD

SEQ ID NO: 510 - protein, 1345 aa, Streptococcus mutans; identical to SEQ ID NO: 509
  Streptococcus mutans N66

SEQ ID NO: 511 - protein, 1350 aa, Streptococcus mutans
  Streptococcus mutans NFSM1
MKKPYSIGLDIGTNSVGWAVVTDDYKVPAKKMTVLGNTDKSHIKKNLLGALLFDSGNTAADRRLKRTARRRYTRRRNRILYLQEIFAEEMSKVDDSFFHRLEDSFLVTEDKRGERHPIFGNLEEEVKYHENFPTIYHLRQYLADNPEKVDLRLVYLALAHIIKFRGHFLIEGKFDTRNNDVQRLFQEFLAVYDNTFENSSLQEQNVQVEEILTDKISKSAKKDRVLKLFPNEKSNGRFAEFLKLIVGNQADFKKHFELEEKTPLQFSKDTYEEELEVLLAQIGDNYAELFLSAKKLYDSILLSGILTVTDVSTKAPLSASMIQRYNEHQMDLAQLKQFIRQKLSDKYNEVFSDVSKDGYAGYIDGKTNQEAFYKYLKGLLNKIEGSGYFLDKIEREDFLRKQRTFDNGSIPHQIHLQEMRAIIRRQAEFYPFLADNQDRIEKILTFRIPYYVGPLARGKSDFAWLSRKSADKITPWNFDEIVDKESSAEAFINRMTNYDLYLPNQKVLPKHSLLYEKFTVYNELTKVKYKTEQGKTAFFDANMKQEIFDGVFKVYRKVTKDKLMDFLEKEFDEFRIVDLTGLDKENKAFNASYGTYHDLRKILDKDFLDNSKNEKILEDIVLTLTLFEDREMIRKRLENYSDLLTKEQVKKLERRHYTGWGRLSAELIHGIRNKESRKTILDYLIDDGNSNRNFMQLINDDALSFKEEIAKAQVIGETDNLNQVVSDIAGSPAIKKGILQSLKIVDELVKIMGHQPENIVVEMARENQFTNQGRRNSQQRLKGLTDSIKEFGSQILKEHPVENSQLQNDRLFLYYLQNGRDMYTGEELDIDYLSQYDIDHIIPQAFIKDNSIDNRVLTSSKENRGKSDDVPSEDVVNRMRPFWNKLLSSGLISQRKYNNLTKKELTPDDKAGFIKRQLVETRQITKHVARMLDERFNKEFDDNNKRIRRVKIVTLKSNLVSSFRKEFELYKVREINDYHHAHDAYLNAVVVKALLVKYPKLEPEFVYGEYPKYNSYRERKTATQKMFFYSNIMNMFKSKVKLADDQIVERPMIEVNDETGEIAWDKTKHITTVKKVLSYPQVNIVKKVEEQTIGQNGGLFDDNPKSPLEVIPSKLVPLKKALNPEKYGGYQKPTTAYPILLIVDTKQLIPISVMDKKRFEQNPVKFLKDKGYQQIEKNNFVKLPKYTLVDIGNGIKRLWASSKEVHKGNQLVVSKKSQDLLYHAHHLDNDYSNEYVKNHYQQFDILFNEITSFSKKCKLGKEHIQKIEEAYSKERDSASIEELADGFIKLLGFTQLGATSPFSFLGIKLNQKQYTGKKDYLLPCMEATLIHQSITGLYETRIDLSKLGGD

SEQ ID NO: 512 - protein, 1350 aa, Streptococcus mutans; identical to SEQ ID NO: 511
  Streptococcus mutans NFSM1

SEQ ID NO: 513 - protein, 1345 aa, Streptococcus mutans; identical to SEQ ID NO: 485
  Streptococcus mutans NLML1

SEQ ID NO: 514 - protein, 1338 aa, Streptococcus mutans
  Streptococcus mutans NLML4
MDLIGTNSVGWAVVTDDYKVPAKKMKVLGNTDKSHIKKNLLGALLFDSGNTAADRRLKRTARRRYTRRRNRILYLQEIFAEEMSKVDDSFFHRLEDSFLVTEDKRGERHPIFGNLEEEVKYHENFPTIYHLRQYLADNPEKVDLRLVYLALAHIIKFRGHFLIEGKFDTRNNDVQRLFQEFLAVYDNTFENSSLQEQNVQVEEILTDKISKSAKKDRVLKLFPNEKSNGRFAEFLKLIVGNQADFKKHFELEEKAPLQFSKDTYEEELEVLLAQIGDNYAELFLSAKKLYDSILLSGILTVTDVSTKAPLSASMIQRYNEHQMDLAQLKQFIRQKLSDKYNEVFSDVSKDGYAGYIDGKTNQEAFYKYLKGLLNKIEGSGYFLDKIEREDFLRKQRTFDNGSIPHQIHLQEMRAIIRRQAEFYPFLADNQDRIEKILTFRIPYYVGPLARGKSDFAWLSRKSADKITPWNFDEIVDKESSAEAFINRMTNYDLYLPNQKVLPKHSLLYEKFTVYNELTKVKYKTEQGKTAFFDANMKQEIFDGVFKVYRKVTKDKLMDFLEKEFDEFRIVDLTGLDKENKAFNASYGTYHDLRKILDKDFLDNSKNEKILEDIVLTLTLFEDREMIRKRLENYSDLLTKEQVKKLERRHYTGWGRLSAELIHGIRNKESRKTILDYLIDDGNSNRNFMQLINDDALSFKEEIAKAQVIGETDNLNQVVSDIAGSPAIKKGILQSLKIVDELVKIMGHQPENIVVEMARENQFTNQGRRNSQQRLKGLTDSIKEFGSQILKEHPVEHSQLQNDRLFLYYLQNGRDMYTGEELDIDYLSQYDIDHIIPQAFIKDNSIDNRVLTSSKENRGKSDDVPSKNVVRKMKSYWSKLLSAKLITQRKFDNLTKAERGGLTDDDKAGFIKRQLVETRQITKHVARILDERFHTETDENNKKIRQVKIVTLKSNLVSNFRKEFELYKVREINDYHHAHDAYLNAVIGKALLGVYPQLEPEFVYGDYPHFHGHKENKATAKKFFYSNIMNFFKKDDVRTDKNGEIIWKKDEHISNIKKVLSYPQVNIVKKVEEQTGGFSKESILPKGNSDKLIPRKTKKFYWDTKKYGGFDSPIVAYSILVIADIEKGKSKKLKTVKALVGVTIMEKMTFERDPVAFLERKGYRNVQEENIIKLPKYSLFKLENGRKRLLASARELQKGNEIVLPNHLGTLLYHAKNIHKVDEPKHLDYVDKHKDEFKELLDVVSNFSKKYTLAEGNLEKIKELYAQNNGEDLKELASSFINLLTFTAIGAPATFKFFDKNIDRKRYTSTTEILNATLIHQSITGLYETRIDLSKLGGD

SEQ ID NO: 515 - protein, 1338 aa, Streptococcus mutans; identical to SEQ ID NO: 514
  Streptococcus mutans NLML4

SEQ ID NO: 516 - protein, 1128 aa, Streptococcus mutans
  Streptococcus mutans NLML5
MANSKILGLDIGIASVGVGIIDKETGKIIHVNSRIFPAATADSNVERRGFRQGRRLVRRKKHRKVRLADLFLDSNLLTDFSKVSLNLNPYQLRVKGLNEELSNEELFIALKSIVSRRGISYLDDASEDSGANSSEYGKAVEENRKLLEDRTPGQIQLERFEKYGKVRGDFTVVENGENHRLINVFSTSAYKKEAERILRRQQEFNIRIADEFIEAYLTILTGKRKYYHGPGNEKSRTDYGRFRTDGTTLDNIFGILIGKCTFYPDEYRAAKASYTAQEFNLLNDLNNLTVPTETKKLSEEQKRQIIEHAKTVKTLGAPTLLKYIAKLVGCSADDIKGYRIDKSDKPEIHTFEAYRKMRTMELIKVADLSRESLDALAHILTLNTEREGIEEAIRDRFTNKEFNQEQINELVLFRKNNSSLFGKGWHNFSLKLMKELIPELYETSEEQMTILTRLGKQRVKKSSNRTNYIDEKELTEEIYNPVVAKSVRQAIKIINLATKKYGVFDNIVIEMARESNEDDEKKAIQNAQKANEDEKEAALLKAAHQFNGKEELPDSIFHGHKELLTKIRLWHQQGEKCLYTGKTIFINDLIHNPYKYEIDHILPLSLSFDDSLANKVLVLSTANQEKGQRTPFQSLDSMDGAWTYREFKAYVKGLKTLSNKKKDYLLNEEDINKNEVKQKFIERNLVDTRYSSRVVLNTLQDFYKKREFDTKISVVRGQFTSQIRRKWRIEKTRETYHHHAVDALIIAASSQLNLWKKQNNPLISYKEDQFVDPETGEILSLSDDEYKELVFKAPYDHFVDTLKSKKFEDSILFSYQVDSKYNRKISDATIYGTRKARLGKDSQEETYVLGKIKDIYSQKGYEDFIKKYKKDKTQFLMYHKDPQTFEKVIEEILKTYSDKELNEKGKEVPCNPFEKYRQENGPVRKYSKKGNGPEIKSIKYYDNKLGNHIDITPNNSHHQVVLQSLKPWRTDVYFNPKSGKYELMGLKYSDLRFEKVSGDYGISVKKYNEIKSKEGVDENSEFKFTLYKNDLILIKDTESGEQELFRFLSRTMPNQKHYVELKPYDKSKFEGHQKLMDIFGEVAKGGQCLKGLNKSNISIYKVKTDVLGNKYFIKKEGDQPQLNFKKKI

SEQ ID NO: 517 - protein, 1128 aa, Streptococcus mutans; identical to SEQ ID NO: 516
  Streptococcus mutans NLML5

SEQ ID NO: 518 - protein, 1125 aa, Streptococcus mutans
  Streptococcus mutans NLML8
MTNGKILGLDIGIASVGVGIINAKTGNVEHASSRIFPAANADNNVERRSARGGRRLIRRKKHRLKRVEDLFEKYNIDTDFSNLNLNPYQLRVKGLNEQLSNEELFAILKNIAKRRGISYLDDAEDDSVGSSDYAKAIDENRKLLKKQTPGEIQLKRLEKYGQLRGNFTIQDENGEYHRLINVFSTSDYVKEARRILETQSYYNKFITESFVEDYIKILQGKRKYYVGPGNEKSRTDYGIYRTDGETLDNLFGILIGKCGFYPEEYRAAKASYTAQEYNFLNDLNNLTVPTETKKLSTEQKYQLVDFAKTASTLEAAKLLKEIAKLVGCQVEEIKGYRLDNKDKPDLHTFEPFRKLKSNLTTIAVENLSITTLDTLAHILTLNTEREGIEEAIQKELPNIFSDEQITGIIAVRKKNSQIFGKGWHSFSIKLMKELIPELYETSEEQMTILIRLKKVKTNSKITNRTKYINEQEVTDEIYNPVVSKSIRQTVKIINAAIKKYGAFDQIVIEMPRESNEEDERKFIADLQKSNAKEKDDAMKQAALLYNGKAELPHGVFHGHKELATKIRLWYQQGERCLYSGKHIDIHDLIHNQHMFEIDHVLPLSLSFDDSLANKVLVYSWANQEKGQRTPFQALPQMASAWSFRELRDYISKQKGISKKKRDYLLTEQDINKVEVKQKFIERNLVDTRYVSRVVLNTLQDALKVMNKETKISVIRGQFTSQLRRQWRIDKSRETYHHHAVDALIIAASSQLRLWKKQNNPMFAEDKHGQKINLDTGEVLSDDAYKELVYQAPYQGFVNTISSKSFEDEILFSYQVDSKVNRKISDATIYATRQAQLGKDKKEETYVLGKIKDIYSQAGYDAFRKKYDKDKAVFLMYQKDPETWEKVIEVILRDYKELDDKGKEIGNPFERYKVKHGFVRKYSRKNKGTEIKSLKYYDNKLGNHIDITPNNSKHSVVLQSINPWRADLYFNPETTKYELMGLKYADLSFEKGTGKYSISREKYDEIKEREGISSKSEFKFTLYKNDLILVKDIGNHKELIARFNSKNDTSKHYVELKPWNKAKFDSEEELIPAFGKVAKSGQFIKGLNKPDLSIYKVKTDILGHKYYIKKEGDKPKLNFENKIKNK

SEQ ID NO: 519 - protein, 1125 aa, Streptococcus mutans; identical to SEQ ID NO: 518
  Streptococcus mutans NLML8

SEQ ID NO: 520 - protein, 1345 aa, Streptococcus mutans
  Streptococcus mutans NLML9
MKKPYSIGLDIGTNSVGWAVVTDDYKVSAKKMKVLGNTDKSHIKKNLLGALLFDSGNTAEDRRLKRTARRRYTRRRNRILYLQEIFAEEMSKVDDSFFHRLEDSFLVTEDKRGERHPIFGNLEEEVKYHENFPTIYHLRQYLADNPEKVDLRLVYLALAHIIKFRGHFLIEGKFDTRNNDVQRLFQEFLAVYDNTFENSSLQEQNVQVEEILTDKISKSAKKDRVLKLFPNEKSNGRFAEFLKLIVGNQADFKKHFELEEKAPLQFSKDTYEEELEVLLAQIGDNYAELFLSAKKLYDSILLSGILTVTDVSTKAPLSASMIQRYNEHQMDLAQLKQFIRQKLSDKYNEVFSDVSKDGYAGYIDGKTNQEAFYKYLKGLLNKIEGSGYFLDKIEREDFLRKQRTFDNGSIPHQIHLQEMRAIIRRQAEFYPFLADNQDRIEKILTFRIPYYVGPLARGKSDFAWLSRKSADKITPWNFDEIVDKESSAEAFINRMTNYDLYLPNQKVLPKHSLLYEKFTVYNELTKVKYKTEQGKTAFFDANMKQEIFDGVFKVYRKVTKDKLMDFLEKEFDEFRIVDLTGLDKENKAFNASYGTYHDLRKILDKDFLDNSKNEKILEDIVLTLTLFEDREMIRKRLENYSDLLTKEQVKKLERRHYTGWGRLSAELIHGIRNKESRKTILDYLIDDGNSNRNFMQLINDDALSFKEEIAKAQVIGETDNLNQVVSDIAGSPAIKKGILQSLKIVDELVKIMGHQPENIVVEMARENQFTNQGRRNSQQRLKGLTDSIKEFGSQILKEHPVEHSQLQNDRLFLYYLQNGRDMYTGEELDIDYLSQYDIDHIIPQAFIKDNSIDNRVLTSSKENRGKSDDVPSKNVVRKMKSYWSKLLSAKLITQRKFDNLTKAERGGLTDDDKAGFIKRQLVETRQITKHVARILDERFHTETDENNKKIRQVKIVTLKSNLVSNFRKEFELYKVREINDYHHTHDAYLNAVIGKALLGVYPQLEPEFVYGDYPHFHGHKENKATAKKFFYSNIMNFFKKDDVRTDKNGEIIWKKDEHISNIKKVLSYPQVNIVKKVEEQTGGFSKESILPKGNSDKLIPRKTKKFYWDTKKYGGFDSPIVAYSILVIADIEKGKSKKLKTVKALVGVTIMEKMTFERDPVAFLERKGYRNVQEENIIKLPKYSLFKLENGRKRLLASARELQKGNEIVLPNHLGTLLYHAKNIHKVDEPKHLDYVDKHKDEFKELLDVVSNFSKKYTLAEGNLEKIKELYAQNNGEDLKELASSFINLLTFTAIGAPATFKFFDKNIDRKRYTSTTEILNATLIHQSITGLYETRIDLSKLGGD

SEQ ID NO: 521 - protein, 1345 aa, Streptococcus mutans; identical to SEQ ID NO: 520
  Streptococcus mutans NLML9

SEQ ID NO: 522 - protein, 1355 aa, Streptococcus mutans
  Streptococcus mutans NMT4863
MKKPYSIGLDIGTNSVGWAVVTDDYKVPAKKMKVLGNTDKSHIKKNLLGALLFDSGNTAEDRRLKRTARRRYTRRRNRILYLQEIFAEEMSKVDDSFFHRLDESFLTDDDKNFDSHPIFGNKAEEDAYHQKFPTIYHLRKHLADSTEKADLRLVYLALAHMIKFRGHFLIEGELNAENTDVQKLFADFVGVYDRTFDDSHLSEITVDASSILTEKISKSRRLEKLINNYPKEKKNTLFGNLIALSLGLQPNFKTNFKLSEDAKLQFSKDTYEEDLEELLGKIGDDYADLFTLAKNLYDAILLSGILTADDSSTKAPLSASMIKRYAEHHEDLEKLKEFIKANKPELYHDIFKDETKNGYAGYIENGVKQDEFYKYLKNTLSKITGSDYFLDQIEREDFLRKQRTFDNGSIPHQIHLQEMHAILRRQGDYYPFLKENQDRIEKILTFRIPYYVGPLARKNSRFAWAEYHSDEAVTPWNFDQVIDKESSAQAFIEHMTNNDLYLPNEKVLPKHSPLYEKYTVYNELTKIKYVTEIGEAKFFDANLKQEIFDGLFKHERKVTKKKLRTFLDKNFDEFRIVDIQGLDKETETFNASYATYQDLLKVIKDKVFMDNPENAEILENIVLTLTLFEDREMIKQRLAKYADVFDKKVIDQLARRHYTGWGRLSAKLLNGIRDKQSCKTIMDYLIDDAQSNRNLMQLITDDNLTFKDDIVKAQYVDNSDDLHQVVQSLAGSPAIKKGILQSLKIVDELVKVMGKEPEQIVVEMARENQTTAKGRRNSQQRYKRLKEAIKSLDRDLNHKILKEHPTDNQALQNNRLFLYYLQNGRDMYTGESLDINRLSDYDIDHVIPQAFIKDNSIDNRVLTSSKANRGKSDDVPSEDVVNRMRPFWNKLLSSGLISQRKYNNLTKKELTLDDKAGFIKRQLVETRQITKHVARMLDERFNKEFDDNNKRIRRVKIVTLKSNLVSSFRKEFELYKVREINDYHHAHDAYLNAVVVKALLVKYPKLEPEFVYGEYPKYNSYRERKTATQKMFFYSNIMNMFKSKVKLADDQIVERPMIEVNDETGEIAWDKTKHITTVKKVLSYPQVNIVKKVEEQTIGQNGGLFDDNPKSPLEVIPSKLVPLKKALNPEKYGGYQKPTTAYPILLIVDTKQLIPISVMDKKRFEQNPVKFLKDKGYQQIEKNNFVKLPKYTLVDIGNGIKRLWASSKEVHKGNQLVVSKKSQDLLYHAHHLDNDYSNEYVKNHYQQFDILFNEITSFSKKCKLGKEHIQKIEEAYSKERDFASIEELADGFIKLLGFTQLGATSPFSFLGIKLNQKQYTGKKDYLLPCMEATLIHQSITGLYETRIDLSKLGGD

SEQ ID NO: 523 - protein, 1355 aa, Streptococcus mutans; identical to SEQ ID NO: 522
  Streptococcus mutans NMT4863

SEQ ID NO: 524 - protein, 1345 aa, Streptococcus mutans
MKKPYSIGLDIGTNSVGWAVVTDDYKVPAKKMKVLGNTDKSHIKKNLLGALLFDSGNTAADRRLKRTARRRYTRRRNRILYLQEIFAEEMSKVDDSFFHRLEDSFLVTEDKRGERHPIFGNLEEEVKYHENFPTIYHLRQYLADNPEKVDLRLVYLALAHIIKFRGHFLIEGKFDTRNNDVQRLFQEFLAVYDNTFENSSLQEQNVQVEEILTDKISKSAKKDRVLKLFPNEKSNGRFAEFLKLIVGNQADFKKHFELEEKAPLQFSKDTYEEELEVLLAQIGDNYAELFLSAKKLYDSILLSGILTVTDVSTKAPLSASMIQRYNEHQMDLAQLKQFIRQKLSDKYNEVFSDVSKDGYAGYIDGKTNQEAFYKYLKGLLNKIEGSGYFLDKIEREDFLRKQRTFDNGSIPHQIHLQEMRAIIRRQAEFYPFLADNQDRIEKILTFRIPYYVGPLARGKSDFAWLSRKSADKITPWNFDEIVDKESSAEAFINRMTNYDLYLPNQKVLPKHSLLYEKFTVYNELTKVKYKTEQGKTAFFDANMKQEIFDGVFKVYRKVTKDKLMDFLEKEFDEFRIVDLTGLDKENKAFNASYGTYHDLRKILDKDFLDNSKNEKILEDIVLTLTLFEDREMIRKRLENYSDLLTKEQVKKLERRHYTGWGRLSAELIHGIRNKESRKTILDYLIDDGNSNRNFMQLINDDALSFKEEIAKAQVIGETDNLNQVVSDIAGSPAIKKGILQSLKIVDELVKIMGHQPENIVVEMARENQFTNQGRRNSQQRLKGLTDSIKEFGSQILKEHPVKHSQLQNDRLFLYYLQNGRDMYTGEELDIDYLSQYDIDHIIPQAFIKDNSIDNRVLTSSKENRGKSDDVPSKNVVRKMKSYWSKLLSAKLITQRKFDNLTKAERGGLTDDDKAGFIKRQLVETRQITKHVARILDERFHTETDENNKKIRQVKIVTLKSNLVSNFRKEFELYKVREINDYHHAHDAYLNAVIGKALLGVYPQLEPEFVYGDYPHFHGHKENKATAKKFFYSNIMNFFKKDDVRTDKNGEIIWKKDEHISNIKKVLSYPQVNIVKKVEEQTGGFSKESILPKGNSDKLIPRKTKKFYWDTKKYGGFDSPIVAYSILVIADIEKGKSKKLKTVKALVGVTIMEKMTFERDPVAFLERKGYRNVQEENIIKLPKYSLFKLENGRKRLLASARELQKGNEIVLPNHLGTLLYHAKNIHKVDEPKHLDYVDKHKDEFKELLDVVSNFSKKYTLAEGNLEKIKELYAQNNGEDLKELASSFINLLTFTAIGAPATFKFFDKNIDRKRYTSTTEILNATLIHQSITGLYETRIDLSKLGGD

SEQ ID NO: 525 - protein, 1345 aa, Streptococcus mutans; identical to SEQ ID NO: 471
  Streptococcus mutans NV1996

SEQ ID NO: 526 - protein, 1345 aa, Streptococcus mutans
  Streptococcus mutans NVAB
MKKPYSIGLDIGTNSVGWAVVTDDYKVPAKKMKVLGNTDKSHIKKNLLGALLFDSGNTAADRRLKRTARRRYTRRRNRILYLQEIFAEEMSKVDDSFFHRLEDSFLVTEDKRGERHPIFGNLEEEVKYHENFPTIYHLRQYLADNPEKVDLRLVYLALAHIIKFRGHFLIEGKFDTRNNDVQRLFQEFLAVYDNTFENSSLQEQNVQVEEILTDKISKSAKKDRVLKLFPNEKSNGRFAEFLKLIVGNQADFKKHFELEEKAPLQFSKDTYEEELEVLLAQIGDNYAELFLSAKKLYDSILLSGILTVTDVSTKAPLSASMIQRYNEHQMDLAQLKQFIRQKLSDKYNEVFSDVSKDGYAGYIDGKTNQEAFYKYLKGLLNKIEGSGYFLDKIEREDFLRKQRTFDNGSIPHQIHLQEMRAIIRRQAEFYPFLADNQDRIEKILTFRIPYYVGPLARGKSDFAWLSRKSADKITPWNFDEIVDKESSAEAFINRMTNYDLYLPNQKVLPKHSLLYEKFTVYNELTKVKYKTEQGKTAFFDANMKQEIFDGVFKVYRKVTKDKLMDFLEKEFDEFRIVDLTGLDKENKVFNASYGTYHDLCKILDKDFLDNSKNEKILEDIVLTLTLFEDREMIRKRLENYSDLLTKEQVKKLERRHYTGWGRLSAELIHGIRNKESRKTILDYLIDDGNSNRNFMQLINDDALSFKEEIAKAQVIGETDNLNQVVSDIAGSPAIKKGILQSLKIVDELVKIMGHQPENIVVEMARENQFTKQGRRNSQQRLKGLTDSIKEFGSQILKEHPVENSQLQNDRLFLYYLQNGRDMYTGEELDIDYLSQYDIDHIIPQAFIKDNSIDNRVLTSSKENRGKSDDVPSKDVVRKMKSYWSKLLSAKLITQRKFDNLTKAERGGLTDDDKAGFIKRQLVETRQITKHVARILDERFYTETDENNKKIRQVKIVTLKSNLVSNFRKEFELYKVREINDYHHAHDAYLNAVIGKALLGVYPQLEPEFVYGDYPHFHGHKENKATAKKFFYSNIMNFFKKDDVRTDKNGEIIWKKDEHISNIKKVLSYPQVNIVKKVEEQTGGFSKESILPKGNSDKLIPRKTKKFYWDTKKYGGFDSPIVAYSILVIADIEKGKSKKLKTVKALVGVTIMEKMTFERDPVAFLERKGYRNVQEENIIKLPKYSLFKLENGRKRLLASARELQKGNEIVLPNHLGTLLYHAKNIHKVDEPKHLDYVDKHKDEFKELLDVVSNFSKKYTLAEGNLEKIKELYAQNNGEDLKELASSFINLLTFTAIGAPATFKFFDKNIDRKRYTSTTEILNATLIHQSITGLYETRIDLSKLGGD

SEQ ID NO: 527 - protein, 1345 aa, Streptococcus mutans; identical to SEQ ID NO: 526
  Streptococcus mutans NVAB

SEQ ID NO: 528 - protein, 1345 aa, Streptococcus mutans
  Streptococcus mutans R221
MKKPYSIGLDIGTNSVGWAVVTDDYKVPAKKMKVLGNTDKSHIKKNLLGALLFDSGNTAEDRRLKRTARRRYTRRRNRILYLQEIFSEEMGKVDDSFFHRLEDSFLVTEDKRGERHPIFGNLEEEVKYHENFPTIYHLRQYLADNPEKTDLRLVYLALAHIIKFRGHFLIEGKFDTRNNDVQRLFQEFLAVYDNTFENSSLQEQNVQVEEILTDKISKSAKKDRVLKLFPNEKSNGRFAEFLKLIVGNQADFKKHFELEEKAPLQFSKDIYEEELEVLLAQIGDNYAELFLSAKKLYDSILLSGILTVTDVSTKAPLSASMIQRYNEHQMDLAQLKQFIRQKLSDKYNEVFSDVSKDGYAGYIDGKTNQEAFYKYLKGLLNKIEGSGYFLDKIEREDFLRKQRTFDNGSIPHQIHLQEMRAIIRRQAEFYPFLADNQDRIEKILTFRIPYYVGPLARGKSDFAWLSRKSADKITPWNFDEIVDKESSVEAFINRMTNYDLYLPNQKVLPKHSLLYEKFTVYNELTKVKYKTEQGKTAFFDANMKQEIFDGVFKVYRKVTKDKLMDFLEKEFDEFRIVDLTGLDKENKAFNASYGTYHDLRKILDKDFLDNSKNEKILEDIVLTLTLFEDREMIRKRLKNYSDLLTKEQLKKLERRHYTGWGRLSAELIHGIRNKESRKTILDYLIDDGNSNRNFMQLINDDALSFKEEIAKAQVIGETDNLNQVVSDIAGSPAIKKGILQSLKIVDELVKIMGHQPENIVVEMARENQFTNQGRRNSQQRLKGLTDSIKEFGSQILKEHPVENSQLQNDRLFLYYLQNGRDMYTGEELDIDYLSQYDIDHIIPQAFIKDNSIDNRVLTSSKENRGKSDDVPSKDVVRKMKSYWSKLLSAKLITQRKFDNLTKAERGGLTDDDKAGFIKRQLVETRQITKHVARILDERFNTETDENNKKIRQVKIVTLKSNLVSNFRKEFELYKVREINDYHHAHDAYLNAVIGKALLGVYPQLEPEFVYGDYPHFHGHKENKATAKKFFYSNIMNFFKKDDVRTDKNGEIIWKKDEHISNIKKVLSYPQVNIVKKVEEQTGGFSKESILPKGNSDKLIPRKTKKFYWDTKKYGGFDSPIVAYSILVIADIEKGKSKKLKTVKALVGVTIMEKMTFERDPVAFLERKGYRNVQEENIIKLPKYSLFKLENGRKRLLASARELQKGNEIVLPNHLGTLLYHAKNIHKVDEPKHLDYVDKHKDEFKELLDVVSNFSKKYTLAEGNLEKIKELYAQNNGEDLKELASSFINLLTFTAIGAPATFKFFDKNIDRKRYTSTTEILNATLIHQSITGLYETRIDLNKLGGD

SEQ ID NO: 529 - protein, 1345 aa, Streptococcus mutans; identical to SEQ ID NO: 528
  Streptococcus mutans R221

SEQ ID NO: 530 - protein, 1345 aa, Streptococcus mutans
  Streptococcus mutans S1B
MKKPYSIGLDIGTNSVGWAVVTDDYKVPAKKMKVLGNTDKSHIKKNLLGALLFDSGNTAEDRRLKRTARRRYTRRRNRILYLQEIFSEEMGKVDDSFFHRLDESFLTDDDKNFDSYPIFGNKAEEDAYHQKFPTIYHLRKHLADSTEKADLRLVYLALAHMIKFRGHFLIEGELNAENTDVQKLFADFVGVYDRTFDDSHLSEITVDASSILTEKISKSRRLEKLINNYPKEKKNTLFRNLVALSLGLQPNFKTNFKLSEDAKLQFSKDTYEEDLEELLGKIGDDYADLFTLAKNLYDAILLSGILTADDSSTKAPLSASMIKRYAEHHEDLEKLKEFIKANKPELYHDIFKDETKNGYAGYIENGVKQDEFYKYLKNTLSKIAGSDYFLDKIEREDFLRKQRTFDNGSIPHQIHLQEMHAILRRQGDYYPFLKENQDRIEKILTFRIPYYVGPLARGKSDFAWLSRKSADKITPWNFDEIVDKESSVEAFINRMTNYDLYLPNQKVLPKHSLLYEKFTVYNELTKVKYKTEQGKTAFFDANMKQEIFDGVFKVYRKVTKDKLMDFLEKEFDEFRIVDLTGLDKENKAFNASYGTYHDLRKILDKDFLDNSKNEKILEDIVLTLTLFEDREMIRKRLKNYSDLLTKEQLKKLERRHYTGWGRLSAELIHGIRNKESRKTILDYLIDDGNSNRNFMQLINDDALSFKEEIAKAQVIGETDNLNQVVSDIAGSPAIKKGILQSLKIVDELVKIMGHQPENIVVEMARENQFTNQGRRNSQQRLKGLTDSIKEFGSQILKEHPVENSQLQNDRLFLYYLQNGRDMYTGEELDIDYLSQYDIDHIIPQAFIKDNSIDNRVLTSSKENRGKSDDVPSKDVVRKMKSYWSKLLSAKLITQRKFDNLTKGERGGLTDDDKAGFIKRQLVETRQITKHVARILDERFNTETDENNKKIRQVKIVTLKSNLVSNFRKEFELYKVREINDYHHAHDAYLNAVIGKALLGVYPQLEPEFVYGDYPHFHGHKENKATAKKFFYSNIMNFFKKDDVRTDKNGEIIWKKDEYISNIKKVLSYPQVNIVKKVEEQTGGFSKESILPKGDSDKLIPRKTKKFYWDTKKYGGFDSPIVAYSILVIADIEKGKSKKLKTVKALVGVTIMEKMTFERDPVAFLERKGYRNVQEENIIKLPKYSLFKLENGRKRLLASARELQKGNEIVLPNHLGTLLYHAKNIHKVDEPKHLDYVDKHKDEFKELLDVVSNFSKKYTLAEGNLEKIKELYAQNNGEDLKELASSFINLLTFTAIGAPATFKFFDKNIDRKRYTSTTEILNATLIHQSITGLYETRIDLSKLGGD

SEQ ID NO: 531 - protein, 1345 aa, Streptococcus mutans; identical to SEQ ID NO: 530
  Streptococcus mutans S1B

SEQ ID NO: 532 - protein, 1345 aa, Streptococcus mutans; identical to SEQ ID NO: 471
  Streptococcus mutans SF1

SEQ ID NO: 533 - protein, 1345 aa, Streptococcus mutans
  Streptococcus mutans SF14
MKKPYSIGLDIGTNSVGWAVVTDDYKVPAKKMKVLGNTDKSHIKKNLLGALLFDSGNTAEDRRLKRTARRRYTRRRNRILYLQEIFSEEMGKVNDSFFHRLEDSFLVTEDKRGERHPIFGNLEEEVKYHENFPTIYHLRQYLADNPEKVDLRLVYLALAHIIKFRGHFLIEGKFDTRNNDVQRLFQEFLAVYDNTFENSSLQEQNVQVEEILTDKISKSAKKDRVLKLFPNEKSNGRFAEFLKLIVGNQADFKKHFELEEKAPLQFSKDTYEEELEVLLAQIGDNYAELFLSAKKLYDSILLSGILTVTDVSTKAPLSASMIQRYNEHQMDLAQLKQFIRQKLSDKYNEVFSDVSKDGYAGYIDGKTNQEAFYKYLKGLLNKIEGSGYFLDKIEREDFLRKQRTFDNGSIPHQIHLQEMRAIIRRQAEFYPFLADNQDRIEKILTFRIPYYVGPLARGKSDFAWLSRKSADKITPWNFDEIVDKESSAEAFINRMTNYDLYLPNQKVLPKHSLLYEKFTVYNELTKVKYKTEQGKTAFFDANMKQEIFDGVFKVYRKVTKDKLMDFLEKEFDEFRIVDLTGLDKENKVFNASYGTYHDLCKILDKDFLDNSKNEKILEDIVLTLTLFEDREMIRKRLENYSDLLTKEQVKKLERRHYTGWGRLSAELIHGIRNKESRKTILDYLIDDGNSNRNFMQLINDDALSFKEEIAKAQVIGETDNLNQVVSDIAGSPAIKKGILQSLKIVDELVKIMGHQPENIVVEMARENQFTKQGRRNSQQRLKGLTDSIKEFGSQILKEHPVENSQLQNDRLFLYYLQNGRDMYTGEELDIDYLSQYDIDHIIPQAFIKDNSIDNRVLTSSKENRGKSDDVPSKDVVRKMKSYWSKLLSAKLITQRKFDNLTKAERGGLTDDDKAGFIKRQLVETRQITKHVARILDERFYTETDENNKKIRQVKIVTLKSNLVSNFRKEFELYKVREINDYHHAHDAYLNAVIGKALLGVYPQLEPEFVYGDYPHFHGHKENKATAKKFFYSNIMNFFKKDDVRTDKNGEIIWKKDEYISNIKKVLSYPQVNIVKKVEEQTGGFSKESILPKGNSDKLIPRKTKKFYWDTKKYGGFDSPIVAYSILVIADIEKGKSKKLKTVKALVGVTIMEKMTFERDPIAFLERKGYRNVQEENIIKLPKYSLFKLENGRKRLLASARELQKGNEIVLPNHLGTLLYHAKNIHKVDEPKHLDYVDKHKDEFKELLDVVSNFSKKYTLAEGNLEKIKELYAQNNGEDLKELASSFINLLTFTAIGAPAAFKFFDKNIDRKRYTSTTEILNATLIHQSITGLYETRIDLSKLGGD

SEQ ID NO: 534 - protein, 1345 aa, Streptococcus mutans; identical to SEQ ID NO: 533
  Streptococcus mutans SF14

SEQ ID NO: 535 - protein, 1345 aa, Streptococcus mutans
  Streptococcus mutans SM1
MKKPYSIGLDIGTNSVGWAVVTDDYKVPAKKMKVLGNTDKSHIKKNLLGALLFDSGNTAEDRRLKRTARRRYTRRRNRILYLQEIFSEEMGKVDDSFFHRLEDSFLVTEDKRGERHPIFGNLEEEVKYHENFPTIYHLRQYLADNPEKVDLRLVYLALAHIIKFRGHFLIEGKFDTRNNDVQKLFQEFLAVYDNTFENSSLQEQNVQVEEILTDKISKSAKKDRVLKLFPNEKSNGRFAEFLKLIVGNQADFKKHFELEEKAPLQLSKDTYEEELEVLLAQIGDNYAELFLSAKKLYDSILLSGILTVTDVSTKAPLSASMIQRYNEHQMDLAQLKQFIRQKLSDKYNEVFSDVSKDGYAGYIDGKTNQEAFYKYLKGLLNKIEGSGYFLDKIEREDFLRKQRTFDNGSIPHQIHLQEMRAIIRRQAEFYPFLADNQDRIEKILTFRIPYYVGPLARGKSDFAWLSRKSADKITPWNFDEIVDKESSVEAFINRMTNYDLYLPNQKVLPKHSLLYEKFTVYNELTKVKYKTEQGKTAFFDANMKQEIFDGVFKVYRKVTKDKLMDFLEKEFDEFRIVDLTGLDKENKAFNASYGTYHDLRKILDKDFLDNSKNEKILEDIVLTLTLFEDREMIRKRLENYSDLLTKEQVKKLERRHYTGWGRLSAELIHGIRNKESRKTLLDYLIDDGNSNRNFMQLINDDALSFKEEIAKAQVIGETDNLNQVVSDIAGSPAIKKGILQSLKIVDELVKIMGHQPENIVVEMARENQFTNQGRRNSQQRLKGLTDSIKEFGSQILKEHPVENSQLQNDRLFLYYLQNGRDMYTGEELDIDYLSQYDIDHIIPQAFIKDNSIDNRVLTSSKENRGKSDDVPSKDVVRKMKSYWSKLLSAKLITQRKFDNLTKAERGGLTDDDKAGFIKRQLVETRQITKHVARILDERFNTETDENNKKIRQVKIVTLKSNLVSNFRKEFELYKVREINDYHHAHDAYLNAVIGKALLGVYPQLEPEFVYGDYPHFHGHKENKATAKKFFYSNIMNFFKKDDVRTDKNGEIIWKKDEYISNIKKVLSYPQVNIVKKVEEQTGGFSKESILPKGNSDKLIPRKTKKFYWDTKKYGGFDSPIVAYSILVIADIEKGKSKKLKTVKALVGVTIMEKMTFERDPIAFLERKGYRNVQEENIIKLPKYSLFKLENGRKRLLASARELQKGNEIVLPNHLGTLLYHAKNIHKVDEPKHLDYVDKHKDEFKELLDVVSNFSKKYTLAEGNLEKIKELYAQNNGEDLKELASSFINLLTFTAIGAPATFKFFDKNIDRKRYTSTTEILNATLIHQSITGLYETRIDLSKLGGD

SEQ ID NO: 536 - protein, 1345 aa, Streptococcus mutans; identical to SEQ ID NO: 535
  Streptococcus mutans SM1

SEQ ID NO: 537 - protein, 1345 aa, Streptococcus mutans
  Streptococcus mutans SM4
MKKPYSIGLDIGTNSVGWAVVTDDYKVPAKKMKVLGNTDKSHIKKNLLGALLFDSGNTAEDRRLKRTARRRYTRRRNRILYLQEIFSEEMDKVDDSFFHRLEDSFLVTEDKRGERHPIFGNLEEEVKYHENFPTIYHLRQYLADNPEKVDLRLVYLALAHIIKFRGHFLIEGKFDTRNNDVQRLFQEFLAVYDNTFENSSLQEQNVQVEEILTDKISKSAKKDRVLKLFPNEKSNGRFAEFLKLIVGNQADFKKHFELEEKAPLQFSKDTYEEELEVLLAQIGDNYAELFLSAKKLYDSILLSGILTVTDVSTKAPLSASMIQRYNEHQMDLAQLKQFIRQKLSDKYNEVFSDVSKDGYAGYIDGKTNQEAFYKYLKGLLNKIEGSGYFLDKIEREDFLRKQRTFDNGSIPHQIHLQEMRAIIRRQAEFYPFLADNQDRIEKILTFRIPYYVGPLARGKSDFAWLSRKSADKITPWNFDEIVDKESSAEAFINRMTNYDLYLPNQKVLPKHSLLYEKFTVYNELTKVKYKTEQGKTAFFDANMKQEIFDGVFKVYRKVTKDKLMDFLEKEFDEFRIVDLTGLDKENKVFNASYGTYHDLCKILDKDFLDNSKNEKILEDIVLTLTLFEDREMIRKRLENYSDLLTKEQVKKLERRHYTGWGRLSAELIHGIRNKESRKTILDYLIDDGNSNRNFMQLINDDALSFKEEIAKAQVIGETDNLNQVVSDIAGSPAIKKGILQSLKIVDELVKIMGHQPENIVVEMARENQFTKQGRRNSQQRLKGLTDSIKEFGSQILKEHPVENSQLQNDRLFLYYLQNGRDMYTGEELDIDYLSQYDIDHIIPQAFIKDNSIDNRVLTSSKENRGKSDDVPSKDVVRKMKSYWSKLLSAKLITQRKFDNLTKAERGGLTDDDKAGFIKRQLVETRQITKHVARILDERFYTETDENNKKIRQVKIVTLKSNLVSNFRKEFELYKVREINDYHHAHDAYLNAVIGKALLGVYPQLEPEFVYGDYPHFHGHKENKATAKKFFYSNIMNFFKKDDVRTDKNGEIIWKKDEHISNIKKVLSYPQVNIVKKVEEQTGGFSKESILPKGNSDKLIPRKTKKFYWDTKKYGGFDSPIVAYSILVIADIEKGKSKKLKTVKALVGVTIMEKMTFERDPVAFLERKGYRNVQEENIIKLPKYSLFKLENGRKRLLASARELQKGNEIVLPNHLGTLLYHAKNIHKVDEPKHLDYVDKHKDEFKELLDVVSNFSKKYTLAEGNLEKIKELYAQNNGEDLKELASSFINLLTFTAIGAPATFKFFDKNIDRKRYTSTTEILNATLIHQSITGLYETRIDLSKLGGD

SEQ ID NO: 538 - protein, 1345 aa, Streptococcus mutans; identical to SEQ ID NO: 537
  Streptococcus mutans SM4

SEQ ID NO: 539 - protein, 1345 aa, Streptococcus mutans
  Streptococcus mutans SM6
MKKPYSIGLDIGTNSVGWAVVTDDYKVPAKKMKVLGNTDKSHIKKNLLGALLFDSGNTAEDRRLKRTARRRYTRRRNRILYLQEIFSEEMGKVDDSFFHRLEDSFLVTEDKRGERHPIFGNLEEEVKYHENFPTIYHLRQYLADNPEKTDLRLVYLALAHIIKFGGHFLIEGKFDTRNNDVQRLFQEFLAVYDNTFENSSLQEQNVQVEEILTDKISKSAKKDRVLKLFPNEKSNGRFAEFLKLIVGNQADFKKHFELEEKAPLQFSKDIYEEELEVLLAQIGDNYAELFLSAKKLYDSILLSGILTVTDVSTKAPLSASMIQRYNEHQMDLAQLKQFIRQKLSDKYNEVFSDVSKDGYAGYIDGKTNQEAFYKYLKGLLNKIEGSGYFLDKIEREDFLRKQRTFDNGSIPHQIHLQEMRAIIRRQAEFYPFLADNQDRIEKILTFRIPYYVGPLARGKSDFAWLSRKSADKITPWNFDEIVDKESSVEAFINRMTNYDLYLPNQKVLPKHSLLYEKFTVYNELTKVKYKTEQGKTAFFDANMKQEIFDGVFKVYRKVTKDKLMDFLEKEFDEFRIVDLTGLDKENKAFNASYGTYHDLRKILDKDFLDNSKNEKILEDIVLTLTLFEDREMIRKRLKNYSDLLTKEQLKKLERRHYTGWGRLSAELIHGIRNKESRKTILDYLIDDGNSNRNFMQLINDDALSFKEEIAKAQVIGETDNLNQVVSDIAGSPAIKKGILQSLKIVDELVKIMGHQPENIVVEMARENQFTNQGRRNSQQRLKGLTDSIKEFGSQILKEHPVENSQLQNDRLFLYYLQNGRDMYTGEELDIDYLSQYDIDHIIPQAFIKDNSIDNRVLTSSKENRGKSDDVPSKNVVRKMKSYWSKLLSAKLITQRKFDNLTKAERGGLTDDDKAGFIKRQLVETRQITKHVARILDERFHTETDENNKKIRQVKIVTLKSNLVSNFRKEFELYKVREINDYHHAHDAYLNAVIGKALLGVYPQLEPEFVYGDYPHFHGHKENKATAKKFFYSNIMNFFKKDDVRTDKNGEIIWKKDEHISNIKKVLSYPQVNIVKKVEEQTGGFSKESILPKGNSDKLIPRKTKKFYWDTKKYGGFDSPIVAYSILVIADIEKGKSKKLKTVKALVGVTIMEKMTFERDPVAFLERKGYRNVQEENIIKLPKYSLFKLENGRKRLLASARELQKGNEIVLPNHLGTLLYHAKNIHKVDEPKHLDYVDKHKDEFKELLDVVSNFSKKYTLAEGNLEKIKELYAQNNGEDLKELASSFINLLTFTAIGAPATFKFFDKNIDRKRYTSTTEILNATLIHQSITGLYETRIDLSKLGGD

SEQ ID NO: 540 - protein, 1345 aa, Streptococcus mutans; identical to SEQ ID NO: 539
  Streptococcus mutans SM6

SEQ ID NO: 541 - protein, 1134 aa, Streptococcus mutans
  Streptococcus mutans ST1
MANGKILGLDIGIASVGVGIIDKETGKIIHVNSRIFPAATADSNVERRGFRQGRRLVRRKKHRKVRLADLFLDSNLLTDFSKVSLNLNPYQLRVKGLNEELSNEELFIALKSIVSRRGISYLDDASEDSGANSSEYGKAVEENRKLLEDRTPGQIQLERFEKYGKVRGDFTVVENGENHRLINVFSTSAYKKEAERILRRQQEFNMRIADEFIEAYLTILTGKRKYYHGPGNEKSRTDYGRFRTDGTTLDNIFGILIGKCTFYPDEYRAAKASYTAQEFNLLNDLNNLTVPTETKKLSEEQKRQIIEHAKTVKTLGAPTLLKYIVKLVGCSADDIKGYRIDKSDKPEIHTFEAYRKMRTMELIKVDDLSRESLDALAHILTLNTEREGIEEAIRDRFTNKEFNQEQINELVLFRKNNSSLFGKGWHNFSLKLMKELIPELYETSEEQMTILTRLGKQRVKKSSNRTNYIDEKELTEEIYNPVVAKSVRQAIKIINLATKKYGVFDNIVIEMARESNEDDEKKAIQNAQKANEDEKKAALLKAAHQFNGKEELPDSIFHGHKELLTKIRLWHQQGEKCLYTGKTIFINDLIHNPYKYEIDHILPLSLSFDDSLANKVLVLSTANQEKGQRTPFQSLDSMDGAWTYREFKSYVKGLKTLSNKKKDYLLTEENIDKIEVKQKFIERNLVDTRYSSRVVLNALQDFYKERKFDTKISVVRGQFTSQLRRKWRIEKTRETYHHHAVDALIIAASSQLNLWKKQNNPLISYKEDQFVDPETGEILSLSDDEYKKLVFKAPYEHFVDTLKSKKFEDSILFSYQVDSKYNRKISGATICGTRKAQLGKDTQEETYVLGKIKDIYSQKGYEDFIKKYKKDKTQFLMYHKDPQTFEKVIEEILKTYPDKELNEKGKEVSCNPFEKYRQENGPVRKYSKKGNGPEIKSLKYYDEVLGKNIDITPKNSLNKVVLRSLNPWRTDVYFNHETRKYEFLGLKYSDLRYLKGEHRYGILIGDYKKIKDKEGIEKESEFKFTLYKNDLILIKDTAKGKEELFRFWSRTGKDNAKTFEKNKIELKPYSKSQFEKGEDTNVLGKLYASSNQLQKSFGTLENLSIYKVRTDVLGNKYFIKKEGDKPQLNFKKKL

SEQ ID NO: 542 - protein, 1134 aa, Streptococcus mutans; identical to SEQ ID NO: 541
  Streptococcus mutans ST1

SEQ ID NO: 543 - protein, 1350 aa, Streptococcus mutans
  Streptococcus mutans ST6
MKKPYSIGLDIGTNSVGWAVVTDDYKVPAKKMKVLGNTDKSHIEKNLLGALLFDSGNTAEDRRLKRTARRRYTRRRNRILYLQEIFSEEMGKVDDSFFHRLEDSFLVTEDKRGERHPIFGNLEEEVKYHENFPTIYHLRQYLADNPEKVDLRLVYLALAHIIKFRGHFLIEGKFDTRNNDVQRLFQEFLAVYDNTFENSSLQEQNVQVEEILTDKISKSAKKDRVLKLFPNEKSNGRFAEFLKLIVGNQADFKKHFELEEKAPLQFSKDTYEEELEVLLAQIGDNYAELFLSAKKLYDSILLSGILTVTDVSTKAPLSASMIQRYNEHQMDLTQLKQFIRQKLSDKYNEVFSDVSKDGYAGYIDGKTNQEAFYKYLKGLLNKIEGSGYFLDKIEREDFLRKQRTFDNGSIPHQIHLQEMRAIIRRQAEFYSFLADNQDRIEKILTFRIPYYVGPLARGKSDFAWLSRKSADKITPWNFDEIVDKESSAEAFINRMTNYDLYLPNQKVLPKHSLLYEKFTVYNELTKVKYKTEQGKTAFFDANMKQEIFDGVFKVYRKVTKDKLMDFLEKEFDEFRIVDLTGLDKENKAFNASYGTYHDLRKILDKDFLDNSKNEKILEDIVLTLTLFEDREMIRKRLENYSDLLTKEQVKKLERRHYTGWGRLSAELIHGIRNKESRKTILDYLIDDGNSNRNFMQLINDDALSFKEEIAKAQVIGETDNLNQVVSDIAGSPAIKKGILQSLKIVDELVKIMGHQPENIVVEMARENQFTNQGRRNSQQRLKGLTDSIKEFGSQILKEHPVENSQLQNDRLFLYYLQNGRDMYTGEELDIDYLSQYDIDHIIPQAFIKDNSIDNRVLTSSKENRGKSDDVPSEDVVNRMRPFWNKLLSSGLISQRKYNNLTKKELTLDDKAGFIKRQLVETRQITKHVARMLDERFNKEFDDNNKRIRKVKIVTLKSNLVSSFRKEFELYKVREINDYHHAHDAYLNAVVVKALLVKYSKLEPEFVYGEYPKYNSYRERKTATQKMFFYSNIMNMFKSKVKLADDQIVERPMIEVNDETGEIAWDKTKHITTVKKVLSYPQVNIVKKVEEQTIGQNGGLFDDNPKSPLEVIPSKLVPLKKALNPEKYGGYQKPTTAYPILLIVDTKQLIPISVMDKKRFEQNPVKFLKDKGYQQIEKNNFVKLPKYTLVDIGNGIKRLWASSKEVHKGNQLVVSKKSQDLLYHAHHLDNDYSNEYVKNHYQQFDILFNEITSFSKKCKLGKEHIQKIEEAYSKERDSASIEELADGFIKLLGFTQLGATSPFSFLGIKLNQKQYTGKKDYLLPCMEATLIHQSITGLYETRIDLSKLGGD

SEQ ID NO: 544 - protein, 1350 aa, Streptococcus mutans; identical to SEQ ID NO: 543
  Streptococcus mutans ST6

SEQ ID NO: 545 - protein, 1125 aa, Streptococcus mutans
  Streptococcus mutans U2A
MTNGKILGLDIGIASVGVGIINAKTGNVEHASSRIFPAANADNNVERRSARGGRRLIRRKKHRLKRVEDLFEKYNIDTDFSNLNLNPYQLRVKGLNEQLSNEELFAILKNIAKRRGISYLDDAEDDSVGSSDYAKAIDENRKLLKKQTPGEIQLKRLEKYGQLRGNFTIQDENGEYHRLINVFSTSDYVKEARRILETQSYYNKFITESFVEDYIKILQGKRKYYVGPGNEKSRTDYGIYRTDGETLDNLFGILIGKCGFYPEEYRAAKASYTAQEYNFLNDLNNLTVPTETKKLSTEQKYQLVDFAKTASTLGAAKLLKEIAKLVGCQVEEIKGYRLDNKDKPDLHTFEPFRKLKSNLTTIAVENLSITTLDTLAHILTLNTEREGIEEAIQKELPNIFSDEQITEIIAVRKKNSQIFGKGWHSFSIKLMKELIPELYETSEEQMTILTRLKKVKTNSKITNRTKYINEEEITDEIYNPVVSKSIRQTVKIINATIKKYGAFDQIIIEMPRESNEEDERKFIADLQKSNAKEKDDAMKQAALLYNGKDELPHDVFHGHKELATKIRLWYQQGERCLYSGKHIDIHDLIHNQHMFEIDHVLPLSLSFDDSLANKVLVYSWANQEKGQRTPFQALPQMASAWSFRELRDYISKQKGISKKKRDYLLTEQDINKVEVKQKFIERNLVDTRYVSRVVLNTLQDALKVMNKETKISVIRGQFTSQLRRQWRIDKSRETYHHHAVDALIIAASSQLRLWKKQNNPMFAEDKHGQKINLDTGEVLSDDAYKELVYQAPYQGFVNTISSKSFEDEILFSYQVDSKVNRKISDATIYATRQAQLGKDKKEETYVLGKIKDIYSQAGYDAFRKKYDKDKAVFLMYQKDPETWEKVIEVILRDYKELDDKGKEIGNPFERYKVKHGFVRKYSRKNKGTEIKSLKYYDNKLGNHIDITPNNSKHSVVLQSINPWRADLYFNPETTKYELMGLKYADLSFEKGTGKYSISREKYDEIKEREGISSKSEFKFTLYKNDLILVKDIGNHKELIARFNSKNDTSKHYVELKPWNKAKFDSEEELIPAFGKVAKSGQFIKGLNKPDLSIYKVKTDILGHKYYIKKEGDKPKLNFENKIKNK

SEQ ID NO: 546 - protein, 1125 aa, Streptococcus mutans; identical to SEQ ID NO: 545
  Streptococcus mutans U2A

SEQ ID NO: 547 - protein, 1345 aa, Streptococcus mutans
  Streptococcus mutans UA159
MKKPYSIGLDIGTNSVGWAVVTDDYKVPAKKMKVLGNTDKSHIEKNLLGALLFDSGNTAEDRRLKRTARRRYTRRRNRILYLQEIFSEEMGKVDDSFFHRLEDSFLVTEDKRGERHPIFGNLEEEVKYHENFPTIYHLRQYLADNPEKVDLRLVYLALAHIIKFRGHFLIEGKFDTRNNDVQRLFQEFLAVYDNTFENSSLQEQNVQVEEILTDKISKSAKKDRVLKLFPNEKSNGRFAEFLKLIVGNQADFKKHFELEEKAPLQFSKDTYEEELEVLLAQIGDNYAELFLSAKKLYDSILLSGILTVTDVGTKAPLSASMIQRYNEHQMDLAQLKQFIRQKLSDKYNEVFSDVSKDGYAGYIDGKTNQEAFYKYLKGLLNKIEGSGYFLDKIEREDFLRKQRTFDNGSIPHQIHLQEMRAIIRRQAEFYPFLADNQDRIEKLLTFRIPYYVGPLARGKSDFAWLSRKSADKITPWNFDEIVDKESSAEAFINRMTNYDLYLPNQKVLPKHSLLYEKFTVYNELTKVKYKTEQGKTAFFDANMKQEIFDGVFKVYRKVTKDKLMDFLEKEFDEFRIVDLTGLDKENKVFNASYGTYHDLCKILDKDFLDNSKNEKILEDIVLTLTLFEDREMIRKRLENYSDLLTKEQVKKLERRHYTGWGRLSAELIHGIRNKESRKTILDYLIDDGNSNRNFMQLINDDALSFKEEIAKAQVIGETDNLNQVVSDIAGSPAIKKGILQSLKIVDELVKIMGHQPENIVVEMARENQFTNQGRRNSQQRLKGLTDSIKEFGSQILKEHPVENSQLQNDRLFLYYLQNGRDMYTGEELDIDYLSQYDIDHIIPQAFIKDNSIDNRVLTSSKENRGKSDDVPSKDVVRKMKSYWSKLLSAKLITQRKFDNLTKAERGGLTDDDKAGFIKRQLVETRQITKHVARILDERFNTETDENNKKIRQVKIVTLKSNLVSNFRKEFELYKVREINDYHHAHDAYLNAVIGKALLGVYPQLEPEFVYGDYPHFHGHKENKATAKKFFYSNIMNFFKKDDVRTDKNGEIIWKKDEHISNIKKVLSYPQVNIVKKVEEQTGGFSKESILPKGNSDKLIPRKTKKFYWDTKKYGGFDSPIVAYSILVIADIEKGKSKKLKTVKALVGVTIMEKMTFERDPVAFLERKGYRNVQEENIIKLPKYSLFKLENGRKRLLASARELQKGNEIVLPNHLGTLLYHAKNIHKVDEPKHLDYVDKHKDEFKELLDVVSNFSKKYTLAEGNLEKIKELYAQNNGEDLKELASSFINLLTFTAIGAPATFKFFDKNIDRKRYTSTTEILNATLIHQSITGLYETRIDLNKLGGD

SEQ ID NO: 548 - protein, 1345 aa, Streptococcus mutans; identical to SEQ ID NO: 472
  Streptococcus mutans W6

SEQ ID NO: 549 - protein, 1121 aa, Streptococcus oralis
  Streptococcus oralis SK1074
MNGLVLGLDIGIASVGVGILEKNSGKIIHANSRLFPAATADNNVERRKNRQARRLNRRKKHRGVRFQDLFEDYGLLTDFSKVSINLNPYRLRVDGLNQQLTNEELFIALKNIVKRRGISYLDDASEDGGAVSSDYGKAVEENRKLLAEQTPGQIQLERFEKYGQVRGDFTVVENGEKCRLINVFSTSAYRKEAEKILRKQQEFNNQITDEFIEDYLKILTGKRKYYHGPGNEKSRTDYGRFRTDGTTLDNIFGVLIGKCTFYPNEYRASKSSYTAQEFNLLNDLNNLTVPTETKKLSEEQKKVIVEYAKEAKTLGASTLLKYIVKMIDASVDQISGYRVDVNNKPEMHTFEVYRKMQSLETISVGELSRNVLDELAHILTLNTEREGIEEAINSKLMGVFSQDQVLELVQFRKNNSSLFSKGWHNFSLKLMMELIPELYETSEEQMTILTRLGKQKSKETSKRTKYIDEKELTEEIYNPVVAKSVRQAIKIINEATKKHGIFDNIVIEMARENNEEDAKKDYIKRQKANQDEKNAAMEKAAFQYNGKKELPGNIFNGHKELATKIRLWHQQGEKCLYTGKTIPISDLIHNQYKYEIDHILPLSLSFDDSLSNKVLVHATANQEKGQRTPFQALDSMDDAWSYREFKSYVKDLKSLSNKKKDYLLTEEDISKIEVKQKFIERNLVDTRYSSRVVLNALQDFYKSHQFDTTISVVRGQFTSQLRRKWGLEKSRETYHHHAVDALIIAASSQLRLWKKQNNPLITYKEGQFVDSQTGEIISLTDDEYKELVFKAPYDHFVDTLHSKTFEDGILFSYQVDSKYNRKISDATIYATRKAKLDKDKSEETYVLGKIKDIYSQAGYDAFIKIYNKDKRKFLMYHKDPQTFEKVIEEILRTYPSKERNDKNKEVPCNPFEKYRQENGPIRKYSKKGNGPEIKCLKYYDNKLGNYIDISPDGSDNQVVLQSLKPWRTDVYFNHQTKEYELMGLKYSDLSFEKGSGKYSISNEKYNSIKRIEGVNEQSEFKFTLYKNDLILIKDSENNEQKLFRFNSRNDTAKHYVELKPYDKARFDGQQELITILGNVAKGGQCLKGLNKSNISIFKVKTDVLGKKHIIKKEGDEPKLKF

SEQ ID NO: 550 - protein, 1373 aa, Streptococcus oralis
  Streptococcus oralis SK304
MENKNYSIGLDIGTNSVGWAVITDDYKVPSKKMKVLGNTDKRFIKKNLIGALLFDEGTTAEARRLKRTARRRYTRRKNRLRYLQEIFAEEMSKVDSSFFHRLDDSFLIPEDKKGSKYPIFATLIEEKEYHKQFPTIYHLRKQLADSKEKTDLRLIYLALAHMIKYRGHFLYEDTFDIKNNDIQKIFNEFISIYNNTFEGNSLSGQNVQVEAIFTDKISKSAKRERVLKLFPDEKSTGLFSEFLKLIVGNQADFKKHFDLEEKAPLQFSRDTYDEDLENLLGQIGDDFADLFVAAKKLYDAILLSGILTVTDPSTKAPLSASMIERYENHQKDLATLKQFIKTNLPEKYDEVFSDQSKDGYAGYIDGKTTQESFYKYIKNLLSKFEGADYFLEKIEREDFLRKQRTFDNGSIPHQIHLQEMNAILRRQGEHYPFLKENKEKIEKILTFRIPYYVGPLARGNRDFAWLTRNSDQAIRPWNFEEIVDKASSAESFINKMTNYDLYLPEEKVLPKHSLLYETFAVYNELTKVKFIAEGLRDYQFLDSRQKKDIFYTLFKAEDKRKVTEKDIIQYLHTVDGYDGIELKGIEKQFNASLSTYHDLLKIIKDKEFMDDPNNEEILENIVHTLTIFEDREMIKQRLAQYDSLFDEKVIKALTRRHYTGWGKLSSKLINGIRDKQTGKTILDYLMDDGYNNRNFMQLINDDELSFKEIIKKAQVVGKTDDVKQVVQELPGSPAIKKGILQSIKLVDELVKVMGHEPESIVIEMARENQTTARGKKNSQQRYKRIEDSLKILASGLNAKILKEHPTDNIQLQNDRLFLYYLQNGRDMYTGKPLDINQLSSYDIDHIVPQAFIKDDSLDNRVLTSLKDNRGKSDNVPSLEVVEKMKTFWQQLLDSKLISYRKFNNLTKAERGGLDERDKVGFIKRQLVETRQITKHVAQILDARYNTEVNEKDKKNRTVKIITLKSNLVSNFRKEFRLYKIREINDYHHAHDAYLNAVVAKAILKKYPKLEPEFVYGDYQKYDLKRYISRSKDPKEIEKATEKYFFYSNLLNFFKEEVHYADGTIVKRENIEYSKDTGEIAWNKEKDFATIKKVLSLPQVNIVKKREVQTGGFSKESILPKGNSDKLIPRKTKDILWDTTKYGGFDSPVIAYSILLIADIEKGKAKRLKTVKTLVGITIMEKATFEKSPIAFLENKGYHNVRKENILCLPKYSLFELKNGRRRMLASAKELQKGNEIVLPVHLTTLLYHAKNIHRLDEPEHLEYIQKHRNEFKGLLNLVSEFSQKYVLADANLEKIKNLYADNEQADIEILANSFINLLTFTALGAPAAFKFFGKDVDRKRYTTVSEILNATLIHQSITGLYETRIDLSKLGED

SEQ ID NO: 551 - protein, 1134 aa, Streptococcus oralis
  Streptococcus oralis SK313
MNGLVLGLDIGIASVGVGILEKNSGKIVHASSRIFPAATADNNVERRKNRQARRLHRRKKHRGARLKDLFEYYGLLTDFSKVSINLNPYRLRVDGLDQQLTNEELFIALKNIVKRRGISYLDDASEDGGTVSSDYGKAVEENRKLLAEQTPGQIQLERFEKYGQLRGDFTVVENSEKCRLINVFSTSAYKKEAERILRKQQEFNNQITDEFIEDYLKILTGKRKYYHGPGNEKSRTDYGRFRTDGATLDNIFGILIGKCTFYPNEYRASKASYTAQEFNLLNDLNNLTVPTETKKLSEEQKKTIIEYAKSAKTLGASTLLKYIAKMIDASVDQIRGYRVDVNNKPEMHTFEVYRKMQSLETISVGELSRNILDELAHILTLNTEREGIEEAINTKLRDSFSQDQVLELVQFRKNNSSLFSKGWHNFSLKLMMELIPELYETSEEQMTILTRLGKQKSKETSKRTKYIDEKEVTEEIYNPVVAKSVRQAIKIINEATKKHGIFDNIVIEMARENNEEDAKKDYIKRQKANQDEKYAAMEKAAFQYNGKKELPDNIFHGHKELATKIRLWHQQGEKCLYTGKSIPISDLIHNQYKYEIDHILPLSLSFDDSLSNKVLVLATANQEKGQRTPFQALDSMDDAWSYREFKSYVKESKLLGNKKKEYLLTEEDISKIEVKQKFIERNLVDTRYSSRVVLNALQDFYKNHNFDTTISVVRGQFTSQLRRKWGLEKSRETYHHHAVDALIIAASSQLRLWKKQNNPLIAYKEGQFVDSQTGEIISLTDDEYKELVFKAPYDHFVDTLSSKTFEDSILFSYQVDSKFNRKISDATIYATRKAKLDKEKKEYTYTLGKIKDIYSLGTKTPSKTGFYKFLDLYNKDKSQFLMFQKDRKTWDEVIEKIMEQYRPFKEYDKAGKLVDFNPFEKYRQENGPIRKYSKKGNGPEIKSLKYYDILLGKHKNITPEGSRNTVALLSLNPWRTDVYYNMETKKYEFLGLKYADLPFEEGGAYGISTETYNELREKEGIGKNSEFKFTLYKNDLILIKDTETNCQQFFRFWSRTGKDNPKSFEKHKIELKPYEKAKFEKGEELEVLGKVPPSSNQFQKNMQIENLSIYKVKTDVLGNKHFIKKEGDKPKLKF

SEQ ID NO: 552 - protein, 1371 aa, Streptococcus oralis
  Streptococcus oralis SK610
MENKNYSIGLDIGTNSVGWSVITDDYKVPSKKMKVLGNTDKRFIKKNLIGALLFDEGTTAEARRLKRTARRRYTRRKNRLRYLQEIFAEEMSKVDSSFFHRLDDSFLIPEDKRGSKYPIFATLAEEKEYHKQFPTIYHLRKQLADSKEKTDLRLIYLALAHMIKYRGHFLYEDTFDIKNNDIQKIFSEFISIYDNTFEGSSLSGQNAQVEAIFTDKISKSAKRERVLKLFPDEKSTGLFSEFLKLIVGNQADFKKHFDLGEKAPLQFSKDTYDEDLENLLGQIGDDFADLFLVAKKLYDAILLSGILTVTDPSTKAPLSASMIERYENHQKDLAVLKQFIKNNLPEKYDEVFSDQSKDGYAGYIDGKTTQEAFYKYIKNLLSKFEGTDYFLEKIEREDFLRKQRTFDNGSIPHQIHLQEMNAILRRQGEHYPFLKDNKEKIEKILTFRIPYYVGPLARGNRDFAWLTRNSDEAIRPWNFEEIVDKASSAEDFINKMTNYDLYLPEEKVLPKHSLLYETFAVYNELTKVKFIAEGLRDYQFLDSGQKKQIVTQLFKEKRKVTEKDIIQFLHNVDGYDGIELKGIEKQFNASLSTYHDLLKIIKDKEFMDDSKNEEILENIVHTLTIFEDREMIKQRLAQYDSLFDEKVIKALIRRHYTGWGKLSAKLIDGICDKQTGNTILDYLIDDGKNNRNFMQLINDDGLSFKEITQKAQVVGKTDDVKQVVQELPGSPAIKKGILQSIKIVDELVKVMGHTPESIVIEMARENQTTARGKKNSQQRYKRIEDALKNLASGLDSNILKEHPTNNIQLQNDRLFLYYLQNGRDMYTGKPLDINQLSSYDIDHIVPQAFIKDDSLDNRVLTSLKDNRGKSDNVPSIEVVQKRKAFWQQLLDSKLISERKFNNLTKAERGGLDERDKVGFIKRQLVETRQITKHVAQILDARFNKEVNEKDKKNRTVKIITLKSNLVSNFRKEFRLYKVREINDYHHAHDAYLNAVVAKAILKKYPKLEPEFVYGDYQKYDLKRYISRSRNPKEVEKATEKYFFYSNLLNFFKEEVHYADGTIVKRENIEYSKDTGEIAWNKEKDFATIKKVLSYPQVNIVKKREVQTGGFSKESILPKGNSDKLIPRKTKDILWETTKYGGFDSPVIAYSILLIADIEKGKAKKLKTVKTLVGITIMEKAAFEENPITFLENKGYHNVRKENILCLPKYSLFELENGRRRLLASAKELQKGNEIVLPVYLTTLLYHSKNVHKLDEPEHLEYIQKHRNEFKDLLNLVSEFSQKYVLADANLEKIQNLYADNEQADIEILANSFINLLTFTALGAPAAFKFFGKDIDRKRYTTVSEILNATLIHQSITGLYETRIDLSKLGED

SEQ ID NO: 553 - protein, 1140 aa, Streptococcus parasanguinis
  Streptococcus parasanguinis F0449
MNGLVLGLDIGIASVGVGILKKDIGEIIHTNSRLFSAATADSNIERRGHRGGKRLTRRKKHRSIRLHDLFEDFGLLTDFSKVSINLNPYQLRVQGLDNQLTNEELFIALKNIVKRRGISYLDDASEDGGTVSSDYGKAVEENRKLLAEQTPGQIQLDRFEKYGQVRGDFNVVENGEKRRLINVFTTSAYSKEAERILRKQQEFNKKITDEFIEDYLTILTGKRKYYHGPGNEKSRTDYGRYTTKKDPEGKYITLDNIFGILIGKCTFYPDEYRASKASYTAQEFNLLNDLNNLTVPTETKKLSEEQKKTIIKYAKTAKTLGASTLLKYIAKLIGASVDQIHGYRIDPNKKPEMHTFETYRKMQSLETISVEELPRKVLDELAHILTLNTEREGIEEAINATLKDTFSQDQVLELVQFRKNNSSLFSKGWHSFSLKLMMELIPELYETSEEQMTILTRLGKQKSKETSKRTKYIDEKELTEEIYNPVVAKSVRQAIKIINEATKKYGIFDNIVIEMARENNEEDAKKEYIKRQKANLDEKNAAMEKAAFQYNGKKELPDNVFHGHKELATKIRLWHQQGEKCLYTGKNIPISDLIQNQYKYEIDHILPLSLSFDDSLSNKVLVLATANQEKGQRTPFQALDSMDDAWSYREFKSYVKDSKLLGNKKKEYLLTEEDISKIEVKQKFIERNLVDTRYSSRVVLNALQDFYKEHQFDTTISVVRGQFTSQLRRKWGLEKSRETYHHHAVDALIIAASSQLRLWKKQNNPLISYTEGQFVDQVTGEIISLSDDEYKELVFKAPYDHFVDTLKSKKFEDSILFSYQVDSKYNRKISDATIYATRKAKLDKENKEYTYTLGKIKDIYALGTKSPSKTGFYKFLDLYNKDKSQFLMFQKDRKTWDEVIEKIIEQYRPFKEYDENGKEVDFNPFEKYRIENGPIRKYSKKGNGPEIKSLKYYDNLLGKFVDITPSESKNPVALLSLNPWRTDVYYNTETSKYEFLGLKYADLCFEKGGAYGISEVKYNKIREKEGIGKESEFKFTLYKNDLILIKDTETNCQQIFRFWSRTGKDNPKSFEKHKIELKPYEKARFEKGEELEVLGKVPPSSNQLQKNMQIENLSIYKVKTDVLGNKHFIKKEGEEPKLKF

SEQ ID NO: 554 - protein, 1130 aa, Streptococcus pasteurianus
MTNGKILGLDIGIASVGVGIIEAKTGKVVHANSRLFSAANAENNAERRGFRGSRRLNRRKKHRVKRVRDLFEKYGIVTDFRNLNLNPYELRVKGLTEQLKNEELFAALRTISKRRGISYLDDAEDDSTGSTDYAKSIDENRRLLKNKTPGQIQLERLEKYGQLRGNFTVYDENGEAHRLINVFSTSDYEKEARKILETQADYNKKITAEFIDDYVEILTQKRKYYHGPGNEKSRTDYGRFRTDGTTLENIFGILIGKCNFYPDEYRASKASYTAQEYNFLNDLNNLKVSTETGKLSTEQKESLVEFAKNTATLGPAKLLKEIAKILDCKVDEIKGYREDDKGKPDLHTFEPYRKLKFNLESINIDDLSREVIDKLADILTLNTEREGIEDAIKRNLPNQFTEEQISEIIKVRKSQSTAFNKGWHSFSAKLMNELIPELYATSDEQMTILTRLEKFKVNKKSSKNTKTIDEKEVTDEIYNPVVAKSVRQTIKIINAAVKKYGDFDKIVIEMPRDKNADDEKKFIDKRNKENKKEKDDALKRAAYLYNSSDKLPDEVFHGNKQLETKIRLWYQQGERCLYSGKPISIQELVHNSNNFEIDHILPLSLSFDDSLANKVLVYAWTNQEKGQKTPYQVIDSMDAAWSFREMKDYVLKQKGLGKKKRDYLLTTENIDKIEVKKKFIERNLVDTRYASRVVLNSLQSALRELGKDTKVSVVRGQFTSQLRRKWKIDKSRETYHHHAVDALIIAASSQLKLWEKQDNPMFVDYGKNQVVDKQTGEILSVSDDEYKELVFQPPYQGFVNTISSKGFEDEILFSYQVDSKYNRKVSDATIYSTRKAKIGKDKKEETYVLGKIKDIYSQNGFDTFIKKYNKDKTQFLMYQKDSLTWENVIEVILRDYPTTKKSEDGKNDVKCNPFEEYRRENGLICKYSKKGKGTPIKSLKYYDKKLGNCIDITPEESRNKVILQSINPWRADVYFNPETLKYELMGLKYSDLSFEKGTGNYHISQEKYDAIKEKEGIGKKSEFKFTLYRNDLILIKDIASGEQEIYRFLSRTMPNVNHYVELKPYDKEKFDNVQELVEALGEADKVGRCIKGLNKPNISIYKVRTDVLGNKYFVKKKGDKPKLDFKNNKK

SEQ ID NO: 555 - protein, 1374 aa, Streptococcus pseudoporcinus
  Streptococcus pseudoporcinus LQ 940-04
MKKRYSYSIGLDIGTNSVGWAVINEDYKVPAKKMTVFGNTDRKTIKKNLLGTVLFDSGETAQARRLKRTNRRRYTRRRYRLCQLQNIFATEMVKVDDTFFQRLSESFFYYQDKAFDKHPIFGNSKEERAYHKTYPTIYHLRKDLADRDQKADLRLIYLALSHIIKFRGHFLIEGKLNSENTDVQKLFIALVTVYNLLFEEEPIAGETCDAKALLTAKTSKSKRLESLISEFPGQKKNGLFGNLLALALGLRPNFKSNFGLSEDAKLQITKDTYEEELDNLLAEIGDHYADLFLAAKNLSDAILLSDILTLSDENTRAPLSASMIKRYEEHQEDLALLKKLVKEQMPEKYWEIFSNAKKNGYAGYIEGKVSQEDFYRYIKPILSRLKGGDEFLAKIDRDDFLRKQRTFDNGSIPHQIHLKELHAILRRQEKYYPFLAEQKEKIEQLLCFRIPYYVGPLAKGGNSSFAWLKRRSDEPITPWNFKDVVDEEASAQAFIEGMTNYDTYLPEEKVLPKHSPLYEMFTVYNELTKVKYIAENMTKPLYLSAEQKEAIIDHLFKQTRKVTVKDLKEKYFSQIEGLENVDVTGVEGAFNASLGTYNDLLKIIKDKAFLDDEANAEILEEIVLILTLFQDEKLIEKRLAKYANLFEKSVLKKLRKRHYRGWGRLSRQLIDGMKDKASGKTILDFLKADDFANRNFIQLINDSSLDFEKLIDDAQKKAIKRESLTEAVANLAGSPAIKKGILQSLKVVDEIVKVMGHNPDNIVIEMSRENQTTAQGLKNARQRLKKIKEVHKKTGSRILEDNSERITNLTLQDNRLYLYLLQDGKDMYTGQDLDINNLSQYDIDHIIPQSFIKDNSIDNLVLTTQKANRGKSDNVPSIEVVRDMKDRVWRRQLANGAISRQKFDHLTKAERGGLADSDKARFLRRQLVETRQITKHVAQLLDSRFNSKSNQNKKLARNVKIITLKSKIVSDFRKDFGLYKLREVNNYHHAHDAYLNAVVGTALLKKYPKLEAEFVYGDYKHFDLVKLISKSDPSLGKATAKVFFYSNIMNFFKEELSLADGTLMKRPVIETNTETGEVVWDKVKDFKTIRKVLSYPQVNIVKKTEIQSGAFSKESVLSKGNSDKLIERKKGWDPKKYGGFDSPNTAYSIFVVAKVAKRKAQKLKTVKEIVGITIMEQAEYEKDNIAFLEKKGYQDIQEKLLIKLPKYSLFELENGRRRLLASANEFQKGNELALSGKYMKFLYLASRYDKLSSKIESEQQKKLFVEQHLHYFDEILDIVVKHATCYIKAENNLKKIISLYKKKEAYSINEQALNMLNLFIFTSLGAPSTFVFFDETIDRKRYTTSSDVLNGILIQQSITGLYETRIDLSRFGGD

SEQ ID NO: 556 - protein, 1368 aa, Streptococcus pyogenes
  Streptococcus pyogenes MGAS10270
MDKKYSIGLDIGTNSVGWAVITDDYKVPSKKFKVLGNTDRHSIKKNLIGALLFDSGETAEATRLKRTARRRYTRRKNRICYLQEIFSNEMAKVDDSFFHRLEESFLVEEDKKHERHPIFGNIVDEVAYHEKYPTIYHLRKKLVDSTDKADLRLIYLALAHMIKFRGHFLIEGDLNPDNSDVDKLFIQLVQTYNQLFEENPINASGVDAKAILSARLSKSRRLENLIAQLPGEKKNGLFGNLIALSLGLTPNFKSNFDLAEDAKLQLSKDTYDDDLDNLLAQIGDQYADLFLAAKNLSDAILLSDILRLNSEITKAPLSASMIKRYDEHHQDLTLLKALVRQQLPEKYKEIFFDQSKNGYAGYIDGGASQEEFYKFIKPILEKMDGTEELLAKLNREDLLRKQRTFDNGSIPHQIHLGELHAILRRQEDFYPFLKDNREKIEKILTFRIPYYVGPLARGNSRFAWMTRKSEETITPWNFEEVVDKGASAQSFIERMTNFDKNLPNEKVLPKHSLLYEYFTVYNELTKVKYVTEGMRKPAFLSGEQKKAIVDLLFKTNRKVTVKQLKEDYFKKIECFDSVEISGVEDRFNASLGTYHDLLKIIKDKDFLDNEENEDILEDIVLTLTLFEDREMIEERLKTYAHLFDDKVMKQLKRRRYTGWGRLSRKLINGIRDKQSGKTILDFLKSDGFANRNFMQLIHDDSLTFKEDIQKAQVSGQGDSLHEHIANLAGSPAIKKGILQTVKVVDELVKVMGRHKPENIVIEMARENQTTQKGQKNSRERMKRIEEGIKELGSQILKEHPVENTQLQNEKLYLYYLQNGRDMYVDQELDINRLSDYDVDHIVPQSFIKDDSIDNKVLTRSDKNRGKSDNVPSEEVVKKMKNYWRQLLNAKLITQRKFDNLTKAERGGLSELDKAGFIKRQLVETRQITKHVAQILDSRMNTKYDENDKLIREVKVITLKSKLVSDFRKDFQFYKVREINNYHHAHDAYLNAVVGTALIKKYPKLESEFVYGDYKVYDVRKMIAKSEQEIGKATAKYFFYSNIMNFFKTEITLANGEIRKRPLIETNGETGEIVWDKGRDFATVRKVLSMPQVNIVKKTEVQTGGFSKESILPKRNSDKLIARKKDWDPKKYGGFDSPTVAYSVLVVAKVEKGKSKKLKSVKELLGLTIMERSSFEKNPIDFLEAKGYKEVKKDLIIKLPKYSLFELENGRKRMLASAGELQKGNELALPSKYVNFLYLASHYEKLKGSPEDNEQKQLFVEQHKHYLDEIIEQISEFSKRVILADANLDKVLSAYNKHRDKPIREQAENIIHLFTLTNLGAPAAFKYFDTTIDRKRYTSTKEVLDATLIHQSITGLYETRIDLSQLGGD

SEQ ID NO: 557 - protein, 1371 aa, Streptococcus pyogenes
MDKKYSIGLDIGTNSVGWAVITDDYKVPSKKFKVLGNTDRHSIKKNLIGALLFDSGETAEATRLKRTARRRYTRRKNRICYLQEIFSNEMAKVDDSFFHRLEESFLVEEDKKHERHPIFGNIVDEVAYHEKYPTIYHLRKKLADSTDKADLRLIYLALAHMIKFRGHFLIEGDLNPDNSDVDKLFIQLVQTYNQLFEENPINASRVDAKAILSARLSKSRRLENLIAQLPGEKKNGLFGNLIALSLGLTPNFKSNFDLAEDAKLQLSKDTYDDDLDNLLAQIGDQYADLFLAAKNLSDATLLSDILRVNSEITKAPLSASMIKRYDEHHQDLTLLKALVRQQLPEKYKEIFFDQSKNGYAGYIDGGASQEEFYKFIKPILEKMDGTEELLAKLNREDLLRKQRTFDNGSIPHQIHLGELHAILRRQEDFYPFLKDNREKIEKILTFRIPYYVGPLARGNSRFAWMTRKSEETITPWNFEEVVDKGASAQSFIERMTNFDKNLPNEKVLPKHSLLYEYFTVYNELTKVKYVTEGMRKPAFLSGEQKKAIVDLLFKTNRKVTVKQLKEDYFKKIECFDSVEISGVEDRFNASLGTYHDLLKIIKDKDFLDNEENEDILEDIVLTLTLFEDKEMIEERLKTYAHLFDDKVMKQLKRRHYTGWGRLSRKLINGIRDKQSGKTILDFLKSDGFANRNFIQLIHDDSLTFKEAIQKAQVSGQGHSLHEQIANLAGSPAIKKGILQSVKVVDELVKVMGHKPENIVIEMARENQTTQKGQKNSRERMKRIEEGIKELGSQILKEHPVENTQLQNEKLYLYYLQNGRDMYVDQELDINRLSDYDVDHIVPQSFIKDDSIDNKVLTRSDKNRGKSDDVPSEEVVKKMKNYWRQLLNAKLITQRKFDNLTKAERGGLSELDKAGFIKRQLVETRQITKHVAQILDSRMNTKYDENDKLIREVKVITLKSKLVSDFRKDFQFYKVREINNYHHAHDAYLNAVVGTALIKKYPKLESEFVYGDYKVYDVRKMIAKSEQEIGKATAKRFFYSNIMNFFKTEITLANGEIRKRPLIETNEETGEIVWDKGRDFATVRKVLSMPQVNIVKKTEVQTGALTNESIYARGSFDKLISRKHRFESSKYGGFGSPTVTYSVLVVAKSKVQDGKVKKIKTGKELIGITLLDKLVFEKNPLKFIEDKGYGNVQIDKCIKLPKYSLFEFENGTRRMLASVMANNNSRGDLQKANEMFLPAKLVTLLYHAHKIESSKELEHEAYILDHYNDLYQLLSYIERFASLYVDVEKNISKVKELFSNIESYSISEICSSVINLLTLTASGAPADFKFLGTTIPRKRYGSPQSILSSTLIHQSITGLYETRIDLSQLGSD

SEQ ID NO: 558 - protein, 1367 aa, Streptococcus pyogenes
MDKKYSIGLDIGTNSVGWAVITDDYKVPSKKFKVLGNTDRHSIKKNLIGALLFGSGETAEATRLKRTARRRYTRRKNRICYLQEIFSNEMAKVDDSFFHRLEESFLVEEDKKHERHPIFGNIVDEVAYHEKYPTIYHLRKKLADSTDKADLRLIYLALAHMIKFRGHFLIEGDLNPDNSDVDKLFIQLVQIYNQLFEENPINASRVDAKAILSARLSKSRRLENLIAQLPGEKRNGLFGNLIALSLGLTPNFKSNFDLAEDAKLQLSKDTYDDDLDNLLAQIGDQYADLFLAAKNLSDAILLSDILRVNSEITKAPLSASMIKRYDEHHQDLTLLKALVRQQLPEKYKEIFFDQSKNGYAGYIDGGASQEEFYKFIKPILEKMDGTEELLVKLNREDLLRKQRTFDNGSIPHQIHLGELHAILRRQEDFYPFLKDNREKIEKILTFRIPYYVGPLARGNSRFAWMTRKSEETITPWNFEEVVDKGASAQSFIERMTNFDKNLPNEKVLPKHSLLYEYFTVYNELTKVKYVTEGMRKPAFLSGEQKKAIVDLLFKTNRKVTVKQLKEDYFKKIECFDSVEISGVEDRFNASLGAYHDLLKIIKDKDFLDNEENEDILEDIVLTLTLFEDRGMIEERLKTYAHLFDDKVMKQLKRRRYTGWGRLSRKLINGIRDKQSGKTILDFLKSDGFANRNFMQLIHDDSLTFKEDIQKAQVSGQGHSLHEQIANLAGSPAIKKGILQTVKIVDELVKVMGHKPENIVIEMARENQTTQKGQKNSRERMKRIEEGIKELGSQILKEHPVENTQLQNEKLYLYYLQNGRDMYVDQELDINRLSDYDVDHIVPQSFIKDDSIDNKVLTRSDKNRGKSDNVPSEEVVKKMKNYWRQLLNAKLITQRKFDNLTKAERGGLSELDKAGFIKRQLVETRQITKHVAQILDSRMNTKYDENDKLIREVKVITLKSKLVSDFRKDFQFYKVREINNYHHAHDAYLNAVVGTALIKKYPKLESEFVYGDYKVYDVRKMIAKSEQEIGKATAKYFFYSNIMNFFKTEITLANGEIRKRPLIETNGETGEIVWDKGRDFATVRKVLSMPQVNIVKKTEVQTGGFSKESILPKRNSDKLIARKKDWDPKKYGGFDSPTVAYSVLVVAKVEKGKSKKLKSVKELLGITIMERSSFEKNPIDFLEAKGYKEVKKDLIIKLPKYSLFELENGRKRMLASAGELQKGNELALPSKYVNFLYLASHYEKLKGSPEDNEQKQLFVEQHKHYLDEIIEQISEFSKRVILADANLDKVLSAYNKHRDKPIREQAENIIHLFTLTNLGAPAAFKYFDTTIDRKRYTSTKEVLDATLIHQSITGLYETRIDLSQLGGD

SEQ ID NO: 559 - protein, 1368 aa, Streptococcus sp.
MDKKYSIGLDIGTNSVGWAVITDDYKVPSKKFKVLGNTDRHSIKKNLIGALLFDSGEIAEATRLKRTARRRYTRRKNRICYLQEIFSNEMAKVDDSFFHRLEESFLVEEDKKHERHPIFGNIVDEVAYHEKYPTIYHLRKKLVDSTDKADLRLIYLALAHMIKFRGHFLIEGDLNPDNSDVDKLFIQLVQTYNQLFEENPINASGVDAKAILSARLSKSRRLENLIAQLPGEKKNGLFGNLIALSLGLTPNFKSNFDLAEDAKLQLSKDTYDDDLDNLLAQIGDQYADLFLAAKNLSDAILLSDILRLNSEITKAPLSASMIKRYDEHHQDLTLLKALVRQQLPEKYKEIFFDQSKNGYAGYIDGGASQEEFYKFIKPILEKMDGTEELLAKLNREDLLRKQRTFDNGSIPHQIHLGELHAILRRQEDFYPFLKDNREKIEKILTFRIPYYVGPLARGNSRFAWMTRKSEETITPWNFEEVVDKGASAQSFIERMTNFDKNLPNEKVLPKHSLLYEYFTVYNELTKVKYVTEGMRKPAFLSGEQKKAIVDLLFKTNRKVTVKQLKEDYFKKIECFDSVEISGVEDRFNASLGTYHDLLKIIKDKDFLDNEENEDILEDIVLTLTLFEDREMIEERLKTYAHLFDDKVMKQLKRRRYTGWGRLSRKLINGIRDKQSGKTILDFLKSDGFANRNFMQLIHDDSLTFKEDIQKAQVSGQGDSLHEHIANLAGSPAIKKGILQTVKVVDELVKVMGRHKPENIVIEMARENQTTQKGQKNSRERMKRIEEGIKELGSQILKEHPVENTQLQNEKLYLYYLQNGRDMYVDQELDINRLSDYDVDHIVPQSFIKDDSIDNKVLTRSDKNRGKSDNVPSEEVVKKMKNYWRQLLNAKLITQRKFDNLTKAERGGLSELDKAGFIKRQLVETRQITKHVAQILDSRMNTKYDENDKLIREVKVITLKSKLVSDFRKDFQFYKVREINNYHHAHDAYLNAVVGTALIKKYPKLESEFVYGDYKVYDVRKMLAKSEQEIGKATAKYFFYSNIMNFFKTEITLANGEIRKRPLIETNGETGEIVWDKGRDFATVRKVLSMPQVNIVKKTEVQTGGFSKESILPKRNSDKLIARKKDWDPKKYGGFDSPTVAYSVLVVAKVEKGKSKKLKSVKELLGITIMERSSFEKNPIDFLEAKGYKEVRKDLIIKLPKYSLFELENGRKRMLASAGELQKGNELALPSKYVNFLYLASHYEKLKGSPEDNEQKQLFVEQHKHYLDEIIEQISEFSKRVILADANLDKVLSAYNKHRDKPIREQAENIIHLFTLTNLGAPTAFKYFDTTIDRKRYTSTKEVLDATFIHQSITGLYETRIDLSQLGGD

SEQ ID NO: 560 - protein, 1368 aa, Streptococcus pyogenes
MDKKYSIGLDIGTNSVGWAVITDDYKVPSKKLKGLGNTDRHGIKKNLIGALLFDSGETAEATRLKRTARRRYTRRKNRICYLQEIFSNEMAKVDDSFFHRLEESFLVEEDKKHERHPIFGNIVDEVAYHEKYPTIYHLRKKLADSTDKVDLRLIYLALAHMIKFRGHFLIEGDLNPDNSDVDKLFIQLVQTYNQLFEENPINASRVDAKAILSARLSKSRRLENLIAQLPGEKKNGLFGNLIALSLGLTPNFKSNFDLAEDAKLQLSKDTYDDDLDNLLAQIGDQYADLFLAAKNLSDATLLSDILRVNSEITKAPLSASMIKRYDEHHQDLTLLKALVRQQLPEKYKEIFFDQSKNGYAGYIDGGASQEEFYKFIKPILEKMDGTEELLAKLNREDLLRKQRTFDNGSIPYQIHLGELHAILRRQEDFYPFLKDNREKIEKILTFRIPYYVGPLARGNSRFAWMTRKSEETITPWNFEEVVDKGASAQSFIERMTNFDKNLPNEKVLPKHSLLYEYFTVYNELTKVKYVTEGMRKPAFLSGEQKKAIVDLLFKTNRKVTVKQLKEDYFKKIECFDSVEISGVEDRFNASLGTYHDLLKIIKDKDFLDNEENEDILEDIVLTLTLFEDREMIEERLKTYAHLFDDKVMKQLKRRRYTGWGRLSRKLINGIRDKQSGKTILDFLKSDGFANRNFMQLIHDDSLTFKEDIQKAQVSGQGDSLHEHIANLAGSPAIKKGILQTVKVVDELVKVMGRHKPENIVIEMARENQTTQKGQKNSRERMKRIEEGIKELGSDILKEYPVENTQLQNEKLYLYYLQNGRDMYVDQELDINRLSDYDVDHIVPQSFLKDDSIDNKVLTRSDKNRGKSDNVPSEEVVKKMKNYWRQLLNAKLITQRKFDNLTKAERGGLSELDKVGFIKRQLVETRQITKHVAQILDSRMNTKYDENDKLIREVRVITLKSKLVSDFRKDFQFYKVREINNYHHAHDAYLNAVVGTALIKKYPKLESEFVYGDYKVYDVRKMIAKSEQEIGKATAKYFFYSNIMNFFKTEITLANGEIRKRPLIETNGETGEIVWDKGRDFATVRKVLSMPQVNIVKKTEVQTGGFSKESILPKRNSDKLIARKKDWDPKKYGGFDSPTVAYSVLVVAKVEKGKSKKLKSVKELLGITIMERSSFEKDPIDFLEAKGYKEVRKDLIIKLPKYSLFELENGRKRMLASAGELQKGNELALPSKYVNFLYLASHYEKLKGSPEDNEQKQLFVEQHKHYLDEIIEQISEFSKRVILADANLDKVLSAYNKHRDKPIREQAENIIHLFTLTNLGAPAAFKYFDTTIDRKRYTSTKEVLDATLIHQSITGLYETRIDLSQLGGD

SEQ ID NO: 561 - protein, 1368 aa, Streptococcus pyogenes
MDKKYSIGLDIGTNSVGWAVITDDYKVPSKKFKVLGNTDRHSIKKNLIGALLFDSGETAEATRLKRTARRRYTRRKNRICYLQEIFSNEMAKVDDSFFHRLEESFLVEEDKKHERHPIFGNIVDEVAYHEKYPTIYHLRKKLVDSTDKADLRLIYLALAHMIKFRGHFLIEGDLNPDNSDVDKLFIQLVQTYNQLFEENPINASGVDAKAILSARLSKSRRLENLIAQLPGEKKNGLFGNLIALSLGLTPNFKSNFDLAEDAKLQLSKDTYDDDLDNLLAQIGDQYADLFLAAKNLSDAILLSDILRVNTEITKAPLSASMIKRYDEHHQDLTLLKALVRQQLPEKYKEIFFDQSKNGYAGYIDGGASQEEFYKFIKPILEKMDGTEELLVKLNREDLLRKQRTFDNGSIPHQIHLGELHAILRRQEDFYPFLKDNREKIEKILTFRIPYYVGPLARGNSRFAWMTRKSEETITPWNFEEVVDKGASAQSFIERMTNFDKNLPNEKVLPKHSLLYEYFTVYNELTKVKYVTEGMRKPAFLSGEQKKAIVDLLFKTNRKVTVKQLKEDYFKKIECFDSVEISGVEDRFNASLGTYHDLLKIIKDKDFLDNEENEDILEDIVLTLTLFEDREMIEERLKTYAHLFDDKVMKQLKRRRYTGWGRLSRKLINGIRDKQSGKTILDFLKSDGFANRNFMQLIHDDSLTFKEDIQKAQVSGQGDSLHEHIANLAGSPAIKKGILQTVKVVDELVKVMGRHKPENIVIEMARENQTTQKGQKNSRERMKRIEEGIKELGSQILKEHPVENTQLQNEKLYLYYLQNGRDMYVDQELDINRLSDYDVDHIVPQSFLKDDSIDNKVLTRSDKNRGKSDNVPSEEVVKKMKNYWRQLLNAKLITQRKFDNLTKAERGGLSELDKAGFIKRQLVETRQITKHVAQILDSRMNTKYDENDKLIREVKVITLKSKLVSDFRKDFQFYKVREINNYHHAHDAYLNAVVGTALIKKYPKLESEFVYGDYKVYDVRKMIAKSEQEIGKATAKYFFYSNIMNFFKTEITLANGEIRKRPLIETNGETGEIVWDKGRDFATVRKVLSMPQVNIVKKTEVQTGGFSKESILPKRNSDKLIARKKDWDPKKYGGFDSPTVAYSVLVVAKVEKGKSKKLKSVKELLGITIMERSSFEKNPIDFLEAKGYKEVKKDLIIKLPKYSLFELENGRKRMLASAGELQKGNELALPSKYVNFLYLASHYEKLKGSPEDNEQKQLFVEQHKHYLDEIIEQISEFSKRVILADANLDKVLSAYNKHRDKPIREQAENIIHLFTLTNLGAPAAFKYFDTTIDRKRYTSTKEVLDATLIHQSITGLYETRIDLSQLGGD

SEQ ID NO: 562 - protein, 1368 aa, Streptococcus pyogenes
MDKKYSIGLDIGTNSVGWAVITDDYKVPSKKFKVLGNTDRHSIKKNLIGALLFDSGETAEATRLKRTARRRYTRRKNRICYLQEIFSNEMAKVDDSFFHRLEESFLVEEDKKHERHPIFGNIVDEVAYHEKYPTIYHLRKKLVDSTDKADLRLIYLALAHMIKFRGHFLIEGDLNPDNSDVDKLFIQLVQTYNQLFEENPINASGVDAKAILSARLSKSRRLENLIAQLPGEKKNGLFGNLIALSLGLTPNFKSNFDLAEDAKLQLSKDTYDDDLDNLLAQIGDQYADLFLAAKNLSDAILLSDILRLNSEITKAPLSASMIKRYDEHHQDLTLLKALVRQQLPEKYKEIFFDQSKNGYAGYIDGGASQEEFYKFIKPILEKMDGTEELLAKLNREDLLRKQRTFDNGSIPHQIHLGELHAILRRQEDFYPFLKDNREKIEKILTFRIPYYVGPLARGNSRFAWMTRKSEETITPWNFEEVVDKGASAQSFIERMTNFDKNLPNEKVLPKHSLLYEYFTVYNELTKVKYVTEGMRKPAFLSGEQKKAIVDLLFKTNRKVTVKQLKEDYFKKIECFDSVEISGVEDRFNASLGTYHDLLKIIKDKDFLDNEENEDILEDIVLTLTLFEDREMIEERLKTYAHLFDDKVMKQLKRRRYTGWGRLSRKLINGIRDKQSGKTILDFLKSDGFANRNFMQLIHDDSLTFKEDIQKAQVSGQGDSLHEHIANLAGSPAIKKGILQTVKVVDELVKVMGRHKPENIVIEMARENQTTQKGQKNSRERMKRIEEGIKELGSQILKEHPVENTQLQNEKLYLYYLQNGRDMYVDQELDINRLSDYDVDHIVPQSFIKDDSIDNKVLTRSDKNRGKSNNVPSEEVVKKMKNYWRQLLNAKLITQRKFDNLTKAERGGLSELDKAGFIKRQLVETRQITKHVAQILDSRMNTKYDENDKLIREVKVITLKSKLVSDFRKDFQFYKVREINNYHHAHDAYLNAVVGTALIKKYPKLESEFVYGDYKVYDVRKMIAKSEQEIGKATAKYFFYSNIMNFFKTEITLANGEIRKRPLIETNGETGEIVWDKGRDFATVRKVLSMPQVNIVKKTEVQTGGFSKESILPKRNSDKLIARKKDWDPKKYGGFDSPTVAYSVLVVAKVEKGKSKKLKSVKELLGITIMERSSFEKNPIDFLEAKGYKEVRKDLIVKLPKYSLFELENGRKRMLASAGELQKGNELALPSKYVNFLYLASHYEKLKGSPEDNEQKQLFVEQHKHYLDEIIEQISEFSKRVILADANLDKVLSAYNKHRDKPIREQAENIIHLFTLTNLGAPAAFKYFDTTIDRKRYTSTKEVLDATFIHQSITGLYETRIDLSQLGGD

SEQ ID NO: 563 - protein, 1368 aa, Streptococcus pyogenes
MDKKYSIGLDIGTNSVGWAVITDDYKVPSKKFKVLGNTDRHSIKKNLIGALLFDSGEIAEATRLKRTARRRYTRRKNRICYLQEIFSNEMAKVDDSFFHRLEESFLVEEDKKHERHPIFGNIVDEVAYHEKYPTIYHLRKKLVDSTDKADLRLIYLALAHMIKFRGHFLIEGDLNPDNSDVDKLFIQLVQTYNQLFEENPINASGVDAKAILSARLSKSRRLENLIAQLPGEKKNGLFGNLIALSLGLTPNFKSNFDLAEDAKLQLSKDTYDDDLDNLLAQIGDQYADLFLAAKNLSDAILLSDILRLNSEITKAPLSASMIKRYDEHHQDLTLLKALVRQQLPEKYKEIFFDQSKNGYAGYIDGGASQEEFYKFIKPILEKMDGTEELLAKLNREDLLRKQRTFDNGSIPHQIHLGELHAILRRQEDFYPFLKDNREKIEKILTFRIPYYVGPLARGNSRFAWMTRKSEETITPWNFEEVVDKGASAQSFIERMTNFDKNLPNEKVLPKHSLLYEYFTVYNELTKVKYVTEGMRKPAFLSGEQKKAIVDLLFKTNRKVTVKQLKEDYFKKIECFDSVEISGVEDRFNASLGTYHDLLKIIKDKDFLDNEENEDILEDIVLTLTLFEDREMIEERLKTYAHLFDDKVMKQLKRRRYTVWGRLSRKLINGIRDKQSGKTILDFLKSDGFANRNFMQLIHDDSLTFKEDIQKAQVSGQGDSLHEHIANLAGSPAIKKGILQTVKVVDELVKVMGRHKPENIVIEMARENQTTQKGQKNSRERMKRIEEGIKELGSQILKEHPVENTQLQNEKLYLYYLQNGRDMYVDQELDINRLSDYDVDHIVPQSFIKDDSIDNKVLTRSDKNRGKSDNVPSEEVVKKMKNYWRQLLNAKLITQRKFDNLTKAERGGLSELDKAGFIKRQLVETRQITKHVAQILDSRMNTKYDENDKLIREVKVITLKSKLVSDFRKDFQFYKVREINNYHHAHDAYLNAVVGTALIKKYPKLESEFVYGDYKVYDVRKMLAKSEQEIGKATAKYFFYSNIMNFFKTEITLANGEIRKRPLIETNGETGEIVWDKGRDFATVRKVLSMPQVNIVKKTEVQTGGFSKESILPKRNSDKLIARKKDWDPKKYGGFDSPTVAYSVLVVAKVEKGKSKKLKSVKELLGITIMERSSFEKNPIDFLEAKGYKEVRKDLIIKLPKYSLFELENGRKRMLASAGELQKGNELALPSKYVNFLYLASHYEKLKGSPEDNEQKQLFVEQHKHYLDEIIEQISEFSKRVILADANLDKVLSAYNKHRDKPIREQAENIIHLFTLTNLGAPTAFKYFDTTIDRKRYTSTKEVLDATFIHQSITGLYETRIDLSQLGGD

SEQ ID NO: 564 - protein, 1368 aa, Streptococcus pyogenes
MDKKYSIGLDIGTNSVGWAVITDDYKVPSKKFKVLGNTDRHSIKKNLIGALLFDSGETAEATRLKRTARRRYTRRKNRICYLQEIFSNEIAKVDDSFFHRLEESFLVEEDKKHERHPIFGNIVDEVAYHEKYPTIYHLRKKLADSTDKADLRLIYLALAHMIKFRGHFLIEGDLNPDNSDVDKLFIQLVQTYNQLFEENPINASRVDAKAILSARLSKSRRLENLIAQLPGEKRNGLFGNLIALSLGLTPNFKSNFDLAEDAKLQLSKDTYDDDLDNLLAQIGDQYADLFLAAKNLSDAILLSDILRVNTEITKAPLSASMIKRYDEHHQDLTLLKALVRQQLPEKYKEIFFDQSKNGYAGYIDGGASQEEFYKFIKPILEKMDGTEELLAKLNREDLLRKQRTFDNGSIPHQIHLGELHAILRRQEDFYPFLKDNREKIEKILTFRIPYYVGPLARGNSRFAWMTRKSEETITPWNFEEVVDKGASAQSFIERMTNFDKNLPNEKVLPKHSLLYEYFTVYNELTKVKYVTEGMRKPAFLSGEQKKAIVDLLFKTNRKVTVKQLKEDYFKKIECFDSVEISGVEDRFNASLGTYHDLLKIIKDKDFLDNEENEDILEDIVLTLTLFEDREMIEERLKTYAHLFDDKVMKQLKRRRYTGWGRLSRKLINGIRDKQSGKTILDFLKSDGFANRNFMQLIHDDSLTFKEDLQKAQVSGQGDSLHEHIANLAGSPAIKKGILQTVKVVDELVKVMGRHKPENIVIEMARENQTTQKGQKNSRERMKRIEEGIKELGSDILKEYPVETTQLQNEKLYLYYLQNGRDMYVDQELDINRLSDYDVDHIVPQSFLKDDSIDNKVLTRSDKNRGKSDNVPSEEVVKKMKNYWKQLLNAKLITQRKFDNLTKAERGGLSELDKAGFIKRQLVETRQITKHVAQILDSRMNTKYDENDKLIREVRVITLKSKLVSDFRKDFQFYKVREINNYHHAHDAYLNAVVGTALIKKYPKLESEFVYGDYKVYDIRKMIAKSEQEIGKATAKYFFYSNIMNFFKTEITLANGEIRKRPLIETNGETGEIVWDKGRDFATVRKVLSMPQVNIVKKTEVQTGGFSKESILPKRNSDKLIARKKDWDPKKYGGFDSPTVAYSVLVVAKVEKGKSKKLKSVKELVGITIMERSSFEKDPVDFLEAKGYKEVRKDLIIKLPKYSLFELENGRKRMLASAGELQKGNELALPSKYVNFLYLASHYEKLKGSPEDNEQKQLFVEQHKHYLDEIIEQISEFSKRVILADANLDKVLSAYNKHRDKPIREQAENIIHLFTLTNLGAPAAFKCFDTTIGRNRYKSIKEVLDATLIHQSITGLYETRIDLSQLGGD

SEQ ID NO: 565 - protein, 1368 aa, Streptococcus pyogenes [sequence omitted]

SEQ ID NO: 566 - protein, 1368 aa, Streptococcus pyogenes; identical to SEQ ID NO: 560

SEQ ID NO: 567 - protein, 1370 aa, Streptococcus ratti
  Streptococcus ratti FA-1 = DSM 20564
MKKPYSIGLDIGTNSVGWAVITDDYKVPAKKMKVLGNTDKNYIKKNLLGALLFDSGNTAEDRRLKRTARRRYTRRRNRLLYLQDIFSDEMNKVDESFFHRLEDSFLVSEDKRGDHHPIFGNVVDEVKYHEQFPTIYHLRKYLADTPEKADLRLVYLALAHMIKFRGHFLIDDPKLDVKNTDSQELFSQFLTAYDVTQEDSHLADVKINISDIITEKMNKSRKVEALLFHFPSQKKNSFFGNLVSLVFGLLPNFKTNFNLAEDAKLQLSKDSYDEDLENLLGQIGDEYTDVFVAARKLYDSILLSGILTVNDLSTKAILSASMVRRYEEHNKDLAKLKAFVKANFTHDVFKEVFSDASKNGYAGYIEGKTSQEDFYKYVKNLIGKVDGSADFIEKIDREDFLRKQRTFDNGSIPHQVHLAEMKAILRRQGEYYPFLKEHAEKIQQILTFRIPYYVGPLDRHGHSDFAWASFNSEEKVTPWNFEEIIDKNKSAQAFIERMTNQDLYLPNEKVLPKHSPLYEKYTVYNELTKIKYVTETGTAKFFDANLKQEIFDGLFKKERKVTKRKLLTFLEKNFDEFRIVDIQGLDKETETFNASYGIYQDLLKIIKDKAFMDDSENADILEDIVLTLTLFEDREMIKQRLAKYADLFDKKVIDNLARRRYTGWGRLSAKLLNGIRDKRSRKTIMDYLVDDGRSNRNLMQLITDDNLTFKDEIAKAQYSDNSDDLHQVVQDLAGSPAIKKGILQSVKIVDELVKVMGYEPEQIVVEMARENQTTAKGRRNSQQRYKRLEEAIKNLDRDLNYKILKEHPTDNQALQNDRLFLYYLQNGRDMYTGESLDINRLSDYDIDHIIPQAFIKDNSIDNRVLVSSAKNRGKSDDVPSEDVVNRMRPFWNKLLNCGLISQRKYSNLTKKELTPNDKAGFIKRQLVETRQITKHVARILDEHFNKEFDEDKKRIRKVKVVTLKSNLVSNFRKEFELYKVREINDYHHAHDAYLNAVVAKALLMKYPKLEPEFVYGEYPKYNSYRERKTATQRMFFYSNIMNMFKSKVKLADERIIERPMIEVNDETGEIAWDKTKHIATVKKVLSYPQINIVKKVEEQTGGLTNETIYPRGSFDKLLNRKNTLEASKYGGFGSPTVAYCVLVVADSKNENGKVKKLKLGSELLGITILEKNDFENNSLDFLSRKGYQGVQEKKIIKLPKYSLFEFQDGSRRMLSSVMANDNKRGDLQKANEMILPAYLVKLLYHAKHINSVGEPAHKNYINEHCSEFQDLLNYIRQFADKFVDVDKNLSKIRSLSKSMAEYSVSEICSSFVNLLTLTALGAPADFKFFGTTIPRKRYGSPQSILSATLIHQSITGLYETRIDLSKLGED

SEQ ID NO: 568 - protein, 1127 aa, Streptococcus salivarius
MSDLVLGLDIGIGSVGVGILNKVTGEIIHKNSRIFPAAQAENNVERRINRQGRRLTRRKKHRRVRLNHLFEESGLITDFTNVSINLNPYQLRVKGLTDELSNEELFIALKNMVKHRGISYLDDASDDGNSSVGDYAQIVKENSKQLETKTPGQIQLERYQKYGQLRGDFTVEEDGKKHRLINVFPTSAYRAEALRILQTQQEFNPQITDEFINSYLQILTGKRKYYHGPGNEKSRTDYGRYTTKKDSEDEYITLDNIFGILIGKCTFYPEEYRAAKASYTAQEFNLLNDLNNLTVPTETKKLSEEQKNQIITNVKNEKAMGPAKLFKYIAKLLSCDVADIKGYRIDKSDKAEIHTFEAYRKMKTLATIDIEQMERENLDKLAYVLTLNTEKEGIQEALEHEFADGTFSQEQIDELVQFRKANSSIFGKGWHSFSVKLMMELIPELYATSEEQMTILTRLGKQKTTSSSNKTKYIDEKQLTEEIYNPVAAKSVRQAIKIVNAAIKEYGDFDNIVIEMARETNEDDEKKAIQKIQKANKDEKDAAMLKAANQYNGKAELPHSVFHGHKQLATKIRLWHQQGERCLYTGKTISIHDLINNSNQFEIDHILPLSITFDDSLANKVLVYATANQEKGQRTPYQALDSMDDAWSFRELKAFVRDSKALSNKKKEYLLTEEDISKFDVRKKFIERNLVDTRYASRVVLNALQEHFRVHKTDTKVSVVRGQFTSQLRRHWGIEKTRDTYHHHAVDALIIAASSQLNLWKKQKNTLVSYSEDQLLDIETGELISDDEYKESVFKAPYQHFVDTLKSKEFEDSILFSYQVDSKFNRKISDATIYATRQAKVGKDKKDETYVLGKIKDIYSQTGYDAFIKIYKKDKSKFLMYRHDPQTFEKVIEPILENYPNKELNEKGKEVPCNPFLKYKEDHGYIRKYSKKGNGPEIKSLKYYDSKLGNHIDITPKNSNNKVVLQSVSPWRADVYFNKTTGKYEILGLKYADLKFEKGTGTYKISEEKYNDIKIKEGVDSDSEFKFTLYKNDLLLIKDTETKEQQLFRFLSRTMPNVKHYVELKPYDKQKFDDNEELIKILGIVAKGGQCKKGVSKPNISIYKIRTDVLGNQHIIKNEGDKPKLDF

SEQ ID NO: 569 - protein, 1385 aa, Streptococcus salivarius
  Streptococcus salivarius K12
MTKPYSIGLDIGTNSVGWAVITDDYKVPSKKMKVLGNTSKKYIKKNLLGALLFDSGITAEGRRLKRTARRRYTRRRNRILYLQEIFSTEMATLDDAFFQRLDDSFLVPDDKRDSKYPIFGNLVEEKVYHDEFPTIYHLRKHLADSSKKADLRLVYLALAHMIKYRGHFLIEGDFNSKNNDLQKNFQDFLDTYNAIFESDLSLENSKQLEEIVKDKISKSAKKDRILKLFPGEKNSGIFSEFLKLIVGNQADFRKYFNLDEKTSLQFSKESYDEDLETLLGHIGDDYSDVFLKAKKLYDAILLSGILTVTDNGTEAPLSSAMIMRYKEHEEDLALLKAYIRNISLETYNEVFKDNTKNGYAGYIDGKTSQEDFYVYLKRLLAGLEGADYFLEKIDREDFLRKQRTFDNGSIPYQIYLQEMRAILDKQAKFYPFLAKNKERIEKILTFRIPYYVGPLARGNSDFAWSIRKRNEKITPWNFEDVIDKESSAEAFINRMTSFDLYLPEEKVLPKHSLLYENFTVYNELTKVRFIAEGMRDYQFLDSKQKKDIVRLYFKGKRKVTDKDIIEYLHAIDGYDGIELKGIEKQFNSSLSTYHDLLNIINDKEFLDDSSNETIIEEIIHTLTMFEDREMIKQRLSKFDNIFDKSVLKKLSRRHYTGWGKLSAKLINGIRDEKSGNTILDYLIDDGVSNRNFMQLIHDDALSFKKKIKKAQIIGDKDNIKQVVKSLPGSPAIKKGILQSIKIVDELVKVMGREPESIVVEMARENQYTNQGKSNSQQRLKRLEESLKGLGSKILKENVPTRLSKIDNNALQNDRLYLYYLQNGKDMYTGEELDIDRLSNYDIDHIIPQAFLKDDSIDNKVLVSSASNRGKSDDVPSLEVVKKRKTLWYQLLKSKLISQRKFDNLTKAERGGLSQEEKAGFIQRQLVETRQITKHVARLLDERFNNKKDENNRTLRTVKIITLKSSLVSQFRKDFELYKVREINDFHHAHDAYLNAVVASALLKKYPKLEPEFVYGDYPKYNSFRERKSATEKVYFYSNIMNIFKKSIPLADGTVIDRPLIEVNEETGESVWNKVADLNTVRKVLSYSQVNIVKKVEEQNHGLDRGKPKGLFNANLSSKPKPNSKENLVGAKEYLDPKKYGGYAGISNSFAILVKGTIEKGAKKKITNVLEFQGISILDRIYYRKDKLNFLLEKGYKDIELIIELPKYSLFELSDGSRRMLASILSTNNKRGEIHKGNQIFISQKFVKLLYHAKRISSTFNENHRKYVENHKKEFEELFYYILEFNENYVGAKKNGELLKSAFQSWQNHSIDELCSSFIGPTGSERKGLFELTSRGGAADFEFLGVKIPRYRDYTPSSLLKDATLIHQSVTGLYETRIDLGKLGED

SEQ ID NO: 570 - protein, 1135 aa, Streptococcus salivarius
  Streptococcus salivarius PS4
MSDLVLGLDIGIGSVGVGILNKVTGEIIHKNSRIFPAAQAENNLERRTNRQGRRLTRRKKHRRVRLNHLFEESGLITDFTKVSINLNPYQLRVKGLTAELSNEELFIALKNMVKHRGISYLDDASDDGNSSVGDYAQIVKENSKQLETKTPGQIQLERYQKYGQLRGDFTVEEDGRKHRLINVFPTSAYHAEALRILQTQQEFNPQITDEFINSYLEILTGKRKYYHGPGNEKSRTDYGKYTTKKDAQGQYITLNNIFGILIGKCTFYPEEYRAAKASYTAQEFNLLNDLNNLTVPTETKKLSEEQKYQIITYVKNEKAMGPAKLFKYIAKLLACDIADIKGYRIDKSDKAEIHTFEAYRKMKTLETIDIEQIEREKLDKLAYVLTLNTEREGIQEALDHEFADGTFSQEQVDELVQFRKANSSIFGKGWHSFSVKLMMELIPELYATSEEQMTILTRLGKQKTTSSSNKTKYIDEKQLTEEIYNPVVAKSVRQAIKIVNAAIKKYGDFDNIVIEMARETNEDDEKKAIQKIQKANKAEKDAAMRKAANQYNGKAELPHSVFHGHKQLATKIRLWHQQGERCLYTGKTISIHDLINNPNQFEIDHILPLSITFDDSLANKVLVYATANQEKGQRTPYQALDSMDDAWSFRELKAFVRESKALSNKKKEYLLTEEDISKFDVRKKFIERNLVDTRYASRVVLNALQEHFKAHKIDTKVSVVRGQFTSQLRRHWGIDKTRDTYHHHAVDALIIAASSQLNLWKKQKNTLVSYSEDQLLDIETGELISDDEYKESVFKAPYQHFVDTLKSKEFEDSILFSYQVDSKFNRKISDATIYATRQAKVGKDKKDETYVLGKIKDIYALGTKTPSKTGFYKFLDLYNKDKSQFLVYQKDRKTWDEVIEKIMEQYRPFKESDKNGKEVDFNPFEKYRIENGPIRKYSRKGNGPEIKSLKYYASKLGNHIDITPKDSNNKVVLQSVSPWRADVYFNKTTGSYEILGLKYADLQFEKGTGTYRISEEKYNDIKKKEGVDSDSEFKFTLYKNDLLLIKDTETKEQRLFRFLSRSMPNKKHYVELKPYSKDKFEKNESLIEILGSADKSGRCIKGLAKSNLSIFKVRTDVLGNQHIIKNEGDKPKLDF

SEQ ID NO: 571 - protein, 1377 aa, Streptococcus sanguinis
  Streptococcus sanguinis SK115
MKKPYSIGLDIGTNSVGWAVITDDYKVPSKKMKVLGNTDKHFIKKNLIGALLFDEGTTAEDRRLKRTSRRRYTRRKNRLRYLQEIFSEEISKLDSSFFHRLDDSFLVPEDKRGSKYPIFATLEEEKEYHKKFPTIYHLRKHLADSKEKTDLRLIYLALAHMIKYRGHFLYEESFDIKNNDIQKIFNEFISIYDNTFEGSSLSGQNAQVEAIFTDKISKSTKRERVLKLFSDEKSTGLFSEFLKLIVGNQADFKKHFDLEEKAPLQFSKDTYDEDLENLLGQIGDGFADLFLVAKKLYDAILLSGILTVTDPSTKAPLSASMIERYENHQEDLAALKQFIKNNLSEKYAEVFSDQSKDGYAGFIDGKTTQEAFYKYIKNLLSKLEGADYFLNKIEREDFLRKQRTFDNGSIPHQIHLQEMNAILRRQGEHYLFLKENREKIEKILAFRIPYYVGPLARGNRDFAWLTRNSDQAIRPWNFEEVVDKASSAEDFINKMTNYDLYLPEEKVLPKHSLLYETFAVYNELTKVKFIAEGLRDYQFLDSGQKKQIVNQLFKDKRKVTEKDIIHYLHNVDGYDGIELKGIEKQFNASLSTYHDLLKIIKDKEFMDNPKNGEILENIIHTLTIFEDREMIKQRLAQYDTLFDEKVIKALTRRHYTGWGKLSAKLINGIRDKQTGKTILEYLIDDGDCNRNFMQLINDDGLSFKEIIQKAQVVGKTDDVKQVVQEIPGSPAIKKGILQSIKIVDELVKVMGHNPESIVIEMARENQTTAKGKKNSQQRYKRIEDALKNLAPGLDSNILKENPTDNIQLQNDRLFLYYLQNGKDMYTGKAIDINQLSNYDIDHIIPQAFIKDDSLDNRVLTSSKDNRGKSDNVPSIEVVQKRKAFWQQLLDSKLISERKFNNLTKAKRGGLDERDKVGFIKRQLVETRQITKHVAQLLDTRFNTEVNEENQKIRTVKIITLKSNLVSNFRKEFGLYKVREINDYHHAHDAYLNAVVAKAILKKYPKLEPEFVYGDYQKYDLKRYILKSKASNTIDKATEKYFFYSNLLNFFKEKVRYADGTIKKRENIEYSNDTGEIAWNKEKDFATIKKVLSLPQVNIVKKTEEQTVGQNGGLFDNNIVSKKKVVDASKLIPIKSSLSPEKYGGYARPTIAYSVLVIADIEKGKGKAKKLKRIKEIVGITIQDKKKFESNPVTYLEECGYKNINSNLIIKLPKYSLFEFNDGQRRLLASSIELQKGNELILPYHLTALLYHAQRINKISEPIHKQYVEAHQNEFKELLTTIISLSKKYIQKPNVELLLQQAFDQADKDIYQLSESFISLLKLTSFGAPGAFKFLGVEISQSSVRYKPNSQFLDTTLIHQSITGLYETRIDLSKLGED

SEQ ID NO: 572 - protein, 1392 aa, Streptococcus sanguinis
  Streptococcus sanguinis SK330
MENKNYSIGLDIGTNSVGWAVITDDYKVPSKKMKVFGNTDKHFIKKNLIGALLFDEGATAEDRRLKRTARRRYTRRKNRLRYLQEIFSEEISKLDSSFFHRLDDSFLVPKDKRGSKYPIFATLEEEKEYHKKFPTIYHLRKHLADSKEKTDLRLIYLALAHMIKYRGHFLYEESFDIKNNDIQKIFNEFISIYDNTFEGSSLSGQNAQVEAIFTDKISKSAKRERVLKLFSDEKSTSLFSEFLKLIVGNQADFKKHFDLEEKAPLQFSKDTYDEDLENLLGQIGDGFTDLFLVAKKLYDAILLSGILTVTDPSTKAPLSASMIERYESHQKDLAALKQFIKNNLPKRYNEVFSDQSKDGYAGYIDGKTTQEAFYKYIKNLLSKFEGADYFLDKIEREDFLRKQRTFDNGSIPHQIHLQEMNAILRRQGEHYPFLKENREKIEKILTFRIPYYVGPLARGNRDFAWLTRNSDQAIRPWNFEEIVDKASSAEEFINKMTNYDLYLPEEKVLPKHSLLYETFAVYNELTKVKFIAEGLRDYQFLDSGQKKQIVNQLFKEKRKVTEKDIIHYLHNVDGYDGIELKGIEKQFNASLSTYHDLLKIIKDKEFMDDPKNEEILENIVHTLTIFEDREMIKQRLAQYDSIFDEKVIKALTRRHYTGWGKLSAKLINGICDKQTGDTILDYLIDDGKINRNFMQLINDDGLSFKEIIQKAQVVGKTDDVKQVVQELPGSPAIKKGILQSIKIVDELVKVMGYAPESIVIEMARENQTTARGKKNSQQRYKRIEDSLKNLAPGLDSNILKENPTDNIQLQNDRLFLYYLQNGKDMYTGKPLDIDQLSSYDIDHIIPQAFIKDDSIDNRVLTSSKDNRGKSDNVPSLEVVQKRKAFWQQLLDSKLISERKFNNLTKAERGGLDERDKVGFIRRQLVETRQITKHVAQILDASFNTEVNEKNQKIRTVKIITLKSNLVSNFRKEFELYKVREINDYHHAHDAYLNAVVAKAILKKYPKLEPEFVYGDYQKYDLKRYISRFKPSKEIEKATEKYFFYSNLLNFFKEEVHYADGIIVKRENIEYSKDTGEIAWNKEKDFATIKKVLSYPQVNIVKKTEIQTHGLDRGKPKGLFNSNPSPKPSEDSKENLVPIKQGLDPRKYGGYAGISNSYAVLVKAIVEKGAKKQQKTILEFQGISILDKINFENNKENYLLKKRYIEILSTITLPKYSLFEFPDGTRRRLASILSTNNKRGEIHKGNELVLPGKYTTLLYHAKNINKKLEPEHLEYVEKHRNDFAKLLECVLNFNDKYVGALKNGERIRQAFTDWETVDIEKLCFSFIGPENSKNAGLFELTSQGSASDFEFLGVKIPRYRDYAPSSLLKATLIHQSITGLYETRIDLSKLGED

SEQ ID NO: 573 - protein, 1370 aa, Streptococcus sanguinis
  Streptococcus sanguinis SK353
MKKPYSIGLDIGTNSVGWAVVTDDYKVPAKKMRVFGDTDRSHIKKNLLGTLLFDDGNTAESRRLKRTARRRYTRRRNRILYLQEIFTESMNEIDESFFHRLDDSFLVPEDKRGSKYPIFATLQEEKEYHKQFPTIYHLRKQLADSKEKSDVRLIYLALAHMIKYRGHFLYEETFDIKNNDIQKIFNEFINIYDNTFEGSSLSGQNAQVEAIFTDKISKSAKRERVLKLFPDEKSTGLFSEFLKLIVGNQADFKKHFDLEEKAPLQFSKDTYDEELENLLGQIGDDFADLFLIAKKLYDAILLSGILTVTDPSTKAPLSASMIERYENHQKDLAALKQFIKNNLPEKYVEVFSDQSKDGYAGYIDGKTTQEAFYKYIKNLLSKFEGADYFLDKIEREDFLRKQRTFDNGSIPHQIHLQEMNAILRRQGEHYPFLKENREKIEKILTFRIPYYVGPLARDNRDFSWLTRNSDEPIRPWNFEEVVDKARSAEDFIHRMTNYDLYLPEEKVLPKHSLLYETFAVYNELTKVKFIAEGLRDYQFLDSGQKKQIVNQLFKEKRKVTEKDIIHYLHNVDGYDGIELKGIEKQFNANLSTYHDLLKITKDKEFMDDPKNEEILENIVHTLTIFEDREMIKQRLAQYDTLFDEKVIKALTRRHYTGWGKLSAKLINGIRDKQSGKTILDYLIDDDKINRNFMQLINDDGLSFKEIIQKAQVVGKTDDVKQVVQELPGSPAIKKGILQSIKIVDELVKVMGYALESIVIEMARENQTTARGKKNSQQRYKRIEDALKNLAPGLDSNILKENPTDNIQLKNDRLFLYYLQNGKDMYTGKPLDINQLSSYDIDHIIPQAFIKDDSIDNRVLTSSKDNRGKSDNVPSLEVVQKRKAFWQQLLDSKLISERKFNNLTKAERGGLDERDKVGFIRRQLVETQQITKNVAQILDARFNTEVKEKNQKIRTVKIITLKSNLVSNFRKEFGLYKVREINNYHHAHDAYLNAVVAKAILKKYPKLEPEFVYGDYQKYDLKKYISRFKPSKEIEKATEKYFFYSNLLNFFKEEVLYADGTIRKRENIEYSKDTGEIAWDKEKDFATIKKVLSYPQVNIVKKREVQTGGFSKESILPKGNSDKLIPRKTKDILWDTTKYGGFDSPVIAYSILLIADIEKGKAKKLKTVKTLVGITIMEKAAFEENPITFLENKGYHNVRKENILCLPKYSLFELENGRRRLLASAKELQKGNEIVLPVCLTTLLYHSKNLHKLDEPEHLEYIQKHRNEFKDLLNLVSEFSQKYILAEANLEKIKDLYADNEQADIEILANSFINLLTFTALGAPAAFKFFGKDVDRKRYTTVSEILNATLIHQSITGLYETRIDLSKLGEE

SEQ ID NO: 574 - protein, 1421 aa, Streptococcus sanguinis
  Streptococcus sanguinis SK49
MTKFNKNYSIGLDIGVSSVGYAVVTEDYRVPAFKFKVLGNTEKEKIKKNLIGSTTFVSAQPAKGTRVFRVNRRRIDRRNHRITYLRDIFQKEIEKVDKNFYRRLDESFRVLGDKSEDLQIKQPFFGDKELETAYHKKYPTIYHLRKHLADADKNSPVADIREVYMAISHILKYRGHFLTLDKINPNNINMQNSWIDFIESCQEVFDLEISDESKNIADIFKSSENRQEKVKKILPYFQQELLKKDKSIFKQLLQLLFGLKTKFKDCFELEEEPDLNFSKENYDENLENFLGSLEEDFSDVFAKLKVLRDTILLSGMLTYTGATHARFSATMVERYEEHRKDLQRFKFFIKQNLSEQDYLDIFGRKTQNGFDVDKETKGYVGYITNKMVLTNPQKQKTIQQNFYDYISGKITGIEGAEYFLNKISDGTFLRKLRTSDNGAIPNQIHAYELEKIIERQGKDYPFLLENKDKLLSILTFKIPYYVGPLAKGSNSRFAWIKRATSSDILDDNDEDTRNGKIRPWNYQKLINMDETRDAFITNLIGNDIILLNEKVLPKRSLIYEEVMLQNELTRVKYKDKYGKAHFFDSELRQNIINGLFKNNSKRVNAKSLIKYLSDNHKDLNAIEIVSGVEKGKSFNSTLKTYNDLKTIFSEELLDSEIYQKELEEIIKVITVFDDKKSIKNYLTKFFGHLEILDEEKINQLSKLRYSGWGRYSAKLLLDIRDEDTGFNLLQFLRNDEENRNLTKLISDNTLSFEPKIKDIQSKSTIEDDIFDEIKKLAGSPAIKRGILNSIKIVDELVQIIGYPPHNIVIEMARENMTTEEGQKKAKTRKTKLESALKNIENSLLENGKVPHSDEQLQSEKLYLYYLQNGKDMYTLDKTGSPAPLYLDQLDQYEVDHIIPYSFLPIDSIDNKVLTHRENNQQKLNNIPDKETVANMKPFWEKLYNAKLISQTKYQRLTTSERTPDGVLTESMKAGFIERQLVETRQIIKHVARILDNRFSDTKIITLKSQLITNFRNTFHIAKIRELNDYHHAHDAYLAVVVGQTLLKVYPKLAPELIYGHHAHFNRHEENKATLRKHLYSNIMRFFNNPDSKVSKDIWDCNRDLPIIKDVIYNSQINFVKRTMIKKGAFYNQNPVGKFNKQLAANNRYPLKTKALCLDTSIYGGYGPMNSALSIIIIAERFNEKKGKIETVKEFHDIFIIDYEKFNNNPFQFLNDTSENGFLKKNNINRVLGFYRIPKYSLMQKIDGTRMLFESKSNLHKATQFKLTKTQNELFFHMKRLLTKSNLMDLKSKSAIKESQNFILKHKEEFDNISNQLSAFSQKMLGNTTSLKNLIKGYNERKIKEIDIRDETIKYFYDNFIKMFSFVKSGAPKDINDFFDNKCTVARMRPKPDKKLLNATLIHQSITGLYETRIDLSKLGED

SEQ ID NO: 575 - protein, 1026 aa, Streptococcus sp.
  Streptococcus sp. BS35b
MNGLVLGLDIGIASVGVGILEKNSGKIIHANSRLFPAATADNNVERRKNRQARRLNRRKKHRGVRFQDLFEDYGLLTDFSKVSINLNPYRLRVDGLNQQLTNEELFIALKNIVKRRGISYLDDASEDGGAVSSDYGKAVEENRKLLAEQTPGQIQLERFEKYGQVRGDFTVVENGEKRRLINVFSTSAYRKEAEKILRKQQEFNNQITDEFIEDYLKILTGKRKYYHGPGNEKSRTDYGRFRTDGTTLDNIFGVLIGKCTFYPNEYRASKSSYTAQEFNLLNDLNNLTVPTETKKLSEEQKKVIVEYAKEAKTLGASTLLKYIVKMIDASVDQISGYRVDVNNKPEMHTFEVYRKMQSLETISVGELSRNVLDELAHILTLNTEREGIEEAINSKLMGVFSQDQVLELVQFRKNNSSLFSKGWHNFSLKLMMELIPELYETSEEQMTILTRLGKQKSKETSKRTKYIDEKELTEEIYNPVVAKSVRQAIKIINEATKKHGIFDNIVIEMARENNEEDAKKDYIKRQKANQDEKNAAMEKAAFQYNGKKELPGNIFNGHKELATKIRLWHQQGEKCLYTGKTIPISDLIHNQYKYEIDHILPLSLSFDDSLSNKVLVHATANQEKGQRTPFQALDSMDDAWSYREFKSYVKDLKSLSNKKKDYLLTEEDISKIEVKQKFIERNLVDTRYSSRVVLNALQDFYKSHQFDTTISVVRGQFTSQLRRKWGLEKSRETYHHHAVDALIIAASSQLRLWKKQNNPLITYKEGQFIDSQTGEIISLTDDEYKELVFKAPYDHFVDTLHSKTFEDGILFSYQVDSKYNRKISDATIYATRKAKLDKDKSEETYVLGKIKDIYSQAGYDAFIKIYNKDKRKFLMYHKDPQTFEKVIEEILRTYPSKERNDKNKEVPCNPFEKYRQENGPIRKYSKKGNGPEIKCLKYYDNKLGNYIDISPDGSDNQVVLQSLKPWRTDVYFNHQTKKYELMGLKYSDLSFEKGSGKYSISNEKYNSIKRIEGVNEQSEFKFTLYK

SEQ ID NO: 576 - protein, 1139 aa, Streptococcus sp.
  Streptococcus sp. C150
MSDLVLGLDIGIGSVGVGILNKVTGEIIHKNSRIFPAAQAENNLERRTNRQGRRLTRRKKHRRVRLNHLFEESGLITDFTKVSINLNPYQLRVKGLTAELSNEELFIALKNMVKHRGISYLDDASDDGNSSVGDYAQIVKENSKQLETKTPGQIQLERYQKYGQLRGDFTVEEDGRKHRLINVFPTSAYHAEALRILQTQQEFNPQITDEFINSYLEILTGKRKYYHGPGNEKSRTDYGKYTTKKDAQGQYITLNNIFGILIGKCTFYPEEYRAAKASYTAQEFNLLNDLNNLTVPTETKKLSEEQKYQIITYVKNEKAMGPAKLFKYIAKLLSCDVADIKGYRIDKSDKAEIHTFEAYRKMKTLETLDVKKMAREELDKLAYVLTLNTEREGIQEALDHEFADGTFSQEQVDELVQFRKANSSIFGKGWHSFSVKLMMELIPELYATSEEQMTILTRLGKQKTTSSSNKTKYIDEKQLTEEIYNPVVAKSVRQAIKIVNAAIKKYGDFDNIVIEMARETNEDDEKKAIQKIQKANKAEKDAAMRKAANQYNGKAELPHSVFHGHKQLATKIRLWHQQGERCLYTGKTISIHDLINNPNQFEIDHILPLSITFDDSLANKVLVYATANQEKGQRTPYQALDSMDDAWSFRELKAFVRESKALSNKKKEYLLTEEDISKFDVRKKFIERNLVDTRYASRVVLNALQEHFRTHKIDTKVSVVRGQFTSQLRRHWGIEKTRDTYHHHAVDALIIAASSQLNLWKKQKNTLVSYSEDQLLDIETGELISDDEYKESVFKAPYQHFVDTLKSKEFEDSILFSYQVDSKFNRKISDATIYATRKAKLDKEKKEYTYTLGKIKDIYALGTKTPSKTGFYKFLDLYKKDKSQFLMYQKDRRTWDEVIEKILEQYRPFKEKDKNGKEVDFNPFEKYRIENGPIRKYSRKGNGPEIKSLKYYDNLLGRFVDITPSESKNPVALLSLNPWRTDVYYNTETRKYEFLGLKYADLCFEKGGSYGISKVKYNKIREKEGIGKNSEFKFTLYKNDLILIKDTETNRQQIFRFWSRTGKDNPKSFEKHKLELKPYEKTRFEKGEELKVLGKVPPSSNRLQKNMQIENLSIYKVRTDVLGNQHIIKNEGDKPKLDF

SEQ ID NO: 577 - protein, 1377 aa, Streptococcus sp.
  Streptococcus sp. C300
MNNKPYSIGLDIGTNSVGWSVITDDYKVPSKKMKVLGNTDKRFIKKNLIGALLFDEGTTAEARRLKRTARRRYTRRKNRLRYLQEIFAEEMSKVDSSFFHRLDDSFLIPEDKRGSKYPIFATLVEEKEYHKQFPTIYHLRKQLADSKEKADLRLIYLVLAHMIKYRGHFLYEEAFDIKNNDIQKIFNEFISIYDNTFEGSSLSGQNAQVETIFTDKISKSAKRERVLKLFPDEKSTGLFSEFLKLIVGNQADFKKHFDLEEKAPLQFSKDTYDEDLENLLEQIGDDFADLFVAAKKLYDAILLSGILTVTDPSTKAPLSASMIERYENHQKDLAVLKQFIKTNLPEKYVEVFSDQSKDGYAGYIDGKTTQEAFYKYIKNLLSKFDGADYFLDKIEREVFLRKQRTFDNGSIPHQIHLQEMNTILRRQGEHYPFLKENKEKIEKILTFRIPYHVGPLARGNRDFAWLTRNSDQAIRPWNFEEIVDKASSAEDFINKMTNYDLYLPEEKVLPKHSLLYETFAVYNELTKVKFIAEGMRDYQFLDSGQKKKIINQLFKKKRKVTEDDIIDCLQKIDNYDGIELKGIEKQFNASLSTYHDILKIIRDKEFMDDPKNGDILENVIHTLTIFEDREMIKQRLAQYNSIFDEKVIKALSRKHYTGWGKLSAKLIDGIRDKQTGKTILDYLMDDGKSNRNFMQLIKDDELSFTEIIQKAQVVGDTDNLRQVVQNLPGSPAIKKGILQSIKIVDELVKVMGHAPESIVIEMARENQTTARGKKNSQQRYKRIEDSLKNLASGLDSNILKENPTDNIQLQNDRLFLYYLQNGKDMYTGEALNINQLSSYDIDHIIPQAFIKDDSLDNRVLTSSKDNRGKSDNVPSLEVVEKMKAFWQQLLDSKLISERKYNNLTKAERERGGLNELDKVGFIKRQLVETRQITKHVAQILDARFNKEVTEKNKKNRNVKIITLKSNMVSNFRKEFGLYKVREINDYHHAHDAYLNAVVAKAILKKYPKLEPEFVYGDYQKYDLKRYISRSKDPKEVEKATEKYFFYSNLLNFFKEEVHYADGTIVKRENIEYSKDTGEIAWNKEKDFATIKKVLSLPQVNIVKKTEEQTVGQNGGLFDNNIVSKKKVVDASKLIPIKSGLSPEKYGGYARPTIAYSVLVTYKQNNKIKNTMVGIPVLTKLEFERDPNLYLRNLGINNVSHVIKLVKYTVLEFKHKYGTYRRFIVSNQELKRANQIFVTTKQMKLISQYTTLDKNEHDSLLKNNQQLIQSIWNQFLEFMLATDLVNKKQYDELILTNNQTIEECRNIMNRVITTLSFTNINAGQKKIIFDDTLSLPIKRWQFTDSDKMVKKIIESTLIHQSITGLYETRIDLSKLGED

SEQ ID NO: 578 - protein, 1371 aa, Streptococcus sp.
  Streptococcus sp. F0441
MENKNYSIGLDIGTNSVGWSVITDDYKVPSKKMKVLGNTDKHFIKKNLIGALLFDEGTTAEARRLKRTARRRYTRRKNRLRYLQEIFSEEIGKVDSSFFHRLDDSFLIPEDKRGSKYPIFATLAEEKKYHKQFPTIYHLRKQLADSKEKTDLRLIYLALAHMIKYRGHFLYEEAFDIKNNDIQKIFNEFISIYNNTFEGNSLSGQNVQVEAIFTDKISKSAKRERVLKLFPDEKSTGLFSEFLKLIVGNQADFKKHFDLEEKAPLQFSRDTYDEDLENLLGQIGDDFADLFLVAKKLYDAILLSGILTVTNPSTKAPLSASMIERYENHQKDLASLKQFIKNNLPEKYDEVFSDQSEDGYAGYIDGKTTQETFYKYIKNLLSKFEGADYFLDKIEREDFLRKQRTFDNGSIPHQIHLQEMNAILRRQGEHYPFLKENKEKIEKILTFRIPYYVGPLARGNRDFAWLTRNSDQAIRPWNFEEIVDKASSAEDFINKMTNYDLYLPEEKVLPKHSLLYETFAVYNELTKVKFIAEGLRDYQFLDSGQKKQIVTQLFKEKRKVTEKDIIQFLHNVDGYDGIELKGIEKQFNASLSTYHDLLKIIKDKAFMDDAKNEAILENIVHTLTIFEDREMIKQRLAQYDSLFDEKVIKALTRRHYTGWGKLSAKLINGISDKQTGNTILDYLIDDGEINRNFMQLINDDGLSFKEIIQKAQVVGKTNDVKQVVQELPGSPAIKKGILQSIKIVDELVKVMGHAPESIVIEMARENQTTARGKKNSQQRYKRIEDSLKILASGLNSKILKEHPTDNIQLQNDRLFLYYLQNGKDMYTGEALDINQLSSCDIDHIIPQAFIKDDSLDNRVLTSSKDNRGKSDNVPSLEVVDKMKVFWQQLLDSKLISYRKFNNLTKAERGGLNELDKVGFIKRQLVETRQITKHVAQILDARFNKEVTEKDKKNRTVKIITLKSNLVSNFRKEFELYKVREINDYHHAHDAYLNAVVAKAILKKYPKLEPEFVYGDYQKYDLKRYISRSKDPKEIEKATEKYFFYSNLLNFFKEEVHYADGTIVKRENIEYSKDTGEIAWNKEKDFATIKKVLSLPQVNIVKKREVQTGGFSKESILPKGNSDKLIPRKTKDILWDTTKYGGFDSPVIAYSILLIADIEKGKAKKLKTVKTLVGITIMEKDAFEKNPIAFLENKGYHNVCKENILCLPKYSLFELENGRRRLLASAKELQKCNEIVLPVYLTTLLYHSKNVHKLDEPGHLEYIQKHRNEFKDLLNLVSEFSQKYVLADANLEKIKNLYADNEQADIEILANSFINLLTFTALGAPAAFKFFGKDVDRKRYTTVSEILNATLIHQSITGLYETRIDLSKLGED

SEQ ID NO: 579 - protein, 1121 aa, Streptococcus sp.
  Streptococcus sp. GMD6S
MNGLVLGLDIGIASVGVGILEKNSGKIIHANSRLFPAATADNNVERRKNRQARRLHRRKKHRGVRFQDLFEDYGLLTDFSKVSINLNPYRLRVDGLNQQLTNEELFIALKNIVKRRGISYLDDASEDGGTVSSDYGKAVEENRKLLAEQTPGQIQLERFEKYGQVRGDFTVVENGEKRRLINVFSTSAYRKEAERILRKQQEFNSKITDEFIEDCLKILTGKRKYYHGPGNEKSRTDYGRFRTDGTTLDNIFGILIGKCTFYPDEYRASKASYTAQEFNLLNDLNNLTVPTETKKLSEEQKKVIVEYAKEAKTLGASTLLKYIAKMIDASVDQIRGYRVDVNNKPEIHTFEAYRKMQSLETISVGELSRNVLDELAHILTLNTEREGIEEAINTKLKDSFSQDQVLELVQFRKNNSSLFSKGWHNFSLKLMMELIPELYETSEEQMTILTRLGKQKSKEISKRTKYIDEKELTEEIYNPVVAKSVRQAIKIINEATKKHGIFDNIVIEMARENNEEDAKKDYIKRQKANQDEKNAAMEKAAFQYNGKKELPDSIFHGQKELATKIRLWHQQGEKCLYTGKNIPISDLIHNQYKYEIDHILPLSLSFDDSLSNKVLVLATANQEKGQRTPFQALDSMDDAWSYREFKSYVKESKLLGNKKKEYLLTEEDISKIEVKQKFIERNLIDTRYSSRVVLNALQDFYKAHKFDTTISVVRGQFTSQLRRKWGLEKSRETYHHHAVDALIIAASSQLRLWKKQNNPLIAYKEGQFVDSETGEIISLSDDEYKELVFKAPYDHFVDTLSSKTFEDSILFSYQVDSKFNRKISDATIYATRKAKLDKEKSEETYVLGKIKDIYSQAGYDAFIKIYNKDKSKFLMYHKDPQTFEKVIEEILRTYPSKELNDKNKEIPCNPFEKYRQENGPIRKYSKKSNGPEIKSLKYYDNKLGNHIDITPESSDNQVVLQSLKPWRTDVYFNHQTKKYELMGLKYSDLSFEKGSGKYSISNQKYNSIKRIEGIDEQSEFKFTLYKNDLILIKDSENNEQKLFRFNSRNDTAKHYIELKPYDKAKFDGEQELITILGNVAKGGRCLKGLNKSNISIFKVKTDVLGKKHIIKKEGDEPKLKF

SEQ ID NO: 580 - protein, 1375 aa, Streptococcus sp.
  Streptococcus sp. M334
MSNKSYSIGLDIGTNSVGWAVITDDYKVPSKKMKVLGNTDKHFIKKNLIGALLFDEGTTAEDRRLKRTARRRYTRRKNRLRYLQEIFSQEISKVDSSFFHRLDDFFLVPEDKRGSKYPIFATLVEEKEYHKKFPTIYHLRKHLADSKEKTDLRLIYLALAHMIKYRGHFLYEESFDIKNNDIQKIFSEFISIYDNTFEGKSLSGQNAQVEAIFTDKISKSTKRERVLKLFPDEKSTGLFSEFLKLIVGNQADFKKHFDLEEKAPLQFSKDTYDEDLENLLGQIGDDFADLFLVAKKLYDAILLSGILTVKDLSTKAPLSASMIERYENHQKDLAALKQFIQNNLQEKYDEVFSDQSKDGYAGYIDGKTTQEAFYKYIKNLLSKFEGADYFLDKIEREDFLKKQRTFDNGSIPHQIHLQEMNAIIRRQGEHYPFLQENKEKIEKILTFRIPYYVGPLARGNGDFAWLTRNSDQAIRPWNFEEIVDQASSAEDFINKMTNYDLYLPEEKVLPKHSLLYETFAVYNELTKVKFIAEGLTRYQFLDKKQKKDIFDTFFKAENKRKVTEKDIIHYLHNVDGYDGIELKGIEKQFNASLSTYHDLLKIIKDKAFMDDSKNEEILENIIHTLTIFEDREMIKQRLAQYDSLFDEKVIKALTRRHYTGWGKLSAKLINGIRDKKSGKTILDYLIDDGEINRNFMQLIHDDGLSFKEIIQKAQVFGKTNDVKQVVQELPGSPAIKKGILQSIKIVDELVKVMGHAPESIVIEMARENQTTARGKKNSQQRYKRIEDSLKNLASGLDSNILKENPTDNIQLQNDRLFLYYLQNGRDMYTGKPLEINQLSNYDIDHIIPQAFIKDDSLDNRVLTSSKDNRGKSDNVPSLEVVEKMKAFWQQLLDSKLISERKFNNLTKAERERGGLNELDKVGFIKRQLVETRQITKHVAQFLDARFNKEVTEKDKKNRNVKIITLKSNLVSNFRKEFGLYKVREINDYHHAHDAYLNAVLAKAILKKYPKLEPEFVYGDYQKYDLQRYISKSREPKEVEKATQKYFFYSNLLNFFKEEVHYADGTIVKRENIEYSKDTGEIAWNKEKDFATVKKVLSLPQVNIVKKTEVQTGGFSKESILPKGNSDKLIPRKTKEILWDTTKYGGFDSPVIAYSILLIADIEKGKAKKLKTVKTLVGITIMEKATFEKNPITFLENKGYHNVRKENILCLPKYSLFELESGRRRMLASAKELQKGNEIVLPVYLTTLLYHSKNVHKLDEPEHLEYIQKHRYEFKDLLNLVSEFSQKYVLADANLEKIKNLYADNEQADIEILANSFINLLTFTALGAPAAFKFLGKDVDRKRYTTVSEILNATLIHQSITGLYETRIDLSKLGED

SEQ ID NO: 581 - protein, 1371 aa, Streptococcus sp.
  Streptococcus sp. oral taxon 056 str. F0418
MNNNNYSIGLDIGTNSVGWAVITDDYKVPSKKMRVLGNTDKRFIKKNLIGALLFDEGTTAEDRRLKRTARRRYTRRKNRLRYLQEIFAEEMSKVDSSFFHRLDDSFLVPEDKSGSKYPIFATLAEEKEYHKKFPTIYHLRKHLADSKEKADLRLIYLALAHITKYRGHFLYEEAFDIKNNDIQKIFNEFINIYDNTFEGSSLSGQNAQVEAIFTGKISKSVKREHVLKLFPDEKSTGLFSEFLKLIVGNQADFKKHFDLEEKASLQFSKDTYDEDLENLLGQIGDDFADLFLVAKKLYDAILLSGILTVTDPSTKAPLSASMIERYENHQEDLAALKQFIKNNLPEKYAEVFSDQSKDGYAGYIDGKTTQEAFYKYIKNLLSKFEGADYFLDKIEREDFLRKQRTFDNGSIPHQIHLQEMNAILRRQGEHYPLLKENKEKIEKILTFRIPYYVGPLARGNRDFAWLTRNSDQAIRPWNFEEIVDKASSAESFINKMTNYDLYLPEEKVLPKHSLLYETFAVYNELTKVKFIAEGLRDYQFFDSGQKKQIVNQLFKEKRKVTEKDIIHYLHNVDGYDGIELKGIEKQFNASLSTYHDLLKIIKDKEFMDNHKNQEILENIVHTLTIFEDREMIKQRLAQYDSIFDEKVIKALTRRHYTGWGKLSAKLINGICDKKTGKTILDYLIDDGYNNRNFMQLINDDGLSFKEIIQKAQVVGKTDDLTQVVRELSGSPAIKKGILQSIKIVDELVKIMGYAPESIVIEMARENQTTAKGKKNSQQRYKRIEDALKNLAPGLDSTISKENPTDNIQLQNDRLFLYYLQNGKDMYTGEALDINQLSSYDIDHIIPQAFIKDDSLDNRVLTSSKDNRGKSDNVPSLEVVKKRKAFWQQLLDSKLISERKFNNLTKAERGGLDERDKVGFIKRQLVETRQITKHVARILDARFNTEVSEKNQKIRSVKIITLKSNLVSNFRKEFKLYKVREINDYHHAHDAYLNAVVAKAILKKYPKLEPEFVYGDYQKYDLKRYISKSKDPKEVEKATEKYFFYSNLLNFFKEEVHYADGTIVKRENIEYSKDTGEIAWNKEKDFVTIKKVLSYPQVNIVKKREVQTGGFSKESILPKGNSDKLIPRKTKDILWDTTKYGGFDSPVIAYSILLIADIEKGKAKKLKTVKTLVGITIMEKAAFEKNPITFLENKGYHNVRKENILCLPKYSLFELENGRRRLLASAKELQKGNEIVLPVYLTTLLYHSKNVHKLDEPEHLEYIQKHRYEFKDLLNLVSEFSQKYVLAEANLEKIKSLYVDNEQADIEILANSFINLLTFTALGAPAAFKFFGKDVDRKRYTTVSEILNATLIHQSITGLYETRIDLSKLGED

SEQ ID NO: 582 - protein, 1420 aa, Streptococcus sp.
  Streptococcus sp. oral taxon 071 str. 73H25AP
MAKFNKNYSIGLDIGVSSVGYAVVTEDYRVPAFKFKVLGNTEKEKIKKNLIGSTTFVPAQSAQGTRVFRVNRRRIDRRNHRIAYLRDIFQKEIEKIDKNFYRRLDESFRVLGDKSEDIQIKQPFFGNKELETAYHKKYPTIYHLRKHLADADKNSPVADIREVYMVLSHILKYRGHFLTLGKIDPNNINMQNSWIDFIESCQDAFDLEISDESKTIAAIFKSSENRQEKVKQILSYFQQELLKKDKSIFKQLLQLLFGLKTKFKDCFELEEEPDLNFSKENYDENLENLLGALEEDFSDVFAKLKILRDTILLSSMLTYTGATHARFSATMVERYEEHRKDLQRFKSFVKQNLSEQDYLDIFGRKTPTGFDVDKETKGYVGYISNKMVLTNPQKQKTIQQNFYDYISGKITGIEGAECFLNKISDGTFLRKLRTTDNGAIPNQIHAYELEKIIERQGRDYPFLLENKDKLLSILTFKIPYYVGPLAKGNNSRFAWIKRTTSQDVLDDNDEDTRNGKIRPWNYHKLINMDETRDAFIINLIGNDIILLNEKVLPKRSLIYEEVMLQNELTRVKYKDKYGKIHFFNSELRQEIINNLFKTNSKRVSSAMLLSYLENFTNLQAVEIVSGIEKGKSLNSTLKTYNDLKTIFSEELLDSEIYQKELEEIIKVITVFDDKKSIKNYLTKYFGHLEFLNEEKINQLSKLRYTGWGRYSGKLLLGIRDEDTGFNLMQFLRNDDENRNLTQLISDTTLSFDSAIKAIQSKSTVEDDVFEEIKNLAGSPAIKRGILNSIKIVDELVQIIGYPPQNIIIEMARENMTTEEGQKKAKTRKSKLESALKNIEDSVLESGKVPHSDEQLQSEKLYLYYLQNGKDMYSLDKTGSPTPLYRDQLDQYEVDHIIPYSFLPIDSIDNKVLTHRENNQRKLNNIPDKETVANMKPFWEKLYNAKLISQTKYQRLTTSERTPDGVLTESMKAGFIERQLVETRQIIKHVARILDNRFSDTKIITLKSQLVTNFRNTFHIAKIRELNDYHHAHDAYLAVVVGQTLLKAYPKLAPELIYGHHAHFNRHEENKATLRKHLYSNIMRFFNNPDSKVSKDIWDCNRDLPIVKDVIYNSQINFVKRTMIKKGAFYNQNPVGKLNKQIAANNRYPLKTKVSSLDTSIYGGYGPMNSALSIIIIAERFNEKKGKIETVKEFHDIFIIDYEKFNNNPFQFLNNVSEEGFLKKNDLNRVLAFYRISKYSLMQKIDGTRMLFESKSNLHKVTQFKLTKTQNELFFHMKRLLTKSNLMDLKSESAIKESQNFIQTHQNEFDNIADRLSNYSQKMLGETKSLQTLINGYNERPIKQIDNNEETIRYYYDNFIKMFSFVKSGAPKDIINFFNDKYTVPRMRPKPDRKMLDATLIHQSITGLYETRIDLSKLGED

SEQ ID NO: 583 - protein, 1122 aa, Streptococcus suis
  Streptococcus suis 89/1591
MSNGKILGLDIGIASVGVGVIDAQTGEIIHASSRIFPSANAANNAERRTFRGSRRLIRRKKHRIKRLDDLFNDFHINLDGEMSTDNPYVLRVKGLSQKLTVEELYISIKNIMKRRGISYLDDAESDNEAGRSDYAKAIERNRQLLTSKTPGEIQLERLEKYGQLRGNFTIIDEEGQSQQIINVFSTSDYVKEVEKILDCQKMYHKFISDEFCDKLIELLREKRKYYVGPGNEKSRTDYGIYRTDGTTLENLFGILIGKCTFYPDQYRSSRASYTAQEFNFLNDLNNLTVPTETKKLSQEQKEFLVNYAKETSVLGAGKILQQIAKLADCKVEDIRGYRLDNKDKPELHTFETYRAMKGLVPLVDIGVLSREQLDILADILTLNTDFEGIREALKKQLPNVFDEKQVKGLASFRKSKSQLFAKGWHNLSQKIMLEVIPELYATSDEQMTILTRLGKFEKSSVAEYPSSINVDEITDEIYNPVVAKSIRQTIKIINASIKKWGEFDQIVIEMPRDRNEDEEKKRIADGQKANAKEKADSILRAAELYCAGKVLPDYVYNGHNQLATKIRLWYQQGERCIYTGQPISIHDLIHNQNQYEIDHILPLSLTFDDSLSNKVLVLATANQEKAQRTPYNYLKSATSAWSYREFKDYVTKRKGIGKKKCEYLTFEEDINGFEVRSKFIQRNLVDTRYASKVILNALQDYFKISGIQTKVSVVRGQFTSQLRHKWGIEKTRETYHHHAVDALIIAASSQLRLWKKQESPLVVDYQEGRQVDLETGEILELTDEQYKELVYQPPYQGFVNTISSSAFDNEILFSYQVDSKVNRKISDATIYATRNAQLGKDKTEGIYVLGKIKDIYTQAGYEAFLKRYTKDKTSFLMYHKDLDTWEKVIEIILRDYREYDEKGKEIGNPFERYRRENGYVKKYSRKGNGTAIKSLKYYDNKLGNHIDITPENSRNAVVLQSLKPWRTDVYFNKETGKYEFLGIKYSDLSFEKGTGEYGISQEKYDSIKIAEGVAKKSIFKFTLYKQDLLFIKDIENNFGKLLRFTSKNDTSKHYVELKPYDKNKFGTEEPLLPVLGNVAKSGQCIKGLNKSNISIYKVRTDILGYRHFIKQEGEHPQLKFKK

SEQ ID NO: 584 - protein, 1122 aa, Streptococcus suis
MSNGKILGLDIGIASVGVGVIDAQTGEIIHASSRIFPSANAANNAERRTFRGSRRLIRRKKHRIKRLDDLFNDFHINLDGEMSTDNPYVLRVKGLSQKLTVEELYISIKNIMKRRGISYLDDAESDNEAGRSDYAKAIERNRQLLTSKTPGEIQLERLEKYGQLRGNFTIIDEEGQSQQIINVFSTSDYVKEVEKILDCQKMYHKFISDEFCDKLIELLREKRKYYVGPGNEKSRTDYGIYRTDGTTLENLFGILIGKCTFYPDQYRSSRASYTAQEFNFLNDLNNLTVPTETKKLSQEQKEFLVNYAKETSVLGAGKILQQIAKLADCKVEDIRGYRLDNKDKPELHTFETYRAMKGLVPLVDIGVLSREQLDILADILTLNTDFEGIREALKKQLPNVFDEKQVKGLASFRKSKSQLFAKGWHNLSQKIMLEVIPELYATSDEQMTILTRLGKFEKSSVAEYPSSINVDEITDEIYNPVVAKSIRQTIKIINASIKKWDEFDQIVIEMPRDRNEDEEKKRIADGQKANAKEKADSILRAAELYCAGKVLPDYVYNGHNQLATKIRLWYQQGERCIYTGQPISIHDLIHNQNQYEIDHILPLSLTFDDSLSNKVLVLATANQEKAQRTPYNYLKSATSAWSYREFKDYVTKRKGIGKKKCEYLTFEEDINGFEVRSKFIQRNLVDTRYASKVILNALQDYFKISGIQTKVSVVRGQFTSQLRHKWGIEKTRETYHHHAVDALIIAASSQLRLWKKQESPLVVDYQEGRQVDLETGEILELTDEQYKELVYQPPYQGFVNTISSSAFDNEILFSYQVDSKVNRKISDATIYATRNAQLGKDKTEGIYVLGKIKDIYTQAGYEAFLKRYTKDKTSFLMYHKDLDTWEKVIEIILRDYREYDEKGKEIGNPFERYRRENGYVKKYSRKGNGTAIKSLKYYDNKLGNHIDITPENSRNAVVLQSLKPWRTDVYFNKETGKYEFLGIKYSDLSFEKGTGEYGISQEKYDSIKIAEGVAKKSIFKFTLYKQDLLFIKDIENNFGKLLRFTSKNDTSKHYVELKPYDKNKFGTEEPLLPVLGNVAKSGQCIKGLNKSNISIYKVRTDILGYRHFIKQEGEHPQLKFKK

SEQ ID NO: 585 - protein, 1381 aa, Streptococcus suis
MVKKKYAIGIDIGTNSVGWSIVTDDYKVPSKKMKVFGNTEKRYIKKNLLGTLLFDEGNTAENRRLKRTARRRYTRRRNRILYLQEIFAEEINKIDDSFFQRLDDSFLIVEDKQGSKHPIFGTLQEEKEYHKQFPTIYHLRKQLADSSQKADIRLIYLALAHIIKYRGHFLFEGDLKSENKDVQHLFNDFVEMFDKTVEGSYLSENLPNVADVLVEKVSKSRRLENILHYFPNEKKNGLFGNFLALALGLQPNFKTNFELAEDAKIQFSKETYEEDLEELLGKIGDDYADLFIATKSLYDGILLAGILSTTDSTTKAPLSSSMVNRYEEHQKDLALLKNFIHQNLSDSYKEVFNDKLKDGYAGYIEGKTTQENFYRFIKKAIEKIEGSNYFIDKIDREDFLRKQRTFDNGSIPHQIHLQEMHAIIRRQAEFYPFLVENQDKIEKILTFRIPYYVGPLARGKSEFAWLNRKSDEKIRPWNFDEMVDKETSAENFITRMTNYDRYLPDQKVLPKHSLLYEKFAVYNELTKVKFIAEGMRDYQFLDSGQKKDIVKTLFKTKRKVTAKDIKAYLENSNGYAGVELKGLEEQFNASLPTYHDLLKILRDKAFIDAEENQEILEDIVLTLTLFEDREMIRKRLEKYKDILTEEQRKKLERRHYTGWGRLSAKLINGILDKVTRKTILGYLIDDGTSNRNFMQLINDDTLSFVDEIRLAQGSGEAEDYRAEVQNLAGSPAIKKGILQSLKIVDELIEVMGYEPEHIVVEMARENQFTNQGRRNSQQRINRLENALKDFGSKILEEQKPYGVSKVNNIHLQSDRLFLYYLQNGKDMYTDEELDIDHLSEYDIDHIIPQAFIKDDSLDNKVLTKSAKNRGKSDDVPSMEIVHNRKNFWRQLLKSKLISQRKFDNLTKAERGGLTNEDKARFIQRQLVETRQITKHVARMLDTRFNTKLDEAGNRIRDPKVNIITLKSNLVSQFRKDYQLYKIREINNYHHAHDAYINAVVATALLKKYPQLAPEFVYGEYPTYNSYNSRKSATEKVLFYSNIMNFFKRIVVHSKTGEVRIRPVIEVNKETGEIVWDKKSDFRTVRKVLSYPQVNVVKKTEVQNHGLDRGKPKGFYNANLSPRPKEGSVENLVPAKQSFDTKRYGGYAGISNSYAVLVNGIIEKGKKKSKAEVTEFQGISILARKDFDKNPKQYLLNLGYKDIKSIIKLPKYSLFELENGSRRMLASILSTNNKRGEIHKGNEMYLPDKFVTLLYHAMRVNRTLEPGHKKYVETHRHVFDELLIYILEYNEKIVGAKANGKRIVEAYSARKDTDNLEELCNSFINLLNLTALGSAVDFEFLGTKIPRYRDYTPSSLLKATLIHQSVTGLYETRIDLSKLGGD

SEQ ID NO: 586 - protein, 1122 aa, Streptococcus suis; identical to SEQ ID NO: 583

SEQ ID NO: 587 - protein, 1388 aa, Streptococcus thermophilus
MTKPYSIGLDIGTNSVGWAVITDNYKVPSKKMKVLGNTSKKYIKKNLLGVLLFDSGITAEGRRLKRTARRRYTRRRNRILYLQEIFSTEMATLDDAFFQRLDDSFLVPDDKRDSKYPIFGNLVEEKVYHDEFPTIYHLRKYLADSTKKADLRLVYLALAHMIKYRGHFLIEGEFNSKNNDIQKNFQDFLDTYNAIFESDLSLENSKQLEEIVKDKISKLEKKDRILKLFPGEKNSGIFSEFLKLIVGNQADFRKCFNLDEKASLHFSKESYDEDLETLLGYIGDDYSDVFLKAKKLYDAILLSGFLTVTDNETEAPLSSAMIKRYNEHKEDLALLKEYIRNISLKTYNEVFKDDTKNGYAGYIDGKTNQEDFYVYLKNLLAEFEGADYFLEKIDREDFLRKQRTFDNGSIPYQIHLQEMRAILDKQAKFYPFLAKNKERIEKILTFRIPYYVGPLARGNSDFAWSIRKRNEKITPWNFEDVIDKESSAEAFINRMTSFDLYLPEEKVLPKHSLLYETFNVYNELTKVRFIAESMRDYQFLDSKQKKDIVRLYFKDKRKVTDKDIIEYLHAIYGYDGIELKGIEKQFNSSLSTYHDLLNIINDKEFLDDSSNEAIIEEIIHTLTIFEDREMIKQRLSKFENIFDKSVLKKLSRRHYTGWGKLSAKLINGIRDEKSGNTILDYLIDDGISNRNFMQLIHDDALSFKKKIQKAQIIGDEDKGNIKEVVKSLPGSPAIKKGILQSIKIVDELVKVMGGRKPESIVVEMARENQYTNQGKSNSQQRLKRLEKSLKELGSKILKENIPAKLSKIDNNALQNDRLYLYYLQNGKDMYTGDDLDIDRLSNYDIDHIIPQAFLKDNSIDNKVLVSSASNRGKSDDFPSLEVVKKRKTFWYQLLKSKLISQRKFDNLTKAERGGLLPEDKAGFIQRQLVETRQITKHVARLLDEKFNNKKDENNRAVRTVKIITLKSTLVSQFRKDFELYKVREINDFHHAHDAYLNAVIASALLKKYPKLEPEFVYGDYPKYNSFRERKSATEKVYFYSNIMNIFKKSISLADGRVIERPLIEVNEETGESVWNKESDLATVRRVLSYPQVNVVKKVEEQNHGLDRGKPKGLFNANLSSKPKPNSNENLVGAKEYLDPKKYGGYAGISNSFAVLVKGTIEKGAKKKITNVLEFQGISILDRINYRKDKLNFLLEKGYKDIELIIELPKYSLFELSDGSRRMLASILSTNNKRGEIHKGNQIFLSQKFVKLLYHAKRISNTINENHRKYVENHKKEFEELFYYILEFNENYVGAKKNGKLLNSAFQSWQNHSIDELCSSFIGPTGSERKGLFELTSRGSAADFEFLGVKIPRYRDYTPSSLLKDATLIHQSVTGLYETRIDLAKLGEG

SEQ ID NO: 588 - protein, 1128 aa, Streptococcus thermophilus
MSDLVLGLDIGIGSVGVGILNKVTGEIIHKNSRIFPAAQAENNLVRRTNRQGRRLTRRKKHRIVRLNRLFEESGLITDFTKISINLNPYQLRVKGLTDELSNEELFIALKNMVKHRGISYLDDASDDGNSSVGDYAQIVKENSKQLETKTPGQIQLERYQTYGQLRGDFTVEKDGKKHRLINVFPTSAYRSEALRILQTQQEFNPQITDEFINRYLEILTGKRKYYHGPGNEKSRTDYGRYRTSGETLDNIFGILIGKCTFYPEEFRAAKASYTAQEFNLLNDLNNLTVPTETKKLSKEQKNQIINYVKNEKAMGPAKLFKYIAKLLSCDVADIKGYRIDKSGKAEIHTFEAYRKMKTLETLDIEQMDRETLDKLAYVLTLNTEREGIQEALEHEFADGSFSQKQVDELVQFRKANSSIFGKGWHNFSVKLMMELIPELYETSEEQMTILTRLGKQKRLRLQIKQNISNKTKYIDEKLLTEEIYNPVVAKSVRQAIKIVNAAIKEYGDFDNIVIEMARETNEDDEKKAIQKIQKANKDEKDAAMLKAANQYNGKAELPHSVFHGHKQLATKIRLWHQQGERCLYTGKTISIHDLINNPNQFEVDHILPLSITFDDSLANKVLVYATANQEKGQRTPYQALDSMDDAWSFRELKAFVRESKTLSNKKKEYLLTEEDISKFDVRKKFIERNLVDTRYASRVVLNALQEHFRAHKIDTKVSVVRGQFTSQLRRHWGIEKTRDTYHHHAVDALIIAASSQLNLWKKQKNTLVSYSEEQLLDIETGELISDDEYKESVFKAPYQHFVDTLKSKEFEDSILFSYQVDSKFNRKISDATIYATRQAKVGKDKKDETYVLGKIKDIYTQDGYDAFMKIYKKDKSKFLMYRHDPQTFEKVIEPILENYPNKQMNEKGKEVPCNPFLKYKEEHGYIRKYSKKGNGPEIKSLKYYDSKLLGNPIDITPENSKNKVVLQSLKPWRTDVYFNKATGKYEILGLKYADLQFEKGTGTYKISQEKYNDIKKKEGVDSDSEFKFTLYKNDLLLVKDTETKEQQLFRFLSRTLPKQKHYVELKPYDKQKFEGGEALIKVLGNVANGGQCIKGLAKSNISIYKVRTDVLGNQHIIKNEGDKPKLDF

SEQ ID NO: 589 - protein, 1121 aa, Streptococcus thermophilus
MSDLVLGLDIGIGSVGVGILNKVTGEIIHKNSRIFPAAQAENNLVRRTNRQGRRLTRRKKHRIVRLNRLFEESGLITDFTKISINLNPYQLRVKGLTDELSNEELFIALKNMVKHRGISYLDDASDDGNSSVGDYAQIVKENSKQLETKTPGQIQLERYQTYGQLRGDFTVEKDGKKHRLINVFPTSAYRSEALRILQTQQEFNPQITDEFINRYLEILTGKRKYYHGPGNEKSRTDYGRYRTSGETLDNIFGILIGKCTFYPDEFRAAKASYTAQEFNLLNDLNNLTVPTETKKLSKEQKNQIINYVKNEKAMGPAKLFKYIAKLLSCDVADIKEYRIDKSGKAEIHTFEAYRKMKTLETLDIEQMDRETLDKLAYVLTLNTEREGIQEALEHEFADGSFSQKQVDELVQFRKANSSIFGKGWHNFSVKLMMELIPELYETSEEQMTILTRLGKQKTTSSSNKTKYIDEKLLTEEIYNPVVAKSVRQAIKIVNAAIKEYGDFDNIVIEMARETNEDDEKKAIQKIQKANKDEKDAAMLKAANQYNGKAELPHSVFHGHKQLATKIRLWHQQGERCLYTGKTISIHDLINNSNQFEVDHILPLSITFDDSLANKVLVYATANQEKGQRTPYQALDSMDDAWSFRELKAFVRESKTLSNKKKEYLLTEEDISKFDVRKKFIERNLVDTRYASRVVLNALQEHFRAHKIDTKVSVVRGQFTSQLRRHWGIEKTRDTYHHHAVDALIIAASIQLNLWKKQKNTLVSYSEDQLLDIETGELISDDEYKESVFKAPYQHFVDTLKSKEFEDSILFSYQVDSKFNRKISDATIYATRQAKVGKDKADETYVLGKIKDIYTQDGYDAFMKIYKKDKSKFLMYRHDPQTFEKVIEPILENYPNKQINEKGKEVPVNPFLKYKEEHGYIRKYSKKGNGPEIKSLKYYDSKLGNHIDITPKDSNNKVVLQSVSPWRADVYFNKTTGKYEILGLKYADLQFEKGTGTYKISQEKYNDIKKKEGVDSDSEFKFTLYKNDLLLVKDTETKEQQLFRFLSRTMPKQKHYVELKPYDKQKFEGGEALIKVLGNVANSGQCKKGLGKSNISIYKVRTDVLGNQHIIKNEGDKPKLDF

SEQ ID NO: 590 - protein, 1388 aa, Streptococcus thermophilus
MTKPYSIGLDIGTNSVGWAVTTDNYKVPSKKMKVLGNTSKKYIKKNLLGVLLFDSGITAEGRRLKRTARRRYTRRRNRILYLQEIFSTEMATLDDAFFQRLDDSFLVPDDKRDSKYPIFGNLVEEKAYHDEFPTIYHLRKYLADSTKKADLRLVYLALAHMIKYRGHFLIEGEFNSKNNDIQKNFQDFLDTYNAIFESDLSLENSKQLEEIVKDKISKLEKKDRILKLFPGEKNSGIFSEFLKLIVGNQADFRKCFNLDEKASLHFSKESYDEDLETLLGYIGDDYSDVFLKAKKLYDAILLSGFLTVTDNETEAPLSSAMIKRYNEHKEDLALLKEYIRNISLKTYNEVFKDDTKNGYAGYIDGKTNQEDFYVYLKKLLAEFEGADYFLEKIDREDFLRKQRTFDNGSIPYQIHLQEMRAILDKQAKFYPFLAKNKERIEKILTFRIPYYVGPLARGNSDFAWSIRKRNEKITPWNFEDVIDKESSAEAFINRMTSFDLYLPEEKVLPKHSLLYETFNVYNELTKVRFIAESMRDYQFLDSKQKKDIVRLYFKDKRKVTDKDIIEYLHAIYGYDGIELKGIEKQFNSSLSTYHDLLNIINDKEFLDDSSNEAIIEEIIHTLTIFEDREMIKQRLSKFENIFDKSVLKKLSRRHYTGWGKLSAKLINGIRDEKSGNTILDYLIDDGISNRNFMQLIHDDALSFKKKIQKAQIIGDEDKGNIKEVVKSLPGSPAIKKGILQSIKIVDELVKVMGGRKPESIVVEMARENQYTNQGKSNSQQRLKRLEKSLKELGSKILKENIPAKLSKIDNNALQNDRLYLYYLQNGKDMYTGDDLDIDRLSNYDIDHIIPQAFLKDNSIDNKVLVSSASNRGKSDDVPSLEVVKKRKTFWYQLLKSKLISQRKFDNLTKAERGGLSPEDKAGFIQRQLVETRQITKHVARLLDEKFNNKKDENNRAVRTVKIITLKSTLVSQFRKDFELYKVREINDFHHAHDAYLNAVVASALLKKYPKLEPEFVYGDYPKYNSFRERKSATEKVYFYSNIMNIFKKSISLADGRVIERPLIEVNEETGESVWNKESDLATVRRVLSYPQVNVVKKVEEQNHGLDRGKPKGLFNANLSSKPKPNSNENLVGAKEYLDPKKYGGYAGISNSFTVLVKGTIEKGAKKKITNVLEFQGISILDRINYRKDKLNFLLEKGYKDIELIIELPKYSLFELSDGSRRMLASILSTNNKRGEIHKGNQIFLSQKFVKLLYHAKRISNTINENHRKYVENHKKEFEELFYYILEFNENYVGAKKNGKLLNSAFQSWQNHSIDELCSSFIGPTGSERKGLFELTSRGSAADFEFLGVKIPRYRDYTPSSLLKDATLIHQSVTGLYETRIDLAKLGEG

SEQ ID NO: 591 - protein, 1121 aa, Streptococcus thermophilus
MSDLVLGLDIGIGSVGVGILNKVTGEIIHKNSRIFPAAQAENNLVRRTNRQGRRLARRKKHRRVRLNRLFEESGLITDFTKISINLNPYQLRVKGLTDELSNEELFIALKNMVKHRGISYLDDASDDGNSSVGDYAQIVKENSKQLETKTPGQIQLERYQTYGQLRGDFTVEKDGKKHRLINVFPTSAYRSEALRILQTQQEFNPQITDEFINRYLEILTGKRKYYHGPGNEKSRTDYGRYRTSGETLDNIFGILIGKCTFYPDEFRAAKASYTAQEFNLLNDLNNLTVPTETKKLSKEQKNQIINYVKNEKAMGPAKLFKYIAKLLSCDVADIKGYRIDKSGKAEIHTFEAYRKMKTLETLDIEQMDRETLDKLAYVLTLNTEREGIQEALEHEFADGSFSQKQVDELVQFRKANSSIFGKGWHNFSVKLMMELIPELYETSEEQMTILTRLGKQKTTSSSNKTKYIDEKLLTEEIYNPVVAKSVRQAIKIVNAAIKEYGDFDNIVIEMARETNEDDEKKAIQKIQKANKDEKDAAMLKAANQYNGKAELPHSVFHGHKQLATKIRLWHQQGERCLYTGKTISIHDLINNSNQFEVDHILPLSITFDDSLANKVLVYATANQEKGQRTPYQALDSMDDAWSFRELKAFVRESKTLSNKKKEYLLTEEDISKFDVRKKFIERNLVDTRYASRVVLNALQEHFRAHKIDTKVSVVRGQFTSQLRRHWGIEKTRDTYHHHAVDALIIAASSQLNLWKKQKNTLVSYSEDQLLDIETGELISDDEYKESVFKAPYQHFVDTLKSKEFEDSILFSYQVDSKFNRKISDATIYATRQAKVGKDKADETYVLGKIKDIYTQDGYDAFMKIYKKDKSKFLMYRHDPQTFEKVIEPILENYPNKQINEKGKEVPCNPFLKYKEEHGYIRKYSKKGNGPEIKSLKYYDSKLGNHIDITPKDSNNKVVLQSVSPWRADVYFNKTTGKYEILGLKYADLQFEKGTGTYKISQEKYNDIKKKEGVDSDSEFKFTLYKNDLLLVKDTETKEQQLFRFLSRTMPKQKHYVELKPYDKQKFEGGEALIKVLGNVANSGQCKKGLGKSNISIYKVRTDVLGNQHIIKNEGDKPKLDF

SEQ ID NO: 592 - protein, 1122 aa, Streptococcus thermophilus
MSDLVLGLDIGIGSVGVGILNKVTGEIIHKNSRIFPAAQAENNLVRRTNRQGRRLTRRKKHRIVRLNRLFEESGLITDFTKISINLNPYQLRVKGLTDELSNEELFIALKNMVKHRGISYLDDASDDGNSSVGDYAQIVKENSKQLETKTPGQIQLERYQTYGQLRGDFTVEKDGKKHRLINVFPTSAYRSEALRILQTQQEFNSQITDEFINRYLEILTGKRKYYHGPGNEKSRTDYGRYRTNGETLDNIFGILIGKCTFYPDEFRAAKASYTAQEFNLLNDLNNLTVPTETKKLSKEQKNQIINYVKNEKVMGPAKLFKYIAKLLSCDVADIKGHRIDKSGKAEIHTFEAYRKMKTLETLDIEQMDRETLDKLAYVLTLNTEREGIQEALEHEFADGSFSQKQVDELVQFRKANSSIFGKGWHNFSVKLMMELIPELYETSEEQMTILTRLGKQKTTSSSNKTKYIDEKLLTEEIYNPVVAKSVRQAIKIVNAAIKEYGDFDNIVIEMARETNEDDEKKAIQKIQKANKDEKDAAMLKAANQYNGKAELPHSVFHGHKQLATKIRLWHQQGERCLYTGKTISIHDLINNPNQFEVDHILPLSITFDDSLANKVLVYATANQEKGQRTPYQALDSMDDAWSFRELKAFVRESKTLSNKKKEYLLTEEDISKFDVRKKFIERNLVDTRYASRVVLNALQEHFRAHKIDTKVSVVRGQFTSQLRRHWGIEKTRDTYHHHAVDALIIAASSQLNLWKKQKNTLVSYSEEQLLDIETGELISDDEYKESVFKAPYQHFVDTLKSKEFEDSILFSYQVDSKFNRKISDATIYATRQAKVGKDKKDETYVLGKIKDIYTQDGYDAFMKIYKKDKSKFLMYRHDPQTFEKVIEPILENYPNKEMNEKGKEVPCNPFLKYKEEHGYIRKYSKKGNGPEIKSLKYYDSKLLGNPIDITPENSKNKVVLQSLKPWRTDVYFNKNTGKYEILGLKYADLQFEKKTGTYKISQEKYNGIMKEEGVDSDSEFKFTLYKNDLLLVKDTETKEQQLFRFLSRTMPNVKYYVELKPYSKDKFEKNESLIEILGSADKSGRCIKGLGKSNISIYKVRTDVLGNQHIIKNEGDKPKLDF

SEQ ID NO: 593 - protein, 1388 aa, Streptococcus thermophilus
MTKPYSIGLDIGTNSVGWAVITDNYKVPSKKMKVLGNTSKKYIKKNLLGVLLFDSGITAEGRRLKRTARRRYTRRRNRILYLQEIFSTEMATLDDAFFQRLDDSFLVPDDKRDSKYPIFGNLVEEKAYHDEFPTIYHLRKYLADSTKKADLRLVYLALAHMIKYRGHFLIEGEFNSKNNDIQKNFQDFLDTYNAIFESDLSLENSKQLEEIVKDKISKLEKKDRILKLFPGEKNSGIFSEFLKLIVGNQADFRKCFNLDEKASLHFSKESYDEDLETLLGYIGDDYSDVFLKAKKLYDAILLSGFLTVTDNETEAPLSSAMIKRYNEHKEDLALLKEYIRNISLKTYNEVFKDDTKNGYAGYIDGKTNQEDFYVYLKNLLAEFEGADYFLEKIDREDFLRKQRTFDNGSIPYQIHLQEMRAILDKQAKFYPFLAKNKERIEKILTFRIPYYVGPLARGNSDFAWSIRKRNEKITPWNFEDVIDKESSAEAFINRMTSFDLYLPEEKVLPKHSLLYETFNVYNELTKVRFIAESMRDYQFLDSKQKKDIVRLYFKDKRKVTDKDIIEYLHAIYGYDGIELKGIEKQFNSSLSTYHDLLNIINDKEFLDDSSNEAIIEEIIHTLTIFEDREMIKQRLSKFENIFDKSVLKKLSRRHYTGWGKLSAKLINGIRDEKSGNTILDYLIDDGISNRNFMQLIHDDALSFKKKIQKAQIIGDEDKGNIKEVVKSLPGSPAIKKGILQSIKIVDELVKVMGGRKPESIVVEMARENQYTNQGKSNSQQRLKRLEKSLKELGSKILKENIPAKLSKIDNNALQNDRLYLYYLQNGKDMYTGDDLDIDRLSNYDIDHIIPQAFLKDNSIDNKVLVSSASNRGKSDDFPSLEVVKKRKTFWYQLLKSKLISQRKFDNLTKAERGGLLPEDKAGFIQRQLVETRQITKHVARLLDEKFNNKKDENNRAVRTVKIITLKSTLVSQFRKDFELYKVREINDFHHAHDAYLNAVIASALLKKYPKLEPEFVYGDYPKYNSFRERKSATEKVYFYSNIMNIFKKSISLADGRVIERPLIEVNEETGESVWNKESDLATVRRVLSYPQVNVVKKVEEQNHGLDRGKPKGLFNANLSSKPKPNSNENLVGAKEYLDPKKYGGYAGISNSFAVLVKGTIEKGAKKKITNVLEFQGISILDRINYRKDKLNFLLEKGYKDIELIIELPKYSLFELSDGSRRMLASILSTNNKRGEIHKGNQIFLSQKFVKLLYHAKRISNTINENHRKYVENHKKEFEELFYYILEFNENYVGAKKNGKLLNSAFQSWQNHSIDELCSSFIGPTGSERKGLFELTSRGSAADFEFLGVKIPRYRDYTPSSLLKDATLIHQSVTGLYETRIDLAKLGEG

SEQ ID NO: 594 - protein, 1121 aa, Streptococcus thermophilus
MSDLVLGLDIGIGSVGVGILNKVTGEIIHKNSRIFPAAQAENNLVRRTNRQGRRLTRRKKHRRVRLNRLFEESGLITDFTKISINLNPYQLRVKGLTDELSNEELFIALKNMVKHRGISYLDDASDDGNSSVGDYAQIVKENSKQLETKTPGQIQLERYQTYGQLRGDFTVEKDGKKHRLINVFPTSAYRSEALRILQTQQEFNPQITDEFVNRYLEILTGKRKYYHGPGNEKSRTDYGRYRTNGETLDNIFGILIGKCTFYPEEFRAAKASYTAQEFNLLNDLNNLTVPTETKKLSKEQKNQIINYVKNEKAMGPAKLFKYIAKLLSCDVADIKGYRIDKSGKAEIHTFEAYRKMKTLETLDIEQMDRETLDKLAYVLTLNTEREGIQEALEHEFADGSFSQKQVDELVQFRKANSSIFGKGWHNFSVKLMMELIPELYETSEEQMTILKRLGKQKTTSSSNKTKYIDEKLLTEEIYNPVVAKSIRQAIKIVNAAIKEYGDFDNIVIEMARETNEDDEKKAIQKIQKANKDEKDAAMLKAANQYNGKAELPHSVFHGHKQLATKIRLWHQQGERCLYTGKTISIHDLINNPNQFEVDHILPLSITFDDSLANKVLVYATANQEKGQRTPYQALDSMDDAWSFRELKAFVRESKTLSNKKKEYLLTEEDISKFDVRKKFIERNLVDTRYASRVVLNALQEHFRAHKIDTKVSVVRGQFTSQLRRHWGIEKTRDTYHHHAVDALIIAASSQLNLWKKQKNTLVSYSEDQLLDIETGELISDDEYKESVFKAPYQHFVDTLKSKEFEDSILFSYQVDSKFNRKISDATIYATRQAKVGKDKKDETYVLGKIKDIYTQDGYDAFMKIYKKDKSKFLMYRHDPQTFEKVIEPILENYPNKEMNEKGKEVPCNPFLKYKEEHGYIRKYSKKGNDPEIKSLKYYDSKLGNHIDITPKDSNNKVVLQSVSPWRADVYFNKTTGKYEILGLKYADLQFEKGTGTYKISQEKYNDIKKKEGVDSDSEFKFTLYKNDLLLVKDTETKEQQLFRFLSRTMPKQKHYVELKPYDKQKFEGGEALIKVLGNVANSGQCKKGLGKSNISIYKVRTDVLGNQHIIKNEGDKPKLDF

SEQ ID NO: 595 - protein, 1122 aa, Streptococcus thermophilus
  Streptococcus thermophilus MTCC 5460
MSDLVLGLDIGIGSVGVGILNKVTGEIIHKNSRIFPAAQAENNVERRTNRQGRRLTRRKKHRRVRLNRLFEESGLITDFTKISINLNPYQLRVRGLTDELSNEELFIALKNMVKHRGISYLDDASDDGNSSVGDYAQIVKENSKQLETKTPGQIQLERYQTYGQLRGDFTVEKDGKKHRLINVFPTSAYRSEALRILQTQQEFNSQITDEFINRYLEILTGKRKYYHGPGNEKSRTDYGRYRTSGETLDNIFGILIGKCTFYPEEFRAAKASYTAQEFNLLNDLNNLTVPTETKKLSKEQKNQIINYVKNEKAMGPAKLFKYIAKLLSCDVADIKGYRIDKSGKAEIHTFEAYRKMKTLETLDIEQMDRETLDKLAYVLTLNTEREGIQEALEHEFADGSFSQKQVDELVQFRKASSSIFGKGWHNFSVKLMMELIPELYETSEEQMTILTRLGKQKTTSSSNKTKYIDEKLLTEEIYNPVVAKSVRQAIKIVNAAIKEYGDFDNIVIEMARETNEDDEKKAIQKIQKANKDEKDAAMLKAANQYNGKAELPHSVFHGHKQLATKIRLWHQQGERCLYTGKTISIHDLINNPNQFEVDHILPLSITFDDSLANKVLVYATANQEKGQRTPYQALDSMDDAWSFRELKAFVRESKTLSNKKKEYLLTEEDISKFDVRKKFIERNLVDTRYASRVVLNALQEHFRAHKIDTKVSVVRGQFTSQLRRHWGIEKTRDTYHHHAVDALIIAASSQLNLWKKQKNTLVSYSEDQLLDIETGELISDDEYKESVFKAPYQHFVDTLKSKEFEDSILFSYQVDSKFNRKLSDATIYATRQAKVGKDKKDETYVLGKIKDIYTQDGYDAFMKIYKKDKSKFLMYRHDPQTFEKVIEPILENYPNKEMNEKGKEVPCNPFLKYKEEHGYIRKYSKKGNGPEIKSLKYYDSKLLGNPIDITPENSKNKVVLQSLKPWRADVYFNKTTGKYEILGLKYADLQFEKKTGTYKISQEKYNGIMKEEGVDSDSEFKFTLYKNDLLLVKDTETKEQQLFRFLSRTMPNVKYYVELKPYSKDKFEKNESLIEILGSADKSGRCIKGLGKSNISIYKVRTDVLGNQHIIKNEGDKPKLDF

SEQ ID NO: 596 - protein, 1121 aa, Streptococcus thermophilus
MSDLVLGLDIGIGSVGVGILNKVTGEIIHKNSRIFPAAQAENNLVRRTNRQGRRLTRRKKHRIVRLNRLFEESGLITDFTKISINLNPYQLRVKGLTDELSNEELFIALKNMVKHRGISYLDDASDDGNSSVGDYAQIVKENSKQLETKTPGQIQLERYQTYGQLRGDFTVEKDGKKHRLINVFPTSAYRSEALRILQTQQEFNPQITDEFINRYLEILTGKRKYYHGPGNEKSRTDYGRYRTSGETLDNIFGILIGKCTFYPDEFRAAKASYTAQEFNLLNDLNNLTVPTETKKLSKEQKNQIINYVKNEKAMGPAKLFKYIAKLLSCDVADIKGYRIDKSGKAEIHTFEAYRKMKTLETLDIEQMDRETLDKLAYVLTLNTEREGIQEALEHEFADGSFSQKQVDELVQFRKANSSIFGKGWHNFSVKLMMELIPELYETSEEQMTILTRLGKQKTTSSSNKTKYIDEKLLTEEIYNPVVAKSVRQAIKIVNAAIKEYGDFDNIVIEMARETNEDDEKKAIQKIQKANKDEKDAAMLKAANQYNGKAELPHSVFHGHKQLATKIRLWHQQGERCLYTGKTISIHDLINNSNQFEVDHILPLSITFDDSLANKVLVYATANQEKGQRTPYQALDSMDDAWSFRELKAFVRESKTLSNKKKEYLLTEEDISKFDVRKKFIERNLVDTRYASRVVLNALQEHFRAHKIDTKVSVVRGQFTSQLRRHWGIEKTRDTYHHHAVDALIIAASSQLNLWKKQKNTLVSYSEDQLLDIETGELISDDEYKESVFKAPYQHFVDTLKSKEFEDSILFSYQVDSKFNRKISDATIYATRQAKVGKDKADETYVLGKIKDIYTQDGYDAFMKIYKKDKSKFLMYRHDPQTFEKVIEPILENYPNKQMNEKGKEVPCNPFLKYKEEHGYIRKYSKKGNGPEIKSLKYYDSKLGNHIDITPKDSNNKVVLQSVSPWRADIYFNNTTGKYEILGLKYADLQFEKGTGTYKISQEKYNDIKKKEGVDSDSEFKFTLYKNDLLLVKETETKEQQLFRFLSRTMPKQKHYVELKPYDKQKFEGGEALIKVLGNVANGGQCIKGLGKSNISIYKVRTDVLGNQHIIKNEGDKPKLDF

SEQ ID NO: 597 - protein, 1388 aa, Streptococcus thermophilus
MTKPYSIGLDIGTNSVGWAVITDNYKVPSKKMKVLGNTSKKYIKKNLLGVLLFDSGITAEGRRLKRTARRRYTRRRNRILYLQEIFSTEMATLDDAFFQRLDDSFLVPDDKRDSKYPIFGNLVEEKAYHDEFPTIYHLRKYLADSTKKADLRLVYLALAHMIKYRGHFLIEGEFNSKNNDIQKNFQDFLDTYNAIFESDLSLENSKQLEEIVKDKISKLEKKDRILKLFPGEKNSGIFSEFLKLIVGNQADFRKCFNLDEKASLHFSKESYDEDLETLLGYIGDDYSDVFLKAKKLYDAILLSGFLTVTDNETEAPLSSAMIKRYNEHKEDLALLKEYIRNISLKTYNEVFKDDTKNGYAGYIDGKTNQEDFYVYLKNLLAEFEGADYFLEKIDREDFLRKQRTFDNGSIPYQIHLQEMRAILDKQAKFYPFLAKNKERIEKILTFRIPYYVGPLARGNSDFAWSIRKRNEKITPWNFEDVIDKESSAEAFINRMTSFDLYLPEEKVLPKHSLLYETFNVYNELTKVRFIAESMRDYQFLDSKQKKDIVRLYFKDKRKVTDKDIIEYLHAIYGYDGIELKGIEKQFNSSLSTYHDLLNIINDKEFLDDSSNEAIIEEIIHTLTIFEDREMIKQRLSKFENIFDKSVLKKLSRRHYTGWGKLSAKLINGIRDEKSGNTILDYLIDDGISNRNFMQLIHDDALSFKKKIQKAQIIGDEDKGNIKEVVKSLPGSPAIKKGILQSIKIVDELVKVMGGRKPESIVVEMARENQYTNQGKSNSQQRLKRLEKSLKELGSKILKENIPAKLSKIDNNALQNDRLYLYYLQNGKDMYTGDDLDIDRLSNYDIDHIIPQAFLKDNSIDNKVLVSSASNRGKSDDFPSLEVVKKRKTFWYQLLKSKLISQRKFDNLTKAERGGLLPEDKAGFIQRQLVETRQITKHVARLLDEKFNNKKDENNRAVRTVKIITLKSTLVSQFRKDFELYKVCEINDFHHAHDAYLNAVIASALLKKYPKLEPEFVYGDYPKYNSFRERKSATEKVYFYSNIMNIFKKSISLADGRVIERPLIEVNEETGESVWNKESDLATVRRVLSYPQVNVVKKVEEQNHGLDRGKPKGLFNANLSSKPKPNSNENLVGAKEYLDPKKYGGYAGISNSFAVLVKGTIEKGAKKKITNVLEFQGISILDRINYRKDKLNFLLEKGYKDIELIIELPKYSLFELSDGSRRMLASILSTNNKRGEIHKGNQIFLSQKFVKLLYHAKRISNTINENHRKYVENHKKEFEELFYYILEFNENYVGAKKNGKLLNSAFQSWQNHSIDELCSSFIGPTGSERKGLFELTSRGSAADFEFLGVKIPRYRDYTPSSLLKDATLIHQSVTGLYETRIDLAKLGEG

SEQ ID NO: 598 - protein, 1128 aa, Streptococcus vestibularis
  Streptococcus vestibularis ATCC 49124
MSDLVLGLDIGIGSVGVGILNKVTGEIIHKNSRIFPAAQAENNVERRTNRQGRRLTRRKKHRRVRLNHLFEESGLITDFTKVSINLNPYQLRVKGLIDELSNEELFIALKNMVKHRGISYLDDASDDGNSSVGDYAQIVKENSKQLETKTPGQIQLERYQKYGQLRGDFTVEEDGKKHRLINVFPTSAYRSEALRILQTQKEFNPQITDEFINRYLEILTGKRKYYHGPGNEKSRTDYGRYTTKKDSENEYITLDNIFGILIGKCTFYPEEYRAAKASYTAQEFNLLNDLNNLTVPTETKKLSEEQKNQIINYVKNEKAMGPAKLFKYIAKLLSCDVADIKGYRIDKSDKAEIHTFEAYRKMKTLETIDFEKMSRDQLDKLAYVLTLNTEREGIQEALDHEFADGNFSQEQIDELVQFRKANSSIFGKGWHNFSVKLMMELIPELYATSEEQMTILTRLGKQKTTSSSNKTKYIDEKLLTEEIYNPVVAKSVRQAIKIVNAAIKEYGDFDNIVIEMARETNEDDEKKAIQKIQKANKDEKDAAMLKAANQYNGRAELPHSVFHGHKQLATKIRLWHQQGERCLYTGKTISIHDLINNPNQFEIDHILPLSITFDDSLANKVLVYATANQEKGQRTPYQALDSMDDAWSFRELKAFVRESKSLSNKKKEYLLTEEDISRFDVRKKFIERNLVDTRYASRVVLNALQEHFRAHKTDTKVSVVRGQFTSQLRRHWGIEKTRDTYHHHAVDALIIAASSQLNLWKKQKNTLVNYSENQLLDIETGELISDDEYKESVFKAPYQHFVDTLKSKEFEDSILFSYQVDSKFNRKISDATIYATRQAKVGKDKKDETYVLGKIKDIYSQTGYDAFIKIYQKDKSKFLMYRHDPQTFEKVIEPILENYPNKEMNEKGKEVPCNPFLKYKEEHGDYIRKYSKKGNGPEIKSLKYYDSKLGNHIDITPKDSNNKVVLQSVSPWRADVYFNKTTGKYEILGLKYADLQFEKGTGTYKISQEKYNVIKKKEGVDSDSEFKFTLYKNDLLLIKDTETKEQQLFRFLSRTKPNVKHYVELKPYDKQKFEGNESLINVLGAVAKGGQCQKGINKPNISIYKVRTDVLGNQHIIKNEGDKPKLDF

SEQ ID NO: 599 - protein, 1084 aa, Subdoligranulum sp.
  Subdoligranulum sp. 4_3_54A2FAA
MKNTLYGIGLDIGVASVGWAVVGLNGTGEPVGLHRLGVRIFDKAEQPKTGESLAAPRRMARGMRRRLRRKALRRADVYALLERSGLSTREELAQMFEAGGLEDIYALRTRALDEPVGKAEFSRILLHLAQRRGFKSNRRTASDGEDGRLLAAVNENRRRMAQGGWRTVGEMLYRHEAFALHKRNKADDYLSTVGRDMVAEEASILFERQRAMGCSWAAPELQAEYLSILLRQRSFDEGPGGNSPYGGNQVEKMVGRCTFEPDEPRAAKAAYSFEYFSLLQKLNHIRLAENGETRPLTQPQRQQLLSLAHKTPDISLARIRKELALPETVQFNGVRCRANETLEESEKKEKFACLPAYHKMRKALDGVVKGRISSLSISQRDAAATALSLYKNEDTLRAKLTEAGFQAPEIDALAGLTGFSKFGHLSLKACRKLIPHLEQGLTYDQACTAAGYDFKGHGAGERAFTLPAAAPEMEQITSPVVRRAVAQTIKVVNGIIREMDASPAWVRIELARELSKTFGERQEMDRSMRENAAQNERLMQELRDTFHLLSPTGQDLVKYRLWKEQDGVCAYSLRRLDVERLFEPGYVDVDHIVPYSLSFDDRRSNKVLVLSSENRQKGNRLPLQYLQGKRREDFIVWTNSSVHDYRKRQNLLREKLSGDEAEGFRQRNLQDTQHMARFLYNYISDHLAFAQSEALGKKRVFAVSGAVTSHLRKRWGLSKVRADGDLHHALDAAVVACTTDGMIRRISGYYGHIEGEYLQDADGAGSQHARTKERFPAPWPRFRDELIVRLSEQPAEPLLDINPEFYCEYGTEHIRPVFVSRMPRRKVTGPGHKETIKGAAAADEGLLTVRKALTELKLDKDGEIKDYYMPSSDTLLYEALKAQLRRFGGDGKKAFAEPFYKPKADGTPGPLVRKVKTTEKATLTVPVHGGAASNDTMVRVDVFLVPGDGYYWVPVYTADTLKPELPNRAVVQGKPYSEWKEMREEDFIFSLYPNDLVYVEHKSGLKFTLQNADSTLEKTRTQTSAFAYFVSGSISTASITIRTHDNAYGIPSLGVKTLKTFHKYQVDVLGNVFPVHKETRQKFR

SEQ ID NO: 600 - protein, 1422 aa, Sutterella wadsworthensis
  Sutterella wadsworthensis 3_1_45B
MTQSERRFSCSIGIDMGAKYTGVFYALFDREELPTNLNSKAMTLVMPETGPRYVQAQRTAVRHRLRGQKRYTLARKLAFLVVDDMIKKQEKRLTDEEWKRGREALSGLLKRRGYSRPNADGEDLTPLENVRADVFAAHPAFSTYFSEVRSLAEQWEEFTANISNVEKFLGDPNIPADKEFIEFAVAEGLIDKTEKKAYQSALSTLRANANVLTGLRQMGHKPRSEYFKAIEADLKKDSRLAKINEAFGGAERLARLLGNLSNLQLRAERWYFNAPDIMKDRGWEPDRFKKTLVRAFKFFHPAKDQNKQHLELIKQIENSEDIIETLCTLDPNRTIPPYEDQNNRRPPLDQTLLLSPEKLTRQYGEIWKTWSARLTSAEPTLAPAAEILERSTDRKSRVAVNGHEPLPTLAYQLSYALQRAFDRSKALDPYALRALAAGSKSNKLTSARTALENCIGGQNVKTFLDCARRYYREADDAKVGLWFDNADGLLERSDLHPPMKKKILPLLVANILQTDETTGQKFLDEIWRKQIKGRETVASRCARIETVRKSFGGGFNIAYNTAQYREVNKLPRNAQDKELLTIRDRVAETADFIAANLGLSDEQKRKFANPFSLAQFYTLIETEVSGFSATTLAVHLENAWRMTIKDAVINGETVRAAQCSRLPAETARPFDGLVRRLVDRQAWEIAKRVSTDIQSKVDFSNGIVDVSIFVEENKFEFSASVADLKKNKRVKDKMLSEAEKLETRWLIKNERIKKASRGTCPYTGDRLAEGGEIDHILPRSLIKDARGIVFNAEPNLIYASSRGNQLKKNQRYSLSDLKANYRNEIFKTSNIAAITAEIEDVVTKLQQTHRLKFFDLLNEHEQDCVRHALFLDDGSEARDAVLELLATQRRTRVNGTQIWMIKNLANKIREELQNWCKTTNNRLHFQAAATNVSDAKNLRLKLAQNQPDFEKPDIQPIASHSIDALCSFAVGSADAERDQNGFDYLDGKTVLGLYPQSCEVIHLQAKPQEEKSHFDSVAIFKEGIYAEQFLPIFTLNEKIWIGYETLNAKGERCGAIEVSGKQPKELLEMLAPFFNKPVGDLSAHATYRILKKPAYEFLAKAALQPLSAEEKRLAALLDALRYCTSRKSLMSLFMAANGKSLKKREDVLKPKLFQLKVELKGEKSFKLNGSLTLPVKQDWLRICDSPELADAFGKPCSADELTSKLARIWKRPVMRDLAHAPVRREFSLPAIDNPSGGFRIRRTNLFGNELYQVHAINAKKYRGFASAGSNVDWSKGILFNELQHENLTECGGRFITSADVTPMSEWRKVVAEDNLSIWIAPGTEGRRYVRVETTFIQASHWFEQSVENWAITSPLSLPASFKVDKPAEFQKAVGTELSELLGQPRSEIFIENVGNAKHIRFWYIVVSSNKKMNESYNNVSKS

SEQ ID NO: 601 - protein, 1049 aa, Tistrella mobilis
MINERLTFGIDLGIGSCGWAVLRHADAAGEPGVIEGLGSWCFDVPETSKERIPTNQVRRSNRLLRRVIRRRRNRMAEIRRLFHAQGLLPSADEDALKRPRLDPWELRARGLDQCLSAEEFAVALGHIARHRGFRSSAKRKAANTSGEDSKMLSALLVTRERTARYRTVGEMFARDPEYSARRRNRDGIFDRTVARDDLIHEVGKLFEAQRARGSAFASPDLEADFNAIAFRQAEMQDSERLVGNCPFERDEKRAARWAPSFERFRLLTRLINLRIATAEGERRFTPEDLARVSAELGATAKLPVSRVRALIGLLPDERFTTIRVEDEDRDIVARTGEAAPGTWRLRKTLGEALWAEMQARPDQLDAIAHVLSFFEATAKIRSELDRLGLPAAVIEALDRGLEDGAFAKFKGAGHISAKACRNLLPHLQQGHRYDQACRLAGYDHAASTLSHTAQVVSKAGFNALVTELGESIANPIARKALTEGLKQIRAMCARWGLPGAIHIELAREVGNSIEKRRELESQRETTTKRRQTERDEIRGLLALEDVDDDTLLRYRLWKEQGGKCLYTGKDIHVRQLIATDNSVQVDHILPWSRFGDDSFNNKTLCLASANQRKRGQTPWEWFSLTGTPEAWEVFASRVETSKDLRGFKKRNLLLKNADEVAQRFRSRNLNDTRYAARLLAEAAKLFYPAGDRQEKDGRRRVLTRPGPLTAALRHAWGLESLKKADGKRVSDDRHHALDALAVAAISEREVQRLTRSFQEWEQQGLARPLRHVAPPWPGFRGDVLAAYAQAFVARPERRRARGKGHDASIRQVVGEGPEAQVFERRGLADLKEADLDRVKDPERNQAIIEAVRAWILAGRPADAPPRSPRGDVIVKLRTAPAKKIKPAVPVRGGTADRGDMVRIDVFTRPNRKGRDEWYLVPIYPHQVMNRKAWPHPPMRSVVAYKDEAGWTEIGAEHSFRFSLYPRSYVQLVKSNGDVIEGYLVSMDRSTGAFRVFVHNNPAEMAKGIGAKTLLNLRKFNVDRFGVRTEVKSEVRTWHGEVCTSPVPPD

SEQ ID NO: 602 - protein, 1395 aa, Treponema denticola
  Treponema denticola AL-2
MKKEIKDYFLGLDVGTGSVGWAVTDTDYKLLKANRKDLWGMRCFETAETAEVRRLHRGARRRIERRKKRIKLLQELFSQEIAKIDEGFFQRMKESPFYAEDKTILQENALFNDKDFTDKTYHKAYPTINHLIKAWIENKVKPDPRLLYLACHNIIKKRGHFLFEGDFDSENQFDTSIQALFEYLREDMEVDIDADSQKVKEILKDSSLKNSEKQSRLNKILGLKPSDKQKKAITNLISGNKINFADLYDNPDLKDAEKNSISFSKDDFDALSDDLASILGDSFELLLKAKAVYNCSVLSKVIGDEQYLSFAKVKIYEKHKTDLTKLKAVIKKHFPNNYKKVFGYNQDNESKNNYSGYVGVCKTKNKKLVINNSVNQEDFYKFLKPILSAKSEIKEVNDILAEIETGNFLPKQISKSNAEIPYQLRKMELEKILSNAEKHFSFLKQKDEKGLSHSEKIIMLLTFKIPYYIGPINDNHKKSFPDRCWVVKKEKSPSGKTTPWNFFDHIDKEKTAEEFITSRTNFCTYLIGESVLPKNSLLYSEYTVLNEINNLQIIIDGKNICDTKLKQKIYEDLFKKYKKITQKQISTFIKHEGICNKTDEVIILGIDKECTSSLKSYIELKNIFGKQVDEISTKNMLEEIIRWATIYDEGEGKTILKTKIKAEYGKYCSDEQIKKILNLKFSGWGRLSRKFLETVTSEMPGFSEPVNIITAMRETQNNLMELLSSEFKFTENIKKINSGFEDAEKQFSYDGLVKPLFLSPSVKKMLWQTLKLVKEISHITQAPPKKIFIEMAKGAELEPARTKTRLKILQDLYSSCKNDADAFSSEIQYLSGKIENEDNLRLRSDKLYLYYTQLGKCMYCGKPIEIGHVFDTSNYDIDHIYPQSKIKDDSISNRVLVCSSCNKNKEDKYPLKSEIQSKQRGFWNFLQRNNFISLEKLNRLTRTTPISDDETAKFIARQLVETRQATKVAAKVLEKMFPETKIVYSKAETVSMFRNKFDIIKCREINDFHHAHDAYLNIVVGNVYNTKFTNNPWNFIKEKRDNPKIADTYNYYKVFDYDVKRNNITAWEKGKTIITVKDMLKRNTPIYTRQAACKKGGLFDQTIMKKGLGQHPLKKEGPFSNISKYGGYNKVSAAYYTLIEYEEKGNKIRSLETIPLYLVKDIQKDQDVLKSYLTDLLGKKEFKILVPKIKINSLLKINGFPCHITGKTNDSFLLRPAVQFCCSNDEVLYFKKIIRFSEIRSQREKIGKTISPYEDLSFRSYIKENLCKKTKNDEIGEKEFYDLLQKKNLEIYDMLLTKHKDTIYKKRPNSATIDILVKGKEKFKSLIIENQFEVILEILKLFSATRNVSELQHIGGSKYSGVAKIGNKISSLDNCILIYQSITGIFEKRIDLLKV

SEQ ID NO: 603 - protein, 1395 aa, Treponema denticola
  Treponema denticola ASLM
MKKEIKDYFLGLDVGTGSVGWAVTDTDYKLLKANRKDLWGMRCFETAETAEVRRLHRGARRRIERRKKRIKLLQELFSQEIAKIDEGFFQRMKESPLYAEDKTILQENTLFNDKDFTDKTYHKAYPTINHLIKAWIENKVKPDPRLLYLACHNIIKKRGHFLFEGDFDSENQFDTSIQALFEYLREDMEVDIDADSQKVKEILKDSSLKNSEKQSRLNKMLGLKPSDKQKKAITNLISGNKINFADLYDNPDLKDAEKNSISFSKDDFDALSDDLASILGDSFELLLKAKAVYNCSVLSKVIGDEQYLSFAKVKIYEKHKTDLTKLKNVIKKHFPKDYKKVFGYNKNEKNNNNYSGYVGVCKTKSKKLIINNSVNQEDFYKFLKTILSAKSEIKEVNDILTEIETGTFLPKQISKSNAEIPYQLRKMELEKILSNAEKHFSFLKQKDEKGLSHSEKIIMLLTFKIPYYIGPINDNHKKSFPDRCWVVKKEKSPSGKTTPWNFFDHIDKEKTAEEFITSRTNFCTYLIGESVLPKNSLLYSEYTVLNEINNLQIIIDGKNICDTKLKQKIYEELFKKYKKITQKQISTFIKHEGICNKTDEVIILGIDKECTSSLKSYIELKNIFGKQVDEISTKNMLEEIIRWATIYDEGEGKTILKTKIKAEYGKYCSDEQIKKILNLKFSGWGRLSRKFLETVTSEMPGFSEPVNIITAMRETQNNLMELLSSEFKFTENIKKINSGFEDVEKQFSYDGLVKPLFLSPSVKKMLWQTLKLVKEISHITQAPPKKIFIEMAKGAELDPVRTKTRLKILQDLYNNCKNDADAFSSEIKDLSGKIENEDNLRLRSDKLYLYYTQLGKCMYCGKPIEIGHVFDTSNYDIDHIYPQSKIKDDSISNRVLVCSSCNKNKEDKYPLKAEIQSKQRGFWNFLQRNNFISLEKFNRLTRATPISDDETAKFIARQLVETRQATKVAARVLEKMFPETKIVYSKAETVSMFRNKFDIVKCREINDFHHAHDAYLNIVVGNVYNTKFTNNLWNFIKEKRDNPKIADTYNYYKVFDYDVKRNNITAWEKGKTIITVKDMLKRNTPIYTRQAACKKGGLFDQTIMKKGLGQHPLKKEGPFSNISKYGGYNKVSAAYYTLIEYEEKGNKIRSLETIPLYLVKDIQKDQDVLKSYLTDLLGKKEFKILVPKIKINSLLKINGFPCHITGKTNDSFLLRPAVQFCCSNDEVLYFKKIIRFSEIRSQREKIGKTISPYEDLSFRSYIKENLCKKTKNDEIGEKEFYDLLQKKNLEIYDMLLTKHKDTIYKKRPNSATIDILVKGKEKFKSLIIENQFEVILEILKLFSATRNVSDLQHIGGSKYSGVAKIGNKISSLDNCILIYQSITGIFEKRIDLLKV

SEQ ID NO: 604 - protein, 1395 aa, Treponema denticola
  Treponema denticola ATCC 35405
MKKEIKDYFLGLDVGTGSVGWAVTDTDYKLLKANRKDLWGMRCFETAETAEVRRLHRGARRRIERRKKRIKLLQELFSQEIAKTDEGFFQRMKESPFYAEDKTILQENTLFNDKDFADKTYHKAYPTINHLIKAWIENKVKPDPRLLYLACHNIIKKRGHFLFEGDFDSENQFDTSIQALFEYLREDMEVDIDADSQKVKEILKDSSLKNSEKQSRLNKILGLKPSDKQKKAITNLISGNKINFADLYDNPDLKDAEKNSISFSKDDFDALSDDLASILGDSFELLLKAKAVYNCSVLSKVIGDEQYLSFAKVKIYEKHKTDLTKLKNVIKKHFPKDYKKVFGYNKNEKNNNNYSGYVGVCKTKSKKLIINNSVNQEDFYKFLKTILSAKSEIKEVNDILTEIETGTFLPKQISKSNAEIPYQLRKMELEKILSNAEKHFSFLKQKDEKGLSHSEKIIMLLTFKIPYYIGPINDNHKKFFPDRCWVVKKEKSPSGKTTPWNFFDHIDKEKTAEAFITSRTNFCTYLVGESVLPKSSLLYSEYTVLNEINNLQIIIDGKNICDIKLKQKIYEDLFKKYKKITQKQISTFIKHEGICNKTDEVIILGIDKECTSSLKSYIELKNIFGKQVDEISTKNMLEEIIRWATIYDEGEGKTILKTKIKAEYGKYCSDEQIKKILNLKFSGWGRLSRKFLETVTSEMPGFSEPVNIITAMRETQNNLMELLSSEFTFTENIKKINSGFEDAEKQFSYDGLVKPLFLSPSVKKMLWQTLKLVKEISHITQAPPKKIFIEMAKGAELEPARTKTRLKILQDLYNNCKNDADAFSSEIKDLSGKIENEDNLRLRSDKLYLYYTQLGKCMYCGKPIEIGHVFDTSNYDIDHIYPQSKIKDDSISNRVLVCSSCNKNKEDKYPLKSEIQSKQRGFWNFLQRNNFISLEKLNRLTRATPISDDETAKFIARQLVETRQATKVAAKVLEKMFPETKIVYSKAETVSMFRNKFDIVKCREINDFHHAHDAYLNIVVGNVYNTKFTNNPWNFIKEKRDNPKIADTYNYYKVFDYDVKRNNITAWEKGKTIITVKDMLKRNTPIYTRQAACKKGELFNQTIMKKGLGQHPLKKEGPFSNISKYGGYNKVSAAYYTLIEYEEKGNKIRSLETIPLYLVKDIQKDQDVLKSYLTDLLGKKEFKILVPKIKINSLLKINGFPCHITGKTNDSFLLRPAVQFCCSNNEVLYFKKIIRFSEIRSQREKIGKTISPYEDLSFRSYIKENLWKKTKNDEIGEKEFYDLLQKKNLEIYDMLLTKHKDTIYKKRPNSATIDILVKGKEKFKSLIIENQFEVILEILKLFSATRNVSDLQHIGGSKYSGVAKIGNKISSLDNCILIYQSITGIFEKRIDLLKV

SEQ ID NO: 605 - protein, 1395 aa, Treponema denticola
  Treponema denticola H1-T
MKKEIKDYFLGLDVGTGSVGWAVTDTDYKLLKANRKDLWGMRCFETAETAEVRRLHRGARRRIERRKKRIKLLQELFSQEIAKIDEGFFQRMKESPFYAEDKTILQENALFNDKDFTDKTYHKAYPTINHLIKAWIENKVKPDPRLLYLACHNIIKKRGHFLFEGDFDSENQFDTSIQALFEYLREDMEVDIDADSQKVKEILKDSSLKNSEKQSRLNKILGLKPSDKQKKAITNLISGNKINFADLYDNPDLKDAEKNSISFSKDDFDALSDDLASILGDSFELLLKAKAVYNCSVLSKVIGDEQYLSFAKVKIYEKHKTDLTKLKAVIKKHFPNNYKKVFGYNQDNESKNNYSGYVGVCKTKNKKLVINNSVNQEDFYKFLKPILSAKSEIKEVNDILAEIETGNFLPKQISKSNAEIPYQLRKMELEKILSNAEKHFSFLKQKDEKGLSHSEKIIMLLTFKIPYYIGPINDNHKKSFPDRCWVVKKEKSPSGKTTPWNFFDHIDKEKTAEEFITSRTNFCTYLIGESVLPKNSLLYSEYTVLNEINNLQIIIDGKNICDTKLKQKIYEDLFKKYKKITQKQISTFIKHEGICNKTDEVIILGIDKECTSSLKSYIELKNIFGKQVDEISTKNMLEEIIRWATIYDEGEGKTILKTKIKAEYGKYCSDEQIKKILNLKFSGWGRLSRKFLETVTSEMPGFSEPVNIITAMRETQNNLMELLSSEFKFTENIKKINSGFEDAEKQFSYDGLVKPLFLSPSVKKMLWQTLKLVKEISHITQAPPKKIFIEMAKGAELEPARTKTRLKILQDLYSSCKNDADAFSSEIQYLSGKIENEDNLRLRSDKLYLYYTQLGKCMYCGKPIEIGHVFDTSNYDIDHIYPQSKIKDDSISNRVLVCSSCNKNKEDKYPLKSEIQSKQRGFWNFLQRNNFISLEKLNRLTRTTPISDDETAKFIARQLVETRQATKVAAKVLEKMFPETKIVYSKAETVSMFRNKFDIIKCREINDFHHAHDAYLNIVVGNVYNTKFTNNPWNFIKEKRDNPKIADTYNYYKVFDYDVKRNNITAWEKGKTIITVKDMLKRNTPIYTRQAACKKGELFNQTIMKKGLGQHPLKKEGPFSNISKYGGYNKVSAAYYTLIEYEEKVNKIRSLETIPLYLVKDIQKDQDVLKSYLTDLLGKKEIKILVPKIKINSLLKINGFPCHITGKTGDSFVLRPAVQFCCSNDEVLYFKKIIRFNEIRSQREKMGKTISPYEDLSFRSYIKENLCKKTKADEIGEKEFYDLLQKKNLEIYDMLLTKHKDTIYNKRPNSTTLGMLTKGRYEFINLKPKDQIIVMLEILKLFCTTREAIDLGLIKGKPAAGVATLGKKISNLDNCILIYQSITGIFEKRIDLLKV

SEQ ID NO: 606 - protein, 1395 aa, Treponema denticola
  Treponema denticola H-22
MKKEIKDYFLGLDVGTGSVGWAVTDTDYKLLKANRKDLWGMRCFETAETAEVRRLHRGARRRIERRKKRIKLLQELFSQEIAKIDEGFFQRMKESPFYAEDKTILQENTLFNDKDFTDKTYHKAYPTINHLIKAWIENKVKPDPRLLYLACHNIIKKRGHFLFEGDFDSENQFDTSIQALFEYLREDMEVDIDADSQKVKEILKDSSLKNSEKQSRLNKILGLKPSDKQKKAITNLISGNKINFADLYDNPDLKDAEKNSISFSKDDFDALSDDLASILGDSFELLLKAKAVYNCSVLSKVIGDEQYLSFAKVKIYEKHKTDLTKLKNVIKKHFPKDYKKVFGYNKNEKNNNNYSGYVGVCKTKSKKLIINNSVNQEDFYKFLKTILSAKSEIKEVNDILTEIETGTFLPKQISKSNAEIPYQLRKMELEKILSNAEKHFSFLKQKDEKGLSHSEKIIMLLTFKIPYYIGPINDNHKKSFPDRCWVIKKEKSPSGKTTPWNFFDHIDKDKTAEAFITSRTNFCTYLVGESVLPKSSLLYSEYTVLNEINNLQIIIDGKNICDIKLKQKIYEELFKKYKKITQKQISTFIKHEGICNKTDEVIILGIDKECTSSLKSYIELKNIFGKQVDEISTKNMLEEIIRWATIYDEGEGKTILKTKIKAEYGKYCSDEQIKKILNLKFSGWGRLSRKFLETVTSEMPGFSEPVNIITAMRETQNNLMELLSSEFKFTENIKKINSGFEDAEKQFSYNGLVKPLFLSPSVKKMLWQTLKLVKEISHITQAPPKKIFIEMAKGAELEPARTKTRLKILQDLYNNCKNDADAFSSEIKDLSGKIENEDNLRLRSDKLYLYYTQLGKCMYCGKPIEIGHVFDTSNYDIDHIYPQSKIKDDSISNRVLVCSSCNKNKEDKYPLKSEIQSKQRGFWNFLQRNNFISLEKLNRLTRTTPISDDETAKFIARQLVETRQATKVAAKVLEKMFPETKIVYSKAETVSMFRNKFDIIKCREINDFHHAHDAYLNIVVGNVYNTKFTNNPWNFIKEKRDNPKIADTYNYYKVFDYDVKRNNITAWEKGKTIITVKDMLKRNTPIYTRQAACKKGGLFDQTIMKKGLGQHPLKKEGAFSNISKYGGYNKVSAAYYTLIEYEEKGNKIRSLETIPLYLVKDIQKDQDVLKSYLTDLLGKKEIKILVPKIKINSLLKINGFPCHITGKTGDSFVLRPAVQFCCSNDEVLYFKKIIRFNEIRSQREKMGKTISPYEDLSFRSYIKENLCKKTKADEIGEKEFYDLLQKKNLEIYDMLLTKHKDTIYNKRPNSTTLGMLTKGRYEFINLKPKDQIIVMLEILKLFCTTREAIDLGLIKGKPAAGVATLGKKISNPDNCILIYQSITGIFEKRIDLLKV

SEQ ID NO: 607 - protein, 1395 aa, Treponema denticola
  Treponema denticola OTK
MKKEIKDYFLGLDVGTGSVGWAVTDTDYKLLKANRKDLWGMRCFETAETAEVRRLHRGARRRIERRKKRIKLLQELFSQEIAKIDEGFFQRMKESPLYAEDKTILQENTLFNDKDFTDKTYHKAYPTINHLIKAWIENKVKPDPRLLYLACHNIIKKRGHFLFEGDFDSENQFDTSIQALFEYLREDMELDIDADSQKVKEILKDSSLKNSEKQSRLNKMLGLKPSDKQKKAITNLISGNKINFADLYDNPDLKDAEKNSISFSKDDFDALSDDLASILGDSFELLLKAKAVYNCSVLSKVIGDEQYLSFAKVKIYEKHKTDLTKLKNVIKKHFPKDYKKVFGYNKNEKNNNNYSAYVGVCKITHKKLVIKNSASQEDFYKFLKTILSAKSEIKEVNDILTEIETGTFLPKQISKSNAEIPYQLRKMELEKILSNAEKHFSFLKQKDEKGLSHSEKIIMLLTFKIPYYIGPINDNHKKSFPDRCWVVKKEKSPSGKTTPWNFFDHIDKEKTAEEFITSRTNFCTYLIGESVLPKSSLLYSEYTVLNEINNLQIIIDGKNICDIKLKQKIYEELFKKYKKITQKQISTFIKHEGICNKTDEVIILGIDKECTSSLKSYIELKNIFGKQVDEISTKNMLEEIIRWATIYDEGEGKTILKTKIKAEYGKYCSDEQIKKILNLKFSGWGRLSRKFLETVTSEMPGFSEPVNIITAMRETQNNLMELLSSEFKFTENIKKINSGFEDAEKQFSYNGLVKPLFLSPSVKKMLWQTLKLVKEISHITQAPPKKIFIEMAKGAELEPARTKTRLKILQDLYSSCKNDADAFSSEIQYLSGKIENEDNLRLRSDKLYLYYTQLGKCMYCGKPIEIGHVFDTSNYDIDHIYPQSKIKDDSISNRVLVCSSCNKNKEDKYPLKAEIQSKQRGFWNFLQRNNFISLEKLNRLTRTSPISDDETAKFIARQLVETRQATKVAAKVLEKMFPETKIVYSKAETVSMFRNKFDIIKCREINDFHHAHDAYLNIVVGNVYNTKFTNNPWNFIKEKRDNPKIADTYNYYKVFDYDVKRNNITAWEKGKTIITVKDMLKRNTPIYTRQAACKKGELFNQTIMKKGLGQHPLKKEGPLSNISKYGGYNKVSAAYYTLIEYEEKGSKIRSLETIPLYLVKDIQKNKDGLKSYLTDQIGKKEIKILIPKIKINSLLKINGFPCHITGKMGEAFVLRPAVQFCCSNDEALYFKKIIRFNEIRKQREKMGKTISPYEDLSFRSYIKDNLCKKTKADEIEEKEFYDLLQKKNLEIYDMLLTKHKDTIYKKRPNSATIDILVKGKEKFKSLIIENQFEVILEILKLFSATRNVSDLQHIGGSKNAGNARVGNKISSLDNCILIYQSITGIFEKRIDLLKI

SEQ ID NO: 608 - protein, 1395 aa, Treponema denticola
  Treponema denticola SP37
MKKEIKDYFLGLDVGTGSVGWAVTDTDYKLLKANRKDLWGMRCFETAETAEVRRLHRGARRRIERRKKRIKLLQELFSQEIAKTDEGFFQRMKESPFYAEDKTILQENALFNDRDFTDKTYHKAYPTINHLIKAWIENKVKPDPRLLYLACHNIIKKRGHFLFEGDFDSENQFDTSIQALFEYLREDMEVDIDADSQKVKEILKDSSLKNSEKQSRLNKMLGLKPSDKQKKAITNLISGNKINFADLYDNPDLKDAEKNSISFSKDDFDALSDDLASILGDSFELLLKAKAVYNCSVLSKVIGDEQYLSFAKVKIYEKHKTDLTKLKNVIKKHFPNDYKKVFGYNKNEKNNNNYSAYVGVCKTKSKKLVINNTVNQEDFYKFLKPILLAKSEIKEVNDILTEIETGTFLPKQISKSNAEIPYQLRKMELEKILSNAEKHFSFLKQKDEKGLSHSEKIIMLLTFKIPYYIGPINDNHKKSFPDRCWVIKKEKSPSGKTTPWNFFDHIDKDKTAEAFITSRTNFCTYLVGESVLPKNSLLYSEYTVLNEINNLQIIIDGKNICDIKLKQKIYEELFKKYKKITQKQISTFIKHEGICNKTDEVIILGIDKECTSSLKSYIELKNIFGKQVDEISTKNMLEEIIRWATIYDEGEGKTILKTKIKAEYGKYCSDEQIKKILNLKFSGWGRLSRKFLETVTSEMPGFSEPVNIITAMRETQNNLMELLSSEFKFTENIKKINSGFEDVEKQFSYDSLVKPLFLSPSVKKMLWQTLKLVKEISHITQAPPKKIFIEMAKGAELDPVRTKTRLKILQDLYNNCKNDADAFSSEIKDLSGKIENEDNLRLRSDKLYLYYTQLGKCMYCGKPIEIGHVFDTSNYDIDHIYPQSKIKDDSISNRVLVCSSCNKNKEDKYPLKAEIQSKQRGFWNFLQRNNFISLEKLNRLTRTSPISDDETAKFIARQLVETRQATKVAAKVLEKMFPETKIVYSKAETVSMFRNKFDIIKCREINDFHHAHDAYLNIVVGNVYNTKFTNNPWNFIKEKRDNPKIADTYNYYKVFDYDVKRNNITAWEKGKTIITVKDMLKRNTPIYTRQAACKKGELFNQTIMKKGLGQHPLKKEGPLSNISKYGGYNKVSAAYYTLIEYEEKGSKIRSLETIPLYLVKDIQKNKDGLKSYLTDQIGKKEIKILIPKIKINSLLKINGFPCHITGKMGEAFVLRPAVQFCCSNDEALYFKKIIRFNEIRKQREKMGKTISPYEDLSFRSYIKDNLCKKTKADEIEEKEFYDLLQKKNLEIYDMLLTKHKDTIYKKRPNSATIDILVKGKEKFKSLIIENQFEVILEILKLFSATRNVSDLQHIGGSKNAGNARVGNKISSLDNCILIYQSITGIFEKRIDLLKI

SEQ ID NO: 609 - protein, 1062 aa, Treponema sp.
  Treponema sp. JC4
MIMKLEKWRLGLDLGTNSIGWSVFSLDKDNSVQDLIDMGVRIFSDGRDPKTKEPLAVARRTARSQRKLIYRRKLRRKQVFKFLQEQGLFPKTKEECMTLKSLNPYELRIKALDEKLEPYELGRALFNLAVRRGFKSNRKDGSREEVSEKKSPDEIKTQADMQTHLEKAIKENGCRTITEFLYKNQGENGGIRFAPGRMTYYPTRKMYEEEFNLIRSKQEKYYPQVDWDDIYKAIFYQRPLKPQQRGYCIYENDKERTFKAMPCSQKLRILQDIGNLAYYEGGSKKRVELNDNQDKVLYELLNSKDKVTFDQMRKALCLADSNSFNLEENRDFLIGNPTAVKMRSKNRFGKLWDEIPLEEQDLIIETIITADEDDAVYEVIKKYDLTQEQRDFIVKNTILQSGTSMLCKEVSEKLVKRLEEIADLKYHEAVESLGYKFADQTVEKYDLLPYYGKVLPGSTMEIDLSAPETNPEKHYGKISNPTVHVALNQTRVVVNALIKEYGKPSQIAIELSRDLKNNVEKKAEIARKQNQRAKENIAINDTISALYHTAFPGKSFYPNRNDRMKYRLWSELGLGNKCIYCGKGISGAELFTKEIEIEHILPFSRTLLDAESNLTVAHSSCNAFKAERSPFEAFGTNPSGYSWQEIIQRANQLKNTSKKNKFSPNAMDSFEKDSSFIARQLSDNQYIAKAALRYLKCLVENPSDVWTTNGSMTKLLRDKWEMDSILCRKFTEKEVALLGLKPEQIGNYKKNRFDHRHHAIDAVVIGLTDRSMVQKLATKNSHKGNRIEIPEFPILRSDLIEKVKNIVVSFKPDHGAEGKLSKETLLGKIKLHGKETFVCRENIVSLSEKNLDDIVDEKIKSKVKDYVAKHKGQKIEAVLSDFSKENGIKKVRCVNRVQTPIEITSGKISRYLSPEDYFAAVIWEIPGEKKTFKAQYIRRNEVEKNSKGLNVVKPAVLENGKPHPAAKQVCLLHKDDYLEFSDKGKMYFCRIAGYAATNNKLDIRPVYAVSYCADWINSTNETMLTGYWKPTPTQNWVSVNVLFDKQKARLVTVSPIGRVFRK

SEQ ID NO: 610 - protein, 1011 aa, Unknown
  Description of Unknown: uncultured delta proteobacterium HF0070_07E19 polypeptide
MSSKAIDSLEQLDLFKPQEYTLGLDLGIKSIGWAILSGERIANAGVYLFETAEELNSTGNKLISKAAERGRKRRIRRMLDRKARRGRHIRYLLEREGLPTDELEEVVVHQSNRTLWDVRAEAVERKLTKQELAAVLFHLVRHRGYFPNTKKLPPDDESDSADEEQGKINRATSRLREELKASDCKTIGQFLAQNRDRQRNREGDYSNLMARKLVFEEALQILAFQRKQGHELSKDFEKTYLDVLMGQRSGRSPKLGNCSLIPSELRAPSSAPSTEWFKFLQNLGNLQISNAYREEWSIDAPRRAQIIDACSQRSTSSYWQIRRDFQIPDEYRFNLVNYERRDPDVDLQEYLQQQERKTLANFRNWKQLEKIIGTGHPIQTLDEAARLITLIKDDEKLSDQLADLLPEASDKAITQLCELDFTTAAKISLEAMYRILPHMNQGMGFFDACQQESLPEIGVPPAGDRVPPFDEMYNPVVNRVLSQSRKLINAVIDEYGMPAKIRVELARDLGKGRELRERIKLDQLDKSKQNDQRAEDFRAEFQQAPRGDQSLRYRLWKEQNCTCPYSGRMIPVNSVLSEDTQIDHILPISQSFDNSLSNKVLCFTEENAQKSNRTPFEYLDAADFQRLEAISGNWPEAKRNKLLHKSFGKVAEEWKSRALNDTRYLTSALADHLRHHLPDSKIQTVNGRITGYLRKQWGLEKDRDKHTHHAVDAIVVACTTPAIVQQVTLYHQDIRRYKKLGEKRPTPWPETFRQDVLDVEEEIFITRQPKKVSGGIQTKDTLRKHRSKPDRQRVALTKVKLADLERLVEKDASNRNLYEHLKQCLEESGDQPTKAFKAPFYMPSGPEAKQRPILSKVTLLREKPEPPKQLTELSGGRRYDSMAQGRLDIYRYKPGGKRKDEYRVVLQRMIDLMRGEENVHVFQKGVPYDQGPEIEQNYTFLFSLYFDDLVEFQRSADSEVIRGYYRTFNIANGQLKISTYLEGRQDFDFFGANRLAHFAKVQVNLLGKVIK

SEQ ID NO: 611 - protein, 1032 aa, Unknown
  Description of Unknown: uncultured Termite group 1 bacterium phylotype Rs-D17 polypeptide
MLYHIANHRGTDSVRSFLEYDDDKIKENTLTAKIAKETKKVIDAKKYRTFGEYLYKGKIEKFQQNIRKKVSNRKTPANKNKEFAVTRDVIIKETEKILASQKQYYTYILTDEYIKKIKDAISYQTEKLIPESGYCPYFKDEKRLPRSHKLNEYRRMYEALNNAKYFDPVLDENTGEILSYQEKEFSREEKKILFDEVLLKGMELTESGAKKLLYHLPDGCEVQLQGRDKTTQKIKGYALVDLEASPFWLRLSQQQQDEFLYDWNSLPLEKLKPKLTNYYSLTESEVDETFQEIKLPSNYASVGKKAMEILLTYIKDGCSYTEALEKAVSEGKLKVDKQTMIYDSLPYYGKILKESTQKLIGKAFSKQFADRNYKEPDTNKNEREFGKIANPVVHQTLNELRKLINEIITVFGKKPLEIGLETTRELKKSKKNREYLSKQQNKNEYARNRIYKEYIEPHLSQIKSRQENPSKYISKFELLEEQNFICPFCSEKITPDDIINSKVDVEHIFPIEESEDITKNNLVIAHNECNADKGKKSPFDAFGDKTSGKYRWNCILHNAQKNLPHKVWRFYQGSLEKFLENKPMSRRFGTDNSYISKIAARYLACLFNDPYHSEIFCIKSSLIAQLRIAWDLNSIMVPLVKNILSEKELEEFKISKNKKIRIDNRHHALDAIVIAYANRGYHNFLNRIHAKEYKINYREKSWLSKILLPPLNRDLEDFKISVKDSIEKANVSIKHDHNTNGSLVKATAYKVYYSGAGEYIITTSKNVEEISFKEKEDPKDTLYRALCKFECRDIDIKDEKLIKKLKYNSTLYKKVQNNLSKAKQELEQDNKKTEEEGKKSQKITEVRIYKKACSLVKGQYIQCGSRLKDKFFAVKEPTEIKTGLGYDTGDNLFLDLYYDKTGKLCGEIIRKVNFNRNKPNYQKEGYTLFERIYQSDILEVDTSEDRISLKNKTGSAPSDRTFIKVNTFTEVNAYFDGKRDKIQIFFGNLLKSSFKNDSFFISSMQKYNVRKVILTSLGIIKYRSQILKNKEV

SEQ ID NO: 612 - protein, 1398 aa, Veillonella atypica
  Veillonella atypica ACS-134-V-Col7a
METQTSNQLITSHLKDYPKQDYFVGLDIGTNSVGWAVTNTSYELLKFHSHKMWGSRLFEEGESAVTRRGFRSMRRRLERRKLRLKLLEELFADAMAQVDSTFFIRLHESKYHYEDKTTGHSSKHILFIDEDYTDQDYFTEYPTIYHLRKDLMENGTDDIRKLFLAVHHILKYRGNFLYEGATFNSNAFTFEDVLKQALVNITFNCFDTNSAISSISNILMESGKTKSDKAKAIERLVDTYTVFDEVNTPDKPQKEQVKEDKKTLKAFANLVLGLSANLIDLFGSVEDIDDDLKKLQIVGDTYDEKRDELAKVWGDEIHIIDDCKSVYDAIILMSIKEPGLTISQSKVKAFDKHKEDLVILKSLLKLDRNVYNEMFKSDKKGLHNYVHYIKQGRTEETSCSREDFYKYTKKIVEGLADSKDKEYILNEIELQTLLPLQRIKDNGVIPYQLHLEELKVILDKCGPKFPFLHTVSDGFSVTEKLIKMLEFRIPYYVGPLNTHHNIDNGGFSWAVRKQAGRVTPWNFEEKIDREKSAAAFIKNLTNKCTYLFGEDVLPKSSLLYSEFMLLNELNNVRIDGKALAQGVKQHLIDSIFKQDHKKMTKNRIELFLKDNNYITKKHKPEITGLDGEIKNDLTSYRDMVRILGNNFDVSMAEDIITDITIFGESKKMLRQTLRNKFGSQLNDETIKKLSKLRYRDWGRLSKKLLKGIDGCDKAGNGAPKTIIELMRNDSYNLMEILGDKFSFMECIEEENAKLAQGQVVNPHDIIDELALSPAVKRAVWQALRIVDEVAHIKKALPSRIFVEVARTNKSEKKKKDSRQKRLSDLYSAIKKDDVLQSGLQDKEFGALKSGLANYDDAALRSKKLYLYYTQMGRCAYTGNIIDLNQLNTDNYDIDHIYPRSLTKDDSFDNLVLCERTANAKKSDIYPIDNRIQTKQKPFWAFLKHQGLISERKYERLTRIAPLTADDLSGFIARQLVETNQSVKATTTLLRRLYPDIDVVFVKAENVSDFRHNNNFIKVRSLNHHHHAKDAYLNIVVGNVYHEKFTRNFRLFFKKNGANRTYNLAKMFNYDVICTNAQDGKAWDVKTSMNTVKKMMASNDVRVTRRLLEQSGALADATIYKASVAAKAKDGAYIGMKTKYSVFADVTKYGGMTKIKNAYSIIVQYTGKKGEEIKEIVPLPIYLINRNATDIELIDYVKSVIPKAKDISIKYRKLCINQLVKVNGFYYYLGGKTNDKIYIDNAIELVVPHDIATYIKLLDKYDLLRKENKTLKASSITTSIYNINTSTVVSLSNKVGIDVFDYFMSKLRTPLYMKMKGNKVDELSSTGRSKFIKMTLEEQSIYLLEVLNLLTNSKTTFDVKPLGITGSRSTIGVKIHNLDEFKIINESITGLYSNEVTIV

SEQ ID NO: 613 - protein, 1398 aa, Veillonella parvula
  Veillonella parvula ATCC 17745
METQASNQLISSHLKGYPIKDYFVGLDIGTSSVGWAVTNKAYELLKFRSHKMWGSRLFDEGESAVARRGFRSMRRRLERRKLRLKLLEELFADAMAQVDPTFFMRLRESKYHYEDKTTGHSSKHILFIDKNYNDQDYFKEYPTVYHLRSELMKSGTDDIRKLFLAVHHILKYRGNFLYEGATFDSNASTLDDVIKQALENITFNCFDCNSAISSIGQILMEAGKTKSDKAKAIEHLVDTYIATDTVDTSSKTQKDQVKEDKKRLKAFANLVLGLNASLIDLFGSVEELEEDLKKLQITGDTYDDKRDELAKAWSDEIYIIDDCKSVYDAIILLSIKEPGLTISESKVKAFNKHKDDLAILKSLLKSDRSIYNTMFKVDEKGLHNYVHYIKQGRTEETSCNREDFYKYTKKIVEGLSDSKDKEYILSQIELQILLPLQRIKDNGVIPYQLHLEELKAILAKCGPKFPFLNEVADGFSVAEKLIKMLEFRIPYYVGPLNTHHNVDNGGFAWAVRKASGRVTPWNFDDKIDREKSAAAFIKNLTNKCTYLLGEDVLPKSSLLYSEFMLLNELNNVRIDGKPLEKVVKEHLIEAVFKQDHKKMTKNRIEQFLKDNGYISETHKHEITGLDGEIKNDLASYRDMVRILGDGFDRSMAEEIITDITIFGESKKMLRETLRKKFASCLDDEAIKKLTKLRYRDWGRLSQKLLNGIEGCDKAGDGTPETIIILMRNFSYNLMELLGDKFSFMERIQEINAKLTEGQIVNPHDIIDDLALSPAVKRAVWQALRIVDEVAHIKKALPARIFVEVTRSNKNEKKKKDSRQKRLSDLYAAIKKDDVLLNGLNNEIFGELKSSLAKYDDAALRSKKLYLYYTQMGRCAYTGEIIELSLLNTDNYDIDHIYPRSLTKDDSFDNLVLCKRTANAQKSDAYPISEEIQKTQKPFWTFLKQQGLISERKYERLTRITPLTADDLSGFIARQLVETNQSVKAATTLLRRLYPGVDVVFVKAENVTDFRHDNNFIKVRSLNHHHHAKDAYLNIVVGNVYHERFTRNFRAFFKKNGANRTYNLAKMFNYDVNCTNAKDGKAWDVKTSMDTVKKMMDSNDVRVTKRLLEQTGALADATIYKATVAGKAKDGAYIGMKTKSSVFADVSKYGGMTKIKNAYSIIVQYTGKKGEVIKEIVPLPIYLTNRNTTDQDLINYVASIIPQAKDISIIYGKLCINQLVKVNGFYYYLGGKTNSKFCIDNAIQVIVSNEWIPYLKVLEKFNNMRKDNKDLKANVVSTRALDNKHTIEVRIVEEKNIEFFDYLVSKLKMPIYQKMKGNKAAELSEKGYGLFKKMSLEEQSIHLIELLNLLTNQKTTFEVKPLGITASRSTVGSKISNQDEFKVINESITGLYSNEVTIV

SEQ ID NO: 614 - protein, 1395 aa, Veillonella sp.
  Veillonella sp. 6_1_27
METQASNQLISSHLKGYPIKDYFVGLDIGTSSVGWAVTNKAYELLKFRSHKMWGSRLFDEGESAVARRGFRSMRRRLERRKLRLKLLEELFADAMAQVDPTFFMRLRESKYHYEDKTTGHSSKHILFIDKNYTDQDYYKEYPTIYHLRVALMKSGTDDIRKLFLAVHHILKYRGNFLYEGATFDSNASTLDDVLKQALENITFNCFDSSAAIGSIGQILMELGKTKSDKAKAIERLVDTYIITDEVDTSGKTQKEQVKEDKKRLKSFANLVLGLSASLTDLFGSVEDLDEDLKKLQIIGDTYDERRDDLAKVWGDEIHIIDDCKSVYDAIILMSIKEPGLTISESKVKAFKKHKDDLAILKSLLKSDRSIYNTMFKVDEKGLHNYVHYIKQGRTEETSCNREDFYKYTKKVVEGLPDSKDKEYILSEIELQTLLPLQRIKDNGVIPYQLHLEELKVILAKCGPKFPFLNEVADGFSVAEKLIKMLEFRIPYYVGPLNTHHNVDNGGFAWAVRKASGRVTPWNFDDKIDREKSAAAFIKNLTNKCTYLLGEDVLPKSSLLYSEFMLLNELNNVRIDGKPLEKAVKEHLIEAVFKQDHKKMTKNRIEQFLKDNNYIPEKHKPEITGLDGEIKNDLASYRDMVRILGNNFDLSMAEEIITDITIFGESKKMLRETLRNKFSSRLDDEAIKKLSKLRYRDWGRLSRKLLNVIEGCDKAGDGTPETIIILMRNFSYNLMELLGDKFSFMERIQEINAKLIEGQIVNPHDIIDDLALSPAVKRAVWQALRIVDEIVHIKKTLPARIFVEVTRSNKAEKKKKDSRQKRLSDLYAAIKKDDALLSGLTNEEFGGLKSGLAKYDDAALRSKKLYLYYTQMGRCAYTGEVIDLSQLNTDNYDIDHIYPRSLTKDDSFDNLVLCKRTANAQKSDTYPISKEIQKAQKAFWIFLKQQGLISERKYERLTRITPLTADDLSGFIARQLVETNQSVKAATTLLRRLYPGVDVVFVKAENVTDFRHDNDFIKVRSLNHHHHAKDAYLNIVVGNVYHERFTRNFRAFFKKNGANRTYNLAKMFNYDVKCTNAKDGKAWAVKTSMDTVKKMMDSNDVRVTKRVYEQKGQLSDINLTKASKVKADIYLPIKANDPIMSQNMKYGGYSDIKNAYYTIIEYSDKKNNSIKAFIPIPIFIATKTLTKQALLEYIKTVLPKANNLRIIYKKVYNDQLLKIDGFNYYLGGRSNDRFCIDNAIQLIVPLEIQFYIKLVEKFTAIISENKNIALKASSVKSRNPINNQVENITLEYTQKLFDYLVSKFNELIYLKMRGNKLTDVNNIGRKQFIKLSLEERCKALAELLNIFTNMNKKLSLSTINVSASRKVVNFKISSLDEFKIVNESITGLYSHEITIV

SEQ ID NO: 615 - protein, 1120 aa, Veillonella sp.
  Veillonella sp. oral taxon 780 str. F0422
MGFKANLVNLFTDEDIEVILPEEKEFKSINLHEGIYEDVRDAYEDAWGDRFAIVDQCKVLHDIIVISSIIKPGQSLSEAKIESYNQHKEDLVLLKSVLKEDRKLYDDMFVVDTDKGTNYVKYTKQGVNGNTSATQEEFYKYVRKVVSVLPETEHTRRIVQKLEEGTFLPLQRISKNGVVPYQLHKEELVRILDKATVNFPFLNKVENGLTVADKIISILEFKIPYYVGPLNPTHSIENGGFAWVVRKEAGQVLPWNFEQKVDVQASAVKFIENLTNKCTYLIDQDVLPKYSLLYAEFSLLNELNNIRVNDKPLPADVKQAFIRDHFISLQDSKTATKKVVAKYLVDNNYVSQPPIITGMDQQIATKLTSHRDMTRILGEHFDHAMAEDIIRYITIFGESKDMLRQVLKNYYGDRLTTEQIKKLGKLTYTGWGRLSKKFLSDIWGMKKNDDDAEAGTIIEHMREGQENLMQLLSSSYSFIDVVQEYVTNVLGEKEKTAFEMLEDLSLSPMVKRSVWQTLRILDEIVSIRKELPKKIFVEVARTNKADKKRTQSRKALLEELYKQIKDEDVHVLQQELESKEDSALNSKKLYLYFTQMGRCMYSGRRIDIHELFTDKYDIDHIYPRSLTKDDSWHNIVLVEKQLNAEKTDRFPILSAIQSKQKGFWKLLWDRGFISEKKYDRLVRTTDLTDEELNQFINRQMVSTNQSVKAVTTLLHQLYPETEVVFSKAENVSDFRHDYDFVKVRSINHHHHAKDAYLNIVVGNVYHEKFTKNFLSFAKQKGTRRTYNLTKIFEYEIKLTEESKKVIWDPNIHMDIVKKMMKSNDVRVTQRAVPQKGGLSDETIYKKGIAKRGVYLPLKSSDERVRDVEKYGGRTSITISEYIILNIRDTSDQDRIEIFSLPLYIAGKKDIHKAIEEAYLSTCKKPASVVDIQILYRGLYIGSKVNINGFTYYMGGKTGSNVSIDSAVDVVMDITSSVYIKLLEKVAIKKIENPKTFRIENIKTSYNHKEVTVSKEQNIALYQELLKKLDTPLFSKMKGNKLEEFRTVGFDTFIALSLEEQASVLLEVLNVLTNFKTKRDITKIGMTSSRSTLGINISNTEQFSVITTSITGLYEQEIKIK

SEQ ID NO: 616 - protein, 1068 aa, Verminephrobacter eiseniae
MNKAVAYRLALDLGSTSLGWAIFRLNEAREPTAIIRAGVRIFSDGRNANSEPLAVHRRVARAMRRRRDRLLKRKKRMHDQLVQHGFFPAEVAERKELERLNPYQLRAKGLHEALTPGEFARALFHINQRRGFKSNRKTDRKDNDSGALKQAISELRKRIQDSDCATAGEWFWKERMQQKPEGVRGQWVRARYRKTPSTTDEGKKRIGYDLYVDRAMVEQEFDALWAAQAALQPGLFTEAARAELKDTLLYQRDLRPVKPGRCTLLPAEERAPLALPSTQRFRILQEVNNLRLLDEALREVPLNLAQRDAVVSALEGKKELSFAAIRKLLTLSGKFNLEDEKRAELKGNATSVILARKDLFGDAWAGFDAAVQDEIVWRLVSQESEGALIAWLQQHTGVDGVCAEAIVNTRLPDGYGRLSRKALERIVPALQREVCTYDKAVQAAGFAHHSDLGFDFDYAEDEVQQVGEHTIASTGEVQAQYAFKQLPYYGKALQRHVAFGSGDAKDHEEKCYGKIANPTVHIGLNQVRTVVNALIRRYGHPTEVVVELARDLKQSREQKQQTQREQADNQKRNEDIRKRIAPILETSPERVRDRDIKKWILWEELNKKDIADRHCPYSGERISATMLLSEAVEIEHILPFSRTLDDSLNNRTVAMRRANRIKGDRTPWEARADFEAQGWRYEAILQRAEGMPPRKRYRFAEDGYQRWLGKDRNFLARALNDTSYLSRLAANYLRLVCPQGVRVIPGQMTDKLRGKFGLNSVLGLDGKKNRNDHRHHAVDACVIGVTDQGLMQRFANASKQARENGLTRLVQDMLLPWWPSYYDHVERAVRHIRVSHRPDHGFEGAMMKGTAHGIREDGIREDGRIKQRPKAKGSADHKTITLIPIDEPRQLARHGVDAEGKPLPYKGYASGSNYCIEITKNGKGKWEGQVISTFDAYRIKAAADAAARAGQVISTVEADSIVRKSGWERLRGAQSQNGQPLVMRLVIGDSVRMEVDGRDEVMRVVKMSGKEMVFAPVREANVDKRNNMPDEQDPFTYTYKRADQLRKAKARQVTISPIGELRDPGFKG

SEQ ID NO: 617 - protein, 1440 aa, Weeksella virosa
MKTILGLDLGTNSIGWALVEQDFENKQGLILGMGSRIIPMDAGIIGKFAEGSSISQTAERTGYRSIRRLRERHLLRRERLHRVLNILKFLPEHYAAEIDFEKRFGQFLAETEPKLAWKKNAEGKFEFLFQRSFDEMVADFKANGQDIKIPYDWTIYYLRKKALTQKISPQELAWIILNFNQKRGYYQLRGEEEEENPNKKVEFYSLKIVDVVADEQPNKKGDTWYSLHLENGWVYRRSSKIPLYDWKDKVRDFIVTTDINEDGSEKLDKDGEVKRSFRAPKEDDWTLIKKKTEQEIEQFNQTVGSYIYEALLDNPTQKIRGKLVRTIERKFYKSELKKILEKQIELQPELFTEDLYNACARELYRRNVAHQQQLSSRDFVYLFLNDIIFYQRPLRSQKSLISNCSLEFRTIKDKDGNGQIIYLKAIPKSNPYYQEFRVWQWLYNLKIFTKEDDKDVTNQFINKVEDLEALFEFLMNQKEVNHTDILTYLIEPIVKSKYPNAKGKAFKDELKKELKKYRWNYVYDADKDESKSYPMNETRYELRKRLDKVENVPADFMTRKIEQHLWHIIYSVTDKIEFEKALKSFANKYDLHQESFVENFKRFKPFDSDYGTYSEKAIKKLLPLMRVGKYWSWDIIDDKTKTRIGKIITGEYDETIKNRVREKAIDLTEENHFQGLQLWLAQYIVYDRHSEADIAGKWNSVADLEQYLSEFKQHSLRNPIVEQVITETLRVVRDIWKQYGKGAKDYFDEIHIELGREMKNTAEERKRLSSIISENETTNLRIRAILEELMYDENMENVRPYSPMQQEALKIYEDGVLSSSVEIPEDIEKISKKSEPTKSEIQRYKLWLEQKYRSPYTGRPIPLSKLFTPAYQIEHIIPQARFFDDGFSNKVICESEVNALKDKMLGLEFIQNYYGQKVTTSFGEVTILTEDAYKAFVKEHYDKNRSKRNKLLLEEIPEKMIDRQMNDTRYISKYISKVLSNLVRGEKDDEGVNSKNIIPGNGKITGILKQDWGLNDVWNDLILPRFERMNQLTNSTDFTAWNEKHQKFLPSVPLELSKGFQKKRIDHRHHALDALIIACATRDHVNLLNNKHAKSRNERYDLQHKLRHTTPWQDKEGKVRTKFTEFKKPWETFTQDTKKELEKIVVNFKQNLRVINKATNYYEKIVDGKKVMFKQEGVNWAIRKPMHKETVSGKIDLPRVKVSKGKILTATRKSLDTSFNAKTILSITDTGIQKILLNYLKAKGNPELAFSPEGIEEMNQNISLYNDGKPHQPILKVRVFEQGSKFPLGETGNKTTKYVEAAKGTNLFFGVYEDNQGKRSYDTIPLNIVIERQKQGLNSVPETNEKGHRLLFSLSPNDLVYVPIEGEVFDETNPDVNRIYKVVSFSGSQMFCVRQDVATSIVYKLEFSSLNKMERTIDGIMIKEICIKLKVDRLGNISKA

SEQ ID NO: 618 - protein, 1409 aa, Wolinella succinogenes
MLVSPISVDLGGKNTGFFSFTDSLDNSQSGTVIYDESFVLSQVGRRSKRHSKRNNLRNKLVKRLFLLILQEHHGLSIDVLPDEIRGLFNKRGYTYAGFELDEKKKDALESDTLKEFLSEKLQSIDRDSDVEDFLNQIASNAESFKDYKKGFEAVFASATHSPNKKLELKDELKSEYGENAKELLAGLRVTKEILDEFDKQENQGNLPRAKYFEELGEYIATNEKVKSFFDSNSLKLTDMTKLIGNISNYQLKELRRYFNDKEMEKGDIWIPNKLHKITERFVRSWHPKNDADRQRRAELMKDLKSKEIMELLTTTEPVMTIPPYDDMNNRGAVKCQTLRLNEEYLDKHLPNWRDIAKRLNHGKFNDDLADSTVKGYSEDSTLLHRLLDTSKEIDIYELRGKKPNELLVKTLGQSDANRLYGFAQNYYELIRQKVRAGIWVPVKNKDDSLNLEDNSNMLKRCNHNPPHKKNQIHNLVAGILGVKLDEAKFAEFEKELWSAKVGNKKLSAYCKNIEELRKTHGNTFKIDIEELRKKDPAELSKEEKAKLRLTDDVILNEWSQKIANFFDIDDKHRQRFNNLFSMAQLHTVIDTPRSGFSSTCKRCTAENRFRSETAFYNDETGEFHKKATATCQRLPADTQRPFSGKIERYIDKLGYELAKIKAKELEGMEAKEIKVPIILEQNAFEYEESLRKSKTGSNDRVINSKKDRDGKKLAKAKENAEDRLKDKDKRIKAFSSGICPYCGDTIGDDGEIDHILPRSHTLKIYGTVFNPEGNLIYVHQKCNQAKADSIYKLSDIKAGVSAQWIEEQVANIKGYKTFSVLSAEQQKAFRYALFLQNDNEAYKKVVDWLRTDQSARVNGTQKYLAKKIQEKLTKMLPNKHLSFEFILADATEVSELRRQYARQNPLLAKAEKQAPSSHAIDAVMAFVARYQKVFKDGTPPNADEVAKLAMLDSWNPASNEPLTKGLSTNQKIEKMIKSGDYGQKNMREVFGKSIFGENAIGERYKPIVVQEGGYYIGYPATVKKGYELKNCKVVTSKNDIAKLEKIIKNQDLISLKENQYIKIFSINKQTISELSNRYFNMNYKNLVERDKEIVGLLEFIVENCRYYTKKVDVKFAPKYIHETKYPFYDDWRRFDEAWRYLQENQNKTSSKDRFVIDKSSLNEYYQPDKNEYKLDVDTQPIWDDFCRWYFLDRYKTANDKKSIRIKARKTFSLLAESGVQGKVFRAKRKIPTGYAYQALPMDNNVIAGDYANILLEANSKTLSLVPKSGISIEKQLDKKLDVIKKTDVRGLAIDNNSFFNADFDTHGIRLIVENTSVKVGNFPISAIDKSAKRMIFRALFEKEKGKRKKKTTISFKESGPVQDYLKVFLKKIVKIQLRTDGSISNIVVRKNAADFTLSFRSEHIQKLLK

SEQ ID NO: 619 - protein, 1059 aa, Wolinella succinogenes
MIERILGVDLGISSLGWAIVEYDKDDEAANRIIDCGVRLFTAAETPKKKESPNKARREARGIRRVLNRRRVRMNMIKKLFLRAGLIQDVDLDGEGGMFYSKANRADVWELRHDGLYRLLKGDELARVLIHIAKHRGYKFIGDDEADEESGKVKKAGVVLRQNFEAAGCRTVGEWLWRERGANGKKRNKHGDYEISIHRDLLVEEVEAIFVAQQEMRSTIATDALKAAYREIAFFVRPMQRIEKMVGHCTYFPEERRAPKSAPTAEKFIAISKFFSTVIIDNEGWEQKIIERKTLEELLDFAVSREKVEFRHLRKFLDLSDNEIFKGLHYKGKPKTAKKREATLFDPNEPTELEFDKVEAEKKAWISLRGAAKLREALGNEFYGRFVALGKHADEATKILTYYKDEGQKRRELTKLPLEAEMVERLVKIGFSDFLKLSLKAIRDILPAMESGARYDEAVLMLGVPHKEKSAILPPLNKTDIDILNPTVIRAFAQFRKVANALVRKYGAFDRVHFELAREINTKGEIEDIKESQRKNEKERKEAADWIAETSFQVPLTRKNILKKRLYIQQDGRCAYTGDVIELERLFDEGYCEIDHILPRSRSADDSFANKVLCLARANQQKTDRTPYEWFGHDAARWNAFETRTSAPSNRVRTGKGKIDRLLKKNFDENSEMAFKDRNLNDTRYMARAIKTYCEQYWVFKNSHTKAPVQVRSGKLTSVLRYQWGLESKDRESHTHHAVDAIIIAFSTQGMVQKLSEYYRFKETHREKERPKLAVPLANFRDAVEEATRIENTETVKEGVEVKRLLISRPPRARVTGQAHEQTAKPYPRIKQVKNKKKWRLAPIDEEKFESFKADRVASANQKNFYETSTIPRVDVYHKKGKFHLVPIYLHEMVLNELPNLSLGTNPEAMDENFFKFSIFKDDLISIQTQGTPKKPAKIIMGYFKNMHGANMVLSSINNSPCEGFTCTPVSMDKKHKDKCKLCPEENRIAGRCLQGFLDYWSQEGLRPPRKEFECDQGVKFALDVKKYQIDPLGYYYEVKQEKRLGTIPQMRSAKKLVKK

SEQ ID NO: 620 - protein, 1388 aa, Zunongwangia profunda
MKRILGLDLGTNSIGWALVNEAENEKEISKIIKLGVRVNPLTIDEKTNFEKGRPLSTNADRTLKRGARRNLQRYKLRRENLIEILIDNHIITKETPLTEIGKGTTYQTLSLRAKAVRERIDLEDFAKVLLAINKKRGYKSSRKASNDEEGQAIDGMAIAKELYERGITPGQYVLELLENDRKYIPDFYRSDLKQEFNKIWNNQKTFYPEILTDELFKELDGKNKSQTWAICQKPFNIKGIKRITKGREKTIENYHWRVKGLSGKLNLEKLAIILQEINNDINQSSGYLGGISDKSKKLYLNKETVGEFLYKQIAKNPHTSLKNQVFYRHDYLDEFEQIWKTQSNFNANLTDELKQEIRDVIIFYQRKIKSQKSLISFCQFESWEQEYFDKETGKTKTRTVGRRVIPKSSPLFQEFKIWQNLNHLVFTNSETDEKIEIKEVEQEIRKELFEELNLRGDLNPNDLLKILRSQFKIGKLSNWKCNFEKIEGNRTNAALFNIYQKISDFEGYGIDWNKSNAKKIRKELKATFPEIGIDASILEFDAYKKQLTNQSSYELWHLLYSAEEDFKISEQDKLIYGNSSVSLKKKLHLKFGFNPEYAKMLANLSLMSDYGNLSAKAIKKILPYLEDGHLYSEACRLAGYNHSKSLTAEELEKFEPKAKLDLLKKNSLRNPVVEKILNQMVNVVNQVIDTYGKPDGVRIELARELKKSAKERAEMTKGIADGTRRNEEIKKIITQKFGIPNPTKSDLVRYRLWQELESRGYKDIFTDKYISPDKIFSSEIDIEHIIPKALLFDDSFSNKTLSFRNVNLKKANRTALDFITQDYQSNVEAYKERVETWNKDNHISKGKRNKLLMSLKDIPDGFIERDLRNSQYIARKAKRMLYEVFPNEVLATSGSITDKLRSDWDLINVMKELNLPKYKALGLTEYEERLDKGTEELFKHEVIKDWTKRNDHRHHAMDALAVAFTTHNHIQYINNLNARKDITQDNHPIIKNIENLITEVNSKGKRVFKAPMSSFRESAKEQIEAILVSFKNKNKVVTKNINQTKKEGGFNYQNAKTPRGQLHKETIYGKSKQPLEKPVKINNRFCKKQVGLIINFKEQEAVLHHLKKYDNNEKIAFSNKTLKSDPIQVNGSPLREVKIFEEIFTIRKDINPDNFKTQKHLDKIIDKGIKEVMKKRLEEYNGDFKTAFSDLDKNPIWLNQSKGITIKRATISGVTNAEPLHQAKDHLGNIILDDNGKEIPIDYVSTGNNHHVAIYQDESGNLQEEVVSFYEAVIRKNQDQPIIKKRHPKGWKFLFTMKQNEMFVFSSENFNPSEIDLLDEKNAAIISPNLFRVQKIATKNYMFRHHLETEVTNNLDFTYRHFQATEWLRNLCKVRIDHIGRIVQIGEY

SEQ ID NO: 621-631 - skipped (11 entries)

SEQ ID NO: 632 - RNA, 22 nt, Homo sapiens
ugcucagguugcacagcuggga

SEQ ID NO: 633 - RNA, 22 nt, Homo sapiens
ucccagcugugcaaccugagca

SEQ ID NO: 634 - RNA, 22 nt, Homo sapiens
ucagguguggaaacugaggcag

SEQ ID NO: 635 - RNA, 22 nt, Homo sapiens
cugccucaguuuccacaccuga

SEQ ID NO: 636 - RNA, 22 nt, Homo sapiens
caaaaccgcgauuacucuugca

SEQ ID NO: 637 - RNA, 22 nt, Homo sapiens
ugcaagaguaaucgcgguuuug

SEQ ID NO: 638 - RNA, 21 nt, Homo sapiens
aaaaguaauugugguuuuugc

SEQ ID NO: 639 - RNA, 21 nt, Homo sapiens
gcaaaaaccacaauuacuuuu

SEQ ID NO: 640 - RNA, 21 nt, Homo sapiens
aaaaacugcaaucacuuuugc

SEQ ID NO: 641 - RNA, 21 nt, Homo sapiens
gcaaaagugauugcaguuuuu

SEQ ID NO: 642 - RNA, 22 nt, Homo sapiens
caaaagugauugugguuuuugc

SEQ ID NO: 643 - RNA, 22 nt, Homo sapiens
gcaaaaaccacaaucacuuuug

SEQ ID NO: 644 - RNA, 22 nt, Homo sapiens
agcaguguuuguuuugcccaca

SEQ ID NO: 645 - RNA, 22 nt, Homo sapiens
ugugggcaaaacaaacacugcu

SEQ ID NO: 646 - RNA, 22 nt, Homo sapiens
ucgggcgcaagagcacugcagu

SEQ ID NO: 647 - RNA, 22 nt, Homo sapiens
acugcagugcucuugcgcccga

SEQ ID NO: 648 - RNA, 21 nt, Homo sapiens
acacuuguugggaugaccugc

SEQ ID NO: 649 - RNA, 21 nt, Homo sapiens
gcaggucaucccaacaagugu

SEQ ID NO: 650 - RNA, 24 nt, Homo sapiens
aggagcuauccacuccaggugucc

SEQ ID NO: 651 - RNA, 24 nt, Homo sapiens
ggacaccuggaguggauagcuccu

SEQ ID NO: 652 - RNA, 23 nt, Homo sapiens
ccagagcagccugcgguaacagu

SEQ ID NO: 653 - RNA, 23 nt, Homo sapiens
acuguuaccgcaggcugcucugg

SEQ ID NO: 654 - RNA, 22 nt, Homo sapiens
aguugccagggcugccuuuggu

SEQ ID NO: 655 - RNA, 22 nt, Homo sapiens
accaaaggcagcccuggcaacu

SEQ ID NO: 656 - RNA, 21 nt, Homo sapiens
uagaccaucuuucuagaguau

SEQ ID NO: 657 - RNA, 21 nt, Homo sapiens
auacucuagaaagauggucua

SEQ ID NO: 658 - RNA, 22 nt, Homo sapiens
agcucuagaaagauuguugacc

SEQ ID NO: 659 - RNA, 22 nt, Homo sapiens
ggucaacaaucuuucuagagcu

SEQ ID NO: 660 - RNA, 21 nt, Homo sapiens
gggacuaggaugcagaccucc

SEQ ID NO: 661 - RNA, 21 nt, Homo sapiens
ggaggucugcauccuaguccc

SEQ ID NO: 662 - RNA, 23 nt, Homo sapiens
aggucugcauucaaauccccaga

SEQ ID NO: 663 - RNA, 23 nt, Homo sapiens
ucuggggauuugaaugcagaccu

SEQ ID NO: 664 - RNA, 20 nt, Homo sapiens
cauuacagcacagccauucu

SEQ ID NO: 665 - RNA, 20 nt, Homo sapiens
agaauggcugugcuguaaug

SEQ ID NO: 666 - RNA, 21 nt, Homo sapiens
ucuggcugugcuguaaugcag

SEQ ID NO: 667 - RNA, 21 nt, Homo sapiens
cugcauuacagcacagccaga

SEQ ID NO: 668 - RNA, 21 nt, Homo sapiens
ugacuucuaccucuuccaaag

SEQ ID NO: 669 - RNA, 21 nt, Homo sapiens
cuuuggaagagguagaaguca

SEQ ID NO: 670 - RNA, 22 nt, Homo sapiens
uuggaauaggggauaucucagc

SEQ ID NO: 671 - RNA, 22 nt, Homo sapiens
gcugagauauccccuauuccaa

SEQ ID NO: 672 - RNA, 22 nt, Homo sapiens
ucguaucagagauuccagacac

SEQ ID NO: 673 - RNA, 22 nt, Homo sapiens
gugucuggaaucucugauacga

SEQ ID NO: 674 - RNA, 23 nt, Homo sapiens
acugggaugucacugaauauggu

SEQ ID NO: 675 - RNA, 23 nt, Homo sapiens
accauauucagugacaucccagu

SEQ ID NO: 676 - RNA, 22 nt, Homo sapiens
caaaguccuuccuauuuuuccc

SEQ ID NO: 677 - RNA, 22 nt, Homo sapiens
gggaaaaauaggaaggacuuug

SEQ ID NO: 678 - RNA, 21 nt, Homo sapiens
gaagaauaggagggacuuugu

SEQ ID NO: 679 - RNA, 21 nt, Homo sapiens
acaaagucccuccuauucuuc

SEQ ID NO: 680 - RNA, 22 nt, Homo sapiens
ugggccaugcauuucuagaacu

SEQ ID NO: 681 - RNA, 22 nt, Homo sapiens
aguucuagaaaugcauggccca

SEQ ID NO: 682 - RNA, 21 nt, Homo sapiens
ucuagaaaugcaugacccacc

SEQ ID NO: 683 - RNA, 21 nt, Homo sapiens
ggugggucaugcauuucuaga

SEQ ID NO: 684 - RNA, 22 nt, Homo sapiens
uuccacugccacuaccuaauuu

SEQ ID NO: 685 - RNA, 22 nt, Homo sapiens
aaauuagguaguggcaguggaa

SEQ ID NO: 686 - RNA, 21 nt, Homo sapiens
auuagguaguggcaguggaac

SEQ ID NO: 687 - RNA, 21 nt, Homo sapiens
guuccacugccacuaccuaau

SEQ ID NO: 688 - RNA, 21 nt, Homo sapiens
caccgacucugucuccugcag

SEQ ID NO: 689 - RNA, 21 nt, Homo sapiens
cugcaggagacagagucggug

SEQ ID NO: 690 - RNA, 22 nt, Homo sapiens
cagcaggggagagagaggaguc

SEQ ID NO: 691 - RNA, 22 nt, Homo sapiens
gacuccucucucuccccugcug

SEQ ID NO: 692 - RNA, 22 nt, Homo sapiens
uuccagcccuucuaaugguagg

SEQ ID NO: 693 - RNA, 22 nt, Homo sapiens
ccuaccauuagaagggcuggaa

SEQ ID NO: 694 - RNA, 22 nt, Homo sapiens
uaccauuagaagagcuggaaga

SEQ ID NO: 695 - RNA, 22 nt, Homo sapiens
ucuuccagcucuucuaauggua

SEQ ID NO: 696 - RNA, 21 nt, Homo sapiens
ucaagugucaucugucccuag

SEQ ID NO: 697 - RNA, 21 nt, Homo sapiens
cuagggacagaugacacuuga

SEQ ID NO: 698 - RNA, 23 nt, Homo sapiens
uuugggauugacgccacaugucu

SEQ ID NO: 699 - RNA, 23 nt, Homo sapiens
agacauguggcgucaaucccaaa

SEQ ID NO: 700 - RNA, 21 nt, Homo sapiens
cugccuguucuuccacuccag

SEQ ID NO: 701 - RNA, 21 nt, Homo sapiens
cuggaguggaagaacaggcag

SEQ ID NO: 702 - RNA, 23 nt, Homo sapiens
uauggaguggacuuucagcuggc

SEQ ID NO: 703 - RNA, 23 nt, Homo sapiens
gccagcugaaaguccacuccaua

SEQ ID NO: 704 - RNA, 22 nt, Homo sapiens
ccucaccaucccuucugccugc

SEQ ID NO: 705 - RNA, 22 nt, Homo sapiens
gcaggcagaagggauggugagg

SEQ ID NO: 706 - RNA, 23 nt, Homo sapiens
caggcagaaguggggcugacagg

SEQ ID NO: 707 - RNA, 23 nt, Homo sapiens
ccugucagccccacuucugccug

SEQ ID NO: 708 - RNA, 20 nt, Homo sapiens
ucucuucaucuaccccccag

SEQ ID NO: 709 - RNA, 20 nt, Homo sapiens
cugggggguagaugaagaga

SEQ ID NO: 710 - RNA, 21 nt, Homo sapiens
uuggaggguguggaagacauc

SEQ ID NO: 711 - RNA, 21 nt, Homo sapiens
gaugucuuccacacccuccaa

SEQ ID NO: 712 - RNA, 22 nt, Homo sapiens
cugccagccccguuccagggca

SEQ ID NO: 713 - RNA, 22 nt, Homo sapiens
ugcccuggaacggggcuggcag

SEQ ID NO: 714 - RNA, 23 nt, Homo sapiens
acaaaguacagcauuagccuuag

SEQ ID NO: 715 - RNA, 23 nt, Homo sapiens
cuaaggcuaaugcuguacuuugu

SEQ ID NO: 716 - RNA, 23 nt, Homo sapiens
aaaggucauuguaagguuaaugc

SEQ ID NO: 717 - RNA, 23 nt, Homo sapiens
gcauuaaccuuacaaugaccuuu

SEQ ID NO: 718 - RNA, 22 nt, Homo sapiens
ugaggcuaaugcacuacuucac

SEQ ID NO: 719 - RNA, 22 nt, Homo sapiens
gugaaguagugcauuagccuca

SEQ ID NO: 720 - RNA, 24 nt, Homo sapiens
uauagagagcaggaagauuaaugu

SEQ ID NO: 721 - RNA, 24 nt, Homo sapiens
acauuaaucuuccugcucucuaua

SEQ ID NO: 722 - RNA, 23 nt, Homo sapiens
gugcuucaucguaauuaaccuua

SEQ ID NO: 723 - RNA, 23 nt, Homo sapiens
uaagguuaauuacgaugaagcac

SEQ ID NO: 724 - RNA, 24 nt, Homo sapiens
guggaaagcaugcauccagggugu

SEQ ID NO: 725 - RNA, 24 nt, Homo sapiens
acacccuggaugcaugcuuuccac

SEQ ID NO: 726 - RNA, 22 nt, Homo sapiens
agacacauuuggagagggaacc

SEQ ID NO: 727 - RNA, 22 nt, Homo sapiens
gguucccucuccaaaugugucu

SEQ ID NO: 728 - RNA, 22 nt, Homo sapiens
uucccuuugucauccuaugccu

SEQ ID NO: 729 - RNA, 22 nt, Homo sapiens
aggcauaggaugacaaagggaa

SEQ ID NO: 730 - RNA, 21 nt, Homo sapiens
gcugggaaggcaaagggacgu

SEQ ID NO: 731 - RNA, 21 nt, Homo sapiens
acgucccuuugccuucccagc

SEQ ID NO: 732 - RNA, 21 nt, Homo sapiens
uaccacaggguagaaccacgg

SEQ ID NO: 733 - RNA, 21 nt, Homo sapiens
ccgugguucuacccuguggua

SEQ ID NO: 734 - RNA, 22 nt, Homo sapiens
ggcuggagcgagugcaguggug

SEQ ID NO: 735 - RNA, 22 nt, Homo sapiens
caccacugcacucgcuccagcc

SEQ ID NO: 736 - RNA, 18 nt, Homo sapiens
ccaggcucugcaguggga

SEQ ID NO: 737 - RNA, 18 nt, Homo sapiens
ucccacugcagagccugg

SEQ ID NO: 738 - RNA, 22 nt, Homo sapiens
cugggaggugugauauuguggu

SEQ ID NO: 739 - RNA, 22 nt, Homo sapiens
accacaauaucacaccucccag

SEQ ID NO: 740 - RNA, 22 nt, Homo sapiens
gggaggugugaucucacacucg

SEQ ID NO: 741 - RNA, 22 nt, Homo sapiens
cgagugugagaucacaccuccc

SEQ ID NO: 742 - RNA, 22 nt, Homo sapiens
ugugauaucaugguuccuggga

SEQ ID NO: 743 - RNA, 22 nt, Homo sapiens
ucccaggaaccaugauaucaca

SEQ ID NO: 744 - RNA, 22 nt, Homo sapiens
ugugauaucgugcuuccuggga

SEQ ID NO: 745 - RNA, 22 nt, Homo sapiens
ucccaggaagcacgauaucaca

SEQ ID NO: 746 - RNA, 18 nt, Homo sapiens
ggugggcuucccggaggg

SEQ ID NO: 747 - RNA, 18 nt, Homo sapiens
cccuccgggaagcccacc

SEQ ID NO: 748 - RNA, 18 nt, Homo sapiens
cacugcaggacucagcag

SEQ ID NO: 749 - RNA, 18 nt, Homo sapiens
cugcugaguccugcagug

SEQ ID NO: 750 - RNA, 17 nt, Homo sapiens
ugagggaggagacugca

SEQ ID NO: 751 - RNA, 17 nt, Homo sapiens
ugcagucuccucccuca

SEQ ID NO: 752 - RNA, 18 nt, Homo sapiens
gaggcugaaggaagaugg

SEQ ID NO: 753 - RNA, 18 nt, Homo sapiens
ccaucuuccuucagccuc

SEQ ID NO: 754 - RNA, 22 nt, Homo sapiens
gucacugaugucuguagcugag

SEQ ID NO: 755 - RNA, 22 nt, Homo sapiens
cucagcuacagacaucagugac

SEQ ID NO: 756 - RNA, 22 nt, Homo sapiens
accugucuguggaaaggagcua

SEQ ID NO: 757 - RNA, 22 nt, Homo sapiens
uagcuccuuuccacagacaggu

SEQ ID NO: 758 - RNA, 22 nt, Homo sapiens
agaguuaacucaaaauggacua

SEQ ID NO: 759 - RNA, 22 nt, Homo sapiens
uaguccauuuugaguuaacucu

SEQ ID NO: 760 - RNA, 22 nt, Homo sapiens
uguugggauucagcaggaccau

SEQ ID NO: 761 - RNA, 22 nt, Homo sapiens
augguccugcugaaucccaaca

SEQ ID NO: 762 - RNA, 17 nt, Homo sapiens
gaagauggacguacuuu

SEQ ID NO: 763 - RNA, 17 nt, Homo sapiens
aaaguacguccaucuuc

SEQ ID NO: 764 - RNA, 21 nt, Homo sapiens
ucugaauagagucugaagagu

SEQ ID NO: 765 - RNA, 21 nt, Homo sapiens
acucuucagacucuauucaga

SEQ ID NO: 766 - RNA, 22 nt, Homo sapiens
caaggagacgggaacauggagc

SEQ ID NO: 767 - RNA, 22 nt, Homo sapiens
gcuccauguucccgucuccuug

SEQ ID NO: 768 - RNA, 20 nt, Homo sapiens
aaaagcugggcugagaggcg

SEQ ID NO: 769 - RNA, 20 nt, Homo sapiens
cgccucucagcccagcuuuu

SEQ ID NO: 770 - RNA, 18 nt, Homo sapiens
aggcuggagugagcggag

SEQ ID NO: 771 - RNA, 18 nt, Homo sapiens
cuccgcucacuccagccu

SEQ ID NO: 772 - RNA, 22 nt, Homo sapiens
gcgacucugaaaacuagaaggu

SEQ ID NO: 773 - RNA, 22 nt, Homo sapiens
accuucuaguuuucagagucgc

SEQ ID NO: 774 - RNA, 20 nt, Homo sapiens
aaagacucugcaagaugccu

SEQ ID NO: 775 - RNA, 20 nt, Homo sapiens
aggcaucuugcagagucuuu

SEQ ID NO: 776 - RNA, 21 nt, Homo sapiens
acaggagugggggugggacau

SEQ ID NO: 777 - RNA, 21 nt, Homo sapiens
augucccacccccacuccugu

SEQ ID NO: 778 - RNA, 21 nt, Homo sapiens
cgucccaccccccacuccugu

SEQ ID NO: 779 - RNA, 21 nt, Homo sapiens
acaggaguggggggugggacg

SEQ ID NO: 780 - RNA, 18 nt, Homo sapiens
aggagaaguaaaguagaa

SEQ ID NO: 781 - RNA, 18 nt, Homo sapiens
uucuacuuuacuucuccu

SEQ ID NO: 782 - RNA, 22 nt, Homo sapiens
auggccagagcucacacagagg

SEQ ID NO: 783 - RNA, 22 nt, Homo sapiens
ccucugugugagcucuggccau

SEQ ID NO: 784 - RNA, 21 nt, Homo sapiens
ugggcucaggguacaaagguu

SEQ ID NO: 785 - RNA, 21 nt, Homo sapiens
aaccuuuguacccugagccca

SEQ ID NO: 786 - RNA, 21 nt, Homo sapiens
cacaggcuuagaaaagacagu

SEQ ID NO: 787 - RNA, 21 nt, Homo sapiens
acugucuuuucuaagccugug

SEQ ID NO: 788 - RNA, 22 nt, Homo sapiens
gugacugauaccuuggaggcau

SEQ ID NO: 789 - RNA, 22 nt, Homo sapiens
augccuccaagguaucagucac

SEQ ID NO: 790 - RNA, 22 nt, Homo sapiens
ugucguggggcuugcuggcuug

SEQ ID NO: 791 - RNA, 22 nt, Homo sapiens
caagccagcaagccccacgaca

SEQ ID NO: 792 - RNA, 17 nt, Homo sapiens
acagggaggagauugua

SEQ ID NO: 793 - RNA, 17 nt, Homo sapiens
uacaaucuccucccugu

SEQ ID NO: 794 - RNA, 17 nt, Homo sapiens
gccggacaagagggagg

SEQ ID NO: 795 - RNA, 17 nt, Homo sapiens
ccucccucuuguccggc

SEQ ID NO: 796 - RNA, 17 nt, Homo sapiens
uuggaggcguggguuuu

SEQ ID NO: 797 - RNA, 17 nt, Homo sapiens
aaaacccacgccuccaa

SEQ ID NO: 798 - RNA, 18 nt, Homo sapiens
cucgaguuggaagaggcg

SEQ ID NO: 799 - RNA, 18 nt, Homo sapiens
cgccucuuccaacucgag

SEQ ID NO: 800 - RNA, 21 nt, Homo sapiens
cacggcaaaagaaacaaucca

SEQ ID NO: 801 - RNA, 21 nt, Homo sapiens
uggauuguuucuuuugccgug

SEQ ID NO: 802 - RNA, 22 nt, Homo sapiens
agauuguuucuuuugccgugca

SEQ ID NO: 803 - RNA, 22 nt, Homo sapiens
ugcacggcaaaagaaacaaucu

SEQ ID NO: 804 - RNA, 17 nt, Homo sapiens
ggugggggcuguuguuu

SEQ ID NO: 805 - RNA, 17 nt, Homo sapiens
aaacaacagcccccacc

SEQ ID NO: 806 - RNA, 20 nt, Homo sapiens
ggcuccuuggucuaggggua

SEQ ID NO: 807 - RNA, 20 nt, Homo sapiens
uaccccuagaccaaggagcc

SEQ ID NO: 808 - RNA, 22 nt, Homo sapiens
cgucccggggcugcgcgaggca

SEQ ID NO: 809 - RNA, 22 nt, Homo sapiens
ugccucgcgcagccccgggacg

SEQ ID NO: 810 - RNA, 22 nt, Homo sapiens
uggggauuuggagaagugguga

SEQ ID NO: 811 - RNA, 22 nt, Homo sapiens
ucaccacuucuccaaaucccca

SEQ ID NO: 812 - RNA, 17 nt, Homo sapiens
ugguagagcugaggaca

SEQ ID NO: 813 - RNA, 17 nt, Homo sapiens
uguccucagcucuacca

SEQ ID NO: 814 - RNA, 23 nt, Homo sapiens
uugaauucuuggccuuaagugau

SEQ ID NO: 815 - RNA, 23 nt, Homo sapiens
aucacuuaaggccaagaauucaa

SEQ ID NO: 816 - RNA, 20 nt, Homo sapiens
gagcuuggucuguagcgguu

SEQ ID NO: 817 - RNA, 20 nt, Homo sapiens
aaccgcuacagaccaagcuc

SEQ ID NO: 818 - RNA, 20 nt, Homo sapiens
ggauccgagucacggcacca

SEQ ID NO: 819 - RNA, 20 nt, Homo sapiens
uggugccgugacucggaucc

SEQ ID NO: 820 - RNA, 17 nt, Homo sapiens
aggguguguguguuuuu

SEQ ID NO: 821 - RNA, 17 nt, Homo sapiens
aaaaacacacacacccu

SEQ ID NO: 822 - RNA, 17 nt, Homo sapiens
ccugguggcuuccuuuu

SEQ ID NO: 823 - RNA, 17 nt, Homo sapiens
aaaaggaagccaccagg

SEQ ID NO: 824 - RNA, 22 nt, Homo sapiens
ucacaagguauugacuggcgua

SEQ ID NO: 825 - RNA, 22 nt, Homo sapiens
uacgccagucaauaccuuguga

SEQ ID NO: 826 - RNA, 19 nt, Homo sapiens
agagguagguguggaagaa

SEQ ID NO: 827 - RNA, 19 nt, Homo sapiens
uucuuccacaccuaccucu

SEQ ID NO: 828 - RNA, 22 nt, Homo sapiens
ccaggaggcggaggagguggag

SEQ ID NO: 829 - RNA, 22 nt, Homo sapiens
cuccaccuccuccgccuccugg

SEQ ID NO: 830 - RNA, 22 nt, Homo sapiens
auagugguugugaauuuaccuu

SEQ ID NO: 831 - RNA, 22 nt, Homo sapiens
aagguaaauucacaaccacuau

SEQ ID NO: 832 - RNA, 23 nt, Homo sapiens
gauugagacuaguagggcuaggc

SEQ ID NO: 833 - RNA, 23 nt, Homo sapiens
gccuagcccuacuagucucaauc

SEQ ID NO: 834 - RNA, 23 nt, Homo sapiens
ugacacggaggguggcuugggaa

SEQ ID NO: 835 - RNA, 23 nt, Homo sapiens
uucccaagccacccuccguguca

SEQ ID NO: 836 - RNA, 17 nt, Homo sapiens
gagacugggguggggcc

SEQ ID NO: 837 - RNA, 17 nt, Homo sapiens
ggccccaccccagucuc

SEQ ID NO: 838 - RNA, 21 nt, Homo sapiens
aagguuuggauagaugcaaua

SEQ ID NO: 839 - RNA, 21 nt, Homo sapiens
uauugcaucuauccaaaccuu

SEQ ID NO: 840 - RNA, 22 nt, Homo sapiens
cucaaguagucugaccagggga

SEQ ID NO: 841 - RNA, 22 nt, Homo sapiens
uccccuggucagacuacuugag

SEQ ID NO: 842 - RNA, 18 nt, Homo sapiens
gggugcgggccggcgggg

SEQ ID NO: 843 - RNA, 18 nt, Homo sapiens
ccccgccggcccgcaccc

SEQ ID NO: 844 - RNA, 18 nt, Homo sapiens
agagcagaaggaugagau

SEQ ID NO: 845 - RNA, 18 nt, Homo sapiens
aucucauccuucugcucu

SEQ ID NO: 846 - RNA, 21 nt, Homo sapiens
uggcaaacguggaagccgaga

SEQ ID NO: 847 - RNA, 21 nt, Homo sapiens
ucucggcuuccacguuugcca

SEQ ID NO: 848 - RNA, 18 nt, Homo sapiens
ggugggggguguuguuuu

SEQ ID NO: 849 - RNA, 18 nt, Homo sapiens
aaaacaacaccccccacc

SEQ ID NO: 850 - RNA, 22 nt, Homo sapiens
cuagugcucuccguuacaagua

SEQ ID NO: 851 - RNA, 22 nt, Homo sapiens
uacuuguaacggagagcacuag

SEQ ID NO: 852 - RNA, 22 nt, Homo sapiens
caagggaccaagcauucauuau

SEQ ID NO: 853 - RNA, 22 nt, Homo sapiens
auaaugaaugcuuggucccuug

SEQ ID NO: 854 - RNA, 22 nt, Homo sapiens
caggaaggauuuagggacaggc

SEQ ID NO: 855 - RNA, 22 nt, Homo sapiens
gccugucccuaaauccuuccug

SEQ ID NO: 856 - RNA, 22 nt, Homo sapiens
cuauuaaggacauuugugauuc

SEQ ID NO: 857 - RNA, 22 nt, Homo sapiens
gaaucacaaauguccuuaauag

SEQ ID NO: 858 - RNA, 22 nt, Homo sapiens
auuaaggacauuugugauugau

SEQ ID NO: 859 - RNA, 22 nt, Homo sapiens
aucaaucacaaauguccuuaau

SEQ ID NO: 860 - RNA, 17 nt, Homo sapiens
gaggcugagcugaggag

SEQ ID NO: 861 - RNA, 17 nt, Homo sapiens
cuccucagcucagccuc

SEQ ID NO: 862 - RNA, 22 nt, Homo sapiens
cgcgcggccgugcucggagcag

SEQ ID NO: 863 - RNA, 22 nt, Homo sapiens
cugcuccgagcacggccgcgcg

SEQ ID NO: 864 - RNA, 21 nt, Homo sapiens
agccaaguggaaguuacuuua

SEQ ID NO: 865 - RNA, 21 nt, Homo sapiens
uaaaguaacuuccacuuggcu

SEQ ID NO: 866 - RNA, 17 nt, Homo sapiens
ggagugggcuggugguu

SEQ ID NO: 867 - RNA, 17 nt, Homo sapiens
aaccaccagcccacucc

SEQ ID NO: 868 - RNA, 22 nt, Homo sapiens
uuucuauuucucaguggggcuc

SEQ ID NO: 869 - RNA, 22 nt, Homo sapiens
gagccccacugagaaauagaaa

SEQ ID NO: 870 - RNA, 22 nt, Homo sapiens
aacccagugggcuauggaaaug

SEQ ID NO: 871 - RNA, 22 nt, Homo sapiens
cauuuccauagcccacuggguu

SEQ ID NO: 872 - RNA, 17 nt, Homo sapiens
gggguggucuguuguug

SEQ ID NO: 873 - RNA, 17 nt, Homo sapiens
caacaacagaccacccc

SEQ ID NO: 874 - RNA, 20 nt, Homo sapiens
aaaaggcgggagaagcccca

SEQ ID NO: 875 - RNA, 20 nt, Homo sapiens
uggggcuucucccgccuuuu

SEQ ID NO: 876 - RNA, 20 nt, Homo sapiens
uaacggccgcgguacccuaa

SEQ ID NO: 877 - RNA, 20 nt, Homo sapiens
uuaggguaccgcggccguua

SEQ ID NO: 878 - RNA, 17 nt, Homo sapiens
gcugggcgaggcuggca

SEQ ID NO: 879 - RNA, 17 nt, Homo sapiens
ugccagccucgcccagc

SEQ ID NO: 880 - RNA, 19 nt, Homo sapiens
agagcuggcugaagggcag

SEQ ID NO: 881 - RNA, 19 nt, Homo sapiens
cugcccuucagccagcucu

SEQ ID NO: 882 - RNA, 18 nt, Homo sapiens
agggggcgggcuccggcg

SEQ ID NO: 883 - RNA, 18 nt, Homo sapiens
cgccggagcccgcccccu

SEQ ID NO: 884 - RNA, 22 nt, Homo sapiens
ucugguaagagauuugggcaua

SEQ ID NO: 885 - RNA, 22 nt, Homo sapiens
uaugcccaaaucucuuaccaga

SEQ ID NO: 886 - RNA, 22 nt, Homo sapiens
aauguggacuggugugaccaaa

SEQ ID NO: 887 - RNA, 22 nt, Homo sapiens
uuuggucacaccaguccacauu

SEQ ID NO: 888 - RNA, 17 nt, Homo sapiens
ggggcugggcgcgcgcc

SEQ ID NO: 889 - RNA, 17 nt, Homo sapiens
ggcgcgcgcccagcccc

SEQ ID NO: 890 - RNA, 21 nt, Homo sapiens
agaaggccuuuccaucucugu

SEQ ID NO: 891 - RNA, 21 nt, Homo sapiens
acagagauggaaaggccuucu

SEQ ID NO: 892 - RNA, 22 nt, Homo sapiens
ccagacuguggcugaccagagg

SEQ ID NO: 893 - RNA, 22 nt, Homo sapiens
ccucuggucagccacagucugg

SEQ ID NO: 894 - RNA, 21 nt, Homo sapiens
aauguaaacaggcuuuuugcu

SEQ ID NO: 895 - RNA, 21 nt, Homo sapiens
agcaaaaagccuguuuacauu

SEQ ID NO: 896 - RNA, 22 nt, Homo sapiens
gaggaaacugaagcugagaggg

SEQ ID NO: 897 - RNA, 22 nt, Homo sapiens
cccucucagcuucaguuuccuc

SEQ ID NO: 898 - RNA, 17 nt, Homo sapiens
cuccgggacggcugggc

SEQ ID NO: 899 - RNA, 17 nt, Homo sapiens
gcccagccgucccggag

SEQ ID NO: 900 - RNA, 22 nt, Homo sapiens
ugggcuggcagggcaagugcug

SEQ ID NO: 901 - RNA, 22 nt, Homo sapiens
cagcacuugcccugccagccca

SEQ ID NO: 902 - RNA, 17 nt, Homo sapiens
aagacugagaggaggga

SEQ ID NO: 903 - RNA, 17 nt, Homo sapiens
ucccuccucucagucuu

SEQ ID NO: 904 - RNA, 17 nt, Homo sapiens
ugagguaguaguuucuu

SEQ ID NO: 905 - RNA, 17 nt, Homo sapiens
aagaaacuacuaccuca

SEQ ID NO: 906 - RNA, 21 nt, Homo sapiens
uaugugaccucggaugaauca

SEQ ID NO: 907 - RNA, 21 nt, Homo sapiens
ugauucauccgaggucacaua

SEQ ID NO: 908 - RNA, 22 nt, Homo sapiens
gcugaugaugauggugcugaag

SEQ ID NO: 909 - RNA, 22 nt, Homo sapiens
cuucagcaccaucaucaucagc

SEQ ID NO: 910 - RNA, 22 nt, Homo sapiens
uuuaagcaggaaauagaauuua

SEQ ID NO: 911 - RNA, 22 nt, Homo sapiens
uaaauucuauuuccugcuuaaa

SEQ ID NO: 912 - RNA, 22 nt, Homo sapiens
ugugacaauagagaugaacaug

SEQ ID NO: 913 - RNA, 22 nt, Homo sapiens
cauguucaucucuauugucaca

SEQ ID NO: 914 - RNA, 18 nt, Homo sapiens
aggcugggcugggacgga

SEQ ID NO: 915 - RNA, 18 nt, Homo sapiens
uccgucccagcccagccu

SEQ ID NO: 916 - RNA, 20 nt, Homo sapiens
aaauggguggucugaggcaa

SEQ ID NO: 917 - RNA, 20 nt, Homo sapiens
uugccucagaccacccauuu

SEQ ID NO: 918 - RNA, 20 nt, Homo sapiens
cuggguugggcugggcuggg

SEQ ID NO: 919 - RNA, 20 nt, Homo sapiens
cccagcccagcccaacccag

SEQ ID NO: 920 - RNA, 17 nt, Homo sapiens
gcggggcugggcgcgcg

SEQ ID NO: 921 - RNA, 17 nt, Homo sapiens
cgcgcgcccagccccgc

SEQ ID NO: 922 - RNA, 22 nt, Homo sapiens
acuaaaggauauagaagguuuu

SEQ ID NO: 923 - RNA, 22 nt, Homo sapiens
aaaaccuucuauauccuuuagu

SEQ ID NO: 924 - RNA, 22 nt, Homo sapiens
ugagggaguaggauguaugguu

SEQ ID NO: 925 - RNA, 22 nt, Homo sapiens
aaccauacauccuacucccuca

SEQ ID NO: 926 - RNA, 22 nt, Homo sapiens
gaagaacuguugcauuugcccu

SEQ ID NO: 927 - RNA, 22 nt, Homo sapiens
agggcaaaugcaacaguucuuc

SEQ ID NO: 928 - RNA, 22 nt, Homo sapiens
cagggccucacuguaucgccca

SEQ ID NO: 929 - RNA, 22 nt, Homo sapiens
ugggcgauacagugaggcccug

SEQ ID NO: 930 - RNA, 22 nt, Homo sapiens
agacugacggcuggaggcccau

SEQ ID NO: 931 - RNA, 22 nt, Homo sapiens
augggccuccagccgucagucu

SEQ ID NO: 932 - RNA, 18 nt, Homo sapiens
acaggcaggauuggggaa

SEQ ID NO: 933 - RNA, 18 nt, Homo sapiens
uuccccaauccugccugu

SEQ ID NO: 934 - RNA, 22 nt, Homo sapiens
aggacuggacucccggcagccc

SEQ ID NO: 935 - RNA, 22 nt, Homo sapiens
gggcugccgggaguccaguccu

SEQ ID NO: 936 - RNA, 17 nt, Homo sapiens
gggagaagggucggggc

SEQ ID NO: 937 - RNA, 17 nt, Homo sapiens
gccccgacccuucuccc

SEQ ID NO: 938 - RNA, 25 nt, Homo sapiens
aaauaugaugaaacucacagcugag

SEQ ID NO: 939 - RNA, 25 nt, Homo sapiens
cucagcugugaguuucaucauauuu

SEQ ID NO: 940 - RNA, 26 nt, Homo sapiens
gcucagggaugauaacugugcugaga

SEQ ID NO: 941 - RNA, 26 nt, Homo sapiens
ucucagcacaguuaucaucccugagc

SEQ ID NO: 942 - RNA, 18 nt, Homo sapiens
cagcagugcgcagggcug

SEQ ID NO: 943 - RNA, 18 nt, Homo sapiens
cagcccugcgcacugcug

SEQ ID NO: 944 - RNA, 22 nt, Homo sapiens
gcuaaggaaguccugugcucag

SEQ ID NO: 945 - RNA, 22 nt, Homo sapiens
cugagcacaggacuuccuuagc

SEQ ID NO: 946 - RNA, 21 nt, Homo sapiens
ugacucugccuguaggccggu

SEQ ID NO: 947 - RNA, 21 nt, Homo sapiens
accggccuacaggcagaguca

SEQ ID NO: 948 - RNA, 21 nt, Homo sapiens
gaccgagagggccucggcugu

SEQ ID NO: 949 - RNA, 21 nt, Homo sapiens
acagccgaggcccucucgguc

SEQ ID NO: 950 - RNA, 21 nt, Homo sapiens
ggggggaugugcaugcugguu

SEQ ID NO: 951 - RNA, 21 nt, Homo sapiens
aaccagcaugcacaucccccc

SEQ ID NO: 952 - RNA, 22 nt, Homo sapiens
uggucugcaaagagaugacugu

SEQ ID NO: 953 - RNA, 22 nt, Homo sapiens
acagucaucucuuugcagacca

SEQ ID NO: 954 - RNA, 22 nt, Homo sapiens
ucauuauauguaugaucuggac

SEQ ID NO: 955 - RNA, 22 nt, Homo sapiens
guccagaucauacauauaauga

SEQ ID NO: 956 - RNA, 18 nt, Homo sapiens
cccagcaggacgggagcg

SEQ ID NO: 957 - RNA, 18 nt, Homo sapiens
cgcucccguccugcuggg

SEQ ID NO: 958 - RNA, 17 nt, Homo sapiens
auggagaaggcuucuga

SEQ ID NO: 959 - RNA, 17 nt, Homo sapiens
ucagaagccuucuccau

SEQ ID NO: 960 - RNA, 17 nt, Homo sapiens
ccccggggagcccggcg

SEQ ID NO: 961 - RNA, 17 nt, Homo sapiens
cgccgggcuccccgggg

SEQ ID NO: 962 - RNA, 22 nt, Homo sapiens
uggaaggagguugccggacgcu

SEQ ID NO: 963 - RNA, 22 nt, Homo sapiens
agcguccggcaaccuccuucca

SEQ ID NO: 964 - RNA, 17 nt, Homo sapiens
ggauggaggaggggucu

SEQ ID NO: 965 - RNA, 17 nt, Homo sapiens
agaccccuccuccaucc

SEQ ID NO: 966 - RNA, 17 nt, Homo sapiens
guggaccuggcugggac

SEQ ID NO: 967 - RNA, 17 nt, Homo sapiens
gucccagccagguccac

SEQ ID NO: 968 - RNA, 21 nt, Homo sapiens
ucgugcauauaucuaccacau

SEQ ID NO: 969 - RNA, 21 nt, Homo sapiens
augugguagauauaugcacga

SEQ ID NO: 970 - RNA, 21 nt, Homo sapiens
ugugguagauauaugcacgau

SEQ ID NO: 971 - RNA, 21 nt, Homo sapiens
aucgugcauauaucuaccaca

SEQ ID NO: 972 - RNA, 22 nt, Homo sapiens
ugagccgagcugagcuuagcug

SEQ ID NO: 973 - RNA, 22 nt, Homo sapiens
cagcuaagcucagcucggcuca

SEQ ID NO: 974 - RNA, 22 nt, Homo sapiens
gagcuuggaugagcugggcuga

SEQ ID NO: 975 - RNA, 22 nt, Homo sapiens
ucagcccagcucauccaagcuc

SEQ ID NO: 976 - RNA, 22 nt, Homo sapiens
gcugaacugggcugagcugggc

SEQ ID NO: 977 - RNA, 22 nt, Homo sapiens
gcccagcucagcccaguucagc

SEQ ID NO: 978 - RNA, 21 nt, Homo sapiens
uuaguccugccuguagguuua

SEQ ID NO: 979 - RNA, 21 nt, Homo sapiens
uaaaccuacaggcaggacuaa

SEQ ID NO: 980 - RNA, 20 nt, Homo sapiens
uugggcugggcuggguuggg

SEQ ID NO: 981 - RNA, 20 nt, Homo sapiens
cccaacccagcccagcccaa

SEQ ID NO: 982 - RNA, 20 nt, Homo sapiens
uaggaugggggugagaggug

SEQ ID NO: 983 - RNA, 20 nt, Homo sapiens
caccucucacccccauccua

SEQ ID NO: 984 - RNA, 22 nt, Homo sapiens
aaaaguaauuguggauuuugcu

SEQ ID NO: 985 - RNA, 22 nt, Homo sapiens
agcaaaauccacaauuacuuuu

SEQ ID NO: 986 - RNA, 22 nt, Homo sapiens
caaaaaccggcaauuacuuuug

SEQ ID NO: 987 - RNA, 22 nt, Homo sapiens
caaaaguaauugccgguuuuug

SEQ ID NO: 988 - RNA, 22 nt, Homo sapiens
gaaaacgacaaugacuuuugca

SEQ ID NO: 989 - RNA, 22 nt, Homo sapiens
ugcaaaagucauugucguuuuc

SEQ ID NO: 990 - RNA, 21 nt, Homo sapiens
caaaaacugcaauuacuuuca

SEQ ID NO: 991 - RNA, 21 nt, Homo sapiens
ugaaaguaauugcaguuuuug

SEQ ID NO: 992 - RNA, 21 nt, Homo sapiens
aaagguaauugugguuucugc

SEQ ID NO: 993 - RNA, 21 nt, Homo sapiens
gcagaaaccacaauuaccuuu

SEQ ID NO: 994 - RNA, 22 nt, Homo sapiens
caaaaacugcaguuacuuuugc

SEQ ID NO: 995 - RNA, 22 nt, Homo sapiens
gcaaaaguaacugcaguuuuug

SEQ ID NO: 996 - RNA, 20 nt, Homo sapiens
aaaagugauugcaguguuug

SEQ ID NO: 997 - RNA, 20 nt, Homo sapiens
caaacacugcaaucacuuuu

SEQ ID NO: 998 - RNA, 22 nt, Homo sapiens
aaagguaauugcaguuuuuccc

SEQ ID NO: 999 - RNA, 22 nt, Homo sapiens
gggaaaaacugcaauuaccuuu

SEQ ID NO: 1000 - RNA, 21 nt, Homo sapiens
uaaaaacugcaauuacuuuua

SEQ ID NO: 1001 - RNA, 21 nt, Homo sapiens
uaaaaguaauugcaguuuuua

SEQ ID NO: 1002 - RNA, 23 nt, Homo sapiens
ugcaaaaguaauugcaguuuuug

SEQ ID NO: 1003 - RNA, 23 nt, Homo sapiens
caaaaacugcaauuacuuuugca

SEQ ID NO: 1004 - RNA, 21 nt, Homo sapiens
aaaaguaacugcgguuuuuga

SEQ ID NO: 1005 - RNA, 21 nt, Homo sapiens
ucaaaaaccgcaguuacuuuu

SEQ ID NO: 1006 - RNA, 22 nt, Homo sapiens
aacggcaaugacuuuuguacca

SEQ ID NO: 1007 - RNA, 22 nt, Homo sapiens
ugguacaaaagucauugccguu

SEQ ID NO: 1008 - RNA, 22 nt, Homo sapiens
caaaaacugcaguuacuuuugu

SEQ ID NO: 1009 - RNA, 22 nt, Homo sapiens
acaaaaguaacugcaguuuuug

SEQ ID NO: 1010 - RNA, 22 nt, Homo sapiens
aaaaguaauugcgguuuuugcc

SEQ ID NO: 1011 - RNA, 22 nt, Homo sapiens
ggcaaaaaccgcaauuacuuuu

SEQ ID NO: 1012 - RNA, 20 nt, Homo sapiens
aaaaggcauugugguuuuug

SEQ ID NO: 1013 - RNA, 20 nt, Homo sapiens
caaaaaccacaaugccuuuu

SEQ ID NO: 1014 - RNA, 23 nt, Homo sapiens
cggcccgggcugcugcuguuccu

SEQ ID NO: 1015 - RNA, 23 nt, Homo sapiens
aggaacagcagcagcccgggccg

SEQ ID NO: 1016 - RNA, 20 nt, Homo sapiens
agagguauagggcaugggaa

SEQ ID NO: 1017 - RNA, 20 nt, Homo sapiens
uucccaugcccuauaccucu

SEQ ID NO: 1018 - RNA, 22 nt, Homo sapiens
uuccuaugcauauacuucuuug

SEQ ID NO: 1019 - RNA, 22 nt, Homo sapiens
caaagaaguauaugcauaggaa

SEQ ID NO: 1020 - RNA, 22 nt, Homo sapiens
aucauagaggaaaauccauguu

SEQ ID NO: 1021 - RNA, 22 nt, Homo sapiens
aacauggauuuuccucuaugau

SEQ ID NO: 1022 - RNA, 22 nt, Homo sapiens
cguggauauuccuucuauguuu

SEQ ID NO: 1023 - RNA, 22 nt, Homo sapiens
aaacauagaaggaauauccacg

SEQ ID NO: 1024 - RNA, 22 nt, Homo sapiens
ugaguauuacauggccaaucuc

SEQ ID NO: 1025 - RNA, 22 nt, Homo sapiens
gagauuggccauguaauacuca

SEQ ID NO: 1026 - RNA, 21 nt, Homo sapiens
cuuccgccccgccgggcgucg

SEQ ID NO: 1027 - RNA, 21 nt, Homo sapiens
cgacgcccggcggggcggaag

SEQ ID NO: 1028 - RNA, 22 nt, Homo sapiens
uagcuuaucagacugauguuga

SEQ ID NO: 1029 - RNA, 22 nt, Homo sapiens
ucaacaucagucugauaagcua

SEQ ID NO: 1030 - RNA, 22 nt, Homo sapiens
cacuagauugugagcuccugga

SEQ ID NO: 1031 - RNA, 22 nt, Homo sapiens
uccaggagcucacaaucuagug

SEQ ID NO: 1032 - RNA, 22 nt, Homo sapiens
aaggagcucacagucuauugag

SEQ ID NO: 1033 - RNA, 22 nt, Homo sapiens
cucaauagacugugagcuccuu

SEQ ID NO: 1034 - RNA, 22 nt, Homo sapiens
uacgucaucguugucaucguca

SEQ ID NO: 1035 - RNA, 22 nt, Homo sapiens
ugacgaugacaacgaugacgua

SEQ ID NO: 1036 - RNA, 22 nt, Homo sapiens
cacgcucaugcacacacccaca

SEQ ID NO: 1037 - RNA, 22 nt, Homo sapiens
ugugggugugugcaugagcgug

SEQ ID NO: 1038 - RNA, 21 nt, Homo sapiens
caacaccagucgaugggcugu

SEQ ID NO: 1039 - RNA, 21 nt, Homo sapiens
acagcccaucgacugguguug

SEQ ID NO: 1040 - RNA, 22 nt, Homo sapiens
uucaccaccuucuccacccagc

SEQ ID NO: 1041 - RNA, 22 nt, Homo sapiens
gcuggguggagaagguggugaa

SEQ ID NO: 1042 - RNA, 23 nt, Homo sapiens
cggguagagagggcagugggagg

SEQ ID NO: 1043 - RNA, 23 nt, Homo sapiens
ccucccacugcccucucuacccg

SEQ ID NO: 1044 - RNA, 18 nt, Homo sapiens
aauccuugcuaccugggu

SEQ ID NO: 1045 - RNA, 18 nt, Homo sapiens
acccagguagcaaggauu

SEQ ID NO: 1046 - RNA, 22 nt, Homo sapiens
caauuuagugugugugauauuu

SEQ ID NO: 1047 - RNA, 22 nt, Homo sapiens
aaauaucacacacacuaaauug

SEQ ID NO: 1048 - RNA, 22 nt, Homo sapiens
uauugcacauuacuaaguugca

SEQ ID NO: 1049 - RNA, 22 nt, Homo sapiens
ugcaacuuaguaaugugcaaua

SEQ ID NO: 1050 - RNA, 22 nt, Homo sapiens
ccuauucuugauuacuuguuuc

SEQ ID NO: 1051 - RNA, 22 nt, Homo sapiens
gaaacaaguaaucaagaauagg

SEQ ID NO: 1052 - RNA, 22 nt, Homo sapiens
uucaaguaauccaggauaggcu

SEQ ID NO: 1053 - RNA, 22 nt, Homo sapiens
agccuauccuggauuacuugaa

SEQ ID NO: 1054 - RNA, 23 nt, Homo sapiens
ccaguuaccgcuuccgcuaccgc

SEQ ID NO: 1055 - RNA, 23 nt, Homo sapiens
gcgguagcggaagcgguaacugg

SEQ ID NO: 1056 - RNA, 21 nt, Homo sapiens
gauuucaguggagugaaguuc

SEQ ID NO: 1057 - RNA, 21 nt, Homo sapiens
gaacuucacuccacugaaauc

SEQ ID NO: 1058 - RNA, 22 nt, Homo sapiens
uccuucauuccaccggagucug

SEQ ID NO: 1059 - RNA, 22 nt, Homo sapiens
cagacuccgguggaaugaagga

SEQ ID NO: 1060 - RNA, 23 nt, Homo sapiens
aaaauggugcccuagugacuaca

SEQ ID NO: 1061 - RNA, 23 nt, Homo sapiens
uguagucacuagggcaccauuuu

SEQ ID NO: 1062 - RNA, 21 nt, Homo sapiens
caagucacuagugguuccguu

SEQ ID NO: 1063 - RNA, 21 nt, Homo sapiens
aacggaaccacuagugacuug

SEQ ID NO: 1064 - RNA, 22 nt, Homo sapiens
ccaguauuaacugugcugcuga

SEQ ID NO: 1065 - RNA, 22 nt, Homo sapiens
ucagcagcacaguuaauacugg

SEQ ID NO: 1066 - RNA, 23 nt, Homo sapiens
ucccccaggugugauucugauuu

SEQ ID NO: 1067 - RNA, 23 nt, Homo sapiens
aaaucagaaucacaccuggggga

SEQ ID NO: 1068 - RNA, 22 nt, Homo sapiens
aaaagcuggguugagagggcga

SEQ ID NO: 1069 - RNA, 22 nt, Homo sapiens
ucgcccucucaacccagcuuuu

SEQ ID NO: 1070 - RNA, 22 nt, Homo sapiens
uggacggagaacugauaagggu

SEQ ID NO: 1071 - RNA, 22 nt, Homo sapiens
acccuuaucaguucuccgucca

SEQ ID NO: 1072 - RNA, 22 nt, Homo sapiens
uggugggccgcagaacaugugc

SEQ ID NO: 1073 - RNA, 22 nt, Homo sapiens
gcacauguucugcggcccacca

SEQ ID NO: 1074 - RNA, 22 nt, Homo sapiens
agugccugcuaugugccaggca

SEQ ID NO: 1075 - RNA, 22 nt, Homo sapiens
ugccuggcacauagcaggcacu

SEQ ID NO: 1076 - RNA, 22 nt, Homo sapiens
cuuggcaccuagcaagcacuca

SEQ ID NO: 1077 - RNA, 22 nt, Homo sapiens
ugagugcuugcuaggugccaag

SEQ ID NO: 1078 - RNA, 23 nt, Homo sapiens
uuauugcuuaagaauacgcguag

SEQ ID NO: 1079 - RNA, 23 nt, Homo sapiens
cuacgcguauucuuaagcaauaa

SEQ ID NO: 1080 - RNA, 22 nt, Homo sapiens
uugcauagucacaaaagugauc

SEQ ID NO: 1081 - RNA, 22 nt, Homo sapiens
gaucacuuuugugacuaugcaa

SEQ ID NO: 1082 - RNA, 22 nt, Homo sapiens
gugaauuaccgaagggccauaa

SEQ ID NO: 1083 - RNA, 22 nt, Homo sapiens
uuauggcccuucgguaauucac

SEQ ID NO: 1084 - RNA, 22 nt, Homo sapiens
uauggcacugguagaauucacu

SEQ ID NO: 1085 - RNA, 22 nt, Homo sapiens
agugaauucuaccagugccaua

SEQ ID NO: 1086 - RNA, 22 nt, Homo sapiens
ugauauguuugauauauuaggu

SEQ ID NO: 1087 - RNA, 22 nt, Homo sapiens
accuaauauaucaaacauauca

SEQ ID NO: 1088 - RNA, 21 nt, Homo sapiens
ugauauguuugauauuggguu

SEQ ID NO: 1089 - RNA, 21 nt, Homo sapiens
aacccaauaucaaacauauca

SEQ ID NO: 1090 - RNA, 18 nt, Homo sapiens
agcaggugcggggcggcg

SEQ ID NO: 1091 - RNA, 18 nt, Homo sapiens
cgccgccccgcaccugcu

SEQ ID NO: 1092 - RNA, 21 nt, Homo sapiens
cagugcaaguguagaugccga

SEQ ID NO: 1093 - RNA, 21 nt, Homo sapiens
ucggcaucuacacuugcacug

SEQ ID NO: 1094 - RNA, 22 nt, Homo sapiens
uauguaauaugguccacaucuu

SEQ ID NO: 1095 - RNA, 22 nt, Homo sapiens
aagauguggaccauauuacaua

SEQ ID NO: 1096 - RNA, 21 nt, Homo sapiens
aauauaacacagauggccugu

SEQ ID NO: 1097 - RNA, 21 nt, Homo sapiens
acaggccaucuguguuauauu

SEQ ID NO: 1098 - RNA, 22 nt, Homo sapiens
aucgggaaugucguguccgccc

SEQ ID NO: 1099 - RNA, 22 nt, Homo sapiens
gggcggacacgacauucccgau

SEQ ID NO: 1100 - RNA, 23 nt, Homo sapiens
aaugacacgaucacucccguuga

SEQ ID NO: 1101 - RNA, 23 nt, Homo sapiens
ucaacgggagugaucgugucauu

SEQ ID NO: 1102 - RNA, 22 nt, Homo sapiens
uacucaggagaguggcaaucac

SEQ ID NO: 1103 - RNA, 22 nt, Homo sapiens
gugauugccacucuccugagua

SEQ ID NO: 1104 - RNA, 23 nt, Homo sapiens
uggaagacuagugauuuuguugu

SEQ ID NO: 1105 - RNA, 23 nt, Homo sapiens
acaacaaaaucacuagucuucca

SEQ ID NO: 1106 - RNA, 22 nt, Homo sapiens
auaaagcuagauaaccgaaagu

SEQ ID NO: 1107 - RNA, 22 nt, Homo sapiens
acuuucgguuaucuagcuuuau

SEQ ID NO: 1108 - RNA, 23 nt, Homo sapiens
ucuuugguuaucuagcuguauga

SEQ ID NO: 1109 - RNA, 23 nt, Homo sapiens
ucauacagcuagauaaccaaaga

SEQ ID NO: 1110 - RNA, 22 nt, Homo sapiens
acaggugagguucuugggagcc

SEQ ID NO: 1111 - RNA, 22 nt, Homo sapiens
ggcucccaagaaccucaccugu

SEQ ID NO: 1112 - RNA, 24 nt, Homo sapiens
ucccugagacccuuuaaccuguga

SEQ ID NO: 1113 - RNA, 24 nt, Homo sapiens
ucacagguuaaagggucucaggga

SEQ ID NO: 1114 - RNA, 22 nt, Homo sapiens
caacaaaucccagucuaccuaa

SEQ ID NO: 1115 - RNA, 22 nt, Homo sapiens
uuagguagacugggauuuguug

SEQ ID NO: 1116 - RNA, 22 nt, Homo sapiens
cguguucacagcggaccuugau

SEQ ID NO: 1117 - RNA, 22 nt, Homo sapiens
aucaagguccgcugugaacacg

SEQ ID NO: 1118 - RNA, 20 nt, Homo sapiens
uaaggcacgcggugaaugcc

SEQ ID NO: 1119 - RNA, 20 nt, Homo sapiens
ggcauucaccgcgugccuua

SEQ ID NO: 1120 - RNA, 22 nt, Homo sapiens
aacacaccugguuaaccucuuu

SEQ ID NO: 1121 - RNA, 22 nt, Homo sapiens
aaagagguuaaccagguguguu

SEQ ID NO: 1122 - RNA, 22 nt, Homo sapiens
uaacagucuacagccauggucg

SEQ ID NO: 1123 - RNA, 22 nt, Homo sapiens
cgaccauggcuguagacuguua

SEQ ID NO: 1124 - RNA, 22 nt, Homo sapiens
accguggcuuucgauuguuacu

SEQ ID NO: 1125 - RNA, 22 nt, Homo sapiens
aguaacaaucgaaagccacggu

SEQ ID NO: 1126 - RNA, 21 nt, Homo sapiens
uaacagucuccagucacggcc

SEQ ID NO: 1127 - RNA, 21 nt, Homo sapiens
ggccgugacuggagacuguua

SEQ ID NO: 1128 - RNA, 23 nt, Homo sapiens
accuuggcucuagacugcuuacu

SEQ ID NO: 1129 - RNA, 23 nt, Homo sapiens
aguaagcagucuagagccaaggu

SEQ ID NO: 1130 - RNA, 23 nt, Homo sapiens
ucucacacagaaaucgcacccgu

SEQ ID NO: 1131 - RNA, 23 nt, Homo sapiens
acgggugcgauuucugugugaga

SEQ ID NO: 1132 - RNA, 22 nt, Homo sapiens
ugguugaccauagaacaugcgc

SEQ ID NO: 1133 - RNA, 22 nt, Homo sapiens
gcgcauguucuauggucaacca

SEQ ID NO: 1134 - RNA, 23 nt, Homo sapiens
caguaacaaagauucauccuugu

SEQ ID NO: 1135 - RNA, 23 nt, Homo sapiens
acaaggaugaaucuuuguuacug

SEQ ID NO: 1136 - RNA, 22 nt, Homo sapiens
agaguugagucuggacgucccg

SEQ ID NO: 1137 - RNA, 22 nt, Homo sapiens
cgggacguccagacucaacucu

SEQ ID NO: 1138 - RNA, 22 nt, Homo sapiens
agaauuguggcuggacaucugu

SEQ ID NO: 1139 - RNA, 22 nt, Homo sapiens
acagauguccagccacaauucu

SEQ ID NO: 1140 - RNA, 21 nt, Homo sapiens
ugauuguccaaacgcaauucu

SEQ ID NO: 1141 - RNA, 21 nt, Homo sapiens
agaauugcguuuggacaauca

SEQ ID NO: 1142 - RNA, 22 nt, Homo sapiens
uauagggauuggagccguggcg

SEQ ID NO: 1143 - RNA, 22 nt, Homo sapiens
cgccacggcuccaaucccuaua

SEQ ID NO: 1144 - RNA, 23 nt, Homo sapiens
uauggcuuuuuauuccuauguga

SEQ ID NO: 1145 - RNA, 23 nt, Homo sapiens
ucacauaggaauaaaaagccaua

SEQ ID NO: 1146 - RNA, 22 nt, Homo sapiens
auguagggcuaaaagccauggg

SEQ ID NO: 1147 - RNA, 22 nt, Homo sapiens
cccauggcuuuuagcccuacau

SEQ ID NO: 1148 - RNA, 23 nt, Homo sapiens
uauggcuuuucauuccuauguga

SEQ ID NO: 1149 - RNA, 23 nt, Homo sapiens
ucacauaggaaugaaaagccaua

SEQ ID NO: 1150 - RNA, 22 nt, Homo sapiens
aaccaucgaccguugaguggac

SEQ ID NO: 1151 - RNA, 22 nt, Homo sapiens
guccacucaacggucgaugguu

SEQ ID NO: 1152 - RNA, 22 nt, Homo sapiens
aacauucaaccugucggugagu

SEQ ID NO: 1153 - RNA, 22 nt, Homo sapiens
acucaccgacagguugaauguu

SEQ ID NO: 1154 - RNA, 25 nt, Homo sapiens
cuuccagacgcuccgccccacgucg

SEQ ID NO: 1155 - RNA, 25 nt, Homo sapiens
cgacguggggcggagcgucuggaag

SEQ ID NO: 1156 - RNA, 24 nt, Homo sapiens
aacaacaaaaucacuagucuucca

SEQ ID NO: 1157 - RNA, 24 nt, Homo sapiens
uggaagacuagugauuuuguuguu

SEQ ID NO: 1158 - RNA, 22 nt, Homo sapiens
agguagacugggauuuguuguu

SEQ ID NO: 1159 - RNA, 22 nt, Homo sapiens
aacaacaaaucccagucuaccu

SEQ ID NO: 1160 - RNA, 22 nt, Homo sapiens
aaacaccauugucacacuccac

SEQ ID NO: 1161 - RNA, 22 nt, Homo sapiens
guggagugugacaaugguguuu

SEQ ID NO: 1162 - RNA, 23 nt, Homo sapiens
uuuagugugauaauggcguuuga

SEQ ID NO: 1163 - RNA, 23 nt, Homo sapiens
ucaaacgccauuaucacacuaaa

SEQ ID NO: 1164 - RNA, 22 nt, Homo sapiens
uauggaaagacuuugccacucu

SEQ ID NO: 1165 - RNA, 22 nt, Homo sapiens
agaguggcaaagucuuuccaua

SEQ ID NO: 1166 - RNA, 21 nt, Homo sapiens
aguggcaaagucuuuccauau

SEQ ID NO: 1167 - RNA, 21 nt, Homo sapiens
auauggaaagacuuugccacu

SEQ ID NO: 1168 - RNA, 22 nt, Homo sapiens
cagcccggaucccagcccacuu

SEQ ID NO: 1169 - RNA, 22 nt, Homo sapiens
aagugggcugggauccgggcug

SEQ ID NO: 1170 - RNA, 20 nt, Homo sapiens
guggguuggggcgggcucug

SEQ ID NO: 1171 - RNA, 20 nt, Homo sapiens
cagagcccgccccaacccac

SEQ ID NO: 1172 - RNA, 23 nt, Homo sapiens
uucgggcuggccugcugcuccgg

SEQ ID NO: 1173 - RNA, 23 nt, Homo sapiens
ccggagcagcaggccagcccgaa

SEQ ID NO: 1174 - RNA, 21 nt, Homo sapiens
ugugcagcaggccaaccgaga

SEQ ID NO: 1175 - RNA, 21 nt, Homo sapiens
ucucgguuggccugcugcaca

SEQ ID NO: 1176 - RNA, 22 nt, Homo sapiens
cagggcaggaagaaguggacaa

SEQ ID NO: 1177 - RNA, 22 nt, Homo sapiens
uuguccacuucuuccugcccug

SEQ ID NO: 1178 - RNA, 22 nt, Homo sapiens
guccacuucugccugcccugcc

SEQ ID NO: 1179 - RNA, 22 nt, Homo sapiens
ggcagggcaggcagaaguggac

SEQ ID NO: 1180 - RNA, 22 nt, Homo sapiens
uuuggacagaaaacacgcaggu

SEQ ID NO: 1181 - RNA, 22 nt, Homo sapiens
accugcguguuuucuguccaaa

SEQ ID NO: 1182 - RNA, 20 nt, Homo sapiens
ccugcguguuuucuguccaa

SEQ ID NO: 1183 - RNA, 20 nt, Homo sapiens
uuggacagaaaacacgcagg

SEQ ID NO: 1184 - RNA, 22 nt, Homo sapiens
ugccgcccucucgcugcucuag

SEQ ID NO: 1185 - RNA, 22 nt, Homo sapiens
cuagagcagcgagagggcggca

SEQ ID NO: 1186 - RNA, 23 nt, Homo sapiens
gagggcagcguggguguggcgga

SEQ ID NO: 1187 - RNA, 23 nt, Homo sapiens
uccgccacacccacgcugcccuc

SEQ ID NO: 1188 - RNA, 22 nt, Homo sapiens
aggagcuagccaggcauaugca

SEQ ID NO: 1189 - RNA, 22 nt, Homo sapiens
ugcauaugccuggcuagcuccu

SEQ ID NO: 1190 - RNA, 20 nt, Homo sapiens
auaugccuggcuagcuccuc

SEQ ID NO: 1191 - RNA, 20 nt, Homo sapiens
gaggagcuagccaggcauau

SEQ ID NO: 1192 - RNA, 19 nt, Homo sapiens
cggcgcgaccggcccgggg

SEQ ID NO: 1193 - RNA, 19 nt, Homo sapiens
ccccgggccggucgcgccg

SEQ ID NO: 1194 - RNA, 21 nt, Homo sapiens
ucuugaagucagaacccgcaa

SEQ ID NO: 1195 - RNA, 21 nt, Homo sapiens
uugcggguucugacuucaaga

SEQ ID NO: 1196 - RNA, 22 nt, Homo sapiens
aacucguguucaaagccuuuag

SEQ ID NO: 1197 - RNA, 22 nt, Homo sapiens
cuaaaggcuuugaacacgaguu

SEQ ID NO: 1198 - RNA, 23 nt, Homo sapiens
ccuggacaccgcucagccggccg

SEQ ID NO: 1199 - RNA, 23 nt, Homo sapiens
cggccggcugagcgguguccagg

SEQ ID NO: 1200 - RNA, 21 nt, Homo sapiens
acucggcugcgguggacaagu

SEQ ID NO: 1201 - RNA, 21 nt, Homo sapiens
acuuguccaccgcagccgagu

SEQ ID NO: 1202 - RNA, 20 nt, Homo sapiens
ucacucucaccuugcuuugc

SEQ ID NO: 1203 - RNA, 20 nt, Homo sapiens
gcaaagcaaggugagaguga

SEQ ID NO: 1204 - RNA, 22 nt, Homo sapiens
uugcuaaguaggcugagauuga

SEQ ID NO: 1205 - RNA, 22 nt, Homo sapiens
ucaaucucagccuacuuagcaa

SEQ ID NO: 1206 - RNA, 22 nt, Homo sapiens
cacccccuguuuccuggcccac

SEQ ID NO: 1207 - RNA, 22 nt, Homo sapiens
gugggccaggaaacagggggug

SEQ ID NO: 1208 - RNA, 23 nt, Homo sapiens
ugggccagggagcagcugguggg

SEQ ID NO: 1209 - RNA, 23 nt, Homo sapiens
cccaccagcugcucccuggccca

SEQ ID NO: 1210 - RNA, 24 nt, Homo sapiens
ugcccaugccauacuuuugccuca

SEQ ID NO: 1211 - RNA, 24 nt, Homo sapiens
ugaggcaaaaguauggcaugggca

SEQ ID NO: 1212 - RNA, 22 nt, Homo sapiens
auggcaucguccccugguggcu

SEQ ID NO: 1213 - RNA, 22 nt, Homo sapiens
agccaccaggggacgaugccau

SEQ ID NO: 1214 - RNA, 22 nt, Homo sapiens
gacacaugaccauaaaugcuaa

SEQ ID NO: 1215 - RNA, 22 nt, Homo sapiens
uuagcauuuauggucauguguc

SEQ ID NO: 1216 - RNA, 23 nt, Homo sapiens
uggagagagaaaagagacagaag

SEQ ID NO: 1217 - RNA, 23 nt, Homo sapiens
cuucugucucuuuucucucucca

SEQ ID NO: 1218 - RNA, 22 nt, Homo sapiens
agacaguaguucuugccugguu

SEQ ID NO: 1219 - RNA, 22 nt, Homo sapiens
aaccaggcaagaacuacugucu

SEQ ID NO: 1220 - RNA, 19 nt, Homo sapiens
accaggcaagaaauauugu

SEQ ID NO: 1221 - RNA, 19 nt, Homo sapiens
acaauauuucuugccuggu

SEQ ID NO: 1222 - RNA, 21 nt, Homo sapiens
auugucccucucccuucccag

SEQ ID NO: 1223 - RNA, 21 nt, Homo sapiens
cugggaagggagagggacaau

SEQ ID NO: 1224 - RNA, 22 nt, Homo sapiens
acugggaagaggagcugaggga

SEQ ID NO: 1225 - RNA, 22 nt, Homo sapiens
ucccucagcuccucuucccagu

SEQ ID NO: 1226 - RNA, 23 nt, Homo sapiens
gaagauggugcugugcugaggaa

SEQ ID NO: 1227 - RNA, 23 nt, Homo sapiens
uuccucagcacagcaccaucuuc

SEQ ID NO: 1228 - RNA, 20 nt, Homo sapiens
ugugggacugcaaaugggag

SEQ ID NO: 1229 - RNA, 20 nt, Homo sapiens
cucccauuugcagucccaca

SEQ ID NO: 1230 - RNA, 21 nt, Homo sapiens
ucugaggccugccucucccca

SEQ ID NO: 1231 - RNA, 21 nt, Homo sapiens
uggggagaggcaggccucaga

SEQ ID NO: 1232 - RNA, 24 nt, Homo sapiens
ugggcgaggggugggcucucagag

SEQ ID NO: 1233 - RNA, 24 nt, Homo sapiens
cucugagagcccaccccucgccca

SEQ ID NO: 1234 - RNA, 21 nt, Homo sapiens
agguagaaugaggccugacau

SEQ ID NO: 1235 - RNA, 21 nt, Homo sapiens
augucaggccucauucuaccu

SEQ ID NO: 1236 - RNA, 19 nt, Homo sapiens
ucaggccucuuucuaccuu

SEQ ID NO: 1237 - RNA, 19 nt, Homo sapiens
aagguagaaagaggccuga

SEQ ID NO: 1238 - RNA, 20 nt, Homo sapiens
cggggugggugaggucgggc

SEQ ID NO: 1239 - RNA, 20 nt, Homo sapiens
gcccgaccucacccaccccg

SEQ ID NO: 1240 - RNA, 22 nt, Homo sapiens
guucuguuaacccauccccuca

SEQ ID NO: 1241 - RNA, 22 nt, Homo sapiens
ugaggggauggguuaacagaac

SEQ ID NO: 1242 - RNA, 22 nt, Homo sapiens
aggggacugguuaauagaacua

SEQ ID NO: 1243 - RNA, 22 nt, Homo sapiens
uaguucuauuaaccaguccccu

SEQ ID NO: 1244 - RNA, 23 nt, Homo sapiens
uggaguuaaggguugcuuggaga

SEQ ID NO: 1245 - RNA, 23 nt, Homo sapiens
ucuccaagcaacccuuaacucca

SEQ ID NO: 1246 - RNA, 22 nt, Homo sapiens
ucucugagcaaggcuuaacacc

SEQ ID NO: 1247 - RNA, 22 nt, Homo sapiens
gguguuaagccuugcucagaga

SEQ ID NO: 1248 - RNA, 22 nt, Homo sapiens
ugugggaucuggaggcaucugg

SEQ ID NO: 1249 - RNA, 22 nt, Homo sapiens
ccagaugccuccagaucccaca

SEQ ID NO: 1250 - RNA, 21 nt, Homo sapiens
acccucgucagguccccgggg

SEQ ID NO: 1251 - RNA, 21 nt, Homo sapiens
ccccggggaccugacgagggu

SEQ ID NO: 1252 - RNA, 22 nt, Homo sapiens
caccggggauggcagagggucg

SEQ ID NO: 1253 - RNA, 22 nt, Homo sapiens
cgacccucugccauccccggug

SEQ ID NO: 1254 - RNA, 23 nt, Homo sapiens
ugggcugagggcaggaggccugu

SEQ ID NO: 1255 - RNA, 23 nt, Homo sapiens
acaggccuccugcccucagccca

SEQ ID NO: 1256 - RNA, 23 nt, Homo sapiens
aauguggaaguggucugaggcau

SEQ ID NO: 1257 - RNA, 23 nt, Homo sapiens
augccucagaccacuuccacauu

SEQ ID NO: 1258 - RNA, 23 nt, Homo sapiens
gugaguguggauccuggaggaau

SEQ ID NO: 1259 - RNA, 23 nt, Homo sapiens
auuccuccaggauccacacucac

SEQ ID NO: 1260 - RNA, 22 nt, Homo sapiens
uuucuucuuagacauggcaacg

SEQ ID NO: 1261 - RNA, 22 nt, Homo sapiens
cguugccaugucuaagaagaaa

SEQ ID NO: 1262 - RNA, 22 nt, Homo sapiens
cugccaugucuaagaagaaaac

SEQ ID NO: 1263 - RNA, 22 nt, Homo sapiens
guuuucuucuuagacauggcag

SEQ ID NO: 1264 - RNA, 22 nt, Homo sapiens
uuucuucuuagacauggcagcu

SEQ ID NO: 1265 - RNA, 22 nt, Homo sapiens
agcugccaugucuaagaagaaa

SEQ ID NO: 1266 - RNA, 19 nt, Homo sapiens
uugccaugucuaagaagaa

SEQ ID NO: 1267 - RNA, 19 nt, Homo sapiens
uucuucuuagacauggcaa

SEQ ID NO: 1268 - RNA, 23 nt, Homo sapiens
ugcagcucugguggaaaauggag

SEQ ID NO: 1269 - RNA, 23 nt, Homo sapiens
cuccauuuuccaccagagcugca

SEQ ID NO: 1270 - RNA, 22 nt, Homo sapiens
caggauccacagagcuagucca

SEQ ID NO: 1271 - RNA, 22 nt, Homo sapiens
uggacuagcucuguggauccug

SEQ ID NO: 1272 - RNA, 22 nt, Homo sapiens
aacuagcucuguggauccugac

SEQ ID NO: 1273 - RNA, 22 nt, Homo sapiens
gucaggauccacagagcuaguu

SEQ ID NO: 1274 - RNA, 22 nt, Homo sapiens
aaagauggacaauuggcuaaau

SEQ ID NO: 1275 - RNA, 22 nt, Homo sapiens
auuuagccaauuguccaucuuu

SEQ ID NO: 1276 - RNA, 24 nt, Homo sapiens
agcugagcuccauggacgugcagu

SEQ ID NO: 1277 - RNA, 24 nt, Homo sapiens
acugcacguccauggagcucagcu

SEQ ID NO: 1278 - RNA, 22 nt, Homo sapiens
cuuccggucugugagccccguc

SEQ ID NO: 1279 - RNA, 22 nt, Homo sapiens
gacggggcucacagaccggaag

SEQ ID NO: 1280 - RNA, 22 nt, Homo sapiens
uggggugcccacuccgcaaguu

SEQ ID NO: 1281 - RNA, 22 nt, Homo sapiens
aacuugcggagugggcacccca

SEQ ID NO: 1282 - RNA, 26 nt, Homo sapiens
cucggccgcggcgcguagcccccgcc

SEQ ID NO: 1283 - RNA, 26 nt, Homo sapiens
ggcgggggcuacgcgccgcggccgag

SEQ ID NO: 1284 - RNA, 23 nt, Homo sapiens
cugggggacgcgugagcgcgagc

SEQ ID NO: 1285 - RNA, 23 nt, Homo sapiens
gcucgcgcucacgcgucccccag

SEQ ID NO: 1286 - RNA, 21 nt, Homo sapiens
cauacaaucugacauguauuu

SEQ ID NO: 1287 - RNA, 21 nt, Homo sapiens
aaauacaugucagauuguaug

SEQ ID NO: 1288 - RNA, 21 nt, Homo sapiens
auacaugucagauuguaugcc

SEQ ID NO: 1289 - RNA, 21 nt, Homo sapiens
ggcauacaaucugacauguau

SEQ ID NO: 1290 - RNA, 21 nt, Homo sapiens
ucccuccuucuguccccacag

SEQ ID NO: 1291 - RNA, 21 nt, Homo sapiens
cuguggggacagaaggaggga

SEQ ID NO: 1292 - RNA, 22 nt, Homo sapiens
acuggggagcagaaggagaacc

SEQ ID NO: 1293 - RNA, 22 nt, Homo sapiens
gguucuccuucugcuccccagu

SEQ ID NO: 1294 - RNA, 23 nt, Homo sapiens
gaaaauccuuuuuguuuuuccag

SEQ ID NO: 1295 - RNA, 23 nt, Homo sapiens
cuggaaaaacaaaaaggauuuuc

SEQ ID NO: 1296 - RNA, 23 nt, Homo sapiens
agggaaaaaaaaaaggauuuguc

SEQ ID NO: 1297 - RNA, 23 nt, Homo sapiens
gacaaauccuuuuuuuuuucccu

SEQ ID NO: 1298 - RNA, 22 nt, Homo sapiens
uguguccgggaaguggaggagg

SEQ ID NO: 1299 - RNA, 22 nt, Homo sapiens
ccuccuccacuucccggacaca

SEQ ID NO: 1300 - RNA, 22 nt, Homo sapiens
ugaaguuacaucauggucgcuu

SEQ ID NO: 1301 - RNA, 22 nt, Homo sapiens
aagcgaccaugauguaacuuca

SEQ ID NO: 1302 - RNA, 22 nt, Homo sapiens
aagcgaccaugauguaacuuca

SEQ ID NO: 1303 - RNA, 22 nt, Homo sapiens
ugaaguuacaucauggucgcuu

SEQ ID NO: 1304 - RNA, 21 nt, Homo sapiens
uuagugcauagucuuuggucu

SEQ ID NO: 1305 - RNA, 21 nt, Homo sapiens
agaccaaagacuaugcacuaa

SEQ ID NO: 1306 - RNA, 22 nt, Homo sapiens
accgaagacugugcgcuaaucu

SEQ ID NO: 1307 - RNA, 22 nt, Homo sapiens
agauuagcgcacagucuucggu

SEQ ID NO: 1308 - RNA, 21 nt, Homo sapiens
uuacacagcuggacagaggca

SEQ ID NO: 1309 - RNA, 21 nt, Homo sapiens
ugccucuguccagcuguguaa

SEQ ID NO: 1310 - RNA, 22 nt, Homo sapiens
uccaggcaggagccggacugga

SEQ ID NO: 1311 - RNA, 22 nt, Homo sapiens
uccaguccggcuccugccugga

SEQ ID NO: 1312 - RNA, 21 nt, Homo sapiens
cugggcucgggacgcgcggcu

SEQ ID NO: 1313 - RNA, 21 nt, Homo sapiens
agccgcgcgucccgagcccag

SEQ ID NO: 1314 - RNA, 22 nt, Homo sapiens
ggggcugugauugaccagcagg

SEQ ID NO: 1315 - RNA, 22 nt, Homo sapiens
ccugcuggucaaucacagcccc

SEQ ID NO: 1316 - RNA, 22 nt, Homo sapiens
cacuguuucaccacuggcucuu

SEQ ID NO: 1317 - RNA, 22 nt, Homo sapiens
aagagccaguggugaaacagug

SEQ ID NO: 1318 - RNA, 21 nt, Homo sapiens
gagccaguggugagacaguga

SEQ ID NO: 1319 - RNA, 21 nt, Homo sapiens
ucacugucucaccacuggcuc

SEQ ID NO: 1320 - RNA, 22 nt, Homo sapiens
aagguauuguucagacuuauga

SEQ ID NO: 1321 - RNA, 22 nt, Homo sapiens
ucauaagucugaacaauaccuu

SEQ ID NO: 1322 - RNA, 22 nt, Homo sapiens
ucugugauagagauucuuugcu

SEQ ID NO: 1323 - RNA, 22 nt, Homo sapiens
agcaaagaaucucuaucacaga

SEQ ID NO: 1324 - RNA, 21 nt, Homo sapiens
ucugaauuguaagaguuguua

SEQ ID NO: 1325 - RNA, 21 nt, Homo sapiens
uaacaacucuuacaauucaga

SEQ ID NO: 1326 - RNA, 23 nt, Homo sapiens
agaacucuugcagucuuagaugu

SEQ ID NO: 1327 - RNA, 23 nt, Homo sapiens
acaucuaagacugcaagaguucu

SEQ ID NO: 1328 - RNA, 22 nt, Homo sapiens
aacgggaaugcaggcuguaucu

SEQ ID NO: 1329 - RNA, 22 nt, Homo sapiens
agauacagccugcauucccguu

SEQ ID NO: 1330 - RNA, 23 nt, Homo sapiens
ucugaguuccuggagccuggucu

SEQ ID NO: 1331 - RNA, 23 nt, Homo sapiens
agaccaggcuccaggaacucaga

SEQ ID NO: 1332 - RNA, 23 nt, Homo sapiens
uggagauccagugcucgcccgau

SEQ ID NO: 1333 - RNA, 23 nt, Homo sapiens
aucgggcgagcacuggaucucca

SEQ ID NO: 1334 - RNA, 22 nt, Homo sapiens
uguugcaagucgguggagacgu

SEQ ID NO: 1335 - RNA, 22 nt, Homo sapiens
acgucuccaccgacuugcaaca

SEQ ID NO: 1336 - RNA, 22 nt, Homo sapiens
cucucuacugacuugcaacaua

SEQ ID NO: 1337 - RNA, 22 nt, Homo sapiens
uauguugcaagucaguagagag

SEQ ID NO: 1338 - RNA, 22 nt, Homo sapiens
ucucccuuccugcccuggcuag

SEQ ID NO: 1339 - RNA, 22 nt, Homo sapiens
cuagccagggcaggaagggaga

SEQ ID NO: 1340 - RNA, 26 nt, Homo sapiens
cccagggcuuggaguggggcaagguu

SEQ ID NO: 1341 - RNA, 26 nt, Homo sapiens
aaccuugccccacuccaagcccuggg

SEQ ID NO: 1342 - RNA, 23 nt, Homo sapiens
uaucugcugggcuuucugguguu

SEQ ID NO: 1343 - RNA, 23 nt, Homo sapiens
aacaccagaaagcccagcagaua

SEQ ID NO: 1344 - RNA, 21 nt, Homo sapiens
uggcuguuggagggggcaggc

SEQ ID NO: 1345 - RNA, 21 nt, Homo sapiens
gccugcccccuccaacagcca

SEQ ID NO: 1346 - RNA, 22 nt, Homo sapiens
cagcccuccucccgcacccaaa

SEQ ID NO: 1347 - RNA, 22 nt, Homo sapiens
uuugggugcgggaggagggcug

SEQ ID NO: 1348 - RNA, 22 nt, Homo sapiens
uaggggcagcagaggaccuggg

SEQ ID NO: 1349 - RNA, 22 nt, Homo sapiens
cccagguccucugcugccccua

SEQ ID NO: 1350 - RNA, 22 nt, Homo sapiens
uugaggagacauggugggggcc

SEQ ID NO: 1351 - RNA, 22 nt, Homo sapiens
ggcccccaccaugucuccucaa

SEQ ID NO: 1352 - RNA, 21 nt, Homo sapiens
gcagcccagcugaggccucug

SEQ ID NO: 1353 - RNA, 21 nt, Homo sapiens
cagaggccucagcugggcugc

SEQ ID NO: 1354 - RNA, 22 nt, Homo sapiens
gagcaggcgaggcugggcugaa

SEQ ID NO: 1355 - RNA, 22 nt, Homo sapiens
uucagcccagccucgccugcuc

SEQ ID NO: 1356 - RNA, 23 nt, Homo sapiens
ccagccacggacugagagugcau

SEQ ID NO: 1357 - RNA, 23 nt, Homo sapiens
augcacucucaguccguggcugg

SEQ ID NO: 1358 - RNA, 23 nt, Homo sapiens
guccuccaggccaugagcugcgg

SEQ ID NO: 1359 - RNA, 23 nt, Homo sapiens
ccgcagcucauggccuggaggac

SEQ ID NO: 1360 - RNA, 22 nt, Homo sapiens
ucaggcaguguggguaucagau

SEQ ID NO: 1361 - RNA, 22 nt, Homo sapiens
aucugauacccacacugccuga

SEQ ID NO: 1362 - RNA, 23 nt, Homo sapiens
ugagaguggaauucacaguauuu

SEQ ID NO: 1363 - RNA, 23 nt, Homo sapiens
aaauacugugaauuccacucuca

SEQ ID NO: 1364 - RNA, 23 nt, Homo sapiens
auacugugaauuucacugucaca

SEQ ID NO: 1365 - RNA, 23 nt, Homo sapiens
ugugacagugaaauucacaguau

SEQ ID NO: 1366 - RNA, 21 nt, Homo sapiens
caaauggacaggauaacaccu

SEQ ID NO: 1367 - RNA, 21 nt, Homo sapiens
agguguuauccuguccauuug

SEQ ID NO: 1368 - RNA, 22 nt, Homo sapiens
agguguuauccuauccauuugc

SEQ ID NO: 1369 - RNA, 22 nt, Homo sapiens
gcaaauggauaggauaacaccu

SEQ ID NO: 1370 - RNA, 22 nt, Homo sapiens
ugaucucaccgcugccuccuuc

SEQ ID NO: 1371 - RNA, 22 nt, Homo sapiens
gaaggaggcagcggugagauca

SEQ ID NO: 1372 - RNA, 22 nt, Homo sapiens
caggaggcagugggcgagcagg

SEQ ID NO: 1373 - RNA, 22 nt, Homo sapiens
ccugcucgcccacugccuccug

SEQ ID NO: 1374 - RNA, 22 nt, Homo sapiens
ugcaagacggauacugucaucu

SEQ ID NO: 1375 - RNA, 22 nt, Homo sapiens
agaugacaguauccgucuugca

SEQ ID NO: 1376 - RNA, 24 nt, Homo sapiens
ugucagugacuccugccccuuggu

SEQ ID NO: 1377 - RNA, 24 nt, Homo sapiens
accaaggggcaggagucacugaca

SEQ ID NO: 1378 - RNA, 22 nt, Homo sapiens
agggggcgcagucacugacgug

SEQ ID NO: 1379 - RNA, 22 nt, Homo sapiens
cacgucagugacugcgcccccu

SEQ ID NO: 1380 - RNA, 23 nt, Homo sapiens
ucaaaauguagaggaagacccca

SEQ ID NO: 1381 - RNA, 23 nt, Homo sapiens
uggggucuuccucuacauuuuga

SEQ ID NO: 1382 - RNA, 22 nt, Homo sapiens
aauuuacucugcaaucuucucc

SEQ ID NO: 1383 - RNA, 22 nt, Homo sapiens
ggagaagauugcagaguaaauu

SEQ ID NO: 1384 - RNA, 22 nt, Homo sapiens
agaagauugcagaguaaguucc

SEQ ID NO: 1385 - RNA, 22 nt, Homo sapiens
ggaacuuacucugcaaucuucu

SEQ ID NO: 1386 - RNA, 26 nt, Homo sapiens
cacaggacugacuccucaccccagug

SEQ ID NO: 1387 - RNA, 26 nt, Homo sapiens
cacuggggugaggagucaguccugug

SEQ ID NO: 1388 - RNA, 22 nt, Homo sapiens
ucuggggaugaggacagugugu

SEQ ID NO: 1389 - RNA, 22 nt, Homo sapiens
acacacuguccucauccccaga

SEQ ID NO: 1390 - RNA, 20 nt, Homo sapiens
augggugauggguguggugu

SEQ ID NO: 1391 - RNA, 20 nt, Homo sapiens
acaccacacccaucacccau

SEQ ID NO: 1392 - RNA, 22 nt, Homo sapiens
uuggccaccacaccuaccccuu

SEQ ID NO: 1393 - RNA, 22 nt, Homo sapiens
aagggguaggugugguggccaa

SEQ ID NO: 1394 - RNA, 22 nt, Homo sapiens
uguaguuguauuguauugccac

SEQ ID NO: 1395 - RNA, 22 nt, Homo sapiens
guggcaauacaauacaacuaca

SEQ ID NO: 1396 - RNA, 23 nt, Homo sapiens
uagcaauacaguacaaauauagu

SEQ ID NO: 1397 - RNA, 23 nt, Homo sapiens
acuauauuuguacuguauugcua

SEQ ID NO: 1398 - RNA, 22 nt, Homo sapiens
ucagucacauaucuagugucua

SEQ ID NO: 1399 - RNA, 22 nt, Homo sapiens
uagacacuagauaugugacuga

SEQ ID NO: 1400 - RNA, 22 nt, Homo sapiens
gacacuaggcaugugagugauu

SEQ ID NO: 1401 - RNA, 22 nt, Homo sapiens
aaucacucacaugccuaguguc

SEQ ID NO: 1402 - RNA, 22 nt, Homo sapiens
ucaaucacuugguaauugcugu

SEQ ID NO: 1403 - RNA, 22 nt, Homo sapiens
acagcaauuaccaagugauuga

SEQ ID NO: 1404 - RNA, 25 nt, Homo sapiens
agcggggaggaagugggcgcugcuu

SEQ ID NO: 1405 - RNA, 25 nt, Homo sapiens
aagcagcgcccacuuccuccccgcu

SEQ ID NO: 1406 - RNA, 22 nt, Homo sapiens
agcccgccccagccgagguucu

SEQ ID NO: 1407 - RNA, 22 nt, Homo sapiens
agaaccucggcuggggcgggcu

SEQ ID NO: 1408 - RNA, 23 nt, Homo sapiens
gccccggcgcgggcggguucugg

SEQ ID NO: 1409 - RNA, 23 nt, Homo sapiens
ccagaacccgcccgcgccggggc

SEQ ID NO: 1410 - RNA, 22 nt, Homo sapiens
agcaaggcggcaucucucugau

SEQ ID NO: 1411 - RNA, 22 nt, Homo sapiens
aucagagagaugccgccuugcu

SEQ ID NO: 1412 - RNA, 21 nt, Homo sapiens
agagaugccgccuugcuccuu

SEQ ID NO: 1413 - RNA, 21 nt, Homo sapiens
aaggagcaaggcggcaucucu

SEQ ID NO: 1414 - RNA, 23 nt, Homo sapiens
uugaagaggaggugcucuguagc

SEQ ID NO: 1415 - RNA, 23 nt, Homo sapiens
gcuacagagcaccuccucuucaa

SEQ ID NO: 1416 - RNA, 22 nt, Homo sapiens
acaacagugacuugcucuccaa

SEQ ID NO: 1417 - RNA, 22 nt, Homo sapiens
uuggagagcaagucacuguugu

SEQ ID NO: 1418 - RNA, 18 nt, Homo sapiens
gggugagggcaggugguu

SEQ ID NO: 1419 - RNA, 18 nt, Homo sapiens
aaccaccugcccucaccc

SEQ ID NO: 1420 - RNA, 18 nt, Homo sapiens
cgugucuucuggcuugau

SEQ ID NO: 1421 - RNA, 18 nt, Homo sapiens
aucaagccagaagacacg

SEQ ID NO: 1422 - RNA, 23 nt, Homo sapiens
ugcaucaggccagaagacaugag

SEQ ID NO: 1423 - RNA, 23 nt, Homo sapiens
cucaugucuucuggccugaugca

SEQ ID NO: 1424 - RNA, 21 nt, Homo sapiens
aaugagagaccuguacuguau

SEQ ID NO: 1425 - RNA, 21 nt, Homo sapiens
auacaguacaggucucucauu

SEQ ID NO: 1426 - RNA, 22 nt, Homo sapiens
uccaguacaggucucucauuuc

SEQ ID NO: 1427 - RNA, 22 nt, Homo sapiens
gaaaugagagaccuguacugga

SEQ ID NO: 1428 - RNA, 22 nt, Homo sapiens
ugggauccagacagugggagaa

SEQ ID NO: 1429 - RNA, 22 nt, Homo sapiens
uucucccacugucuggauccca

SEQ ID NO: 1430 - RNA, 22 nt, Homo sapiens
uucucccacuaccaggcuccca

SEQ ID NO: 1431 - RNA, 22 nt, Homo sapiens
ugggagccugguagugggagaa

SEQ ID NO: 1432 - RNA, 22 nt, Homo sapiens
ccaaccuagguggucagaguug

SEQ ID NO: 1433 - RNA, 22 nt, Homo sapiens
caacucugaccaccuagguugg

SEQ ID NO: 1434 - RNA, 22 nt, Homo sapiens
aacucugaccccuuagguugau

SEQ ID NO: 1435 - RNA, 22 nt, Homo sapiens
aucaaccuaaggggucagaguu

SEQ ID NO: 1436 - RNA, 23 nt, Homo sapiens
gugccaccuuaacugcagccaau

SEQ ID NO: 1437 - RNA, 23 nt, Homo sapiens
auuggcugcaguuaagguggcac

SEQ ID NO: 1438 - RNA, 22 nt, Homo sapiens
aaguuggcugcaguuaaggugg

SEQ ID NO: 1439 - RNA, 22 nt, Homo sapiens
ccaccuuaacugcagccaacuu

SEQ ID NO: 1440 - RNA, 22 nt, Homo sapiens
aagggggaaggaaacauggaga

SEQ ID NO: 1441 - RNA, 22 nt, Homo sapiens
ucuccauguuuccuucccccuu

SEQ ID NO: 1442 - RNA, 22 nt, Homo sapiens
uccauguuuccuucccccuucu

SEQ ID NO: 1443 - RNA, 22 nt, Homo sapiens
agaagggggaaggaaacaugga

SEQ ID NO: 1444 - RNA, 21 nt, Homo sapiens
acacauggguggcuguggccu

SEQ ID NO: 1445 - RNA, 21 nt, Homo sapiens
aggccacagccacccaugugu

SEQ ID NO: 1446 - RNA, 22 nt, Homo sapiens
uaggccacagccacccaugugu

SEQ ID NO: 1447 - RNA, 22 nt, Homo sapiens
acacauggguggcuguggccua

SEQ ID NO: 1448 - RNA, 21 nt, Homo sapiens
agcuguaccugaaaccaagca

SEQ ID NO: 1449 - RNA, 21 nt, Homo sapiens
ugcuugguuucagguacagcu

SEQ ID NO: 1450 - RNA, 22 nt, Homo sapiens
ucacaaaucuauaauaugcagg

SEQ ID NO: 1451 - RNA, 22 nt, Homo sapiens
ccugcauauuauagauuuguga

SEQ ID NO: 1452 - RNA, 21 nt, Homo sapiens
ugcuuaaguuguaccaaguau

SEQ ID NO: 1453 - RNA, 21 nt, Homo sapiens
auacuugguacaacuuaagca

SEQ ID NO: 1454 - RNA, 22 nt, Homo sapiens
ccuggcauauuugguauaacuu

SEQ ID NO: 1455 - RNA, 22 nt, Homo sapiens
aaguuauaccaaauaugccagg

SEQ ID NO: 1456 - RNA, 22 nt, Homo sapiens
ugagggcuccaggugacggugg

SEQ ID NO: 1457 - RNA, 22 nt, Homo sapiens
ccaccgucaccuggagcccuca

SEQ ID NO: 1458 - RNA, 22 nt, Homo sapiens
accugccagcaccucccugcag

SEQ ID NO: 1459 - RNA, 22 nt, Homo sapiens
cugcagggaggugcuggcaggu

SEQ ID NO: 1460 - RNA, 23 nt, Homo sapiens
ggcaggagggcugugccagguug

SEQ ID NO: 1461 - RNA, 23 nt, Homo sapiens
caaccuggcacagcccuccugcc

SEQ ID NO: 1462 - RNA, 22 nt, Homo sapiens
cccucucuggcuccuccccaaa

SEQ ID NO: 1463 - RNA, 22 nt, Homo sapiens
uuuggggaggagccagagaggg

SEQ ID NO: 1464 - RNA, 24 nt, Homo sapiens
ugggggagccaugagauaagagca

SEQ ID NO: 1465 - RNA, 24 nt, Homo sapiens
ugcucuuaucucauggcuccccca

SEQ ID NO: 1466 - RNA, 21 nt, Homo sapiens
guaccuucugguucagcuagu

SEQ ID NO: 1467 - RNA, 21 nt, Homo sapiens
acuagcugaaccagaagguac

SEQ ID NO: 1468 - RNA, 23 nt, Homo sapiens
aacugaaccaggagugagcuucg

SEQ ID NO: 1469 - RNA, 23 nt, Homo sapiens
cgaagcucacuccugguucaguu

SEQ ID NO: 1470 - RNA, 22 nt, Homo sapiens
uggggaaggcgucagugucggg

SEQ ID NO: 1471 - RNA, 22 nt, Homo sapiens
cccgacacugacgccuucccca

SEQ ID NO: 1472 - RNA, 21 nt, Homo sapiens
agacccugcagccuucccacc

SEQ ID NO: 1473 - RNA, 21 nt, Homo sapiens
ggugggaaggcugcagggucu

SEQ ID NO: 1474 - RNA, 22 nt, Homo sapiens
acccagguucccucuggccgca

SEQ ID NO: 1475 - RNA, 22 nt, Homo sapiens
ugcggccagagggaaccugggu

SEQ ID NO: 1476 - RNA, 23 nt, Homo sapiens
agggccagaggagccuggagugg

SEQ ID NO: 1477 - RNA, 23 nt, Homo sapiens
ccacuccaggcuccucuggcccu

SEQ ID NO: 1478 - RNA, 22 nt, Homo sapiens
auagugggaagcuggcagauuc

SEQ ID NO: 1479 - RNA, 22 nt, Homo sapiens
gaaucugccagcuucccacuau

SEQ ID NO: 1480 - RNA, 21 nt, Homo sapiens
aucugccagcuuccacagugg

SEQ ID NO: 1481 - RNA, 21 nt, Homo sapiens
ccacuguggaagcuggcagau

SEQ ID NO: 1482 - RNA, 25 nt, Homo sapiens
caugcugaccucccuccugccccag

SEQ ID NO: 1483 - RNA, 25 nt, Homo sapiens
cuggggcaggagggaggucagcaug

SEQ ID NO: 1484 - RNA, 23 nt, Homo sapiens
ugggaggggagaggcagcaagca

SEQ ID NO: 1485 - RNA, 23 nt, Homo sapiens
ugcuugcugccucuccccuccca

SEQ ID NO: 1486 - RNA, 22 nt, Homo sapiens
ucauuuaucuguugggaagcua

SEQ ID NO: 1487 - RNA, 22 nt, Homo sapiens
uagcuucccaacagauaaauga

SEQ ID NO: 1488 - RNA, 23 nt, Homo sapiens
cuggcggagcccauuccaugcca

SEQ ID NO: 1489 - RNA, 23 nt, Homo sapiens
uggcauggaaugggcuccgccag

SEQ ID NO: 1490 - RNA, 22 nt, Homo sapiens
cacacaaguggcccccaacacu

SEQ ID NO: 1491 - RNA, 22 nt, Homo sapiens
aguguugggggccacuugugug

SEQ ID NO: 1492 - RNA, 22 nt, Homo sapiens
ugcugggggccacaugagugug

SEQ ID NO: 1493 - RNA, 22 nt, Homo sapiens
cacacucauguggcccccagca

SEQ ID NO: 1494 - RNA, 21 nt, Homo sapiens
gcccugaccuguccuguucug

SEQ ID NO: 1495 - RNA, 21 nt, Homo sapiens
cagaacaggacaggucagggc

SEQ ID NO: 1496 - RNA, 23 nt, Homo sapiens
uguagagcagggagcaggaagcu

SEQ ID NO: 1497 - RNA, 23 nt, Homo sapiens
agcuuccugcucccugcucuaca

SEQ ID NO: 1498 - RNA, 22 nt, Homo sapiens
ccaccaggucuagcauugggau

SEQ ID NO: 1499 - RNA, 22 nt, Homo sapiens
aucccaaugcuagaccuggugg

SEQ ID NO: 1500 - RNA, 22 nt, Homo sapiens
aaucccaaugcuagacccggug

SEQ ID NO: 1501 - RNA, 22 nt, Homo sapiens
caccgggucuagcauugggauu

SEQ ID NO: 1502 - RNA, 22 nt, Homo sapiens
gcugcgggcugcggucagggcg

SEQ ID NO: 1503 - RNA, 22 nt, Homo sapiens
cgcccugaccgcagcccgcagc

SEQ ID NO: 1504 - RNA, 21 nt, Homo sapiens
aaaggugcucaaauuagacau

SEQ ID NO: 1505 - RNA, 21 nt, Homo sapiens
augucuaauuugagcaccuuu

SEQ ID NO: 1506 - RNA, 22 nt, Homo sapiens
ccuaauuugaacaccuucggua

SEQ ID NO: 1507 - RNA, 22 nt, Homo sapiens
uaccgaagguguucaaauuagg

SEQ ID NO: 1508 - RNA, 19 nt, Homo sapiens
aggcagguuaucugggcug

SEQ ID NO: 1509 - RNA, 19 nt, Homo sapiens
cagcccagauaaccugccu

SEQ ID NO: 1510 - RNA, 20 nt, Homo sapiens
augcgaggaugcugacagug

SEQ ID NO: 1511 - RNA, 20 nt, Homo sapiens
cacugucagcauccucgcau

SEQ ID NO: 1512 - RNA, 22 nt, Homo sapiens
ugaaacuggagcgccuggagga

SEQ ID NO: 1513 - RNA, 22 nt, Homo sapiens
uccuccaggcgcuccaguuuca

SEQ ID NO: 1514 - RNA, 22 nt, Homo sapiens
accagcgcguuuucaguuucau

SEQ ID NO: 1515 - RNA, 22 nt, Homo sapiens
augaaacugaaaacgcgcuggu

SEQ ID NO: 1516 - RNA, 25 nt, Homo sapiens
aagggaggaggagcggaggggcccu

SEQ ID NO: 1517 - RNA, 25 nt, Homo sapiens
agggccccuccgcuccuccucccuu

SEQ ID NO: 1518 - RNA, 22 nt, Homo sapiens
gcccgagaggauccgucccugc

SEQ ID NO: 1519 - RNA, 22 nt, Homo sapiens
gcagggacggauccucucgggc

SEQ ID NO: 1520 - RNA, 22 nt, Homo sapiens
aggacugauccucucgggcagg

SEQ ID NO: 1521 - RNA, 22 nt, Homo sapiens
ccugcccgagaggaucaguccu

SEQ ID NO: 1522 - RNA, 23 nt, Homo sapiens
ucaggcaaagggauauuuacaga

SEQ ID NO: 1523 - RNA, 23 nt, Homo sapiens
ucuguaaauaucccuuugccuga

SEQ ID NO: 1524 - RNA, 21 nt, Homo sapiens
uuucugucuuuucugguccag

SEQ ID NO: 1525 - RNA, 21 nt, Homo sapiens
cuggaccagaaaagacagaaa

SEQ ID NO: 1526 - RNA, 23 nt, Homo sapiens
uggccggaugggacaggaggcau

SEQ ID NO: 1527 - RNA, 23 nt, Homo sapiens
augccuccugucccauccggcca

SEQ ID NO: 1528 - RNA, 23 nt, Homo sapiens
ucuaaagacuagacuucgcuaug

SEQ ID NO: 1529 - RNA, 23 nt, Homo sapiens
cauagcgaagucuagucuuuaga

SEQ ID NO: 1530 - RNA, 23 nt, Homo sapiens
uggcccggcgacgucucacgguc

SEQ ID NO: 1531 - RNA, 23 nt, Homo sapiens
gaccgugagacgucgccgggcca

SEQ ID NO: 1532 - RNA, 23 nt, Homo sapiens
ugaguggggcucccgggacggcg

SEQ ID NO: 1533 - RNA, 23 nt, Homo sapiens
cgccgucccgggagccccacuca

SEQ ID NO: 1534 - RNA, 21 nt, Homo sapiens
agcggugcuccugcgggccga

SEQ ID NO: 1535 - RNA, 21 nt, Homo sapiens
ucggcccgcaggagcaccgcu

SEQ ID NO: 1536 - RNA, 23 nt, Homo sapiens
ccggucccaggagaaccugcaga

SEQ ID NO: 1537 - RNA, 23 nt, Homo sapiens
ucugcagguucuccugggaccgg

SEQ ID NO: 1538 - RNA, 22 nt, Homo sapiens
aaggcccgggcuuuccucccag

SEQ ID NO: 1539 - RNA, 22 nt, Homo sapiens
cugggaggaaagcccgggccuu

SEQ ID NO: 1540 - RNA, 22 nt, Homo sapiens
agggaaggaggcuuggucuuag

SEQ ID NO: 1541 - RNA, 22 nt, Homo sapiens
cuaagaccaagccuccuucccu

SEQ ID NO: 1542 - RNA, 21 nt, Homo sapiens
gagguuuggggaggauuugcu

SEQ ID NO: 1543 - RNA, 21 nt, Homo sapiens
agcaaauccuccccaaaccuc

SEQ ID NO: 1544 - RNA, 20 nt, Homo sapiens
cgccccuccugcccccacag

SEQ ID NO: 1545 - RNA, 20 nt, Homo sapiens
cugugggggcaggaggggcg

SEQ ID NO: 1546 - RNA, 22 nt, Homo sapiens
ugcggggacaggccagggcauc

SEQ ID NO: 1547 - RNA, 22 nt, Homo sapiens
gaugcccuggccuguccccgca

SEQ ID NO: 1548 - RNA, 22 nt, Homo sapiens
ccugacccacccccucccgcag

SEQ ID NO: 1549 - RNA, 22 nt, Homo sapiens
cugcgggagggggugggucagg

SEQ ID NO: 1550 - RNA, 22 nt, Homo sapiens
cucgggcggaggugguugagug

SEQ ID NO: 1551 - RNA, 22 nt, Homo sapiens
cacucaaccaccuccgcccgag

SEQ ID NO: 1552 - RNA, 24 nt, Homo sapiens
agaggacccguagcugcuagaagg

SEQ ID NO: 1553 - RNA, 24 nt, Homo sapiens
ccuucuagcagcuacggguccucu

SEQ ID NO: 1554 - RNA, 22 nt, Homo sapiens
uuguggaucucaaggaugugcu

SEQ ID NO: 1555 - RNA, 22 nt, Homo sapiens
agcacauccuugagauccacaa

SEQ ID NO: 1556 - RNA, 22 nt, Homo sapiens
uucucuuucuuuagccuugugu

SEQ ID NO: 1557 - RNA, 22 nt, Homo sapiens
acacaaggcuaaagaaagagaa

SEQ ID NO: 1558 - RNA, 22 nt, Homo sapiens
caaggccaaaggaagagaacag

SEQ ID NO: 1559 - RNA, 22 nt, Homo sapiens
cuguucucuuccuuuggccuug

SEQ ID NO: 1560 - RNA, 23 nt, Homo sapiens
augcggaccuggguuagcggagu

SEQ ID NO: 1561 - RNA, 23 nt, Homo sapiens
acuccgcuaacccagguccgcau

SEQ ID NO: 1562 - RNA, 22 nt, Homo sapiens
agccaggcucugaagggaaagu

SEQ ID NO: 1563 - RNA, 22 nt, Homo sapiens
acuuucccuucagagccuggcu

SEQ ID NO: 1564 - RNA, 22 nt, Homo sapiens
uuucccuucagagccuggcuuu

SEQ ID NO: 1565 - RNA, 22 nt, Homo sapiens
aaagccaggcucugaagggaaa

SEQ ID NO: 1566 - RNA, 22 nt, Homo sapiens
ccagagaugguugccuuccuau

SEQ ID NO: 1567 - RNA, 22 nt, Homo sapiens
auaggaaggcaaccaucucugg

SEQ ID NO: 1568 - RNA, 23 nt, Homo sapiens
cagggaggcgcucacucucugcu

SEQ ID NO: 1569 - RNA, 23 nt, Homo sapiens
agcagagagugagcgccucccug

SEQ ID NO: 1570 - RNA, 22 nt, Homo sapiens
caugacgucacagaggcuucgc

SEQ ID NO: 1571 - RNA, 22 nt, Homo sapiens
gcgaagccucugugacgucaug

SEQ ID NO: 1572 - RNA, 23 nt, Homo sapiens
aggccucugugacgucacggugu

SEQ ID NO: 1573 - RNA, 23 nt, Homo sapiens
acaccgugacgucacagaggccu

SEQ ID NO: 1574 - RNA, 23 nt, Homo sapiens
ugccccaccugcugaccacccuc

SEQ ID NO: 1575 - RNA, 23 nt, Homo sapiens
gaggguggucagcagguggggca

SEQ ID NO: 1576 - RNA, 23 nt, Homo sapiens
gugagugggagccgguggggcug

SEQ ID NO: 1577 - RNA, 23 nt, Homo sapiens
cagccccaccggcucccacucac

SEQ ID NO: 1578 - RNA, 21 nt, Homo sapiens
uaggacuagauguuggaauua

SEQ ID NO: 1579 - RNA, 21 nt, Homo sapiens
uaauuccaacaucuaguccua

SEQ ID NO: 1580 - RNA, 22 nt, Homo sapiens
aaauucauguucaaucuaaacc

SEQ ID NO: 1581 - RNA, 22 nt, Homo sapiens
gguuuagauugaacaugaauuu

SEQ ID NO: 1582 - RNA, 22 nt, Homo sapiens
uuuagauugaacaugaaguuag

SEQ ID NO: 1583 - RNA, 22 nt, Homo sapiens
cuaacuucauguucaaucuaaa

SEQ ID NO: 1584 - RNA, 21 nt, Homo sapiens
gagggcaugcgcacuuugucc

SEQ ID NO: 1585 - RNA, 21 nt, Homo sapiens
ggacaaagugcgcaugcccuc

SEQ ID NO: 1586 - RNA, 21 nt, Homo sapiens
acaaggugugcaugccugacc

SEQ ID NO: 1587 - RNA, 21 nt, Homo sapiens
ggucaggcaugcacaccuugu

SEQ ID NO: 1588 - RNA, 22 nt, Homo sapiens
cuucugaucaagauuuguggug

SEQ ID NO: 1589 - RNA, 22 nt, Homo sapiens
caccacaaaucuugaucagaag

SEQ ID NO: 1590 - RNA, 21 nt, Homo sapiens
ccaaaucuugaucagaagccu

SEQ ID NO: 1591 - RNA, 21 nt, Homo sapiens
aggcuucugaucaagauuugg

SEQ ID NO: 1592 - RNA, 24 nt, Homo sapiens
aggcaggggcuggugcugggcggg

SEQ ID NO: 1593 - RNA, 24 nt, Homo sapiens
cccgcccagcaccagccccugccu

SEQ ID NO: 1594 - RNA, 21 nt, Homo sapiens
cgccugcccagcccuccugcu

SEQ ID NO: 1595 - RNA, 21 nt, Homo sapiens
agcaggagggcugggcaggcg

SEQ ID NO: 1596 - RNA, 22 nt, Homo sapiens
uuaacuccuuucacacccaugg

SEQ ID NO: 1597 - RNA, 22 nt, Homo sapiens
ccaugggugugaaaggaguuaa

SEQ ID NO: 1598 - RNA, 21 nt, Homo sapiens
uggauguggaaggaguuaucu

SEQ ID NO: 1599 - RNA, 21 nt, Homo sapiens
agauaacuccuuccacaucca

SEQ ID NO: 1600 - RNA, 22 nt, Homo sapiens
ugagugauugauagcuauguuc

SEQ ID NO: 1601 - RNA, 22 nt, Homo sapiens
gaacauagcuaucaaucacuca

SEQ ID NO: 1602 - RNA, 21 nt, Homo sapiens
auagcaauugcucuuuuggaa

SEQ ID NO: 1603 - RNA, 21 nt, Homo sapiens
uuccaaaagagcaauugcuau

SEQ ID NO: 1604 - RNA, 21 nt, Homo sapiens
ucugaaagagcaguugguguu

SEQ ID NO: 1605 - RNA, 21 nt, Homo sapiens
aacaccaacugcucuuucaga

SEQ ID NO: 1606 - RNA, 23 nt, Homo sapiens
cgcgggcgcuccuggccgccgcc

SEQ ID NO: 1607 - RNA, 23 nt, Homo sapiens
ggcggcggccaggagcgcccgcg

SEQ ID NO: 1608 - RNA, 20 nt, Homo sapiens
ccaggagauccagagagaau

SEQ ID NO: 1609 - RNA, 20 nt, Homo sapiens
auucucucuggaucuccugg

SEQ ID NO: 1610 - RNA, 22 nt, Homo sapiens
auucucucuggaucccauggau

SEQ ID NO: 1611 - RNA, 22 nt, Homo sapiens
auccaugggauccagagagaau

SEQ ID NO: 1612 - RNA, 22 nt, Homo sapiens
ucugccauccucccuccccuac

SEQ ID NO: 1613 - RNA, 22 nt, Homo sapiens
guaggggagggaggauggcaga

SEQ ID NO: 1614 - RNA, 24 nt, Homo sapiens
ggugggauggagagaagguaugag

SEQ ID NO: 1615 - RNA, 24 nt, Homo sapiens
cucauaccuucucuccaucccacc

SEQ ID NO: 1616 - RNA, 18 nt, Homo sapiens
ugagaugacacuguagcu

SEQ ID NO: 1617 - RNA, 18 nt, Homo sapiens
agcuacagugucaucuca

SEQ ID NO: 1618 - RNA, 21 nt, Homo sapiens
agcagacuugaccuacaauua

SEQ ID NO: 1619 - RNA, 21 nt, Homo sapiens
uaauuguaggucaagucugcu

SEQ ID NO: 1620 - RNA, 22 nt, Homo sapiens
cagaacaggagcauagaaaggc

SEQ ID NO: 1621 - RNA, 22 nt, Homo sapiens
gccuuucuaugcuccuguucug

SEQ ID NO: 1622 - RNA, 22 nt, Homo sapiens
uuaauuuuuuguuucggucacu

SEQ ID NO: 1623 - RNA, 22 nt, Homo sapiens
agugaccgaaacaaaaaauuaa

SEQ ID NO: 1624 - RNA, 23 nt, Homo sapiens
cuugccauccugguccacugcau

SEQ ID NO: 1625 - RNA, 23 nt, Homo sapiens
augcaguggaccaggauggcaag

SEQ ID NO: 1626 - RNA, 22 nt, Homo sapiens
guggaccaggauggcaagggcu

SEQ ID NO: 1627 - RNA, 22 nt, Homo sapiens
agcccuugccauccugguccac

SEQ ID NO: 1628 - RNA, 22 nt, Homo sapiens
auaccucaucuagaaugcugua

SEQ ID NO: 1629 - RNA, 22 nt, Homo sapiens
uacagcauucuagaugagguau

SEQ ID NO: 1630 - RNA, 22 nt, Homo sapiens
uucuagaugagagauauauaua

SEQ ID NO: 1631 - RNA, 22 nt, Homo sapiens
uauauauaucucucaucuagaa

SEQ ID NO: 1632 - RNA, 22 nt, Homo sapiens
ucuucuuccuuugcagaguuga

SEQ ID NO: 1633 - RNA, 22 nt, Homo sapiens
ucaacucugcaaaggaagaaga

SEQ ID NO: 1634 - RNA, 22 nt, Homo sapiens
aauucuguaaaggaagaagagg

SEQ ID NO: 1635 - RNA, 22 nt, Homo sapiens
ccucuucuuccuuuacagaauu

SEQ ID NO: 1636 - RNA, 22 nt, Homo sapiens
uaggagggaauaguaaaagcag

SEQ ID NO: 1637 - RNA, 22 nt, Homo sapiens
cugcuuuuacuauucccuccua

SEQ ID NO: 1638 - RNA, 22 nt, Homo sapiens
acccuugagccugaucccuagc

SEQ ID NO: 1639 - RNA, 22 nt, Homo sapiens
gcuagggaucaggcucaagggu

SEQ ID NO: 1640 - RNA, 22 nt, Homo sapiens
aauguuggaauccucgcuagag

SEQ ID NO: 1641 - RNA, 22 nt, Homo sapiens
cucuagcgaggauuccaacauu

SEQ ID NO: 1642 - RNA, 21 nt, Homo sapiens
uagcggggauuccaauauugg

SEQ ID NO: 1643 - RNA, 21 nt, Homo sapiens
ccaauauuggaauccccgcua

SEQ ID NO: 1644 - RNA, 22 nt, Homo sapiens
ugauugucuucauaucuagaac

SEQ ID NO: 1645 - RNA, 22 nt, Homo sapiens
guucuagauaugaagacaauca

SEQ ID NO: 1646 - RNA, 22 nt, Homo sapiens
uucuggauaugaagacaaucaa

SEQ ID NO: 1647 - RNA, 22 nt, Homo sapiens
uugauugucuucauauccagaa

SEQ ID NO: 1648 - RNA, 23 nt, Homo sapiens
ccccgguguuggggcgcgucugc

SEQ ID NO: 1649 - RNA, 23 nt, Homo sapiens
gcagacgcgccccaacaccgggg

SEQ ID NO: 1650 - RNA, 21 nt, Homo sapiens
ggcgcgcccagcucccgggcu

SEQ ID NO: 1651 - RNA, 21 nt, Homo sapiens
agcccgggagcugggcgcgcc

SEQ ID NO: 1652 - RNA, 20 nt, Homo sapiens
ugaggagaugcugggacuga

SEQ ID NO: 1653 - RNA, 20 nt, Homo sapiens
ucagucccagcaucuccuca

SEQ ID NO: 1654 - RNA, 21 nt, Homo sapiens
agagucggcgacgccgccagc

SEQ ID NO: 1655 - RNA, 21 nt, Homo sapiens
gcuggcggcgucgccgacucu

SEQ ID NO: 1656 - RNA, 22 nt, Homo sapiens
ugaagccagcucuggucugggc

SEQ ID NO: 1657 - RNA, 22 nt, Homo sapiens
gcccagaccagagcuggcuuca

SEQ ID NO: 1658 - RNA, 22 nt, Homo sapiens
ugagaccaggacuggaugcacc

SEQ ID NO: 1659 - RNA, 22 nt, Homo sapiens
ggugcauccaguccuggucuca

SEQ ID NO: 1660 - RNA, 24 nt, Homo sapiens
gaugcgccgcccacugccccgcgc

SEQ ID NO: 1661 - RNA, 24 nt, Homo sapiens
gcgcggggcagugggcggcgcauc

SEQ ID NO: 1662 - RNA, 22 nt, Homo sapiens
gcggggguggcggcggcauccc

SEQ ID NO: 1663 - RNA, 22 nt, Homo sapiens
gggaugccgccgccacccccgc

SEQ ID NO: 1664 - RNA, 22 nt, Homo sapiens
uuacggaccagcuaagggaggc

SEQ ID NO: 1665 - RNA, 22 nt, Homo sapiens
gccucccuuagcugguccguaa

SEQ ID NO: 1666 - RNA, 21 nt, Homo sapiens
cacacauagcagguguauaua

SEQ ID NO: 1667 - RNA, 21 nt, Homo sapiens
uauauacaccugcuaugugug

SEQ ID NO: 1668 - RNA, 22 nt, Homo sapiens
guauacaccugauauguguaug

SEQ ID NO: 1669 - RNA, 22 nt, Homo sapiens
cauacacauaucagguguauac

SEQ ID NO: 1670 - RNA, 22 nt, Homo sapiens
ugaaugguaaagcgaugucaca

SEQ ID NO: 1671 - RNA, 22 nt, Homo sapiens
ugugacaucgcuuuaccauuca

SEQ ID NO: 1672 - RNA, 20 nt, Homo sapiens
aucgcuuuaccauucauguu

SEQ ID NO: 1673 - RNA, 20 nt, Homo sapiens
aacaugaaugguaaagcgau

SEQ ID NO: 1674 - RNA, 18 nt, Homo sapiens
uggauaugaugacugaaa

SEQ ID NO: 1675 - RNA, 18 nt, Homo sapiens
uuucagucaucauaucca

SEQ ID NO: 1676 - RNA, 18 nt, Homo sapiens
cggugagcgcucgcuggc

SEQ ID NO: 1677 - RNA, 18 nt, Homo sapiens
gccagcgagcgcucaccg

SEQ ID NO: 1678 - RNA, 23 nt, Homo sapiens
ucugcacugugaguuggcuggcu

SEQ ID NO: 1679 - RNA, 23 nt, Homo sapiens
agccagccaacucacagugcaga

SEQ ID NO: 1680 - RNA, 24 nt, Homo sapiens
acauccugcuccacagggcagagg

SEQ ID NO: 1681 - RNA, 24 nt, Homo sapiens
ccucugcccuguggagcaggaugu

SEQ ID NO: 1682 - RNA, 22 nt, Homo sapiens
ucuggcuaucucacgagacugu

SEQ ID NO: 1683 - RNA, 22 nt, Homo sapiens
acagucucgugagauagccaga

SEQ ID NO: 1684 - RNA, 22 nt, Homo sapiens
auauuauuagccacuucuggau

SEQ ID NO: 1685 - RNA, 22 nt, Homo sapiens
auccagaaguggcuaauaauau

SEQ ID NO: 1686 - RNA, 21 nt, Homo sapiens
agaaguggcuaauaauauuga

SEQ ID NO: 1687 - RNA, 21 nt, Homo sapiens
ucaauauuauuagccacuucu

SEQ ID NO: 1688 - RNA, 22 nt, Homo sapiens
uaaaguggcagaguauagacac

SEQ ID NO: 1689 - RNA, 22 nt, Homo sapiens
gugucuauacucugccacuuua

SEQ ID NO: 1690 - RNA, 22 nt, Homo sapiens
ugucuauacucugucacuuuac

SEQ ID NO: 1691 - RNA, 22 nt, Homo sapiens
guaaagugacagaguauagaca

SEQ ID NO: 1692 - RNA, 21 nt, Homo sapiens
ucucaguaaguggcacucugu

SEQ ID NO: 1693 - RNA, 21 nt, Homo sapiens
acagagugccacuuacugaga

SEQ ID NO: 1694 - RNA, 21 nt, Homo sapiens
gacagagugccacuuacugaa

SEQ ID NO: 1695 - RNA, 21 nt, Homo sapiens
uucaguaaguggcacucuguc

SEQ ID NO: 1696 - RNA, 22 nt, Homo sapiens
aacucacgaaguauaccgaagu

SEQ ID NO: 1697 - RNA, 22 nt, Homo sapiens
acuucgguauacuucgugaguu

SEQ ID NO: 1698 - RNA, 22 nt, Homo sapiens
uucgguauacuuugugaauugg

SEQ ID NO: 1699 - RNA, 22 nt, Homo sapiens
ccaauucacaaaguauaccgaa

SEQ ID NO: 1700 - RNA, 22 nt, Homo sapiens
acuggcaugcugcauuuauaua

SEQ ID NO: 1701 - RNA, 22 nt, Homo sapiens
uauauaaaugcagcaugccagu

SEQ ID NO: 1702 - RNA, 22 nt, Homo sapiens
aucuaaaugcagcaugccaguc

SEQ ID NO: 1703 - RNA, 22 nt, Homo sapiens
gacuggcaugcugcauuuagau

SEQ ID NO: 1704 - RNA, 19 nt, Homo sapiens
cauccguccgucuguccac

SEQ ID NO: 1705 - RNA, 19 nt, Homo sapiens
guggacagacggacggaug

SEQ ID NO: 1706 - RNA, 21 nt, Homo sapiens
aguggaccgaggaaggaagga

SEQ ID NO: 1707 - RNA, 21 nt, Homo sapiens
uccuuccuuccucgguccacu

SEQ ID NO: 1708 - RNA, 22 nt, Homo sapiens
uacacaagaaaaccaaggcuca

SEQ ID NO: 1709 - RNA, 22 nt, Homo sapiens
ugagccuugguuuucuugugua

SEQ ID NO: 1710 - RNA, 21 nt, Homo sapiens
uaacauaauaguguggauuga

SEQ ID NO: 1711 - RNA, 21 nt, Homo sapiens
ucaauccacacuauuauguua

SEQ ID NO: 1712 - RNA, 21 nt, Homo sapiens
ugcuuaaccuugcccucgaaa

SEQ ID NO: 1713 - RNA, 21 nt, Homo sapiens
uuucgagggcaagguuaagca

SEQ ID NO: 1714 - RNA, 21 nt, Homo sapiens
uuggacgguaagguuaagcaa

SEQ ID NO: 1715 - RNA, 21 nt, Homo sapiens
uugcuuaaccuuaccguccaa

SEQ ID NO: 1716 - RNA, 21 nt, Homo sapiens
aaaagcaucaggaaguaccca

SEQ ID NO: 1717 - RNA, 21 nt, Homo sapiens
uggguacuuccugaugcuuuu

SEQ ID NO: 1718 - RNA, 21 nt, Homo sapiens
gcaggacaggcagaaguggau

SEQ ID NO: 1719 - RNA, 21 nt, Homo sapiens
auccacuucugccuguccugc

SEQ ID NO: 1720 - RNA, 22 nt, Homo sapiens
cagggcuggcagugacaugggu

SEQ ID NO: 1721 - RNA, 22 nt, Homo sapiens
acccaugucacugccagcccug

SEQ ID NO: 1722 - RNA, 22 nt, Homo sapiens
auuucccugccauucccuuggc

SEQ ID NO: 1723 - RNA, 22 nt, Homo sapiens
gccaagggaauggcagggaaau

SEQ ID NO: 1724 - RNA, 22 nt, Homo sapiens
uggcggcgguaguuaugggcuu

SEQ ID NO: 1725 - RNA, 22 nt, Homo sapiens
aagcccauaacuaccgccgcca

SEQ ID NO: 1726 - RNA, 22 nt, Homo sapiens
gcucccucuagggucgcucgga

SEQ ID NO: 1727 - RNA, 22 nt, Homo sapiens
uccgagcgacccuagagggagc

SEQ ID NO: 1728 - RNA, 22 nt, Homo sapiens
ugggaacuuaguagagguuuaa

SEQ ID NO: 1729 - RNA, 22 nt, Homo sapiens
uuaaaccucuacuaaguuccca

SEQ ID NO: 1730 - RNA, 21 nt, Homo sapiens
uggggcuagugaugcaggacg

SEQ ID NO: 1731 - RNA, 21 nt, Homo sapiens
cguccugcaucacuagcccca

SEQ ID NO: 1732 - RNA, 22 nt, Homo sapiens
gcugacagcagggcuggccgcu

SEQ ID NO: 1733 - RNA, 22 nt, Homo sapiens
agcggccagcccugcugucagc

SEQ ID NO: 1734 - RNA, 21 nt, Homo sapiens
auuggacugcugauggcccgu

SEQ ID NO: 1735 - RNA, 21 nt, Homo sapiens
acgggccaucagcaguccaau

SEQ ID NO: 1736 - RNA, 22 nt, Homo sapiens
aggccaucagcaguccaaugaa

SEQ ID NO: 1737 - RNA, 22 nt, Homo sapiens
uucauuggacugcugauggccu

SEQ ID NO: 1738 - RNA, 22 nt, Homo sapiens
uuggacagaaaacacgcaggaa

SEQ ID NO: 1739 - RNA, 22 nt, Homo sapiens
uuccugcguguuuucuguccaa

SEQ ID NO: 1740 - RNA, 20 nt, Homo sapiens
ccugcguguuuucuguccaa

SEQ ID NO: 1741 - RNA, 20 nt, Homo sapiens
uuggacagaaaacacgcagg

SEQ ID NO: 1742 - RNA, 22 nt, Homo sapiens
ugagacaggcuuaugcugcuau

SEQ ID NO: 1743 - RNA, 22 nt, Homo sapiens
auagcagcauaagccugucuca

SEQ ID NO: 1744 - RNA, 22 nt, Homo sapiens
auagcagcaugaaccugucuca

SEQ ID NO: 1745 - RNA, 22 nt, Homo sapiens
ugagacagguucaugcugcuau

SEQ ID NO: 1746 - RNA, 20 nt, Homo sapiens
gagacagguucaugcugcua

SEQ ID NO: 1747 - RNA, 20 nt, Homo sapiens
uagcagcaugaaccugucuc

SEQ ID NO: 1748 - RNA, 21 nt, Homo sapiens
auagcagcauaagccugucuc

SEQ ID NO: 1749 - RNA, 21 nt, Homo sapiens
gagacaggcuuaugcugcuau

SEQ ID NO: 1750 - RNA, 22 nt, Homo sapiens
uguguggauccuggaggaggca

SEQ ID NO: 1751 - RNA, 22 nt, Homo sapiens
ugccuccuccaggauccacaca

SEQ ID NO: 1752 - RNA, 22 nt, Homo sapiens
agacaucaagaucagucccaaa

SEQ ID NO: 1753 - RNA, 22 nt, Homo sapiens
uuugggacugaucuugaugucu

SEQ ID NO: 1754 - RNA, 22 nt, Homo sapiens
uuugggacugaucuugaugucu

SEQ ID NO: 1755 - RNA, 22 nt, Homo sapiens
agacaucaagaucagucccaaa

SEQ ID NO: 1756 - RNA, 22 nt, Homo sapiens
aaggaaccagaaaaugagaagu

SEQ ID NO: 1757 - RNA, 22 nt, Homo sapiens
acuucucauuuucugguuccuu

SEQ ID NO: 1758 - RNA, 22 nt, Homo sapiens
ucuggccuugacuugacucuuu

SEQ ID NO: 1759 - RNA, 22 nt, Homo sapiens
aaagagucaagucaaggccaga

SEQ ID NO: 1760 - RNA, 23 nt, Homo sapiens
ucaaggccagaggucccacagca

SEQ ID NO: 1761 - RNA, 23 nt, Homo sapiens
ugcugugggaccucuggccuuga

SEQ ID NO: 1762 - RNA, 21 nt, Homo sapiens
acuccaguuuuaguucucuug

SEQ ID NO: 1763 - RNA, 21 nt, Homo sapiens
caagagaacuaaaacuggagu

SEQ ID NO: 1764 - RNA, 22 nt, Homo sapiens
aagagaacugaaaguggagccu

SEQ ID NO: 1765 - RNA, 22 nt, Homo sapiens
aggcuccacuuucaguucucuu

SEQ ID NO: 1766 - RNA, 22 nt, Homo sapiens
uaagggguguauggcagaugca

SEQ ID NO: 1767 - RNA, 22 nt, Homo sapiens
ugcaucugccauacaccccuua

SEQ ID NO: 1768 - RNA, 21 nt, Homo sapiens
uuucagauaacaguauuacau

SEQ ID NO: 1769 - RNA, 21 nt, Homo sapiens
auguaauacuguuaucugaaa

SEQ ID NO: 1770 - RNA, 22 nt, Homo sapiens
aagcaauacuguuaccugaaau

SEQ ID NO: 1771 - RNA, 22 nt, Homo sapiens
auuucagguaacaguauugcuu

SEQ ID NO: 1772 - RNA, 22 nt, Homo sapiens
uacuaacugcagauucaaguga

SEQ ID NO: 1773 - RNA, 22 nt, Homo sapiens
ucacuugaaucugcaguuagua

SEQ ID NO: 1774 - RNA, 21 nt, Homo sapiens
auugccuaacaugugccagaa

SEQ ID NO: 1775 - RNA, 21 nt, Homo sapiens
uucuggcacauguuaggcaau

SEQ ID NO: 1776 - RNA, 22 nt, Homo sapiens
ucugguauguaguagguaauaa

SEQ ID NO: 1777 - RNA, 22 nt, Homo sapiens
uuauuaccuacuacauaccaga

SEQ ID NO: 1778 - RNA, 22 nt, Homo sapiens
aguugccuuuuuguucccaugc

SEQ ID NO: 1779 - RNA, 22 nt, Homo sapiens
gcaugggaacaaaaaggcaacu

SEQ ID NO: 1780 - RNA, 21 nt, Homo sapiens
auaggcaccaaaaagcaacaa

SEQ ID NO: 1781 - RNA, 21 nt, Homo sapiens
uuguugcuuuuuggugccuau

SEQ ID NO: 1782 - RNA, 22 nt, Homo sapiens
ccugcaacuuugccugaucaga

SEQ ID NO: 1783 - RNA, 22 nt, Homo sapiens
ucugaucaggcaaaguugcagg

SEQ ID NO: 1784 - RNA, 22 nt, Homo sapiens
ugaucaggcaaaauugcagacu

SEQ ID NO: 1785 - RNA, 22 nt, Homo sapiens
agucugcaauuuugccugauca

SEQ ID NO: 1786 - RNA, 22 nt, Homo sapiens
uuguggcuggucaugaggcuaa

SEQ ID NO: 1787 - RNA, 22 nt, Homo sapiens
uuagccucaugaccagccacaa

SEQ ID NO: 1788 - RNA, 21 nt, Homo sapiens
uuagucucaugaucagacaca

SEQ ID NO: 1789 - RNA, 21 nt, Homo sapiens
ugugucugaucaugagacuaa

SEQ ID NO: 1790 - RNA, 22 nt, Homo sapiens
aaagauagacaauuggcuaaau

SEQ ID NO: 1791 - RNA, 22 nt, Homo sapiens
auuuagccaauugucuaucuuu

SEQ ID NO: 1792 - RNA, 22 nt, Homo sapiens
uuagccaauuguccaucuuuag

SEQ ID NO: 1793 - RNA, 22 nt, Homo sapiens
cuaaagauggacaauuggcuaa

SEQ ID NO: 1794 - RNA, 22 nt, Homo sapiens
ucugugagaccaaagaacuacu

SEQ ID NO: 1795 - RNA, 22 nt, Homo sapiens
aguaguucuuuggucucacaga

SEQ ID NO: 1796 - RNA, 22 nt, Homo sapiens
uuguucuuuggucuuucagcca

SEQ ID NO: 1797 - RNA, 22 nt, Homo sapiens
uggcugaaagaccaaagaacaa

SEQ ID NO: 1798 - RNA, 23 nt, Homo sapiens
cgggcuguccggaggggucggcu

SEQ ID NO: 1799 - RNA, 23 nt, Homo sapiens
agccgaccccuccggacagcccg

SEQ ID NO: 1800 - RNA, 23 nt, Homo sapiens
ucuguauucuccuuugccugcag

SEQ ID NO: 1801 - RNA, 23 nt, Homo sapiens
cugcaggcaaaggagaauacaga

SEQ ID NO: 1802 - RNA, 23 nt, Homo sapiens
uacauggauggaaaccuucaagc

SEQ ID NO: 1803 - RNA, 23 nt, Homo sapiens
gcuugaagguuuccauccaugua

SEQ ID NO: 1804 - RNA, 22 nt, Homo sapiens
uauggagguucuagaccauguu

SEQ ID NO: 1805 - RNA, 22 nt, Homo sapiens
aacauggucuagaaccuccaua

SEQ ID NO: 1806 - RNA, 22 nt, Homo sapiens
gggaccauccugccugcugugg

SEQ ID NO: 1807 - RNA, 22 nt, Homo sapiens
ccacagcaggcaggaugguccc

SEQ ID NO: 1808 - RNA, 22 nt, Homo sapiens
ucagcaggcaggcuggugcagc

SEQ ID NO: 1809 - RNA, 22 nt, Homo sapiens
gcugcaccagccugccugcuga

SEQ ID NO: 1810 - RNA, 22 nt, Homo sapiens
ucaccugaccucccaugccugu

SEQ ID NO: 1811 - RNA, 22 nt, Homo sapiens
acaggcaugggaggucagguga

SEQ ID NO: 1812 - RNA, 22 nt, Homo sapiens
caggcacgggagcucaggugag

SEQ ID NO: 1813 - RNA, 22 nt, Homo sapiens
cucaccugagcucccgugccug

SEQ ID NO: 1814 - RNA, 21 nt, Homo sapiens
ugaguguugucuacgagggca

SEQ ID NO: 1815 - RNA, 21 nt, Homo sapiens
ugcccucguagacaacacuca

SEQ ID NO: 1816 - RNA, 21 nt, Homo sapiens
acugacaggagagcauuuuga

SEQ ID NO: 1817 - RNA, 21 nt, Homo sapiens
ucaaaaugcucuccugucagu

SEQ ID NO: 1818 - RNA, 22 nt, Homo sapiens
ugaccugggacucggacagcug

SEQ ID NO: 1819 - RNA, 22 nt, Homo sapiens
cagcuguccgagucccagguca

SEQ ID NO: 1820 - RNA, 22 nt, Homo sapiens
ucucaggaguaaagacagaguu

SEQ ID NO: 1821 - RNA, 22 nt, Homo sapiens
aacucugucuuuacuccugaga

SEQ ID NO: 1822 - RNA, 22 nt, Homo sapiens
aacucugucuucacucaugagu

SEQ ID NO: 1823 - RNA, 22 nt, Homo sapiens
acucaugagugaagacagaguu

SEQ ID NO: 1824 - RNA, 22 nt, Homo sapiens
uggggcggagcuuccggaggcc

SEQ ID NO: 1825 - RNA, 22 nt, Homo sapiens
ggccuccggaagcuccgcccca

SEQ ID NO: 1826 - RNA, 22 nt, Homo sapiens
caaucagcaaguauacugcccu

SEQ ID NO: 1827 - RNA, 22 nt, Homo sapiens
agggcaguauacuugcugauug

SEQ ID NO: 1828 - RNA, 22 nt, Homo sapiens
uggcagugucuuagcugguugu

SEQ ID NO: 1829 - RNA, 22 nt, Homo sapiens
acaaccagcuaagacacugcca

SEQ ID NO: 1830 - RNA, 22 nt, Homo sapiens
ccaauauuggcugugcugcucc

SEQ ID NO: 1831 - RNA, 22 nt, Homo sapiens
ggagcagcacagccaauauugg

SEQ ID NO: 1832 - RNA, 21 nt, Homo sapiens
uagcagcacagaaauauuggc

SEQ ID NO: 1833 - RNA, 21 nt, Homo sapiens
gccaauauuucugugcugcua

SEQ ID NO: 1834 - RNA, 21 nt, Homo sapiens
uaauuuuauguauaagcuagu

SEQ ID NO: 1835 - RNA, 21 nt, Homo sapiens
acuagcuuauacauaaaauua

SEQ ID NO: 1836 - RNA, 22 nt, Homo sapiens
gagcuuauucauaaaagugcag

SEQ ID NO: 1837 - RNA, 22 nt, Homo sapiens
cugcacuuuuaugaauaagcuc

SEQ ID NO: 1838 - RNA, 22 nt, Homo sapiens
aagacgggaggaaagaagggag

SEQ ID NO: 1839 - RNA, 22 nt, Homo sapiens
cucccuucuuuccucccgucuu

SEQ ID NO: 1840 - RNA, 22 nt, Homo sapiens
cagugguuuuacccuaugguag

SEQ ID NO: 1841 - RNA, 22 nt, Homo sapiens
cuaccauaggguaaaaccacug

SEQ ID NO: 1842 - RNA, 22 nt, Homo sapiens
auucuaauuucuccacgucuuu

SEQ ID NO: 1843 - RNA, 22 nt, Homo sapiens
aaagacguggagaaauuagaau

SEQ ID NO: 1844 - RNA, 22 nt, Homo sapiens
aaccagcaccccaacuuuggac

SEQ ID NO: 1845 - RNA, 22 nt, Homo sapiens
guccaaaguuggggugcugguu

SEQ ID NO: 1846 - RNA, 24 nt, Homo sapiens
aaagacauaggauagagucaccuc

SEQ ID NO: 1847 - RNA, 24 nt, Homo sapiens
gaggugacucuauccuaugucuuu

SEQ ID NO: 1848 - RNA, 22 nt, Homo sapiens
uaacugguugaacaacugaacc

SEQ ID NO: 1849 - RNA, 22 nt, Homo sapiens
gguucaguuguucaaccaguua

SEQ ID NO: 1850 - RNA, 20 nt, Homo sapiens
cgugccacccuuuuccccag

SEQ ID NO: 1851 - RNA, 20 nt, Homo sapiens
cuggggaaaaggguggcacg

SEQ ID NO: 1852 - RNA, 17 nt, Homo sapiens
guggggccaggcggugg

SEQ ID NO: 1853 - RNA, 17 nt, Homo sapiens
ccaccgccuggccccac

SEQ ID NO: 1854 - RNA, 22 nt, Homo sapiens
aaaagcuggguugagagggcaa

SEQ ID NO: 1855 - RNA, 22 nt, Homo sapiens
uugcccucucaacccagcuuuu

SEQ ID NO: 1856 - RNA, 22 nt, Homo sapiens
gguccagaggggagauagguuc

SEQ ID NO: 1857 - RNA, 22 nt, Homo sapiens
gaaccuaucuccccucuggacc

SEQ ID NO: 1858 - RNA, 23 nt, Homo sapiens
uagccuucagaucuugguguuuu

SEQ ID NO: 1859 - RNA, 23 nt, Homo sapiens
aaaacaccaagaucugaaggcua

SEQ ID NO: 1860 - RNA, 23 nt, Homo sapiens
ccacuuggaucugaaggcugccc

SEQ ID NO: 1861 - RNA, 23 nt, Homo sapiens
gggcagccuucagauccaagugg

SEQ ID NO: 1862 - RNA, 22 nt, Homo sapiens
ugugcgcagggagaccucuccc

SEQ ID NO: 1863 - RNA, 22 nt, Homo sapiens
gggagaggucucccugcgcaca

SEQ ID NO: 1864 - RNA, 22 nt, Homo sapiens
ugucuacuacuggagacacugg

SEQ ID NO: 1865 - RNA, 22 nt, Homo sapiens
ccagugucuccaguaguagaca

SEQ ID NO: 1866 - RNA, 21 nt, Homo sapiens
aaggcagggcccccgcucccc

SEQ ID NO: 1867 - RNA, 21 nt, Homo sapiens
ggggagcgggggcccugccuu

SEQ ID NO: 1868 - RNA, 21 nt, Homo sapiens
cugacuguugccguccuccag

SEQ ID NO: 1869 - RNA, 21 nt, Homo sapiens
cuggaggacggcaacagucag

SEQ ID NO: 1870 - RNA, 25 nt, Homo sapiens
aaaaaccacaauuacuuuugcacca

SEQ ID NO: 1871 - RNA, 25 nt, Homo sapiens
uggugcaaaaguaauugugguuuuu

SEQ ID NO: 1872 - RNA, 23 nt, Homo sapiens
caaaaaccgcaauuacuuuugca

SEQ ID NO: 1873 - RNA, 23 nt, Homo sapiens
ugcaaaaguaauugcgguuuuug

SEQ ID NO: 1874 - RNA, 22 nt, Homo sapiens
augugccugagggaguaagaca

SEQ ID NO: 1875 - RNA, 22 nt, Homo sapiens
ugucuuacucccucaggcacau

SEQ ID NO: 1876 - RNA, 20 nt, Homo sapiens
ucuuacucccucaggcacug

SEQ ID NO: 1877 - RNA, 20 nt, Homo sapiens
cagugccugagggaguaaga

SEQ ID NO: 1878 - RNA, 22 nt, Homo sapiens
agacacauuuggagagggaccc

SEQ ID NO: 1879 - RNA, 22 nt, Homo sapiens
gggucccucuccaaaugugucu

SEQ ID NO: 1880 - RNA, 22 nt, Homo sapiens
gguucccucuccaaaugugucu

SEQ ID NO: 1881 - RNA, 22 nt, Homo sapiens
agacacauuuggagagggaacc

SEQ ID NO: 1882 - RNA, 21 nt, Homo sapiens
aaaauuucuuucacuacuuag

SEQ ID NO: 1883 - RNA, 21 nt, Homo sapiens
cuaaguagugaaagaaauuuu

SEQ ID NO: 1884 - RNA, 21 nt, Homo sapiens
uuagugaaggcuauuuuaauu

SEQ ID NO: 1885 - RNA, 21 nt, Homo sapiens
aauuaaaauagccuucacuaa

SEQ ID NO: 1886 - RNA, 20 nt, Homo sapiens
acuguaaacgcuuucugaug

SEQ ID NO: 1887 - RNA, 20 nt, Homo sapiens
caucagaaagcguuuacagu

SEQ ID NO: 1888 - RNA, 22 nt, Homo sapiens
gcaugugaugaagcaaaucagu

SEQ ID NO: 1889 - RNA, 22 nt, Homo sapiens
acugauuugcuucaucacaugc

SEQ ID NO: 1890 - RNA, 24 nt, Homo sapiens
caaagugaugaguaauacuggcug

SEQ ID NO: 1891 - RNA, 24 nt, Homo sapiens
cagccaguauuacucaucacuuug

SEQ ID NO: 1892 - RNA, 20 nt, Homo sapiens
gaaucggaaaggaggcgccg

SEQ ID NO: 1893 - RNA, 20 nt, Homo sapiens
cggcgccuccuuuccgauuc

SEQ ID NO: 1894 - RNA, 21 nt, Homo sapiens
uugugaagaaagaaauucuua

SEQ ID NO: 1895 - RNA, 21 nt, Homo sapiens
uaagaauuucuuucuucacaa

SEQ ID NO: 1896 - RNA, 22 nt, Homo sapiens
aggaggcaucuugagaaaugga

SEQ ID NO: 1897 - RNA, 22 nt, Homo sapiens
uccauuucucaagaugccuccu

SEQ ID NO: 1898 - RNA, 24 nt, Homo sapiens
acaaaaaaaaaagcccaacccuuc

SEQ ID NO: 1899 - RNA, 24 nt, Homo sapiens
gaaggguugggcuuuuuuuuuugu

SEQ ID NO: 1900 - RNA, 22 nt, Homo sapiens
uguuguacuuuuuuuuuuguuc

SEQ ID NO: 1901 - RNA, 22 nt, Homo sapiens
gaacaaaaaaaaaaguacaaca

SEQ ID NO: 1902 - RNA, 21 nt, Homo sapiens
ucucucggcuccucgcggcuc

SEQ ID NO: 1903 - RNA, 21 nt, Homo sapiens
gagccgcgaggagccgagaga

SEQ ID NO: 1904 - RNA, 23 nt, Homo sapiens
cgagggcauuucaugaugcaggc

SEQ ID NO: 1905 - RNA, 23 nt, Homo sapiens
gccugcaucaugaaaugcccucg

SEQ ID NO: 1906 - RNA, 22 nt, Homo sapiens
augaagugcacucaugauaugu

SEQ ID NO: 1907 - RNA, 22 nt, Homo sapiens
acauaucaugagugcacuucau

SEQ ID NO: 1908 - RNA, 22 nt, Homo sapiens
ugucuacauuaaugaaaagagc

SEQ ID NO: 1909 - RNA, 22 nt, Homo sapiens
gcucuuuucauuaauguagaca

SEQ ID NO: 1910 - RNA, 22 nt, Homo sapiens
ucacccugcaucccgcacccag

SEQ ID NO: 1911 - RNA, 22 nt, Homo sapiens
cugggugcgggaugcaggguga

SEQ ID NO: 1912 - RNA, 22 nt, Homo sapiens
gugggcugggcugggcugggcc

SEQ ID NO: 1913 - RNA, 22 nt, Homo sapiens
ggcccagcccagcccagcccac

SEQ ID NO: 1914 - RNA, 20 nt, Homo sapiens
cgcgggucggggucugcagg

SEQ ID NO: 1915 - RNA, 20 nt, Homo sapiens
ccugcagaccccgacccgcg

SEQ ID NO: 1916 - RNA, 21 nt, Homo sapiens
ucaccugagcucccgugccug

SEQ ID NO: 1917 - RNA, 21 nt, Homo sapiens
caggcacgggagcucagguga

SEQ ID NO: 1918 - RNA, 20 nt, Homo sapiens
aggcaugggaggucagguga

SEQ ID NO: 1919 - RNA, 20 nt, Homo sapiens
ucaccugaccucccaugccu

SEQ ID NO: 1920 - RNA, 23 nt, Homo sapiens
caucagcacccuauguccuuucu

SEQ ID NO: 1921 - RNA, 23 nt, Homo sapiens
agaaaggacauagggugcugaug

SEQ ID NO: 1922 - RNA, 22 nt, Homo sapiens
aaagacauaguugcaagauggg

SEQ ID NO: 1923 - RNA, 22 nt, Homo sapiens
cccaucuugcaacuaugucuuu

SEQ ID NO: 1924 - RNA, 22 nt, Homo sapiens
uuugugaccugguccacuaacc

SEQ ID NO: 1925 - RNA, 22 nt, Homo sapiens
gguuaguggaccaggucacaaa

SEQ ID NO: 1926 - RNA, 22 nt, Homo sapiens
gaugguugaccagagagcacac

SEQ ID NO: 1927 - RNA, 22 nt, Homo sapiens
gugugcucucuggucaaccauc

SEQ ID NO: 1928 - RNA, 20 nt, Homo sapiens
aaaagcuggguugagagggu

SEQ ID NO: 1929 - RNA, 20 nt, Homo sapiens
acccucucaacccagcuuuu

SEQ ID NO: 1930 - RNA, 21 nt, Homo sapiens
cacaagguauugguauuaccu

SEQ ID NO: 1931 - RNA, 21 nt, Homo sapiens
agguaauaccaauaccuugug

SEQ ID NO: 1932 - RNA, 22 nt, Homo sapiens
uaguaccaguaccuuguguuca

SEQ ID NO: 1933 - RNA, 22 nt, Homo sapiens
ugaacacaagguacugguacua

SEQ ID NO: 1934 - RNA, 22 nt, Homo sapiens
aguauucuguaccagggaaggu

SEQ ID NO: 1935 - RNA, 22 nt, Homo sapiens
accuucccugguacagaauacu

SEQ ID NO: 1936 - RNA, 22 nt, Homo sapiens
uggcaguguauuguuagcuggu

SEQ ID NO: 1937 - RNA, 22 nt, Homo sapiens
accagcuaacaauacacugcca

SEQ ID NO: 1938 - RNA, 22 nt, Homo sapiens
uauacaagggcaagcucucugu

SEQ ID NO: 1939 - RNA, 22 nt, Homo sapiens
acagagagcuugcccuuguaua

SEQ ID NO: 1940 - RNA, 22 nt, Homo sapiens
agcgagguugcccuuuguauau

SEQ ID NO: 1941 - RNA, 22 nt, Homo sapiens
auauacaaagggcaaccucgcu

SEQ ID NO: 1942 - RNA, 22 nt, Homo sapiens
caaucacuaacuccacugccau

SEQ ID NO: 1943 - RNA, 22 nt, Homo sapiens
auggcaguggaguuagugauug

SEQ ID NO: 1944 - RNA, 23 nt, Homo sapiens
uaggcagugucauuagcugauug

SEQ ID NO: 1945 - RNA, 23 nt, Homo sapiens
caaucagcuaaugacacugccua

SEQ ID NO: 1946 - RNA, 22 nt, Homo sapiens
cagccacaacuacccugccacu

SEQ ID NO: 1947 - RNA, 22 nt, Homo sapiens
aguggcaggguaguuguggcug

SEQ ID NO: 1948 - RNA, 22 nt, Homo sapiens
aggcaguguauuguuagcuggc

SEQ ID NO: 1949 - RNA, 22 nt, Homo sapiens
gccagcuaacaauacacugccu

SEQ ID NO: 1950 - RNA, 22 nt, Homo sapiens
aaucacuaaccacacggccagg

SEQ ID NO: 1951 - RNA, 22 nt, Homo sapiens
ccuggccgugugguuagugauu

SEQ ID NO: 1952 - RNA, 23 nt, Homo sapiens
aggcaguguaguuagcugauugc

SEQ ID NO: 1953 - RNA, 23 nt, Homo sapiens
gcaaucagcuaacuacacugccu

SEQ ID NO: 1954 - RNA, 20 nt, Homo sapiens
guccgcucggcgguggccca

SEQ ID NO: 1955 - RNA, 20 nt, Homo sapiens
ugggccaccgccgagcggac

SEQ ID NO: 1956 - RNA, 23 nt, Homo sapiens
gaacgccuguucuugccaggugg

SEQ ID NO: 1957 - RNA, 23 nt, Homo sapiens
ccaccuggcaagaacaggcguuc

SEQ ID NO: 1958 - RNA, 19 nt, Homo sapiens
aagugugcagggcacuggu

SEQ ID NO: 1959 - RNA, 19 nt, Homo sapiens
accagugcccugcacacuu

SEQ ID NO: 1960 - RNA, 21 nt, Homo sapiens
aggggugcuaucugugauuga

SEQ ID NO: 1961 - RNA, 21 nt, Homo sapiens
ucaaucacagauagcaccccu

SEQ ID NO: 1962 - RNA, 22 nt, Homo sapiens
cuuucagucagauguuugcugc

SEQ ID NO: 1963 - RNA, 22 nt, Homo sapiens
gcagcaaacaucugacugaaag

SEQ ID NO: 1964 - RNA, 22 nt, Homo sapiens
uguaaacauccccgacuggaag

SEQ ID NO: 1965 - RNA, 22 nt, Homo sapiens
cuuccagucggggauguuuaca

SEQ ID NO: 1966 - RNA, 22 nt, Homo sapiens
uguaaacauccucgacuggaag

SEQ ID NO: 1967 - RNA, 22 nt, Homo sapiens
cuuccagucgaggauguuuaca

SEQ ID NO: 1968 - RNA, 22 nt, Homo sapiens
agaaguaauugcgguuuugcca

SEQ ID NO: 1969 - RNA, 22 nt, Homo sapiens
uggcaaaaccgcaauuacuucu

SEQ ID NO: 1970 - RNA, 22 nt, Homo sapiens
caaaacuggcaauuacuuuugc

SEQ ID NO: 1971 - RNA, 22 nt, Homo sapiens
gcaaaaguaauugccaguuuug

SEQ ID NO: 1972 - RNA, 22 nt, Homo sapiens
aaaaguaauugcgaguuuuacc

SEQ ID NO: 1973 - RNA, 22 nt, Homo sapiens
gguaaaacucgcaauuacuuuu

SEQ ID NO: 1974 - RNA, 22 nt, Homo sapiens
caagaaccucaguugcuuuugu

SEQ ID NO: 1975 - RNA, 22 nt, Homo sapiens
acaaaagcaacugagguucuug

SEQ ID NO: 1976 - RNA, 22 nt, Homo sapiens
caaaaaucucaauuacuuuugc

SEQ ID NO: 1977 - RNA, 22 nt, Homo sapiens
gcaaaaguaauugagauuuuug

SEQ ID NO: 1978 - RNA, 22 nt, Homo sapiens
caaaaaccacaguuucuuuugc

SEQ ID NO: 1979 - RNA, 22 nt, Homo sapiens
gcaaaagaaacugugguuuuug

SEQ ID NO: 1980 - RNA, 22 nt, Homo sapiens
aaaaguaauugugguuuuugcc

SEQ ID NO: 1981 - RNA, 22 nt, Homo sapiens
ggcaaaaaccacaauuacuuuu

SEQ ID NO: 1982 - RNA, 21 nt, Homo sapiens
ugacaacuauggaugagcucu

SEQ ID NO: 1983 - RNA, 21 nt, Homo sapiens
agagcucauccauaguuguca

SEQ ID NO: 1984 - RNA, 21 nt, Homo sapiens
aacaggugacugguuagacaa

SEQ ID NO: 1985 - RNA, 21 nt, Homo sapiens
uugucuaaccagucaccuguu

SEQ ID NO: 1986 - RNA, 21 nt, Homo sapiens
aaaacggugagauuuuguuuu

SEQ ID NO: 1987 - RNA, 21 nt, Homo sapiens
aaaacaaaaucucaccguuuu

SEQ ID NO: 1988 - RNA, 21 nt, Homo sapiens
gcuaguccugacucagccagu

SEQ ID NO: 1989 - RNA, 21 nt, Homo sapiens
acuggcugagucaggacuagc

SEQ ID NO: 1990 - RNA, 21 nt, Homo sapiens
aggguaagcugaaccucugau

SEQ ID NO: 1991 - RNA, 21 nt, Homo sapiens
aucagagguucagcuuacccu

SEQ ID NO: 1992 - RNA, 22 nt, Homo sapiens
auauuaccauuagcucaucuuu

SEQ ID NO: 1993 - RNA, 22 nt, Homo sapiens
aaagaugagcuaaugguaauau

SEQ ID NO: 1994 - RNA, 22 nt, Homo sapiens
gaugagcucauuguaauaugag

SEQ ID NO: 1995 - RNA, 22 nt, Homo sapiens
cucauauuacaaugagcucauc

SEQ ID NO: 1996 - RNA, 19 nt, Homo sapiens
agguugacauacguuuccc

SEQ ID NO: 1997 - RNA, 19 nt, Homo sapiens
gggaaacguaugucaaccu

SEQ ID NO: 1998 - RNA, 20 nt, Homo sapiens
auguauaaauguauacacac

SEQ ID NO: 1999 - RNA, 20 nt, Homo sapiens
guguguauacauuuauacau

SEQ ID NO: 2000 - RNA, 24 nt, Homo sapiens
cugaagugauguguaacugaucag

SEQ ID NO: 2001 - RNA, 24 nt, Homo sapiens
cugaucaguuacacaucacuucag

SEQ ID NO: 2002 - RNA, 22 nt, Homo sapiens
aagauguggaaaaauuggaauc

SEQ ID NO: 2003 - RNA, 22 nt, Homo sapiens
gauuccaauuuuuccacaucuu

SEQ ID NO: 2004 - RNA, 21 nt, Homo sapiens
uagauaaaauauugguaccug

SEQ ID NO: 2005 - RNA, 21 nt, Homo sapiens
cagguaccaauauuuuaucua

SEQ ID NO: 2006 - RNA, 21 nt, Homo sapiens
cuucuugugcucuaggauugu

SEQ ID NO: 2007 - RNA, 21 nt, Homo sapiens
acaauccuagagcacaagaag

SEQ ID NO: 2008 - RNA, 22 nt, Homo sapiens
uaugcauuguauuuuuaggucc

SEQ ID NO: 2009 - RNA, 22 nt, Homo sapiens
ggaccuaaaaauacaaugcaua

SEQ ID NO: 2010 - RNA, 21 nt, Homo sapiens
uuuccauaggugaugagucac

SEQ ID NO: 2011 - RNA, 21 nt, Homo sapiens
gugacucaucaccuauggaaa

SEQ ID NO: 2012 - RNA, 21 nt, Homo sapiens
uuggccacaauggguuagaac

SEQ ID NO: 2013 - RNA, 21 nt, Homo sapiens
guucuaacccauuguggccaa

SEQ ID NO: 2014 - RNA, 22 nt, Homo sapiens
ugugucacucgaugaccacugu

SEQ ID NO: 2015 - RNA, 22 nt, Homo sapiens
acaguggucaucgagugacaca

SEQ ID NO: 2016 - RNA, 23 nt, Homo sapiens
acuuacagacaagagccuugcuc

SEQ ID NO: 2017 - RNA, 23 nt, Homo sapiens
gagcaaggcucuugucuguaagu

SEQ ID NO: 2018 - RNA, 19 nt, Homo sapiens
aggcugcggaauucaggac

SEQ ID NO: 2019 - RNA, 19 nt, Homo sapiens
guccugaauuccgcagccu

SEQ ID NO: 2020 - RNA, 23 nt, Homo sapiens
uaaaucccauggugccuucuccu

SEQ ID NO: 2021 - RNA, 23 nt, Homo sapiens
aggagaaggcaccaugggauuua

SEQ ID NO: 2022 - RNA, 21 nt, Homo sapiens
aaacuacugaaaaucaaagau

SEQ ID NO: 2023 - RNA, 21 nt, Homo sapiens
aucuuugauuuucaguaguuu

SEQ ID NO: 2024 - RNA, 21 nt, Homo sapiens
guucaaauccagaucuauaac

SEQ ID NO: 2025 - RNA, 21 nt, Homo sapiens
guuauagaucuggauuugaac

SEQ ID NO: 2026 - RNA, 19 nt, Homo sapiens
ccgguuccagucccuggag

SEQ ID NO: 2027 - RNA, 19 nt, Homo sapiens
cuccagggacuggaaccgg

SEQ ID NO: 2028 - RNA, 20 nt, Homo sapiens
aggguguuucucucaucucu

SEQ ID NO: 2029 - RNA, 20 nt, Homo sapiens
agagaugagagaaacacccu

SEQ ID NO: 2030 - RNA, 24 nt, Homo sapiens
gaccuggacauguuugugcccagu

SEQ ID NO: 2031 - RNA, 24 nt, Homo sapiens
acugggcacaaacauguccagguc

SEQ ID NO: 2032 - RNA, 20 nt, Homo sapiens
auggagauagauauagaaau

SEQ ID NO: 2033 - RNA, 20 nt, Homo sapiens
auuucuauaucuaucuccau

SEQ ID NO: 2034 - RNA, 19 nt, Homo sapiens
agcugucugaaaaugucuu

SEQ ID NO: 2035 - RNA, 19 nt, Homo sapiens
aagacauuuucagacagcu

SEQ ID NO: 2036 - RNA, 21 nt, Homo sapiens
agaccuggcccagaccucagc

SEQ ID NO: 2037 - RNA, 21 nt, Homo sapiens
gcugaggucugggccaggucu

SEQ ID NO: 2038 - RNA, 23 nt, Homo sapiens
acuugggcacugaaacaaugucc

SEQ ID NO: 2039 - RNA, 23 nt, Homo sapiens
ggacauuguuucagugcccaagu

SEQ ID NO: 2040 - RNA, 24 nt, Homo sapiens
acugggggcuuucgggcucugcgu

SEQ ID NO: 2041 - RNA, 24 nt, Homo sapiens
acgcagagcccgaaagcccccagu

SEQ ID NO: 2042 - RNA, 23 nt, Homo sapiens
aucgcugcgguugcgagcgcugu

SEQ ID NO: 2043 - RNA, 23 nt, Homo sapiens
acagcgcucgcaaccgcagcgau

SEQ ID NO: 2044 - RNA, 22 nt, Homo sapiens
gucccucuccaaaugugucuug

SEQ ID NO: 2045 - RNA, 22 nt, Homo sapiens
caagacacauuuggagagggac

SEQ ID NO: 2046 - RNA, 22 nt, Homo sapiens
acuuguaugcuagcucagguag

SEQ ID NO: 2047 - RNA, 22 nt, Homo sapiens
cuaccugagcuagcauacaagu

SEQ ID NO: 2048 - RNA, 22 nt, Homo sapiens
uuuaggauaagcuugacuuuug

SEQ ID NO: 2049 - RNA, 22 nt, Homo sapiens
caaaagucaagcuuauccuaaa

SEQ ID NO: 2050 - RNA, 21 nt, Homo sapiens
guguugaaacaaucucuacug

SEQ ID NO: 2051 - RNA, 21 nt, Homo sapiens
caguagagauuguuucaacac

SEQ ID NO: 2052 - RNA, 22 nt, Homo sapiens
uaugucugcugaccaucaccuu

SEQ ID NO: 2053 - RNA, 22 nt, Homo sapiens
aaggugauggucagcagacaua

SEQ ID NO: 2054 - RNA, 22 nt, Homo sapiens
ggggcuggggccggggccgagc

SEQ ID NO: 2055 - RNA, 22 nt, Homo sapiens
gcucggccccggccccagcccc

SEQ ID NO: 2056 - RNA, 22 nt, Homo sapiens
ugagguaguagguuguaugguu

SEQ ID NO: 2057 - RNA, 22 nt, Homo sapiens
aaccauacaaccuacuaccuca

SEQ ID NO: 2058 - RNA, 21 nt, Homo sapiens
gugucuuuugcucugcaguca

SEQ ID NO: 2059 - RNA, 21 nt, Homo sapiens
ugacugcagagcaaaagacac

SEQ ID NO: 2060 - RNA, 24 nt, Homo sapiens
ccccgggaacgucgagacuggagc

SEQ ID NO: 2061 - RNA, 24 nt, Homo sapiens
gcuccagucucgacguucccgggg

SEQ ID NO: 2062 - RNA, 22 nt, Homo sapiens
acccgucccguucguccccgga

SEQ ID NO: 2063 - RNA, 22 nt, Homo sapiens
uccggggacgaacgggacgggu

SEQ ID NO: 2064 - RNA, 22 nt, Homo sapiens
augggugaauuuguagaaggau

SEQ ID NO: 2065 - RNA, 22 nt, Homo sapiens
auccuucuacaaauucacccau

SEQ ID NO: 2066 - RNA, 22 nt, Homo sapiens
cuggacugagccgugcuacugg

SEQ ID NO: 2067 - RNA, 22 nt, Homo sapiens
ccaguagcacggcucaguccag

SEQ ID NO: 2068 - RNA, 22 nt, Homo sapiens
cuggacugagccaugcuacugg

SEQ ID NO: 2069 - RNA, 22 nt, Homo sapiens
ccaguagcauggcucaguccag

SEQ ID NO: 2070 - RNA, 22 nt, Homo sapiens
uacguagauauauauguauuuu

SEQ ID NO: 2071 - RNA, 22 nt, Homo sapiens
aaaauacauauauaucuacgua

SEQ ID NO: 2072 - RNA, 24 nt, Homo sapiens
aaauauauauauauauguacguau

SEQ ID NO: 2073 - RNA, 22 nt, Homo sapiens
gcucuuuucauuaauguagaca

SEQ ID NO: 2074 - RNA, 22 nt, Homo sapiens
ugcuggaucagugguucgaguc

SEQ ID NO: 2075 - RNA, 22 nt, Homo sapiens
gacucgaaccacugauccagca

SEQ ID NO: 2076 - RNA, 19 nt, Homo sapiens
uggauuuuuggaucaggga

SEQ ID NO: 2077 - RNA, 19 nt, Homo sapiens
ucccugauccaaaaaucca

SEQ ID NO: 2078 - RNA, 22 nt, Homo sapiens
uuauaaagcaaugagacugauu

SEQ ID NO: 2079 - RNA, 22 nt, Homo sapiens
aaucagucucauugcuuuauaa

SEQ ID NO: 2080 - RNA, 23 nt, Homo sapiens
uagugcaauauugcuuauagggu

SEQ ID NO: 2081 - RNA, 23 nt, Homo sapiens
acccuauaagcaauauugcacua

SEQ ID NO: 2082 - RNA, 22 nt, Homo sapiens
acccuaucaauauugucucugc

SEQ ID NO: 2083 - RNA, 22 nt, Homo sapiens
gcagagacaauauugauagggu

SEQ ID NO: 2084 - RNA, 17 nt, Homo sapiens
uaagugcuuccaugcuu

SEQ ID NO: 2085 - RNA, 17 nt, Homo sapiens
aagcauggaagcacuua

SEQ ID NO: 2086 - RNA, 22 nt, Homo sapiens
ucggccugaccacccaccccac

SEQ ID NO: 2087 - RNA, 22 nt, Homo sapiens
gugggguggguggucaggccga

SEQ ID NO: 2088 - RNA, 21 nt, Homo sapiens
ggggggggggggggggggccg

SEQ ID NO: 2089 - RNA, 21 nt, Homo sapiens
cggcccccccccccccccccc

SEQ ID NO: 2090 - RNA, 22 nt, Homo sapiens
cuauacgaccugcugccuuucu

SEQ ID NO: 2091 - RNA, 22 nt, Homo sapiens
agaaaggcagcaggucguauag

SEQ ID NO: 2092 - RNA, 22 nt, Homo sapiens
agagguaguagguugcauaguu

SEQ ID NO: 2093 - RNA, 22 nt, Homo sapiens
aacuaugcaaccuacuaccucu

SEQ ID NO: 2094 - RNA, 22 nt, Homo sapiens
ccgcacuguggguacuugcugc

SEQ ID NO: 2095 - RNA, 22 nt, Homo sapiens
gcagcaaguacccacagugcgg

SEQ ID NO: 2096 - RNA, 21 nt, Homo sapiens
uaaagugcugacagugcagau

SEQ ID NO: 2097 - RNA, 21 nt, Homo sapiens
aucugcacugucagcacuuua

SEQ ID NO: 2098 - RNA, 22 nt, Homo sapiens
aacuggaucaauuauaggagug

SEQ ID NO: 2099 - RNA, 22 nt, Homo sapiens
cacuccuauaauugauccaguu

SEQ ID NO: 2100 - RNA, 26 nt, Homo sapiens
aaguaguugguuuguaugagaugguu

SEQ ID NO: 2101 - RNA, 26 nt, Homo sapiens
aaccaucucauacaaaccaacuacuu

SEQ ID NO: 2102 - RNA, 21 nt, Homo sapiens
aagugaucuaaaggccuacau

SEQ ID NO: 2103 - RNA, 21 nt, Homo sapiens
auguaggccuuuagaucacuu

SEQ ID NO: 2104 - RNA, 22 nt, Homo sapiens
ucagaugaucuaaaggccuaua

SEQ ID NO: 2105 - RNA, 22 nt, Homo sapiens
uauaggccuuuagaucaucuga

SEQ ID NO: 2106 - RNA, 21 nt, Homo sapiens
uaggccuuuagaucacuuaaa

SEQ ID NO: 2107 - RNA, 21 nt, Homo sapiens
uuuaagugaucuaaaggccua

SEQ ID NO: 2108 - RNA, 21 nt, Homo sapiens
acucuagcugccaaaggcgcu

SEQ ID NO: 2109 - RNA, 21 nt, Homo sapiens
agcgccuuuggcagcuagagu

SEQ ID NO: 2110 - RNA, 22 nt, Homo sapiens
agaaggaaauugaauucauuua

SEQ ID NO: 2111 - RNA, 22 nt, Homo sapiens
uaaaugaauucaauuuccuucu

SEQ ID NO: 2112 - RNA, 21 nt, Homo sapiens
agagaagaagaucagccugca

SEQ ID NO: 2113 - RNA, 21 nt, Homo sapiens
ugcaggcugaucuucuucucu

SEQ ID NO: 2114 - RNA, 24 nt, Homo sapiens
agccuggaagcuggagccugcagu

SEQ ID NO: 2115 - RNA, 24 nt, Homo sapiens
acugcaggcuccagcuuccaggcu

SEQ ID NO: 2116 - RNA, 23 nt, Homo sapiens
aggaugagcaaagaaaguagauu

SEQ ID NO: 2117 - RNA, 23 nt, Homo sapiens
aaucuacuuucuuugcucauccu

SEQ ID NO: 2118 - RNA, 22 nt, Homo sapiens
aaccacuuucuuugcucaucca

SEQ ID NO: 2119 - RNA, 22 nt, Homo sapiens
uggaugagcaaagaaagugguu

SEQ ID NO: 2120 - RNA, 22 nt, Homo sapiens
cggaugagcaaagaaagugguu

SEQ ID NO: 2121 - RNA, 22 nt, Homo sapiens
aaccacuuucuuugcucauccg

SEQ ID NO: 2122 - RNA, 22 nt, Homo sapiens
aggcauugacuucucacuagcu

SEQ ID NO: 2123 - RNA, 22 nt, Homo sapiens
agcuagugagaagucaaugccu

SEQ ID NO: 2124 - RNA, 21 nt, Homo sapiens
agugaaugauggguucugacc

SEQ ID NO: 2125 - RNA, 21 nt, Homo sapiens
ggucagaacccaucauucacu

SEQ ID NO: 2126 - RNA, 21 nt, Homo sapiens
aguuaggauuaggucguggaa

SEQ ID NO: 2127 - RNA, 21 nt, Homo sapiens
uuccacgaccuaauccuaacu

SEQ ID NO: 2128 - RNA, 19 nt, Homo sapiens
auggauaaggcuuuggcuu

SEQ ID NO: 2129 - RNA, 19 nt, Homo sapiens
aagccaaagccuuauccau

SEQ ID NO: 2130 - RNA, 22 nt, Homo sapiens
augguacccuggcauacugagu

SEQ ID NO: 2131 - RNA, 22 nt, Homo sapiens
acucaguaugccaggguaccau

SEQ ID NO: 2132 - RNA, 23 nt, Homo sapiens
caagucuuauuugagcaccuguu

SEQ ID NO: 2133 - RNA, 23 nt, Homo sapiens
aacaggugcucaaauaagacuug

SEQ ID NO: 2134 - RNA, 22 nt, Homo sapiens
caggauguggucaaguguuguu

SEQ ID NO: 2135 - RNA, 22 nt, Homo sapiens
aacaacacuugaccacauccug

SEQ ID NO: 2136 - RNA, 23 nt, Homo sapiens
ccucagggcuguagaacagggcu

SEQ ID NO: 2137 - RNA, 23 nt, Homo sapiens
agcccuguucuacagcccugagg

SEQ ID NO: 2138 - RNA, 21 nt, Homo sapiens
ccuguugaaguguaaucccca

SEQ ID NO: 2139 - RNA, 21 nt, Homo sapiens
uggggauuacacuucaacagg

SEQ ID NO: 2140 - RNA, 18 nt, Homo sapiens
cgggcguggugguggggg

SEQ ID NO: 2141 - RNA, 18 nt, Homo sapiens
cccccaccaccacgcccg

SEQ ID NO: 2142 - RNA, 20 nt, Homo sapiens
cgggcgugguggugggggug

SEQ ID NO: 2143 - RNA, 20 nt, Homo sapiens
cacccccaccaccacgcccg

SEQ ID NO: 2144 - RNA, 23 nt, Homo sapiens
cuggagauauggaagagcugugu

SEQ ID NO: 2145 - RNA, 23 nt, Homo sapiens
acacagcucuuccauaucuccag

SEQ ID NO: 2146 - RNA, 26 nt, Homo sapiens
gaugaugauggcagcaaauucugaaa

SEQ ID NO: 2147 - RNA, 26 nt, Homo sapiens
uuucagaauuugcugccaucaucauc

SEQ ID NO: 2148 - RNA, 25 nt, Homo sapiens
gggcgacaaagcaagacucuuucuu

SEQ ID NO: 2149 - RNA, 25 nt, Homo sapiens
aagaaagagucuugcuuugucgccc

SEQ ID NO: 2150 - RNA, 25 nt, Homo sapiens
gaacccaugagguugaggcugcagu

SEQ ID NO: 2151 - RNA, 25 nt, Homo sapiens
acugcagccucaaccucauggguuc

SEQ ID NO: 2152 - RNA, 17 nt, Homo sapiens
gugggggagaggcuguc

SEQ ID NO: 2153 - RNA, 17 nt, Homo sapiens
gacagccucucccccac

SEQ ID NO: 2154 - RNA, 20 nt, Homo sapiens
uaaagagcccuguggagaca

SEQ ID NO: 2155 - RNA, 20 nt, Homo sapiens
ugucuccacagggcucuuua

SEQ ID NO: 2156 - RNA, 22 nt, Homo sapiens
uaguacugugcauaucaucuau

SEQ ID NO: 2157 - RNA, 22 nt, Homo sapiens
auagaugauaugcacaguacua

SEQ ID NO: 2158 - RNA, 20 nt, Homo sapiens
ucguuugccuuuuucugcuu

SEQ ID NO: 2159 - RNA, 20 nt, Homo sapiens
aagcagaaaaaggcaaacga

SEQ ID NO: 2160 - RNA, 21 nt, Homo sapiens
uggacugcccugaucuggaga

SEQ ID NO: 2161 - RNA, 21 nt, Homo sapiens
ucuccagaucagggcagucca

SEQ ID NO: 2162 - RNA, 22 nt, Homo sapiens
uggguggucuggagauuugugc

SEQ ID NO: 2163 - RNA, 22 nt, Homo sapiens
gcacaaaucuccagaccaccca

SEQ ID NO: 2164 - RNA, 22 nt, Homo sapiens
ugugagguuggcauuguugucu

SEQ ID NO: 2165 - RNA, 22 nt, Homo sapiens
agacaacaaugccaaccucaca

SEQ ID NO: 2166 - RNA, 17 nt, Homo sapiens
uucaaguaauucaggug

SEQ ID NO: 2167 - RNA, 17 nt, Homo sapiens
caccugaauuacuugaa

SEQ ID NO: 2168 - RNA, 22 nt, Homo sapiens
uucuggaauucugugugaggga

SEQ ID NO: 2169 - RNA, 22 nt, Homo sapiens
ucccucacacagaauuccagaa

SEQ ID NO: 2170 - RNA, 22 nt, Homo sapiens
uuuucaacucuaaugggagaga

SEQ ID NO: 2171 - RNA, 22 nt, Homo sapiens
ucucucccauuagaguugaaaa

SEQ ID NO: 2172 - RNA, 18 nt, Homo sapiens
acguuggcucugguggug

SEQ ID NO: 2173 - RNA, 18 nt, Homo sapiens
caccaccagagccaacgu

SEQ ID NO: 2174 - RNA, 22 nt, Homo sapiens
ccaccuccccugcaaacgucca

SEQ ID NO: 2175 - RNA, 22 nt, Homo sapiens
uggacguuugcaggggaggugg

SEQ ID NO: 2176 - RNA, 22 nt, Homo sapiens
acucggcguggcgucggucgug

SEQ ID NO: 2177 - RNA, 22 nt, Homo sapiens
cacgaccgacgccacgccgagu

SEQ ID NO: 2178 - RNA, 21 nt, Homo sapiens
ucgaccggaccucgaccggcu

SEQ ID NO: 2179 - RNA, 21 nt, Homo sapiens
agccggucgagguccggucga

SEQ ID NO: 2180 - RNA, 22 nt, Homo sapiens
ugagaacugaauuccauaggcu

SEQ ID NO: 2181 - RNA, 22 nt, Homo sapiens
agccuauggaauucaguucuca

SEQ ID NO: 2182 - RNA, 22 nt, Homo sapiens
aaucauacacgguugaccuauu

SEQ ID NO: 2183 - RNA, 22 nt, Homo sapiens
aauaggucaaccguguaugauu

SEQ ID NO: 2184 - RNA, 22 nt, Homo sapiens
uagguuauccguguugccuucg

SEQ ID NO: 2185 - RNA, 22 nt, Homo sapiens
cgaaggcaacacggauaaccua

SEQ ID NO: 2186 - RNA, 21 nt, Homo sapiens
ccaguccugugccugccgccu

SEQ ID NO: 2187 - RNA, 21 nt, Homo sapiens
aggcggcaggcacaggacugg

SEQ ID NO: 2188 - RNA, 22 nt, Homo sapiens
ucugcccccuccgcugcugcca

SEQ ID NO: 2189 - RNA, 22 nt, Homo sapiens
uggcagcagcggagggggcaga

SEQ ID NO: 2190 - RNA, 22 nt, Homo sapiens
ggaggggucccgcacugggagg

SEQ ID NO: 2191 - RNA, 22 nt, Homo sapiens
ccucccagugcgggaccccucc

SEQ ID NO: 2192 - RNA, 22 nt, Homo sapiens
cccugugcccggcccacuucug

SEQ ID NO: 2193 - RNA, 22 nt, Homo sapiens
cagaagugggccgggcacaggg

SEQ ID NO: 2194 - RNA, 20 nt, Homo sapiens
ccccagggcgacgcggcggg

SEQ ID NO: 2195 - RNA, 20 nt, Homo sapiens
cccgccgcgucgcccugggg

SEQ ID NO: 2196 - RNA, 22 nt, Homo sapiens
accuugccuugcugcccgggcc

SEQ ID NO: 2197 - RNA, 22 nt, Homo sapiens
ggcccgggcagcaaggcaaggu

SEQ ID NO: 2198 - RNA, 21 nt, Homo sapiens
auuugugcuuggcucugucac

SEQ ID NO: 2199 - RNA, 21 nt, Homo sapiens
gugacagagccaagcacaaau

SEQ ID NO: 2200 - RNA, 22 nt, Homo sapiens
auuguccuugcuguuuggagau

SEQ ID NO: 2201 - RNA, 22 nt, Homo sapiens
aucuccaaacagcaaggacaau

SEQ ID NO: 2202 - RNA, 21 nt, Homo sapiens
auccccagauacaauggacaa

SEQ ID NO: 2203 - RNA, 21 nt, Homo sapiens
uuguccauuguaucuggggau

SEQ ID NO: 2204 - RNA, 23 nt, Homo sapiens
cagugcaauaguauugucaaagc

SEQ ID NO: 2205 - RNA, 23 nt, Homo sapiens
gcuuugacaauacuauugcacug

SEQ ID NO: 2206 - RNA, 22 nt, Homo sapiens
gcucugacuuuauugcacuacu

SEQ ID NO: 2207 - RNA, 22 nt, Homo sapiens
aguagugcaauaaagucagagc

SEQ ID NO: 2208 - RNA, 23 nt, Homo sapiens
uaagugcuuccauguuuuaguag

SEQ ID NO: 2209 - RNA, 23 nt, Homo sapiens
cuacuaaaacauggaagcacuua

SEQ ID NO: 2210 - RNA, 22 nt, Homo sapiens
acuuuaacauggaagugcuuuc

SEQ ID NO: 2211 - RNA, 22 nt, Homo sapiens
gaaagcacuuccauguuaaagu

SEQ ID NO: 2212 - RNA, 23 nt, Homo sapiens
uaagugcuuccauguuucagugg

SEQ ID NO: 2213 - RNA, 23 nt, Homo sapiens
ccacugaaacauggaagcacuua

SEQ ID NO: 2214 - RNA, 22 nt, Homo sapiens
uuuaacauggggguaccugcug

SEQ ID NO: 2215 - RNA, 22 nt, Homo sapiens
cagcagguacccccauguuaaa

SEQ ID NO: 2216 - RNA, 23 nt, Homo sapiens
uaagugcuuccauguuugagugu

SEQ ID NO: 2217 - RNA, 23 nt, Homo sapiens
acacucaaacauggaagcacuua

SEQ ID NO: 2218 - RNA, 22 nt, Homo sapiens
acuuuaacauggaggcacuugc

SEQ ID NO: 2219 - RNA, 22 nt, Homo sapiens
gcaagugccuccauguuaaagu

SEQ ID NO: 2220 - RNA, 22 nt, Homo sapiens
aauugcacuuuagcaaugguga

SEQ ID NO: 2221 - RNA, 22 nt, Homo sapiens
ucaccauugcuaaagugcaauu

SEQ ID NO: 2222 - RNA, 22 nt, Homo sapiens
acuguugcuaauaugcaacucu

SEQ ID NO: 2223 - RNA, 22 nt, Homo sapiens
agaguugcauauuagcaacagu

SEQ ID NO: 2224 - RNA, 23 nt, Homo sapiens
agcucggucugaggccccucagu

SEQ ID NO: 2225 - RNA, 23 nt, Homo sapiens
acugaggggccucagaccgagcu

SEQ ID NO: 2226 - RNA, 22 nt, Homo sapiens
aaaaacugagacuacuuuugca

SEQ ID NO: 2227 - RNA, 22 nt, Homo sapiens
ugcaaaaguagucucaguuuuu

SEQ ID NO: 2228 - RNA, 19 nt, Homo sapiens
aaaaacuguaauuacuuuu

SEQ ID NO: 2229 - RNA, 19 nt, Homo sapiens
aaaaguaauuacaguuuuu

SEQ ID NO: 2230 - RNA, 22 nt, Homo sapiens
aaaacuguaauuacuuuuguac

SEQ ID NO: 2231 - RNA, 22 nt, Homo sapiens
guacaaaaguaauuacaguuuu

SEQ ID NO: 2232 - RNA, 23 nt, Homo sapiens
ugcaaaaguaauugcaguuuuug

SEQ ID NO: 2233 - RNA, 23 nt, Homo sapiens
caaaaacugcaauuacuuuugca

SEQ ID NO: 2234 - RNA, 23 nt, Homo sapiens
caaaaaccgcaauuacuuuugca

SEQ ID NO: 2235 - RNA, 23 nt, Homo sapiens
ugcaaaaguaauugcgguuuuug

SEQ ID NO: 2236 - RNA, 22 nt, Homo sapiens
aaaaguaaucgcgguuuuuguc

SEQ ID NO: 2237 - RNA, 22 nt, Homo sapiens
gacaaaaaccgcgauuacuuuu

SEQ ID NO: 2238 - RNA, 22 nt, Homo sapiens
aaaaguacuugcggauuuugcu

SEQ ID NO: 2239 - RNA, 22 nt, Homo sapiens
agcaaaauccgcaaguacuuuu

SEQ ID NO: 2240 - RNA, 22 nt, Homo sapiens
aaaaguauuugcggguuuuguc

SEQ ID NO: 2241 - RNA, 22 nt, Homo sapiens
gacaaaacccgcaaauacuuuu

SEQ ID NO: 2242 - RNA, 21 nt, Homo sapiens
caaagguauuugugguuuuug

SEQ ID NO: 2243 - RNA, 21 nt, Homo sapiens
caaaaaccacaaauaccuuug

SEQ ID NO: 2244 - RNA, 22 nt, Homo sapiens
ccaaaacugcaguuacuuuugc

SEQ ID NO: 2245 - RNA, 22 nt, Homo sapiens
gcaaaaguaacugcaguuuugg

SEQ ID NO: 2246 - RNA, 22 nt, Homo sapiens
aaaaguaauugcgguuuuugcc

SEQ ID NO: 2247 - RNA, 22 nt, Homo sapiens
ggcaaaaaccgcaauuacuuuu

SEQ ID NO: 2248 - RNA, 22 nt, Homo sapiens
uagcaaaaacugcaguuacuuu

SEQ ID NO: 2249 - RNA, 22 nt, Homo sapiens
aaaguaacugcaguuuuugcua

SEQ ID NO: 2250 - RNA, 20 nt, Homo sapiens
ggagguugggaagggcagag

SEQ ID NO: 2251 - RNA, 20 nt, Homo sapiens
cucugcccuucccaaccucc

SEQ ID NO: 2252 - RNA, 18 nt, Homo sapiens
ugaggcgggggggcgagc

SEQ ID NO: 2253 - RNA, 18 nt, Homo sapiens
gcucgcccccccgccuca

SEQ ID NO: 2254 - RNA, 20 nt, Homo sapiens
agagaugaagcgggggggcg

SEQ ID NO: 2255 - RNA, 20 nt, Homo sapiens
cgcccccccgcuucaucucu

SEQ ID NO: 2256 - RNA, 24 nt, Homo sapiens
ggaggccgggguggggcggggcgg

SEQ ID NO: 2257 - RNA, 24 nt, Homo sapiens
ccgccccgccccaccccggccucc

SEQ ID NO: 2258 - RNA, 19 nt, Homo sapiens
ggggagcgaggggcggggc

SEQ ID NO: 2259 - RNA, 19 nt, Homo sapiens
gccccgccccucgcucccc

SEQ ID NO: 2260 - RNA, 23 nt, Homo sapiens
uauucauuuauccccagccuaca

SEQ ID NO: 2261 - RNA, 23 nt, Homo sapiens
uguaggcuggggauaaaugaaua

SEQ ID NO: 2262 - RNA, 24 nt, Homo sapiens
acuggcuagggaaaaugauuggau

SEQ ID NO: 2263 - RNA, 24 nt, Homo sapiens
auccaaucauuuucccuagccagu

SEQ ID NO: 2264 - RNA, 22 nt, Homo sapiens
uucauuugccucccagccuaca

SEQ ID NO: 2265 - RNA, 22 nt, Homo sapiens
uguaggcugggaggcaaaugaa

SEQ ID NO: 2266 - RNA, 24 nt, Homo sapiens
ugggcuaagggagaugauugggua

SEQ ID NO: 2267 - RNA, 24 nt, Homo sapiens
uacccaaucaucucccuuagccca

SEQ ID NO: 2268 - RNA, 22 nt, Homo sapiens
acuccagccccacagccucagc

SEQ ID NO: 2269 - RNA, 22 nt, Homo sapiens
gcugaggcuguggggcuggagu

SEQ ID NO: 2270 - RNA, 22 nt, Homo sapiens
aggaggaauuggugcuggucuu

SEQ ID NO: 2271 - RNA, 22 nt, Homo sapiens
aagaccagcaccaauuccuccu

SEQ ID NO: 2272 - RNA, 22 nt, Homo sapiens
aggcagcgggguguaguggaua

SEQ ID NO: 2273 - RNA, 22 nt, Homo sapiens
uauccacuacaccccgcugccu

SEQ ID NO: 2274 - RNA, 22 nt, Homo sapiens
uccauuacacuacccugccucu

SEQ ID NO: 2275 - RNA, 22 nt, Homo sapiens
agaggcaggguaguguaaugga

SEQ ID NO: 2276 - RNA, 22 nt, Homo sapiens
acugcugagcuagcacuucccg

SEQ ID NO: 2277 - RNA, 22 nt, Homo sapiens
cgggaagugcuagcucagcagu

SEQ ID NO: 2278 - RNA, 23 nt, Homo sapiens
caaagugcuguucgugcagguag

SEQ ID NO: 2279 - RNA, 23 nt, Homo sapiens
cuaccugcacgaacagcacuuug

SEQ ID NO: 2280 - RNA, 23 nt, Homo sapiens
cacccggcugugugcacaugugc

SEQ ID NO: 2281 - RNA, 23 nt, Homo sapiens
gcacaugugcacacagccgggug

SEQ ID NO: 2282 - RNA, 23 nt, Homo sapiens
agcuucuuuacagugcugccuug

SEQ ID NO: 2283 - RNA, 23 nt, Homo sapiens
caaggcagcacuguaaagaagcu

SEQ ID NO: 2284 - RNA, 23 nt, Homo sapiens
agcagcauuguacagggcuauga

SEQ ID NO: 2285 - RNA, 23 nt, Homo sapiens
ucauagcccuguacaaugcugcu

SEQ ID NO: 2286 - RNA, 17 nt, Homo sapiens
ccugagaaaagggccaa

SEQ ID NO: 2287 - RNA, 17 nt, Homo sapiens
uuggcccuuuucucagg

SEQ ID NO: 2288 - RNA, 19 nt, Homo sapiens
ggccacugagucagcacca

SEQ ID NO: 2289 - RNA, 19 nt, Homo sapiens
uggugcugacucaguggcc

SEQ ID NO: 2290 - RNA, 18 nt, Homo sapiens
agggcauguccagggggu

SEQ ID NO: 2291 - RNA, 18 nt, Homo sapiens
acccccuggacaugcccu

SEQ ID NO: 2292 - RNA, 23 nt, Homo sapiens
gccuggagcuacuccaccaucuc

SEQ ID NO: 2293 - RNA, 23 nt, Homo sapiens
gagaugguggaguagcuccaggc

SEQ ID NO: 2294 - RNA, 17 nt, Homo sapiens
caguguucagagaugga

SEQ ID NO: 2295 - RNA, 17 nt, Homo sapiens
uccaucucugaacacug

SEQ ID NO: 2296 - RNA, 18 nt, Homo sapiens
aucugaccugaugaaggu

SEQ ID NO: 2297 - RNA, 18 nt, Homo sapiens
accuucaucaggucagau

SEQ ID NO: 2298 - RNA, 18 nt, Homo sapiens
ccagagguggggacugag

SEQ ID NO: 2299 - RNA, 18 nt, Homo sapiens
cucaguccccaccucugg

SEQ ID NO: 2300 - RNA, 17 nt, Homo sapiens
ccccgccaccgccuugg

SEQ ID NO: 2301 - RNA, 17 nt, Homo sapiens
ccaaggcgguggcgggg

SEQ ID NO: 2302 - RNA, 22 nt, Homo sapiens
caguugggucuaggggucagga

SEQ ID NO: 2303 - RNA, 22 nt, Homo sapiens
uccugaccccuagacccaacug

SEQ ID NO: 2304 - RNA, 19 nt, Homo sapiens
cuuggggcauggaguccca

SEQ ID NO: 2305 - RNA, 19 nt, Homo sapiens
ugggacuccaugccccaag

SEQ ID NO: 2306 - RNA, 16 nt, Homo sapiens
aggaaacagggaccca

SEQ ID NO: 2307 - RNA, 16 nt, Homo sapiens
ugggucccuguuuccu

SEQ ID NO: 2308 - RNA, 17 nt, Homo sapiens
gacauucagacuaccug

SEQ ID NO: 2309 - RNA, 17 nt, Homo sapiens
cagguagucugaauguc

SEQ ID NO: 2310 - RNA, 18 nt, Homo sapiens
auucuaagugccuuggcc

SEQ ID NO: 2311 - RNA, 18 nt, Homo sapiens
ggccaaggcacuuagaau

SEQ ID NO: 2312 - RNA, 17 nt, Homo sapiens
acucagucauggucauu

SEQ ID NO: 2313 - RNA, 17 nt, Homo sapiens
aaugaccaugacugagu

SEQ ID NO: 2314 - RNA, 19 nt, Homo sapiens
cugugggcucagcucuggg

SEQ ID NO: 2315 - RNA, 19 nt, Homo sapiens
cccagagcugagcccacag

SEQ ID NO: 2316 - RNA, 16 nt, Homo sapiens
cuaggaggccuuggcc

SEQ ID NO: 2317 - RNA, 16 nt, Homo sapiens
ggccaaggccuccuag

SEQ ID NO: 2318 - RNA, 16 nt, Homo sapiens
uccagcucgguggcac

SEQ ID NO: 2319 - RNA, 16 nt, Homo sapiens
gugccaccgagcugga

SEQ ID NO: 2320 - RNA, 21 nt, Homo sapiens
ggcuccuccucucaggaugug

SEQ ID NO: 2321 - RNA, 21 nt, Homo sapiens
cacauccugagaggaggagcc

SEQ ID NO: 2322 - RNA, 21 nt, Homo sapiens
gcaggcacagacagcccuggc

SEQ ID NO: 2323 - RNA, 21 nt, Homo sapiens
gccagggcugucugugccugc

SEQ ID NO: 2324 - RNA, 20 nt, Homo sapiens
ucagggagucaggggagggc

SEQ ID NO: 2325 - RNA, 20 nt, Homo sapiens
gcccuccccugacucccuga

SEQ ID NO: 2326 - RNA, 19 nt, Homo sapiens
gggggaagaaaaggugggg

SEQ ID NO: 2327 - RNA, 19 nt, Homo sapiens
ccccaccuuuucuuccccc

SEQ ID NO: 2328 - RNA, 18 nt, Homo sapiens
cauucaacuagugauugu

SEQ ID NO: 2329 - RNA, 18 nt, Homo sapiens
acaaucacuaguugaaug

SEQ ID NO: 2330 - RNA, 18 nt, Homo sapiens
cagcagucccucccccug

SEQ ID NO: 2331 - RNA, 18 nt, Homo sapiens
cagggggagggacugcug

SEQ ID NO: 2332 - RNA, 17 nt, Homo sapiens
ccaauuaccacuucuuu

SEQ ID NO: 2333 - RNA, 17 nt, Homo sapiens
aaagaagugguaauugg

SEQ ID NO: 2334 - RNA, 17 nt, Homo sapiens
cucagugacucaugugc

SEQ ID NO: 2335 - RNA, 17 nt, Homo sapiens
gcacaugagucacugag

SEQ ID NO: 2336 - RNA, 21 nt, Homo sapiens
gcaguucugagcacaguacac

SEQ ID NO: 2337 - RNA, 21 nt, Homo sapiens
guguacugugcucagaacugc

SEQ ID NO: 2338 - RNA, 18 nt, Homo sapiens
cuaggggguuugcccuug

SEQ ID NO: 2339 - RNA, 18 nt, Homo sapiens
caagggcaaacccccuag

SEQ ID NO: 2340 - RNA, 16 nt, Homo sapiens
cucuccucccggcuuc

SEQ ID NO: 2341 - RNA, 16 nt, Homo sapiens
gaagccgggaggagag

SEQ ID NO: 2342 - RNA, 21 nt, Homo sapiens
gaguguaguucugagcagagc

SEQ ID NO: 2343 - RNA, 21 nt, Homo sapiens
gcucugcucagaacuacacuc

SEQ ID NO: 2344 - RNA, 18 nt, Homo sapiens
gggucccggggagggggg

SEQ ID NO: 2345 - RNA, 18 nt, Homo sapiens
ccccccuccccgggaccc

SEQ ID NO: 2346 - RNA, 18 nt, Homo sapiens
uaaaauuugcauccagga

SEQ ID NO: 2347 - RNA, 18 nt, Homo sapiens
uccuggaugcaaauuuua

SEQ ID NO: 2348 - RNA, 17 nt, Homo sapiens
uggggcucagcgaguuu

SEQ ID NO: 2349 - RNA, 17 nt, Homo sapiens
aaacucgcugagcccca

SEQ ID NO: 2350 - RNA, 18 nt, Homo sapiens
gggcucacaucaccccau

SEQ ID NO: 2351 - RNA, 18 nt, Homo sapiens
auggggugaugugagccc

SEQ ID NO: 2352 - RNA, 18 nt, Homo sapiens
gcggcgaguccgacucau

SEQ ID NO: 2353 - RNA, 18 nt, Homo sapiens
augagucggacucgccgc

SEQ ID NO: 2354 - RNA, 17 nt, Homo sapiens
accccacuccugguacc

SEQ ID NO: 2355 - RNA, 17 nt, Homo sapiens
gguaccaggaguggggu

SEQ ID NO: 2356 - RNA, 19 nt, Homo sapiens
ucucccuugagggcacuuu

SEQ ID NO: 2357 - RNA, 19 nt, Homo sapiens
aaagugcccucaagggaga

SEQ ID NO: 2358 - RNA, 17 nt, Homo sapiens
uugucugcugaguuucc

SEQ ID NO: 2359 - RNA, 17 nt, Homo sapiens
ggaaacucagcagacaa

SEQ ID NO: 2360 - RNA, 19 nt, Homo sapiens
gcauugugcagggcuauca

SEQ ID NO: 2361 - RNA, 19 nt, Homo sapiens
ugauagcccugcacaaugc

SEQ ID NO: 2362 - RNA, 19 nt, Homo sapiens
ugcccuccuuucuucccuc

SEQ ID NO: 2363 - RNA, 19 nt, Homo sapiens
gagggaagaaaggagggca

SEQ ID NO: 2364 - RNA, 16 nt, Homo sapiens
uucagcaggaacagcu

SEQ ID NO: 2365 - RNA, 16 nt, Homo sapiens
agcuguuccugcugaa

SEQ ID NO: 2366 - RNA, 18 nt, Homo sapiens
ccccugggccggccuugg

SEQ ID NO: 2367 - RNA, 18 nt, Homo sapiens
ccaaggccggcccagggg

SEQ ID NO: 2368 - RNA, 17 nt, Homo sapiens
cagccugacaggaacag

SEQ ID NO: 2369 - RNA, 17 nt, Homo sapiens
cuguuccugucaggcug

SEQ ID NO: 2370 - RNA, 17 nt, Homo sapiens
gggagucuacagcaggg

SEQ ID NO: 2371 - RNA, 17 nt, Homo sapiens
cccugcuguagacuccc

SEQ ID NO: 2372 - RNA, 18 nt, Homo sapiens
cagugcaauguuuuccuu

SEQ ID NO: 2373 - RNA, 18 nt, Homo sapiens
aaggaaaacauugcacug

SEQ ID NO: 2374 - RNA, 17 nt, Homo sapiens
augugggcucaggcuca

SEQ ID NO: 2375 - RNA, 17 nt, Homo sapiens
ugagccugagcccacau

SEQ ID NO: 2376 - RNA, 16 nt, Homo sapiens
ugccuuccugucugug

SEQ ID NO: 2377 - RNA, 16 nt, Homo sapiens
cacagacaggaaggca

SEQ ID NO: 2378 - RNA, 22 nt, Homo sapiens
cugggacaggaggaggaggcag

SEQ ID NO: 2379 - RNA, 22 nt, Homo sapiens
cugccuccuccuccugucccag

SEQ ID NO: 2380 - RNA, 18 nt, Homo sapiens
gcuggugacaugagaggc

SEQ ID NO: 2381 - RNA, 18 nt, Homo sapiens
gccucucaugucaccagc

SEQ ID NO: 2382 - RNA, 18 nt, Homo sapiens
ugggagcuggacuacuuc

SEQ ID NO: 2383 - RNA, 18 nt, Homo sapiens
gaaguaguccagcuccca

SEQ ID NO: 2384 - RNA, 20 nt, Homo sapiens
ucccacuacuucacuuguga

SEQ ID NO: 2385 - RNA, 20 nt, Homo sapiens
ucacaagugaaguaguggga

SEQ ID NO: 2386 - RNA, 18 nt, Homo sapiens
ccaguguggcucagcgag

SEQ ID NO: 2387 - RNA, 18 nt, Homo sapiens
cucgcugagccacacugg

SEQ ID NO: 2388 - RNA, 17 nt, Homo sapiens
uucugagcugaggacag

SEQ ID NO: 2389 - RNA, 17 nt, Homo sapiens
cuguccucagcucagaa

SEQ ID NO: 2390 - RNA, 17 nt, Homo sapiens
ccggcauguccagggca

SEQ ID NO: 2391 - RNA, 17 nt, Homo sapiens
ugcccuggacaugccgg

SEQ ID NO: 2392 - RNA, 18 nt, Homo sapiens
ccuagacaccuccaguuc

SEQ ID NO: 2393 - RNA, 18 nt, Homo sapiens
gaacuggaggugucuagg

SEQ ID NO: 2394 - RNA, 17 nt, Homo sapiens
uggagagaaaggcagua

SEQ ID NO: 2395 - RNA, 17 nt, Homo sapiens
uacugccuuucucucca

SEQ ID NO: 2396 - RNA, 19 nt, Homo sapiens
aauguuuuuuccuguuucc

SEQ ID NO: 2397 - RNA, 19 nt, Homo sapiens
ggaaacaggaaaaaacauu

SEQ ID NO: 2398 - RNA, 18 nt, Homo sapiens
ucccuggaguuucuucuu

SEQ ID NO: 2399 - RNA, 18 nt, Homo sapiens
aagaagaaacuccaggga

SEQ ID NO: 2400 - RNA, 18 nt, Homo sapiens
cuggagucuaggauucca

SEQ ID NO: 2401 - RNA, 18 nt, Homo sapiens
uggaauccuagacuccag

SEQ ID NO: 2402 - RNA, 16 nt, Homo sapiens
gcagcauucauguccc

SEQ ID NO: 2403 - RNA, 16 nt, Homo sapiens
gggacaugaaugcugc

SEQ ID NO: 2404 - RNA, 18 nt, Homo sapiens
gaaagagagcugagugug

SEQ ID NO: 2405 - RNA, 18 nt, Homo sapiens
cacacucagcucucuuuc

SEQ ID NO: 2406 - RNA, 19 nt, Homo sapiens
ggccuuguuccugucccca

SEQ ID NO: 2407 - RNA, 19 nt, Homo sapiens
uggggacaggaacaaggcc

SEQ ID NO: 2408 - RNA, 20 nt, Homo sapiens
agcccccuggccccaaaccc

SEQ ID NO: 2409 - RNA, 20 nt, Homo sapiens
ggguuuggggccagggggcu

SEQ ID NO: 2410 - RNA, 18 nt, Homo sapiens
cucugggaaaugggacag

SEQ ID NO: 2411 - RNA, 18 nt, Homo sapiens
cugucccauuucccagag

SEQ ID NO: 2412 - RNA, 18 nt, Homo sapiens
ccgcuuucugagcuggac

SEQ ID NO: 2413 - RNA, 18 nt, Homo sapiens
guccagcucagaaagcgg

SEQ ID NO: 2414 - RNA, 17 nt, Homo sapiens
ggugaggcuagcuggug

SEQ ID NO: 2415 - RNA, 17 nt, Homo sapiens
caccagcuagccucacc

SEQ ID NO: 2416 - RNA, 17 nt, Homo sapiens
acauugccagggaguuu

SEQ ID NO: 2417 - RNA, 17 nt, Homo sapiens
aaacucccuggcaaugu

SEQ ID NO: 2418 - RNA, 17 nt, Homo sapiens
cacuguggguacaugcu

SEQ ID NO: 2419 - RNA, 17 nt, Homo sapiens
agcauguacccacagug

SEQ ID NO: 2420 - RNA, 17 nt, Homo sapiens
ucccugagcaaagccac

SEQ ID NO: 2421 - RNA, 17 nt, Homo sapiens
guggcuuugcucaggga

SEQ ID NO: 2422 - RNA, 18 nt, Homo sapiens
gggauucuguagcuuccu

SEQ ID NO: 2423 - RNA, 18 nt, Homo sapiens
aggaagcuacagaauccc

SEQ ID NO: 2424 - RNA, 21 nt, Homo sapiens
uuagcgguggaccgcccugcg

SEQ ID NO: 2425 - RNA, 21 nt, Homo sapiens
cgcagggcgguccaccgcuaa

SEQ ID NO: 2426 - RNA, 21 nt, Homo sapiens
cugugggcucagcgcgugggg

SEQ ID NO: 2427 - RNA, 21 nt, Homo sapiens
ccccacgcgcugagcccacag

SEQ ID NO: 2428 - RNA, 18 nt, Homo sapiens
cagccccacagccucaga

SEQ ID NO: 2429 - RNA, 18 nt, Homo sapiens
ucugaggcuguggggcug

SEQ ID NO: 2430 - RNA, 20 nt, Homo sapiens
cccugagacccuaaccuuaa

SEQ ID NO: 2431 - RNA, 20 nt, Homo sapiens
uuaagguuagggucucaggg

SEQ ID NO: 2432 - RNA, 18 nt, Homo sapiens
uugcacuugucucaguga

SEQ ID NO: 2433 - RNA, 18 nt, Homo sapiens
ucacugagacaagugcaa

SEQ ID NO: 2434 - RNA, 20 nt, Homo sapiens
uguuccucugucucccagac

SEQ ID NO: 2435 - RNA, 20 nt, Homo sapiens
gucugggagacagaggaaca

SEQ ID NO: 2436 - RNA, 19 nt, Homo sapiens
ggcuugcaugggggacugg

SEQ ID NO: 2437 - RNA, 19 nt, Homo sapiens
ccagucccccaugcaagcc

SEQ ID NO: 2438 - RNA, 17 nt, Homo sapiens
ccaguuuucccaggauu

SEQ ID NO: 2439 - RNA, 17 nt, Homo sapiens
aauccugggaaaacugg

SEQ ID NO: 2440 - RNA, 19 nt, Homo sapiens
ccugagacccuaguuccac

SEQ ID NO: 2441 - RNA, 19 nt, Homo sapiens
guggaacuagggucucagg

SEQ ID NO: 2442 - RNA, 19 nt, Homo sapiens
ccucagaucagagccuugc

SEQ ID NO: 2443 - RNA, 19 nt, Homo sapiens
gcaaggcucugaucugagg

SEQ ID NO: 2444 - RNA, 22 nt, Homo sapiens
cauugcacuugucucggucuga

SEQ ID NO: 2445 - RNA, 22 nt, Homo sapiens
ucagaccgagacaagugcaaug

SEQ ID NO: 2446 - RNA, 21 nt, Homo sapiens
aggcggagacuugggcaauug

SEQ ID NO: 2447 - RNA, 21 nt, Homo sapiens
caauugcccaagucuccgccu

SEQ ID NO: 2448 - RNA, 22 nt, Homo sapiens
ccuauucuugguuacuugcacg

SEQ ID NO: 2449 - RNA, 22 nt, Homo sapiens
cgugcaaguaaccaagaauagg

SEQ ID NO: 2450 - RNA, 19 nt, Homo sapiens
aauggauuuuuggagcagg

SEQ ID NO: 2451 - RNA, 19 nt, Homo sapiens
ccugcuccaaaaauccauu

SEQ ID NO: 2452 - RNA, 22 nt, Homo sapiens
ugcggggcuagggcuaacagca

SEQ ID NO: 2453 - RNA, 22 nt, Homo sapiens
ugcuguuagcccuagccccgca

SEQ ID NO: 2454 - RNA, 22 nt, Homo sapiens
aaaaguaauugcggauuuugcc

SEQ ID NO: 2455 - RNA, 22 nt, Homo sapiens
ggcaaaauccgcaauuacuuuu

SEQ ID NO: 2456 - RNA, 22 nt, Homo sapiens
caaaaguaauuguggauuuugu

SEQ ID NO: 2457 - RNA, 22 nt, Homo sapiens
acaaaauccacaauuacuuuug

SEQ ID NO: 2458 - RNA, 23 nt, Homo sapiens
uaagugcuuccauguuuugguga

SEQ ID NO: 2459 - RNA, 23 nt, Homo sapiens
ucaccaaaacauggaagcacuua

SEQ ID NO: 2460 - RNA, 23 nt, Homo sapiens
acuuaaacguggauguacuugcu

SEQ ID NO: 2461 - RNA, 23 nt, Homo sapiens
agcaaguacauccacguuuaagu

SEQ ID NO: 2462 - RNA, 21 nt, Homo sapiens
cuauacaaucuacugucuuuc

SEQ ID NO: 2463 - RNA, 21 nt, Homo sapiens
gaaagacaguagauuguauag

SEQ ID NO: 2464 - RNA, 22 nt, Homo sapiens
ugagguaguagguuguauaguu

SEQ ID NO: 2465 - RNA, 22 nt, Homo sapiens
aacuauacaaccuacuaccuca

SEQ ID NO: 2466 - RNA, 22 nt, Homo sapiens
cuguacagccuccuagcuuucc

SEQ ID NO: 2467 - RNA, 22 nt, Homo sapiens
ggaaagcuaggaggcuguacag

SEQ ID NO: 2468 - RNA, 20 nt, Homo sapiens
caccaggcauuguggucucc

SEQ ID NO: 2469 - RNA, 20 nt, Homo sapiens
ggagaccacaaugccuggug

SEQ ID NO: 2470 - RNA, 23 nt, Homo sapiens
ugaguaccgccaugucuguuggg

SEQ ID NO: 2471 - RNA, 23 nt, Homo sapiens
cccaacagacauggcgguacuca

SEQ ID NO: 2472 - RNA, 22 nt, Homo sapiens
uacccagagcaugcagugugaa

SEQ ID NO: 2473 - RNA, 22 nt, Homo sapiens
uucacacugcaugcucugggua

SEQ ID NO: 2474 - RNA, 22 nt, Homo sapiens
aagugcugucauagcugagguc

SEQ ID NO: 2475 - RNA, 22 nt, Homo sapiens
gaccucagcuaugacagcacuu

SEQ ID NO: 2476 - RNA, 23 nt, Homo sapiens
cacucagccuugagggcacuuuc

SEQ ID NO: 2477 - RNA, 23 nt, Homo sapiens
gaaagugcccucaaggcugagug

SEQ ID NO: 2478 - RNA, 22 nt, Homo sapiens
ucgacagcacgacacugccuuc

SEQ ID NO: 2479 - RNA, 22 nt, Homo sapiens
gaaggcagugucgugcugucga

SEQ ID NO: 2480 - RNA, 22 nt, Homo sapiens
uagguaguuuccuguuguuggg

SEQ ID NO: 2481 - RNA, 22 nt, Homo sapiens
cccaacaacaggaaacuaccua

SEQ ID NO: 2482 - RNA, 21 nt, Homo sapiens
uacaguacugugauaacugaa

SEQ ID NO: 2483 - RNA, 21 nt, Homo sapiens
uucaguuaucacaguacugua

SEQ ID NO: 2484 - RNA, 22 nt, Homo sapiens
caguuaucacagugcugaugcu

SEQ ID NO: 2485 - RNA, 22 nt, Homo sapiens
agcaucagcacugugauaacug

SEQ ID NO: 2486 - RNA, 23 nt, Homo sapiens
ugugcaaaucuaugcaaaacuga

SEQ ID NO: 2487 - RNA, 23 nt, Homo sapiens
ucaguuuugcauagauuugcaca

SEQ ID NO: 2488 - RNA, 22 nt, Homo sapiens
aguuuugcauaguugcacuaca

SEQ ID NO: 2489 - RNA, 22 nt, Homo sapiens
uguagugcaacuaugcaaaacu

SEQ ID NO: 2490 - RNA, 23 nt, Homo sapiens
aguuuugcagguuugcauccagc

SEQ ID NO: 2491 - RNA, 23 nt, Homo sapiens
gcuggaugcaaaccugcaaaacu

SEQ ID NO: 2492 - RNA, 22 nt, Homo sapiens
aguuuugcagguuugcauuuca

SEQ ID NO: 2493 - RNA, 22 nt, Homo sapiens
ugaaaugcaaaccugcaaaacu

SEQ ID NO: 2494 - RNA, 23 nt, Homo sapiens
ugugcaaauccaugcaaaacuga

SEQ ID NO: 2495 - RNA, 23 nt, Homo sapiens
ucaguuuugcauggauuugcaca

SEQ ID NO: 2496 - RNA, 23 nt, Homo sapiens
uacugcaucaggaacugauugga

SEQ ID NO: 2497 - RNA, 23 nt, Homo sapiens
uccaaucaguuccugaugcagua

SEQ ID NO: 2498 - RNA, 22 nt, Homo sapiens
augguuccgucaagcaccaugg

SEQ ID NO: 2499 - RNA, 22 nt, Homo sapiens
ccauggugcuugacggaaccau

SEQ ID NO: 2500 - RNA, 21 nt, Homo sapiens
agcuacaucuggcuacugggu

SEQ ID NO: 2501 - RNA, 21 nt, Homo sapiens
acccaguagccagauguagcu

SEQ ID NO: 2502 - RNA, 22 nt, Homo sapiens
cucaguagccaguguagauccu

SEQ ID NO: 2503 - RNA, 22 nt, Homo sapiens
aggaucuacacuggcuacugag

SEQ ID NO: 2504 - RNA, 22 nt, Homo sapiens
uuaucagaaucuccagggguac

SEQ ID NO: 2505 - RNA, 22 nt, Homo sapiens
guaccccuggagauucugauaa

SEQ ID NO: 2506 - RNA, 23 nt, Homo sapiens
aucaacagacauuaauugggcgc

SEQ ID NO: 2507 - RNA, 23 nt, Homo sapiens
gcgcccaauuaaugucuguugau

SEQ ID NO: 2508 - RNA, 21 nt, Homo sapiens
caaaacgugaggcgcugcuau

SEQ ID NO: 2509 - RNA, 21 nt, Homo sapiens
auagcagcgccucacguuuug

SEQ ID NO: 2510 - RNA, 22 nt, Homo sapiens
cagcagcaauucauguuuugaa

SEQ ID NO: 2511 - RNA, 22 nt, Homo sapiens
uucaaaacaugaauugcugcug

SEQ ID NO: 2512 - RNA, 18 nt, Homo sapiens
uucacagggaggugucau

SEQ ID NO: 2513 - RNA, 18 nt, Homo sapiens
augacaccucccugugaa

SEQ ID NO: 2514 - RNA, 20 nt, Homo sapiens
gcggagagagaauggggagc

SEQ ID NO: 2515 - RNA, 20 nt, Homo sapiens
gcuccccauucucucuccgc

SEQ ID NO: 2516 - RNA, 21 nt, Homo sapiens
ccugcgagucuccggcggugg

SEQ ID NO: 2517 - RNA, 21 nt, Homo sapiens
ccaccgccggagacucgcagg

SEQ ID NO: 2518 - RNA, 21 nt, Homo sapiens
gggcuagggccugcugccccc

SEQ ID NO: 2519 - RNA, 21 nt, Homo sapiens
gggggcagcaggcccuagccc

SEQ ID NO: 2520 - RNA, 19 nt, Homo sapiens
uucugcugccggccaaggc

SEQ ID NO: 2521 - RNA, 19 nt, Homo sapiens
gccuuggccggcagcagaa

SEQ ID NO: 2522 - RNA, 22 nt, Homo sapiens
uccucaucacacugcaccuuag

SEQ ID NO: 2523 - RNA, 22 nt, Homo sapiens
cuaaggugcagugugaugagga

SEQ ID NO: 2524 - RNA, 20 nt, Homo sapiens
gguagugaguuaucagcuac

SEQ ID NO: 2525 - RNA, 20 nt, Homo sapiens
guagcugauaacucacuacc

SEQ ID NO: 2526 - RNA, 20 nt, Homo sapiens
gauauucagaggcuaggugg

SEQ ID NO: 2527 - RNA, 20 nt, Homo sapiens
ccaccuagccucugaauauc

SEQ ID NO: 2528 - RNA, 21 nt, Homo sapiens
acggcccaggcggcauuggug

SEQ ID NO: 2529 - RNA, 21 nt, Homo sapiens
caccaaugccgccugggccgu

SEQ ID NO: 2530 - RNA, 21 nt, Homo sapiens
agcaugacagaggagaggugg

SEQ ID NO: 2531 - RNA, 21 nt, Homo sapiens
ccaccucuccucugucaugcu

SEQ ID NO: 2532 - RNA, 21 nt, Homo sapiens
gggaagagcuguacggccuuc

SEQ ID NO: 2533 - RNA, 21 nt, Homo sapiens
gaaggccguacagcucuuccc

SEQ ID NO: 2534 - RNA, 19 nt, Homo sapiens
ccgccugagcuagcugugg

SEQ ID NO: 2535 - RNA, 19 nt, Homo sapiens
ccacagcuagcucaggcgg

SEQ ID NO: 2536 - RNA, 24 nt, Homo sapiens
uuggaagcuuggaccaacuagcug

SEQ ID NO: 2537 - RNA, 24 nt, Homo sapiens
cagcuaguugguccaagcuuccaa

SEQ ID NO: 2538 - RNA, 19 nt, Homo sapiens
ucuagugcgggcguucccg

SEQ ID NO: 2539 - RNA, 19 nt, Homo sapiens
cgggaacgcccgcacuaga

SEQ ID NO: 2540 - RNA, 24 nt, Homo sapiens
aggagcagugccggccaaggcgcc

SEQ ID NO: 2541 - RNA, 24 nt, Homo sapiens
ggcgccuuggccggcacugcuccu

SEQ ID NO: 2542 - RNA, 19 nt, Homo sapiens
gaauacgucugguugaucc

SEQ ID NO: 2543 - RNA, 19 nt, Homo sapiens
ggaucaaccagacguauuc

SEQ ID NO: 2544 - RNA, 20 nt, Homo sapiens
cuuauaucagaggcuguggg

SEQ ID NO: 2545 - RNA, 20 nt, Homo sapiens
cccacagccucugauauaag

SEQ ID NO: 2546 - RNA, 20 nt, Homo sapiens
uuccgccagucgguggccgg

SEQ ID NO: 2547 - RNA, 20 nt, Homo sapiens
ccggccaccgacuggcggaa

SEQ ID NO: 2548 - RNA, 19 nt, Homo sapiens
aaggggcugggggagcaca

SEQ ID NO: 2549 - RNA, 19 nt, Homo sapiens
ugugcucccccagccccuu

SEQ ID NO: 2550 - RNA, 23 nt, Homo sapiens
agguugggaucgguugcaaugcu

SEQ ID NO: 2551 - RNA, 23 nt, Homo sapiens
agcauugcaaccgaucccaaccu

SEQ ID NO: 2552 - RNA, 22 nt, Homo sapiens
ggguggggauuuguugcauuac

SEQ ID NO: 2553 - RNA, 22 nt, Homo sapiens
guaaugcaacaaauccccaccc

SEQ ID NO: 2554 - RNA, 22 nt, Homo sapiens
uauugcacuugucccggccugu

SEQ ID NO: 2555 - RNA, 22 nt, Homo sapiens
acaggccgggacaagugcaaua

SEQ ID NO: 2556 - RNA, 22 nt, Homo sapiens
uauugcacucgucccggccucc

SEQ ID NO: 2557 - RNA, 22 nt, Homo sapiens
ggaggccgggacgagugcaaua

SEQ ID NO: 2558 - RNA, 22 nt, Homo sapiens
agggacgggacgcggugcagug

SEQ ID NO: 2559 - RNA, 22 nt, Homo sapiens
cacugcaccgcgucccgucccu

SEQ ID NO: 2560 - RNA, 21 nt, Homo sapiens
aucacauugccagggauuucc

SEQ ID NO: 2561 - RNA, 21 nt, Homo sapiens
ggaaaucccuggcaaugugau

SEQ ID NO: 2562 - RNA, 22 nt, Homo sapiens
gggguuccuggggaugggauuu

SEQ ID NO: 2563 - RNA, 22 nt, Homo sapiens
aaaucccauccccaggaacccc

SEQ ID NO: 2564 - RNA, 22 nt, Homo sapiens
acugcagugaaggcacuuguag

SEQ ID NO: 2565 - RNA, 22 nt, Homo sapiens
cuacaagugccuucacugcagu

SEQ ID NO: 2566 - RNA, 23 nt, Homo sapiens
agcuacauugucugcuggguuuc

SEQ ID NO: 2567 - RNA, 23 nt, Homo sapiens
gaaacccagcagacaauguagcu

SEQ ID NO: 2568 - RNA, 22 nt, Homo sapiens
accuggcauacaauguagauuu

SEQ ID NO: 2569 - RNA, 22 nt, Homo sapiens
aaaucuacauuguaugccaggu

SEQ ID NO: 2570 - RNA, 22 nt, Homo sapiens
ucguaccgugaguaauaaugcg

SEQ ID NO: 2571 - RNA, 22 nt, Homo sapiens
cgcauuauuacucacgguacga

SEQ ID NO: 2572 - RNA, 21 nt, Homo sapiens
cauuauuacuuuugguacgcg

SEQ ID NO: 2573 - RNA, 21 nt, Homo sapiens
cgcguaccaaaaguaauaaug

SEQ ID NO: 2574 - RNA, 23 nt, Homo sapiens
uacuccagagggcgucacucaug

SEQ ID NO: 2575 - RNA, 23 nt, Homo sapiens
caugagugacgcccucuggagua

SEQ ID NO: 2576 - RNA, 21 nt, Homo sapiens
ucccacguuguggcccagcag

SEQ ID NO: 2577 - RNA, 21 nt, Homo sapiens
cugcugggccacaacguggga

SEQ ID NO: 2578 - RNA, 23 nt, Homo sapiens
ccucaccaccccuucugccugca

SEQ ID NO: 2579 - RNA, 23 nt, Homo sapiens
ugcaggcagaagggguggugagg

SEQ ID NO: 2580 - RNA, 24 nt, Homo sapiens
cugcaggcagaaguggggcugaca

SEQ ID NO: 2581 - RNA, 24 nt, Homo sapiens
ugucagccccacuucugccugcag

SEQ ID NO: 2582 - RNA, 21 nt, Homo sapiens
ccaaaccagucgugccugugg

SEQ ID NO: 2583 - RNA, 21 nt, Homo sapiens
ccacaggcacgacugguuugg

SEQ ID NO: 2584 - RNA, 22 nt, Homo sapiens
cucaaaccggcugugccugugg

SEQ ID NO: 2585 - RNA, 22 nt, Homo sapiens
ccacaggcacagccgguuugag

SEQ ID NO: 2586 - RNA, 21 nt, Homo sapiens
acaggcacgacugguuuggca

SEQ ID NO: 2587 - RNA, 21 nt, Homo sapiens
ugccaaaccagucgugccugu

SEQ ID NO: 2588 - RNA, 22 nt, Homo sapiens
uccgaacucuccauuccucugc

SEQ ID NO: 2589 - RNA, 22 nt, Homo sapiens
gcagaggaauggagaguucgga

SEQ ID NO: 2590 - RNA, 20 nt, Homo sapiens
ugggaauggggguaagggcc

SEQ ID NO: 2591 - RNA, 20 nt, Homo sapiens
ggcccuuacccccauuccca

SEQ ID NO: 2592 - RNA, 22 nt, Homo sapiens
aggcgauguggggauguagaga

SEQ ID NO: 2593 - RNA, 22 nt, Homo sapiens
ucucuacauccccacaucgccu

SEQ ID NO: 2594 - RNA, 21 nt, Homo sapiens
uaguggucagagggcuuauga

SEQ ID NO: 2595 - RNA, 21 nt, Homo sapiens
ucauaagcccucugaccacua

SEQ ID NO: 2596 - RNA, 22 nt, Homo sapiens
ucugacaucagugauucuccug

SEQ ID NO: 2597 - RNA, 22 nt, Homo sapiens
caggagaaucacugaugucaga

SEQ ID NO: 2598 - RNA, 22 nt, Homo sapiens
cgcgccugcaggaacugguaga

SEQ ID NO: 2599 - RNA, 22 nt, Homo sapiens
ucuaccaguuccugcaggcgcg

SEQ ID NO: 2600 - RNA, 23 nt, Homo sapiens
ugggcaggggcuuauuguaggag

SEQ ID NO: 2601 - RNA, 23 nt, Homo sapiens
cuccuacaauaagccccugccca

SEQ ID NO: 2602 - RNA, 22 nt, Homo sapiens
ugcaggggucgggugggccagg

SEQ ID NO: 2603 - RNA, 22 nt, Homo sapiens
ccuggcccacccgaccccugca

SEQ ID NO: 2604 - RNA, 20 nt, Homo sapiens
aggcgcacccgaccacaugc

SEQ ID NO: 2605 - RNA, 20 nt, Homo sapiens
gcauguggucgggugcgccu

SEQ ID NO: 2606 - RNA, 22 nt, Homo sapiens
auaguccgaguaacgucggggc

SEQ ID NO: 2607 - RNA, 22 nt, Homo sapiens
gccccgacguuacucggacuau

SEQ ID NO: 2608 - RNA, 23 nt, Homo sapiens
cugggcccgcggcgggcgugggg

SEQ ID NO: 2609 - RNA, 23 nt, Homo sapiens
ccccacgcccgccgcgggcccag

SEQ ID NO: 2610 - RNA, 21 nt, Homo sapiens
uacuuggaaaggcaucaguug

SEQ ID NO: 2611 - RNA, 21 nt, Homo sapiens
caacugaugccuuuccaagua

SEQ ID NO: 2612 - RNA, 22 nt, Homo sapiens
ugcaacgaaccugagccacuga

SEQ ID NO: 2613 - RNA, 22 nt, Homo sapiens
ucaguggcucagguucguugca

SEQ ID NO: 2614 - RNA, 22 nt, Homo sapiens
ugcaacuuaccugagucauuga

SEQ ID NO: 2615 - RNA, 22 nt, Homo sapiens
ucaaugacucagguaaguugca

SEQ ID NO: 2616 - RNA, 21 nt, Homo sapiens
cacuguguccuuucugcguag

SEQ ID NO: 2617 - RNA, 21 nt, Homo sapiens
cuacgcagaaaggacacagug

SEQ ID NO: 2618 - RNA, 22 nt, Homo sapiens
cacuggcuccuuucuggguaga

SEQ ID NO: 2619 - RNA, 22 nt, Homo sapiens
ucuacccagaaaggagccagug

SEQ ID NO: 2620 - RNA, 22 nt, Homo sapiens
cacuguuuccuuucugagugga

SEQ ID NO: 2621 - RNA, 22 nt, Homo sapiens
uccacucagaaaggaaacagug

SEQ ID NO: 2622 - RNA, 21 nt, Homo sapiens
uauucagaaaggugccaguca

SEQ ID NO: 2623 - RNA, 21 nt, Homo sapiens
ugacuggcaccuuucugaaua

SEQ ID NO: 2624 - RNA, 20 nt, Homo sapiens
auuccuagaaauuguucaua

SEQ ID NO: 2625 - RNA, 20 nt, Homo sapiens
uaugaacaauuucuaggaau

SEQ ID NO: 2626 - RNA, 22 nt, Homo sapiens
uaauacugucugguaaaaccgu

SEQ ID NO: 2627 - RNA, 22 nt, Homo sapiens
acgguuuuaccagacaguauua

SEQ ID NO: 2628 - RNA, 22 nt, Homo sapiens
ugaaacauacacgggaaaccuc

SEQ ID NO: 2629 - RNA, 22 nt, Homo sapiens
gagguuucccguguauguuuca

SEQ ID NO: 2630 - RNA, 22 nt, Homo sapiens
cuauacaaccuacugccuuccc

SEQ ID NO: 2631 - RNA, 22 nt, Homo sapiens
gggaaggcaguagguuguauag

SEQ ID NO: 2632 - RNA, 22 nt, Homo sapiens
ugagguaguagguugugugguu

SEQ ID NO: 2633 - RNA, 22 nt, Homo sapiens
aaccacacaaccuacuaccuca

SEQ ID NO: 2634 - RNA, 22 nt, Homo sapiens
uaacacugucugguaacgaugu

SEQ ID NO: 2635 - RNA, 22 nt, Homo sapiens
acaucguuaccagacaguguua

SEQ ID NO: 2636 - RNA, 22 nt, Homo sapiens
caucuuaccggacagugcugga

SEQ ID NO: 2637 - RNA, 22 nt, Homo sapiens
uccagcacuguccgguaagaug

SEQ ID NO: 2638 - RNA, 22 nt, Homo sapiens
uaauacugccugguaaugauga

SEQ ID NO: 2639 - RNA, 22 nt, Homo sapiens
ucaucauuaccaggcaguauua

SEQ ID NO: 2640 - RNA, 22 nt, Homo sapiens
caucuuacugggcagcauugga

SEQ ID NO: 2641 - RNA, 22 nt, Homo sapiens
uccaaugcugcccaguaagaug

SEQ ID NO: 2642 - RNA, 23 nt, Homo sapiens
uaauacugccggguaaugaugga

SEQ ID NO: 2643 - RNA, 23 nt, Homo sapiens
uccaucauuacccggcaguauua

SEQ ID NO: 2644 - RNA, 22 nt, Homo sapiens
cgucuuacccagcaguguuugg

SEQ ID NO: 2645 - RNA, 22 nt, Homo sapiens
ccaaacacugcuggguaagacg

SEQ ID NO: 2646 - RNA, 22 nt, Homo sapiens
uccagcaucagugauuuuguug

SEQ ID NO: 2647 - RNA, 22 nt, Homo sapiens
caacaaaaucacugaugcugga

SEQ ID NO: 2648 - RNA, 20 nt, Homo sapiens
uacaguauagaugauguacu

SEQ ID NO: 2649 - RNA, 20 nt, Homo sapiens
aguacaucaucuauacugua

SEQ ID NO: 2650 - RNA, 22 nt, Homo sapiens
ggauaucaucauauacuguaag

SEQ ID NO: 2651 - RNA, 22 nt, Homo sapiens
cuuacaguauaugaugauaucc

SEQ ID NO: 2652 - RNA, 21 nt, Homo sapiens
cggggcagcucaguacaggau

SEQ ID NO: 2653 - RNA, 21 nt, Homo sapiens
auccuguacugagcugccccg

SEQ ID NO: 2654 - RNA, 21 nt, Homo sapiens
uccuucugcuccgucccccag

SEQ ID NO: 2655 - RNA, 21 nt, Homo sapiens
cugggggacggagcagaagga

SEQ ID NO: 2656 - RNA, 21 nt, Homo sapiens
cgggggcggggccgaagcgcg

SEQ ID NO: 2657 - RNA, 21 nt, Homo sapiens
cgcgcuucggccccgcccccg

SEQ ID NO: 2658 - RNA, 21 nt, Homo sapiens
uccugcgcgucccagaugccc

SEQ ID NO: 2659 - RNA, 21 nt, Homo sapiens
gggcaucugggacgcgcagga

SEQ ID NO: 2660 - RNA, 22 nt, Homo sapiens
caucagaauucauggaggcuag

SEQ ID NO: 2661 - RNA, 22 nt, Homo sapiens
cuagccuccaugaauucugaug

SEQ ID NO: 2662 - RNA, 22 nt, Homo sapiens
agcuuccaugacuccugaugga

SEQ ID NO: 2663 - RNA, 22 nt, Homo sapiens
uccaucaggagucauggaagcu

SEQ ID NO: 2664 - RNA, 21 nt, Homo sapiens
ugacagcgcccugccuggcuc

SEQ ID NO: 2665 - RNA, 21 nt, Homo sapiens
gagccaggcagggcgcuguca

SEQ ID NO: 2666 - RNA, 24 nt, Homo sapiens
agcgcgggcugagcgcugccaguc

SEQ ID NO: 2667 - RNA, 24 nt, Homo sapiens
gacuggcagcgcucagcccgcgcu

SEQ ID NO: 2668 - RNA, 22 nt, Homo sapiens
cugggaggugugauaucguggu

SEQ ID NO: 2669 - RNA, 22 nt, Homo sapiens
accacgauaucacaccucccag

SEQ ID NO: 2670 - RNA, 22 nt, Homo sapiens
ugugauaucaugguuccuggga

SEQ ID NO: 2671 - RNA, 22 nt, Homo sapiens
ucccaggaaccaugauaucaca

SEQ ID NO: 2672 - RNA, 22 nt, Homo sapiens
aggugcuccaggcuggcucaca

SEQ ID NO: 2673 - RNA, 22 nt, Homo sapiens
ugugagccagccuggagcaccu

SEQ ID NO: 2674 - RNA, 22 nt, Homo sapiens
gagcaauguagguagacuguuu

SEQ ID NO: 2675 - RNA, 22 nt, Homo sapiens
aaacagucuaccuacauugcuc

SEQ ID NO: 2676 - RNA, 22 nt, Homo sapiens
uguccucuagggccugcagucu

SEQ ID NO: 2677 - RNA, 22 nt, Homo sapiens
agacugcaggcccuagaggaca

SEQ ID NO: 2678 - RNA, 20 nt, Homo sapiens
aaaggcauaaaaccaagaca

SEQ ID NO: 2679 - RNA, 20 nt, Homo sapiens
ugucuugguuuuaugccuuu

SEQ ID NO: 2680 - RNA, 21 nt, Homo sapiens
uaacgcauaauauggacaugu

SEQ ID NO: 2681 - RNA, 21 nt, Homo sapiens
acauguccauauuaugcguua

SEQ ID NO: 2682 - RNA, 22 nt, Homo sapiens
uugaggaaaagauggucuuauu

SEQ ID NO: 2683 - RNA, 22 nt, Homo sapiens
aauaagaccaucuuuuccucaa

SEQ ID NO: 2684 - RNA, 26 nt, Homo sapiens
aagaggaagaaauggcugguucucag

SEQ ID NO: 2685 - RNA, 26 nt, Homo sapiens
cugagaaccagccauuucuuccucuu

SEQ ID NO: 2686 - RNA, 20 nt, Homo sapiens
gcucggacugagcagguggg

SEQ ID NO: 2687 - RNA, 20 nt, Homo sapiens
cccaccugcucaguccgagc

SEQ ID NO: 2688 - RNA, 21 nt, Homo sapiens
acagggccgcagauggagacu

SEQ ID NO: 2689 - RNA, 21 nt, Homo sapiens
agucuccaucugcggcccugu

SEQ ID NO: 2690 - RNA, 21 nt, Homo sapiens
gcagagaacaaaggacucagu

SEQ ID NO: 2691 - RNA, 21 nt, Homo sapiens
acugaguccuuuguucucugc

SEQ ID NO: 2692 - RNA, 22 nt, Homo sapiens
acugauuaucuuaacucucuga

SEQ ID NO: 2693 - RNA, 22 nt, Homo sapiens
ucagagaguuaagauaaucagu

SEQ ID NO: 2694 - RNA, 23 nt, Homo sapiens
ucucugaguaccauaugccuugu

SEQ ID NO: 2695 - RNA, 23 nt, Homo sapiens
acaaggcauaugguacucagaga

SEQ ID NO: 2696 - RNA, 22 nt, Homo sapiens
aacuaguaauguuggauuaggg

SEQ ID NO: 2697 - RNA, 22 nt, Homo sapiens
cccuaauccaacauuacuaguu

SEQ ID NO: 2698 - RNA, 22 nt, Homo sapiens
auauguauaugugacugcuacu

SEQ ID NO: 2699 - RNA, 22 nt, Homo sapiens
aguagcagucacauauacauau

SEQ ID NO: 2700 - RNA, 21 nt, Homo sapiens
uggccaaaaagcaggcagaga

SEQ ID NO: 2701 - RNA, 21 nt, Homo sapiens
ucucugccugcuuuuuggcca

SEQ ID NO: 2702 - RNA, 22 nt, Homo sapiens
ggaggaaccuuggagcuucggc

SEQ ID NO: 2703 - RNA, 22 nt, Homo sapiens
gccgaagcuccaagguuccucc

SEQ ID NO: 2704 - RNA, 23 nt, Homo sapiens
gaggcugaugugaguagaccacu

SEQ ID NO: 2705 - RNA, 23 nt, Homo sapiens
aguggucuacucacaucagccuc

SEQ ID NO: 2706 - RNA, 21 nt, Homo sapiens
cuguccuaagguuguugaguu

SEQ ID NO: 2707 - RNA, 21 nt, Homo sapiens
aacucaacaaccuuaggacag

SEQ ID NO: 2708 - RNA, 21 nt, Homo sapiens
ucuucaaccucaggacuugca

SEQ ID NO: 2709 - RNA, 21 nt, Homo sapiens
ugcaaguccugagguugaaga

SEQ ID NO: 2710 - RNA, 22 nt, Homo sapiens
ugugauaucaugguuccuggga

SEQ ID NO: 2711 - RNA, 22 nt, Homo sapiens
ucccaggaaccaugauaucaca

SEQ ID NO: 2712 - RNA, 22 nt, Homo sapiens
cugggaggugugauauuguggu

SEQ ID NO: 2713 - RNA, 22 nt, Homo sapiens
accacaauaucacaccucccag

SEQ ID NO: 2714 - RNA, 22 nt, Homo sapiens
cagguagauauuugauaggcau

SEQ ID NO: 2715 - RNA, 22 nt, Homo sapiens
augccuaucaaauaucuaccug

SEQ ID NO: 2716 - RNA, 21 nt, Homo sapiens
gccuaucacauaucugccugu

SEQ ID NO: 2717 - RNA, 21 nt, Homo sapiens
acaggcagauaugugauaggc

SEQ ID NO: 2718 - RNA, 20 nt, Homo sapiens
gggcuggggcgcggggaggu

SEQ ID NO: 2719 - RNA, 20 nt, Homo sapiens
accuccccgcgccccagccc

SEQ ID NO: 2720 - RNA, 18 nt, Homo sapiens
ugcuuccuuucagagggu

SEQ ID NO: 2721 - RNA, 18 nt, Homo sapiens
acccucugaaaggaagca

SEQ ID NO: 2722 - RNA, 21 nt, Homo sapiens
ugaguuggccaucugagugag

SEQ ID NO: 2723 - RNA, 21 nt, Homo sapiens
cucacucagauggccaacuca

SEQ ID NO: 2724 - RNA, 23 nt, Homo sapiens
aacauucauuguugucggugggu

SEQ ID NO: 2725 - RNA, 23 nt, Homo sapiens
acccaccgacaacaaugaauguu

SEQ ID NO: 2726 - RNA, 21 nt, Homo sapiens
ucacagugaaccggucucuuu

SEQ ID NO: 2727 - RNA, 21 nt, Homo sapiens
aaagagaccgguucacuguga

SEQ ID NO: 2728 - RNA, 22 nt, Homo sapiens
caacaaaucacagucugccaua

SEQ ID NO: 2729 - RNA, 22 nt, Homo sapiens
uauggcagacugugauuuguug

SEQ ID NO: 2730 - RNA, 21 nt, Homo sapiens
cucacugaacaaugaaugcaa

SEQ ID NO: 2731 - RNA, 21 nt, Homo sapiens
uugcauucauuguucagugag

SEQ ID NO: 2732 - RNA, 23 nt, Homo sapiens
aacauucauugcugucggugggu

SEQ ID NO: 2733 - RNA, 23 nt, Homo sapiens
acccaccgacagcaaugaauguu

SEQ ID NO: 2734 - RNA, 22 nt, Homo sapiens
accaucgaccguugauuguacc

SEQ ID NO: 2735 - RNA, 22 nt, Homo sapiens
gguacaaucaacggucgauggu

SEQ ID NO: 2736 - RNA, 23 nt, Homo sapiens
aacauucaacgcugucggugagu

SEQ ID NO: 2737 - RNA, 23 nt, Homo sapiens
acucaccgacagcguugaauguu

SEQ ID NO: 2738 - RNA, 22 nt, Homo sapiens
accacugaccguugacuguacc

SEQ ID NO: 2739 - RNA, 22 nt, Homo sapiens
gguacagucaacggucaguggu

SEQ ID NO: 2740 - RNA, 22 nt, Homo sapiens
cuguugccacuaaccucaaccu

SEQ ID NO: 2741 - RNA, 22 nt, Homo sapiens
agguugagguuaguggcaacag

SEQ ID NO: 2742 - RNA, 22 nt, Homo sapiens
auaagacgagcaaaaagcuugu

SEQ ID NO: 2743 - RNA, 22 nt, Homo sapiens
acaagcuuuuugcucgucuuau

SEQ ID NO: 2744 - RNA, 22 nt, Homo sapiens
auaagacgaacaaaagguuugu

SEQ ID NO: 2745 - RNA, 22 nt, Homo sapiens
acaaaccuuuuguucgucuuau

SEQ ID NO: 2746 - RNA, 21 nt, Homo sapiens
agggagggacgggggcugugc

SEQ ID NO: 2747 - RNA, 21 nt, Homo sapiens
gcacagcccccgucccucccu

SEQ ID NO: 2748 - RNA, 23 nt, Homo sapiens
ucuggcuccgugucuucacuccc

SEQ ID NO: 2749 - RNA, 23 nt, Homo sapiens
gggagugaagacacggagccaga

SEQ ID NO: 2750 - RNA, 22 nt, Homo sapiens
uggaauguaaagaaguauguau

SEQ ID NO: 2751 - RNA, 22 nt, Homo sapiens
auacauacuucuuuacauucca

SEQ ID NO: 2752 - RNA, 22 nt, Homo sapiens
aacaucacagcaagucugugcu

SEQ ID NO: 2753 - RNA, 22 nt, Homo sapiens
agcacagacuugcugugauguu

SEQ ID NO: 2754 - RNA, 21 nt, Homo sapiens
uuaagacuugcagugauguuu

SEQ ID NO: 2755 - RNA, 21 nt, Homo sapiens
aaacaucacugcaagucuuaa

SEQ ID NO: 2756 - RNA, 22 nt, Homo sapiens
aacaucacugcaagucuuaaca

SEQ ID NO: 2757 - RNA, 22 nt, Homo sapiens
uguuaagacuugcagugauguu

SEQ ID NO: 2758 - RNA, 21 nt, Homo sapiens
acagacuugcugugauguuca

SEQ ID NO: 2759 - RNA, 21 nt, Homo sapiens
ugaacaucacagcaagucugu

SEQ ID NO: 2760 - RNA, 22 nt, Homo sapiens
aaaccguuaccauuacugaguu

SEQ ID NO: 2761 - RNA, 22 nt, Homo sapiens
aacucaguaaugguaacgguuu

SEQ ID NO: 2762 - RNA, 22 nt, Homo sapiens
uagcaagagaaccauuaccauu

SEQ ID NO: 2763 - RNA, 22 nt, Homo sapiens
aaugguaaugguucucuugcua

SEQ ID NO: 2764 - RNA, 23 nt, Homo sapiens
ugaggggcagagagcgagacuuu

SEQ ID NO: 2765 - RNA, 23 nt, Homo sapiens
aaagucucgcucucugccccuca

SEQ ID NO: 2766 - RNA, 22 nt, Homo sapiens
caagcucgcuucuaugggucug

SEQ ID NO: 2767 - RNA, 22 nt, Homo sapiens
cagacccauagaagcgagcuug

SEQ ID NO: 2768 - RNA, 22 nt, Homo sapiens
aacccguagauccgaucuugug

SEQ ID NO: 2769 - RNA, 22 nt, Homo sapiens
cacaagaucggaucuacggguu

SEQ ID NO: 2770 - RNA, 22 nt, Homo sapiens
caagcucgugucuguggguccg

SEQ ID NO: 2771 - RNA, 22 nt, Homo sapiens
cggacccacagacacgagcuug

SEQ ID NO: 2772 - RNA, 22 nt, Homo sapiens
cacccguagaaccgaccuugcg

SEQ ID NO: 2773 - RNA, 22 nt, Homo sapiens
cgcaaggucgguucuacgggug

SEQ ID NO: 2774 - RNA, 23 nt, Homo sapiens
uggagacgcggcccuguuggagu

SEQ ID NO: 2775 - RNA, 23 nt, Homo sapiens
acuccaacagggccgcgucucca

SEQ ID NO: 2776 - RNA, 23 nt, Homo sapiens
ucuacagugcacgugucuccagu

SEQ ID NO: 2777 - RNA, 23 nt, Homo sapiens
acuggagacacgugcacuguaga

SEQ ID NO: 2778 - RNA, 22 nt, Homo sapiens
caaauucguaucuaggggaaua

SEQ ID NO: 2779 - RNA, 22 nt, Homo sapiens
uauuccccuagauacgaauuug

SEQ ID NO: 2780 - RNA, 23 nt, Homo sapiens
uacccuguagauccgaauuugug

SEQ ID NO: 2781 - RNA, 23 nt, Homo sapiens
cacaaauucggaucuacagggua

SEQ ID NO: 2782 - RNA, 23 nt, Homo sapiens
ccugcagcgacuugauggcuucc

SEQ ID NO: 2783 - RNA, 23 nt, Homo sapiens
ggaagccaucaagucgcugcagg

SEQ ID NO: 2784 - RNA, 22 nt, Homo sapiens
ucagugcacuacagaacuuugu

SEQ ID NO: 2785 - RNA, 22 nt, Homo sapiens
acaaaguucuguagugcacuga

SEQ ID NO: 2786 - RNA, 22 nt, Homo sapiens
aaaguucugagacacuccgacu

SEQ ID NO: 2787 - RNA, 22 nt, Homo sapiens
agucggagugucucagaacuuu

SEQ ID NO: 2788 - RNA, 22 nt, Homo sapiens
ccuguucuccauuacuuggcuc

SEQ ID NO: 2789 - RNA, 22 nt, Homo sapiens
gagccaaguaauggagaacagg

SEQ ID NO: 2790 - RNA, 21 nt, Homo sapiens
uucaaguaauucaggauaggu

SEQ ID NO: 2791 - RNA, 21 nt, Homo sapiens
accuauccugaauuacuugaa

SEQ ID NO: 2792 - RNA, 22 nt, Homo sapiens
gcccugaacgaggggucuggag

SEQ ID NO: 2793 - RNA, 22 nt, Homo sapiens
cuccagaccccucguucagggc

SEQ ID NO: 2794 - RNA, 22 nt, Homo sapiens
gcugacuccuaguccagggcuc

SEQ ID NO: 2795 - RNA, 22 nt, Homo sapiens
gagcccuggacuaggagucagc

SEQ ID NO: 2796 - RNA, 22 nt, Homo sapiens
aucacacaaaggcaacuuuugu

SEQ ID NO: 2797 - RNA, 22 nt, Homo sapiens
acaaaaguugccuuugugugau

SEQ ID NO: 2798 - RNA, 22 nt, Homo sapiens
agagguugcccuuggugaauuc

SEQ ID NO: 2799 - RNA, 22 nt, Homo sapiens
gaauucaccaagggcaaccucu

SEQ ID NO: 2800 - RNA, 21 nt, Homo sapiens
gguagauuuuccuucuauggu

SEQ ID NO: 2801 - RNA, 21 nt, Homo sapiens
accauagaaggaaaaucuacc

SEQ ID NO: 2802 - RNA, 21 nt, Homo sapiens
aucauagaggaaaauccacgu

SEQ ID NO: 2803 - RNA, 21 nt, Homo sapiens
acguggauuuuccucuaugau

SEQ ID NO: 2804 - RNA, 22 nt, Homo sapiens
guagauucuccuucuaugagua

SEQ ID NO: 2805 - RNA, 22 nt, Homo sapiens
uacucauagaaggagaaucuac

SEQ ID NO: 2806 - RNA, 22 nt, Homo sapiens
cugguacaggccugggggacag

SEQ ID NO: 2807 - RNA, 22 nt, Homo sapiens
cugucccccaggccuguaccag

SEQ ID NO: 2808 - RNA, 22 nt, Homo sapiens
ucucccaacccuuguaccagug

SEQ ID NO: 2809 - RNA, 22 nt, Homo sapiens
cacugguacaaggguugggaga

SEQ ID NO: 2810 - RNA, 22 nt, Homo sapiens
acggguuaggcucuugggagcu

SEQ ID NO: 2811 - RNA, 22 nt, Homo sapiens
agcucccaagagccuaacccgu

SEQ ID NO: 2812 - RNA, 22 nt, Homo sapiens
ucacaagucaggcucuugggac

SEQ ID NO: 2813 - RNA, 22 nt, Homo sapiens
gucccaagagccugacuuguga

SEQ ID NO: 2814 - RNA, 22 nt, Homo sapiens
aacccguagauccgaacuugug

SEQ ID NO: 2815 - RNA, 22 nt, Homo sapiens
cacaaguucggaucuacggguu

SEQ ID NO: 2816 - RNA, 21 nt, Homo sapiens
cuguacaggccacugccuugc

SEQ ID NO: 2817 - RNA, 21 nt, Homo sapiens
gcaaggcaguggccuguacag

SEQ ID NO: 2818 - RNA, 22 nt, Homo sapiens
ugagguaguaguuuguacaguu

SEQ ID NO: 2819 - RNA, 22 nt, Homo sapiens
aacuguacaaacuacuaccuca

SEQ ID NO: 2820 - RNA, 22 nt, Homo sapiens
ucccugagacccuaacuuguga

SEQ ID NO: 2821 - RNA, 22 nt, Homo sapiens
ucacaaguuagggucucaggga

SEQ ID NO: 2822 - RNA, 22 nt, Homo sapiens
caagcuuguaucuauagguaug

SEQ ID NO: 2823 - RNA, 22 nt, Homo sapiens
cauaccuauagauacaagcuug

SEQ ID NO: 2824 - RNA, 23 nt, Homo sapiens
aaagugcugcgacauuugagcgu

SEQ ID NO: 2825 - RNA, 23 nt, Homo sapiens
acgcucaaaugucgcagcacuuu

SEQ ID NO: 2826 - RNA, 22 nt, Homo sapiens
uuuagagacggggucuugcucu

SEQ ID NO: 2827 - RNA, 22 nt, Homo sapiens
agagcaagaccccgucucuaaa

SEQ ID NO: 2828 - RNA, 24 nt, Homo sapiens
uggcccugacugaagaccagcagu

SEQ ID NO: 2829 - RNA, 24 nt, Homo sapiens
acugcuggucuucagucagggcca

SEQ ID NO: 2830 - RNA, 21 nt, Homo sapiens
gcgacccauacuugguuucag

SEQ ID NO: 2831 - RNA, 21 nt, Homo sapiens
cugaaaccaaguaugggucgc

SEQ ID NO: 2832 - RNA, 22 nt, Homo sapiens
gaaaucaagcgugggugagacc

SEQ ID NO: 2833 - RNA, 22 nt, Homo sapiens
ggucucacccacgcuugauuuc

SEQ ID NO: 2834 - RNA, 21 nt, Homo sapiens
cccugggccucugcuccccag

SEQ ID NO: 2835 - RNA, 21 nt, Homo sapiens
cuggggagcagaggcccaggg

SEQ ID NO: 2836 - RNA, 24 nt, Homo sapiens
uggggagcugaggcucugggggug

SEQ ID NO: 2837 - RNA, 24 nt, Homo sapiens
cacccccagagccucagcucccca

SEQ ID NO: 2838 - RNA, 20 nt, Homo sapiens
ggggagcuguggaagcagua

SEQ ID NO: 2839 - RNA, 20 nt, Homo sapiens
uacugcuuccacagcucccc

SEQ ID NO: 2840 - RNA, 25 nt, Homo sapiens
cuagugagggacagaaccaggauuc

SEQ ID NO: 2841 - RNA, 25 nt, Homo sapiens
gaauccugguucugucccucacuag

SEQ ID NO: 2842 - RNA, 20 nt, Homo sapiens
agagucuugugaugucuugc

SEQ ID NO: 2843 - RNA, 20 nt, Homo sapiens
gcaagacaucacaagacucu

SEQ ID NO: 2844 - RNA, 23 nt, Homo sapiens
gcagcagagaauaggacuacguc

SEQ ID NO: 2845 - RNA, 23 nt, Homo sapiens
gacguaguccuauucucugcugc

SEQ ID NO: 2846 - RNA, 23 nt, Homo sapiens
ugagcgccucgacgacagagccg

SEQ ID NO: 2847 - RNA, 23 nt, Homo sapiens
cggcucugucgucgaggcgcuca

SEQ ID NO: 2848 - RNA, 23 nt, Homo sapiens
ucccuguccuccaggagcucacg

SEQ ID NO: 2849 - RNA, 23 nt, Homo sapiens
cgugagcuccuggaggacaggga

SEQ ID NO: 2850 - RNA, 22 nt, Homo sapiens
cuauacggccuccuagcuuucc

SEQ ID NO: 2851 - RNA, 22 nt, Homo sapiens
ggaaagcuaggaggccguauag

SEQ ID NO: 2852 - RNA, 22 nt, Homo sapiens
ugagguaggagguuguauaguu

SEQ ID NO: 2853 - RNA, 22 nt, Homo sapiens
aacuauacaaccuccuaccuca

SEQ ID NO: 2854 - RNA, 22 nt, Homo sapiens
cugcgcaagcuacugccuugcu

SEQ ID NO: 2855 - RNA, 22 nt, Homo sapiens
agcaaggcaguagcuugcgcag

SEQ ID NO: 2856 - RNA, 22 nt, Homo sapiens
ugagguaguaguuugugcuguu

SEQ ID NO: 2857 - RNA, 22 nt, Homo sapiens
aacagcacaaacuacuaccuca

SEQ ID NO: 2858 - RNA, 22 nt, Homo sapiens
ugcccuguggacucaguucugg

SEQ ID NO: 2859 - RNA, 22 nt, Homo sapiens
ccagaacugaguccacagggca

SEQ ID NO: 2860 - RNA, 21 nt, Homo sapiens
ugguucuagacuugccaacua

SEQ ID NO: 2861 - RNA, 21 nt, Homo sapiens
uaguuggcaagucuagaacca

SEQ ID NO: 2862 - RNA, 23 nt, Homo sapiens
ugucugcccgcaugccugccucu

SEQ ID NO: 2863 - RNA, 23 nt, Homo sapiens
agaggcaggcaugcgggcagaca

SEQ ID NO: 2864 - RNA, 22 nt, Homo sapiens
aaaaguaauugcggucuuuggu

SEQ ID NO: 2865 - RNA, 22 nt, Homo sapiens
accaaagaccgcaauuacuuuu

SEQ ID NO: 2866 - RNA, 18 nt, Homo sapiens
ucgaggagcucacagucu

SEQ ID NO: 2867 - RNA, 18 nt, Homo sapiens
agacugugagcuccucga

SEQ ID NO: 2868 - RNA, 22 nt, Homo sapiens
cuauacaaucuauugccuuccc

SEQ ID NO: 2869 - RNA, 22 nt, Homo sapiens
gggaaggcaauagauuguauag

SEQ ID NO: 2870 - RNA, 22 nt, Homo sapiens
cuauacagucuacugucuuucc

SEQ ID NO: 2871 - RNA, 22 nt, Homo sapiens
ggaaagacaguagacuguauag

SEQ ID NO: 2872 - RNA, 22 nt, Homo sapiens
ugagguaguagauuguauaguu

SEQ ID NO: 2873 - RNA, 22 nt, Homo sapiens
aacuauacaaucuacuaccuca

SEQ ID NO: 2874 - RNA, 22 nt, Homo sapiens
aaaaguaauugugguuuuggcc

SEQ ID NO: 2875 - RNA, 22 nt, Homo sapiens
ggccaaaaccacaauuacuuuu

SEQ ID NO: 2876 - RNA, 22 nt, Homo sapiens
aaaaguaauugcgguuuuugcc

SEQ ID NO: 2877 - RNA, 22 nt, Homo sapiens
ggcaaaaaccgcaauuacuuuu

SEQ ID NO: 2878 - RNA, 22 nt, Homo sapiens
ccucugaaauucaguucuucag

SEQ ID NO: 2879 - RNA, 22 nt, Homo sapiens
cugaagaacugaauuucagagg

SEQ ID NO: 2880 - RNA, 22 nt, Homo sapiens
ugagaacugaauuccauggguu

SEQ ID NO: 2881 - RNA, 22 nt, Homo sapiens
aacccauggaauucaguucuca

SEQ ID NO: 2882 - RNA, 22 nt, Homo sapiens
acagcaggcacagacaggcagu

SEQ ID NO: 2883 - RNA, 22 nt, Homo sapiens
acugccugucugugccugcugu

SEQ ID NO: 2884 - RNA, 22 nt, Homo sapiens
ugccugucuacacuugcugugc

SEQ ID NO: 2885 - RNA, 22 nt, Homo sapiens
gcacagcaaguguagacaggca

SEQ ID NO: 2886 - RNA, 22 nt, Homo sapiens
uagcaccaucugaaaucgguua

SEQ ID NO: 2887 - RNA, 22 nt, Homo sapiens
uaaccgauuucagauggugcua

SEQ ID NO: 2888 - RNA, 22 nt, Homo sapiens
acugauuucuuuugguguucag

SEQ ID NO: 2889 - RNA, 22 nt, Homo sapiens
cugaacaccaaaagaaaucagu

SEQ ID NO: 2890 - RNA, 24 nt, Homo sapiens
gcugguuucauauggugguuuaga

SEQ ID NO: 2891 - RNA, 24 nt, Homo sapiens
ucuaaaccaccauaugaaaccagc

SEQ ID NO: 2892 - RNA, 22 nt, Homo sapiens
cugguuucacaugguggcuuag

SEQ ID NO: 2893 - RNA, 22 nt, Homo sapiens
cuaagccaccaugugaaaccag

SEQ ID NO: 2894 - RNA, 23 nt, Homo sapiens
uagcaccauuugaaaucaguguu

SEQ ID NO: 2895 - RNA, 23 nt, Homo sapiens
aacacugauuucaaauggugcua

SEQ ID NO: 2896 - RNA, 22 nt, Homo sapiens
uagcaccauuugaaaucgguua

SEQ ID NO: 2897 - RNA, 22 nt, Homo sapiens
uaaccgauuucaaauggugcua

SEQ ID NO: 2898 - RNA, 22 nt, Homo sapiens
ugaccgauuucuccugguguuc

SEQ ID NO: 2899 - RNA, 22 nt, Homo sapiens
gaacaccaggagaaaucgguca

SEQ ID NO: 2900 - RNA, 23 nt, Homo sapiens
ugucacucggcucggcccacuac

SEQ ID NO: 2901 - RNA, 23 nt, Homo sapiens
guagugggccgagccgagugaca

SEQ ID NO: 2902 - RNA, 22 nt, Homo sapiens
cugccaauuccauaggucacag

SEQ ID NO: 2903 - RNA, 22 nt, Homo sapiens
cugugaccuauggaauuggcag

SEQ ID NO: 2904 - RNA, 21 nt, Homo sapiens
cugaccuaugaauugacagcc

SEQ ID NO: 2905 - RNA, 21 nt, Homo sapiens
ggcugucaauucauaggucag

SEQ ID NO: 2906 - RNA, 20 nt, Homo sapiens
acugccccaggugcugcugg

SEQ ID NO: 2907 - RNA, 20 nt, Homo sapiens
ccagcagcaccuggggcagu

SEQ ID NO: 2908 - RNA, 22 nt, Homo sapiens
aacgccauuaucacacuaaaua

SEQ ID NO: 2909 - RNA, 22 nt, Homo sapiens
uauuuagugugauaauggcguu

SEQ ID NO: 2910 - RNA, 22 nt, Homo sapiens
cuuucagucggauguuugcagc

SEQ ID NO: 2911 - RNA, 22 nt, Homo sapiens
gcugcaaacauccgacugaaag

SEQ ID NO: 2912 - RNA, 22 nt, Homo sapiens
aauugcacgguauccaucugua

SEQ ID NO: 2913 - RNA, 22 nt, Homo sapiens
uacagauggauaccgugcaauu

SEQ ID NO: 2914 - RNA, 22 nt, Homo sapiens
cggguggaucacgaugcaauuu

SEQ ID NO: 2915 - RNA, 22 nt, Homo sapiens
aaauugcaucgugauccacccg

SEQ ID NO: 2916 - RNA, 22 nt, Homo sapiens
cugggagguggauguuuacuuc

SEQ ID NO: 2917 - RNA, 22 nt, Homo sapiens
gaaguaaacauccaccucccag

SEQ ID NO: 2918 - RNA, 22 nt, Homo sapiens
uguaaacauccuacacucagcu

SEQ ID NO: 2919 - RNA, 22 nt, Homo sapiens
agcugaguguaggauguuuaca

SEQ ID NO: 2920 - RNA, 22 nt, Homo sapiens
cugggagaggguuguuuacucc

SEQ ID NO: 2921 - RNA, 22 nt, Homo sapiens
ggaguaaacaacccucucccag

SEQ ID NO: 2922 - RNA, 22 nt, Homo sapiens
cugggagaaggcuguuuacucu

SEQ ID NO: 2923 - RNA, 22 nt, Homo sapiens
agaguaaacagccuucucccag

SEQ ID NO: 2924 - RNA, 23 nt, Homo sapiens
uguaaacauccuacacucucagc

SEQ ID NO: 2925 - RNA, 23 nt, Homo sapiens
gcugagaguguaggauguuuaca

SEQ ID NO: 2926 - RNA, 22 nt, Homo sapiens
uuuuucauuauugcuccugacc

SEQ ID NO: 2927 - RNA, 22 nt, Homo sapiens
ggucaggagcaauaaugaaaaa

SEQ ID NO: 2928 - RNA, 23 nt, Homo sapiens
ucaagagcaauaacgaaaaaugu

SEQ ID NO: 2929 - RNA, 23 nt, Homo sapiens
acauuuuucguuauugcucuuga

SEQ ID NO: 2930 - RNA, 23 nt, Homo sapiens
caaagugcuuacagugcagguag

SEQ ID NO: 2931 - RNA, 23 nt, Homo sapiens
cuaccugcacuguaagcacuuug

SEQ ID NO: 2932 - RNA, 22 nt, Homo sapiens
ggauuccuggaaauacuguucu

SEQ ID NO: 2933 - RNA, 22 nt, Homo sapiens
agaacaguauuuccaggaaucc

SEQ ID NO: 2934 - RNA, 23 nt, Homo sapiens
guccaguuuucccaggaaucccu

SEQ ID NO: 2935 - RNA, 23 nt, Homo sapiens
agggauuccugggaaaacuggac

SEQ ID NO: 2936 - RNA, 22 nt, Homo sapiens
acugcauuaugagcacuuaaag

SEQ ID NO: 2937 - RNA, 22 nt, Homo sapiens
cuuuaagugcucauaaugcagu

SEQ ID NO: 2938 - RNA, 23 nt, Homo sapiens
uaaagugcuuauagugcagguag

SEQ ID NO: 2939 - RNA, 23 nt, Homo sapiens
cuaccugcacuauaagcacuuua

SEQ ID NO: 2940 - RNA, 22 nt, Homo sapiens
gaggguuggguggaggcucucc

SEQ ID NO: 2941 - RNA, 22 nt, Homo sapiens
ggagagccuccacccaacccuc

SEQ ID NO: 2942 - RNA, 22 nt, Homo sapiens
cugugcgugugacagcggcuga

SEQ ID NO: 2943 - RNA, 22 nt, Homo sapiens
ucagccgcugucacacgcacag

SEQ ID NO: 2944 - RNA, 22 nt, Homo sapiens
ccaguggggcugcuguuaucug

SEQ ID NO: 2945 - RNA, 22 nt, Homo sapiens
cagauaacagcagccccacugg

SEQ ID NO: 2946 - RNA, 22 nt, Homo sapiens
uguaacagcaacuccaugugga

SEQ ID NO: 2947 - RNA, 22 nt, Homo sapiens
uccacauggaguugcuguuaca

SEQ ID NO: 2948 - RNA, 22 nt, Homo sapiens
ucacaguggucucugggauuau

SEQ ID NO: 2949 - RNA, 22 nt, Homo sapiens
auaaucccagagaccacuguga

SEQ ID NO: 2950 - RNA, 22 nt, Homo sapiens
uaaucucagcuggcaacuguga

SEQ ID NO: 2951 - RNA, 22 nt, Homo sapiens
ucacaguugccagcugagauua

SEQ ID NO: 2952 - RNA, 22 nt, Homo sapiens
cagugccucggcagugcagccc

SEQ ID NO: 2953 - RNA, 22 nt, Homo sapiens
gggcugcacugccgaggcacug

SEQ ID NO: 2954 - RNA, 20 nt, Homo sapiens
gugcauugcuguugcauugc

SEQ ID NO: 2955 - RNA, 20 nt, Homo sapiens
gcaaugcaacagcaaugcac

SEQ ID NO: 2956 - RNA, 19 nt, Homo sapiens
acuggacuuggaggcagaa

SEQ ID NO: 2957 - RNA, 19 nt, Homo sapiens
uucugccuccaaguccagu

SEQ ID NO: 2958 - RNA, 25 nt, Homo sapiens
acuggacuuggagucagaagagugg

SEQ ID NO: 2959 - RNA, 25 nt, Homo sapiens
ccacucuucugacuccaaguccagu

SEQ ID NO: 2960 - RNA, 20 nt, Homo sapiens
acuggacuuggagucagaaa

SEQ ID NO: 2961 - RNA, 20 nt, Homo sapiens
uuucugacuccaaguccagu

SEQ ID NO: 2962 - RNA, 19 nt, Homo sapiens
acuggacuuggagucagga

SEQ ID NO: 2963 - RNA, 19 nt, Homo sapiens
uccugacuccaaguccagu

SEQ ID NO: 2964 - RNA, 20 nt, Homo sapiens
acuggacuuggagccagaag

SEQ ID NO: 2965 - RNA, 20 nt, Homo sapiens
cuucuggcuccaaguccagu

SEQ ID NO: 2966 - RNA, 20 nt, Homo sapiens
acugggcuuggagucagaag

SEQ ID NO: 2967 - RNA, 20 nt, Homo sapiens
cuucugacuccaagcccagu

SEQ ID NO: 2968 - RNA, 21 nt, Homo sapiens
acuggacuuggugucagaugg

SEQ ID NO: 2969 - RNA, 21 nt, Homo sapiens
ccaucugacaccaaguccagu

SEQ ID NO: 2970 - RNA, 21 nt, Homo sapiens
acuggacuaggagucagaagg

SEQ ID NO: 2971 - RNA, 21 nt, Homo sapiens
ccuucugacuccuaguccagu

SEQ ID NO: 2972 - RNA, 19 nt, Homo sapiens
acuggauuuggagccagaa

SEQ ID NO: 2973 - RNA, 19 nt, Homo sapiens
uucuggcuccaaauccagu

SEQ ID NO: 2974 - RNA, 20 nt, Homo sapiens
aggaauguuccuucuuugcc

SEQ ID NO: 2975 - RNA, 20 nt, Homo sapiens
ggcaaagaaggaacauuccu

SEQ ID NO: 2976 - RNA, 21 nt, Homo sapiens
ucagugcaugacagaacuugg

SEQ ID NO: 2977 - RNA, 21 nt, Homo sapiens
ccaaguucugucaugcacuga

SEQ ID NO: 2978 - RNA, 20 nt, Homo sapiens
ucacaccugccucgcccccc

SEQ ID NO: 2979 - RNA, 20 nt, Homo sapiens
ggggggcgaggcagguguga

SEQ ID NO: 2980 - RNA, 21 nt, Homo sapiens
gugggcgggggcaggugugug

SEQ ID NO: 2981 - RNA, 21 nt, Homo sapiens
cacacaccugcccccgcccac

SEQ ID NO: 2982 - RNA, 22 nt, Homo sapiens
acgcccuucccccccuucuuca

SEQ ID NO: 2983 - RNA, 22 nt, Homo sapiens
ugaagaagggggggaagggcgu

SEQ ID NO: 2984 - RNA, 22 nt, Homo sapiens
uugcauauguaggaugucccau

SEQ ID NO: 2985 - RNA, 22 nt, Homo sapiens
augggacauccuacauaugcaa

SEQ ID NO: 2986 - RNA, 23 nt, Homo sapiens
guuugcacgggugggccuugucu

SEQ ID NO: 2987 - RNA, 23 nt, Homo sapiens
agacaaggcccacccgugcaaac

SEQ ID NO: 2988 - RNA, 22 nt, Homo sapiens
gacuauagaacuuucccccuca

SEQ ID NO: 2989 - RNA, 22 nt, Homo sapiens
ugagggggaaaguucuauaguc

SEQ ID NO: 2990 - RNA, 21 nt, Homo sapiens
agggggaaaguucuauagucc

SEQ ID NO: 2991 - RNA, 21 nt, Homo sapiens
ggacuauagaacuuucccccu

SEQ ID NO: 2992 - RNA, 21 nt, Homo sapiens
cuuuuugcggucugggcuugc

SEQ ID NO: 2993 - RNA, 21 nt, Homo sapiens
gcaagcccagaccgcaaaaag

SEQ ID NO: 2994 - RNA, 21 nt, Homo sapiens
ucuuguguucucuagaucagu

SEQ ID NO: 2995 - RNA, 21 nt, Homo sapiens
acugaucuagagaacacaaga

SEQ ID NO: 2996 - RNA, 23 nt, Homo sapiens
cccaguguucagacuaccuguuc

SEQ ID NO: 2997 - RNA, 23 nt, Homo sapiens
gaacagguagucugaacacuggg

SEQ ID NO: 2998 - RNA, 22 nt, Homo sapiens
acaguagucugcacauugguua

SEQ ID NO: 2999 - RNA, 22 nt, Homo sapiens
uaaccaaugugcagacuacugu

SEQ ID NO: 3000 - RNA, 22 nt, Homo sapiens
acaguagucugcacauugguua

SEQ ID NO: 3001 - RNA, 22 nt, Homo sapiens
uaaccaaugugcagacuacugu

SEQ ID NO: 3002 - RNA, 23 nt, Homo sapiens
cccaguguuuagacuaucuguuc

SEQ ID NO: 3003 - RNA, 23 nt, Homo sapiens
gaacagauagucuaaacacuggg

SEQ ID NO: 3004 - RNA, 22 nt, Homo sapiens
uggagugugacaaugguguuug

SEQ ID NO: 3005 - RNA, 22 nt, Homo sapiens
caaacaccauugucacacucca

SEQ ID NO: 3006 - RNA, 22 nt, Homo sapiens
ugcccuaaaugccccuucuggc

SEQ ID NO: 3007 - RNA, 22 nt, Homo sapiens
gccagaaggggcauuuagggca

SEQ ID NO: 3008 - RNA, 23 nt, Homo sapiens
uaaggugcaucuagugcaguuag

SEQ ID NO: 3009 - RNA, 23 nt, Homo sapiens
cuaacugcacuagaugcaccuua

SEQ ID NO: 3010 - RNA, 22 nt, Homo sapiens
cuccuauaugaugccuuucuuc

SEQ ID NO: 3011 - RNA, 22 nt, Homo sapiens
gaagaaaggcaucauauaggag

SEQ ID NO: 3012 - RNA, 21 nt, Homo sapiens
gaacggcuucauacaggaguu

SEQ ID NO: 3013 - RNA, 21 nt, Homo sapiens
aacuccuguaugaagccguuc

SEQ ID NO: 3014 - RNA, 22 nt, Homo sapiens
ugugacugguugaccagagggg

SEQ ID NO: 3015 - RNA, 22 nt, Homo sapiens
ccccucuggucaaccagucaca

SEQ ID NO: 3016 - RNA, 23 nt, Homo sapiens
acugcccuaagugcuccuucugg

SEQ ID NO: 3017 - RNA, 23 nt, Homo sapiens
ccagaaggagcacuuagggcagu

SEQ ID NO: 3018 - RNA, 23 nt, Homo sapiens
uaaggugcaucuagugcagauag

SEQ ID NO: 3019 - RNA, 23 nt, Homo sapiens
cuaucugcacuagaugcaccuua

SEQ ID NO: 3020 - RNA, 22 nt, Homo sapiens
cagugcaaugaugaaagggcau

SEQ ID NO: 3021 - RNA, 22 nt, Homo sapiens
augcccuuucaucauugcacug

SEQ ID NO: 3022 - RNA, 21 nt, Homo sapiens
acucuuucccuguugcacuac

SEQ ID NO: 3023 - RNA, 21 nt, Homo sapiens
guagugcaacagggaaagagu

SEQ ID NO: 3024 - RNA, 24 nt, Homo sapiens
uuuggcaaugguagaacucacacu

SEQ ID NO: 3025 - RNA, 24 nt, Homo sapiens
agugugaguucuaccauugccaaa

SEQ ID NO: 3026 - RNA, 21 nt, Homo sapiens
agggcccccccucaauccugu

SEQ ID NO: 3027 - RNA, 21 nt, Homo sapiens
acaggauugagggggggcccu

SEQ ID NO: 3028 - RNA, 22 nt, Homo sapiens
cagugcaauguuaaaagggcau

SEQ ID NO: 3029 - RNA, 22 nt, Homo sapiens
augcccuuuuaacauugcacug

SEQ ID NO: 3030 - RNA, 22 nt, Homo sapiens
uucacauugugcuacugucugc

SEQ ID NO: 3031 - RNA, 22 nt, Homo sapiens
gcagacaguagcacaaugugaa

SEQ ID NO: 3032 - RNA, 22 nt, Homo sapiens
ucggauccgucugagcuuggcu

SEQ ID NO: 3033 - RNA, 22 nt, Homo sapiens
agccaagcucagacggauccga

SEQ ID NO: 3034 - RNA, 22 nt, Homo sapiens
cugaagcucagagggcucugau

SEQ ID NO: 3035 - RNA, 22 nt, Homo sapiens
aucagagcccucugagcuucag

SEQ ID NO: 3036 - RNA, 22 nt, Homo sapiens
ccucuuccccuugucucuccag

SEQ ID NO: 3037 - RNA, 22 nt, Homo sapiens
cuggagagacaaggggaagagg

SEQ ID NO: 3038 - RNA, 22 nt, Homo sapiens
ugagugacaggggaaaugggga

SEQ ID NO: 3039 - RNA, 22 nt, Homo sapiens
uccccauuuccccugucacuca

SEQ ID NO: 3040 - RNA, 22 nt, Homo sapiens
ucaggacacuucugaacuugga

SEQ ID NO: 3041 - RNA, 22 nt, Homo sapiens
uccaaguucagaaguguccuga

SEQ ID NO: 3042 - RNA, 22 nt, Homo sapiens
caguucagaaguguuccugagu

SEQ ID NO: 3043 - RNA, 22 nt, Homo sapiens
acucaggaacacuucugaacug

SEQ ID NO: 3044 - RNA, 21 nt, Homo sapiens
uuucccuuuccauccuggcag

SEQ ID NO: 3045 - RNA, 21 nt, Homo sapiens
cugccaggauggaaagggaaa

SEQ ID NO: 3046 - RNA, 21 nt, Homo sapiens
uugccagggcaggagguggaa

SEQ ID NO: 3047 - RNA, 21 nt, Homo sapiens
uuccaccuccugcccuggcaa

SEQ ID NO: 3048 - RNA, 21 nt, Homo sapiens
agagauugguagaaaucaggu

SEQ ID NO: 3049 - RNA, 21 nt, Homo sapiens
accugauuucuaccaaucucu

SEQ ID NO: 3050 - RNA, 23 nt, Homo sapiens
aaucggacccauuuaaaccggag

SEQ ID NO: 3051 - RNA, 23 nt, Homo sapiens
cuccgguuuaaauggguccgauu

SEQ ID NO: 3052 - RNA, 24 nt, Homo sapiens
ucugggcacaggcggauggacagg

SEQ ID NO: 3053 - RNA, 24 nt, Homo sapiens
ccuguccauccgccugugcccaga

SEQ ID NO: 3054 - RNA, 21 nt, Homo sapiens
ccagugacugagcuggagcca

SEQ ID NO: 3055 - RNA, 21 nt, Homo sapiens
uggcuccagcucagucacugg

SEQ ID NO: 3056 - RNA, 22 nt, Homo sapiens
aggauaggaagaaugaagugcu

SEQ ID NO: 3057 - RNA, 22 nt, Homo sapiens
agcacuucauucuuccuauccu

SEQ ID NO: 3058 - RNA, 22 nt, Homo sapiens
aggagaguggauuccagguggu

SEQ ID NO: 3059 - RNA, 22 nt, Homo sapiens
accaccuggaauccacucuccu

SEQ ID NO: 3060 - RNA, 22 nt, Homo sapiens
uccuccucuaccucaucccagu

SEQ ID NO: 3061 - RNA, 22 nt, Homo sapiens
acugggaugagguagaggagga

SEQ ID NO: 3062 - RNA, 22 nt, Homo sapiens
ugagggguuuggaaugggaugg

SEQ ID NO: 3063 - RNA, 22 nt, Homo sapiens
ccaucccauuccaaaccccuca

SEQ ID NO: 3064 - RNA, 21 nt, Homo sapiens
auccaguucucugagggggcu

SEQ ID NO: 3065 - RNA, 21 nt, Homo sapiens
agcccccucagagaacuggau

SEQ ID NO: 3066 - RNA, 22 nt, Homo sapiens
aaccccuaaggcaacuggaugg

SEQ ID NO: 3067 - RNA, 22 nt, Homo sapiens
ccauccaguugccuuagggguu

SEQ ID NO: 3068 - RNA, 21 nt, Homo sapiens
ucauccucgucucccucccag

SEQ ID NO: 3069 - RNA, 21 nt, Homo sapiens
cugggagggagacgaggauga

SEQ ID NO: 3070 - RNA, 22 nt, Homo sapiens
agggaaggggacgaggguuggg

SEQ ID NO: 3071 - RNA, 22 nt, Homo sapiens
cccaacccucguccccuucccu

SEQ ID NO: 3072 - RNA, 23 nt, Homo sapiens
aagaagagacugagucaucgaau

SEQ ID NO: 3073 - RNA, 23 nt, Homo sapiens
auucgaugacucagucucuucuu

SEQ ID NO: 3074 - RNA, 23 nt, Homo sapiens
caauggcacaaacucauucuuga

SEQ ID NO: 3075 - RNA, 23 nt, Homo sapiens
ucaagaaugaguuugugccauug

SEQ ID NO: 3076 - RNA, 21 nt, Homo sapiens
acugaauccucuuuuccucag

SEQ ID NO: 3077 - RNA, 21 nt, Homo sapiens
cugaggaaaagaggauucagu

SEQ ID NO: 3078 - RNA, 22 nt, Homo sapiens
ugggaugagggauugaagugga

SEQ ID NO: 3079 - RNA, 22 nt, Homo sapiens
uccacuucaaucccucauccca

SEQ ID NO: 3080 - RNA, 22 nt, Homo sapiens
caggccauauugugcugccuca

SEQ ID NO: 3081 - RNA, 22 nt, Homo sapiens
ugaggcagcacaauauggccug

SEQ ID NO: 3082 - RNA, 22 nt, Homo sapiens
uagcagcacauaaugguuugug

SEQ ID NO: 3083 - RNA, 22 nt, Homo sapiens
cacaaaccauuaugugcugcua

SEQ ID NO: 3084 - RNA, 22 nt, Homo sapiens
cgaaucauuauuugcugcucua

SEQ ID NO: 3085 - RNA, 22 nt, Homo sapiens
uagagcagcaaauaaugauucg

SEQ ID NO: 3086 - RNA, 22 nt, Homo sapiens
uagcagcacaucaugguuuaca

SEQ ID NO: 3087 - RNA, 22 nt, Homo sapiens
uguaaaccaugaugugcugcua

SEQ ID NO: 3088 - RNA, 22 nt, Homo sapiens
ccaauauuacugugcugcuuua

SEQ ID NO: 3089 - RNA, 22 nt, Homo sapiens
uaaagcagcacaguaauauugg

SEQ ID NO: 3090 - RNA, 22 nt, Homo sapiens
cuagguauggucccagggaucc

SEQ ID NO: 3091 - RNA, 22 nt, Homo sapiens
ggaucccugggaccauaccuag

SEQ ID NO: 3092 - RNA, 20 nt, Homo sapiens
guguguggaaaugcuucugc

SEQ ID NO: 3093 - RNA, 20 nt, Homo sapiens
gcagaagcauuuccacacac

SEQ ID NO: 3094 - RNA, 22 nt, Homo sapiens
gugugcggaaaugcuucugcua

SEQ ID NO: 3095 - RNA, 22 nt, Homo sapiens
uagcagaagcauuuccgcacac

SEQ ID NO: 3096 - RNA, 23 nt, Homo sapiens
agcagcauuguacagggcuauca

SEQ ID NO: 3097 - RNA, 23 nt, Homo sapiens
ugauagcccuguacaaugcugcu

SEQ ID NO: 3098 - RNA, 22 nt, Homo sapiens
aacuggcccucaaagucccgcu

SEQ ID NO: 3099 - RNA, 22 nt, Homo sapiens
agcgggacuuugagggccaguu

SEQ ID NO: 3100 - RNA, 22 nt, Homo sapiens
cgggguuuugagggcgagauga

SEQ ID NO: 3101 - RNA, 22 nt, Homo sapiens
ucaucucgcccucaaaaccccg

SEQ ID NO: 3102 - RNA, 21 nt, Homo sapiens
gcagggacagcaaaggggugc

SEQ ID NO: 3103 - RNA, 21 nt, Homo sapiens
gcaccccuuugcugucccugc

SEQ ID NO: 3104 - RNA, 22 nt, Homo sapiens
uucccuuugucauccuucgccu

SEQ ID NO: 3105 - RNA, 22 nt, Homo sapiens
aggcgaaggaugacaaagggaa

SEQ ID NO: 3106 - RNA, 23 nt, Homo sapiens
auggccaaaacugcaguuauuuu

SEQ ID NO: 3107 - RNA, 23 nt, Homo sapiens
aaaauaacugcaguuuuggccau

SEQ ID NO: 3108 - RNA, 25 nt, Homo sapiens
aaaaaccacaauuacuuuugcacca

SEQ ID NO: 3109 - RNA, 25 nt, Homo sapiens
uggugcaaaaguaauugugguuuuu

SEQ ID NO: 3110 - RNA, 21 nt, Homo sapiens
caaaagugaucgugguuuuug

SEQ ID NO: 3111 - RNA, 21 nt, Homo sapiens
caaaaaccacgaucacuuuug

SEQ ID NO: 3112 - RNA, 23 nt, Homo sapiens
caaagacugcaauuacuuuugcg

SEQ ID NO: 3113 - RNA, 23 nt, Homo sapiens
cgcaaaaguaauugcagucuuug

SEQ ID NO: 3114 - RNA, 23 nt, Homo sapiens
aaaaguaacugcgguuuuugccu

SEQ ID NO: 3115 - RNA, 23 nt, Homo sapiens
aggcaaaaaccgcaguuacuuuu

SEQ ID NO: 3116 - RNA, 22 nt, Homo sapiens
ugccuggaacauaguagggacu

SEQ ID NO: 3117 - RNA, 22 nt, Homo sapiens
agucccuacuauguuccaggca

SEQ ID NO: 3118 - RNA, 21 nt, Homo sapiens
auaggacucauauagugccag

SEQ ID NO: 3119 - RNA, 21 nt, Homo sapiens
cuggcacuauaugaguccuau

SEQ ID NO: 3120 - RNA, 20 nt, Homo sapiens
agacacuauacgagucauau

SEQ ID NO: 3121 - RNA, 20 nt, Homo sapiens
auaugacucguauagugucu

SEQ ID NO: 3122 - RNA, 23 nt, Homo sapiens
ugugacugcauuaugaaaauucu

SEQ ID NO: 3123 - RNA, 23 nt, Homo sapiens
agaauuuucauaaugcagucaca

SEQ ID NO: 3124 - RNA, 20 nt, Homo sapiens
uggcuuuuaacuuugauggc

SEQ ID NO: 3125 - RNA, 20 nt, Homo sapiens
gccaucaaaguuaaaagcca

SEQ ID NO: 3126 - RNA, 21 nt, Homo sapiens
cacagcaaguguagacaggca

SEQ ID NO: 3127 - RNA, 21 nt, Homo sapiens
ugccugucuacacuugcugug

SEQ ID NO: 3128 - RNA, 21 nt, Homo sapiens
ccugucugugccugcuguaca

SEQ ID NO: 3129 - RNA, 21 nt, Homo sapiens
uguacagcaggcacagacagg

SEQ ID NO: 3130 - RNA, 22 nt, Homo sapiens
uaaauagaguaggcaaaggaca

SEQ ID NO: 3131 - RNA, 22 nt, Homo sapiens
uguccuuugccuacucuauuua

SEQ ID NO: 3132 - RNA, 22 nt, Homo sapiens
uccuuugccuauucuauuuaag

SEQ ID NO: 3133 - RNA, 22 nt, Homo sapiens
cuuaaauagaauaggcaaagga

SEQ ID NO: 3134 - RNA, 22 nt, Homo sapiens
guugggacaagaggacggucuu

SEQ ID NO: 3135 - RNA, 22 nt, Homo sapiens
aagaccguccucuugucccaac

SEQ ID NO: 3136 - RNA, 17 nt, Homo sapiens
cagagaauuguuuaauc

SEQ ID NO: 3137 - RNA, 17 nt, Homo sapiens
gauuaaacaauucucug

SEQ ID NO: 3138 - RNA, 20 nt, Homo sapiens
uagaggaagcuguggagaga

SEQ ID NO: 3139 - RNA, 20 nt, Homo sapiens
ucucuccacagcuuccucua

SEQ ID NO: 3140 - RNA, 22 nt, Homo sapiens
uccccuucugcaggccugcugg

SEQ ID NO: 3141 - RNA, 22 nt, Homo sapiens
ccagcaggccugcagaagggga

SEQ ID NO: 3142 - RNA, 23 nt, Homo sapiens
aucagggcuuguggaaugggaag

SEQ ID NO: 3143 - RNA, 23 nt, Homo sapiens
cuucccauuccacaagcccugau

SEQ ID NO: 3144 - RNA, 23 nt, Homo sapiens
ucuggcaaguaaaaaacucucau

SEQ ID NO: 3145 - RNA, 23 nt, Homo sapiens
augagaguuuuuuacuugccaga

SEQ ID NO: 3146 - RNA, 23 nt, Homo sapiens
ucgaggacugguggaagggccuu

SEQ ID NO: 3147 - RNA, 23 nt, Homo sapiens
aaggcccuuccaccaguccucga

SEQ ID NO: 3148 - RNA, 24 nt, Homo sapiens
uggguagagaaggagcucagagga

SEQ ID NO: 3149 - RNA, 24 nt, Homo sapiens
uccucugagcuccuucucuaccca

SEQ ID NO: 3150 - RNA, 22 nt, Homo sapiens
uaaagaacucuuaaaacccaau

SEQ ID NO: 3151 - RNA, 22 nt, Homo sapiens
auuggguuuuaagaguucuuua

SEQ ID NO: 3152 - RNA, 23 nt, Homo sapiens
ugauggauaaaagacuacauauu

SEQ ID NO: 3153 - RNA, 23 nt, Homo sapiens
aauauguagucuuuuauccauca

SEQ ID NO: 3154 - RNA, 22 nt, Homo sapiens
ugccuaggcugagacugcagug

SEQ ID NO: 3155 - RNA, 22 nt, Homo sapiens
cacugcagucucagccuaggca

SEQ ID NO: 3156 - RNA, 22 nt, Homo sapiens
uggcccaaccuauucaguuagu

SEQ ID NO: 3157 - RNA, 22 nt, Homo sapiens
acuaacugaauagguugggcca

SEQ ID NO: 3158 - RNA, 23 nt, Homo sapiens
cugacugaauagguagggucauu

SEQ ID NO: 3159 - RNA, 23 nt, Homo sapiens
aaugacccuaccuauucagucag

SEQ ID NO: 3160 - RNA, 24 nt, Homo sapiens
ucuguagccugggagcaauggggu

SEQ ID NO: 3161 - RNA, 24 nt, Homo sapiens
accccauugcucccaggcuacaga

SEQ ID NO: 3162 - RNA, 23 nt, Homo sapiens
uaggagcucaacagaugccuguu

SEQ ID NO: 3163 - RNA, 23 nt, Homo sapiens
aacaggcaucuguugagcuccua

SEQ ID NO: 3164 - RNA, 19 nt, Homo sapiens
gagggcggguggaggagga

SEQ ID NO: 3165 - RNA, 19 nt, Homo sapiens
uccuccuccacccgcccuc

SEQ ID NO: 3166 - RNA, 25 nt, Homo sapiens
auaacauuguaaagcgcuucuuucg

SEQ ID NO: 3167 - RNA, 25 nt, Homo sapiens
cgaaagaagcgcuuuacaauguuau

SEQ ID NO: 3168 - RNA, 24 nt, Homo sapiens
agauauuuugaguguuuggaauug

SEQ ID NO: 3169 - RNA, 24 nt, Homo sapiens
caauuccaaacacucaaaauaucu

SEQ ID NO: 3170 - RNA, 22 nt, Homo sapiens
aacuccaaacacucaaaacuca

SEQ ID NO: 3171 - RNA, 22 nt, Homo sapiens
ugaguuuugaguguuuggaguu

SEQ ID NO: 3172 - RNA, 22 nt, Homo sapiens
caugcuaggauagaaagaaugg

SEQ ID NO: 3173 - RNA, 22 nt, Homo sapiens
ccauucuuucuauccuagcaug

SEQ ID NO: 3174 - RNA, 24 nt, Homo sapiens
gguugggcagugaggaggguguga

SEQ ID NO: 3175 - RNA, 24 nt, Homo sapiens
ucacacccuccucacugcccaacc

SEQ ID NO: 3176 - RNA, 22 nt, Homo sapiens
uggaaaaaacuggugugugcuu

SEQ ID NO: 3177 - RNA, 22 nt, Homo sapiens
aagcacacaccaguuuuuucca

SEQ ID NO: 3178 - RNA, 22 nt, Homo sapiens
cuggggagauccucgagguugg

SEQ ID NO: 3179 - RNA, 22 nt, Homo sapiens
ccaaccucgaggaucuccccag

SEQ ID NO: 3180 - RNA, 22 nt, Homo sapiens
caaccucgacgaucuccucagc

SEQ ID NO: 3181 - RNA, 22 nt, Homo sapiens
gcugaggagaucgucgagguug

SEQ ID NO: 3182 - RNA, 21 nt, Homo sapiens
ugaggagaucgucgagguugg

SEQ ID NO: 3183 - RNA, 21 nt, Homo sapiens
ccaaccucgacgaucuccuca

SEQ ID NO: 3184 - RNA, 22 nt, Homo sapiens
caaccucgaggaucuccccagc

SEQ ID NO: 3185 - RNA, 22 nt, Homo sapiens
gcuggggagauccucgagguug

SEQ ID NO: 3186 - RNA, 21 nt, Homo sapiens
gguggggcaaugggaucaggu

SEQ ID NO: 3187 - RNA, 21 nt, Homo sapiens
accugaucccauugccccacc

SEQ ID NO: 3188 - RNA, 23 nt, Homo sapiens
ggggaaagcgaguagggacauuu

SEQ ID NO: 3189 - RNA, 23 nt, Homo sapiens
aaaugucccuacucgcuuucccc

SEQ ID NO: 3190 - RNA, 22 nt, Homo sapiens
cagaaggggaguugggagcaga

SEQ ID NO: 3191 - RNA, 22 nt, Homo sapiens
ucugcucccaacuccccuucug

SEQ ID NO: 3192 - RNA, 21 nt, Homo sapiens
ccaggcucugcagugggaacu

SEQ ID NO: 3193 - RNA, 21 nt, Homo sapiens
aguucccacugcagagccugg

SEQ ID NO: 3194 - RNA, 21 nt, Homo sapiens
cucccacuuccagaucuuucu

SEQ ID NO: 3195 - RNA, 21 nt, Homo sapiens
agaaagaucuggaagugggag

SEQ ID NO: 3196 - RNA, 22 nt, Homo sapiens
aaagaucuggaagugggagaca

SEQ ID NO: 3197 - RNA, 22 nt, Homo sapiens
ugucucccacuuccagaucuuu

SEQ ID NO: 3198 - RNA, 22 nt, Homo sapiens
cugcccuagucuagcugaagcu

SEQ ID NO: 3199 - RNA, 22 nt, Homo sapiens
agcuucagcuagacuagggcag

SEQ ID NO: 3200 - RNA, 22 nt, Homo sapiens
uucagccaggcuagugcagucu

SEQ ID NO: 3201 - RNA, 22 nt, Homo sapiens
agacugcacuagccuggcugaa

SEQ ID NO: 3202 - RNA, 22 nt, Homo sapiens
uaggauuacaagugucggccac

SEQ ID NO: 3203 - RNA, 22 nt, Homo sapiens
guggccgacacuuguaauccua

SEQ ID NO: 3204 - RNA, 22 nt, Homo sapiens
agagcugagacuagaaagccca

SEQ ID NO: 3205 - RNA, 22 nt, Homo sapiens
ugggcuuucuagucucagcucu

SEQ ID NO: 3206 - RNA, 22 nt, Homo sapiens
ggcuuucuagucucagcucucc

SEQ ID NO: 3207 - RNA, 22 nt, Homo sapiens
ggagagcugagacuagaaagcc

SEQ ID NO: 3208 - RNA, 23 nt, Homo sapiens
cugauaagaacagaggcccagau

SEQ ID NO: 3209 - RNA, 23 nt, Homo sapiens
aucugggccucuguucuuaucag

SEQ ID NO: 3210 - RNA, 21 nt, Homo sapiens
ucccuaccccuccacucccca

SEQ ID NO: 3211 - RNA, 21 nt, Homo sapiens
uggggaguggagggguaggga

SEQ ID NO: 3212 - RNA, 23 nt, Homo sapiens
uuagggaguagaaggguggggag

SEQ ID NO: 3213 - RNA, 23 nt, Homo sapiens
cuccccacccuucuacucccuaa

SEQ ID NO: 3214 - RNA, 22 nt, Homo sapiens
uauaaaaugagggcaguaagac

SEQ ID NO: 3215 - RNA, 22 nt, Homo sapiens
gucuuacugcccucauuuuaua

SEQ ID NO: 3216 - RNA, 22 nt, Homo sapiens
ugugacuuuaagggaaauggcg

SEQ ID NO: 3217 - RNA, 22 nt, Homo sapiens
cgccauuucccuuaaagucaca

SEQ ID NO: 3218 - RNA, 22 nt, Homo sapiens
agguggaugcaaugugaccuca

SEQ ID NO: 3219 - RNA, 22 nt, Homo sapiens
ugaggucacauugcauccaccu

SEQ ID NO: 3220 - RNA, 23 nt, Homo sapiens
cgcagacaaugccuacuggccua

SEQ ID NO: 3221 - RNA, 23 nt, Homo sapiens
uaggccaguaggcauugucugcg

SEQ ID NO: 3222 - RNA, 17 nt, Homo sapiens
gaguucuacagucagac

SEQ ID NO: 3223 - RNA, 17 nt, Homo sapiens
gucugacuguagaacuc

SEQ ID NO: 3224 - RNA, 22 nt, Homo sapiens
uaggacugugcuuggcacauag

SEQ ID NO: 3225 - RNA, 22 nt, Homo sapiens
cuaugugccaagcacaguccua

SEQ ID NO: 3226 - RNA, 22 nt, Homo sapiens
cugggguucugagacagacagu

SEQ ID NO: 3227 - RNA, 22 nt, Homo sapiens
acugucugucucagaaccccag

SEQ ID NO: 3228 - RNA, 22 nt, Homo sapiens
aaaggaggaaauaggcaggcca

SEQ ID NO: 3229 - RNA, 22 nt, Homo sapiens
uggccugccuauuuccuccuuu

SEQ ID NO: 3230 - RNA, 22 nt, Homo sapiens
ugcccugccuguuuucuccuuu

SEQ ID NO: 3231 - RNA, 22 nt, Homo sapiens
aaaggagaaaacaggcagggca

SEQ ID NO: 3232 - RNA, 23 nt, Homo sapiens
uagugaguuagagaugcagagcc

SEQ ID NO: 3233 - RNA, 23 nt, Homo sapiens
ggcucugcaucucuaacucacua

SEQ ID NO: 3234 - RNA, 19 nt, Homo sapiens
acuggccugggacuaccgg

SEQ ID NO: 3235 - RNA, 19 nt, Homo sapiens
ccgguagucccaggccagu

SEQ ID NO: 3236 - RNA, 21 nt, Homo sapiens
ugcacggcacuggggacacgu

SEQ ID NO: 3237 - RNA, 21 nt, Homo sapiens
acguguccccagugccgugca

SEQ ID NO: 3238 - RNA, 23 nt, Homo sapiens
uguguacacacgugccaggcgcu

SEQ ID NO: 3239 - RNA, 23 nt, Homo sapiens
agcgccuggcacguguguacaca

SEQ ID NO: 3240 - RNA, 17 nt, Homo sapiens
ggggcgcggccggaucg

SEQ ID NO: 3241 - RNA, 17 nt, Homo sapiens
cgauccggccgcgcccc

SEQ ID NO: 3242 - RNA, 22 nt, Homo sapiens
agaaggggugaaauuuaaacgu

SEQ ID NO: 3243 - RNA, 22 nt, Homo sapiens
acguuuaaauuucaccccuucu

SEQ ID NO: 3244 - RNA, 19 nt, Homo sapiens
aucgggcccucggcgccgg

SEQ ID NO: 3245 - RNA, 19 nt, Homo sapiens
ccggcgccgagggcccgau

SEQ ID NO: 3246 - RNA, 17 nt, Homo sapiens
gcuucuguaguguaguc

SEQ ID NO: 3247 - RNA, 17 nt, Homo sapiens
gacuacacuacagaagc

SEQ ID NO: 3248 - RNA, 22 nt, Homo sapiens
gccucucucggagucgcucgga

SEQ ID NO: 3249 - RNA, 22 nt, Homo sapiens
uccgagcgacuccgagagaggc

SEQ ID NO: 3250 - RNA, 23 nt, Homo sapiens
aaagucucgcucucugccccuca

SEQ ID NO: 3251 - RNA, 23 nt, Homo sapiens
ugaggggcagagagcgagacuuu

SEQ ID NO: 3252 - RNA, 24 nt, Homo sapiens
ugaggggccucagaccgagcuuuu

SEQ ID NO: 3253 - RNA, 24 nt, Homo sapiens
aaaagcucggucugaggccccuca

SEQ ID NO: 3254 - RNA, 23 nt, Homo sapiens
agaagaaggcggucggucugcgg

SEQ ID NO: 3255 - RNA, 23 nt, Homo sapiens
ccgcagaccgaccgccuucuucu

SEQ ID NO: 3256 - RNA, 20 nt, Homo sapiens
uuggccauggggcugcgcgg

SEQ ID NO: 3257 - RNA, 20 nt, Homo sapiens
ccgcgcagccccauggccaa

SEQ ID NO: 3258 - RNA, 23 nt, Homo sapiens
ccugggcagcguguggcugaagg

SEQ ID NO: 3259 - RNA, 23 nt, Homo sapiens
ccuucagccacacgcugcccagg

SEQ ID NO: 3260 - RNA, 23 nt, Homo sapiens
agaggcuuugugcggauacgggg

SEQ ID NO: 3261 - RNA, 23 nt, Homo sapiens
ccccguauccgcacaaagccucu

SEQ ID NO: 3262 - RNA, 21 nt, Homo sapiens
cccuugggucugaugggguag

SEQ ID NO: 3263 - RNA, 21 nt, Homo sapiens
cuaccccaucagacccaaggg

SEQ ID NO: 3264 - RNA, 25 nt, Homo sapiens
ugccccaucugugcccuggguagga

SEQ ID NO: 3265 - RNA, 25 nt, Homo sapiens
uccuacccagggcacagauggggca

SEQ ID NO: 3266 - RNA, 23 nt, Homo sapiens
uguggaagguagacggccagaga

SEQ ID NO: 3267 - RNA, 23 nt, Homo sapiens
ucucuggccgucuaccuuccaca

SEQ ID NO: 3268 - RNA, 20 nt, Homo sapiens
ucuggccagcuacgucccca

SEQ ID NO: 3269 - RNA, 20 nt, Homo sapiens
uggggacguagcuggccaga

SEQ ID NO: 3270 - RNA, 23 nt, Homo sapiens
uggggacguagcuggccagacag

SEQ ID NO: 3271 - RNA, 23 nt, Homo sapiens
cugucuggccagcuacgucccca

SEQ ID NO: 3272 - RNA, 22 nt, Homo sapiens
cucucuggccgucuaccuucca

SEQ ID NO: 3273 - RNA, 22 nt, Homo sapiens
uggaagguagacggccagagag

SEQ ID NO: 3274 - RNA, 23 nt, Homo sapiens
ucugggagguuguagcaguggaa

SEQ ID NO: 3275 - RNA, 23 nt, Homo sapiens
uuccacugcuacaaccucccaga

SEQ ID NO: 3276 - RNA, 22 nt, Homo sapiens
uccugcguaggaucugaggagu

SEQ ID NO: 3277 - RNA, 22 nt, Homo sapiens
acuccucagauccuacgcagga

SEQ ID NO: 3278 - RNA, 22 nt, Homo sapiens
agcucugcugcucacuggcagu

SEQ ID NO: 3279 - RNA, 22 nt, Homo sapiens
acugccagugagcagcagagcu

SEQ ID NO: 3280 - RNA, 21 nt, Homo sapiens
ggccagccaccaggagggcug

SEQ ID NO: 3281 - RNA, 21 nt, Homo sapiens
cagcccuccugguggcuggcc

SEQ ID NO: 3282 - RNA, 17 nt, Homo sapiens
cgcgccgggcccggguu

SEQ ID NO: 3283 - RNA, 17 nt, Homo sapiens
aacccgggcccggcgcg

SEQ ID NO: 3284 - RNA, 23 nt, Homo sapiens
ggaggcgcaggcucggaaaggcg

SEQ ID NO: 3285 - RNA, 23 nt, Homo sapiens
cgccuuuccgagccugcgccucc

SEQ ID NO: 3286 - RNA, 22 nt, Homo sapiens
guggaguccuggggaauggaga

SEQ ID NO: 3287 - RNA, 22 nt, Homo sapiens
ucuccauuccccaggacuccac

SEQ ID NO: 3288 - RNA, 23 nt, Homo sapiens
agggacugccuuaggagaaaguu

SEQ ID NO: 3289 - RNA, 23 nt, Homo sapiens
aacuuucuccuaaggcagucccu

SEQ ID NO: 3290 - RNA, 17 nt, Homo sapiens
gggauaugaagaaaaau

SEQ ID NO: 3291 - RNA, 17 nt, Homo sapiens
auuuuucuucauauccc

SEQ ID NO: 3292 - RNA, 22 nt, Homo sapiens
uggaagggagaagagcuuuaau

SEQ ID NO: 3293 - RNA, 22 nt, Homo sapiens
auuaaagcucuucucccuucca

SEQ ID NO: 3294 - RNA, 22 nt, Homo sapiens
acuuuccucacucccgugaagu

SEQ ID NO: 3295 - RNA, 22 nt, Homo sapiens
acuucacgggagugaggaaagu

SEQ ID NO: 3296 - RNA, 21 nt, Homo sapiens
uucgcgggcgaaggcaaaguc

SEQ ID NO: 3297 - RNA, 21 nt, Homo sapiens
gacuuugccuucgcccgcgaa

SEQ ID NO: 3298 - RNA, 22 nt, Homo sapiens
caucuggcauccgucacacaga

SEQ ID NO: 3299 - RNA, 22 nt, Homo sapiens
ucugugugacggaugccagaug

SEQ ID NO: 3300 - RNA, 22 nt, Homo sapiens
ugagggacagaugccagaagca

SEQ ID NO: 3301 - RNA, 22 nt, Homo sapiens
ugcuucuggcaucugucccuca

SEQ ID NO: 3302 - RNA, 22 nt, Homo sapiens
aaacuaaucucuacacugcugc

SEQ ID NO: 3303 - RNA, 22 nt, Homo sapiens
gcagcaguguagagauuaguuu

SEQ ID NO: 3304 - RNA, 22 nt, Homo sapiens
gcaguaguguagagauugguuu

SEQ ID NO: 3305 - RNA, 22 nt, Homo sapiens
aaaccaaucucuacacuacugc

SEQ ID NO: 3306 - RNA, 21 nt, Homo sapiens
gcugcaccggagacuggguaa

SEQ ID NO: 3307 - RNA, 21 nt, Homo sapiens
uuacccagucuccggugcagc

SEQ ID NO: 3308 - RNA, 21 nt, Homo sapiens
uacccagucuccggugcagcc

SEQ ID NO: 3309 - RNA, 21 nt, Homo sapiens
ggcugcaccggagacugggua

SEQ ID NO: 3310 - RNA, 24 nt, Homo sapiens
uguggacagugagguagagggagu

SEQ ID NO: 3311 - RNA, 24 nt, Homo sapiens
acucccucuaccucacuguccaca

SEQ ID NO: 3312 - RNA, 22 nt, Homo sapiens
agcuuuugggaauucagguagu

SEQ ID NO: 3313 - RNA, 22 nt, Homo sapiens
acuaccugaauucccaaaagcu

SEQ ID NO: 3314 - RNA, 21 nt, Homo sapiens
accugaauuaccaaaagcuuu

SEQ ID NO: 3315 - RNA, 21 nt, Homo sapiens
aaagcuuuugguaauucaggu

SEQ ID NO: 3316 - RNA, 22 nt, Homo sapiens
auauaccuguucggucucuuua

SEQ ID NO: 3317 - RNA, 22 nt, Homo sapiens
uaaagagaccgaacagguauau

SEQ ID NO: 3318 - RNA, 22 nt, Homo sapiens
aggggaccaaagagauauauag

SEQ ID NO: 3319 - RNA, 22 nt, Homo sapiens
cuauauaucucuuugguccccu

SEQ ID NO: 3320 - RNA, 23 nt, Homo sapiens
uuuguauggauauguguguguau

SEQ ID NO: 3321 - RNA, 23 nt, Homo sapiens
auacacacacauauccauacaaa

SEQ ID NO: 3322 - RNA, 22 nt, Homo sapiens
uguguuagaauaggggcaauaa

SEQ ID NO: 3323 - RNA, 22 nt, Homo sapiens
uuauugccccuauucuaacaca

SEQ ID NO: 3324 - RNA, 22 nt, Homo sapiens
auugccucuguucuaacacaag

SEQ ID NO: 3325 - RNA, 22 nt, Homo sapiens
cuuguguuagaacagaggcaau

SEQ ID NO: 3326 - RNA, 22 nt, Homo sapiens
aagggcuuccucucugcaggac

SEQ ID NO: 3327 - RNA, 22 nt, Homo sapiens
guccugcagagaggaagcccuu

SEQ ID NO: 3328 - RNA, 21 nt, Homo sapiens
ccugcagagaggaagcccuuc

SEQ ID NO: 3329 - RNA, 21 nt, Homo sapiens
gaagggcuuccucucugcagg

SEQ ID NO: 3330 - RNA, 22 nt, Homo sapiens
aggauuucagaaauacuggugu

SEQ ID NO: 3331 - RNA, 22 nt, Homo sapiens
acaccaguauuucugaaauccu

SEQ ID NO: 3332 - RNA, 24 nt, Homo sapiens
agauguauggaaucuguauauauc

SEQ ID NO: 3333 - RNA, 24 nt, Homo sapiens
gauauauacagauuccauacaucu

SEQ ID NO: 3334 - RNA, 22 nt, Homo sapiens
cggggagagaacgcagugacgu

SEQ ID NO: 3335 - RNA, 22 nt, Homo sapiens
acgucacugcguucucuccccg

SEQ ID NO: 3336 - RNA, 19 nt, Homo sapiens
uggggcggagcuuccggag

SEQ ID NO: 3337 - RNA, 19 nt, Homo sapiens
cuccggaagcuccgcccca

SEQ ID NO: 3338 - RNA, 21 nt, Homo sapiens
ucacgcggagagauggcuuug

SEQ ID NO: 3339 - RNA, 21 nt, Homo sapiens
caaagccaucucuccgcguga

SEQ ID NO: 3340 - RNA, 22 nt, Homo sapiens
caggcgucugucuacguggcuu

SEQ ID NO: 3341 - RNA, 22 nt, Homo sapiens
aagccacguagacagacgccug

SEQ ID NO: 3342 - RNA, 22 nt, Homo sapiens
caccuugcgcuacucaggucug

SEQ ID NO: 3343 - RNA, 22 nt, Homo sapiens
cagaccugaguagcgcaaggug

SEQ ID NO: 3344 - RNA, 22 nt, Homo sapiens
aaucugagaaggcgcacaaggu

SEQ ID NO: 3345 - RNA, 22 nt, Homo sapiens
accuugugcgccuucucagauu

SEQ ID NO: 3346 - RNA, 22 nt, Homo sapiens
aaggccuuucugaaccuucaga

SEQ ID NO: 3347 - RNA, 22 nt, Homo sapiens
ucugaagguucagaaaggccuu

SEQ ID NO: 3348 - RNA, 22 nt, Homo sapiens
gugacaucacauauacggcagc

SEQ ID NO: 3349 - RNA, 22 nt, Homo sapiens
gcugccguauaugugaugucac

SEQ ID NO: 3350 - RNA, 24 nt, Homo sapiens
ucagaacaaaugccgguucccaga

SEQ ID NO: 3351 - RNA, 24 nt, Homo sapiens
ucugggaaccggcauuuguucuga

SEQ ID NO: 3352 - RNA, 22 nt, Homo sapiens
ugagaaccacgucugcucugag

SEQ ID NO: 3353 - RNA, 22 nt, Homo sapiens
cucagagcagacgugguucuca

SEQ ID NO: 3354 - RNA, 17 nt, Homo sapiens
ucauauugcuucuuucu

SEQ ID NO: 3355 - RNA, 17 nt, Homo sapiens
agaaagaagcaauauga

SEQ ID NO: 3356 - RNA, 22 nt, Homo sapiens
ugugacagauugauaacugaaa

SEQ ID NO: 3357 - RNA, 22 nt, Homo sapiens
uuucaguuaucaaucugucaca

SEQ ID NO: 3358 - RNA, 23 nt, Homo sapiens
uggaguccaggaaucugcauuuu

SEQ ID NO: 3359 - RNA, 23 nt, Homo sapiens
aaaaugcagauuccuggacucca

SEQ ID NO: 3360 - RNA, 22 nt, Homo sapiens
aagcccuuaccccaaaaaguau

SEQ ID NO: 3361 - RNA, 22 nt, Homo sapiens
auacuuuuugggguaagggcuu

SEQ ID NO: 3362 - RNA, 22 nt, Homo sapiens
aagcccuuaccccaaaaagcau

SEQ ID NO: 3363 - RNA, 22 nt, Homo sapiens
augcuuuuugggguaagggcuu

SEQ ID NO: 3364 - RNA, 22 nt, Homo sapiens
uggaauguaaggaagugugugg

SEQ ID NO: 3365 - RNA, 22 nt, Homo sapiens
ccacacacuuccuuacauucca

SEQ ID NO: 3366 - RNA, 22 nt, Homo sapiens
cuuaucagauuguauuguaauu

SEQ ID NO: 3367 - RNA, 22 nt, Homo sapiens
aauuacaauacaaucugauaag

SEQ ID NO: 3368 - RNA, 22 nt, Homo sapiens
uuauaauacaaccugauaagug

SEQ ID NO: 3369 - RNA, 22 nt, Homo sapiens
cacuuaucagguuguauuauaa

SEQ ID NO: 3370 - RNA, 22 nt, Homo sapiens
cuuagcagguuguauuaucauu

SEQ ID NO: 3371 - RNA, 22 nt, Homo sapiens
aaugauaauacaaccugcuaag

SEQ ID NO: 3372 - RNA, 22 nt, Homo sapiens
auauaauacaaccugcuaagug

SEQ ID NO: 3373 - RNA, 22 nt, Homo sapiens
cacuuagcagguuguauuauau

SEQ ID NO: 3374 - RNA, 22 nt, Homo sapiens
cacuuagcagguuguauuauau

SEQ ID NO: 3375 - RNA, 22 nt, Homo sapiens
auauaauacaaccugcuaagug

SEQ ID NO: 3376 - RNA, 22 nt, Homo sapiens
auaauacaaccugcuaagugcu

SEQ ID NO: 3377 - RNA, 22 nt, Homo sapiens
agcacuuagcagguuguauuau

SEQ ID NO: 3378 - RNA, 22 nt, Homo sapiens
uuugguccccuucaaccagcug

SEQ ID NO: 3379 - RNA, 22 nt, Homo sapiens
cagcugguugaaggggaccaaa

SEQ ID NO: 3380 - RNA, 22 nt, Homo sapiens
uuugguccccuucaaccagcua

SEQ ID NO: 3381 - RNA, 22 nt, Homo sapiens
uagcugguugaaggggaccaaa

SEQ ID NO: 3382 - RNA, 22 nt, Homo sapiens
uguaaacauccuugacuggaag

SEQ ID NO: 3383 - RNA, 22 nt, Homo sapiens
cuuccagucaaggauguuuaca

SEQ ID NO: 3384 - RNA, 22 nt, Homo sapiens
ugucaguuugucaaauacccca

SEQ ID NO: 3385 - RNA, 22 nt, Homo sapiens
ugggguauuugacaaacugaca

SEQ ID NO: 3386 - RNA, 22 nt, Homo sapiens
cguguauuugacaagcugaguu

SEQ ID NO: 3387 - RNA, 22 nt, Homo sapiens
aacucagcuugucaaauacacg

SEQ ID NO: 3388 - RNA, 21 nt, Homo sapiens
uucacaguggcuaaguuccgc

SEQ ID NO: 3389 - RNA, 21 nt, Homo sapiens
gcggaacuuagccacugugaa

SEQ ID NO: 3390 - RNA, 22 nt, Homo sapiens
agggcuuagcugcuugugagca

SEQ ID NO: 3391 - RNA, 22 nt, Homo sapiens
ugcucacaagcagcuaagcccu

SEQ ID NO: 3392 - RNA, 21 nt, Homo sapiens
aucacauugccagggauuacc

SEQ ID NO: 3393 - RNA, 21 nt, Homo sapiens
gguaaucccuggcaaugugau

SEQ ID NO: 3394 - RNA, 22 nt, Homo sapiens
uggguuccuggcaugcugauuu

SEQ ID NO: 3395 - RNA, 22 nt, Homo sapiens
aaaucagcaugccaggaaccca

SEQ ID NO: 3396 - RNA, 22 nt, Homo sapiens
cuuucagucggauguuuacagc

SEQ ID NO: 3397 - RNA, 22 nt, Homo sapiens
gcuguaaacauccgacugaaag

SEQ ID NO: 3398 - RNA, 22 nt, Homo sapiens
ugccuacugagcugauaucagu

SEQ ID NO: 3399 - RNA, 22 nt, Homo sapiens
acugauaucagcucaguaggca

SEQ ID NO: 3400 - RNA, 22 nt, Homo sapiens
ugccuacugagcugaaacacag

SEQ ID NO: 3401 - RNA, 22 nt, Homo sapiens
cuguguuucagcucaguaggca

SEQ ID NO: 3402 - RNA, 22 nt, Homo sapiens
uggcucaguucagcaggaacag

SEQ ID NO: 3403 - RNA, 22 nt, Homo sapiens
cuguuccugcugaacugagcca

SEQ ID NO: 3404 - RNA, 21 nt, Homo sapiens
uucacaguggcuaaguucugc

SEQ ID NO: 3405 - RNA, 21 nt, Homo sapiens
gcagaacuuagccacugugaa

SEQ ID NO: 3406 - RNA, 22 nt, Homo sapiens
agagcuuagcugauuggugaac

SEQ ID NO: 3407 - RNA, 22 nt, Homo sapiens
guucaccaaucagcuaagcucu

SEQ ID NO: 3408 - RNA, 23 nt, Homo sapiens
uguaguguuuccuacuuuaugga

SEQ ID NO: 3409 - RNA, 23 nt, Homo sapiens
uccauaaaguaggaaacacuaca

SEQ ID NO: 3410 - RNA, 21 nt, Homo sapiens
cauaaaguagaaagcacuacu

SEQ ID NO: 3411 - RNA, 21 nt, Homo sapiens
aguagugcuuucuacuuuaug

SEQ ID NO: 3412 - RNA, 22 nt, Homo sapiens
ugaaggucuacugugugccagg

SEQ ID NO: 3413 - RNA, 22 nt, Homo sapiens
ccuggcacacaguagaccuuca

SEQ ID NO: 3414 - RNA, 22 nt, Homo sapiens
uuguacaugguaggcuuucauu

SEQ ID NO: 3415 - RNA, 22 nt, Homo sapiens
aaugaaagccuaccauguacaa

SEQ ID NO: 3416 - RNA, 21 nt, Homo sapiens
cuggauggcuccuccaugucu

SEQ ID NO: 3417 - RNA, 21 nt, Homo sapiens
agacauggaggagccauccag

SEQ ID NO: 3418 - RNA, 23 nt, Homo sapiens
ucuuggaguaggucauugggugg

SEQ ID NO: 3419 - RNA, 23 nt, Homo sapiens
ccacccaaugaccuacuccaaga

SEQ ID NO: 3420 - RNA, 22 nt, Homo sapiens
cucaucugcaaagaaguaagug

SEQ ID NO: 3421 - RNA, 22 nt, Homo sapiens
cacuuacuucuuugcagaugag

SEQ ID NO: 3422 - RNA, 22 nt, Homo sapiens
aacuguuugcagaggaaacuga

SEQ ID NO: 3423 - RNA, 22 nt, Homo sapiens
ucaguuuccucugcaaacaguu

SEQ ID NO: 3424 - RNA, 22 nt, Homo sapiens
cuugguucagggagggucccca

SEQ ID NO: 3425 - RNA, 22 nt, Homo sapiens
uggggacccucccugaaccaag

SEQ ID NO: 3426 - RNA, 22 nt, Homo sapiens
aggaccuucccugaaccaagga

SEQ ID NO: 3427 - RNA, 22 nt, Homo sapiens
uccuugguucagggaagguccu

SEQ ID NO: 3428 - RNA, 21 nt, Homo sapiens
accuccugugugcauggauua

SEQ ID NO: 3429 - RNA, 21 nt, Homo sapiens
uaauccaugcacacaggaggu

SEQ ID NO: 3430 - RNA, 22 nt, Homo sapiens
uacccauugcauaucggaguug

SEQ ID NO: 3431 - RNA, 22 nt, Homo sapiens
caacuccgauaugcaaugggua

SEQ ID NO: 3432 - RNA, 18 nt, Homo sapiens
aaagcuggguugagaagg

SEQ ID NO: 3433 - RNA, 18 nt, Homo sapiens
ccuucucaacccagcuuu

SEQ ID NO: 3434 - RNA, 20 nt, Homo sapiens
gguauccguuuggggauggu

SEQ ID NO: 3435 - RNA, 20 nt, Homo sapiens
accauccccaaacggauacc

SEQ ID NO: 3436 - RNA, 22 nt, Homo sapiens
gaaggcagcagugcuccccugu

SEQ ID NO: 3437 - RNA, 22 nt, Homo sapiens
acaggggagcacugcugccuuc

SEQ ID NO: 3438 - RNA, 22 nt, Homo sapiens
ucagugcaucacagaacuuugu

SEQ ID NO: 3439 - RNA, 22 nt, Homo sapiens
acaaaguucugugaugcacuga

SEQ ID NO: 3440 - RNA, 22 nt, Homo sapiens
aaguucuguuauacacucaggc

SEQ ID NO: 3441 - RNA, 22 nt, Homo sapiens
gccugaguguauaacagaacuu

SEQ ID NO: 3442 - RNA, 22 nt, Homo sapiens
cuggcccucucugcccuuccgu

SEQ ID NO: 3443 - RNA, 22 nt, Homo sapiens
acggaagggcagagagggccag

SEQ ID NO: 3444 - RNA, 21 nt, Homo sapiens
cuagacugaagcuccuugagg

SEQ ID NO: 3445 - RNA, 21 nt, Homo sapiens
ccucaaggagcuucagucuag

SEQ ID NO: 3446 - RNA, 21 nt, Homo sapiens
ucgaggagcucacagucuagu

SEQ ID NO: 3447 - RNA, 21 nt, Homo sapiens
acuagacugugagcuccucga

SEQ ID NO: 3448 - RNA, 21 nt, Homo sapiens
cacauuacacggucgaccucu

SEQ ID NO: 3449 - RNA, 21 nt, Homo sapiens
agaggucgaccguguaaugug

SEQ ID NO: 3450 - RNA, 22 nt, Homo sapiens
aggugguccguggcgcguucgc

SEQ ID NO: 3451 - RNA, 22 nt, Homo sapiens
gcgaacgcgccacggaccaccu

SEQ ID NO: 3452 - RNA, 23 nt, Homo sapiens
cgcauccccuagggcauuggugu

SEQ ID NO: 3453 - RNA, 23 nt, Homo sapiens
acaccaaugcccuaggggaugcg

SEQ ID NO: 3454 - RNA, 20 nt, Homo sapiens
ccucugggcccuuccuccag

SEQ ID NO: 3455 - RNA, 20 nt, Homo sapiens
cuggaggaagggcccagagg

SEQ ID NO: 3456 - RNA, 23 nt, Homo sapiens
ccuaguagguguccaguaagugu

SEQ ID NO: 3457 - RNA, 23 nt, Homo sapiens
acacuuacuggacaccuacuagg

SEQ ID NO: 3458 - RNA, 21 nt, Homo sapiens
acggugcuggauguggccuuu

SEQ ID NO: 3459 - RNA, 21 nt, Homo sapiens
aaaggccacauccagcaccgu

SEQ ID NO: 3460 - RNA, 23 nt, Homo sapiens
ucagcaccaggauauuguuggag

SEQ ID NO: 3461 - RNA, 23 nt, Homo sapiens
cuccaacaauauccuggugcuga

SEQ ID NO: 3462 - RNA, 23 nt, Homo sapiens
ucaacaaaaucacugaugcugga

SEQ ID NO: 3463 - RNA, 23 nt, Homo sapiens
uccagcaucagugauuuuguuga

SEQ ID NO: 3464 - RNA, 22 nt, Homo sapiens
aacaauauccuggugcugagug

SEQ ID NO: 3465 - RNA, 22 nt, Homo sapiens
cacucagcaccaggauauuguu

SEQ ID NO: 3466 - RNA, 23 nt, Homo sapiens
ggcagguucucacccucucuagg

SEQ ID NO: 3467 - RNA, 23 nt, Homo sapiens
ccuagagagggugagaaccugcc

SEQ ID NO: 3468 - RNA, 23 nt, Homo sapiens
gacacgggcgacagcugcggccc

SEQ ID NO: 3469 - RNA, 23 nt, Homo sapiens
gggccgcagcugucgcccguguc

SEQ ID NO: 3470 - RNA, 21 nt, Homo sapiens
auguaugugugcaugugcaug

SEQ ID NO: 3471 - RNA, 21 nt, Homo sapiens
caugcacaugcacacauacau

SEQ ID NO: 3472 - RNA, 22 nt, Homo sapiens
uauacaagggcagacucucucu

SEQ ID NO: 3473 - RNA, 22 nt, Homo sapiens
agagagagucugcccuuguaua

SEQ ID NO: 3474 - RNA, 20 nt, Homo sapiens
ggcggcggcggaggcggggg

SEQ ID NO: 3475 - RNA, 20 nt, Homo sapiens
cccccgccuccgccgccgcc

SEQ ID NO: 3476 - RNA, 22 nt, Homo sapiens
gcaggugcucacuuguccuccu

SEQ ID NO: 3477 - RNA, 22 nt, Homo sapiens
aggaggacaagugagcaccugc

SEQ ID NO: 3478 - RNA, 19 nt, Homo sapiens
ggggccuggcggugggcgg

SEQ ID NO: 3479 - RNA, 19 nt, Homo sapiens
ccgcccaccgccaggcccc

SEQ ID NO: 3480 - RNA, 22 nt, Homo sapiens
gcccaaaggugaauuuuuuggg

SEQ ID NO: 3481 - RNA, 22 nt, Homo sapiens
cccaaaaaauucaccuuugggc

SEQ ID NO: 3482 - RNA, 22 nt, Homo sapiens
caaagaauucuccuuuugggcu

SEQ ID NO: 3483 - RNA, 22 nt, Homo sapiens
agcccaaaaggagaauucuuug

SEQ ID NO: 3484 - RNA, 22 nt, Homo sapiens
cugcaauguaagcacuucuuac

SEQ ID NO: 3485 - RNA, 22 nt, Homo sapiens
guaagaagugcuuacauugcag

SEQ ID NO: 3486 - RNA, 23 nt, Homo sapiens
aaaagugcuuacagugcagguag

SEQ ID NO: 3487 - RNA, 23 nt, Homo sapiens
cuaccugcacuguaagcacuuuu

SEQ ID NO: 3488 - RNA, 22 nt, Homo sapiens
acuguaguaugggcacuuccag

SEQ ID NO: 3489 - RNA, 22 nt, Homo sapiens
cuggaagugcccauacuacagu

SEQ ID NO: 3490 - RNA, 23 nt, Homo sapiens
caaagugcucauagugcagguag

SEQ ID NO: 3491 - RNA, 23 nt, Homo sapiens
cuaccugcacuaugagcacuuug

SEQ ID NO: 3492 - RNA, 23 nt, Homo sapiens
gggguauuguuuccgcugccagg

SEQ ID NO: 3493 - RNA, 23 nt, Homo sapiens
ccuggcagcggaaacaauacccc

SEQ ID NO: 3494 - RNA, 23 nt, Homo sapiens
uagcagcgggaacaguucugcag

SEQ ID NO: 3495 - RNA, 23 nt, Homo sapiens
cugcagaacuguucccgcugcua

SEQ ID NO: 3496 - RNA, 21 nt, Homo sapiens
cgagccucaagcaagggacuu

SEQ ID NO: 3497 - RNA, 21 nt, Homo sapiens
aagucccuugcuugaggcucg

SEQ ID NO: 3498 - RNA, 22 nt, Homo sapiens
uagucccuuccuugaagcgguc

SEQ ID NO: 3499 - RNA, 22 nt, Homo sapiens
gaccgcuucaaggaagggacua

SEQ ID NO: 3500 - RNA, 21 nt, Homo sapiens
acuggacuuggagucagaagg

SEQ ID NO: 3501 - RNA, 21 nt, Homo sapiens
ccuucugacuccaaguccagu

SEQ ID NO: 3502 - RNA, 22 nt, Homo sapiens
cuccugacuccagguccugugu

SEQ ID NO: 3503 - RNA, 22 nt, Homo sapiens
acacaggaccuggagucaggag

SEQ ID NO: 3504 - RNA, 22 nt, Homo sapiens
uuuguucguucggcucgcguga

SEQ ID NO: 3505 - RNA, 22 nt, Homo sapiens
ucacgcgagccgaacgaacaaa

SEQ ID NO: 3506 - RNA, 22 nt, Homo sapiens
acggauguuugagcaugugcua

SEQ ID NO: 3507 - RNA, 22 nt, Homo sapiens
uagcacaugcucaaacauccgu

SEQ ID NO: 3508 - RNA, 23 nt, Homo sapiens
ucaaaugcucagacuccuguggu

SEQ ID NO: 3509 - RNA, 23 nt, Homo sapiens
accacaggagucugagcauuuga

SEQ ID NO: 3510 - RNA, 22 nt, Homo sapiens
cggcaacaagaaacugccugag

SEQ ID NO: 3511 - RNA, 22 nt, Homo sapiens
cucaggcaguuucuuguugccg

SEQ ID NO: 3512 - RNA, 22 nt, Homo sapiens
uagguaguuucauguuguuggg

SEQ ID NO: 3513 - RNA, 22 nt, Homo sapiens
cccaacaacaugaaacuaccua

SEQ ID NO: 3514 - RNA, 22 nt, Homo sapiens
caauguuuccacagugcaucac

SEQ ID NO: 3515 - RNA, 22 nt, Homo sapiens
gugaugcacuguggaaacauug

SEQ ID NO: 3516 - RNA, 21 nt, Homo sapiens
gugcauuguaguugcauugca

SEQ ID NO: 3517 - RNA, 21 nt, Homo sapiens
ugcaaugcaacuacaaugcac

SEQ ID NO: 3518 - RNA, 18 nt, Homo sapiens
aucccaccucugccacca

SEQ ID NO: 3519 - RNA, 18 nt, Homo sapiens
ugguggcagaggugggau

SEQ ID NO: 3520 - RNA, 19 nt, Homo sapiens
aucccaccacugccaccau

SEQ ID NO: 3521 - RNA, 19 nt, Homo sapiens
augguggcaguggugggau

SEQ ID NO: 3522 - RNA, 22 nt, Homo sapiens
accuuccucuccaugggucuuu

SEQ ID NO: 3523 - RNA, 22 nt, Homo sapiens
aaagacccauggagaggaaggu

SEQ ID NO: 3524 - RNA, 22 nt, Homo sapiens
aaagacccauugaggagaaggu

SEQ ID NO: 3525 - RNA, 22 nt, Homo sapiens
accuucuccucaaugggucuuu

SEQ ID NO: 3526 - RNA, 21 nt, Homo sapiens
aauguagagauugaucaaaau

SEQ ID NO: 3527 - RNA, 21 nt, Homo sapiens
auuuugaucaaucucuacauu

SEQ ID NO: 3528 - RNA, 23 nt, Homo sapiens
acggaauauguauacggaauaua

SEQ ID NO: 3529 - RNA, 23 nt, Homo sapiens
uauauuccguauacauauuccgu

SEQ ID NO: 3530 - RNA, 24 nt, Homo sapiens
agagcucacagcuguccuucucua

SEQ ID NO: 3531 - RNA, 24 nt, Homo sapiens
uagagaaggacagcugugagcucu

SEQ ID NO: 3532 - RNA, 22 nt, Homo sapiens
aucaaauaaggacuagucugca

SEQ ID NO: 3533 - RNA, 22 nt, Homo sapiens
ugcagacuaguccuuauuugau

SEQ ID NO: 3534 - RNA, 23 nt, Homo sapiens
augagacucauguaaaacaucuu

SEQ ID NO: 3535 - RNA, 23 nt, Homo sapiens
aagauguuuuacaugagucucau

SEQ ID NO: 3536 - RNA, 21 nt, Homo sapiens
auggaauguauauacggaaua

SEQ ID NO: 3537 - RNA, 21 nt, Homo sapiens
uauuccguauauacauuccau

SEQ ID NO: 3538 - RNA, 22 nt, Homo sapiens
auuguagaaccuaagauuggcc

SEQ ID NO: 3539 - RNA, 22 nt, Homo sapiens
ggccaaucuuagguucuacaau

SEQ ID NO: 3540 - RNA, 22 nt, Homo sapiens
caucucuaaggaacucccccaa

SEQ ID NO: 3541 - RNA, 22 nt, Homo sapiens
uugggggaguuccuuagagaug

SEQ ID NO: 3542 - RNA, 23 nt, Homo sapiens
uauggggcuucuguagagauuuc

SEQ ID NO: 3543 - RNA, 23 nt, Homo sapiens
gaaaucucuacagaagccccaua

SEQ ID NO: 3544 - RNA, 20 nt, Homo sapiens
ccguguuucccccacgcuuu

SEQ ID NO: 3545 - RNA, 20 nt, Homo sapiens
aaagcgugggggaaacacgg

SEQ ID NO: 3546 - RNA, 15 nt, Homo sapiens
aggagauccuggguu

SEQ ID NO: 3547 - RNA, 15 nt, Homo sapiens
aacccaggaucuccu

SEQ ID NO: 3548 - RNA, 22 nt, Homo sapiens
cucgugggcucuggccacggcc

SEQ ID NO: 3549 - RNA, 22 nt, Homo sapiens
ggccguggccagagcccacgag

SEQ ID NO: 3550 - RNA, 22 nt, Homo sapiens
caguggccagagcccugcagug

SEQ ID NO: 3551 - RNA, 22 nt, Homo sapiens
cacugcagggcucuggccacug

SEQ ID NO: 3552 - RNA, 22 nt, Homo sapiens
cugcagaguuuguacggaccgg

SEQ ID NO: 3553 - RNA, 22 nt, Homo sapiens
ccgguccguacaaacucugcag

SEQ ID NO: 3554 - RNA, 20 nt, Homo sapiens
uccguacaaacucugcugug

SEQ ID NO: 3555 - RNA, 20 nt, Homo sapiens
cacagcagaguuuguacgga

SEQ ID NO: 3556 - RNA, 22 nt, Homo sapiens
cuuccccccaguaaucuucauc

SEQ ID NO: 3557 - RNA, 22 nt, Homo sapiens
gaugaagauuacuggggggaag

SEQ ID NO: 3558 - RNA, 23 nt, Homo sapiens
ugaggauauggcagggaagggga

SEQ ID NO: 3559 - RNA, 23 nt, Homo sapiens
uccccuucccugccauauccuca

SEQ ID NO: 3560 - RNA, 23 nt, Homo sapiens
uuuugcaugacccugggaguagg

SEQ ID NO: 3561 - RNA, 23 nt, Homo sapiens
ccuacucccagggucaugcaaaa

SEQ ID NO: 3562 - RNA, 22 nt, Homo sapiens
gacucacucacaggauugugca

SEQ ID NO: 3563 - RNA, 22 nt, Homo sapiens
ugcacaauccugugagugaguc

SEQ ID NO: 3564 - RNA, 22 nt, Homo sapiens
acacagugcuucauccacuacu

SEQ ID NO: 3565 - RNA, 22 nt, Homo sapiens
aguaguggaugaagcacugugu

SEQ ID NO: 3566 - RNA, 22 nt, Homo sapiens
uaguggaugaugcacucugugc

SEQ ID NO: 3567 - RNA, 22 nt, Homo sapiens
gcacagagugcaucauccacua

SEQ ID NO: 3568 - RNA, 21 nt, Homo sapiens
ugaugauacagguggagguag

SEQ ID NO: 3569 - RNA, 21 nt, Homo sapiens
cuaccuccaccuguaucauca

SEQ ID NO: 3570 - RNA, 22 nt, Homo sapiens
cuacuucuaccuguguuaucau

SEQ ID NO: 3571 - RNA, 22 nt, Homo sapiens
augauaacacagguagaaguag

SEQ ID NO: 3572 - RNA, 22 nt, Homo sapiens
ugcgacauuggaaguaguauca

SEQ ID NO: 3573 - RNA, 22 nt, Homo sapiens
ugauacuacuuccaaugucgca

SEQ ID NO: 3574 - RNA, 21 nt, Homo sapiens
uuagaccuaguacacguccuu

SEQ ID NO: 3575 - RNA, 21 nt, Homo sapiens
aaggacguguacuaggucuaa

SEQ ID NO: 3576 - RNA, 22 nt, Homo sapiens
uuuccuacccuaccugaagacu

SEQ ID NO: 3577 - RNA, 22 nt, Homo sapiens
agucuucagguaggguaggaaa

SEQ ID NO: 3578 - RNA, 22 nt, Homo sapiens
aucuguaagagaaaguaaauga

SEQ ID NO: 3579 - RNA, 22 nt, Homo sapiens
ucauuuacuuucucuuacagau

SEQ ID NO: 3580 - RNA, 24 nt, Homo sapiens
cccggacaggcguucgugcgacgu

SEQ ID NO: 3581 - RNA, 24 nt, Homo sapiens
acgucgcacgaacgccuguccggg

SEQ ID NO: 3582 - RNA, 23 nt, Homo sapiens
accuggacccagcguagacaaag

SEQ ID NO: 3583 - RNA, 23 nt, Homo sapiens
cuuugucuacgcuggguccaggu

SEQ ID NO: 3584 - RNA, 22 nt, Homo sapiens
accaagucugcgucauccucuc

SEQ ID NO: 3585 - RNA, 22 nt, Homo sapiens
gagaggaugacgcagacuuggu

SEQ ID NO: 3586 - RNA, 23 nt, Homo sapiens
aguggaugauggagacucgguac

SEQ ID NO: 3587 - RNA, 23 nt, Homo sapiens
guaccgagucuccaucauccacu

SEQ ID NO: 3588 - RNA, 24 nt, Homo sapiens
guuccacacugacacugcagaagu

SEQ ID NO: 3589 - RNA, 24 nt, Homo sapiens
acuucugcagugucaguguggaac

SEQ ID NO: 3590 - RNA, 24 nt, Homo sapiens
ccugcuggucaggaguggauacug

SEQ ID NO: 3591 - RNA, 24 nt, Homo sapiens
caguauccacuccugaccagcagg

SEQ ID NO: 3592 - RNA, 23 nt, Homo sapiens
gagggucuugggagggaugugac

SEQ ID NO: 3593 - RNA, 23 nt, Homo sapiens
gucacaucccucccaagacccuc

SEQ ID NO: 3594 - RNA, 22 nt, Homo sapiens
auauacagggggagacucuuau

SEQ ID NO: 3595 - RNA, 22 nt, Homo sapiens
auaagagucucccccuguauau

SEQ ID NO: 3596 - RNA, 22 nt, Homo sapiens
auauacagggggagacucucau

SEQ ID NO: 3597 - RNA, 22 nt, Homo sapiens
augagagucucccccuguauau

SEQ ID NO: 3598 - RNA, 21 nt, Homo sapiens
agaggauacccuuuguauguu

SEQ ID NO: 3599 - RNA, 21 nt, Homo sapiens
aacauacaaaggguauccucu

SEQ ID NO: 3600 - RNA, 22 nt, Homo sapiens
ucuacaaaggaaagcgcuuucu

SEQ ID NO: 3601 - RNA, 22 nt, Homo sapiens
agaaagcgcuuuccuuuguaga

SEQ ID NO: 3602 - RNA, 22 nt, Homo sapiens
ucaaaacugaggggcauuuucu

SEQ ID NO: 3603 - RNA, 22 nt, Homo sapiens
agaaaaugccccucaguuuuga

SEQ ID NO: 3604 - RNA, 24 nt, Homo sapiens
uucuccaaaagaaagcacuuucug

SEQ ID NO: 3605 - RNA, 24 nt, Homo sapiens
cagaaagugcuuucuuuuggagaa

SEQ ID NO: 3606 - RNA, 23 nt, Homo sapiens
uucucgaggaaagaagcacuuuc

SEQ ID NO: 3607 - RNA, 23 nt, Homo sapiens
gaaagugcuucuuuccucgagaa

SEQ ID NO: 3608 - RNA, 22 nt, Homo sapiens
ccucuagauggaagcacugucu

SEQ ID NO: 3609 - RNA, 22 nt, Homo sapiens
agacagugcuuccaucuagagg

SEQ ID NO: 3610 - RNA, 22 nt, Homo sapiens
aucgugcaucccuuuagagugu

SEQ ID NO: 3611 - RNA, 22 nt, Homo sapiens
acacucuaaagggaugcacgau

SEQ ID NO: 3612 - RNA, 22 nt, Homo sapiens
aucgugcaucccuuuagagugu

SEQ ID NO: 3613 - RNA, 22 nt, Homo sapiens
acacucuaaagggaugcacgau

SEQ ID NO: 3614 - RNA, 22 nt, Homo sapiens
aucgugcauccuuuuagagugu

SEQ ID NO: 3615 - RNA, 22 nt, Homo sapiens
acacucuaaaaggaugcacgau

SEQ ID NO: 3616 - RNA, 22 nt, Homo sapiens
caaagcgcuccccuuuagaggu

SEQ ID NO: 3617 - RNA, 22 nt, Homo sapiens
accucuaaaggggagcgcuuug

SEQ ID NO: 3618 - RNA, 23 nt, Homo sapiens
caaagcgcuucucuuuagagugu

SEQ ID NO: 3619 - RNA, 23 nt, Homo sapiens
acacucuaaagagaagcgcuuug

SEQ ID NO: 3620 - RNA, 23 nt, Homo sapiens
ucucuggagggaagcacuuucug

SEQ ID NO: 3621 - RNA, 23 nt, Homo sapiens
cagaaagugcuucccuccagaga

SEQ ID NO: 3622 - RNA, 21 nt, Homo sapiens
gaaagcgcuucucuuuagagg

SEQ ID NO: 3623 - RNA, 21 nt, Homo sapiens
ccucuaaagagaagcgcuuuc

SEQ ID NO: 3624 - RNA, 22 nt, Homo sapiens
cucuagagggaagcacuuucuc

SEQ ID NO: 3625 - RNA, 22 nt, Homo sapiens
gagaaagugcuucccucuagag

SEQ ID NO: 3626 - RNA, 22 nt, Homo sapiens
aaagugcauccuuuuagagugu

SEQ ID NO: 3627 - RNA, 22 nt, Homo sapiens
acacucuaaaaggaugcacuuu

SEQ ID NO: 3628 - RNA, 22 nt, Homo sapiens
cucuagagggaagcgcuuucug

SEQ ID NO: 3629 - RNA, 22 nt, Homo sapiens
cagaaagcgcuucccucuagag

SEQ ID NO: 3630 - RNA, 22 nt, Homo sapiens
caaagugccucccuuuagagug

SEQ ID NO: 3631 - RNA, 22 nt, Homo sapiens
cacucuaaagggaggcacuuug

SEQ ID NO: 3632 - RNA, 22 nt, Homo sapiens
aagugccuccuuuuagaguguu

SEQ ID NO: 3633 - RNA, 22 nt, Homo sapiens
aacacucuaaaaggaggcacuu

SEQ ID NO: 3634 - RNA, 22 nt, Homo sapiens
uucuccaaaagggagcacuuuc

SEQ ID NO: 3635 - RNA, 22 nt, Homo sapiens
gaaagugcucccuuuuggagaa

SEQ ID NO: 3636 - RNA, 22 nt, Homo sapiens
aaagugcuucccuuuggacugu

SEQ ID NO: 3637 - RNA, 22 nt, Homo sapiens
acaguccaaagggaagcacuuu

SEQ ID NO: 3638 - RNA, 21 nt, Homo sapiens
cuccagagggaaguacuuucu

SEQ ID NO: 3639 - RNA, 21 nt, Homo sapiens
agaaaguacuucccucuggag

SEQ ID NO: 3640 - RNA, 22 nt, Homo sapiens
acaaagugcuucccuuuagagu

SEQ ID NO: 3641 - RNA, 22 nt, Homo sapiens
acucuaaagggaagcacuuugu

SEQ ID NO: 3642 - RNA, 22 nt, Homo sapiens
cuacaaagggaagcacuuucuc

SEQ ID NO: 3643 - RNA, 22 nt, Homo sapiens
gagaaagugcuucccuuuguag

SEQ ID NO: 3644 - RNA, 22 nt, Homo sapiens
gaaggcgcuucccuuuagagcg

SEQ ID NO: 3645 - RNA, 22 nt, Homo sapiens
cgcucuaaagggaagcgccuuc

SEQ ID NO: 3646 - RNA, 21 nt, Homo sapiens
cuccagagggaugcacuuucu

SEQ ID NO: 3647 - RNA, 21 nt, Homo sapiens
agaaagugcaucccucuggag

SEQ ID NO: 3648 - RNA, 22 nt, Homo sapiens
cucuagagggaagcacuuucug

SEQ ID NO: 3649 - RNA, 22 nt, Homo sapiens
cagaaagugcuucccucuagag

SEQ ID NO: 3650 - RNA, 22 nt, Homo sapiens
gaaagugcuuccuuuuagaggc

SEQ ID NO: 3651 - RNA, 22 nt, Homo sapiens
gccucuaaaaggaagcacuuuc

SEQ ID NO: 3652 - RNA, 23 nt, Homo sapiens
cucuugagggaagcacuuucugu

SEQ ID NO: 3653 - RNA, 23 nt, Homo sapiens
acagaaagugcuucccucaagag

SEQ ID NO: 3654 - RNA, 22 nt, Homo sapiens
acuggacuuagggucagaaggc

SEQ ID NO: 3655 - RNA, 22 nt, Homo sapiens
gccuucugacccuaaguccagu

SEQ ID NO: 3656 - RNA, 22 nt, Homo sapiens
aaacaaacauggugcacuucuu

SEQ ID NO: 3657 - RNA, 22 nt, Homo sapiens
aagaagugcaccauguuuguuu

SEQ ID NO: 3658 - RNA, 22 nt, Homo sapiens
gaaguugcccauguuauuuucg

SEQ ID NO: 3659 - RNA, 22 nt, Homo sapiens
cgaaaauaacaugggcaacuuc

SEQ ID NO: 3660 - RNA, 21 nt, Homo sapiens
aaucauucacggacaacacuu

SEQ ID NO: 3661 - RNA, 21 nt, Homo sapiens
aaguguuguccgugaaugauu

SEQ ID NO: 3662 - RNA, 22 nt, Homo sapiens
gaaguuguucgugguggauucg

SEQ ID NO: 3663 - RNA, 22 nt, Homo sapiens
cgaauccaccacgaacaacuuc

SEQ ID NO: 3664 - RNA, 23 nt, Homo sapiens
ccuccguguuaccuguccucuag

SEQ ID NO: 3665 - RNA, 23 nt, Homo sapiens
cuagaggacagguaacacggagg

SEQ ID NO: 3666 - RNA, 23 nt, Homo sapiens
ugaggauggauagcaaggaagcc

SEQ ID NO: 3667 - RNA, 23 nt, Homo sapiens
ggcuuccuugcuauccauccuca

SEQ ID NO: 3668 - RNA, 22 nt, Homo sapiens
uucagaucccagcggugccucu

SEQ ID NO: 3669 - RNA, 22 nt, Homo sapiens
agaggcaccgcugggaucugaa

SEQ ID NO: 3670 - RNA, 19 nt, Homo sapiens
guccuaggaggcuccucug

SEQ ID NO: 3671 - RNA, 19 nt, Homo sapiens
cagaggagccuccuaggac

SEQ ID NO: 3672 - RNA, 21 nt, Homo sapiens
caauucucaaaggagccuccc

SEQ ID NO: 3673 - RNA, 21 nt, Homo sapiens
gggaggcuccuuugagaauug

SEQ ID NO: 3674 - RNA, 21 nt, Homo sapiens
guuggggugcaggggucugcu

SEQ ID NO: 3675 - RNA, 21 nt, Homo sapiens
agcagaccccugcaccccaac

SEQ ID NO: 3676 - RNA, 22 nt, Homo sapiens
uuuccggcucgcgugggugugu

SEQ ID NO: 3677 - RNA, 22 nt, Homo sapiens
acacacccacgcgagccggaaa

SEQ ID NO: 3678 - RNA, 23 nt, Homo sapiens
ugagugugugugugugagugugu

SEQ ID NO: 3679 - RNA, 23 nt, Homo sapiens
acacacucacacacacacacuca

SEQ ID NO: 3680 - RNA, 22 nt, Homo sapiens
agugggaggccagggcacggca

SEQ ID NO: 3681 - RNA, 22 nt, Homo sapiens
ugccgugcccuggccucccacu

SEQ ID NO: 3682 - RNA, 20 nt, Homo sapiens
ugagcccuguccucccgcag

SEQ ID NO: 3683 - RNA, 20 nt, Homo sapiens
cugcgggaggacagggcuca

SEQ ID NO: 3684 - RNA, 23 nt, Homo sapiens
aagugccgccaucuuuugagugu

SEQ ID NO: 3685 - RNA, 23 nt, Homo sapiens
acacucaaaagauggcggcacuu

SEQ ID NO: 3686 - RNA, 20 nt, Homo sapiens
acucaaacugugggggcacu

SEQ ID NO: 3687 - RNA, 20 nt, Homo sapiens
agugcccccacaguuugagu

SEQ ID NO: 3688 - RNA, 23 nt, Homo sapiens
aagugcccccacaguuugagugc

SEQ ID NO: 3689 - RNA, 23 nt, Homo sapiens
gcacucaaacugugggggcacuu

SEQ ID NO: 3690 - RNA, 22 nt, Homo sapiens
acucaaaagauggcggcacuuu

SEQ ID NO: 3691 - RNA, 22 nt, Homo sapiens
aaagugccgccaucuuuugagu

SEQ ID NO: 3692 - RNA, 22 nt, Homo sapiens
aaaccuguguuguucaagaguc

SEQ ID NO: 3693 - RNA, 22 nt, Homo sapiens
gacucuugaacaacacagguuu

SEQ ID NO: 3694 - RNA, 22 nt, Homo sapiens
acaguagagggaggaaucgcag

SEQ ID NO: 3695 - RNA, 22 nt, Homo sapiens
cugcgauuccucccucuacugu

SEQ ID NO: 3696 - RNA, 22 nt, Homo sapiens
gugaaauguuuaggaccacuag

SEQ ID NO: 3697 - RNA, 22 nt, Homo sapiens
cuagugguccuaaacauuucac

SEQ ID NO: 3698 - RNA, 23 nt, Homo sapiens
uugaacuguuaagaaccacugga

SEQ ID NO: 3699 - RNA, 23 nt, Homo sapiens
uccagugguucuuaacaguucaa

SEQ ID NO: 3700 - RNA, 22 nt, Homo sapiens
uagugguccuaaacauuucaca

SEQ ID NO: 3701 - RNA, 22 nt, Homo sapiens
ugugaaauguuuaggaccacua

SEQ ID NO: 3702 - RNA, 21 nt, Homo sapiens
ugcaggaccaagaugagcccu

SEQ ID NO: 3703 - RNA, 21 nt, Homo sapiens
agggcucaucuugguccugca

SEQ ID NO: 3704 - RNA, 21 nt, Homo sapiens
cucccacaugcaggguuugca

SEQ ID NO: 3705 - RNA, 21 nt, Homo sapiens
ugcaaacccugcaugugggag

SEQ ID NO: 3706 - RNA, 21 nt, Homo sapiens
caucccuugcaugguggaggg

SEQ ID NO: 3707 - RNA, 21 nt, Homo sapiens
cccuccaccaugcaagggaug

SEQ ID NO: 3708 - RNA, 22 nt, Homo sapiens
aaaaugaaaugagcccagccca

SEQ ID NO: 3709 - RNA, 22 nt, Homo sapiens
ugggcugggcucauuucauuuu

SEQ ID NO: 3710 - RNA, 21 nt, Homo sapiens
agccgcggggaucgccgaggg

SEQ ID NO: 3711 - RNA, 21 nt, Homo sapiens
cccucggcgauccccgcggcu

SEQ ID NO: 3712 - RNA, 19 nt, Homo sapiens
agggaccugagugucuaag

SEQ ID NO: 3713 - RNA, 19 nt, Homo sapiens
cuuagacacucaggucccu

SEQ ID NO: 3714 - RNA, 19 nt, Homo sapiens
aggugugucuguagagucc

SEQ ID NO: 3715 - RNA, 19 nt, Homo sapiens
ggacucuacagacacaccu

SEQ ID NO: 3716 - RNA, 24 nt, Homo sapiens
cauagcccggucgcugguacauga

SEQ ID NO: 3717 - RNA, 24 nt, Homo sapiens
ucauguaccagcgaccgggcuaug

SEQ ID NO: 3718 - RNA, 18 nt, Homo sapiens
cggcuggaggugugagga

SEQ ID NO: 3719 - RNA, 18 nt, Homo sapiens
uccucacaccuccagccg

SEQ ID NO: 3720 - RNA, 18 nt, Homo sapiens
cuaagaaguugacugaag

SEQ ID NO: 3721 - RNA, 18 nt, Homo sapiens
cuucagucaacuucuuag

SEQ ID NO: 3722 - RNA, 19 nt, Homo sapiens
gacuggacaagcugaggaa

SEQ ID NO: 3723 - RNA, 19 nt, Homo sapiens
uuccucagcuuguccaguc

SEQ ID NO: 3724 - RNA, 21 nt, Homo sapiens
gcuugucgcugcgguguugcu

SEQ ID NO: 3725 - RNA, 21 nt, Homo sapiens
agcaacaccgcagcgacaagc

SEQ ID NO: 3726 - RNA, 17 nt, Homo sapiens
ggcgggugcgggggugg

SEQ ID NO: 3727 - RNA, 17 nt, Homo sapiens
ccacccccgcacccgcc

SEQ ID NO: 3728 - RNA, 21 nt, Homo sapiens
ugugucccauuauuggugauu

SEQ ID NO: 3729 - RNA, 21 nt, Homo sapiens
aaucaccaauaaugggacaca

SEQ ID NO: 3730 - RNA, 22 nt, Homo sapiens
uuuaagaaaacaccauggagau

SEQ ID NO: 3731 - RNA, 22 nt, Homo sapiens
aucuccaugguguuuucuuaaa

SEQ ID NO: 3732 - RNA, 22 nt, Homo sapiens
gcuauuucacgacaccaggguu

SEQ ID NO: 3733 - RNA, 22 nt, Homo sapiens
aacccuggugucgugaaauagc

SEQ ID NO: 3734 - RNA, 23 nt, Homo sapiens
agcugguguugugaaucaggccg

SEQ ID NO: 3735 - RNA, 23 nt, Homo sapiens
cggccugauucacaacaccagcu

SEQ ID NO: 3736 - RNA, 21 nt, Homo sapiens
aauaauacaugguugaucuuu

SEQ ID NO: 3737 - RNA, 21 nt, Homo sapiens
aaagaucaaccauguauuauu

SEQ ID NO: 3738 - RNA, 22 nt, Homo sapiens
agaucgaccguguuauauucgc

SEQ ID NO: 3739 - RNA, 22 nt, Homo sapiens
gcgaauauaacacggucgaucu

SEQ ID NO: 3740 - RNA, 22 nt, Homo sapiens
aaucaugugcagugccaauaug

SEQ ID NO: 3741 - RNA, 22 nt, Homo sapiens
cauauuggcacugcacaugauu

SEQ ID NO: 3742 - RNA, 23 nt, Homo sapiens
uuuggcacuagcacauuuuugcu

SEQ ID NO: 3743 - RNA, 23 nt, Homo sapiens
agcaaaaaugugcuagugccaaa

SEQ ID NO: 3744 - RNA, 22 nt, Homo sapiens
uccuguacugagcugccccgag

SEQ ID NO: 3745 - RNA, 22 nt, Homo sapiens
cucggggcagcucaguacagga

SEQ ID NO: 3746 - RNA, 22 nt, Homo sapiens
gcuacuucacaacaccagggcc

SEQ ID NO: 3747 - RNA, 22 nt, Homo sapiens
ggcccugguguugugaaguagc

SEQ ID NO: 3748 - RNA, 22 nt, Homo sapiens
caucaucgucucaaaugagucu

SEQ ID NO: 3749 - RNA, 22 nt, Homo sapiens
agacucauuugagacgaugaug

SEQ ID NO: 3750 - RNA, 23 nt, Homo sapiens
acuccauuuguuuugaugaugga

SEQ ID NO: 3751 - RNA, 23 nt, Homo sapiens
uccaucaucaaaacaaauggagu

SEQ ID NO: 3752 - RNA, 22 nt, Homo sapiens
cuccuacauauuagcauuaaca

SEQ ID NO: 3753 - RNA, 22 nt, Homo sapiens
uguuaaugcuaauauguaggag

SEQ ID NO: 3754 - RNA, 23 nt, Homo sapiens
uuaaugcuaaucgugauaggggu

SEQ ID NO: 3755 - RNA, 23 nt, Homo sapiens
accccuaucacgauuagcauuaa

SEQ ID NO: 3756 - RNA, 22 nt, Homo sapiens
agaucagaaggugauuguggcu

SEQ ID NO: 3757 - RNA, 22 nt, Homo sapiens
agccacaaucaccuucugaucu

SEQ ID NO: 3758 - RNA, 22 nt, Homo sapiens
uacugcagacguggcaaucaug

SEQ ID NO: 3759 - RNA, 22 nt, Homo sapiens
caugauugccacgucugcagua

SEQ ID NO: 3760 - RNA, 21 nt, Homo sapiens
guuagggccaacaucucuugg

SEQ ID NO: 3761 - RNA, 21 nt, Homo sapiens
ccaagagauguuggcccuaac

SEQ ID NO: 3762 - RNA, 21 nt, Homo sapiens
aacauagaggaaauuccacgu

SEQ ID NO: 3763 - RNA, 21 nt, Homo sapiens
acguggaauuuccucuauguu

SEQ ID NO: 3764 - RNA, 21 nt, Homo sapiens
gguggauauuccuucuauguu

SEQ ID NO: 3765 - RNA, 21 nt, Homo sapiens
aacauagaaggaauauccacc

SEQ ID NO: 3766 - RNA, 23 nt, Homo sapiens
ucauagcccuguacaaugcugcu

SEQ ID NO: 3767 - RNA, 23 nt, Homo sapiens
agcagcauuguacagggcuauga

SEQ ID NO: 3768 - RNA, 22 nt, Homo sapiens
uaacacugucugguaaagaugg

SEQ ID NO: 3769 - RNA, 22 nt, Homo sapiens
ccaucuuuaccagacaguguua

SEQ ID NO: 3770 - RNA, 22 nt, Homo sapiens
caucuuccaguacaguguugga

SEQ ID NO: 3771 - RNA, 22 nt, Homo sapiens
uccaacacuguacuggaagaug

SEQ ID NO: 3772 - RNA, 22 nt, Homo sapiens
aacuggccuacaaagucccagu

SEQ ID NO: 3773 - RNA, 22 nt, Homo sapiens
acugggacuuuguaggccaguu

SEQ ID NO: 3774 - RNA, 22 nt, Homo sapiens
ugggucuuugcgggcgagauga

SEQ ID NO: 3775 - RNA, 22 nt, Homo sapiens
ucaucucgcccgcaaagaccca

SEQ ID NO: 3776 - RNA, 21 nt, Homo sapiens
augaccuaugaauugacagac

SEQ ID NO: 3777 - RNA, 21 nt, Homo sapiens
gucugucaauucauaggucau

SEQ ID NO: 3778 - RNA, 22 nt, Homo sapiens
aagcugccaguugaagaacugu

SEQ ID NO: 3779 - RNA, 22 nt, Homo sapiens
acaguucuucaacuggcagcuu

SEQ ID NO: 3780 - RNA, 22 nt, Homo sapiens
aguucuucaguggcaagcuuua

SEQ ID NO: 3781 - RNA, 22 nt, Homo sapiens
uaaagcuugccacugaagaacu

SEQ ID NO: 3782 - RNA, 22 nt, Homo sapiens
acagauucgauucuaggggaau

SEQ ID NO: 3783 - RNA, 22 nt, Homo sapiens
auuccccuagaaucgaaucugu

SEQ ID NO: 3784 - RNA, 23 nt, Homo sapiens
uacccuguagaaccgaauuugug

SEQ ID NO: 3785 - RNA, 23 nt, Homo sapiens
cacaaauucgguucuacagggua

SEQ ID NO: 3786 - RNA, 22 nt, Homo sapiens
uagcagcacguaaauauuggcg

SEQ ID NO: 3787 - RNA, 22 nt, Homo sapiens
cgccaauauuuacgugcugcua

SEQ ID NO: 3788 - RNA, 21 nt, Homo sapiens
ugagaugaagcacuguagcuc

SEQ ID NO: 3789 - RNA, 21 nt, Homo sapiens
gagcuacagugcuucaucuca

SEQ ID NO: 3790 - RNA, 22 nt, Homo sapiens
ggugcagugcugcaucucuggu

SEQ ID NO: 3791 - RNA, 22 nt, Homo sapiens
accagagaugcagcacugcacc

SEQ ID NO: 3792 - RNA, 21 nt, Homo sapiens
uugcucacuguucuucccuag

SEQ ID NO: 3793 - RNA, 21 nt, Homo sapiens
cuagggaagaacagugagcaa

SEQ ID NO: 3794 - RNA, 18 nt, Homo sapiens
cagggucagcugagcaug

SEQ ID NO: 3795 - RNA, 18 nt, Homo sapiens
caugcucagcugacccug

SEQ ID NO: 3796 - RNA, 21 nt, Homo sapiens
aagcauucuuucauugguugg

SEQ ID NO: 3797 - RNA, 21 nt, Homo sapiens
ccaaccaaugaaagaaugcuu

SEQ ID NO: 3798 - RNA, 21 nt, Homo sapiens
ccgucgccgccacccgagccg

SEQ ID NO: 3799 - RNA, 21 nt, Homo sapiens
cggcucggguggcggcgacgg

SEQ ID NO: 3800 - RNA, 27 nt, Homo sapiens
cacuguaggugauggugagagugggca

SEQ ID NO: 3801 - RNA, 27 nt, Homo sapiens
ugcccacucucaccaucaccuacagug

SEQ ID NO: 3802 - RNA, 23 nt, Homo sapiens
gggaugguagaccggugacgugc

SEQ ID NO: 3803 - RNA, 23 nt, Homo sapiens
gcacgucaccggucuaccauccc

SEQ ID NO: 3804 - RNA, 21 nt, Homo sapiens
uaggacacauggucuacuucu

SEQ ID NO: 3805 - RNA, 21 nt, Homo sapiens
agaaguagaccauguguccua

SEQ ID NO: 3806 - RNA, 22 nt, Homo sapiens
cuccugagccauucugagccuc

SEQ ID NO: 3807 - RNA, 22 nt, Homo sapiens
gaggcucagaauggcucaggag

SEQ ID NO: 3808 - RNA, 21 nt, Homo sapiens
gugccagcugcagugggggag

SEQ ID NO: 3809 - RNA, 21 nt, Homo sapiens
cucccccacugcagcuggcac

SEQ ID NO: 3810 - RNA, 21 nt, Homo sapiens
cccggagccaggaugcagcuc

SEQ ID NO: 3811 - RNA, 21 nt, Homo sapiens
gagcugcauccuggcuccggg

SEQ ID NO: 3812 - RNA, 21 nt, Homo sapiens
ucguggccuggucuccauuau

SEQ ID NO: 3813 - RNA, 21 nt, Homo sapiens
auaauggagaccaggccacga

SEQ ID NO: 3814 - RNA, 20 nt, Homo sapiens
ucugcaggguuugcuuugag

SEQ ID NO: 3815 - RNA, 20 nt, Homo sapiens
cucaaagcaaacccugcaga

SEQ ID NO: 3816 - RNA, 21 nt, Homo sapiens
uguucauguagauguuuaagc

SEQ ID NO: 3817 - RNA, 21 nt, Homo sapiens
gcuuaaacaucuacaugaaca

SEQ ID NO: 3818 - RNA, 18 nt, Homo sapiens
ucagcuggcccucauuuc

SEQ ID NO: 3819 - RNA, 18 nt, Homo sapiens
gaaaugagggccagcuga

SEQ ID NO: 3820 - RNA, 21 nt, Homo sapiens
uggcagggaggcugggagggg

SEQ ID NO: 3821 - RNA, 21 nt, Homo sapiens
ccccucccagccucccugcca

SEQ ID NO: 3822 - RNA, 20 nt, Homo sapiens
ucacuguucagacaggcgga

SEQ ID NO: 3823 - RNA, 20 nt, Homo sapiens
uccgccugucugaacaguga

SEQ ID NO: 3824 - RNA, 21 nt, Homo sapiens
ccccaccuccucucuccucag

SEQ ID NO: 3825 - RNA, 21 nt, Homo sapiens
cugaggagagaggaggugggg

SEQ ID NO: 3826 - RNA, 19 nt, Homo sapiens
gugaggacucgggaggugg

SEQ ID NO: 3827 - RNA, 19 nt, Homo sapiens
ccaccucccgaguccucac

SEQ ID NO: 3828 - RNA, 22 nt, Homo sapiens
ugagccccugugccgcccccag

SEQ ID NO: 3829 - RNA, 22 nt, Homo sapiens
cugggggcggcacaggggcuca

SEQ ID NO: 3830 - RNA, 22 nt, Homo sapiens
guggguacggcccagugggggg

SEQ ID NO: 3831 - RNA, 22 nt, Homo sapiens
ccccccacugggccguacccac

SEQ ID NO: 3832 - RNA, 22 nt, Homo sapiens
ucaccagcccuguguucccuag

SEQ ID NO: 3833 - RNA, 22 nt, Homo sapiens
cuagggaacacagggcugguga

SEQ ID NO: 3834 - RNA, 26 nt, Homo sapiens
gugagggcaugcaggccuggaugggg

SEQ ID NO: 3835 - RNA, 26 nt, Homo sapiens
ccccauccaggccugcaugcccucac

SEQ ID NO: 3836 - RNA, 23 nt, Homo sapiens
cucucaccacugcccucccacag

SEQ ID NO: 3837 - RNA, 23 nt, Homo sapiens
cugugggagggcaguggugagag

SEQ ID NO: 3838 - RNA, 24 nt, Homo sapiens
guggguaggguuugggggagagcg

SEQ ID NO: 3839 - RNA, 24 nt, Homo sapiens
cgcucucccccaaacccuacccac

SEQ ID NO: 3840 - RNA, 20 nt, Homo sapiens
gugucugggcggacagcugc

SEQ ID NO: 3841 - RNA, 20 nt, Homo sapiens
gcagcuguccgcccagacac

SEQ ID NO: 3842 - RNA, 20 nt, Homo sapiens
cuuccucgucugucugcccc

SEQ ID NO: 3843 - RNA, 20 nt, Homo sapiens
ggggcagacagacgaggaag

SEQ ID NO: 3844 - RNA, 23 nt, Homo sapiens
gugagugggagccccagugugug

SEQ ID NO: 3845 - RNA, 23 nt, Homo sapiens
cacacacuggggcucccacucac

SEQ ID NO: 3846 - RNA, 27 nt, Homo sapiens
accuucuuguauaagcacugugcuaaa

SEQ ID NO: 3847 - RNA, 27 nt, Homo sapiens
uuuagcacagugcuuauacaagaaggu

SEQ ID NO: 3848 - RNA, 22 nt, Homo sapiens
ggcgacaaaacgagacccuguc

SEQ ID NO: 3849 - RNA, 22 nt, Homo sapiens
gacagggucucguuuugucgcc

SEQ ID NO: 3850 - RNA, 22 nt, Homo sapiens
uugcuugaacccaggaagugga

SEQ ID NO: 3851 - RNA, 22 nt, Homo sapiens
uccacuuccuggguucaagcaa

SEQ ID NO: 3852 - RNA, 19 nt, Homo sapiens
ggagauggagguugcagug

SEQ ID NO: 3853 - RNA, 19 nt, Homo sapiens
cacugcaaccuccaucucc

SEQ ID NO: 3854 - RNA, 21 nt, Homo sapiens
accacugcacuccagccugag

SEQ ID NO: 3855 - RNA, 21 nt, Homo sapiens
cucaggcuggagugcaguggu

SEQ ID NO: 3856 - RNA, 22 nt, Homo sapiens
ggugguugaggcugcaguaagu

SEQ ID NO: 3857 - RNA, 22 nt, Homo sapiens
acuuacugcagccucaaccacc

SEQ ID NO: 3858 - RNA, 17 nt, Homo sapiens
ucgccuccuccucuccc

SEQ ID NO: 3859 - RNA, 17 nt, Homo sapiens
gggagaggaggaggcga

SEQ ID NO: 3860 - RNA, 22 nt, Homo sapiens
ucuauacagacccuggcuuuuc

SEQ ID NO: 3861 - RNA, 22 nt, Homo sapiens
gaaaagccagggucuguauaga

SEQ ID NO: 3862 - RNA, 22 nt, Homo sapiens
ucugggcaacaaagugagaccu

SEQ ID NO: 3863 - RNA, 22 nt, Homo sapiens
aggucucacuuuguugcccaga

SEQ ID NO: 3864 - RNA, 21 nt, Homo sapiens
gaucucacuuuguugcccagg

SEQ ID NO: 3865 - RNA, 21 nt, Homo sapiens
ccugggcaacaaagugagauc

SEQ ID NO: 3866 - RNA, 20 nt, Homo sapiens
ucgcgccccggcucccguuc

SEQ ID NO: 3867 - RNA, 20 nt, Homo sapiens
gaacgggagccggggcgcga

SEQ ID NO: 3868 - RNA, 25 nt, Homo sapiens
ugggaacggguuccggcagacgcug

SEQ ID NO: 3869 - RNA, 25 nt, Homo sapiens
cagcgucugccggaacccguuccca

SEQ ID NO: 3870 - RNA, 21 nt, Homo sapiens
uuaggccgcagaucuggguga

SEQ ID NO: 3871 - RNA, 21 nt, Homo sapiens
ucacccagaucugcggccuaa

SEQ ID NO: 3872 - RNA, 22 nt, Homo sapiens
aauaggccacggaucugggcaa

SEQ ID NO: 3873 - RNA, 22 nt, Homo sapiens
uugcccagauccguggccuauu

SEQ ID NO: 3874 - RNA, 21 nt, Homo sapiens
cacccagaucugcggccuaau

SEQ ID NO: 3875 - RNA, 21 nt, Homo sapiens
auuaggccgcagaucugggug

SEQ ID NO: 3876 - RNA, 22 nt, Homo sapiens
uuagggcccuggcuccaucucc

SEQ ID NO: 3877 - RNA, 22 nt, Homo sapiens
ggagauggagccagggcccuaa

SEQ ID NO: 3878 - RNA, 22 nt, Homo sapiens
uucauucggcuguccagaugua

SEQ ID NO: 3879 - RNA, 22 nt, Homo sapiens
uacaucuggacagccgaaugaa

SEQ ID NO: 3880 - RNA, 24 nt, Homo sapiens
uugcagcugccugggagugacuuc

SEQ ID NO: 3881 - RNA, 24 nt, Homo sapiens
gaagucacucccaggcagcugcaa

SEQ ID NO: 3882 - RNA, 21 nt, Homo sapiens
uugggacauacuuaugcuaaa

SEQ ID NO: 3883 - RNA, 21 nt, Homo sapiens
uuuagcauaaguaugucccaa

SEQ ID NO: 3884 - RNA, 22 nt, Homo sapiens
ucucacuguagccucgaacccc

SEQ ID NO: 3885 - RNA, 22 nt, Homo sapiens
gggguucgaggcuacagugaga

SEQ ID NO: 3886 - RNA, 22 nt, Homo sapiens
uuugaggcuacagugagaugug

SEQ ID NO: 3887 - RNA, 22 nt, Homo sapiens
cacaucucacuguagccucaaa

SEQ ID NO: 3888 - RNA, 18 nt, Homo sapiens
cagggaggugaaugugau

SEQ ID NO: 3889 - RNA, 18 nt, Homo sapiens
aucacauucaccucccug

SEQ ID NO: 3890 - RNA, 19 nt, Homo sapiens
gaugaugcugcugaugcug

SEQ ID NO: 3891 - RNA, 19 nt, Homo sapiens
cagcaucagcagcaucauc

SEQ ID NO: 3892 - RNA, 24 nt, Homo sapiens
ccagacagaauucuaugcacuuuc

SEQ ID NO: 3893 - RNA, 24 nt, Homo sapiens
gaaagugcauagaauucugucugg

SEQ ID NO: 3894 - RNA, 22 nt, Homo sapiens
cuccuggggcccgcacucucgc

SEQ ID NO: 3895 - RNA, 22 nt, Homo sapiens
gcgagagugcgggccccaggag

SEQ ID NO: 3896 - RNA, 21 nt, Homo sapiens
cuccguuugccuguuucgcug

SEQ ID NO: 3897 - RNA, 21 nt, Homo sapiens
cagcgaaacaggcaaacggag

SEQ ID NO: 3898 - RNA, 22 nt, Homo sapiens
cucggcgcggggcgcgggcucc

SEQ ID NO: 3899 - RNA, 22 nt, Homo sapiens
ggagcccgcgccccgcgccgag

SEQ ID NO: 3900 - RNA, 21 nt, Homo sapiens
gcccuccgcccgugcaccccg

SEQ ID NO: 3901 - RNA, 21 nt, Homo sapiens
cggggugcacgggcggagggc

SEQ ID NO: 3902 - RNA, 22 nt, Homo sapiens
gcccgcguguggagccaggugu

SEQ ID NO: 3903 - RNA, 22 nt, Homo sapiens
acaccuggcuccacacgcgggc

SEQ ID NO: 3904 - RNA, 22 nt, Homo sapiens
aaaaccgucuaguuacaguugu

SEQ ID NO: 3905 - RNA, 22 nt, Homo sapiens
acaacuguaacuagacgguuuu

SEQ ID NO: 3906 - RNA, 18 nt, Homo sapiens
uccagugcccuccucucc

SEQ ID NO: 3907 - RNA, 18 nt, Homo sapiens
ggagaggagggcacugga

SEQ ID NO: 3908 - RNA, 18 nt, Homo sapiens
ugaggcaguagauugaau

SEQ ID NO: 3909 - RNA, 18 nt, Homo sapiens
auucaaucuacugccuca

SEQ ID NO: 3910 - RNA, 22 nt, Homo sapiens
aggggcuggcuuuccucugguc

SEQ ID NO: 3911 - RNA, 22 nt, Homo sapiens
gaccagaggaaagccagccccu

SEQ ID NO: 3912 - RNA, 22 nt, Homo sapiens
uggagagaaaggcaguuccuga

SEQ ID NO: 3913 - RNA, 22 nt, Homo sapiens
ucaggaacugccuuucucucca

SEQ ID NO: 3914 - RNA, 22 nt, Homo sapiens
ucgugucuuguguugcagccgg

SEQ ID NO: 3915 - RNA, 22 nt, Homo sapiens
ccggcugcaacacaagacacga

SEQ ID NO: 3916 - RNA, 22 nt, Homo sapiens
ggcuacaacacaggacccgggc

SEQ ID NO: 3917 - RNA, 22 nt, Homo sapiens
gcccggguccuguguuguagcc

SEQ ID NO: 3918 - RNA, 21 nt, Homo sapiens
cggcggggacggcgauugguc

SEQ ID NO: 3919 - RNA, 21 nt, Homo sapiens
gaccaaucgccguccccgccg

SEQ ID NO: 3920 - RNA, 22 nt, Homo sapiens
cgcaggggccgggugcucaccg

SEQ ID NO: 3921 - RNA, 22 nt, Homo sapiens
cggugagcacccggccccugcg

SEQ ID NO: 3922 - RNA, 21 nt, Homo sapiens
ugagugccggugccugcccug

SEQ ID NO: 3923 - RNA, 21 nt, Homo sapiens
cagggcaggcaccggcacuca

SEQ ID NO: 3924 - RNA, 22 nt, Homo sapiens
gcugcgcuuggauuucgucccc

SEQ ID NO: 3925 - RNA, 22 nt, Homo sapiens
ggggacgaaauccaagcgcagc

SEQ ID NO: 3926 - RNA, 23 nt, Homo sapiens
caacggaaucccaaaagcagcug

SEQ ID NO: 3927 - RNA, 23 nt, Homo sapiens
cagcugcuuuugggauuccguug

SEQ ID NO: 3928 - RNA, 22 nt, Homo sapiens
ucaggccaggcacaguggcuca

SEQ ID NO: 3929 - RNA, 22 nt, Homo sapiens
ugagccacugugccuggccuga

SEQ ID NO: 3930 - RNA, 19 nt, Homo sapiens
accgugcaaagguagcaua

SEQ ID NO: 3931 - RNA, 19 nt, Homo sapiens
uaugcuaccuuugcacggu

SEQ ID NO: 3932 - RNA, 20 nt, Homo sapiens
ccuccugcccuccuugcugu

SEQ ID NO: 3933 - RNA, 20 nt, Homo sapiens
acagcaaggagggcaggagg

SEQ ID NO: 3934 - RNA, 20 nt, Homo sapiens
uguuuugauaacaguaaugu

SEQ ID NO: 3935 - RNA, 20 nt, Homo sapiens
acauuacuguuaucaaaaca

SEQ ID NO: 3936 - RNA, 23 nt, Homo sapiens
guguuaauuaaaccucuauuuac

SEQ ID NO: 3937 - RNA, 23 nt, Homo sapiens
guaaauagagguuuaauuaacac

SEQ ID NO: 3938 - RNA, 23 nt, Homo sapiens
cuguaauauaaauuuaauuuauu

SEQ ID NO: 3939 - RNA, 23 nt, Homo sapiens
aauaaauuaaauuuauauuacag

SEQ ID NO: 3940 - RNA, 22 nt, Homo sapiens
uuggggaaacggccgcugagug

SEQ ID NO: 3941 - RNA, 22 nt, Homo sapiens
cacucagcggccguuuccccaa

SEQ ID NO: 3942 - RNA, 21 nt, Homo sapiens
ccucccaugccaagaacuccc

SEQ ID NO: 3943 - RNA, 21 nt, Homo sapiens
gggaguucuuggcaugggagg

SEQ ID NO: 3944 - RNA, 21 nt, Homo sapiens
gguucuuagcauaggaggucu

SEQ ID NO: 3945 - RNA, 21 nt, Homo sapiens
agaccuccuaugcuaagaacc

SEQ ID NO: 3946 - RNA, 21 nt, Homo sapiens
uguucucuuugccaaggacag

SEQ ID NO: 3947 - RNA, 21 nt, Homo sapiens
cuguccuuggcaaagagaaca

SEQ ID NO: 3948 - RNA, 22 nt, Homo sapiens
aaaucucugcaggcaaauguga

SEQ ID NO: 3949 - RNA, 22 nt, Homo sapiens
ucacauuugccugcagagauuu

SEQ ID NO: 3950 - RNA, 22 nt, Homo sapiens
caugguucugucaagcaccgcg

SEQ ID NO: 3951 - RNA, 22 nt, Homo sapiens
cgcggugcuugacagaaccaug

SEQ ID NO: 3952 - RNA, 21 nt, Homo sapiens
uugugcuugaucuaaccaugu

SEQ ID NO: 3953 - RNA, 21 nt, Homo sapiens
acaugguuagaucaagcacaa

SEQ ID NO: 3954 - RNA, 22 nt, Homo sapiens
ucugcaagugucagaggcgagg

SEQ ID NO: 3955 - RNA, 22 nt, Homo sapiens
ccucgccucugacacuugcaga

SEQ ID NO: 3956 - RNA, 22 nt, Homo sapiens
gagagcaguguguguugccugg

SEQ ID NO: 3957 - RNA, 22 nt, Homo sapiens
ccaggcaacacacacugcucuc

SEQ ID NO: 3958 - RNA, 22 nt, Homo sapiens
aucacauugccagugauuaccc

SEQ ID NO: 3959 - RNA, 22 nt, Homo sapiens
ggguaaucacuggcaaugugau

SEQ ID NO: 3960 - RNA, 22 nt, Homo sapiens
agcagaggcagagaggcucagg

SEQ ID NO: 3961 - RNA, 22 nt, Homo sapiens
ccugagccucucugccucugcu

SEQ ID NO: 3962 - RNA, 23 nt, Homo sapiens
ugaggcucuguuagccuuggcuc

SEQ ID NO: 3963 - RNA, 23 nt, Homo sapiens
gagccaaggcuaacagagccuca

SEQ ID NO: 3964 - RNA, 22 nt, Homo sapiens
uaucauggaguugguaaagcac

SEQ ID NO: 3965 - RNA, 22 nt, Homo sapiens
gugcuuuaccaacuccaugaua

SEQ ID NO: 3966 - RNA, 22 nt, Homo sapiens
guuuuaccaccuccaggagacu

SEQ ID NO: 3967 - RNA, 22 nt, Homo sapiens
agucuccuggaggugguaaaac

SEQ ID NO: 3968 - RNA, 22 nt, Homo sapiens
cgccucuucagcgcugucuucc

SEQ ID NO: 3969 - RNA, 22 nt, Homo sapiens
ggaagacagcgcugaagaggcg

SEQ ID NO: 3970 - RNA, 23 nt, Homo sapiens
caggcagugacuguucagacguc

SEQ ID NO: 3971 - RNA, 23 nt, Homo sapiens
gacgucugaacagucacugccug

SEQ ID NO: 3972 - RNA, 23 nt, Homo sapiens
agaauugcguuuggacaaucagu

SEQ ID NO: 3973 - RNA, 23 nt, Homo sapiens
acugauuguccaaacgcaauucu

SEQ ID NO: 3974 - RNA, 22 nt, Homo sapiens
agauguccagccacaauucucg

SEQ ID NO: 3975 - RNA, 22 nt, Homo sapiens
cgagaauuguggcuggacaucu

SEQ ID NO: 3976 - RNA, 24 nt, Homo sapiens
agcagaagcagggagguucuccca

SEQ ID NO: 3977 - RNA, 24 nt, Homo sapiens
ugggagaaccucccugcuucugcu

SEQ ID NO: 3978 - RNA, 22 nt, Homo sapiens
uaugugggaugguaaaccgcuu

SEQ ID NO: 3979 - RNA, 22 nt, Homo sapiens
aagcgguuuaccaucccacaua

SEQ ID NO: 3980 - RNA, 22 nt, Homo sapiens
ugguuuaccgucccacauacau

SEQ ID NO: 3981 - RNA, 22 nt, Homo sapiens
auguaugugggacgguaaacca

SEQ ID NO: 3982 - RNA, 23 nt, Homo sapiens
cagugcaaugauauugucaaagc

SEQ ID NO: 3983 - RNA, 23 nt, Homo sapiens
gcuuugacaauaucauugcacug

SEQ ID NO: 3984 - RNA, 17 nt, Homo sapiens
uaauugcuuccauguuu

SEQ ID NO: 3985 - RNA, 17 nt, Homo sapiens
aaacauggaagcaauua

SEQ ID NO: 3986 - RNA, 23 nt, Homo sapiens
uugccacacugcaacaccuuaca

SEQ ID NO: 3987 - RNA, 23 nt, Homo sapiens
uguaagguguugcaguguggcaa

SEQ ID NO: 3988 - RNA, 21 nt, Homo sapiens
ucuggcuguuguggugugcaa

SEQ ID NO: 3989 - RNA, 21 nt, Homo sapiens
uugcacaccacaacagccaga

SEQ ID NO: 3990 - RNA, 22 nt, Homo sapiens
gauaucagcucaguaggcaccg

SEQ ID NO: 3991 - RNA, 22 nt, Homo sapiens
cggugccuacugagcugauauc

SEQ ID NO: 3992 - RNA, 21 nt, Homo sapiens
guuccugcugaacugagccag

SEQ ID NO: 3993 - RNA, 21 nt, Homo sapiens
cuggcucaguucagcaggaac

SEQ ID NO: 3994 - RNA, 20 nt, Homo sapiens
auauggguuuacuaguuggu

SEQ ID NO: 3995 - RNA, 20 nt, Homo sapiens
accaacuaguaaacccauau

SEQ ID NO: 3996 - RNA, 22 nt, Homo sapiens
ugcuaugccaacauauugccau

SEQ ID NO: 3997 - RNA, 22 nt, Homo sapiens
auggcaauauguuggcauagca

SEQ ID NO: 3998 - RNA, 21 nt, Homo sapiens
aggcaagaugcuggcauagcu

SEQ ID NO: 3999 - RNA, 21 nt, Homo sapiens
agcuaugccagcaucuugccu

SEQ ID NO: 4000 - RNA, 18 nt, Homo sapiens
cggggcggcaggggccuc

SEQ ID NO: 4001 - RNA, 18 nt, Homo sapiens
gaggccccugccgccccg

SEQ ID NO: 4002 - RNA, 19 nt, Homo sapiens
aaaagcuggguugagagga

SEQ ID NO: 4003 - RNA, 19 nt, Homo sapiens
uccucucaacccagcuuuu

SEQ ID NO: 4004 - RNA, 22 nt, Homo sapiens
cccaauacacggucgaccucuu

SEQ ID NO: 4005 - RNA, 22 nt, Homo sapiens
aagaggucgaccguguauuggg

SEQ ID NO: 4006 - RNA, 23 nt, Homo sapiens
agguuguccguggugaguucgca

SEQ ID NO: 4007 - RNA, 23 nt, Homo sapiens
ugcgaacucaccacggacaaccu

SEQ ID NO: 4008 - RNA, 23 nt, Homo sapiens
gcaaagcacacggccugcagaga

SEQ ID NO: 4009 - RNA, 23 nt, Homo sapiens
ucucugcaggccgugugcuuugc

SEQ ID NO: 4010 - RNA, 22 nt, Homo sapiens
ucucugggccugugucuuaggc

SEQ ID NO: 4011 - RNA, 22 nt, Homo sapiens
gccuaagacacaggcccagaga

SEQ ID NO: 4012 - RNA, 21 nt, Homo sapiens
gccccugggccuauccuagaa

SEQ ID NO: 4013 - RNA, 21 nt, Homo sapiens
uucuaggauaggcccaggggc

SEQ ID NO: 4014 - RNA, 22 nt, Homo sapiens
uccgucucaguuacuuuauagc

SEQ ID NO: 4015 - RNA, 22 nt, Homo sapiens
gcuauaaaguaacugagacgga

SEQ ID NO: 4016 - RNA, 22 nt, Homo sapiens
aacacaccuauucaaggauuca

SEQ ID NO: 4017 - RNA, 22 nt, Homo sapiens
ugaauccuugaauagguguguu

SEQ ID NO: 4018 - RNA, 24 nt, Homo sapiens
aauccuuggaaccuaggugugagu

SEQ ID NO: 4019 - RNA, 24 nt, Homo sapiens
acucacaccuagguuccaaggauu

SEQ ID NO: 4020 - RNA, 22 nt, Homo sapiens
uaaugccccuaaaaauccuuau

SEQ ID NO: 4021 - RNA, 22 nt, Homo sapiens
auaaggauuuuuaggggcauua

SEQ ID NO: 4022 - RNA, 23 nt, Homo sapiens
agggacuuuugggggcagaugug

SEQ ID NO: 4023 - RNA, 23 nt, Homo sapiens
cacaucugcccccaaaagucccu

SEQ ID NO: 4024 - RNA, 22 nt, Homo sapiens
uaaugccccuaaaaauccuuau

SEQ ID NO: 4025 - RNA, 22 nt, Homo sapiens
auaaggauuuuuaggggcauua

SEQ ID NO: 4026 - RNA, 22 nt, Homo sapiens
agggacuuucaggggcagcugu

SEQ ID NO: 4027 - RNA, 22 nt, Homo sapiens
acagcugccccugaaagucccu

SEQ ID NO: 4028 - RNA, 24 nt, Homo sapiens
gaaaaugaugaguagugacugaug

SEQ ID NO: 4029 - RNA, 24 nt, Homo sapiens
caucagucacuacucaucauuuuc

SEQ ID NO: 4030 - RNA, 23 nt, Homo sapiens
ugagcaccacacaggccgggcgc

SEQ ID NO: 4031 - RNA, 23 nt, Homo sapiens
gcgcccggccuguguggugcuca

SEQ ID NO: 4032 - RNA, 21 nt, Homo sapiens
gcuggucugcguggugcucgg

SEQ ID NO: 4033 - RNA, 21 nt, Homo sapiens
ccgagcaccacgcagaccagc

SEQ ID NO: 4034 - RNA, 22 nt, Homo sapiens
gccugcugggguggaaccuggu

SEQ ID NO: 4035 - RNA, 22 nt, Homo sapiens
accagguuccaccccagcaggc

SEQ ID NO: 4036 - RNA, 23 nt, Homo sapiens
gaagugcuucgauuuuggggugu

SEQ ID NO: 4037 - RNA, 23 nt, Homo sapiens
acaccccaaaaucgaagcacuuc

SEQ ID NO: 4038 - RNA, 22 nt, Homo sapiens
acucaaaaugggggcgcuuucc

SEQ ID NO: 4039 - RNA, 22 nt, Homo sapiens
ggaaagcgcccccauuuugagu

SEQ ID NO: 4040 - RNA, 22 nt, Homo sapiens
uauguaacaugguccacuaacu

SEQ ID NO: 4041 - RNA, 22 nt, Homo sapiens
aguuaguggaccauguuacaua

SEQ ID NO: 4042 - RNA, 21 nt, Homo sapiens
ugguagacuauggaacguagg

SEQ ID NO: 4043 - RNA, 21 nt, Homo sapiens
ccuacguuccauagucuacca

SEQ ID NO: 4044 - RNA, 22 nt, Homo sapiens
uguagauacgagcaccagccac

SEQ ID NO: 4045 - RNA, 22 nt, Homo sapiens
guggcuggugcucguaucuaca

SEQ ID NO: 4046 - RNA, 23 nt, Homo sapiens
acaggcggcuguagcaauggggg

SEQ ID NO: 4047 - RNA, 23 nt, Homo sapiens
cccccauugcuacagccgccugu

SEQ ID NO: 4048 - RNA, 22 nt, Homo sapiens
aauucccuuguagauaacccgg

SEQ ID NO: 4049 - RNA, 22 nt, Homo sapiens
ccggguuaucuacaagggaauu

SEQ ID NO: 4050 - RNA, 22 nt, Homo sapiens
uacgcgcagaccacaggauguc

SEQ ID NO: 4051 - RNA, 22 nt, Homo sapiens
gacauccuguggucugcgcgua

SEQ ID NO: 4052 - RNA, 22 nt, Homo sapiens
uuacacacaacugaggaucaua

SEQ ID NO: 4053 - RNA, 22 nt, Homo sapiens
uaugauccucaguuguguguaa

SEQ ID NO: 4054 - RNA, 23 nt, Homo sapiens
uagcccccaggcuucacuuggcg

SEQ ID NO: 4055 - RNA, 23 nt, Homo sapiens
cgccaagugaagccugggggcua

SEQ ID NO: 4056 - RNA, 23 nt, Homo sapiens
agggcauaggagaggguugauau

SEQ ID NO: 4057 - RNA, 23 nt, Homo sapiens
auaucaacccucuccuaugcccu

SEQ ID NO: 4058 - RNA, 22 nt, Homo sapiens
gaauguugcucggugaaccccu

SEQ ID NO: 4059 - RNA, 22 nt, Homo sapiens
agggguucaccgagcaacauuc

SEQ ID NO: 4060 - RNA, 23 nt, Homo sapiens
agguuacccgagcaacuuugcau

SEQ ID NO: 4061 - RNA, 23 nt, Homo sapiens
augcaaaguugcucggguaaccu

SEQ ID NO: 4062 - RNA, 22 nt, Homo sapiens
uauguaacacgguccacuaacc

SEQ ID NO: 4063 - RNA, 22 nt, Homo sapiens
gguuaguggaccguguuacaua

SEQ ID NO: 4064 - RNA, 21 nt, Homo sapiens
uaguagaccguauagcguacg

SEQ ID NO: 4065 - RNA, 21 nt, Homo sapiens
cguacgcuauacggucuacua

SEQ ID NO: 4066 - RNA, 23 nt, Homo sapiens
acuucaccugguccacuagccgu

SEQ ID NO: 4067 - RNA, 23 nt, Homo sapiens
acggcuaguggaccaggugaagu

SEQ ID NO: 4068 - RNA, 18 nt, Homo sapiens
guguucucugauggacag

SEQ ID NO: 4069 - RNA, 18 nt, Homo sapiens
cuguccaucagagaacac

SEQ ID NO: 4070 - RNA, 22 nt, Homo sapiens
caggucgucuugcagggcuucu

SEQ ID NO: 4071 - RNA, 22 nt, Homo sapiens
agaagcccugcaagacgaccug

SEQ ID NO: 4072 - RNA, 21 nt, Homo sapiens
ugucuugcaggccgucaugca

SEQ ID NO: 4073 - RNA, 21 nt, Homo sapiens
ugcaugacggccugcaagaca

SEQ ID NO: 4074 - RNA, 22 nt, Homo sapiens
aucaugaugggcuccucggugu

SEQ ID NO: 4075 - RNA, 22 nt, Homo sapiens
acaccgaggagcccaucaugau

SEQ ID NO: 4076 - RNA, 23 nt, Homo sapiens
uugcuaguugcacuccucucugu

SEQ ID NO: 4077 - RNA, 23 nt, Homo sapiens
acagagaggagugcaacuagcaa

SEQ ID NO: 4078 - RNA, 25 nt, Homo sapiens
uaggcaguguauugcuagcggcugu

SEQ ID NO: 4079 - RNA, 25 nt, Homo sapiens
acagccgcuagcaauacacugccua

SEQ ID NO: 4080 - RNA, 22 nt, Homo sapiens
auuggggacauuuugcauucau

SEQ ID NO: 4081 - RNA, 22 nt, Homo sapiens
augaaugcaaaauguccccaau

SEQ ID NO: 4082 - RNA, 22 nt, Homo sapiens
uuuugcgauguguuccuaauau

SEQ ID NO: 4083 - RNA, 22 nt, Homo sapiens
auauuaggaacacaucgcaaaa

SEQ ID NO: 4084 - RNA, 22 nt, Homo sapiens
uugggaucauuuugcauccaua

SEQ ID NO: 4085 - RNA, 22 nt, Homo sapiens
uauggaugcaaaaugaucccaa

SEQ ID NO: 4086 - RNA, 22 nt, Homo sapiens
uuuugcaauauguuccugaaua

SEQ ID NO: 4087 - RNA, 22 nt, Homo sapiens
uauucaggaacauauugcaaaa

SEQ ID NO: 4088 - RNA, 21 nt, Homo sapiens
gcaguccaugggcauauacac

SEQ ID NO: 4089 - RNA, 21 nt, Homo sapiens
guguauaugcccauggacugc

SEQ ID NO: 4090 - RNA, 22 nt, Homo sapiens
uaugugccuuuggacuacaucg

SEQ ID NO: 4091 - RNA, 22 nt, Homo sapiens
cgauguaguccaaaggcacaua

SEQ ID NO: 4092 - RNA, 23 nt, Homo sapiens
auacacauacacgcaacacacau

SEQ ID NO: 4093 - RNA, 23 nt, Homo sapiens
auguguguugcguguauguguau

SEQ ID NO: 4094 - RNA, 23 nt, Homo sapiens
uugcaugucagauuguaauuccc

SEQ ID NO: 4095 - RNA, 23 nt, Homo sapiens
gggaauuacaaucugacaugcaa

SEQ ID NO: 4096 - RNA, 21 nt, Homo sapiens
ucacuccucuccucccgucuu

SEQ ID NO: 4097 - RNA, 21 nt, Homo sapiens
aagacgggaggagaggaguga

SEQ ID NO: 4098 - RNA, 22 nt, Homo sapiens
ucaggcucaguccccucccgau

SEQ ID NO: 4099 - RNA, 22 nt, Homo sapiens
aucgggaggggacugagccuga

SEQ ID NO: 4100 - RNA, 22 nt, Homo sapiens
gucauacacggcucuccucucu

SEQ ID NO: 4101 - RNA, 22 nt, Homo sapiens
agagaggagagccguguaugac

SEQ ID NO: 4102 - RNA, 22 nt, Homo sapiens
agaggcuggccgugaugaauuc

SEQ ID NO: 4103 - RNA, 22 nt, Homo sapiens
gaauucaucacggccagccucu

SEQ ID NO: 4104 - RNA, 22 nt, Homo sapiens
aaucauacagggacauccaguu

SEQ ID NO: 4105 - RNA, 22 nt, Homo sapiens
aacuggaugucccuguaugauu

SEQ ID NO: 4106 - RNA, 22 nt, Homo sapiens
aaucguacagggucauccacuu

SEQ ID NO: 4107 - RNA, 22 nt, Homo sapiens
aaguggaugacccuguacgauu

SEQ ID NO: 4108 - RNA, 21 nt, Homo sapiens
uugaaaggcuauuucuugguc

SEQ ID NO: 4109 - RNA, 21 nt, Homo sapiens
gaccaagaaauagccuuucaa

SEQ ID NO: 4110 - RNA, 21 nt, Homo sapiens
cccagauaauggcacucucaa

SEQ ID NO: 4111 - RNA, 21 nt, Homo sapiens
uugagagugccauuaucuggg

SEQ ID NO: 4112 - RNA, 22 nt, Homo sapiens
caaccuggaggacuccaugcug

SEQ ID NO: 4113 - RNA, 22 nt, Homo sapiens
cagcauggaguccuccagguug

SEQ ID NO: 4114 - RNA, 20 nt, Homo sapiens
ccauggaucuccaggugggu

SEQ ID NO: 4115 - RNA, 20 nt, Homo sapiens
acccaccuggagauccaugg

SEQ ID NO: 4116 - RNA, 22 nt, Homo sapiens
cuuaugcaagauucccuucuac

SEQ ID NO: 4117 - RNA, 22 nt, Homo sapiens
guagaagggaaucuugcauaag

SEQ ID NO: 4118 - RNA, 22 nt, Homo sapiens
aguggggaacccuuccaugagg

SEQ ID NO: 4119 - RNA, 22 nt, Homo sapiens
ccucauggaaggguuccccacu

SEQ ID NO: 4120 - RNA, 23 nt, Homo sapiens
aggaccugcgggacaagauucuu

SEQ ID NO: 4121 - RNA, 23 nt, Homo sapiens
aagaaucuugucccgcagguccu

SEQ ID NO: 4122 - RNA, 22 nt, Homo sapiens
caaaccacacugugguguuaga

SEQ ID NO: 4123 - RNA, 22 nt, Homo sapiens
ucuaacaccacagugugguuug

SEQ ID NO: 4124 - RNA, 21 nt, Homo sapiens
cagcagcacacugugguuugu

SEQ ID NO: 4125 - RNA, 21 nt, Homo sapiens
acaaaccacagugugcugcug

SEQ ID NO: 4126 - RNA, 23 nt, Homo sapiens
uuucaagccagggggcguuuuuc

SEQ ID NO: 4127 - RNA, 23 nt, Homo sapiens
gaaaaacgcccccuggcuugaaa

SEQ ID NO: 4128 - RNA, 20 nt, Homo sapiens
ucacuaccugacaauacagu

SEQ ID NO: 4129 - RNA, 20 nt, Homo sapiens
acuguauugucagguaguga

SEQ ID NO: 4130 - RNA, 21 nt, Homo sapiens
ugcuguauugucagguaguga

SEQ ID NO: 4131 - RNA, 21 nt, Homo sapiens
ucacuaccugacaauacagca

SEQ ID NO: 4132 - RNA, 22 nt, Homo sapiens
uucugccucuguccagguccuu

SEQ ID NO: 4133 - RNA, 22 nt, Homo sapiens
aaggaccuggacagaggcagaa

SEQ ID NO: 4134 - RNA, 24 nt, Homo sapiens
agggcuggacucagcggcggagcu

SEQ ID NO: 4135 - RNA, 24 nt, Homo sapiens
agcuccgccgcugaguccagcccu

SEQ ID NO: 4136 - RNA, 21 nt, Homo sapiens
ugacugccucacugaccacuu

SEQ ID NO: 4137 - RNA, 21 nt, Homo sapiens
aaguggucagugaggcaguca

SEQ ID NO: 4138 - RNA, 24 nt, Homo sapiens
aauuugguuucugaggcacuuagu

SEQ ID NO: 4139 - RNA, 24 nt, Homo sapiens
acuaagugccucagaaaccaaauu

SEQ ID NO: 4140 - RNA, 21 nt, Homo sapiens
uacuuuucuagguuguugggg

SEQ ID NO: 4141 - RNA, 21 nt, Homo sapiens
ccccaacaaccuagaaaagua

SEQ ID NO: 4142 - RNA, 23 nt, Homo sapiens
ucacaacaaccuugcaggguaga

SEQ ID NO: 4143 - RNA, 23 nt, Homo sapiens
ucuacccugcaagguuguuguga

SEQ ID NO: 4144 - RNA, 22 nt, Homo sapiens
cuuggauuuuccugggccucag

SEQ ID NO: 4145 - RNA, 22 nt, Homo sapiens
cugaggcccaggaaaauccaag

SEQ ID NO: 4146 - RNA, 22 nt, Homo sapiens
ugaggacagggcaaauucacga

SEQ ID NO: 4147 - RNA, 22 nt, Homo sapiens
ucgugaauuugcccuguccuca

SEQ ID NO: 4148 - RNA, 22 nt, Homo sapiens
aucauaugaaccaaacucuaau

SEQ ID NO: 4149 - RNA, 22 nt, Homo sapiens
auuagaguuugguucauaugau

SEQ ID NO: 4150 - RNA, 22 nt, Homo sapiens
uagagucuggcugauaugguuu

SEQ ID NO: 4151 - RNA, 22 nt, Homo sapiens
aaaccauaucagccagacucua

SEQ ID NO: 4152 - RNA, 21 nt, Homo sapiens
ccugugcucccagggccucgc

SEQ ID NO: 4153 - RNA, 21 nt, Homo sapiens
gcgaggcccugggagcacagg

SEQ ID NO: 4154 - RNA, 22 nt, Homo sapiens
ugaggcccuuggggcacagugg

SEQ ID NO: 4155 - RNA, 22 nt, Homo sapiens
ccacugugccccaagggccuca

SEQ ID NO: 4156 - RNA, 22 nt, Homo sapiens
uccuaaaucugaaaguccaaaa

SEQ ID NO: 4157 - RNA, 22 nt, Homo sapiens
uuuuggacuuucagauuuagga

SEQ ID NO: 4158 - RNA, 24 nt, Homo sapiens
uuggacuuuuucagauuuggggau

SEQ ID NO: 4159 - RNA, 24 nt, Homo sapiens
auccccaaaucugaaaaaguccaa

SEQ ID NO: 4160 - RNA, 22 nt, Homo sapiens
augcaccugggcaaggauucug

SEQ ID NO: 4161 - RNA, 22 nt, Homo sapiens
cagaauccuugcccaggugcau

SEQ ID NO: 4162 - RNA, 23 nt, Homo sapiens
uaauccuugcuaccugggugaga

SEQ ID NO: 4163 - RNA, 23 nt, Homo sapiens
ucucacccagguagcaaggauua

SEQ ID NO: 4164 - RNA, 22 nt, Homo sapiens
uuuugugucucccauuccccag

SEQ ID NO: 4165 - RNA, 22 nt, Homo sapiens
cuggggaaugggagacacaaaa

SEQ ID NO: 4166 - RNA, 22 nt, Homo sapiens
agggggauggcagagcaaaauu

SEQ ID NO: 4167 - RNA, 22 nt, Homo sapiens
aauuuugcucugccaucccccu

SEQ ID NO: 4168 - RNA, 22 nt, Homo sapiens
gugcauggcuguauauauaaca

SEQ ID NO: 4169 - RNA, 22 nt, Homo sapiens
uguuauauauacagccaugcac

SEQ ID NO: 4170 - RNA, 21 nt, Homo sapiens
uauauauacagccaugcacuc

SEQ ID NO: 4171 - RNA, 21 nt, Homo sapiens
gagugcauggcuguauauaua

SEQ ID NO: 4172 - RNA, 22 nt, Homo sapiens
aaugcacccgggcaaggauucu

SEQ ID NO: 4173 - RNA, 22 nt, Homo sapiens
agaauccuugcccgggugcauu

SEQ ID NO: 4174 - RNA, 22 nt, Homo sapiens
aauccuuugucccugggugaga

SEQ ID NO: 4175 - RNA, 22 nt, Homo sapiens
ucucacccagggacaaaggauu

SEQ ID NO: 4176 - RNA, 22 nt, Homo sapiens
aaugcaccugggcaaggauuca

SEQ ID NO: 4177 - RNA, 22 nt, Homo sapiens
ugaauccuugcccaggugcauu

SEQ ID NO: 4178 - RNA, 21 nt, Homo sapiens
auccuugcuaucugggugcua

SEQ ID NO: 4179 - RNA, 21 nt, Homo sapiens
uagcacccagauagcaaggau

SEQ ID NO: 4180 - RNA, 22 nt, Homo sapiens
agacccuggucugcacucuauc

SEQ ID NO: 4181 - RNA, 22 nt, Homo sapiens
gauagagugcagaccagggucu

SEQ ID NO: 4182 - RNA, 21 nt, Homo sapiens
uugcagcugcgguuguaaggu

SEQ ID NO: 4183 - RNA, 21 nt, Homo sapiens
accuuacaaccgcagcugcaa

SEQ ID NO: 4184 - RNA, 22 nt, Homo sapiens
cgucaacacuugcugguuuccu

SEQ ID NO: 4185 - RNA, 22 nt, Homo sapiens
aggaaaccagcaaguguugacg

SEQ ID NO: 4186 - RNA, 22 nt, Homo sapiens
gggagccaggaaguauugaugu

SEQ ID NO: 4187 - RNA, 22 nt, Homo sapiens
acaucaauacuuccuggcuccc

SEQ ID NO: 4188 - RNA, 21 nt, Homo sapiens
uaaggcacccuucugaguaga

SEQ ID NO: 4189 - RNA, 21 nt, Homo sapiens
ucuacucagaagggugccuua

SEQ ID NO: 4190 - RNA, 22 nt, Homo sapiens
uauucaggaagguguuacuuaa

SEQ ID NO: 4191 - RNA, 22 nt, Homo sapiens
uuaaguaacaccuuccugaaua

SEQ ID NO: 4192 - RNA, 21 nt, Homo sapiens
uuuugcaccuuuuggagugaa

SEQ ID NO: 4193 - RNA, 21 nt, Homo sapiens
uucacuccaaaaggugcaaaa

SEQ ID NO: 4194 - RNA, 23 nt, Homo sapiens
ugauuguagccuuuuggaguaga

SEQ ID NO: 4195 - RNA, 23 nt, Homo sapiens
ucuacuccaaaaggcuacaauca

SEQ ID NO: 4196 - RNA, 23 nt, Homo sapiens
ggguuuguagcuuugcuggcaug

SEQ ID NO: 4197 - RNA, 23 nt, Homo sapiens
caugccagcaaagcuacaaaccc

SEQ ID NO: 4198 - RNA, 23 nt, Homo sapiens
cagggcucagggauuggauggag

SEQ ID NO: 4199 - RNA, 23 nt, Homo sapiens
cuccauccaaucccugagcccug

SEQ ID NO: 4200 - RNA, 23 nt, Homo sapiens
augcuacucggaaaucccacuga

SEQ ID NO: 4201 - RNA, 23 nt, Homo sapiens
ucagugggauuuccgaguagcau

SEQ ID NO: 4202 - RNA, 21 nt, Homo sapiens
gugggauuucugaguagcauc

SEQ ID NO: 4203 - RNA, 21 nt, Homo sapiens
gaugcuacucagaaaucccac

SEQ ID NO: 4204 - RNA, 23 nt, Homo sapiens
ccggggcagauugguguagggug

SEQ ID NO: 4205 - RNA, 23 nt, Homo sapiens
cacccuacaccaaucugccccgg

SEQ ID NO: 4206 - RNA, 23 nt, Homo sapiens
acggagacgacaagacugugcug

SEQ ID NO: 4207 - RNA, 23 nt, Homo sapiens
cagcacagucuugucgucuccgu

SEQ ID NO: 4208 - RNA, 22 nt, Homo sapiens
aauccacgcugagcuuggcauc

SEQ ID NO: 4209 - RNA, 22 nt, Homo sapiens
gaugccaagcucagcguggauu

SEQ ID NO: 4210 - RNA, 23 nt, Homo sapiens
aggaaaugaggcuggcuaggagc

SEQ ID NO: 4211 - RNA, 23 nt, Homo sapiens
gcuccuagccagccucauuuccu

SEQ ID NO: 4212 - RNA, 22 nt, Homo sapiens
ugauugguacgucuguggguag

SEQ ID NO: 4213 - RNA, 22 nt, Homo sapiens
cuacccacagacguaccaauca

SEQ ID NO: 4214 - RNA, 22 nt, Homo sapiens
aaucagugaaugccuugaaccu

SEQ ID NO: 4215 - RNA, 22 nt, Homo sapiens
agguucaaggcauucacugauu

SEQ ID NO: 4216 - RNA, 21 nt, Homo sapiens
uuacaggcgugaaccaccgcg

SEQ ID NO: 4217 - RNA, 21 nt, Homo sapiens
cgcggugguucacgccuguaa

SEQ ID NO: 4218 - RNA, 21 nt, Homo sapiens
uacugcagacaguggcaauca

SEQ ID NO: 4219 - RNA, 21 nt, Homo sapiens
ugauugccacugucugcagua

SEQ ID NO: 4220 - RNA, 21 nt, Homo sapiens
guuucaccauguuggucaggc

SEQ ID NO: 4221 - RNA, 21 nt, Homo sapiens
gccugaccaacauggugaaac

SEQ ID NO: 4222 - RNA, 23 nt, Homo sapiens
uaaauuucaccuuucugagaagg

SEQ ID NO: 4223 - RNA, 23 nt, Homo sapiens
ccuucucagaaaggugaaauuua

SEQ ID NO: 4224 - RNA, 22 nt, Homo sapiens
uucacaaggaggugucauuuau

SEQ ID NO: 4225 - RNA, 22 nt, Homo sapiens
auaaaugacaccuccuugugaa

SEQ ID NO: 4226 - RNA, 23 nt, Homo sapiens
uaaauuucaccuuucugagaaga

SEQ ID NO: 4227 - RNA, 23 nt, Homo sapiens
ucuucucagaaaggugaaauuua

SEQ ID NO: 4228 - RNA, 22 nt, Homo sapiens
uucucaaggaggugucguuuau

SEQ ID NO: 4229 - RNA, 22 nt, Homo sapiens
auaaacgacaccuccuugagaa

SEQ ID NO: 4230 - RNA, 21 nt, Homo sapiens
auugacacuucugugaguaga

SEQ ID NO: 4231 - RNA, 21 nt, Homo sapiens
ucuacucacagaagugucaau

SEQ ID NO: 4232 - RNA, 23 nt, Homo sapiens
uacucuggagagugacaaucaug

SEQ ID NO: 4233 - RNA, 23 nt, Homo sapiens
caugauugucacucuccagagua

SEQ ID NO: 4234 - RNA, 21 nt, Homo sapiens
auugacaccucugugagugga

SEQ ID NO: 4235 - RNA, 21 nt, Homo sapiens
uccacucacagaggugucaau

SEQ ID NO: 4236 - RNA, 22 nt, Homo sapiens
uucucaagagggaggcaaucau

SEQ ID NO: 4237 - RNA, 22 nt, Homo sapiens
augauugccucccucuugagaa

SEQ ID NO: 4238 - RNA, 22 nt, Homo sapiens
gagugccuucuuuuggagcguu

SEQ ID NO: 4239 - RNA, 22 nt, Homo sapiens
aacgcuccaaaagaaggcacuc

SEQ ID NO: 4240 - RNA, 18 nt, Homo sapiens
ugcuuccuuucagagggu

SEQ ID NO: 4241 - RNA, 18 nt, Homo sapiens
acccucugaaaggaagca

SEQ ID NO: 4242 - RNA, 22 nt, Homo sapiens
aucuggagguaagaagcacuuu

SEQ ID NO: 4243 - RNA, 22 nt, Homo sapiens
aaagugcuucuuaccuccagau

SEQ ID NO: 4244 - RNA, 22 nt, Homo sapiens
gaaagcgcuucccuuugcugga

SEQ ID NO: 4245 - RNA, 22 nt, Homo sapiens
uccagcaaagggaagcgcuuuc

SEQ ID NO: 4246 - RNA, 20 nt, Homo sapiens
cugcaaagggaagcccuuuc

SEQ ID NO: 4247 - RNA, 20 nt, Homo sapiens
gaaagggcuucccuuugcag

SEQ ID NO: 4248 - RNA, 21 nt, Homo sapiens
caaagcgcuucccuuuggagc

SEQ ID NO: 4249 - RNA, 21 nt, Homo sapiens
gcuccaaagggaagcgcuuug

SEQ ID NO: 4250 - RNA, 22 nt, Homo sapiens
cucuagagggaagcacuuucug

SEQ ID NO: 4251 - RNA, 22 nt, Homo sapiens
cagaaagugcuucccucuagag

SEQ ID NO: 4252 - RNA, 21 nt, Homo sapiens
aaagcgcuucccuucagagug

SEQ ID NO: 4253 - RNA, 21 nt, Homo sapiens
cacucugaagggaagcgcuuu

SEQ ID NO: 4254 - RNA, 22 nt, Homo sapiens
cucuagagggaagcgcuuucug

SEQ ID NO: 4255 - RNA, 22 nt, Homo sapiens
cagaaagcgcuucccucuagag

SEQ ID NO: 4256 - RNA, 22 nt, Homo sapiens
aaagugcauccuuuuagagguu

SEQ ID NO: 4257 - RNA, 22 nt, Homo sapiens
aaccucuaaaaggaugcacuuu

SEQ ID NO: 4258 - RNA, 22 nt, Homo sapiens
cucuagagggaagcgcuuucug

SEQ ID NO: 4259 - RNA, 22 nt, Homo sapiens
cagaaagcgcuucccucuagag

SEQ ID NO: 4260 - RNA, 22 nt, Homo sapiens
aaagugcaucuuuuuagaggau

SEQ ID NO: 4261 - RNA, 22 nt, Homo sapiens
auccucuaaaaagaugcacuuu

SEQ ID NO: 4262 - RNA, 22 nt, Homo sapiens
cucuagagggaagcgcuuucug

SEQ ID NO: 4263 - RNA, 22 nt, Homo sapiens
cagaaagcgcuucccucuagag

SEQ ID NO: 4264 - RNA, 21 nt, Homo sapiens
aaagugcuuccuuuuagaggg

SEQ ID NO: 4265 - RNA, 21 nt, Homo sapiens
cccucuaaaaggaagcacuuu

SEQ ID NO: 4266 - RNA, 22 nt, Homo sapiens
aaagugcuuccuuuuagagggu

SEQ ID NO: 4267 - RNA, 22 nt, Homo sapiens
acccucuaaaaggaagcacuuu

SEQ ID NO: 4268 - RNA, 22 nt, Homo sapiens
cucuagagggaagcacuuucug

SEQ ID NO: 4269 - RNA, 22 nt, Homo sapiens
cagaaagugcuucccucuagag

SEQ ID NO: 4270 - RNA, 22 nt, Homo sapiens
aaagugcuucucuuuggugggu

SEQ ID NO: 4271 - RNA, 22 nt, Homo sapiens
acccaccaaagagaagcacuuu

SEQ ID NO: 4272 - RNA, 20 nt, Homo sapiens
cuacaaagggaagcccuuuc

SEQ ID NO: 4273 - RNA, 20 nt, Homo sapiens
gaaagggcuucccuuuguag

SEQ ID NO: 4274 - RNA, 21 nt, Homo sapiens
aaagugcuuccuuuuugaggg

SEQ ID NO: 4275 - RNA, 21 nt, Homo sapiens
cccucaaaaaggaagcacuuu

SEQ ID NO: 4276 - RNA, 22 nt, Homo sapiens
aagugcuuccuuuuagaggguu

SEQ ID NO: 4277 - RNA, 22 nt, Homo sapiens
aacccucuaaaaggaagcacuu

SEQ ID NO: 4278 - RNA, 24 nt, Homo sapiens
acaaagugcuucccuuuagagugu

SEQ ID NO: 4279 - RNA, 24 nt, Homo sapiens
acacucuaaagggaagcacuuugu

SEQ ID NO: 4280 - RNA, 22 nt, Homo sapiens
aacgcacuucccuuuagagugu

SEQ ID NO: 4281 - RNA, 22 nt, Homo sapiens
acacucuaaagggaagugcguu

SEQ ID NO: 4282 - RNA, 22 nt, Homo sapiens
aaaaugguucccuuuagagugu

SEQ ID NO: 4283 - RNA, 22 nt, Homo sapiens
acacucuaaagggaaccauuuu

SEQ ID NO: 4284 - RNA, 22 nt, Homo sapiens
cucuagagggaagcgcuuucug

SEQ ID NO: 4285 - RNA, 22 nt, Homo sapiens
cagaaagcgcuucccucuagag

SEQ ID NO: 4286 - RNA, 23 nt, Homo sapiens
gaacgcgcuucccuauagagggu

SEQ ID NO: 4287 - RNA, 23 nt, Homo sapiens
acccucuauagggaagcgcguuc

SEQ ID NO: 4288 - RNA, 22 nt, Homo sapiens
cucuagagggaagcgcuuucug

SEQ ID NO: 4289 - RNA, 22 nt, Homo sapiens
cagaaagcgcuucccucuagag

SEQ ID NO: 4290 - RNA, 21 nt, Homo sapiens
gaaggcgcuucccuuuggagu

SEQ ID NO: 4291 - RNA, 21 nt, Homo sapiens
acuccaaagggaagcgccuuc

SEQ ID NO: 4292 - RNA, 20 nt, Homo sapiens
cugcaaagggaagcccuuuc

SEQ ID NO: 4293 - RNA, 20 nt, Homo sapiens
gaaagggcuucccuuugcag

SEQ ID NO: 4294 - RNA, 22 nt, Homo sapiens
ccucccacacccaaggcuugca

SEQ ID NO: 4295 - RNA, 22 nt, Homo sapiens
ugcaagccuugggugugggagg

SEQ ID NO: 4296 - RNA, 22 nt, Homo sapiens
caugccuugaguguaggaccgu

SEQ ID NO: 4297 - RNA, 22 nt, Homo sapiens
acgguccuacacucaaggcaug

SEQ ID NO: 4298 - RNA, 22 nt, Homo sapiens
aucauacaaggacaauuucuuu

SEQ ID NO: 4299 - RNA, 22 nt, Homo sapiens
aaagaaauuguccuuguaugau

SEQ ID NO: 4300 - RNA, 22 nt, Homo sapiens
ggagaaauuauccuuggugugu

SEQ ID NO: 4301 - RNA, 22 nt, Homo sapiens
acacaccaaggauaauuucucc

SEQ ID NO: 4302 - RNA, 22 nt, Homo sapiens
uggugggcacagaaucuggacu

SEQ ID NO: 4303 - RNA, 22 nt, Homo sapiens
aguccagauucugugcccacca

SEQ ID NO: 4304 - RNA, 25 nt, Homo sapiens
aaaggauucugcugucggucccacu

SEQ ID NO: 4305 - RNA, 25 nt, Homo sapiens
agugggaccgacagcagaauccuuu

SEQ ID NO: 4306 - RNA, 23 nt, Homo sapiens
ucggggaucaucaugucacgaga

SEQ ID NO: 4307 - RNA, 23 nt, Homo sapiens
ucucgugacaugaugauccccga

SEQ ID NO: 4308 - RNA, 22 nt, Homo sapiens
aaacauucgcggugcacuucuu

SEQ ID NO: 4309 - RNA, 22 nt, Homo sapiens
aagaagugcaccgcgaauguuu

SEQ ID NO: 4310 - RNA, 22 nt, Homo sapiens
auucugcauuuuuagcaaguuc

SEQ ID NO: 4311 - RNA, 22 nt, Homo sapiens
gaacuugcuaaaaaugcagaau

SEQ ID NO: 4312 - RNA, 22 nt, Homo sapiens
accugagguugugcauuucuaa

SEQ ID NO: 4313 - RNA, 22 nt, Homo sapiens
uuagaaaugcacaaccucaggu

SEQ ID NO: 4314 - RNA, 22 nt, Homo sapiens
ucagcaaacauuuauugugugc

SEQ ID NO: 4315 - RNA, 22 nt, Homo sapiens
gcacacaauaaauguuugcuga

SEQ ID NO: 4316 - RNA, 22 nt, Homo sapiens
ucaguaaauguuuauuagauga

SEQ ID NO: 4317 - RNA, 22 nt, Homo sapiens
ucaucuaauaaacauuuacuga

SEQ ID NO: 4318 - RNA, 22 nt, Homo sapiens
agcuacaguuacuuuugcacca

SEQ ID NO: 4319 - RNA, 22 nt, Homo sapiens
uggugcaaaaguaacuguagcu

SEQ ID NO: 4320 - RNA, 20 nt, Homo sapiens
uaaaaacugcaauuacuuuc

SEQ ID NO: 4321 - RNA, 20 nt, Homo sapiens
gaaaguaauugcaguuuuua

SEQ ID NO: 4322 - RNA, 23 nt, Homo sapiens
ugcaaaaguaauugcaguuuuug

SEQ ID NO: 4323 - RNA, 23 nt, Homo sapiens
caaaaacugcaauuacuuuugca

SEQ ID NO: 4324 - RNA, 22 nt, Homo sapiens
aaagaccgugacuacuuuugca

SEQ ID NO: 4325 - RNA, 22 nt, Homo sapiens
ugcaaaaguagucacggucuuu

SEQ ID NO: 4326 - RNA, 22 nt, Homo sapiens
agaaguaacuacgguuuuugca

SEQ ID NO: 4327 - RNA, 22 nt, Homo sapiens
ugcaaaaaccguaguuacuucu

SEQ ID NO: 4328 - RNA, 19 nt, Homo sapiens
aaaaaccacaauuacuuuu

SEQ ID NO: 4329 - RNA, 19 nt, Homo sapiens
aaaaguaauugugguuuuu

SEQ ID NO: 4330 - RNA, 19 nt, Homo sapiens
aaaaguaauugcggucuuu

SEQ ID NO: 4331 - RNA, 19 nt, Homo sapiens
aaagaccgcaauuacuuuu

SEQ ID NO: 4332 - RNA, 22 nt, Homo sapiens
caaaaacugcaauuacuuuugc

SEQ ID NO: 4333 - RNA, 22 nt, Homo sapiens
gcaaaaguaauugcaguuuuug

SEQ ID NO: 4334 - RNA, 22 nt, Homo sapiens
gaaaguaauugcuguuuuugcc

SEQ ID NO: 4335 - RNA, 22 nt, Homo sapiens
ggcaaaaacagcaauuacuuuc

SEQ ID NO: 4336 - RNA, 21 nt, Homo sapiens
uaaaacugcaguuauuuuugc

SEQ ID NO: 4337 - RNA, 21 nt, Homo sapiens
gcaaaaauaacugcaguuuua

SEQ ID NO: 4338 - RNA, 21 nt, Homo sapiens
aaaaguaauugcaguuuuugc

SEQ ID NO: 4339 - RNA, 21 nt, Homo sapiens
gcaaaaacugcaauuacuuuu

SEQ ID NO: 4340 - RNA, 22 nt, Homo sapiens
uaaaacccacaauuauguuugu

SEQ ID NO: 4341 - RNA, 22 nt, Homo sapiens
acaaacauaauuguggguuuua

SEQ ID NO: 4342 - RNA, 22 nt, Homo sapiens
aaaaguaauugcggguuuugcc

SEQ ID NO: 4343 - RNA, 22 nt, Homo sapiens
ggcaaaacccgcaauuacuuuu

SEQ ID NO: 4344 - RNA, 21 nt, Homo sapiens
caaaaccgcaguaacuuuugu

SEQ ID NO: 4345 - RNA, 21 nt, Homo sapiens
acaaaaguuacugcgguuuug

SEQ ID NO: 4346 - RNA, 22 nt, Homo sapiens
aaaaguuauugcgguuuuggcu

SEQ ID NO: 4347 - RNA, 22 nt, Homo sapiens
agccaaaaccgcaauaacuuuu

SEQ ID NO: 4348 - RNA, 21 nt, Homo sapiens
uggcaguuacuuuugcaccag

SEQ ID NO: 4349 - RNA, 21 nt, Homo sapiens
cuggugcaaaaguaacugcca

SEQ ID NO: 4350 - RNA, 21 nt, Homo sapiens
aaaaguaauugcgguuuuugc

SEQ ID NO: 4351 - RNA, 21 nt, Homo sapiens
gcaaaaaccgcaauuacuuuu

SEQ ID NO: 4352 - RNA, 20 nt, Homo sapiens
aaaacugcaguuacuuuugc

SEQ ID NO: 4353 - RNA, 20 nt, Homo sapiens
gcaaaaguaacugcaguuuu

SEQ ID NO: 4354 - RNA, 18 nt, Homo sapiens
aaaaguacuugcggauuu

SEQ ID NO: 4355 - RNA, 18 nt, Homo sapiens
aaauccgcaaguacuuuu

SEQ ID NO: 4356 - RNA, 20 nt, Homo sapiens
gugcaaaagucaucacgguu

SEQ ID NO: 4357 - RNA, 20 nt, Homo sapiens
aaccgugaugacuuuugcac

SEQ ID NO: 4358 - RNA, 22 nt, Homo sapiens
gcuggugcaaaaguaauggcgg

SEQ ID NO: 4359 - RNA, 22 nt, Homo sapiens
ccgccauuacuuuugcaccagc

SEQ ID NO: 4360 - RNA, 22 nt, Homo sapiens
aaaaguaaucacuguuuuugcc

SEQ ID NO: 4361 - RNA, 22 nt, Homo sapiens
ggcaaaaacagugauuacuuuu

SEQ ID NO: 4362 - RNA, 20 nt, Homo sapiens
agugccugagggaguaagag

SEQ ID NO: 4363 - RNA, 20 nt, Homo sapiens
cucuuacucccucaggcacu

SEQ ID NO: 4364 - RNA, 22 nt, Homo sapiens
ugucuuacucccucaggcacau

SEQ ID NO: 4365 - RNA, 22 nt, Homo sapiens
augugccugagggaguaagaca

SEQ ID NO: 4366 - RNA, 23 nt, Homo sapiens
agugccugagggaguaagagccc

SEQ ID NO: 4367 - RNA, 23 nt, Homo sapiens
gggcucuuacucccucaggcacu

SEQ ID NO: 4368 - RNA, 21 nt, Homo sapiens
gcgacccacucuugguuucca

SEQ ID NO: 4369 - RNA, 21 nt, Homo sapiens
uggaaaccaagagugggucgc

SEQ ID NO: 4370 - RNA, 22 nt, Homo sapiens
uuagcuuaaggaguaccagauc

SEQ ID NO: 4371 - RNA, 22 nt, Homo sapiens
gaucugguacuccuuaagcuaa

SEQ ID NO: 4372 - RNA, 21 nt, Homo sapiens
uaugguacuccuuaagcuaac

SEQ ID NO: 4373 - RNA, 21 nt, Homo sapiens
guuagcuuaaggaguaccaua

SEQ ID NO: 4374 - RNA, 19 nt, Homo sapiens
ugagcugcuguaccaaaau

SEQ ID NO: 4375 - RNA, 19 nt, Homo sapiens
auuuugguacagcagcuca

SEQ ID NO: 4376 - RNA, 22 nt, Homo sapiens
cacauaugaagugagccagcac

SEQ ID NO: 4377 - RNA, 22 nt, Homo sapiens
gugcuggcucacuucauaugug

SEQ ID NO: 4378 - RNA, 22 nt, Homo sapiens
ugcuggcucauuucauaugugu

SEQ ID NO: 4379 - RNA, 22 nt, Homo sapiens
acacauaugaaaugagccagca

SEQ ID NO: 4380 - RNA, 22 nt, Homo sapiens
uuccaugccuccuagaaguucc

SEQ ID NO: 4381 - RNA, 22 nt, Homo sapiens
ggaacuucuaggaggcauggaa

SEQ ID NO: 4382 - RNA, 22 nt, Homo sapiens
agccuuccaggagaaauggaga

SEQ ID NO: 4383 - RNA, 22 nt, Homo sapiens
ucuccauuucuccuggaaggcu

SEQ ID NO: 4384 - RNA, 22 nt, Homo sapiens
uaaaacuuuaagugugccuagg

SEQ ID NO: 4385 - RNA, 22 nt, Homo sapiens
ccuaggcacacuuaaaguuuua

SEQ ID NO: 4386 - RNA, 22 nt, Homo sapiens
uaggcacacuuaaaguuauagc

SEQ ID NO: 4387 - RNA, 22 nt, Homo sapiens
gcuauaacuuuaagugugccua

SEQ ID NO: 4388 - RNA, 22 nt, Homo sapiens
gaauauggguauauuaguuugg

SEQ ID NO: 4389 - RNA, 22 nt, Homo sapiens
ccaaacuaauauacccauauuc

SEQ ID NO: 4390 - RNA, 22 nt, Homo sapiens
aaacuaauauacccauauucug

SEQ ID NO: 4391 - RNA, 22 nt, Homo sapiens
cagaauauggguauauuaguuu

SEQ ID NO: 4392 - RNA, 22 nt, Homo sapiens
uaguucuucccuuugcccaauu

SEQ ID NO: 4393 - RNA, 22 nt, Homo sapiens
aauugggcaaagggaagaacua

SEQ ID NO: 4394 - RNA, 22 nt, Homo sapiens
cagggaaaugggaagaacuaga

SEQ ID NO: 4395 - RNA, 22 nt, Homo sapiens
ucuaguucuucccauuucccug

SEQ ID NO: 4396 - RNA, 22 nt, Homo sapiens
cugaauagcugggacuacaggu

SEQ ID NO: 4397 - RNA, 22 nt, Homo sapiens
accuguagucccagcuauucag

SEQ ID NO: 4398 - RNA, 22 nt, Homo sapiens
ugaaguaccagcuacucgagag

SEQ ID NO: 4399 - RNA, 22 nt, Homo sapiens
cucucgaguagcugguacuuca

SEQ ID NO: 4400 - RNA, 22 nt, Homo sapiens
cagagugacaagcugguuaaag

SEQ ID NO: 4401 - RNA, 22 nt, Homo sapiens
cuuuaaccagcuugucacucug

SEQ ID NO: 4402 - RNA, 22 nt, Homo sapiens
uauccagcuuguuacuauaugc

SEQ ID NO: 4403 - RNA, 22 nt, Homo sapiens
gcauauaguaacaagcuggaua

SEQ ID NO: 4404 - RNA, 21 nt, Homo sapiens
gccccgggcagugugaucauc

SEQ ID NO: 4405 - RNA, 21 nt, Homo sapiens
gaugaucacacugcccggggc

SEQ ID NO: 4406 - RNA, 18 nt, Homo sapiens
auggucaccuccgggacu

SEQ ID NO: 4407 - RNA, 18 nt, Homo sapiens
agucccggaggugaccau

SEQ ID NO: 4408 - RNA, 19 nt, Homo sapiens
aagucccacuaaugccagc

SEQ ID NO: 4409 - RNA, 19 nt, Homo sapiens
gcuggcauuagugggacuu

SEQ ID NO: 4410 - RNA, 21 nt, Homo sapiens
acuggcauuagugggacuuuu

SEQ ID NO: 4411 - RNA, 21 nt, Homo sapiens
aaaagucccacuaaugccagu

SEQ ID NO: 4412 - RNA, 23 nt, Homo sapiens
ugcacauggcaaccuagcuccca

SEQ ID NO: 4413 - RNA, 23 nt, Homo sapiens
ugggagcuagguugccaugugca

SEQ ID NO: 4414 - RNA, 21 nt, Homo sapiens
ggcugggugcucuugugcagu

SEQ ID NO: 4415 - RNA, 21 nt, Homo sapiens
acugcacaagagcacccagcc

SEQ ID NO: 4416 - RNA, 21 nt, Homo sapiens
uaaaguaaauaugcaccaaaa

SEQ ID NO: 4417 - RNA, 21 nt, Homo sapiens
uuuuggugcauauuuacuuua

SEQ ID NO: 4418 - RNA, 21 nt, Homo sapiens
aauaaaguucauguauggcaa

SEQ ID NO: 4419 - RNA, 21 nt, Homo sapiens
uugccauacaugaacuuuauu

SEQ ID NO: 4420 - RNA, 21 nt, Homo sapiens
uugccauacauagacuuuauu

SEQ ID NO: 4421 - RNA, 21 nt, Homo sapiens
aauaaagucuauguauggcaa

SEQ ID NO: 4422 - RNA, 21 nt, Homo sapiens
auacccauagcuuagcuccca

SEQ ID NO: 4423 - RNA, 21 nt, Homo sapiens
ugggagcuaagcuauggguau

SEQ ID NO: 4424 - RNA, 21 nt, Homo sapiens
ugggagcuaagcuauggguau

SEQ ID NO: 4425 - RNA, 21 nt, Homo sapiens
auacccauagcuuagcuccca

SEQ ID NO: 4426 - RNA, 22 nt, Homo sapiens
caaaguuuaagauccuugaagu

SEQ ID NO: 4427 - RNA, 22 nt, Homo sapiens
acuucaaggaucuuaaacuuug

SEQ ID NO: 4428 - RNA, 22 nt, Homo sapiens
aucaaggaucuuaaacuuugcc

SEQ ID NO: 4429 - RNA, 22 nt, Homo sapiens
ggcaaaguuuaagauccuugau

SEQ ID NO: 4430 - RNA, 20 nt, Homo sapiens
aaaguagcuguaccauuugc

SEQ ID NO: 4431 - RNA, 20 nt, Homo sapiens
gcaaaugguacagcuacuuu

SEQ ID NO: 4432 - RNA, 19 nt, Homo sapiens
aggcacggugucagcaggc

SEQ ID NO: 4433 - RNA, 19 nt, Homo sapiens
gccugcugacaccgugccu

SEQ ID NO: 4434 - RNA, 19 nt, Homo sapiens
gggcgccugugaucccaac

SEQ ID NO: 4435 - RNA, 19 nt, Homo sapiens
guugggaucacaggcgccc

SEQ ID NO: 4436 - RNA, 23 nt, Homo sapiens
aguauguucuuccaggacagaac

SEQ ID NO: 4437 - RNA, 23 nt, Homo sapiens
guucuguccuggaagaacauacu

SEQ ID NO: 4438 - RNA, 22 nt, Homo sapiens
gagaaaugcuggacuaaucugc

SEQ ID NO: 4439 - RNA, 22 nt, Homo sapiens
gcagauuaguccagcauuucuc

SEQ ID NO: 4440 - RNA, 22 nt, Homo sapiens
agaaaggguggcaauaccucuu

SEQ ID NO: 4441 - RNA, 22 nt, Homo sapiens
aagagguauugccacccuuucu

SEQ ID NO: 4442 - RNA, 22 nt, Homo sapiens
agguauugccacccuuucuagu

SEQ ID NO: 4443 - RNA, 22 nt, Homo sapiens
acuagaaaggguggcaauaccu

SEQ ID NO: 4444 - RNA, 22 nt, Homo sapiens
guagcaccuugcaggauaaggu

SEQ ID NO: 4445 - RNA, 22 nt, Homo sapiens
accuuauccugcaaggugcuac

SEQ ID NO: 4446 - RNA, 24 nt, Homo sapiens
uacagaugcagauucucugacuuc

SEQ ID NO: 4447 - RNA, 24 nt, Homo sapiens
gaagucagagaaucugcaucugua

SEQ ID NO: 4448 - RNA, 20 nt, Homo sapiens
aacucuagccugagcaacag

SEQ ID NO: 4449 - RNA, 20 nt, Homo sapiens
cuguugcucaggcuagaguu

SEQ ID NO: 4450 - RNA, 22 nt, Homo sapiens
acagcccagcaguuaucacggg

SEQ ID NO: 4451 - RNA, 22 nt, Homo sapiens
cccgugauaacugcugggcugu

SEQ ID NO: 4452 - RNA, 21 nt, Homo sapiens
uaucguaucguauuguauugu

SEQ ID NO: 4453 - RNA, 21 nt, Homo sapiens
acaauacaauacgauacgaua

SEQ ID NO: 4454 - RNA, 22 nt, Homo sapiens
uuagaacguuuuagggucaaau

SEQ ID NO: 4455 - RNA, 22 nt, Homo sapiens
auuugacccuaaaacguucuaa

SEQ ID NO: 4456 - RNA, 22 nt, Homo sapiens
uaacaaacaccuguaaaacagc

SEQ ID NO: 4457 - RNA, 22 nt, Homo sapiens
gcuguuuuacagguguuuguua

SEQ ID NO: 4458 - RNA, 22 nt, Homo sapiens
agcauacaccuguaguccuaga

SEQ ID NO: 4459 - RNA, 22 nt, Homo sapiens
ucuaggacuacagguguaugcu

SEQ ID NO: 4460 - RNA, 21 nt, Homo sapiens
aguuaaugaauccuggaaagu

SEQ ID NO: 4461 - RNA, 21 nt, Homo sapiens
acuuuccaggauucauuaacu

SEQ ID NO: 4462 - RNA, 21 nt, Homo sapiens
ucagcuacuaccucuauuagg

SEQ ID NO: 4463 - RNA, 21 nt, Homo sapiens
ccuaauagagguaguagcuga

SEQ ID NO: 4464 - RNA, 22 nt, Homo sapiens
uugcucugagcuccgagaaagc

SEQ ID NO: 4465 - RNA, 22 nt, Homo sapiens
gcuuucucggagcucagagcaa

SEQ ID NO: 4466 - RNA, 22 nt, Homo sapiens
caaauaauaccacagugggugu

SEQ ID NO: 4467 - RNA, 22 nt, Homo sapiens
acacccacugugguauuauuug

SEQ ID NO: 4468 - RNA, 20 nt, Homo sapiens
aauaauaucacaguaggugu

SEQ ID NO: 4469 - RNA, 20 nt, Homo sapiens
acaccuacugugauauuauu

SEQ ID NO: 4470 - RNA, 22 nt, Homo sapiens
aauaauaucacaguagguguac

SEQ ID NO: 4471 - RNA, 22 nt, Homo sapiens
guacaccuacugugauauuauu

SEQ ID NO: 4472 - RNA, 22 nt, Homo sapiens
gcaguggcucugaaaugaacuc

SEQ ID NO: 4473 - RNA, 22 nt, Homo sapiens
gaguucauuucagagccacugc

SEQ ID NO: 4474 - RNA, 21 nt, Homo sapiens
cagaucaugggacugucucag

SEQ ID NO: 4475 - RNA, 21 nt, Homo sapiens
cugagacagucccaugaucug

SEQ ID NO: 4476 - RNA, 22 nt, Homo sapiens
acuccaagaagaaucuagacag

SEQ ID NO: 4477 - RNA, 22 nt, Homo sapiens
cugucuagauucuucuuggagu

SEQ ID NO: 4478 - RNA, 22 nt, Homo sapiens
cucauuuaaguagucugaugcc

SEQ ID NO: 4479 - RNA, 22 nt, Homo sapiens
ggcaucagacuacuuaaaugag

SEQ ID NO: 4480 - RNA, 22 nt, Homo sapiens
ucaaguaguuucaugauaaagg

SEQ ID NO: 4481 - RNA, 22 nt, Homo sapiens
ccuuuaucaugaaacuacuuga

SEQ ID NO: 4482 - RNA, 22 nt, Homo sapiens
ugggggagugcagugauugugg

SEQ ID NO: 4483 - RNA, 22 nt, Homo sapiens
ccacaaucacugcacuccccca

SEQ ID NO: 4484 - RNA, 22 nt, Homo sapiens
uccugucuuuccuuguuggagc

SEQ ID NO: 4485 - RNA, 22 nt, Homo sapiens
gcuccaacaaggaaagacagga

SEQ ID NO: 4486 - RNA, 22 nt, Homo sapiens
uaaugcauuaaauuauugaagg

SEQ ID NO: 4487 - RNA, 22 nt, Homo sapiens
ccuucaauaauuuaaugcauua

SEQ ID NO: 4488 - RNA, 19 nt, Homo sapiens
uuauugucacguucugauu

SEQ ID NO: 4489 - RNA, 19 nt, Homo sapiens
aaucagaacgugacaauaa

SEQ ID NO: 4490 - RNA, 22 nt, Homo sapiens
ugagucagcaacauaucccaug

SEQ ID NO: 4491 - RNA, 22 nt, Homo sapiens
caugggauauguugcugacuca

SEQ ID NO: 4492 - RNA, 18 nt, Homo sapiens
aggagaagucgggaaggu

SEQ ID NO: 4493 - RNA, 18 nt, Homo sapiens
accuucccgacuucuccu

SEQ ID NO: 4494 - RNA, 22 nt, Homo sapiens
cgaaaacagcaauuaccuuugc

SEQ ID NO: 4495 - RNA, 22 nt, Homo sapiens
gcaaagguaauugcuguuuucg

SEQ ID NO: 4496 - RNA, 22 nt, Homo sapiens
uuaggccaucaucccauuaugc

SEQ ID NO: 4497 - RNA, 22 nt, Homo sapiens
gcauaaugggaugauggccuaa

SEQ ID NO: 4498 - RNA, 23 nt, Homo sapiens
uguuucggggcucauggccugug

SEQ ID NO: 4499 - RNA, 23 nt, Homo sapiens
cacaggccaugagccccgaaaca

SEQ ID NO: 4500 - RNA, 22 nt, Homo sapiens
aaagguaauugcaguuuuuccc

SEQ ID NO: 4501 - RNA, 22 nt, Homo sapiens
gggaaaaacugcaauuaccuuu

SEQ ID NO: 4502 - RNA, 22 nt, Homo sapiens
uucuggauaacaugcugaagcu

SEQ ID NO: 4503 - RNA, 22 nt, Homo sapiens
agcuucagcauguuauccagaa

SEQ ID NO: 4504 - RNA, 22 nt, Homo sapiens
acguuugaaugcuguacaaggc

SEQ ID NO: 4505 - RNA, 22 nt, Homo sapiens
gccuuguacagcauucaaacgu

SEQ ID NO: 4506 - RNA, 20 nt, Homo sapiens
augagcgacugugccugacc

SEQ ID NO: 4507 - RNA, 20 nt, Homo sapiens
ggucaggcacagucgcucau

SEQ ID NO: 4508 - RNA, 19 nt, Homo sapiens
gagccaguuggacaggagc

SEQ ID NO: 4509 - RNA, 19 nt, Homo sapiens
gcuccuguccaacuggcuc

SEQ ID NO: 4510 - RNA, 23 nt, Homo sapiens
uucauuugguauaaaccgcgauu

SEQ ID NO: 4511 - RNA, 23 nt, Homo sapiens
aaucgcgguuuauaccaaaugaa

SEQ ID NO: 4512 - RNA, 22 nt, Homo sapiens
uugagaaugaugaaucauuagg

SEQ ID NO: 4513 - RNA, 22 nt, Homo sapiens
ccuaaugauucaucauucucaa

SEQ ID NO: 4514 - RNA, 23 nt, Homo sapiens
uuacaguuguucaaccaguuacu

SEQ ID NO: 4515 - RNA, 23 nt, Homo sapiens
aguaacugguugaacaacuguaa

SEQ ID NO: 4516 - RNA, 21 nt, Homo sapiens
caaagaggaaggucccauuac

SEQ ID NO: 4517 - RNA, 21 nt, Homo sapiens
guaaugggaccuuccucuuug

SEQ ID NO: 4518 - RNA, 22 nt, Homo sapiens
ucaguuccaggccaaccaggcu

SEQ ID NO: 4519 - RNA, 22 nt, Homo sapiens
agccugguuggccuggaacuga

SEQ ID NO: 4520 - RNA, 22 nt, Homo sapiens
uuaugguuugccugggacugag

SEQ ID NO: 4521 - RNA, 22 nt, Homo sapiens
cucagucccaggcaaaccauaa

SEQ ID NO: 4522 - RNA, 19 nt, Homo sapiens
ugggcguaucuguaugcua

SEQ ID NO: 4523 - RNA, 19 nt, Homo sapiens
uagcauacagauacgccca

SEQ ID NO: 4524 - RNA, 20 nt, Homo sapiens
agaccauggguucucauugu

SEQ ID NO: 4525 - RNA, 20 nt, Homo sapiens
acaaugagaacccauggucu

SEQ ID NO: 4526 - RNA, 22 nt, Homo sapiens
uugugucaauaugcgaugaugu

SEQ ID NO: 4527 - RNA, 22 nt, Homo sapiens
acaucaucgcauauugacacaa

SEQ ID NO: 4528 - RNA, 19 nt, Homo sapiens
ugucucugcugggguuucu

SEQ ID NO: 4529 - RNA, 19 nt, Homo sapiens
agaaaccccagcagagaca

SEQ ID NO: 4530 - RNA, 25 nt, Homo sapiens
aggcaccagccaggcauugcucagc

SEQ ID NO: 4531 - RNA, 25 nt, Homo sapiens
gcugagcaaugccuggcuggugccu

SEQ ID NO: 4532 - RNA, 21 nt, Homo sapiens
gaagugugccguggugugucu

SEQ ID NO: 4533 - RNA, 21 nt, Homo sapiens
agacacaccacggcacacuuc

SEQ ID NO: 4534 - RNA, 21 nt, Homo sapiens
aagccugcccggcuccucggg

SEQ ID NO: 4535 - RNA, 21 nt, Homo sapiens
cccgaggagccgggcaggcuu

SEQ ID NO: 4536 - RNA, 20 nt, Homo sapiens
guugugucaguuuaucaaac

SEQ ID NO: 4537 - RNA, 20 nt, Homo sapiens
guuugauaaacugacacaac

SEQ ID NO: 4538 - RNA, 22 nt, Homo sapiens
uggucuaggauuguuggaggag

SEQ ID NO: 4539 - RNA, 22 nt, Homo sapiens
cuccuccaacaauccuagacca

SEQ ID NO: 4540 - RNA, 22 nt, Homo sapiens
cacacacugcaauuacuuuugc

SEQ ID NO: 4541 - RNA, 22 nt, Homo sapiens
gcaaaaguaauugcagugugug

SEQ ID NO: 4542 - RNA, 25 nt, Homo sapiens
aggggugguguugggacagcuccgu

SEQ ID NO: 4543 - RNA, 25 nt, Homo sapiens
acggagcugucccaacaccaccccu

SEQ ID NO: 4544 - RNA, 21 nt, Homo sapiens
ugagcuaaaugugugcuggga

SEQ ID NO: 4545 - RNA, 21 nt, Homo sapiens
ucccagcacacauuuagcuca

SEQ ID NO: 4546 - RNA, 23 nt, Homo sapiens
gcgaggaccccucggggucugac

SEQ ID NO: 4547 - RNA, 23 nt, Homo sapiens
gucagaccccgagggguccucgc

SEQ ID NO: 4548 - RNA, 25 nt, Homo sapiens
gcugggcagggcuucugagcuccuu

SEQ ID NO: 4549 - RNA, 25 nt, Homo sapiens
aaggagcucagaagcccugcccagc

SEQ ID NO: 4550 - RNA, 20 nt, Homo sapiens
gggaaaaggaagggggagga

SEQ ID NO: 4551 - RNA, 20 nt, Homo sapiens
uccucccccuuccuuuuccc

SEQ ID NO: 4552 - RNA, 20 nt, Homo sapiens
gcggaaggcggagcggcgga

SEQ ID NO: 4553 - RNA, 20 nt, Homo sapiens
uccgccgcuccgccuuccgc

SEQ ID NO: 4554 - RNA, 18 nt, Homo sapiens
gugaaggcccggcggaga

SEQ ID NO: 4555 - RNA, 18 nt, Homo sapiens
ucuccgccgggccuucac

SEQ ID NO: 4556 - RNA, 19 nt, Homo sapiens
ugagggagugggugggagg

SEQ ID NO: 4557 - RNA, 19 nt, Homo sapiens
ccucccacccacucccuca

SEQ ID NO: 4558 - RNA, 19 nt, Homo sapiens
acuggaauuggagucaaaa

SEQ ID NO: 4559 - RNA, 19 nt, Homo sapiens
uuuugacuccaauuccagu

SEQ ID NO: 4560 - RNA, 19 nt, Homo sapiens
ugagggaguuggguguaua

SEQ ID NO: 4561 - RNA, 19 nt, Homo sapiens
uauacacccaacucccuca

SEQ ID NO: 4562 - RNA, 19 nt, Homo sapiens
ugagggaguggauuguaug

SEQ ID NO: 4563 - RNA, 19 nt, Homo sapiens
cauacaauccacucccuca

SEQ ID NO: 4564 - RNA, 19 nt, Homo sapiens
ggcuggucagaugggagug

SEQ ID NO: 4565 - RNA, 19 nt, Homo sapiens
cacucccaucugaccagcc

SEQ ID NO: 4566 - RNA, 19 nt, Homo sapiens
agcagggcuggggauugca

SEQ ID NO: 4567 - RNA, 19 nt, Homo sapiens
ugcaauccccagcccugcu

SEQ ID NO: 4568 - RNA, 19 nt, Homo sapiens
ugagggaggagguugggua

SEQ ID NO: 4569 - RNA, 19 nt, Homo sapiens
uacccaaccuccucccuca

SEQ ID NO: 4570 - RNA, 19 nt, Homo sapiens
ugaggugguaggauguaga

SEQ ID NO: 4571 - RNA, 19 nt, Homo sapiens
ucuacauccuaccaccuca

SEQ ID NO: 4572 - RNA, 22 nt, Homo sapiens
uccgagccugggucucccucuu

SEQ ID NO: 4573 - RNA, 22 nt, Homo sapiens
aagagggagacccaggcucgga

SEQ ID NO: 4574 - RNA, 22 nt, Homo sapiens
ggggguccccggugcucggauc

SEQ ID NO: 4575 - RNA, 22 nt, Homo sapiens
gauccgagcaccggggaccccc

SEQ ID NO: 4576 - RNA, 22 nt, Homo sapiens
agucauuggaggguuugagcag

SEQ ID NO: 4577 - RNA, 22 nt, Homo sapiens
cugcucaaacccuccaaugacu

SEQ ID NO: 4578 - RNA, 19 nt, Homo sapiens
cagcaggaggugaggggag

SEQ ID NO: 4579 - RNA, 19 nt, Homo sapiens
cuccccucaccuccugcug

SEQ ID NO: 4580 - RNA, 22 nt, Homo sapiens
acucaaaacccuucagugacuu

SEQ ID NO: 4581 - RNA, 22 nt, Homo sapiens
aagucacugaaggguuuugagu

SEQ ID NO: 4582 - RNA, 22 nt, Homo sapiens
agacuucccauuugaagguggc

SEQ ID NO: 4583 - RNA, 22 nt, Homo sapiens
gccaccuucaaaugggaagucu

SEQ ID NO: 4584 - RNA, 23 nt, Homo sapiens
aaacucuacuuguccuucugagu

SEQ ID NO: 4585 - RNA, 23 nt, Homo sapiens
acucagaaggacaaguagaguuu

SEQ ID NO: 4586 - RNA, 21 nt, Homo sapiens
ggcuagcaacagcgcuuaccu

SEQ ID NO: 4587 - RNA, 21 nt, Homo sapiens
agguaagcgcuguugcuagcc

SEQ ID NO: 4588 - RNA, 21 nt, Homo sapiens
acagucugcugagguuggagc

SEQ ID NO: 4589 - RNA, 21 nt, Homo sapiens
gcuccaaccucagcagacugu

SEQ ID NO: 4590 - RNA, 23 nt, Homo sapiens
aucccuugcaggggcuguugggu

SEQ ID NO: 4591 - RNA, 23 nt, Homo sapiens
acccaacagccccugcaagggau

SEQ ID NO: 4592 - RNA, 22 nt, Homo sapiens
gugagucucuaagaaaagagga

SEQ ID NO: 4593 - RNA, 22 nt, Homo sapiens
uccucuuuucuuagagacucac

SEQ ID NO: 4594 - RNA, 21 nt, Homo sapiens
ucuaguaagaguggcagucga

SEQ ID NO: 4595 - RNA, 21 nt, Homo sapiens
ucgacugccacucuuacuaga

SEQ ID NO: 4596 - RNA, 22 nt, Homo sapiens
augcugacauauuuacuagagg

SEQ ID NO: 4597 - RNA, 22 nt, Homo sapiens
ccucuaguaaauaugucagcau

SEQ ID NO: 4598 - RNA, 22 nt, Homo sapiens
guucucccaacguaagcccagc

SEQ ID NO: 4599 - RNA, 22 nt, Homo sapiens
gcugggcuuacguugggagaac

SEQ ID NO: 4600 - RNA, 21 nt, Homo sapiens
uggguuuacguugggagaacu

SEQ ID NO: 4601 - RNA, 21 nt, Homo sapiens
aguucucccaacguaaaccca

SEQ ID NO: 4602 - RNA, 19 nt, Homo sapiens
gugucugcuuccuguggga

SEQ ID NO: 4603 - RNA, 19 nt, Homo sapiens
ucccacaggaagcagacac

SEQ ID NO: 4604 - RNA, 23 nt, Homo sapiens
cuaauaguaucuaccacaauaaa

SEQ ID NO: 4605 - RNA, 23 nt, Homo sapiens
uuuauugugguagauacuauuag

SEQ ID NO: 4606 - RNA, 23 nt, Homo sapiens
ugugcuugcucgucccgcccgca

SEQ ID NO: 4607 - RNA, 23 nt, Homo sapiens
ugcgggcgggacgagcaagcaca

SEQ ID NO: 4608 - RNA, 25 nt, Homo sapiens
agggaucgcgggcggguggcggccu

SEQ ID NO: 4609 - RNA, 25 nt, Homo sapiens
aggccgccacccgcccgcgaucccu

SEQ ID NO: 4610 - RNA, 21 nt, Homo sapiens
augauccaggaaccugccucu

SEQ ID NO: 4611 - RNA, 21 nt, Homo sapiens
agaggcagguuccuggaucau

SEQ ID NO: 4612 - RNA, 19 nt, Homo sapiens
aguguggcuuucuuagagc

SEQ ID NO: 4613 - RNA, 19 nt, Homo sapiens
gcucuaagaaagccacacu

SEQ ID NO: 4614 - RNA, 19 nt, Homo sapiens
ucuaggcugguacugcuga

SEQ ID NO: 4615 - RNA, 19 nt, Homo sapiens
ucagcaguaccagccuaga

SEQ ID NO: 4616 - RNA, 19 nt, Homo sapiens
aagcagcugccucugaggc

SEQ ID NO: 4617 - RNA, 19 nt, Homo sapiens
gccucagaggcagcugcuu

SEQ ID NO: 4618 - RNA, 21 nt, Homo sapiens
guggcugcacucacuuccuuc

SEQ ID NO: 4619 - RNA, 21 nt, Homo sapiens
gaaggaagugagugcagccac

SEQ ID NO: 4620 - RNA, 21 nt, Homo sapiens
aggaggcagcgcucucaggac

SEQ ID NO: 4621 - RNA, 21 nt, Homo sapiens
guccugagagcgcugccuccu

SEQ ID NO: 4622 - RNA, 21 nt, Homo sapiens
aauggcgccacuaggguugug

SEQ ID NO: 4623 - RNA, 21 nt, Homo sapiens
cacaacccuaguggcgccauu

SEQ ID NO: 4624 - RNA, 25 nt, Homo sapiens
caacccuaggagagggugccauuca

SEQ ID NO: 4625 - RNA, 25 nt, Homo sapiens
ugaauggcacccucuccuaggguug

SEQ ID NO: 4626 - RNA, 22 nt, Homo sapiens
auaauacaugguuaaccucuuu

SEQ ID NO: 4627 - RNA, 22 nt, Homo sapiens
aaagagguuaaccauguauuau

SEQ ID NO: 4628 - RNA, 21 nt, Homo sapiens
aauauuauacagucaaccucu

SEQ ID NO: 4629 - RNA, 21 nt, Homo sapiens
agagguugacuguauaauauu

SEQ ID NO: 4630 - RNA, 25 nt, Homo sapiens
ggcggagggaaguagguccguuggu

SEQ ID NO: 4631 - RNA, 25 nt, Homo sapiens
accaacggaccuacuucccuccgcc

SEQ ID NO: 4632 - RNA, 24 nt, Homo sapiens
ugccugggucucuggccugcgcgu

SEQ ID NO: 4633 - RNA, 24 nt, Homo sapiens
acgcgcaggccagagacccaggca

SEQ ID NO: 4634 - RNA, 22 nt, Homo sapiens
aggcggggcgccgcgggaccgc

SEQ ID NO: 4635 - RNA, 22 nt, Homo sapiens
gcggucccgcggcgccccgccu

SEQ ID NO: 4636 - RNA, 22 nt, Homo sapiens
gguggcccggccgugccugagg

SEQ ID NO: 4637 - RNA, 22 nt, Homo sapiens
ccucaggcacggccgggccacc

SEQ ID NO: 4638 - RNA, 20 nt, Homo sapiens
accaggaggcugaggccccu

SEQ ID NO: 4639 - RNA, 20 nt, Homo sapiens
aggggccucagccuccuggu

SEQ ID NO: 4640 - RNA, 20 nt, Homo sapiens
gucccugaguguauguggug

SEQ ID NO: 4641 - RNA, 20 nt, Homo sapiens
caccacauacacucagggac

SEQ ID NO: 4642 - RNA, 21 nt, Homo sapiens
uccgguucucagggcuccacc

SEQ ID NO: 4643 - RNA, 21 nt, Homo sapiens
gguggagcccugagaaccgga

SEQ ID NO: 4644 - RNA, 23 nt, Homo sapiens
aggaagcccuggaggggcuggag

SEQ ID NO: 4645 - RNA, 23 nt, Homo sapiens
cuccagccccuccagggcuuccu

SEQ ID NO: 4646 - RNA, 20 nt, Homo sapiens
cuguaugcccucaccgcuca

SEQ ID NO: 4647 - RNA, 20 nt, Homo sapiens
ugagcggugagggcauacag

SEQ ID NO: 4648 - RNA, 23 nt, Homo sapiens
uggugcggagagggcccacagug

SEQ ID NO: 4649 - RNA, 23 nt, Homo sapiens
cacugugggcccucuccgcacca

SEQ ID NO: 4650 - RNA, 22 nt, Homo sapiens
caacuagacugugagcuucuag

SEQ ID NO: 4651 - RNA, 22 nt, Homo sapiens
cuagaagcucacagucuaguug

SEQ ID NO: 4652 - RNA, 23 nt, Homo sapiens
aaggagcuuacaaucuagcuggg

SEQ ID NO: 4653 - RNA, 23 nt, Homo sapiens
cccagcuagauuguaagcuccuu

SEQ ID NO: 4654 - RNA, 22 nt, Homo sapiens
gggacccagggagagacguaag

SEQ ID NO: 4655 - RNA, 22 nt, Homo sapiens
cuuacgucucucccuggguccc

SEQ ID NO: 4656 - RNA, 22 nt, Homo sapiens
gcagagugcaaacaauuuugac

SEQ ID NO: 4657 - RNA, 22 nt, Homo sapiens
gucaaaauuguuugcacucugc

SEQ ID NO: 4658 - RNA, 20 nt, Homo sapiens
cggcucugggucugugggga

SEQ ID NO: 4659 - RNA, 20 nt, Homo sapiens
uccccacagacccagagccg

SEQ ID NO: 4660 - RNA, 22 nt, Homo sapiens
gcagcagggugaaacugacaca

SEQ ID NO: 4661 - RNA, 22 nt, Homo sapiens
ugugucaguuucacccugcugc

SEQ ID NO: 4662 - RNA, 21 nt, Homo sapiens
uggaggagaaggaaggugaug

SEQ ID NO: 4663 - RNA, 21 nt, Homo sapiens
caucaccuuccuucuccucca

SEQ ID NO: 4664 - RNA, 23 nt, Homo sapiens
ucugcucauaccccaugguuucu

SEQ ID NO: 4665 - RNA, 23 nt, Homo sapiens
agaaaccaugggguaugagcaga

SEQ ID NO: 4666 - RNA, 23 nt, Homo sapiens
ugcaccaugguugucugagcaug

SEQ ID NO: 4667 - RNA, 23 nt, Homo sapiens
caugcucagacaaccauggugca

SEQ ID NO: 4668 - RNA, 23 nt, Homo sapiens
cugggaucuccggggucuugguu

SEQ ID NO: 4669 - RNA, 23 nt, Homo sapiens
aaccaagaccccggagaucccag

SEQ ID NO: 4670 - RNA, 22 nt, Homo sapiens
ugagaccucuggguucugagcu

SEQ ID NO: 4671 - RNA, 22 nt, Homo sapiens
agcucagaacccagaggucuca

SEQ ID NO: 4672 - RNA, 23 nt, Homo sapiens
uccaguaccacgugucagggcca

SEQ ID NO: 4673 - RNA, 23 nt, Homo sapiens
uggcccugacacgugguacugga

SEQ ID NO: 4674 - RNA, 22 nt, Homo sapiens
ggagacugaugaguucccggga

SEQ ID NO: 4675 - RNA, 22 nt, Homo sapiens
ucccgggaacucaucagucucc

SEQ ID NO: 4676 - RNA, 21 nt, Homo sapiens
gcaggaacuugugagucuccu

SEQ ID NO: 4677 - RNA, 21 nt, Homo sapiens
aggagacucacaaguuccugc

SEQ ID NO: 4678 - RNA, 22 nt, Homo sapiens
cugcccuggcccgagggaccga

SEQ ID NO: 4679 - RNA, 22 nt, Homo sapiens
ucggucccucgggccagggcag

SEQ ID NO: 4680 - RNA, 21 nt, Homo sapiens
ccuggaaacacugagguugug

SEQ ID NO: 4681 - RNA, 21 nt, Homo sapiens
cacaaccucaguguuuccagg

SEQ ID NO: 4682 - RNA, 22 nt, Homo sapiens
uauaccucaguuuuaucaggug

SEQ ID NO: 4683 - RNA, 22 nt, Homo sapiens
caccugauaaaacugagguaua

SEQ ID NO: 4684 - RNA, 22 nt, Homo sapiens
uggugguuuacaaaguaauuca

SEQ ID NO: 4685 - RNA, 22 nt, Homo sapiens
ugaauuacuuuguaaaccacca

SEQ ID NO: 4686 - RNA, 22 nt, Homo sapiens
uggauuucuuugugaaucacca

SEQ ID NO: 4687 - RNA, 22 nt, Homo sapiens
uggugauucacaaagaaaucca

SEQ ID NO: 4688 - RNA, 21 nt, Homo sapiens
uccucuucucccuccucccag

SEQ ID NO: 4689 - RNA, 21 nt, Homo sapiens
cugggaggagggagaagagga

SEQ ID NO: 4690 - RNA, 20 nt, Homo sapiens
guagaggagauggcgcaggg

SEQ ID NO: 4691 - RNA, 20 nt, Homo sapiens
cccugcgccaucuccucuac

SEQ ID NO: 4692 - RNA, 22 nt, Homo sapiens
gugaacgggcgccaucccgagg

SEQ ID NO: 4693 - RNA, 22 nt, Homo sapiens
ccucgggauggcgcccguucac

SEQ ID NO: 4694 - RNA, 22 nt, Homo sapiens
gacugacaccucuuugggugaa

SEQ ID NO: 4695 - RNA, 22 nt, Homo sapiens
uucacccaaagaggugucaguc

SEQ ID NO: 4696 - RNA, 21 nt, Homo sapiens
uacucaaaaagcugucaguca

SEQ ID NO: 4697 - RNA, 21 nt, Homo sapiens
ugacugacagcuuuuugagua

SEQ ID NO: 4698 - RNA, 21 nt, Homo sapiens
uuaauaucggacaaccauugu

SEQ ID NO: 4699 - RNA, 21 nt, Homo sapiens
acaaugguuguccgauauuaa

SEQ ID NO: 4700 - RNA, 22 nt, Homo sapiens
auccgcgcucugacucucugcc

SEQ ID NO: 4701 - RNA, 22 nt, Homo sapiens
ggcagagagucagagcgcggau

SEQ ID NO: 4702 - RNA, 20 nt, Homo sapiens
gugagucaggguggggcugg

SEQ ID NO: 4703 - RNA, 20 nt, Homo sapiens
ccagccccacccugacucac

SEQ ID NO: 4704 - RNA, 22 nt, Homo sapiens
ugcccuuaaaggugaacccagu

SEQ ID NO: 4705 - RNA, 22 nt, Homo sapiens
acuggguucaccuuuaagggca

SEQ ID NO: 4706 - RNA, 22 nt, Homo sapiens
ucuucucuguuuuggccaugug

SEQ ID NO: 4707 - RNA, 22 nt, Homo sapiens
cacauggccaaaacagagaaga

SEQ ID NO: 4708 - RNA, 22 nt, Homo sapiens
aaauuauuguacaucggaugag

SEQ ID NO: 4709 - RNA, 22 nt, Homo sapiens
cucauccgauguacaauaauuu

SEQ ID NO: 4710 - RNA, 22 nt, Homo sapiens
uucaacggguauuuauugagca

SEQ ID NO: 4711 - RNA, 22 nt, Homo sapiens
ugcucaauaaauacccguugaa

SEQ ID NO: 4712 - RNA, 22 nt, Homo sapiens
cuauacaacuuacuacuuuccc

SEQ ID NO: 4713 - RNA, 22 nt, Homo sapiens
gggaaaguaguaaguuguauag

SEQ ID NO: 4714 - RNA, 22 nt, Homo sapiens
ugagguaguaaguuguauuguu

SEQ ID NO: 4715 - RNA, 22 nt, Homo sapiens
aacaauacaacuuacuaccuca

SEQ ID NO: 4716-4733 - skipped (18 entries)

SEQ ID NO: 4734 - DNA, 3131 bp, Adeno-associated virus
gcggccgcgaattcgcccttggctgcgtcaactggaccaatgagaactttcccttcaatgattgcgtcgacaagatggtgatctggtgggaggagggcaagatgacggccaaggtcgtggagtccgccaaggccattctcggcggcagcaaggtgcgcgtggaccaaaagtgcaagtcgtccgcccagatcgaccccacccccgtgatcgtcacctccaacaccaacatgtgcgccgtgattgacgggaacagcaccaccttcgagcaccagcagcctctccaggaccggatgtttaagttcgaactcacccgccgtctggagcacgactttggcaaggtgacaaagcaggaagtcaaagagttcttccgctgggccagtgatcacgtgaccgaggtggcgcatgagttttacgtcagaaagggcggagccagcaaaagacccgcccccgatgacgcggataaaagcgagcccaagcgggcctgcccctcagtcgcggatccatcgacgtcagacgcggaaggagctccggtggactttgccgacaggtaccaaaacaaatgttctcgtcacgcgggcatgcttcagatgctgtttccctgcaaaacgtgcgagagaatgaatcggaatttcaacatttgcttcacacacggggtcagagactgctcagagtgtttccccggcgtgtcagaatctcaaccggtcgtcagaaagaggacgtatcggaaactccgtgcgattcatcatctgctggggcgggctcccgagattgcttgctcggcctgcgatctggtcaacgtggacctggatgactgtgtttctgagcaataaatgacttaaaccaggtatggctgccgatggttatcttccagattggctcgaggacaacctctctgagggcattcgcgagtggtgggcgctgaaacctggagccccgaagcccaaagccaaccagcaaaagcaggacgacggccggggtctggtgcttcctggctacaagtacctcggacccttcaacggactcgacaagggggagcccgtcaacgcggcggacgcagcggccctcgagcacgacaaggcttacgaccagcagctgcaggcgggtgacaatccgtacctgcggtataaccacgccgacgccgagtttcaggagcgtctgcaagaagatacgtcttttgggggcaacctcgggcgagcagtcttccaggccaagaagcgggttctcgaacctctcggtctggttgaggaaggcgctaagacggctcctggaaagaagagaccggtagagccatcaccccagcgttctccagactcctctacgggcatcggcaagaaaggccaacagcccgccagaaaaagactcaattttggtcagactggcgactcagagtcagttccagaccctcaacctctcggagaacctccagcagcgccctctggtgtgggacctaatacaatggctgcaggcggtggcgcaccaatggcagacaataacgaaggcgccgacggagtgggtagttcctcgggaaattggcattgcgattccacatggctgggcgacagagtcatcaccaccagcacccgaacctgggccctgcccacctacaacaaccacctctacaagcaaatctccaacgggacatcgggaggagccaccaacgacaacacctacttcggctacagcaccccctgggggtattttgactttaacagattccactgccacctttcaccacgtgactggcagcgactcatcaacaacaactggggattccgacccaagagactcagcttcaagctcttcaacatccaggtcaaggaggtcacgcagaatgaaggcaccaagaccatcgccaataacctcaccagcaccatccaggtgtttacggactcggagtaccagctgccgtacgttctcggctctgtccaccagggctgcctgcctccgttcccggcggacgtgttcatgattccccagtacggctacctaacactcaacaacggtagtcaggccgtgggacgctcctccttctactgcctggaatactttccttcgcagatgctgagaaccggcaacaacttccagtttacttacaccttcgaggacgtgcctttccacagcagctacgcccacagctagagcttggaccggctgatgaatcctctgattgaccagtacctgtactacttgtctcggactcaaacaacaggaggcacggcaaatacgcagactctgggcttcagccaaggtgggcctaatacaatggccaatcaggcaaagaactggctgccaggaccctgttaccgccaacaacgcgtctcaacgacaaccgggcaaaacaacaatagcaactttgcctggactgctgggaccaaataccatctgaatggaagaaattcattggctaatcctggcatcgctatggcaacacacaaagacgacgaggagcgtttttttcccagtaacgggatcctgatttttggcaaacaaaatgctgccagagacaatgcggattacagcgatgtcatgctcaccagcgaggaagaaatcaaaaccactaaccctgtggctacagaggaatacggtatcgtggcagataacttgcagcagcaaaacacggctcctcaaattggaactgtcaacagccagggggccttacccggtatggtctggcagaaccgggacgtgtacctgcagggtcccatctgggccaagattcctcacacggacggcaacttccacccgtctccgctgatgggcggctttggcctgaaacatcctccgcctcagatcctgatcaagaacacgcctgtacctgcggatcctccgaccaccttcaaccagtcaaagctgaactctttcatcacgcaatacagcaccggacaggtcagcgtggaaattgaatgggagctgcagaaggaaaacagcaagcgctggaaccccgagatccagtacacctccaactactacaaatctataagtgtggactttgctgttaatacagaaggcgtgtactctgaaccccgccccattggcacccgttacctcacccgtaatctgtaattgcctgttaatcaataaaccggttgattcgtttcagttgaactttggtctctgcgaagggcgaattc

SEQ ID NO: 4735 - protein, 728 aa, Adeno-associated virus
MAADGYLPDWLEDNLSEGIREWWDLKPGAPKPKANQQKQDDGRGLVLPGYKYLGPFNGLDKGEPVNEADAAALEHDKAYDKQLEQGDNPYLKYNHADAEFQERLQEDTSFGGNLGRAVFQAKKRVLEPLGLVEEGAKTAPGKKRPIESPDSSTGIGKKGQQPAKKKLNFGQTGDSESVPDPQPLGEPPAAPSGLGSGTMAAGGGAPMADNNEGADGVGNASGNWHCDSTWLGDRVITTSTRTWALPTYNNHLYKQISSQSGATNDNHFFGYSTPWGYFDFNRFHCHFSPRDWQRLINNNWGFRPRKLRFKLFNIQVKEVTTNDGVTTIANNLTSTIQVFSDSEYQLPYVLGSAHQGCLPPFPADVFMIPQYGYLTLNNGSQSMGRSSFYCLEYFPSQMLRTGNNFEFSYTFEEVPFHSSYAHSQSLDRLMNPLIDQYLYYLARTQSTTGSTRELQFHQAGPNTMAEQSKNWLPGPCYRQQRLSKNIDSNNNSNFAWTGATKYHLNGRNSLTNPGVAMATNKDDEGQFFPINGVLVFGKTGAANKTTLENVLMTSEEEIKTTNPVATEEYGVVSSNLQSSTAGPQTQTVNSQGALPGMVWQNRDVYLQGPIWAKIPHTDGNFHPSPLMGGFGLKHPPPQILIKNTPVPANPPGVFTPALFASFITQYSTGQVSVEIEWELQKENSKRWNPEIQYTSNYAKSNNVEFAVNNEGVYTEPRPIGTRYLTRNL

SEQ ID NO: 4736 - protein, 644 aa, Adeno-associated virus
  MOD_RES (434)..(434): Any amino acid
KAYDQQLKAGDNPYLRYNHADAEFQERLQEDTSFGGNLGRAVFQAKKRVLEPLGLVETPAKTAPGKKRPVDSPDSTSGIGKKGQQPAKKRLNFGQTGDSESVPDPQPIGEPPAGPSGLGSGTMAAGGGAPMADNNEGADGVGNASGNWHCDSTWLGDRVITTSTRTWALPTYNNHLYKQISSQSAGSTNDNVYFGYSTPWGYFDFNRFHCHFSPRDWQRLINNNWGFRPKKLNFKLFNIQVKEVTTNDGVTTIANNLTSTVQVFSDSEYQLPYVLGSAHQGCLPPFPADVFMIPQYGYLTLNNGSQSVGRSSFYCLEYFPSQMLRTGNNFTFSYTFEDVPFHSSYAHSQSLDRLMNPLIDQYLYYLARTQSNAGGTAGNRELQFYQGGPTTMAEQAKNWLPGPCFRQQRVSKTLDQNNNSNFAWTGATKYHLNXRNSLVNPGVAMATHKDDEERFFPSSGVLIFGKTGAANKTTLENVLMTNEEEIRPTNPVATEEYGIVSSNLQAASTAAQTQVVNNQGALPGMVWQNRDVYLQGPIWAKIPHTDGNFHPSPLMGGFGLKHPPPQILIKNTPVPANPPEVFTPAKFASFITQYSTGQVSVEIEWELQKENSKRWNPEIQYTSNFDKQTGVDFAVDSQGVYSEP

SEQ ID NO: 4737 - DNA, 1933 bp, Adeno-associated virus
caaggcctacgaccagcagctcaaagcgggtgacaatccgtacctgcggtataaccacgccgacgccgagtttcaggagtgtcttcaagaagatacgtcttttgggggcaacctcgggcgagcagtcttccaggccaaaaagcgggttctcgaacctcttggtctggttgagacgccagctaagacggcacctggaaagaagcgaccggtagactcgccagactccacctcgggcatcggcaagaaaggccagcagcccgcgaaaaagagactcaactttgggcagactggcgactcagagtcagtccccgaccctcaaccaatcggagaaccaccagcaggcccctctggtctgggatctggtacaatggttgcaggcggtggcgcaccaatggctgacaataacgagggcgccgacggagtgggtaatgcctcaggaaattggcattgcgattccacatggctgggcgacagagtcatcaccaccagcacccgaacctgggccctgcccacctacaacaaccacctctacaagcaaatctccagtcagtcagcagggagcaccaacgataacgtctatttcggctacagcaccccctgggggtattttgacttcaacagattccattgccacttctcaccacgtgactggcagcgacttatcaacaacaactggggattccggcccaagaagctcaacttcaagctcttcaacatccaggtcaaggaggtcacgacgaatgacggtgtcacaaccatcgctaataaccttaccagcacggttcaggtcttttcggactcggaatatcaactgccgtacgtcctcggctccgcgcaccagggctgcctgcctccgttcccggcagacgtgttcatgattccgcagtacggatacctgactctgaacaatggcagccaatcggtaggccgttcctccttctactgcctggagtactttccttctcagatgctgagaacgggcaacaacttcacctttagctacaccttcgaggacgtgcctttccacagcagctacgcgcacagccagagtctggaccggctgatgaatcccctcatcgaccagtacctgtactacttggccagaacacagagcaacgcaggaggtactgctggcaatcgggaactgcagttttatcagggcggacctaccaccatggccgaacaagcaaagaactggctgcccggaccttgcttccggcaacagagagtatccaagacgctggatcaaaataacaacagcaactttgcctggactggtgccacaaaataccatttaaatggaagaaattcattggttaatcccggtgtcgccatggcaacccacaaggacgacgaggaacgcttctccccttcgagcggagttctaatttttggcaaaactggagcagctaataaaactacattagaaaacgtgctcatgacaaatgaagaagaaattcgtcctaccaacccggtagctaccgaggaatacgggattgtaagcagcaacttgcaggcggctagcaccgcagcccagacacaagttgttaacaaccagggagccttacctggcatggtctggcagaaccgggacgtgtacctgcaaggtcccatttgggccaagattcctcacacggacggcaactttcacccgtctcctctaatgggtggctttggactgaaacacccgcctccccagatcctgatcaaaaacacgccggtacctgctaatcctccagaagtgtttactcctgccaagtttgcttccttcatcacgcagtacagcaccgggcaagtcagcgttgagatcgagtgggagctgcagaaagagaacagcaagcgctggaacccagagattcagtacacctccaactttgacaaacagactggagtggactttgctgttgacagccagggtgtttactctgagcct

SEQ ID NO: 4738 - protein, 644 aa, Adeno-associated virus
KAYDQQLKAGDNPYLRYNHADAEFQECLQEDTSFGGNLGRAVFQAKKRVLEPLGLVETPAKTAPGKKRPVDSPDSTSGIGKKGQQPAKKRLNFGQTGDSESVPDPQPIGEPPAGPSGLGSGTMVAGGGAPMADNNEGADGVGNASGNWHCDSTWLGDRVITTSTRTWALPTYNNHLYKQISSQSAGSTNDNVYFGYSTPWGYFDFNRFHCHFSPRDWQRLINNNWGFRPKKLNFKLFNIQVKEVTTNDGVTTIANNLTSTVQVFSDSEYQLPYVLGSAHQGCLPPFPADVFMIPQYGYLTLNNGSQSVGRSSFYCLEYFPSQMLRTGNNFTFSYTFEDVPFHSSYAHSQSLDRLMNPLIDQYLYYLARTQSNAGGTAGNRELQFYQGGPTTMAEQAKNWLPGPCFRQQRVSKTLDQNNNSNFAWTGATKYHLNGRNSLVNPGVAMATHKDDEERFSPSSGVLIFGKTGAANKTTLENVLMTNEEEIRPTNPVATEEYGIVSSNLQAASTAAQTQVVNNQGALPGMVWQNRDVYLQGPIWAKIPHTDGNFHPSPLMGGFGLKHPPPQILIKNTPVPANPPEVFTPAKFASFITQYSTGQVSVEIEWELQKENSKRWNPEIQYTSNFDKQTGVDFAVDSQGVYSEP

SEQ ID NO: 4739 - DNA, 1933 bp, Adeno-associated virus
caaggcctacgaccagcagctcaaagcgggtgacaatccgtacctgcggtataaccacgccgacgccgagtttcaggagcgtcttcaagaagatacgtcttttgggggcaacctcgggcgagcagtcttccaggccaaaaagcgggttctcgaacctcttggtctggttgagacgccagctaagacggcacctggaaagaagcgaccggtagactcgccagactccacctcgggcatcggcaagaaaggccagcagcccgcgaaaaagagactcaactttgggcagactggcgactcagagccagtccccgaccctcaaccaatcggagaaccaccagcaggcccctctggtctgggatctggtacaatggctgcaggcggtggcgcaccaatggctgacaataacgagggcgccgacggagtgggtaatgcctcaggaaattggcattgcgattccacacggctgggcgacagagtcatcaccaccagcacccgaacctgggccctgcccacctacaacaaccacctctacaagcaaatctccagtcagtcagcagggagcaccaacgataacgtctatttcggctacagcaccccctgggggtattttgacttcaacagattccattgccacttctcaccacgtgactggcagcgacttatcaacaacaactggggattccggcccaagaagctcaacttcaagctcttcaacatccaggtcaaggaggtcacgacgaatgacggcgtcacaaccatcgctaataaccttaccagcacggttcaggtcttttcggactcggaatatcaactgccgtacgtcctcggctccgcgcaccagggctgcctgcctccgttcccggcagacgtgttcatgattccgcagtacggatacctgactctgaacaatggcagccaatcggtaggccgttcctccttctactgcctggagtactttccttctcagatgctgagaacgggcaacaacttcacctttagctacaccttcgaggacgtgcctttccacagcagctacgcgcacagccagagtctgggccggctgatgaatcccctcatcgaccagtacctgtactacttggccagaacacagagcaacgcaggaggtactgctggcaatcgggaactgcagttttatcagggcggacctaccaccatggccgaacaagcaaagaactggctgcccggaccttgcttccggcaacagagagtatccaagacgctggatcaaaataacaacagcaactttgcctggactggtgccacaaaataccatttaaatggaagaaattcattggttaatcccggtgtcgccatggcaacccacaaggacgacgaggaacgcttcttcccttcgagcggagttctaatttttggcaaaactggagcagctaataaaactacattagaaaacgtgctcatgacaaatgaagaagaaattcgtcctaccaacccggtagctaccgaggaatacgggattgtaagcagcaacttgcaggcggctagcaccgcagcccagacacaagttgttaacaaccagggagccttacctggcatggtctggcagaaccgggacgtgtacctgcaaggtcccatttgggccaagattcctcacacggacggcaactttcacccgtctcctctaatgggtggctttggactgaaacacccgcctccccagatcctgatcaaaaacacaccggtacctgctaatcctccagaagtgtttactcctgccaagtttgcttccttcatcacgcagtacagcaccgggcaagtcagcgttgagatcgaatgggagctgcagaaagagaacagcaagcgctggaacccagagattcagtacacctccaactttgacaaacagactggagtggactttgctgttgacagccagggtgtttactctgagcct

SEQ ID NO: 4740 - protein, 644 aa, Adeno-associated virus
KAYDQQLKAGDNPYLRYNHADAEFQERLQEDTSFGGNLGRAVFQAKKRVLEPLGLVETPAKTAPGKKRPVDSPDSTSGIGKKGQQPAKKRLNFGQTGDSEPVPDPQPIGEPPAGPSGLGSGTMAAGGGAPMADNNEGADGVGNASGNWHCDSTRLGDRVITTSTRTWALPTYNNHLYKQISSQSAGSTNDNVYFGYSTPWGYFDFNRFHCHFSPRDWQRLINNNWGFRPKKLNFKLFNIQVKEVTTNDGVTTIANNLTSTVQVFSDSEYQLPYVLGSAHQGCLPPFPADVFMIPQYGYLTLNNGSQSVGRSSFYCLEYFPSQMLRTGNNFTFSYTFEDVPFHSSYAHSQSLGRLMNPLIDQYLYYLARTQSNAGGTAGNRELQFYQGGPTTMAEQAKNWLPGPCFRQQRVSKTLDQNNNSNFAWTGATKYHLNGRNSLVNPGVAMATHKDDEERFFPSSGVLIFGKTGAANKTTLENVLMTNEEEIRPTNPVATEEYGIVSSNLQAASTAAQTQVVNNQGALPGMVWQNRDVYLQGPIWAKIPHTDGNFHPSPLMGGFGLKHPPPQILIKNTPVPANPPEVFTPAKFASFITQYSTGQVSVEIEWELQKENSKRWNPEIQYTSNFDKQTGVDFAVDSQGVYSEP

SEQ ID NO: 4741 - DNA, 1933 bp, Adeno-associated virus; identical to SEQ ID NO: 4739

SEQ ID NO: 4742 - protein, 644 aa, Adeno-associated virus; identical to SEQ ID NO: 4740

SEQ ID NO: 4743 - DNA, 1933 bp, Adeno-associated virus
caaggcctacgaccagcagctcaaagcgggtgacaatccgtacctgcggtataaccacgccgacgccgagtttcaggagcgtcttcaagaagatacgtcttttgggggcaacctcgggcgagcagtcttccaggccaaaaagcgggttctcgaacctcttggtctggttgagacgccagctaagacggcacctggaaagaagcgaccggtagactcgccagactccacctcgggcatcggcaagaaaggccagcagcccgcgaaaaagagactcaactttgggcagactggcgactcagagtcagtccccgaccctcaaccaatcggagaaccaccagcaggcccctctggtctgggatctggtacaatggctgcaggcggtggcgcaccaatggctgacaatagcgagggcgccgacggagtgggtaatgcctcaggaaattggcattgcgattccacatggctgggcgacagagtcatcaccaccagcacccgaacctgggccctgcccacctacaacaaccacctctacaagcaaatctccagtcagtcagcagggagcaccaacgataacgtctatttcggctacagcaccccctgggggtattttgacttcaacagattccattgccacttctcaccacgtgactggcagcgacttatcaacaacaactggggattccggcccaagaagctcaacttcaagctcttcaacatccaggtcaaggaggtcacgacgaatgacggtgtcacaaccatcgctaataaccttaccagcacggttcaggtcttttcggactcggaatatcaactgccgtacgtcctcggctccgcgcaccagggctgcctgcctccgttcccggcagacgtgttcatgattccgcagtacggatacctgactctgaacaatggcagccaatcggtaggccgttcctccttctactgcctggagtactttccttctcagatgctgagaacgggcaacaacttcacctttagctacaccttcgaggacgtgcctttccacagcagctacgcgcacagccagagtctggaccggctgatgaatcccctcatcgaccagtacctgtactacttggccagaacacagagcaacgcaggaggtactgctggcaatcgggaactgcagttttatcagggcggacctaccaccatggccgaacaagcaaagaactggctgcccggaccttgcttccggcaacagagagtatccaagacgctggatcaaaataacaacagcaactttgcctggactggtgccacaaaataccatttaaatggaagaaattcattggttaatcccggtgtcgccatggcaacccacaaggacgacgaggaacgcttcttcccttcgagcggagttctaatttttggcaaaactggagcagctaataaaactacattagaaaacgtgctcatgacaaatgaagaagaaattcgtcctaccaacccggtagctaccgaggaatacgggattgtaagcagcaacttgcaggcggctagcaccgcagcccagacacaagttgttaacaaccagggagccttacctggcatggtctggcagaaccgggacgtgtacctgcaaggtcccatttgggccaagattcctcacacggacggcaactttcacccgtctcctctaatgggtggctttggactgaaacacccgcctccccagatcctgatcaaaaacacaccggtacctgctaatcctccagaagtgtttactcctgccaagcttgcttccttcatcacgcagtacagcaccgggcaagtcagcgttgagatcgagtgggagctgcagaaagagaacagcaagcgctggaacccagagattcagtacacctccaactttgacaaacagactggagtggactttgctgttgacagccagggtgtttactctgagcct

SEQ ID NO: 4744 - protein, 644 aa, Adeno-associated virus
KAYDQQLKAGDNPYLRYNHADAEFQERLQEDTSFGGNLGRAVFQAKKRVLEPLGLVETPAKTAPGKKRPVDSPDSTSGIGKKGQQPAKKRLNFGQTGDSESVPDPQPIGEPPAGPSGLGSGTMAAGGGAPMADNSEGADGVGNASGNWHCDSTWLGDRVITTSTRTWALPTYNNHLYKQISSQSAGSTNDNVYFGYSTPWGYFDFNRFHCHFSPRDWQRLINNNWGFRPKKLNFKLFNIQVKEVTTNDGVTTIANNLTSTVQVFSDSEYQLPYVLGSAHQGCLPPFPADVFMIPQYGYLTLNNGSQSVGRSSFYCLEYFPSQMLRTGNNFTFSYTFEDVPFHSSYAHSQSLDRLMNPLIDQYLYYLARTQSNAGGTAGNRELQFYQGGPTTMAEQAKNWLPGPCFRQQRVSKTLDQNNNSNFAWTGATKYHLNGRNSLVNPGVAMATHKDDEERFFPSSGVLIFGKTGAANKTTLENVLMTNEEEIRPTNPVATEEYGIVSSNLQAASTAAQTQVVNNQGALPGMVWQNRDVYLQGPIWAKIPHTDGNFHPSPLMGGFGLKHPPPQILIKNTPVPANPPEVFTPAKLASFITQYSTGQVSVEIEWELQKENSKRWNPEIQYTSNFDKQTGVDFAVDSQGVYSEP

SEQ ID NO: 4745 - DNA, 1933 bp, Adeno-associated virus
caaggcctacgaccagcagctcaaagcgggtgacaatccgtacctgcggtataaccacgccgacgccgagtttcaggagcgtcttcaagaagatacgtcttttgggggcaacctcgggcgagcagtcttccaggccaaaaagcgggttctcgaacctcttggtctggttgagacgccagctaagacggcacctggaaagaagcgaccggtagactcgccagactccacctcgggcatcggcaagaaaggccagcagcccgcgaaaaagagactcaactttgggcagactggcgactcagagtcagtccccgaccctcaaccaatcggagaaccaccagcaggcccctctggtctgggatctggtacaatggctgcaggcggtggcgcaccaatggctgacaataacgagggcgccgacggagtgggtaatgcctcaggaaattggcattgcgattccacatggctgggcgacagagtcatcaccaccagcacccgaacctgggccctgcccacctacaacaaccacctctacaagcaaatctccagtcagtcagcagggagcaccaacgataacgtctatttcggctacagcaccccctgggggtattttgacttcaacagattccattgccacttctcaccacgtgactggcagcgacttatcaacaacaactggggattccggcccaagaagctcaacttcaagctcttcaacatccaggtcaaggaggtcacgacgaatgacggcgtcacaaccatcgctaataaccttaccagcacggttcaggtcttttcggacccggaatatcaactgccgtacgtcctcggctccgcgcaccagggctgcctgcctccgttcccggcagacgtgttcatgattccgcagtacggatacctgactctgaacaatggcagccaatcggtaggccgttcctccttctactgcctggagtactttccttctcagatgctgagaacgggcaacaacttcacctttagctacaccttcgaggacgtgcctttccacagcagctacgcgcacagccagagtctggaccggctgatgaatcccctcatcgaccagtacctgtactacttggccagaacacagagcaacgcaggaggtactgctggcaatcgggaactgcagttttatcagggcggacctaccaccatggccgaacaagcaaagaactggctgcccggaccttgcttccggcaacagagagtatccaagacgctggatcaaaataacaacagcaactttgcctggactggtgccacaaaataccatttaaatggaagaaattcattggttaatcccggtgtcgccatggcaacccacaaggacgacgaggaacgcttcttcccttcgagcggagttctaatttttggcaaaactggagcagctaataaaactacattagaaaacgtgctcatgacaaatgaagaagaaattcgtcctaccaacccggtagctaccgaggaatacgggattgtaagcagcaacttgcaggcggctagcaccgcagcccagacacaagttgttaacaaccagggagccttacctggcatggtctggcagaaccgggacgtgtacctgcaaggtcccatttgggccaagattcctcacacggacggcaactttcacccgtctcctctaatgggtggctttggactgaaacacccgcctccccagatcctgatcaaaaacacaccggtacctgctaatcctccagaagtgtttactcctgccaagattgcttccttcatcacgcagtacagcaccgggcaagtcagcgttgagatcgagtgggagctgcagaaagagaacagcaagcgctggaacccagagattcagtacacctccaactttgacaaacagactggagtggactttgctgttgacagccagggtgtttactctgagcct

SEQ ID NO: 4746 - protein, 644 aa, Adeno-associated virus
KAYDQQLKAGDNPYLRYNHADAEFQERLQEDTSFGGNLGRAVFQAKKRVLEPLGLVETPAKTAPGKKRPVDSPDSTSGIGKKGQQPAKKRLNFGQTGDSESVPDPQPIGEPPAGPSGLGSGTMAAGGGAPMADNNEGADGVGNASGNWHCDSTWLGDRVITTSTRTWALPTYNNHLYKQISSQSAGSTNDNVYFGYSTPWGYFDFNRFHCHFSPRDWQRLINNNWGFRPKKLNFKLFNIQVKEVTTNDGVTTIANNLTSTVQVFSDPEYQLPYVLGSAHQGCLPPFPADVFMIPQYGYLTLNNGSQSVGRSSFYCLEYFPSQMLRTGNNFTFSYTFEDVPFHSSYAHSQSLDRLMNPLIDQYLYYLARTQSNAGGTAGNRELQFYQGGPTTMAEQAKNWLPGPCFRQQRVSKTLDQNNNSNFAWTGATKYHLNGRNSLVNPGVAMATHKDDEERFFPSSGVLIFGKTGAANKTTLENVLMTNEEEIRPTNPVATEEYGIVSSNLQAASTAAQTQVVNNQGALPGMVWQNRDVYLQGPIWAKIPHTDGNFHPSPLMGGFGLKHPPPQILIKNTPVPANPPEVFTPAKIASFITQYSTGQVSVEIEWELQKENSKRWNPEIQYTSNFDKQTGVDFAVDSQGVYSEP

SEQ ID NO: 4747 - protein, 728 aa, Adeno-associated virus
MAADGYLPDWLEDNLSEGIREWWDLKPGAPKPKANQQKQDDGRGLVLPGYKYLRPFNGLDKGEPVNEADAAALEHDKAYDKQLEQGDNPYLKYNHADAEFQERLQEDTSFGGNLGRAVFQAKKRVLEPLGLVEEVAKTAPGKKRPIESPDSSTGIGKKGQQPAKKKLNFGQTGDSESVPDPQPLGEPPAAPSGLGSGTMAAGGGAPMADNNEGADGVGNASGNWHCDSTWLGDRVITTSTRTWALPTYNNHLYKQISSQSGATNDNHFFSYSTPWGYFDFNRFHCHFSPRDWQRLINNNWGFRPRKLRFKLFNIQVKEVTTNDGVTTIANNLTSTIQVFSDSEYQLPYVLGSAHQGCLPPFPADVFMIPQYGYLTLNNGSQSVGRSSFYCLEYFPSQMLRTGNNFEFSYTFEEVPFHSSYVHSQSLDRLMNPLIDQYLYYLARTQSTTGSTRELQFHQAGPNTMAEQSKNWLPGPCYRQQRLSKNIDSNNNSNFAWTGATKYHLNGRNSLTNPGVAMATNKDDEDQFFPINGVLVFGKTGAANKTTLENVLMTSEEEIKTTNPVATEEYGVVSSNLQSSTAGPQTQTVNSQGALPGMVWQNRDVCLQGPIWAKIPHTDGNFHPSPLMGGFGLKHPPPQILIKNTPVPANPPEVFTPAKFASFITQYSTGQVSVEIEWELQKENSKRWNPEIQYTSNYAKSNNVEFAVNNEGVYTEPRPIGTRYLTRNL

SEQ ID NO: 4748 - protein, 728 aa, Adeno-associated virus
MAADGYLPDWLEDNLSEGIREWWDLKPGAPKPKANQQKQDDGRGLVLPGYKYLGPFNGLDKGEPVNEADAAALEHDKAYDKQLEQGDNPYLKYNHADAEFQERLQEDTSFGGNLGRAVFQAKKRVLEPLGLVEEGAKTASGKKRPIESPDSSTGIGKKGQQPAKKKLNFGQTGDSESVPDPQPLGEPPAAPSGLGSGTMAAGGGAPMADNNEGADGVGNASGNWHCDSTWLGDRVITTSTRTWALPTYNNHLYKQISSQSGATNDNHFFGYSTPWGYFDFNRFHCHFSPRDWQRLINNNWGFRPRKLRFKLFNIQVKEVTTNDGVTTIANNLTSTIQVFSDSEYQLPYVLGSAHQGCLPPFPADVFMIPQYGYLTLNNGSQSVGRSSFCCLEYFPSQMLRTGNNFEFSYTFEEVPFHSSYAHSQSLDRLMNPLIDQYLYYLARTQSTTGSTRELQFHQAGPNTVAEQSKNWLPGPCYRQQRLSKNIDSNNNSNFAWTGATKYHLNGRNSLTNPGVAMATNKDDEDQFLPINGVLVFGKTGAANKTTLENVLMTSEEEIKTTNPVATEEYGVVSSNLQSSTAGPRTQTVNSQGALPGMVWQNRDVYLQGPIWAEIPHTDGNFHPSPLMGGFGLKHPPPQILIKNTPVPANPPEVFTPAKFASFITQYSTGQVSVEIEWELQKENSKRWNPEIQYTSNYAKSNNVEFAVNNEGVYTEPRPIGTRYLTRNL

SEQ ID NO: 4749 - protein, 738 aa, Adeno-associated virus
MAADGYLPDWLEDNLSEGIREWWALKPGAPKPKANQQKQDDGRGLVLPGYKYLGPFNGLDKGEPVNAADAAALEHDKAYDQQLKAGDNPYLRYNHADAEFQERLQEDTSFGGNLGRAVFQAKKRVLEPLGLVEEGAKTAPGKKRPVEPSPQRSPDSTTGIGKKGQQPAKKRLNFGQTGDSESVPDPQPIGEPPAGPSGLGSGTMAAGGGAPMADNNEGADGVGSSSGNWHCDSTWLGDRVITTSTRTWALPTYNNHLYKQISNGTSGGSTNDNTYFGYSTPWGYFDFNRFHCHFSPRDWQRLINNNWGFRPKRLNFKLFNIQVKEVTQNEGTKTIANNLTSTIQVFTDSEYQLPYVLGSARQGCLPPFPADVFMIPQYGYLTLNNGSQAVGRSSFYCLEYFPSQMLRTGNNFEFSYQFEDVPFHSSYAHSQSLDRLMNPLIDQYLYYLSRTQSTGGTAGTQQLLFSQAGPNNMSAQAKNWLPGPCYRQQRVSTTLSQNNNSNFAWTGATKYHLNGRDSLVNPGVAMATHKDDEERFFPSSGVLMFGKQGAGKGNVDYSSVMLTSEEEIKTTNPVATEQYGVVADNLQQQNAAPIVGAVNSQGALPGMVWQNRDVYLQGPIWAKIPHTDGNFHPSPLMGGFGLKHPPPQILIKNTPVPADPPTTFSQAKLASFITQYSTGQVSVEIEWELQKENSKRWNPEIQYTSNYYKSTNVDFAVNTDGTYSEPRPIGTRYLTRNL

SEQ ID NO: 4750 - DNA, 3121 bp, Adeno-associated virus
gaattcgcccttcgcagagaccaaagttcaactgaaacgaatcaaccggtttattgattaacaagcaattacagattacgggtgaggtaacgggtgccgatggggcgaggctcagaataagtgccatctgtgttaacagcaaagtccacatttgtagatttgtagtagttggaagtgtattgaatctctgggttccagcgtttgctgttttctttctgcagctcccattcaatttccacgctgacctgtccggtgctgtactgcgtgatgaacgacgccagcttagcttgactgaaggtagttggaggatccgcgggaacaggtgtattcttaatcaggatctgaggaggcgggtgtttcagtccaaagccccccatcagcggcgagggatgaaagtttccgtccgtgtgaggaatcttggcccagataggaccctgcaggtacacgtcccggttctgccagaccatgccaggtaaggctccttgactgttgacggcccctacaataggagcggcgttttgctgttgcaggttatcggccaccacgccgtactgttctgtggccactgggttggtggttttaatttcttcctcactggttagcataacgctgctatagtccacgttgccttttccagctccctgtttcccaaacattaagactccgctggacggaaaaaatcgctcttcgtcgtccttgtgggttgccatagcgacaccgggatttaccagagagtctctgccattcagatgatacttggtggcaccggtccaggcaaagttgctgttgttattttgcgacagtgtcgtggagacgcgttgctgccggtagcagggcccgggtagccagtttttggcctgagccgacatgttattaggcccggcctgagaaaatagcaactgctgagttcctgcggtacctcccgtggactgagtccgagacaggtagtacaggtactggtcgatgagggggttcatcagccggtccaggctttggctgtgcgcgtagctgctgtgaaaaggcacgtcctcaaactggtagctgaactcaaagttgttgcccgttctcagcatttgagaaggaaagtactccaggcagtagaaggaggaacggcccacggcctgactgccattgttcagagtcaggtacccgtactgaggaatcatgaagacgtccgccgggaacggaggcaggcagccctggcgcgcagagccgaggacgtacgggagctggtattccgagtccgtaaagacctgaatcgtgctggtaaggttattggcgatggtcttggtgccttcattctgcgtgacctccttgacctggatgttgaagagcttgaagttgagtctcttgggccggaatccccagttgttgttgatgagtcgctgccagtcacgtggtgagaagtggcagtggaatctgttaaagtcaaaatacccccagggggtgctgtagccgaagtaggtgttgtcgttggtgcttcctcccgaagtcccgttggagatttgcttgtagaggtggttgttgtaggtggggagggcccaggttcgggtgctggtggtgatgactctgtcgcccagccatgtggaatcgcaatgccaatttcctgaggaactacccactccgtcggcgccttcgttattgtctgccattggagcgccaccgcctgcagccattgtaccagatcccagaccagaggggcctgcggggggttctccgattggttgagggtcgggcactgactctgagtcgccagtctgcccaaagttgagtctctttttcgcgggctgctggcctttcttgccgatgcccgtagtggagtctggagaacgctggggtgatggctctaccggtctcttctttccaggagccgtcttagcgccttcctcaaccagaccgagaggttcgagaacccgcttcttggcctggaagactgctcgtccgaggttgcccccaaaagacgtatcttcttgcagacgctcctgaaactcggcgtcggcgtggttataccgcaggtacggattgtcacccgctttgagctgctggtcgtaggccttgtcgtgctcgagggccgctgcgtccgccgcgttgacgggctcccccttgtcgagtccgttgaagggtccgaggtacttgtagccaggaagcaccagaccccggccgtcgtcctgcttttgctggttggctttgggcttcggggctccaggtttcagcgcccaccactcgcgaatgccctcagagaggttgtcctcgagccaatctggaagataaccatcggcagccatacctgatctaaatcatttattgttcaaagatgcagtcatccaaatccacattgaccagatcgcaggcagtgcaagcgtctggcacctttcccatgatatgatgaatgtagcacagtttctgatacgcctttttgacgacagaaacgggttgagattctgacacgggaaagcactctaaacagtctttctgtccgtgagtgaagcagatatttgaattctgattcattctctcgcattgtctgcagggaaacagcatcagattcatgcccacgtgacgagaacatttgttttggtacctgtccgcgtagttgatcgaagcttccgcgtctgacgtcgatggctgcgcaactgactcgcgcacccgtttgggctcacttatatctgcgtcactgggggcgggtcttttcttggctccaccctttttgacgtagaattcatgctccacctcaaccacgtgatcctttgcccaccggaaaaagtctttgacttcctgcttggtgaccttcccaaagtcatgatccagacggcgggtgagttcaaatttgaacatccggtcttgcaacggctgctggtgttcgaaggtcgttgagttcccgtcaatcacggcgcacatgttggtgttggaggtgacgatcacgggagtcgggtctatctgggccgaggacttgcatttctggtccacgcgcaccttgcttcctccgagaatggctttggccgactccacgaccttggcggtcatcttcccctcctcccaccagatcaccatcttgtcgacacagtcgttgaagggaaagttctcattggtccagttgacgcagccgtagaagggcgaattc

SEQ ID NO: 4751 - DNA, 3121 bp, Adeno-associated virus
gaattcgcccttctacggctgcgtcaactggaccaatgagaactttcccttcaacgactgtgtcgacaagatggtgatctggtgggaggaggggaagatgaccgccaaggtcgtggagtcggccaaagccattctcggaggaagcaaggtgcgcgtggaccagaaatgcaagtcctcggcccagatagacccgactcccgtgatcgtcacctccaacaccaacatgtgcgccgtgattgacgggaactcaacgaccttcgaacaccagcagccgttgcaagaccggatgttcaaatttgaactcacccgccgtctggatcatgactttgggaaggtcaccaagcaggaagtcaaagactttttccggtgggcaaaggatcacgtggttgaggtggagcacgaattctacgtcaaaaagggtggagccaagaaaagacccgcccccagtgacgcagatataagtgagcccaaacgggtgcgcgagtcagttgcgcagccatcgacgtcagacgcggaagcttcgatcaactacgcagacaggtaccaaaacaaatgttctcgtcacgcgggcatgaatctgatgctgtttccctgcagacaatgcgagagaatgaatcagaattcaaatatctgcttcactcacggacagaaagactgtttagagtgctttcccgtgtcagaatctcaacccgtttctgtcgtcaaaaaggcgtatcagaaactgtgctacattcatcatatcatgggaaaggtgccagacgcttgcactgcctgcgatctggtcgatgtggatttggatgactgcatctttgaacaataaatgatttaaatcaggtatggctgccgatggttatcttccagattggctcgaggacaacctctctgagggcattcgcgagtggtgggcgctgaaacctggagccccgaagcccaaagccaaccagcaaaagcaggacggcggccggggtctggtgcttcctggctacaagtacctcggacccttcaacggactcgacaagggggagcccgtcaacgcggcggacgcagcggccctcgagcacgacaaggcctacgaccagcagctcaaagcgggtgacaatccgtacctgcggtataaccacgccgacgccgagtttcaggagcgtctgcaagaagatacgtcttttgggggcaacctcgggcgagcagtcttccaggccaagaagcgggttctcgaacctctcggtctggttgaggaaggcgctaagacggctcctggaaagaagagaccggtagagccatcaccccagcgttctccagactcctctacgggcatcggcaagaaaggccagcagcccgcgaaaaagagactcaactttgggcagactggcgactcagagtcagtgcccgaccctcaaccaatcggagaaccccccgcaggcccctctggtctgggatctggtacaatggctgcaggcggtggcgctccaatggcagacaataacgaaggcgccgacggagtgggtagttcctcaggaaattggcattgcgattccacatggctgggcgactgagtcatcaccaccagcacccgaacctgggccctccccacctacaacaaccacctctacaagcaaatctccaacgggacttcgggaggaagcaccaacgacaacacctacttcggctacagcaccccctgggggtattttgactttaacagattccactgccacttctcaccacgtgactggcagcgactcatcaacaacaactggggattccggcccaagagactcaacttcaagctcttcaacatccaggtcaaggaggtcacgcagaatgaaggcaccaagaccatcgccaataaccttaccagcacgattcaggtctttacggactcggaataccagctcccgtacgtcctcggctctgcgcaccagggctgcctgcctccgttcccggcggacgtcttcatgattcctcagtacgggtacctgactctgaacaatggcagtcaggccgtgggccgttcctccttctactgcctggagtactttccttctcaaatgctgagaacgggcaacaactttgagttcagctaccagtttgaggacgtgccttttcacagcagctacgcgcacagccaaagcctggaccggctgatgaaccccctcatcgaccagtacctgtactacctgtctcggactcagtccacgggaggtaccgcaggaactcagcagttgctattttctcaggccgggcctaataacatgtcggctcaggccaaaaactggctacccgggccctgctaccggcagtaacgcgtctccacgacactgtcgcaaaataacaacagcaactttgtctggaccggtgccaccaagtatcatctgaatggcagagactctctggtagatcccggtgtcgctatggcaacccacaaggacgacgaagagcgattttttccgtccagcggagtcataatgtttgggaaacagggagctggaaaagacaacgtggactatagcagcgtcatgctaaccagtgaggaagaaattaaaaccaccaacccagtggccacagaacagtacggcgtggtggccgataacctgcaacagcaaaacgccgctcctattgtaggggccgtcaacagtcaaggagccttacctggcatggtctggcagaaccgggacgtgtacctgcagggtcctacctgggccaagattcctcacacggacggaaactttcatccctcgccgctgatgggaggctttggactgaaacacccgcctcctcagatcctgattaagaatacacctgttcccgcggatcctccaactaccttcagtcaagctaagctggcgtcgttcatcacgcagtacagcaccggacaggtcagcgtggaaattgaatgggagctgcaggaagaaaacagcaaacgctggaacccagagattcaatacacttccaactactacaaatctacaaatgtggactttgctgttaacacagatggcacttattctgagcctcgccccatcggcacccgttacctcacccgtaatctgtaattgcttgttaatcaataaaccggttgattcgtttcagttgaactttggtctctgcgaagggcgaattc

SEQ ID NO: 4752 - protein, 738 aa, Adeno-associated virus
MAADGYLPDWLEDNLSEGIREWWALKPGAPKPKANQQKQDDGRGLVLPGYKYLGPFNGLDKGEPVNAADAAALEHDKAYDQQLKAGDNPYLRYNHADAEFQERLQEDTSFGGNLGRAVFQAKKRVLEPLGLVEEGAKTAPGKKRPVEPSPQRSPDSSTGIGKKGQQPAKKRLNFGQTGDSESVPDPQPIGEPPAGPSGLGSGTMAAGGGAPMADNNEGADGVGSSSGNWHCDSTWLGDGVITTSTRTWALPTYNNHLYKQISNGTSGGSTNDNTYFGYSTPWGYFDFNRFHCHFSPRDWQRLINNNWGFRPKSLNFKLFNIQVKEVTQNEGTKTIANNLTSTIQVFTDSEYQLPYVLGSAHQGCLPPFPADVFMIPQYGYLTLNNGSQAVGRSSFYCLEYFPSQMLRTGNNFEFSYQFEDVPFHSSYAHSQSLDRLMNPLIDQYLYYLSRTQSTGGTAGTQQLLFSQAGPNNMSAQAKNWLPGPCYRQQRVSTTLSQNDNSNFAWTGATKYHLNGRDSLVNPGVAMATHKDDEERFFPSSGVLMFGKQGAGKDNVDYSSVMLTSEEEIKTTNPVATEQYGVVADNLQQQNAAPIVGAVNSQGALPGMVWQNRDVYLQGPIWAKIPHTDGNFHPSPLMGGFGLKHPPPQILIKNTPVPADPPTTFSQAKLASFITQYSTGQVSVEIEWELQKENSKRWNPEIQYTSNYYKSTNVDFAVNTDGTYSEPRPIGTRYLTRNL

SEQ ID NO: 4753 - DNA, 3121 bp, Adeno-associated virus
gaattcgcccttcgcgagaccaaagttcaactgaaacgaatcaaccggtttattgattaacaagcaattacagattacgggtgaggtaacgggtgccgatggggcgaggctcagaataagtgccatctgtgttaacagcaaagtccacatttgtagatttgtagtagttggaagtgtattgaatctctgggttccagcgtttgctgttttctttctgcagctcccattcaatttccacgctgacctgtccggtgctgtactgcgtgatgaacgacgccagcttagcttgactgaaggtagttggaggatccgcgggaacaggtgtattcttaatcaggatctgaggaggcgggtgtttcagtccaaagcctcccatcagcggcgagggatgaaagtttccgtccgtgtgaggaatcttggcccagataggaccctgcaggtacacgtcccggttctgccagaccatgccaggtaaggctccttgactgttgacggcccctacaataggagcggcgttttgctgttgcaggttatcggccaccacgccgtactgttctgtggccactgggttggtggttttaatttcttcctcactggttagcataacgctgctatagtccacgttgtcttttccagctccctgtttcccaaacattaagactccgctggacggaaaaaatcgctcttcgtcgtccttgtgggttgccatagcgacaccgggatttaccagagagtctctgccattcagatgatacttggtggcaccggtccaggcaaagttgctgttgtcattttgcgacagtgtcgtggagacgcgttgctgccggtagcagggcccgggtagccagtttttggcctgagccgacatgttattaggcccggcctgagaaaatagcaactgctgagttcctgcggtacctcccgtggactgagtccgagacaggtagtacaggtactggtcgatgagggggttcatcagccggtccaggctttggctgtgcgcgtagctgctgtgaaaaggcacgtcctcaaactggtagctgaactcaaagttgttgcccgttctcagcatttgagaaggaaagtactccaggcagtagaaggaggaacggcccacggcctgactgccattgttcagagtcaggtacccgtactgaggaatcatgaagacgtccgccgggaacggaggcaggcagccctggtgcgcagagccgaggacgtacgggagctggtattccgagtccgtaaagacctgaatcgtgctggtaaggttattggcgatggtcttggtgccttcattctgcgtgacctccttgacctggatgttgaagagcttgaagttgaggctcttgggccggaatccccagttgttgttgatgagtcgctgccagtcacgtggtgagaagtggcagtggaatctgttaaagtcaaaatacccccagggggtgctgtagccgaagtaggtgttgtcgttggtgcttcctcccgaagtcccgttggagatttgcttgtagaggtggttgttgtaggtggggagggcccaggttcgggtgctggtggtgatgactccgtcgcccagccatgtggaatcgcaatgccaatttcctgaggaactacccactccgtcggcgccttcgttattgtctgccattggagcgccaccgcctgcagccattgtaccagatcccagaccagaggggcctgcggggggttctccgattggttgagggtcgggcactgactctgagtcgccagtctgcccaaagttgagtctctttttcgcgggctgctggcctttcttgccgatgcccgtagaggagtctggagaacgctggggtgatggctctaccggtctcttctttccaggagccgtcttagcgccttcctcaaccagaccgagaggttcgagaacccgcttcttggcctggaagactgctcgcccgaggttgcccccaaaagacgtatcttcttgcagacgctcctgaaactcggcgtcggcgtggttataccgcaggtacggattgtcacccgctttgagctgctggtcgtaggccttgtcgtgctcgagggccgctgcgtccgccgcgttgacgggctcccccttgtcgagtccgttgaagggtccgaggtacttgtagccaggaagcaccagaccccggccgtcgtcctgcttttgctggttggctttgggcttcggggctccaggtttcagcgcccaccactcgcgaatgccctcagagaggttgtcctcgagccaatctggaagataaccatcggcagccatacctgatttaaatcatttattgttcaaagatgcagtcatccaaatccacattgaccagatcgcaggcagtgcaagcgtctggcacctttcccatgatatgatgaatgtagcacagtttctgatacgcctttttgacgacagaaacgggttgagattctgacacgggaaagcactctaaacagtctttctgtccgtgagtgaagcagatatttgaattctgattcattctctcgcattgtctgcagggaaacagcatcagattcatgcccacgtgacgagaacatttgttttggtacctgtctgcgtagttgatcgaagcttccgcgtctgacgtcgatggctgcgcaactgactcgcgcacccgtttgggctcacttatatctgcgtcactgggggcgggtcttttcttggctccaccctttttgacgtagaattcatgctccacctcaaccacgtgatcctttgcccaccggaaaaagtctttgacttcctgcttggtgaccttcccaaagtcatgatccagacggcgggtgagttcaaatttgaacatccggtcttgcaacggctgctggtgttcgaaggtcgttgagttcccgtcaatcacggcgcacatgttggtgttggaggtgacgatcacgggagtcgggtctatctgggccgaggacttgcatttctggtccacgcgcaccttgcttcctccgagaatggctttggccgactccacgaccttggcggtcatcttcccctcctcccaccagatcaccatcttgtcgacacagtcgttgaagggaaagttctcattggtccagttgacgcagccgtagaaagggcgaattc

SEQ ID NO: 4754 - DNA, 2211 bp, Adeno-associated virus
atggctgctgacggttatcttccagattggctcgaggacaacctttctgaaggcattcgtgagtggtgggctctgaaacctggagtccctcaacccaaagcgaaccaacaacaccaggacaaccgtcggggtcttgtgcttccgggttacaaatacctcggacccggtaacggactcgacaaaggagagccggtcaacgaggcggacgcggcagccctcgaacacgacaaagcttacgaccagcagctcaaggccggtgacaacccgtacctcaagtacaaccacgccgacgccgagtttcaggagcgtcttcaagaagatacgtcttttgggggcaaccttggcagagcagtcttccaggccaaaaagaggatccttgagcctcttggtctggttgaggaagcagctaaaacggctcctggaaagaagggggctgtagatcagtctcctcaggaaccggactcatcatctggtgttggcaaatcgggcaaacagcctgccagaaaaagactaaatttcggtcagactggagactcagagtcagtcccagaccctcaacctctcggagaaccaccagcagcccccacaagtttgggatctaatacaatggcttcaggcggtggcgcaccaatggcagacaataacgagggtgccgatggagtgggtaattcctcaggaaattggcattgcgattcccaatggctgggcgacagagtcatcaccaccagcaccagaacctgggccctgcccacttacaacaaccatctctacaagcaaatctccagccaatcaggagcttcaaacgacaaccactactttggctacagcaccccttgggggtattttgactttaacagattccactgccacttctcaccacgtgactggcagcgactcattaacaacaactggggattccggcccaagaaactcagcttcaagctcttcaacatccaagttagaggggtcacgcagaacgatggcacgacgactattgccaataaccttaccagcacggttcaagtgtttacggactcggagtatcagctcccgtacgtgctcgggtcggcgcaccaaggctgtctcccgccgtttccagcggacgtcttcatggtccctcagtatggatacctcaccctgaacaacggaagtcaagcggtgggacgctcatccttttactgcctggagtacttcccttcgcagatgctaaggactggaaataacttccaattcagctataccttcgaggatgtaccttttcacagcagctacgctcacagccagagtttggatcgcttgatgaatcctcttattgatcagtatctgtactacctgaacagaacgcaaggaacaacctctggaacaaccaaccaatcacggctgctttttagccaggctgggcctcagtctatgtctttgcaggccagaaattggctacctgggccctgctaccggcaacagagactttcaaagactgctaacgacaacaacaacagtaactttccttggacagcggccagcaaatatcatctcaatggccgcgactcgctggtgaatccaggaccagctatggccagtcacaaggacgatgaagaaaaatttttccctatgcacggcaatctaatatttggcaaagaagggacaacggcaagtaacgcagaattagataatgtaatgattacggatgaagaagagattcgtaccaccaatcctgtggcaacagagcagtatggaactgtggcaaataacttgcagagctcaaatacagctcccacgactggaactgtcaatcatcagggggccttacctggcatggtgtggcaagatcgtgacgtgtaccttcaaggacctatctgggcaaagattcctcacacggatggacactttcatccttctcctctgatgggaggctttggactgaaacatccgcctcctcaaatcatgatcaaaaatactccggtaccggcaaatcctccgacgactttcagcccggccaagtttgcttcatttatcactcagtactccactggacaggtcagcgtggaaattgagtgggagctacagaaagaaaacagcaaacgttggaatccagagattcagtacacttccaactacaacaagtctgttaatgtggactttactgtagacactaatggtgtttatagtgaacctcgccctattggaacccggtatctcacacgaaacttgtga

SEQ ID NO: 4755 - protein, 737 aa, Adeno-associated virus
MAADGYLPDWLEDNLSEGIREWWDLKPGAPKPKANQQKQDNGRGLVLPGYKYLGPFNGLDKGEPVNAADAAALEHDKAYDQQLNAGDNPYLRYNHADAEFQERLQEDTSFGGNLGRAVFQAKKRVLEPLGLVEEGAKTAPAKKRPVEPSPQRSPDSSTGIGKKGQQPARKRLNFGQTGDSESVPDPQPLGEPPAAPSSVGSGTVAAGGGAPMADNNEGADGVGNASGNWHCDSTWLGDRVITTSTRTWALPTYNNHLYEQISSETAGSTNDNTYFGYSTPWGYFDFNRFHCHFSPRDWQRLINNNWGFRPKKLRFKLFNIQVKEVTTNDGVTTIANNLTSTIQVFSDSEYQLPYVLGSAHQGCLPPFPADVFMIPQYGYLTLNNGSQSVGRSSFYCLEYFPSQMLRTGNNFEFSYSFEDVPFHSSYAHSQSLDRLMNPLIDQYLYYLARTQSDPGGTAGNRELQFYQGGPSTMAEQAKNWLPGPCFRQQRVSKTLDQNNNSNFAWTGATKYHLNGRNSLVNPGVAMATHKDDEDRFFPSSGVLIFGKTGATNKTTLENVLMTNEEEIRPTNPVATEEYGIVSSNLQAANTAAQTQVVNNQGALPGMVWQNRDVYLQGPIWAKIPHTDGNFHPSPLMGGFGLKHPPPQILIKNTPVPANPPEVFTPAKFASFITQYSTGQVSVEIEWELQKENSKRWDPEIQYTSNFEKQTGVDFAVDSQGVYSEPRPIGTRYLTRNL

SEQ ID NO: 4756 - DNA, 2211 bp, Adeno-associated virus
atggctgctgacggttatcttccagattggctcgaggacaacctttctgaaggcattcgtgagtggtgggctctgaaacctggagtccctcaacccaaagcgaaccaacaacaccaggacaaccgtcggggtcttgtgcttccgggttacaaatacctcggacccggtaacggactcgacaaaggagagccggtcaacgaggcggacgcggcagccctcgaacacgacaaagcttacgaccagcagctcaaggccggtgacaacccgtacctcaagtacaaccacgccgacgccgagtttcaggagcgtcttcaagaagatacgtcttttgggggcaaccttggcagagcagtcttccaggccaaaaagaggatccttgagcctcttggtctggttgaggaagcagctaaaacggctcctggaaagaagggggctgtagatcagtctcctcaggaaccggactcatcatctggtgttggcaaatcgggcaaacagcctgccagaaaaagactaaatttcggtcagactggagactcagagtcagtcccagaccctcaacctctcggagaaccaccagcagcccccacaagtttgggatctaatacaatggcttcaggcggtggcgcaccaatggcagacaataacgagggtgccgatggagtgggtaattcctcaggaaattggcattgcgattcccaatggctgggcgacagagtcatcaccaccagcaccagaacctgggccctgcccacttacaacaaccatctctacaagcaaatctccagccaatcaggagcttcaaacgacaaccactactttggctacagcaccccttgggggtattttgactttaacagattccactgccacttctcaccacgtgactggcagcgactcattaacaacaactggggattccggcccaagaaactcagcttcaagctcttcaacatccaagttagaggggtcacgcagaacgatggcacgacgactattgccaataaccttaccagcacggttcaagtgtttacggactcggagtatcagctcccgtacgtgctcgggtcggcgcaccaaggctgtctcccgccgtttccagcggacgtcttcatggtccctcagtatggatacctcaccctgaacaacggaagtcaagcggtgggacgctcatccttttactgcctggagtacttcccttcgcagatgctaaggactggaaataacttccaattcagctataccttcgaggatgtaccttttcacagcagctacgctcacagccagagtttggatcgcttgatgaatcctcttattgatcagtatctgtactacctgaacagaacgcaaggaacaacctctggaacaaccaaccaatcacggctgctttttagccaggctgggcctcagtctatgtctttgcaggccagaaattggctacctgggccctgctaccggcaacagagactttcaaagactgctaacgacaacaacaacagtaactttccttggacagcggccagcaaatatcatctcaatggccgcgactcgctggtgaatccaggaccagctatggccagtcacaaggacgatgaagaaaaatttttccctatgcacggcaatctaatatttggcaaagaagggacaacggcaagtaacgcagaattagataatgtaatgattacggatgaagaagagattcgtaccaccaatcctgtggcaacagagcagtatggaactgtggcaaataacttgcagagctcaaatacagctcccacgactggaactgtcaatcatcagggggccttacctggcatggtgtggcaagatcgtgacgtgtaccttcaaggacctatctgggcaaagattcctcacacggatggacactttcatccttctcctctgatgggaggctttggactgaaacatccgcctcctcaaatcatgatcaaaaatactccggtaccggcaaatcctccgacgactttcagcccggccaagtttgcttcatttatcactcagtactccactggacaggtcagcgtggaaattgagtgggagctacagaaagaaaacagcaaacgttggaatccagagattcagtacacttccaactacaacaagtctgttaatgtggactttactgtagacactaatggtgtttatagtgaacctcgccctattggaacccggtatctcacacgaaacttgtaa

SEQ ID NO: 4757 - protein, 736 aa, Adeno-associated virus
MAADGYLPDWLEDNLSEGIREWWALKPGVPQPKANQQHQDNRRGLVLPGYKYLGPGNGLDKGEPVNEADAAALEHDKAYDQQLKAGDNPYLKYNHADAEFQERLQEDTSFGGNLGRAVFQAKKRILEPLGLVEEAAKTAPGKKGAVDQSPQEPDSSSGVGKSGKQPARKRLNFGQTGDSESVPDPQPLGEPPAAPTSLGSNTMASGGGAPMADNNEGADGVGNSSGNWHCDSQWLGDRVITTSTRTWALPTYNNHLYKQISSQSGASNDNHYFGYSTPWGYFDFNRFHCHFSPRDWQRLINNNWGFRPKKLSFKLFNIQVRGVTQNDGTTTIANNLTSTVQVFTDSEYQLPYVLGSAHQGCLPPFPADVFMVPQYGYLTLNNGSQAVGRSSFYCLEYFPSQMLRTGNNFQFSYTFEDVPFHSSYAHSQSLDRLMNPLIDQYLYYLNRTQGTTSGTTNQSRLLFSQAGPQSMSLQARNWLPGPCYRQQRLSKTANDNNNSNFPWTAASKYHLNGRDSLVNPGPAMASHKDDEEKFFPMHGNLIFGKEGTTASNAELDNVMITDEEEIRTTNPVATEQYGTVANNLQSSNTAPTTGTVNHQGALPGMVWQDRDVYLQGPIWAKIPHTDGHFHPSPLMGGFGLKHPPPQIMIKNTPVPANPPTTFSPAKFASFITQYSTGQVSVEIEWELQKENSKRWNPEIQYTSNYNKSVNVDFTVDTNGVYSEPRPIGTRYLTRNL

SEQ ID NO: 4758 - protein, 728 aa, Adeno-associated virus
MAADGYLPDWLEDNLSEGIREWWDLKPGAPKPKANQQKQDDGRGLVLPGYKYLGPFNGLDKGEPVNEADAAALEHDKAYDKQLEQGDNPYLKYNHADAEFQERLQEDTSFGGNLGRAVFQAKKRVLEPLGLVEEGAKTAPGKKRPIESPDSSTGIGRKGQQPAKKKLNFGQTGDSESVPDPQPIGEPPAGPSGLGSGTMAAGGGAPMADNNEGADGVGNASGNWHCDSTWLGDRVITTSTRTWALPTYNNHLYKQISSQSGATNDNHFFGYSTPWGYFDFNRFHCHFSPRDWQRLINNNWGFRPRKLRFKLFNIQVKEVTTNDGVTTIANNLTSTIQVFSDSEYQLPYVLGSAHQGCLPPFPADVFMIPQYGYLTLNNGSQSVGRSSFYCLEYFPSQMLRTGNNFEFSYTFEEVPFHSSYAHSQSLDRLMNPLIDQYLYYLARTQSTTGSTRELQFHQAGPNTMAEQSKNWLPGPCYRQQRLSKNIDSNNNSNFAWTGATKYHLNGRNSLTNPGVAMATNKDDEDQFFPINGVLVFGKTGAANKTTLENVLMTSEEEIKTTNPVATEEYGVVSSNLQSSTAGPQTQTVNSQGALPGMVWQNRDVYLQGPIWAKIPHTDGNFHPSPLMGGFGLKHPPPQILIKNTPVPANPPEVFTPAKFASFITQYSTGQVSVEIEWELQKENSKRWNPEIQYTSNYAKSNNVEFAVNNEGVYTEPRPIGTRYLTRNL

SEQ ID NO: 4759 - protein, 728 aa, Adeno-associated virus
MAADGYLPDWLEDNLSEGIREWWDLKPGAPKPKANQQKQDDGRGLVLPGYKYLGPFNGLDKGEPVNAADAAALEHDKAYDQQLKAGDNPYLRYNHADAEFQERLQEDTSFGGNLGRAVFQAKKRVLEPLGLVEEGAKTAPGKKRPIESPDSSTGIGKKGQQPAKKKLNFGQTGDSESVPDPQPIGEPPAGPSGLGSGTMAAGGGAPMADNNEGADGVGNASGNWHCDSTWLGDRVITTSTRTWALPTYNNHLYKQISSQSGATNDNHFFGYSTPWGYFDFNRFHCHFSPRDWQRLINNNWGFRPRKLRFKLFNIQVKEVTTNDGVTTIANNLTSTIQVFSDSEYQLPYVLGSAHQGCLPPFPADVFMIPQYGYLTLNNGSQSVGRSSFYCLEYFPSQMLRTGNNFEFSYTFEEVPFHSSYAHSQSLDRLMNPLIDQYLYYLARTQSTTGSTRELQFHQAGPNTMAEQSKNWLPGPCYRRQRLSKDIDSNNNSNFAWTGATKYHLNGRNSLTNPGVAMATNKDDEDQFFPINGVLVFGKTGAANKTTLENVLMTSEEEIKTTNPVATEEYGVVSSNLQSSTAGPQTQTVNSQGALPGMVWQNRDVYLQGPIWAKIPHTDGNFHPSPLMGGFGLKHPPPQILIKNTPVPANPPEVFTPAKFASFITQYSTGQVSVEIEWELQKENSKRWNPEIQYTSNYAKSNNVEFAVNNEGVYTEPRPIGTRYLTRNL

SEQ ID NO: 4760 - protein, 685 aa, Adeno-associated virus
MAADGYLPDWLEDNLSEGIREWWDLKPGAPKPKANQQKQDDGRGLVLPGYKYLGPFNGLDKGEPVNEADAAALEHDKAYDKQLEQGDNPYLKYNHADAEFQERLQEDTSFGGNLGRAVFQAKKRVLEPLGLVEEGAKTAPGKKRPVEPSPQRSPDSSTGIGKTGQQPAKKRLNFGQTGDSESVPDPQPIGEPPAGPSGLGSGTMAAGGGAPMADNNEGADGVGSSSGNWHCDSTWLGDRVITTSTRTWALPTYNNHLYKQISNGTSGGSTNDNTYFGYSTPWGYFDFNRFHCHFSPRDWQRLINNNWGFRPKRLNFKLFNIQVKEVTQNEGTKTIANNLTSTIQVFTDSEYQLPYVLGSAHQGCLPPFPADVFMIPQYGYLTLNNGSQAVGRSSFYCLEYFPSQMLRTGNNFEFSYQFEDVPFHSSYAHSQSLDRLTNPLIDQYLYYLARTQSTTGSTRGLQFHQAGPNTMAEQSKNWLPGPCYRQQRLSKNIDSNNNSNFAWTGATKYHLNGRNSLTNPGVAMATNKDDEDQFFPINGVLVFGKTGAANKTTLENVLMTSEEEIKTTNPVATEEYGVVSSNLQSSTAGPQTQTVNSQGALPGMVWQNRDVYLQGPIWAKIPHTDGNFHPSPLMGGFGLKHPPPQILIKYTSNYYKSTNVDFAVNTEGTYSEPRPIGTRYLTRNL

SEQ ID NO: 4761 - protein, 733 aa, Adeno-associated virus
MAADGYLPDWLEDNLSEGIREWWDLKPGAPKPKANQQKQDDGRGLVLPGYKYLGPFNGLDKGEPVNAADAAALEHDKAYDQQLKAGDNPYLRYNHADAEFQERLQEDTSFGGNLGRAVFQAKKRVLEPLGLVEEGAKTAPGKKRPIESPDSSTGIGKKGQQPAKKKLNFGQTGDSESVPDPQPIGEPPAGPSGLGSGTMAAGGGAPMADNNEGADGVGSSSGNWHCDSTWLGDRVITTSTRTWALPTYNNHLYKQISNGTSGGSTNDNTYFGYSTPWGYFDFNRFHCHFSPRDWQRLINNNWGFRPKRLNFKLFNIQVKEVTQNEGTKTIANNLTSTIQVFTDSEYQLPYVLGSAHQGCLPPFPADVFMIPQYGYLTLNNGSQAVGRSSFYCLEYFPSQMLRTGNNFEFSYQFEDVPFHSSYAHSQSLDRLMNPLIDQYLYYLSRTQSTGGTAGTQQLLFSQAGPNNMSAQAKNWLPGPCYRQQRVSTTVSQNNNSNFAWTGATKYHLNGRDSLVNPGVAMATHKGDEERFFPSSGVLMFGKQGAGKDNVDYSSVMLTSEEEIKTTNPVATEQYGVVADNLQQQNAAPIVGAVNSQGALPGMVWQNRDVYLQGPIWAKIPHTDGNFHPSPLMGGFGLKHPPPQILIKNTPVPADPPTTFSQAKLASFITQYSTGQVSVEIEWELQKENSKRWNPEIQYTSNYYKSTNVDFAVNTEGTYSEPRPIGTRYLTRSL

SEQ ID NO: 4762 - protein, 738 aa, Adeno-associated virus
MAADGYLPDWLEDNLSEGIREWWDLKPGAPKPKANQQKQDDGRGLVLPGYKYLGPFNGLDKGEPVNAADAAALEHDKAYDQQLKAGDNPYLRYNHADAEFQERLQEDTSFGGNLGRAVFQAKKRVLEPLGLVEEGAKTAPGKKRPVEPSPQRSPDSSTGIGKTGQQPAKKRLNFGQTGDSESVPDPQPIGEPPAGPSGLGSGTMAAGGGAPMADNNEGADGVGSSSGNWHCDSTWLGDRVITTSTRTWALPTYNNHLYKQISNGTSGGSTNDNTYFGYSTPWGYFDFNRFHCHFSPRDWQRLINNNWGFRPKRLNFKLFNIQVKEVTQNEGTKTIANNLTSTIQVFTDSEYQLPYVLGSAHQGCPPPFPADVFMIPQYGYLTLNNGSQAVGRSSFYCLEYFPSQMRRTGNNFEFSYQFEDVPFHSSYAHSQSLDRLMNPLIDQYLYYLSRTQSTGGTAGTQQLLFSQAGPNNMSAQAKNWLPGPCYRQQRVSTTLSQNNNSNFAWTGATKYHLNGRDSLVNPGVAMATHKDDEERFFPSSGVLMFGKQGAGKDNVDYSSVMLTSEEEIKTTNPVATEQYGVVADNLQQQNAAPIVGAVNSQGALPGMVWQNRDVYLQGPIWAKIPHTDGNFHPSPLMGGFGLKHPPPQILIKNTPVPADPPTTFSQAKLASFITQYSTGQVSVEIEWELQKENSKRWNPEIQYTSNYYKSTNVDFAVNTEGTYSEPRPIGTRYLTRNL

SEQ ID NO: 4763 - protein, 733 aa, Adeno-associated virus
MAADGYLPDWLEDNLSEGIREWWDLRPGAPKPKANQQKQDDGRGLVLPGYKYLGPFNGLDKGEPVNEADAAALEHDKAYDKQLEQGDNPYLKYNHADAEFQERLQEDTSFGGNLGRAVFQAKKRVLEPLGLVEEGAKTAPGKKRPIESPDSSTGIGKKGQQPAKKRLNFGQTGDSESVPDPQPIGEPPAGPSGLGSGTMAAGGGAPMADNNEGADGVGSSSGNWHCDSTWLGDRVITTSTRTWALPTYNNHLYKQISNGTSGGSTNDNTYFGYSTPWGYFDFNRFHCHFSPRDWQRLINNNWGFRPKRLNFKLFNIQVKEVTQNEGTKTIANNLTSTIQVFTDSEYQLPYVLGSAHQGCLPPFPADVFMIPQYGYLTLNNGSQAVGRSSFYCLEYFPSQMLRTGNNFEFSYQFEDVPFHSSYAHSQSLDRLMNPLIDQYLYYLSRTQSTGGTAGTQQLLFSQAGPNNMSAQAKNWLPGPCYRQQRVSTTVSQNNNSNFAWTGATKYHLNGRDSLVNPGVAMATHKGDEERFFPSSGVLMFGKQGAGKDNVDYSSVMLTSEEEIKTTNPVATEQYGVVADNLQQQNAAPIVGAVNSQGALPGMVWQNRDVYLQGPIWAKIPHTDGNFHPSPLMGGFGLKHPPPQILIKNTPVPADPPTTFSQAKLASFITQYSTGQVSVEIEWELQKENSKRWNPEIQYTSNYYKSTNVDFAVNTEGTYSEPRPIGTRYLTRNL

SEQ ID NO: 4764 - DNA, 3098 bp, Adeno-associated virus
gaattcgccctttctacggctgcgtcaactggaccaatgagaactttcccttcaacgattgcgtcgacaagatggtgatctggtgggaggagggcaagatgacggccaaggtcgtggagtccgccaaggccattctcggcggcagcaaggtgcgcgtggaccaaaagtgcaagtcttccgcccagatcgatcccacccccgtgatcgtcacttccaacaccaacatgtgcgctgtgattgacgggaacagcaccaccttcgagcaccagcagccgttacaagaccggatgttcaaatttgaactcacccgccgtctggagcacgactttggcaaggtgacaaagcaggaagtcaaagagttcttccgctgggcgcaggatcacgtgaccgaggtggcgcatgagttctacgtcagaaagggtggagccaacaagagacccgcccccgatgacgcggataaaagcgagcccaagcgggcctgcccctcagtcgcggatccatcgacgtcagacgcggaaggagctccggtggactttgccgacaggtaccaaaacaaatgttctcgtcacgcgggcatgcttcagatgctgtttccctgcaagacatgcgagagaatgaatcagaatttcaacatttgcttcacgcacgggaccagagactgttcagaatgtttccccggcgtgtcagaatctcaaccggtcgtcagaaagaggacgtatcggaaactctgtgccattcatcatctgctggggcgggctcccgagattgcttgctcggcctgcgatctggtcaacgtggacctggatgaccgtgtttctgagcaataaatgacttaaaccaggtatggctgccgatggttatcttccagattggctcgaggacaacctctctgagggcattcgcgagtggtgggacttgaaacctggagccccgaaacccaaagccaaccagcaaaagcaggacgacggccggggtctggtgcttcctggctacaagtacctcggacccttcaacggactcgacaagggagagccggtcaacgaggcagacgccgcggccctcgagcacgacaaggcctacgacaagcagctcgagcagggggacaacccgtacctcaagtacaaccacgccgacgccgagtttcaggagcgtcttcaagaagatacgtcttttgggggcaacctcgggcgagcagtcttccaggccaagaagcgggttctcgaacctctcggtctggttgaggaaggcgctaagacggctcctggaaagaagagacccatagaatcccccgactcctccacgggcatcggcaagaaaggccagcagcccgctaaaaagaagctcaactttgggcagactggcgactcagagtcagtgcccgacccccaacctctcggagaacctcccgccgcgccctcaggtctgggatctggtacaatggctgcaggcggtggcgcaccaatggcagacaataacgaaggcgccgacggagtgggtaatgcctccggaaattggcattgcgattccacatggctgggcgacagagtcatcaccaccagcacccgcacctgggccctgcccacctacaacaaccacctctacaagcagatatcaagtcagagcggggctaccaacgacaaccacttcttcggctacagcaccccctggggctattttgacttcaacagattccactgccacttctcaccacgtgactggcagcgactcatcaacaacaactggggattccggcccagaaagctgcggttcaagttgttcaacatccaggtcaaggaggtcacgacgaacgacggcgttacgaccatcgctaataaccttaccagcacgattcaggtcttctcggactcggagtaccaactgccgtacgtcctcggctctgcgcaccagggctgcctccctccgttccctgcggacgtgttcatgattcctcagtacggatatctgactctaaacaacggcagtcagtctgtgggacgttcctccttctactgcctggagtactttccttctcagatgctgagaacgggcaataactttgaattcagctacacctttgaggaagtgcctttccacagcagctatgcgcacagccagagcctggaccggctgatgaatcccctcatcgaccagtacctgtactacctggcccggacccagagcactacggggtccacaagggagctgcagttccatcaggctgggcccaacaccatggccgagcaatcaaagaactggctgcccggaccctgttatcggcagcagagactgtcaaaaaacatagacagcaacaacaacagtaactttgcctggaccggggccactaaataccatctgaatggtagaaattcattaaccaacccgggcgtagccatggccaccaacaaggacgacgaggaccagttctttcccatcaacggagtgctggtttttggcgaaacgggggctgccaacaagacaacgctggaaaacgtgctaatgaccagcgaggaggagatcaaaaccaccaatcccgtggctacagaagaatacggtgtggtctccagcaacctgcaatcgtctacggccggaccccagacacagactgtcaacagccagggggctctgcccggcatggtctggcagaaccgggacgtgtacctgcagggtcccatctgggccaaaattcctcacacggacggcaactttcacccgtctcccctgatgggcggatttggactcaaacacccgcctcctcaaattctcatcaaaaacaccccggtacctgctaatcctccagaggtgtttactcctgccaagtttgcctcatttatcacgcagtacagcaccggccaggtcagcgtggagatcgagtgggaactgcagaaagaaaacagcaaacgctggaatccagagattcagtacacctcaaattatgccaagtctaataatgtggaatttgctgtcaacaacgaaggggtttatactgagcctcgccccattggcacccgttacctcacccgtaacctgtaattgcctgttaatcaataaaccggttaattcgtttcagttgaactttggtctctgcgaagggcgaattc

SEQ ID NO: 4765 - protein, 728 aa, Adeno-associated virus
MAADGYLPDWLEDNLSEGIREWWDLKPGAPKPKANQQKQDDGRGLVLPGYKYLGPFNGLDKGEPVNEADAAALEHDKAYDKQLEQGDNPYLKYNHADAEFQERLQEDTSFGGNLGRAVFQAKKRVLEPLGLVEEGAKTAPGKKRPIESPDSSTGIGKKGQQPAKKKLNFGQTGDSESVPDPQPLGEPPAAPSGLGSGTMAAGGGAPMADNNEGADGVGNASGNWHCDSTWLGDRVITTSTRTWALPTYNNHLYKQISSQSGATNDNHFFGYSTPWGYFDFNRFHCHFSPRDWQRLINNNWGFRPRKLRFKLFNIQVKEVTTNDGVTTIANNLTSTIQVFSDSEYQLPYVLGSAHQGCLPPFPADVFMIPQYGYLTLNNGSQSVGRSSFYCLEYFPSQMLRTGNNFEFSYTFEEVPFHSSYAHSQSLDRLMNPLIDQYLYYLARTQSTTGSTRELQFHQAGPNTMAEQSKNWLPGPCYRQQRLSKNIDSNNNSNFAWTGATKYHLNGRNSLTNPGVAMATNKDDEDQFFPINGVLVFGETGAANKTTLENVLMTSEEEIKTTNPVATEEYGVVSSNLQSSTAGPQTQTVNSQGALPGMVWQNRDVYLQGPIWAKIPHTDGNFHPSPLMGGFGLKHPPPQILIKNTPVPANPPEVFTPAKFASFITQYSTGQVSVEIEWELQKENSKRWNPEIQYTSNYAKSNNVEFAVNNEGVYTEPRPIGTRYLTRNL

SEQ ID NO: 4766 - protein, 733 aa, Adeno-associated virus
MAADGHLPDWLEDNLSEGIREWWDLKPGAPKPKANQQKQDDGRGLVLPGYKYLGPFNGLDKGEPVNAADAAALEHDKAYDQQLKAGDNPYLRYNHADAEFQERLQEDTSFGGNLGRAVFQAKKRVLEPLGLVEEGAKTAPGKKRPIESPDSSTGIGKKGQQPAKKKLNFGQTGDSESVPDPQPIGEPPAGPSGLGSGTMAAGGGAPMADNNEGADGVGSSSGNWHCDSTWLGDRVITTSTRTWALPTYNNHLYKQISNGTSGGSTNDNTYFGYSTPWGYFDFNRFHCHFSPRDWQRLINNSWGFRPKRLNFKLFNIQVKEVTQNEGTKTIANNLTSTIQVFTDSEYQLPYVLGSAHQGCLPPFPADVFMIPQYGYLTLNNGSQAVGRSSFYCLEYFPSQMLRTGNNFEFSYQFEDVPFHSSYAHSQSLDRLMNPLIDQYLYYLSRTQSTGGTAGTQQLLFSQAGPNNMSAQAKNWLPGPCYRQQRVSTTLSQNNNSNFAWTGATKYHLNGRDSLVNPGVAMATHKDDEERFFPSSGVLMFGKQGAGKDNVDYSSVMLTSEEEIKTTNPVATEQYGVVADNLQQQNAAPIVGAVNSQGALPGMVWQNRDVYLQGPIWAKIPHTDGNFHPSPLMGGFGLKHPPPQILIKNTPVPADPPTTFSQAKLASFITQYSTGQVSVEIEWELQKENSKRWNPEIQYTSNYYKSTNVDFAVNTEGTYSEPRPIGTRYLTRNL

SEQ ID NO: 4767 - DNA, 2495 bp, Adeno-associated virus
gaattcgccctttctacggctgcgtcaactagaccaatgagaactttcccttcaacgattgcgtcgacaagatggtgatctggtgggaggagggcaagatgacggccaaggtcgtggagtccgccaaggccattcatcatctgctggggcgggctcccgagattgcttgctcggcctgcgatctggtcaacgtggacctggatgactgtgtttctgagcaataaatgacttaaaccaggtatggctgccgatggttatcttccagattggctcgaggacaacctctctgagggcattcgcgagtggtgggacttgaaacctggagccccgaaacccaaagccaaccagcaaaagcaggacgacggccggggtctggtgcttcctggctacaagtacctcggacccttcaacggactcgacaagggagagccggtcaacgaggcagacgccgcggccctcgagcacgacaaggcctacgacaagcagctcgagcagggggacaacccgtacctcaagtacaaccacgccgacgccgagtttcaggagcgtcttcaagaagatacgtcttttgggggcaacctcgggcgagcagtcttccaggccaagaagcgggttctcgaacctctcggtctggttgaggaaggcgctaagacggctcctggaaagaagagacccatagaatcccccgactcctccacgggcatcggcaagaaaggccagcagcccgctaaaaagaagctcaactttgggcagactggcgactcagagtcagtgcccgaccctcaaccaatcggagaaccccccgcaggcccctctggtctgggatctggtacaatggctgcaggcggtggcgctccaatggcagacaataacgaaggcgccgacggagtgggtaatgcctccggaaattggcattgcgattccacatggctgggcgacagagtcatcaccaccagcacccgcacctgggccctgcccacctacaacaaccacctctacaagcagatatcaagtcagagcggggctaccaacgacaaccacttcttcggctacagcaccccctggggctattttgacttcaacagattccactgccacttctcaccacgtgactggcagcgactcatcaacaacaactggggattccggcccagaaagctgcggttcaagttgttcaacatccaggtcaaggaggtcacgacgaacgacggcgttacgaccatcgctaataaccttaccagcacgattcaggtcttctcggactcggagtaccaactgccgtacgtcctcggctctgcgcaccagggctgcctccctccgttccctgcggacgtgttcatgattcctcagtacggatatctgactctaaacaacggcagtcagtctgtgggacgttcctccttctactgcctggagtactttccttctcagatgctgagaacgggcaataactttgaattcagctacacctttgaggaagtgcctttccacagcagctatgcgcacagccagagcctggaccggctgatgaatcccctcatcgaccagtacctgtactacctggcccggacccagagcactacggggtccacaagggagctgcagttccatcaggctgggcccaacaccatggccgagcaatcaaagaactggctgcccggaccctgttatcggcagcagagactgtcaaaaaacatagacagcaacaacaccagtaactttgcctggaccggggccactaaataccatctgaatggtagaaattcattaaccaacccgggcgtagccatggccaccaacaaggacgacgaggaccagttctttcccatcaacggagtgctggtttttggcaaaacgggggctgccaacaagacaacgctggaaaacgtgctaatgaccagcgaggaggagatcaaaaccaccaatcccgtggctacagaacagtacggtgtggtctccagcaacctgcaatcgtctacggccggaccccagacacagactgtcaacagccagggggctctgcccggcatggtctggcagaaccgggacgtgtacctgcagggtcccatctgggccaaaattcctcacacggacggcaactttcacccgtctcccctgatgggcggatttggactcaaacacccgcctcctcaaattctcatcaaaaacaccccggtacctgctaatcctccagaggtgtttactcctgccaagtttgcctcatttatcacgcagtacagcaccggccaggtcagcgtggagatcgagtgggaactgcagaaagaaaacagcaaacgctggaatccagagattcagtacacctcaaattatgccaagtctaataatgtggaatttgctgtcaacaacgaaggggtttatactgagcctcgccccattggcacccgttacctcacccgtaacctgtaattgcctgttaatcaataaaccggttaattcgtttcagttgaactttggtctctgcgaagggcgaattc

SEQ ID NO: 4768 - protein, 728 aa, Adeno-associated virus
MAADGYLPDWLEDNLSEGIREWWDLKPGAPKPKANQQKQDDGRGLVLPGYKYLGPFNGLDKGEPVNEADAAALEHDKAYDKQLEQGDNPYLKYNHADAEFQERLQEDTSFGGNLGRAVFQAKKRVLEPLGLVEEGAKTAPGKKRPIESPDSSTGIGKKGQQPAKKKLNFGQTGDSESVPDPQPIGEPPAGPSGLGSGTMAAGGGAPMADNNEGADGVGNASGNWHCDSTWLGDRVITTSTRTWALPTYNNHLYKQISSQSGATNDNHFFGYSTPWGYFDFNRFHCHFSPRDWQRLINNNWGFRPRKLRFKLFNIQVKEVTTNDGVTTIANNLTSTIQVFSDSEYQLPYVLGSAHQGCLPPFPADVFMIPQYGYLTLNNGSQSVGRSSFYCLEYFPSQMLRTGNNFEFSYTFEEVPFHSSYAHSQSLDRLMNPLIDQYLYYLARTQSTTGSTRELQFHQAGPNTMAEQSKNWLPGPCYRQQRLSKNIDSNNTSNFAWTGATKYHLNGRNSLTNPGVAMATNKDDEDQFFPINGVLVFGKTGAANKTTLENVLMTSEEEIKTTNPVATEQYGVVSSNLQSSTAGPQTQTVNSQGALPGMVWQNRDVYLQGPIWAKIPHTDGNFHPSPLMGGFGLKHPPPQILIKNTPVPANPPEVFTPAKFASFITQYSTGQVSVEIEWELQKENSKRWNPEIQYTSNYAKSNNVEFAVNNEGVYTEPRPIGTRYLTRNL

SEQ ID NO: 4769 - DNA, 2504 bp, Adeno-associated virus
gaattcgccctttctacggctgcgtcaactggaccaatgagaactttcccttcaacgattgcgtcgacaagatggtgatctggtgggaggagggcaagatgacggccaaggtcgtggagtccgccaaggccattcatcatctgctggggcgggctcccgagattgcttgctcggcctgcgatctggtcaacgtggacctggatgactgtgtttctgagcaataaatgacttaaaccaggtatggctgccgatggttatcttccagattggctcgaggacaacctctctgagggcattcgcgagtggtgggacttgaaacctggagccccgaaacccaaagccaaccagcaaaagcaggacgacggccggggtctggtgcttcctggctacaagtacctcggacccttcaacggactcgacaagggagagccggtcaacgaggcagacgccgcggccctcgagcacgacaaggcctacgacaagcagctcgagcagggggacaacccgtacctcaagtacaaccacgccgacgccgagtttcaggagcgtcttcaagaagatacgtcttttgggggcaacctcgggcgagcagtcttccaggccaagaagcgggttctcgaacctctcggtctggttgaggaaggcgctaagacggctcctggaaagaagagacccatagaatcccccgactcctccacgggcatcggcaagaaaggccagcagcccgctaaaaagaagctcaactttgggcagactggcgactcagagtcagtgcccgaccctcaaccaatcggagaaccccccgcaggcccctctggtctgggatctggtacaatggctgcaggcggtggcgctccaatggcagacaataacgaaggcgccgacggagtgggtaatgcctccggaaattggcattgcgattccacatggctgggcgacagagtcatcaccaccagcacccgcacctgggccctgcccacctacaacaaccacctctacaagcagatatcaagtcagagcggggctaccaacgacaaccacttcttcggctacagcaccccctggggctattttgacttcaacagattccactgccacttctcatcacgtgactggcagcgactcatcaacaacaactggggattccggcccaagagactcaacttcaagctcttcaacatccaggtcaaggaggtcacgcagaatgaaggcaccaagaccatcgccaataaccttaccagcacgattcaggtctttacggactcggaataccggctcccgtacgtcctcggctctgcgcaccagggctgcctgcctccgttcccggcggacgtcttcatgattcctcagtacgggtacctgactctgaacaacggcagtcaggccgtgggccgttcctccttctactgcctggagtactttccttctcaaatgctgagaacgggcaacaactttgagttcagctaccagtttgaggacgtgccttttcacagcagctacgcgcacagccaaagcctggaccggctgatgaaccccctcatcgaccagtacctgtactacctgtctcggactcagtccacgggaggtaccgcaggaactcagcagttgctattttctcaggccgggcctaataacatgtcggctcaggccaaaaactggctacccgggccctgctaccggcagcaacgcgtctccacgacactgtcgcaaaataacaacagcaactttgcttggaccggtgccaccaagtatcatctgaatggcagagactctctggtaaatcccggtgtcgctatggcaacgcacaaggacgacgaagagcgattttttccatccagcggagtcttgatgtttgggaaacagggagctggaaaagacaacgtggactatagcagcgttatgctaaccagtgaggaagaaatcaaaaccaccaacccagtggccacagaacagtacggcgtggtggccgataacctgcaacagcaaaacgccgctcctattgtaggggccgtcaacagtcaaggagccttacctggcatggtctggcagaaccgggacgtgtacctgcagggtcctatctgggccaagattcctcacacggacggcaactttcatccttcgccgctgatgggaggctttggactgaaacacccgcctcctcagatcctgattaagaatacacctgttcccgcggatcctccaactaccttcagtcaagccaagccggcgtcgttcatcacgcagtacagcaccggacaggtcagcgtggaaattgaatgggagctgcagaaagagaacagcaagcgctggaacccagagattcagtatacttccaactactacaaatctacaaatgtggactttgctgtcaatactgagggtacttattcagagcctcgccccattggcacccgttacctcacccgtaacctgtaattgcctgttaatcaataaaccggttaattcgtttcagttgaactttggtctctgcgaagggcgaattc

SEQ ID NO: 4770 - protein, 731 aa, Adeno-associated virus
MAADGYLPDWLEDNLSEGIREWWDLKPGAPKPKANQQKQDDGRGLVLPGYKYLGPFNGLDKGEPVNEADAAALEHDKAYDKQLEQGDNPYLKYNHADAEFQERLQEDTSFGGNLGRAVFQAKKRVLEPLGLVEEGAKTAPGKKRPIESPDSSTGIGKKGQQPAKKKLNFGQTGDSESVPDPQPIGEPPAGPSGLGSGTMAAGGGAPMADNNEGADGVGNASGNWHCDSTWLGDRVITTSTRTWALPTYNNHLYKQISSQSGATNDNHFFGYSTPWGYFDFNRFHCHFSSRDWQRLINNNWGFRPKRLNFKLFNIQVKEVTQNEGTKTIANNLTSTIQVFTDSEYRLPYVLGSAHQGCLPPFPADVFMIPQYGYLTLNNGSQAVGRSSFYCLEYFPSQMLRTGNNFEFSYQFEDVPFHSSYAHSQSLDRLMNPLIDQYLYYLSRTQSTGGTAGTQQLLFSQAGPNNMSAQAKNWLPGPCYRQQRVSTTLSQNNNSNFAWTGATKYHLNGRDSLVNPGVAMATHKDDEERFFPSSGVLMFGKQGAGKDNVDYSSVMLTSEEEIKTTNPVATEQYGVVADNLQQQNAAPIVGAVNSQGALPGMVWQNRDVYLQGPIWAKIPHTDGNFHPSPLMGGFGLKHPPPQILIKNTPVPADPPTTFSQAKPASFITQYSTGQVSVEIEWELQKENSKRWNPEIQYTSNYYKSTNVDFAVNTEGTYSEPRPIGTRYLTRNL

SEQ ID NO: 4771 - protein, 731 aa, Adeno-associated virus
MAADGYLPDWLEDNLSEGIREWWDLKPGAPKPKANQQKQDDGRGLVLPGYKYLGPFNGLDKGEPVNEADAAALEHDKAYDKQLEQGDNPYLKYNHADAEFQERLQEDTSFGGNLGRAVFRAKKRVLEPLGLVEEGAKTAPGKKRPIESPDSSTGIGKKGQQPAKKKLNFGQTGDSESVPDPQPLGEPPAAPSGLGSGTMAAGGGAPMADNNEGADGVGNASGNWHCDSTWLGDRVITTSTRTWALPTYNNHLYKQISSQSGATNDNHFFGYSTPWGYFDFNRFHCHFSPRDWQRLINNNRGFRPRKLRFKLFNIQVKEVTTNDGVTTIANNLTSTIQVFSDSEYQLPYVLGSAHQGCLPPFPADVFMIPQYGYLTLNNGSQSVGRSSFYCLEYFPSQMLRTGNNFEFSYQFEDVPFHSSYAHSQSLDRLMNPLIDQYLYYLSRTQSTGGTAGTQQLLFSQAGPNNMSAQAKNWLPGPCYRQQRVSTTLSQNNNSNFAWTGATKYHLNGRDSLVNPGVAMATHKDDEERFFPSSGVLMFGKQGAGKDNVDYSSVMLTSEEEIKTTNPVATEQYGVVADNLQQQNAAPIVGAVNSQGALPGMAWQNRDVYLQGPIWAKIPHTDGNFHPSPLMGGFGLKHPPPQILIKNTPVPADPPTTFSQAKLASFITQYSTGQVSVEIEWELQKENSKRWNPEIQYTSNYYKSTNVDFAVNTEGTYSEPRPIGTRYLTRNL

SEQ ID NO: 4772 - protein, 738 aa, Adeno-associated virus
MAADGYLPDWLEDNLSEGIREWWDLKPGAPKPKANQQKQDDGRGLVLPGYKYLGPFNGLDKGEPVNEADAAALEHDKAYDKQLEQGDNPYLKYNHADAEFQERLQEDTSFGGNLGRAVFQAKKRVLEPLGLVEEGAKTAPGKKRPVEPSPQRSPDSSTGIGKTGQQPAKKRLNFGQTGDSESVPDPQPIGEPPAGPSGLGSGTMAAGGGAPMADNNEGADGVGSSSGNWHCDSTWLGDRVITTSTRTWALPTYNNHLYKQISNGTSGGSTNDNTYFGYSTPWGYFDFNRFHCHFSPRDWQRLINNNWGFRPKRLNFKLFNIQVKEVTQNEGTKTIANNLTSTIQVFTDSEYQLPYVLGSAHQGCLPPFPADVFMIPQYGYLTLNNGSQAVGRSSFYCLEYFPSQMLRTGNNFEFSYQFEDVPFHSSYAHSQSLDRLMNPLIDQYLYYLSRTQSTGGTAGTQQLLFSQAGPNNMSAQAKNWLPGPCYRQQRVSTTLSQNNNSNFAWTGATKYHLNGRDSLVNPGVAMATHKDDEERFFPSSGVLMFGKQGAGKDNVDYSSVMLTSEEEIKTTNPVATEQYGVVADNLQQQNAAPIVGAVNSQGALPGMVWQNRDVYLQGPIWAKIPHTDGNFHPSPLMGGFGLKHPPPQILIKNTPVPADPPTTFSQAKLASFITQYSTGQVSVEIEWELQKENSKRWNPEIQYTSNYYKSTNVDFAVNTEGTYSEPRPIGTRYLTRNL

SEQ ID NO: 4773 - protein, 735 aa, Adeno-associated virus
MAADGYLPDWLEDNLSEGIREWWDLKPGAPKPKANQQKQDDGRGLVLPGYKYLGPFNGLDKGEPVNEADAAALEHDKAYDKQLEQGDNPYLKYNHADAEFQERLQEDTSFGGNLGRAVFQAKKRVLEPLGLVEEGAKTAPGKKRPVEPSPQRSPDSSTGIGKTGQQPAKKRLNFGQTGDSESVPDPQPIGEPPAGPSGLGSGTMAAGGGAPMADNNEGADGVGSSSGNWHCDSTWLGDRVITTSTRTWALPTYNNHLYKQISNGTSGGSTNDNTYFGYSTPWGYFDFNRFHCHFSPRDWQRLINNNWGFRPRKLRFKLFNIQVKEVTTDDGVTTIANNLTSTIQVFSDSEYQLPYVLGSAHQGCLPPFPADVFMIPQYGYLTLNNGSQSVGRSSFYCLEYFPSQMLRTGNNFEFSYTFEEVPFHSSYAHSQSLDRLMNPLIDQYLYYLARTQSTTGSTRELQFHQAGPNTMAEQSKNWLPGPCYRQQRLSKNIDSNNNSNFAWTGATKYHLNGRNSLTNPGVAMATNKDDEDQFFPINGVLVFGKTGAANKTTLENVLMTSEEEIKTTNPVATEEYGVVSSNLQSSTAGPQTQTVNSQGALPGMVWQNRDVYLQGPIWAKIPHTDGNFHPSPLMDGFGLKHPPPQILIKNTPVPANPPEVFTPAKFASFITQYSTGQVSVEIEWELQKENSKRWNPEIQYTSNYAKSNNVEFAVNNEGVYTEPRPIGTRYLTRNL

SEQ ID NO: 4774 - DNA, 3128 bp, Adeno-associated virus
gaattcgccctttctacggctgcgtcaactggaccaatgagaactttcccttcaacgattgcgtcgacaagatggtgatctggtgggaggagggcaagatgacggccaaggtcgtggagtccgccaaggccattctcggcggcagcaaggtgcgcgtggaccaaaagtgcaagtcttccgcccagatcgatcccacccccgtgatcgtcacttccaacaccaacatgtgcgccgtgattgacgggaacagcaccaccttcgagcaccagcagccgttacaagaccggatgttcaaatttgaactcacccgccgtctggagcacgactttggcaaggtgacaaagcaggaagtcaaagagttcttccgctgggcgcaggatcacgtgaccgaggtggcgcatgagttctacgtcagaaagggtggagccaacaagagacccgcccccgatgacgcggataaaagcgagcccaagcgggcctgcccctcagtcgcggatccatcgacgtcagacgcggaaggagctccggtggactttgccgacaggtaccaaaacaaatgttctcgtcacgcgggcatgcttcagatgctgtttccctgcaagacatgcgagagaatgaatcagaatttcaacatttgcttcacgcacgggaccagagactgttcagaatgtttccccggcgtgtcagaatctcaaccggtcgtcagaaagaggacgtatcggaaactctgtgccattcatcatctgctagggcgggctcccgagattgcttgctcggcctgcgatctggtcaacgtggacctggatgactgtgtttctgagcaataaatgacttaaaccaggtatggctgccgatggttatcttccagattggctcgaggacaacctctctgagggcattcgcgagtggtgggacttgaaacctggagccccgaaacccaaagccaaccagcaaaagcaggacgacggccggggtctggtgcttcctggctacaagtacctcggacccttcaacggactcgacaagggggagcccgtcaacgcggcggacgcagcggccctcgagcacgacaaggcctacgaccagcagctcaaagcgggtgacaatccgtacctgcggtataaccacgccgacgccgagtttcaggagcgtctgcaagaagatacgtcttttgggggcaacctcgggcgagcagtcttccaggccaagaagcgggttctcgaacctctcggtctggttgaggaaggcgctaagacggctcctggaaagaagagaccggtagagccatcaccccagcgttctccagactcctctacgggcatcggcaagacaggccagcagcccgcgaaaaagagactcaactttgggcagactggcgactcagagtcagtgcccgaccctcaaccaatcggagaaccccccgcaggcccctctggtctgggatctggtacaatggctgcaggcggtggcgctccaatggcagacaataacgaaggcgccgacggagtgggtagttcctcaggaaattggcattgcgattccacatggctgggcgacagagtcatcaccaccagcacccgaacctgggccctccccacctacaacaaccacctctacaagcaaatctccaacgggacatcgggaggaagcaccaacgacaacacctacttcggctacagcaccccctgggggtattttgactttaacagattccactgccacttctcaccacgtgactggcagcgactcatcaacaacaactggggattccggcccaagagactcaacttcaagctcttcaacatccaggtcaaggaggtcacgcagaatgaaggcaccaagaccatcgccaataaccttaccagcacgattcaggtctttacggactcggaataccagctcccgtacgtcctcggctctgcgcaccagggctgcctgcctccgttcccggcggacgtcttcatgattcctcagtacgggtacctgactctgaacaacggcagtcaggccgtgggccgttcctccttctactgcctggagtactttccttctcaaatgctgagaacgggcaacaactttgagttcagctaccagtttgaggacgtgccttttcacagcagctacgcgcacagccaaagcctggaccggctgatgaaccccctcatcgaccagtacctgtactacctgtctcggactcagtccacgggaggtaccgcaggaactcagcagttgctattttctcaggccgggcctaataacatgtcggctcaggccaaaaactggctacccgggccctgctaccggcagcaacgcgtctccacgacactgtcgcaaaataacaacagcaactttgcttggaccggtgccaccaagtatcatctgaatggcagagactctctggtaaatcccggtgtcgctatggcaacgcacaaggacgacgaagagcgattttttccatccagcggagtcttgatgtttgggaaacagggagctggaaaagacaacgtggactatagcagcgttatgctaaccagtgaggaagaaatcaaaaccaccaacccagtggccacagaacagtacggcgtggtggccgataacctgcaacagcaaaacgccgctcctattgtaggggccgtcaacagtcaaggagccttacctggcatggtctggcagaaccgggacgtgtacctgcagggtcctatctgggccaagattcctcacacggacggcaactttcatccttcgccgctgatgggaggctttggactgaaacacccgcctcctcagatcctgattaagaatacacctgttcccgcggatcctccaactaccttcagtcaagccaagctggcgtcgttcatcacgcagtacagcaccggacaggtcagcgtggaaattgaatgggagctgcagaaagagaacagcaagcgctggaacccagagattcagtatacttccaactactacaaatctacaaatgtggactttgctgtcaatactgagggtacttattcagagcctcgccccattggcacccgttacctcacccgtaacctgtaattgcctgttaatcaataaaccggctaattcgtttcagttgaactttggtctctgcgaagggcgaattc

SEQ ID NO: 4775 - protein, 738 aa, Adeno-associated virus
MAADGYLPDWLEDNLSEGIREWWDLKPGAPKPKANQQKQDDGRGLVLPGYKYLGPFNGLDKGEPVNAADAAALEHDKAYDQQLKAGDNPYLRYNHADAEFQERLQEDTSFGGNLGRAVFQAKKRVLEPLGLVEEGAKTAPGKKRPVEPSPQRSPDSSTGIGKTGQQPAKKRLNFGQTGDSESVPDPQPIGEPPAGPSGLGSGTMAAGGGAPMADNNEGADGVGSSSGNWHCDSTWLGDRVITTSTRTWALPTYNNHLYKQISNGTSGGSTNDNTYFGYSTPWGYFDFNRFHCHFSPRDWQRLINNNWGFRPKRLNFKLFNIQVKEVTQNEGTKTIANNLTSTIQVFTDSEYQLPYVLGSAHQGCLPPFPADVFMIPQYGYLTLNNGSQAVGRSSFYCLEYFPSQMLRTGNNFEFSYQFEDVPFHSSYAHSQSLDRLMNPLIDQYLYYLSRTQSTGGTAGTQQLLFSQAGPNNMSAQAKNWLPGPCYRQQRVSTTLSQNNNSNFAWTGATKYHLNGRDSLVNPGVAMATHKDDEERFFPSSGVLMFGKQGAGKDNVDYSSVMLTSEEEIKTTNPVATEQYGVVADNLQQQNAAPIVGAVNSQGALPGMVWQNRDVYLQGPIWAKIPHTDGNFHPSPLMGGFGLKHPPPQILIKNTPVPADPPTTFSQAKLASFITQYSTGQVSVEIEWELQKENSKRWNPEIQYTSNYYKSTNVDFAVNTEGTYSEPRPIGTRYLTRNL

SEQ ID NO: 4776 - DNA, 3084 bp, Adeno-associated virus
gaattcgccctttctacggctgcatcaactggaccaatgagaactttcccttcaacgattgcgtcgacaagatggtgatctggtgggaggagggcaagatgacggccaaggtcgtggagtccgccaaggccattctcggcggcagcaaggtgcgcgtggaccaaaagtgcaagtcgtccgcccagatcgaccccacccccgtgatcgtcacctccaacaccaacatgtgcgccgtgattgacgggaacagcaccaccttcgagcaccagcagccgttgcaggaccggatgttcaagttcgaactcacccgccgtctggagcacgactttggcaaggtgaccaagcaggaagtcaaagagttcttccgctgggcgcaggatcacgtgaccgaggtggcgcatgagttctacgtcagaaagggcggagccagcaaaagacccgcccccgatgacgcggatataagcgagcccaagcgggcctgcccctcagtcgcggatccatcgacgtcagacgcggaaggagctccggtggactttgccgacaggtaccaaaacaaatgttctcgtcacgcgggcatgcttcagatgctgtttccctgcaaaacgtgcgagaaaatgaatcagaatttcaacatttgcttcacgcacggggtcagagactgctcagaatgtttccccggtgcatcagaatctcaaccggtcgtcagaaaaaaaacgtatcagaaactgtgtgccattcatcatctgctggggcgggcacccgagattgcttgctcggcctgcgatctggtcaacgtggacctggacgactgtgtttctgagcaataaatgacttaaaccaggtatggctgccgatggttatcttccagattggcttgaggacaacctctctgagggcattcgcgagtggtgggacctgaaacctggagccccgaaacccaaagccaaccagcaaaagcaggacgacggccggggtctggtgcttcctggctacaagtacctcggacccttcaacggactcgacaagggggagcccgtcaacgcggcggacgcagcggccctcgagcacgacaaggcctacgaccagcagctcaaagcgggtgacaatccgtacctgcggtataaccacgccgacgccgagtttcaggagcgtctgcaagaagatacgtcttttgggggcaacctcgggcgagcagtcttccaggccaagaagcgggttctcgaacctctcggtctggttgaggaaggcgctaagacggctcctggaaagaagagaccggtagagccatcacctcagcgttcccccgactcctccacgggcatcggcaagaaaggccaccagcccgcgagaaagagactgaactttgggcagactggcgactcggagtcagtccccgaccctcaaccaatcggagaaccaccagcaggcccctctggtctgggatctggtacaatggctgcaggcggtggcgctccaatggcagacaataacgaaggcgccgacggagtgggtagttcctcaggaaattggcattgcgattccacatggctgggcgacagagtcatcaccaccagcacccgaacctgggccctgcccacctacaacaaccatctctacaagcaaatctccaacgggacatcgggaggaagcactaacgacaacacctactttggctacagcaccccctgggggtattttgacttcaacagattccactgccacttctcaccacgtgactggcagcgactcatcaacaataactggggattccggcccaagagactcaacttcaagctcttcaacatccaggtcaaggaggtcacgcagaatgaaggcaccaagaccatcgccaataaccttaccagcacgattcaggtgtttacggactcggaataccagctcccgtacgtccccggctctgcgcaccagggctgcctccctccgttcccggcggacgtcttcatgattcctcagtacgggtatctgaccctaaacaatggcagtcaggctgtgggccgttcctccttctactgcctggaatacttcccttctcaaatgctgaggacgggcaacaactttgaattcagctacaccttcgaggacgtgcctttccacagcagctacgcgcacagccagagcctggaccggctgatgaaccctctcatcgaccagtacctgtattacttatccagaactcagtccacaggaggaactcaaggtactcagcaattgttattttctcaagccgggcccgcaaacatgtcggctcaggccaagaactggctacctggaccgtgttaccgtcagcaacgagtttccacgacactgtcgcaaaacaacaacagcaattttgcttggaccggtgccaccaagtatcacctgaatggcagagactccctggttaatcccggcgttgccatggctacccacaaggacgacgaggagcgcttcttcccgtcaagcggagttctaatgtttggcaagcagggggctggaaaagacaatgtggactacagcagcgtgatgctcaccagcgaagaagaaattaaaactactaacccagtggctacagagcagtatggtgtggtggcagacaacctgcagcagaccaacggagctcccattgtgggaactgtcaacagccagggggccttacctggtatggtctggcaaaaccgggacgtgtacctgcagggccccatctgggccaaaattcctcacacggacggcaactttcatccttcgccgctgatgggaggctttggactgaaacacccgcctcctcagatcctggtgaaaaacactcctgttcctgcggatcctccgaccaccttcagccaggccaagctggcttcttttatcacgcagtacagcaccggacaggtcagcgtggaaatcgaatgggagctgcagaaagaaaacagcaagcgctggaacccagagattcagtatacttccaactactacaaatctacaaatgtggactttgctgtcaatactgagggtacttattcagagcctcgccccattggcactcgttatctcacccgtaatctgtaattgcttgttaatcaataaaccggt

SEQ ID NO: 4777 - protein, 738 aa, Adeno-associated virus
MAADGYLPDWLEDNLSEGIREWWDLKPGAPKPKANQQKQDDGRGLVLPGYKYLGPFNGLDKGEPVNAADAAALEHDKAYDQQLKAGDNPYLRYNHADAEFQERLQEDTSFGGNLGRAVFQAKKRVLEPLGLVEEGAKTAPGKKRPVEPSPQRSPDSSTGIGKKGHQPARKRLNFGQTGDSESVPDPQPIGEPPAGPSGLGSGTMAAGGGAPMADNNEGADGVGSSSGNWHCDSTWLGDRVITTSTRTWALPTYNNHLYKQISNGTSGGSTNDNTYFGYSTPWGYFDFNRFHCHFSPRDWQRLINNNWGFRPKRLNFKLFNIQVKEVTQNEGTKTIANNLTSTIQVFTDSEYQLPYVPGSAHQGCLPPFPADVFMIPQYGYLTLNNGSQAVGRSSFYCLEYFPSQMLRTGNNFEFSYTFEDVPFHSSYAHSQSLDRLMNPLIDQYLYYLSRTQSTGGTQGTQQLLFSQAGPANMSAQAKNWLPGPCYRQQRVSTTLSQNNNSNFAWTGATKYHLNGRDSLVNPGVAMATHKDDEERFFPSSGVLMFGKQGAGKDNVDYSSVMLTSEEEIKTTNPVATEQYGVVADNLQQTNGAPIVGTVNSQGALPGMVWQNRDVYLQGPIWAKIPHTDGNFHPSPLMGGFGLKHPPPQILVKNTPVPADPPTTFSQAKLASFITQYSTGQVSVEIEWELQKENSKRWNPEIQYTSNYYKSTNVDFAVNTEGTYSEPRPIGTRYLTRNL

SEQ ID NO: 4778 - DNA, 3123 bp, Adeno-associated virus
gaattcgcccttggctgcgtcaactggaccaatgagaactttcccttcaacgattgcgtcgacaagatggtgatctggtgggaggagggcaagatgacggccaaggtcgtggagtccgccaaggccattctcggcggcagcaaggtgcgcgtggaccaaaagtgcaagtcgtccgcccagatcgaccccacccccgtgatcgtcacctccaacaccaacatgtgcgccgtgattgacgggaacagcaccaccttcgagcaccagcagccgttgcaggaccggatgttcaagttcgaactcacccgccgtctggagcacgactttggcaaggtgaccaagcaggaagtcaaagagttcttccgctgggcgcaggatcacgtgaccgaggtggcgcatgagttctacgtcagaaagggcggagccagcaaaagacccgcccccgatgacgcggatataagcgagcccaagcgggcctgcccctcagtcgcggatccatcgacgtcagacgcggaaggagctccggtggactttgccgacaggtaccaaaacaaatgttctcgtcacgcgggcatgctccagatgctgtttccctgcaaaacgtgcgagagaatgaatcagaatttcaacatttgcttcacgcacggggtcagagactgctcagaatgtttccccggtgcatcagaatctcaaccggtcgtcagaaaaaaaacgtatcagaaactgtgtgccattcatcatctgctggggcgggcacccgagattgcttgctcggcctgcgatctggtcaacgtggacctggacgactgtgtttctgagcaataaatgacttaaaccaggtatggctgccgatggttatcttccagattggcttgaggacaacctctctgagggcattcgcgagtggtgggacctgaaacctggagccccgaaacccaaagccaaccagcaaaagcaggacgacggccggggtctggtgcttcctggctacaagtacctcggacccttcaacggactcgacaagggggagcccgtcaacgcggcggacgcagcggccctcgagcacgacaaggcctacgaccagcagctcaaagcgggtgacaatccgtacctgcggtataaccacgccgacgccgagtttcaggagcgtctgcaagaagatacgtcttttgggggcaacctcgggcgagcagtcttccaggccaagaagcgggttctcgaacctctcggtctggttgaggaaggcgctaagacggctcctggaaagaagagaccggtagagccatcacctcagcgttcccccgactcctccacgggcatcggcaagaaaggccaccagcccgcgagaaagagactgaactttgggcagactggcgactcggagtcagtccccgaccctcaaccaatcggagaaccaccagcaggcccctctggtctgggatctggtacaatggctgcaggcggtggcgctccaatggcagacaataacgaaggcgccgacggagtgggtagttcctcaggaaattggcattgcgattccacatggctgggcgacagagtcatcaccaccagcacccgaacctgggccctgcccacctacaacaaccatctctacaagcaaatctccaacgggacatcgggaggaagcactaacgacaacacctactttggctacagcaccccctgggggtattttgacttcaacagattccactgccacttctcaccacgtgactggcagcgactcatcaacaataactggggattccggcccaagagactcaacttcaagctcttcaacatccaggtcaaggaggtcacgcagaatgaaggcaccaagaccatcgccaataaccttaccagcacgattcaggtgtttacggactcggaataccagctcccgtacgtcctcggctctgcgcaccagggctgcctccctccgttcccggcggacgtcttcatgattcctcagtacgggtatctgaccctaaacaatggcagtcaggctgtgggccgttcctccttctactgcctggaatacttcccttctcaaatgctgaggacgggcaacaactttgaattcagctacaccttcgaggacgtgcctttccacagcagctacgcgcacagccagagcctggaccggctgatgaaccctctcatcgaccagtacctgtattacttatccagaactcagtccacaggaggaactcaaggtactcagcaattgttattttctcaagccgggcccgcaaacatgtcggctcaggccaagaactggctacctggaccgtgttaccgtcagcaacgagtttccacgacactgtcgcaaaacaacaacagcaattttgcttggaccggtgccaccaagtatcacctgaatggcagagactccctggttaatcccggcgttgccatggctacccacaaggacgacgaggagcgcttcttcccgtcaagcggagttctaatgtttggcaagcagggggctggaaaagacaatgtggactacagcagcgtgatgctcaccagcgaagaagaaattaaaactactaacccagtggctacagagcagtatggtgtggtggcagacaacctgcagcagaccaacggagctcccattgtgggaactgtcaacagccagggggccttacctggtatggtctggcaaaaccgggacgtgtacctgcagggccccatctgggccaaaattcctcacacggacggcaactttcatccttcgccgctgatgggaggctttggactgaaacacccgcctcctcagatcctggtgaaaaacactcctgttcctgcggatcctccgaccaccttcagccaggccaagctggcttcttttatcacgcagtacagcaccggacaggtcagcgtggaaatcgaatgggagctgcagaaagaaaacagcaagcgctggaacccagagattcagtatacttccaactactacaaatctacaaatgtggactttgctgtcaatactgagggtacttattcagagcctcgccccattggcactcgttatctcacccgtaatctgtaattgcttgttaatcaataaaccggttaattcgtttcagttgaactttggtctctgcgaagggcgaattc

SEQ ID NO: 4779 - protein, 738 aa, Adeno-associated virus
MAADGYLPDWLEDNLSEGIREWWDLKPGAPKPKANQQKQDDGRGLVLPGYKYLGPFNGLDKGEPVNAADAAALEHDKAYDQQLKAGDNPYLRYNHADAEFQERLQEDTSFGGNLGRAVFQAKKRVLEPLGLVEEGAKTAPGKKRPVEPSPQRSPDSSTGIGKKGHQPARKRLNFGQTGDSESVPDPQPIGEPPAGPSGLGSGTMAAGGGAPMADNNEGADGVGSSSGNWHCDSTWLGDRVITTSTRTWALPTYNNHLYKQISNGTSGGSTNDNTYFGYSTPWGYFDFNRFHCHFSPRDWQRLINNNWGFRPKRLNFKLFNIQVKEVTQNEGTKTIANNLTSTIQVFTDSEYQLPYVLGSAHQGCLPPFPADVFMIPQYGYLTLNNGSQAVGRSSFYCLEYFPSQMLRTGNNFEFSYTFEDVPFHSSYAHSQSLDRLMNPLIDQYLYYLSRTQSTGGTQGTQQLLFSQAGPANMSAQAKNWLPGPCYRQQRVSTTLSQNNNSNFAWTGATKYHLNGRDSLVNPGVAMATHKDDEERFFPSSGVLMFGKQGAGKDNVDYSSVMLTSEEEIKTTNPVATEQYGVVADNLQQTNGAPIVGTVNSQGALPGMVWQNRDVYLQGPIWAKIPHTDGNFHPSPLMGGFGLKHPPPQILVKNTPVPADPPTTFSQAKLASFITQYSTGQVSVEIEWELQKENSKRWNPEIQYTSNYYKSTNVDFAVNTEGTYSEPRPIGTRYLTRNL

SEQ ID NO: 4780 - DNA, 3122 bp, Adeno-associated virus
gaattcgccctttctacggctgcgtcaactggaccaatgagaactttcccttcaacgattgcgtcgacaagatggtgatctggtgggaggagggcaagatgacggccaaggtcgtggagtccgccaaggccattctcggcggcagcaaggtgcgtgtggaccaaaagtgcaagtcttccgcccagatcgatcccacccccgtgatcgtcacctccaacaccaacatgtgcgccgtgattgacgggaacagcgccaccttcgagcaccagcagccgttgcaggaccggatgttcaaatttgaactcacccgccgtctggagcatgactttggcaaggtgacgaagcaggaagtcaaagagttcttccgctgggcgcaggatcacgtgaccgaggtggcgcatgagttccacgtcagaaagggtggagccaacaagagacccgcccccgatgacgcggatataagcgagcccaagcgggcctgcccctcagtcgcggatccatcgacgtcagacgcggaaggagctccggtggactttgccgacaggtaccaaaacaaatgttctcgtcacgcgggcatgcttcagatgctgtttccctgcaagacatgcgagagaatgaatcagaatttcaacatttgcttcacgcacgggaccagagactgttcagaatgtttccccggcgtgtcagaatctcaaccggtcgtcagaaagaggacgtatcggaaactctgtgcgattcatcatctgctggggcgggctcccgagattgcttgctcggcctgcgatctggtcaacgtggacctggatgactgtgtttctgagcaataaatgacttaaaccaggtatggctgccgatggttatcttccagattggctcgaggacaacctctctgagggcattcgcgagtggtgggacttgaaacctggagccccgaaacccaaagccaaccagcaaaagcaggacgacggccggggtctggtgcttcctggctacaagtacctcggacccttcaacggactcgacaagggggagcccgtcaacgcggcggacgcagcggccctcgagcacgacaaagcctacgaccagcagctcaaagcgggtgacaatccgtacctgcggtataatcacgccgacgccgagtttcaggagcgtctgcaagaagatacgtcttttgggggcaacctcgggcgagcagtcttccaggccaagaagcgggttctcgaacctctcggtctggttgaggaaggcgctaagacggctcctggaaagaagagactggtagagcagtcgccacaagagccagactcctcctcgggcatcggcaagacaggccagcagcccgctaaaaagagactcaattttggtcagactggcgactcagagtcagtccccgacccacaacctctcggagaacctccagcagccccctcaggtctgggacctaatacaatggcttcaggcggtggcgctccaatggcagacaataacgaaggcgccgacggagtgggtaattcctcgggaaattggcattgcgattccacatggctgggggacagagtcatcaccaccagcacccgaacctgggccctgcccacctacaacaaccacctctacaagcaaatctccaacggcacctcgggaggaagcaccaacgacaacacctattttggctacagcaccccctgggggtattttgacttcaacagattccactgtcacttttcaccacgtgactggcaacgactcatcaacaacaattggggattccggcccaaaagactcaacttcaagctgttcaacatccaggtcaaggaagtcacgacgaacgaaggcaccaagaccatcgccaataatctcaccagcaccgtgcaggtctttacggactcggagtaccagttaccgtacgtgctaggatccgctcaccagggatgtctgcctccgttcccggcggacgtcttcacggttcctcagtacggctatttaactttaaacaatggaagccaagccctgggacgttcctccttctactgtctggagtatttcccatcgcagatgctgagaaccggcaacaactttcagttcagctacaccttcgaggacgtgcctttccacagcagctacgcgcacagccagagcctggacaggctgatgaatcccctcatcgaccagtacctgtactacctggtcagaacgcaaacgactggaactggagggacgcagactctggcattcagccaagcgggtcctagctcaatggccaaccaggctagaaattgggtgcccggaccttgctaccggcagcagcgcgtctccacgacaaccaaccagaacaacaacagcaactttgcctggacgggagctgccaagtttaagctgaacggccgagactctctaatgaatccgggcgtggcaatggcttcccacaaggatgacgacgaccgcttcttcccttcgagcggggtcctgatttttggcaagcaaggagccgggaacgatggagtggattacagccaagtgctgattacagatgaggaagaaatcaaggctaccaaccccgtggccacagaagaatatggagcagtggccatcaacaaccaggccgccaatacgcaggcgcagaccggactcgtgcacaaccagggggtgattcccggcatggtgtggcagaatagagacgtgtacctgcagggtcccatctgggccaaaattcctcacacggacggcaactttcacccgtctcccctgatgggcggctttggactgaagcacccgcctcctcaaattctcatcaagaacacaccggttccagcggacccgccgcttaccttcaaccaggccaagctgaactctttcatcacgcagtacagcaccggacaggtcagcgtggaaatcgagtgggagctgcagaaagaaaacagcaaacgctggaatccagagattcaatacacttccaactactacaaatctacaaatgtggactttgctgtcaacacggaaggagtttatagcgagcctcgccccattggcacccgttacctcacccgcaacctgtaattacatgttaatcaataaaccggttaattcgtttcagttgaactttggtctctgcgaagggcgaattc

SEQ ID NO: 4781 - protein, 736 aa, Adeno-associated virus
MAADGYLPDWLEDNLSEGIREWWDLKPGAPKPKANQQKQDDGRGLVLPGYKYLGPFNGLDKGEPVNAADAAALEHDKAYDQQLKAGDNPYLRYNHADAEFQERLQEDTSFGGNLGRAVFQAKKRVLEPLGLVEEGAKTAPGKKRLVEQSPQEPDSSSGIGKTGQQPAKKRLNFGQTGDSESVPDPQPLGEPPAAPSGLGPNTMASGGGAPMADNNEGADGVGNSSGNWHCDSTWLGDRVITTSTRTWALPTYNNHLYKQISNGTSGGSTNDNTYFGYSTPWGYFDFNRFHCHFSPRDWQRLINNNWGFRPKRLNFKLFNIQVKEVTTNEGTKTIANNLTSTVQVFTDSEYQLPYVLGSAHQGCLPPFPADVFTVPQYGYLTLNNGSQALGRSSFYCLEYFPSQMLRTGNNFQFSYTFEDVPFHSSYAHSQSLDRLMNPLIDQYLYYLVRTQTTGTGGTQTLAFSQAGPSSMANQARNWVPGPCYRQQRVSTTTNQNNNSNFAWTGAAKFKLNGRDSLMNPGVAMASHKDDDDRFFPSSGVLIFGKQGAGNDGVDYSQVLITDEEEIKATNPVATEEYGAVAINNQAANTQAQTGLVHNQGVIPGMVWQNRDVYLQGPIWAKIPHTDGNFHPSPLMGGFGLKHPPPQILIKNTPVPADPPLTFNQAKLNSFITQYSTGQVSVEIEWELQKENSKRWNPEIQYTSNYYKSTNVDFAVNTEGVYSEPRPIGTRYLTRNL

SEQ ID NO: 4782 - DNA, 3117 bp, Adeno-associated virus
gaattcgcccttggctgcgtcaactggaccaatgagaactttcccttcaacgattgcgtcgacaagatggtgatctggtgggaggagggcaagatgacggccaaggtcgtggagtccgccaaggccattctcggcggcagcaaggtgcgtgtggaccaaaagtgcaagtcttccgcccagatcgatcccacccccgtgatcgtcacctccaacaccaacatgtgcgccgtgattgacgggaacagcaccaccttcgagcaccagcagccgttgcaggaccggatgttcaaatttgaactcacccgccgtctggagcatgactttggcaaggtgacgaagcaggaagtcaaagagttcttccgctgggcgcaggatcacgtgaccgaggtggcgcatgagttccacgtcagaaagggtggagccaacaagagacccgcccccgatgacgcggatataagcgagcccaagcgggcctgcccctcagtcgcggatccatcgacgtcagacgcggaaggagctccggtggactttgccgacaggtaccaaaacaaatgttctcgtcacgcgggcatgcttcagatgctgtttccctgcaagacatgcgagagaatgaatcagaatttcaacatttgcttcacgcacgggaccagagactgttcagaatgtttccccggcgtgtcagaatctcaaccggtcgtcagaaagaggacgtatcggaaactctgtgcgattcatcatctgctggggcgggctcccgagattgcttgctcggcctgcgatctggtcaacgtggacctggatgactgtgtttctgagcaataaatgacttaaaccaggtatggctgccgatggttatcttccagattggctcgaggacaacctctctgagggcattcgcgagtggtgggacttgaaacctggagccccgaaacccaaagccaaccagcaaaagcaggacgacggccggggtctggtgcttcctggctacaagtacctcggacccttcaacggactcgacaagggggagcccgtcaacgcggcggacgcagcggccctcgagcacgacaaagcctacgaccagcagctcaaagcgggtgacaatccgtacctgcggtataatcacgccgacgccgagtttcaggagcgtctgcaagaagatacgtcttttgggggcaacctcgggcgagcagtcttccaggccaagaagcgggttctcgaacctctcggtctggttgaggaaggcgctaagacggctcctggaaagaagagaccggtagagcagtcgccacaagagccagactcctcctcgggcatcggcaagacaggccagcagcccgctaaaaagagactcaattttggtcagactggcgactcagagtcagtccccgacccacaacctctcggagaacctccagcagccccctcaggtctgggacctaatacaatggcttcaggcggtggcgctccaatggcagacaataacgaaggcgccgacggagtgggtaattcctcgggaaattggcattgcgattccacatggctgggggacagagtcatcaccaccagcacccgaacctgggccctgcccacctacaacaaccacctctacaagcaaatctccaacggcacctcgggaggaagcaccaacgacaacacctattttggctacagcaccccctgggggtattttgacttcaacagattccactgtcacttttcaccacgtgactggcaacgactcatcaacaacaattggggattccggcccaaaagactcaacttcaagctgttcaacatccaggtcaaggaagtcacgacgaacgaaggcaccaagaccatcgccaataatctcaccagcaccgtgcgggtctttacggactcggagtaccagttaccgtacgtgctaggatccgctcaccagggatgtctgcctccgttcccggcggacgtcttcatggttcctcagtacggctatttaactttaaacaatggaagccaagccctgggacgttcctccttctactgtctggagtatttcccatcgcagatgctgagaaccggcaacaactttcagttcagctacaccttcgaggacgtgcctttccacagcagctacgcgcacagccagagcctggacaggctgatgaatcccctcatcgaccagtacctgtactacctggtcagaacgcaaacgactggaactggagggacgcagactctggcattcagccaagcgggtcctagctcaatggccaaccaggctagaaattgggtgcccggaccttgctaccggcagcagcgcgtctccacgacaaccaaccagagcaacaacagcaactttgcctggacgggagctgccaagtttaagctgaacggccgagactctctaatgaatccgggcgtggcaatggcttcccacaaggatgacgacgaccgcttcttcccttcgagcggggtcctgatttttggcaagcaaggagccgggaacgatggagtggattacagccaagtgctgattacagatgaggaagaaatcaaggctaccaaccccgtggccacagaagaatatggagcagtggccatcaacaaccaggccgccaatacgcaggcgcagaccggactcgtgcacaaccagggggtgattcccggcatggtgtggcagaatagagacgtgtacctgcagggtcccatctgggccaaaattcctcacacggacggcaactttcacccgtctcccctgatgggcggctttggactgaagcacccgcctcctcaaattctcatcaagaacacaccggttccagcggacccgccgcttaccttcaaccaggccaagctgaactctttcatcacgcagtacagcaccggacaggtcagcgtggaaatcgagtgggagctgcagaaagaaaacagcaaacgctggaatccagagattcaatacacttccaactactacaaatctacaaatgtggactttgctgtcaacacggaaggagtttatagcgagcctcgccccattggcacccgttacctcacccgcaacctgtaattacatgttaatcaataaaccggttaattcgtttcagttgaactttggtctctgcgaagggcgaattc

SEQ ID NO: 4783 - protein, 736 aa, Adeno-associated virus
MAADGYLPDWLEDNLSEGIREWWDLKPGAPKPKANQQKQDDGRGLVLPGYKYLGPFNGLDKGEPVNAADAAALEHDKAYDQQLKAGDNPYLRYNHADAEFQERLQEDTSFGGNLGRAVFQAKKRVLEPLGLVEEGAKTAPGKKRPVEQSPQEPDSSSGIGKTGQQPAKKRLNFGQTGDSESVPDPQPLGEPPAAPSGLGPNTMASGGGAPMADNNEGADGVGNSSGNWHCDSTWLGDRVITTSTRTWALPTYNNHLYKQISNGTSGGSTNDNTYFGYSTPWGYFDFNRFHCHFSPRDWQRLINNNWGFRPKRLNFKLFNIQVKEVTTNEGTKTIANNLTSTVRVFTDSEYQLPYVLGSAHQGCLPPFPADVFMVPQYGYLTLNNGSQALGRSSFYCLEYFPSQMLRTGNNFQFSYTFEDVPFHSSYAHSQSLDRLMNPLIDQYLYYLVRTQTTGTGGTQTLAFSQAGPSSMANQARNWVPGPCYRQQRVSTTTNQSNNSNFAWTGAAKFKLNGRDSLMNPGVAMASHKDDDDRFFPSSGVLIFGKQGAGNDGVDYSQVLITDEEEIKATNPVATEEYGAVAINNQAANTQAQTGLVHNQGVIPGMVWQNRDVYLQGPIWAKIPHTDGNFHPSPLMGGFGLKHPPPQILIKNTPVPADPPLTFNQAKLNSFITQYSTGQVSVEIEWELQKENSKRWNPEIQYTSNYYKSTNVDFAVNTEGVYSEPRPIGTRYLTRNL

SEQ ID NO: 4784 - DNA, 3121 bp, Adeno-associated virus
gaattcgcccttctacggctgcgtcaactggaccaatgagaactttcccttcaacgattgcgtcgacaagatggtgatctggtgggaggagggcaagatgacggccaaggtcgtggagtccgccaaggccattctcggcggcagcaaggtgcgtgtggaccaaaagtgcaagtcttccgcccagatcgatcccacccccgtgatcgtcacctccaacaccaacatgtgcgccgtgattgacgggaacagcaccaccttcgagcaccagcagccgttgcaggaccggatgttcaaatttgaactcacccgccgtctggagcatgactttggcaaggtgacgaagcaggaagtcaaagagttcttccgctgggcgcaggatcacgtgaccgaggtggcgcatgagttccacgtcagaaagggtggcgccaacaagagacccgcccccgatgacgcggatataagcgagcccaagcgggcctgcccctcagtcgcggatccatcgacgtcagacgcggaaggagctccggtggactttgccgacaggtaccaaaacaaatgttctcgtcacgcgggcatgcttcagatgctgtttccctgcaagacatgcgagagaatgaatcagaatttcaacatttgcttcacgcacgggaccagagactgttcagaatgtttccccggcgtgtcagaatctcaaccggtcgtcagaaagaggacgtatcggaaactctgtgcgattcatcatctgctggggcgggctcccgagattgcttgctcggcctgcgatctggtcaacgtggacctggatgactgtgtttctgagcaataaatgacttaaaccaggtatggctgccgatggttatcttccagattggctcgaggacaacctctctgagggcattcgcgagtggtgggacttgaaacctggagccccgaaacccaaagccaaccagcaaaagcaggacgacggccggggtctggtgcttcctggctacaagtacctcggacccttcaacggactcgacaagggggagcccgtcaacgcggcggacgcagcggccctcgagcacgacaaagcctacgaccagcagctcaaagcgggtgacaatccgtacctgcggtataatcacgccgacgccgagtttcaggagcgtctgcaagaagatacgtcctttgggggcaacctcgggcgagcagtcttccaggccaagaagcgggttctcgaacctctcggtctggttgaggaaggcgctaagacggctcctggaaagaagagaccggtagagcagtcgccacaagagccagactcctcctcgggcatcggcaagacaggccagcagcccgctaaaaagagactcaattttggtcagactggcgactcagagtcagtccccgacccacaacctctcggagaacctccagcagccccctcaggtctgggacctaatacaatggcttcaggcggtggcgctccaatggcagacaataacgaaggcgccgacggagtgggtaattcctcgggaaattggcattgcgattccacatggctgggggacagagtcatcaccaccagcacccgaacctgggccctgcccacctacaacaaccacctctacaagcaaatctccaacggcacctcgggaggaagcaccaacgacaacacctattttggctacagcaccccctgggggtattttgacttcaacagattccactgtcacttttcaccacgtgactggcaacgactcatcaacaacaattggggattccggcccaaaagactcaacttcaagctgttcaacatccaggtcaaggaagtcacgacgaacgaaggcaccaagaccatcgccaataatctcaccagcaccgtgcaggtctttacggacttggagtaccagttaccgtacgtgctaggatccgctcaccagggatgtctgcctccgttcccggcggacgtcttcatggttcctcagtacggctatttaactttaaacaatggaagccaagccctgggacgttcctccttctactgtctggagtatttcccatcgcagatgccgagaaccggcaacaactttcagttcagctacaccttcgaggacgtgcctttccacagcagctacgcgcacagccagagcctggacaggctgatgaatcccctcatcgaccagtacctgtactacctggtcagaacgcaaacgactggaactggagggacgcagactctggcattcagccaagcgggtcctagctcaatggccaaccaggctagaaattgggtgcccggaccttgctaccggcagcagcgcgtctccacgacaaccaaccagaacaacaacagcaactttgcctggacgggagctgccaagtttaagctgaacggccgagactctctaatgaatccgggcgtggcaatggcttcccacaaggatgacgacgaccgcttcttcccttcgagcggggtcctgatttttggcaagcaaggagccgggaacgatggagtggattacagccaagtgctgattacagatgaggaagaaatcaaggctaccaaccccgtggccacagaagaatatggagcagtggccatcaacaaccaggccgccaatacgcaggcgcagaccggactcgtgcacaaccagggggtgattcccggcatggtgtggcagaatagagacgtgtacctgcagggtcccatctgggccaaaattcctcacacggacggcaactttcacccgtctcccctgatgggcggctttggactgaagcacccgcctcctcaaattctcatcaagaacacaccggttccagcggacccgccgcttaccttcaaccaggccaagctgaactctttcatcacgcagtacagcaccggacaggtcagcgtggaaatcgagtgggagctgcagaaagaaaacagcaaacgctggaatccagagattcaatacacttccaactactacaaatctacaaatgtggactttgctgtcaacacggaaggagtttatagcgagcctcgccccattggcacccgttacctcacccgcaacctgtaattacatgttaatcaataaaccggttaattcgtttcagttgaactttggtctctgcgaagggcgaattc

SEQ ID NO: 4785 - protein, 736 aa, Adeno-associated virus
MAADGYLPDWLEDNLSEGIREWWDLKPGAPKPKANQQKQDDGRGLVLPGYKYLGPFNGLDKGEPVNAADAAALEHDKAYDQQLKAGDNPYLRYNHADAEFQERLQEDTSFGGNLGRAVFQAKKRVLEPLGLVEEGAKTAPGKKRPVEQSPQEPDSSSGIGKTGQQPAKKRLNFGQTGDSESVPDPQPLGEPPAAPSGLGPNTMASGGGAPMADNNEGADGVGNSSGNWHCDSTWLGDRVITTSTRTWALPTYNNHLYKQISNGTSGGSTNDNTYFGYSTPWGYFDFNRFHCHFSPRDWQRLINNNWGFRPKRLNFKLFNIQVKEVTTNEGTKTIANNLTSTVQVFTDLEYQLPYVLGSAHQGCLPPFPADVFMVPQYGYLTLNNGSQALGRSSFYCLEYFPSQMPRTGNNFQFSYTFEDVPFHSSYAHSQSLDRLMNPLIDQYLYYLVRTQTTGTGGTQTLAFSQAGPSSMANQARNWVPGPCYRQQRVSTTTNQNNNSNFAWTGAAKFKLNGRDSLMNPGVAMASHKDDDDRFFPSSGVLIFGKQGAGNDGVDYSQVLITDEEEIKATNPVATEEYGAVAINNQAANTQAQTGLVHNQGVIPGMVWQNRDVYLQGPIWAKIPHTDGNFHPSPLMGGFGLKHPPPQILIKNTPVPADPPLTFNQAKLNSFITQYSTGQVSVEIEWELQKENSKRWNPEIQYTSNYYKSTNVDFAVNTEGVYSEPRPIGTRYLTRNL

SEQ ID NO: 4786 - DNA, 3122 bp, Adeno-associated virus
gaattcgccctttctacggctgcgtcaactggaccaatgagaactttcccttcaacgattgcgtcgacaagatggtgatctggtgggaggagggcaagatgacggccaaggtcgtggagtccgccaaggccattctcggcggcagcaaggtgcgtgtggaccaaaagtgcaagtcttccgcccagatcgatcccacccccgtgatcgtcacctccaacaccaacatgtgcgccgtgattgacgggaacagcaccaccttcgagcaccagcagccgttgcaggaccggatgttcaaatttgaactcacccgccgtctggagcatgactttggcaaggtgacgaagcaggaagtcaaagggttcttccgctgggcgcaggatcacgtgaccgaggtggcgcatgagttccacgtgcgagcccaagcgggcctgcccctcagtcgcggatccatcgacgtcagaccagaaagggtggagccaacaagagacccgcccccgatgacgcggatataagcggaaggagctccggtggactttgccgacaggtaccaaaacaaatgttctcgtcacgcgggcatgcttcagatgctgtttccctgcaagacatgcgagagaatgaatcagaatttcaacatttgcttcacgcacgggaccagagactgttcagaatgtttccccggcgtgtcagaatctcaaccggtcgtcagaaagaggacgtatcggaaactctgtgcgattcatcatctgctggggcgggctcccgagattgcttgctcggcctgcgatctggtcaacgtggacctggatgactgtgtttctgagcaataaatgacttaaaccaggtatggctgccgatggttatcttccagattggctcgaggacaacctctctgagggcattcgcgagtggtgggacttgaaacctggagccccgaaacccaaagccaaccagcaaaagcaggacgacggccggggtctggtgcttcctggctacaagtacctcggacccttcaacggactcgacaagggggagcccgtcaacgcggcggacgcagcggccctcgagcacgacaaagcctacgaccagcagctcaaagcgggtgacaatccgtacctgcggtataatcacgccgacgccgagtttcaggagcgtctgcaagaagatacgtcttttgggggcaacctcgggcgagcagtcttccaggccaagaagcgggttctcgaacctctcggtctggttgaggaaggcgctaagacggctcctggaaagaagagaccggtagagcagtcgccacaagagccagactcctcctcgggcatcggcaagacaggccagcagcccgctaaaaagagactcaattttggtcagactggcgactcagagtcagtccccgacccacaacctctcggagaacctccagcagccccctcaggtctgggacctaatacaatggcttcaggcggtggcgctccaatggcagacaataacgaaggcgccgacggagtgggtaattcctcgggaaattggcattgcgattccacatggctgggggacagagtcatcaccaccagcacccgaacctgggccctgcccacctacaacaaccacctctacaagcaaatctccaacggcacctcgggaggaagcaccaacgacaacacctattttggctacagcaccccctgggggtattttgacttcaacagattccactgtcacttttcaccacgtgactggcaacgactcatcaacaacaattggggattccggcccaaaagactcaacttcaagctgttcaacatccaggtcaaggaagtcacgacgaacgaaggcaccaagaccatcgccaataatctcaccagcaccgtgcaggtctttacggactcggagtaccagttaccgtacgtgctaggatccgctcaccagggatgtctgcctccgttcccggcggacgtcttcatggttcctcagtacggctatttaactttaaacaatggaagccaagccctgggacgttcctccttctactgtctggagtatttcccatcgcagatgctgagaaccggcaacaactttcagttcagctacaccttcgaggacgtgcctttccacagcagctacgcgcacagccagagcctggacaggctgatgaatcccctcatcgaccagtacctgtactacctggtcagaacgcaaacgactggaactggagggacgcagactctggcattcagccaagcgggtcctagctcaatggccaaccaggctagaaattgggtgcccggaccttgctaccggcagcagcgcgtctccacgacaaccaaccagaacaacaacagcaactttgcctggacgggagctgccaagtttaagctgaacggccgagactctctaatgaatccgggcgtggcaatggcttcccacaaggatgacgacgaccgcttcttcccttcgagcggggtcctgatttttggcaagcaaggagccgggaacgatggagtggattacagccaagtgctgattacagatgaggaagaaatcaaggctaccaaccccgtggccacagaagaatatggagcagtggccatcaacaaccaggccgccaatacgcaggcgcagaccggactcgtgcacaaccagggggtgattcccggcatggtgtggcagaatagagacgtgtacctgcagggtcccatctgggccaaaattcctcacacggacggcaactttcacccgtctcccctgatgggcggctttggactgaagcacccgcctcctcaaattctcatcaagaacacaccggttccagcggacccgccgcttaccttcaaccaggccaagctgaactctttcatcacgcagtacagcaccggacaggtcagcgtggaaatcgagtgggagctgcagaaagaaaacagcaaacgctggaatccagagattcaatacacttccaactactacaaatctacaaatgtggactttgctgtcaacacggagggggtttatagcgagcctcgccccattggcacccgttacctcacccgcaacctgtaattacatgttaatcaataaaccggttaattcgtttcagttgaactttggtctctgcgaagggcgaattc

SEQ ID NO: 4787 - protein, 736 aa, Adeno-associated virus
MAADGYLPDWLEDNLSEGIREWWDLKPGAPKPKANQQKQDDGRGLVLPGYKYLGPFNGLDKGEPVNAADAAALEHDKAYDQQLKAGDNPYLRYNHADAEFQERLQEDTSFGGNLGRAVFQAKKRVLEPLGLVEEGAKTAPGKKRPVEQSPQEPDSSSGIGKTGQQPAKKRLNFGQTGDSESVPDPQPLGEPPAAPSGLGPNTMASGGGAPMADNNEGADGVGNSSGNWHCDSTWLGDRVITTSTRTWALPTYNNHLYKQISNGTSGGSTNDNTYFGYSTPWGYFDFNRFHCHFSPRDWQRLINNNWGFRPKRLNFKLFNIQVKEVTTNEGTKTIANNLTSTVQVFTDSEYQLPYVLGSAHQGCLPPFPADVFMVPQYGYLTLNNGSQALGRSSFYCLEYFPSQMLRTGNNFQFSYTFEDVPFHSSYAHSQSLDRLMNPLIDQYLYYLVRTQTTGTGGTQTLAFSQAGPSSMANQARNWVPGPCYRQQRVSTTTNQNNNSNFAWTGAAKFKLNGRDSLMNPGVAMASHKDDDDRFFPSSGVLIFGKQGAGNDGVDYSQVLITDEEEIKATNPVATEEYGAVAINNQAANTQAQTGLVHNQGVIPGMVWQNRDVYLQGPIWAKIPHTDGNFHPSPLMGGFGLKHPPPQILIKNTPVPADPPLTFNQAKLNSFITQYSTGQVSVEIEWELQKENSKRWNPEIQYTSNYYKSTNVDFAVNTEGVYSEPRPIGTRYLTRNL

SEQ ID NO: 4788 - DNA, 2370 bp, Adeno-associated virus
gaattcgccctttctacggctgcgtcaactggaccaatgagaactttcccttcaacgattgcgtcgacaagatggtgatctggtgggaggagggcaagatgacggccaaggtcgtggagtccgccaaggccattctcggcggcagcaaggtgcgcgtggaccaaaagtgcaagtcgtccgcccagatcgaccccacccccgtgatcgtcacctccaacaccaacatgtgcgccgtgattgacgggaacagcaccaccttcgagcaccagcagccgttgcaggaccggatgttcaagttcgaactcacccgccgtctggagcacgactttggcaaggtgaccaagcaggaagtcaaagagttcttccgctgggcgcaggatcacgtgaccgaggtggcgcatgagttctacgtcagaaagggcggagccagcaaaagacccgcccccgatgacgcggatataagcgagcccaagcgggcctgcccctcagtcgcggatccatcgacgtcagacgcggaaggagctccggtggactttgccgacaggtaccaaaacaaatgttctcgtcacgcgggcatgcttcagacgctgtttccctgcaaaacgtgcgagagaatgaatcagaatttcaacatttgcttcacgcacggggtcagagactgctcagaatgtttccccggtgcatcagaatctcaaccggtcgtcagaaaaaaaacgtatcagaaactgtgtgccattcatcatctgctggggcgggcacccgagattgcttgctcggcctgcgatctggtcaacgtggacctggacgactgtgtttctgagcaataaatgacttaaaccaggtatggctgccgatggttatcttccagattggcttgaggacaacctctctgagggcattcgcgagtggtgggacctgaaacctggagccccgaaacccaaagccaaccagcaaaagcaggacgacggccggggtctggtgcttcctggctacaagtacctcggacccttcaacggactcgacaagggggagcccgtcaacgcggcggacgcagcggccctcgagcacgacaaggcctacgaccagcagctcaaagcgggtgacaatccgtacctgcggtataaccacgccgacgccgagtttcaggagcgtctgcaagaagatacgtcttttgggggcaacctcgggcgagcagtcttccaggccaagaagcgggttctcgaacctctcggtctggttgaggaaggcgctaagacggctcctggaaagaagagaccggtagagccatcacctcagcgttcccccgactcctccacgggcatcggcaagaaaggccaccagcccgcgagaaagagactgaactttgggcagactggcgactcggagtcagtccccgaccctcaaccaatcggagaaccaccagcaggcccctctggtctgggatctggtacaatggctgcaggcggtggcgctccaatggcagacaataacgaaggcgccgacggagtgggtagttcctcaggaaattggcattgcgattccacatggctgggcgacagagtcatcaccaccagcacccgaacctgggccctgcccacctacaacaaccatctctacaagcaaatctccaacgggacatcgggaggaagcactaacgacaacacctactttggctacagcaccccctgggggtattttgacttcaacagattccactgccacttctcaccacgtgactggcagcgactcatcaacaataactggggattccggcccaagagactcaacttcaagctcttcaacatccaggtcaaggaggtcacgcagaatgaaggcaccaagaccatcgccaataaccttaccagcacgattcaggtgtttacggactcggaataccagctcccgtacgtcctcggctctgcgcaccagggctgcctccctccgttcccggcggacgtcttcatgattcctcagtacgggtatctgaccctaaacaatggcagtcaggctgtgggccgttcctccttctactgcctggaatacttcccttctcaaatgctgaggacgggcaacaactttgaattcagctacaccttcgaggacgtgcctttccacagcagctacgcgcacagccagagcctggaccggctgatgaaccctctcatcgaccagtacctgtattacttatccagaactcagtccacaggaggaactcaaggtactcagcaattgttattttctcaagccgggcccgcaaacatgtyggctcaggccaagaactggctacctggaccgtgttaccgtcagcaacgagtttccacgacactgtcgcaaaacaacaacagcaattttgctggaccggtgccacca

SEQ ID NO: 4789 - protein, 738 aa, Adeno-associated virus; identical to SEQ ID NO: 4779

SEQ ID NO: 4790 - DNA, 2205 bp, Adeno-associated virus
atgactgacggttaccttccagattggctagaggacaacctctctgaaggcgttcgagagtggtgggcgctgcaacctggagcccctaaacccaaggcaaatcaacaacatcaggacaacgctcggggtcttgtgcttccgggttacaaatacctcggacccggcaacggactcgacaagggggaacccgtcaacgcagcggacgcggcagccctcgagcacgacaaggcctacgaccagcagctcaaggccggtgacaacccctacctcaagtacaaccacgccgacgcggagttccagcagcggcttcagggcgacacatcgtttgggggcaacctcggcagagcagtcttccaggccaaaaagagggttcttgaacctcttggtctggttgagcaagcgggtgagacggctcctggaaagaagagaccgttgattgaatccccccagcagcccgactcctccacgggtatcggcaaaaaaggcaagcagccggctaaaaagaagctcgttttcgaagacgaaactggagcaggcgacggaccccctgagggatcaacttccggagccatgtctgatgacagtgagatgcgtgcagcagctggcggagctgcagtcgagggcggacaaggtgccgatggagtgggtaatgcctcgggtgattggcattgcgattccacctggtctgagggccacgtcacgaccaccagcaccagaacctgggtcttgcccacctacaacaaccacctctacaagcgactcggagagagcctgcagtccaacacctacaacggattctccaccccctggggatactttgacttcaaccgcttccactgccacttctcaccacgtgactggcagcgactcatcaacaacaactggggcatgcgacccaaagccatgcgggtcaaaatcttcaacatccaggtcaaggaggtcacgacgtcgaacggcgagacaacggtggctaataaccttaccagcacggttcagatctttgcggactcgtcgtacgaactgccgtacgtgatggatgcgggtcaagagggcagcctgcctccttttcccaacgacgtctttatggtgccccagtacggctactgtggactggtgaccggcaacacttcgcagcaacagactgacagaaatgccttctactgcctggagtactttccttcgcagatgctgcggactggcaacaactttgaaattacgtacagttttgagaaggtgcctttccactcgatgtacgcgcacagccagagcctggaccggctgatgaaccctctcatcgaccagtacctgtggggactgcaatcgaccaccaccggaaccaccctgaatgccgggactgccaccaccaactttaccaagctgcggcctaccaacttttccaactttaaaaagaactggctgcccgggccttcaatcaagcagcagggcttctcaaagactgccaatcaaaactacaagatccctgccaccgggtcagacagtctcatcaaatacgagacgcacagcactctggacggaagatggagtgccctgacccccggacctccaatggccacggctggacctgcggacagcaagttcagcaacagccagctcatctttgcggggcctaaacagaacggcaacacggccaccgtacccgggactctgatcttcacctctgaggaggagctggcagccaccaacgccaccgatacggacatgtggggcaacctacctggcggtgaccagagcaacagcaacctgccgaccgtggacagactgacagccttgggagccgtgcctggaatggtctggcaaaacagagacatttactaccagggtcccatttgggccaagattcctcataccgatggacactttcacccctcaccgctgattggtgggtttgggctgaaacacccgcctcctcaaatttttatcaagaacaccccggtacctgcgaatcctgcaacgaccttcagctctactccggtaaactccttcattactcagtacagcactggccaggtgtcggtgcagattgactgggagatccagaaggagcggtccaaacgctggaaccccgaggtccagtttacctccaactacggacagcaaaactctctgttgtgggctcccgatgcggctgggaaatacactgagcctagggctatcggtacccgctacctcacccaccacctgtaa

SEQ ID NO: 4791 - protein, 734 aa, Adeno-associated virus
MTDGYLPDWLEDNLSEGVREWWALQPGAPKPKANQQHQDNARGLVLPGYKYLGPGNGLDKGEPVNAADAAALEHDKAYDQQLKAGDNPYLKYNHADAEFQQRLQGDTSFGGNLGRAVFQAKKRVLEPLGLVEQAGETAPGKKRPLIESPQQPDSSTGIGKKGKQPAKKKLVFEDETGAGDGPPEGSTSGAMSDDSEMRAAAGGAAVEGGQGADGVGNASGDWHCDSTWSEGHVTTTSTRTWVLPTYNNHLYKRLGESLQSNTYNGFSTPWGYFDFNRFHCHFSPRDWQRLINNNWGMRPKAMRVKIFNIQVKEVTTSNGETTVANNLTSTVQIFADSSYELPYVMDAGQEGSLPPFPNDVFMVPQYGYCGLVTGNTSQQQTDRNAFYCLEYFPSQMLRTGNNFEITYSFEKVPFHSMYAHSQSLDRLMNPLIDQYLWGLQSTTTGTTLNAGTATTNFTKLRPTNFSNFKKNWLPGPSIKQQGFSKTANQNYKIPATGSDSLIKYETHSTLDGRWSALTPGPPMATAGPADSKFSNSQLIFAGPKQNGNTATVPGTLIFTSEEELAATNATDTDMWGNLPGGDQSNSNLPTVDRLTALGAVPGMVWQNRDIYYQGPIWAKIPHTDGHFHPSPLIGGFGLKHPPPQIFIKNTPVPANPATTFSSTPVNSFITQYSTGQVSVQIDWEIQKERSKRWNPEVQFTSNYGQQNSLLWAPDAAGKYTEPRAIGTRYLTHHL

SEQ ID NO: 4792 - DNA, 3128 bp, Adeno-associated virus
gaattcgccctttctacggctgcgtcaactggaccaatgagaactttcccttcaacgattgcgtcgacaagatgttgatctggtgggaggagggcaagatgacggccaaggtcgtggagtccgccaaggccattctcggcggcagcaaagtgcgcgtggaccaaaagtgcaagccgtccgcccagatcgaccccacccccgtgatcgtcacctccaacaccaacatgtgcgccgtgattgacgggaacagcaccaccttcgagcaccagcagccgttgcgggaccggatgttcaagtttgaactcacccgccgtctggagcacgactttggcaaggtgacaaagcaggaagtcagagagttcttccgctgggcgcaggatcacgtgaccgaggtggcgcacgagttctacgtcagaaagggtggagccaacaagagacccgcccccgatgacgcggataaaagcgagcccaagcgggcctgcccctcagtcgcggatccatcgacgtcagacgcggaaggagctccggtggactttgccgacaggtaccaaaacaaatgttctcgtcacgcgggcatgcttcagatgctgtttccctgcaaaacatgcgagagaatgaatcagaatttcaacatttgcttcacgcacgggaccagagactgttcagaatgtttccccggcgtgtcagaatctcaaccggtcgtcagaaaaaagacgtatcggaaactctgtgcgattcatcatctgctggggcgggcacccgagattgcttgctcggcctgcgatctggtcaacgtggacctagatgactgtgtttctgagcaataaatgacttaaaccaggtatggctgccgatggttatcttccagattggctcgaggacaacctctctgagggcattcgcgagtggtgggacttgaaacctggagccccgaaacccaaagccaaccagcaaaagcaggacgacggccggggtctggtgcttcctggctacaagtacctcggacccttcaacggactcgacaagggggagcccgtcaacgcggcggacgcagcggccctcgagcacgacaaggcctacgaccagcagctcaaagcgggtgacaatccgtacctgcggtataaccacgccgacgccgagtttcaggagcgtctgcaagaagatacgtcttttgggggcaacctcgggcgagcagtcttccaggccaagaagcgggttctcgaacctctcggtctggttgaggaaggcgctaagacggctcctggaaagaagagaccggtagagccatcaccccagcgttctccagactcctctacgggcatcggcaagaaaggccagcagcccgcgaaaaagagactcaactttgggcagactggcgactcagagtcagtgcccgaccctcaaccaatcggagaaccccccgcaggcccctctggtctgggatctggtacaatggctgcaggcggtggcgctccaatggcagacaataacgaaggcgccgacggagtgggtagttcctcaggaaattggcattgcgattccacatggctgggcgacagagtcatcaccaccagcacccgaacctgggccctccccacctacaacaaccacctctacaagcaaatctccaacgggacttcgggaggaagcaccaacgacaacacctacttcggctacagcaccccctgggggtattttgactttaacagattccactgccacttctcaccacgtgactggcagcgactcatcaacaacaactggggattccggcccaagagactcaacttcaagctcttcaacatccaggtcaaggaggtcacgcagaatgaaggcaccaagaccatcgccaataaccttaccagcacgattcaggtctttacggactcggaataccagctcccgtacgtcctcggctctgcgcaccagggctgcctgcctccgttcccggcggacgtcttcatgattcctcagtacgggtacctgactctgaacaatggcagtcaggccgtgggccgttcctccttctactgcctggagtactttccttctcaaatgctgagaacgggcaacaactttgagttcagctaccagtttgaggacgtgccttttcacagcagctacgcgcacagccaaagcctggaccggctgatgaaccccctcatcgaccagtacctgtactacctgtctcggactcagtccacgggaggtaccgcaggaactcagcagttgctattttctcaggccgggcctaataacatgtcggctcaggccaaaaactggctacccgggccctgctaccggcagcaacgcgtctccacgacactgtcgcaaaataacaacagcaactgtaaatcccggtgtcgctatggcaacccacaaggacgacgaagagcgattttgcctggaccggtgccaccaagtatcatctgaatggcagagactctctgttttccgtccagcggagtcttaatgtttgggaaacagggagctggaaaagacaacgtggactatagcagcgttatgctaaccagtgaggaagaaattaaaaccaccaacccagtggccacggaacagtacggcgtggtggccgataacctgcaacagcaaaacgccgctcctattgtaggggccgtcaacagtcaaggagccttacctggcatggtctggcagaaccgggacgtgtacctgcagggtcctatctgggccaagattcctcacacggacggaaactttcatccctcgccgctgatgggaggctttggactgaaacacccgcctcctcagatcctgattaagaatacacctgttcccgcggatcctccaactaccttcagtcaagctaagctggcgtcgttcatcacgcagtacagcaccggacaggtcagcgtggaaattgaatgggagctgcagaaagaaaacagcaaacgctggaacccagagattcaatacacttccaactactacaaatctacaaatgtggacttcgctgttaacacagatggcacttattctgagcctcgccccattggcacccgttacctcacccgtaatctgtaattgctcgttaatcaataaaccggttgattcgtttcagttgaactttggtctctgcgaagggcgaattc

SEQ ID NO: 4793 - protein, 738 aa, Adeno-associated virus
MAADGYLPDWLEDNLSEGIREWWDLKPGAPKPKANQQKQDDGRGLVLPGYKYLGPFNGLDKGEPVNAADAAALEHDKAYDQQLKAGDNPYLRYNHADAEFQERLQEDTSFGGNLGRAVFQAKKRVLEPLGLVEEGAKTAPGKKRPVEPSPQRSPDSSTGIGKKGQQPAKKRLNFGQTGDSESVPDPQPIGEPPAGPSGLGSGTMAAGGGAPMADNNEGADGVGSSSGNWHCDSTWLGDRVITTSTRTWALPTYNNHLYKQISNGTSGGSTNDNTYFGYSTPWGYFDFNRFHCHFSPRDWQRLINNNWGFRPKRLNFKLFNIQVKEVTQNEGTKTIANNLTSTIQVFTDSEYQLPYVLGSAHQGCLPPFPADVFMIPQYGYLTLNNGSQAVGRSSFYCLEYFPSQMLRTGNNFEFSYQFEDVPFHSSYAHSQSLDRLMNPLIDQYLYYLSRTQSTGGTAGTQQLLFSQAGPNNMSAQAKNWLPGPCYRQQRVSTTLSQNNNSNFAWTGATKYHLNGRDSLVNPGVAMATHKDDEERFFPSSGVLMFGKQGAGKDNVDYSSVMLTSEEEIKTTNPVATEQYGVVADNLQQQNAAPIVGAVNSQGALPGMVWQNRDVYLQGPIWAKIPHTDGNFHPSPLMGGFGLKHPPPQILIKNTPVPADPPTTFSQAKLASFITQYSTGQVSVEIEWELQKENSKRWNPEIQYTSNYYKSTNVDFAVNTDGTYSEPRPIGTRYLTRNL

SEQ ID NO: 4794 - DNA, 3129 bp, Adeno-associated virus
gaattcgccctttctacggctgcgtcaactggaccaatgagaactttcccttcaacgattgcgtcgacaagatggtgatctggtgggaggagggcaagatgacggccaaggtcgtggagtccgccaaggccattctcggcggcagcaaagtgcgcgtggaccaaaagtgcaagtcgtccgcccagatcgaccccacccccgtgatcgtcacctccaacaccaacatgtgcgccgtgattgacgggaacagcaccaccttcgagcaccagcagccgttgcaggaccggatgttcaagtttgaactcacccgccgtctggagcacgactttggcaaggtgacaaagcaggaagtcagagagttcttccgctgggcgcaggatcacgtgaccgaggtggcgcacgagttctacgtcagaaagggtggagccaacaagagacccgcccccgatgacgcggataaaagcgagcccaagcgggcctgcccctcagtcgcggatccatcgacgtcagacgcggaaggagctccggtggactttgccgacaggtaccaaaacaaatgttctcgtcacgcgggcatgcttcagatgctgtttccctgcaaaacatgcgagagaatgaatcagaatttcaacatttgcttcacgcacgggaccagagactgttcagaatgtttccccggcgtgtcagaatctcaaccggtcgtcagaaaaaagacgtatcggaaactctgtgcgattcatcatctgctgggggcgggcacccgagattgcttgctcggcctgcgatctggtcaacgtggacctagatgactgtgtttctgagcaataaatgacttaaaccaggtatggctgccgatggttatcttccagattggctcgaggacaacctctctgagggcattcgcgagtggtgggacttgaaacctggagccccgaaacccaaagccaaccagcaaaagcaggacgacggccggggtctggtgcttcctggctacaagtacctcggacccttcaacggactcgacaagggggagcccgtcaacgcggcggacgcagcggccctcgagcacgacaaggcctacgaccagcagctcaaagcgggtgacaatccgtacctgcggtataaccacgccgacgccgagtttcaggagcgtctgcaagaagatacgtcttttgggggcaacctcgggcgagcagtcttccaggccaagaagcgggttctcgaacctctcggtctggttgaggaaggcgctaagacggctcctggaaagaagagaccggtagagccatcaccccagcgttctccagactcctctacgggcatcggcaagaaaggccagcagcccgcgaaaaagagactcaactttgggcagactggcgactcagagtcagtgcccgaccctcaaccaatcggagaaccccccgcaggcccctctggtctgggatctggtacaatggctgcaggcggtggcgctccaatggcagacaataacgaaggcgccgacggagtgggtagttcctcaggaaattggcattgcgattccacatggctgggcgacagagtcatcaccaccagcacccgaacctgggccctccccacctacaacaaccacctctacaagcaaatctccaacgggacttcgggaggaagcaccaacgacaacacctacttcggctacagcaccccctgggggtattttgactttaacagattccactgccacttctcaccacgtgactggcagcgactcatcaacaacaactggggattccggcccaagagactcaacttcaagctcttcaacatccaggtcaaggaggtcacgcagaatgaaggcaccaagaccatcgccaataaccttaccagcacgattcaggtctttacggactcggaataccagctcccgtacgtcctcggctctgcgcaccagggctgcctgcctccgttcccggcggacgtcttcatgattcctcagtacgggtacctgactctgaacaatggcagtcaggccgtgggccgttcctccttctactgcctggagtactttccttctcaaatgctgagaacgggcaacaactttgagttcagctaccagtttgaggacgtgccttttcacagcagctacgcgcacagccaaagcctggaccggctgatgaaccccctcatcgaccagtacctgtactacctgtctcggactcagtccacgggaggtaccgcaggaactcagcagttgctattttctcaggccgggcctaataacatgtcggctcaggccaaaaactggctacccgggccctgctaccggcagcaacgcgtctccacgacactgtcgcaaaataacaacagcaactttgcctggaccggtgccaccaagtatcatctgaatggcagagactctctggtaaatcccggtgtcgctatggcaacccacaaggacgacgaagagcgattttttccgtccagcggagtcttaatgtttgggaaacagggagctggaaaagacaacgtggactatagcagcgttatgctaaccagtgaggaagaaattaaaaccaccaacccagtggccacagaacagtacggcgtggtggccgataacctgcaacagcaaaacgccgctcctattgtaggggccgtcaacagtcaaggagccttacctggcatggtctggcagaaccgggacgtgtacctgcagggtcctatctgggccaagattcctcacacggacggaaactttcatccctcgccgctgatgggaggctttggactgaaacacccgcctcctcagatcctgattaagaatacacctgttcccgcggatcctccaactaccttcagtcaagctaagctggcgtcgttcatcacgcagtacagcaccggacaggtcagcgtggaaattgaatgggagctgcagaaagaaaacagcaaacgctggaacccagagattcaatacacttccaactactacaaatctacaaatgtggactttgctgttaacacagatggcacttattctgagcctcgccccatcggcacccgttacctcacccgtaatctgtaattgcttgttaatcaataaaccggttgattcgtttcagttgaactttggtctctgcgaagggcgaattc

SEQ ID NO: 4795 - DNA, 3128 bp, Adeno-associated virus
gaattcgccctttctacggctgcgtcaactggaccaatgagaactttcccttcaacgattgcgtcgacaagatggtgatctggtgggaggagggcaagatgacggccaaggtcgtggagtccgccaaggccattctcggcggcagcaaagtgcgcgtggaccaaaagtgcaagtcgtccgcccagatcgaccccacccccgtgatcgtcacctccaacaccaacatgtgcgccgtgattgacgggaacagcaccaccttcgagcaccagcagccgttgcaggaccggatgttcaagtttgaactcacccgccgtctggagcacgactttggcaaggtgacaaagcaggaagtcagagagttcttccgctgggcgcaggatcacgtgaccgaggtggcgcacgagttctacgtcagaaagggtggagccaacaagagacccgcccccgatgacgcggataaaagcgagcccaagcgggcctgcccctcagtcgcggatccatcgacgtcagacgcggaaggagctccggtggactttgccgacaggtaccaaaacaaatgttctcgtcacgcgggcatgcttcagatgctgtttccctgcaaaacatgcgagagaatgaatcagaatttcaacatttgcttcacgcacgggaccagagactgttcagaatgtttccccggcgtgtcagaatctcaaccggttgtcagaaaaaagacgtatcggaaactctgtgcgattcatcatctgctggggcgggcacccgagattgcttgctcggcctgcgatctggtcaacgtggacctagatgactgtgtttctgagcaataaatgacttaaaccaggtatggctgccgatggttatcttccagattggctcgaggacaacctctctgagggcattcgcgagtggtgggacttgaaacctggagccccgaaacccaaagccaaccagcaaaagcaggacgacggccggggtctggtgcttcctggctacaagtacctcggacccttcaacggactcgacaagggggagcccgtcaacgcggcggacgcagcggccctcgagcacgacaaggcctacgaccagcagctcaaagcgggtgacaatccgtacctgcggtataaccacgccgacgccgagtttcaggagcgtctgcaagaagatacgtcttttgggggcaacctcgggcgagcagtcttccaggccaagaagcgggttctcgaacctctcggtctggttgaggaaggcgctaagacggctcctggaaagaagagaccggtagagccatcaccccagcgttctccagactcctctacgggcatcggcaagaaaggccagcagcccgcgaaaaagagactcaactttgggcagactggcgactcagagtcagtgcccgaccctcaaccaatcggagaaccccccgcaggcccctctggtctgggatctggtacaatggctgcaggcggtggcgctccaatggcagacaataacgaaggcgccgacggagtgggtagttcctcaggaaattggcattgcgattccacatggctgggcgacagagtcatcaccaccagcacccgaacctgggccctccccacctacaacaaccacctctacaagcaaatctccaacgggacttcgggaggaagcaccaacgacaacacctacttcggctacagcaccccctgggggtattttgactttaacagattccactgccacttctcaccacgtgactggcagcgactcatcaacaacaactggggattccggcccaagagacccaacttcaagctcttcaacatccaggtcaaggaggtcacgcagaatgaaggcaccaagaccatcgccaataaccttaccagcacgattcaggtctttacggactcggaataccagctcccgtacgtcctcggctctgcgcaccagggctgcctgcctccgttcccggcggacgtcttcatgattcctcagtacgggtacctgactctgaacaatggcagtcaggccgtgggccgttcctccttctactgcctggagtactttccttctcaaatgctgagaacgggcaacaactttgagttcagctaccagtttgaggacgtgccttttcacagcagctacgcgcacagccaaagcctggaccggctgatgaaccccctcatcgaccagtacctgtactacctgtctcggactcagtccacgggaggtaccgcaggaactcagcagttgctattttctcaggccgggcctaataacatgtcggctcaggccaaaaactggctacccgggccctgctaccggcagcaacgcgtctccacgacactgtcgcaaaataacaacagcaactttgcctggaccggtgccaccaagtatcatctgaatggcagagactctctggtaaatcccggtgtcgctatggcaacccacaaggacgacgaagagcgattttttccgtccagcggagtcttaatgtttgggaaacagggagctggaaaagacaacgtggactatagcagcgttatgctaaccagtgaggaagaaattaaaaccaccaacccagtggccacagaacagtacggcgtggtggccgataacctgcaacagcaaaacgccgctcctattgtaggggccgtcaacagtcaaggagccttacctggcatggtctggcagaaccgggacgtgtacctgcagggtcctatctgggccaagattcctcacacggacggaaactttcatccctcgccgctgatgggaggctttggactgaaacacccgcctcctcagatcctgattaagaatacacctgttcccgcggatcctccaactaccttcagtcaagctaagctggcgtcgttcatcacgcagtacagcaccggacaggtcagcgtggaaattgaatgggagctgcagaaagaaaacagcaaacgctggaacccagagattcaatacacttccaactactacaaatctacaaatgtggactttgctgttaacacagatggcacttattctgagcctcgccccattggcacccgttacctcacccgtaatctgtaattgcttgttaatcaataaaccggttgattcgtttcagttgaactttggtctctgcgaagggcgaattc

SEQ ID NO: 4796 - protein, 738 aa, Adeno-associated virus
MAADGYLPDWLEDNLSEGIREWWDLKPGAPKPKANQQKQDDGRGLVLPGYKYLGPFNGLDKGEPVNAADAAALEHDKAYDQQLKAGDNPYLRYNHADAEFQERLQEDTSFGGNLGRAVFQAKKRVLEPLGLVEEGAKTAPGKKRPVEPSPQRSPDSSTGIGKKGQQPAKKRLNFGQTGDSESVPDPQPIGEPPAGPSGLGSGTMAAGGGAPMADNNEGADGVGSSSGNWHCDSTWLGDRVITTSTRTWALPTYNNHLYKQISNGTSGGSTNDNTYFGYSTPWGYFDFNRFHCHFSPRDWQRLINNNWGFRPKRPNFKLFNIQVKEVTQNEGTKTIANNLTSTIQVFTDSEYQLPYVLGSAHQGCLPPFPADVFMIPQYGYLTLNNGSQAVGRSSFYCLEYFPSQMLRTGNNFEFSYQFEDVPFHSSYAHSQSLDRLMNPLIDQYLYYLSRTQSTGGTAGTQQLLFSQAGPNNMSAQAKNWLPGPCYRQQRVSTTLSQNNNSNFAWTGATKYHLNGRDSLVNPGVAMATHKDDEERFFPSSGVLMFGKQGAGKDNVDYSSVMLTSEEEIKTTNPVATEQYGVVADNLQQQNAAPIVGAVNSQGALPGMVWQNRDVYLQGPIWAKIPHTDGNFHPSPLMGGFGLKHPPPQILIKNTPVPADPPTTFSQAKLASFITQYSTGQVSVEIEWELQKENSKRWNPEIQYTSNYYKSTNVDFAVNTDGTYSEPRPIGTRYLTRNL

SEQ ID NO: 4797 - protein, 738 aa, Adeno-associated virus
MAADGYLPDWLEDNLSEGIREWWDLKPGAPKPKANQQKQDDGRGLVLPGYKYLGPFNGLDKGEPVNAADAAALEHDKAYDQQLKAGDNPYLRYNHADAEFQERLQEDTSFGGNLGRAVFQAKKRVLEPLGLVEEAAKTAPGKKRPVEPSPQRSPDSSTGIGKKGQQPAKKRLNFGQTGDSESVPDPQPIGEPPAGPSGLGSGTMAAGGGAPMADNNEGADGVGSSSGNWHCDSTWLGDRVITTSTRTWALPTYNNHLYKQISNGTSGGSTNDNTYFGYSTPWGYFDFNRFHCHFSPRDWQRLINNNWGFRPKRLSFKLFNIQVKEVTQNEGTKTIANNLTSTIQVFTDSEYQLPYVLGSAHQGCLPPFPADVFMIPQYGYLTLNNGSQAVGRSSFYCLEYFPSQMLRTGNNFEFSYTFEDVPFHSSYAHSQSLDRLMNPLIDQYLYYLSRTQSTGGTQGTQQLLFSQAGPANMSAQAKNWLPGPCYRQQRVSTTLSQNNNSNFAWTGATKYHLNGRDSLVNPGVAMATHKDDEERFFPSSGVLMFGKQGAGRDNVDYSSVMLTSEEEIKTTNPVATEQYGVVADNLQQTNTGPIVGNVNSQGALPGMVWQNRDVYLQGPIWAKIPHTDGNFHPSPLMGGFGLKHPPPQILIKNTPVPADPPTTFSQAKLASFITQYSTGQVSVEIEWELQKENSKRWNPEIQYTSNYYKSTNVDFAVNTEGTYSEPRPIGTRYLTRNL

SEQ ID NO: 4798 - protein, 720 aa, Adeno-associated virus
MSFVDHPPDWLEEVGEGLREFLGLEAGPPKPKPNQQHQDQARGLVLPGYNYLGPGNGLDRGEPVNRADEVAREHDISYNEQLEAGDNPYLKYNHADAEFQEKLADDTSFGGNLGKAVFQAKKRVLEPFGLVEEGAKTAPTGKRIDDHFPKRKKARTEEDSKPSTSSDAEAGPSGSQQLQIPAQPASSLGADTMSAGGGGPLGDNNQGADGVGNASGDWHCDSTWMGDRVVTKSTRTWVLPSYNNHQYREIKSGSVDGSNANAYFGYSTPWGYFDFNRFHSHWSPRDWQRLINNYWGFRPRSLRVKIFNIQVKEVTVQDSTTTIANNLTSTVQVFTDDDYQLPYVVGNGTEGCLPAFPPQVFTLPQYGYATLNRDNTENPTERSSFFCLEYFPSKMLRTGNNFEFTYNFEEVPFHSSFAPSQNLFKLANPLVDQYLYRFVSTNNTGGVQFNKNLAGRYANTYKNWFPGPMGRTQGWNLGSGVNRASVSAFATTNRMELEGASYQVPPQPNGMTNNLQGSNTYALENTMIFNSQPANPGTTATYLEGNMLITSESETQPVNRVAYNVGGQMATNNQSSTTAPATGTYNLQEIVPGSVWMERDVYLQGPIWAKIPETGAHFHPSPAMGGFGLKHPPPMMLIKNTPVPGNITSFSDVPVSSFITQYSTGQVTVEMEWELKKENSKRWNPEIQYTNNYNDPQFVDFAPDSTGEYRTTRPIGTRYL

SEQ ID NO: 4799 - protein, 736 aa, Adeno-associated virus
MAADGYLPDWLEDNLSEGIREWWDLKPGAPKPKANQQKQDDGRGLVLPGYKYLGPFNGLDKGEPVNAADAAALEHDKAYDQQLKAGDNPYLRYNHADAEFQERLQEDTSFGGNLGRAVFQAKKRVLEPFGLVEEGAKTAPGKKRPVEQSPQEPDSSSGIGKTGQQPAKKRLNFGQTGDSESVPDPQPLGEPPATPAAVGPTTMASGGGAPMADNNEGADGVGNASGNWHCDSTWLGDRVITTSTRTWALPTYNNHLYKQISSASTGASNDNHYFGYSTPWGYFDFNRFHCHFSPRDWQRLINNNWGFRPKRLNFKLFNIQVKEVTTNDGVTTIANNLTSTVQVFSDSEYQLPYVLGSAHQGCLPPFPADVFMIPQYGYLTLNNGSQAVGRSSFYCLEYFPSQMLRTGNNFTFSYTFEDVPFHSSYAHSQSLDRLMNPLIDQYLYYLNRTQNQSGSAQNKDLLFSRGSPAGMSVQPKNWLPGPCYRQQRVSKTKTDNNNSNFTWTGASKYNLNGRESIINPGTAMASHKDDKDKFFPMSGVMIFGKESAGASNTALDNVMITDEEEIKATNPVATERFGTVAVNLQSSSTDPATGDVHVMGALPGMVWQDRDVYLQGPIWAKIPHTDGHFHPSPLMGGFGLKHPPPQILIKNTPVPANPPAEFSATKFASFITQYSTGQVSVEIEWELQKENSKRWNPEVQYTSNYAKSANVDFTVDNNGLYTEPRPIGTRYLTRPL

SEQ ID NO: 4800 - protein, 736 aa, Adeno-associated virus
MAADGYLPDWLEDNLSEGIREWWDLKPGAPKPKANQQKQDDGRGLVLPGYKYLGPFNGLDKGEPVNAADAAALEHDKAYDQQLKAGDNPYLRYNHADAEFQERLQEDTSFGGNLGRAVFQAKKRVLEPFGLVEEGAKTAPGKKRPVEQSPQEPDSSSGIGKTGQQPAKKRLNFGQTGDSESVPDPQPLGEPPATPAAVGPTTMASGGGAPMADNNEGADGVGNASGNWHCDSTWLGDRVITTSTRTWALPTYNNHLYKQISSASTGASNDNHYFGYSTPWGYFDFNRFHCHFSPRDWQRLINNNWGFRPKRLNFKLFNIQVKEVTTNDGVTTIANNLTSTVQVFSDSEYQLPYVLGSAHQGCLPPFPADVFMIPQYGYLTLNNGSQAVGRSSFYCLEYFPSQMLRTGNNFTFSYTFEDVPFHSSYAHSQSLDRLMNPLIDQYLYYLNRTQNQSGSAQNKDLLFSRGSPAGMSVQPKNWLPGPCYRQQRVSKTKTDNNNSNFTWTGASKYNLNGRESIINPGTAMASHKDDEDKFFPMSGVMIFGKESAGASNTALDNVMITDEEEIKATNPVATERFGTVAVNLQSSSTDPATGDVHVMGALPGMVWQDRDVYLQGPIWAKIPHTDGHFHPSPLMGGFGLKHPPPQILIKNTPVPANPPAEFSATKFASFITQYSTGQVSVEIEWELQKENSKRWNPEVQYTSNYAKSANVDFTVDNNGLYTEPRPIGTRYLTRPL

SEQ ID NO: 4801 - protein, 736 aa, Adeno-associated virus
MAADGYLPDWLEDNLSEGIREWWDLKPGAPKPKANQQKQDDGRGLVLPGYKYLGPFNGLDKGEPVNAADAAALEHDKAYDQQLKAGDNPYLRYNHADAEFQERLQEDTSFGGNLGRAVFQAKKRVLEPLGLVEEGAKTAPGKKRPVEQSPQEPDSSSGIGKTGQQPAKKRLNFGQTGDSESVPDPQPLGEPPATPAAVGPTTMASGGGAPMADNNEGADGVGNASGNWHCDSTWLGDRVITTSTRTWALPTYNNHLYKQISSASTGASNDNHYFGYSTPWGYFDFNRFHCHFSPRDWQRLINNNWGFRPKRLNFKLFNIQVKEVTTNDGVTTIANNLTSTVQVFSDSEYQLPYVLGSAHQGCLPPFPADVFMIPQYGYLTLNNGSQAVGRSSFYCLEYFPSQMLRTGNNFTFSYTFEDVPFHSSYAHSQSLDRLMNPLIDQYLYYLNRTQNQSGSAQNKDLLFSRGSPAGMSVQPKNWLPGPCYRQQRVSKTKTDNNNSNFTWTGASKYNLNGRESIINPGTAMASHKDDEDKFFPMSGVMIFGKESAGASNTALDNVMITDEEEIKATNPVATERFGTVAVNLQSSSTDPATGDVHVMGALPGMVWQDRDVYLQGPIWAKIPHTDGHFHPSPLMGGFGLKHPPPQILIKNTPVPANPPAEFSATKFASFITQYSTGQVSVEIEWELQKENSKRWNPEVQYTSNYAKSANVDFTVDNNGLYTEPRPIGTRYLTRPL

SEQ ID NO: 4802 - protein, 736 aa, Adeno-associated virus
MAADGYLPDWLEDNLSEGIREWWDLKPGAPKPKANQQKQDDGRGLVLPGYKYLGPFNGLDKGEPVNAADAAALEHDKAYDQQLKAGDNPYLRYNHADAEFQERLQEDTSFGGNLGRAVFQAKKRVLEPLGLVEEGAKTAPGKKRPVEQSPQEPDSSSGIGKTGQQPAKKRLNFGQTGDSESVPDPQPLGEPPATPAAVGPTTMASGGGAPMADNNEGADGVGNASGNWHCDSTWLGDRVITTSTRTWALPTYNNHLYKQISSASTGASNDNHYFGYSTPWGYFDFNRFHCHFSPRDWQRLINNNWGFRPKRLNFKLFNIQVKEVTTNDGVTTIANNLTSTVQVFSDSEYQLPYVLGSAHQGCLPPFPADVFMIPQYGYLTLNNGSQAVGRSSFYCLEYFPSQMLRTGNNFTFSYTFEDVPFHSSYAHSQSLDRLMNPLIDQYLYYLNRTQNQSGSAQNKDLLFSRGSPAGMSVQPKNWLPGPCYRQQRVSKTKTDNNNSNFTWTGASKYNLNGRESIINPGTAMASHKDDKDKFFPMSGVMIFGKESAGASNTALDNVMITDEEEIKATNPVATERFGTVAVNLQSSSTDPATGDVHVMGALPGMVWQDRDVYLQGPIWAKIPHTDGHFHPSPLMGGFGLKHPPPQILIKNTPVPANPPAEFSATKFASFITQYSTGQVSVEIEWELQKENSKRWNPEVQYTSNYAKSANVDFTVDNNGLYTEPRPIGTRYLTRPL

SEQ ID NO: 4803 - protein, 728 aa, Adeno-associated virus
MAADGYLPDWLEGNLSEGIREWWDLKPGAPKPKANQQKQDDGRGLVLPGYRYLGPFNGLDKGEPVNEADAAALEHDKAYDKQLEQGDNPYLKYNHADAEFQERLQEDTSFGGNLGRAVFQAKKRVLEPLGLVEEGAKTAPGKKRPIESPDSSTGIGKNGQPPAKKKLNFGQTGDSESVPDPQPLGEPPAAPSGLGSGTMAAGGGAPMADNNEGADGVGNASGNWHCDSTWLGDRVITTSTRTWALPTYNNHLYKQISSQSGATNDNHFFGYSTPWGYFDFNRFHCHFSPRDWQRLINNNWGFRPRKLRFKLFNIQVKEVTTNDGVTTIANNLTSTIQVFSDSEYQLPYVLGSAHQGCLPPFPADVFMIPQYGYLTLNNGSQSVGRSSFYCLEYFPSQMLRTGDNFEFSYTFEEVPFHSSYAHSQSLDRLMNPLIDQYLYYLARTQSTTGSTRELQFHQAGPNTMAEQSKNWLPGPCYRQQRLSKNIDSNNNSNFAWTGATKYHLNGRNSLTNPGVAMATNKDDEDQFFPINGVLVFGKTGAANKTTLENVLMTSEEEIKTTNPVATEEYGVVSSNLQSSTAGPQTQTVNSQGALPGMVWQNRDVYLQGPIWAKIPHTDGNFHPSPLMGGFGLKHPPPQILIKNTPVPANPPEVFTPAKFASFITQYSTGQVSVEIEWELQKENSKRWNPEIQYTSNYAKSNNVEFAVNNEGVYTEPRPIGTRYLTRNL

SEQ ID NO: 4804 - DNA, 2211 bp, Adeno-associated virus
atggctgccgatggttatcttccagattggctcgaggacaaccttagtgaaggaattcgcgagtggtgggctttgaaacctggagcccctcaacccaaggcaaatcaacaacatcaagacaacgctcgaggtcttgtgcttccgggttacaaataccttggacccggcaacggactcgacaagggggagccggtcaacgcagcagacgcggcggccctcgagcacgacaaggcctacgaccagcagctcaaggccggagacaacccgtacctcaagtacaaccacgccgacgccgagttccaggagcggctcaaagaagatacgtcttttgggggcaacctcgggcgagcagtcttccaggccaaaaagaggcttcttgaacctcttggtctggttgaggaagcggctaagacggctcctggaaagaagaggcctgtagagcagtctcctcaggaaccggactcctccgcgggtattggcaaatcgggtgcacagcccgctaaaaagagactcaatttcggtcagactggcgacacagagtcagtcccagaccctcaaccaatcggagaacctcccgcagccccctcaggtgtgggatctcttacaatggcttcaggtggtggcgcaccagtggcagacaataacgaaggtgccgatggagtgggtagttcctcgggaaattggcattgcgattcccaatggctgggggacagagtcatcaccaccagcacccgaacctgggccctgcccacctacaacaatcacctctacaagcaaatctccaacagcacatctggaggatcttcaaatgacaacgcctacttcggctacagcaccccctgggggtattttgacttcaacagattccactgccacttctcaccacgtgactggcagcgactcatcaacaacaactggggattccggcctaagcgactcaacttcaagctcttcaacattcaggtcaaagaggttacggacaacaatggagtcaagaccatcgccaataaccttaccagcacggtccaggtcttcacggactcagactatcagctcccgtacgtgctcgggtcggctcacgagggctgcctcccgccgttcccagcggacgttttcatgattcctcagtacgggtatctgacgcttaatgatggaagccaggccgtgggtcgttcgtccttttactgcctggaatatttcccgtcgcaaatgctaagaacgggtaacaacttccagttcagctacgagtttgagaacgtacctttccatagcagctacgctcacagccaaagcctggaccgactaatgaatccactcatcgaccaatacttgtactatctctcaaagactattaacggttctggacagaatcaacaaacgctaaaattcagtgtggccggacccagcaacatggctgtccagggaagaaactacatacctggacccagctaccgacaacaacgtgtctcaaccactgtgactcaaaacaacaacagcgaatttgcttggcctggagcttcttcttgggctctcaatggacgtaatagcttgatgaatcctggacctgctatggccagccacaaagaaggagaggaccgtttctttcctttgtctggatctttaatttttggcaaacaaggaactggaagagacaacgtggatgcggacaaagtcatgataaccaacgaagaagaaattaaaactactaacccggtagcaacggagtcctatggacaagtggccacaaaccaccagagtgcccaagcacaggcgcagaccggctgggttcaaaaccaaggaatacttccgggtatggtttggcaggacagagatgtgtacctgcaaggacccatttgggccaaaattcctcacacggacggcaactttcacccttctccgctgatgggagggtttggaatgaagcacccgcctcctcagatcctcatcaaaaacacacctgtacctgcggatcctccaacggccttcaacaaggacaagctgaactctttcatcacccagtattctactggccaagtcagcgtggagatcgagtgggagctgcagaaggaaaacagcaagcgctggaacccggagatccagtacacttccaactattacaagtctaataatgttgaatttgctgttaatactgaaggtgtatatagtgaaccccgccccattggcaccagatacctgactcgtaatctgtaa

SEQ ID NO: 4805 - protein, 736 aa, Adeno-associated virus
MAADGYLPDWLEDNLSEGIREWWALKPGAPQPKANQQHQDNARGLVLPGYKYLGPGNGLDKGEPVNAADAAALEHDKAYDQQLKAGDNPYLKYNHADAEFQERLKEDTSFGGNLGRAVFQAKKRLLEPLGLVEEAAKTAPGKKRPVEQSPQEPDSSAGIGKSGAQPAKKRLNFGQTGDTESVPDPQPIGEPPAAPSGVGSLTMASGGGAPVADNNEGADGVGSSSGNWHCDSQWLGDRVITTSTRTWALPTYNNHLYKQISNSTSGGSSNDNAYFGYSTPWGYFDFNRFHCHFSPRDWQRLINNNWGFRPKRLNFKLFNIQVKEVTDNNGVKTIANNLTSTVQVFTDSDYQLPYVLGSAHEGCLPPFPADVFMIPQYGYLTLNDGSQAVGRSSFYCLEYFPSQMLRTGNNFQFSYEFENVPFHSSYAHSQSLDRLMNPLIDQYLYYLSKTINGSGQNQQTLKFSVAGPSNMAVQGRNYIPGPSYRQQRVSTTVTQNNNSEFAWPGASSWALNGRNSLMNPGPAMASHKEGEDRFFPLSGSLIFGKQGTGRDNVDADKVMITNEEEIKTTNPVATESYGQVATNHQSAQAQAQTGWVQNQGILPGMVWQDRDVYLQGPIWAKIPHTDGNFHPSPLMGGFGMKHPPPQILIKNTPVPADPPTAFNKDKLNSFITQYSTGQVSVEIEWELQKENSKRWNPEIQYTSNYYKSNNVEFAVNTEGVYSEPRPIGTRYLTRNL

SEQ ID NO: 4806 - DNA, 2460 bp, Adeno-associated virus
ggtaattcctccggaaattggcattgcgattccacatggctgggcgaccgagtcattaccaccagcacccggacttgggccctgcccacctacaacaaccacctctacaagcaaatctccagccaatcgggtgccaccaacgacaaccactacttcggctacagcaccccttgggggtattttgatttcaacagattccactgccatttctcaccacgtgactggcagcgactcatcaacaacaactggggattcatggctgccgatggttatcttccagattggctcgaggacactctctctgaaggaatcagacagtggtggaagctcaaacctggcccaccaccgccgaaacctaaccaacaacaccgggacgacagtaggggtcttgtgcttcctgggtacaagtacctcggacccttcaacggactcgacaaaggagagccggtcaacgaggcagacgccgcggccctcgagcacgacaaagcctacgaccaccagctcaagcaaggggacaacccgtacctcaaatacaaccacgcggacgctgaatttcaggagcgtcttcaagaagatacgtctttcgggggcaacctcgggcgagcagtcttccaggccaaaaagagggtactcgagcctcttggtctggttgaggaagctgttaagacggctcctggaaaaaagagacctatagagcagtctcctgcagaaccggactcttcctcgggcatcggcaaatcaggccagcagcccgctaagaaaagactcaattttggtcagactggcgacacagagtcagtcccagaccctcaaccaatcggagaaccccccgcagccccctctggtgtgggatctaatacaatggcttcaggcggtggggcaccaatggcagacaataacgaaggcgccgacggagtgggtaattcctcgggaaattggcattgcgattccacatggatgggcgacagagttatcaccaccagcacaagaacctgggccctccccacctacaataatcacctctacaagcaaatctccagcgaatcgggagccaccaacgacaaccactacttcggctacagcaccccctgggggtattttgactttaacagattccactgtcacttctcaccacgtgactggcagcgactcatcaacaacaactggggatttagacccaagaaactcaatttcaagctcttcaacatccaagtcaaggaggtcacgcagaatgatggaaccacgaccatcgccaataaccttaccagcacggtgcaggtcttcacagactctgagtaccagctgccctacgtcctcggttcggctcaccagggctgccttccgccgttcccagcagacgtcttcatgattcctcagtacggctacttgactctgaacaatggcagccaagcggtaggacgttcttcattctactgtctagagtattttccctctcagatgctgaggacgggaaacaacttcaccttcagctacacttttgaagacgtgcctttccacagcagctacgcgcacagccagagtctggatcggctgatgaatcctctcattgaccagtacctgtattacctgagcaaaactcagggtacaagtggaacaacgcagcaatcgagactgcagttcagccaagctgggcctagctccatggctcagcaggccaaaaactggctaccgggacccagctaccgacagcagcgaatgtctaagacggctaatgacaacaacaacagtgaatttgcttggactgcagccaccaaatattacctgaatggaagaaattctctggtcaatcccgggcccccaatggccagtcacaaggacgatgaggaaaagtatttccccatgcacggaaatctcatctttggaaaacaaggcacaggaactaccaatgtggacattgaatcagtgcttattacagacgaagaagaaatcagaacaactaatcctgtggctacagaacaatacggacaggttgccaccaaccatcagagtcagaacaccacagcttcctatggaagtgtggacagccagggaatcttacctggaatggtgtggcaggaccgcgatgtctatcttcaaggtcccatttgggccaaaactcctcacacggacggacactttcatccttctccgctcatgggaggctttggactgaaacaccctcctccccagatcctgatcaaaaacacacctgtgccagcgaatcccgcgaccactttcactcctggaaagtttgcttcgttcattacccagtattccaccggacaggtcagcgtggaaatagagtgggagctgcagaaagaaaacagcaaacgctggaacccagaaattcagtacacctccaactacaacaagtcggtgaatgtggagtttaccgtggacgcaaacggtgtttattctgaaccccgccctattggcactcgttaccttacccggaacttg

SEQ ID NO: 4807 - DNA, 3123 bp, Adeno-associated virus
gaattcgccctttctacggctgcgtcaactggaccaatgaaaactttcccttcaacgattgcgtcgacaagatggtgatctggtgggaggagggaaagatgaccgccaaggtcgtggaatctgccaaagccattctgggtggaggcaaggttcgtgtggaccagaaatgcaagtcttcggcccagatcgacccgactccggtgattgtcacctctaacaccaacatgtgcgccgtgattgacggaaactcgaccaccttcgagcaccagcagccgttgcaagaccggatgttcaaatttgaacttacccgccgtttggatcatgactttgggaaggtcaccaagcaggaagtcaaagactttttccggtgggctcaagatcacgtgactgaggtggagcatgagttctacgtcaaaaagggtggagccaagaaaaggcccgcccccgatgatgtatatataaatgagcccaagcgggcgcgcgagtcagttgcgcagccatcgacgtcagacgcggaagcttcgataaactacgcggacaggtaccaaaacaaatgttctcgtcacgtgggcatgaatctgatgctgtttccctgtcgacaatgcgaaagaatgaatcagaattcaaatatctgcttcacacacgggcaaaaagactgtttggaatgctttcccgtgtcagaatctcaacccgtttctgtcgtcagaaaaacgtatcagaaactttgttacattcatcatatcatgggaaaagtaccagacgcctgcactgcctgcgacctggtaaatgtggacttggatgactgtatttctgagcaataaatgacttaaatcaggtatggctgctgacggttatcttccagattggctcgaggacactctctctgaaggaatcagacagtggtggaagctcaaacctggcccaccaccgccgaaacctaaccaacaacaccgggacgacagtaggggtcttgtgcttcctgggtacaagtacctcggacccttcaacggactcgacaaaggagagccggtcaacgaggcagacgccgcggccctcgagcacgacaaagcctacgaccaccagctcaagcaaggggacaacccgtacctcaaatacaaccacgcggacgctgaatttcaggagcgtcttcaagaagatacgtctttcgggggcaacctcgggcgagcagtcttccaggccaaaaagagggtactcgagcctcttggtctggttgaggaagctgttaagacggctcctggaaaaaagagacctatagagcagtctcctgcagaaccggactcttcctcgggcatcggcaaatcaggccagcagcccgctaagaaaagactcaattttggtcagactggcgacacagagtcagtcccaggccctcaaccaatcggagaaccccccgcagccccctctggtgtgggatctaatacaatggcttcaggcggtggggcaccaatggcagacaataacgaaggcgccgacggagtgggtaattcctcgggaaattggcattgcgattccacatggatgggcgacagagttatcaccaccagcacaagaacctgggccctccccacctacaataatcacctctacaagcaaatctccagcgaatcgggagccaccaacgacaaccactacttcggctacagcaccccctgggggtattttgactttaacagattccactgtcacttctcaccacgtgactggcagcgactcatcaacaacaactggggatttagacccaagaaactcaatttcaagctcttcaacatccaagtcaaggaggtcacgcagaatgatggaaccacgaccatcgccaataaccttaccagcgcggtgcaggtcttcacagactctgagtaccagctgccctacgtcctcggttcggctcaccagggctgccttccgccgttcccagcagacgtcttcatgattcctcagtacggctacttgactctgaacaatggcagccaagcggtaggacgttcttcattctactgtctagagtattttccctctcagatgctgaggacgggaaacaacttcaccttcagctacacttttgaagacgtgcctttccacagcagctacgcgcacagccagagtctggatcggctgatgaatcctctcattgaccagtacctgtattacctgagcaaaactcagggtacaagtggaacaacgcagcaatcgagactgcagttcagccaagctgggcctagctccatggctcagcaggccaaaaactggctaccgggacccagctaccgacagcagcgaatgtctaagacggctaatgacaacaacaacagtgaatttgcttggactgcagccaccaaatattacctgaatggaagaaattctctggtcaatcccgggcccccagtggccagtcacaaggacgatgaggaaaagtatttccccatgcacggaaatctcatctttggaaaacaaggcacaggaactaccaatgtggacattgaatcagtgcttattacagacgaagaagaaatcagaacaactaatcctgtggctacagaacaatacggacaggttgccaccaaccatcagagtcagaacaccacagcttcctatggaagtgtggacagccagggaatcttacctggaatggtgtggcaggaccgcgatgtctatcttcaaggtcccatttgggccaaaactcctcacacggacggacactttcatccttctccgctcatgggaggctttggactgaaacaccctcctccccagatcctgatcaaaaacacacctgtgccagcgaatcccgcgaccactttcactcctggaaagtttgcttcgttcattacccagtattccacctgacaggtcagcgtggaaatagagtgggagctgcagaaagaaaacagcaaacgctggaacccagaaattcagtacacctccaactacaacaagtcggtgaatgtggagtttaccgtggacgcaaacggtgtttattctgaaccccgccctattggcactcgttaccttacccggaacttgtaatttcctgttaatgaataagccgatttatgcgtttcagttgaactttggtctctgcgaagggcgaattcgtttaaacct

SEQ ID NO: 4808 - protein, 735 aa, Adeno-associated virus
MAADGYLPDWLEDTLSEGIRQWWKLKPGPPPPKPNQQHRDDSRGLVLPGYKYLGPFNGLDKGEPVNEADAAALEHDKAYDHQLKQGDNPYLKYNHADAEFQERLQEDTSFGGNLGRAVFQAKKRVLEPLGLVEEAVKTAPGKKRPIEQSPAEPDSSSGIGKSGQQPAKKRLNFGQTGDTESVPGPQPIGEPPAAPSGVGSNTMASGGGAPMADNNEGADGVGNSSGNWHCDSTWMGDRVITTSTRTWALPTYNNHLYKQISSESGATNDNHYFGYSTPWGYFDFNRFHCHFSPRDWQRLINNNWGFRPKKLNFKLFNIQVKEVTQNDGTTTIANNLTSAVQVFTDSEYQLPYVLGSAHQGCLPPFPADVFMIPQYGYLTLNNGSQAVGRSSFYCLEYFPSQMLRTGNNFTFSYTFEDVPFHSSYAHSQSLDRLMNPLIDQYLYYLSKTQGTSGTTQQSRLQFSQAGPSSMAQQAKNWLPGPSYRQQRMSKTANDNNNSEFAWTAATKYYLNGRNSLVNPGPPVASHKDDEEKYFPMHGNLIFGKQGTGTTNVDIESVLITDEEEIRTTNPVATEQYGQVATNHQSQNTTASYGSVDSQGILPGMVWQDRDVYLQGPIWAKTPHTDGHFHPSPLMGGFGLKHPPPQILIKNTPVPANPATTFTPGKFASFITQYSTGQVSVEIEWELQKENSKRWNPEIQYTSNYNKSVNVEFTVDANGVYSEPRPIGTRYLTRNL

SEQ ID NO: 4809 - DNA, 3123 bp, Adeno-associated virus
gaattcgccctttctacggctgcgtcaactggaccaatgaaaactttcccttcaacgattgcgtcgacaagatggtgatctggtgggaggagggaaagatgaccgccaaggtcgtggaatctgccaaagccattctgggtggaagcaaggttcgtgtggaccagaaatgcaagtcttcggcccagatcgacccgactccggtgattgtcacctctaacaccaacatgtgcgccgtgattgacggaaactcgaccaccttcgagcaccagcagccgttgcaagaccggatgttcaaatttgaacttacccgccgtttggatcatgactttgggaaggtcaccaagcaggaagtcaaagactttttccggtgggctcaagatcacgtgactgaggtggagcatgagttctacgtcaaaaagggtggagccaagaaaaggcccgcccccgatgatgtatatataaatgagcccaagcgggcgcgcgagtcagttgcgcagccatcgacgtcagacgcggaagcttcgataaactacgcgggcaggtaccaaaacaaatgttctcgtcacgtgggcatgaatctgatgctgtttccctgtcgacaatgcgaaagaatgaatcagaattcaaatatctgcttcacacacgggcaaaaagactgtttggaatgctttcccgtgtcagaatctcaacccgtttctgtcgtcagaaaaacgtatcagaaactttgttacattcatcatatcatgggaaaagaaccagacgcctgcactgcctgcgacctggtaaatgtggacttggatgactgtatttctgagcaataaatgacttaaatcaggtatggctgctgacggttatcttccagattggctcgaggacactctctctgaaggaatcagacagtggtggaagctcaaacctggcccaccaccgccgaaacctaaccaacaacaccgggacgacagtaggggtcttgtgcttcctgggtacaagtacctcggacccttcaacggactcgacaaaggagagccggtcaacgaggcagacgccgcggccctcgagcacgacaaagcctacgaccaccagctcaagcaaggggacaacccgtacctcaaatacaaccacgcggacgctgaatttcaggagcgtcttcaagaagatacgtctttcgggggcaacctcgggcgagcagtcttccaggccaaaaagagggtactcgagcctcttggtctggttgaggaagctgttaagacggctcctggaaaaaagagacctatagagcagtctcctgcagaaccggactcttcctcgggcatcggcgaatcaggccagcagcccgctaagaaaagactcaattttggtcagactggcgacacagagtcagtcccagaccctcaaccaatcggagaaccccccgcagccccctctggtgtgggatctaatacaatggcttcaggcggtggggcaccaatggcagacgataacgaaggcgccgacggagtgggtaattcctcgggaaattggcattgcgattccacatggatgggcgacagagttatcaccaccagcacaagaacctgggccctccccacctacaataatcacctctacaagcaaatctccagcgaatcgggagccaccaacgacaaccactacttcggctacagcaccccctgggggtattttgactttaacagattccactgtcacttctcaccacgtgactggcagcgactcatcaacaacaactggggatttagacccaagaaactcaatttcaagctcttcaacatccaagtcaaggaggtcacgcagaatgatggaaccacgaccatcgccaataaccttaccagcacggtgcaggtcttcacagactctgagtaccagctgccctacgtcctcggttcggctcaccagggctgccttccgccgttcccagcagacgtcttcatgattcctcagtacggctacttgactctgaacaatggcagccaagcggtaggacgttcttcattctactgtctagagtattttccctctcagatgctgaggacgggaaacaacttcaccttcagctacacttttgaagacgtgcctttccacagcagctacgcgcacagccagagtctggatcggctgatgaatcctctcattgaccagtacctgtattacctgagcaaaactcagggtacaagtggaacaacgcagcaatcgagactgcagttcagccaagctgggcctagctccatggctcagcaggccaaaaactggctaccgggacccagctaccgacagcagcgaatgtctaagacggctaatgacaacaacaacagtgaatttgcttggactgcagccaccaaatattacctgaatggaagaaattctctggtcaatcccgggcccccaatggccagtcacaaggacgatgaggaaaagtatttccccatgcacggaaatctcatctttggaaaacaaggcacaggaactaccaatgtggacattgaatcagtgcttattacagacgaagaagaaatcagaacaactaatcctgtggctacagaacaatacggacaggttgccaccaaccatcagagtcaggacaccacagcttcctatggaagtgtggacagccagggaatcttacctggaatggtgtggcaggaccgcgatgtctatcttcaaggtcccatttgggccaaaactcctcacacggacggacactttcatccttctccgctcatgggaggctttggactgaaacaccctcctccccagatcctgatcaaaaacacacctgtgccagcgaatcccgcgaccactttcactcctggaaagtttgcttcgttcattacccagtattccaccggacaggtcagcgtggaaatagagtgggagctgcagaaagaaaacagcaaacgctggaacccagaaattcagtacacctccaactacaacaagtcggtgaatgtggagtttaccgtggacgcaaacggtgtttattctgaaccccgccctattggcactcgttaccttacccggaacttgtaatttcctgttaatgaataaaccgatttatgcgtttcagttgaactttggtctctgcgaagggcgaattcgcggccgcta

SEQ ID NO: 4810 - protein, 735 aa, Adeno-associated virus
MAADGYLPDWLEDTLSEGIRQWWKLKPGPPPPKPNQQHRDDSRGLVLPGYKYLGPFNGLDKGEPVNEADAAALEHDKAYDHQLKQGDNPYLKYNHADAEFQERLQEDTSFGGNLGRAVFQAKKRVLEPLGLVEEAVKTAPGKKRPIEQSPAEPDSSSGIGESGQQPAKKRLNFGQTGDTESVPDPQPIGEPPAAPSGVGSNTMASGGGAPMADDNEGADGVGNSSGNWHCDSTWMGDRVITTSTRTWALPTYNNHLYKQISSESGATNDNHYFGYSTPWGYFDFNRFHCHFSPRDWQRLINNNWGFRPKKLNFKLFNIQVKEVTQNDGTTTIANNLTSTVQVFTDSEYQLPYVLGSAHQGCLPPFPADVFMIPQYGYLTLNNGSQAVGRSSFYCLEYFPSQMLRTGNNFTFSYTFEDVPFHSSYAHSQSLDRLMNPLIDQYLYYLSKTQGTSGTTQQSRLQFSQAGPSSMAQQAKNWLPGPSYRQQRMSKTANDNNNSEFAWTAATKYYLNGRNSLVNPGPPMASHKDDEEKYFPMHGNLIFGKQGTGTTNVDIESVLITDEEEIRTTNPVATEQYGQVATNHQSQDTTASYGSVDSQGILPGMVWQDRDVYLQGPIWAKTPHTDGHFHPSPLMGGFGLKHPPPQILIKNTPVPANPATTFTPGKFASFITQYSTGQVSVEIEWELQKENSKRWNPEIQYTSNYNKSVNVEFTVDANGVYSEPRPIGTRYLTRNL

SEQ ID NO: 4811 - DNA, 3113 bp, Adeno-associated virus
gaattcgccctttctacggctgcgtcaactggaccaatgaaaactttcccttcaacgattgcgtcgacaagatggtgatctggtgggaggagggaaagatgaccgccaaggtcgtggaatctgccaaagccattctgggtggaagcaaggttcgtgtggaccagaaatgcaagtcttcggcccagatcgacccgactccggtgattgtcacctctaacaccaacatgtgcgccgtgattgacggaaactcgaccaccttcgagcaccagcagccgttgcaagaccggatgttcaaatttgaacttacccgccgtttggatcatgactttgggaaggtcaccaagcaggaagtcaaagactttttccggtgggctcaagatcacgtgactgaggtggagcatgagttctacgtcaaaaagggtggagccaagaaaaggcccgcccccgatgatgtatatataaatgagcccaagcgggcgcgcgagtcagttgcgcagccatcgacgtcagacgcggaagcttcgataaactacgcggacaggtaccaaaacaaatgttctcgtcacgtgggcatgaatctgatgctgtttccctgtcgacaatgcgaaagaatgaatcagaattcaaatatctgcttcacacacgggcaaaaagactgtttggaatgctttcccgtgtcagaatctcaacccgttcctgtcgtcagaaaaacgtatcagaaactttgttacattcatcatatcatgggaaaagtaccagacgcctgcactgcctgcgacctggtaaatgtggacttggatgactgtatttctgagcaataaatgacttaaatcaggtatggctgctgacggttatcttccagattggctcgaggacactctctctgaaggaatcagacagtggtggaagctcaaacctggcccaccaccgccgaaacctaaccaacaacaccgggacgacagtaggggtcttgtgcttcctgggtacaagtacctcggacccttcaacggactcgacaaaggagagccggtcaacgaggcagacgccgcggccctcgagcacgacaaagcctacgaccaccagctcaagcaaggggacaacccgtacctcaaatacaaccacgcggacgctgaatttcaggagcgtcttcaagaagatacgtctttcgggggcaacctcgggcgagcagtcttccaggccaaaaagagggtactcgagcctcttggtctggttgaggaagctgttaagacggctcctggaaaaaagagacctatagagcagtctcctgcagaaccggactcttcctcgggcatcggcaaatcaggccagcagcccgctaagaaaagactcaattttggtcagactggcgacacagagtcagtcccagaccctcaaccaatcggagaaccccccgcagccccctctggtgtgggatctaatacaatggcttcaggcggtggggcaccaatggcagacaataacgaaggcgccgacggagtgggtaattcctcgggaaattggcattgcgattccacatggatgggcgacagagttatcaccaccagcacaagaacctgggccctccccacctacaataatcacctctacaagcaaatctccagcgaatcgggagccaccaacgacaaccactacttcggctacagcaccccctgggggtattttgactttaacagattccactgtcacttctcaccacgtgactggcagcgactcatcaataacaactggggatttagacccaagaaactcaatttcaagctcttcaacatccaagtcaaggaggtcacgcagaatgatggaaccacgaccatcgccaataaccttaccagcacggtgcaggtcttcacagactctgagtaccagctgccctacgtcctcggttcggctcaccagggctgccttccgccgttcccagcagacgtcttcatgattcctcagtacggctacttgactctgaacaatggcagccaagcggtaggacgttcttcattctactgtctagagtattttccctctcagatgctgaggacgggaaacaacttcaccttcagctacacttttgaagacgtgcctttccacagcagctacgcgcacagccagagtctggatcggctgatgaatcctctcattgaccagtacctgtattacctgagcaaaactcagggtacaagtggaacaacgcagcaatcgagactgcagttcaaccaagctgggcctagctccatggctcagcaggccaaaaactggctaccgggacccagctaccgacagcagcgaatgtctaagacggctaatgacaacaacaacagtgaatttgcttggactgcagccaccaaatattacccgaatggaagaaattctctggtcaatcccgggcccccaatggccagtcacaaggacgatgaggaaaagtatttccccatgcacggaaatctcatctttggaaaacaaggcacaggaactaccaatgtggacattgaatcagtgcttattacagacgaagaagaaatcagaacgactaatcctgtggctacagaacaatacggacaggttgccaccaaccgtcagagtcagaacaccacagcttcctatggaagtgtggacagccagggaatcttacctggaatggtgtggcaggaccgcgatgtctatcttcaaggtcccatttgggccaaaactcctcacacggacggacactttcatccttctccgctcatgggaggctttggactgaaacaccctcctccccagatcctgatcaaaaacacacctgtgccagcgaatcccgcgaccactttcactcctggaaagtttgcttcgttcattacccagtattccaccggacaggtcagcgtggaaatagagtgggagctgcagaaagaaaacagcaaacgctggaacccggaaattcagtacacctccaactacaacaagtcggtgaatgtggagtttaccgtggacgcaaacggtgtttattctgaaccccgccctattggcactcgttaccttacccggaacttgtaatttcctgttaatgaataaaccgatttatgcgtttcagttgaactttggtctctgcgaagggcgaattc

SEQ ID NO: 4812 - protein, 735 aa, Adeno-associated virus
MAADGYLPDWLEDTLSEGIRQWWKLKPGPPPPKPNQQHRDDSRGLVLPGYKYLGPFNGLDKGEPVNEADAAALEHDKAYDHQLKQGDNPYLKYNHADAEFQERLQEDTSFGGNLGRAVFQAKKRVLEPLGLVEEAVKTAPGKKRPIEQSPAEPDSSSGIGKSGQQPAKKRLNFGQTGDTESVPDPQPIGEPPAAPSGVGSNTMASGGGAPMADNNEGADGVGNSSGNWHCDSTWMGDRVITTSTRTWALPTYNNHLYKQISSESGATNDNHYFGYSTPWGYFDFNRFHCHFSPRDWQRLINNNWGFRPKKLNFKLFNIQVKEVTQNDGTTTIANNLTSTVQVFTDSEYQLPYVLGSAHQGCLPPFPADVFMIPQYGYLTLNNGSQAVGRSSFYCLEYFPSQMLRTGNNFTFSYTFEDVPFHSSYAHSQSLDRLMNPLIDQYLYYLSKTQGTSGTTQQSRLQFNQAGPSSMAQQAKNWLPGPSYRQQRMSKTANDNNNSEFAWTAATKYYPNGRNSLVNPGPPMASHKDDEEKYFPMHGNLIFGKQGTGTTNVDIESVLITDEEEIRTTNPVATEQYGQVATNRQSQNTTASYGSVDSQGILPGMVWQDRDVYLQGPIWAKTPHTDGHFHPSPLMGGFGLKHPPPQILIKNTPVPANPATTFTPGKFASFITQYSTGQVSVEIEWELQKENSKRWNPEIQYTSNYNKSVNVEFTVDANGVYSEPRPIGTRYLTRNL

SEQ ID NO: 4813 - DNA, 3122 bp, Adeno-associated virus
agcggccgcgaattcgccctttctacggctgcgtcaactggaccaatgaaaactttcccttcaacgattgcgtcgacaagatggtgatctggtgggaggagggaaagatgaccgccaaggtcgtggaatctgccaaagccattctgggtggaagcaaggttcgtgtggaccagaaatgcaggtcttcggcccagatcgacccgactccggtgattgtcacctctaacaccaacatgtgcgccgtgattgacggaaactcgaccaccttcgagcaccagcagccgttgcaagaccggatgttcaaatttgaacttacccgccgtttggatcatgactttgggaaggtcaccaagcaggaagtcaaagactttttccggtgggctcaagatcacgtgactgaggtggagcatgagttctacgtcaaaaagggtggagccaagaaaaggcccgcccccgatgatgtatatataaatgagcccaagcgggcgcgcgagtcagttgcgcagccatcgacgtcagacgcggaagcttcgataaactacgcggacaggtaccaaaacaaatgttctcgtcacgtgggcatgaatctgatgctgtttccctgtcgacaatgcgaaagaatgaatcagaattcaaatatctgcttcacacacgggcaaaaagactgtttggaatgctttcccgtgtcagaatctcaacccgtttctgtcgtcagaaaaacgtatcagaaactttgttacattcatcatatcatgggaaaagtaccagacgcctgcactgcctgcgacctggtaaatgtggacttggatgactgtatttctgagcaataaatgacttaaatcaggtatggctgctgacggttatcttccagattggctcgaggacactctctctgaaggaatcagacagtggtggaagctcaaacctggcccaccaccgccgaaacctaaccaacaacaccgggacgacagtaggggtcttgtgcttcctgggtacaagtacctcggacccttcaacggactcgacaaaggagagccggtcaacgaggcagacgccgcggccctcgagcacgacaaagcctacgaccaccagctcaagcaaggggacaacccgtacctcaaatacaaccacgcggacgctgaatttcaggagcgtcttcaagaagatacgtctttcgggggcaacctcgggcgagcagtcttccaggccaaaaagagggtactcgagcctcttggtctggttgaggaagctgttaagacggctcctggaaaaaagagacctatagagcagtctcctgcagaaccggactcttcctcgggcatcggcaaatcaggccagcagcccgctaagaaaagactcaattttggtcagactggcgacacagagtcagtcccagaccctcaaccaatcggagaaccccccgcagccccctctggtgtgggatctaatacaatggcttcaggcggtggggcaccaatggcagacaataacgaaggcgccgacggagtgggtaattcctcgggaaattggcattgcgattccacatggatgggcgacagagttatcaccaccagcacaagaacctgggccctccccacctacaataatcgcctctacaagcaaatctccagcgaatcgggagccaccaacgacaaccactacttcggctacagcaccccctgggggtattttgactttaacagattccactgtcacttctcaccacgtgactggcagcgactcatcaacaacaactggggatttagacccaagaaactcaatttcaagctcttcaacatccaagtcaaggaggtcacgcagaatgatggaaccacgaccatcgccaataaccttaccagcacggtgcaggtcttcacagactctgagtaccagctgccctacgtcctcggttcggctcaccagggctgccttccgccgttcccagcagacgtcttcatgattcctcagtacggctacttgactctgaacaatggcagccaagcggtaggacgttcttcattctactgtctagagtattttccctctcagatgctgaggacgggaaacaacttcaccttcagctacacttttgaagacgtgcctttccacagcagctacgcgcacagccagagtctggatcggctgatgaatcctctcattgaccagtacctgtattacctgagcaaaactcagggtacaagtggaacaacgcagcaatcgagactgcagttcagccaagctgggcctagctccatggctcagcaggccaaaaactggctaccgggacccagctaccgacagcagcgaatgtctaagacggctaatgacaacaacaacagtgaatttgcttggactgcagccaccaaatattacctgaatggaagaaattctctggtcaatcccgggcccccaatggccagtcacaaggacgatgaggaaaagtatttccccatgcacggaaatctcatctttggaaaacaaggcacaggaactaccaatgtggacattgaatcagtgcttattacagacgaagaagaaatcagaacaactaatcctgtggctacagaacaatacggacaggttgccaccaaccatcagagtcagaacaccacagcttcctatggaagtgtggacagccagggaatcttacctggaatggtgtggcaggaccgcgatgtctatcttcaaggtcccatttgggccaaaactcctcacacggacggacactttcatccttctccgctcatgggaggctttggactgaaacaccctcctccccagatcctgatcaaaaacacacctgtgccagcgaatcccgcgaccactttcactcctggaaagtttgcttcgttcattacccagtattccaccggacaggtcagcgtggaaatagagtgggagctgcagaaagaaaacagcaaacgctggaacccagaaattcagtacacctccaactacaacaagtcggtgaatgtggagtttaccgtggacgcaaacggtgtttattctgaaccccgccctattggcactcgttaccttacccggaacttgtaatttcctgttaatgaataaaccgatttatgcgtttcagttgaactttggtctctgcgaagggcgaattc

SEQ ID NO: 4814 - protein, 735 aa, Adeno-associated virus
MAADGYLPDWLEDTLSEGIRQWWKLKPGPPPPKPNQQHRDDSRGLVLPGYKYLGPFNGLDKGEPVNEADAAALEHDKAYDHQLKQGDNPYLKYNHADAEFQERLQEDTSFGGNLGRAVFQAKKRVLEPLGLVEEAVKTAPGKKRPIEQSPAEPDSSSGIGKSGQQPAKKRLNFGQTGDTESVPDPQPIGEPPAAPSGVGSNTMASGGGAPMADNNEGADGVGNSSGNWHCDSTWMGDRVITTSTRTWALPTYNNRLYKQISSESGATNDNHYFGYSTPWGYFDFNRFHCHFSPRDWQRLINNNWGFRPKKLNFKLFNIQVKEVTQNDGTTTIANNLTSTVQVFTDSEYQLPYVLGSAHQGCLPPFPADVFMIPQYGYLTLNNGSQAVGRSSFYCLEYFPSQMLRTGNNFTFSYTFEDVPFHSSYAHSQSLDRLMNPLIDQYLYYLSKTQGTSGTTQQSRLQFSQAGPSSMAQQAKNWLPGPSYRQQRMSKTANDNNNSEFAWTAATKYYLNGRNSLVNPGPPMASHKDDEEKYFPMHGNLIFGKQGTGTTNVDIESVLITDEEEIRTTNPVATEQYGQVATNHQSQNTTASYGSVDSQGILPGMVWQDRDVYLQGPIWAKTPHTDGHFHPSPLMGGFGLKHPPPQILIKNTPVPANPATTFTPGKFASFITQYSTGQVSVEIEWELQKENSKRWNPEIQYTSNYNKSVNVEFTVDANGVYSEPRPIGTRYLTRNL

SEQ ID NO: 4815 - protein, 733 aa, Adeno-associated virus
MAADGYLPDWLEDNLSEGIREWWDLKPGAPKPKANQQKQDDGRGLVLPGYKYLGPFNGLDKGEPVNAADAAALEHDKAYDQQLKAGDNPYLRYNHADAEFQERLQEDTSFGGNLGRAVFQAKKRVLEPLGLVEEGAKTAPGKKRPLESPQEPDSSSGIGKKGKQPAKKRLNFEEDTGAGDGPPEGSDTSAMSSDIEMRAAPGGNAVDAGQGSDGVGNASGDWHCDSTWSEGKVTTTSTRTWVLPTYNNHLYLRLGTTSNSNTYNGFSTPWGYFDFNRFHCHFSPRDWQRLINNNWGLRPKAMRVKIFNIQVKEVTTSNGETTVANNLTSTVQIFADSSYELPYVMDAGQEGSLSPFPNDVFMVPQYGYCGIVTGENQNQTDRNAFYCLEYFPSQMLRTGNNFEMAYNFGKVPFHSMYAYSQSPDRLMNPLLDQYLWHLQSTTSGETLNQGNAATTFGKIRSGDFAFYRKNWLPGPCVKQQRLSKTASQNYKIPASGGNALLKYDTHYTLNNRWSNIAPGPPMATAGPSDGDFSNAQLIFPGPSVTGNTTTSANNLLFTSEEEIAATNPRDTDMFGQIADNNQNATTAPITGNVTAMGVLPGMVWQNRDIYYQGPIWAKIPHADGHFHPSPLIGGFGLKHPPPQIFIKNTPVPANPATTFTAARVDSFITQYSTGQVAVQIEWEIEKERSKRWNPEVQFTSNYGNQSSMLWAPDTTGKYTEPRVIGSRYLTNHL

SEQ ID NO: 4816 - protein, 733 aa, Adeno-associated virus
MAADGYLPDWLEDNLSEGIREWWDLKPGAPKLKANQQKQDDGRGLVLPGYKYLGPFHGLDKGEPVNAADAAALEHDKAYDQQLKAGDNPYLRYNHADAEFQERLQEDTSFGGNLGRAVFQAKKRVLEPLGLVEEGAKTAPGKKRPLESPQEPDSSSGIGKKGKQPAKKRLNFEEDTGAGDGPPEGSDTSAMSSDIEMRAAPGGNAVDAGQGSDGVGNASGDWHCDSTWSEGKVTTTSTRTWVLPTYNNHLYLRLGTTSNSNTYNGFSTPWGYFDFNRFHCHFSPRDWQRLINNNWGLRPKAMRVKIFNIQVKEVTTSNGETTVANNLTSTVQIFADSSYELPYVMDAGQEGSLPPFPNDVFMVPQYGYCGIVTGENQNQTDRNAFYCLEYFPSQMLRTGNNFEMAYNFEKVPFHSMYAHSQSLDRLMNPLLDQYLWHLQSTTSGETLNQGNAATTFGKIRSGDFAFYRKNWLPGPCVKQQRFSKTASQNYKIPASGGNALLKYDTHYTLNNRWSNIAPGPPMATAGPSDGDFSNAQLIFPGPSVTGNTTTSANNLLFTSEGEIAATNPRDTDMFGQIADNNQNATTAPITGNVTAMGVLPGMVWQNRDIYYQGPIWAKIPHADGHFHPSPLIGGFGLKHPPPQIFIKNTPVPANPATTFTAARVDSFITQYSTGQVAVQIEWEIEKERSKRRNPEVQFTSNYGNQSSMLWAPDTTGKYTEPRVIGSRYLTNHL

SEQ ID NO: 4817 - protein, 733 aa, Adeno-associated virus
MAADGYLPDWLEDNLSEGIREWWDLKPGAPKPKANQQKQDDGRGLVLPGYEYLGPFNGLDKGEPVNAADAAALEHDKAYDQQLKAGDNPYLRYNHADAEFQERLQEDTSFGGNLGRAVFQAKKRVLEPLGLVEEGAKTAPGKKRPLESPQEPDSSSGIGKKGKQPAKKRLNFEEDTGAGDGPPEGSDTSAMSSDIEMRAAPGGNAVDAGQGSDGVGNASGDWHCDSTWSEGKVTTTSTRTWVLPTYNNHLYLRLGTTSNSNTYNGFSTPWGYFDFNRFHCHFSPRDWQRLINNNWGLRPKAMRVKIFNIQVKEVTTSNGETTVANNLTSTVQIFADSSYELPYVMDAGQEGSLPPFPNDVFMVPQYGYCGIVTGENQNQTDRNAFYCLEYFPSQMLRTGNNFETAYNFEKVPFHSMYAHSQSLDGLMNPLLDQYLWHLQSTTSGETLNQGNAATTFGKIRSGDFAFYRKNWLPGPCVKQQRFSKTASQNYKIPASGGNALLKYDTHYTLNNRWSNIAPGPPMATAGPSDGDFSNAQLIFPGPSVTGNTTTSANNLLFTSEEEIAATNPRDTDMFGQIADNNQNATTAPITGNVTAMGVLPGMVWQNRDIYYQGPIWAKIPHADGHFHPSPLIGGFGLKHPPPQIFIKNTPVPAYPATTFTAARVDSFITQYSTGQVAVQIEWEIEKERSKRWNPEVQFTSNCGNQSSMLWAPDTTGKYTEPRVIGSRYLTNHL

SEQ ID NO: 4818 - protein, 735 aa, Adeno-associated virus
MAADGYLPDWLEDTLSEGIRQWWKLKPGPPPPKPNQQHRDDSRGLVLPGYKYLGPFNGLDKGEPVNEADAAALEHDKAYDHQLKQGDNPYLKYNHADAEFQERLQEDTSFGGNLGRAVFQAKKRVLEPLGLVEEAVKTAPGKKRPIEQSPAEPDSSSGIGKSGQQPAKKRLNFGQTGDTESVPDPQPIGEPPAAPSGVGSNTMASGGGAPMADNNEGADGVGNSSGNWHCDSTWMGDRVITTSTRTWALPTYNNHLYKQISSESGATNDNHYFGYSTPWGYFDFNRFHCHFSPRDWQRLINNNWGFRPKKLNFKLFNIQVKEVTQNDGTTTIANNLTSTVQVFTDSEYQLPYVLGSAHQGCLPPFPADVFMIPQYGYLTLNNGSQAVGRSSFYCLEYFPSQMLRTGNNFTFSYTFEDVPFHSSYAHSQSLDRLMNPLIDQYLYYLSKTQGTSGTTQQSRLQFSQAGPSSMAQQAKNWLPGPSYRQQRMSKTANDNNNSEFAWTAATKYYLNGRNSLVNPGPPMASHKDDEEKYFPMHGNLIFGKQGTGTTNVDIESVLITDEEEIRTTNPVATEQYGQVATNHQSQNTTASYGSVDSQGILPGMVWQDRDVYLQGPIWAKIPHTDGHFHPSPLMGGFGLKHPPPQILIKNTPVPANPATTFTPGKFASFITQYSTGQVSVEIEWELQKENSKRWNPEIQYTSNYNKSVNVEFTVDANGVYSEPRPIGTRYLTRNL

SEQ ID NO: 4819 - DNA, 3127 bp, Adeno-associated virus
gcggccgcgaattcgcccttcgcagagaccaaagttcaactgaaacgaatcaaccggtttattgattaacatgcaattacagattacgggtgaggtaacgagtgccaatagggcgaggctcagagtaaacaccctggctgtcaacggcaaagtccacaccagtctgcttttcaaagttggaggtgtactgaatctccgggtcccagcgcttgctgttttccttctgcagctcccactcgatttccacgctgacttgtccggtgctgtactgtgtgatgaacgaagcaaacttggcaggagtaaacacctccggaggattagcgggaacgggagtgttcttgatcaggatctgaggaggcggatgtttaagtccaaagccgcccatcaaaggagacgggtgaaagttgccatccgtgtgaggaatcttggcccagatgggaccctgcaggtacacgtcccggttctgccagaccatgccaggtaaggctccctggttgttgacaacttgtgtctgggctgcagtattagccgcttgtaagttgctgctgactatcccgtattcttccgtggctacaggattagtaggacgaatttcttcttcatttgtcattaacacattttccaatgtagttttgttagttgctccagtttttccaaaaatcaggactccgctggatgggaaaaagcggtcctcgtcgtccttgtgagttgccatggcgacgccgggattaaccaacgagtttctgccgttcaggtgatatttggtggcaccagtccaagcaaagttgctgttgttgttttgatccagcgttttggagaccctttgttgccggaagcagggtccaggtaaccaattcttggcttgttcggccatagttgaaggcccgccctggtaaaactgcagttcccgattgccagctgtgcctcctgggtcactctgtgttctggccaggtagtacaagtactggtcgatgaggggattcatcagccggtccaggctctggctgtgtgcgtagctgctgtggaaaggcacgtcctcgaagctgtagctgaactcaaagttgttgcccgttctcagcatctgagaggggaagtactccaggcagtagaaggaggaacgtcccacagactgactgccattgttgagagtcaggtagccgtactgaggaatcatgaagacgtccgccgggaacggaggcaggcagccctggtgcgcagagccgaggacgtacggcagctggtattccgagtccgagaatacctgaatcgtgctggtaaggttattagcgatggtcgtaacgccgtcattcgtcgtgacctccttgacctggatgttgaagagcttgaaccgcagcttcttgggccggaatccccagttgttgttgatgagtcgctgccagtcacgtggtgagaagtggcagtggaatctgttaaagtcaaaatacccccagggggtgctgtagccgaagtaggtgttgtcgttggtactacctgcagtttcactggagatttgctcgtagaggtggttgttgtaggtgggcagggcccaggttcgggtgctggtggtaatgactctgtcgcccagccatgtggaatcgcaatgccaatttcctgaggcattacccactccgtcggcaccttcgttattgtctgccattggtgcgccaccgcctgcagccactgtaccagatcccacactagagggcgctgctggaggttctccgagaggttgagggtcggggactgactctgagtcgccagtctgaccgaaattgagtctctttctggcgggctgctggcccttcttgccgatgcccgtggaggagtcgggggaacgctgaggtgacggctctaccggtctcttctttgcaggagccgtcttagcgccttcctcaaccagaccgagaggttcgagaacccgcttcttggcctggaagactgctcgcccgaggttgcccccaaatgacgtatcttcttgcagacgctcctgaaactcggcgtcggcgtggttataccgcaggtacgggttgtcacccgcattgagctgctggtcgtaggccttgtcgtgctcgagggccgctgcgtccgccgcgttgacgggctcccccttgtcgagtccgttgaagggtccgaggtacttgtagccaggaagcaccagaccccggccgttgtcctgcttttgctggttggctttgggtttcggggctccaggtttcaggtcccaccactcgcgaatgccctcagagaggttgtcctcgagccaatctggaagataaccatcggcagccatacctgatttaaatcatttattgttcaaagatgcagtcatccaaatccacattgaccagatcgcaggcagtgcaagcgtctggcacctttcccatgatatgatgaatgtagcacagtttctgatacgcctttttgacgacagaaacgggtttagattctgacacgggaaagcactctaaacagtctttctgtccgtgagtgaagcagatatttgaattctgattcattctctcgcattgtctgcagggaaacagcatcagattcatgcccacgtgacgagaacatttgttttggtacctgtctgcgtagttgatcgaagcttccgcgtctgacgtcgatggctgcgcaactgactcgcgcacccgtttgggctcacttatatctgcgtcactgggggcgggtcttttcttggctccaccctttttgacgtagaattcatgctccacctcaaccacgtaatcctttgcccaccggaaaaagtctttgacttcctgcttggtgaccttcccaaagtcatgatccagacggcgggtgagttcaaatttgaacatccggtcttgcaacggctgctggtgttcgaaggtcgttgagttcccgtcgatcacggcgcacatgttggtgttggagatgacgatcgcgggagtcgggtctatctgggccgaggacttgcatttctggtccacgcgcaccttgcttcctccgagaatggctttggccgactccacgaccttggcggtcatcttcccctcctcccaccagatcaccatcttgtcgacacagtcgttgaagggaaagttctcattggtccagttgacgcagccgtagaaagggcgaattc

SEQ ID NO: 4820 - DNA, 3106 bp, Adeno-associated virus
gcggccgcgaattcgcccttcgcagagaccaaagttcaactgaaacgaatcaaccggtttattgattaacaagtaattacaggttacgggtgaggtaacgggtgccaatggggcgaggctcagtataaaccccttcgttgttgacagcaaattccacattattagacttggcataatttgaggtgtactgaatctctggattccagcgtttgctgttttctttctgcagttcccactcgatctccacgctgacctggccggtgctgtactgcgtgataaatgaggcaaacttggcaggagtaaacacctctggaggattagcaggtaccggggtgtttttgatgagaatttgaggaggcgggtgtttgagtccaaatccgcccatcaggggagacgggtgaaagttgccgtccgtgtgaggaattttggcccagatgggaccctgcaggcacacgtcccggttctgccagaccatgccgggcagagccccctggctgttgacagtctgtgtctggggtccggccgtagacgattgcaggttgctggagaccacaccgtattcttctgtagccacgggattggtggttttgatctcctcctcgctggtcattagcacgttttccagcgttgtcttgttggcagcccccgttttgccaaaaaccagcactccgttgatgggaaagaactggtcctcgtcgtccttgttggtggccatggctacgcccgggttggttaatgaatttctaccattcagatggtatttagtggccccggtccaggcaaagttactgttgttgttgctgtctatgttttttgacagtctctgctgccgataacagggtccgggcagccagttctttgattgctcggccatggtgttgggcccagcctgatggaactgcagctcccttgtggaccccgtagtgctctgggtccgggccaggtagtacaggtactggtcgatgaggggattcatcagccggtctaggctctggctgtgcacatagctgctgtggaaaggcacttcctcaaaggtgtagctgaattcaaagttattgcccgttctcagcatctgagaaggaaagtactccaggcagtagaaggaggaacgtcccacagactgactgccgttgtttagagtcagatatccgtactgaggaatcatgaacacgtccgcagggaacggagggaggcagccctggtgcgcagagccgaggacgtacggcagttggtactccgagtccgagaagacctgaatcgtgctggtaaggttattagcgatggtcgtaacgccgtcgttcgtcgtgacctccttgacctggatgttgaacaacttgaaccgcagctttctgggccggaatccccagttgttgttgatgagtcgctgccagtcacgtggtgagaagtggcagtggaatctgttgaagtcaaaatagccccagggggtgctgtagctgaagaagtggttgtcgttggtagccccgctctgacttgatatctgcttgtagaggtggttgttgtaggtgggcagggcccaggtgcgggtgctggtggtgatgactctgtcgcccagccatgtggaatcgcaatgccaatttccggaggcattacccactccgtcggcgccttcgttattgtctgccattggtgcgccaccgcctgcagccattgtaccagatcccagacctgagggcgcggcgggaggttctccgagaggttgggggtcgggcactgactctgagtcgccagtctgcccaaagttgagcttctttttagcgggctgctggcctttcttgccgatgcccgtggaggagtcgggggattctatgggtctcttctttccaggagccgtcttagcgacttcctcaaccagaccgagaggttcgagaacccgcttcttggcctggaagactgctcgcccgaggttgcccccaaaagacgtatcttcttgaagacgctcctgaaactcggcgtcggcgtggttgtacttgaggtacgggttgtccccctgctcgagctgcttgtcgtaggccttgtcgtgctcgagggccgcggcgtctgcctcgttgaccggctctcccttgtcgagtccgttgaagggtctgaggtacttgtagccaggaagcaccagaccccggccgtcgtcctgcttttgctggttggctttgggtttcggggctccaggtttcaagtcccaccactcgcgaatgccctcagagaggttgtcctcgagccaatctggaagataaccatcggcagccatacctggtttaagtcatttattgctcagaaacacagtcatccaggtccacgttgaccagatcgcaggccgagcaagcaatctcgggagcccgccccagcagatgatgaatggcacagagtttccgatacgtcctctttctgacgaccggttgagattctgacacgccggggaaacattctgaacagtctctggtcccgtgcgtgaagcaaatgttgaaattctgattcactctctcgcatgtcttgcagggaaacagcatctgaagcatgcccgcgtgacgagaacatttgttttggtacctgtcggcaaagtccaccggagctccttccgcgtctgacgtcgatggattcgcgactgaggggcaggcccgcttgggctcgcttttatccgcgtcatcgggggcgggtctcttgttggccccaccctttctgacgtagaacccatgcgccacctcggtcacgtgatcctgcgcccagcggaagaaccttttgacttcctgctttgtcaccttgccaaagttatgctccagacggcgggtgggttcaaatttgaacatccggtcctgcaacggctgctggtgctcgaaggtggcgctgttcccgtcaatcacggcgcacatgttggtgttggaggtgacggtcacgggggtggggtcgatctgggcggacgacttgcacttttggtccacgcgcaccttgctgccgccgagaatggccttggcggactccacgaccttggccgtcatcttgccctcctcccaccagatcaccatcttgtcggcgcaatcgttgaagggaaagttctcattggtccagttgacgcagccgtagaaagggcgaattc

SEQ ID NO: 4821 - DNA, 3102 bp, Adeno-associated virus
gcggccgcgaattcgcccttcgcagagaccaaagttcaactgaaacgaatcaaccggtttattgattaacaagtaattacaggttacgggtgaggtaacgggtgccaatggggcgaggctcagtataaaccccttcgttgttgacagcaaattccacattattagacttggcataatttgaggtgtactgaatctctggattccagcgtttgctgttttctttctgcagttcccactcgatctccacgctgacctggccggtgctgtactgcgtgataaatgaggcaaacttggcaggagtaaacacctctggaggattagcaggtaccggggtgtttttgatgagaatttgaggaggcgggtgtttgagtccaaatccgcccatcaggggagacgggtgaaagttgccgtccgtgtgaggaatttcggcccagatgggaccctgcaggtacacgtcccggttctgccagaccatgccgggcagagccccctggctgttgacagtctgtgtccggggtccggccgtagacgattgcaggttgctggagaccacaccgtattcttctgtagccacgggattggtggttttgatctcctcctcgctggtcattagcacgttttccagcgttgtcttgttggcagcccccgttttgccaaaaaccagcactccgttgatgggaaggaactggtcctcgtcgtccttgttggtggccatggctacgcccgggttggttaatgaatttctaccattcagatggtatttagtggccccggtccaggcaaagttactgttgttgttgctgtctatgttttttgacagtctctgctgccgataacagggtccgggcagccagttctttgattgctcggccacggtgttgggcccagcctgatggaactgcagctcccttgtggaccccgtagtgctctgggtccgggccaggtagtacaggtactggtcgatgaggggattcatcagccggtccaggctctggctgtgcgcatagctgctgtggaaaggcacttcctcaaaggtgtagctgaattcaaagttattgcccgttctcagcatctgagaaggaaagtactccaggcagcagaaggaggaacgtcccacagactgactgccgttgtttagagtcagatatccgtactgaggaatcatgaacacgtccgcagggaacggagggaggcagccctggtgcgcagagccgaggacgtacggcagttggtactccgagtccgagaagacctgaatcgtgctggtaaggttattagcgatggtcgtaacgccgtcgttcgtcgtgacctccttgacctggatgttgaacaacttgaaccgcagctttctgggccggaatccccagttgttgttgatgagtcgctgccagtcacgtggtgagaagtggcagtggaatctgttgaagtcaaaatagccccagggggtgctgtagccgaagaagtggttgtcgttggtagccccgctctgacttgatatctgcttgtagaggtggttgttgtaggtgggcagggcccaggtgcgggtgctggtggtgatgactctgtcgcccagccatgtggaatcgcaatgccaatttccggaggcattacccactccgtcggcgccttcgttattgtctgccattggtgcgccaccgcctgcagccattgtaccagatcccagacctgagggcgcggcgggaggttctccgagaggttgggggtcgggcactgactctgagtcgccagtctgcccaaagttgagcttctttttagcgggctgctggcctttcttgccgatgcccgtggaggagtcgggggattctatgggtctcttctttccggaagccgtcttagcgccttcctcaaccagaccgagaggttcgagaacccgcttcttggcctggaagactgctcgcccgaggttgcccccaaaagacgtatcttcttgaagacgctcctgaaactcggcgtcggcgtggttgtacttgaggtacgggttgtccccctgctcgagctgcttgtcgtaggccttgtcgtgctcgagggccgcggcgtctgcctcgttgaccggctctcccttgtcgagtccgttgaagggtccgaggtacttgtagccaggaagcaccagaccccggccgtcgtcctgcttttgctggttggctttgggtttcggggctccaggtttcaagtcccaccactcgcgaatgccctcagagaggttgtcctcgagccaatctggaagataaccatcggcagccatacctggtttaagtcatttattgctcagaaacacagtcatccaggtccacgttgaccagatcgcaggccgagcaagcaatctcgggagcccgccccagcagatgatgaatggcacagagtttccgatacgtcctctttctgacgaccggttgagattctgacacgccggggaaacattctgaacagtctctggtcccgtgcgtgaagcaaatgttgaaattctgattcattctctcgcatgtcttgcagggaaacagcatctgaagcatgcccgcgtgacgagaacatttgttttggtacctgtcggcaaagtccaccggagctccttccgcgtctgacgtcgatggatccgcgactgaggggcaagcccgcttgggctcgcttttatccgcgtcatcgggggcgggtctcttgttggctccaccctttctgacgtagaactcatgcgccacctcggtcacgtgatcctgcgcccagcggaagaactctttgacttcctgctttgtcaccttgccaaagtcatgctccagacggcgggtgagttcaaatttgaacatccggtcttgtaacggctgctggtgctcgaaggtggtgctgttcccgtcaatcacggcgcacatgttggtgttggaagtgacgatcacgggggtgggatcgatctgggcggacgacttgcacttttggtccacgcgcaccttgctgccgccgagaatggccttggcggactccacgaccttggccgtcatcttgccctcctcccaccagatcaccatcttgtcgacgcaatcgttgaagggaaagttctcattggtccagttgacgcagccgaagggcgaattc

SEQ ID NO: 4822 - protein, 728 aa, Adeno-associated virus
MAADGYLPDWLEDNLSEGIREWWDLKPGAPKPKANQQKQDDGRGLVLPGYRYLGPFNGLDKGEPVNEADAAALEHDKAYDKQLEQGDNPYLKYNHADAEFQERLQEDTSFGGNLGRAVFQAKKRVLEPLGLVEEGAKTAPGKKRPIESPDSSTGIGKNGQPPAKKKLNFGQTGDSESVPDPQPLGEPPAAPSGLGSGTMAAGGGAPMADNNEGADGVGNASGNWHCDSTWLGDRVITTSTRTWALPTYNNHLYKQISSQSGATNDNHFFGYSTPWGYFDFNRFHCHFSPRDWQRLINNNWGFRPRKLRFKLFNIQVKEVTTNDGVTTIANNLTSTIQVFSDSEYQLPYVLGSAHQGCLPPFPADVFMIPQYGYLTLNNGSQSVGRSSFYCLEYFPSQMLRTGNNFEFSYTFEEVPFHSSYAHSQSLDRLMNPLIDQYLYYLARTQSTTGSTRELQFHQAGPNTMAEQSKNWLPGPCYRQQRLSKNIDSNNNSNFAWTGATKYHLNGRNSLTNPGVAMATNKDDEDQFFPINGVLVFGKTGAANKTTLENVLMTSEEEIKTTNPVATEEYGVVSSNLQSSTAGPQTQTVNSQGALPGMVWQNRDVYLQGPIWAKIPHTDGNFHPSPLMGGFGLKHPPPQILIKNTPVPANPPEVFTPAKFASFITQYSTGQVSVEIEWELQKENSKRWNPEIQYTSNYAKSNNVEFAVNNEGVYTEPRPIGTRYLTRNL

SEQ ID NO: 4823 - DNA, 2187 bp, Adeno-associated virus
atggctgccgatggttatcttccagattggctcgagggcaacctctctgagggcattcgcgagtggtgggacttgaaacctggagccccgaaacccaaagccaaccagcaaaagcaggacgacggccggggtctggtgcttcctggctacaggtacctcggacccttcaacggactcgacaagggagagccggtcaacgaggcagacgccgcggccctcgagcacgacaaggcctacgacaagcagctcgagcagggggacaacccgtacctcaagtacaaccacgccgacgccgagtttcaggagcgtcttcaagaagatacgtcttttgggggcaacctcgggcgagcagtcttccaggccaagaagcgggttctcgaacctctcggtctggttgaggaaggcgctaagacggctcctggaaagaagagacccatagaatcccccgactcctccacgggcatcggcaagaacggccagccgcccgctaaaaagaagctcaactttgggcagactggcgactcagagtcagtgcccgacccccaacctctcggagaacctcccgccgcgccctcaggtctgggatctggtacaatggctgcaggcggtggcgcaccaatggcagacaataacgaaggcgccgacggagtgggtaatgcctccggaaattggcattgcgattccacatggctgggcgacagagtcatcaccaccagcacccgcacctgggccctgcccacctacaacaaccacctctacaagcagatatcaagtcagagcggggctaccaacgacaaccacttcttcggctacagcaccccctggggctattttgacttcaacagattccactgccacttctcaccacgtgactggcagcgactcatcaacaacaactggggattccggcccagaaagctgcggttcaagttgttcaacatccaggtcaaggaggtcacgacgaacgacggcgttacgaccatcgctaataaccttaccagcacgattcaggtcttctcggactcggagtaccaactgccgtacgtcctcggctctgcgcaccagggctgcctccctccgttccctgcggacgtgttcatgattcctcagtacggatatctgactctaaacaacggcagtcagtctgtgggacgttcctccttctactgcctggagtactttccttctcagatgctgagaacgggcgataactttgaattcagctacacctttgaggaagtgcctttccacagcagctatgcgcacagccagagcctggaccggctgatgaatcccctcatcgaccagtacctgtactacctggcccggacccagagcactacggggtccacaagggagctgcagttccatcaggctgggcccaacaccatggccgagcaatcaaagaactggctgcccggaccctgttatcggcagcagagactgtcaaaaaacatagacagcaacaacaacagtaactttgcctggaccggggccactaaataccatctgaatggtagaaattcattaaccaacccgggcgtagccatggccaccaacaaggacgacgaggaccagttctttcccatcaacggagtgctggtttttggcaaaacgggggctgccaacaagacaacgctggaaaacgtgctaatgaccagcgaggaggagatcaaaaccaccaatcccgtggctacagaagaatacggtgtggtctccagcaacctgcaatcgtctacggccggaccccagacacagactgtcaacagccagggggctctgcccggcatggtctggcagaaccgggacgtgtacctgcagggtcccatctgggccaaaattcctcacacggacggcaactttcacccgtctcccctgatgggcggatttggactcaaacacccgcctcctcaaattctcatcaaaaacaccccggtacctgctaatcctccagaggtgtttactcctgccaagtttgcctcatttatcacgcagtacagcaccggccaggtcagcgtggagatcgagtgggaactgcagaaagaaaacagcaaacgctggaatccagagattcagtacacctcaaattatgccaagtctaataatgtggaatttgctgtcaacaacgaaggggtttatactgagcctcgccccattggcacccgttacctcacccgtaacctgtaa

SEQ ID NO: 4824 - protein, 728 aa, Adeno-associated virus; identical to SEQ ID NO: 4803

SEQ ID NO: 4825 - DNA, 3106 bp, Adeno-associated virus
gcggccgcgaattcgcccttcgcagagaccaaagttcaactgaaacgaatcagccggtttattgattaacaagtaattacaggttacgggtgaggtaacgggtgccaatggggcgaggctcagtataaaccccttcgttgttgacagcaaattccacattattagacttggcataatttgaggtgtactgaatctctggattccagcgtttgctgttttctttctgcagttcccactcgatctccacgctgacctggccggtgctgtactgcgtgataaatgaggcaaacttggcaggagtaaacacctctggaggattagcaggtaccggggtgtttttgatgagaatttgaggaggcgggtgtttgagtccaaatccgcccatcaggggagacgggtgaaagttgccgtccgtgtgaggaattttggcccagatgggaccctgcaggtacacgtcccggttctgccagaccatgccgggcagagccccctggctgttgacagtctgtgtctggggtccggccgtagacgattgcaggttgctggagaccacaccgtattcttctgtagccacgggattggtggttttgatctcctcctcgctggtcattagcacgttttccagcgttgtcttgttggcagcccccgttttgccaaaaaccagcactccgttgatgggaaagaactggtcctcgtcgtccttgttggtggccatggctacgcccgggttggttaatgaatttctaccattcagatggtatttagtggccccggtccaggcaaagttactgttgttgttgctgtctatgttttttgacagtctctgctgccgataacagggtccgggcagccagttctttgattgctcggccatggtgttgggcccagcctgatggaactgcagctcccttgtggaccccgtagtgctctgggtccgggccaggtagtacaggtactggtcgatgaggggattcatcagccggtccaggctctggctgtgcgcatagctgctgtggaaaggcacttcctcaaaggtgtagctgaattcaaagttatcgcccgttctcagcatctgagaaggaaagtactccaggcagtagaaggaggaacgtcccacagactgactgccgttgtttagagtcagatatccgtactgaggaatcatgaacacgtccgcagggaacggagggaggcagccctggtgcgcagagccgaggacgtacggcagttggtactccgagtccgagaagacctgaatcgtgctggtaaggttattagcgatggtcgtaacgccgtcgttcgtcgtgacctccttgacctggatgttgaacaacttgaaccgcagctttctgggccggaatccccagttgttgttgatgagtcgctgccagtcacgtggtgagaagtggcagtggaatctgttgaagtcaaaatagccccagggggtgctgtagccgaagaagtggttgtcgttggtagccccgctctgacttgatatctgcttgtagaggtggttgttgtaggtgggcagggcccaggtgcgggtgctggtggtgatgactctgtcgcccagccatgtggaatcgcaatgccaatttccggaggcattacccactccgtcggcgccttcgttattgtctgccattggtgcgccaccgcctgcagccattgtaccagatcccagacctgagggcgcggcgggaggttctccgagaggttgggggtcgggcactgactctgagtcgccagtctgcccaaagttgagcttctttttagcgggcggctggccgttcttgccgatgcccgtggaggagtcgggggattctatgggtctcttctttccaggagccgtcttagcgccttcctcaaccagaccgagaggttcgagaacccgcttcttggcctggaagactgctcgcccgaggttgcccccaaaagacgtatcttcttgaagacgctcctgaaactcggcgtcggcgtggttgtacttgaggtacgggttgtccccctgctcgagctgcttgtcgtaggccttgtcgtgctcgagggccgcggcgtctgcctcgttgaccggctctcccttgtcgagtccgttgaagggtccgaggtacctgtagccaggaagcaccagaccccggccgtcgtcctgcttttgctggttggctttgggtttcggggctccaggtttcaagtcccaccactcgcgaatgccctcagagaggttgccctcgagccaatctggaagataaccatcggcagccatacctggtttaagtcatttattgctcagaaacacagtcatccaggtccacgttggccagatcgcaggccgagcaagcaatctcgggagcccgccccagcagatgatgaatggcacagagtttccgatacgtcctctttctgacgaccggttgagattctgacacgccggggaaacattctgaacagtctctggtcccgtgcgtgaagcaaatgttgaaattctgattcattctctcgcatgtcttgcaggggaacagcatctgaagcatgcccgcgtgacgagaacatttgttttggtacctgtcggcaaagtccaccggagctccttccgcgtctgacgtcgatggatccgcgactgaggggcaggcccgcttgggctcgcttttatccgcgtcatcgggggcgggtctcttgttggctccaccctttctgacgtagaactcatacgccacctcggtcacgtgatcctgcgcccagcggaagaactctttgacttcctgctttgtcaccttgccaaagtcatgctccagacggcgggtgagttcaaatttgaacatccggtcttgtaacggctgctggtgctcgaaggtggtgctgttcccgtcaatcacggcgcacatgttggtgttggaagtgacgatcacgggggtgggatcgatctgggcggacgacttgcacttttggtccacgcgcaccttgctgccgccgagaatggccttggcggactccacgaccttggccgtcatcctgccctcctcccaccagatcaccatcttgtcgacgcaatcgttgaagggaaagttctcattggtccagttgacgcagccgtagaaagggcgaattc

SEQ ID NO: 4826 - protein, 728 aa, Adeno-associated virus
MAADGYLPDWLEDNLSEGIREWWDLKPGAPKPKANQQKQDDGRGLVLPGYRYLGPFNGLDKGEPVNEADAAALEHDKAYDKQLEQGDNPYLKYNHADAEFQERLQEDTSFGGNLGRAVFQAKKRVLEPLGLVEEGAKTAPGKKRPIESPDSSTGIGKNGQPPAKKKLNFGQTGDSESVPDPQPLGEPPAAPSGLGSGTMAAGGGAPMADNNEGADGVGNASGNWHCDSTWLGDRVITTSTRTWALPTYNNHLYKQISSQSGATNDNHFFGYSTPWGYFDFNRFHCHFSPRDWQRLINNNWGFRPRKLRFKLFNIQVKEVTTNDGVTTIANNLTSTIQVFSDSEYQLPYVLGSAHQGCLPPFPADVFMIPQYGYLTLNNGSQSVGRSSFYCLEYFPSQMLRTGDNFEFSYTFEEVPFHSSYAHSQSLDRLMNPLIDQYLYYLARTQSTTGSTRELQFHQAGPNTMAEQSKNWLPGPCYRQQRLSKNIDSNNNSNFAWTGATKYHLNGRNSLTNPGVAMATNKDDEDQFFPINGVLVFGKTGAANKTTLENVLMTSEEEIKTTNPVATEEYGVVSSNLQSSTAGPQTQTVNSQGALPGMVWQNRDVYLQGPIWAKIPHTDGNFHPSPLMGGFGLKHPPPQILIKNTPVPANPPEVFTPAKFASFITQYSTGQVSVEIEWELQKENSKRWNPEIQYTSNYAKSNNVEFAVNNEGVYTEPRPIGTRYLTRNL

SEQ ID NO: 4827 - protein, 728 aa, Adeno-associated virus; identical to SEQ ID NO: 4822

SEQ ID NO: 4828 - protein, 728 aa, Adeno-associated virus
MAADGYLPDWLEDNLSEGIREWWDLKPGAPKPKANQQKQDDGRGLVLPGYKYLGPFNGLDKGEPVNEADAAALEHDKAYDKQLEQGDNPYLKYNHADAEFQERLQEDTSFGGNLGRAVFQAKKRVLEPLGLVEEGAKTAPGKKRPIESPDSSTGIGKNGQPPAKKKLNFGQTGDSESVPDPQPLGEPPAAPSGLGSGTMAAGGGAPMADNNEGADGVGNASGNWHCDSTWLGDRVITTSTRTWALPTYNNHLYKQISSQSGATNDNHFFGYSTPWGYFDFNRFHCHFSPRDWQRLINNNWGFRPRKLRFKLFNIQVKEVTTNDGVTTIANNLTSTIQVFSDSEYQLPYVLGSAHQGCLPPFPADVFMIPQYGYLTLNNGSQSVGRSSFYCLEYFPSQMLRTGNNFEFSYTFEEVPFHSSYAHSQSLDRLMNPLIDQYLYYLARTQSTTGSTRELQFHQAGPNTMAEQSKNWLPGPCYRQQRLSKNIDSNNNSNFAWTGATKYHLNGRNSLTNPGVAMATNKDDEDQFFPINGVLVFGKTGAANKTTLENVLMTSEEEIKTTNPVATEEYGVVSSNLQSSTAGPQTQTVNSQGALPGMVWQNRDVYLQGPIWAKIPHTDGNFHPSPLMGGFGLKHPPPQILIKNTPVPANPPEVFTPAKFASFITQYSTGQVSVEIEWELQKENSKRWNPEIQYTSNYAKSNNVEFAVNNEGVYTEPRPIGTRYLTRNL

SEQ ID NO: 4829 - protein, 728 aa, Adeno-associated virus
MAADGYLPDWLEDNLSEGIREWWDLKPGAPKPKANQQKQDDGRGLVLPGYKYLGPFNGLDKGEPVNEADAAALEHDKAYDKQLEQGDNPYLKYNHADAEFQERLQEDTSFGGNLGRAVFQAKKRVLEPLGLVEEGAKTAPGKKRPIESPDSSTGIGKKGQQPAKKKLNFGQTGDSESVPDPQPLGEPPAAPSGLGSGTMAAGGGAPMADNNEGADGVGNASGNWHCDSTWLGDRVITTSTRTWALPTYNNHLYKQISSQSGATNDNHFFGYSTPWGYFDFNRFHCHFSPRDWQRLINNNWGFRPRKLRFKLFNIQVKEVTTNDGVTTIANNLTSTIQVFSDSEYQLPYVLGSAHQGCLPPFPADVFMIPQYGYLTLNNGSQSVGRSSFYCLEYFPSQMLRTGNNFEFSYTFEEVPFHSSYAHSQSLDRLMNPLIDQYLYYLARTQSTTGSTRELQFHQAGPNTMAEQSKNWLPGPCYRQQRLSKNIDSNNNSNFAWTGATKYHLNGRNSLTNPGVAMATNKDDEDQFFPINGVLVFGKTGAANKTTLENVLMTSEEEIKTTNPVATEEYGVVSSNLQSSTAGPQTQTVNSQGALPGMVWQNRDVYLQGPIWAKIPHTDGNFHPSPLMGGFGLKHPPPQILIKNTPVPANPPEVFTPAKFASFITQYSTGQVSVEIEWELQKENSKRWNPEIQYTSNYAKSNNVEFAVNNEGVYTEPRPIGTRYLTRNL

SEQ ID NO: 4830 - DNA, 3098 bp, Adeno-associated virus
gaattcgcccttcgcagagaccaaagttcaactgaaacgaatcaaccggtttattgattaacaagtaattacaggttacgggtgaggtaacgggtgccaatggggcgaggctcagtataaaccccttcgttgttgacagcaaattccacattattagacttggcataatttgaggtgtactgaatctctggattccagcgtttgctgttttctttctgcagttcccactcgatctccacgctgacctggccggtgctgtactgcgtgataaatgaggcaaactaggcaggagtaaacacccctggaggattagcaggtaccggggtgtttttgatgagaatttgaggaggcgggtgtttgagtccaaatccgcccatcaggggagacgggtgaaagttgccgtccgtgtgaggaattttggcccagatgggaccctgcaggtacacgtcccggttctgccagaccatgccgggcagagccccctggctgttgacagtctgtgtctggggtccggccgtagacgattgcaggttgctggagaccacaccgtattcttctgtagccacgggattggtggttttgatctcctcctcgctggtcattagcacgttttccagcgttgtcttgttggcagcccccgttttgccaaaaaccagcactccgttgatgggaaagaactggccctcgtcgtccttgttggtggccatggctacgcccgggttggttaatgaatttctaccattcagatggtatttagtggccccggtccaggcaaagttactgttgttgttgctgtctatgttttttgacagtctctgctgccgataacagggtccgggcagccagttctttgattgctcggccatggtgttgggcccagcctgatggaactgcagctcccttgtggaccccgtagtgctctgggtccgggccaggtagtacaggtactggtcgatgaggggattcatcagccggtccaggctctggctgtgcgcatagctgctgtggaaaggcacttcctcaaaggtgtagctgaattcaaagttattgcccgttctcagcatctgagaaggaaagtactccaggcagtagaaggaggaacgtcccatagactgactgccgttgtttagagtcagatatccgtactgaggaatcatgaacacgtccgcagggaacggagggaggcagccctggtgcgcagagccgaggacgtacggcagttggtactccgagtccgagaagacctgaatcgtgctggtaaggttattagcgatggtcgtaacgccgtcgttcgtcgtgacctccttgacctggatgttgaacaacttgaaccgcagctttctgggccggaatccccagttgttgttgatgagtcgctgccagtcacgtggtgagaagtggcagtggaatctgttgaagtcaaaatagccccagggggtgctgtagccgaagaagtggttgtcgttggtagccccgctctgacttgatatctgcttgtagaggtggttgttgtaggtgggcagggcccaggtgcgggtgctggtggtgatgactctgtcgcccagccatgtggaatcgcaatgccaatttccggaggcattacccactccgtcggcgccttcgttattgtctgccattggtgcgccaccgcctgcagccattgtaccagatcccagacctgagggcgcggcgggaggttctccgagaggttgggggtcgggcactgactctgagtcgccagtctgcccaaagttgagcttctttttagcgggctgctggcctttcttgccgatgcccgtggaggagtcgggggattctatgggtctcttctttccaggagccgtcttagcgccttcctcaaccagaccgagaggttcgagaacccgcttcttggcctggaagactgctcgcccgaggttgcccccaaaagacgtatcttcttgaagacgctcctgaaactcagcgtcggcgtggttgtacttgaggtacgggttgtccccctgctcgagctgcttgtcgtaggccttgtcgtgctcgagggccgcggcgtctgcctcgttgaccggctctcccttgtcgagtccgttgaagggtccgaggtacttgtagccaggaagcaccagaccccggccgtcgtcctgcttttgctggttggctttgggtttcggggctccaggtttcaagtcccaccactcgcgaatgccctcagagaggttgtcctcgagccaatctggaagataaccatcggcagccatacctggtttaagtcatttattgctcagaaacacagtcatccaggtccacgttgaccagatcgcaggccgagcaagcaatctcgggagcccgccccagcagatgatgaatggcacagagtttccgatacgtcctctttctgacgaccggttgagattctgacacgccggggaaacattctgaacagtctctggtcccgtgcgtgaagcaaatgttgaaattctgattcattctctcgcatgtcttgcagggaaacagcatctgaagcatgcccgcgtgacgagaacatttgttttggtacctgtcggcaaagtccaccggagctccttccgcgtctgacgtcgatggatccgcgactgaggggcaggcccgcttgggctcgcttttatccgcgtcatcgggggcgggcctcttgttggctccaccctttctgacgtagaactcatgcgccacctcggtcacgtgatcctgcgcccagcggaagaactctttgacttcctgctttgtcaccttgccaaagtcctgctccagacggcgggtgagttcaaatttgaacatccggtcttgtaacggctgctggtgctcgaaggtggtgctgttcccgtcaatcacggcgcacatgttggtgttggaagtgacgatcacgggggtgggatcgatctgggcggacgacttgcacttttggtccacgcgcaccttgctgccgccgagaatggccttggcggactccacgaccttggccgtcatcttgccctcctcccaccagatcaccatcttgtcgacgcaatcgttgaagggaaagttctcattggtccagttgacgcagccgtagaaagggcgaattc

SEQ ID NO: 4831 - protein, 729 aa, Adeno-associated virus
MAADGYLPDWLEDNLSEGIREWWDLKPGAPKPKANQQKQDDGRGLVLPGYKYLGPFNGLDKGEPVNAADAAALEHDKAYDQQLKAGDNPYLRYNHADAEFQERLQEDTSFGGNLGRAVFQAKKRVLEPLGLVEEGAKTAPGKKRPIDSPDSSTGIGKKGQQPAKKKLNFGQTGDSESVPDPQPLGEPPAAPSSVGSGTMAAGGGAPMADNNEGADGVGNASGNWHCDSTWLGDRVITTSTRTWALPTYNNHLYKQISSSSSGATNDNHYFGYSTPWGYFDFNRFHCHFSPRDWQRLINNNWGFRPKKLRFKLFNIQVKEVTTNDGVTTIANNLTSTVQVFSDSEYQLPYVLGSAHQGCLPPFPADVFMIPQYGYLTLNNGSQSVGRSSFYCLEYFPSQMLRTGNNFEFSYSFEDVPFHSSYAHSQSLDRLMNPLIDQYLYYLARTQSTTGSTRELQFHQAGPNTMAEQSKNWLPGPCYRQQGLSKNLDFNNNSNFAWTAATKYHLNGRNSLTNPGIPMATNKDDEDQFFPINGVLVFGKTGAANKTTLENVLMTSEEEIKTTNPVATEEYGVVSSNLQPSTAGPQSQTINSQGALPGMVWQNRDVYLQGPIWAKIPHTDGNFHPSPLMGGFGLKHPPPQILIKNTPVPANPPEVFTPAKFASFITQYSTGQVSVEIEWELQKENSKRWNPEIQYTSNYAKSNNVEFAVNPDGVYTEPRPIGTRYLPRNL

SEQ ID NO: 4832 - protein, 1458 aa, Adeno-associated virus
MAADGYLPDWLEDNLSEGIREWWDLKPGAPKPKANQQKQDDGRGLVLPGYKYLGPFNGLDKGEPVNAADAAALEHDKAYDQQLKAGDNPYLRYNHADAEFQERLQEDTSFGGNLGRAVFQAKKRVLEPLGLVEEGAKTAPGKKRPIDSPDSSTGIGKKGQQPAKKKLNFGQTGDSESVPDPQPLGEPPAAPSSVGSGTMAAGGGAPTADNNEGADGVGNASGNWHCDSTWLGDRVITTSTRTWALPTYNNHLYKQISSSSSGATNDNHYFGYSTPWGYFDFNRFHCHFSPRDWQRLINNNWGFRPKKLRFKLFNIQVKEVTTNDGVTTIANNLTSTVQVFSDSEYQLPYVLGSAHQGCLPPFPADVFMIPQYGYLTLNNGSQSVGRSSFYCLEYFPSQMLRTGNNFEFSYSFEDVPFHSSYAHSQSLDRLMNPLIDQYLYYLARTQSTTGSTRELQFHQAGPNTMAEQSKNWLPGPCYRQQRLSKNLDFNNNSNFAWTAATKYHLNGRNSLTNPGIPMATNKDDEDQFFPINGVLVFGKTGAANKTTLENVLMTSEEEIKTTNPVATEEYGVVSSNLQSSTAGPQSQTINSQGALPGMVWQNRDVYLQGPIWAKIPHTDGNFHPSPLMGGFGLEHPPPQILIKNTPVPANPPEVFTPAKFASFITQYSTGQVSVEIEWELQKENSKRWNPEIQYTSNYAKSNNVEFAVNPDGVYTEPRPIGTRYLTRNLMAADGYLPDWLEDNLSEGIREWWDLKPGAPKPKANQQKQDDGRGLVLPGYKYLGPFNGLDKGEPVNAADAAALEHDKAYDQQLKAGDNPYLRYNHADAEFQERLQEDTSFGGNLGRAVFQAKKRVLEPLGLVEEGAKTAPGKKRPIGSPDSSTGIGKKGQQPAKKKLNFGQTGDSESVPDPQPLGEPPAAPSSVGSGTMAAGGGAPMADNNEGADGVGNASGNWHCDSTWLGDRVITTSTRTWALPTYNNHLYKQISSSSSGATNDNHYFGYSTPWGYFDFNRFHCHFSPRDWQRLINNNWGFRPKKLRFKLLNIQVKEVTTNDGVTTIANNLTSTVQVFSDSEYQLPYVLGSAHQGCLPPFPADVFMIPQYGYLTLDNGSQSVGRSSFYCLEYFPSQMLRTGNNFEFSYSFEDVPFHSSYAHSQSLDRLMNPLIDQYLYYLARTQSTTGSTRELQFHQAGPNTMAEQSKNWLPGPCYRQQRLSKNLDFNNNSNFAWTAATKYHLNGRNSLTNPGIPMATNKDDEDQFFPINGVLVFGKTGAANKTTLENVLMTSEEEIKTTNPVATEEYGVVSSNLQSSTAGPQSQTINSQGALPGMVWQNRDVYLQGPIWAKIPHTDGNFHPSPLMGGFGLKHPPPQILIKNTPVPANPPEVFTPAKFASFITQYSTGQVSVEIEWELQKENSKRWNPEIQYTSNYAKSNNVEFAVNPDGVYTEPRPIGTRYLTRNL

SEQ ID NO: 4833 - protein, 729 aa, Adeno-associated virus
MAADGYLPDWLEDNLSEGIREWWDLKPGAPKPKANQQKQDDGRGLVLPGYKYLGPFNGLDKGEPVNAADAAALEHDKAYDQQLKAGDNPYLRYNHADAEFQERLQEDTSFGGNLGRAVFQAKKRVLEPLGLVEEGAKTAPGKKRPIDSPDSSTGIGKKGQQPAKKKLNFGQTGDSESVPDPQPLGEPPAAPSSVGSGTMAAGGGAPTADNNEGADGVGNASGNWHCDSTWLGDRVITTSTRTWALPTYNNHLYKQISSSSSGATNDNHYFGYSTPWGYFDFNRFHCHFSPRDWQRLINNNWGFRPKKLRFKLFNIQVKEVTTNDGVTTIANNLTSTVQVFSDSEYQLPYVLGSAHQGCLPPFPADVFMIPQYGYLTLNNGSQSVGRSSFYCLEYFPSQMLRTGNNFEFSYSFEDVPFHSSYAHSQSLDRLMNPLIDQYLYYLARTQSTTGSTRELQFHQAGPNTMAEQSKNWLPGPCYRQQRLSKNLDFNNNSNFAWTAATKYHLNGRNSLTNPGIPMATNKDDEDQFFPINGVLVFGKTGAANKTTLENVLMTSEEEIKTTNPVATEEYGVVSSNLQSSTAGPQSQTINSQGALPGMVWQNRDVYLQGPIWAKIPHTDGNFHPSPLMGGFGLEHPPPQILIKNTPVPANPPEVFTPAKFASFITQYSTGQVSVEIEWELQKENSKRWNPEIQYTSNYAKSNNVEFAVNPDGVYTEPRPIGTRYLTRNL

SEQ ID NO: 4834 - DNA, 3075 bp, Adeno-associated virus
tgagaactttcctttcaacgattgcgtcggacaagatggtgatctggtgggaggaggggaagatgaccgccaaggtcgtggagtcggccaaagccattcttggaggaagcaaggtgcgtgtggaccagaaatgcaagtcctcggcccagatagacccgactcccgtgatcgtcacctccaacaccaacatgtgcgccgtgattgacgggaactcaacgaccttcgagcaccagcagccgttgcaagaccggatgttcaaatttgaacttacccgccgtctggatcatgactttggaaaggtcaccaagcaggaagtgaaagactttttccggtgggcaaaggatcacgtggttgaggtggagcatgaattctacgtcaaaaagggtggagctaagaaaagacccgcccccagtgacgcagatataagtgagcccaaacgggcgcgcgagtcagttgcgcagccatcaacgtcagacgcggaagcttcgatcaactacgcggacaggtaccaaaaacaaatgttctcgtcacgtgggcatgaatctgatgctgtttccctgcagacaatgcgagagaatgaatcagaattcaaatatctgcttcactcacggacagaaagactgtttagagtgctttcccgtgtcagaatctcaacccgtttctgtcgtcaaaaaggcgtatcagaaactgtgctacattcatcatatcatgggaaaggtgccagacgcttgcactgcctgcgatctggtcaatgtggatttggatgactgcatctctgaacaataaatgatttaaatcaggtatggctgccgatggttatcctccagattggctcgaggacactctctctgaagggataagacagtggtggaagctcaaacctggcccaccaccaccaaagcccgcagagcggcataaggacgacagcaggggtcttgtgcttcctgggtacaagtacctcggacccttcaacggactcgacaagggggagccggtcaacgaggcagacgccgcggccctcgagcacgacaaggcctacgaccggcagctcgacagcggagacaacccgtacctcaagtacaaccacgccgacgcagagtttcaggagcgccttaaagaagatacgtcttttgggggcaacctcggacgagcagtcttccaggcgaaaaagagggttcttgaacctctgggcctggttgaggaacctgttaagacggctccgggaaaaaagaggccggtagagcactctcctgtggagccagactcctcctcgggaaccggaaaagcgggccagcggcctgcaagaaaaagattaaattttggtcagactggagacgcagactccgtacctgacccccagcctctcggacagccaccagcagccccctctggtctgggatctactacaatggctacaggcagtggcgcaccaatggcagacaataacgagggtgccgatggagtgggtaattcctcaggaaattggcattgcgattcccaatggctgggcgacagagtcatcaccaccagcacccgaacctgggccctgcccacatacaacaaccacctctacaagcaaatctccagccaatcaggagccagcaacgacaaccactactttggctacagcaccccctgggggtattttgacttcaacagattccactgccacttttcaccacgtgactggcaaagactcatcaacaacaactggggattccggcccaaaagactcaacttcaagctctttaatattcaagtcaaagaggtcacgcagaatgacggtacgacgacgattgccaataaccttaccagcacggttcaggtgtttactgactcggagtaccagctcccgtacgtcctgggctcggcgcatcaaggatgcctcccgccgtttccagcggacgtcttcatggtcccacagtatggatacctcaccctgaacaacgggagtcaggcggtaggacgctcttccttttactgcctggagtactttccttctcagatgctgcgtactggaaacaactttcagttcagctacacttttgaagacgtgcctttccacagcagctacgctcacagccagagtctggatcggctgatgaatcctctgatcgaccagtacctgtattatctgaacaagacacaaacaaatagtggaactcttcagcagtctcggctactgtttagccaagctggaccaaccaacatgtctcttcaagctaaaaactggctgcctggaccttgctacagacagcagcgtctgtcaaaacaggcaaacgacaacaacaacagcaactttccctggactgcagctacaaagtatcatctaaatggccgggactcgttggttaatccaggaccagctatggccagtcacaaggatgacgaagaaaagtttttccccatgcatggaaccctgatatttggtaaacaaggaacaaatgccaacgacgcggatttggaaaatgtcatgattacagatgaagaagaaatcagggccaccaatcccgtggctacggagcagtacgggactgtgtcaaataatttgcaaaactcaaacactggtccaactactggaactgtcaatcgccaaggagcgttacctggtatggtgtggcaggatcgagacgtgtacctgcagggacccatttgggccaagattcctcacaccgatggacactttcatccttctccactgatgggaggttttggactcaaacacccgcctcctcagatcatgatcaaaaacactcccgttccagccaatcctcccacaaacttcagttctgccaagtttgcttctttcatcacacagtattccacgggacaggtcagcgtggagatcgagtgggagctgcagaaggagaacagcaaacgctggaatcccgaaattcagtacacttccaactacaacaagtctgttaatgtggactttactgtggacactaatggtgtgtattcagagcctcgccccattggcaccagatacctgactcgtaatctgtaattgcttgttaatcaataaaccgtttaattcgtttcagttgaactttggtctctgcgaagggcgaa

SEQ ID NO: 4835 - DNA, 3142 bp, Adeno-associated virus
aaaacgacgggccagtgattgtaatacgactcactatagggcgaaattgaaattagcggccgcgaattcgcctttcgcagagaccaaagttcaactgaaacgaattaaacggtttattgattaacaagcaattacagattacgagtcaggtatctggtgccaatggggcgaggctctgaatacacaccattagtgtccacagtaaagtccacattaacagacttgttgtagttggaagtgtactgaatttcgggattccagcgtttgctgttctccttctgcagctcccactcgatctccacgctgacctgtcccgtggaatactgtgtgatgaaagaagcaaacttggcagaactgaagtttgtgggaggattggctggaacgggagtgtttttgatcatgatctgaggaggcgggtgtttgagtccaaaacctcccatcagtggagaaggatgaaagtgtccatcggtgtgaggaatcttggcccaaatgggtccctgcaggtacacgtctcgatcctgccacaccataccaggtaacgctccttggtgattgacagttccagtagttggaccagtgtttgagttttgcaaattatttgacacagtcccgtactgctccgtagccacgggattggtggccctgatttcttcttcatctgtaatcatgacattttccaaatccgcgtcgttggcatttgttccttgtttaccaaatatcagggttccatgcatggggaaaaacttttcttcgtcatccttgtgactggccatagctggtcctggattaaccaacgagtcccggccatttagatgatactttgtagctgcagtccagggaaagttgctgttgttgttgtcgtttgcctgttttgacagacgctgctgtctgtagcaaggtccaggcagccagtttttagcttgaagagacatgttggttggtccagcttggctaaacagtagccgagactgctgaagagttccactatttgtttgtgtcttgttcagataatacaggtactggtcgatcagaggattcatcagccgatccagactctggctgtgagcgtagctgctgtggaaaggcacgtcttcaaaagtgtagctgaactgaaagttgtttccagtacgcagcatctgagaaggaaagtactccaggcagtaaaaggaagagcgtcctaccgcctgactcccgttgttcagggtgaggtatccatactgtgggaccatgaagacgtccgctggaaacggcgggaggcatccttgatgcgccgagcccaggacgtacgggagctggtactccgagtcagtaaacacctgaaccgtgctggtaaggttattggcaatcgtcgtcgtaccgtcattctgcgtgacctctttgacttgaatattaaagagcttgaagttgagtcttttgggccggaatccccggttgttgttgacgagtctttgccagtcacgtggtgaaaagtggcagtggaatctgttgaagtcaaaatacccccagggggtgctgtagccaaagtagtggttgtcgttgctggctcctgattggctggagatttgcttgtagaggtggttgttgtatgtgggcagggcccaggttcgggtgctggtggtgatgactctgtcgcccagccattgggaatcgcaatgccaatttcctgaggaattacccactccatcggcaccctcgttattgtctgccattggtgcgccactgcctgtagccattgtagtagatcccagaccagagggggctgctggtggctgtccgagaggctgggggtcaggtacggagtctgcgtctccagtctgaccaaaatttaatctttttcttgcaggctgctggcccgcttttccggttcccgaggaggagtctggctccacaggagagtgctctaccggcctcttttttcccggagccgtcttaacaggctcctcaaccaggcccagaggttcaagaaccctctttttcgcctggaagactgctcgtccgaggttgcccccaaaagacgtatcttctttaaggcgctcctgaaactctgcgtcggcgtggttgtacttgaggtacgggttgtctccgctgtcgagctgccggtcgtaggccttgtcgtgctcgagggccgcggcgtctgcctcgttgaccggctcccccttgtcgagtccgttgaagggtccgaggtacttgtacccaggaagcacaagacccctgctgtcgtccttatgccgctctgcgggctttggtggtggtgggccaggtttgagcttccaccactgtcttattccttcagagagagtgtcctcgagccaatctggaagataaccatcggcagccatacctgatttaaatcatttattgttcagagatgcagtcatccaaatccacattgaccagatcgcaggcagtgcaagcgtctggcacctttcccatgatatgatgaatgtagcacagtttctgatacgcctttttgacgacagaaacgggttgagattctgacacgggaaagcactctaaacagtctttctgtccgtgagtgaagcagatatttgaattctgattcattctctcgcattgtctgcagggaaacagcatcagattcatgcccacgtgacgagaacatttgttttggtacctgtccgcgtagttgatcgaagcttccgcgtctgacgtcgatggctgcgcaactgactcgcgcgcccgtttgggctcacttatatctgcgtcactgggggcgggtcttttcttagctccaccctttttgacgtagaattcatgctccacctcaaccacgtgatcctttgcccaccggaaaaagtctttcacttcctgcttggtgacctttccaaagtcatgatccagacggcgggtaagttcaaatttgaacatccggtcttgcaacggctgctggtgctcgaaggtcgttgagttcccgtcaatcacggcgcacatgttggtgttggaggtgacgatcacgggagtcgggtctatctgggccgaggacttgcatttctggtccacacgcaccttgcttcctccaagaatggctttggccgactccacgaccttggcggtcatcttcccctcctcccaccagatcaccatcttgtcgacgcaatggtaaaaggaaagttctcattgg

SEQ ID NO: 4836 - DNA, 2208 bp, Adeno-associated virus
atggctgccgatggttatcttccagattggctcgaggacactctctctgaaggaataagacagtggtggaagctcaaacctggcccaccaccaccaaagcccgcagagcggcataaggacgacagcaggggtcttgtgcttcctgggtacaagtacctcggacccttcaacggactcgacaagggggagccggtcaacgaggcagacgccgcggccctcgagcacgacaaggcctacgaccggcagctcgacagcggagacaacccgtacctcaagtacaaccacgccgacgcagagtttcaggagcgccttaaagaagatacgtcttttgggggcaacctcggacgagcagtcttccaggcgaaaaagagggttcttgaacctctgggcctggttgaggaacctgttaagacggctccgggaaaaaagaggccggtagagcactctcctgtggagccagactcctcctcgggaaccggaaaagcgggccagcagcctgcaagaaaaagattaaattttggtcagactggagacgcagactccgtacctgacccccagcctctcggacagccaccagcagccccctctggtctgggatctactacaatggctacaggcagtggcgcaccaatggcagacaataacgagggtgccgatggagtgggtaattcctcaggaaattggcattgcgattcccaatggctgggcgacagagtcatcaccaccagcacccgaacctgggccctgcccacatacaacaaccacctctacaagcaaatctccagccaatcaggagccagcaacgacaaccactactttggctacagcaccccctgggggtattttgacttcaacagattccactgccacttttcaccacgtgactggcaaagactcatcaacaacaactggggattccggcccaaaagactcaacttcaagctctttaatattcaagtcaaagaggtcacgcagaatggcggtacgacgacgattgccaataaccttaccagcacggttcaggtgtttactgactcggagtaccagctcccgtacgtcctgggctcggcgcatcaaggatgcctcccgccgtttccagcggacgtcttcatggtcccacagtatggatacctcaccctgaacaacgggagtcaggcggtaggacgctcttccttttactgcctggagtactttccttctcagatgctgcgtactggaaacaactttcagttcagctacacttttgaagacgtgcctttccacagcagctacgctcacagccagagtctggatcggctgatgaatcctctgatcgaccagtacctgtattatctgaacaagacacaaacaaatagtggaactcttcagcagtctcggctactgtttagccaagctggaccaaccaacatgtctcttcaagctaaaaactggctgcctggaccttgctacagacagcagcgtctgtcaaaacaggcaaacggcaacaacaacagcaactttccctggactgcagctacaaagtatcatctaaatggccgggactcgttggttaatccaggaccagctatggccagtcacaaggatgacgaagaaaagtttttccccatgcatggaaccctgatatttggtaaacaaggaacaaatgccaacgacgcggatttggaaaatgtcatgattacagatgaagaagaaatcagggccaccaatcccgtggctacggagcagtacgggactgtgtcaaataatttgcaaaactcaaacactggtccaactactggaactgtcaatcaccaaggagcgttacctggtatggtgtggcaggatcgagacgtgtacctgcagggacccatttgggccaagattcctcacaccgatggacactttcatccttctccactgacgggaggttttggactcaaacacccgcctcctcagatcatgatcaaaaacactcccgttccagccaatcctcccacaaacttcagttctgccaagtttgcttctttcatcacacagtattccacgggacaggtcagcgtggagatcgagtgggagctgcagaaggagaacagcaaacgctggaatcccgaaattcagtacacttccaactacaacaagtctgttaatgtggactttactgtggacactaatggtgtgtattcagagcctcgccccattggcaccagatacctgactcgtaatctgtaa

SEQ ID NO: 4837 - protein, 735 aa, Adeno-associated virus
MAADGYLPDWLEDTLSEGIRQWWKLKPGPPPPKPAERHKDDSRGLVLPGYKYLGPFNGLDKGEPVNEADAAALEHDKAYDRQLDSGDNPYLKYNHADAEFQERLKEDTSFGGNLGRAVFQAKKRVLEPLGLVEEPVKTAPGKKRPVEHSPVEPDSSSGTGKAGQQPARKRLNFGQTGDADSVPDPQPLGQPPAAPSGLGSTTMATGSGAPMADNNEGADGVGNSSGNWHCDSQWLGDRVITTSTRTWALPTYNNHLYKQISSQSGASNDNHYFGYSTPWGYFDFNRFHCHFSPRDWQRLINNNWGFRPKRLNFKLFNIQVKEVTQNGGTTTIANNLTSTVQVFTDSEYQLPYVLGSAHQGCLPPFPADVFMVPQYGYLTLNNGSQAVGRSSFYCLEYFPSQMLRTGNNFQFSYTFEDVPFHSSYAHSQSLDRLMNPLIDQYLYYLNKTQTNSGTLQQSRLLFSQAGPTNMSLQAKNWLPGPCYRQQRLSKQANGNNNSNFPWTAATKYHLNGRDSLVNPGPAMASHKDDEEKFFPMHGTLIFGKQGTNANDADLENVMITDEEEIRATNPVATEQYGTVSNNLQNSNTGPTTGTVNHQGALPGMVWQDRDVYLQGPIWAKIPHTDGHFHPSPLTGGFGLKHPPPQIMIKNTPVPANPPTNFSSAKFASFITQYSTGQVSVEIEWELQKENSKRWNPEIQYTSNYNKSVNVDFTVDTNGVYSEPRPIGTRYLTRNL

SEQ ID NO: 4838 - DNA, 2208 bp, Adeno-associated virus
atggctgccgatggttatcttccagattggctcgaggacactctctctgaaggaataagacagtggtggaagctcaaacctggcccaccaccaccaaagctcgcagagcggcatcaggacgacagcaggggtcttgtgcttcctgggtacaagtacctcggacccttcaacggactcgacaaaggagagccggtcaacgaggcagacgccgcggccctcgagcacgacaaggcctacgaccggcagctcgacagcggagacaacccgtacctcaagtacaaccacgccgacgcggagtttcaggagcgtcttaaagaagatacgtcttttgggggcaacctcggacgagcagtcttccaggcgaaaaagagggttcttgaacctctgggcctggttgaggaacctgttaagacggctccgggaaaaaagaggccggtagagcactctcctgtggagccagactcctcctcgggaaccggaaaggcgggccatcagcctgcgagaaagagattgaattttggtcagactggagacgcagactccgtacctgacccccagcctctcggacagccaccagcagcccccacaagtctgggatctactacaatggctacaggcagtggcgcaccaatggcagacaataacgagggtgccgatggagtgggtaattcctcaggaaattggcattgcgattcccaatggctgggcgacagagtcatcaccaccagcacccgaacctgggccctgcccacctacaacaaccacctctacaagcaaatctccagccaatcaggagcctcgaacgacaaccactactttggctacagcaccccctgggggtattttgacttcaacagattccactgtcacttctccccacgtgattggcaaagactcatcaacaacaactggggattccgacccaagagactcaacttcaagctctttaacattcaagtcaaagaggtcacgcagaatgacggtacgacgacgattgccaataaccttaccagcacggttcaggtgtttactgactcggagtaccagctcccgtacgtcctcggctcggcgcatcaaggatgcctcccgccgtttccagcggacgtcttcacggtcccacagtatggatacctcaccctgaacaacgggagtcaggcggtaggacgctcttccttttactgcctggagtactttccttctcagatgctgcgtactggaaacaaccttaccttcagctacacctttgaggacgttcctttccacagcagctacgctcacagccagagtttggaccggctgatgaatcctctgatcgaccagtatctatattatctgaacaggacacaatcaaatagtggaactcttcagcagtctaggctactgtttagccaagctggacccaccagcatgtctcttcaagctaaaaactggctgcctggaccttgctacagacagcagcgtctttcaaagcaggcaaacgacaacaacaacagcaactttccctggactgcggctacaaagtatcatctaaatggccgggactcgttggttaatccaggaccagctatggccagccacaaagacgatgaagaaaagtttttccccatgcatggaaccctgatatttggtaaacaaggaacaaatgctaacgacgcggatttggagcatgttatgattacagatgaagaagaaatcaggaccaccaatcctgtggctacagagcagtacggaaacgtgtcaaataatttgcaaaactcaaatactggtccaactacagaaaatgtcaatcaccagggagcgttacctggtatggtgtggcaggatcgagacgtgtacctgcagggacccatttgggccaagattcctcacaccgacggacactttcacccttctccactgatgggaggttttggactcaaacacccgcctcctcaaatcatgatcaaaaacactcccgttccagccaatcctcccacaaactacagttctgccaagtttgcttctttcatcacacagtattccacgggccaggtcagcgtggagattgagtgggagctgcggaaggagaacagcaaacgctggaaccccgagatccagtatacttccaactacaacaaatctgttaatgtggactttactgtggacactaatggtgtgtattcagagcctcgccccattggcaccagatacctgactcgtaatctgtaa

SEQ ID NO: 4839 - protein, 735 aa, Adeno-associated virus
MAADGYLPDWLEDTLSEGIRQWWKLKPGPPPPKLAERHQDDSRGLVLPGYKYLGPFNGLDKGEPVNEADAAALEHDKAYDRQLDSGDNPYLKYNHADAEFQERLKEDTSFGGNLGRAVFQAKKRVLEPLGLVEEPVKTAPGKKRPVEHSPVEPDSSSGTGKAGHQPARKRLNFGQTGDADSVPDPQPLGQPPAAPTSLGSTTMATGSGAPMADNNEGADGVGNSSGNWHCDSQWLGDRVITTSTRTWALPTYNNHLYKQISSQSGASNDNHYFGYSTPWGYFDFNRFHCHFSPRDWQRLINNNWGFRPKRLNFKLFNIQVKEVTQNDGTTTIANNLTSTVQVFTDSEYQLPYVLGSAHQGCLPPFPADVFTVPQYGYLTLNNGSQAVGRSSFYCLEYFPSQMLRTGNNLTFSYTFEDVPFHSSYAHSQSLDRLMNPLIDQYLYYLNRTQSNSGTLQQSRLLFSQAGPTSMSLQAKNWLPGPCYRQQRLSKQANDNNNSNFPWTAATKYHLNGRDSLVNPGPAMASHKDDEEKFFPMHGTLIFGKQGTNANDADLEHVMITDEEEIRTTNPVATEQYGNVSNNLQNSNTGPTTENVNHQGALPGMVWQDRDVYLQGPIWAKIPHTDGHFHPSPLMGGFGLKHPPPQIMIKNTPVPANPPTNYSSAKFASFITQYSTGQVSVEIEWELRKENSKRWNPEIQYTSNYNKSVNVDFTVDTNGVYSEPRPIGTRYLTRNL

SEQ ID NO: 4840 - DNA, 2208 bp, Adeno-associated virus
atggctgccgatggttatcttccagattggctcgaggacactctctctgaaggaataagacagtggtggaagctcaaacctggcccaccaccaccaaagcccgcagagcggcatcaggacgacagcaggggtcttgtgcttcctgggtacaagtacctcggacccttcaacggactcgacaaaggagagccggtcaacgaggcagacgccgcggccctcgagcacgacaaggcctacgaccggcagctcgacagcggagacaacccgtacctcaagtacaaccacgccgacgcggagtttcaggagcgtcttaaagaagatacgtcttttgggggcaacctcggacgagcagtcttccaggcgaaaaagagggttcttgaacctctgggcctggttgaggaacctgttaagacggctccgggaaaaaagaggccggtagagcactctcctgtggagccagactcctcctcgggaaccggaaaagcgggccatcagcctgcgagaaagagattgaattttggtcagactggagacgcagactccgtacctgacccccagcctctcggacagccaccagcagcccccacaagtttgggatctactacaatggctacaggcagtggcgcaccaatggcagacaataacgagggtgccgatggagtgggtaattcctcaggaaattggcattgcgattcccaatggctgggcgacagagtcatcaccaccagcacccgaacctgggccctgcccacctacaacaaccacctctacaagcaaatctccagccaatcaggagcctcgaacgacaaccactactttggctacagcaccccctgggggtattttgacttcaacagattccactgtcacttctccccacgtgattggcaaagactcatcaacaacaactggggattccgacccaagagactcaacttcaagctctttaacattcaagtcaaggaggtcacgcagaatgacggtacgacgacgattgccaataaccttaccagcacggttcaggtgtttactgactcggagtaccagctcccgtacgtcctcggctcggcgcatcaaggatgcctcccgccgtttccagcggacgtcttcatggtcccacagtatggatacctcaccctgaacaacgggagtcaggcggtaggacgctcttccttttactgcctggagtactttccttctcagatgctgcgtactggaaacaactttaccttcagctacacctttgaggacgttcctttccacagcagctacgctcacagccagagtttggaccggctgatgaatcctctgatcgaccagtatctatattatctgaacaggacacaatcaaatagtggaactcttcagcagtctaggctactgtttagccaagctggacccaccagcatgtctcttcaagctaaaaactggctgcctggaccttgctacagacagcagcgtctttcaaagcaggcaaacgacaacaacaacagcaactttccctggactgcggctacaaagtatcgtctaaatggccgggactcgttggttaatccaggaccagctatggccagccacaaagacgatgaagaaaagtttttccccatgcatggaaccctgatatttggtaaacaaggaacaaatgctaacgacgcggatttggagcatgttatgattacagatgaagaagaaatcaggaccaccaatcctgtggctacagagcagtacggaaacgtgtcaaataatttgcaaaactcaaatactggtccaactacagaaaatgtcaatcaccagggagcgttacctggtatggtgtggcaggatcgagacgtgtacctgcagggacccatttgggccaagattcctcacaccgacggacactttcacccttctccactgatgggaggttttggactcaaacacccgcctcctcaaatcatgatcaaaaacactcccgttccagccaatcctcccacaaacttcagttctgccaagtttgcttctttcatcacacagtattccacgggccaggtcagcgtggagattgagtgggagctgcagaaggagaacagcaaacgctggaaccccgagatccagtatacttccaactacaacaaatctgttaatgtggactttactgtggacactaatggtgtgtattcagagcctcgccccattggcaccagatacctgactcgtaatctgtaa

SEQ ID NO: 4841 - protein, 735 aa, Adeno-associated virus
MAADGYLPDWLEDTLSEGIRQWWKLKPGPPPPKPAERHQDDSRGLVLPGYKYLGPFNGLDKGEPVNEADAAALEHDKAYDRQLDSGDNPYLKYNHADAEFQERLKEDTSFGGNLGRAVFQAKKRVLEPLGLVEEPVKTAPGKKRPVEHSPVEPDSSSGTGKAGHQPARKRLNFGQTGDADSVPDPQPLGQPPAAPTSLGSTTMATGSGAPMADNNEGADGVGNSSGNWHCDSQWLGDRVITTSTRTWALPTYNNHLYKQISSQSGASNDNHYFGYSTPWGYFDFNRFHCHFSPRDWQRLINNNWGFRPKRLNFKLFNIQVKEVTQNDGTTTIANNLTSTVQVFTDSEYQLPYVLGSAHQGCLPPFPADVFMVPQYGYLTLNNGSQAVGRSSFYCLEYFPSQMLRTGNNFTFSYTFEDVPFHSSYAHSQSLDRLMNPLIDQYLYYLNRTQSNSGTLQQSRLLFSQAGPTSMSLQAKNWLPGPCYRQQRLSKQANDNNNSNFPWTAATKYRLNGRDSLVNPGPAMASHKDDEEKFFPMHGTLIFGKQGTNANDADLEHVMITDEEEIRTTNPVATEQYGNVSNNLQNSNTGPTTENVNHQGALPGMVWQDRDVYLQGPIWAKIPHTDGHFHPSPLMGGFGLKHPPPQIMIKNTPVPANPPTNFSSAKFASFITQYSTGQVSVEIEWELQKENSKRWNPEIQYTSNYNKSVNVDFTVDTNGVYSEPRPIGTRYLTRNL

SEQ ID NO: 4842 - DNA, 2208 bp, Adeno-associated virus
atggctgccgatggttatcttccagattggctcgaggacactctctctgaaggaataagacagtggtggaagctcaaacctggcccaccaccaccaaagcccgcagagcggcatcaggacgacagcaggggtcttgtgcttcctgggtacaagtacctcggacccttcaacggactcgacaaaggagagccggtcaacgaggcagacgccgcggccctcgagcacgacaaggcctacgaccggcagctcgacagcggagacaacccgtacctcaagtacaaccacgccgacgcggagtttcaggagcgtcttaaagaagatacgtcttttgggggcaacctcggacgagcagtcttccaggcgaaaaagagggttcttgaacctctgggcctggttgaggaacctgttaagacggctccgggaaaaaagaggccggtagagcactctcctgtggagccagactcctcctcgggaaccggaaaagcgggccatcagcctgcgagaaagagattgaattttggtcagactggagacgcagactccgtacctgacccccagcctctcggacagccaccagcagcccccacaagtttgggatctactacaatggctacaggcagtggcgcaccaatggcagacaataacgagggtgccgatggagtgggtaattcctcaggaaattggcattgcgattcccaatggctgggcgacagagtcatcaccaccagcacccgaacctgggccctgcccacctacaacaaccacctctacaagcaaatctccagccaatcaggagcctcgaacgacaaccactactttggctacagcaccccctgggggtattttgacttcaacagattccactgtcacttctccccacgtgattggcaaagactcatcaacaacaactggggattccgacccaagagactcaacttcaagctctttaacattcaagtcaaagaggtcacgcagaatgacggtacgacgacgattgccaataaccttaccagcacggttcaggtgtttactgactcggagtaccagctcccgtacgtcctcggctcggcgcatcaaggatgcctcccgccgtttccagcggacgtcttcatggtcccacagtatggatacctcaccctgaacaacgggagtcaggcggtaggacgcccttccttttactgcctggagtactttccttctcagatgctgcgtactggaaacaactttaccttcagctacacctttgaggacgttcctttccacagcagctacgctcacagccagagtttggaccggctgatgaatcctctgatcgaccagtatctatattatctgaacaggacacaatcaaatagtggaactcttcagcagtctaggctactgtttagccaagctggacccaccagcatgtctcttcaagctaaaaactggctgcctggaccttgctacagacagcagcgtctttcaaagcaggcaaacgacaacaacaacagcaactttccctggactgcggctacaaagtatcatctaaatggccgggactcgttggttaatccaggaccagctatggccagccacaaagacgatgaagaaaagtttttccccatgcatgggaccctgatatttggtaaacaaggaacaaatgctaacgacgcggatttggagcatgttatgattacagatgaagaagaaatcaggaccaccaatcctgtggctacagagcagtacggaaacgtgtcaaataatttgcaaaactcaaatactggtccaactacagaaaatgtcaatcaccagggagcgttacctggtatggtgtggcaggatcgagacgtgtacctgcagggacccatttgggccaagattcctcacaccgacggacactttcacccttctccactgatgggaggttttggactcaaacacccgcctcctcaaatcatgatcaaaaacactcccgttccagccaatcctcccacaaacttcagttctgccaagtttgcttctttcatcacacagtattccacgggccaggtcagcgtggagattgagtgggagctgcagaaggagaacagcaaacgctggaaccccgagatccagtatacttccaactacaacaaatctgttaatgtggactttactgtggacactaatggtgtgtattcagagcctcgccccattggcaccagatacctgactcgtaatctgtaa

SEQ ID NO: 4843 - protein, 735 aa, Adeno-associated virus
MAADGYLPDWLEDTLSEGIRQWWKLKPGPPPPKPAERHQDDSRGLVLPGYKYLGPFNGLDKGEPVNEADAAALEHDKAYDRQLDSGDNPYLKYNHADAEFQERLKEDTSFGGNLGRAVFQAKKRVLEPLGLVEEPVKTAPGKKRPVEHSPVEPDSSSGTGKAGHQPARKRLNFGQTGDADSVPDPQPLGQPPAAPTSLGSTTMATGSGAPMADNNEGADGVGNSSGNWHCDSQWLGDRVITTSTRTWALPTYNNHLYKQISSQSGASNDNHYFGYSTPWGYFDFNRFHCHFSPRDWQRLINNNWGFRPKRLNFKLFNIQVKEVTQNDGTTTIANNLTSTVQVFTDSEYQLPYVLGSAHQGCLPPFPADVFMVPQYGYLTLNNGSQAVGRPSFYCLEYFPSQMLRTGNNFTFSYTFEDVPFHSSYAHSQSLDRLMNPLIDQYLYYLNRTQSNSGTLQQSRLLFSQAGPTSMSLQAKNWLPGPCYRQQRLSKQANDNNNSNFPWTAATKYHLNGRDSLVNPGPAMASHKDDEEKFFPMHGTLIFGKQGTNANDADLEHVMITDEEEIRTTNPVATEQYGNVSNNLQNSNTGPTTENVNHQGALPGMVWQDRDVYLQGPIWAKIPHTDGHFHPSPLMGGFGLKHPPPQIMIKNTPVPANPPTNFSSAKFASFITQYSTGQVSVEIEWELQKENSKRWNPEIQYTSNYNKSVNVDFTVDTNGVYSEPRPIGTRYLTRNL

SEQ ID NO: 4844 - DNA, 2208 bp, Adeno-associated virus
atggctgccgatggttatcttccagattggctcgaggacactctctctgaaggaataagacagtggtggaagctcaaacctggcccaccaccaccaaagcccgcagagcggcataaggacgacagcaggggtcttgtgcttcctgggtacaagtacctcggacccttcaacggactcgacaagggagagccggtcaacgaggcagacgccgcggccctcgagcacgacaaggcctacgaccggcagctcgacagcggagacaacccgtacctcaagtacaaccacgccgacgcggagtttcaggagcgccttaaagaagatacgtcttttgggggcaacctcggacgagcagtcttccaggcaaaaaagagggttcttgaacctctgggcctggttgaggagcctgttaaaacggctccgggaaaaaagaggccggtagagcactctcctgcggagccagactcctcctcgggaaccggaaaagcgggccagcagcctgcaagaaaaagattgaatttcggtcagactggagacgcagactccgtacctgacccccagcctctcggacagccaccagcagccccctctggtctgggaactaatacgatggcttcaggcagtggcgcaccaatggcagacaataacgagggcgccgacggagtgggtaattcctcgggaaattggcattgcgattccacatggatgggcgacagagtcatcaccaccagcacccgaacttgggccctgcccacctacaacaaccatctctacaagcaaatctccagccaatcaggagccagcaacgacaaccactactttggctacagcaccccttgggggtattttgacttcaacagattccactgccacttttcaccacgtgactggcaaagactcatcaacaacaactggggattccggcccaagagactcaacttcaagctctttaacattcaagtcaaagaggtcacgcagaatgacggtacgacgacgattgccaataaccttaccagcacggttcaggtgtttactgactcggagtaccagctcccgtacgtcctcggctcggcgcatcaaggatgcctcccgccgttcccagcagacgtcttcatggtgccacagtatggatacctcaccctgaacaacgggagtcaggcagtaggacgctcttcattttactgcctggagtactttccttctcagatgctgcgtaccggaaacaactttaccttcagctacacctttgaggacgttcctttccacagcagctacgctcacagccagagtttggaccgtctcatgaatcctctcatcgaccagtacctgtattacttgagcagaacaaacactccaagcggaaccaccacgcagtccaggcttcagttttctcaggccggagcaagtgacattcgggaccagtctaggaactggcttcctggaccctgttaccgccagcagcgagtatcaaagacatctgcggataacaacaacagtgaatactcgtggactggagctaccaagtaccacctcaatggcagagactctctggtgaatccgggcccggccatggccagccacaaggacgatgaagaaaagttttttcctcagagcggggttctcatctttgggaagcaaggctcagagaaaacaaatgtggacattgaaaaggtcatgattacagacgaagaggaaatcaggaccaccaatcccgtggctacggagcagtatggttctgtatctaccaacctgcagggcggcaacacacaagcagctaccgcagatgtcaacacacaaggcgttcttccaggcatggtctggcaggacagagacgtgtacctgcaggggcccatctgggcaaagattccacacacggacggacattttcacccctctcccctcatgggcggattcggacttaaacaccctcctccacagattctcatcaagaacaccccggtacctgcgaatccttcgaccaccttcagtgcggcaaagtttgcttctttcatcacacagtattccacggggcaggtcagcgtggagatcgagtgggagctgcagaaggagaacagcaaacgctggaatcccgagatccagtacacttccaactacaacaaatctgttaatgtggactttactgttgacactaatggcgtgtattcagagcctcgccccattggcaccagatacctgactcgtaatctgtaa

SEQ ID NO: 4845 - protein, 735 aa, Adeno-associated virus
MAADGYLPDWLEDTLSEGIRQWWKLKPGPPPPKPAERHKDDSRGLVLPGYKYLGPFNGLDKGEPVNEADAAALEHDKAYDRQLDSGDNPYLKYNHADAEFQERLKEDTSFGGNLGRAVFQAKKRVLEPLGLVEEPVKTAPGKKRPVEHSPAEPDSSSGTGKAGQQPARKRLNFGQTGDADSVPDPQPLGQPPAAPSGLGTNTMASGSGAPMADNNEGADGVGNSSGNWHCDSTWMGDRVITTSTRTWALPTYNNHLYKQISSQSGASNDNHYFGYSTPWGYFDFNRFHCHFSPRDWQRLINNNWGFRPKRLNFKLFNIQVKEVTQNDGTTTIANNLTSTVQVFTDSEYQLPYVLGSAHQGCLPPFPADVFMVPQYGYLTLNNGSQAVGRSSFYCLEYFPSQMLRTGNNFTFSYTFEDVPFHSSYAHSQSLDRLMNPLIDQYLYYLSRTNTPSGTTTQSRLQFSQAGASDIRDQSRNWLPGPCYRQQRVSKTSADNNNSEYSWTGATKYHLNGRDSLVNPGPAMASHKDDEEKFFPQSGVLIFGKQGSEKTNVDIEKVMITDEEEIRTTNPVATEQYGSVSTNLQGGNTQAATADVNTQGVLPGMVWQDRDVYLQGPIWAKIPHTDGHFHPSPLMGGFGLKHPPPQILIKNTPVPANPSTTFSAAKFASFITQYSTGQVSVEIEWELQKENSKRWNPEIQYTSNYNKSVNVDFTVDTNGVYSEPRPIGTRYLTRNL

SEQ ID NO: 4846 - DNA, 3161 bp, Adeno-associated virus
gattgaatttagcggccgcgaattcgcccttgctgcgtcaactggaccaatgagaactttccattcaatgattgcgtcgacaagatggtgatctggtgggaggagggaaagatgaccgccaaggtcatggagtcggccaaagccattctcggaggaagcaaggtgcgcgtggaccagaaatgtaagtcctcggcccagatagacccgactcccgtgattgtcacctccaacaccaacatgtgcgccgtgattgacgggaactcaacgaccttcgagcaccagcagccgttgcaagaccggatgttcaaatttgaactcacccgccgtctggatcatgactttgggaaggtcaccaagcaggaagtcaaagactttttccggtgggcaaaggatcacgtggttgaggtggagcatgaattctacgtcaaaaagggtggagccaagaaaagacccgcccccagtgacgcagatataagtgagcccaaacgggcgcgcgggtcagttgcgcagccatcgacgtcagacgcggaagcttcgatcaactacgcggacaggtaccaaaacaaatgttctcgtcacgtgggcatgaatctgatgctgtttccctgcagacaatgcgagagaatgaatcaaaattcaaatatctgcttcactcacggacagaaggactgtttagagtgctttcccgtgtcagaatctcaacccgtttctgtcgtcaaaaaggcgtatcagaaactttgctacattcatcatatcatgggaaaggtgccagacgcttgcactgcctgcgatctggtcaatgtggatttggatgactgcatctctgaacaataaatgatttaaatcaggtatggctgccgatggttatcttccagattggctcaaggacactctctctgaaggaataagacagtggtggaagctcaaacctggcccaccaccaccaaagcccgcagagcggcataaggacgacagcgggggtcttgtgcttcctgggtacaagtacctcggacccttcaacggactcgacaagggagagccggtcaacgaggcagacgccgcggccctcgagtacgacaaggcctacgaccggcagctcgacagcggagacaacccgtacctcaagtacaaccacgccgacgcggagtttcaggagcgccttaaagaagatacgtcttttgggggcaacctcggacgagcagtcttccaggcgaaaaagagggttcttgaacctctgggcctggttgaggaacctgttaagacggctccgggaaaaaagaggccggtagagcactctcctgtggagccagactcctcctcgggaacaggaaaagcgggccagcagcctgcgagaaagagattgaattttggtcagactggagacgcagactccgtacctgacccccagcctctcggacagccaccagcagccccctctggtctgggaactaatacgatggctacaggcagtggcgcaccaatggcagacaataacgagggcgccgacggagtgggtaattcctcgggaagttggcattgcgattccacatggatgggcgacagagtcatcaccaccagcacccgaacctgggctctgcccacctacaacaaccatctgtacaagcagatctccagccaatcaggagccagcaacgacaaccactactttggctacagcaccccttgggggtattttgacttcaacagattccactgccacttttcaccacgtgactggcaaagactcatcaacaacaactggggattccggcccaagagactcaacttcaagctctttaacattcaagtcaaggaggtcacgcagaatgacggtacgacgacgattgccaataaccttaccagcacggttcaggtgtttactgactcggagtaccagctcccgtacgtccccggctcggcgcatcaaggatgcctcccgccgttcccagcagacgtcttcatggtgccacagtatggatacctcaccctgaacaacgggagtcaggcagtaggacgctcttcattttactgcctggagtactttccttctcagatgcttcgtaccggaaacaactttaccttcagctacacctttgaggatgttcctttccacagcagctacgctcacagccagagtttggaccgtctcatgaatcctctcatcgaccagtacctgtattacttgagcagaacaaacactccaagcggaaccaccacgcagtccaggcttcagttttctcaggccggagcaagtgacattcgggaccagtctaggaactggcttcctggaccctgttaccgccagcagcgagtatcaaagacagctgcggacaacaacaacagtgaatactcgtggactggagctaccaagtaccacctcaatggcagagactctctggtgaatccgggcccggccatggccagccacaaggacgatgaagaaaagttttttcctcaaagcggggttctcatctttgggaagcaaggctcagagaaaacaaatgtggacattgaaaaggtcatgattacagacgaagaggaaatcagaaccaccaatcccgtggccacggagcagtatggttctgtatctaccaacctccagagcggcaacacacaagcagctactgcagatgtcaacacacaaggcgttcttccaggcatggtctggcaggacagagacgtgcacctgcaggggcctatctgggcaaagattccacacacggacggacattttcacccctctcccctcatgggcggatttggacttaaacaccctcctccacagattctcatcaagaacaccccggtacctgcaaatccttcgaccaccttcagtgcggcaaagtttgcttccttcatcacacagtattccacagggcaggtcagcgtggagatcgagtgggagctgcagaaggagaacagcaaacgctggaaccccgagatccagtacacttccaactacaacaaatctgttaatgtggactttactgtggacactaatggtgtgtattcagagcctcgccccattggcaccagatacctgactcgtaatctgtaattgcttgttaatcaataaaccgtttaattcgtttcagttgaactttggtctctgcgaagggcgaattcgtttaaaccctgcaggactagtccctttagtgagg

SEQ ID NO: 4847 - DNA, 3162 bp, Adeno-associated virus
gaattgaatttagcggccgcgaattcgcccttcgcagagaccaaagttcaactgaaacgaattaaacggtttattgattaacaagcaattacagattacgagtcaggtatctggtgccaatggggcgaggctctgaatacacgccattagtgtccacagtaaagtccacattaacagacttgttgtagttggaagtgtactgaatttcgggattccagcgtttgctgttttccttctgcagctcccactcgatctccacgctgacctgtcccgtggagtactgtgtgatgaaggaagcaaactttgccgcactgaaggtggtcgaaggattcgcaggtaccggggtgttcttgatgagaatctgtggaggagggtgtttaagtccgaatccacccatgaggggagaggggtgaaaatgtccgtccgtgtgtggaatctttgcccagatgggcccctgaaggtacacatctctgtcctgccagaccatgcctggaagaacgccttgtgtgttgacatctgcggtagctgcttgtctgttgcctctctggaggttggtagatacagaaccgtactgctccgtagccacgggattggttgtcctgatttcctcttcgtctgtaatcatgaccttttcaatgtccacatttgttttctctgagccttgcttcccaaagatgagaaccccgctctgaggaaaaaacttttcttcattgtccttgtggcttgccatggccgggcccggattcaccagagagtctctgccattgaggtggtacttggtagctccagtccacgagtattcactgttgttgttatccgcagatgtctttgatactcgctgctggcggtaacagggtccaggaagccagttcctagactggtcccgaatgtcactcgctccggcctgagaaaactgaagccttgactgcgtggtggttccacttggagtgtttgttgtgctcaagtaatacaggtactggtcgatgagaggattcatgagacggtccagactctggctgtgagcgtagccgctgtggaaaggaacgtcctcaaaagtgtagctgaaggtaaagttgtttccggtacgcagcatctgagaaggaaagtactccaggcagtaaaatgaagagcgtcctactgcctgactcccgttgttcagggtgaggtatccatactgtggcaccatgaagacgtctgctgggaacggcgggaggcatccttgatgcgccgagccgaggacgtacgggagctggtactccgagtcagtaaacacctgaaccgtgctggtaaggttattggcaatcgtcgtcgtaccgtcattctgcgtgacctctttgacttgaatgttaaagagcttgaagttgagtctcttgggtcggaatccccagttgttgttgatgagtctttgccagtcacgtggtgaaaagtggcagtggaatctgttgaagtcaaaatacccccaaggggtgctgtagccaaagtagtgattgtcgttcgaggctcctgattggctggaaatttgtttgtagaggtggttgttgtaggtgggcagggcccaggttcgggtgctggtggtgatgactctgtcgcccatccatgtggaatcgcaatgccaatttcccgaggaattacccactccgtcggcgccctcgttattgtctgccattggtgcgccactgcctgtagccatcgtattagttcccagaccagagggggctgctggtggctgtccgagaggctgggggtcaggtactgagtctgcgtctccagtctgaccaaaattcaatctttttcttgcaggctgctggcccgcctttccggttcccgaggaggagtctggctccacaggagagtgctctaccggcctcttttttcctggagccgtcttgacaggttccccaaccaggcccagaggttcaagaaccctctttttcgcctggaagactgctcgtccgaggttgcccccaaaagacgtatcttctttaaggcgctcctgaaactccgcgtcggcgtggttgtacttgaggtacgggttgtctccgctgtcgagctgccggtcgtaggctttgtcgtgctcgagggccgcggcgtctgcctcgttgaccggctctcccttgtcgagtccgttgaagggtccgaggtacttgtacccaggaagcacaagacccctgctgtcgtccttatgccgctctgcgggctttggtggtggtgggccaggtttgagcttccaccactgtcttattccttcagagagagtgtcctcgagccaatctggaagataaccatcggcagccatacctgatttaaatcatttattgttcaaagatgcagtcatccaaatccacattgaccagatcgcaggcagtgcaagcgtctggcacctttcccatgatatgatgaatgtagcacagtttctgatacgcctttttgacgacagaaacgggttgagattctgacacgggaaagcactctaaacagtctttctgtccgtgagtgaagcagatatttgaattctgattcattctctcgcattgtctgcagggaaacagcatcagattcatgcccacgtgacgagaacatttgttttggtacctgtctgcgtagttgatcgaagcttccgcgtctgacgtcgatggctgcgcaactgactcgcgcacccgtttgggctcacttatatctgcgtcactgggggcgggtcttttcttggctccaccctttttgacgtagaattcatgctccacctcaaccacgtgatcctttgcccaccggaaaaagtctttgacttcctgcttggtgaccttcccaaagtcatgatccagacggcgggtgagttcaaatttgaacatccggtcttgcaacggctgctggtgttcgaaggtcgttgagttcccgtcaatcacggcgcacatgttggtgttggaggtgacgatcacgggagtcgggtctatctgggccgaggacttgcatttctggtccacgcgcaccttgcttcctccgagaatggctttggccgactccacgaccttggcggtcatcttcccctcctcccaccagatcaccatcttgtcgacacagtcgttgaagggaaagttctcattggtccagttgacgcagcaagggcgaattcgtttaaacctgcaggactagtccctttagtgaggg

SEQ ID NO: 4848 - DNA, 3164 bp, Adeno-associated virus
gcgaattgaatttagcggccgcgaattcgcccttcgcagagaccaaagttcaactgaaacgaattaaacggtttattgattaacaagcaattacaaattacgagtcaggtatctggtgccaatggggcgaggctctgaatacacgccattagtgtccacagtaaagtccacattaacagacttgttgtagttggaagtgtactgaatttcgggattccagcgtttgctgttttccttctgcagctcccactcgatctccacgctgacctgtcccgtggagtactgtgtgatgaaggaagcaaactttgccgcactgaaggtggtcgaaggattcgcaggtaccggggtgttcttgatgagaatctgtggaggagggtgtttaggtccgaatccacccatgaggggagaggggtgaaaatgtccgtccgtgtgtggaatctttgcccagatgggcccctgaaggtacacatctctgtcctgccagaccatgcctggaagaacgccttgtgtgttgacatctgcggtagctgcttgtctgttgcctctctggaggttggtagatacagaaccatactgctccgtagccacgggattggttgtcctgatttcctcttcgtctgtaatcatgaccttttcaatgtccacatttgttttctctgagccttgcttcccaaagatgagaaccccgctctgaggaaaaaacttttcttcattgtccttgtggcttgccatggccgggcccggattcaccagagagtctctgccattgaggtggtacttggtagctccagtccacgagtattcactgttgttgttatccgcagatgtctttgatactcgctgctggcggtaacagggtccaggaagccagttcctagactggtcccgaatgtcactcgctccggcctgagaaaactgaagccttgactgcgtggtggttccacttggagtgtttgttgtgctcaagtaatacaggtactggtcgatgagaggattcatgagacggtccagactctggctgtgagcgtagctgctgtggaaaggaacgtcctcaaaagtgtagctgaaggtaaagttgtttccggtacgcagcatctgagaaggaaagtactccgggcagtaaaatgaagagcgtcctactgcctgactcccgttgctcagggtgaggtatccatactgtggcaccatgaagacgtctgctgggaacggcgggaggcatccttgatgcgccgagccgaggacgtacgggagctggtactccgagtcagtaaacacctgaaccgtgctggtaaggttattggcaatcgtcgtcgtaccgtcattctgcgtgacctctttgacttgaatgttaaagagcttgaagttgagtctcttgggtcggaatccccagttgttgttgatgagtctttgccagtcacgtggtgaaaagtggcagtggaatctgttgaagtcaaaatacccccaaggggtgctgtagccaaagtagtgattgtcgttcgaggctcctgattggctggaaatttgtctgtagaggtggttgttgtaggtgggcagggcccaggttcgggtgctggtggtgatgactctgtcgcccatccatgtggaatcgcaatgccgatttcccgaggaattacccactccgtcggcgccctcgttattgtctgccattggtgcgccactgcctgtagccatcgtattagttcccagaccagagggggctgctggtggctgtccgagaggctgggggtcaggtactgagtctgcgtctccagtctgaccaaaattcaatctttttcttgcaggctgctggcccgcctttccggttcccgaggaggagtctggctccacaggagagtgctctaccggcctcttttttcccggagccgtcttaacaggttccccaaccaggcccagaggttcaagaaccctctttttcgcctggaagactgctcgtccgaggttgcccccaaaagacgtatcttctttaaggcgctcctgaaactccgcgtcggcgtggttgtacttgaggtacgggttgtctccgctgtcgagctgccggtcgtaggctttgtcgtgctcgagggccgcggcgtctgcctcgttgaccggctctcccttgtcgagtccgttgaagggtccgaggtacttgtacccaggaagcacaagacccctgctgtcgtccttatgccgctctgcgggctttggtggtggtgggccaggtttgagcttccaccactgtcttattccttcagagagagtgtcctcgagccaatctggaagataaccatcggcagccatacctgatttaaatcatttattgttcaaagatgcagtcatccaaatccacattgaccagatcgcaggcagtgcaagcgtctggcacctttcccatgatatgatgaatgtagcacagtttctgatacgcctttttgacgacagaaacgggttgagattctgacacgggaaagcactctaaacagtctttctgtccgtgagtgaagcagatatttgaattctgattcattctctcgcattgtctgcagggaaacagcatcagattcatgcccacgtgacgagaacatttgttttggtacctgtctgcgtagttgatcgaagcttccgcgtctgacgtcgatggctgcgcaactgactcgcgcacccgtttgggcccacttatatctgcgtcactgggggcgggtcttttcttggctccaccctttttgacgtagaattcatgctccacctcaaccacgtgatcctttgcccaccggaaaaagtctttgacttcctgcttggtgaccttcccaaagtcatgatccagacggcgggtgagttcaaatttgaacatccggtcttgcaacggctgctggtgttcgaaggtcgttgagttcccgtcaatcacggcgcacatgttggtgttggaggtgacgatcacgggagtcgggtctatctgggccgaggacttgcatttctggtccacgcgcaccttgcttcctccgagaatggctttggccgactccacgaccttggcggtcatcttcccctcctcccaccagatcaccatcttgtcgacacagtcgttgaagggaaagttctcattggtccagttgacgcagcaagggcgaattcgtttaaacctgcaggactagtccctttagtgaggg

SEQ ID NO: 4849 - DNA, 3163 bp, Adeno-associated virus
accctcactaaagggactagtcctgcaggtttaaacgaattcgcccttgctgcgtcaactggagcaatgagaactttcccttcaacgactgtgtcgacaagatggtgatttggtgggaggaggggaagatgaccgccaaggtcgtggagtcggccaaagccattctcggaggaagcaaggtgcgcgtggaccagaaatgcaagtcctcggcccagatagatccgactcccgtgatcgtcacctccaacaccaacatgtgcgccgtgattgacgggaactcaacgaccttcgaacaccagcagccgttgcaagaccggatgttcaaatttgaactcacccgccgtctggatcatgactttgggaaggtcaccaagcaggaagtcaaagactttttccggtgggcaaaggatcacgtggttgaggtggagcatggattctacgtcaaaaagggtggagccaagaaaagacccgcccctagtgacgcagatataagtgagcccaaacgggtgcgcgagtcagttgcgcagccatcgacgtcggacgcggaagcttcgatcaactacgcggacaggtaccaaaacaaatgttctcgtcacgtgggcatgaatctgatgctgtttccctgcagacaatgcgagagaatgaatcaaaattcaaatatctgcttcactcacggacagaaagactgtttagagtgctttcccgtgtcagaatctcaacctgtttctgtcgtcaaaaaggcgtatcagaaactgcgctacattcatcatatcatgggaaaggtgccagacgcttgcactgcctgcgatctggtcaatgtggatttggatgactgcatctctgaacaataaatgatttaaatcaggtatggctgccgatggttatcttccagattggctcgaggacactctctctgaaggaataagacagtggtggaagctcaaacctggcccaccaccaccaaagcccgcagagcggcataaggacgacagcaggggtcttgtgcttcctgggtacaagtacctcggacccttcaacggactcgacaagggagagccggtcaacgaggcagacgccgcggccctcgagcacgacaaggcctacgaccggcagctcgacagcggagacaacccgtacctcaagtacaaccacgccgacgcggagtttcaggagcgtcttaaagaagatacgtcttttgggggcaacctcggacgagcagtcttccaggcgaaaaagagggttcttgaacctctgggcctggttgaggaacctgttaagacggctccgggaaaaaagaggccggtagagcactctcctgcggagccagactcctcctcgggaaccggaaaagcgggccagcagcctgcaagaaaaagactgaatttcggtcagactggagacgcagactccgtacctgacccccagcctctcggacagccaccagcagcccccacaagtttgggatctactacaatggctacaggcagtggcgcaccaatggcagacaataacgagggtgccgatggagtgggtaattcctcaggaaattggcattgcgattcccaatggctgggcgacagagtcatcaccaccagcacccgaacctgggccctgcccacctacaacaaccacctttacaagcaaatctccagccaatcaggagcctcaaacgacaaccactactttggctacagcaccccctgggggtattttgacttcaacagattccactgccacttttcaccacgtgactggcaaagactcatcaacaacaactggggattccgacccaagagactcaacttcaagctctttaacattcaagtcaaagaggtcacgcagaatgacggtacgacgacgattgccaataaccttaccagcacggttcaggtgtttactgactcggagtaccagctcccgtacgtcctcggctcggcgcatcaaggatgcctcccgccgtttccagcggacgtcttcatggtcccacagtatggatacctcaccctgaacaacgggagtcaggcggtaggacgctcttccttttactgcctggagtgctttccttctcagatgctgcgtactggaaacaactttcagttcagctacacttttgaagacgtgcctttccacagcagctacgctcacagccagagtttggatcggctgatgaatcctctgatcgaccagtacctgtattatctaaacagaacacaaacagctagtggaactcagcagtctcggctactgtttagccaagctggacccacaagcatgtctcttcaagctaaaaactggctgcctggaccgtgttatcgccagcagcgtttgtcaaagcaggcaaacgacaacaacaacagcaactttccctggactggagctaccaagtaccacctcaatggcagagactctttggtgaacccgggcccggccatggccagccacaaggacgatgaagaaaagtttttccccatgcatggaaccctaatatttggtaaagaaggaacaaatgctaccaacgcggaattggaaaatgtcatgattacagatgaagaggaaatcaggaccaccaatcccgtggctacagagcagtacggatatgtgtcaaataatttgcaaaactcaaatactgctgcaagtactgaaactgtgaatcaccaaggagcattacctggtatggtgtggcaggatcgagacgtgtacctgcagggacccatttgggccaagattcctcacaccgatggacactttcatccttctccactgatgggaggttttggactcaaacacccgcctcctcagattatgatcaaaaacactcccgttccagccaatcctcccacaaacttcagttctgccaagtttgcttccttcatcacacagtattccacgggacaggtcagcgtggagatcgagtgggagctgcagaaggagaacagcaaacgctggaatcccgaaattcagtacacttccaactacaacaaatctgttaatgtggactttactgtggacactaatggtgtgtattcagagcctcgccccattggcaccagatacctgactcgtaatctgtaattgcttgttaatcaataaaccgtttaattcgtttcagttgaactttggtctctgcgaagggcgaattcgcggccgctaaattcaattcgcc

SEQ ID NO: 4850 - protein, 735 aa, Adeno-associated virus
MAADGYLPDWLEDTLSEGIRQWWKLKPGPPPPKPAERHKDDSRGLVLPGYKYLGPFNGLYKGEPVDEADAAALEHDKAYDRQLDSGDNPYLKYNHADAEFQERLKEDTSFGGNLGRAVFQAKKRVLEPLGLVGEPVKTAPGKKRPVEHSPVEPDSSSGTGKAGNQPARKRLNFGQTGDADSVPDPQPLGQPPAAPSGLGSTTMATGSGAPVADNNEGADGVGNSSGNWHCDSQWLGDRVITTSTRTWALPTYNNHLYKQISSQSGASNDNHYFGYSTPWGYFDFNRFHCHFSPRDRQRLINNNWGFRPKRLNFKLFNIQVKEVTQNDGTTTIANNLTSTVQVFTDSGYQLPYVLGLAHQGCLPPFPADVFMVPQYGYLTLNNGSQAVGRSSFYCLEYFPSQMLRTGNNFQFSYTFEDVPFHSSYAHSQSLDRLMNPLIDQYLYYLNKTQSNSGTLQQSRLLFSQAGPTSMSLQAKNWLPGPCYRQQRLSKQANDNNNSNFPWTAATKYHLNGRDSLVNPGPAMASHKDDEEKFFPMHGTLIFGKQGTNANDADLDNVMITDEEEIRTTNPVATEQYGYVSNNLQNSNTGPTTGTVNHQGALPGMVWQDRDVYLQGPIWAKIPHTDGHFHPSPLMGGFGLKHPPPQIMIKNTPVPANPPTNFSSAKFASFITQYSTGQVSVEIEWELQKEDSKRWNPEIQYTSNYNKPVNVDFTVDTNGVYSEPRPIGTRYLTRNL

SEQ ID NO: 4851 - DNA, 2208 bp, Adeno-associated virus
atggctgccgatggttatcttccagattggctcgaggacactctctctgaaggaataagacagtggtggaagctcaaacctggcccaccaccaccaaagcccgcagagcggcataaggacgacagcaggggtcttgtgcttcctgggtacaagtacctcggacccttcaacggactctacaagggagagccggtcgacgaggcagacgccgcggccctcgagcacgacaaggcctacgaccggcagctcgacagcggagacaacccgtacctcaagtacaaccacgccgacgcggagtttcaggagcgccttaaagaagatacgtcttttgggggcaacctcggacgagcagtcttccaggccaaaaagagggttcttgaacctctgggcttggttggggagcctgttaaaacggctccgggaaaaaagaggccggtagagcactctcctgtggagccagactcctcctcgggaaccggaaaagcgggcaaccagcctgcaagaaaaagattgaattttggtcagactggagacgcagactccgtacctgacccccagcctctcggacagccaccagcagccccctctggtctgggatctactacaatggctacaggcagtggcgcaccagtggcagacaataacgagggtgccgatggagtgggtaattcctcaggaaattggcattgcgattcccaatggctgggcgacagagtcatcaccaccagcacccgaacctgggctctgcccacctacaataaccacctctacaagcaaatctccagccaatcaggagcctcaaacgacaaccactactttggctacagcaccccctgggggtattttgacttcaacagattccactgccacttttcaccacgtgaccggcaaagactcatcaacaacaactggggattccgaccaaaaagactcaacttcaagctctttaacattcaagtcaaagaggtcacgcagaatgacggtacgacgacgattgccaataaccttaccagcacggttcaggtgtttactgactcggggtaccagctcccgtacgtcctcggcttggcgcatcaaggatgcctcccgccgttcccagcagacgtcttcatggtgccacagtatggatacctcaccctgaacaacgggagtcaggcggtaggacgctcttccttttactgcctggagtactttccttctcagatgctgcgtactggaaacaactttcagttcagctacacctttgaagacgttcctttccacagcagctacgctcacagccagagtctggatcggctgatgaatcctctgatcgaccagtacctgtattatctgaacaagacacaatcaaatagtggaactcttcagcagtctcggctactgtttagccaagctggacccaccagcatgtctcttcaagctaaaaactggctgcctggaccttgctacagacagcagcgtctgtcaaagcaggcaaacgacaacaacaacagcaactttccctggactgcggctacaaagtatcatctaaatggccgggactcgttggttaatccaggaccagctatggccagccacaaagacgatgaagaaaagtttttccccatgcatggaaccctgatatttggtaaacaaggaacaaatgctaacgacgcggatttggacaatgtcatgattacagatgaagaagaaatccgcaccaccaatcccgtggctacggagcagtacggatatgtgtcaaataatttgcaaaactcaaatactggtccaactactggaactgtcaatcaccaaggagcgttacctggtatggtgtggcaggatcgagacgtgtacctgcagggacccatttgggccaagattcctcacaccgatggacactttcatccttctccacttatgggaggttttggactcaaacacccacctcctcagatcatgattaaaaacactcccgttccagccaatcctcccacaaacttcagttctgccaagtttgcttctttcatcacacagtattccacgggacaagtcagcgtggagatcgagtgggagctgcagaaggaggacagcaaacgctggaaccccgagatccagtacacttccaactataacaaacctgttaatgtggactttactgtggacactaatggtgtgtattcagagcctcgccccattggcaccagatacctgactcgtaatctgtaa

SEQ ID NO: 4852 - DNA, 3161 bp, Adeno-associated virus
cgaattgatttagcggccgcgaattcgcccttcgcagagaccaaagttcaactgaaacgaattaaacggtttattgattaacaagcaattacagattacgagtcaggtatctggtgccaatggggcgaggctctgaatacacaccattagtgtccacagtaaagtccacattaacagatttgttgtagttggaagtgtactggatctcgggattccagcgtttgctgttctccttctgtagctcccactcgatctccacgctgacccgccccgtggaatactgtgtgatgaaggaagcaaactttgccgcactgaaggtggtcgaaggattcgcaggtaccggggtgtttttgatgagaatctgtggaggagggtgtttaagtccgaatccgcccatgaggggagaggggtgaaaatgtccgtccgtgtgcggaatctttgcccagataggcccctgcaggtacacgtctctgtcctgccagaccatgcctggaagaacgccttgtgtgttgacatctgcagtagatgcttgtgtgttgccgctctggaggttggtagatacagaaccatactgctccgtggccacgggattggtggttctgatttcctcttcgtctgtaatcatgaccttttcaatgtccacatttgttttctctgatccttgttttccaaagatgagaaccccgctctgaggaaaaaacttttcttcatcgtccttgtggctggccattgccgggcccggattcaccagagagtctctgccattgaggtggtacttggtagctccaatccacgagtattcactgttgttgttgtccgcagatgtctttgatactcgctgctggcggtaacagggtccaggaagccagttcctagactgatcccgaatgtcactcgctccggcctgagaaaactgaagcctggactgcgtggtggttccgcttggagtgtttgttctgctcaagtaatacaggtactggtcgatgagaggattcatgagacggtccaaactctggctgtgagcgtagctgctgtggaaaggaacatcctcaaaggtgtagctgaaggtaaagttgtttccggtacgcagcatctgagaagggaagtactccaggcagtaaaatgaagagcgtcctactgcctgactcccgttgttcagggtgaggtatccatactgtggcaccatgaagacgtctgctgggaacggcgggaggcatccttgatgcgccgagccgaggacgtacgggagctggtactccgagtcagtaaacacctgaaccgtgctggtaaggttattggcaatcgtcgtcgtaccatcattctgcgtgacctctctgacttgaatgttaaagagcttgaagttgagtctcttgggccggaatccccagttgttgttgatgagtctttgccagtcacgtggtgaaaagtggcagtggaatctgttgaagtcaaaatacccccaaggggtgctgtagccaaagtagtggttgtcgttgctggctcctgattggctggaaatctgcttgtacagatggttgttgtaggtgggcagagcccaggttcgggtgctggtggtgatgactctgtcgcccatccatgtggaatcgcaatgccaatttcccgaggaattacccactccgtcggcgccatcgttattgtctgccattggtgcgccactgcctgtagccatcgtattagttcccagaccagagggggctgctggtggctgtccgagaggctgggggtcaggtacggagtctgcgtctccagtctgaccgaaattcaatctctttcttgcaggctggttgcccgcttttccggttcccgaggaggagtctggctccacaggagagtgctctaccggcctcttttttcccggagccgtcttaacaggctcctcaaccaggcccagaggttcaagaaccctcttttttgcctggaagactgctcgtccgaggttgcccccaaaagacgtatcttctttaaggcgctcctgaaactccgcgtcggcgtggtcgtacttgaggtacgggttgtctccgctgtcgagctgccggtcgtaggccttgtcgtgctcgagggccgcggcgtctgcctcgttgaccggctctcccttgtcgagtccgttgaagggtccgaggtacttgtacccaggaagcacaagacccctgctgtcgtccttatgccgctctgcgggctttggtggtggtgggccaggtttgagcttccaccactgtcttattccttcagagagagtgtcctcgagccaatctggaagataaccatcggcagccatacctgatttaaatcatttattgttcagagatgcagtcatccaaatccacattgaccagatcgcaggcagtgcaagcgtctggcacctttcccatgatatgatgaatgtagcaaagtttctgatacgcctttttgacgacagaaacgggttgagattctgacacgggaaagcactctaaacagtctttctgtccgtgagtgaagcagatatttgaattctgattcattctctcgcattgtctgcagggaaacagcatcagattcatgcccacgtgacgagaacatttgttttggtacctgtccgcgtagttgatcgaagcttccgcgtctgacgtcgatggctgcgcaactgactcgcgcgcccgtttgggctcacttatatctgcgtcactgggggcgggtcttttcttggctccaccctttttgacgtagaattcatgctccacctcaaccacgtgatcctttgcccaccggaaaaagtctttcacttcctgcttggtgaccttcccaaagtcatgatccagacggcgggttagttcaaatttgaacatccggtcttgcaacggctgctggtgttcgaaggtcgttgagttcccgtcaatcacggcgcacatgttggtgttggaggtggcgatcacgggagtcgggtctatctgggccgaggacttgcacttttggtccacgcgcaccttgcttcctccgagaatggcttcggccgattccacgaccttggcggtcatctttccctcctcccaccagatcaccatcttgtcgacacagtcgttgaagggaaagttctcattggtccagttgacgcagcaagggcgaattcgtttaaacctgcaggaactagtcccttagtgagg

SEQ ID NO: 4853 - protein, 735 aa, Adeno-associated virus
MAADGYLPDWLEDTLSEGIRQWWKLKPGPPPPKPAERHKDDSRGLVLPGYKYLGPFNGLYKGEPVNEADAAALEHDKAYDRQLDSGDNPYLKYNHAGAEFQERLKEDTSFGGNLGRAVFQAKKRVLEPLGLVEEPVKTAPGKKRPVEHSPVEPDSSSGTGKAGNQPARKRLNFGQTGDADSVPDPQPLGQPPAAPSGLGSTTMATGSGAPVADNNEGADGVGNSSGNWHCDSQWLGDRVITTSTRTWALPTYNNHLYKQISSQSGASNDNHYFGYSTPWGYFDFNRFHCHFSPRDWQRLINNNWGFRPKRLNFKLFNIQVKEVTQNDGTTTIANNLTSTVQVFTDSEYQLPYVLGSAHQGCLPPFPADVFMVPQYGYLTLNNGSQAVGRSSFYCLEYFPSQMLRTGNNFQFSYTFEDVPFHSSYAHSQSLDRLMNPLIDQYLYYLNKTQSNSGTLQQSRLLFSQAGPTSMSLQAKNWLPGPCYRQQRLSKQANDNNNSNFPWTAATKYHLNGRDSLVNPGPAMASHKDDEEKFFPMHGTLIFGKQGTNANDADLDNVMITDEEEIRTTNPVATEQYGYVSNNLQDSNTGPTTGTVNHQGALPGMVWQDRDVYLQGPIWAKIPHTDGHFHPSPLMGGFGLKHPPPQIMIKNTPVPANPPTNFSSAKFASFITQYSTGQVSVEIEWELQKENSKRWNPEIQYTSNYNKSVNVDFTVDTNGVYSEPRPIGTRYLTRNL

SEQ ID NO: 4854 - DNA, 2208 bp, Adeno-associated virus
atggctgccgatggttatcttccagattggctcgaggacactctctctgaaggaataagacagtggtggaagctcaaacctggcccaccaccgccaaagcccgcagagcggcataaggacgacagcaggggtcttgtgcttcctgggtacaagtacctcggacccttcaacggactctacaagggagagccggtcaacgaggcagacgccgcggccctcgagcacgacaaggcctacgaccggcagctcgacagcggagacaacccgtacctcaagtacaaccacgccggcgcggagtttcaggagcgccttaaagaagatacgtcttttgggggcaacctcggacgagcagtcttccaggccaaaaagagggttcttgaacctctgggcttggttgaggagcctgttaaaacggctccgggaaaaaagaggccggtagagcactctcctgtggagccagactcctcctcgggaaccggaaaagcgggcaaccagcctgcaagaaaaagattgaattttggtcagactggagacgcagactccgtacctgacccccagcctctcggacagccaccagcagccccctctggtctgggatctactacaatggctacaggcagtggcgcaccagtggcagacaataacgagggtgccgatggagtgggtaattcctcaggaaattggcattgcgattcccaatggctgggcgacagagtcatcaccaccagcacccgaacctgggctctgcccacctacaacaaccacctctacaagcaaatctccagccaatcaggagcctcaaacgacaaccactactttggctacagcaccccctgggggtattttgacttcaacagattccactgccacttttcaccacgtgactggcaaagactcatcaacaacaactggggattccgaccaaagagactcaacttcaagctctttaacattcaagtcaaagaggtcacgcagaatgacggtacgacgacgattgccaataaccttaccagcacggttcaggtgtttactgactcggagtaccagctcccgtacgtcctcggctcggcgcatcaaggatgcctcccgccgttcccagcagacgtcttcatggtgccacagtatggatacctcaccctgaacaacgggagtcaggcggtaggacgctcttccttttactgcctggagtactttccttctcagatgctgcgtactggaaacaactttcagttcagctacacctttgaagacgttcctttccacagcagctacgctcacagccagagtctggatcggctgatgaatcctctgatcgaccagtacctgtattatctgaacaagacacaatcaaatagtggaacccttcagcagtctcggctactgtttagccaagctggacccaccagcatgtctcttcaagctaaaaactggctgcctggaccttgctacagacagcagcgtctgtcaaagcaggcaaacgacaacaacaacagcaactttccctggactgcggctacaaagtatcatctaaatggccgggactcgttggttaatccaggaccagctatggccagccacaaagacgatgaagaaaagtttttccccatgcatggaaccctgatatttggtaaacaaggaacaaatgctaacgacgcggatttggacaatgtcatgattacagatgaagaagaaatccgcaccaccaatcccgtggctacggagcagtacggatatgtgtcaaataatttgcaagactcaaatactggtccaactactggaactgtcaatcaccaaggagcgttacctggtatggtgtggcaggatcgagacgtgtacctgcagggacccatttgggccaagattcctcacaccgatggacactttcatccttctccacttatgggaggttttggactcaaacacccacctcctcagatcatgattaaaaacactcccgttccagccaatcctcccacaaacttcagttctgccaagtttgcttctttcatcacacagtattccacgggacaagtcagcgtagagatcgagtgggagctgcagaaggagaacagcaaacgctggaaccccgagatccagtacacttccaactataacaaatctgttaatgtggactttactgtggacactaatggtgtgtattcagagcctcgccccattggcaccagatacctgactcgtaatctgtaa

SEQ ID NO: 4855 - protein, 738 aa, Adeno-associated virus
MAADGYLPDWLEDNLSEGIREWWDLKPGAPKPKANQQKQDDGRGLVLPGCKYLGPFNGLDKGEPVNAADAAALEHDKAYDQQLKAGDNPYLRYNHADAEFQERLQEDTSFGGNLGRAVFQAKKRVLEPLGLVEEGAKTAPGKKRPVEPSPQRSPDSSTGIGKTGQQPAKKRLNFGQTGDSESVPDPQPIGEPPAGPSGLGSGTMAAGGGAPMADNNEGADGVGSSSGNWHCDSTWLGDRVITTSTRTWALPTYNNHLYKQISNGTSGGSTNDNTYFGYSTPWGYFDFNRFHCHFSPRDWQRLINNNWGFRPKRLNFKLFNIQVKEVTQNEGTKTIANNLTSTIQVFTDSEYQLPYVLGSAHQGCPPPFPADVFMIPQYGYLTLNNGSQAVGRSSFYCLEYFPSQMRRTGNNFEFSYQFEDVPFHSSYAHSQSLDRLMNPLIDQYLYYLSRTQSTGGTAGTQQLLFSQAGPNNMSAQAKNWLPGPCYRQQRVSTTLSQNNNSNFAWTGATKYHLNGRDSLVNPGVAMATHKDDEERFFPSSGVLMFGKQGAGKDNVDYSSVMLTSEEEIKTTNPVATEQYGVVADNLQQQNAAPIVGAVNSQGALPGMVWQNRDVYLQGPIWAKIPHTDGNFHPSPLMGGFGLKHPPPQILIKNTPVPADPPTTFSQAKLASFITQYSTGQVSVEIEWELQKENSKRWNPEIQYTSNYNKSVNVDFTVDTNGVYSEPRPIGTRYLTRNL

SEQ ID NO: 4856 - DNA, 2217 bp, Adeno-associated virus
atggctgccgatggttatcttccagattggctcgaggacaacctctctgagggcattcgcgagtggtgggacttgaaacctggagccccgaaacccaaagccaaccagcaaaagcaggacgacggccggggtctggtgcttcctggctgcaagtacctcggacccttcaacggactcgacaagggggagcccgtcaacgcggcggacgcagcggccctcgagcacgacaaggcctacgaccagcagctcaaagcgggtgacaatccgtacctgcggtataaccacgccgacgccgagtttcaggagcgtctgcaagaagatacgtcttttgggggcaacctcgggcgagcagtcttccaggccaagaagcgggttctcgaacctctcggtctggttgaggaaggcgctaagacggctcctggaaagaagagaccggtagagccatcaccccagcgttctccagactcctctacgggcatcggcaagacaggccagcagcccgcgaaaaagagactcaactttgggcagactggcgactcagagtcagtgcccgaccctcaaccaatcggagaaccccccgcaggcccctctggtctgggatctggtacaatggctgcaggcggtggcgctccaatggcagacaataacgaaggcgccgacggagtgggtagttcctcaggaaattggcattgcgattccacatggctgggcgacagagtcatcaccaccagcacccgaacctgggccctccccacctacaacaaccacctctacaagcaaatctccaacgggacatcgggaggaagcaccaacgacaacacctacttcggctacagcaccccctgggggtattttgactttaacagattccactgccacttctcaccacgtgactggcagcgactcatcaacaacaactggggattccggcccaagagactcaacttcaagctcttcaacatccaggtcaaggaggtcacgcagaatgaaggcaccaagaccatcgccaataaccttaccagcacgattcaggtctttacggactcggaataccagctcccgtacgtcctcggctctgcgcaccagggctgcccgcctccgttcccggcggacgtcttcatgattcctcagtacgggtacctgactctgaacaacggcagtcaggccgtgggccgttcctccttctactgcctggagtactttccttctcaaatgcggagaacgggcaacaactttgagttcagctaccagtttgaggacgtgccttttcacagcagctacgcgcatagccaaagcctggaccggctgatgaaccccctcatcgaccagtacctgtactacctgtctcggactcagtccacgggaggtaccgcaggaactcagcagttgctattttctcaggccgggcctaataacatgtcggctcaggccaaaaactggctacccgggccctgctaccggcagcaacgcgtctccacgacactgtcgcaaaataacaacagcaactttgcttggaccggtgccaccaagtatcatctgaatggcagagactctctggtaaatcccggtgtcgctatggcaacgcacaaggacgacgaagagcgattttttccatccagcggagtcttgatgtttgggaaacagggagctggaaaagacaacgtggactatagcagcgttatgctaaccagtgaggaagaaatcaaaaccaccaacccagtggccacagaacagtacggcgtggtggccgataacctgcaacagcaaaacgccgctcctattgtaggggccgtcaacagtcaaggagccttacctggcatggtctggcagaaccgggacgtgtacctgcagggtcctatctgggccaagattcctcacacggacggcaactttcatccttcgccgctgatgggaggctttggactgaaacacccgcctcctcagatcctgattaagaatacacctgttcccgcggatcctccaactaccttcagtcaagccaagctggcgtcgttcatcacgcagtacagcaccggacaggtcagcgtggaaattgaatgggagctgcagaaagagaacagcaagcgctggaacccagagattcagtatacttccaactataacaaatctgttaatgtggactttactgtggacactaatggtgtgtattcagagcctcgccccattggcaccagatacctgactcgtaatctgtaa

SEQ ID NO: 4857 - DNA, 3167 bp, Adeno-associated virus
attgaatttagcggccgcgaattcgcccttcgcagagaccaaagttcaactgaaacgaattaaacggtttattgattaacaagcaattacagattacgagtcaggtacctggtgccaatggggcgaggctctgaatacacaccattagtgtccacagtaaagtccacattaacagatttgttgtagttggaagtgtactgaatctcgggattccagcgtttgctgttctccttctgcagctcccactcgatctccacgctgacctgccccgtggagtactgtgtaatgaaggaagcaaactttgccgcactgaaggtagtcgaaggattcgcaggtaccggggtgttcttgatgagaatctgcgggggagggtgtttaagtccgaatccgcccatgaggggagaggggtgaaaatgtccgtccgtgtgtggaatctttgcccagatgggcccctgcaggtacacgtctctgtcctgccacaccatgcctggaagaacgccttgtgtgttgacatctgaggtagctgcttgtgtgttgccgctctggaggttggtagatacagaaccatactgctccgtagccacgggattggtggtcctgatttcctcttcgtctgtaatcatgaccttttcaatgtccacattagtttttcccgagtcttgttttccaaagatgagaaccccgctctgaggaaaaaacttttcttcatcgtccttgtggctggccatggccgggcccggattcaccagagagtctcttccattaaggtggtacttggtagctccagtccacgagtattcactgttgttgttatccgcagatgtctttgatactcgctgctggcggtaacagggtccaggaagccagttcctagactggtcccgaatgtcacttgctccggcctgagaaaactgaagccttgactgcgtggtggttccgcttggagtgtttgttctgctcaagtaatacaggtactggtcgatgagaggattcatgagacggtccaaactctggctgtgggcgtagctgctgtggaaaggaacgtcctcaaaggtgtagctgaaggtaaagttgtttccggtacgcagcatctgagaaggaaagtactccaggcagtaaaatgaagagcgtcctactgcctgactcccgttgttcagggtgaggtatccatactgtggcaccatgaagacgtctgctgggaacggcgggaggcatccttgatgcgccgagccgaggacgtacgggagctggtactccgagtcagtaaacacctgaaccgtgctggtaaggttattggcaatcgtcgtcgtaccgtcattctgcgtgacctccttgacttgaatgttaaagagcttgaagttgagtcttttgggccggaatccccaattgttgttgatgagtctttgccagtcacgtggcgaaaagtggcagtggaatctgttgaagtcaaaatacccccaaggggtgctgtagccaaagtagtggttgtcgtttgaggctcctgattggctggaaatctgcttgtagaggtggttgttgtaggtgggcagagcccaggtgcgggtgctggtggtgatgactctgtcgcccatccatgtggaatcgcaatgccaatttcccgaggaattacccactccgtcggcgccctcgttattgtctgccattggtgcgccactgcctgtagccatcgtattagttcccagaccagagggggctgctggtggctgtccgagaggctgggggtcaggtacggagtctgcgtctccagtctgaccgaaattcaatctctttcttgcaggctgctggcccgcttttccggttcccgaggaggagtctggctccgcaggagagtgctctaccggcctcttttttcccggagccgtcttaacaggttcctcaaccaggcccagaggttcaagaaccctctttttcgcctggaagactgctcgtccgaggttgcccccaaaagacgtatcttctttaagacgctcctggaactccgcgtcggcgtggttgtacttggggtacgggttgtctccgctgtcgagctgccggtcgtaggccttgtcgtgctcgagggccgcggcgtctgcctcgttgaccggctctcccttgtcgagtccgttgaagggtccaaggtacttgtacccaggaagcacaagacccctgctgtcgtccttatgccgctctgcgggctttggtggtggtgggccaggtttgagcttccaccactgtcttattccttcagagagagtgtcctcgagccaatctggaagataaccatcggcagccatacctgatttaaatcatttattgttcagagatgcagtcatccaaatccacattgaccagatcgcaagcagtgcaagcgtctggcacctttcccatgatatgatgaatgtagcacagtttctgatacgcctttttgacgacagaaacgggttgagattctgacacgggaaagcactctaaacagtctttctgtccgtgagtgaagcagatatttgaattctgattcattctctcgcattgtctgcagggaaacagcatcagattcatgcccacgtgacgagaacatttgttttggtacctgtccgcgtagttgattgaagcttccgcgtctgacgtcgatggctgcgcaactgactcgcgcgcccgtttgggctcacttatatctgcgtcactgggggcgggtctttttttggctccaccctttttgacgtagaattcatgctctacctcaaccacgtgatcctttgcccaccggaaaaagtctttgacttcctgcttggtgaccttcccaaagtcatgatccagacggcgggtgagttcaaatttgaacatccggtcttgcaacggctgctggtgttcgaaggtcgttgagttcccgtcaatcactgcgcacatgttggtgttggaggtgacaatcacgggagtcgggtctatctgggccgaggacttgcatttctggtccacgcgcaccttgcttcctccgagaatggctttggccgactccacgaccttggcggtcatcttcccctcctcccaccagatcaccatcttgtcgacgcaatcattgaaaggaaagttctcattggtccagttgacgcagccgtagaaagggcgaattcgtttaaacctgcaggactagtccctttagtgagggt

SEQ ID NO: 4858 - DNA, 3161 bp, Adeno-associated virus
aattgaatttagcggccgcgaattcgcccttcgcagagaccaaagttcaactgaaacgaattaaacggtttattgattaacaagcaattacagattacgagtcaggtatctggtgccaatggggcgaggctctgaatacacaccattagtgtccacagtaaagtccacattaacagatttgttgtagttggaagtgtactgaatctcgggattccagcgtttgctgttctccttctgcagctcccactcgatctccacgctgacctgccccgtggagtactgtgtaatgaaggaagcaaactttgccgcactgaaggtagtcgaaggattcgcaggtaccggggtgttcttgatgagaatctgcgggggagggtgtttaagtccgaatccgcccatgaggggagaggggtgaaaatgtccgtccgtgtgtggaatctttgcccagatgggcccctgcaggtacacgtctctgtcctgccacaccatgcctggaagaacgccttgtgtgttgacatctgaggtagctgcttgtgtgttgccgctctggaggttggtagatacagaaccatactgctccgtagccacgggattggtggtcctgatttcctcttcgtctgtaatcatgaccttttcaatgtccacattagtttttcccgagtcttgttttccaaagatgagaaccccgctctgaggaaaaaacttttcttcatcgtccttgtggctggccatggccgggcccggattcaccagagagtctcttccattaaggtggtacttggtagctccagtccacgagtattcactgttgttgttatccgcagatgtctttgatactcgctgctggcggtaacagggtccaggaagccagttcctagactggtcccgaatgtcacttgctccggcctgagaaaactgaagccttgactgcgtggtggttccgcttggagtgtttgttctgctcaagtaatacaggtactggtcgacgagaggattcatgagacggtccaaactctggctgtgggcgtagctgctgtggaaaggaacgtcctcaaaggtgtagctgaaggtaaagttgtttccggtacgcagcatctgagaaggaaagtactccaggcagtaaaatgaagagcgtcctactgcctgactcccgttgttcagggtgaggtatccatactgtggcaccatgaagacgtctgctgggaacggcgggaggcatccttgatgcgccgagccgaggacgtacgggagctggtactccgagtcagtaaacacctgaaccgtgctggtaaggttattggcaatcgtcgtcgtaccgtcattctgcgtgacctccttgacttgaatgttaaagagcttgaagttgagtcttttgggccgggatccccaattgttgttgatgagtctttgccagtcacgtggcgaaaagtggcagtggaatctgttgaagtcaaaatacccccaaggggtgctgtagccaaagtagtggttgtcgtttgaggctcctgattggctggaaatctgcctgtagaggtggttgttgtaggtgggcagagcccaggtgcgggtgctggtggtgatgactctgtcgcccatccatgtggaatcgcaatgccaatttcccgaggaattacccactccgtcggcgccctcgttattgtctgccattggtgcgccactgcctgtagccatcgtattagttcccagaccagagggggctgctggtggctgtccgagaggctgggggtcaggtacggagtctgcgtctccagtctgaccgaaattcaatctccttcttgcaggctgctggcccgcttttccggttcccgaggaggagtctggctccgcaagagagtgctctaccggcctcttttttcccggagccgtcttaacaggttcctcaaccaggcccagaggttcaagaaccctctttttcgcctggaagactgctcgtccgaggttgcccccaaaagacgtatcttctttaagacgctcctggaactccgcgtcggcgtggttgtacttgaggtacgggttgtctccgccgtcgagctgccggtcgtaggccttgtcgtgctcgagggccgcggcgtctgcctcgttgaccggctctcccttgtcgagtccgttgaagggtccaaggtacttgtacccaggaagcacaagacccctgctgtcgtccttatgccgctctgcgggctttggtggtggtgggccaggtttgagcttccaccactgtcttattccttcagagagagtgtcctcgagccaatctggaagataaccatcggcagccatacctgatttaaatcatttattgttcagagatgcagtcatccaaatccacattgaccagatcgcaagcagtgcaagcgtctggcacctttcccatgatatgatgaatgtagcacagtttctgatacgcctttttgacgacagaaacgggttgagattctgacacgggaaagcactctaaacagtctttctgtccgtgagtgaagcagatatttgaattctgattcattctctcgcattgtctgcagggaaacagcatcagattcatgcccacgtgacgagaacatttgttttggtacctgtccgcgtagttgattgaagcttccgcgtctgacgtcgatggctgcgcaactgactcgcgcgcccgtttgggctcacttatatctgcgtcactgggggcgggtctttttttggctccaccctttttgacgtagaattcatgctctacctcaaccacgtgatcctttgcccaccggaaaaagtctttgacttcctgcttggtgaccttcccaaagtcatgatccagacggcgggtgagttcaaatttgaacatccggtcttgcaacggctgctggtgttcgaaggtcgttgagttcccgtcaatcactgcgcacatgttggtgttggaggtgacaatcacgggagtcgggtctatctgggccgaggacttgcatttctggtccacgcgcaccttgcttcctccgagaatggctttggccgactccacgaccttggcggtcatcttcccctcctcccaccagatcaccatcttgtcgacgcaatcattgaaaggaaagttctcattggtccagttgacgcagcaagggcgaattcgtttaaacctgcaggactagtccctttagtgaggg

SEQ ID NO: 4859 - DNA, 3172 bp, Adeno-associated virus
gattgaatttagcggccgcgaattcgcccttgctgcgtcaactggaccaatgagaactttcccttcaacgattgcgtcgacaagatggtgatctggtgggaggagggcaagatgaccgccaaggtcgtggagtccgccaaggccattctgggtggaagcaaggtgcgcgtggaccaaaagtgcaagtcatcggcccagatcgaccccacgcccgtgatcgtcacctccaacaccaacatgtgcgccgtgatcgacgggaacagcaccaccttcgagcaccagcagcccctgcaggaccgcatgttcaagttcgagctcacccgccgtctggagcacgactttggcaaggtgaccaagcaggaagtcaaagagttcttccgctgggctcaggatcacgtgactgaggtggcgcatgagttctacgtcagaaagggcggagccaccaaaagacccgcccccagtgacgcggatataagcgagcccaagcgggcctgcccctcagttgcggagccatcgacgtcagacgcggaagcaccggtggactttgcggacaggtaccaaaacaaatgttctcgtcacgcgggcatgcttcagatgctgtttccctgcaagacatgcgagagaatgaatcagaatttcaacgtctgcttcacgcacggggtcagagactgctcagagtgcttccccggcgcgtcggaatctcaacccgtcgtcagaaaaaagacgtatcagaaactgtgcgcgattcatcatctgctggggcgggcacccgagattgcgtgttcggcctgcgatctcgtcaacgtggacttggatgactgtgtttctgagcaataaatgacttaaaccaggtatggctgctgacggttatcttccagattggctcgaggacaacctctctgagggcattcgcgagtggtgggacctgaaacctggagcccccaagcccaaggccaaccagcagaagcaggacgacggccggggtctggtgcttcctggctacaagtacctcggacccttcaacggactcgacaagggggagcccgtcaacgcggcggacgcagcggccctcgagcacgacaaggcctacgaccagcagctcaaagcgggtgacaatccgtacctgcggtataaccacgccgacgccgagtttcaggagcgtctgcaagaagatacgtcttttgggggcaacctcgggcgagcagtcttccaggccaagaagcgggttctcgaacctctcggtctggttgaggaagctgctaagacggctcctggaaagaagagaccggtagaaccgtcacctcagcgttcccccgactcctccgcgggcatcggcaagaaaggccagcagcccgctaaaaagagactgaactttggtcagactggcgactcagagtcagtccccgaccctcaaccaatcggagaaccaccagcaggcccctctggtctgggatctggtacaatggctgcaggcggtggcgctccaatggcagacaataacgaaggcgccgacggagtgggtagttcctcaggaaattggcattgcgattccacatggctgggcgacagagtcatcaccaccagcacccgaacctgggccctgcccacctacaacaaccacctctacaagcaaatatccaatgggacatcgggaggaagcaccaacgacaacacctacttcggctacagcaccccctgggggtattttgacttcaacagattccactgccacttctcaccacgtgactggcagcgactcatcaacaacaactggggattccggccaaaaagactcagcttcaagctcttcaacatccaggtcaaggaggtcacgcagaatgaaggcaccgagaccatcgccaataaccttaccagcacgattcaggtatttacggactcggaataccagctgccgtacgtcctcggctccgcgcaccagggctgcctgcctccgttcccggcggacgtcttcatgattccccagtacggctaccttacactgaacaatggaagtcaagccgtaggccgttcctccttctactgcctggaatattttccatctcaaatgctgcgaactggaaacaattttgaattcagctacaccttcgaggacgtgcctttccacagcagctgcgcacacagccagagctcggaccgactgatgaatcctctcatcgaccagtacctgtactacttatccagaactcggtccacaggaggaactcaaggtacccagcaattgttattttctcaagctgggcctgcaaacatgtcggctcaggctaagaactggctacctggaccttgctaccggcagcagcgagtctctacgacactgtcgcaaaacaacaacagcaactttgcttggactggtgccaccaaatatcacctgaacggaagagactctttggtaaatcccggtgtcgccatggcaacccacaaggacgacgaggaacgcttcttcccgtcgagtggagtcctgatgtttggaaaacagggtgctggaagagacaatgtggactacagcagcgttatgctaaccagcgaagaagaaattaaaaccactaaccctgtagccacagaacaatacggtgtggtggctgacaacttgcagcaaaccaatacagggcctattgtgggaaatgtcaacagccaaggagccttacctggcatggtctggcagaaccgagacgtgtacctgcagggtcccatctgggccaagattcctcacacggacggcaacttccacccttcaccgctaatgggaggatttggactgaagcacccacctcctcagatcctgatcaagaacacgccggtacctgcggatcctccaacaacgttcagccaggcgaaattggcttccttcattacgcagtacagcaccggacaggtcagcgtggaaatcgagtgggagctgcagaaggagaacagcaaacgctggaacccagagattcagtacacttcaaactactacaaatctacaaatgtggactttgctgtcaatacagagggaacttattctgagcctcgccccattggtactcgttacctcacccgtaatctgtaattgctggttaatcaataaaccgtttgattcgtttcagttgaactttggtctctgcgaagggcgaattcgtttaaacctgcaggactagtccctttagtgagg

SEQ ID NO: 4860 - DNA, 3172 bp, Adeno-associated virus
gattgaatttagcggccgcgaattcgcccttgctgcgtcaactggaccaatgagaactttcccttcaacgattgcgtcgacaagatggtgatctggtgggaggagggcaagatgaccgccaaggtcgtggagtccgccaaggccattctgggtggaagcaaggtgcgcgtggaccaaaagtgcaagtcatcggcccagatcgaccccacgcccgtgatcgtcacctccaacaccaacatgtgcgccgtgatcggcgggaacagcaccaccttcgagcaccagcagcccctgcaggaccgcatgttcaagttcgagctcacccgccgtctggagcacgactttggcaaggtgaccaagcaggaagtcaaagagttcttccgctgggctcaggatcacgtgactgaggtggcgcatgagttctacgtcagaaagggcggagccaccaaaagacccgcccccagtgacgcggatataagcgagcccaagcgggcctgcccctcagttgcggagccatcgacgtcagacgcggaagcaccggtggactttgcggacaggtaccaaaacaaatgttctcgtcacgcgggcatgcttcagatgctgtttccctgcaagacatgcgagagaatgaatcagaatttcaacgtctgcttcacgcacggggtcagagactgctcagagtgcctccccggcgcgtcagaatctcaacccgtcgtcagaaaaaagacgtatcagaaactgtgcgcgattcatcatctgctggggcgggcacccgagattgcgtgttcggcctgcgatctcgtcaacgtggacttggatgactgtgtttctgagcaataaatgacttaaaccaggtatggctgctgacggttatcttccagattggctcgaggacaacctctctgagggcattcgcgagtggtgggacctgaaacctggagcccccaagcccaaggccaaccagcagaagcaggacgacggccggggtctggtgcttcttggctacaagtacctcggacccttcaacggactcgacaagggggagcccgtcaatgcggcggacgcagcggccctcgagcacgacaaggcctacgaccagcagctcaaagcgggtgacaatccgtacctgcggtataaccacgccgacgccgagtttcaggagcgtctgcaagaagatacgtcttttgggggcaacctcgggcgagcagtcttccaggccaagaagcgggttctcgaacctctcggtctggttgaggaagctgctaagacggctcctggaaagaagagaccggtagaaccgtcacctcagcgttcccccgactcctccacgggcatcggcaagaaaggccagcagcccgctaaaaagagactgaactttggtcagactggcgactcagagtcagtccccgaccctcaaccaatcggagaaccaccagcaggcccctctggtctgggatctggtacaatggctgcaggcggtggcgctccaatggcagacaataacgaaggcgccgacggagtgggtagttcctcaggaaattggcattgcgattccacatggctgggcgacagagtcatcaccaccagcacccgaacctgggccctgcccacctacaacaaccacctctacaagcaaatatccaatgggacatcgggaggaagcaccaacgacaacacctacttcggctacagcaccccctgggggtattttgacttcaacagattccactgccacttctcaccacgtgactggcagcgactcatcaacaacaactggggattccggccaaaaagactcagcttcaagctcttcaacatccaggtcaaggaggtcacgcagaatgaaggcaccaagaccatcgccaataaccttaccagcacgattcaggtatttacggactcggaataccagctgccgtacgtcctcggctccgcgcaccagggctgcctgcctccgttcccggcggacgtcttcatgattccccagtacggctaccttacactgaacaatggaagtcaagccgtaggccgttcctccttctactgcctggaatattttccatctcaaatgctgcgaactggaaacaattttgaattcagctacaccttcgaggacgtgcctttccacagcggctacgcacacagccagagcttggaccgactgatgaatcctctcatcgaccagtacctgtactacttatccagaactcagtccacaggaggaactcaaggtacccagcaattgttattttctcaagctgggcctgcaaacatgtcggctcaggctaagaactggctacctggaccttgctaccggcagcagcgagtctctacgacactgtcgcaaaacaacaacagcaactttgcttggactggtgccaccaaatatcacctgaacggaagagactctttggtaaatcccggtgtcgccatggcaacccacaaggacgacgaggaacgcttcttcccgtcgagtggagtcctgatgtttggaaaacagggtgctggaagagacaatgtggactacagcagcgttatgctaaccagcgaagaagaaattaaaaccactaaccctgtagccacagaacaatacggtgtggtggctgacaacttgcagcaaaccaatacagggcctattgtgggaaatgtcaacagccaaggagccttacctggcatggtctggcagaaccgagacgtgtacctgcagggtcccatctgggccaagattcctcacacggacggcaacttccacccttcaccgctaatgggaggatttggactgaagcacccacctcctcagatcctgatcaagaacacgccggtacctgcggatcctccaacgacgttcagccaggcgaaattggcttccttcattacgcagtacagcaccggacaggtcagcgtggaaatcgagtgggagctgcagaaggagaacagcaaacgctggaacccagagattcagtacacttcaaactactacaaatctacaaatgtggactttgctgtcaatacagagggaacttattctgagcctcgccccattggtactcgttacctcacccgtaatctgtaattgctggttaatcaataaaccgtttgattcgtttcagttgaactttggtctctgcgaagggcgaattcgtttaaacctgcaggactagtccctttagtgagg

SEQ ID NO: 4861 - DNA, 2208 bp, Adeno-associated virus
atggctgccgatggttatcttccagattggctcgaggacactctctctgaaggaataagacagtggtggaagctcaaacctggcccaccaccaccaaagcccgcagagcggcataaggacgacagcaggggtcttgtgcttcctgggtacaagtacctcggacccttcaacggactcgacaagggagagccggtcaacgaggcagacgccgcggccctcgagcacgacaaggcctacgaccggcagctcgaaagcggagacaacccgtacctcaagtacaaccacgccgacgcggagtttcaggagcgtcttaaagaagatacgtcttttgggggcaacctcggacgagcagtcttccaggcgaaaaagagggttcttgaacctctgggcctggttgaggagcctgttaaaacggctccgggaaaaaagaggccggtagagcactctcctgtggagccagactcctcctcgggaaccggaaaagcgggccagcagcctgcgagaaaaagattgaattttggtcagactggagacgcagactccgtacctgacccccagcctctcggacagccaccagcagccccctctggtctgggatctactacaatggcttcaggcagtggcgcaccagtggcagacaataacgagggtgccgatggagtgggtaattcctcaggaaattggcattgcgattcccaatggctgggcgacagagtcatcaccaccagcacccgaacctgggccctgcccacctacaacaaccacctctacaagcaaatctccagccaatcaggagcctcaaacgacaaccactactttggctacagcaccccctgggggtattttgacttcaacagattccactgccacttttcaccacgtgactggcaaagactcatcaacaacagctggggattccgacccaaaagactcaacttcaagctctttaacattcaagtcaaagaggtcacgcagaatgacggtacgacgacgattgccaataaccttaccagcacggttcaagtgtttaccgactcggagtaccagctcccgtacgtcctcggctcggcgcatcaaggatgcctcccgccgttcccagcagacgtctttatggtcccacagtatggatacctcaccctgaacaacgggagtcaggcggtaggacgctcttccttttactgcctggagtactttccttctcagatgctgcgtactggaaacaactttcagttcagctacacctttgaagacgttcccttccacagcagctacgctcacagccagagtctggatcggctgctgaatcctctgatcgaccagtacctatattatctgaacaagacacaatcaaatagtggaactcttcagcagtctcggctactgtttagccaagctggacccaccagcatgtctcttcaagctaaaaactggctgcctggaccttgctacagacagcagcgtctgtcaaagcaggcaaacgacaacaacaacagcaactttccctggactgcggctacaaagtatcatctaaatggccgggactcgttggttaatccaggaccagctatggccagccacaaagacgatgaagaaaagtttttccccatgcatggaaccctgatatttggtaaacaaggaacaaatgctaacgacgcggatttggacaatgtcatgattacagatgaagaagaaatccgcaccaccaatcccgtggctacggagcagtacggatatgtgtcaaataatttgcaaaactcaaatactggtccaactactggaactgtcaatcaccaaggagcgttacctggtatggtgtggcaggatcgagacgtgtacctgcagggacccatttgggccaagattcctcacacggacgggcactttcatccttctccactaatgggaggttttgggctcaaacacccgcctcctcagatcatgatcaaaaacactcccgttccagccaatcctcctacaaacttcagttcttccaagtttgcttctttcatcacacagtattccacggggcaggtcagcgtggagatcgagtgggagctgcagaaggagaacagcaaacgctggaatcccgaaattcagtatacttccaactacaacaaatctgttaatgtggactttactgtggacactaatggtgtgtattcagagcctcgccccattggcaccagatacccgactcgtaatctgtaa

SEQ ID NO: 4862 - protein, 735 aa, Adeno-associated virus
MAADGYLPDWLEDTLSEGIRQWWKLKPGPPPPKPAERHKDDSRGLVLPGYKYLGPFNGLDKGEPVNEADAAALEHDKAYDRQLESGDNPYLKYNHADAEFQERLKEDTSFGGNLGRAVFQAKKRVLEPLGLVEEPVKTAPGKKRPVEHSPVEPDSSSGTGKAGQQPARKRLNFGQTGDADSVPDPQPLGQPPAAPSGLGSTTMASGSGAPVADNNEGADGVGNSSGNWHCDSQWLGDRVITTSTRTWALPTYNNHLYKQISSQSGASNDNHYFGYSTPWGYFDFNRFHCHFSPRDWQRLINNSWGFRPKRLNFKLFNIQVKEVTQNDGTTTIANNLTSTVQVFTDSEYQLPYVLGSAHQGCLPPFPADVFMVPQYGYLTLNNGSQAVGRSSFYCLEYFPSQMLRTGNNFQFSYTFEDVPFHSSYAHSQSLDRLLNPLIDQYLYYLNKTQSNSGTLQQSRLLFSQAGPTSMSLQAKNWLPGPCYRQQRLSKQANDNNNSNFPWTAATKYHLNGRDSLVNPGPAMASHKDDEEKFFPMHGTLIFGKQGTNANDADLDNVMITDEEEIRTTNPVATEQYGYVSNNLQNSNTGPTTGTVNHQGALPGMVWQDRDVYLQGPIWAKIPHTDGHFHPSPLMGGFGLKHPPPQIMIKNTPVPANPPTNFSSSKFASFITQYSTGQVSVEIEWELQKENSKRWNPEIQYTSNYNKSVNVDFTVDTNGVYSEPRPIGTRYPTRNL

SEQ ID NO: 4863 - DNA, 2208 bp, Adeno-associated virus
atggctgccgatggttatcttccagattggctcgaggacactctctctgaaggaataagacagtggtggaagctcaaacctggcccaccaccaccaaagcccgcagagcggcataaggacgacagcaggggtcttgtgcttcctgggtacaagtacctcggacccttcaacggactcgacaagggagagccggtcaacgaggcagacgccgcggccctcgagcacgacaaggcctacgaccggcagctcgacagcggagacaacccgtacctcaagtacaaccacgccgacgcggagtttcaggagcgtcttaaagaagatacgtcttttgggggcaacctcggacgagcagtcttccaggccaaaaagaggattcttgaacctctgggcctggttgaggaacctgttaagacggctccgggagaaaagaggccggtagagcactctcctgcggagccagactcctcctcgggaaccggaaaagcgggccagcagcctgcaagaaagagattgaattttggccagactggagacgcagactcagtacctgacccccagcctctcggacagccaccagcagccccctctggtctgggaactaatacgatggcttcaggcagtggcgcaccaatggcagacaataacgagggcgccgacggagtgggtaattcctcgggaaattggtattgcgattccacatggatgggcgacagagtcatcaccaccagcacccgcacctgggccctgcccacctacaacaaccatctgtacaagcaaatctccagccagtctggagccagcaacgacaaccactactttggctacagcaccccctgggggtattttgacttcaacagattccactgccacttctccccacgtgactggcaaagactcatcaacaacaactggggattccggcccaagagactcagcttcaagctctttaacattcaagtcaaagaggtcacgcagaatgacggtacgacgacgattgccaataaccttaccagcacggttcaggtgtttactgactcggagtaccagctcccgtacgtcctcggctcggcgcatcaaggatgcctcccgccgttcccagcagacgtcttcatggtgccacagtatggatacctcaccctgaacaacggcagtcaggcggtaggacgctcttccttttactgcctggagtactttccttctcagatgcttcgtaccggaaacaactttaccttcagctacacctttgaagacgttcctttccatagcagctacgctcacagccaaagtctggaccgtctcatgaatcctctcatcgaccagtacctgtattacttgagcagaacaaacactccaagcggaaccaccacgatgtccaggcttcagttttctcaggccggagcaagtgacattcgggaccagtctagaaactggcttcctggaccctgttaccgccagcagcgagtatcaaagacagctgcggacaacaacaacagtgattactcgtggactggagctaccaagtaccacctcaatggaagagactctctggtgaatccgggcccagctatggccagccacaaggacgatgaagaaaaatattttcctcagagcggggttctcatctttggaaaacaagactcgggaaaaactaatgtggacattgaaaaggttatgattacagacgaagaggaaatcaggaccaccaatcccgtggctacggagcagtatggttctgtatctaccaacctccagagcggcaacacacaagcagctacctcagatgtcaacacacaaggcgttcttccaggcatggtctggcaggacagagacgtgtacctgcaggggcccatctgggcaaagattccacacacggacggacattttcacccctctcccctcgtgggcggattcggacttaaacaccctcctccacaaattctcatcaagaacaccccggtacctgcgaatccttcgaccactttcagtgcggcaaagtttgcttccttcatcacacagtactccacggggcaggtcagcgtggagatcgagtgggagctgcagaaggagaacagcaaacgctggaatcccgaaattcagtacacttccaactacaacaaatctgttaatgtggactttactgtggacactaatggtgtgtattcagagcctcgccccattggcaccagatacctgactcgtaatctgtaa

SEQ ID NO: 4864 - protein, 735 aa, Adeno-associated virus
MAADGYLPDWLEDTLSEGIRQWWKLKPGPPPPKPAERHKDDSRGLVLPGYKYLGPFNGLDKGEPVNEADAAALEHDKAYDRQLDSGDNPYLKYNHADAEFQERLKEDTSFGGNLGRAVFQAKKRILEPLGLVEEPVKTAPGEKRPVEHSPAEPDSSSGTGKAGQQPARKRLNFGQTGDADSVPDPQPLGQPPAAPSGLGTNTMASGSGAPMADNNEGADGVGNSSGNWYCDSTWMGDRVITTSTRTWALPTYNNHLYKQISSQSGASNDNHYFGYSTPWGYFDFNRFHCHFSPRDWQRLINNNWGFRPKRLSFKLFNIQVKEVTQNDGTTTIANNLTSTVQVFTDSEYQLPYVLGSAHQGCLPPFPADVFMVPQYGYLTLNNGSQAVGRSSFYCLEYFPSQMLRTGNNFTFSYTFEDVPFHSSYAHSQSLDRLMNPLIDQYLYYLSRTNTPSGTTTMSRLQFSQAGASDIRDQSRNWLPGPCYRQQRVSKTAADNNNSDYSWTGATKYHLNGRDSLVNPGPAMASHKDDEEKYFPQSGVLIFGKQDSGKTNVDIEKVMITDEEEIRTTNPVATEQYGSVSTNLQSGNTQAATSDVNTQGVLPGMVWQDRDVYLQGPIWAKIPHTDGHFHPSPLVGGFGLKHPPPQILIKNTPVPANPSTTFSAAKFASFITQYSTGQVSVEIEWELQKENSKRWNPEIQYTSNYNKSVNVDFTVDTNGVYSEPRPIGTRYLTRNL

SEQ ID NO: 4865 - DNA, 2209 bp, Adeno-associated virus
atggctgccgatggttatcctccagattggctcgaggacactctctctgaagggataagacagtggtggaagctcaaacctggcccaccaccaccaaagcccgcagagcggcataaggacgacagcaggggtcttgtgcttcctgggtacaagtacctcggacccttcaacggactcgacaagggggagccggtcaacgaggcagacgccgcggccctcgagcacgacaaggcctacgaccggcagctcgacagcggagacaacccgtacctcaagtacaaccacgccgacgcagagtttcaggagcgccttaaagaagatacgtcttttgggggcaacctcggacgagcagtcttccaggcgaaaaagagggttcttgaacctctgggcctggttgaggaacctgttaagacggctccgggaaaaaagaggccggtagagcactctcctgtggagccagactcctcctcgggaaccggaaaagcgggccagcggcctgcaagaaaaagattaaattttggtcagactggagacgcagactccgtacctgacccccagcctctcggacagccaccagcagccccctctggtctgggatctactacaatggctacaggcagtggcgcaccaatggcagacaataacgagggtgccgatggagtgggtaattcctcaggaaattggcattgcgattcccaatggctgggcgacagagtcatcaccaccagcacccgaacctgggccctgcccacatacaacaaccacctctacaagcaaatctccagccaatcaggagccagcaacgacaaccactactttggctacagcaccccctgggggtattttgacttcaacagattccactgccacttttcaccacgtgactggcaaagactcatcaacaacaactggggattccggcccaaaagactcaacttcaagctctttaatattcaagtcaaagaggtcacgcagaatgacggtacgacgacgattgccaataaccttaccagcacggttcaggtgtttactgactcggagtaccagctcccgtacgtcctgggctcggcgcatcaaggatgcctcccgccgtttccagcggacgtcttcatggtcccacagtatggatacctcaccctgaacaacgggagtcaggcggtaggacgctcttccttttactgcctggagtactttccttctcagatgctgcgtactggaaacaactttcagttcagctacacttttgaagacgtgcctttccacagcagctacgctcacagccagagtctggatcggctgatgaatcctctgatcgaccagtacctgtattatctgaacaagacacaaacaaatagtggaactcttcagcagtctcggctactgtttagccaagctggaccaaccaacatgtctcttcaagctaaaaactggctgcctggaccttgctacagacagcagcgtctgtcaaaacaggcaaacgacaacaacaacagcaactttccctggactgcagctacaaagtatcatctaaatggccgggactcgttggttaatccaggaccagctatggccagtcacaaggatgacgaagaaaagtttttccccatgcatggaaccctgatatttggtaaacaaggaacaaatgccaacgacgcggatttggaaaatgtcatgattacagatgaagaagaaatcagggccaccaatcccgtggctacggagcagtacgggactgtgtcaaataatttgcaaaactcaaacactggtccaactactggaactgtcaatcgccaaggagcgttacctggtatggtgtggcaggatcgagacgtgtacctgcagggacccatttgggccaagattcctcacaccgatggacactttcatccttctccactgatgggaggttttggactcaaacacccgcctcctcagatcatgatcaaaaacactcccgttccagccaatcctcccacaaacttcagttctgccaagtttgcttctttcatcacacagtattccacgggacaggtcagcgtggagatcgagtgggagctgcagaaggagaacagcaaacgctggaatcccgaaattcagtacacttccaactacaacaagtctgttaatgtggactttactgtggacactaatggtgtgtattcagagcctcgccccattggcaccagatacctgactcgtaatctgtaat

SEQ ID NO: 4866 - protein, 735 aa, Adeno-associated virus
MAADGYPPDWLEDTLSEGIRQWWKLKPGPPPPKPAERHKDDSRGLVLPGYKYLGPFNGLDKGEPVNEADAAALEHDKAYDRQLDSGDNPYLKYNHADAEFQERLKEDTSFGGNLGRAVFQAKKRVLEPLGLVEEPVKTAPGKKRPVEHSPVEPDSSSGTGKAGQRPARKRLNFGQTGDADSVPDPQPLGQPPAAPSGLGSTTMATGSGAPMADNNEGADGVGNSSGNWHCDSQWLGDRVITTSTRTWALPTYNNHLYKQISSQSGASNDNHYFGYSTPWGYFDFNRFHCHFSPRDWQRLINNNWGFRPKRLNFKLFNIQVKEVTQNDGTTTIANNLTSTVQVFTDSEYQLPYVLGSAHQGCLPPFPADVFMVPQYGYLTLNNGSQAVGRSSFYCLEYFPSQMLRTGNNFQFSYTFEDVPFHSSYAHSQSLDRLMNPLIDQYLYYLNKTQTNSGTLQQSRLLFSQAGPTNMSLQAKNWLPGPCYRQQRLSKQANDNNNSNFPWTAATKYHLNGRDSLVNPGPAMASHKDDEEKFFPMHGTLIFGKQGTNANDADLENVMITDEEEIRATNPVATEQYGTVSNNLQNSNTGPTTGTVNRQGALPGMVWQDRDVYLQGPIWAKIPHTDGHFHPSPLMGGFGLKHPPPQIMIKNTPVPANPPTNFSSAKFASFITQYSTGQVSVEIEWELQKENSKRWNPEIQYTSNYNKSVNVDFTVDTNGVYSEPRPIGTRYLTRNL

SEQ ID NO: 4867 - DNA, 2208 bp, Adeno-associated virus
atggctgccgatggttatcttccagattggctcgaggacactctctctgaaggaataagacagtggtggaagctcaaacctggcccaccaccaccaaagcccgcagagcggcataaggacgacagcaggggtcttgtgcttcctgggtacaggtacctcggacccttcaacggactcgacaagggagagccggtcaacgaggcagacgccgcggccctcgagcacgacaaggcctacgaccggcagctcgacagcggagacaacccgtacctcaagtacaaccacgtcgacgcggagtttcaggagcgtcttaaagaagatacgtcttttgggggcaacctcggacgagcagtcttccaggccaaaaagaggattcttgaacctctgggcctggttgaggaacctgttaaggcggctccgggagaaaagaggccggtagagcactctcctgcggagccagactcctcctcgggaaccggaaaagcgggccagcagcctgcaagaaagagattgaattttggtcagactggagacgcagactcagtacctgacccccagcctctcggacagccaccagcagccccctctggtctgggaactaatacgatggcttcaggcagtggcgcaccaatggcagacaataacgagggcgccgacggagtgggtaattcctcgggaaattggcattgcgattccacatggatgggcgacagagtcatcaccaccagcacccgcacctgggccctgcccacctacaacaaccatctgtacaagcaaatctccagccagtctggagccagcaacgacaaccactactttggctacagcaccccctgggggcattttgacttcaacagattccactgccacttctccccacgtgactggcaaagactcatcaacaacaactggggattccggcccaagagactcagcttcaagctctttaacattcaagtcaaagaggtcacgcagaatgacggtacgacgacgattgccaataaccttaccagcacggttcaggtgtttactgactcggagtaccagctcccgtacgtcctcggctcggcgcatcaaggatgcctcccgccgttcccagcagacgtcttcatggtgccacagtatggatacctcaccctgaacaacggcagtcaggcggtaggacgctcttccttttactgcctggagtactttccttctcagatgcttcgtaccggaaacaactttaccttcagctacacctttgaagacgttcctttccatagcagctacgctcacagccaaagtctggaccgtctcatgaatcctctcatcgaccagtacctgtattacttgagcagaacaaacactccaagcggaaccaccacgatgtccaggcttcagttttctcaggccggagcaagtgacattcgggaccagtctagaaactggcttcctggaccctgttaccgccagcagcgagtatcaaagacagctgcggacaacaacaacagtgattactcgtggactggagctaccaagtaccacctcaatggaagagactctctggtgaatccgggcccagctatggccagccacaaggacgatgaagaaaaatattttcctcagagcggggttctcatctttggaaaacaagactcgggaaaaactaatgtggacattgaaaaggttatgattacagacgaagaggaaatcaggaccaccaatcccgtggctacggagcagtatggttctgtatctaccaacctccagagcggcaacacacaagcagctacctcagatgtcaacacacaaggcgttcttccaggcatggtctggcaggacagagacgtgtacctgcaggggcccatctgggcaaagattccacacacggacggacattttcacccctctccccccatgggcggattcggacttaaacaccctcctccacaaattctcatcaagaacaccccggtacctgcgaatccttcgaccactttcagtgcggcaaagtttgcttccttcatcacacagtactccacggggcaggtcagcgtggagatcgagtgggagctgcagaaggagaacagcaaacgctggaatcccgaaattcagtacacttccaactacaacaaatctgttaatgtggactttactgtggacactaatggtgtgtattcagagcctcgccccattggcgccagatacctgactcgtaatctgtaa

SEQ ID NO: 4868 - protein, 735 aa, Adeno-associated virus
MAADGYLPDWLEDTLSEGIRQWWKLKPGPPPPKPAERHKDDSRGLVLPGYRYLGPFNGLDKGEPVNEADAAALEHDKAYDRQLDSGDNPYLKYNHVDAEFQERLKEDTSFGGNLGRAVFQAKKRILEPLGLVEEPVKAAPGEKRPVEHSPAEPDSSSGTGKAGQQPARKRLNFGQTGDADSVPDPQPLGQPPAAPSGLGTNTMASGSGAPMADNNEGADGVGNSSGNWHCDSTWMGDRVITTSTRTWALPTYNNHLYKQISSQSGASNDNHYFGYSTPWGHFDFNRFHCHFSPRDWQRLINNNWGFRPKRLSFKLFNIQVKEVTQNDGTTTIANNLTSTVQVFTDSEYQLPYVLGSAHQGCLPPFPADVFMVPQYGYLTLNNGSQAVGRSSFYCLEYFPSQMLRTGNNFTFSYTFEDVPFHSSYAHSQSLDRLMNPLIDQYLYYLSRTNTPSGTTTMSRLQFSQAGASDIRDQSRNWLPGPCYRQQRVSKTAADNNNSDYSWTGATKYHLNGRDSLVNPGPAMASHKDDEEKYFPQSGVLIFGKQDSGKTNVDIEKVMITDEEEIRTTNPVATEQYGSVSTNLQSGNTQAATSDVNTQGVLPGMVWQDRDVYLQGPIWAKIPHTDGHFHPSPPMGGFGLKHPPPQILIKNTPVPANPSTTFSAAKFASFITQYSTGQVSVEIEWELQKENSKRWNPEIQYTSNYNKSVNVDFTVDTNGVYSEPRPIGARYLTRNL

SEQ ID NO: 4869 - DNA, 2208 bp, Adeno-associated virus
atggctgccgatggttatcttccagattggctcgaggacaccctctctgaaggaataagacagtggtggaagctcaaacctggcccaccaccaccaaagcccgcagagcggcataaggacgacagcaggggtcttgtgcttcctgggtacaagtacctcggacccttcaacggactcgacaagggagagccggtcaacgaggcagacgccgcggccctcgagcacgacaaggcctacgaccggcagctcgacagcggagataacccgtacctcaagtacaaccacgccgacgcggagtttcaggagcgccttaaagaggatacgtcttttgggggcaacctcggacgagcagtcttccaggccaaaaagaggattcttgaacctctgggcctggttgaggaacctgttaagacggctccgggaaaaaagaggccggtagagcactctcctgcggagccagactcctcctcgggaaccggaaaagcgggccagcagcctgcaagaaagagattgaattttggtcagactggagacgcagactcagtacctgacccccggcctctcggacagccaccagcagccccctctggtctgggaactaatacgatggcttcaggcagtggcgcaccaatggcagacaataacgagggcgccgacggagtgggtaattcctcgggaaattggcattgcgattccacatggatgggcgacagagtcatcaccaccagcacccgcacctgggccctgcccacctacaacaaccatctgtacaagcaaatctccagccagtctggagccagcaacgacaaccactactttggctacagcaccccctgggggtattttgacttcaacagattccactgccacttctccccacgtgactggcaaagactcatcaacaacaactggggattccggcccaagagactcagcttcaagctctttaacattcaagtcaaagaggtcacgcagaatgacggtacgacgacgattgccaataaccttaccagcacggttcaggtgtttactgactcggagtaccagctcccgtacgtcctcggctcggcgcatcaaggatgcctcccgccgttcccagcagacgtcttcatggtgccacagtatggatacctcaccctgaacaacggcagtcaggcggtaggacgctcttccttttactgcctggagtactttccttctcagatgcttcgtaccggaaacaactttaccttcagctacacctttgaagacgttcctttccatagcagctacgctcacagccaaagtctggaccgtctcatgaatcctctcatcgaccagtacctgtattacttgagcagaacaaacactccaagcggaaccaccacgatgtccaggcttcagttttctcaggccggagcaagtgacattcgggaccagtctagaaactggcttcctggaccctgttaccgccagcagcgagtatcaaagacagctgcggacaacaacaacagtgattactcgtggactggagctaccaagtaccacctcaatggaagagactctctggtgaatccgggcccagctatggccagccacaaggacgatgaagaaaaatattttcctcagagcggggttctcatctttggaaaacaagactcgggaaaaactaatgtggacattgaaaaggttatgattacagacgaagaggaaatcaggaccaccaatcccgtggctacggagcagtatggttctgtatctaccaacctccagagcggcaacacacaagcagctacctcagatgtcaacacacaaggcgttcttccaggcatggtctggcaggacagagacgtgtacctgcaggggcccatctgggcaaagattccacacacggacggacattttcacccctctcccctcatgggcggattcggacttaaacaccctcctccacaaattctcatcaagaacaccccggtacctgcgaatccttcgaccactttcagtgcggcaaagtttgcttccttcatcacacagtactccacggggcaggtcagcgtggagatcgagtgggagctgcagaaggagaacagcaaacgctggaatcccgaaattcagtacacttccaactacaacaaatctgttaatgtggactttactgtggacactaatggtgtgtattcagagcctcgccccattggcaccagatacctgactcgtaatctgtaa

SEQ ID NO: 4870 - protein, 735 aa, Adeno-associated virus
MAADGYLPDWLEDTLSEGIRQWWKLKPGPPPPKPAERHKDDSRGLVLPGYKYLGPFNGLDKGEPVNEADAAALEHDKAYDRQLDSGDNPYLKYNHADAEFQERLKEDTSFGGNLGRAVFQAKKRILEPLGLVEEPVKTAPGKKRPVEHSPAEPDSSSGTGKAGQQPARKRLNFGQTGDADSVPDPRPLGQPPAAPSGLGTNTMASGSGAPMADNNEGADGVGNSSGNWHCDSTWMGDRVITTSTRTWALPTYNNHLYKQISSQSGASNDNHYFGYSTPWGYFDFNRFHCHFSPRDWQRLINNNWGFRPKRLSFKLFNIQVKEVTQNDGTTTIANNLTSTVQVFTDSEYQLPYVLGSAHQGCLPPFPADVFMVPQYGYLTLNNGSQAVGRSSFYCLEYFPSQMLRTGNNFTFSYTFEDVPFHSSYAHSQSLDRLMNPLIDQYLYYLSRTNTPSGTTTMSRLQFSQAGASDIRDQSRNWLPGPCYRQQRVSKTAADNNNSDYSWTGATKYHLNGRDSLVNPGPAMASHKDDEEKYFPQSGVLIFGKQDSGKTNVDIEKVMITDEEEIRTTNPVATEQYGSVSTNLQSGNTQAATSDVNTQGVLPGMVWQDRDVYLQGPIWAKIPHTDGHFHPSPLMGGFGLKHPPPQILIKNTPVPANPSTTFSAAKFASFITQYSTGQVSVEIEWELQKENSKRWNPEIQYTSNYNKSVNVDFTVDTNGVYSEPRPIGTRYLTRNL

SEQ ID NO: 4871 - DNA, 2208 bp, Adeno-associated virus
atggctgccgatggttatcttccagattggctcgaggacactctctctgaaggaataagacagtggtggaagctcaaacctggcccaccaccaccaaagcccgcagagcggcataaggacgacagcaggggtcttgtgcttcctgggtacaagtacctcggacccttcaacggactcgacaagggagagccggtcaacgaggcagacgccgcggccctcgagcacgacaaggcctacgaccggcagctcgacagcggagacaacccgtacctcaagtacaaccacgccgacgcggagtttcaggagcgccttaaaggagatacgtcttttgggggcaacctcggacgagcagtcttccaggccaaaaagaggattcttgaacctctgggcctggttgaggaacctgttaagacggctccgggaaaaaagaggccggtagagcactctcctgcggagccagactcctcctcgggaaccggaaaagcgggccagcagcctgcaagaaagagattgaattttggtcagactggagacgcagactcagtacctgacccccagcctctcggacagccaccagcagccccctctggtctgggaactaatacgatggcttcaggcagtggcgcaccaatggcagacaataacgagggcgccgacggagtgggtaattcctcgggaaattggcattgcgattccacatggatgggcggcagagtcatcaccaccagcacccgcacctgggccctgcccacctacaacaaccatctgtacaagcaaatctccagccagtctggagccagcaacgacaaccactactttggctacagcaccccctgggggtattttgacttcaacagattccactgccacttctccccacgtgactggcaaagactcatcaacaacaactggggattccggcccaagagactcagcttcaagctctttaacattcaagtcaaagaggtcacgcagaatgacggtacgacgacgattgccaataaccttaccagcacggttcaggtgtttactgactcggagtaccagctcccgtacgtcctcggctcggcgcatcaaggatgcctcccgccgttcccagcagacgtcttcatggtgccacagtatggatacctcaccctgaacaacggcagtcaggcggtaggacgctcttccttttactgcctggagtactttccttctcagacgcttcgtaccggaaacaactttaccttcagctacacctttgaagacgttcctttccatagcagctacgctcacagccaaagtctggaccgtctcatgaatcctctcatcgaccagtacctgtattacttgagcagaacaaacactccaagcggaaccaccacgatgtccaggcttcagttttctcaggccggagcaagtgacattcgggaccagtctagaaactggcttcctggaccctgttaccgccagcagcgagtatcaaagacagctgcggacaacaacaacagtgattactcgtggactggagctaccaagtaccacctcaatggaagagactctctggtgaatccgggcccagctatggccagccacaaggacgatgaagaaaaatattttcctcagagcggggttctcatctttggaaaacaagactcgggaaaaactaatgtggacattgaaaaggttatgattacagacgaagaggaaatcaggaccaccaatcccgtggctacggagcagtatggttctgtatctaccaacctccagagcggcaacacacaagcagctacctcagatgtcaacacacaaggcgttcttccaggcatggtctggcaggacagagacgtgtacctgcaggggcccatctgggcaaagattccacacacggacggacattttcacccctctcccctcatgggcggattcggacttaaacaccctcctccacaaattctcatcaagaacaccccggtacctgcgaatccttcgaccactttcagtgcggcaaagtttgcttccttcatcacacagtactccacggggcaggtcagcgtggagatcgagtgggagctgcagaaggagaacagcaaacgctggaatcccgaaattcagtacacttccaactacaacaaatctgttaatgtggactttactgtggacactaatggtgtgtattcagagcctcgccccattggcaccagatacctgactcgtaatctgtaa

SEQ ID NO: 4872 - protein, 735 aa, Adeno-associated virus
MAADGYLPDWLEDTLSEGIRQWWKLKPGPPPPKPAERHKDDSRGLVLPGYKYLGPFNGLDKGEPVNEADAAALEHDKAYDRQLDSGDNPYLKYNHADAEFQERLKGDTSFGGNLGRAVFQAKKRILEPLGLVEEPVKTAPGKKRPVEHSPAEPDSSSGTGKAGQQPARKRLNFGQTGDADSVPDPQPLGQPPAAPSGLGTNTMASGSGAPMADNNEGADGVGNSSGNWHCDSTWMGGRVITTSTRTWALPTYNNHLYKQISSQSGASNDNHYFGYSTPWGYFDFNRFHCHFSPRDWQRLINNNWGFRPKRLSFKLFNIQVKEVTQNDGTTTIANNLTSTVQVFTDSEYQLPYVLGSAHQGCLPPFPADVFMVPQYGYLTLNNGSQAVGRSSFYCLEYFPSQTLRTGNNFTFSYTFEDVPFHSSYAHSQSLDRLMNPLIDQYLYYLSRTNTPSGTTTMSRLQFSQAGASDIRDQSRNWLPGPCYRQQRVSKTAADNNNSDYSWTGATKYHLNGRDSLVNPGPAMASHKDDEEKYFPQSGVLIFGKQDSGKTNVDIEKVMITDEEEIRTTNPVATEQYGSVSTNLQSGNTQAATSDVNTQGVLPGMVWQDRDVYLQGPIWAKIPHTDGHFHPSPLMGGFGLKHPPPQILIKNTPVPANPSTTFSAAKFASFITQYSTGQVSVEIEWELQKENSKRWNPEIQYTSNYNKSVNVDFTVDTNGVYSEPRPIGTRYLTRNL

SEQ ID NO: 4873 - DNA, 2208 bp, Adeno-associated virus
atggctgccgatggttatcttccagattggctcgaggacactctctctgaaggaataagacagtggtggaagctcaaacctggcccaccaccaccaaagcccgcagagcggcataaggacgacagcaggggtcttgtgcttcctgggtacaagtacctcggacccttcaacggactcgacaagggagagccggtcaacgaggcagacgccgcggccctcgagcacgacaaggcctacgaccggcagctcgacagcggagacaacccgtacctcaagtacaaccacgccgacgcggagtttcaggagcgtcttaaagaagatacgtcttttgggggcaacctcggacgagcagtcttccaggccaaaaagaggattcttgaacctctgggcctggttgaggaacctgttaagacggctccgggaaaaaagaggccggtagagcactctcctgcggagccagactcctcctcgggaaccggaaaagcgggccagcagcctgcaagaaagagattgaattttggtcagactggagacgcagactcagtacctgacccccagcctctcggacagccaccagcagccccctctggtctgggaactaatacgatggcttcaggcagtggcgcaccaatggcagacaataacgagggcgccgacggagtgggtaattcctcgggaaattggcattgcgattccacatggatgggcgacagagtcatcaccaccagcacccgcacctgggccctgcccacctgcaacaaccatctgtacaagcaaatctccagccagtctggagccagcaacgacaaccactactttggctacagcaccccctgggggtattttgacttcaacagattccactgccacttctccccacgtgactggcaaagactcatcaacaacaactggggattccggcccaagagactcagcttcaagctctttaacattcaagtcaaagaggtcacgcagaatgacggtacgacgacgattgccaataaccttaccagcacggttcaggtgtttactgactcggagtaccagctcccgtacgtcctcggctcggcgcatcaaggatgcctcccgccgttcccagcagacgtcttcatggtgccacagtatggatacctcaccctgaacaacggcagtcaggcggtaggacgctcttccttttactgcctggagtattttccttctcagatgcttcgtaccggaaacaactttaccttcagctacacctttgaagacgttcctttccatagcagctacgctcacagccaaagtctggaccgtctcatgaatcctctcatcgaccagtacctgtattacttgagcagaacaaacactccaagcggaaccaccacgatgtccaggcttcagttttctcaggccggagcaagtgacattcgggaccagtctagaaactggcttcctggaccctgttaccgccagcagcgagtatcaaagacagctgcggacaacaacaacagtgattactcgtggactggagctaccaagtaccacctcaatggaagagactctctggtgaatccgggcccagctatggccagccacaaggacgatgaagaaaaatattttcctcagagcggggttctcatctttggaaaacaagactcgggaaaaactaatgtggacattgaaaaggttatgattacagacgaagaggaaatcaggaccaccaatcccgtggctacggagcagtatggttctgtatctacctacctccagagcggcaacacacaagcagctacctcagatgtcaacacacaaggcgttcttccaggcatggtctggcaggacagagacgtgtacctgcgggggcccatctgggcaaagattccacacacggacggacattttcacccctctcccctcatgggcggatttggacttaaacaccctcctccacaaattctcatcaagaacaccccggtacctgcgaatccttcgaccactttcagtgcggcaaagtttgcttccttcatcacacagtactccacggggcaggtcagcgtggagatcgagtgggagctgcagaaggagaacagcaaacgctggaatcccgaaattcagtacacttccaactacaacaaatctgttaatgtggactttactgtggacactaatggtgtgtattcagagcctcgccccattggcaccagatacctgactcgtaatctgtaa

SEQ ID NO: 4874 - protein, 735 aa, Adeno-associated virus
MAADGYLPDWLEDTLSEGIRQWWKLKPGPPPPKPAERHKDDSRGLVLPGYKYLGPFNGLDKGEPVNEADAAALEHDKAYDRQLDSGDNPYLKYNHADAEFQERLKEDTSFGGNLGRAVFQAKKRILEPLGLVEEPVKTAPGKKRPVEHSPAEPDSSSGTGKAGQQPARKRLNFGQTGDADSVPDPQPLGQPPAAPSGLGTNTMASGSGAPMADNNEGADGVGNSSGNWHCDSTWMGDRVITTSTRTWALPTCNNHLYKQISSQSGASNDNHYFGYSTPWGYFDFNRFHCHFSPRDWQRLINNNWGFRPKRLSFKLFNIQVKEVTQNDGTTTIANNLTSTVQVFTDSEYQLPYVLGSAHQGCLPPFPADVFMVPQYGYLTLNNGSQAVGRSSFYCLEYFPSQMLRTGNNFTFSYTFEDVPFHSSYAHSQSLDRLMNPLIDQYLYYLSRTNTPSGTTTMSRLQFSQAGASDIRDQSRNWLPGPCYRQQRVSKTAADNNNSDYSWTGATKYHLNGRDSLVNPGPAMASHKDDEEKYFPQSGVLIFGKQDSGKTNVDIEKVMITDEEEIRTTNPVATEQYGSVSTYLQSGNTQAATSDVNTQGVLPGMVWQDRDVYLRGPIWAKIPHTDGHFHPSPLMGGFGLKHPPPQILIKNTPVPANPSTTFSAAKFASFITQYSTGQVSVEIEWELQKENSKRWNPEIQYTSNYNKSVNVDFTVDTNGVYSEPRPIGTRYLTRNL

SEQ ID NO: 4875 - DNA, 2208 bp, Adeno-associated virus; identical to SEQ ID NO: 4869

SEQ ID NO: 4876 - protein, 735 aa, Adeno-associated virus; identical to SEQ ID NO: 4870

SEQ ID NO: 4877 - DNA, 2208 bp, Adeno-associated virus
atggctgccgatggttatcttccagattggctcgaggacactctctctgaaggaataagacagtggtggaagctcaaacctggcccaccaccaccaaagcccgcagagcggcataaggacggcagcaggggtcttgtgcttcctgggtacaagtacctcggacccttcaacggactcgacaagggagagccggtcaacgaggcagacgccgcggccctcgagcacgacaaggcctacgaccggcagctcaacagcggagacaacccgtacctcaagtacaaccacgccgacgcggagtttcaggagcgccttaaagaagatacgtcttttgggggcaacctcggacgagcagtcttccaggcaaaaaagagggttcttgaacctctgggcctggttgaggagcctgttaaaacggctccgggaaaaaagagaccggtagagcactctcctgcggagccagactcctcctcgggaaccggaaaagcgggccagcagcctgcaagaaagagattgaattttggtcagactggagacgcagactccgtacctgacccccagcctctcggacagccaccagcagccccctctggtctgggatctactacaatggctacaggcagtggcgcaccaatggcagacaataacgagggtgccgatggagtgggtaattcctcaggaaattggcattgcgattcccaatggctgggcgacagagtcatcaccacaagcactcgaacctgggccctgcccacctacaacaaccacctctacaagcaaatctccagccaatcaggagcctcaaacgacaaccactattttggctacagcaccccttgggggtattttgacttcaacagattccactgccacttttcaccacgtgactggcaaagactcatcaacaacaactggggattccgacccaagagactcaacttcaagctctttaacattcaagtcaaagaggtcacgcagaatgacggtacgacgacgattgccaataaccttaccagcacggttcaggtgtttactgactcggagtaccagctcccgtacgtcctcggctcggcgcatcaaggatgcctcccgccgttcccagcggacgtcttcatggtcccacagtatggatacctcaccctgaacaacgggagtcaggcggtaggacgctctcccttttactgcctggagtactttccttctcagatgctgcgtactggaaacaactttcagttcagctacacttttgaagacgtgcctttccacagcagctacgctcacagccagagtctggatcggctgatgaatcctctgatcgaccagtacctgtattatctgaacaagacacaaacaaatagtggaactcttcagcagtctcggctactgtttagccaagctggacccaccaacatgtctcttcaagctaaaaactggctgcctggaccttgctacagacagcagcgtctgtcaaagcaggcaaacgacaacaacaacagcaactttccctggactgcagctacaaagtatcatctaaatggccgggactcgttggttaatccaggaccagctatggccagtcacaaggatgacgaagaaaagtttttccccatgcatggaaccctgatatttggtaaacaaggaacaaatgccaacgacgcggatttggaaaatgtcatgattacagatgaagaagaaatcaggaccaccaatcccgtggctacggagcagtacgggactgtgtcaaataatttgcaaaactcaaacactggtccaactactggaactgtcaatcaccaaggagcgttacctggtatggtgtggcaggatcgagatgtgtaccttcagggacccatttgggccaagattcctcacaccgatggacactttcatccttctccactgatgggaggttttggactcaaacacccgcctcctcagattatgatcaaaaacactcccgttccagccaatcctcctacaaacttcagttctgccaagtttgcttctttcatcacacagtattccacggggcaggtcagcgtggagatcgagtgggagctgcagaaggagaacagcaaacgctggaatcccgaaattcagtacacttccaactacaacaaatctgttaatgtggactttactgtggacaataatggcgtgtactcagagcctcgccccattggcaccagatacctgactcgtaatctgtaa

SEQ ID NO: 4878 - protein, 735 aa, Adeno-associated virus
MAADGYLPDWLEDTLSEGIRQWWKLKPGPPPPKPAERHKDGSRGLVLPGYKYLGPFNGLDKGEPVNEADAAALEHDKAYDRQLNSGDNPYLKYNHADAEFQERLKEDTSFGGNLGRAVFQAKKRVLEPLGLVEEPVKTAPGKKRPVEHSPAEPDSSSGTGKAGQQPARKRLNFGQTGDADSVPDPQPLGQPPAAPSGLGSTTMATGSGAPMADNNEGADGVGNSSGNWHCDSQWLGDRVITTSTRTWALPTYNNHLYKQISSQSGASNDNHYFGYSTPWGYFDFNRFHCHFSPRDWQRLINNNWGFRPKRLNFKLFNIQVKEVTQNDGTTTIANNLTSTVQVFTDSEYQLPYVLGSAHQGCLPPFPADVFMVPQYGYLTLNNGSQAVGRSPFYCLEYFPSQMLRTGNNFQFSYTFEDVPFHSSYAHSQSLDRLMNPLIDQYLYYLNKTQTNSGTLQQSRLLFSQAGPTNMSLQAKNWLPGPCYRQQRLSKQANDNNNSNFPWTAATKYHLNGRDSLVNPGPAMASHKDDEEKFFPMHGTLIFGKQGTNANDADLENVMITDEEEIRTTNPVATEQYGTVSNNLQNSNTGPTTGTVNHQGALPGMVWQDRDVYLQGPIWAKIPHTDGHFHPSPLMGGFGLKHPPPQIMIKNTPVPANPPTNFSSAKFASFITQYSTGQVSVEIEWELQKENSKRWNPEIQYTSNYNKSVNVDFTVDNNGVYSEPRPIGTRYLTRNL

SEQ ID NO: 4879 - DNA, 2208 bp, Adeno-associated virus
atggctgccgatggttatcttccagattggctcgaggacactctctctgaaggaataagacagtggtggaagctcaaacctggcccaccaccaccaaagcccgcagagcggcataaggacgacagcaggggtcttgtgcttcctgggtacaagtacctcggacccttcaacggactcgacaagggagagccggtcaacgaggcagacgccgcggccctcgagcacgacaaggcctacgaccggcagctcgacagcggagacaacccgtacctcaagtacaaccacgccgacgcggagtttcaggagcgtcttaaagaagatacgtcttttgggggcaacctcggacgagcagtcttccaggccaaaaagaggattcttgaacctctgggcctggttgaggaacctgttaagacggctccgggaaaaaagaggccggtagagcactctcctgcggagccagactcctcctcgggaaccggaaaagcgggccagcagcctgcaagaaagagattgaattttggtcagactggagacgcagactcagtacctgacccccagcctctcggacagccaccagcagccccctctggtctgggaactaatacgatggcttcaggcagtggcgcaccaatggcagacaataacgagggcgccgacggagtgggtaattcctcgggaaattggcattgcgattccacatggatgggcgacagagtcatcaccaccagcacccgcacctgggccctgcccacctacaacaaccatctgtacaagcaaatctccagccagtctggagccagcaacgacaaccactactttggctacagcaccccctgggggtattttgacttcaacagattccactgccacttctccccacgtgactggcaaagactcatcaacaacaactggggattccggcccaagagactcagcttcaagctctttaacattcaagtcaaagaggtcacgcagaatgacggtacgacgacgattgccaataaccttaccagcacggttcaggtgtttactgactcggagtaccagctcccgtacgtcctcggctcggcgcatcaaggatgcctcccgccgttcccagcagacgtcttcatggtgccacagtatggatacctcaccctgaacaacggcagtcaggcggtaggacgctcttccttttactgcctggagtactttccttctcagatgcttcgtaccggaaacaactttaccttcagctacacctttgaagacgttcctttccatagcagctacgctcacagccaaagtctggaccgtctcatgaatcctctcatcgaccagtacctgtattacttgagcagaacaaacactccaagcggaaccaccacgatgtccaggcttcagttttctcaggccggagcaagtgacattcgggaccagtctagaaactggcttcctggaccctgttaccgccagcagcgagtatcaaagacagctgcggacaacaacaacagtgattactcgtggactggagctaccaagtaccacctcaatggaagagactctctggtgaatccgggcccagctatggccagccacaaggacgatgaagaaaaatattttcctcagagcggggttctcatctttggaaaacaagactcgggaaaaactaatgtggacattgaaaaggttatgattacagacgaagaggaaatcaggaccaccaatcccgtggctacggagcagtatggttctgtatctaccaacctccagagcggcaacacacaagcagctacctcagatgtcaacacacaaggcgttcttccaggcatggtctggcaggacagagacgtgtacctgcaggggcccatctgggcaaagattccacacacggacggacattttcacccctctcccctcatgggcggattcggacttaaacaccctcctccacaaattctcatcaagaacaccccggtacctgcgaatccttcgaccactttcagtgcggcaaagtttgcttccttcatcacacagtactccacggggcaggtcagcgtggagatcgagtgggagctgcagaaggagaacagcaaacgctggaatcccgaaattcagtacacttccaactacaacaaatctgttaatgtggactttactgtggacactaatggtgtgtattcagagcctcgccccattggcaccagatacctgactcgtaatctgtaa

SEQ ID NO: 4880 - protein, 735 aa, Adeno-associated virus
MAADGYLPDWLEDTLSEGIRQWWKLKPGPPPPKPAERHKDDSRGLVLPGYKYLGPFNGLDKGEPVNEADAAALEHDKAYDRQLDSGDNPYLKYNHADAEFQERLKEDTSFGGNLGRAVFQAKKRILEPLGLVEEPVKTAPGKKRPVEHSPAEPDSSSGTGKAGQQPARKRLNFGQTGDADSVPDPQPLGQPPAAPSGLGTNTMASGSGAPMADNNEGADGVGNSSGNWHCDSTWMGDRVITTSTRTWALPTYNNHLYKQISSQSGASNDNHYFGYSTPWGYFDFNRFHCHFSPRDWQRLINNNWGFRPKRLSFKLFNIQVKEVTQNDGTTTIANNLTSTVQVFTDSEYQLPYVLGSAHQGCLPPFPADVFMVPQYGYLTLNNGSQAVGRSSFYCLEYFPSQMLRTGNNFTFSYTFEDVPFHSSYAHSQSLDRLMNPLIDQYLYYLSRTNTPSGTTTMSRLQFSQAGASDIRDQSRNWLPGPCYRQQRVSKTAADNNNSDYSWTGATKYHLNGRDSLVNPGPAMASHKDDEEKYFPQSGVLIFGKQDSGKTNVDIEKVMITDEEEIRTTNPVATEQYGSVSTNLQSGNTQAATSDVNTQGVLPGMVWQDRDVYLQGPIWAKIPHTDGHFHPSPLMGGFGLKHPPPQILIKNTPVPANPSTTFSAAKFASFITQYSTGQVSVEIEWELQKENSKRWNPEIQYTSNYNKSVNVDFTVDTNGVYSEPRPIGTRYLTRNL

SEQ ID NO: 4881 - DNA, 2208 bp, Adeno-associated virus
atggctgccgatggttatcttccagattggctcgaggacactctctctgaaggaataagacagtggtggaagctcaaacctggcccaccaccaccaaagcccgcagagcggcataaggacgacagcaggggtcttgtgcttcctgggtacaagtacctcggacccttcaacggactcgacaagggagagccggtcaacgaggcagacgccgcggccctcgagcacgacaaggcctacgaccggcagctcgacagcggagacaacccgtacctcaagtacaaccacgccgacgcggagtttcaggagcgtcttaaagaagatacgtcttttgggggcaacctcggacgagcagtcttccaggccaaaaagaggattcttgaacctctgggcctggttgaggaacctgttaagacggctccgggaaaaaagaggccggtagagcactctcctgcggagccagactcctcctcgggaaccggaaaagcgggccagcagcctgcaagaaagagattgaattttggtcagactggagacgcagactcagtacctgacccccagcctctcggacagccaccagcagccccctctggtctgggaactaatacgatggcttcaggcagtggcgcaccaatggcagacaataacgagggcgccgacggagtgggtaattcctcgggaaattggcattgcgattccacatggatgggcgacagagtcatcaccaccagcacccgcacctgggccctgcccacctacaacaaccatctgtacaagcaaatctccagccagtctggagccagcaacgacaaccactactttggctacagcaccccctgggggtatttcgacttcaacagattccactgccacttctccccacgtgactggcaaagactcatcaacaacaactggggattccggcccaagagactcagcttcaagctctttaacattcaagtcaaagaggtcacgcagaatgacggtacgacgacgattgccaataaccttaccagcacggttcaggtgtttactgactcggggtaccagctcccgtacgtcctcggctcggcgcatcaaggatgccttccgccgttcccagcagacgtcttcatggtgccacagtatggatacctcaccctgaacaacggcagtcaggcggtaggacgctcttccttttactgcctggagtactttccttctcagatgcttcgtaccggaaacaactttaccttcagctacacctttgaagacgttcctttccatagcagctacgctcacggccaaagtctggaccgtctcatgaatcctctcatcgaccagtacctgtattacttgagcagaacaaacactccaagcggaaccaccacgatgtccaggcttcagttttctcaggccggagcaagtgacgttcgggaccagtctagaaactggcttcctggaccctgttaccgccagcagcgagtatcaaagacagctgcggacaacaacaacagtgattactcgtggactggagctaccaagtaccacctcaatggaagagactctctggtgaatccgggcccagctatggccagccacaaggacgatgaagaaaaatattttcctcagagcggggttctcgtctttggaaaacaagactcgggaaaaactaatgtggacattgaaaaggttatgattacagacgaagaggaaatcaggaccaccaatcccgcggctacggagcagtatggttctgtatctaccaacctccagagcggcaacacacaagcagctacctcagatgtcaacacacaaggcgttcttccaggcatggtctggcaggacagagacgtgtacctgcaggggcccatctgggcaaagattccacacacggacggacattttcacccctctcccctcatgggcggattcggacttaaacaccctcctccacaaattctcatcaagaacaccccggtacctgcgaatccttcgaccactttcagtgcggcaaagtttgtttccttcatcacacagtactccacggggcaggtcagcgtggagatcgagtgggagctgcagaaggagaacagcaaacgctggaatcccgaaattcagtacacttccaactacaacaaatctgttaatgtggactttactgtggacactaatggtgtgtattcagagcctcgccccattggcaccagatacctgactcgtaatctgtaa

SEQ ID NO: 4882 - protein, 735 aa, Adeno-associated virus
MAADGYLPDWLEDTLSEGIRQWWKLKPGPPPPKPAERHKDDSRGLVLPGYKYLGPFNGLDKGEPVNEADAAALEHDKAYDRQLDSGDNPYLKYNHADAEFQERLKEDTSFGGNLGRAVFQAKKRILEPLGLVEEPVKTAPGKKRPVEHSPAEPDSSSGTGKAGQQPARKRLNFGQTGDADSVPDPQPLGQPPAAPSGLGTNTMASGSGAPMADNNEGADGVGNSSGNWHCDSTWMGDRVITTSTRTWALPTYNNHLYKQISSQSGASNDNHYFGYSTPWGYFDFNRFHCHFSPRDWQRLINNNWGFRPKRLSFKLFNIQVKEVTQNDGTTTIANNLTSTVQVFTDSGYQLPYVLGSAHQGCLPPFPADVFMVPQYGYLTLNNGSQAVGRSSFYCLEYFPSQMLRTGNNFTFSYTFEDVPFHSSYAHGQSLDRLMNPLIDQYLYYLSRTNTPSGTTTMSRLQFSQAGASDVRDQSRNWLPGPCYRQQRVSKTAADNNNSDYSWTGATKYHLNGRDSLVNPGPAMASHKDDEEKYFPQSGVLVFGKQDSGKTNVDIEKVMITDEEEIRTTNPAATEQYGSVSTNLQSGNTQAATSDVNTQGVLPGMVWQDRDVYLQGPIWAKIPHTDGHFHPSPLMGGFGLKHPPPQILIKNTPVPANPSTTFSAAKFVSFITQYSTGQVSVEIEWELQKENSKRWNPEIQYTSNYNKSVNVDFTVDTNGVYSEPRPIGTRYLTRNL

SEQ ID NO: 4883 - DNA, 2208 bp, Adeno-associated virus
atggctgccgatggttatcttccagattggctcgaggacactctctctgaaggaataagacagtggtggaaactcaaacctggcccaccaccaccaaagcccgcagagcggcataaggacgacagcaggggtcttgtgcttcctgggtacaagtacctcggacccttcaacggactcgacaagggagagccggtcaacgaggcagacgccgcggccctcgagcacgacaaggcctacgaccggcagctcgacagcggagacaacccgtacctcaagtacaaccacgccgacgcggagtttcaggagcgccttaaagaagatacgtcttttgggggcaacctcggacgagcagtcttccaggcaaaaaagagggttctggaacctctgagcctggttgaggagcctgttaagacggctccgggaaaaaagaggccggtagagcactctcccgcagagccagattcctcctccggaactggaaagtcgggcaaccagcctgcaagaaagagattgaatttcggtcagactggagactcagactccgtacctgacccccagcctctcggacagccaccagcagccccctctggtctgggaactaatacgatggctacaggcagtggcgcaccaatggcagacaataacgagggcgccgacggagtgggtaattcctcgggaaattggcattgcgattccacatggatgggcgacagagtcatcaccaccagcacccgaacctgggccctgcccacctacaacaaccatctgtacaagcaaatatccagccagtctggagccagcaacgacaatcactactttggctacagcaccccctgggggtattttgacttcaacagattccactgccacttttcaccacgtgactggcaaagactcatcaacaacaactggggattccgacccaagagactcaacttcaagctctttaacattcaagtcaaagaggtcacgcagaatgacggtacgacgacgattgccaataaccttaccagcacggttcaggtgtttactgactcggagtaccagctcccgtacgtcctcggctcggcgcatcaaggatgcctcccgccgttcccagcagacgtcttcatggtgccacagtatggatacctcaccctgaacaacgggagtcaggcagtaggacgctcttcattttactgcctagagtactttccttctcagatgctgcgtaccggaaacaactttaccttcagctacacctttgaggacgttcctttccacagcagctacgctcacagccagagtttggaccgtctcatgaatcctctcatcgaccagtacctgtattacttgagcagaacaaacactccaagcggaaccaccacgcagtccaggcttcagttttctcaggccggagcgagtgacattcaggaccagtctaggaactggcttcctggaccctgttaccgtcagcagcgagtatcaaagacatctgcggataacaacaacagtgaatactcgtggactggagctaccaagtaccacctcaatggcagagactctctggtgaatccgggcccggccatggccagccacaaagacgatgaagaaaagttttttcctcagagcggggttcttatctttgggaagcaaggctcagagaaaacaaatgtggatattgaaaaggtcatgattacagacgaagaggaaatcaggaccaccaatcccgtggctacggagcagtatggttctgtatctaccaacctccagagcggcaacacacaagcagctaccgcagatgtcaacacacaaggcgttcttccaggcatggtcgggcaagacagagacgtgtacctgcaggggcctacttgggcaaagattccacacacggacggacattttcacccctctcccctcatgggcggatttggacttaaacaccctcctccacagattctcatcaagaacaccccggtacctgcgaatccttcgaccaccttcagtgcggcaaagtttgcttccttcattacacagtactccacggggcaggtcagcgtggagatcgagtgggagctgcagaaggagaacagcaaacgctggaatcccgagatccagtacacttccaactacaacaagtctgttaatgtggactttactgtggacactaatggcgtgtattcagagcctcgccccattggcaccagatacctgactcgtaatctgtaa

SEQ ID NO: 4884 - protein, 735 aa, Adeno-associated virus
MAADGYLPDWLEDTLSEGIRQWWKLKPGPPPPKPAERHKDDSRGLVLPGYKYLGPFNGLDKGEPVNEADAAALEHDKAYDRQLDSGDNPYLKYNHADAEFQERLKEDTSFGGNLGRAVFQAKKRVLEPLSLVEEPVKTAPGKKRPVEHSPAEPDSSSGTGKSGNQPARKRLNFGQTGDSDSVPDPQPLGQPPAAPSGLGTNTMATGSGAPMADNNEGADGVGNSSGNWHCDSTWMGDRVITTSTRTWALPTYNNHLYKQISSQSGASNDNHYFGYSTPWGYFDFNRFHCHFSPRDWQRLINNNWGFRPKRLNFKLFNIQVKEVTQNDGTTTIANNLTSTVQVFTDSEYQLPYVLGSAHQGCLPPFPADVFMVPQYGYLTLNNGSQAVGRSSFYCLEYFPSQMLRTGNNFTFSYTFEDVPFHSSYAHSQSLDRLMNPLIDQYLYYLSRTNTPSGTTTQSRLQFSQAGASDIQDQSRNWLPGPCYRQQRVSKTSADNNNSEYSWTGATKYHLNGRDSLVNPGPAMASHKDDEEKFFPQSGVLIFGKQGSEKTNVDIEKVMITDEEEIRTTNPVATEQYGSVSTNLQSGNTQAATADVNTQGVLPGMVGQDRDVYLQGPTWAKIPHTDGHFHPSPLMGGFGLKHPPPQILIKNTPVPANPSTTFSAAKFASFITQYSTGQVSVEIEWELQKENSKRWNPEIQYTSNYNKSVNVDFTVDTNGVYSEPRPIGTRYLTRNL

SEQ ID NO: 4885 - DNA, 2208 bp, Adeno-associated virus
atggctgccgatggttatcttccagattggctcgaggacactctctctgaaggaataagacagtggtggaagctcaaacctggcccaccaccaccaaagcccgcagagcggcataaggacgacagcaggggtcttgtgcttcctgggtacaagtacctcggacccttcaacggactcgacaagggagagccggtcaacgaggcagacgccgcggccctcgagcacgacaaggcctacgaccggcagctcgacagcggagacaacccgtacctcaagtacaaccacgccgacgcagagtttcaggagcgccttaaagaagatacgtcttttgggggcaacctcggacgagcagtcttccaggcaaaaaagagggttctggaacctctgggcctggttgaggagcctgttaagacggctccgggaaaaaagaggccggtagagcactctcctgcagagccagattcctcctccggaactggaaagtcgggcaaccagcctgcaagaaagagattgaatttcggtcagactggagactcagactccgtacctgacccccagcctctcggacagccaccagcagccccctctggtctgggaactaatacgatggctacaggcagtggcgcaccaatggcagacaataacgagggcgccgacggagtgggtaattcctcgggaaattggcattgcgattccacatggatgggcgacagagtcatcaccaccagcacccgaacctgggccctgcccacctacaacaaccatctgtacaagcaaatatccagccagtctggagccagcaacgacaatcactactttggctacagcaccccctgggggtattttgacttcaacagattccactgccacttttcaccacgtgactggcaaagactcatcaacaacaactggggattccgacccaagagactcaacttcaagctctttaacattcaagtcaaagaggtcacgcagaatgacggtacgacgacgattgccaataaccttaccagcacggttcaggtgtttactgactcggagtaccagctcccgtacgtcctcggctcggcgcatcaaggatgcctcccgccgttcccagcagacgtcttcatggtgccacagtatggatacctcaccctgaacaacgggagtcaggcagtaggacgctcttcattttactgcctagggtactttccttctcagatgctgcgtaccggaaacaactttaccttcagctacacctttgaggacgttcctttccacagcagctacgctcacagccagagtttggaccgtctcatgaatcctctcatcgaccagtacctgtattacttgagcagaacaaacactccaagcggaaccaccacgcagtccaggcttcagttttctcaggccggagcgagtgacattcgggaccagtctaggaactggcttcctggaccctgttaccgtcagcagcgagtatcaaagacatctgcggataacaacaacagtgaatactcgtggactggagctaccaagtaccacctcaatggcagagactctctggtgaatccgggcccggccatggccagccacaaagacgatgaagaaaagttttttcctcagagcggggttcttatctttgggaagcaaggcccagagaaaacaaatgtggatattgaaaaggtcatgattacagacgaagaggaaatcaggaccaccaatcccgtggctacggagcagtatggttctgtatctaccaacctccagagcggcaacacacaagcagctaccgcagatgtcaacacacaaggcgttcttccaggcatggtctggcaagacagagacgtgtacctgcaggggcctatttgggcaaagattccacacacggacggacattttcacccctctcccctcatgggcggatttggacttaaacaccctcctccacagattctcatcaagaacaccccggtacctgcgaatccttcgaccaccttcagtgcggcaaagtttgcttccttcattacacagtactccacggggcaggtcagcgtggagatcgagtgggagctgcagaaggagaacagcaaacgctggaatcccgagatccagtacacttccaactacaacaagtctgttaatgtggactttactgtggacactaatggcgtgtattcagagcctcgccccattggcaccagatacctgactcgtaatctgtaa

SEQ ID NO: 4886 - protein, 735 aa, Adeno-associated virus
MAADGYLPDWLEDTLSEGIRQWWKLKPGPPPPKPAERHKDDSRGLVLPGYKYLGPFNGLDKGEPVNEADAAALEHDKAYDRQLDSGDNPYLKYNHADAEFQERLKEDTSFGGNLGRAVFQAKKRVLEPLGLVEEPVKTAPGKKRPVEHSPAEPDSSSGTGKSGNQPARKRLNFGQTGDSDSVPDPQPLGQPPAAPSGLGTNTMATGSGAPMADNNEGADGVGNSSGNWHCDSTWMGDRVITTSTRTWALPTYNNHLYKQISSQSGASNDNHYFGYSTPWGYFDFNRFHCHFSPRDWQRLINNNWGFRPKRLNFKLFNIQVKEVTQNDGTTTIANNLTSTVQVFTDSEYQLPYVLGSAHQGCLPPFPADVFMVPQYGYLTLNNGSQAVGRSSFYCLGYFPSQMLRTGNNFTFSYTFEDVPFHSSYAHSQSLDRLMNPLIDQYLYYLSRTNTPSGTTTQSRLQFSQAGASDIRDQSRNWLPGPCYRQQRVSKTSADNNNSEYSWTGATKYHLNGRDSLVNPGPAMASHKDDEEKFFPQSGVLIFGKQGPEKTNVDIEKVMITDEEEIRTTNPVATEQYGSVSTNLQSGNTQAATADVNTQGVLPGMVWQDRDVYLQGPIWAKIPHTDGHFHPSPLMGGFGLKHPPPQILIKNTPVPANPSTTFSAAKFASFITQYSTGQVSVEIEWELQKENSKRWNPEIQYTSNYNKSVNVDFTVDTNGVYSEPRPIGTRYLTRNL

SEQ ID NO: 4887 - protein, 735 aa, Adeno-associated virus
MAADGYLPDWLEDTLSEGIRQWWKLKPGPPPPKPAERHKDDSRGLVLPGYKYLGPFNGLDKGEPVNEADAAALEHDKAYDRQLDSGDNPYLKYNHADAEFQERLKEDTSFGGNLGRAVFQAKKRVLEPLGLVEEPVKTAPGKKRPVEHSPAEPDSSSGTGKSGNQPARKRLNFGQTGDSDSVPDPQPLGQPPAAPSGLGTNTMATGSGAPMADNNEGADGVGNSSGNWHCDSTWMGDRVITTSTRTWALPTYNNHLYKQISSQSGASNDNHYFGYSTPWGYFDFNRFHCHFSPRDWQRLINNNWGFRPKRLNFKLFNIQVKEVTQNDGTTTIANNLTSTVQVFTDSEYQLPYVLGSAHQGCLPPFPADVFMVPQYGYLTLNNGSQAVGRSSFYCLEYFPSQMLRTGNNFTFSYTFEDVPFHSSYAHSQSLDRLMNPLIDQYLYYLSRTNTPSGTTTQSRLQFSQAGASDIRDQSRNWLPGPCYRQQRVSKTSADNNNSEYSWTGATKYHLNGRDSLVNPGPAMASHKDDEEKFFPQSGVLIFGKQGPEKTNVDIEKVMITDEEEIRTTNPVATEQYGSVSTNLQSGNTQAATADVNTQGVLPGMVWQDRDVYLQGPIWAKIPHTDGHFHPSPLMGGFGLKHPPPQILIKNTPVPANPSTTFSAAKFASFITQYSTGQVSVEIEWELQKENSKRWNPEIQYTSNYNKSVNVDFTVDTNGVYSEPRPIGTRYLTRNL

SEQ ID NO: 4888 - protein, 735 aa, Adeno-associated virus; identical to SEQ ID NO: 4887

SEQ ID NO: 4889 - DNA, 2211 bp, Adeno-associated virus
atggctgccgatggttatcttccagattggctcgaggacactctctctgaaggaataagacagtggtggaagctcaaacctggcccaccaccaccaaagcccgcagagcggcataaggacgacagcaggggtcttgtgcttcctgggtacaagtacctcggacccttcaacggactcgacaagggggagccggtcaacgaggcagacgccgcggccctcgagcacgacaaggcctacgaccggcagctcgacagcggagacaacccgtacctcaagtacaaccacgccgacgcagagtttcaggagcgccttaaagaagatacgtcttttgggggcaacctcggacgagcagtcttccaggcgaaaaagagggttcttgaacctctgcggcctggtttgaggaaacctgttaagacggctccgggaaaaaagaggccggtagagcactctcctgtggagccagactcctcctcgggaaccggaaaagcgggccagcagcctgcaagaaaaagattaaattttggtcagactggagacgcagactccgtacctgacccccagcctctcggacagccaccagcagccccctctggtctgggatctactacaatggctacaggcagtggcgcaccaatggcagacaataacgagggtgccgatggagtgggtaattcctcaggaaattggcattgcgattcccaatggctggacgacagagtcatcgccaccagcacccgaacctgggccctgcccacatacaacaaccacctctacaagcaaatctccagccaatcaggagcctgcaacgacaaccactactttggctacagcaccccctgggggtattttgacttcaacagattccactgccacttttcaccacgtgactggcaaagactcatcaacagcaactggggattccggcccaaaagactcaacttcaagctctttaatattcaagtcaaagaggtcacgcagaatgacggtacgacgacgattgccaataaccttaccagcacggttcaggtgtttactgactcggagtaccagctcccgtacgtcccgggctcggcgcatcaaggatgcctcccgccgtttccagcggacgtcttcatggtcccacagtatggatacctcaccctgaacaacgggagtcaggcggtaggacgctcttccttttactgcctggagtactttccttctcagatgctgcgtactggaaacaactttcagttcagctacacttttgaagacgtgcctttccacagcagctacgctcactgccagagtctggatcggctgatgaatcctctgatcgaccagtacctgtattatctgaacaagacacaaacaaatagtggaactcttcagcagtctcggctactgtttagccaagctggaccaaccaacatgtctcttcaagctaaaaactggctgcctggaccttgctacagacagcagcgtctgtcaaaacaggcaaacgacaataacaactgcaactttccctggactgcagctacaaagtatcatctaaatggccgggactcgttggttaatccaggaccagctatggccagtcacaaggatgacgaagaaaagtttttccccatgcatggaaccctgatatttggtaaacaaggaacaaatgccaacgacgcggatttggaaaatgtcatgattacagatgaagaagaaatcaggcccaccaatcccgtggctacggagcagtacgggactgtgtcaaataatttgcaaaactcaaacactggtccaactacaggaactgtcaatcaccaaggagcgttacctggtatggtgtggcaggatcgagacgtgtacctgcagggacccatttgggccaagattcctcacaccgatggacactttcatccttctccactgatgggaggttttggactcaaacacccgcctcctcagatcatgatcaaaagcactcccgttccagccaatcctcccacaaacttcagttctgccaagtttgcttcttccatcacacagtattccacgggacaggtcagcgtggagatcgagtgggagctgcagaaggagaacagcaaacgctggaatcccgaaattcagtacacttccaactacaacaagtctgttaatgtggactttactgtggacactaatggtgtgtattcagagcctcgccccattggcaccagatacctgactcgtaatctgtaa

SEQ ID NO: 4890 - protein, 736 aa, Adeno-associated virus
MAADGYLPDWLEDTLSEGIRQWWKLKPGPPPPKPAERHKDDSRGLVLPGYKYLGPFNGLDKGEPVNEADAAALEHDKAYDRQLDSGDNPYLKYNHADAEFQERLKEDTSFGGNLGRAVFQAKKRVLEPLRPGLRKPVKTAPGKKRPVEHSPVEPDSSSGTGKAGQQPARKRLNFGQTGDADSVPDPQPLGQPPAAPSGLGSTTMATGSGAPMADNNEGADGVGNSSGNWHCDSQWLDDRVIATSTRTWALPTYNNHLYKQISSQSGACNDNHYFGYSTPWGYFDFNRFHCHFSPRDWQRLINSNWGFRPKRLNFKLFNIQVKEVTQNDGTTTIANNLTSTVQVFTDSEYQLPYVPGSAHQGCLPPFPADVFMVPQYGYLTLNNGSQAVGRSSFYCLEYFPSQMLRTGNNFQFSYTFEDVPFHSSYAHCQSLDRLMNPLIDQYLYYLNKTQTNSGTLQQSRLLFSQAGPTNMSLQAKNWLPGPCYRQQRLSKQANDNNNCNFPWTAATKYHLNGRDSLVNPGPAMASHKDDEEKFFPMHGTLIFGKQGTNANDADLENVMITDEEEIRPTNPVATEQYGTVSNNLQNSNTGPTTGTVNHQGALPGMVWQDRDVYLQGPIWAKIPHTDGHFHPSPLMGGFGLKHPPPQIMIKSTPVPANPPTNFSSAKFASSITQYSTGQVSVEIEWELQKENSKRWNPEIQYTSNYNKSVNVDFTVDTNGVYSEPRPIGTRYLTRNL

SEQ ID NO: 4891 - DNA, 2208 bp, Adeno-associated virus
atggctgccgatggttatcttccagattggctcgaggacactctctctgaaggaataagacagtggtggaagctcaaacctggcccaccaccaccaaagcccgcagagcggcataaggacgacagcaggggtcttgtgcttcctgggtacaagtacctcggacccttcaacggactcgacaagggagagccggtcaacgaggcagacgccgcggccctcgagcacgacaaggcctacgaccggcagctcgacagcggagacaacccgtacctcaagtacaaccacgccgacgcggagtttcaggagcgccttaaagaggatacgtcttttgggggcaacctcggacgagcagtcttccaggcaaaaaagagggttctggaacctctgggcctggttgaggagcctgttaagacggctccgggaaaaaagaggccggtagagcactctcctgcagagccagattcctcctccggaactggaaagtcgggcaaccagcctgcaagaaagagattgaatttcggtcagactggagactcagactccgtacctgacccccagcctctcggacagccaccagcagccccctctggtctgggaactaatacgatggctacaggcagtggcgcaccaatggcagacaataacgagggcgccgacggagtgggtaattcctcgggaaattggcattgcgattccacatggatgggcgacagagtcatcaccaccagcacccgaacctgggccctgcccacctacaacaaccatctgtacaagcaaatatccagccagtctggagccagcaacgacaatcactactttggctacagcaccccctgggggtattttgacttcaacagattccactgccacttttcaccacgtgactggcaaagactcatcaacaacaactggggattccgacccaagagactcaacttcaagctctttaacattcaagtcaaagaggtcacgcagaatgacggtacgacgacgattgccaataaccttaccagcacggttcaggtgtttactgactcggagtaccagctcccgtacgtcctcggctcggcgcatcaaggatgcctcccgccgttcccagcagacgtcttcatggtgccacagtatggatacctcaccctgaacaacgggagtcaggcagtaggacgctcttcattttactgcctagagtactttccttctcagatgctgcgtaccggaaacagctttaccttcagctacacctttgaggacgttcctttccacagcagctacgctcacagccagagtttggaccgtctcatgaatcctctcatcgaccagtacctgtattacttgagcagaacaaacactccaagcggaaccaccacgcagtccaggcttcagttttctcaggccggagcgagtgacattcgggaccagtctaggaactggcttcctggaccctgttaccgtcagcagcgagtatcaaagacatctgcggataacaacaacagtgaatactcgtggactggagctaccaagtaccacctcaatggcagagactctctggtgaatccgggcccggccatggccagccacaaagacgatgaagaaaagttctttcctcagagcggggttcttatctttgggaagcaaggctcagagaaaacaaatgtggatattgaaaaggtcatgattacagacgaagaggaaatcaggaccaccaatcccgtggctacggagcagtatggttctgtatctaccaacctccagagcggcaacacacaagcagctaccgcagatgtcaacacacaaggcgttcttccaggcatggtctggcaagacagagacgtgtacctgcaggggcctatttgggcaaagattccacacacggacggacattttcacccctctcccctcatgggcggatttggacttaaacaccctcctccacagattctcatcaagaacaccccggtacctgcgaatccttcgaccaccttcagtgcggcaaagtttgcttccttcattacacagtactccacggggcaggtcagcgtggagatcgagtgggagctgcagaaggagaacagcaaacgctggaatcccgagatccagtacacttccaactacaacaagtctgttaatgtggactttactgtggacactaatggcgtgtattcagagcctcgccccattggcaccagatacctgactcgtaatctgtaa

SEQ ID NO: 4892 - protein, 735 aa, Adeno-associated virus
MAADGYLPDWLEDTLSEGIRQWWKLKPGPPPPKPAERHKDDSRGLVLPGYKYLGPFNGLDKGEPVNEADAAALEHDKAYDRQLDSGDNPYLKYNHADAEFQERLKEDTSFGGNLGRAVFQAKKRVLEPLGLVEEPVKTAPGKKRPVEHSPAEPDSSSGTGKSGNQPARKRLNFGQTGDSDSVPDPQPLGQPPAAPSGLGTNTMATGSGAPMADNNEGADGVGNSSGNWHCDSTWMGDRVITTSTRTWALPTYNNHLYKQISSQSGASNDNHYFGYSTPWGYFDFNRFHCHFSPRDWQRLINNNWGFRPKRLNFKLFNIQVKEVTQNDGTTTIANNLTSTVQVFTDSEYQLPYVLGSAHQGCLPPFPADVFMVPQYGYLTLNNGSQAVGRSSFYCLEYFPSQMLRTGNSFTFSYTFEDVPFHSSYAHSQSLDRLMNPLIDQYLYYLSRTNTPSGTTTQSRLQFSQAGASDIRDQSRNWLPGPCYRQQRVSKTSADNNNSEYSWTGATKYHLNGRDSLVNPGPAMASHKDDEEKFFPQSGVLIFGKQGSEKTNVDIEKVMITDEEEIRTTNPVATEQYGSVSTNLQSGNTQAATADVNTQGVLPGMVWQDRDVYLQGPIWAKIPHTDGHFHPSPLMGGFGLKHPPPQILIKNTPVPANPSTTFSAAKFASFITQYSTGQVSVEIEWELQKENSKRWNPEIQYTSNYNKSVNVDFTVDTNGVYSEPRPIGTRYLTRNL

SEQ ID NO: 4893 - DNA, 2211 bp, Adeno-associated virus; identical to SEQ ID NO: 4804

SEQ ID NO: 4894 - protein, 736 aa, Adeno-associated virus
MAADGYLPDWLEDTLSEGIRQWWKLKPGPPPPKPAERHKDDSRGLVLPGYKYLGPGNGLDKGEPVNAADAAALEHDKAYDQQLKAGDNPYLKYNHADAEFQERLKEDTSFGGNLGRAVFQAKKRLLEPLGLVEEAAKTAPGKKRPVEQSPQEPDSSAGIGKSGSQPAKKKLNFGQTGDTESVPDPQPIGEPPAAPSGVGSLTMASGGGAPVADNNEGADGVGSSSGNWHCDSQWLGDRVITTSTRTWALPTYNNHLYKQISNSTSGGSSNDNAYFGYSTPWGYFDFNRFHCHFSPRDWQRLINNNWGFRPKRLNFKLFNIQVKEVTDNNGVKTIANNLTSTVQVFTDSDYQLPYVLGSAHEGCLPPFPADVFMIPQYGYLTLNDGGQAVGRSSFYCLEYFPSQMLRTGNNFQFSYEFENVPFHSSYAHSQSLDRLMNPLIDQYLYYLSKTINGSGQNQQTLKFSVAGPSNMAVQGRNYIPGPSYRQQRVSTTVTQNNNSEFAWPGASSWALNGRNSLMNPGPAMASHKEGEDRFFPLSGSLIFGKQGTGRDNVDADKVMITNEEEIKTTNPVATESYGQVATNHQSAQAQAQTGWVQNQGILPGMVWQDRDVYLQGPIWAKIPHTDGNFHPSPLMGGFGMKHPPPQILIKNTPVPADPPTAFNKDKLNSFITQYSTGQVSVEIEWELQKENSKRWNPEIQYTSNYYKSNNVEFAVSTEGVYSEPRPIGTRYLTRNL

SEQ ID NO: 4895 - DNA, 2211 bp, Adeno-associated virus
atggctgccgatggttatcttccagattggctcgaggacactctctctgaaggaataagacagtggtggaagctcaaacctggcccaccaccaccaaagcccgcagagcggcataaggacgacagcaggggtcttgtgcttcctgggtacaagtacctcggacccggcaacggactcgacaagggggagccggtcaacgcagcagacgcggcggccctcgagcacgacaaggcctacgaccagcagctcaaggccggagacaacccgtacctcaagtacaaccacgccgacgccgagttccaggagcggctcaaagaagatacgtcttttgggggcaacctcgggcgagcagtcttccaggccaaaaagaggcttcttgaacctcttggtctggttgaggaagcggctaagacggctcctggaaagaagaggcctgtagagcagtctcctcaggaaccggactcctccgcgggtattggcaaatcgggttcacagcccgctaaaaagaaactcaatttcggtcagactggcgacacagagtcagtccccgaccctcaaccaatcggagaacctcccgcagccccctcaggtgtgggatctcttacaatggcttcaggtggtggcgcaccagtggcagacaataacgaaggtgccgatggagtgggtagttcctcgggaaattggcattgcgattcccaatggctgggggacagagtcatcaccaccagcacccgaacctgggccctgcccacctacaacaatcacctctacaagcaaatctccaacagcacatctggaggatcttcaaatgacaacgcctacttcggctacagcaccccctgggggtattttgacttcaacagattccactgccacttctcaccacgtgactggcagcgactcatcaacaacaactggggattccggcctaagcgactcaacttcaagctcttcaacattcaggtcaaagaggttacggacaacaatggagtcaagaccatcgccaataaccttaccagcacggtccaggtcttcacggactcagactatcagctcccgtacgtgctcgggtcggctcacgagggctgcctcccgccgttcccagcggacgttttcatgattcctcagtacgggtatctgacgcttaatgatgggagccaggccgtgggtcgttcgtccttttactgcctggaatatttcccgtcgcaaatgctaagaacgggtaacaacttccagttcagctacgagtttgagaacgtacctttccatagcagctacgctcacagccaaagcctggaccgactaatgaatccactcatcgaccaatacttgtactatctctcaaagactattaacggttctggacagaatcaacaaacgctaaaattcagcgtggccggacccagcaacatggctgtccagggaagaaactacatacctggacccagctaccgacaacaacgtgtctcaaccactgtgactcaaaacaacaacagcgaatttgcttggcctggagcttcttcttgggctctcaatggacgtaatagcttgatgaatcctggacctgctatggccagccacaaagaaggagaggaccgtttctttcctttgtctggatctttaatttttggcaaacaaggaactggaagagacaacgtggatgcggacaaagtcatgataaccaacgaagaagaaattaaaactactaacccggtagcaacggagtcctatggacaagtggccacaaaccaccagagtgcccaagcacaggcgcagaccggctgggttcaaaaccaaggaatacttccgggtatggtttggcaggacagagatgtgtacctgcaaggacccatttgggccaaaattcctcacacggacggcaactttcacccttctccgctaatgggagggtttggaatgaagcacccgcctcctcagatcctcatcaaaaacacacctgtacctgcggatcctccaacggctttcaataaggacaagctgaactctttcatcacccagtattctactggccaagtcagcgtggagattgagtgggagctgcagaaggaaaacagcaagcgctggaacccggagatccagtacacttccaactattacaagtctaataatgttgaatttgctgttaatactgaaggtgtatatagtgaaccccgccccattggcaccagatacctgactcgtaatctgtaa

SEQ ID NO: 4896 - protein, 736 aa, Adeno-associated virus
MAADGYLPDWLEDTLSEGIRQWWKLKPGPPPPKPAERHKDDSRGLVLPGYKYLGPGNGLDKGEPVNAADAAALEHDKAYDQQLKAGDNPYLKYNHADAEFQERLKEDTSFGGNLGRAVFQAKKRLLEPLGLVEEAAKTAPGKKRPVEQSPQEPDSSAGIGKSGSQPAKKKLNFGQTGDTESVPDPQPIGEPPAAPSGVGSLTMASGGGAPVADNNEGADGVGSSSGNWHCDSQWLGDRVITTSTRTWALPTYNNHLYKQISNSTSGGSSNDNAYFGYSTPWGYFDFNRFHCHFSPRDWQRLINNNWGFRPKRLNFKLFNIQVKEVTDNNGVKTIANNLTSTVQVFTDSDYQLPYVLGSAHEGCLPPFPADVFMIPQYGYLTLNDGSQAVGRSSFYCLEYFPSQMLRTGNNFQFSYEFENVPFHSSYAHSQSLDRLMNPLIDQYLYYLSKTINGSGQNQQTLKFSVAGPSNMAVQGRNYIPGPSYRQQRVSTTVTQNNNSEFAWPGASSWALNGRNSLMNPGPAMASHKEGEDRFFPLSGSLIFGKQGTGRDNVDADKVMITNEEEIKTTNPVATESYGQVATNHQSAQAQAQTGWVQNQGILPGMVWQDRDVYLQGPIWAKIPHTDGNFHPSPLMGGFGMKHPPPQILIKNTPVPADPPTAFNKDKLNSFITQYSTGQVSVEIEWELQKENSKRWNPEIQYTSNYYKSNNVEFAVNTEGVYSEPRPIGTRYLTRNL

SEQ ID NO: 4897 - DNA, 2208 bp, Adeno-associated virus
atggctgccgatggttatcttccagattggctcgaggacactctctctgaaggaataagacagcggtggaagctcaaacctggcccaccaccaccagagcccgcagagcggcataaggacgacagcaggggtcttgtgcttcctgggtacaagtacctcggacccttcaacggactcgacaagggagagccggtcaacgaggcagacgccgcggccctcgagcacgacaaagcctacgaccggcagctcgacagcggagacaacccgtacctcaagtacaaccacgccgacgcggagtttcaggagcgccttaaagaagatacgtcttttgggggcaacctcggacgagcagtcttccaggcgaaaaagagggtacttgaacctctgggcctggttgaggaacctgttaagacggctccgggaaaaaagaggccggtagagcactctcctgtggagccagactcctcctcgggaaccggaaaggcgggccagcagcctgcaagaaaaagattgaattttggtcagactggagacgcagactcagtacctgacccccagcctctcggacagccaccagcagccccctctggtctgggaactaatacgatggctacaggcagtggcgcaccaatggcagacaataacgagggcgccgacggagtgggtaattcctcgggaaattggcattgcgattccacatggatgggcgacagagtcatcaccaccagcacccgaacctgggccctgcccacctacaacaaccacctctacaaacaaatttccagccaatcaggagcctcgaacgacaatcactactttggctacagcaccccttgggggtattttgacttcaacagattccactgccacttttcaccacgtgactggcaaagactcatcaacaacaactggggattccgacccaagagactcaacttcaagctctttaacattcaagtcaaagaggtcacgcagaatgacggtacgacgacgattgccaataaccttaccggcacggttcaggtgtttactgactcggagtaccagctcccgtacgtcctcggctcggcgcatcaaggatgcctcccgccgttcccagcagacgtcttcatggtgccacagtatggatacctcaccctgaacaacgggagtcaggcagtaggacgctcttcattttactgcctggagtactttccttctcagatgctgcgtaccggaaacaactttaccttcagctacacttttgaggacgttcctttccacagcagctacgctcacagccagagtctgggccgtctcatgaatcctctcatcgaccagtacctgtattacttgagcagaacaaacactccaagtggaaccaccacgcagtcaaggcttcagttttctcaggccggagcgagtgacattcgggaccagtctaggaactggcttcctggaccctgttaccgccagcagcgagtatcaaagacatctgcggataacaacaacagtgaatactcgtggactggagctaccaagtaccacctcaatggcagagactctctggtgaatccgggcccggccatggcaagccacaaggacgatgaagaaaagttttttcctcagagcggggttctcatctttgggaagcaaggctcagagaaaacaaatgtggacattgaaaaggtcatgattacagacgaagaggaaatcaggacaaccaatcccgtggctacggagcagtatggttctgtatctaccaacctccagagaggcaacagacaagcagctaccgcagatgtcaacacacaaggcgttcttccaggcatggtctggcaggacagagatgtgtaccttcaggggcccatctgggcaaagattccacacacggacggacattttcacccctctcccctcatgggtggattcggacttaaacaccctcctccacagattctcatcaagaacaccccggtacctgcgaatccttcgaccaccttcagtgcggcaaagtttgcttccttcatcacacagtactccacgggacaggtcagcgtggagatcgagtgggagctgcagaaggaaaacagcaaacgctggaatcccgaaattcagtacacttccaactacaacaagtctgttaatgtggactttactgtggacactaatggcgtgtattcagagcctcgccccattggcaccagatacctgactcgtaatctgtaa

SEQ ID NO: 4898 - protein, 735 aa, Adeno-associated virus
MAADGYLPDWLEDTLSEGIRQRWKLKPGPPPPEPAERHKDDSRGLVLPGYKYLGPFNGLDKGEPVNEADAAALEHDKAYDRQLDSGDNPYLKYNHADAEFQERLKEDTSFGGNLGRAVFQAKKRVLEPLGLVEEPVKTAPGKKRPVEHSPVEPDSSSGTGKAGQQPARKRLNFGQTGDADSVPDPQPLGQPPAAPSGLGTNTMATGSGAPMADNNEGADGVGNSSGNWHCDSTWMGDRVITTSTRTWALPTYNNHLYKQISSQSGASNDNHYFGYSTPWGYFDFNRFHCHFSPRDWQRLINNNWGFRPKRLNFKLFNIQVKEVTQNDGTTTIANNLTGTVQVFTDSEYQLPYVLGSAHQGCLPPFPADVFMVPQYGYLTLNNGSQAVGRSSFYCLEYFPSQMLRTGNNFTFSYTFEDVPFHSSYAHSQSLGRLMNPLIDQYLYYLSRTNTPSGTTTQSRLQFSQAGASDIRDQSRNWLPGPCYRQQRVSKTSADNNNSEYSWTGATKYHLNGRDSLVNPGPAMASHKDDEEKFFPQSGVLIFGKQGSEKTNVDIEKVMITDEEEIRTTNPVATEQYGSVSTNLQRGNRQAATADVNTQGVLPGMVWQDRDVYLQGPIWAKIPHTDGHFHPSPLMGGFGLKHPPPQILIKNTPVPANPSTTFSAAKFASFITQYSTGQVSVEIEWELQKENSKRWNPEIQYTSNYNKSVNVDFTVDTNGVYSEPRPIGTRYLTRNL

SEQ ID NO: 4899 - DNA, 2208 bp, Adeno-associated virus
atggctgccgatggttatcttccagattggctcgaggacactctctctgaaggaataagacagcggtggaagctcaaacctggcccaccaccaccagagcccgcagagcggcataaggacgacagcaggggtcttgtgcttcctgggtacaagtacctcggacccttcaacggactcgacaagggagagccggtcaacgaggcagacgccgcggccctcgagcacgacaaagcctacgaccggcagctcgacagcggagacaacccgtacctcaagtacaaccacgccgacgcggagtttcaggagcgccttaaagaagatacgtcctttgggggcaacctcggacgagcagtcttccaggcgaaaaagagggtacttgaacctctgggcctggttgaggaacctgttaagacggctccgggaaaaaagaggccggtagagcactctcctgtggagccagactcctcctcgggaaccggaaaggcgggccagcagcctgcaagaaaaagattgaattttggtcagactggagacgcagactcagtacctgacccccagcctctcggacagccaccagcagccccctctggtctgggaactaatacgatggctacaggcagtggcgcaccaatggcagacaataacgagggcgccgacggagtgggtaattcctcgggaaattggcattgcgattccacatggatgggcgacagagtcatcaccaccagcacccgaacctgggccctgcccacctacaacaaccacctctacaaacaaatttccagccaatcaggagcctcgaacgacaatcactactttggctacagcaccccttgggggtattttgacttcaacagattccactgccacttttcaccacgtgactggcaaagactcatcaacaacaactggggattccgacccaagagactcaacttcaagctctttaacattcaagtcaaagaggtcacgcagaatgacggtacgacgacgattgccaataaccttaccagcacggttcaggtgtttactgactcggagtaccagctcccgtacgtcctcggctcggcgcatcaaggatgcctcccgccgttcccagcagacgtcttcatggtgccacagtatggatacctcaccctgaacaacgagagtcaggcagtaggacgctcttcattttactgcctggagtactttccttctcagatgctgcgtaccggaaacaactttaccttcagctacacttttgaggacgttcctttccacagcagctacgctcacagccagagtctgggccgtctcatgaatcctctcatcgaccagtacctgtattacttgagcagaacaaacactccaagtggaaccaccacgcagtcaaggcttcagttttctcaggccggagcgagtgacattcgggaccagtctaggaactggcttcctggaccctgttaccgccagcagcgagtatcaaagacatctgcggataacaacaacagtgaatactcgtggactggagctaccaagtaccacctcaatggcagagactctctggtgaatccgggcccggccatggcaagccacaaggacgatgaagaaaagttttttcctcagagcggggttctcatctttgggaagcaaggctcagagaaaacaaatgtggacattgaaaaggtcatgattacagacgaagaggaaatcaggacaaccaatcccgtggctacggagcagtatggttctgtatctaccaacctccagagaggcaacagacaagcagctaccgcagatgtcaacacacaaggcgttcttccaggcatggtctggcaggacagagatgtgtaccttcaggggcccatctgggcaaagattccacacacggacggacattttcacccctctcccctcatgggtggattcggacttaaacaccctcctccacagattctcatcaagaacaccccggtacctgcgaatccttcgaccaccttcagtgcggcaaagtttgcttccttcatcacacagtactccacgggacaggtcagcgtggagatcgagtgggagctgcagaaggaaaacagcaaacgctggaatcccgaaattcagtacacttccaactacaacaagtctgttaatgtggactttactgtggacactaatggcgtgtattcagagcctcgccccattggcaccagatacctgactcgtaatctgtaa

SEQ ID NO: 4900 - protein, 735 aa, Adeno-associated virus
MAADGYLPDWLEDTLSEGIRQRWKLKPGPPPPEPAERHKDDSRGLVLPGYKYLGPFNGLDKGEPVNEADAAALEHDKAYDRQLDSGDNPYLKYNHADAEFQERLKEDTSFGGNLGRAVFQAKKRVLEPLGLVEEPVKTAPGKKRPVEHSPVEPDSSSGTGKAGQQPARKRLNFGQTGDADSVPDPQPLGQPPAAPSGLGTNTMATGSGAPMADNNEGADGVGNSSGNWHCDSTWMGDRVITTSTRTWALPTYNNHLYKQISSQSGASNDNHYFGYSTPWGYFDFNRFHCHFSPRDWQRLINNNWGFRPKRLNFKLFNIQVKEVTQNDGTTTIANNLTSTVQVFTDSEYQLPYVLGSAHQGCLPPFPADVFMVPQYGYLTLNNESQAVGRSSFYCLEYFPSQMLRTGNNFTFSYTFEDVPFHSSYAHSQSLGRLMNPLIDQYLYYLSRTNTPSGTTTQSRLQFSQAGASDIRDQSRNWLPGPCYRQQRVSKTSADNNNSEYSWTGATKYHLNGRDSLVNPGPAMASHKDDEEKFFPQSGVLIFGKQGSEKTNVDIEKVMITDEEEIRTTNPVATEQYGSVSTNLQRGNRQAATADVNTQGVLPGMVWQDRDVYLQGPIWAKIPHTDGHFHPSPLMGGFGLKHPPPQILIKNTPVPANPSTTFSAAKFASFITQYSTGQVSVEIEWELQKENSKRWNPEIQYTSNYNKSVNVDFTVDTNGVYSEPRPIGTRYLTRNL

SEQ ID NO: 4901 - DNA, 2208 bp, Adeno-associated virus
atggctgccgatggttatcttccagattggctcgaggacactctctctgaaggaataagacagcggtggaagctcaaacctggcccaccaccaccagagcccgcagagcggcataaggacgacagcaggggtcttgtgcttcctgggtacaagtacctcggacccttcaacggactcgacaagggagagccggtcaacgaggcagacgccgcggccctcgagcacgacaaagcctacgaccggcagctcgacagcggagacaacccgtacctcaagtacaaccacgccgacgcggagtttcaggagcgccttaaagaagatacgtcttttgggggcaacctcggacgagcagtcttccaggcgaaaaagagggtacttgaacctctgggcctggttgaggaacctgttaagacggctccgggaaaaaagaggccggtagagcactctcctgtggagccagactcctcctcgggaaccggaaaggcgggccagcagcctgcaagaaaaagattgaattttggtcagactggagacgcagactcagtacctgacccccagcctctcggacagccaccagcagccccctctggtctgggaactaatacgatggctacaggcagtggcgcaccaatggcagacaataacgagggcgccgacggagtgggtaattcctcgggaaattggcattgcgattccacatggatgggcgacagagtcatcaccaccagcacccgaacctgggccctgcccacctacaacaaccacctctacaaacaaatttccagccaatcaggagcctcgaacgacaatcactactttggctacagcaccccttgggggtattttgacttcaacagattccactgccacttttcaccacgtgactggcaaagactcatcaacaacaactggggattccgacccaagagactcaacttcaagctctttaacattcaagtcaaagaggtcacgcagaatgacggtacgacgacgattgccaataaccttaccagcacggttcaggtgtttactgactcggagtaccagctcccgtacgtcctcggctcggcgcatcaaggatgcctcccgccgttcccagcagacgtcttcatggtaccacagtatggatacctcaccctgaacaacgggagtcaggcagtaggacgctcttcattttactgcctggagtactttccttctcagatgctgcgtaccggaaacaactttaccttcagctacacttttgaggacgttcctttccacagcagctacgctcacagccagagtctgggccgtctcatgaatcctctcatcgaccagtacctgtattacttgagcagaacaaacactccaagtggaaccaccacgcagtcaaggcttcagttttctcaggccggagcgagtgacattcgggaccagtctaggaactggcttcctggaccctgttaccgccagcagcgagtatcaaagacatctgcggataacaacaacagtgaatactcgtggactggagctaccaagtaccacctcaatggcagagactctctggtgaatccgggcccggccatggcaagccacaaggacgatgaagaaaagttttttcctcagagcggggttctcatctttgggaagcaaggctcagagaaaacaaatgtggacattgaaaaggtcatgattacagacgaagaggaaatcaggacaaccaatcccgtggctacggagcagtatggttctgtatctaccaacctccagagaggcaacagacaagcagctaccgcagatgtcaacacacaaggcgttcttccaggcatggtctggcaggacagagatgtgtaccttcaggggcccatctgggcaaagattccacacacggacggacattttcacccctctcccctcatgggtggattcggacttaaacaccctcctccacagattctcatcaagaacaccccggtacctgcgaatccttcgaccaccttcagtgcggcaaagtttgcttccttcatcacacagtactccacgggacaggtcagcgtggagatcgagtgggagctgcagaaggaaaacagcaaacgctggaatcccgaaattcagtacacttccaactacaacaagtctgttaatgtggactttactgtggacactaatggcgtgtattcagagcctcgccccattggcaccagatacctgactcgtaatctgtaa

SEQ ID NO: 4902 - protein, 735 aa, Adeno-associated virus
MAADGYLPDWLEDTLSEGIRQRWKLKPGPPPPEPAERHKDDSRGLVLPGYKYLGPFNGLDKGEPVNEADAAALEHDKAYDRQLDSGDNPYLKYNHADAEFQERLKEDTSFGGNLGRAVFQAKKRVLEPLGLVEEPVKTAPGKKRPVEHSPVEPDSSSGTGKAGQQPARKRLNFGQTGDADSVPDPQPLGQPPAAPSGLGTNTMATGSGAPMADNNEGADGVGNSSGNWHCDSTWMGDRVITTSTRTWALPTYNNHLYKQISSQSGASNDNHYFGYSTPWGYFDFNRFHCHFSPRDWQRLINNNWGFRPKRLNFKLFNIQVKEVTQNDGTTTIANNLTSTVQVFTDSEYQLPYVLGSAHQGCLPPFPADVFMVPQYGYLTLNNGSQAVGRSSFYCLEYFPSQMLRTGNNFTFSYTFEDVPFHSSYAHSQSLGRLMNPLIDQYLYYLSRTNTPSGTTTQSRLQFSQAGASDIRDQSRNWLPGPCYRQQRVSKTSADNNNSEYSWTGATKYHLNGRDSLVNPGPAMASHKDDEEKFFPQSGVLIFGKQGSEKTNVDIEKVMITDEEEIRTTNPVATEQYGSVSTNLQRGNRQAATADVNTQGVLPGMVWQDRDVYLQGPIWAKIPHTDGHFHPSPLMGGFGLKHPPPQILIKNTPVPANPSTTFSAAKFASFITQYSTGQVSVEIEWELQKENSKRWNPEIQYTSNYNKSVNVDFTVDTNGVYSEPRPIGTRYLTRNL

SEQ ID NO: 4903 - DNA, 2208 bp, Adeno-associated virus
atggctgccgatggttatcttccagattggctcgaggacactctctctgaaggaataagacagcggtggaagctcaaacctggcccaccaccaccagagcccgcagagcggcataaggacgacagcaggggtcttgtgcttcctgggtacaagtacctcggacccttcaacggactcgacaagggagagccggtcaacgaggcagacgccgcggccctcgagcacgacaaagcctacgaccggcagctcgacagcggagacaacccgtacctcaagtacaaccacgccgacgcggagtttcaggagcgccttaaagaagatacgtcttttgggggcaacctcggacgagcagtcttccaggcgaaaaagagggtactcgaacctctgggcctggttgaggaacctgttaagacggctccgggaaaaaagaggccggtagagcactctcctgtggagccagactcctcctcgggaaccggaaaggcgggccagcagcctgcaagaaaaagattgaattttggtcagactggagacgcagactcagtacctgacccccagcctctcggacagccaccagcagccccctctggtctgggaactaatacgatggctacaggcagtggcgcaccaatggcagacaataacgagggcgccgacggagtgggtaattcctcgggaaattggcattgcgattccacatggatgggcgacagagtcatcaccaccagcacccgaacctgggccctgcccacctacaacaaccacctctacaaacaaatttccagccaatcaggagcctcgaacgacaatcactactttggctacagcaccccttgggggtattttgacttcaacagattccactgccacttttcaccacgtgactggcaaagactcatcaacaacaactggggattccgacccaagagactcaacttcaagctctttaacattcaagtcaaagaggtcacgcagaatgacggtacgacgacgattgccaataaccttaccagcacggttcaggtgtttactgactcggagtaccagctcccgtacgtcctcggctcggcgcatcaaggatgcctcccgccgttcccagcagacgtcttcatggtgccacagtatggatacctcaccctgaacaacgggagtcaggcagcaggacgctcttcattttactgcctggagtactttccttctcagatgctgcgtaccggaaacaactttaccttcagctacacttttgaggacgttcctttccacagcagctacgctcacagccagagtctgggccgtctcatgaatcctctcatcgaccagtacctgtattacttgagcagaacaaacactccaagtggaaccaccacgcagtcaaggcttcagttttctcaggccggagcgagtgacattcgggaccagtctaggaactggcttcctggaccctgttaccgccagcagcgagtatcaaagacatctgcggataacaacaacagtgaatactcgtggactggagctaccaagtaccacctcaatggcagagactctctggtgaatccgggcccggccatggcaagccacaaggacgatgaagaaaagttttttcctcagagcggggttctcatctttgggaagcaaggctcagagaaaacaaatgtggacattgaaaaggtcatgattacagacgaagaggaaatcaggacaaccaatcccgtggctacggagcagtatggttctgtatctaccaacctccagagaggcaacagacaagcagctaccgcagatgtcaacacacaaggcgttcttccaggcatggtctggcaggacagagatgtgtaccttcaggggcccatctgggcaaagattccacacacggacggacattttcacccctctcccctcatgggtggattcggacttaaacaccctcctccacagattctcatcaagaacaccccggtacctgcgaatccttcgaccaccttcagtgcggcaaagtttgcttccttcatcacacagtactccacgggacaggtcagcgtggagatcgagtgggagctgcagaaggaaaacagcaaacgctggaatcccgaaattcagtacacttccaactacaacaagtccgttaatgtggactttactgtggacactaatggcgtgtattcagagcctcgccccattggcaccagatacctgactcgtaatctgtaa

SEQ ID NO: 4904 - protein, 735 aa, Adeno-associated virus
MAADGYLPDWLEDTLSEGIRQRWKLKPGPPPPEPAERHKDDSRGLVLPGYKYLGPFNGLDKGEPVNEADAAALEHDKAYDRQLDSGDNPYLKYNHADAEFQERLKEDTSFGGNLGRAVFQAKKRVLEPLGLVEEPVKTAPGKKRPVEHSPVEPDSSSGTGKAGQQPARKRLNFGQTGDADSVPDPQPLGQPPAAPSGLGTNTMATGSGAPMADNNEGADGVGNSSGNWHCDSTWMGDRVITTSTRTWALPTYNNHLYKQISSQSGASNDNHYFGYSTPWGYFDFNRFHCHFSPRDWQRLINNNWGFRPKRLNFKLFNIQVKEVTQNDGTTTIANNLTSTVQVFTDSEYQLPYVLGSAHQGCLPPFPADVFMVPQYGYLTLNNGSQAAGRSSFYCLEYFPSQMLRTGNNFTFSYTFEDVPFHSSYAHSQSLGRLMNPLIDQYLYYLSRTNTPSGTTTQSRLQFSQAGASDIRDQSRNWLPGPCYRQQRVSKTSADNNNSEYSWTGATKYHLNGRDSLVNPGPAMASHKDDEEKFFPQSGVLIFGKQGSEKTNVDIEKVMITDEEEIRTTNPVATEQYGSVSTNLQRGNRQAATADVNTQGVLPGMVWQDRDVYLQGPIWAKIPHTDGHFHPSPLMGGFGLKHPPPQILIKNTPVPANPSTTFSAAKFASFITQYSTGQVSVEIEWELQKENSKRWNPEIQYTSNYNKSVNVDFTVDTNGVYSEPRPIGTRYLTRNL

SEQ ID NO: 4905 - protein, 738 aa, Adeno-associated virus; identical to SEQ ID NO: 4797

SEQ ID NO: 4906 - DNA, 2217 bp, Adeno-associated virus
atggctgctgacggttatcttccagattggctcgaggacaacctctctgagggcattcgcgagtggtgggacctgaaacctggagcccccaagcccaaggccaaccagcagaagcaggacgacggccggggtctggtgcttcctggctacaagtacctcggacccttcaacggactcgacaagggggagcccgtcaacgcggcggacgcagcggccctcgagcacgacaaggcctacgaccagcagctcaaagcgggtgacaatccgtacctgcggtataaccacgccgacgccgagtttcaggagcgtctgcaagaagatacgtcttttgggggcaacctcgggcgagcagtcttccaggccaagaagcgggttctcgaacctctcggtctggttgaggaagctgctaagacggctcctggaaagaagagaccggtagaaccgtcacctcagcgttcccccgactcctccacgggcatcggcaagaaaggccagcagcccgctaaaaagagactgaactttggtcagactggcgactcagagtcagtccccgaccctcaaccaatcggagaaccaccagcaggcccctctggtctgggatctggtacaatggctgcaggcggtggcgctccaatggcagacaataacgaaggcgccgacggagtgggtagttcctcaggaaattggcattgcgattccacatggctgggcgacagagtcatcaccaccagcacccgaacctgggccctgcccacctacaacaaccacctctacaagcaaatatccaatgggacatcgggaggaagcaccaacgacaacacctacttcggctacagcaccccctgggggtattttgacttcaacagattccactgccacttctcaccacgtgactggcagcgactcatcaacaacaactggggattccggccaaaaagactcagcttcaagctcttcaacatccaggtcaaggaggtcacgcagaatgaaggcaccaagaccatcgccaataaccttaccagcacgattcaggtatttacggactcggaataccagctgccgtacgtcctcggctccgcgcaccagggctgcctgcctccgttcccggcggacgtcttcatgattccccagtacggctaccttacactgaacaatggaagtcaagccgtaggccgttcctccttctactgcctggaatattttccatctcaaatgctgcgaactggaaacaattttgaattcagctacaccttcgaggacgtgcctttccacagcagctacgcacacagccagagcttggaccgactgatgaatcctctcatcgaccagtacctgtactacttatccagaactcagtccacaggaggaactcaaggtacccagcaattgttattttctcaagctgggcctgcaaacatgtcggctcaggctaagaactggctacctggaccttgctaccggcagcagcgagtctctacgacactgtcgcaaaacaacaacagcaactttgcttggactggtgccaccaaatatcacctgaacggaagagactctttggtaaatcccggtgtcgccatggcaacccacaaggacgacgaggaacgcttcttcccgtcgagtggagtcctgatgttcggaaaacagggtgctggaagagacaatgtggactacagcagcgttatgctaaccagcgaagaagaaattaaaaccactaaccccgtagccacagaacaatacggtgtggtggctgacaacttgcagcaaaccaatacagggcctattgtgggaaatgtcaacagccaaggagccttacctggcatggtctggcagaaccgagacgtgtacctgcagggtcccatctgggccaagattcctcacacggacggcaacttccacccttcaccgctaatgggaggatttggactgaagcacccacctcctcagatcctgatcaagaacacgccggtacctgcggatcctccaacaacgttcagccaggcgaaattggcttccttcattacgcagtacagcaccggacaggtcagcgtggaaatcgagtgggagctgcagaaggagaacagcaaacgctggaacccagagattcagtacacttcaaactactacaaatctacaaatgtggactttgctgtcaatacagagggaacttattctgagcctcgccccattggtactcgttacctcacccgtaatctgtaa

SEQ ID NO: 4907 - protein, 738 aa, Adeno-associated virus
MAADGYLPDWLEDNLSEGIREWWDLKPGAPKPKANQQKQDDGRGLVLPGYKYLGPFNGLDKGEPVNAADAAALEHDKAYDQQLKAGDNPYLRYNHADAEFQERLQEDTSFGGNLGRAVFQAKKRVLEPLGLVEEAAKTAPGKKRPVEPSPQRSPDSSTGIGKKGQQPAKKRLNFGQTGDSESVPDPQPIGEPPAGPSGLGSGTMAAGGGAPMADNNEGADGVGSSSGNWHCDSTWLGDRVITTSTRTWALPTYNNHLYKQISNGTSGGSTNDNTYFGYSTPWGYFDFNRFHCHFSPRDWQRLINNNWGFRPKRLSFKLFNIQVKEVTQNEGTKTIANNLTSTIQVFTDSEYQLPYVLGSAHQGCLPPFPADVFMIPQYGYLTLNNGSQAVGRSSFYCLEYFPSQMLRTGNNFEFSYTFEDVPFHSSYAHSQSLDRLMNPLIDQYLYYLSRTQSTGGTQGTQQLLFSQAGPANMSAQAKNWLPGPCYRQQRVSTTLSQNNNSNFAWTGATKYHLNGRDSLVNPGVAMATHKDDEERFFPSSGVLMFGKQGAGRDNVDYSSVMLTSEEEIKTTNPVATEQYGVVADNLQQTNTGPIVGNVNSQGALPGMVWQNRDVYLQGPIWAKIPHTDGNCHPSPLMGGFGLKHPPPQILIKNTPVPADPPTTFSQAKLASFITQYSTGQVSVEIEWELQKENSKRWNPEIQYTSNYYKSTNVDFAVNTEGTYSEPRPIGTRYLTRNL

SEQ ID NO: 4908 - protein, 738 aa, Adeno-associated virus
MAADGYLPDWLEDNLSEGIREWWDLKPGAPKPKANQQKQDDGRGLVLPGYKYLGPFNGLDKGEPVNAADAAALEHDKAYDQQLKAGDNPYLRYNHADAEFQERLQEDTSFGGNLGRAVFQAKKRVLEPLGLVEEGAKTAPGKKRPVEPSPQRSPDSSTGIGKKGQQPARKRLNFGRTGDSESVPDPQPIGEPPAAPSSVGSGTMAAGGGAPMADNNEGADGVGSSSGNWHCDSTWLGDRVITTSTRTWALPTYNNHLYKQISNGTSGGSTNDNTYFGYSTPWGYLDFNRFHCHFSPRDWQRLINNNWGFRPKRLSFKLFNIQVKEVTQNEGTKTIANNLASTIQVFTDSEYQPPYVLGSAHQGCLPPFPADVFMIPQYGYLTLNNGSQAVGRSSFYCLEYFPSQMLRTGNNFSFSYTFEDVPFHSSYAHSQSLDRLMNPLIDQYLYYLSRTQSTGGTAGTQQLLFSRAGPSNMSAQARNWLPGPCYRQQRVSTTLSQNNNSNFAWTGATKYHLNGRDSLVNPGVAMATNKDDEDRFFPSSGILMFGKQGAGKDNVDYSNVMLTSEEEIKTTNPVATEQYGVVADNLQQQNTAPTVGAVNSQGALPGMVWQNRDVYLQGPIWAKIPHTDGNFHPSPLMGGFGLKHPPPQILIKNTPVPADPPTAFNQAKLNSFIAQYSTGQVSVEIEWELQKENSKRWNPEIQYTSNYYKSTNADFAVNTEGVYSEPRPIGTRYLTRNL

SEQ ID NO: 4909 - DNA, 2217 bp, Adeno-associated virus
atggctgccgatggttatcttccagattggctcgaggacaacctctctgagggcattcgcgagtggtgggacctgaaacctggagccccgaaacccaaagccaaccagcaaaagcaggacgacggccggggtctggtgcttcctggctacaagtacctcggacccttcaacggactcgacaagggggagcccgtcaacgcggcggacgcagcggccctcgagcacgacaaggcctacgaccagcagctcaaagcgggtgacaatccgtacctgcggtataatcacgccgacgccgagtttcaggagcgtctgcaagaagatacgtcttttgggggcaacctcgggcgagcagtcttccaggccaagaagcgggttctcgaacctctcggtctggttgaggaaggcgctaagacggctcctggaaagaagagaccggtagagccgtcaccacagcgttcccccgactcctccacgggcatcggcaagaaaggccagcagcccgccagaaagagactcaatttcggtcggactggcgactcagagtcagtccccgaccctcaacctatcggagaacctccagcagcgccctctagtgtgggatctggtacaatggctgcaggcggtggcgcaccaatggcagacaataacgaaggtgccgacggagtgggtagttcctcgggaaattggcattgcgattccacatggctgggcgacagagttatcaccaccagcacccgaacctgggccctgcccacctacaacaaccacctctacaagcaaatctccaacgggacctcgggaggcagcaccaacgacaacacctactttggctacagcaccccctgggggtatcttgactttaacagattccactgccacttctcaccacgtgactggcagcgactcatcaacaacaactggggattccggcccaagagactcagcttcaagctcttcaacatccaggtcaaagaggtcacgcagaatgaaggcaccaagaccatcgccaataacctcgccagcaccatccaggtgtttacggactcggaataccagccgccgtacgtcctcggctctgcccaccagggctgcctgcctccgttcccggcggacgtcttcatgattcctcagtacggctacctgactctcaacaacggtagtcaggccgtgggacgttcctccttctactgcctggagtacttcccctctcagatgctgagaacgggcaacaacttttccttcagctacactttcgaggacgtgcctttccacagcagctacgcgcacagccagagtttggacaggctgatgaatcctctcatcgaccagtacctgtactacctgtcaagaacccagtctacgggaggcacagcgggaacccagcagttgctgttttctcgggccgggcctagcaacatgtcggctcaggccagaaactggctgcctggaccctgctacagacagcagcgcgtctccacgacactgtcgcaaaacaacaacagcaactttgcctggactggtgccaccaagtatcatctgaacggcagagactctctggtgaatccgggcgtcgccatggcaaccaacaaggacgacgaggaccgcttcttcccatccagcggcatcctcatgtttggcaagcagggagctggaaaagacaacgtggactatagcaacgtgatgctaaccagcgaggaagaaatcaagaccaccaaccccgtggccacagaacagtatggcgtggtggctgataacctacagcagcaaaacaccgctcctactgtgggggccgtcaacagccagggagccttacctggcatggtctggcagaaccgggacgtgtacctgcagggtcctatttgggccaagattcctcacacagatggcaactttcacccgtctcctttaatgggcggctttggacttaaacatccgcctcctcagatcctcatcaaaaacactcctgttcctgcggatcctccaacagcgttcaaccaggccaagctgaattctttcatcgcgcagtacagcaccggacaagtcagcgtggagatcgagtgggagctgcagaaggagaacagcaagcgctggaacccagagattcagtatacttccaactactacaaatctacaaatgcggactttgctgttaatactgagggtgtttactctgagcctcgccccattggcactcgttacctcacccgtaatctgtaa

SEQ ID NO: 4910 - DNA, 2208 bp, Adeno-associated virus
atggctgccgatggttatcttccagattggctcgaggacactctctctgaaggaataagacagtggtggaagctcaaacctggcccaccaccaccaaagcccgcagagcggcataaggacgacagcaggggtcttgtgcttcctgggtacaagtacctcggacccttcaacggactcgacaagggggagccggtcaacgaggcagacgccgcggccctcgagcacgacaaggcctacgaccggcagctcgacagcggagacaacccgtacctcaagtacaaccacgccgacgcagagtttcaggagcgccttaaagaagatacgtcttttgggggcaacctcggacgagcagtcttccaggcgaaaaagagggttcttgaacctctgggcctggttgaggagcctgttaagacggctccgggaaaaaagaggccggtagagcactctcctgtggagccagactcctcctcgggaaccggaaaagcgggccagcagcctgcaagaaaaagattaaattttggtcagactggagacgcagactccgtacctgacccccagcctctcggacagccaccagcagccccctctggtctgggatctactacaatggctacaggcagtggcgcaccaatggcagacaataacgagggtgccgatggagtgggtaattcctcaggaaattggcattgcgattcccaatggctgggcgacagagtcatcaccaccagcacccgaacctgggccctgcccacatacaacaaccacctctacaagcaaatctccagccaatcaggagccagcaacgacaaccactactttggctacagcaccccctgggggtattttgacttcaacagattccactgccacttttcaccacgtgactggcaaagactcgtcaacaacaaccggggattccggcccaaaagactcaacttcaagctctttaatattcaagtcaaagaggtcacgcagaatgacggtacgacgacgattgccaataaccttaccagcacggttcaggtgtttactgactcggagtaccagctcccgtacgtcctgggctcggcgcatcaaggatgcctcccgccgtttccagcggacgtcttcatggtcccacagtatggatacctcaccctgaacaacgggagtcaggcggtaggacgctcttccttttactgcctggagtactttccttctcagatgctgcgtactggaaacaactttcagttcagctacacttttgaagacgtgcctttccacagcagctacgctcacagccagagtctggatcggctgatgaatcctctgatcgaccagtacctgtattatctgaacaagacacaaacaaatagtggaactcttcagcagtctcggctactgtttagccaagctggaccaaccaacatgtctcttcaagctaaaaactggctgcctggaccttgctacagacagcagcgtctgtcaaaacaggcaaacgacaacaacaacagcaactttccctggactgcagctacaaagtatcatctaaatggccgggactcgttggttaatccaggaccagctatggccagtcacaaggatgacgaagaaaagtttttccccatgcatggaaccctgatatttggtaaacaaggaacaaatgccaacgacgcggatttggaaaatgtcatgattacagatgaagaagaaatcagggccaccaatcccgtggctacggagcagtacgggactgtgtcaaataatttgcaaaactcaaacactggtccaactactggaactgtcaatcaccaaggagcgttacctggtatggtgtggcaggatcgagacgtgtacctgcagggacccatttgggccaagattcctcacaccgatggacactttcatccttctccactgatgggaggttttggactcaaacacccgcctcctcagatcatgatcaaaaacactcccgttccagccaatcctcccacaaacttcagttctgccaagtttgcttctttcatcacacagtattccacgggacaggtcagcgtggagatcgagtgggagctgcagaaggagaacagcaaacgctggaatcccgaaattcagtacacttccaactacaacaagtctgttaatgtggactttactgtggacactaatggtgtgtattcagagcctcgccccattggcaccagatacctgactcgtaatctgtaa

SEQ ID NO: 4911 - protein, 735 aa, Adeno-associated virus
MAADGYLPDWLEDTLSEGIRQWWKLKPGPPPPKPAERHKDDSRGLVLPGYKYLGPFNGLDKGEPVNEADAAALEHDKAYDRQLDSGDNPYLKYNHADAEFQERLKEDTSFGGNLGRAVFQAKKRVLEPLGLVEEPVKTAPGKKRPVEHSPVEPDSSSGTGKAGQQPARKRLNFGQTGDADSVPDPQPLGQPPAAPSGLGSTTMATGSGAPMADNNEGADGVGNSSGNWHCDSQWLGDRVITTSTRTWALPTYNNHLYKQISSQSGASNDNHYFGYSTPWGYFDFNRFHCHFSPRDWQRLVNNNRGFRPKRLNFKLFNIQVKEVTQNDGTTTIANNLTSTVQVFTDSEYQLPYVLGSAHQGCLPPFPADVFMVPQYGYLTLNNGSQAVGRSSFYCLEYFPSQMLRTGNNFQFSYTFEDVPFHSSYAHSQSLDRLMNPLIDQYLYYLNKTQTNSGTLQQSRLLFSQAGPTNMSLQAKNWLPGPCYRQQRLSKQANDNNNSNFPWTAATKYHLNGRDSLVNPGPAMASHKDDEEKFFPMHGTLIFGKQGTNANDADLENVMITDEEEIRATNPVATEQYGTVSNNLQNSNTGPTTGTVNHQGALPGMVWQDRDVYLQGPIWAKIPHTDGHFHPSPLMGGFGLKHPPPQIMIKNTPVPANPPTNFSSAKFASFITQYSTGQVSVEIEWELQKENSKRWNPEIQYTSNYNKSVNVDFTVDTNGVYSEPRPIGTRYLTRNL

SEQ ID NO: 4912 - protein, 738 aa, Adeno-associated virus
MAADGYLPDWLEDNLSEGIREWWDLKPGAPKPKANQQKQDDGRGLVLPGYKYLGPFNGLDKGEPVNAADAAALEHDKAYDQQLKAGDNPYLRYNHADAEFQERLQEDTSFGGNLGRAVFQAKKRVLEPLGLVEEAAKTAPGKKRPVEPSPQRSPDSSTGIGKKGQQPAKKRLSFGQTGDSESVPDPQPIGEPPAGPSGLGSGTMAAGGGAPMADNNEGADGVGSSSGNWHCDSTWLGDRVITTSTRTWALPTYNNHLYKQISNGTSGGSTNDNTYFGYSTPWGYFDFNRFHCHFSPRDWQRLINNNWGFRPKRLSFKLFNIQVKEVTQNEGTKTIANNLTSTIQVFTDSEYQLPYVLGSAHQGCLPPFPADVFMIPQYGYLTLNNGSQAVGRSSFYCLEYFPSQMLRTGNNSEFSYTFEDVPFHSSYAHSQSLDRLMNPLIDQYLYYLSRTQSTGGTQGTQQLLFSQAGPANMSAQAKNWLPGPCYRQQRVSTTLSQNNNSNFAWTGATKYHLNGRDSLVNPGVAMATHKDDEERFFPSSGVLMFGKQGAGRDNVDYSSVMLTSEEEIKTTNPVATEQYGVVADNLQQTNTGPIVGNVNSQGALPGMVWQNRDVYLQGPIWAKIPHTDGNFHPSPLMGGFGLKHPPPQILIKNTPVPADPPTTFSQAKLASFITQYSTGQVSVEIEWELQKENSKRWNPEIQYTSNYYKSTNVDFAVNTEGTYSEPRPIGTRYLTRNL

SEQ ID NO: 4913 - DNA, 2217 bp, Adeno-associated virus
atggctgctgacggttatcttccagattggctcgaggacaacctctctgagggcattcgcgagtggtgggacctgaaacctggagcccccaagcccaaggccaaccagcagaagcaggacgacggccggggtctggtgcttcctggctacaagtacctcggacccttcaacggactcgacaagggggagcccgtcaacgcggcggacgcagcggccctcgagcacgacaaggcctacgaccagcagctcaaagcgggtgacaatccgtacctgcggtataaccacgccgacgccgagtttcaggagcgtctgcaagaagatacgtcttttgggggcaacctcgggcgagcagtcttccaggccaagaagcgggttctcgaacctctcggtctggttgaggaagctgctaagacggctcctggaaagaagagaccggtagaaccgtcacctcagcgttcccccgactcctccacgggcatcggcaagaaaggccagcagcccgctaaaaagagactgagctttggtcagactggcgactcagagtcagtccccgaccctcaaccaatcggagaaccaccagcaggcccctctggtctgggatctggtacaatggctgcaggcggtggcgctccaatggcagacaataacgaaggcgccgacggagtgggtagttcctcaggaaattggcattgcgattccacatggctgggcgacagagtcatcaccaccagcacccgaacctgggccctgcccacctacaacaaccacctctacaagcaaatatccaatgggacatcgggaggaagcaccaacgacaacacctacttcggctacagcaccccctgggggtattttgacttcaacagattccactgccacttctcaccacgtgactggcagcgactcatcaacaacaactggggattccggccaaaaagactcagcttcaagctcttcaacatccaggtcaaggaggtcacgcagaatgaaggcaccaagaccatcgccaataaccttaccagcacgattcaggtatttacggactcggaataccagctgccgtacgtcctcggctccgcgcaccagggctgcctgcctccgttcccggcggacgtcttcatgattccccagtacggctaccttacactgaacaatggaagtcaagccgtaggccgttcctccttctactgcctggaatattttccatctcaaatgctgcgaactggaaacaattctgaattcagctacaccttcgaggacgtgcctttccacagcagctacgcacacagccagagcttggaccgactgatgaatcctctcatcgaccagtacctgtactacttatccagaactcagtccacaggaggaactcaaggtacccagcaattgttattttctcaagctgggcctgcaaacatgtcggctcaggctaagaactggctacctggaccttgctaccggcagcagcgagtctctacgacactgtcgcaaaacaacaacagcaactttgcttggactggtgccaccaaatatcacctgaacggaagagactctttggtaaatcccggtgtcgccatggcaacccacaaggacgacgaggaacgcttcttcccgtcgagtggagtcctgatgtttggaaaacagggtgctggaagagacaatgtggactacagcagcgttatgctaaccagcgaagaagaaattaaaaccactaaccctgtagccacagaacaatacggtgtggtggctgacaacttgcagcaaaccaatacagggcctattgtgggaaatgtcaacagccaaggagccttacctggcatggtctggcagaaccgagacgtgtacctgcagggtcccatctgggccaagattcctcacacggacggcaacttccacccttcaccgctaatgggaggatttggactgaagcacccacctcctcagatcctgatcaagaacacgccggtacctgcggatcctccaacaacgttcagccaggcgaaattggcttccttcattacgcagtacagcaccggacaggtcagcgtggaaatcgagtgggagctgcagaaggagaacagcaaacgctggaacccagagattcagtacacttcaaactactacaaatctacaaatgtggactttgctgtcaatacagagggaacttattctgagcctcgccccattggtactcgttacctcacccgtaatctgtaa

SEQ ID NO: 4914 - protein, 738 aa, Adeno-associated virus
MAADGYLPDWLEDNLSEGIREWWDLKPGAPKPKANQQKQDDGRGLVLPGYKYLGPFNGLDKGEPVNAADAAALEHDKAYDQQLKAGDNPYLRYNHADAEFQERLQEDTSFGGNLGRAVFQAKKRVLEPLGPVEEAAKTAPGKKRPVEPPPQRSPDSSTGIGKKGQQPAKKRLNFGQTGDSESVPDPQPIGEPPAGPSGLGSGTMAAGGGAPMADNNEGADGVGSSSGNWHCDSTWLGDRVITTSTRTWALPTYNNHLYKQISNGTSGGSTNDNTYFGYSTPWGYFDFNRFHCHFSPRDWQRLINNNWGFRPKRLSFKLFNIQVKEVTQNEGTKTVANNLTSTIQVFTDSEYQLPYVLGSAHQGCLPPFPADVFMIPQYGYLTLNNGSQAVGRSSFYCLEYFPSQMLRTGNNFEFSYTFEDVPFHSSYAHSQSLDRLMNPLIDQYLYYLSRTQSTGGTQGTQQLLFSQAGPANMSAQAKNWLPGPCYRQQRVSTTLSQNNNSNFAWTGATKYHLNGRDSLVNPGVAMATHKDDEERFFPSSGVLMFGKQGAGRDNVDYSSVMLTSEEEIKTTNPVATEQYGVVADNLQQTNTGPIVGNVNSQGALPGMVWQNRDVYLQGPIWAKIPHTDGNFHPSPLMGGFGLKHPPPQILIKNTPVPADPPTTFSQAKLASFITQYSTGQVSVEIEWELQKENSKRWNPEIQYTSNYYKSTNVDFAVNTEGTYSEPRPIGTRYLTRNL

SEQ ID NO: 4915 - DNA, 2217 bp, Adeno-associated virus
atggctgctgacggttatcttccagattggctcgaggacaacctctctgagggcattcgcgagtggtgggacctgaaacctggagcccccaagcccaaggccaaccagcagaagcaggacgacggccggggtctggtgcttcctggctacaagtacctcggacccttcaacggactcgacaagggggagcccgtcaacgcggcggacgcagcggccctcgagcacgacaaggcctacgaccagcagctcaaagcgggtgacaatccgtacctgcggtataaccacgccgacgccgagtttcaggagcgtctacaagaagatacgtcttttgggggcaacctcgggcgagcagtcttccaggccaagaagcgggttctcgaacctctcggtccggttgaggaagctgctaagacggctcctggaaagaagagaccggtagaaccgccacctcagcgttcccccgactcctccacgggcatcggcaagaaaggccagcagcccgctaaaaagagactgaactttggtcagactggcgactcagagtcagtccccgaccctcaaccaatcggagaaccaccagcaggcccctctggtctgggatctggtacaatggctgcaggcggtggcgctccaatggcagacaataacgaaggcgccgacggagtgggtagttcctcaggaaattggcattgcgattccacatggctgggcgacagagtcatcaccaccagcacccgaacctgggccctgcccacctacaacaaccacctctacaagcaaatatccaatgggacatcgggaggaagcaccaacgacaacacctacttcggctacagcaccccctgggggtattttgacttcaacagattccactgccacttctcaccacgtgactggcagcgactcatcaacaacaactggggattccggccaaaaagactcagcttcaagctcttcaacatccaggtcaaggaggtcacgcagaatgaaggcaccaagaccgtcgccaataaccttaccagcacgattcaggtatttacggactcggaataccagctgccgtacgtcctcggctccgcgcaccagggctgcctgcctccgttcccggcggacgtcttcatgattccccagtacggctaccttacactgaacaatggaagtcaagccgtaggccgttcctccttctactgcctggaatattttccatctcaaatgctgcgaactggaaacaattttgaattcagctacaccttcgaggacgtgcctttccacagcagctacgcacacagccagagcttggaccgactgatgaatcctctcatcgaccagtacctgtactacttatccagaactcagtccacaggaggaactcaaggtacccagcaattgttattttctcaagctgggcctgcaaacatgtcggctcaggctaagaactggctacctggaccttgctaccggcagcagcgagtctctacgacactgtcgcaaaacaacaacagcaactttgcttggactggtgccaccaaatatcacctgaacggaagagactctttggtaaatcccggtgtcgccatggcaacccacaaggacgacgaggaacgcttcttcccgtcgagtggagtcctgatgtttggaaaacagggtgctggaagagacaatgtggactacagcagcgttatgctaaccagcgaagaagaaattaaaaccactaaccctgtagccacagaacaatacggtgtggtggctgacaacttgcagcaaaccaatacagggcctattgtgggaaatgtcaacagccaaggagccttacctggcatggtctggcagaaccgagacgtgtacctgcagggtcccatctgggccaagattcctcacacggacggcaacttccacccttcaccgctaatgggaggatttggactgaagcacccacctcctcagatcctgatcaagaacacgccggtacctgcggatcctccaacaacgttcagccaggcgaaattggcttccttcattacgcagtacagcaccggacaggtcagcgtggaaatcgagtgggagctgcagaaggagaacagcaaacgttggaacccagagattcagtacacttcaaactactacaaatctacaaatgtggactttgctgtcaatacagagggaacttattctgagcctcgccccattggtactcgttacctcacccgtaatctgtaa

SEQ ID NO: 4916 - protein, 738 aa, Adeno-associated virus
MAADGYLPDWLEDNLSEGIREWWDLKPGAPKPKANQQKQDDGRGLVLPGYKYLGPFNGLDKGEPVNAADAAALEHDKAYDQQLKAGDNPYLRYNHADAEFQERLQEDTSFGGNLGRAVFQAKKRVLEPLGLVEEAAKTAPGKKRPVEPSPQRSPDSSTGIGKKGQQPAKKRLNFGQTGDSESVPDPQPIGEPPAGPSGLGSGTMAAGGGAPMADNNEGADGVGSSSGNWHCDSTWLGDRVITTSTRTWALPTYNNHLYKQISNGTSGGSTNDNTYFGYSTPWGYFDFNRFHCHFSPRDWQRLINNNWGFRPKRLSFKLFNIQVKEVTQNEGTKTIANNLTSTIQVFTDSEYQLPYVLGSAHQGCLPPFPADVFMIPQYGYLTLNNGSQAVGRSSFYCLEYFPSQMLRTGNNFEFSYTFEDVPFHSSYAHSQSLDRLMNPLIDQYLYYLSRTQSTGGTQGTQQLLFSQAGPANMSAQAKNWLPGPCYRQQRVSTTLSQSNNSNFAWTGATKYHLNGRDSLVNPGVAMATHKDDEERFFPSSGVLMFGKQGAGRDNVDYSSVMLTSEEEIKTTNPVATEQYGVVADNLQQTNTGPIVGNVNSQGALPGMVWQNRDVYLQGPIWAKIPHTDGNFHPSPLMGGLGLKHPPPQILIKNTPVPADPPTTFSQAKLASFITQYSTGQVSVEIEWELQKENSKRWNPEIQYTSNYYKSTNVDFAVNTEGTYSEPRPIGTRYLTRNL

SEQ ID NO: 4917 - DNA, 2217 bp, Adeno-associated virus
atggctgctgacggttatcttccagattggctcgaggacaacctctctgagggcattcgcgagtggtgggacctgaaacctggagcccccaagcccaaggccaaccagcagaagcaggacgacggccggggtctggtgcttcctggctacaagtacctcggacccttcaacggactcgacaagggggagcccgtcaacgcggcggacgcagcggccctcgagcacgacaaggcctacgaccagcagctcaaagcgggtgacaatccgtacctgcggtataaccacgccgacgccgagtttcaggagcgtctgcaagaagatacgtcttttgggggcaacctcgggcgagcagtcttccaggccaagaagcgggttctcgaacctctcggtctggttgaggaagcggctaagacggctcctggaaagaagagaccggtagaaccgtcacctcagcgttcccccgactcctccacgggcatcggcaagaaaggccagcagcccgctaaaaagagactgaactttggtcagactggcgactcagagtcagtccccgaccctcaaccaatcggagaaccaccagcaggcccctctggtctgggatctggtacaatggctgcaggcggtggcgctccaatggcagacaataacgaaggcgccgacggagtgggtagttcctcaggaaattggcattgcgattccacatggctgggcgacagagtcatcaccaccagcacccgaacctgggccctgcccacctacaacaaccacctctacaagcaaatatccaatgggacatcgggaggaagcaccaacgacaacacctacttcggctacagcaccccctgggggtattttgacttcaacagattccactgccacttctcaccacgtgactggcagcgactcatcaacaacaactggggattccggccaaaaagactcagcttcaagctcttcaacatccaggtcaaggaggtcacgcagaatgaaggcaccaagaccatcgccaataaccttaccagcacgattcaggtatttacggactcggaataccagctgccgtacgtcctcggctccgcgcaccagggctgcctgcctccgttcccggcggacgtcttcatgattccccagtacggctaccttacactgaacaatggaagtcaagccgtaggccgttcctccttctactgcctggaatattttccatctcaaatgctgcgaactggaaacaattttgaattcagctacaccttcgaggacgtgcctttccacagcagctacgcacacagccagagcttggaccgactgatgaatcctctcatcgaccagtacctgtactacttatccagaactcagtccacaggaggaactcaaggtacccagcaattgttattttctcaagctgggcctgcaaacatgtcggctcaggctaagaactggctacctggaccttgctaccggcagcagcgagtctctacgacactgtcgcaaagcaacaacagcaactttgcttggactggtgccaccaaatatcacctgaacggaagagactctttggtaaatcccggtgtcgccatggcaacccacaaggacgacgaggaacgcttcttcccgtcgagtggagtcctgatgtttggaaaacagggtgctggaagagacaatgtggactacagcagcgttatgctaaccagcgaagaagaaattaaaaccactaaccctgtagccacagaacaatacggtgtggtggctgacaacttgcagcaaaccaatacagggcctattgtgggaaatgtcaacagccaaggagccttacctggcatggtctggcagaaccgagacgtgtacctgcagggtcccatctgggccaagattcctcacacggacggcaacttccacccttcaccgctaatgggaggacttggactgaagcacccacctcctcagatcctgatcaagaacacgccggtacctgcggatcctccaacaacgttcagccaggcgaaattggcttccttcattacgcagtacagcaccggacaggtcagcgtggaaatcgagtgggagctgcagaaggagaacagcaaacgctggaacccagagattcagtacacttcaaactactacaaatctacaaatgtggactttgctgtcaatacagagggaacttattctgagcctcgccccattggtactcgttacctcacccgtaatctgtaa

SEQ ID NO: 4918 - protein, 737 aa, Adeno-associated virus
MAADGYLPDWLEDNLSEGIREWWDLKPGAPKPKANQQKQDDGRGLVLPGYKYLGPFNGLDKGEPVNAADAAALEHDKAYDQQLKAGDNPYPRYNHADAEFQERLQEDTPFGGNLGRAVFQAKKRVLEPLGLVEEAAKTAPGKKRPVEPSPQRSPDSSTGIGKKGQQPAKKRLNFGQTGDSESVPDPQPIGEPPAGPSGLGSGTMAAGGGAPMADNNEGADGVGNASGNWHCDSTWLGDRVITTSTRTWALPTYNNHLYKQISSASTGASNDNHYFGYSTPWGYFDFNRFHCHFSPRDWQRLINNNWGFRPKRLNFKLFNIQVKEVTTNDGVTTIANNLTSTVQVFSDSEYQLPYVLGSAHQGCLPPFPADVFMIPQYGYLTLNNGSQAVGRSSFYCLEYFPSQMLRTGNNFTFSYTFEEVPLHSSYAHSQSLDRLMNPLIVQYLYYLNRTQNQSGSAQNKDLLFSRGSPAGMSVQPKNWLPGPCYRQQRVSKTKTDNNNSNFTWTGASKYNLNGRESIINPGTAMASHKDDEDKFFPMSGVMIFGKESAGASNTALDNVMITDEEEIKATNPVATERFGTVAVNFQSSSTDPATGDVHAMGALPGMVWQDRDVYLQGPIWAKIPHTDGHFHPSPLMGGFGLKNPPPQILIKNTPVPANPPAEFSATKFASFITQYSTGQVSVEIEWELQKENSKRWNPEVQYTSNYAKSASVDFTVDNNGLYTEPRPIGTRYLTRPL

SEQ ID NO: 4919 - protein, 737 aa, Adeno-associated virus
MAADGYLPDWLEDNLSEGIREWWDLKPGAPKPKANQQKQDDGRGLVLPGYKYLGPFNGLDKGEPVNAADAAALEHDKAYDQQLKAGDNPYPRYNHADAEFQERLQEDTSFGGNLGRAVFQAKKRVLEPLGLVEEAAKTAPGKKRPVEPSPQRSPDSSTGIGKKGQQPAKKRLNFGQTGDSESVPDPQPIGEPPAGPSGLGSGTMAAGGGAPMADNNEGADGVGNASGNWHCDSTWLGDRVITTSTRTWALPTYNNHLYKQISSASTGASNDNHYFGYSTPWGYFDFNRFHCHFSPRDWQRLINNNWGFRPKRLNFKLFNIQVKEVTTNDGVTTIANNLTSTVQVFSDSEYQLPYVLGSAHQGCLPPFPADVFMIPQYGYLTLNNGSQAVGRSSFYCLEYFPSQMLRTGNNFTFSYTFEEVPLHSSYAHSQSLDRLMNPLIDQYLYYLNRTQNQSGSAQNKDLLFSRGSPAGMSVQPKNWLPGPCYRQQRVSKTKTDNNNSNFTWTGASKYNLNGRESIINPGTAMASHKDDEDKFFPMSGVMIFGKESAGASNTALDNVMITDEEEIKATNPVATERFGTVAVNFQSSSTDPATGDVHAMGALPGMVWQDRDVYLQGPIWAKIPHTDGHFHPSPLMGGFGLKNPPPQILIKNTPVPANPPAEFSATKFASFITQYSTGQVSVEIEWELQKENSKRWNPEVQYTSNYAKSASVDFTVDNNGLYTEPRPIGTRYLTRPL

SEQ ID NO: 4920 - DNA, 2214 bp, Adeno-associated virus
atggctgctgacggttatcttccagattggctcgaggacaacctctctgagggcattcgcgagtggtgggacctgaaacctggagcccccaagcccaaggccaaccagcagaagcaggacgacggccggggtctggtgcttcctggctacaagtacctcggacccttcaacggactcgacaagggggagcccgtcaacgcggcggacgcagcggccctcgagcacgacaaggcctacgaccagcagctcaaagcgggtgacaatccgtacccgcggtataaccacgccgacgccgagtttcaggagcgtctgcaagaagatacgccttttgggggcaacctcgggcgagcagtcttccaggccaagaagcgggttctcgaacctctcggtctggttgaggaagctgctaagacggctcctggaaagaagagaccggtagaaccgtcacctcagcgttcccccgactcctccacgggcatcggcaagaaaggccagcagcccgctaaaaagagactgaactttggtcagactggcgactcagagtcagtccccgaccctcaaccaatcggagaaccaccagcaggcccctctggtctgggatctggtacaatggctgcaggcggtggcgctccaatggcagacaataacgaaggcgccgacggagtgggtaatgcctcaggaaattggcattgcgattccacatggctgggcgacagagtcatcaccaccagcacccgcacctgggccttgcccacctacaataaccacctctacaagcaaatctccagtgcttcaacgggggccagcaacgacaaccactacttcggctacagcaccccctgggggtattttgatttcaacagattccactgccacttttcaccacgtgactggcagcgactcatcaacaacaattggggattccggcccaagagactcaacttcaaactcttcaacatccaagtcaaggaggtcacgacgaatgatggcgtcacaaccatcgctaataaccttaccagcacggttcaagtcttctcggactcggagtaccagcttccgtacgtcctcggctctgcgcaccagggctgcctccctccgttcccggcggacgtgttcatgattccgcaatacggctacctgacgctcaacaatggcagccaagccgtgggacgttcatccttttactgcctggaatatttcccttctcagatgctgagaacgggcaacaactttaccttcagctacacctttgaggaagtgcctctccacagcagctacgcgcacagccagagcctggaccggctgatgaatcctctcatcgtccaatacctgtattacctgaacagaactcaaaatcagtccggaagtgcccaaaacaaggacttgctgttcagccgtgggtctccagctggcatgtctgttcagcccaaaaactggctacctggaccctgttatcggcagcagcgcgtttctaaaacaaaaacagacaacaacaacagcaattttacctggactggtgcttcaaaatataacctcaatgggcgtgaatccatcatcaaccctggcactgctatggcctcacacaaagacgacgaagacaagttctttcccatgagcggtgtcatgatttttggaaaagagagcgccggagcttcaaacactgcattggacaatgtcatgattacagacgaagaggaaattaaagccactaaccctgtggccaccgaaagatttgggaccgtggcagtcaatttccagagcagcagcacagaccctgcgaccggagatgtgcatgctatgggagcattacctggcatggtgtggcaagatagagacgtgtacctgcagggtcccatttgggccaaaattcctcacacagatggacactttcacccgtctcctcttatgggcggctttggactcaagaacccgcctcctcagatcctcatcaaaaacacgcctgttcctgcgaatcctccggcggagttttcagctacaaagtttgcttcattcatcacccaatactccacaggacaagtgagtgtggaaattgaatgggagctgcagaaagaaaacagcaagcgctggaatcccgaagtgcagtacacatccaattatgcaaaatctgccagcgttgattttactgtggacaacaatggactttatactgagcctcgccccattggcacccgttaccttacccgtcccctgtaa

SEQ ID NO: 4921 - protein, 736 aa, Adeno-associated virus
MAADGYLPDWLEDTLSEGIRQWWKLRPGPPPPKPAERHKDDSRGLVLPGYKYLGPFNGLDKGEPVNEADAAALEHDKAYDRQLDSGDNPYLKYNHADAEFQERLKEDTSFGGNLGRAVFQAKKRVLEPLGLVEEGAETAPGKKRPVEQSPQGPDSSSGIGKTGQQPAKKRLNFGQTGDSESVPDPQPLGEPPATPAAVGPTTMASGGGAPMADNNEGADGVGNASGNWHCDSTWLGDRVITTSTRTWALPTYNNHLYKQISSASTGASNDNHYFGYSTPWGYFDFNRFHCHFSPRDWQRLINNNWGFRPKRLNFKLFNIQVKEVTTNDGVTTIANNLTSTVQVFSDSEYQLPYVLGSAHQGCLPPFPADVFMIPQYGYLTLNNGSQAVGRSSFYCLEYFPSQMLRTGNNFTFSYTFEEVPFHSSYAHSQSLDRLMNPLIDQYLYYPNRTQNQSGSAQNKDLLFSRGSPAGMSVQPKNWLPGPCYRQQRVSKTKTDNNNSNFTWTGASKYNLNGRESIINPGTAMASHKDDEDKFFPMSGVMIFGKESAGASNTALDNVMITDEEEIKATNPVATERFGTVAVNFQSSSTDPATGDVHAMGALPGMVWQGRDVYLQGPIWAKIPHTDGHFHPSPLMGGFGLKNPPPQILIKNTPVPANPPAEFSATKFASFITQYSTGQVSVEIEWELQKENSKRWNPEVQYTSNYAKSANVDFTVDNNGLYTEPRPIGTRYLTRPL

SEQ ID NO: 4922 - DNA, 2211 bp, Adeno-associated virus
atggctgccgatggttatcttccagattggctcgaggacactctctctgaaggaataagacagtggtggaagctcagacctggcccaccaccaccaaagcccgcagagcggcataaggacgacagcaggggtcttgtgcttcctgggtacaagtacctcggacccttcaacggactcgacaagggagagccggtcaacgaggcagacgccgcggccctcgagcacgacaaagcctacgaccggcagctcgacagcggagacaacccgtacctcaagtacaaccacgccgacgcggagtttcaggagcgccttaaagaagatacgtcttttgggggcaacctcgggcgagcagtcttccaggccaagaagcgggttctcgaacctctcggtctggttgaggaaggcgctgagacggctcctggaaagaaacgtccggtagagcagtcgccacaagggccagactcctcctcgggcatcggcaagacaggccagcagcccgctaaaaagagactcaattttggtcagactggcgactcagagtcagtccccgatccacaacctctcggagaacctccagcaacccccgctgctgtgggacctactacaatggcttcaggcggtggcgcaccaatggcagacaataacgaaggcgccgacggagtgggtaatgcctcaggaaattggcattgcgattccacatggctgggcgacagagtcatcaccaccagcacccgcacctgggccttgcccacctacaataaccacctctacaagcaaatctccagtgcttcaacgggggccagcaacgacaaccactacttcggctacagcaccccctgggggtattttgatttcaacagattccactgccacttttcaccacgtgactggcagcgactcatcaacaacaattggggattccggcccaagagactcaacttcaaactcttcaacatccaagtcaaggaggtcacgacgaatgatggcgtcacaaccatcgctaataaccttaccagcacggttcaagtcttctcggactcggagtaccagcttccgtacgtcctcggctctgcgcaccagggctgcctccctccgttcccggcggacgtgttcatgattccgcaatacggctacctgacgctcaacaatggcagccaagccgtgggacgttcatccttttactgcctggaatatttcccttctcagatgctgagaacgggcaacaactttaccttcagctacacctttgaggaagtgcctttccacagcagctacgcgcacagccagagcctggaccggctgatgaatcctctcatcgaccaatacctgtattacccgaacagaactcaaaatcagtccggaagtgcccaaaacaaggacttgctgtttagccgtgggtctccagctggcatgtctgttcagcccaaaaactggctacctggaccctgttatcggcagcagcgcgtttctaaaacaaaaacagacaacaacaacagcaattttacctggactggtgcttcaaaatataacctcaatgggcgtgaatccatcatcaaccctggcactgctatggcctcacacaaagacgacgaagacaagttctttcccatgagcggtgtcatgatttttggaaaagagagcgccggagcttcaaacactgcattggacaatgtcatgattacagacgaagaggaaattaaagccactaaccctgtggccaccgaaagatttgggaccgtggcagtcaatttccagagcagcagcacagaccctgcgaccggagatgtgcatgctatgggagcattacctggcatggtgtggcaaggtagagacgtgtacctgcagggtcccatttgggccaaaattcctcacacagatggacactttcacccgtctcctcttatgggcggctttggactcaagaacccgcctcctcagatcctcatcaaaaacacgcctgttcctgcgaatcctccggcggagttttcagctacaaagtttgcttcattcatcacccaatactccacaggacaagtgagtgtggaaattgaatgggagctgcagaaagaaaacagcaagcgctggaatcccgaagtgcagtacacatccaattatgcaaaatctgccaacgttgattttactgtggacaacaatggactttatactgagcctcgccccattggcacccgttaccttacccgtcccctgtaa

SEQ ID NO: 4923 - protein, 736 aa, Adeno-associated virus
MAADGYLPDWLEDTLSEGIRQWWKLRPGPPPPKPAERHKDDSRGLVLPGYKYLGPFNGLDKGEPVNEADAAALEHDKAYDRQLDSGDNPYLKYNHADAEFQERLKEDTSFGGNLGRAVFQAKKRVLEPLGLVEEGAKTAPGKKRPVEQSPQGPDSSSGIGKTGQQPAKKRLNFGQTGDSESVPDPQPLGEPPATPAAVGPTTMASGGGAPMADNNEGADGVGNASGNWHCDSTWLGDRVITTSTRTWALPTYNNHLYKQISSASTGASNDNHYFGYSTPWGYFDFNRFHCHFSPRDWQRLINNNWGFRPKRLNFKLFNIQVKEVTTNDGVTTIANNLTSTVQVFSDSEYQLPYVLGSAHQGCLPPFPADVFMIPQYGYLTLNNGSQAVGRSSFYCLEYFPSQMLRTGNNFTFSYTFEEVPFHSSYAHSQSLDRLMNPLIDQYLYYPNRTQNQSGSAQNKDLLFSRGSPAGMSVQPKNWLPGPCYRQQRVSKTKTDNNNSNFTWTGASKYNLNGRESIINPGTAMASHKDDEDKFFPMSGVMIFGKESAGASNTALDNVMITDEEEIKATNPVATERFGTVAVNFQSSSTDPATGDVHAMGALPGMVWQGRDVYLQGPIWAKIPHTDGHFHPSPLMGGFGLKNPPPQILIKNTPVPANPPAEFSATKFASFITQYSTGQVSVEIEWELQKENSKRWNPEVQYTSNYAKSANVDFTVDNNGLYTEPRPIGTRYLTRPL

SEQ ID NO: 4924 - protein, 736 aa, Adeno-associated virus
MAADGYLPDWLEDTLSEGIRQWWKLRPGPPPPKPAERHKDDSRGLVLPGYKYLGPFNGLDKGEPVNEADAAALEHDKAYDRQLDSGDNPYLKYNHADAEFQERLKEDTSFGGNLGRAVFQAKKRVLEPLGLVEEGAKTAPGKKRPVEQSPQGPDSSSGIGKTGQQPAKKRLNFGQTGDSESVPDPQPLGEPPATPAAVGPTTMASGGGAPMADNNEGADGVGNASGNWHCDSTWLGDRVITTSTRTWALPTYNNHLYKQISSASTGASNDNHYFGYSTPWGYFDFNRFHCHFSPRDWQRLINNNWGFRPKRLNFKLFNIQVKEVTTNDGVTTIANNLTSTVQVFSDSEYQLPYVLGSAHQGCLPPFPADVFMIPQYGYLTLNNGSQAVGRSSFYCLEYFPSQMLRTGNNFTFSYTFEEVPFHSSYAHSQSLDRLMNPLIDQYLYYLNRTQNQSGSAQNKDLLFSRGSPAGMSVQPKNWLPGPCYRQQRVSKTKTDNNNSNFTWTGASKYNLNGRESIINPGTAMASHKDDEDKFFPMSGVMIFGKESAGASNTALDNVMITDEEEIKATNPVATERFGTVAVNFQSSSTDPATGDVHAMGALPGMVWQGRDVYLQGPIWAKIPHTDGHFHPSPLMGGFGLKNPPPQILIKNTPVPANPPAEFSATKFASFITQYSTGQVSVEIEWELQKENSKRWNPEVQYTSNYAKSANVDFTVDNNGLYTEPRPIGTRYLTRPL

SEQ ID NO: 4925 - protein, 736 aa, Adeno-associated virus
MAADGYLPDWLEDTLSEGIRQWWKLRPGPPPPKPAERHKDDSRGLVLPGYKYLGPFNGLDKGEPVNEADAAALEHDKAYDRQLDSGDNPYLKYNHADAEFQERLKEDTSFGGNLGRAVFQAKKRVLEPLGLVEEGAKTAPGKKRPVEQSPQGPDSSSGIGKTGQQPAKKRLNFGQTGDSESVPDPQPLGEPPATPAAVGPTTMASGGGAPMADNNEGADGVGNASGNWHCDSTWLGDRVITTSTRTWALPTYNNHLYKQISSASTGASNDNHYFGYSTPWGYFDFNRFHCHFSPRDWQRLINNNWGFRPKRLNFKLFNIQVKEVTTNDGVTTIANNLTSTVQVFSDSEYQLPYVLGSAHQGCLPPFPADVFMIPQYGYLTLNNGSQAVGRSSFYCLEYFPSQMLRTGNNFTFSYTFEEVPFHSSYAHSQSLDRLMNPLIDQYLYYLNRTQNQSGSAQNKDLLFSRGSPAGMSVQPKNWLPGPCYRQQRVSKTKTDNNNSNFTWTGASKYNLNGRESIINPGTAMASHKDDEDKFFPMSGVMIFGKESAGASNTALDNVMITDEEEIKATNPVATERFGTVAVNFQSSSTDPATGDVHAMGALPGMVWQDRDVYLQGPIWAKIPHTDGHFHPSPLMGGFGLKNPPPQILIKNTPVPANPPAEFSATKFASFITQYSTGQVSVEIEWELQKENSKRWNPEVQYTSNYAKSANVDFTVDNNGLYTEPRPIGTRYLTRPL

SEQ ID NO: 4926 - DNA, 2208 bp, Adeno-associated virus
atggctgccgatggctatcttccagattggctcgaggacactctctctgaaggaataagacagtggtggaagctcaaacctggcccaccaccaccaaagcccgcagagcggcatagggacgacagcaggggtcttgtgcttcctgggtacaagtacctcggacccttcaacggactcgacaagggagagccggtcaacgaggcagacgccgcggccctcgagcacgacaaagcctacgaccggcagctcgacagcggagacaacccgtacctcaagtacaaccacgccgacgcggagtttcaggagcgccttaaagaagatacgtcttttgggggcaacctcggacgagcagtcttccaggcgaaaaagagggttcttgaacctctgggcctggttgaggaacctgttaagacggctccgggaaaaaagaggccggtagagcactctcctgtggagccagactcctcctcgggaaccggaaaggcgggccagcagcctgcaagaaaaagattgaattttggtcagactggagacgcagactcagtacctgacccccagcctctcggacagccaccagcagccccctctggtctgggaactaatacgatggctacaggcagtggcgcaccaatggcagacaataacgagggcgccgacggagtgggtaattcctcgggaaattggcattgcgattccacatggatgggcgacagagtcatcaccaccagcacccgaacctgggccctgcccacctacaacaaccacctctacaaacaaatttccagccaatcaggagcctcgaacgacaatcactactttggctacagcaccccttgggggtattttgacttcaacagattccactgccacttttcaccacgtgactggcaaagactcatcaacaacaactggggattccgacccaagagactcaacttcaagctctttaacattcaagtcaaagaggtcacgcagaatgacggtacgacgacgattgccaataaccttaccagcacggttcaggtgtttactgactcggggtaccagctcccgtacgtcctcggctcggcgcatcaaggatgcctcccgccgttcccagcagacgtcttcatggtgccacagtatggataccccaccctgaacaacgggagtcaggcagtaggacgctcttcattttactgcctggagtactttccttctcagatgctgcgtaccggaaacaactttaccttcagctacacttttgaggacgttcctttccacagcagctacgctcacagccagagtctggaccgtctcatgaatcctctcatcgaccagtacctgtattacttgagcacaacaaacactccaagtggaaccaccacgcagtcaaggcttcagttttctcaggccggagcgagtgacattcgggaccagtctaggaactggcttcctggaccctgttaccgccagcagcgagtatcaaagacatctgcggataacaacaacagtgaatactcgtggactggagctaccaagtaccacctcaatggcagagactctctggtgaatccgggcccggccgtggcaagccacaaggacgatgaagaaaagttttttcctcagagcggggttctcatctttgggaagcaaggctcagagaaaacaaatgtggacattgaaaaggtcatgattacagacgaagaggaaatcaggacaaccaatcccgtggctacggagcagtatggttctgtatctaccaacctccagagaggcaacagacaagcagctaccgcagatgtcaacacacaaggcgttcttccaggcatggtctggcaggacagagatgtgtaccttcaggggcccatctgggcaaagattccacacacggacggacattttcacccctctcccctcatgggtggattcggacttaaacaccctcctccacagattctcatcaagaacaccccggtacctgcgaatccttcgaccaccttcagtgcggcaaagtttgcttccttcatcacacagtactccacgggacaggtcagcgtggagatcgagtgggagctgcagaaggaaaacagcaaacgctggaatcccgaaattcagtacacttccaactacaacaagtctgttaatgtggactttactgtggacactaatggcgtgtattcagagcctcgccccattggcaccagatacctgactcgtaatctgtaa

SEQ ID NO: 4927 - protein, 735 aa, Adeno-associated virus
MAADGYLPDWLEDTLSEGIRQWWKLKPGPPPPKPAERHRDDSRGLVLPGYKYLGPFNGLDKGEPVNEADAAALEHDKAYDRQLDSGDNPYLKYNHADAEFQERLKEDTSFGGNLGRAVFQAKKRVLEPLGLVEEPVKTAPGKKRPVEHSPVEPDSSSGTGKAGQQPARKRLNFGQTGDADSVPDPQPLGQPPAAPSGLGTNTMATGSGAPMADNNEGADGVGNSSGNWHCDSTWMGDRVITTSTRTWALPTYNNHLYKQISSQSGASNDNHYFGYSTPWGYFDFNRFHCHFSPRDWQRLINNNWGFRPKRLNFKLFNIQVKEVTQNDGTTTIANNLTSTVQVFTDSGYQLPYVLGSAHQGCLPPFPADVFMVPQYGYPTLNNGSQAVGRSSFYCLEYFPSQMLRTGNNFTFSYTFEDVPFHSSYAHSQSLDRLMNPLIDQYLYYLSTTNTPSGTTTQSRLQFSQAGASDIRDQSRNWLPGPCYRQQRVSKTSADNNNSEYSWTGATKYHLNGRDSLVNPGPAVASHKDDEEKFFPQSGVLIFGKQGSEKTNVDIEKVMITDEEEIRTTNPVATEQYGSVSTNLQRGNRQAATADVNTQGVLPGMVWQDRDVYLQGPIWAKIPHTDGHFHPSPLMGGFGLKHPPPQILIKNTPVPANPSTTFSAAKFASFITQYSTGQVSVEIEWELQKENSKRWNPEIQYTSNYNKSVNVDFTVDTNGVYSEPRPIGTRYLTRNL

SEQ ID NO: 4928 - DNA, 2211 bp, Adeno-associated virus
atggctgccgacggttatcttccagattggctcgaggacactctctctgaaggaataagacagtggtggaagctcaaacctggcccaccaccaccaaagcccgcagagcggcataaggacgacagcaggggtcttgtgcttcctgggtacaagtacctcggacccttcaacggactcgacaagggagagccggtcaacgaggcagacgccgcggccctcgagcacgacaaagcctacgaccggcagctcgacagcggagacaacccgtacctcaagtacaaccacgccgacgcggagtttcaggagcgccttaaagaagatacgtcttttgggggcaacctcgggcgggcagtcttccaggccaagaagcgggttctcgaacctctcggtctggttgaggaaggcgctaagacggctcctggaaagaaacgtccggtagagcagtcgccacaagagccagactccccctcgggcatcggcaagacaggccagcagcccgctaaaaagagactcaattttggtcagactggcgactcagagtcagtccccgatccacaacctctcggagaacctccagcaacccccgctgctgtgggacctactacaatggcttcaggcggtggcgcaccaatggcagacaataacgaaggcgccgacggagtgggtaatgcctcaggaaattggcactgcgattccacatggctgggcgacagagtcatcaccaccagcacccgcacctgggccttgcccacctacaataaccacctctacaagcaaatctccagtgcttcaacgggggccagcaacgacaaccactacttcggctacagcaccccctgggggtattttgatttcaacagattccactgccacttttcaccacgtgactggcagcgactcatcaacaacaattggggattccggcccaagagactcaacttcaaactcttcaacatccaagtcaaggaggtcacgacgaatgatggcgtcacaaccatcgctaataaccttaccagcacggttcaagtcttctcggactcggagtaccagcttccgtacgtcctcggctctgcgcaccagggccgcctccctccgttcccggcggacgtgttcatgattccgcaatacggctacctgacgctcaacaatggcagccaagccgtgggacgttcatcctcttactgcctggaatatttcccttctcagatgctgagaacgggcaacaactttaccttcagctacacctttgaggaagtgcctctccacagcagctgcgcgcacagccagagcctggaccggctgatgaatcctctcatcgaccaatacctgtattacctgaacagaactcaaaatcagtccggaagtgcccaaaacagggacttgctgttcagccgtgggtctccagctggcatgtctgttcagcccaaaaactggctacctggaccctgttatcggcagcagcgcgtttctaaaacaaaaacagacaacaacaacagcaattttacctggactggtgcttcaaaatataacctcaatgggcgtgaatccatcatcaaccctggcactgctatggcctcacacaaagacgacgaagacaagttctttcccatgagcggtgtcatgatttttggaaaagagagcgccggagcttcaaacactgcattggacaatgtcatgattacagacgaagaggaaattaaagccactaaccctgtggccaccgaaagatttgggaccgtggcagtcaatttccagagcagcagcacagaccctgcgaccggagatgtgcatgctatgggagcattacctggcatggtgtggcaagatagagacgtgtacctgcagggtcccatttgggccaaaattcctcacacagatggacactttcacccgtctcctcttatgggcggctttggactcaagaacccgcctcctcagatcctcatcaaaaacacgcctgttcctgcgaatcctccggcggagttttcagctacaaagtttgcttcattcatcacccaatactccgcaggacaagtgagtgtggaaattgaatgggagctgcagaaagaaaacagcaagcgctggaatcccgaagtgcagtacacatccaattatgcaaaatctgccaacgttgattttactgtggacaacaatggactttatactgagcctcgccccattggcacccgttaccttacccgtcccctgtaa

SEQ ID NO: 4929 - protein, 736 aa, Adeno-associated virus
MAADGYLPDWLEDTLSEGIRQWWKLKPGPPPPKPAERHKDDSRGLVLPGYKYLGPFNGLDKGEPVNEADAAALEHDKAYDRQLDSGDNPYLKYNHADAEFQERLKEDTSFGGNLGRAVFQAKKRVLEPLGLVEEGAKTAPGKKRPVEQSPQEPDSPSGIGKTGQQPAKKRLNFGQTGDSESVPDPQPLGEPPATPAAVGPTTMASGGGAPMADNNEGADGVGNASGNWHCDSTWLGDRVITTSTRTWALPTYNNHLYKQISSASTGASNDNHYFGYSTPWGYFDFNRFHCHFSPRDWQRLINNNWGFRPKRLNFKLFNIQVKEVTTNDGVTTIANNLTSTVQVFSDSEYQLPYVLGSAHQGRLPPFPADVFMIPQYGYLTLNNGSQAVGRSSSYCLEYFPSQMLRTGNNFTFSYTFEEVPLHSSCAHSQSLDRLMNPLIDQYLYYLNRTQNQSGSAQNRDLLFSRGSPAGMSVQPKNWLPGPCYRQQRVSKTKTDNNNSNFTWTGASKYNLNGRESIINPGTAMASHKDDEDKFFPMSGVMIFGKESAGASNTALDNVMITDEEEIKATNPVATERFGTVAVNFQSSSTDPATGDVHAMGALPGMVWQDRDVYLQGPIWAKIPHTDGHFHPSPLMGGFGLKNPPPQILIKNTPVPANPPAEFSATKFASFITQYSAGQVSVEIEWELQKENSKRWNPEVQYTSNYAKSANVDFTVDNNGLYTEPRPIGTRYLTRPL

SEQ ID NO: 4930 - protein, 736 aa, Adeno-associated virus
MAADGYLPDWLEDTLSEGIRQWWKLKPGPPPPKPAERHKDDSRGLVLPGYKYLGPFNGLDKGEPVNEADAAALEHDKAYDRQLDSGDNPYLKYNHADAEFQERLKEDTSFGGNLGRAVFQAKKRVLEPLGLVEEGAKTAPGKKRPVEQSPQEPDSSSGIGKTGQQPAKKRLNFGQTGDSESVPDPQPLGEPPATPAAVGPTTMASGGGAPMADNNEGADGVGNASGNWHCDSTWLGDRVITTSTRTWALPTYNNHLYKQISSASTGASNDNHYFGYSTPWGYFDFNRFHCHFSPRDWQRLINNNWGFRPKRLNFKLFNIQVKEVTTNDGVTTIANNLTSTVQVFSDSEYQLPYVLGSAHQGCLPPFPADVFMIPQYGYLTLNNGSQAVGRSSFYCLEYFPSQMLRTGNNFTFSYTFEEVPLHSSCAHSQSLDRLMNPLIDQYLYYLNRTQNQSGSAQNRDLLFSRGSPAGMSVQPKNWLPGPCYRQQRVSKTKTDNNNSNFTWTGASKYNLNGRESIINPGTAMASHKDDEDKFFPMSGVMIFGKESAGASNTALDNVMITDEEEIKATNPVATERFGTVAVNFQSSSTDPATGDVHAMGALPGMVWQDRDVYLQGPIWAKIPHTDGHFHPSPLMGGFGLKNPPPQILIKNTPVPANPPAEFSATKFASFITQYSTGQVSVEIEWELQKENSKRWNPEVQYTSNYAKSANVDFTVDNNGLYTEPRPIGTRYLTRPL

SEQ ID NO: 4931 - DNA, 2208 bp, Adeno-associated virus
atggctgccgatggctatcttccagattggctcgaggacactctctctgaaggaataagacagtggtggaagctcaaacctggcccaccaccaccaaagcccgcagagcggcatagggacgacagcaggggtcttgtgcttcctgggtacaagtacctcggacccttcaacggactcgacaagggagagccggtcaacgaggcagacgccgcggccctcgagcacgacaaagcctacgaccggcagctcgacagcggagacaacccgtacctcaagtacaaccacgccgacgcggagtttcaggagcgccttaaagaagatacgtcttttgggggcaacctcggacgagcagtcttccaggcgaaaaagagggttcttgaacctctgggcctggttggggaacctgttaagacggctccgggaaaaaagaggccggtagagcactctcctgtggagccagactcctcctcgggaaccggaaaggcgggccagcagcctgcaagaaaaagattgaattttggtcagactggagacgcagactcagtacctgacccccagcctctcggacagccaccagcagccccctctggtctgggaactaatacgatggctacaggcagtggcgcaccaatggcagacaataacgagggcgccgacggagtgggtaattcctcgggaaattggcattgcgattccacatggatgggcgacagagtcatcaccaccagcacccgaacctgggccctgcccacctacaacaaccacctctacaaacaaatttccagccaatcaggagcctcgaacgacagtcactactttggctacagcaccccttgggggtattttgacttcaacagattccactgccacttttcaccacgtgactggcaaagactcatcaacaacaactggggattccgacccaagagactcaacttcaagctctttaacattcaagtcaaagaggtcacgcagaatgacggtacgacgacgattgccaataaccttaccagcacggttcaggtgtttactgactcggagtaccagctcccgtacgtcctcggctcggcgcatcaaggatgcctcccgccgttcccagcagacgtcttcatggtgccacagtatggatacctcaccctgaacaacgggagtcaggcagtaggacgctcttcattttactgcctggagtactttccttctcagatgctgcgtaccggaaacaactttaccttcagctacacttttgaggacgttcctttccacagcagctacgctcacagccagagtctggaccgtctcatgaatcctctcatcgaccagtacctgtattacttgagcacaacaaacactccaagtggaaccaccacgcagtcaaggctccagttttctcaggccggagcgagtgacattcgggaccagtctaggaactggcttcctggaccctgttaccgccagcagcgagtatcaaagacatctgcggataacaacaacagtgaatactcgtggactggagctaccaagtaccacctcaatggcagagactctctggtgaatccgggcccggccatggcaagccacaaggacaatgaagaaaagttttttcctcagagcggggttctcatctttgggaagcaaggctcagagaaaacaaatgtggacattgaaaaggtcatgattacagacgaagaggaaatcaggacaaccaatcccgtggctacggagcagtatggttctgtatctaccaacctccagagaggcaacagacaagcagctaccgcagatgtcaacacacaaggcgttcttccaggcatggtctggcaggacagagatgtgtaccttcaggggcccatctgggcaaagattccacacacggacggacattttcacccctctcccctcatgggtggattcggacttaaacaccctcctccacagattctcatcaagaacaccccggtacctgcgaatccttcgaccaccttcagtgcggcaaagtttgcttccttcatcacacagtactccacgggacaggtcagcgtggagatcgagtgggagctgcagaaggaaaacagcaaacgctggaatcccgaaattcagtacacttccaactacaacaagtctgttaatgtggactttactgtggacactaatggcgtgtattcagagcctcgccccattggcaccagatacctgactcgtaatctgtaa

SEQ ID NO: 4932 - protein, 735 aa, Adeno-associated virus
MAADGYLPDWLEDTLSEGIRQWWKLKPGPPPPKPAERHRDDSRGLVLPGYKYLGPFNGLDKGEPVNEADAAALEHDKAYDRQLDSGDNPYLKYNHADAEFQERLKEDTSFGGNLGRAVFQAKKRVLEPLGLVGEPVKTAPGKKRPVEHSPVEPDSSSGTGKAGQQPARKRLNFGQTGDADSVPDPQPLGQPPAAPSGLGTNTMATGSGAPMADNNEGADGVGNSSGNWHCDSTWMGDRVITTSTRTWALPTYNNHLYKQISSQSGASNDSHYFGYSTPWGYFDFNRFHCHFSPRDWQRLINNNWGFRPKRLNFKLFNIQVKEVTQNDGTTTIANNLTSTVQVFTDSEYQLPYVLGSAHQGCLPPFPADVFMVPQYGYLTLNNGSQAVGRSSFYCLEYFPSQMLRTGNNFTFSYTFEDVPFHSSYAHSQSLDRLMNPLIDQYLYYLSTTNTPSGTTTQSRLQFSQAGASDIRDQSRNWLPGPCYRQQRVSKTSADNNNSEYSWTGATKYHLNGRDSLVNPGPAMASHKDNEEKFFPQSGVLIFGKQGSEKTNVDIEKVMITDEEEIRTTNPVATEQYGSVSTNLQRGNRQAATADVNTQGVLPGMVWQDRDVYLQGPIWAKIPHTDGHFHPSPLMGGFGLKHPPPQILIKNTPVPANPSTTFSAAKFASFITQYSTGQVSVEIEWELQKENSKRWNPEIQYTSNYNKSVNVDFTVDTNGVYSEPRPIGTRYLTRNL

SEQ ID NO: 4933 - protein, 737 aa, Adeno-associated virus
RMAADGYLPDWLEDNLSEGIREWWDLKPGAPKPKANQQKQDDGRGLVLPGYKYLGPFNGLDKGEPVNAADAAALEHDKAYDQQLKAGDNPYLRYNHADAEFQERLQEDTSFGGNLGRAVFQAKKRVLEPLGLVEEGAKTAPGKKRPVEQSPQEPDSSSGIGKTGQQPAKKRLNFGQTGDSESVPDPQPLGEPPATPAAVGPTTMASGGGAPMADNNEGADGVGNASGNWHCDSTWLGDRVITTSTRTWALPTYNNHLYKQISSTSTGASNDNHYFGYGTPWGYFDFNRFHCHFSPRDWQRLINNNWGFRPKRLNFKLFNIQVEEVTTNDGVTTIANNLTSTVQVFSDSEYQLPYVLGSAHQGCLPPFPADVFMIPQYGYLTLNNGSQAVGRSSFYCLEYFPSQMLRTGNNFTFSYTFEEVPFHSSYAHSQSLDRLMNPLIDQYLYYLNRTQNQSGSAQNKDLLFSRGSPAGMSVQPKNWLPGPCYRQQRVSKTKTDNNNSNFTWTGASKYNLNGRESIINPGTAVASHKDDEDKFFPMSGVMIFGKESAGASSTALDNVMITDEEEIKATNPVATERFGTVAVNFQSSSTDPATGDVHAMGALPGMVWQDRDVYLQGPIWAKIPHTDGHFHPSPLMGGFGLKNPPPQILIKNTPVPANPPAEFSATKFASFITQYSTGQVSVEIEWELQKENSKRWNPEVQYTSNYAKSANVDFTVDNNGLYTEPRPIGTRYLTRPL

SEQ ID NO: 4934 - protein, 736 aa, Adeno-associated virus
MAADGYLPDWLEDNLSEGIREWWDLKPGAPKPKANQQKQDDGRGLVLPGYKYLGPFNGLDKGEPVNAADAAALEHDKAYDQQLKAGDNPYLRYNHADAEFQERLQEDTSFGGNLGRAVFQAKKRVLEPLGLVEEGAKTAPGKKRPVEQSPQEPDSSSGIGKTGQQPAKKRLNFGQTGDSESVPDPQPLGEPPATPAAVGPTTMASGGGAPMADNNEGADGVGNASGNWHCDSTWLGDRVITTSTRTWALPTYNNHLYKQISSTSTGASNDNHYFGYGTPWGYFDFNRFHCHFSPRDWQRLINNNWGFRPKRLNFKLFNIQVEEVTTNDGVTTIANNLTSTVQVFSDSEYQLPYVLGSAHQGCLPPFPADVFMIPQYGYLTLNNGSQAVGRSSFYCLEYFPSQMLRTGNNFTFSYTFEEVPFHSSYAHSQSLDRLMNPLIDQYLYYLNRTQNQSGSAQNKDLLFSRGSPAGMSVQPKNWLPGPCYRQQRVSKTKTDNNNSNFTWTGASKYNLNGRESIINPGTAVASHKDDEDKFFPMSGVMIFGKESAGASSTALDNVMITDEEEIKATNPVATERFGTVAVNFQSSSTDPATGDVHAMGALPGMVWQDRDVYLQGPIWAKIPHTDGHFHPSPLMGGFGLKNPPPQILIKNTPVPANPPAEFSATKFASFITQYSTGQVSVEIEWELQKENSKRWNPEVQYTSNYAKSANVDFTVDNNGLYTEPRPIGTRYLTRPL

SEQ ID NO: 4935 - DNA, 2211 bp, Adeno-associated virus
atggctgccgatggttatcttccagattggctcgaggacaacctctctgagggcattcgcgagtggtgggacttgaaacctggagccccgaagcccaaagccaaccagcaaaagcaggacgacggccggggtctggtgcttcctggctacaagtacctcggacccttcaacggactcgacaagggggagcccgtcaacgcggcggacgcagcggccctcgagcacgacaaggcctacgaccagcagctcaaagcgggtgacaatccgtacctgcggtataaccacgccgacgccgagtttcaggagcgtctgcaagaagatacgtcttttgggggcaacctcgggcgagcagtcttccaggccaagaagcgggttctcgaacctctcggtctggttgaggaaggcgctaagacggctcctggaaagaaacgtccggtagagcagtcgccacaagagccagactcctcctcgggcatcggcaagacaggccagcagcccgctaaaaagagactcaattttggccagactggcgactcagagtcagtccccgatccacaacctctcggagaacctccagcaacccccgctgctgtgggacctactacaatggcttcaggcggtggcgcaccaatggcagacaataacgaaggcgccgacggagtgggtaatgcctcaggaaattggcattgcgattccacatggctgggcgacagagtcatcaccaccagcacccgcacctgggccttgcccacctacaataaccacctctacaagcaaatctccagtacttcaacgggggccagcaacgacaaccactacttcggctacggcaccccctgggggtattttgatttcaacagattccactgccacttttcaccacgtgactggcagcgactcatcaacaacaattggggattccggcccaagagactcaacttcaaactcttcaacatccaagtcgaggaggtcacgacgaatgatggcgtcacaaccatcgctaataaccttaccagcacggttcaagtcttctcggactcggagtaccagcttccgtacgtcctcggctctgcgcaccagggctgcctccctccgttcccggcggacgtgttcatgattccgcaatacggctacctgacgctcaacaatggcagccaagccgtgggacgttcatccttttactgcctggaatatttcccttctcagatgctgagaacgggcaacaactttaccttcagctacacctttgaggaagtgcctttccacagcagctacgcgcacagccagagcctggaccggctgatgaatcctctcatcgaccaatacctgtattacctgaacagaacacaaaatcagtccggaagtgcccaaaacaaggacttgctgtttagccgtgggtctccagctggcatgtctgttcagcccaaaaactggctacctggaccctgttatcggcagcagcgcgtttctaaaacaaaaacagacaacaacaacagcaattttacctggactggtgcttcaaaatataacctcaatgggcgtgaatccatcatcaaccctggcaccgctgtggcctcacacaaagacgacgaagacaagttctttcccatgagcggtgtcatgatttttggaaaagagagcgccggagcttcaagcactgcattggacaatgtcatgattacagacgaagaggaaattaaagccactaaccctgtggccaccgaaagatttgggaccgtggcagtcaatttccagagcagcagcacagaccctgcgaccggagatgtgcatgctatgggagcattacctggcatggtgtggcaagatagagacgtgtacctgcagggtcccatttgggccaaaattcctcacacagatggacactttcacccgtctcctcttatgggcggctttggactcaagaacccgcctcctcagatcctcatcaaaaacacgcctgttcctgcgaatcctccggcggagttttcagctacaaagtttgcttcattcatcacccaatactccacaggacaagtgagtgtggaaattgaatgggagctgcagaaagaaaacagcaagcgctggaatcccgaagtgcagtacacatccaattatgcaaaatctgccaacgttgattttactgtggacaacaatggactttatactgagcctcgccccattggcacccgttaccttacccgtcccctgtaa

SEQ ID NO: 4936 - protein, 737 aa, Adeno-associated virus
RMAADGYLPDWLEDNLSEGIREWWDLKPGAPKPKANQQKQDDGRGLVLPGYKYLGPFNGLDKGEPVNAADAAALEHDKAYDQQLKAGDNPYLRYNHADAEFQERLQEDTSFGGNLGRAVFQAKKRVLEPLGLVEEGAKTAPGKKRPVEQSPQEPDSSSGIGKTGQQPAKKRLNFGQTGDSESVPDPQPLGEPPATPAAVGPTTMASGGGAPMADNNEGADGVGNASGNWHCDSTWLGDRVITTSTRTWALPTYNNHLYKQISSTSTGASNDNHYFGYSTPWGYFDFNRFHCHFSPRDWQRLINNNWGFRPKRLNFKLFNIQVEEVTTNDGVTTIANNLTSTVQVFSDSEYQLPYVLGSAHQGCLPPFPADVFMIPQYGYLTLNNGSQAVGRSSFYCLEYFPSQMLRTGNNFTFSYTFEEVPFHSSYAHSQSLDRLMNPLIDQYLYYLNRTQNQSGSAQNKDLLFSRGSPAGMSVQPKNWLPGPCYRQQRVSKTKTDNNNSNFTWTGASKYNLNGRESIINPGTAVASHKDDEDKFFPMSGVMIFGKESAGASSTALDNVMITDEEEIKATNPVATERFGTVAVNFQSSSTDPATGDVHAMGALPGMVWQDRDVYLQGPIWAKIPHTDGHFHPSPLMGGFGLKNPPPQILIKNTPVPANPPAEFSATKFASFITQYSTGQVSVEIEWELQKENSKRWNPEVQYTSNYAKSANVDFTVDNNGLYTEPRPIGTRYLTRPL

SEQ ID NO: 4937 - protein, 737 aa, Adeno-associated virus
RMAADGYLPDWLEDNLSEGIREWWDLKPGAPKPKANQQKQDDGRGLVLPGYKYLGPFNGLDKGEPVNAADAAALEHDKAYDQQLKAGDNPYLRYNHADAEFQERLQEDTSFGGNLGRAVFQAKKRVLEPLGLVEEGAKTAPGKKRPVEQSPQEPDSSSGIGKTGQQPAKKRLNFGQTGDSESVPDPQPLGEPPATPAAVGPTTMASGGGAPMADNNEGADGVGNASGNWHCDSTWLGDRVITTSTRTWALPTYNNHLYKQISSTSTGASNDNHYFGYSTPWGYFDFNRFHCHFSPRDWQRLINNNWGFRPKRLNFKLFNIQVKEVTTNDGVTTIANNLTSTVQVFSDSEYQLPYVLGSAHQGCLPPFPADVFMIPQYGYLTLNNGSQAVGRSSFYCLEYFPSQMLRTGNNFTFSYTFEEVPFHSSYAHSQSLDRLMNPLIDQYLYYLNRTQNQSGSAQNKDLLFSRGSPAGMSVQPKNWLPGPCYRQQRVSKTKTDNNNSNFTWTGASKYNLNGRESIINPGTAVASHKDDEDKFFPMSGVMIFGKESAGASSTALDNVMITDEEEIKATNPVATERFGTVAVNFQSSSTDPATGDVHAMGALPGMVWQDRDVYLQGPIWAKIPHTDGHFHPSPLMGGFGLKNPPPQILIKNTPVPANPPAEFSATKFASFITQYSTGQVSVEIEWELQKENSKRWNPEVQYTSNYAKSANVDFTVDNNGLYTEPRPIGTRYLTRPL

SEQ ID NO: 4938 - protein, 737 aa, Adeno-associated virus
RMAADGYLPDWLEDNLSEGIREWWDLKPGAPKPKANQQKQDDGRGLVLPGYKYLGPFNGLDKGEPVNAADAAALEHDKAYDQQLKAGDNPYLRYNHADAEFQERLQEDTSFGGNLGRAVFQAKKRVLEPLGLVEEGAKTAPGKKRPVEQSPQEPDSSSGIGKTGQQPAKKRLNFGQTGDSESVPDPQPLGEPPATPAAVGPTTMASGGGAPMADNNEGADGVGNASGNWHCDSTWLGDRVITTSTRTWALPTYNNHLYKQISSTSTGASNDNHYFGYSTPWGYFDFNRFHCHFSPRDWQRLINNNWGFRPKRLNFKLFNIQVKEVTTNDGVTTIANNLTSTVQVFSDSEYQLPYVLGSAHQGCLPPFPADVFMIPQYGYLTLNNGSQAVGRSSFYCLEYFPSQMLRTGNNFTFSYTFEEVPFHSSYAHSQSLDRLMNPLIDQYLYYLNRTQNQSGSAQNKDLLFSRGSPAGMSVQPKNWLPGPCYRQQRVSKTKTDNNNSNFTWTGASKYNLNGRESIINPGTAVASHKDDEDKFFPMSGVMIFGKESAGANSTALDNVMITDEEEIKATNPVATERFGTVAVNFQSSSTDPATGDVHAMGALPGMVWQDRDVYLQGPIWAKIPHTDGHFHPSPLMGGFGLKNPPPQILIKNTPVPANPPAEFSATKFASFITQYSTGQVSVEIEWELQKENSKRWNPEVQYTSNYAKSANVDFTVDNNGLYTEPRPIGTRYLTRPL

SEQ ID NO: 4939 - DNA, 2208 bp, Adeno-associated virus
atggctgccgatggttatcttccagattggctcaaggacactctctctgaaggaataagacagtggtggaagctcaaacctggcccaccaccaccaaagcccgcagagcggcataaggacgacagcgggggtcttgtgcttcctgggtacaagtacctcggacccttcaacggactcgacaagggagagccggtcaacgaggcagacgccgcggccctcgagtacgacaaggcctacgaccggcagctcgacagcggagacaacccgtacctcaagtacaaccacgccgacgcggagtttcaggagcgccttaaagaagatacgtcttttgggggcaacctcggacgagcagtcttccaggcgaaaaagagggttcttgaacctctgggcctggttgaggaacctgttaagacggctccgggaaaaaagaggccggtagagcactctcctgtggagccagactcctcctcgggaacaggaaaagcgggccagcagcctgcgagaaagagattgaattttggtcagactggagacgcagactccgtacctgacccccagcctctcggacagccaccagcagccccctctggtctgggaactaatacgatggctacaggcagtggcgcaccaatggcagacaataacgagggcgccgacggagtgggtaattcctcgggaagttggcattgcgattccacatggatgggcgacagagtcatcaccaccagcacccgaacctgggctctgcccacctacaacaaccatctgtacaagcagatctccagccaatcaggagccagcaacgacaaccactactttggctacagcaccccttgggggtattttgacttcaacagattccactgccacttttcaccacgtgactggcaaagactcatcaacaacaactggggattccggcccaagagactcaacttcaagctctttaacattcaagtcaaggaggtcacgcagaatgacggtacgacgacgattgccaataaccttaccagcacggttcaggtgtttactgactcggagtaccagctcccgtacgtccccggctcggcgcatcaaggatgcctcccgccgttcccagcagacgtcttcatggtgccacagtatggatacctcaccctgaacaacgggagtcaggcagtaggacgctcttcattttactgcctggagtactttccttctcagatgcttcgtaccggaaacaactttaccttcagctacacctttgaggatgttcctttccacagcagctacgctcacagccagagtttggaccgtctcatgaatcctctcatcgaccagtacctgtattacttgagcagaacaaacactccaagcggaaccaccacgcagtccaggcttcagttttctcaggccggagcaagtgacattcgggaccagtctaggaactggcttcctggaccctgttaccgccagcagcgagtatcaaagacagctgcggacaacaacaacagtgaatactcgtggactggagctaccaagtaccacctcaatggcagagactctctggtgaatccgggcccggccatggccagccacaaggacgatgaagaaaagttttttcctcaaagcggggttctcatctttgggaagcaaggctcagagaaaacaaatgtggacattgaaaaggtcatgattacagacgaagaggaaatcagaaccaccaatcccgtggccacggagcagtatggttctgtatctaccaacctccagagcggcaacacacaagcagctactgcagatgtcaacacacaaggcgttcttccaggcatggtctggcaggacagagacgtgcacctgcaggggcctatctgggcaaagattccacacacggacggacattttcacccctctcccctcatgggcggatttggacttaaacaccctcctccacagattctcatcaagaacaccccggtacctgcaaatccttcgaccaccttcagtgcggcaaagtttgcttccttcatcacacagtattccacagggcaggtcagcgtggagatcgagtgggagctgcagaaggagaacagcaaacgctggaaccccgagatccagtacacttccaactacaacaaatctgttaatgtggactttactgtggacactaatggtgtgtattcagagcctcgccccattggcaccagatacctgactcgtaatctgtaa

SEQ ID NO: 4940 - protein, 735 aa, Adeno-associated virus
MAADGYLPDWLKDTLSEGIRQWWKLKPGPPPPKPAERHKDDSGGLVLPGYKYLGPFNGLDKGEPVNEADAAALEYDKAYDRQLDSGDNPYLKYNHADAEFQERLKEDTSFGGNLGRAVFQAKKRVLEPLGLVEEPVKTAPGKKRPVEHSPVEPDSSSGTGKAGQQPARKRLNFGQTGDADSVPDPQPLGQPPAAPSGLGTNTMATGSGAPMADNNEGADGVGNSSGSWHCDSTWMGDRVITTSTRTWALPTYNNHLYKQISSQSGASNDNHYFGYSTPWGYFDFNRFHCHFSPRDWQRLINNNWGFRPKRLNFKLFNIQVKEVTQNDGTTTIANNLTSTVQVFTDSEYQLPYVPGSAHQGCLPPFPADVFMVPQYGYLTLNNGSQAVGRSSFYCLEYFPSQMLRTGNNFTFSYTFEDVPFHSSYAHSQSLDRLMNPLIDQYLYYLSRTNTPSGTTTQSRLQFSQAGASDIRDQSRNWLPGPCYRQQRVSKTAADNNNSEYSWTGATKYHLNGRDSLVNPGPAMASHKDDEEKFFPQSGVLIFGKQGSEKTNVDIEKVMITDEEEIRTTNPVATEQYGSVSTNLQSGNTQAATADVNTQGVLPGMVWQDRDVHLQGPIWAKIPHTDGHFHPSPLMGGFGLKHPPPQILIKNTPVPANPSTTFSAAKFASFITQYSTGQVSVEIEWELQKENSKRWNPEIQYTSNYNKSVNVDFTVDTNGVYSEPRPIGTRYLTRNL

SEQ ID NO: 4941 - DNA, 2208 bp, Adeno-associated virus
atggctgccgatggttatcttccagattggctcgaggacactctctctgaaggaataagacagtggtggaagctcaaacctggcccaccaccaccaaagcccgcagagcggcataaggacgacagcaggggtcttgtgcttcctgggtacaagtacctcggacccttcaacggactcgacaagggggagccggtcaacgaggcagacgccgcggccctcgagcacgacaaggcctacgaccggcagctcgacagcggagacaacccgtacctcaagtacaaccacgccgacgcagagtttcaggagcgccttaaagaagatacgtcttttgggggcaacctcggacgagcagtcttccaggcgaaaaagagggttcttgaacctctgggcctggttgaggaacctgttaagacggctccgggaaaaaagaggccggtagagcactctcctgtggagccagactcctcctcgggaaccggaaaagcgggccagcagcctgcaagaaaaagattaaattttggtcagactggagacgcagactccgtacctgacccccagcctctcggacagccaccagcagccccctctggtctgggatctactacaatggctacaggcagtggcgcaccaatggcagacaataacgagggtgccgatggagtgggtaattcctcaggaaattggcattgcgattcccaatggctgggcgacagagtcatcaccaccagcacccgaacctgggccctgcccacatacaacaaccacctctacaagcaaatctccagccaatcaggagccagcaacgacaaccactactttggctacagcaccccctgggggtattttgacttcaacagattccactgccacttttcaccacgtgactggcaaagactcatcaacaacaactggggattccggcccaaaagactcaacttcaagctctttaatattcaagtcaaagaggtcacgcagaatgacggtacgacgacgattgccaataaccttaccagcacggttcaggtgtttactgactcggagtaccagctcccgtacgtcctgggctcggcgcatcaaggatgcctcccgccgtttccagcggacgtcttcatggtcccacagtatggatacctcaccctgaacaacgggagtcaggcggtaggacgctcttccttttactgcctggagtactttccttctcagatgctgcgtactggaaacaactttcagttcagctacacttttgaagacgtgcctttccacagcagctacgctcacagccagagtctggatcggctgatgaatcctctgatcgaccagtacctgtattatctgaacaagacacaaacaaatagtggaactcttcagcagtctcggctactgtttagccaagctggaccaaccaacatgtctcttcaagctaaaaactggctgcctggaccttgctacagacagcagcgtctgtcaaaacaggcaaacgacaacaacaacagcaactttccctggactgcagctacaaagtatcatctaaatggccgggactcgttggttaatccaggaccagctatggccagtcgcaaggatgacgaagaaaagtttttccccatgcatggaaccctgatatttggtaaacaaggaacaaatgccaacgacgcggatttggaaaatgtcatgattacagatgaagaagaaatcagggccaccaatcccgtggctacggagcagtacgggactgtgtcaaataatttgcaaaactcaaacactggtccaactactggaactgtcaatcaccaaggagcgttacctggtatggtgtggcaggatcgagacgtgtacctgcagggacccatttgggccaagattcctcacaccgatggacactttcatccttctccactgatgggaggttttggactcaaacacccgcctcctcagatcatgatcaaaaacactcccgttccagccaatcctcccacaaacttcagttctgccaagtttgcttctttcatcacacagtattccacgggacaggtcagcgtggagatcgagtgggagctgcagaaggagaacagcaaacgctggaatcccgaaattcagtacacttccaactacaacaagtctgttaatgtggactttactgtggacactaatggtgtgtattcagagcctcgccccattggcaccagatacctgactcgtaatctgtaa

SEQ ID NO: 4942 - protein, 735 aa, Adeno-associated virus
MAADGYLPDWLEDTLSEGIRQWWKLKPGPPPPKPAERHKDDSRGLVLPGYKYLGPFNGLDKGEPVNEADAAALEHDKAYDRQLDSGDNPYLKYNHADAEFQERLKEDTSFGGNLGRAVFQAKKRVLEPLGLVEEPVKTAPGKKRPVEHSPVEPDSSSGTGKAGQQPARKRLNFGQTGDADSVPDPQPLGQPPAAPSGLGSTTMATGSGAPMADNNEGADGVGNSSGNWHCDSQWLGDRVITTSTRTWALPTYNNHLYKQISSQSGASNDNHYFGYSTPWGYFDFNRFHCHFSPRDWQRLINNNWGFRPKRLNFKLFNIQVKEVTQNDGTTTIANNLTSTVQVFTDSEYQLPYVLGSAHQGCLPPFPADVFMVPQYGYLTLNNGSQAVGRSSFYCLEYFPSQMLRTGNNFQFSYTFEDVPFHSSYAHSQSLDRLMNPLIDQYLYYLNKTQTNSGTLQQSRLLFSQAGPTNMSLQAKNWLPGPCYRQQRLSKQANDNNNSNFPWTAATKYHLNGRDSLVNPGPAMASRKDDEEKFFPMHGTLIFGKQGTNANDADLENVMITDEEEIRATNPVATEQYGTVSNNLQNSNTGPTTGTVNHQGALPGMVWQDRDVYLQGPIWAKIPHTDGHFHPSPLMGGFGLKHPPPQIMIKNTPVPANPPTNFSSAKFASFITQYSTGQVSVEIEWELQKENSKRWNPEIQYTSNYNKSVNVDFTVDTNGVYSEPRPIGTRYLTRNL

SEQ ID NO: 4943 - DNA, 2208 bp, Adeno-associated virus
atggctgccgatggttatcttccagattggctcgaggacactctctctgaaggaataagacagtggtggaagctcaaacctggcccaccaccaccaaagcccgcagagcggcataaggacgacagcaggggtcttgtgcttcctgggtacaagtacctcggacccttcaacggactcgacaagggagagccggtcaacgaggcagacgccgcggccctcgagcacgacaaagcctacgaccggcagctcgacagcggagacaacccgtacctcaagtacaaccacgccgacgcggagtttcaggagcgccttaaagaagatacgtcttttgggggcaacctcggacgagcagtcttccaggcgaaaaagagggttcttgaacctctgggcctggttggggaacctgtcaagacggctccaggaaaaaagaggccggtagagcactctcctgtggagccagactcctcctcgggaaccggaaaggcgggccagcagcctgcaagaaaaagattgaattttggtcagactggagacgcagactcagtacctgacccccagcctctcggacagccaccagcagccccctctggtctgggaactaatacgatggctacaggcagtggcgcaccaatggcagacaataacgagggcgccgacggagtgggtaattcctcgggaaattggcattgcgattccacatggatgggcgacagagtcatcaccaccagcacccgaacctgggccctgcccacctacaacaaccacctctacaaacaaatttccagccaatcaggagcctcgaacgacaatcactactttggctacagcaccccttgggggtattttgacttcaacagattccactgccacttttcaccacgtgactggcaaagactcatcaacaacaactggggattccgacccaagagactcaacttcaagctctttaacattcaagtcaaagaggtcacgcagaatgacggtacgacgacgattgccaataaccttaccagcacggttcaggtgtttactgactcggagtaccagctcccgtacgtcctcggctcggcgcatcaaggatgcctcccgccgttcccagcagacgtcttcatggtgccacagtatggatacctcaccctgaacaacgggagtcaggcagtaggacgctcttcattttactgcctggagtactttccttctcagatgctgcgtaccggaaacaactttaccttcagctacacttttgaggacgttcctttccacagcggctacgctcacagccagagtctggaccgtctcatgaatcctctcatcgaccagtacctgtattacttgagcacaacaaacactccaagtggaaccaccacgcagtcaaggcttcagttttctcaggccggagcgagtgacattcgggaccagtctaggaactggcttcctggaccctgttaccgccagcagcgagtatcaaagacatctgcggataacaacaacagtgaatactcgtggactggagctaccaagtaccacctcaatggcagagactctctggtgaatccgggcccggccatggcaagccacaaggacaatgaagaaaagttttttcctcagagcggggttctcatctttgggaagcaaggctcagagaaaacaaatgtggacattgaaaaggtcatgattacagacgaagaggaaatcaggacaaccaatcccgtggctacggagcagtacggttctgtatctaccaacctccagagaggcaacagacaagcagctaccgcagatgtcaacacacaaggcgttcttccaggcatggtctggcaggacagagatgtgtaccttcaggggcccatctgggcaaagattccacacacggacggacattttcacccctctcccctcatgggtggattcggacttaaacaccctcctccacagattctcatcaagaacaccccggtacctgcgaatccttcgaccaccttcagtgcggcaaagtttgcttccttcatcacacagtactccacgggacaggtcagcgtggagatcgagtgggagctgcagaaggaaaacagcaaacgctggaatcccgaaattcagtacacttccaactacaacaagtctgttaatgtggactttactgtggacactaatggcgtgtattcagagcctcgccccattggcaccagatacctgactcgtaatctgtaa

SEQ ID NO: 4944 - protein, 735 aa, Adeno-associated virus
MAADGYLPDWLEDTLSEGIRQWWKLKPGPPPPKPAERHKDDSRGLVLPGYKYLGPFNGLDKGEPVNEADAAALEHDKAYDRQLDSGDNPYLKYNHADAEFQERLKEDTSFGGNLGRAVFQAKKRVLEPLGLVGEPVKTAPGKKRPVEHSPVEPDSSSGTGKAGQQPARKRLNFGQTGDADSVPDPQPLGQPPAAPSGLGTNTMATGSGAPMADNNEGADGVGNSSGNWHCDSTWMGDRVITTSTRTWALPTYNNHLYKQISSQSGASNDNHYFGYSTPWGYFDFNRFHCHFSPRDWQRLINNNWGFRPKRLNFKLFNIQVKEVTQNDGTTTIANNLTSTVQVFTDSEYQLPYVLGSAHQGCLPPFPADVFMVPQYGYLTLNNGSQAVGRSSFYCLEYFPSQMLRTGNNFTFSYTFEDVPFHSGYAHSQSLDRLMNPLIDQYLYYLSTTNTPSGTTTQSRLQFSQAGASDIRDQSRNWLPGPCYRQQRVSKTSADNNNSEYSWTGATKYHLNGRDSLVNPGPAMASHKDNEEKFFPQSGVLIFGKQGSEKTNVDIEKVMITDEEEIRTTNPVATEQYGSVSTNLQRGNRQAATADVNTQGVLPGMVWQDRDVYLQGPIWAKIPHTDGHFHPSPLMGGFGLKHPPPQILIKNTPVPANPSTTFSAAKFASFITQYSTGQVSVEIEWELQKENSKRWNPEIQYTSNYNKSVNVDFTVDTNGVYSEPRPIGTRYLTRNL

SEQ ID NO: 4945 - DNA, 2208 bp, Adeno-associated virus
atggctgccgatggttatcttccagattggctcgaggacactctctctgaaggaataagacagtggtggaagctcaaacctggcccaccaccaccaaagcccgcagagcggcataaggacgacagcaggggtcttgtgcttcctgggtacaagtacctcggacccttcaacggactcgacaagggagagccggtcaacgaggcagacgccgcggccctcgagcacgacaaagcctacgaccggcagctcgacagcggagacaacccgtacctcaagtacaaccacgccgacgcggagtttcaggagcgccttaaagaagatacgtcttttgggggcaacctcggacgagcagtcttccaggcgaaaaagagggttcttgaacctctgggcctggttggggaacctgttaagacggctccgggaaaaaagaggccggtagagcactctcctgtggagccagactcctcctcgggaaccggaaaggcgggccagcagcctgcaagaaaaagattgaattttggtcagactggagacgcagactcagtacctgacccccagcctctcggacagccaccagcagccccctctggtctgggaactaatacgatggctacaggcagtggcgcaccaatggcagacaataacgagggcgccgacggagtgggtaattcctcgggaaatcggcattgcgattccacatggatgggcgacagagtcatcaccaccagcacccgaacctgggccctgcccacctacaacaaccacctctacagacaaatttccagccaatcaggagcctcgaacgacaatcactactttggctacagcaccccttgggggtattttgacttcaacagattccactgccacttttcaccacgtgactggcaaagactcatcaacaacaactggggattccgacccaagagactcaacttcaagctctttaacattcaagtcaaagaggtcacgcagaatgacggtacgacgacgattgccaataaccttaccagcacggttcaggtgtttactgactcggagtaccagctcccgtacgtcctcggctcggcgcatcaaggatgcctcccgccgttcccagcagacgtcttcatggtgccacagtatggatacctcaccctgagcaacgggagtcaggcagtaggacgctcttcattttactgcccggagtactttccttctcagatgctgcgtaccggaaacaactttaccttcagctacacttttgaggacgttcctttccacagcagctacgctcacagccagagtctggaccgtctcatgaatcctctcatcgaccagtacctgtattacttgagcacaacaaacactccaagtggaaccaccacgcagtcaaggcttcagttttctcaggccggagcgagtgacattcgggaccagtctaggaactggcttcctggaccctgttaccgccagcagcgagtatcaaagacatctgcggataacaacaacagtgaatactcgtggactggagctaccaagtaccacctcaatggcagagactctctggtgaatccgggcccggccatggcaagccacaaggacaatgaagaaaagttttttcctcagagcggggttctcatctttgggaagcaaggctcagagaaaacaaatgtggacattgaaaaggtcatgattacagacgaagaggaaatcaggacaaccaatcccgtggctacggagcagtatggttctgtatctaccaacctccagagaggcaacagacaagcagctaccgcagatgtcaacacacaaggcgttcttccaggcatggtctggcaggacagagatgtgtaccttcaggggcccatctgggcaaagattccacacacggacggacattttcacccctctcccctcatgggtggattcggacctaaacaccctcctccacagattctcatcaagaacaccccggtacctgcgaatccttcgaccaccttcagtgcggcaaagtttgcttccttcatcacacagtactccacgggacaggtcagcgtggagatcgagtgggagctgcagaaggaaaacagcaaacgctggaatcccgaaattcagtacacttccaactacaacaagtctgttaatgtggactttactgtggacactaatggcgtgtattcagagcctcgccccattggcaccagatacctgactcgtaatttgtaa

SEQ ID NO: 4946 - protein, 735 aa, Adeno-associated virus
MAADGYLPDWLEDTLSEGIRQWWKLKPGPPPPKPAERHKDDSRGLVLPGYKYLGPFNGLDKGEPVNEADAAALEHDKAYDRQLDSGDNPYLKYNHADAEFQERLKEDTSFGGNLGRAVFQAKKRVLEPLGLVGEPVKTAPGKKRPVEHSPVEPDSSSGTGKAGQQPARKRLNFGQTGDADSVPDPQPLGQPPAAPSGLGTNTMATGSGAPMADNNEGADGVGNSSGNRHCDSTWMGDRVITTSTRTWALPTYNNHLYRQISSQSGASNDNHYFGYSTPWGYFDFNRFHCHFSPRDWQRLINNNWGFRPKRLNFKLFNIQVKEVTQNDGTTTIANNLTSTVQVFTDSEYQLPYVLGSAHQGCLPPFPADVFMVPQYGYLTLSNGSQAVGRSSFYCPEYFPSQMLRTGNNFTFSYTFEDVPFHSSYAHSQSLDRLMNPLIDQYLYYLSTTNTPSGTTTQSRLQFSQAGASDIRDQSRNWLPGPCYRQQRVSKTSADNNNSEYSWTGATKYHLNGRDSLVNPGPAMASHKDNEEKFFPQSGVLIFGKQGSEKTNVDIEKVMITDEEEIRTTNPVATEQYGSVSTNLQRGNRQAATADVNTQGVLPGMVWQDRDVYLQGPIWAKIPHTDGHFHPSPLMGGFGPKHPPPQILIKNTPVPANPSTTFSAAKFASFITQYSTGQVSVEIEWELQKENSKRWNPEIQYTSNYNKSVNVDFTVDTNGVYSEPRPIGTRYLTRNL

SEQ ID NO: 4947 - DNA, 2205 bp, Adeno-associated virus
atggctgccgatggttatcttccagattggctcgaggacactctctctgaaggaataagacagtggtggaagctcaaacctggcccaccaccaccaaagcccgcagagcggcataaggacgacagcaggggtcttgtgcttcctgggtacaagtacctcggacccttcaacggactcgacaagggagagccggtcaacgaggcagacgccgcggccctcgagcacgacaaggcctacgaccggcagctcgacagcggagacaacccgtacctcaagtacaaccacgccgacgcggagtttcaggagcgtcttaaagaagatacgtcttttgggggcaacctcggacgagcagtcttccaggcgaaaaagagggttcttgaacctctgggcctggttgaggaacctgttaagacggctccgggaaaaaagaggccggtagagcactctcctgcggagccagactcctcctcgggaaccggaaaagcgggccagcagcctgcaagaaaaagactgaatttcggtcagactggagacgcagactccgtacctgacccccagcctctcagacagccaccagcagcccccacaagtttgggatctactacaatggctacaggcagtggcgcaccaatggcagacaataacgagggtgccgatggagtgggtaattcctcaggaaattggcattgcgattcccaatggctgggcgacagagtcatcaccaccagcacccgaacctgggccctgcccacctacaacaaccacctttacaagcaaatctccagccaatcaggagcctcaaacgacaaccactactttggctacagcaccccctgggggtattttgacttcaacagattccactgccacttttcaccacgtgactggcaaagactcatcaacaacaactggggattccgacccaagagactcaacttcaagctctttaacattcaagtcaaagaggtcacgcagaatgacggtacgacgacgattgccaataaccttaccagcacggttcaggtgtttactgactcggagtaccagctcccgtacgtcctcggctcggcgcatcaaggatgcctcccgccgtttccagcggacgtcttcatggtcccacagtatggatacctcaccctgaacaacgggagtcaggcggtaggacgctcttccttttactgcctggagtactttccttctcagatgctgcgtactggaaacaactttcagttcagctacacttttgaagacgtgcctttccacagcagctacgctcacagccagagtttggatcggctgatgaatcctctgatcgaccagtacctgtattatctaaacagaacacaaacagctagtggaactcagcagtctcggctactgtttagccaagctggacccacaagcatgtctcttcaagctaaaaactggctgcctggaccgtgttatcgccagcagcgtttgtcaaagcaggcaaacgacaacaacaacagcaactttccctggactggagctaccaagtactacctcaatggcagagactctttggtgaacccgggcccggccatggccagccacaaggacgatgaagaaaagtttttccccatgcatggaaccctaatatttggtaaagaaggaacaaatgctaccaacgcggaattggaaaatgtcatgattacagatgaagaggaaatcaggaccaccaatcccgtggctacagagcagtacggatatgtgtcaaataatttgcaaaactcaaatactgctgcaagtactgaaactgtgaatcaccaaggagcattacctggtatggtgtggcaggatcgagacgtgtacctgcagggacccatttgggccaagattcctcacaccgatggacactttcatccttctccactgatgggaggttttggactcaaacacccgcctcctcagattatgatcaaaaacactcccgttccagccaatcctcccacaaacttcagttctgccaagtttgcttccttcatcacacagtattccacgggacaggtcagcgtggagatcgagtgggagctgcagaaggagaacagcaaacgctggaatcccgaaattcagtacacttccaactacaacaaatctgttaatgtggactttactgtggacactaatggtgtgtattcagagcctcgccccattggcaccagatacctgactcgtaatctgtaa

SEQ ID NO: 4948 - protein, 734 aa, Adeno-associated virus
MAADGYLPDWLEDTLSEGIRQWWKLKPGPPPPKPAERHKDDSRGLVLPGYKYLGPFNGLDKGEPVNEADAAALEHDKAYDRQLDSGDNPYLKYNHADAEFQERLKEDTSFGGNLGRAVFQAKKRVLEPLGLVEEPVKTAPGKKRPVEHSPAEPDSSSGTGKAGQQPARKRLNFGQTGDADSVPDPQPLRQPPAAPTSLGSTTMATGSGAPMADNNEGADGVGNSSGNWHCDSQWLGDRVITTSTRTWALPTYNNHLYKQISSQSGASNDNHYFGYSTPWGYFDFNRFHCHFSPRDWQRLINNNWGFRPKRLNFKLFNIQVKEVTQNDGTTTIANNLTSTVQVFTDSEYQLPYVLGSAHQGCLPPFPADVFMVPQYGYLTLNNGSQAVGRSSFYCLEYFPSQMLRTGNNFQFSYTFEDVPFHSSYAHSQSLDRLMNPLIDQYLYYLNRTQTASGTQQSRLLFSQAGPTSMSLQAKNWLPGPCYRQQRLSKQANDNNNSNFPWTGATKYYLNGRDSLVNPGPAMASHKDDEEKFFPMHGTLIFGKEGTNATNAELENVMITDEEEIRTTNPVATEQYGYVSNNLQNSNTAASTETVNHQGALPGMVWQDRDVYLQGPIWAKIPHTDGHFHPSPLMGGFGLKHPPPQIMIKNTPVPANPPTNFSSAKFASFITQYSTGQVSVEIEWELQKENSKRWNPEIQYTSNYNKSVNVDFTVDTNGVYSEPRPIGTRYLTRNL

SEQ ID NO: 4949 - DNA, 3160 bp, Adeno-associated virus
acccttcactaaagggactagtcctgcaggtttaaacgaattcgcccttgctgcgtcaactggaccaatgagaactttcccttcaacgactgtgtcgacaagatggtgatttggtgggaggaggggaagatgaccgccaaggtcgtggagtcggccaaagccattctcggaggaagcaaggtgcgcgtggaccagaaatgcaagtcctcggcccagatagatccgactcccgtgatcgtcacctccaacaccaacatgtgcgccgtgattgacgggaactcaacgaccttcgaacaccagcagccgttgcaagaccggatgttcaaatttgaactcacccgccgtctggatcatgactttgggaaggtcaccaagcgggaagtcaaagactttttccggtgggcaaaggatcacgtggttgaggtggagcatgaattctacgtcaaaaagggtggagccaagaaaagacccgcccctagtgacgcagatataagtgagcccaaacgggtgcgcgagtcagttgcgcagccatcgacgtcagacgcggaagcttcgatcaactacgcggacaggtaccaaaacaaatgttctcgtcacgtgggcatgaatctgatgctgtttccctgcagacaatgcgagagaatgaatcaaaattcaaatatctgcttcactcacggacagaaagactgtttagagtgctttcccgtgtcagaatctcaacctgtttctgtcgtcaaaaaggcgtatcagaaactgtgctacattcatcatatcatgggaaaggtgccagacgcttgcactgcctgcgatctggtcaatgtggatttggatgactgcatctctgaacaataaatgatttaaatcaggtatggctgccgatggttatcttccagattggctcgaggacactctctctgaaggaataagacagtggtggaagctcaaacctggcccaccaccaccaaagcccgcagagcggcataaggacgacagcaggggtcttgtgcttcctgggtacaagtacctcggacccttcaacggactcgacaagggagagccggtcaacgaggcagacgccgcggccctcgagcacgacaaggcctacgaccggcagctcgacagcggagacaacccgtacctcaagtacaaccacgccgacgcggagtttcaggagcgtcttaaagaagatacgtcttttgggggcaacctcggacgagcagtcttccaggcgaaaaagagggttcttgaacctctgggcctggttgaggaacctgttaagacggctccgggaaaaaagaggccggtagagcactctcctgcggagccagactcctcctcgggaaccggaaaagcgggccagcagcctgcaagaaaaagactgaatttcggtcagactggagacgcagactccgtacctgacccccagcctctcagacagccaccagcagcccccacaagtttgggatctactacaatggctacaggcagtggcgcaccaatggcagacaataacgagggtgccgatggagtgggtaattcctcaggaaattggcattgcgattcccaatggctgggcgacagagtcatcaccaccagcacccgaacctgggccctgcccacctacaacaaccacctttacaagcaaatctccagccaatcaggagcctcaaacgacaaccactactttggctacagcaccccctgggggtattttgacttcaacagattccactgccacttttcaccacgtgactggcaaagactcatcaacaacaactggggattccgacccaagagactcaacttcaagctctttaacattcaagtcaaagaggtcacgcagaatgacggtacgacgacgattgccaataaccttaccagcacggttcaggtgtttactgactcggagtaccagctcccgtacgtcctcggctcggcgcatcaaggatgcctcccgccgtttccagcggacgtcttcatggtcccacagtatggatacctcaccctgaacaacgggagtcaggcggtaggacgctcttccttttactgcctggagtactttccttctcagatgctgcgtactggaaacaactttcagttcagctacacttttgaagacgtgcctttccacagcagctacgctcacagccagagtttggatcggctgatgaatcctctgatcgaccagtacctgtattatctaaacagaacacaaacagctagtggaactcagcagtctcggctactgtttagccaagctggacccacaagcatgtctcttcaagctaaaaactggctgcctggaccgtgttatcgccagcagcgtttgtcaaagcaggcaaacgacaacaacaacagcaactttccctggactggagctaccaagtactacctcaatggcagagactctttggtgaacccgggcccggccatggccagccacaaggacgatgaagaaaagtttttccccatgcatggaaccctaatatttggtaaagaaggaacaaatgctaccaacgcggaattggaaaatgtcatgattacagatgaagaggaaatcaggaccaccaatcccgtggctacagagcagtacggatatgtgtcaaataatttgcaaaactcaaatactgctgcaagtactgaaactgtgaatcaccaaggagcattacctggtatggtgtggcaggatcgagacgtgtacctgcagggacccatttgggccaagattcctcacaccgatggacactttcatccttctccactgatgggaggttttggactcaaacacccgcctcctcagattatgatcaaaaacactcccgttccagccaatcctcccacaaacttcagttctgccaagtttgcttccttcatcacacagtattccacgggacaggtcagcgtggagatcgagtgggagctgcagaaggagaacagcaaacgctggaatcccgaaattcagtacacttccaactacaacaaatctgttaatgtggactttactgtggacactaatggtgtgtattcagagcctcgccccattggcaccagatacctgactcgtaatctgtaattgcttgttaatcaataaaccgtttaattcgtttcagttgaactttggtctctgcgaagggcgaattcgcggccgctaaatcaatcg

SEQ ID NO: 4950 - protein, 734 aa, Adeno-associated virus
MAADGYLPDWLEDTLSEGIRQWWKLKPGPPPPKPAERHKDDSRGLVLPGYKYLGPFNGLDKGEPVNEADAAALEHDKAYDRQLDSGDNPYLKYNHADAEFQERLKEDTSFGGNLGRAVFQAKKRVLEPLGLVEEPVKTAPGKKRPVEHSPAEPDSSSGTGKAGQQPARKRLNFGQTGDADSVPDPQPLGQPPAAPTSLGSTTMATGSGAPMADNNEGADGVGNSSGNWHCDSQWLGDRVITTSTRTWALPTYNNHLYKQISSQSGASNDNHYFGYSTPWGYFDFNRFHCRFSPRDWQRLINNNWGFRPKRLNFKLFNIQVKEVTQNDGTTTIANNLTSTVQVFTDSEYQLPYVLGSAHQGCLPPFPADVFMVPQYGYLTLNNGSQAVGRSSFYCLEYFPSQMLRTGNNFQFSYTFEDVPFHSSYAHSQGLDRLMNPLIDQYLYYLNRTQTASGTQQSRLLFSQAGPTSMSLQAKNWLPGPCYRQQRLSKQANDNNNSNFPWTGATKYHLNGGDSLVNPGPAMASHKDDEEKFFPMHGTLIFGKEGTNATNAELENVMITDEEEIRTTNPVATEQYGYVSNNLQNSNTAASTETVNHQGALPGMVWQDRDVYLRGPIWAKIPHADGHFHPSPLMGGFGLKHPPPQIMIKNTPVPANPPTNFSSAKFASFITQYSTGQVSVEIEWELQKENSKRWNPEIQYTSNYNKSVNVDFTVDTNGVYSEPRPIGTRYLTRNL

SEQ ID NO: 4951 - DNA, 3157 bp, Adeno-associated virus
ctcactaagggactagtcctgcaggtttaaacgaattcgcccttgctgcgtcaactggaccaatgagaactttcccttcaacgactgtgtcgacaagatggtgatttggtgggaggaggggaagatgaccgccaaggtcgtggagtcggccaaagccactctcggaggaagcaaggtgcgcgtggaccagaaacgcaagtcctcggcccagatagatccgactcccgtgatcgtcacctccaacaccaacatgtgcgccgtgattgacgggaactcaacgaccttcgaacaccagcagccgttgcaagaccgaatgttcaaatttgaactcacccgccgtctggatcatgacttcgggaaggtcaccaagcaggaagtcaaagactttttccggtgggcaaaggatcacgtggttgaggtggagcatgaattctacgtcaaaaagggtggagccaagaaaagacccgcccctagtgacgcagatataagtgagcccaaacgggtgcgcgagtcagttgcgcagccatcgacgtcagacgcggaagcttcgatcaactacgcggacaggtaccaaaacaaatgttctcgtcacgtgggcatgaatctgatgctgtttccctgcagacaatgcgagagaatgaatcaaaattcaaatatctgcttcactcacggacagaaagactgtttagagtgctttcccgtgtcagaatctcaacctgtttctgtcgtcaaaaaggcgtatcagaaactgtgctacattcatcatatcatgggaaaggtgccagacgcttgcactgcctgcgatctggtcaatgtggatttggatgactgcatctctgaacaataaatgatttaaatcaggtatggctgccgatggttatcttccagattggctcgaggacactctctctgaaggaataagacagtggtggaagctcaaacctggcccaccaccaccaaagcccgcagagcggcataaggacgacagcaggggtcttgtgcttcctgggtacaagtacctcggacccttcaacggactcgacaagggagagccggtcaacgaggcagacgccgcggctctcgagcacgacaaggcctacgaccggcagctcgacagcggagacaacccgtacctcaagtacaaccacgccgacgcggagtttcaggagcgtcttaaagaagatacgtcttttgggggcaacctcggacgagcagtcttccaggcgaaaaagagggttcttgaacctctgggcctggttgaggaacctgttaagacggctccgggaaaaaagaggccggtagagcactctcctgcggagccagactcctcctcgggaaccggaaaagcgggccagcagcctgcaagaaaaagactgaatttcggtcagactggagacgcagactccgtacctgacccccagcctctcggacagccaccagcagcccccacaagtttgggatctactacaatggctacaggcagtggcgcaccaatggcagacaataacgagggtgccgatggagtgggtaattcctcaggaaattggcattgcgattcccaatggctgggcgacagagtcatcaccaccagcacccgaacctgggccctgcccacctacaacaaccacctttacaagcaaatctccagccaatcaggagcctcaaacgacaaccactactttggctacagcaccccctgggggtattttgacttcaacagattccactgccgcttttcaccacgtgactggcaaagactcatcaacaacaactggggattccgacccaagagactcaacttcaagctctttaacattcaagtcaaagaggtcacgcagaatgacggtacgacgacgattgccaataaccttaccagcacggttcaggtgtttactgactcggagtaccagctcccgtacgtcctcggctcggcgcatcaaggatgcctcccgccgtttccagcggacgtcttcatggtcccacagtatggatacctcaccctgaacaacgggagtcaggcggtaggacgctcttccttttactgcctggagtactttccttctcagatgctgcgtactggaaacaactttcagttcagctacacttttgaagacgtgcctttccacagcagctacgctcacagccagggtttggatcggctgatgaatcctctgatcgaccagtacctgtattatctaaacagaacacaaacagctagtggaactcagcagtctcggctactgtttagccaagctggacccacaagcatgtctcttcaagctaaaaactggctgcctggaccgtgttatcgccagcagcgtttgtcaaagcaggcaaacgacaacaacaacagcaactttccctggactggagctaccaagtaccacctcaatggcggagactctttggtgaacccgggcccggccatggccagccacaaggacgatgaagaaaagtttttccccatgcatggaaccctaatatttggtaaagaaggaacaaatgctaccaacgcggaattggaaaatgtcatgattacagatgaagaggaaatcaggaccaccaatcccgtggctacagagcagtacggatatgtgtcaaataatttgcaaaactcaaatactgctgcaagtactgaaactgtgaatcaccaaggagcattacctggtatggtgtggcaggatcgagacgtgtacctgcggggacccatttgggccaagattcctcacgccgatggacactttcatccttctccactgatgggaggttttggactcaaacacccgcctcctcagattatgatcaaaaacactcccgttccagccaatcctcccacaaacttcagttctgccaagtttgcttccttcatcacacagtattccacgggacaggtcagcgtggagatcgagtgggagctgcagaaggagaacagcaaacgctggaatcccgaaattcagtacacttccaactacaacaaatctgttaatgtggactttactgtggacactaatggtgtgtattcagagcctcgccccattggcaccagatacctgactcgtaatctgtaattgcttgttaatcaataaaccgtttaattcgtttcagttgaactttggtctctgcgaagggcgaattcgcggccgctaaattcaattcg

SEQ ID NO: 4952 - protein, 734 aa, Adeno-associated virus
MAADGYLPDWLEDTLSEGIRQWWKLKPGPPPPKPAERHKDDSRGLVLPGYKYLGPFNGLDKGEPVNEADAAALEHDKAYDRQLDSGDNPYLKYNHADAEFQERLKEDTSFGGNLGRAVFQAKKRVLEPLGLVEEPVKTAPGKKRPVEHSPAEPDSSSGTGKAGQQPARKRLNFGQTGDADSVPDPQPLGQPPAAPTSLGSTTMATGSGAPMADNNEGADGVGNSSGNWHCDSQWLGDRVITTSTRTWALPTYNNHLYKQISSQSGASNDNHYFGYSTPWGYFDFNRFHCHFSPRDWQRLINNNWGFRPKRLNFKLFNIQVKEVTQNDGTTTIANNLTSTVQVFTDSEYQLPYVLGSAHQGCLPPFPADVFMVPQYGYLTLNNGSQAVGRSSFYCLECFPSQMLRTGNNFQFSYTFEDVPFHSSYAHSQSLDRLMNPLIDQYLYYLNRTQTASGTQQSRLLFSQAGPTSMSLQAKNWLPGPCYRQQRLSKQANDNNNSNFPWTGATKYHLNGRDSLVNPGPAMASHKDDEEKFFPMHGTLIFGKEGTNATNAELENVMITDEEEIRTTNPVATEQYGYVSNNLQNSNTAASTETVNHQGALPGMVWQDRDVYLQGPIWAKIPHTDGHFHPSPLMGGFGLKHPPPQIMIKNTPVPANPPTNFSSAKFASFITQYSTGQVSVEIEWELQKENSKRWNPEIQYTSNYNKSVNVDFTVDTNGVYSEPRPIGTRYLTRNL

SEQ ID NO: 4953 - DNA, 2208 bp, Adeno-associated virus
atggctgccgatggttatcttccagattggctcgaggacactctctctgaaggaataagacagtggtggaagctcaaacctggcccaccaccaccaaagcccgcagagcggcataaggacgacagcaggggtcttgtgcttcctggatacaagtacctcggacccttcaacggactcgacaagggagagccggtcaacgaggcagacgccgcggccctcgagcacgacaaggcctacgaccggcagctcgacagcggagacaacccgtacctcaagtacaaccacgccgacgcggagtttcaggagcgccttaaagaagatacgtcttttgggggcaacctcggacgagcagtcttccaggcgaaaaagagggttcttgaacctctgggcctggttgaggaacctgttaagacggctccgggaaaaaagaggccggtagagcactctcctgtggagccagactcctcctcgggaaccggaaaagcgggcaaccagcctgcaagaaaaagattgaatttcggtcagactggagacgcagactccgtacctgacccccagcctctcggacagccaccagcatccccctctggtctgggaactaatacgatggctacaggcagtggcgcaccaatggcagacaataacgagggcgccgacggagtgggtaattcctcgggaaattggcattgcgattccacatggatgggcgacagagtcgtcaccaccagcacccgcacctgggccctgcccacctacaacaaccacctctacaagcagatttccagccaatcaggagccagcaacgacaaccactactttggctacagcaccccttgggggtattttgacttcaacagattccactgccacttttcgccacgcgactggcagagactcatcaacaacaactggggattccggcccaaaagactcaacttcaagctgtttaacattcaagtcaaggaggtcacgcagaatgacggtacgacgacgattgccaataaccttaccagcacggttcaggtgtttactgacttggagtaccagctcccgtacgtcctcggctcggcgcatcaaggatgcctcccgccgttcccagcagacgtcttcatggtgccacagtatggatacctcaccctgaacaacgggagtcaggcggtaggacgctcttccttttactgcctggagtactttccttctcagatgcttcgcaccggaaacaactttaccttcagctacacttttgaagacgttcctttccacagcagctacgctcacagtcaaagtctggaccgtctcatgaatcctctcatcgaccagtacctgtattacttgagcagaacaaacactccaagcggaaccactacgcagtccaggcttcagttttctcaggccggagcgagtgacattcgggaccagtctaggaactggcttcctggaccctgttaccgccagcagcgagtatcaaagacagctgcggataacaacaacagtgaatactcgtggactggagctaccaagtaccacctcaatggcagagactctctggtgaatccgggcccggccatggccagccacaaggacgatgaagaaaagttttttcctcaaagcggggttctcatctttgggaagcaaggctcagagaaaacaaatgtggacattgaaaaggtcatgattacagacgaagaggaaatcaggaccaccaatcccgtggctacggagcagtatggttctgtatctaccaacctccagagcggcaacacacaagcagctacctcagatgtcaacacacaaggcgttcttccaggcatggtctggcaggacagagacgtgtacctgcaggggcccatctgggcaaaaattccacacacggacggacattttcacccctctcccctcatgggcggatttggacttaaacaccctcctccacagattctcattaagaataccccggtacctgcgaatccttcgaccaccttcagcgcggcaaagtttgcttccttcatcacacagtattccacggggcaggtcagcgtggagatcgagtgggagctgcagaaggagaacagcaaacgctggaatcccgaaattcagtacacttccaactacaacaaatctgttaatgtggactttactgtggacactaatggggtgtattcagagcctcgccctattggcaccagatacctgactcgtaatctgtaa

SEQ ID NO: 4954 - DNA, 3159 bp, Adeno-associated virus
gattgatttagcggccgcgaattcgcccttgctgcgtcaactggaccaatgagaactttcccttcaacgattgcgtcgacaagatggtgatctggtgggaggagggaaagatgaccgccaaggtcgtggagtcggccaaagccattctcggaggaagcaaggtgcgtgtggaccaaaagtgcaagtcttcggcccagatcgacccgactcccgtgatcgtcacctccaacaccaacatgtgcgccgtgattgatggaaactcaacgaccttcgagcaccagcagccgttgcaagaccggatgttcaaatttgaacttacccgccgtctggatcatgactttggaaaggtcaccaagcaggaagtgaaagactttttccggtgggcaaaggatcacgtggttgaggtggagcatgagttctacgtcaaaaagggtggagccaaaaaaagacccgcccccagtgacgcagatataagtgagcccaaacgggcgcgcgagtcagttgcgcagccatcgacgtcagacgcggaagcttcgatcaactacgcggacaggtaccaaaacaaatgttctcgtcacgtgggcatgaatctgatgctgtttccctgcagacaatgcgagagaatgaatcagaattcaaatatctgcttcactcacggacagaaagactgtccatagtgctttcccgtgtcagaatctcaacccgtttctgtcgtcaaaaaggcgtatcagaaactgtgctacattcatcacatcatgggaaaggtgccagacgcttgcactgcttgcgacctggtcaatgtggatttggatgactgcatctctgaacaataaatgatttaaatcaggtatggctgccgatggttatcttccagattggctcgaggacactctctctgaaggaataagacagtggtggaagctcaaacctggcccaccaccaccaaagcccgcagagcggcataaggacgacagcaggggtcttgtgcttcctggatacaagtacctcggacccttcaacggactcgacaagggagagccggtcaacgaggcagacgccgcggccctcgagcacgacaaggcctacgaccggcagctcgacagcggagacaacccgtacctcaagtacaaccacgccgacgcggagtttcaggagcgccttaaagaagatacgtcttttgggggcaacctcggacgagcagtcttccaggcgaaaaagagggttcttgaacctctgggcctggttgaggaacctgttaagacggctccgggaaaaaagaggccggtagagcactctcctgtggagccagactcctcctcgggaaccggaaaagcgggcaaccagcctgcaagaaaaagattgaatttcggtcagactggagacgcagactccgtacctgacccccagcctctcggacagccaccagcatccccctctggtctgggaactaatacgatggctacaggcagtggcgcaccaatggcagacaataacgagggcgccgacggagtgggtaattcctcgggaaattggcattgcgattccacatggatgggcgacagagtcgtcaccaccagcacccgcacctgggccctgcccacctacaacaaccacctctacaagcagatttccagccaatcaggagccagcaacgacaaccactactttggctacagcaccccttgggggtattttgacttcaacagattccactgccacttttcgccacgcgactggcagagactcatcaacaacaactggggattccggcccaaaagactcaacttcaagctgtttaacattcaagtcaaggaggtcacgcagaatgacggtacgacgacgattgccaataaccttaccagcacggttcaggtgtttactgacttggagtaccagctcccgtacgtcctcggctcggcgcatcaaggatgcctcccgccgttcccagcagacgtcttcatggtgccacagtatggatacctcaccctgaacaacgggagtcaggcggtaggacgctcttccttttactgcctggagtactttccttctcagatgcttcgcaccggaaacaactttaccttcagctacacttttgaagacgttcctttccacagcagctacgctcacagtcaaagtctggaccgtctcatgaatcctctcatcgaccagtacctgtattacttgagcagaacaaacactccaagcggaaccactacgcagtccaggcttcagttttctcaggccggagcgagtgacattcgggaccagtctaggaactggcttcctggaccctgttaccgccagcagcgagtatcaaagacagctgcggataacaacaacagtgaatactcgtggactggagctaccaagtaccacctcaatggcagagactctctggtgaatccgggcccggccatggccagccacaaggacgatgaagaaaagttttttcctcaaagcggggttctcatctttgggaagcaaggctcagagaaaacaaatgtggacattgaaaaggtcatgattacagacgaagaggaaatcaggaccaccaatcccgtggctacggagcagtatggttctgtatctaccaacctccagagcggcaacacacaagcagctacctcagatgtcaacacacaaggcgttcttccaggcatggtctggcaggacagagacgtgtacctgcaggggcccatctgggcaaaaattccacacacggacggacattttcacccctctcccctcatgggcggatttggacttaaacaccctcctccacagattctcattaagaataccccggtacctgcgaatccttcgaccaccttcagcgcggcaaagtttgcttccttcatcacacagtattccacggggcaggtcagcgtggagatcgagtgggagctgcagaaggagaacagcaaacgctggaatcccgaaattcagtacacttccaactacaacaaatctgttaatgtggactttactgtggacactaatggggtgtattcagagcctcgccctattggcaccagatacctgactcgtaatctgtaattgcttgttaatcaataaaccgtttaattcgtttcagttgaactttggtctctgcgaagggcgaattcgtttaaacctgcaggactagtccctttagtgagg

SEQ ID NO: 4955 - protein, 735 aa, Adeno-associated virus
MAADGYLPDWLEDTLSEGIRQWWKLKPGPPPPKPAERHKDDSRGLVLPGYKYLGPFNGLDKGEPVNEADAAALEHDKAYDRQLDSGDNPYLKYNHADAEFQERLKEDTSFGGNLGRAVFQAKKRVLEPLGLVEEPVKTAPGKKRPVEHSPVEPDSSSGTGKAGNQPARKRLNFGQTGDADSVPDPQPLGQPPASPSGLGTNTMATGSGAPMADNNEGADGVGNSSGNWHCDSTWMGDRVVTTSTRTWALPTYNNHLYKQISSQSGASNDNHYFGYSTPWGYFDFNRFHCHFSPRDWQRLINNNWGFRPKRLNFKLFNIQVKEVTQNDGTTTIANNLTSTVQVFTDLEYQLPYVLGSAHQGCLPPFPADVFMVPQYGYLTLNNGSQAVGRSSFYCLEYFPSQMLRTGNNFTFSYTFEDVPFHSSYAHSQSLDRLMNPLIDQYLYYLSRTNTPSGTTTQSRLQFSQAGASDIRDQSRNWLPGPCYRQQRVSKTAADNNNSEYSWTGATKYHLNGRDSLVNPGPAMASHKDDEEKFFPQSGVLIFGKQGSEKTNVDIEKVMITDEEEIRTTNPVATEQYGSVSTNLQSGNTQAATSDVNTQGVLPGMVWQDRDVYLQGPIWAKIPHTDGHFHPSPLMGGFGLKHPPPQILIKNTPVPANPSTTFSAAKFASFITQYSTGQVSVEIEWELQKENSKRWNPEIQYTSNYNKSVNVDFTVDTNGVYSEPRPIGTRYLTRNL

SEQ ID NO: 4956 - DNA, 2205 bp, Adeno-associated virus
atggctgccgatggttatcttccagattggctcgaggacactctctctgaaggaataagacagtggtggaagctcaaacctggcccaccaccaaagcccgcagagcggcataaggacgacagcaggggtcttgtgcttcctggatacaagtacctcggacccttcaacggactcgacaagggagagccggtcaacgaggcagacgccgcggccctcgagcacgacaaggcctacgaccggcagctcgacagcggagacaacccgtacctcaagtacaaccacgccgacgcggagtttcaggagcgccttaaagaagatacgtcttttgggggcaacctcggacgagcagtcttccaggcgaaaaagagggttcttgaacctctgggcctggttgaggaacctgttaagacggctccgggaaaaaagaggcccgtagagcactctcctgtggagccagactcctcctcgggaaccggaaaagcgggcaaccagcctgcaagaaaaagattgaatttcggtcagactggagacgcagactccgtacctgacccccagcctctcggacagccaccagcagccccctctggtctgggaactaatacgatggctacaggcagtggcgcaccaatggcagacaataacgagggcgccgacggagtgggtaattcctcgggagattggcattgcgattccacatggatgggcgacagagtcatcaccaccagcacccgcacctgggccctgcccacctacaacaaccacctctacaagcagatttccagccaatcaggagccagcaatgacaaccactactttggctacagcaccccttgggggtattttgacttcaacagattccactgccacttttcgccacgcgactggcagagactcatcaacaacaactggggattccggcccaaaagactcaacctcaagctgtttaacattcaagtcaaggaggtcacgcagaatgacggtacgacgacgattgccaataaccttaccagcacggttcaggtgtttactgacttggagtaccagctcccgtacgtcctcggctcggcgcatcaaggatgcctcccgccgttcccagcagacgtcttcatggtgccacagtatggatacctcaccctgaacaacgggagtcaggcggtaggacgctcttccttttactgcctggagtactttccttctcagatgcttcgtaccggaaacaactttaccttcagctacacttttgaagacgttcctttccacagcagctacgctcacagtcaaagtctggaccgtctcatgaatcctctcatcgaccagtacctgtattacttgagcagaacaaacactccaagcggaaccactacgcagtccaggcttcagttttctcaggccggagcgagtgacattcgggaccagtctaggaactggcttcctggaccctgttaccgccagcagcgagtatcaaagacagctgcggataacaacaacggtgaatactcgtggactggagctaccaagtaccacctcaatggcagagactctctggtgaatccgggcccggccatggccagccacaaggacgatgaagaaaagttttttcctcaaagcggggttctcatctttgggaagcaaggctcagagaaaacaaatgtggacattgaaaaggtcatgattacagacgaagaggaaatcaggaccaccaatcccgtggctacggagcagtatggttctgtatctaccaacctccagagcggcaacacacgagcagctacctcagatgtcaacacacaaggcgttcttccaggcatggtctggcaggacagagacgtgtacctgcaggggcccatctgggcaaaaattccacacacggacggacattttcacccctctcccctcatgggcggatttggacttaaacaccctcctccacagattctcattaagaataccccggtacctgcgaatccttcgaccaccttcagcgcggcaaagtttgcttccttcatcacacagtattccacggggcaggtcagcgtggagatcgagtgggagctgcagaaggagaacagcaaacgctggaatcccgaaattcagtacacttccaactacaacaaatctgttaatgtggactttactgtggacactaatggggtgtattcagagcctcgccctattggcaccagatacctgactcgtaatctgtaa

SEQ ID NO: 4957 - DNA, 3156 bp, Adeno-associated virus
cgattgaatttagcggccgcgaattcgcccttgctgcgtcaacggaccaatgagaactttcccttcaacgattgcgtcgacaagatggtgatctggtgggaggagggaaagatgaccgccaaggtcgtggagtcggccaaagccattctcggaggaagcaaggtgcgtgtggaccaaaagtgcaagtcttcggcccagatcgacccgactcccgtgatcgtcacctccaacaccaacatgtgcgccgtgattgatggaaactcaacgaccttcgagcaccagcagccgttgcaagaccggatgttcaaatttgaacttacccgccgtctggatcatgactttggaaaggtcaccaagcaggaagtgaaagactttttccggtgggcaaaggatcacgtggttgaggtggagcatgagttctacgtcaaaaagggtggagccaaaaaaagacccgcccccagtgacgcagatataagtgagcccaaacgggcgcgcgagtcagttgcgcagccatcgacgtcagacgcggaagcttcgatcaactacgcggacaggtaccaaaacaaatgttctcgtcacgtgggcatgaatctgatgctgtttccctgcagacaatgcgagcgaatgaatcagaattcaaatatctgcttcactcacggacagaaagactgtttagagtgctttcccgtgtcagaatctcaacccgtttctgtcgtcaaaaaggcgtatcagaaactgtgctacattcatcacatcatgggaaaggtgccagacgcttgcactgcttgcgacctggtcaatgtggatttggatgactgcatctctgaacaataaatgatttaaatcaggtatggctgccgatggttatcttccagattggctcgaggacactctctctgaaggaataagacagtggtggaagctcaaacctggcccaccaccaaagcccgcagagcggcataaggacgacagcaggggtcttgtgcttcctggatacaagtacctcggacccttcaacggactcgacaagggagagccggtcaacgaggcagacgccgcggccctcgagcacgacaaggcctacgaccggcagctcgacagcggagacaacccgtacctcaagtacaaccacgccgacgcggagtttcaggagcgccttaaagaagatacgtcttttgggggcaacctcggacgagcagtcttccaggcgaaaaagagggttcttgaacctctgggcctggttgaggaacctgttaagacggctccgggaaaaaagaggcccgtagagcactctcctgtggagccagactcctcctcgggaaccggaaaagcgggcaaccagcctgcaagaaaaagattgaatttcggtcagactggagacgcagactccgtacctgacccccagcctctcggacagccaccagcagccccctctggtctgggaactaatacgatggctacaggcagtggcgcaccaatggcagacaataacgagggcgccgacggagtgggtaattcctcgggagattggcattgcgattccacatggatgggcgacagagtcatcaccaccagcacccgcacctgggccctgcccacctacaacaaccacctctacaagcagatttccagccaatcaggagccagcaatgacaaccactactttggctacagcaccccttgggggtattttgacttcaacagattccactgccacttttcgccacgcgactggcagagactcatcaacaacaactggggattccggcccaaaagactcaacctcaagctgtttaacattcaagtcaaggaggtcacgcagaatgacggtacgacgacgattgccaataaccttaccagcacggttcaggtgtttactgacttggagtaccagctcccgtacgtcctcggctcggcgcatcaaggatgcctcccgccgttcccagcagacgtcttcatggtgccacagtatggatacctcaccctgaacaacgggagtcaggcggtaggacgctcttccttttactgcctggagtactttccttctcagatgcttcgtaccggaaacaactttaccttcagctacacttttgaagacgttcctttccacagcagctacgctcacagtcaaagtctggaccgtctcatgaatcctctcatcgaccagtacctgtattacttgagcagaacaaacactccaagcggaaccactacgcagtccaggcttcagttttctcaggccggagcgagtgacattcgggaccagtctaggaactggcttcctggaccctgttaccgccagcagcgagtatcaaagacagctgcggataacaacaacggtgaatactcgtggactggagctaccaagtaccacctcaatggcagagactctctggtgaatccgggcccggccatggccagccacaaggacgatgaagaaaagttttttcctcaaagcggggttctcatctttgggaagcaaggctcagagaaaacaaatgtggacattgaaaaggtcatgattacagacgaagaggaaatcaggaccaccaatcccgtggctacggagcagtatggttctgtatctaccaacctccagagcggcaacacacgagcagctacctcagatgtcaacacacaaggcgttcttccaggcatggtctggcaggacagagacgtgtacctgcaggggcccatctgggcaaaaattccacacacggacggacattttcacccctctcccctcatgggcggatttggacttaaacaccctcctccacagattctcattaagaataccccggtacctgcgaatccttcgaccaccttcagcgcggcaaagtttgcttccttcatcacacagtattccacggggcaggtcagcgtggagatcgagtgggagctgcagaaggagaacagcaaacgctggaatcccgaaattcagtacacttccaactacaacaaatctgttaatgtggactttactgtggacactaatggggtgtattcagagcctcgccctattggcaccagatacctgactcgtaatctgtaattgcttgttaatcaataaaccgtttaattcgtttcagttgaactttggtctctgcgaagggcgaattcgtttaaacctgcaggactagtccctttagtgag

SEQ ID NO: 4958 - protein, 734 aa, Adeno-associated virus
MAADGYLPDWLEDTLSEGIRQWWKLKPGPPPKPAERHKDDSRGLVLPGYKYLGPFNGLDKGEPVNEADAAALEHDKAYDRQLDSGDNPYLKYNHADAEFQERLKEDTSFGGNLGRAVFQAKKRVLEPLGLVEEPVKTAPGKKRPVEHSPVEPDSSSGTGKAGNQPARKRLNFGQTGDADSVPDPQPLGQPPAAPSGLGTNTMATGSGAPMADNNEGADGVGNSSGDWHCDSTWMGDRVITTSTRTWALPTYNNHLYKQISSQSGASNDNHYFGYSTPWGYFDFNRFHCHFSPRDWQRLINNNWGFRPKRLNLKLFNIQVKEVTQNDGTTTIANNLTSTVQVFTDLEYQLPYVLGSAHQGCLPPFPADVFMVPQYGYLTLNNGSQAVGRSSFYCLEYFPSQMLRTGNNFTFSYTFEDVPFHSSYAHSQSLDRLMNPLIDQYLYYLSRTNTPSGTTTQSRLQFSQAGASDIRDQSRNWLPGPCYRQQRVSKTAADNNNGEYSWTGATKYHLNGRDSLVNPGPAMASHKDDEEKFFPQSGVLIFGKQGSEKTNVDIEKVMITDEEEIRTTNPVATEQYGSVSTNLQSGNTRAATSDVNTQGVLPGMVWQDRDVYLQGPIWAKIPHTDGHFHPSPLMGGFGLKHPPPQILIKNTPVPANPSTTFSAAKFASFITQYSTGQVSVEIEWELQKENSKRWNPEIQYTSNYNKSVNVDFTVDTNGVYSEPRPIGTRYLTRNL

SEQ ID NO: 4959 - DNA, 2208 bp, Adeno-associated virus
atggctgccgatggttatcttccagattggctcgaggacactctctctgaaggaataagacagtggtggaagctcaaacctggcccaccaccaccaaagcccgcagagcggcataaggacgacagcaggggtcttgtgcttcctgggtacaagtacctcggacccttcaacggactcgacaagggagagccggtcaacgaggcagacgccgcggccctcgagcacgacaaggcctacgaccggcagctcgacagcggagacaacccgtacctcaagtacgaccacgccgacgcggagtttcaggagcgccttaaagaagatacgtcttttgggggcaacctcggacgagcagtcttccaggcaaaaaagagggttcttgaacctctgggcctggttgaggagcctgttaagacggctccgggaaaaaagaggccggtagagcactctcctgtggagccagactcctcctcgggaaccggaaaagcgggcaaccagcctgcaagaaagagattgaatttcggtcagactggagacgcagactccgtacctgacccccagcctctcggacagccaccagcagccccctctggtctgggaactaatacgatggctacaggcagtggcgcaccaatggcagacaataacgatggcgccgacggagtgggtaattcctcgggaaattggcattgcgattccacatggatgggcgacagagtcatcaccaccagcacccgaacctgggctctgcccacctacaacaaccatctgtacaagcagatttccagccaatcaggagccagcaacgacaaccactactttggctacagcaccccttgggggtattttgacttcaacagattccactgccacttttcaccacgtgactggcaaagactcatcaacaacaactggggattccggcccaagagactcaacttcaagctctttaacattcaagtcagagaggtcacgcagaatgatggtacgacgacgattgccaataaccttaccagcacggttcaggtgtttactgactcggagtaccagctcccgtacgtcctcggctcggcgcatcaaggatgcctcccgccgttcccagcagacgtcttcatggtgccacagtatggatacctcaccctgaacaacgggagtcaggcagtaggacgctcttcattttactgcctggagtacttcccttctcagatgctgcgtaccggaaacaactttaccttcagctacacctttgaggatgttcctttccacagcagctacgctcacagccagagtttggaccgtctcatgaatcctctcatcgaccagtacctgtattacttgagcagaacaaacactccaagcggaaccaccacgcagtccaggcttcagttttctcaggccggagcgagtgacattcgggatcagtctaggaactggcttcctggaccctgttaccgccagcagcgagtatcaaagacatctgcggacaacaacaacagtgaatactcgtggattggagctaccaagtaccacctcaatggcagagactctctggtgaatccgggcccggcaatggccagccacaaggacgatgaagaaaagttttttcctcagagcggggttctcatctttggaaaacaaggatcagagaaaacaaatgtggacattgaaaaggtcatgattacagacgaagaggaaatcagaaccaccaatcccgtggccacggagcagtatggttctgtatctaccaacctccagagcggcaacacacaagcatctactgcagatgtcaacacacaaggcgttcttccaggcatggtctggcaggacagagacgtgtacctgcaggggcctatctgggcaaagattccgcacacggacggacattttcacccctctcccctcatgggcggattcggacttaaacaccctcctccacagattctcatcaaaaacaccccggtacctgcgaatccttcgaccaccttcagtgcggcaaagtttgcttccttcatcacacagtattccacggggcgggtcagcgtggagatcgagtgggagctacagaaggagaacagcaaacgctggaatcccgagatccagtacacttccaactacaacaaatctgttaatgtggactttactgtggacactaatggtgtgtattcagagcctcgccccattggcaccagatacctgactcgtaatctgtaa

SEQ ID NO: 4960 - protein, 735 aa, Adeno-associated virus
MAADGYLPDWLEDTLSEGIRQWWKLKPGPPPPKPAERHKDDSRGLVLPGYKYLGPFNGLDKGEPVNEADAAALEHDKAYDRQLDSGDNPYLKYDHADAEFQERLKEDTSFGGNLGRAVFQAKKRVLEPLGLVEEPVKTAPGKKRPVEHSPVEPDSSSGTGKAGNQPARKRLNFGQTGDADSVPDPQPLGQPPAAPSGLGTNTMATGSGAPMADNNDGADGVGNSSGNWHCDSTWMGDRVITTSTRTWALPTYNNHLYKQISSQSGASNDNHYFGYSTPWGYFDFNRFHCHFSPRDWQRLINNNWGFRPKRLNFKLFNIQVREVTQNDGTTTIANNLTSTVQVFTDSEYQLPYVLGSAHQGCLPPFPADVFMVPQYGYLTLNNGSQAVGRSSFYCLEYFPSQMLRTGNNFTFSYTFEDVPFHSSYAHSQSLDRLMNPLIDQYLYYLSRTNTPSGTTTQSRLQFSQAGASDIRDQSRNWLPGPCYRQQRVSKTSADNNNSEYSWIGATKYHLNGRDSLVNPGPAMASHKDDEEKFFPQSGVLIFGKQGSEKTNVDIEKVMITDEEEIRTTNPVATEQYGSVSTNLQSGNTQASTADVNTQGVLPGMVWQDRDVYLQGPIWAKIPHTDGHFHPSPLMGGFGLKHPPPQILIKNTPVPANPSTTFSAAKFASFITQYSTGRVSVEIEWELQKENSKRWNPEIQYTSNYNKSVNVDFTVDTNGVYSEPRPIGTRYLTRNL

SEQ ID NO: 4961 - DNA, 2217 bp, Adeno-associated virus
atggctgccgatggttatcttccagattggctcgaggacaacctctctgagggcattcgcgagtggtgggacttgaaacctggagccccgaaacccaaagccaaccagcaaaagcaggacgacggccggggtctggtgcttcctggctacaagtacctcggacccttcaacggactcgacaagggggagcccgtcaacgcggcggacgcagcggccctcgagcacgacaaggcctacgaccagcagctcaaagcgggtgacaatccgtacctgcggtataaccacgccgacgccgagtttcaggagcgtctgcaagaagatacgtcttttgggggcaacctcgggcgagcagtcttccaggccaagaagcgggttctcgaacctctcggtctggttgaggaaggcgctaagacggctcctggaaagaagagaccggtagagccatcaccccagcgttctccagactcctctacgggcatcggcaagacaggccagcagcccgcgaaaaagagactcaactttgggcagactggcgactcagagtcagtgcccgaccctcaaccaatcggagaaccccccgcaggcccctctggtctgggatctggtacaatggctgcaggcggtggcgctccaatggcagacaataacgaaggcgccgacggagtgggtagttcctcaggaaattggcattgcgattccgcatggctgggcgacagagtcatcaccaccagcacccgaccctgggccctccccacctacaacaaccacctctacaagcaaatctccaacgggacatcgggaggaagcaccaacgacaacacctacttcggctacagcaccccctgggggtattttgactttaacagattccactgccacttctcaccacgtgactggcagcgactcatcaacaacaactggggattccggcccaagagactcaacttcaagctcttcaacatccaggtcaaggaggtcacgcagaatgaaggcaccaagaccatcgccaataaccttaccagcacgattcaggtctttacggactcggaataccagctcccgtacgtcctcggctctgcgcaccagggctgcccgcctccgttcccggcggacgtcttcatgattcctcagtacgggtacctgactctgaacaacggcagtcaggccgtgggccgttcctccttctactgcctggagtactttccttctcaaatgcggagaacgggcaacaactttgagttcagctaccagtttgaggacgtgccttttcacagcagctacgcgcatagccaaagcctggaccggctgatgaaccccctcatcgaccagtacctgtactacctgtctcggactcagtccacgggaggtaccgcaggaactcagcagttgctattttctcaggccgggcctaataacatgtcggctcaggccaaaaactggctacccgggccctgctaccggcagcaacgcgtctccacgacactgtcgcaaaataacaacagcaactttgcttggaccggtgccaccaagtatcatctgaatggcagagactctctggtaaatcccggtgtcgctatggcaacgcacaaggacgacgaagagcgattttttccatccagcggagtcttgatgtttgggaaacagggagctggaaaagacaacgtggactatagcagcgttatgctaaccagtgaggaagaaatcaaaaccaccaacccagtggccacagaacagtacggcgtggtggccgataacctgcaacagcaaaacgccgctcctattgtaggggccgtcaacagtcaaggagccttacctggcatggtctggcagaaccgggacgtgtacctgcagggtcctatctgggccaagattcctcacacggacggcaactttcatccttcgccgctgatgggaggctttggactgaaacacccgcctcctcagatcctgattaagaatacacctgttcccgcggatcctccaactaccttcagtcaagccaagctggcgtcgttcatcacgcagtacagcaccggacaggtcagcgtggaaattgaatgggagctgcagaaagagaacagcaagcgctggaacccagagattcagtatacttccaactactacaaatctacaaatgtggactttgctgtcaatactgagggtacttattcagagcctcgccccattggcacccgttacctcacccgtaacctgtaa

SEQ ID NO: 4962 - protein, 738 aa, Adeno-associated virus
MAADGYLPDWLEDNLSEGIREWWDLKPGAPKPKANQQKQDDGRGLVLPGYKYLGPFNGLDKGEPVNAADAAALEHDKAYDQQLKAGDNPYLRYNHADAEFQERLQEDTSFGGNLGRAVFQAKKRVLEPLGLVEEGAKTAPGKKRPVEPSPQRSPDSSTGIGKTGQQPAKKRLNFGQTGDSESVPDPQPIGEPPAGPSGLGSGTMAAGGGAPMADNNEGADGVGSSSGNWHCDSAWLGDRVITTSTRPWALPTYNNHLYKQISNGTSGGSTNDNTYFGYSTPWGYFDFNRFHCHFSPRDWQRLINNNWGFRPKRLNFKLFNIQVKEVTQNEGTKTIANNLTSTIQVFTDSEYQLPYVLGSAHQGCPPPFPADVFMIPQYGYLTLNNGSQAVGRSSFYCLEYFPSQMRRTGNNFEFSYQFEDVPFHSSYAHSQSLDRLMNPLIDQYLYYLSRTQSTGGTAGTQQLLFSQAGPNNMSAQAKNWLPGPCYRQQRVSTTLSQNNNSNFAWTGATKYHLNGRDSLVNPGVAMATHKDDEERFFPSSGVLMFGKQGAGKDNVDYSSVMLTSEEEIKTTNPVATEQYGVVADNLQQQNAAPIVGAVNSQGALPGMVWQNRDVYLQGPIWAKIPHTDGNFHPSPLMGGFGLKHPPPQILIKNTPVPADPPTTFSQAKLASFITQYSTGQVSVEIEWELQKENSKRWNPEIQYTSNYYKSTNVDFAVNTEGTYSEPRPIGTRYLTRNL

SEQ ID NO: 4963 - protein, 735 aa, Adeno-associated virus
MAADGYLPDWLEDTLSEGIRQWWKLKPGPPPPKPAERHKDDSRGLVLPGYKYLGPFNGLDKGEPVNEADAAALEHDKAYDRQLDSGDNPYLKYNHADAEFQERLKEDTSFGGNLGRAVFQAKKRVLEPLGLVEEPVKTAPGKKRPVEHSPVEPDSSSGTGKAGQQPARKRLNFGQTGDADSVPDPQPLGQPPAAPSGLGSTTMATGSGAPMADNNEGADGVGNSSGNWHCDSQWLGDRVITTSTRTWALPTYNNHLYKQISSQSGASNDNHYFGYSTPWGYFDFNRFHCHFSPRDWQRLINNNWGFRPKRLNFKLFNIQVKEVTQNDGTTTIANNLTSTVQVFTDSEYQLPYVLGSAHQGCLPPFPADVFMVPQYGYLTLNNGSQAVGRSSFYCLEYFPSQMLRTGNNFQFSYTFEDVPFHSSYAHSQSLDRLMNPLVDQYLYYLNKTQTNSGTLQQSRLLFSQAGPTNMSLQAKNWLPGPCYRQQRLSKQANDNNNSNFPWTAATKYHLNGRDSLVNPGPAMASHKDDEEKFFPMHGTLIFGKQGTNANDADLENVMITDEEEIRTTNPVATEQYGTVSNNLQNSNTGPTTGTVNHQGALPGMVWQDRDVYLQGPIWAKIPHTDGHFHPSPLMGGFGLKHPPPQIMIKNTPVPANPPTNFSSAKFASFITQYSTGQVSVEIEWELQKENSKRWNPEIQYTSNYNKSVNVDFTVDTNGVYSEPRPIGTRYLTRNL

SEQ ID NO: 4964 - DNA, 3158 bp, Adeno-associated virus
gattgaatttagcggccgcgaattcgcccttgctgcgtcaactggaccaatgagaactttcctttcaatgattgcgtcgacaagatggtgatctggtgggaggagggaaagatgaccgccaaggtcgtggagtcggccaaagccattctcggaggaagcaaggtgcgcgcggaccagaaatgcaagtcctcggcccagatagacccgactcccgtgattgtcacctccaacaccaacatgtgcgccgtgattgacgggaactcaacgaccttcgaacaccagcagccgttgcaagaccggatgttcaaatttgaactcacccgccgtctggatcatgactttgggaaggtcaccaagcaggaagtcaaagactttttccggtgggcaaaggatcacgtggttgaggtggagcatgaattctacgtcaaaaagggtggagctaagaaaagacccgcccccagtgacgcagatataagtgagcccaaacgggcgcgcgagtcagttgcgcagccatcgacgtcagacgcggaagcttcgatcaactacgcgggcaggtaccaaaacaaatgttctcgtcacgtgggcatgaatctgatgctgtttccctgcagacaatgcgagagaatgaatcagaattcaaatatctgcttcactcacggacagaaagactgtttagagtgctttcccgtgtcagaatctcaacccgtttctgtcgtcaaaaaggcgtatcagaaactttgctacattcatcatatcatgggaaaggtgccagacgcttgcactgcctgcgatctggtcaatgtggatttggatgactgcatctctgaacaataaatgatttaaatcaggtatggctgccgatggttatcttccagattggctcgaggacactctctctgaaggaataagacagtggtggaagctcaaacctggcccaccaccaccaaagcccgcagagcggcataaggacgacagcaggggtcttgtgcttcctgggtacaagtacctcggacccttcaacggactcgacaagggggagccggtcaacgaggcagacgccgcggccctcgagcacgacaaggcctacgaccggcagctcgacagcggagacaacccgtacctcaagtacaaccacgccgacgcggagtttcaggagcgccttaaagaagatacgtcttttgggggcaacctcggacgagcagtcttccaggcaaaaaagagggttcttgaacctctgggcctggttgaggaacctgttaaaacggctccgggaaaaaagaggccggtagagcactctcctgtggagccagactcctcctcgggaaccggaaaagcgggccagcagcctgcaagaaaaagattgaatttcggtcagactggagacgcagactccgtacctgacccccagcctctcggacagccaccagcagccccctctggtctgggatctactacaatggctacaggcagtggcgcaccaatggcagacaataacgagggtgccgatggagtgggtaattcctcgggaaattggcattgcgattcccaatggctgggcgacagagtcatcaccaccagcacccgcacctgggccctgcccacctacaacaaccacctctacaagcaaatctccagccaatcaggagcctcaaacgacaaccactactttggctacagcaccccctgggggtattttgacttcaacagattccactgccacttttcaccacgtgactggcaaagactcatcaacaacaactggggattccgacccaagagactcaacttcaagctctttaacattcaagtcaaagaggtcacgcagaatgacggtacgacgacgattgccaataaccttaccagcacggttcaggtgtttactgactcggagtaccagctcccgtacgtcctcggctcggcgcatcaaggatgcctcccgccgtttccagcggacgtcttcatggtcccacagtatggatacctcaccctgaacaacgggagtcaggcagtaggacgctcttcattttactgcctggagtactttccttctcagatgctgcgtaccggaaacaactttcaattcagctacacttttgaagacgtgcctttccacagcagctacgctcacagccagagtctggatcggctgatgaatcctctggtcgaccagtacctgtattatctgaacaagacacaaacaaatagtggaactcttcagcagtctcggctactgtttagccaagctggacccaccaacatgtctcttcaagctaaaaactggctgcctggaccttgctacagacagcagcgtctgtcaaagcaggcaaacgacaacaacaacagcaactttccctggactgcagctacaaagtatcatctaaatggccgggactcgttggttaatccaggaccagctatggccagtcacaaggatgacgaagaaaagtttttccccatgcatggaacccttatatttggtaaacaaggaacaaatgccaacgacgcggatttggaaaatgtcatgattacagatgaagaagaaatcaggaccaccaatcccgtggctacggagcagtacggaactgtatcaaataatttgcaaaactcaaacactggtccaactactggaactgtcaatcaccaaggagcgttacctggtatggtgtggcaggatcgagacgtgtacctgcagggacccatttgggccaagattcctcacaccgatggacactttcatccttctccactgatgggaggttttggactcaaacacccacctcctcaaatcatgatcaaaaacactcccgttccagccaatcctcccacaaacttcagttctgccaagtttgcttctttcatcacacagtattccacggggcaggtcagcgtggagatcgagtgggagctgcagaaggagaacagcaaacgctggaatcccgaaattcagtacacttccaactacaacaaatctgttaatgtggactttactgtggacactaatggtgtgtattcagagcctcgccccattggcaccagatacctgactcgtaatctgtaattgcttgttaatcaataaaccgtttaattcgtttcagttgaactttggtctctgcgaagggcgaattcgtttaaacctgcaggactagtccctttagtga

SEQ ID NO: 4965 - protein, 735 aa, Adeno-associated virus
MAADGYLPDWLEDTLSEGIRQWWKLKPGPPPPKPAERHKDDSRGLVLPGYKYLGPFNGLDKGEPVNEADAAALEHDKAYDRQLDSGDNPYLKYNHADAEFQERLKEDTSFGGNLGRAVFQAKKRVLEPLGLVEEPVKTAPGKKRPVEHPPVEPDSSSGTGKAGQQPARKRLNFGQTGDADSVPDPQPLGQPPAAPSGLGSTTMATGSGAPMADNNEGADGVGNSSGNWHCDSQWLGDRVITTSTRTWALPTYNNHLYKQISSQSGASNDNHYFGYSTPWGYFDFNRFHCHFSPRDWQRLINNNWGFRPKRLNFKLFNIQVKEVTQNDGTTTIANNLTSTVQVFTDSEYQLPYVLGSAHQGCLPPFPADVFMVPQYGYLTLNNGSQAVGRSSFYCLEYFPSQMLRTGNNFQFSYTFEDVPFHSSYAHSQSLDRLMNPLIDQYLYYLNKTQTNSGTLQQSRLLFSQAGPTNMSLQAKNRLPGPCYRQQRLSKQANDNNNSNFPWTAATKYHLNGRDSLVNPGPAMASHKDDEEKFFPMHGTLIFGKQGTNANDADLENVMITDEEEIRTTNPVATEQYGTVSNNLQNSNTGPTTGTVNHQGALPGMVWQDRDVYLQGPIWAKIPHTDGHFHPSPLVGGFGLKHPPPQIMIKNTPVPANPPTNFSSAKFASFITQYSTGQVSVEIEWELQKENSKRWNPEIQYTSNYNKSVNVDFTVDTNGVYSEPRPIGTRYLTRNL

SEQ ID NO: 4966 - DNA, 3159 bp, Adeno-associated virus
gattgaatttagcggccgcgaattcgcccttgctgcgtcaactggaccaatgagaactttcctttcaatgattgcgtcgacaagatggtgatctggtgggaggagggaaagatgaccgccaaggtcgtggagtcggccaaagccattctcggaggaagcaaggtgcgcgtggaccagaaatgcaagtcctcggcccagatagacccgactcccgtgattgtcacctccaacaccgacatgtgcgccgtgattgacgggaactcaacgaccttcgaacaccagcagccgttgcaagaccggatgttcaaatttgaactcacccgccgtctggatcatgactttgggaaggtcaccaagcaggaagtcaaagactttttccggtgggcaaaggatcacgtggttgaggtggagcatgaattctacgtcaaaaagggtggagctaagaaaagacccgcccccagtgacgcagatataagtgagcccaaacgggcgcgcgagtcagttgcgcagccatcgacgtcagacgcggaagcttcgatcaactacgcggacaggtaccaaaacaaatgttctcgtcacgtgggcatgaatctgatgctgtttccctgcagacaatgcgagagaatgaatcagaattcaaatatctgcttcactcacggacagaaagactgtttagagtgctttcccgtgtcagaatctcaacccgtttctgtcgtcaaaaaggcgtatcagaaactttgctacattcatcatatcatgggaaaggtgccagacgcttgcactgcctgcgatctggtcaatgtggatttggatgactgcatctctgaacaataaatgatttaaatcaggtatggctgccgatggttatcttccagattggctcgaggacactctctctgaaggaataagacagtggtggaagctcaaacctggcccaccaccaccaaagcccgcagagcggcataaggacgacagcaggggtcttgtgcttcctgggtacaagtacctcggacccttcaacggactcgacaagggggagccggtcaacgaggcagacgccgcggccctcgagcacgacaaggcctacgaccggcagctcgacagcggagacaacccgtacctcaagtacaaccacgccgacgcggagtttcaggagcgccttaaagaagatacgtcttttgggggcaacctcggacgagcagtcttccaggcaaaaaagagggttcttgaacctctgggcctggttgaggaacctgttaaaacggctccgggaaaaaagaggccggtagagcaccctcctgtggagccagactcctcctcgggaaccggaaaagcgggccagcagcctgcaagaaaaagattgaatttcggtcagactggagacgcagactccgtacctgacccccagcctctcggacagccaccagcagccccctctggtctgggatctactacaatggctacaggcagtggcgcaccaatggcagacaataacgagggtgccgatggagtgggtaattcctcgggaaattggcattgcgattcccaatggctgggcgacagagtcatcaccaccagcacccgcacctgggccctgcccacctacaacaaccacctctacaagcaaatctccagccaatcaggagcctcaaacgacaaccactactttggctacagcaccccctgggggtattttgacttcaacagattccactgccacttttcaccacgtgactggcaaagactcatcaacaacaactggggattccgacccaagagactcaacttcaagctctttaacattcaagtcaaagaggtcacgcagaatgacggtacgacgacgattgccaataaccttaccagcacggttcaggtgtttactgactcggagtaccagctcccgtacgtcctcggctcggcgcatcaaggatgcctcccgccgtttccagcggacgtcttcatggtcccacagtatggatacctcaccctgaacaacgggagtcaggcagtaggacgctcttcattttactgcctggagtactttccttctcagatgctgcgtaccggaaacaactttcagttcagctacacttttgaagacgtgcctttccacagcagctacgctcacagccagagtctggatcggctgatgaatcctctgatcgaccagtacctgtattatctgaacaagacacaaacaaatagtggaactcttcagcagtctcggctactgtttagccaagctggacccaccaacatgtctcttcaagctaaaaaccggctgcctggaccttgctacagacagcagcgtctgtcaaagcaggcaaacgacaacaacaacagcaactttccctggaccgcagctacaaagtatcatctaaatggccgggactcgttggttaatccaggaccagctatggccagtcacaaggatgacgaagaaaagtttttccccatgcatggaacccttatatttggtaaacaaggaacaaatgccaacgacgcggatttggaaaatgtcatgattacagatgaagaagaaatcaggaccaccaatcccgtggctacggagcagtacggaactgtatcaaataatttgcaaaactcaaacactggtccaactactggaactgtcaatcaccaaggagcgttacctggtatggtgtggcaggatcgagacgtgtacctgcagggacccatttgggccaagattcctcacaccgatggacactttcatccttctccactggtgggaggttttggactcaaacacccacctcctcaaatcatgatcaaaaacactcccgttccagccaatcctcccacaaacttcagttctgccaagtttgcttctttcatcacacagtattccacggggcaggtcagcgtggagatcgagtgggagctgcagaaggagaacagcaaacgctggaatcccgaaattcagtacacttccaactacaacaaatctgttaatgtggactttactgtggacactaatggtgtgtattcagagcctcgccccattggcaccagatacctgactcgtaatctgtaattgcttgttaatcaataaaccgtttaattcgtttcagttgaactttggtctctgcgaagggcgaattcgtttaaacctgcaggactagtccctttagtgag

SEQ ID NO: 4967 - DNA, 2208 bp, Adeno-associated virus
atggctgccgatggttatcttccagattggctcgaggacactctctctgaaggaataagacagtggtggaagctcaaacctggcccaccaccaccaaagcccgcagagcggcataaggacgacagcaggggtcttgtgcttcctgggtacaagtaccttggacccttcaacggactcgacaagggagagccggtcaacgaggcagacgccgcggccctcgagcacgacaaggcctacgaccggcagctcgacagcggagacaacccgtaccccaagtacaaccacgccgacgcggagttccaggagcgtcttaaagaagatacgtcttttgggggcaacctcggacgagcagtcttccaggcgaaaaagagggttcttgaacctctgggcctggttgaggaacctgttaagacggctccgggaaaaaagaggccggtagagcactctcctgcggagccagactcctcctcgggaaccggaaaagcgggccagcagcctgcaagaaagagattgaatttcggtcagactggagacgcagactccgtacctgacccccagcctctcggacagccaccagcagccccctctggtctgggaactaatacgatggctacaggcagtggcgcaccaatggcagacaataacgagggcgccgacggagtgggtaattcctcgggaaattggcattgcgattccacatggatgggcgacagagtcatcaccaccagcacccgcacctgggctctgcccacctacaacaaccacctctacaagcagatttccagccaatcaggagcctcaaacgacaaccactactttggctacagcaccccttgggggtattttgacttcaacagattccactgccacttttcgccacgtgactggcaaagactcatcaacaacaattggggattccggcccaaaagactcaacttcaagctctttaacattcaagtcaaggaggtcacgcagaatgacggtacgacgacgattgccaataaccttaccagcacggttcaggtgtttactgactcggagtaccagctcccgtacgtcctcggctcggcgcatcaaggatgcctcccgccgttcccagcagacgtcttcatggtgccacagtatggatacctcaccctgaacaacgggagtcaggcagtaggacgctcttcattttactgcctggagtactttccttctcagatgctgcgtaccggaaacaactttaccttcagctacacctttgaggacgttcctttccacagcagctacgcccacagccagagtttggaccgtctcatgaatcctctcatcgaccagtacctgtattacttgagcagaacaaacactccaagcggaaccaccacgcagtcaaggcttcagttttctcaggccggagcaagtgacattcgggaccagtctaggaactggcttcctggaccctgttaccgccagcagcgagtatcaaagacatctgcggataacaacaacagtgaatactcgtggactggagctaccaagtaccaccttaatggaagagactctctggtgaatccgggcccggccatggccagccacaaggacgatgaagaaaagttttttcctcagagcggggttctcatctttggaaaacaagactcgggaaaaactaatgtggacattgaaaaggtcatgattacagacgaagaggaaatcaggaccaccaatcccgtggctacggagcagtatggttctgtatctaccaacctccagagcggcaacacacaagcagctacctcagatgtcaacacacaaggcgttcttccaggcatggtgtggcaggacagagacgtgtacctgcaggggcccatctgggcaaagattccacacacggacggacattttcacccctctcccctcatgggcggattcggacttaaacaccctcccccgcagattctcatcaagaacaccccggtacctgcgaatccttcgactaccttcagtgcggcaaagtttgcttccttcattacacagtactccacggggcaggtcagcgtggagatcgagtgggagctgcagaaggagaacagcaaacgctggaatcccgagattcagtacacttccaactacaacaaatctgttaatgtggactttactgtggacactaatggtgtgtattcagagcctcgccccattggcaccaggtacctgactcgtaatctgtaa

SEQ ID NO: 4968 - protein, 735 aa, Adeno-associated virus
MAADGYLPDWLEDTLSEGIRQWWKLKPGPPPPKPAERHKDDSRGLVLPGYKYLGPFNGLDKGEPVNEADAAALEHDKAYDRQLDSGDNPYPKYNHADAEFQERLKEDTSFGGNLGRAVFQAKKRVLEPLGLVEEPVKTAPGKKRPVEHSPAEPDSSSGTGKAGQQPARKRLNFGQTGDADSVPDPQPLGQPPAAPSGLGTNTMATGSGAPMADNNEGADGVGNSSGNWHCDSTWMGDRVITTSTRTWALPTYNNHLYKQISSQSGASNDNHYFGYSTPWGYFDFNRFHCHFSPRDWQRLINNNWGFRPKRLNFKLFNIQVKEVTQNDGTTTIANNLTSTVQVFTDSEYQLPYVLGSAHQGCLPPFPADVFMVPQYGYLTLNNGSQAVGRSSFYCLEYFPSQMLRTGNNFTFSYTFEDVPFHSSYAHSQSLDRLMNPLIDQYLYYLSRTNTPSGTTTQSRLQFSQAGASDIRDQSRNWLPGPCYRQQRVSKTSADNNNSEYSWTGATKYHLNGRDSLVNPGPAMASHKDDEEKFFPQSGVLIFGKQDSGKTNVDIEKVMITDEEEIRTTNPVATEQYGSVSTNLQSGNTQAATSDVNTQGVLPGMVWQDRDVYLQGPIWAKIPHTDGHFHPSPLMGGFGLKHPPPQILIKNTPVPANPSTTFSAAKFASFITQYSTGQVSVEIEWELQKENSKRWNPEIQYTSNYNKSVNVDFTVDTNGVYSEPRPIGTRYLTRNL

SEQ ID NO: 4969 - DNA, 2208 bp, Adeno-associated virus
atggctgccgatggttatcttccagattggctcgaggacactctctctgaaggaataagacagtggtggaagctcaaacctggcccaccaccaccaaagcccgcagagcggcataaggacgacagcaggggtcttgtgcttcctgggtacaagtaccttggacccttcaacggactcgacaagggagagccggtcaacgaggcagacgccgcggccctcgagcacgacaaggcctacgaccggcagctcgacggcggagacaacccgtacctcaagtacaaccacgccgacgcggagttccaggagcgtcttaaagaagatacgtcttttgggggcaacctcggacgagcagtcttccaggcgaaaaagagggttcttgaacctctgggcctggttgaggaacctgttaagacggctccgggaaaaaagaggccggtagagcactctcttgcggagccagactcctcctcgggaaccggaaaagcgggccagcagcctgcaagaaggagattgaatttcggtcagactggagacgcagactccgtacctgacccccagcctctcggacagccaccagcagccccctctggtctgggaactaatacgatggctacaggcagtggcgcaccaatggcagacaataacgagggcgccgacggagtgggtaattcctcgggaaattggcattgcgattccacatggatgggcgacagagtcatcaccaccagcacccgcacctgggctctgcccacctacaacaaccacctctacaggcagatttccagccaatcaggagcctcaaacgacaaccactactttggctacagcaccccttgggggtattttgacttcaacagattccactgccacttttcgccacgtgactggcaaagactcatcaacaacaattggggatcccggcccaaaagactcaacttcaagctctttaacattcaagtcaaggaggtcacgcagaatgacggtacgacgacgattgccaataaccttaccagcacggttcaggtgtttactgactcggagtaccagctcccgtacgtcctcggctcggcgcatcaaggatgcctcccgccgttcccagcagacgtcttcatggtgccacagtatggatacctcaccctgaacaacgggagtcaggcagtaggacgctcttcattttactgcctggagtactttccttctcagatgctgcgtaccggaaacaactttaccttcagctacacctttgaggacgttcctttccacagcagctacgcccacagccagagtttggaccgtctcatgaatcctctcgtcgaccagtacctgtattacttgagcagaacaaacactccaagcggaaccaccacgcagtcaaggcttcagttttctcaggccggagcaagtgacattcgggaccagtctaggaactggcttcctggaccctgttaccgccagcagcgagtatcaaagacatctgcggataacaacaacagtgaatactcgtggactggagctaccaagtaccaccttaatggaagagactctctggtgaatccgggcccggccatggccagccacaaggacgatgaagaaaagttttttcctcagagcggggttctcatctttggaaaacaagactcgggaaaaactaatgtggacattgaaaaggtcatgattacagacgaagaggaaatcaggaccaccaatcccgtggctacggagcagtatggttctgtatctaccaacctccagagcggcaacacacaagcagctacctcagatgtcaacacacaaggcgttcttccaggcatggtgtggcaggacagagacgtgtacctgcaggggcccatctgggcaaagattccacacacggacggacattttcacccctctcccctcatgggcggattcggacttaaacaccctcccccgcagattctcatcaagaacaccccggtacctgcgaatccttcgactaccttcagtgcggcaaagtttgcttccttcattacacagtactccacggggcaggtcagcgtggagatcgagtgggagctgcagaaggagaacagcaaacgctggaatcccgagattcagtacacttccaactacaacaaatctgttaatgtggactttactgtggacactaatggtgtgtattcagagcctcgccccattggcaccagatacctgactcgtaatctgtaa

SEQ ID NO: 4970 - protein, 735 aa, Adeno-associated virus
MAADGYLPDWLEDTLSEGIRQWWKLKPGPPPPKPAERHKDDSRGLVLPGYKYLGPFNGLDKGEPVNEADAAALEHDKAYDRQLDGGDNPYLKYNHADAEFQERLKEDTSFGGNLGRAVFQAKKRVLEPLGLVEEPVKTAPGKKRPVEHSLAEPDSSSGTGKAGQQPARRRLNFGQTGDADSVPDPQPLGQPPAAPSGLGTNTMATGSGAPMADNNEGADGVGNSSGNWHCDSTWMGDRVITTSTRTWALPTYNNHLYRQISSQSGASNDNHYFGYSTPWGYFDFNRFHCHFSPRDWQRLINNNWGSRPKRLNFKLFNIQVKEVTQNDGTTTIANNLTSTVQVFTDSEYQLPYVLGSAHQGCLPPFPADVFMVPQYGYLTLNNGSQAVGRSSFYCLEYFPSQMLRTGNNFTFSYTFEDVPFHSSYAHSQSLDRLMNPLVDQYLYYLSRTNTPSGTTTQSRLQFSQAGASDIRDQSRNWLPGPCYRQQRVSKTSADNNNSEYSWTGATKYHLNGRDSLVNPGPAMASHKDDEEKFFPQSGVLIFGKQDSGKTNVDIEKVMITDEEEIRTTNPVATEQYGSVSTNLQSGNTQAATSDVNTQGVLPGMVWQDRDVYLQGPIWAKIPHTDGHFHPSPLMGGFGLKHPPPQILIKNTPVPANPSTTFSAAKFASFITQYSTGQVSVEIEWELQKENSKRWNPEIQYTSNYNKSVNVDFTVDTNGVYSEPRPIGTRYLTRNL

SEQ ID NO: 4971 - protein, 738 aa, Adeno-associated virus
MAADGYLPDWLEDNLSEGIREWWDLKPGAPKPKANQQKQDDGRGLVLPGYKYLGPFNGLDKGEPVNAADAAALEHDKAYDQQLKAGDNPYLRYNHADAEFQERLQEDTSFGGNLGRAVFQAKKRVLEPLGLVEEAAKTAPGKKRPVEPSPQRSPDSSAGIGKKGQQPAKKRLNFGQTGDSESVPDPQPIGEPPAGPSGLGSGTMAAGGGAPMADNNEGADGVGSSSGNWHCDSTWLGDRVITTSTRTWALPTYNNHLYKQISNGTSGGSTNDNTYFGYSTPWGYFDFNRFHCHFSPRDWQRLINNNWGFRPKRLSFKLFNIQVKEVTQNEGTETIANNLTSTIQVFTDSEYQLPYVLGSAHQGCLPPFPADVFMIPQYGYLTLNNGSQAVGRSSFYCLEYFPSQMLRTGNNFEFSYTFEDVPFHSSCAHSQSSDRLMNPLIDQYLYYLSRTRSTGGTQGTQQLLFSQAGPANMSAQAKNWLPGPCYRQQRVSTTLSQNNNSNFAWTGATKYHLNGRDSLVNPGVAMATHKDDEERFFPSSGVLMFGKQGAGRDNVDYSSVMLTSEEEIKTTNPVATEQYGVVADNLQQTNTGPIVGNVNSQGALPGMVWQNRDVYLQGPIWAKIPHTDGNFHPSPLMGGFGLKHPPPQILIKNTPVPADPPTTFSQAKLASFITQYSTGQVSVEIEWELQKENSKRWNPEIQYTSNYYKSTNVDFAVNTEGTYSEPRPIGTRYLTRNL

SEQ ID NO: 4972 - DNA, 2217 bp, Adeno-associated virus
atggctgctgacggttatcttccagattggctcgaggacaacctctctgagggcattcgcgagtggtgggacctgaaacctggagcccccaagcccaaggccaaccagcagaagcaggacgacggccggggtctggtgcttcttggctacaagtacctcggacccttcaacggactcgacaagggggagcccgtcaatgcggcggacgcagcggccctcgagcacgacaaggcctacgaccagcagctcaaagcgggtgacaatccgtacctgcggtataaccacgccgacgccgagtttcaggagcgtctgcaagaagatacgtcttttgggggcaacctcgggcgagcagtcttccaggccaagaagcgggttctcgaacctctcggtctggttgaggaagctgctaagacggctcctggaaagaagagaccggtagaaccgtcacctcagcgttcccccgactcctccacgggcatcggcaagaaaggccagcagcccgctaaaaagagactgaactttggtcagactggcgactcagagtcagtccccgaccctcaaccaatcggagaaccaccagcaggcccctctggtctgggatctggtacaatggctgcaggcggtggcgctccaatggcagacaataacgaaggcgccgacggagtgggtagttcctcaggaaattggcattgcgattccacatggctgggcgacagagtcatcaccaccagcacccgaacctgggccctgcccacctacaacaaccacctctacaagcaaatatccaatgggacatcgggaggaagcaccaacgacaacacctacttcggctacagcaccccctgggggtattttgacttcaacagattccactgccacttctcaccacgtgactggcagcgactcatcaacaacaactggggattccggccaaaaagactcagcttcaagctcttcaacatccaggtcaaggaggtcacgcagaatgaaggcaccaagaccatcgccaataaccttaccagcacgattcaggtatttacggactcggaataccagctgccgtacgtcctcggctccgcgcaccagggctgcctgcctccgttcccggcggacgtcttcatgattccccagtacggctaccttacactgaacaatggaagtcaagccgtaggccgttcctccttctactgcctggaatattttccatctcaaatgctgcgaactggaaacaattttgaattcagctacaccttcgaggacgtgcctttccacagcggctacgcacacagccagagcttggaccgactgatgaatcctctcatcgaccagtacctgtactacttatccagaactcagtccacaggaggaactcaaggtacccagcaattgttattttctcaagctgggcctgcaaacatgtcggctcaggctaagaactggctacctggaccttgctaccggcagcagcgagtctctacgacactgtcgcaaaacaacaacagcaactttgcttggactggtgccaccaaatatcacctgaacggaagagactctttggtaaatcccggtgtcgccatggcaacccacaaggacgacgaggaacgcttcttcccgtcgagtggagtcctgatgtttggaaaacagggtgctggaagagacaatgtggactacagcagcgttatgctaaccagcgaagaagaaattaaaaccactaaccctgtagccacagaacaatacggtgtggtggctgacaacttgcagcaaaccaatacagggcctattgtgggaaatgtcaacagccaaggagccttacctggcatggtctggcagaaccgagacgtgtacctgcagggtcccatctgggccaagattcctcacacggacggcaacttccacccttcaccgctaatgggaggatttggactgaagcacccacctcctcagatcctgatcaagaacacgccggtacctgcggatcctccaacgacgttcagccaggcgaaattggcttccttcattacgcagtacagcaccggacaggtcagcgtggaaatcgagtgggagctgcagaaggagaacagcaaacgctggaacccagagattcagtacacttcaaactactacaaatctacaaatgtggactttgctgtcaatacagagggaacttattctgagcctcgccccattggtactcgttacctcacccgtaatctgtaa

SEQ ID NO: 4973 - protein, 738 aa, Adeno-associated virus
MAADGYLPDWLEDNLSEGIREWWDLKPGAPKPKANQQKQDDGRGLVLLGYKYLGPFNGLDKGEPVNAADAAALEHDKAYDQQLKAGDNPYLRYNHADAEFQERLQEDTSFGGNLGRAVFQAKKRVLEPLGLVEEAAKTAPGKKRPVEPSPQRSPDSSTGIGKKGQQPAKKRLNFGQTGDSESVPDPQPIGEPPAGPSGLGSGTMAAGGGAPMADNNEGADGVGSSSGNWHCDSTWLGDRVITTSTRTWALPTYNNHLYKQISNGTSGGSTNDNTYFGYSTPWGYFDFNRFHCHFSPRDWQRLINNNWGFRPKRLSFKLFNIQVKEVTQNEGTKTIANNLTSTIQVFTDSEYQLPYVLGSAHQGCLPPFPADVFMIPQYGYLTLNNGSQAVGRSSFYCLEYFPSQMLRTGNNFEFSYTFEDVPFHSGYAHSQSLDRLMNPLIDQYLYYLSRTQSTGGTQGTQQLLFSQAGPANMSAQAKNWLPGPCYRQQRVSTTLSQNNNSNFAWTGATKYHLNGRDSLVNPGVAMATHKDDEERFFPSSGVLMFGKQGAGRDNVDYSSVMLTSEEEIKTTNPVATEQYGVVADNLQQTNTGPIVGNVNSQGALPGMVWQNRDVYLQGPIWAKIPHTDGNFHPSPLMGGFGLKHPPPQILIKNTPVPADPPTTFSQAKLASFITQYSTGQVSVEIEWELQKENSKRWNPEIQYTSNYYKSTNVDFAVNTEGTYSEPRPIGTRYLTRNL

SEQ ID NO: 4974 - protein, 735 aa, Adeno-associated virus
MAADGYLPDWLEDTLSEGIRQWWKLKPGPPPPKPAERHKDDSRGLVLPGYKYLGPFNGLDKGEPVNEADAAALEHDKAYDRQLDSGDNPYLKYNHADAEFQERLKEDTSFGGNLGRAVFQAKKRVLEPLGLVEPPVKTAPGKKRPVEHSPAEPDSSSGTGKAGQQPARKRLNFGQTGDADSVPDPQPLGQPPAAPSGLGSTTMATGSGAPMADNNEGADGVGNSSGNWHCDSQWLGDRVITTSTRTWALPTYNNHLYKQISSQSGASNDNHYFGYSTPWGYFDFNRFHCHFSPRDWQRLINNNWGFRPKRLNFKLFNIQVKEVTQNDGTTTIANNLTSTVQVFTDSEYQLPYVLGSAHQGCLPPFPADVFMVPQYGYLTLNNGSQAVGRSSFYCLEYFPSQMLRTGNNFQFSYTFEDVPFHSSYAHSQSLDRLMNPLIDQYLYYLNKTQSNSGTLQQSRLLFSQAGPTSMSLQAKNWLPGPCYRQQRLSKQANDNNNSNFPWTAATKYHLNGRDSLVNPGPAMASHKDDEEKFFPMHGTLIFGKQGTNANDADLDNVMITDEEEIRTTNPVATEQYGYVSNNLQNSNTGPTTGTVNHQGALPGMVWQDRDVYLQGPIWAKIPHTDGHFHPSPLMGGFGLKHPPPQIMIKNTPVPANPPTNFSSAKFASFITQYSTGQVSVEIEWELQKENSKRWNPEIQYTSNYNKSVNVDFTVDTNGVYSEPRPIGTRYLTRNL

SEQ ID NO: 4975 - protein, 735 aa, Adeno-associated virus
MAADGYLPDWLEDTLSEGIRQWWKLKPGPPPPKPAERHKDDSRGLVLPGYKYLGPFNGLDKGEPVNEADAAALEHDKAYDRQLDSGDNPYLKYNHADAEFQERLKEDTSFGGNLGRAVFQAKKRVLEPLGLVEGPVKTAPGKKRPVEHSPAEPDSSSGTGKAGQQPARKRLNFGQTGDADSVPDPQPLGQPPAAPSGLGSTTMATGSGAPMADNNEGADGVGNSSGNWHCDSQWLGDRVITTSTRTWALPTYNNHLYKQISSQSGASNDNHYFGYSTPWGYFDFNRFHCHFSPRDWQRLINNNWGFRPKRLNFKLFNIQVKEVTQNDGTTTIANNLTSTVQVFTDSEYQLPYVLGSAHQGCLPPFPADVFMVPQYGYLTLNNGSQAVGRSSFYCLEYFPSQMLRTGNNFQFSYTFEDVPFHSSYAHSQSLDRLMNPLIDQYLYYLNKTQSNSGTLQQSRLLFSQAGPTSMSLQAKNWLPGPCYRQQRLSKQANDNNNSNFPWTAATKYHLNGRDSLVNPGPAMASHKDDEEKFFPMHGTLIFGKQGTNANDADLDNVMITDEEEIRTTNPVATEQYGYVSNNLQNSNTGPTTGTVNHQGALPGMVWQDRDVYLQGPIWAKIPHTDGHFHPSPLMGGFGLKHPPPQIMIKNTPVPANPPTNFSSAKFASFITQYSTGQVSVEIEWELQKENSKRWNPEIQYTSNYNKSVNVDFTVDTNGVYSEPRPIGTRYLTRNL

SEQ ID NO: 4976 - DNA, 2208 bp, Adeno-associated virus
atggctgccgatggttatcttccagattggctcgaggacactctctctgaaggaataagacagtggtggaagctcaaacctggcccaccaccaccaaagcccgcagagcggcataaggacgacagcaggggtcttgtgcttcctgggtacaagtacctcggacccttcaacggactcgacaagggggagccggtcaacgaggcagacgccgcggccctcgagcacgacaaggcctacgaccggcagctcgacagcggagacaacccgtacctcaagtacaaccacgccgacgcggagtttcaggagcgtcttaaagaagatacgtcttttgggggcaacctcggacgagcagtcttccaggcgaaaaagagggttcttgaacctctgggcctggttgagggacctgttaagacggctccgggaaaaaagaggccggtagagcactctcctgcggagccagactcctcctcgggaaccggaaaagcgggccagcagcctgcaagaaaaagattgaattttggtcagactggagacgcagactccgtacctgacccccagcctctcggacagccaccagcagccccctctggtttgggatctactacaatggctacaggcagtggcgcaccaatggcagacaataacgagggtgccgatggagtgggtaattcctcaggaaattggcattgcgattcccaatggctgggcgacagagtcatcaccaccagcacccgaacctgggccctgcccacctacaacaaccacctctacaagcaaatctcaagccaatcaggagcctcaaacgacaaccactactttggctacagcaccccttgggggtattttgacttcaacagattccactgccacttttcaccacgtgactggcaaagactcatcaacaacaactggggattccgacccaagagactcaacttcaagctctttaacattcaagtcaaagaggtcacgcagaatgacggtacgacgacgattgccaataaccttaccagcacggttcaggtgtttactgactcggagtaccagctcccgtacgtcctcgggtcggcgcatcaaggatgcctcccgccgtttccagcggacgtcttcatggtcccacagtatggatacctcaccctgaacaacgggagtcaggcggtaggacgctcttccttttactgcctggagtactttccttctcagatgcttcgtactggaaacaactttcagttcagctacacctttgaagacgttcctttccacagcagctacgctcacagccagagtctggatcggctgatgaatcctctgatcgaccagtacctgtattatctgaacaaaacacaatcaaatagtggaactcttcagcagtctcggctactgtttagtcaagctggacccaccagcatgtctcttcaagctaaaaactggctacctggaccttgctacagacagcagcgtctgtcaaagcaggcaaacgacaacaacaacagcaactttccctggactgcggctacaaagtatcacctaaatggccgggactcgttggttaatccaggaccagctatggccagtcacaaagacgatgaagaaaagtttttccccatgcatggaaccctgatatttggtaaacaaggaacaaatgctaacgacgcggatttggacaatgtcatgattacagatgaagaagaaatccgcaccaccaatcccgtggctacggagcagtacggatatgtgtcaaataatttgcaaaactcaaatactggtccaactactggaactgtcaatcaccaaggagcgttacctggcatggtgtggcaggatcgagacgtgtacctgcagggacccatttgggccaagattcctcacaccgatggacactttcatccttctccactgatgggaggttttgggctcaaacacccgcctcctcagatcatgatcaaaaacactcccgttccagccaatcctcccacaaacttcagttctgccaagtttgcttctttcatcacacagtattccacggggcaggtcagcgtggagatcgagtgggagctgcagaaagagaacagcaaacgctggaatcccgaaattcagtacacttccaactacaacaaatctgttaatgtggactttactgtggacactaatggcgtgtattcagagcctcgccccattggcaccagatacctgactcgtaatctgtaa

SEQ ID NO: 4977 - DNA, 2211 bp, Adeno-associated virus
atggctgccgatggttatcttccagattggctcgaggacaacctctctgagggcattcgcgagtggtgggacttgaaacctggagccccgaagcccaaagccaaccagcaaaagcaggacgacggccggggtctggtgcttcctggctacaagtacctcggacccttcaacggactcgacaagggggagcccgtcaacgcggcggacgcagcggccctcgagcacgacaaggcctacgaccagcagctcaaagcgggtgacaatccgtacctgcggtataaccacgccgacgccgagtttcaggagcgtctgcaagaagatacgtcttttgggggcaacctcgggcgagcagtcttccaggccaagaagcgggttctcgaacctctcggtctggttgaggaaggcgctaagacggctcctggaaagaaacgtccggtagagcagtcgccacaagagccagactcctcctcgggcatcggcaagacaggccagcagcccgctaaaaagagactcaattttggtcagactggcgactcagagtcagtccccgatccacaacctctcggagaacctccagcaacccccgctgctgtgggacctactacaatggcttcaggcggtggcgcaccaatggcagacaataacgaaggcgccgacggagtgggtaatgcctcaggaaattggcattgcgattccacatggctgggcgacagagtcatcaccaccagcacccgcacctgggccttgcccacctacaataaccacctctacaagcaaatctccagtgcttcaacgggggccagcaacgacaaccactacttcggctacagcaccccctgggggtattttgatttcaacagattccactgccacttttcaccacgtgactggcagcgactcatcaacaacaattggggattccggcccaagagactcaacttcaaactcttcaacatccaagtcaaggaggtcacgacgaatgatggcgtcacaaccatcgctaataaccttaccagcacggttcaagtcttctcggactcggagtaccagcttccgtacgtcctcggctctgcgcaccagggctgcctccctccgttcccggcggacgtgttcatgattccgcaatacggctacctgacgctcaacaatggcagccaagccgtgggacgttcatccttttactgcctggaatatttcccttctcagatgctgagaacgggcaacaactttaccttcagctacacctttgaggaagtgcctttccacagcagctacgcgcacagccagagcctggaccggctgatgaatcctctcatcgaccaatacctgtattacctgaacagaactcaaaatcagtccggaagtgcccaaaacaaggacttgctgtttagccgtgggtctccagctggcatgtctgttcagcccaaaaactggctacctggaccctgttatcggcagcagcgcgtttctaaaacaaaaacagacaacaacaacagcaattttacctggactggtgcttcaaaatataacctcaatgggcgtgaatccatcatcaaccctggcactgctatggcctcacacaaagacgacgaagacaagttctttcccatgagcggtgtcatgatttttggaaaagagagcgccggagcttcaaacactgcattggacaatgtcatgattacagacgaagaggaaattaaagccactaaccctgtggccaccgaaagatttgggaccgtggcagtcaatttccagagcagcagcacagaccctgcgaccggagatgtgcatgctatgggagcattacctggcatggtgtggcaagatagagacgtgtacctgcagggtcccatttgggccaaaattcctcacacagatggacactttcacccgtctcctcttatgggcggctttggactcaagaacccgcctcctcagatcctcatcaaaaacacgcctgttcctgcgaatcctccggcggagttttcagctacaaagtttgcttcattcatcacccaatactccacaggacaagtgagtgtggaaattgaatgggagctgcagaaagaaaacagcaagcgctggaatcccgaagtgcagtacacatccaattatgcaaaatctgccaacgttgattttactgtggacaacaatggactttatactgagcctcgccccattggcacccgttaccttacccgtcccctgtaa

SEQ ID NO: 4978 - DNA, 2208 bp, Adeno-associated virus
atggctgccgatggttatcttccagattggctcgaggacactctctctgaaggaacaagacagtggtggaagctcaaacctggcccaccaccaccaaagcccgcagagcggcataaggacgacagcaggggtcttgtgcttcctgggtacaagtacctcggacccttcaacggactcgacaagggggagccggtcaacgaggcagacgccgcggccctcgagcacgacaaggcctacgaccggcagctcgacagcggagacaacccgtacctcaagtacaaccacgccgacgcggagtttcaggagcgtcttaaagaagatacgtcttttgggggcaacctcggacgagcagtcttccaggcgaaaaagagggttcttgaacctctgggcctggttgaggaacctgttaagacggctccgggaaaaaagaggccggtagagcactctcctgcggagccagactcctcctcgggaaccggaaaagcgggccagcagcctgcaagaaaaagattgaattttggtcagactggagacgcagactccgtacctgacccccagcctctcggacagccaccagcagccccctctggtttgggatctactacaatggctacaggcagtggcgcaccaatggcagacaataacgagggtgccgatggagtgggtaattcctcaggaaattggcattgcgattcccaatggctgggcgacagagtcatcaccaccagcacccgaacctgggccctgcccacctacaacaaccacctctacaagcaaatctcaagccaatcaggagcctcaaacgacaaccactactttggctacagcaccccttgggggtattttgacttcaacagattccactgccacttttcaccacgtgactggcaaagactcatcaacaacaactggggattccgacccaagagactcaacttcaagctctttaacattcaagtcaaagaggtcacgcagaatgacggtacgacgacgattgccaataaccttaccagcacggttcaggtgtttactgactcggagtaccagctcccgtacgtcctcgggtcggcgcatcaaggatgcctcccgccgtttccagcggacgtcttcatggtcccacagtatggatacctcaccctgaacaacgggagtcaggcggtaggacgctcttccttttactgcctggagtactttccttctcagatgcttcgtactggaaacaactttcagttcagctacacctttgaagacgttcctttccacagcagctacgctcacagccagagtctggatcggctgatgaatcctctgatcgaccagtacctgtattatctgaacaaaacacaatcaaatagtggaactcttcagcagtctcggctactgtttagtcaagctggacccaccagcatgtctcttcaagctaaaaactggctacctggaccttgctacagacagcagcgtctgtcaaagcaggcaaacgacaacaacaacagcaactttccctggactgcggctacaaagtaccacctaaatggccgggactcgttggttaatccaggaccagctatggccagtcacaaagacgatgaagaaaagtttttccccatgcatggaaccctgatatttggtaaacaaggaacaaatgctaacgacgcggatttggacaatgtcatgattacagatgaagaagaaatccgcaccaccaatcccgtggctacggagcagtacggatatgtgtcaaataatttgcaaaactcaaatactggtccaactactggaactgtcaatcaccaaggagcgttacctggcatggtgtggcaggatcgagacgtgtacctgcagggacccatttgggccaagattcctcacaccgatggacactttcatccttctccactgatgggaggttttgggctcaaacacccgcctcctcagatcatgatcaaaaacactcccgttccagccaatcctcccacaaacttcagttctgccaagtttgcttctttcatcacacagtattccacggggcaggtcagcgtggagatcgagtgggagctgcagaaagagaacagcaaacgctggaatcccgaaattcagtacacttccaactacaacaaatctgttaatgtggactttactgtggacactaatggcgtgtattcagagcctcgccccattggcaccagatacctgactcgtaatctgtaa

SEQ ID NO: 4979 - DNA, 2217 bp, Adeno-associated virus
atggctgctgacggttatcttccagattggctcgaggacaacctctctgagggcattcgcgagtggtgggacctgaaacctggagcccccaagcccaaggccaaccagcagaagcaggacgacggccggggtctggtgcttcctggctacaagtacctcggacccttcaacggactcgacaagggggagcccgtcaacgcggcggacgcagcggccctcgagcacgacaaggcctacgaccagcagctcaaagcgggtgacaatccgtacctgcggtataaccacgccgacgccgagtttcaggagcgtctgcaagaagatacgtcttttgggggcaacctcgggcgagcagtcttccaggccaagaagcgggttctcgaacctctcggtctggttgaggaagctgctaagacggctcctggaaagaagagaccggtagaaccgtcacctcagcgttcccccgactcctccacgggcatcggcaagaaaggccagcagcccgctaaaaagagactgaactttggtcagactggcgactcagagtcagtccccgaccctcaaccaatcggagaaccacctgcaggcccctctggtctgggatctggtacaatggctgcaggcggtggcgctccaatggcagacaataacgaaggcgccgacggagtgggtagttcctcaggaaattggcattgcgattccacatggctgggcgacagagtcatcaccaccagcacccgaacctgggccctgcccacctacaacaaccacctctacaagcaaatatccaatgggacatcgggagggagcaccaacgacaacacctacttcggctacagcaccccctgggggtattttgacttcaacagattccactgccacttctcaccacgtgactggcagcgactcatcaacaacaactggggattccggccaaaaagactcagcttcaagctcttcaacatccaggtcaaggaggtcacgcagaatgaaggcaccaagaccatcgccaataaccttaccagcacgattcaggtatttacggactcggaataccagctgccgtacgtcctcggctccgcgcaccagggctgcctgcctccgttcccggcggacgtcttcatgattccccagtacggctaccttacactgaacaatggaagtcaagccgtaggccgttcctccttctactgcctggaatattttccatctcaaatgctgcgaactggaaacaattttgaattcagctacaccttcgaggacgtgcctttccacagcagctacgcacacagccagagcttggaccgactgatgaatcctctcatcgaccagtacctgtactacttatccagaactcagtccacaggaggaactcaaggtacccagcaattgttattttctcaagctgggcctgcaaacatgtcggctcaggctaagaactggctacctggaccttgctaccggcagcagcgagtctctacgacactgtcgcaaaacaacaacagcaactttgcttggactggtgccaccaaatatcacctgaacggaagagactctttggtaaatcccggtgtcgccatggcaacccacaaggacgacgaggaacgcttcttcccgtcgagtggagtcctgatgtttggaaaacagggtgctggaagagacaatgtggactacagcagcgttatgctaaccagcgaagaagaaattaaaaccactaaccctgtagccacagaacaatacggtgtggtggctgacaacttgcagcaaaccaatacagggcctattgtgggaaatgtcaacagccaaggagccttacctggcatggtctggcagaaccgagacgtgtacctgcagggtcccatctgggccaagattcctcacacggacggcaactgccacccttcaccgctaatgggaggatttggactgaagcacccacctcctcagatcctgatcaagaacacgccggtacctgcggatcctccaacaacgttcagccaggcgaaattggcttccttcattacgcagtacagcaccggacaggtcagcgtggaaatcgagtgggagctgcagaaggagaacagcaaacgctggaacccagagattcagtacacttcaaactactacaaatctacaaatgtggactttgctgtcaatacagagggaacttattctgagcctcgccccattggtactcgttacctcacccgtaatctgtaa

SEQ ID NO: 4980 - protein, 735 aa, Adeno-associated virus
MAADGYLPDWLEDTLSEGTRQWWKLKPGPPPPKPAERHKDDSRGLVLPGYKYLGPFNGLDKGEPVNEADAAALEHDKAYDRQLDSGDNPYLKYNHADAEFQERLKEDTSFGGNLGRAVFQAKKRVLEPLGLVEEPVKTAPGKKRPVEHSPAEPDSSSGTGKAGQQPARKRLNFGQTGDADSVPDPQPLGQPPAAPSGLGSTTMATGSGAPMADNNEGADGVGNSSGNWHCDSQWLGDRVITTSTRTWALPTYNNHLYKQISSQSGASNDNHYFGYSTPWGYFDFNRFHCHFSPRDWQRLINNNWGFRPKRLNFKLFNIQVKEVTQNDGTTTIANNLTSTVQVFTDSEYQLPYVLGSAHQGCLPPFPADVFMVPQYGYLTLNNGSQAVGRSSFYCLEYFPSQMLRTGNNFQFSYTFEDVPFHSSYAHSQSLDRLMNPLIDQYLYYLNKTQSNSGTLQQSRLLFSQAGPTSMSLQAKNWLPGPCYRQQRLSKQANDNNNSNFPWTAATKYHLNGRDSLVNPGPAMASHKDDEEKFFPMHGTLIFGKQGTNANDADLDNVMITDEEEIRTTNPVATEQYGYVSNNLQNSNTGPTTGTVNHQGALPGMVWQDRDVYLQGPIWAKIPHTDGHFHPSPLMGGFGLKHPPPQIMIKNTPVPANPPTNFSSAKFASFITQYSTGQVSVEIEWELQKENSKRWNPEIQYTSNYNKSVNVDFTVDTNGVYSEPRPIGTRYLTRNL

SEQ ID NO: 4981 - DNA, 2208 bp, Adeno-associated virus
atggctgccgatggttatcttccagattggctcgaggacactctctctgaaggaataagacagtggtggaagctcaaacctggcccaccaccaccaaagcccgcagagcggcatcaggacaacagcaggggtcttgtgcttcctgggtacaagtacctcggaccctccaacggactcgacaaaggagagccggtcaacgaggcagacgccgcggccctcgagcacgacaaggcctacgaccggcagctcgacagcggagacaacccgtacctcaagtacaaccacgccgacgcggagtttcaggagcgtcttaaagaagatacgtcttttgggggcaacctcggacgagcagtcttccaggcgaaaaagagggttcttgaacctctgggcctggttgaggaacctgttaagacggctccgggaaaaaagaggccggtagagcactctcctgtggagccagactcctcctcgggaaccggaaaagcgggccatcagcctgcgagaaagagattgaattttggtcagactggagacgcagactccgtacctgacccccagcctctcggacagccaccagcagcccccacaagtttgggatctactacaatggctacaggcagtggcgcaccaatggcagacaataacgagggtgccgatggagtgggtaattcctcaggaaattggcattgcgattcccaatggctgggcgacagagtcatcaccaccagcacccgaacctgggccctgcccacctacaacaaccacctctacaagcaaatctccagccaatcaggagcctcgaacgacaaccactactttggctgcagcaccccctgggggtattttgacttcaacagattccactgtcacttctccccacgtgattggcaaagactcatcaacaacaactggggattccgacccaagagactcaacttcaagctctttaacattcaagtcaaagaggtcacgcagaatgacggtacgacgacgattgccaataaccttaccagcacggttcaggtgtttactgactcggagtacccgctcccgtacgtcctcggctcggcgcatcaaggatgcctcccgccgtttccagcggacgtcttcatggtcccacagtatggatacctcaccctgaacaacgggagtcaggcggtaggacgctcttccttttactgcctggagtactttccttctcagatgctgcgtaccggaaacaactttaccttcagctacacctttgaggacgttcctttccacagcagctacgctcacagccagagtttggaccggctgatgaatcctctgatcgaccagtatctatattatctgaacaggacacaatcaaatagtggaactcttcagcagtctaggctactgtttagccaagctggacccaccagcatgtctcttcaagctaaaaactggctgcctggaccttgctacagacagcagcgtctttcaaagcaggcaaacgacaacaacaacagcaactttccctggactgcggctacaaagtatcatctaaatggccgggactcgttggttaatccaggaccagctatggccagccacaaagacgatgaagaaaagtttttccccatgcatggaaccctgatatttggtaaacaaggaacaaatgctaacgacgcggatttggagcatgttatgattacagatgaagaagaaatcaggaccaccaatcctgtggctacagagcagtacggaaacgtgtcaaataatttgcaaaactcaaatactggtccaactacagaaaatgtcaatcaccagggagcgttacctggtatggtgtggcaggatcgagacgtgtacctgcagggacccatttgggccaagattcctcacaccgacggacactttcacccttctccactgatgggaggttttggactcaaacacccgcctcctcaaatcatgatcaaaaacactcccgttccagccaatcctcccacaaacttcagttctgccaagtttgcttctttcatcacacagtattccacgggccaggtcagcgtggagattgagtgggagctgcagaaggagaacagcaaacgctggaaccccgagatccagtatacttccaactacaacaaatctgttaatgtggactttactgtggacactaatggtgtgtattcagagccttgccccattggcaccagatacctgactcgtaatctgtaa

SEQ ID NO: 4982 - protein, 735 aa, Adeno-associated virus
MAADGYLPDWLEDTLSEGIRQWWKLKPGPPPPKPAERHQDNSRGLVLPGYKYLGPSNGLDKGEPVNEADAAALEHDKAYDRQLDSGDNPYLKYNHADAEFQERLKEDTSFGGNLGRAVFQAKKRVLEPLGLVEEPVKTAPGKKRPVEHSPVEPDSSSGTGKAGHQPARKRLNFGQTGDADSVPDPQPLGQPPAAPTSLGSTTMATGSGAPMADNNEGADGVGNSSGNWHCDSQWLGDRVITTSTRTWALPTYNNHLYKQISSQSGASNDNHYFGCSTPWGYFDFNRFHCHFSPRDWQRLINNNWGFRPKRLNFKLFNIQVKEVTQNDGTTTIANNLTSTVQVFTDSEYPLPYVLGSAHQGCLPPFPADVFMVPQYGYLTLNNGSQAVGRSSFYCLEYFPSQMLRTGNNFTFSYTFEDVPFHSSYAHSQSLDRLMNPLIDQYLYYLNRTQSNSGTLQQSRLLFSQAGPTSMSLQAKNWLPGPCYRQQRLSKQANDNNNSNFPWTAATKYHLNGRDSLVNPGPAMASHKDDEEKFFPMHGTLIFGKQGTNANDADLEHVMITDEEEIRTTNPVATEQYGNVSNNLQNSNTGPTTENVNHQGALPGMVWQDRDVYLQGPIWAKIPHTDGHFHPSPLMGGFGLKHPPPQIMIKNTPVPANPPTNFSSAKFASFITQYSTGQVSVEIEWELQKENSKRWNPEIQYTSNYNKSVNVDFTVDTNGVYSEPCPIGTRYLTRNL

SEQ ID NO: 4983 - DNA, 2196 bp, Adeno-associated virus
atggctgctgacggttatcttccagattggctcgaggacaacctctctgagggcattcgcgagtggtgggcgctgaaacctggagccccgcaacccaaagccaaccagcaaaagcaggacgacggccggggtctggtgcttcctggctacaagtacctcggacccttcaacggactcgacaagggggagcccgtcaacgaggcggacgccgcggccctcgagcacgacaaggcctacgaccagcagctcaaagcgggtgacaatccgtacctgcggtataatcacgccgacgccgagtttcaagagcgtctgcaagaagatacgtcctttgggggcaacctcgggcgagcagtcttccaggccaaaaagagggtactcgagcctctgggtctggttgaggaaggcgctaagacggctcctggaaagaagcggccagtagaaccggactccagctcgggcatcggcaagtcaggccagcagcccgcgaaaaagagactgaattttgggcagactggcgactcagagtcagtgcctgacccccaacctctctcagaaccacccgcaggtccctctggtctgggatctggtacaatggctgctggcggtggcgctccaatggcagacaataacgaaggcgccgacggagtgggtaatgtctcaggaaattggcattgcgattccacatggctgggcgaccgagtcatcaccaccagcactcggacctgggccctccccacctacaacaaccacctctacaagcaaatctccaacgggacctcgggaggcagcagcaacgacaacacctactttggctacagcaccccctgggggtattttgactttaacagattccactgccacttttcaccacgtgactggcagcgactcatcaacaacaactgggggttccggcccaagaagctcaacttcaagctcttcaacatccaggtcaaggaggtcacccagaatgaaggcaccaagaccatcgccaataacctcaccagcacggtgcaggtctttacggactcggagtaccagctcccgtacgtgctcggctctgcccaccagggctgcctgcctccgttcccggcggacgtgttcatgattccgcagtacgggtacctgacgctgaacaacgggagccaggccgtggggcgatcctccttctactgcctggagtactttccctcgcagatgctgagaacgggcaacaactttaccttcagctacaccttcgaggacgtgcccttccacagcagctacgcgcacagccagagcctggaccggctgatgaacccgctgattgaccagtacctgtactacctgtctcggactcagaccaacgggaccaatgccacgcagactctgttgtttgctcaggccgggcctcagaacatgtcggctcaggccaagaactggctgcctggtccttgctatcggcagcagcgcgtctctacgacagtgtcgcaaaacaacaacagcaactttacctggaccggggcgaccaagtaccacctgaacggccgagactccctggtgagccccggtgtcgccatggcaacgcacaaggacgacgaggagcgcttcttcccgagcagcggggtcctgatgtttggcaagcagggcgctggaaaggacaatgtcgagtacaccaacgtgatgctcaccagcgaggaggagatcaagaccaccaaccctgtggccacggagcagtacggcgtggtggctgacaatctgcagcagaccaactcagctcccattgtgggggcagtcaacagccagggggccttacccggtatggtctggcagaaccgggacgtgtacctgcagggtcccatctgggccaagatcccgcatacggacggcaactttcacccgtctcctctcatgggcggctttggactgaaacacccgcctccccagatcctgatcaaaaacacgccggtacctgcggatcccccggtgaactttacggacgctaagctggcgagtttcatcacgcagtacagcaccgggcaggtcagcgtggagattgagtgggagctgcagaaggagaacagcaagcgctggaatcccgagattcagtacacttccaattattataaatcagctaatgtggactttgccgtcaatgcagatggtgtatatagtgaaccccgccccattggcactcgttacctcacccgtaatctgtaa

SEQ ID NO: 4984 - protein, 731 aa, Adeno-associated virus
MAADGYLPDWLEDNLSEGIREWWALKPGAPQPKANQQKQDDGRGLVLPGYKYLGPFNGLDKGEPVNEADAAALEHDKAYDQQLKAGDNPYLRYNHADAEFQERLQEDTSFGGNLGRAVFQAKKRVLEPLGLVEEGAKTAPGKKRPVEPDSSSGIGKSGQQPAKKRLNFGQTGDSESVPDPQPLSEPPAGPSGLGSGTMAAGGGAPMADNNEGADGVGNVSGNWHCDSTWLGDRVITTSTRTWALPTYNNHLYKQISNGTSGGSSNDNTYFGYSTPWGYFDFNRFHCHFSPRDWQRLINNNWGFRPKKLNFKLFNIQVKEVTQNEGTKTIANNLTSTVQVFTDSEYQLPYVLGSAHQGCLPPFPADVFMIPQYGYLTLNNGSQAVGRSSFYCLEYFPSQMLRTGNNFTFSYTFEDVPFHSSYAHSQSLDRLMNPLIDQYLYYLSRTQTNGTNATQTLLFAQAGPQNMSAQAKNWLPGPCYRQQRVSTTVSQNNNSNFTWTGATKYHLNGRDSLVSPGVAMATHKDDEERFFPSSGVLMFGKQGAGKDNVEYTNVMLTSEEEIKTTNPVATEQYGVVADNLQQTNSAPIVGAVNSQGALPGMVWQNRDVYLQGPIWAKIPHTDGNFHPSPLMGGFGLKHPPPQILIKNTPVPADPPVNFTDAKLASFITQYSTGQVSVEIEWELQKENSKRWNPEIQYTSNYYKSANVDFAVNADGVYSEPRPIGTRYLTRNL

SEQ ID NO: 4985 - DNA, 2196 bp, Adeno-associated virus
atggctgctgacggttatcttccagattggctcgaggacaacctctctgagggcattcgcgagtggtgggcgctgaaacctggagccccgcaacccaaagccaaccagcaaaagcaggacgacggccggggtctggtgcttcctggctacaagtacctcggacccttcaacggactcgacaagggggagcccgtcaacgaggcggacgccgcggccctcgagcacgacaaggcctacgaccagcagctcaaagcgggtgacaatccgtacctgcggtataatcacgccgacgccgagtttcaagagcgtctgcaagaagatacgtcctttgggggcaacctcgggcgagcagtcttccaggccaaaaagagggtactcgagcctctgggtctggttgaggaaggcgctaagacggctcctggaaagaagcggccagtagaaccggactccagctcgggcatcggcaagtcaggccggcagcccgcgaaaaagagactgaattttgggcagactggcgactcagagtcagtgcctgacccccaacctctctcagaaccacccgcaggtccctctggtctgggatctggtacaatggctgcaggcggtggcgctccaatggcagacaataacgaaggcgccgacggagtgggtaatgcctcaggaaattggcattgcgattccacatggctgggcgaccgagtcatcaccaccagcactcggacctgggccctccccacctacaacaaccacctctacaagcaaatctccaacgggacctcgggaggcagcagcaacgacaacacctactttggctacagcaccccctgggggtattttgactttaacagattccactgccacttttcaccacgtgactggcagcgactcatcaacaacaactggggattccggcccaagaggctcaacttcaagctcttcaacatccaggtcaaggaggtcacccagaatgaaggcaccaagaccatcgccaataacctcaccagcacggtgcaggtctttacggactcgaagtaccagctcccgtacgtgctcggctctgcccaccagggctgcctgcctccgttcccggcggacgtgttcatgattccgcagtacgggtacctgacgctgaacaacgggagccaggccgtggggcgatcctccttctactgcctggagtactttccctcgcagatgctgagaacgggcaacaactttaccttcagctacaccttcgaggacgtgcccttccacagcagctacgcgcacagccagagcctggaccggctgatgaacccgctgattgaccagtacctgtactacctgtctcggactcagaccaacgggaccaatgccacgcagactctgttgtttgctcaggccgggcctcagaacatgtcggctcaggccaagaactggctgcctggtccttgctatcggcagcagcgcgtctctacgacagtgtcgcaaaacaacaacagcaactttacctggaccggggcgaccaagtaccacctgaacggccgagactccctggtgaaccccggtgtcgccatggcaacgcacaaggacgacgaggagcgcttcttcccgagcagcggggtcctgatgtttggcaagcagggcgctggaaaggacaatgtcgagtacaccaacgtgatgctcaccagcgaggaggagatcaagaccaccaaccctgtggccacggagcagtacggtgtggtggctgacaatctgcagcagaccaactcggctcccattgtgggggcagtcaacagccagggggccttacccggtatggtctggcagaaccgggacgtgtacctgcagggtcccatctgggccaagatcccgcatacggacggcaactttcacccgtctcctctcatgggcggctttggactgaaacacccgcctccccagatcctgatcaaaaacacgccggtacctgcggatcccccggtgaactttacggacgctaagctggcgagtttcatcacgcagtacagcaccgggcaggtcagcgtggagattgagtgggagctgcagaaggagaacagcaagcgctggaatcccgagattcagtacacttccaattattataaatcagctaatgtggactttgccgtcaatgcagatggtgtatatagtgaaccccgccccattggcactcgttacctcacccgtaatctgtaa

SEQ ID NO: 4986 - protein, 731 aa, Adeno-associated virus
MAADGYLPDWLEDNLSEGIREWWALKPGAPQPKANQQKQDDGRGLVLPGYKYLGPFNGLDKGEPVNEADAAALEHDKAYDQQLKAGDNPYLRYNHADAEFQERLQEDTSFGGNLGRAVFQAKKRVLEPLGLVEEGAKTAPGKKRPVEPDSSSGIGKSGRQPAKKRLNFGQTGDSESVPDPQPLSEPPAGPSGLGSGTMAAGGGAPMADNNEGADGVGNASGNWHCDSTWLGDRVITTSTRTWALPTYNNHLYKQISNGTSGGSSNDNTYFGYSTPWGYFDFNRFHCHFSPRDWQRLINNNWGFRPKRLNFKLFNIQVKEVTQNEGTKTIANNLTSTVQVFTDSKYQLPYVLGSAHQGCLPPFPADVFMIPQYGYLTLNNGSQAVGRSSFYCLEYFPSQMLRTGNNFTFSYTFEDVPFHSSYAHSQSLDRLMNPLIDQYLYYLSRTQTNGTNATQTLLFAQAGPQNMSAQAKNWLPGPCYRQQRVSTTVSQNNNSNFTWTGATKYHLNGRDSLVNPGVAMATHKDDEERFFPSSGVLMFGKQGAGKDNVEYTNVMLTSEEEIKTTNPVATEQYGVVADNLQQTNSAPIVGAVNSQGALPGMVWQNRDVYLQGPIWAKIPHTDGNFHPSPLMGGFGLKHPPPQILIKNTPVPADPPVNFTDAKLASFITQYSTGQVSVEIEWELQKENSKRWNPEIQYTSNYYKSANVDFAVNADGVYSEPRPIGTRYLTRNL

SEQ ID NO: 4987 - DNA, 2196 bp, Adeno-associated virus
atggctgctgacggttatcttccagattggctcgaggacaacctctctgagggcattcgcgagtggtgggcgctgaaacctggagccccgcaacccaaagccaaccagcaaaagcaggacgacggccggggtctggtgcttcctggctacaagtacctcggacccttcaacggactcgacaagggggagcccgtcaacgaggcggacgccgcggccctcgagcacgacaaggcctacgaccagcagctcaaagcgggtgacaatccgtacctgcggtataatcacgccgacgccgagtttcaagagcgtctgcaagaagatacgtcctttgggggcaacctcgggcgagcagtcttccaggccaaaaagagggtactcgagcctctgggtctggttgaggaaggcgctaagacggctcctggaaagaagcggccagtagaaccggactccagctcgggcatcggcaagtcaggccagcagcccgcgaaaaagagactgaattttgggccgactggcgactcagagtcagtgcctgacccccaacctctctcagaaccacctgcaggtccctctggtctgggatctggtacaatggctgcaggcggtggcgctccaatggcagacaataacgaaggcgccgacggagtgggtaatgtctcaggaaattggcattgcgattccacatggctgggcgaccgagtcatcaccaccagcactcggacctgggccctccccacctacaacaaccacctctacaagcaaatctccaacgggacctcgggaggcagcagcaacgacaacacctactttggctacagcaccccctgggggtattttgactttaacagattccactgccacttttcaccacgcgactggcagcgactcatcaacaacaactggggattccggcccaagaagctcaacttcaagctcttcaacatccaggtcaaggaggtcacccagaatgaaggcaccaagaccaccgccaataacctcaccagcacggtgcaggtctttacggactcggagtaccagctcccgtacgtgctcggctctgcccaccagggctgcctgcctccgttcccggcggacgtgttcatgattccgcagtacgggtacctgacgctgaacaacgggagccaggccgtggggcgatcctccttctactgcctggagtactttccctcgcagatgctgagaacgggcaacaactttaccttcagctacaccttcgaggacgtgcccttccacagcagctacgcgcacagccagagcctggaccggctgatgaacccgctgattgaccagtacctgtactacctgtctcggactcagaccaacgggaccaatgccacgcagactctgttgtttgctcaggccgggcctcagaacatgtcggctcaggccaagaactggctgcctggtccttgctatcggcagcagcgcgtctctacggcagtgtcgcaaaacaacaacagcaactttacctggaccggggcgaccaagtaccacctgaacggccgagactccctggtgaaccccggtgtcgccatggcaacgcacaaggacgacgaggagcgcttcttcccgagcagcggggtcctgatgtttggcaagcagggcgctggaaaggacaatgtcgagtacaccaacgtgatgctcaccagcgaggaggagatcaagaccaccaaccctgtggccacggagcagtacggtgtggtggctgacaatctgcagcagaccaactcggctcccattgtgggggcagtcaacagccagggggccttacccggtatggtctggcagaaccgggacgtgtacctgcagggtcccatctgggccaagatcccgcatacggacggcaactttcacccgtctcctctcatgggcggctttggactgaaacacccgcctccccagatcctgatcaaaaacacgccggtacctgcggatcccccggtgaactttacggacgctaagctggcgagtttcatcacgcagtacagcaccgggcaggtcagcgtggagattgagtgggagctgcagaaggagaacagcaagcgctggaatcccgagattcagtacacttccaattattataaatcagctaatgtggactttgccgtcaatgcagatggtgtatatagcgaaccccgccccattggcactcgttacctcacccgtaatctgtaa

SEQ ID NO: 4988 - protein, 731 aa, Adeno-associated virus
MAADGYLPDWLEDNLSEGIREWWALKPGAPQPKANQQKQDDGRGLVLPGYKYLGPFNGLDKGEPVNEADAAALEHDKAYDQQLKAGDNPYLRYNHADAEFQERLQEDTSFGGNLGRAVFQAKKRVLEPLGLVEEGAKTAPGKKRPVEPDSSSGIGKSGQQPAKKRLNFGPTGDSESVPDPQPLSEPPAGPSGLGSGTMAAGGGAPMADNNEGADGVGNVSGNWHCDSTWLGDRVITTSTRTWALPTYNNHLYKQISNGTSGGSSNDNTYFGYSTPWGYFDFNRFHCHFSPRDWQRLINNNWGFRPKKLNFKLFNIQVKEVTQNEGTKTTANNLTSTVQVFTDSEYQLPYVLGSAHQGCLPPFPADVFMIPQYGYLTLNNGSQAVGRSSFYCLEYFPSQMLRTGNNFTFSYTFEDVPFHSSYAHSQSLDRLMNPLIDQYLYYLSRTQTNGTNATQTLLFAQAGPQNMSAQAKNWLPGPCYRQQRVSTAVSQNNNSNFTWTGATKYHLNGRDSLVNPGVAMATHKDDEERFFPSSGVLMFGKQGAGKDNVEYTNVMLTSEEEIKTTNPVATEQYGVVADNLQQTNSAPIVGAVNSQGALPGMVWQNRDVYLQGPIWAKIPHTDGNFHPSPLMGGFGLKHPPPQILIKNTPVPADPPVNFTDAKLASFITQYSTGQVSVEIEWELQKENSKRWNPEIQYTSNYYKSANVDFAVNADGVYSEPRPIGTRYLTRNL

SEQ ID NO: 4989 - DNA, 4404 bp, Adeno-associated virus
atggctgccgatggttatcttccagattggctcgagggcaacctctctgagggcattcgcgagtggtgggacttgaaacctggagccccgaaacccaaagccaaccagcaaaagcaggacgacggccggggtctggtgcttcctggctacaggtacctcggacccttcaacggactcgacaagggagagccggtcaacgaggcagacgccgcggccctcgagcacgacaaggcctacgacaagcagctcgagcagggggacaacccgtacctcaagtacaaccacgccgacgccgagtttcaggagcgtcttcaagaagatacgtcttttgggggcaacctcgggcgagcagtcttccaggccaagaagcgggttctcgaacctctcggtctggttgaggaaggcgctaagacggctcctggaaagaagagacccatagaatcccccgactcctccacgggcatcggcaagaacggccagccgcccgctaaaaagaagctcaactttgggcagactggcgactcagagtcagtgcccgacccccaacctctcggagaacctcccgccgcgccctcaggtctgggatctggtacaatggctgcaggcggtggcgcaccaatggcagacaataacgaaggcgccgacggagtgggtaatgcctccggaaattggcattgcgattccacatggctgggcgacagagtcatcaccaccagcacccgcacctgggccctgcccacctacaacaaccacctctacaagcagatatcaagtcagagcggggctaccaacgacaaccacttcttcggctacagcaccccctggggctattttgacttcaacagattccactgccacttctcaccacgtgactggcagcgactcatcaacaacaactggggattccggcccagaaagctgcggttcaagttgttcaacatccaggtcaaggaggtcacgacgaacgacggcgttacgaccatcgctaataaccttaccagcacgattcaggtcttctcggactcggagtaccaactgccgtacgtcctcggctctgcgcaccagggctgcctccctccgttccctgcggacgtgttcatgattcctcagtacggatatctgactctaaacaacggcagtcagtctgtgggacgttcctccttctactgcctggagtactttccttctcagatgctgagaacgggcgataactttgaattcagctacacctttgaggaagtgcctttccacagcagctatgcgcacagccagagcctggaccggctgatgaatcccctcatcgaccagtacctgtactacctggcccggacccagagcactacggggtccacaagggagctgcagttccatcaggctgggcccaacaccatggccgagcaatcaaagaactggctgcccggaccctgttatcggcagcagagactgtcaaaaaacatagacagcaacaacaacagtaactttgcctggaccggggccactaaataccatctgaatggtagaaattcattaaccaacccgggcgtagccatggccaccaacaaggacgacgaggaccagttctttcccatcaacggagtgctggtttttggcaaaacgggggctgccaacaagacaacgctggaaaacgtgctaatgaccagcgaggaggagatcaaaaccaccaatcccgtggctacagaagaatacggtgtggtctccagcaacctgcaatcgtctacggccggaccccagacacagactgtcaacagccagggggctctgcccggcatggtctggcagaaccgggacgtgtacctgcagggtcccatctgggccaaaattcctcacacggacggcaactttcacccgtctcccctgatgggcggatttggactcaaacacccgcctcctcaaattctcatcaaaaacaccccggtacctgctaatcctccagaggtgtttactcctgccaagtttgcctcatttatcacgcagtacagcaccggccaggtcagcgtggagatcgagtgggaactgcagaaagaaaacagcaaacgctggaatccagagattcagtacacctcaaattatgccaagtctaataatgtggaatttgctgtcaacaacgaaggggtttatactgagcctcgccccattggcacccgttacctcacccgtaacctgtaaatggctgccgatggttatcttccagattggctcgaggacaacctctctgagggcattcgcgagtggtgggacttgaaacctggagccccgaaacccaaagccaaccagcaaaagcaggacgacggccggggtctggtgcttcctggctacaagtacctcggacccttcaacggactcgacaagggggagcccgtcaacgcggcggacgcagcggccctcgagcacgacaaggcctacgaccagcagctcaaagcgggtgacaatccgtacctgcggtataaccacgccgacgccgagtttcaggagcgtctgcaagaagatacgtcttttgggggcaacctcgggcgagcagtcttccaggccaagaagcgggttctcgaacctctcggtctggttgaggaaggcgctaagacggctcctggaaagaagagaccggtagagccatcaccccagcgttctccagactcctctacgggcatcggcaagaaaggccagcagcccgcgaaaaagagactcaactttgggcagactggcgactcagagtcagtgcccgaccctcaaccaatcggagaaccccccgcaggcccctctggtctgggatctggtacaatggctgcaggcggtggcgctccaatggcagacaataacgaaggcgccgacggagtgggtagttcctcaggaaattggcattgcgattccacatggctgggcgacagagtcatcaccaccagcacccgaacctgggccctccccacctacaacaaccacctctacaagcaaatctccaacgggacttcgggaggaagcaccaacgacaacacctacttcggctacagcaccccctgggggtattttgactttaacagattccactgccacttctcaccacgtgactggcagcgactcatcaacaacaactggggattccggcccaagagactcaacttcaagctcttcaacatccaggtcaaggaggtcacgcagaatgaaggcaccaagaccatcgccaataaccttaccagcacgattcaggtctttacggactcggaataccagctcccgtacgtcctcggctctgcgcaccagggctgcctgcctccgttcccggcggacgtcttcatgattcctcagtacgggtacctgactctgaacaatggcagtcaggccgtgggccgttcctccttctactgcctggagtactttccttctcaaatgctgagaacgggcaacaactttgagttcagctaccagtttgaggacgtgccttttcacagcagctacgcgcacagccaaagcctggaccggctgatgaaccccctcatcgaccagtacctgtactacctgtctcggactcagtccacgggaggtaccgcaggaactcagcagttgctattttctcaggccgggcctaataacatgtcggctcaggccaaaaactggctacccgggccctgctaccggcagcaacgcgtctccacgacactgtcgcaaaataacaacagcaactttgcctggaccggtgccaccaagtatcatctgaatggcagagactctctggtaaatcccggtgtcgctatggcaacccacaaggacgacgaagagcgattttttccgtccagcggagtcttaatgtttgggaaacagggagctggaaaagacaacgtggactatagcagcgttatgctaaccagtgaggaagaaattaaaaccaccaacccagtggccacagaacagtacggcgtggtggccgataacctgcaacagcaaaacgccgctcctattgtaggggccgtcaacagtcaaggagccttacctggcatggtctggcagaaccgggacgtgtacctgcagggtcctatctgggccaagattcctcacacggacggaaactttcatccctcgccgctgatgggaggctttggactgaaacacccgcctcctcagatcctgattaagaatacacctgttcccgcggatcctccaactaccttcagtcaagctaagctggcgtcgttcatcacgcagtacagcaccggacaggtcagcgtggaaattgaatgggagctgcagaaagaaaacagcaaacgctggaacccagagattcaatacacttccaactactacaaatctacaaatgtggactttgctgttaacacagatggcacttattctgagcctcgccccatcggcacccgttacctcacccgtaatctgtaa

SEQ ID NO: 4990 - protein, 738 aa, Adeno-associated virus; identical to SEQ ID NO: 4793

SEQ ID NO: 4991 - protein, 738 aa, Adeno-associated virus; identical to SEQ ID NO: 4793

SEQ ID NO: 4992 - DNA, 2501 bp, Adeno-associated virus
gaattcgcccttggctgcgtcaactggaccaatgagaactttcccttcaacgattgcgtcgacaagatggtgatctggtgggaggagggcaagatgacggccaaggtcgtggagtccgccaaggccattcatcatctgctggggcgggctcccgagattgcttgctcggcctgcgatctggtcaacgtggacctggatgactgtgtttctgagcaataaatgacttaaaccaggtatggctgccgatggttatcttccagattggctcgaggacaacctctctgagggcattcgcgagtggtgggacttgagacctggagccccgaaacccaaagccaaccagcaaaagcaggacgacggccggggtctggtgcttcctggctacaagtacctcggacccttcaacggactcgacaagggagagccggtcaacgaggcagacgccgcggccctcgagcacgacaaggcctacgacaagcagctcgagcagggggacaacccgtacctcaagtacaaccacgccgacgccgagtttcaggagcgtcttcaagaagatacgtcttttgggggcaacctcgggcgagcagtcttccaggccaagaagcgggttctcgaacctctcggtctggttgaggaaggcgctaagacggctcctggaaagaagagacccatagaatcccccgactcctccacgggcatcggcaagaaaggccagcagcccgctaaaaagagactcaactttgggcagactggcgactcagagtcagtgcccgaccctcaaccaatcggagaaccccccgcaggcccctctggtctgggatctggcacaatggctgcaggcggtggcgctccaatggcagacaataacgaaggcgccgacggagtgggtagttcctcaggaaattggcattgcgattccacatggctgggcgacagagtcatcaccaccagcacccgaacctgggccctccccacctacaacaaccacctctacaagcaaatctccaacgggacatcgggaggaagcaccaacgacaacacctacttcggctacagcaccccctgggggtattttgactttaacagattccactgccacttctcaccacgtgactggcagcgactcatcaacaacaactggggattccggcccaagagactcaacttcaagctcttcaacatccaggtcaaggaggtcacgcagaatgaaggcaccaagaccatcgccaataaccttaccagcacgattcaggtctttacggactcggaataccagctcccgtacgtcctcggctctgcgcaccagggctgcctgcctccgttcccggcggacgtcttcatgattcctcagtacgggtacctgactctgaacaacggcagtcaggccgtgggccgttcctccttctactgcctggagtactttccttctcaaatgctgagaacgggcaacaactttgagttcagctaccagtttgaggacgtgccttttcacagcagctatgcgcacagccaaagcctggaccggctgatgaaccccctcatcgaccagtacctgtactacctgtctcggactcagtccacgggaggtaccgcaggaactcagcagttgctattttctcaggccgggcctaataacatgtcggctcaggccaaaaactggctacccgggccctgctaccggcagcaacgcgtctccacgacagtgtcgcaaaataacaacagcaactttgcttggaccggtgccaccaagtatcatctgaatggcagagactctctggtaaatcccggtgtcgctatggcaacgcacaagggcgacgaagagcgattttttccatccagcggagtcttgatgtttgggaaacagggagctggaaaagacaacgtagactatagcagcgttatgctaaccagtgaggaagaaatcaaaaccaccaacccagtggccacagaacagtacggcgtggtggccgataacctgcaacagcaaaacgccgctcctattgtaggggccgtcaacagtcaaggagccttacctggcatggtctggcagaaccgggacgtgtacctgcagggtcctatctgggccaagattcctcacacggacggcaactttcatccttcgccgctgatgggaggctttggactgaaacacccgcctcctcagatcctgattaagaatacacctgttcccgcggatcctccaactaccttcagtcaagccaagctggcgtcgttcatcacgcagtacagcaccggacaggtcagcgtggaaattgaatgggagctgcagaaagagaacagcaagcgctggaacccagagattcagtatacttccaactactacaaatctacaaatgtggactttgctgtcaatactgagggtacttattcagagcctcgccccattggcacccgttacctcacccgtaacctgtaattgcctgttaatcaataaaccggttgattcgtttcagttgaactttggtctcaagggcgaattc

SEQ ID NO: 4993 - DNA, 2187 bp, Adeno-associated virus
atggctgccgatggttatcttccagattggctcgaggacaacctctctgagggcattcgcgagtggtgggacttgaaacctggagccccgaaacccaaagccaaccagcaaaagcaggacgacggccggggtctggtgcttcctggctacaagtacctcggacccttcaacggactcgacaagggagagccggtcaacgaggcagacgccgcggccctcgagcacgacaaggcctacgacaagcagctcgagcagggggacaacccgtacctcaagtacaaccacgccgacgccgagtttcaggagcgtcttcaagaagatacgtcttttgggggcaacctcgggcgagcagtcttccaggccaagaagcgggttctcgaacctctcggtctggttgaggaaggcgctaagacggctcctggaaagaagagacccatagaatcccccgactcctccacgggcatcggcaagaaaggccagcagcccgctaaaaagaagctcaactttgggcagactggcgactcagagtcagtgcccgacccccaacctctcggagaacctcccgccgcgccctcaggtctgggatctggtacaatggctgcaggcggtggcgcaccaatggcagacaataacgaaggcgccgacggagtgggtaatgcctccggaaattggcattgcgattccacatggctgggcgacagagtcatcaccaccagcacccgcacctgggccctgcccacctacaacaaccacctctacaagcagatatcaagtcagagcggggctaccaacgacaaccacttcttcggctacagcaccccctggggctattttgacttcaacagattccactgccacttctcaccacgtgactggcagcgactcatcaacaacaactggggattccggcccagaaagctgcggttcaagttgttcaacatccaggtcaaggaggtcacgacgaacgacggcgttacgaccatcgctaataaccttaccagcacgattcaggtcttctcggactcggagtaccaactgccgtacgtcctcggctctgcgcaccagggctgcctccctccgttccctgcggacgtgttcatgattcctcagtacggatatctgactctaaacaacggcagtcagtctgtgggacgttcctccttctactgcctggagtactttccttctcagatgctgagaacgggcaataactttgaattcagctacacctttgaggaagtgcctttccacagcagctatgcgcacagccagagcctggaccggctgatgaatcccctcatcgaccagtacctgtactacctggcccggacccagagcactacggggtccacaagggagctgcagttccatcaggctgggcccaacaccatggccgagcaatcaaagaactggctgcccggaccctgttatcggcagcagagactgtcaaaaaacatagacagcaacaacaacagtaactttgcctggaccggggccactaaataccatctgaatggtagaaattcattaaccaacccgggcgtagccatggccaccaacaaggacgacgaggaccagttctttcccatcaacggagtgctggtttttggcgaaacgggggctgccaacaagacaacgctggaaaacgtgctaatgaccagcgaggaggagatcaaaaccaccaatcccgtggctacagaagaatacggtgtggtctccagcaacctgcaatcgtctacggccggaccccagacacagactgtcaacagccagggggctctgcccggcatggtctggcagaaccgggacgtgtacctgcagggtcccatctgggccaaaattcctcacacggacggcaactttcacccgtctcccctgatgggcggatttggactcaaacacccgcctcctcaaattctcatcaaaaacaccccggtacctgctaatcctccagaggtgtttactcctgccaagtttgcctcatttatcacgcagtacagcaccggccaggtcagcgtggagatcgagtgggaactgcagaaagaaaacagcaaacgctggaatccagagattcagtacacctcaaattatgccaagtctaataatgtggaatttgctgtcaacaacgaaggggtttatactgagcctcgccccattggcacccgttacctcacccgtaacctgtaa

SEQ ID NO: 4994 - protein, 728 aa, Adeno-associated virus; identical to SEQ ID NO: 4765

SEQ ID NO: 4995 - protein, 728 aa, Adeno-associated virus; identical to SEQ ID NO: 4829

SEQ ID NO: 4996 - protein, 728 aa, Adeno-associated virus; identical to SEQ ID NO: 4829

SEQ ID NO: 4997 - DNA, 3113 bp, Adeno-associated virus
gaattcgccctttctacggctgcgtcaactggaccaatgagaactttcccttcaacgattgcgtcgacaagatggtgatctggtgggaggagggcaagatgacggccaaggtcgtggagtccgccaaggccattctcggcggcagcaaggtgcgcgtggaccaaaagtgcaagtcgtccgcccagatcgatcccacccccgtgatcgtcacttccaacaccaacatgtgcgccgtgattgacgggaacagcaccaccttcgagcaccagcagccgttacaagaccggatgttcaaatttgaactcacccgccgtctggagcatgactttggcaaggtgacaaagcaggaagtcaaagagttcttccgctgggcgcaggatcacgtgaccgaggtggcgcatgagttctacgtcagaaagggtggagccaacaagagacccgcccccgatgacgcggataaaagcgagcccaagcgggcctgcccctcagtcgcggatccatcgacgtcagacgcggaaggagctccggtggactttgccgacaggtaccaaaacaaatgttctcgtcacgcgggcatgcttcagatgctgcttccctgcaagacatgcgagagaatgaatcagaatttcagcatttgcttcacgcacgggaccagagactgttcagaatgtttccccggcgtgtcagaatctcaaccggtcgtcagaaagaggacgtatcggaaactctgtgccattcatcatctgctggggcgggctcccgagattgcttgctcggcctgcgatctggtcaacgtggacctggatgactgtgtttctgagcaataaatgacttaaaccaggtatggctgccgatggtcatcttccagattggctcgaggacaacctctctgagggcattcgcgagtggtgggacttgaaacctggagccccgaaacccaaagccaaccagcaaaagcaggacgacggccggggtctggtgcttcctggctacaagtacctcggacccttcaacggactcgacaagggggagcccgtcaacgcggcggacgcagcggccctcgagcacgacaaggcctacgaccagcagctcaaagcgggtgacaatccgtacctgcggtataaccacgccgacgccgagtttcaggagcgtcttcaagaagatacgtcttttgggggcaacctcgggcgagcagtcttccaggccaagaagcgggttctcgaacctctcggtctggttgaggaaggcgctaagacggctcctggaaagaagagacccatagaatcccccgactcctccacgggcatcggcaagaaaggccagcagcccgctaaaaagaagctcaactttgggcagactggcgactcagagtcagtgcccgaccctcaaccaatcggagaaccccccgcaggcccctctggtctgggatctggtacaatggctgcaggcggtggcgctccaatggcagacaataacgaaggcgccgacggagtgggtagttcctcaggaaattggcattgcgattccacatagctgggcgacagagtcatcaccaccagcacccgaacctgggccctccccacctacaacaaccacctctacaagcaaatctccaacgggacatcgggaggaagcaccaacgacaacacctacttcggctacagcaccccctgggggtattttgactttaacagattccactgccacttctcaccacgtgactggcagcgactcatcaacaacagctggggattccggcccaagagactcaacttcaagctcttcaacatccaggtcaaggaggtcacgcagaatgaaggcaccaagaccatcgccaataaccttaccagcacgattcaggtctttacggactcggaataccagctcccgtacgtcctcggctctgcgcaccagggctgcctgcctccgttcccggcggacgtcttcatgattcctcagtacgggtacctgactctgaacaacggcagtcaggccgtgggccgttcctccttctactgcctggagtactttccttctcaaatgctgagaacgggcaacaactttgagttcagctaccagtttgaggacgtgccttttcacagcagctacgcgcacagccaaagcctggaccggctgatgaaccccctcatcgaccagtacctgtactacctgtctcggactcagtccacgggaggtaccgcaggaactcagcagttgctattttctcaggccgggcctaataacatgtcggctcaggccaaaaactggctacccgggccctgctaccggcagcaacgcgtctccacgacactgtcgcaaaataacaacagcaactttgcttggaccggtgccaccaagtatcatctgaatggcagagactctctggtaaatcccggtgtcgctatggcaacgcacaaggacgacgaagagcgattttttccatccagcggagtcttgatgtttgggaaacagggagctggaaaagacaacgtggactatagcagcgttatgctaaccagtgaggaagaaatcaaaaccaccaacccagtggccacagaacagtacggcgtggtggccgataacctgcaacagcaaaacgccgctcctattgtaggggccgtcaacagtcaaggagccttacctggcatggtctggcagaaccgggacgtgtacctgcagggtcctatctgggccaagattcctcacacggacggcaactttcatccttcgccgctgatgggaggctttggactgaaacacccgcctcctcagatcctgattaagaatacacctgttcccgcggatcctccaactaccttcagtcaagccaagctggcgtcgttcatcacgcagtacagcaccggacaggtcagcgtggaaattgaatgggagctgcagaaagagaacagcaagcgctggaacccagagattcagtatacttccaactactacaaatctacaaatgtggactttgctgtcaatactgagggtacttattcagagcctcgccccattggcacccgttacctcacccgtaacctgtaattgcctgttaatcaataaaccggttaattcgtttcagttgaactttggtctctgcgaagggcgaattc

SEQ ID NO: 4998 - DNA, 3106 bp, Adeno-associated virus
gaattcgcccttctacggctgcgtcaactggaccaatgagaactttcccttcaacgattgcgtcgacaagatggtgatctggtgggaggagggcaagatgacggccaaggtcgtggagtccgccaaggccattctcggcggcagcaaggtgcgcgtggaccaaaagtgcaagtcgtccgcccagatcgaccccacccccgtgatcgtcacctccaacaccaacatgtgcgccgtgattgacgggaacagcaccaccttcgagcaccagcagccgttgcaggaccggatgttcaaatttgaactcacccgccgtctggagcatgactttggcaaggcgacaaagcaggaagtcaaagagttcttccgctgggcgcaggatcacgtgaccgaggtggcgcatgagttctacgtcagaaagggtggagccaacaagagacccgcccccgatgacgcggataaaagcgagcccaagcgggcccgcccctcagtcgcggatccatcgacgtcagacgcggaaggagctccggtggactttgccgacaggtaccaaaacaaatgttctcgtcacgcgggcatgcttcagatgctgtttccctgcaaaacatgcgagagaatgaatcagaatttcaacatttgcttcacgcacgggaccagagactgttcagaatgtttccccggcgtgtcagaatctcaaccggtcgtcagaaagaggacgtatcggaaactctgtgccattcatcatctgctggggcgggctcccgagattgcttgctcggcctgcgatctggtcaacgtggacctggatgactgtgtttctgagcaataaatgacttaaaccaggtatggctgccgatggttatcttccagattggctcgaggacaacctctctgagggcattcgcgagtggtgggacttgaaacctggagccccgaaacccaaagccaaccagcaaaagcaggacgacggccggggtctggtgcttcctggctacaagtacctcggacccttcaacggactcgacaagggagagccggtcaacgaggcagacgccgcggccctcgagcacgacaaggcctacgacaagcagctcgagcagggggacaacccgtacctcaagtacaaccacgccgacgccgagtttcaggagcgtcttcaagaagatacgtcttttgggggcaacctcgggcgagcagtcttccgggccaagaagcgggttctcgaacctctcggtctggttgaggaaggcgctaagacggctcctggaaagaagagacccatagaatcccccgactcctccacgggcatcggcaagaaaggccagcagcccgctaaaaagaagctcaactttgggcagactggcgactcagagtcagtgcccgacccccaacctctcggagaacctcccgccgcgccctcaggtctgggatctggtacaatggctgcaggcggtggcgcaccaatggcagacaataacgaaggcgccgacggagtgggtaatgcctccggaaattggcattgcgattccacatggctgggcgacagagtcatcaccaccagcacccgcacctgggccctgcccacctacaacaaccacctctacaagcagatatcaagtcagagcggggctaccaacgacaaccacttcttcggctacagcaccccctggggctattttgacttcaacagattccactgccacttctcaccacgtgactggcagcgactcatcaacaacaaccggggattccggcccagaaagctgcggttcaagttgttcaacatccaggtcaaggaggtcacgacgaacgacggcgttacgaccatcgctaataaccttaccagcacgattcaggtcttctcggactcggagtaccaactgccgtacgtcctcggctctgcgcaccagggctgcctccctccgttccctgcggacgtgttcatgattcctcagtacggatatctgactctaaacaacggcagtcagtctgtgggacgttcctccttctactgcctggagtactttccttctcagatgctgagaacgggcaataactttgaattcagctaccagtttgaggacgtgccctttcacagcagctacgcgcacagccaaagcctggaccggctgatgaaccccctcatcgaccagtacctgtactacctgtctcggactcagtccacgggaggtaccgcaggaactcagcagttgctattttctcaggccgggcctaataacatgtcggctcaggccaaaaactggctacccgggccctgctaccggcagcaacgcgtctccacgacactgtcgcaaaataacaacagcaactttgcttggaccggtgccaccaagtatcatctgaatggcagagactctctggtaaatcccggtgtcgctatggcaacgcacaaggacgacgaagagcgattttttccatccagcggagtcttgatgtttgggaaacagggagctggaaaagacaacgtggactatagcagcgttatgctaaccagtgaggaagaaatcaaaaccaccaacccagtggccacagaacagtacggcgtggtggccgataacctgcaacagcaaaacgccgctcctattgtaggggccgtcaacagtcaaggagccttacctggcatggcctggcagaaccgggacgtgtacctgcagggtcctatctgggccaagattcctcacacggacggcaactttcatccttcgccgctgatgggaggctttggactgaaacacccgcctcctcagatcctgattaagaatacacctgttcccgcggatcctccaactaccttcagtcaagccaagctggcgtcgttcatcacgcagtacagcaccggacaggtcagcgtggaaattgaatgggagctgcagaaagagaacagcaagcgctggaacccagagattcagtatacttccaactactacaaatctacaaatgtggactttgctgtcaatactgagggtacttattcagagcctcgccccattggcacccgttacctcacccgtaacctgtaattgcctgttaatcaataaaccggttaattcgtttcagttgaactttggtctctgcgaagggcgaattc

SEQ ID NO: 4999 - DNA, 3197 bp, Adeno-associated virus
gaattcgccctttctacggctgcgtcaactggaccaatgagaactttcccttcaacgattgcgtcgacaagatggtgatctggtgggaggagggcaagatgacggccaaggtcgtggagtccgccaaggccattctcggcggcagcaaggtgcgcgtggaccaaaagtgcaagtcgtccgcccagatcgaccccacccccgtgatcgtcacctccaacaccaacatgtgcgccgtgattgacgggaacagcaccaccttcgagcaccagcagccgttacaagaccggatgttcaaatttgaactcacccgccgtctggagcacgactttggcaaggtgacaaagcaggaagtcaaagagttcttccgctgggcgcaggatcacgtgaccgaggtggcgcatgagttctacgtcagaaagggtggagccaacaagagacccgcccccgatgacgcggataaaagcgagcccaagcgggcctgcccctcagtcgcggatccatcgacgtcagacgcggaaggagctccggtggactttgccgacaggtaccaaaacaaatgttctcgtcacgcgggcatgcttcagatgctgtttccctgcaagacatgcgagagaatgaatcagaatttcaacatttgcttcacgcacgggaccagagactgttcagaatgtttccccggcgtgtcagaatctcaaccggtcgtcagaaagaggacgtatcggaaactctgtgccattcatcatctgctggggcgggctcccgagattgcttgctcggcctgcgatctggtcaacgtggacctggatgactgtgtttctgagcaataaatgacttaaaccaggtatggctgccgatggttatcttccagattggctcgaggacaacctctctgagggcattcgcgagtggtgggacttgaaacctggagccccgaaacccaaagccaaccagcaaaagcaggacgacggccggggtctggtgcttcctggctacaagtacctcggacccttcaacggactcgacaagggagagccggtcaacgaggcagacgccgcggccctcgagcacgacaaggcctacgacaagcagctcgagcagggggacaacccgtacctcaagtacaaccacgccgacgccgagtttcaggagcgtcttcaagaagatacgtcttttgggggcaacctcgggcgagcagtcttccaggccaagaagcgggttctcgaacctctcggtctggttgaggaaggcgctaagacggctcctggaaagaagagaccggtagagccatcaccccagcgttctccagactcctctacgggcatcggcaagacaggccagcagcccgcgaaaaagagactcaactttgggcagactggcgactcagagtcagtgcccgaccctcaaccaatcggagaaccccccgcaggcccctctggtctgggatctggtacaatggctgcaggcggtggcgctccaatggcagacaataacgaaggcgccgacggagtgggtagttcctcaggaaattggcattgcgattccacatggctgggcgacagagtcatcaccaccagcacccgaacctgggccctccccacctacaacaaccacctctacaagcaaatctccaacgggacatcgggaggaagcaccaacgacaacacctacttcggctacagcaccccctgggggtattttgactttaacagattccactgccacttctcaccacgtgactggcagcgactcatcaacaacaactggggattccggcccaagagactcaacttcaagctcttcaacatccaggtcaaggaggtcacgcagaatgaaggcaccaagaccatcgccaataaccttaccagcacgattcaggtctttacggactcggaataccagctcccgtacgtcctcggctctgcgcaccagggctgcctgcctccgttcccggcggacgtcttcatgattcctcagtacgggtacctgactctgaacaacggcagtcaggccgtgggccgttcctccttctactgcctggagtactttccttctcaaatgctgagaacgggcaacaactttgagttcagctaccagtttgaggacgtgccttttcacagcagctacgcgcacagccaaagcctggaccggctgatgaaccccctcatcgaccagtacctgtactacctgtctcggactcagtccacgggaggtaccgcaggaactcagcagttgctattttctcaggccgggcctaataacatgtcggctcaggccaaaaactggctacccgggccctgctaccggcagcaacgcgtctccacgacactgtcgcaaaataacaacagcaactttgcttggaccggtgccaccaagtatcatctgaatggcagagactctctggtaaatcccggtgtcgctatggcaacgcacaaggacgacgaagagcgattttttccatccagcggagtcttgatgtttgggaaacagggagctggaaaagacaacgtggactatagcagcgttatgctaaccagtgaggaagaaatcaaaaccaccaacccagtggccacagaacagtacggcgtggtggccgataacctgcaacagcaaaacgccgctcctattgtaggggccgtcaacagtcaaggagccttacctggcatggtctggcagaaccgggacgtgtacctgcagggtcctatctgggccaagattcctcacacggacggcaactttcatccttcgccgctgatgggaggctttggactgaaacacccgcctcctcagatcctgattaagaatacacctgttcccgcggatcctccaactaccttcagtcaagccaagctggcgtcgttcatcacgcagtacagcaccggacaggtcagcgtggaaattgaatgggagctgcagaaagagaacagcaagcgctggaacccagagattcagtatacttccaactactacaaatctacaaatgtggactttgctgtcaatactgagggtacttattcagagcctcgccccattggcacccgttacctcacccgtaacctgtaattgcctgttaatcaataaaccggttaattcgtttcagttgaactttggtctctgcgaagggcgaattcgtttaaacctgcaggactagtccctttagtgagggttaattctgagcttggcgtaatcatgggtcatag

SEQ ID NO: 5000 - DNA, 3276 bp, Adeno-associated virus
gaattcgcccttcgcagagaccaaagttcaactgaaacgaattaaccggtttattgattaacaggcaattacaggttacgggtgaggtaacgggtgccaatggggcgaggctcagtataaaccccttcgttgttgacagcaaattccacattattagacttggcataatttgaggtgtactgaatctctggattccagcgtttgctgttttctttctgcagttcccactcgatctccacgctgacctggccggtgctgtactgcgtgataaatgaggcaaacttggcaggagtaaacacctctggaggattagcaggtaccggggtgtttttgatgagaatttgaggaggcgggtgtttgagtccaaatccgtccatcaggggagacgggtgaaagttgccgtccgtgtgaggaattttggcccagatgggaccctgcaggtacacgtcccggttctgccagaccatgccgggcagagccccctggctgttgacagtctgtgtctggggtccggccgtagacgattgcaggttgctggagaccacaccgtattcttctgtagccacgggattggtggttttgatctcctcctcgctggtcattagcacgttttccagcgttgtcttgttggcagcccccgttttgccaaaaaccagcactccgttgatgggaaagaactggtcctcgtcgtccttgttggtggccatggctacgcccgggttggttaatgaatttctaccattcagatggtatttagtggccccggtccaggcaaagttactgttgttgttgctgtctatgttttttgacagtctctgctgccgataacagggtccgggcagccagttctttgattgctcggccatggtgttgggcccagcctgatggaactgcagctcccttgtggaccccgtagtgctctgggtccgggccaggtagtacaggtactggtcgatgaggggattcatcagccggtccaggctctggctatgcgcatagctgctgtggaaaggcacttcctcaaaggtgtagctgaattcaaagttattgcccgttctcagcatctgagaaggaaagtactccaggcagtagaaggaggaacgtcccacagactgactgccgttgtttagagtcagatatccgtactgaggaatcatgaacacgtccgcagggaacggagggaggcagccctggtgcgcagagccgaggacgtacggcagttggtactccgagtccgagaagacctgaatcgtgctggtaaggttattagcgatggtcgtaacgccgtcgtccgtcgtgacctccttgacctggatgttgaacaacttgaaccgcagctttctgggccggaatccccagttgttgttgatgagtcgctgccagtcacgtggtgagaagtggcagtggaatctgttaaagtcaaaatacccccagggggtgctgtagccgaagtaggtgttgtcgttggtgcttcctcccgatgtcccgttggagatttgcttgtagaggtggttgttgtaggtggggagggcccaggttcgggtgctggtggtgatgactctgtcgcccagccatgtggaatcgcaatgccaatttcctgaggaactacccactccgtcggcgccttcgttattgtctgccattggagcgccaccgcctgcagccattgtaccagatcccagaccagaggggcctgcggggggttctccgattggttgagggtcgggcactgactctgagtcgccagtctgcccaaagttgagtctctttttcgcgggctgctggcctgtcttgccgatgcccgtagaggagtctggagaacgctggggtgatggctctaccggtctcttctttccaggagccgtcttagcgccttcctcaaccagaccgagaggttcgagaacccgcttcttggcctggaagactgctcgcccgaggttgcccccaaaagacgtatcttcttgaagacgctcctgaaactcggcgtcggcgtggttgtacttgaggtacgggttgtccccctgctcgagctgcttgtcgtaggccttgtcgtgctcgagggccgcggcgtctgcctcgttgaccggctctcccttgtcgagtccgttgaagggtccgaggtacttgtagccaggaagcaccagaccccggccgtcgtcctgcttttgctggttggctttgggtttcggggctccaggtttcaagtcccaccactcgcgaatgccctcagagaggttgtcctcgagccaatctggaagataaccatcggcagccatacctggtttaagtcatttattgctcagaaacacagtcatccaggtccacgttgaccagatcgcaggccgagcaagcaatctcgggagcccgccccagcagatgatgaatggcacagagtttccgatacgtcctctttctgacgaccggttgagattctgacacgccggggaaacattctgaacagtctctggtcccgtgcgtgaagcaaatgttgaaattctgattcattctctcgcatgtcttgcagggaaacagcatctgaagcatgcccgcgtgacgagaacacttgttttggtacctgtcggcaaagtccaccggagctccttccgcgtctgacgtcgatggatgcaaaatgtcgcaaaagcactcacgtgacagctaatacaggaccactcccctatgacgtgatttacgtcagcgctatgcccgcgtgacgagaacatttgttttggtacctgtcggcaaagtccaccggagctccttccgcgtctgacgtcgatggatccgcgactgaggggcaggcccgcttgggctcgcttttatccgcgtcatcgggggcgggtctcttgttggctccaccctttctgacgtagaactcatgcgccacctcggtcacgtgatcctgcgcccagcggaagaactctttgacttcctgctttgtcaccttgccaaagtcatgctccagacggcgggtgagttcaaatttgaacatccggtcctgcaacggctgctggtgctcgaaggtggtgctgttcccgtcaatcacggcgcacatgttggtgttggaagtgacgatcacgggggtgggatcgatctgggcggaagacttgcacttttggtccacgcgcaccttgctgccgccgagaatggccttggcggactccacgaccttggccgtcatcttgccctcctcccaccagatcaccatcttgtcgacgcaatcgttgaagggaaagttctcattggtccagttgacgcagccgtagaaagggcgaattc

SEQ ID NO: 5001 - protein, 738 aa, Adeno-associated virus; identical to SEQ ID NO: 4777

SEQ ID NO: 5002 - protein, 738 aa, Adeno-associated virus
MAADGYLPDWLEDNLSEGIREWWDLKPGAPKPKANQQKQDDGRGLVLPGYKYLGPFNGLDKGEPVNAADAAALEHDKAYDQQLKAGDNPYLRYNHADAEFQERLQEDTSFGGNLGRAVFQAKKRVLEPLGLVEEGAKTAPGKKRPVEPSPQRSPDSSTGIGKKGHQPARKRLNFGQTGDSESVPDPQPIGEPPAGPSGLGSGTMAAGGGAPMADNNEGADGVGSSSGNWHCDSTWLGDRVITTSTRTWALPTYNNHLYKQISNGTSGGSTNDNTYFGYSTPWGYFDFNRFHCHFSPRDWQRLINNNWGFRPKRLNFKLFNIQVKEVTQNEGTKTIANNLTSTIQVFTDSEYQLPYVPGSAHQGCLPPFPADVFMIPQYGYLTLNNGSQAVGRSSFYCLEYFPSQMLRTGNNFEFSYTFEDVPFHSSYAHSQSLDRLMNPLIDQYLYYLSRTQSTGGTQGTQQLLFSQAGPANMSAQAKNWLPGPCYRQQRVSTTLSQNNNSNFAWTGATKYHLNGRDSLVNPGVAMATHKDDEERFFPSSGVLMFGKQGAGKDNVDYSSVMLTSEEEIKTTNPVATEQYGVVADNLQQTNGAPIVGTVNSQGALPGMVWQNRDVYLQGPIWAKIPHTDGNFHPSPLMGGFGLKHPPPQILIKNTPVPADPPTTFSQAKLASFITQYSTGQVSVEIEWELQKENSKRWNPEIQYTSNYYKSTNVDFAVNTEGTYSEPRPIGTRYLTRNL

SEQ ID NO: 5003 - protein, 738 aa, Adeno-associated virus; identical to SEQ ID NO: 4775

SEQ ID NO: 5004 - DNA, 2489 bp, Adeno-associated virus
gaattcgccctttctacggctgcgtcaactggaccaatgagaactttcccttcaacgattgcgtcgacaagatggtgatctggtgggaggagggcaagatgacggccaaggtcgtgaagtccgccaaggccattcatcatctgctggggcgggctcccgagattgcttgctcggcctgcgatctggtcaacgtggacctggatgactgtgtttctgagcaataaatgacttaaaccaggtatggctgccgatggttatcttccagattggctcgaggacaacctctctgagggcattcgcgagtggtgggacttgaaacctggagccccgaaacccaaagccaaccagcaaaagcaggacgacggccggggtctggtgcttcctggctacaagtacctcggacccttcaacggactcgacaagggagagccggtcaacgaggcagacgccgcggccctcgagcacgacaaggcctacgacaagcagctcgagcagggggacaacccgtacctcaagtacaaccacgccgacgccgagtttcaggagcgtcttcaagaagatacgtcttttgggggcaacctcgggcgagcagtcttccaggccaagaagcgggttctcgaacctctcggtctggttgaggaaggcgctaagacggctcctggaaagaagagacccatagaatcccccgactcctccacgggcatcggcaggaaaggccagcagcccgctaaaaagaagctcaactttgggcagactggcgactcagagtcagtgcccgaccctcaaccaatcggagaaccccccgcaggcccctctggtctgggatctggtacaatggctgcaggcggtggcgctccaatggcagacaataacgaaggcgccgacggagtgggtaatgcctccggaaattggcattgcgattccacatggctgggcgacagagtcatcaccaccagcacccgcacctgggccctgcccacctacaacaaccacctctacaagcagatatcaagtcagagcggggctaccaacgacaaccacttcttcggctacagcaccccctggggctattttgacttcaacagattccactgccacttctcaccacgtgactggcagcgactcatcaacaacaactggggattccggcccagaaagctgcggttcaagttgttcaacatccaggtcaaggaggtcacgacgaacgacggcgttacgaccatcgccaataaccttaccagcacgattcaggtcttctcggactcggagtaccaactgccgtacgtcctcggctctgcgcaccagggctgcctccctccgttccctgcggacgtgttcatgattcctcagtacggatatctgactctaaacaacggcagtcagtctgtgggacgttcctccttctactgcctggagtactttccttctcagatgctgagaacgggcaataactttgaattcagctacacctttgaggaagtgcctttccacagcagctatgcgcacagccagagcctggaccggctgatgaatcccctcatcgaccagtacctgtactacctggcccggacccagagcactacggggtccacaagggagctgcagttccatcaggctgggcccaacaccatggccgagcaatcaaagaactggctgcccggaccctgttatcggcagcagagactgtcaaaaaacatagacagcaacaacaacagtaactttgcctggaccggggccactaaataccatctgaatggtagaaattcattaaccaacccgggcgtagccatggccaccaacaaggacgacgaggaccagttctttcccatcaacggagtgctggtttttggcaaaacgggggctgccaacaagacaacgctggaaaacgtgctaatgaccagcgaggaggagatcaaaaccaccaatcccgtggctacagaagaatacggtgtggtctccagcaacctgcaatcgtctacggccggaccccagacacagactgtcaacagccagggggctctgcccggcatggtctggcagaaccgggacgtgtacctgcagggtcccatctgggccaaaattcctcacacggacggcaactttcacccgtctcccctgatgggcggatttggactcaaacacccgcctcctcaaattctcatcaaaaacaccccggtacctgctaatcctccagaggtgtttactcctgccaagtttgcctcatttatcacgcagtacagcaccggccaggtcagcgtggagatcgagtgggaactgcagaaagaaaacagcaaacgctggaatccagagattcagtacacctcaaattatgccaagtctaataatgtggaatttgctgtcaacaacgaaggggtttatactgagcctcgccccattggcacccgttacctcacccgtaacctgtaattgcctgttaatcaataaaccggttaattcgtttcagttgaactttggtcaagggcgaattc

SEQ ID NO: 5005 - DNA, 3098 bp, Adeno-associated virus
gaattcgccctttctacggctgcgtcaactggaccaatgagaactttcccttcaacgattgcgtcgacaagatggtgatctggtgggaggagggcaagatgacggccaaggtcgtggagtccgccaaggccattctcggcggcagcaaggtgcgcgtggaccaaaagtgcaagtcttccgcccagatcgatcccacccccgtgatcgtcacttccaacaccaacatgtgcgccgtgattgacgggaacagcaccaccttcgagcaccagcagccgttacaagaccggatgttcaaatttgaactcacccgccgtctggagcacgactttggcaaggtgacaaagcaggaagtcaaagagttcttccgctgggcgcaggatcacgtgaccgaggtggcgcatgagttctacgtcagaaagggtggagccaacaagagacccgcccccgatgacgcggataaaagcgagcccaagcgggcctgcccctcagtcgcggatccatcgacgtcagacgcggaaggagctccggtggactttgccgacaggtaccaaaacaaatgttctcgtcacgcgggcatgcttcagatgctgtttccctgcaagacatgcgagagaatgaatcagaatttcaacatttgcttcacgcacgggaccggagactgttcagaatgtttccccggcgtgtcagaatctcaaccggtcgtcagaaagaggacgtatcggaaactctgtgccattcatcatctgctggggcgggctcccgagattgcttgctcggcctgcgatctggtcaacgtggacctggatgactgtgtttctgagcaataaatgacttaaaccaggtatggctgccgatggttatcttccagattggctcgaggacaacctctctgagggcattcgcgagtggtgggacttgaaacctggagccccgaaacccaaagccaaccagcaaaagcaggacgacggccggggtctggtgcttcctggctacaagtacctcggacccttcaacggactcgacaagggagagccggtcaacgcggcggacgcagcggccctcgagcacgacaaggcctacgaccagcagctcaaagcgggtgacaatccgtacctgcggtataaccacgccgacgccgagtttcaggagcgtcttcaagaagatacgtcttttgggggcaacctcgggcgagcagtcttccaggccaagaagcgggttctcgaacctctcggtctggttgaggaaggcgctaagacggctcctggaaagaagagacccatagaatcccccgactcctccacgggcatcggcaagaaaggccagcagcccgctaaaaagaagctcaactttgggcagactggcgactcagagtcagtgcccgaccctcaaccaatcggagaaccccccgcaggcccctctggtctgggatctggtacaatggctgcaggcggtggcgctccaatggcagacaataacgaaggcgccgacggagtgggtaatgcctccggaaattggcattgcgattccacatggctgggcgacagagtcatcaccaccagcacccgcacctgggccctgcccacctacaacaaccacctctacaagcagatatcaagtcagagcggggctaccaacgacaaccacttcttcggctacagcaccccctggggctattttgacttcaacagattccactgccacttctcaccacgtgactggcagcgactcatcaacaacaactggggattccggcccagaaagctgcggttcaagttgttcaacatccaggtcaaggaggtcacgacgaacgacggcgttacgaccatcgctaataaccttaccagcacgattcaggtcttctcggactcggagtaccaactgccgtacgtcctcggctctgcgcaccagggctgcctccctccgttccctgcggacgtgttcatgattcctcagtacggatatctgactctaaacaacggcagtcagtctgtgggacgttcctccttctactgcctggagtactttccttctcagatgctgagaacgggcaataactttgaattcagctacacctttgaggaagtgcctttccacagcagctatgcgcacagccagagcctggaccggctgatgaatcccctcatcgaccagtacctgtactacctggcccggacccagagcactacggggtccacaagggagctgcagttccatcaggctgggcccaacaccatggccgagcaatcaaagaactggctgcccggaccctgttatcggcggcagagactgtcaaaagacatagacagcaacaacaacagtaactttgcctggaccggggccactaaataccatctgaatggtagaaattcattaaccaacccgggcgtagccatggccaccaacaaggacgacgaggaccagttctttcccatcaacggagtgctggtttttggcaaaacgggggctgccaacaagacaacgctggaaaacgtgctaatgaccagcgaggaggagatcaaaaccaccaatcccgtggctacagaagaatacggtgtggtctccagcaacctgcaatcgtctacggccggaccccagacacagactgtcaacagccagggggctctgcccggcatggtctggcagaaccgggacgtgtacctgcagggtcccatctgggccaaaattcctcacacggacggcaactttcacccgtctcccctgatgggcggatttggactcaaacacccgcctcctcaaattctcatcaaaaacaccccggtacctgctaatcctccagaggtgtttactcctgccaagtttgcctcatttatcacgcagtacagcaccggccaggtcagcgtggagatcgagtgggaactgcagaaagagaacagcaaacgctggaatccagagattcagtacacctcaaattatgccaagtctaataatgtggaatttgctgtcaacaacgaaggggtttatactgagcctcgccccattggcacccgttacctcacccgtaacctgtaattacttgttaatcaataaaccggttgattcgtttcagttgaactttggtctctgcgaagggcgaattc

SEQ ID NO: 5006 - DNA, 2969 bp, Adeno-associated virus
gaattcgccctttctacggctgcgtcaactggaccaatgagaactttcccttcaacgattgcgtcgacaagatggtgatctggtgggaggagggcaagatgacggccaaggtcgtggagtccgccaaggccattctcggcggcagcaaggtgcgcgtggaccaaaagtgcaagtcgtccgcccagatcgaccccacccccgtgatcgtcacctccaacaccaacatgtgcgccgtgattgacgggaacagcaccaccttcgagcaccagcagccgttacaagaccggatgttcaaatttgaactcacccgccgtctggagcacgactttggcaaggtgacaaagcaggaagtcaaagagttcttccgctgggcgcaggatcacgtgaccgaggtggcgcatgagttctacgtcagaaagggtggagccaacaagagacccgcccccgatgacgcggataaaagcgagcccaagcgggcctgcccctcagtcgcggatccatcgacgtcagacgcggaaggagctccggtggactttgccgacaggtaccaaaacaaatgttctcgtcacgcgggcatgcttcagatgctgtttccctgcaagacatgcgagagaatgaatcagaatttcaacatttgcttcacgcacgggaccagagactgttcagaatgtttccccggcgtgtcagaatctcaaccggtcgtcagaaagaggacgtatcggaaactctgtgccattcatcatctgctggggcgggctcccgagattgcttgctcggcctgcgatctggtcaacgtggacctggatgactgtgtttctgagcaataaatgacttaaaccaggtatggctgccgatggttatcttccagattggctcgaggacaacctctctgagggcatccgcgagtggtgggacttgaaacctggagccccgaaacccaaagccaaccagcaaaagcaggacgacggccggggtctggtgcttcctggctacaagtacctcggacccttcaacggactcgacaagggagagccggtcaacgaggcagacgccgcggccctcgagcacgacaaggcctacgacaagcagctcgagcagggggacaacccgtacctcaagtacaaccacgccgacgccgagtttcaggagcgtcttcaagaagatacgtcttttgggggcaacctcgggcgagcagtcttccaggccaagaagcgggttctcgaacctctcggtctggttgaggaaggcgctaagacggctcctggaaagaagagaccggtagagccatcaccccagcgttctccagactcctctacgggcatcggcaagacaggccagcagcccgcgaaaaagagactcaactttgggcagactggcgactcagagtcagtgcccgaccctcaaccaatcggagaaccccccgcaggcccctctggtctgggatctggtacaatggctgcaggcggtggcgctccaatggcagacaataacgaaggcgccgacggagtgggtagttcctcaggaaattggcattgcgattccacatggctgggcgacagagtcatcaccaccagcacccgaacctgggccctccccacctacaacaaccacctctacaagcaaatctccaacgggacatcgggaggaagcaccaacgacaacacctacttcggctacagcaccccctgggggtattttgactttaacagattccactgccacttctcaccacgtgactggcagcgactcatcaacaacaactggggattccggcccaagagactcaacttcaagctcttcaacatccaggtcaaggaggtcacgcagaatgaaggcaccaagaccatcgccaataaccttaccagcacgattcaggtctttacggactcggaataccagctcccgtacgtcctcggctctgcgcaccagggctgcctgcctccgttcccggcggacgtcttcatgattcctcagtacgggtacctgactctgaacaacggcagtcaggccgtgggccgttcctccttctactgcctggagtactttccttctcaaatgctgagaacgggcaacaactttgagttcagctaccagtttgaggacgtgccttttcacagcagctacgcgcacagccaaagcctggaccggctgacgaaccccctcatcgaccagtacctgtactacctggcccggacccagagcactacggggtccacaagggggctgcagttccatcaggctgggcccaacaccatggccgagcaatcaaagaactggctgcccggaccctgttatcggcagcagagactgtcaaaaaacatagacagcaacaacaacagtaactttgcctggaccggggccactaaataccatctgaatggtagaaattcattaaccaacccgggcgtagccatggccaccaacaaggacgacgaggaccagttctttcccatcaacggagtgctggtttttggcaaaacgggggctgccaacaagacaacgctggaaaacgtgctaatgaccagcgaggaggagatcaaaaccaccaatcccgtggctacagaagaatacggtgtggtctccagcaacctgcaatcgtctacggccggaccccagacacagactgtcaacagccagggggctctgcccggcatggtctggcagaaccgggacgtgtacctgcagggtcccatctgggccaaaattcctcacacggacggcaactttcacccgtctcccctgatgggcggatttggactcaaacacccgcctcctcaaattctcatcaagtatacttccaactactacaaatctacaaatgtggactttgctgtcaatactgagggtacttattcagagcctcgccccattggcacccgttacctcacccgtaacctgtaattgcctgttaatcaataaaccggttaattcgtttcagttgaactttggtctctgcgaagggcgaattc

SEQ ID NO: 5007 - DNA, 3113 bp, Adeno-associated virus
gaattcgccctttctacggctgcgtcaactggaccaatgagaactttcccttcaacgattgcgtcgacaagatggtgatctggtgggaggagggcaagatgacggccaaggtcgtggagtccgccaaggccattctcggcggcagcaaggtgcgcgtggaccaaaagtgcaagtcgtccgcccagatcgatcccacccccgtgatcgtcacttccaacaccaacatgtgcgccgtgattgacgggaacagcaccaccttcgagcaccagcagccgttacaagaccggatgttcaaatttgaactcacccgccgtctggagcatgactttggcaaggtgacaaagcaggaagtcaaagagttcttccgctgggcgcaggatcacgtgaccgaggtggcgcatgagttctacgtcagaaagggtggagccaacaagagacccgcccccgatgacgcggataaaagcgagcccaagcgggcctgcccctcagtcgcggatccatcgacgtcagacgcggaaggagctccggtggactttgccgacaggtaccaaaacaaatgttctcgtcacgcgggcatgcttcagatgctgtttccctgcaagacatgcgagagaatgaatcagaatttcaacatttgcttcacgcacgggaccagagactgttcagaatgtttccccggcgtgtcagaatctcaaccggtcgtcagaaagaggacgtatcggaaactctgtgccattcatcatctgctggggcgggctcccgagattgcttgctcggcctgcgatctggtcaacgtggacctggatgactgtgtttctgagcaataaatgacttaaaccaggtatggctgccgatggttatcttccagattggctcgaggacaacctctctgagggcattcgcgagtggtgggacttgaaacctggagccccgaaacccaaagccaaccagcaaaagcaggacgacggccggggtctggtgcttcctggctacaagtacctcggacccttcaacggactcgacaagggggagcccgtcaacgcggcggacgcagcggccctcgagcacgacaaggcctacgaccagcagctcaaagcgggtgacaatccgtacctgcggtataaccacgccgacgccgagtttcaggagcgtcttcaagaagatacgtcttttgggggcaacctcgggcgagcagtcttccaggccaagaagcgggttctcgaacctctcggtctggttgaggaaggcgctaagacggctcctggaaagaagagacccatagaatcccccgactcctccacgggcatcggcaagaaaggccagcagcccgctaaaaagaagctcaactttgggcagactggcgactcagagtcagtgcccgaccctcaaccaatcggagaaccccccgcaggcccctctggtctgggatctggtacaatggctgcaggcggtggcgctccaatggcagacaataacgaaggcgccgacggagtgggtagttcctcaggaaattggcattgcgattccacatggctgggcgacagagtcatcaccaccagcacccgaacctgggccctccccacctacaacaaccacctctacaagcaaatctccaacgggacatcgggaggaagcaccaacgacaacacctacttcggctacagcaccccctgggggtattttgactttaacagattccactgccacttctcaccacgtgactggcagcgactcatcaacaacaactggggattccggcccaagagactcaacttcaagctcttcaacatccaggtcaaggaggtcacgcagaatgaaggcaccaagaccatcgccaataaccttaccagcacgattcaggtctttacggactcggaataccagctcccgtacgtcctcggctctgcgcaccagggctgcctgcctccgttcccggcggacgtcttcatgattcctcagtacgggtacctgactctgaacaacggcagtcaggccgtgggccgttcctccttctactgcctggagtactttccttctcaaatgctgagaacgggcaacaactttgagttcagctaccagtttgaggacgtgccttttcacagcagctatgcgcacagccaaagcctggaccggctgatgaaccccctcatcgaccagtacctgtactacctgtctcggactcagtccacgggaggtaccgcaggaactcagcagttgctattttctcaggccgggcctaataacatgtcggctcaggccaaaaactggctacccgggccctgctaccggcagcaacgcgtctccacgacagtgtcgcaaaataacaacagcaactttgcttggaccggtgccaccaagtatcatctgaatggcagagactctctggtaaatcccggtgtcgctatggcaacgcacaagggcgacgaagagcgattttttccatccagcggagtcttgatgtttgggaaacagggagctggaaaagacaacgtggactatagcagcgttatgctaaccagtgaggaagaaatcaaaaccaccaacccagtggccacagaacagtacggcgtggtggccgataacctgcaacagcaaaacgccgctcctattgtaggggccgtcaacagtcaaggagccttacctggcatggtctggcagaaccgggacgtgtacctgcagggtcctatctgggccaagattcctcacacggacggcaactttcatccttcgccgctgatgggaggctttggactgaaacacccgcctcctcagatcctgattaagaatacacctgttcccgcggatcctccaactaccttcagtcaagccaagctggcgtcgttcatcacgcagtacagcaccggacaggtcagcgtggaaattgaatgggagctgcagaaagagaacagcaagcgctggaacccagagattcagtatacttccaactactacaaatctacaaatgtggactttgctgtcaatactgagggtacttattcagagcctcgccccattggcacccgttacctcacccgtagcctgtaattgcctgttaatcaataaaccggttgattcgtttcagttgaactttggtctctgcgaagggcgaattc

SEQ ID NO: 5008 - DNA, 3128 bp, Adeno-associated virus
gaattcgccctttctacggctgcgtcaactggaccaatgagaactttcccttcaacgattgcgtcgacaagatggtgatctggtgggaggagggcaagatgacggccaaggtcgtggagtccgccaaggccattctcggcggcagcaaggtgcgcgtggaccaaaagtgcaagtcgtccgcccagatcgaccccacccccgtgatcgtcacctccaacaccaacatgtgcgccgtgattgacgggaacagcaccaccttcgagcaccagcagccgttgcaggaccggatgttcaaatttgaactcacccgccgtctggagcatgactttggcaaggtgacaaagcaggaagtcaaagagttcttccgctgggcgcaggatcacgtgaccgaggtggcgcatgagttctacgtcagaaagggtggagccaacaagagacccgcccccgatgacgcggataaaagcgagcccaagcgggcctgcccctcagtcgcggatccatcgacgtcagacgcggaaggagctccggtggactttgccgacaggtaccaaaacaaatgttctcgtcacgcgggcatgcttcagatgctgtttccctgcaagacatgcgagagaatgaatcagaatttcaacatttgcttcacgcgcgggaccagagactgttcagaatgtttcccgggcgtgtcagaatctcaaccggtcgtcagaaagaggacgtatcggaaactctgtgccattcatcatctgctggggcgggctcccgagattgcttgctcggcctgcgatctggtcaacgtggacctggatgactgtgtttctgagcaataaatgacttaaaccaggtatggctgccgatggttatcttccagattggctcgaggacaacctctctgagggcattcgcgagtggtgggacttgaaacctggagccccgaaacccaaagccaaccagcaaaagcaggacgacggccggggtctggtgcttcctggctacaagtacctcggacccttcaacggactcgacaagggggagcccgtcaacgcggcggacgcagcggccctcgagcacgacaaggcctacgaccagcagctcaaagcgggtgacaatccgtacctgcggtataaccacgccgacgccgagtttcaggagcgtctgcaagaagatacgtcttttgggggcaacctcgggcgagcagtcttccaggccaagaagcgggttctcgaacctctcggtctggttgaggaaggcgctaagacggctcctggaaagaagagaccggtagagccatcaccccagcgttctccagactcctctacgggcatcggcaagacaggccagcagcccgcgaaaaagagactcaactttgggcagactggcgactcagagtcagtgcccgaccctcaaccaatcggagaaccccccgcaggcccctctggtctgggatctggtacaatggctgcaggcggtggcgctccaatggcagacaataacgaaggcgccgacggagtgggtagttcctcaggaaattggcattgcgattccacatggctgggcgacagagtcatcaccaccagcacccgaacctgggccctccccacctacaacaaccacctctacaagcaaatctccaacgggacatcgggaggaagcaccaacgacaacacctacttcggctacagcaccccctgggggtattttgactttaacagattccactgccacttctcaccacgtgactggcagcgactcatcaacaacaactggggattccggcccaagagactcaacttcaagctcttcaacatccaggtcaaggaggtcacgcagaatgaaggcaccaagaccatcgccaataaccttaccagcacgattcaggtctttacggactcggaataccagctcccgtacgtcctcggctctgcgcaccagggctgcccgcctccgttcccggcggacgtcttcatgattcctcagtacgggtacctgactctgaacaacggcagtcaggccgtgggccgttcctccttctactgcctggagtactttccttctcaaatgcggagaacgggcaacaactttgagttcagctaccagtttgaggacgtgccttttcacagcagctacgcgcatagccaaagcctggaccggctgatgaaccccctcatcgaccagtacctgtactacctgtctcggactcagtccacgggaggtaccgcaggaactcagcagttgctattttctcaggccgggcctaataacatgtcggctcaggccaaaaactggctacccgggccctgctaccggcagcaacgcgtctccacgacactgtcgcaaaataacaacagcaactttgcttggaccggtgccaccaagtatcatctgaatggcagagactctctggtaaatcccggtgtcgctatggcaacgcacaaggacgacgaagagcgattttttccatccagcggagtcttgatgtttgggaaacagggagctggaaaagacaacgtggactatagcagcgttatgctaaccagtgaggaagaaatcaaaaccaccaacccagtggccacagaacagtacggcgtggtggccgataacctgcaacagcaaaacgccgctcctattgtaggggccgtcaacagtcaaggagccttacctggcatggtctggcagaaccgggacgtgtacctgcagggtcctatctgggccaagattcctcacacggacggcaactttcatccttcgccgctgatgggaggctttggactgaaacacccgcctcctcagatcctgattaagaatacacctgttcccgcggatcctccaactaccttcagtcaagccaagctggcgtcgttcatcacgcagtacagcaccggacaggtcagcgtggaaattgaatgggagctgcagaaagagaacagcaagcgctggaacccagagattcagtatacttccaactactacaaatctacaaatgtggactttgctgtcaatactgagggtacttattcagagcctcgccccattggcacccgttacctcacccgtaacctgtaattgcctgttaatcaataaaccggttaattcgtttcagttgaactttggtctctgcgaagggcgaattc

SEQ ID NO: 5009 - protein, 738 aa, Adeno-associated virus; identical to SEQ ID NO: 5002

SEQ ID NO: 5010 - DNA, 1933 bp, Adeno-associated virus
  modified_base (1302)..(1302): a, c, t or g
caaggcctacgaccagcagctcaaagcgggtgacaatccgtacctgcggtataaccacgccgacgccgagtttcaggagcgtcttcaagaagatacgtcttttgggggcaacctcgggcgagcagtcttccaggccaaaaagcgggttctcgaacctcttggtctggttgagacgccagctaagacggcacctggaaagaagcgaccggtagactcgccagactccacctcgggcatcggcaagaaaggccagcagcccgcgaaaaagagactcaactttgggcagactggcgactcagagtcagtccccgaccctcaaccaatcggagaaccaccagcaggcccctctggtctgggatctggtacaatggctgcaggcggtggcgcaccaatggctgacaataacgagggcgccgacggagtgggtaatgcctcaggaaattggcattgcgattccacatggctgggcgacagagtcatcaccaccagcacccgaacctgggccctgcccacctacaacaaccacctctacaagcaaatctccagtcagtcagcagggagcaccaacgataacgtctatttcggctacagcaccccctgggggtattttgacttcaacagattccattgccacttctcaccacgtgactggcagcgacttatcaacaacaactggggattccggcccaagaagctcaacttcaagctcttcaacatccaggtcaaggaggtcacgacgaatgacggtgtcacaaccatcgctaataaccttaccagcacggttcaggtcttttcggactcggaatatcaactgccgtacgtcctcggctccgcgcaccagggctgcctgcctccgttcccggcagacgtgttcatgattccgcagtacggatacctgactctgaacaatggcagccaatcggtaggccgttcctccttctactgcctggagtactttccttctcagatgctgagaacgggcaacaacttcacctttagctacaccttcgaggacgtgcctttccacagcagctacgcgcacagccagagtctggaccggctgatgaatcccctcatcgaccagtacctgtactacttggccagaacacagagcaacgcaggaggtactgctggcaatcgggaactgcagttttatcagggcggacctaccaccatggccgaacaagcaaagaactggctgcccggaccttgcttccggcaacagagagtatccaagacgctggatcaaaataacaacagcaactttgcctggactggtgccacaaaataccatttaaatgnaagaaattcattggttaatcccggtgtcgccatggcaacccacaaggacgacgaggaacgcttcttcccttcgagcggagttctaatttttggcaaaactggagcagctaataaaactacattagaaaacgtgctcatgacaaatgaagaagaaattcgtcctaccaacccggtagctaccgaggaatacgggattgtaagcagcaacttgcaggcggctagcaccgcagcccagacacaagttgttaacaaccagggagccttacctggcatggtctggcagaaccgggacgtgtacctgcaaggtcccatttgggccaagattcctcacacggacggcaactttcacccgtctcctctaatgggtggctttggactgaaacacccgcctccccagatcctgatcaaaaacacaccggtacctgctaatcctccagaagtgtttactcctgccaagtttgcttccttcatcacgcagtacagcaccgggcaagtcagcgttgagatcgagtgggagctgcagaaagagaacagcaagcgctggaacccagagattcagtacacctccaactttgacaaacagactggagtggactttgctgttgacagccagggtgtttactctgagcct

SEQ ID NO: 5011 - DNA, 3105 bp, Adeno-associated virus
gaattcgcccttgctgcgtcaactggaccaatgagaactttcccttcaacgattgcgtcgacaagatggtgatctggtgggaggagggcaagatgaccgccaaggtcgtggagtccgccaaggccattctgggcggaagcaaggtgcgcgtggaccaaaagtgcaagtcatcggcccagatcgaccccacgcccgtgatcgtcacctccaacaccaacatgtgcgccgtgatcgacgggaacagcaccaccttcgagcaccagcagccgctgcaggaccgcatgttcaagttcgagctcacccgccgtctggagcacgactttggcaaggtgaccaagcaggaagtcaaagagttcttccgctgggctcaggatcacgtgactgaggtggcgcatgagttctacgtcagaaagggcggagccaccaaaagacccgcccccagtgacgcggatataagcgagcccaagcgggcctgcccctcagttgcggagccatcgacgtcagacgcggaagcaccggtggactttgcggacaggtaccaaaacaaatgttctcgtcacgcgggcatgcttcagatgctgtttccctgcaagacatgcgagagaatgaatcagaatttcaacgtctgcttcacgcacggggtcagagactgctcagagtgcttccccggcgcgtcagaatctcaacccgtcgtcagaaaaaagacgtatcagaaactgtgcgcgattcatcatctgctggggcgggcacccgagattgcgtgttcggcccgcgatctcgtcaacgtggacttggatgactgtgtttctgagcaataaatgacttaaaccaggtatggctgctgacggttatcttccagattggctcgaggacaacctctctgagggcattcgcgagtggtgggacctgaaacctggagcccccaagcccaaggccaaccagcagaagcaggacgacggccggggtctggtgcttcctggctacaagtacctcggacccttcaacggactcgacaagggggagcccgtcaacgcggcggacgcagcggccctcgagcacgacaaggcctacgaccagcagctcaaagcgggtgacaatccgtacctgcggtataaccacgccgacgccgagtttcaggagcgtctgcaagaagatacgtcttttgggggcaacctcgggcgagcagtcttccaggccaagaagagggtactcgaacctctgggcctggttgaagaaggtgctaagacggctcctggaaagaagagaccgttagagtcaccacaagagcccgactcctcctcaggaatcggcaaaaaaggcaaacaaccagccaaaaagagactcaactttgaagaggacactggagccggagacggaccccctgaaggatcagataccagcgccatgtcttcagacattgaaatgcgtgcagcaccgggcggaaatgctgtcgatgcgggacaaggttccgatggagtgggtaatgcctcgggtgattggcattgcgattccacctggtctgagggcaaggtcacaacaacctcgaccagaacctgggtcttgcccacctacaacaaccacttgtacctgcggctcggaacaacatcaaacagcaacacctacaacggattctccaccccctggggatactttgactttaacagattccactgtcacttctcaccacgtgactggcaaagactcatcaacaacaactggggactacgaccaaaagccatgcgcgttaaaatcttcaatatccaagttaaggaggtcacaacgtcgaacggcgagactacggtcgctaataaccttaccagcacggttcagatatttgcggactcgtcgtatgagctcccgtacgtgatggacgctggacaagagggaagtctgtctcctttccccaatgacgtcttcatggtgcctcaatatggctactgtggcattgtgactggcgaaaatcagaaccagacggacagaaatgctttctactgcctggagtattttccttcacaaatgctgagaactggcaataactttgaaatggcttacaactttgggaaggtgccgttccactcaatgtatgcttacagccagagcccggacagactgatgaatcccctcctggaccagtacctgtggcacttacagtcgaccacctctggagagactctgaatcaaggcaatgcagcaaccacatttggaaaaatcaggagtggagactttgccttttacagaaagaactggctgcctgggccttgtgttaaacagcagagactctcaaaaactgccagtcaaaattacaagattcctgccagcgggggcaacgctctgttaaagtatgacacccactataccttaaacaaccgctggagcaacatagcgcctggacctccaatggcaacagctggaccttcagatggggacttcagcaacgcccagctcatcttccctggaccatcagtcaccggaaacacaacaacctcagcaaacaatctgttgtttacatcagaagaagaaattgctgccaccaacccaagagacacggacatgtttggtcagattgctgacaataatcagaatgctacaactgctcccataaccggcaacgtgactgctatgggagtgcttcctggcatggtgtggcaaaacagagacatttactaccaagggccaatttgggccaagatcccacacgcggacggacattttcatccttcaccgctaattggcggttttggactgaaacatccgcctccccagatatttatcaaaaacacccccgtacctgccaatcctgcgacaaccttcactgcagccagagtggactctttcatcacacaatacagcaccggccaggtcgctgttcagattgaatgggaaatcgaaaaggaacgctccaaacgctggaatcctgaagtgcagtttacttcaaactatgggaaccagtcttctatgttgtgggctcccgatacaactgggaagtatacagagccgcgggttattggctctcgttatttgactaatcatttgtaactgcctagttaatcaataaaccgtgtgattcgtttcagttgaactttggtctctgcgaagggcgaattc

SEQ ID NO: 5012 - protein, 733 aa, Adeno-associated virus
MAADGYLPDWLEDNLSEGIREWWDLKPGAPKPKANQQKQDDGRGLVLPGYKYLGPFNGLDKGEPVNAADAAALEHDKAYDQQLKAGDNPYLRYNHADAEFQERLQEDTSFGGNLGRAVFQAKKRVLEPLGLVEEGAKTAPGKKRPLESPQEPDSSSGIGKKGKQPAKKRLNFEEDTGAGDGPPEGSDTSAMSSDIEMRAAPGGNAVDAGQGSDGVGNASGDWHCDSTWSEGKVTTTSTRTWVLPTYNNHLYLRLGTTSNSNTYNGFSTPWGYFDFNRFHCHFSPRDWQRLINNNWGLRPKAMRVKIFNIQVKEVTTSNGETTVANNLTSTVQIFADSSYELPYVMDAGQEGSLPPFPNDVFMVPQYGYCGIVTGENQNQTDRNAFYCLEYFPSQMLRTGNNFEMAYNFEKVPFHSMYAHSQSLDRLMNPLLDQYLWHLQSTTSGETLNQGNAATTFGKIRSGDFAFYRKNWLPGPCVKQQRFSKTASQNYKIPASGGNALLKYDTHYTLNNRWSNIAPGPPMATAGPSDGDFSNAQLIFPGPSVTGNTTTSANNLLFTSEEEIAATNPRDTDMFGQIADNNQNATTAPITGNVTAMGVLPGMVWQNRDIYYQGPIWAKIPHADGHFHPSPLIGGFGLKHPPPQIFIKNTPVPANPATTFTAARVDSFITQYSTGQVAVQIEWEIEKERSKRWNPEVQFTSNYGNQSSMLWAPDTTGKYTEPRVIGSRYLTNHL

SEQ ID NO: 5013 - DNA, 3105 bp, Adeno-associated virus
gaattcgcccttgctgcgtcaactggaccaatgagaactttcccttcaacgattgcgtcgacaagatggtgatctggtgggaggagggcaagatgaccgccaaggtcgtggagtccgccaaggccattctgggcggaagcaaggtgcgcgtggaccaaaagtgcaagtcatcggcccagatcgaccccacgcccgtgatcgtcacctccaacaccaacatgtgcgccgtgatcgacgggaacagcaccaccttcgagcaccagcagccgctgcaggaccgcatgttcaagttcgagctcacccgccgtctggagcacgactttggcaaggtgaccaagcaggaagtcaaagagttcttccgctgggctcaggatcacgtgactgaggtggcgcatgagttctacgtcagaaagggcggagccaccaaaagacccgcccccagtgacgcggatataagcgagcccaagcgggcctgcccctcagttgcggagccatcgacgtcagacgcggaagcaccggtggactttgcggacaggtaccaaaacaaatgttctcgtcacgcgggcatgcttcagatgctgtttccctgcaagacatgcgagagaatgaatcagaatttcaacgtctgcttcacgcacggggtcagagactgctcagagtgcttccccggcgcgtcagaatctcaacccgtcgtcagaaaaaagacgtatcagaaactgtgcgcgattcatcatctgctggggcgggcacccgagattgcgtgttcggcctgcgatctcgtcaacgtggacttggatgactgtgtttctgagcaataaatgacttaaaccaggtatggctgctgacggttatcttccagattggctcgaggacaacctctctgagggcattcgcgagtggtgggacctgaaacctggagcccccaagctcaaggccaaccagcagaagcaggacgacggccggggtctggtgcttcctggctacaagtacctcggacccttccacggactcgacaagggggagcccgtcaacgcggcggacgcagcggccctcgagcacgacaaggcctacgaccagcagctcaaagcgggtgacaatccgtacctgcggtataaccacgccgacgccgagtttcaggagcgtctgcaagaagatacgtcttttgggggcaacctcgggcgagcagtcttccaggccaagaagagggtactcgaaccactgggcctggttgaagaaggtgctaagacggctcctggaaagaagagaccgttagagtcaccacaagagcccgactcctcctcaggaatcggcaaaaaaggcaaacaaccagccaaaaagagactcaactttgaagaggacactggagccggagacggaccccctgaaggatcagataccagcgccatgtcttcagacattgaaatgcgtgcagcaccgggcggaaatgctgtcgatgcgggacaaggttccgatggagtgggtaatgcctcgggtgattggcattgcgattccacctggtctgagggcaaggtcacaacaacctcgaccagaacctgggtcttgcccacctacaacaaccacttgtacctgcggctcggaacaacatcaaacagcaacacctacaacggattctccaccccctggggatactttgactttaacagattccactgtcacttctcaccacgtgactggcaaagactcatcaacaacaactggggactacgaccaaaagccatgcgcgttaaaatcttcaatatccaagttaaggaggtcacaacgtcgaacggcgagactacggtcgctaataaccttaccagcacggttcagatatttgcggactcgtcgtatgagctcccgtacgtgatggacgctggacaagagggaagtctgcctcctttccccaatgacgtcttcatggtgcctcaatatggctactgtggcattgtgactggcgaaaatcagaaccagacggacagaaatgctttctactgcctggagtattttccttcacaaatgctgagaactggcaataactttgaaatggcttacaactttgagaaggtgccgttccactcaatgtatgctcacagccagagcctggacagactgatgaatcccctcctggaccagtacctgtggcacttacagtcgaccacctctggagagactctgaatcaaggcaatgcagcaaccacatttggaaaaatcaggagtggagactttgccttttacagaaagaactggctgcctgggccttgtgttaaacagcagagattctcaaaaactgccagtcaaaattacaagattcctgccagcgggggcaacgctctgttaaagtatgacacccactataccttaaacaaccgctggagcaacatagcgcctggacctccaatggcaacagctggaccttcagatggggacttcagcaacgcccagctcatcttccctggaccatcagtcaccggaaacacaacaacctcagcaaacaatctgttgtttacatcagaaggagaaattgctgccaccaacccaagagacacggacatgtttggtcagattgctgacaataatcagaatgctacaactgctcccataaccggcaacgtgactgctatgggagtgcttcctggcatggtgtggcaaaacagagacatttactaccaagggccaatttgggccaagatcccacacgcggacggacattttcatccttcaccgctaattggcggttttggactgaaacatccgcctccccagatatttatcaaaaacacccccgtacctgccaatcctgcgacaaccttcactgcagccagagtggactctttcatcacacaatacagcaccggccaggtcgctgttcagattgaatgggaaatcgaaaaggaacgctccaaacgccggaatcctgaagtgcagtttacttcaaactatgggaaccagtcttctatgttgtgggctcccgatacaactgggaagtatacagagccgcgggttattggctctcgttatttgactaatcatttgtaactgcctagttaatcaataaaccgtgtgattcgtttcagttgaactttggtctctgcgaagggcgaattc

SEQ ID NO: 5014 - DNA, 3105 bp, Adeno-associated virus
gaattcgcccttcgcagagaccaaagttcaactgaaacgaatcacacggtttattgattaactaggcagttacaaatgattagtcaaataacgagagccaataacccgcggctctgtatacttcccagttgtatcgggagcccacaacatagaagactggttcccacagtttgaagtaaactgcacttcaggattccagcgtttggagcgttccttttcgatttcccattcaatctgaacagcgacctggccggtgctgtattgtgtgatgaaagagtccactctggctgcagtgaaggttgtcgcaggataggcaggtacgggggtgtttttgataaatatctggggaggcggatgtttcagtccaaaaccgccaattagcggtgaaggatgaaaatgtccgtccgcgtgtgggatcttggcccaaattggcccttggtagtaaatgtctctgttttgccacaccatgccaggaagcactcccatagcagtcacgttgccggttatgggagcagttgtagcattctgattattgtcagcaatctgaccaaacatgtccgtgtctcttgggttggtggcagcaatttcttcttctgatgtaaacaacagattgtttgctgaggttgttgtgtttccggtgactgatggtccagggaagatgagctgggcgttgctgaagtccccatctgaaggtccagctgttgccattggaggtccaggcgctatgttgctccagcggttgtttaaggtatagtgggtgtcatactttaacagagcgttgcccccgctggcaggaatcttgtaattttgactggcagtttttgagaatctctgctgtttaacacaaggcccaggcagccagttctttctgtaaaaggcaaagtctccactcctgatttttccaaatgtggttgctgcattgccttgattcagagtctctccagaggtggtcgactgtaagtgccacaggtactggtccaggaggggattcatcagtccgtccaggctctggctgtgagcatacattgagtggaacggcaccttctcaaagttgtaagccgtttcaaagttattgccagttctcagcatttgtgaaggaaaatactccaggcagtagaaagcatttctgtccgtctggttctgattttcgccagtcacaatgccacagtagccatattgaggcaccatgaagacgtcattggggaaaggaggcagacttccctcttgtccagcgtccatcacgtacgggagctcatacgacgagtccgcaaatatctgaaccgtgctggtaaggttattagcgaccgtagtctcgccgttcgacgttgtgacctccttaacttggatattgaagattttaacgcgcatggcttttggtcgtagtccccagttgttgttgatgagtctttgccagtcacgtggtgagaagtgacagtggaatctgttaaagtcaaagtatccccagggggtggagaatccgttgtaggtgttgctgtttgatgttgttccgagccgcaggtacaagtggttgttgtaggtgggcaagacccaggttctggtcgaggttgttgtgaccttgccctcagaccaggtggaatcgcaatgccaatcacccgaggcattacccactccatcggaaccttgtcccgcatcgacagcatttccgcccggtgctgcacgcatttcaatgtctgaagacatggcgctggtatctgatccttcagggggtccgtctccggctccagtgtcctcttcaaagttgagtctctttttggctggttgtttgccttttttgccgattcctgaggaggagtcgggctcttgtggtgactctaacggtctcttctttccaggagccgtcttagcaccttcttcaaccaggcccagaggttcgagtaccctcttcttggcctggaagactgctcgcccgaggttgcccccaaaagacgtatcttcttgcagacgctcctgaaactcggcgtcggcgtggttataccgcaggtacggattgtcacccgctttgagctgctggtcgtaggccttgtcgtgctcgagggccgctgcgtccgccgcgttgacgggctcccccttgtcgagtccgttgaagggtccgaggtactcgtagccaggaagcaccagaccccggccgtcgtcctgcttctgctggttggccttgggcttgggggctccaggtttcaggtcccaccactcgcgaatgccctcagagaggttgtcctcgagccaatctggaagataaccgtcagcagccatacctggtttaagtcatttattgctcagaaacacagtcatccaagtccacgttgacgagatcgcaggccgaacacgcaatctcgggtgcccgccccagcagatgatgaatcgcgcacagtttctgatacgtcttttttctgacgacgggttgagattctgacgcgccggggaagcactctgagcagtctctgaccccgtgcgtgaagcagacgttgaaattctgattcattctctcgcatgtcttgcagggaaacagcatctgaagcatgcccgcgtgacgagaacatttgttttggtacctgtccgcaaggtccaccggtgcttccgcgtctgacgtcgatggctccgcaactgaggggcaggcccgcttgggctcgcttatatccgcgtcactgggggcgggtcttttggtggctccgccctttctgacgtagaactcatgcgccacctcagtcacgtgatcctgagcccagcggaagaactctttgacttcctgcttggtcaccttgccaaagtcgtgctccagacggcgggtgagctcgaacttgaacatgcggtcctgcagcggctgctggtgctcgaaggtggtgctgttcccgtcgatcacggcgcacatgttggtgttggaggtgacgatcacgggcgtggggtcgatctgggccgatgacttgcacttttggtccacgcgcaccttgcttccgcccagaatggccttggcggactccacgaccttggcggtcatcttgccctcctcccaccagatcaccatcttgtcgacgcaatcgttgaagggaaagttctcattggtccagttgacgcagcaagggcgaattc

SEQ ID NO: 5015 - DNA, 3094 bp, Adeno-associated virus
gaattcgcccttgctgcgtcaactggaccaagagaactttcccttcaacgattgcgtcgacaagatggtgatctggtgggaggagggcaagatgacggccaaggtcgtggagtccgccaaagccattctgggcggaagcaaggtgcgcgtcgaccaaaagtgcaagtcctcggcccagatcgatcccacccccgtgatcgtcacctccaacaccaacatgtgcgccgtgatcgacgggaacagcaccaccttcgagcaccagcagccgttgcaggaccggatgttcaaatttgaactcacccgccgtctggaacacgactttggcaaggtgaccaagcaggaagtcaaagagttcttccgctgggctagtgatcacgtgactgaggtgacgcatgagttctacgtcagaaagggcggagccagcaaaagacccgcccccgatgacgcggatataagcgagcccaagcgggcctgtccctcagtcacggacccatcgacgtcagacgcggaaggagctccggtggactttgccgacaggtaccaaaacaaatgttctcgtcacgcgggcatgcttcagatgctgtttccctgcaaaacgtgcgagagaatgaatcagaatttcaacatttgcttcacgcacggggtcagagactgtttagaatgtttccccggcgtgtcagaatctcaaccggtcgtcagaaaaaagacgtatcggaagctgtgtgcgattcatcatctgctggggcgggcacccgagattgcttgctcggcctgcgacctggtcaacgtggacctggacgactgtgtttctgagcaataaatgacttaaaccgggtatggctgccgatggttatcttccagattggctcgaggacaacctctctgagggcattcgcgagtggtgggacctgaaacctggagccccgaaacccaaagccaaccagcaaaagcaggacgacggccggggtctggtgcttcctggctacaagtacctcggacccttcaacggactcgacaagggggagcccgtcaacgcggcggacgcagcggccctcgagcacgacaaggcctacgaccagcagctcaaagcgggtgacaatccgtacctgcggtataaccacgccgacgccgagtttcaggagcgtctgcaagaagatacgtcatttgggggcaacctcgggcgagcagtcttccaggccaagaagcgggttctcgaacctctcggtctggttgaggaaggcgctaagacggctcctggaaagaagagacccatagactctccagactcctccacgggcatcggcaaaaaaggccagcagcccgctaaaaagaagctcaattttggtcagactggcgactcagagtcagtccccgaccctcaacctcttggagaacctccagcagcgccctctagtgtgggatctggtacaatggctgcaggcggtggcgcaccaatggcagacaataacgaaggtgccgacggagtgggtaatgcctcaggaaattggcattgcgattccacatggctgggcgacagagtcatcaccaccagcaccagaacctgggccctccccacctacaacaaccacctctacaagcaaatctccagcagcagctcaggagccaccaatgacaaccactacttcggctacagcaccccctgggggtattttgactttaacagattccactgccacttctcaccacgtgactggcagcgactcatcaacaacaactggggattccggcccaagaagctgcggttcaagctcttcaacatccaggtcaaggaggtcacaacgaatgacggcgtcacgaccatcgctaataaccttaccagcacggttcaggtcttctcggactcggaataccagctgccgtacgtcctcggctctgcgcaccagggctgcctgcctccgttcccggcggacgtcttcatgattcctcagtacggctacctgactctgaacaacggcagccaatcggtgggccgttcctccttctactgcctggaatatttcccctctcaaatgctgagaacgggcaacaactttgagttcagttacagcttcgaggacgtgcctttccacagcagctacgcgcacagccagagcctagaccggctgatgaaccctctcatcgaccagtacctgtactacctggcccggacccagagcaccacgggttccaccagggaactgcaatttcatcaagctgggcccaatactatggccgagcagtcaaagaactggctgcctggaccctgctataggcaacagggactgtcaaagaacttggactttaacaacaacagcaattttgcctggactgctgccactaaatatcatctgaatggcagaaactctttgaccaatcctggcattcccatggcaaccaacaaggatgatgaggaccagttctttcccatcaacggggtactggtttttggcaagacgggagctgccaacaaaactacgctggaaaacgttctgatgaccagcgaggaggagatcaagaccactaaccctgtggctacagaagaatacggtgtggtctccagcaacctgcagccgtctacagccgggcctcaatcacagactatcaacagccagggagcactgcctggcatggtctggcagaaccgggacgtgtatctgcagggtcccatctgggccaaaattcctcacacggatggcaactttcacccgtctcctctgatgggcggttttggactcaaacacccgcctccacagatcctgatcaaaaacacacctgtacctgctaatcctccggaggtgtttactcctgccaagtttgcctccttcatcacgcagtacagcaccggacaagtcagcgtggaaatcgagtgggagctgcagaaagaaaacagcaagcgctggaacccagaaattcagtatacttccaattatgccaagtctaataatgttgaatttgctgtgaaccctgatggtgtttatactgagcctcgccccattggcactcgttacctcccccgtaatctgtaattgcttgttaatcaataaaccggttgattcgtttcagttgaactttggtctctgcgaagggcgaattc

SEQ ID NO: 5016 - DNA, 3095 bp, Adeno-associated virus
gaattcgcccttcgcagagaccaaagttcaactgaaacgaatcaaccggtttattgattaacaagcaattacagattacgggtgaggtaacgagtgccaatggggcgaggctcagtataaacaccatcagggttcacagcaaattcaacattattagacttggcataattggaagtatactgaatttctgggttccagcgcttgctgttttctttctgcagctcccactcgatttccacgctgacttgtccggtgctgtactgcgtgatgaaggaggcaaacttggcaggagtaaacacctccggaggattagcaggtacaggtgtgtttttgatcaggatctgtggaggcgggtgtttgagtccaaaaccgcccatcagaggagacgggtgaaagttgccatccgtgtgaggaattttggcccagatgggaccctgcagatacacgtcccggttctgccagaccatgccaggcagtgctccctggctgttgatagtctgtgattgaggcccggctgtagacgactgcaggttgctggagaccacaccgtattcttctgtagccacagggttagtggtcttgatctcctcctcgctggtcatcagaacgttttccagcgtagttttgttggcagctcccgtcttgccaaaaaccagtaccccgttgatgggaaagaactggtcctcatcatccttgttggttgccatgggaatgccaggattggtcaaagagtttctgccattcagatgatatttagtggcagcagtccaggcaaaattgctgttgttgttaaagtccaagttctttgacagtctctgttgcctatagcagggtccaggcagccagttctttgactgctcggccatagtattgggcccagcttgatgaaattgcagttccctggtggaacccgtggtgctctgggtccgggccaggtagtacaggtactggtcgatgagagggttcatcagccggtctaggctctggctgtgcgcgtagctgctgtggaaaggcacgtcctcgaagctgtaactgaactcaaagttgttgcccgttctcagcatttgagaggggaaatattccaggcagtagaaggaggaacggcccaccgattggctgccgttgtccagagtcaggtagccgtactgaggaatcatgaagacgtccgccgggaacggaggcaggcagccctggtgcgcagagccgaggacgtacggcagctggtattccgagtccgagaagacctgaaccgtgctggtaaggttattagcgatggtcgtgacgccgtcattcgttgtgacctccttgacctggatgttgaggagcttgaaccgcagcttcttgggccggaatccccagttgttgttgatgagtcgctgccagtcacgtggtgagaagtggcagtggaatctgttaaagtcaaaatacccccagggggtgctgtagccgaagtagtggttgtcattggtggctcctgagctgctgctggagatttgcttgtagaggtggttgttgtaggtggggagggcccaggttctggtgctggtggtgatgactctgtcgcccagccatgtggaatcgcaatgccaatttcctgaggcattacccactccgtcggcaccttcgttattgtctgccattggtgcgccaccgcctgcagccattgtaccagatcccacactagagggcgctgctggaggttctccaagaggttgagggtcggggactgactctgagtcgccagtctgaccaaaattgagcttctttttagcgggctgctggccttttttgccgatgcccgtggaggagtctggagagcctatgggtctcttctttccaggagccgtcttagcgccttcctcaaccagaccgagaggttcgagaacccgcttcttggcctggaagactgctcgcccgaggttgcccccaaatgacgtatcttcttgcagacgctcctgaaactcggcgtcggcgtggttataccgcaggtacggattgtcacccgctttgagctgctggtcgtaggccttgtcgtgctcgagggccgctgcgtccgccgcgttgacgggctcccccttgtcgagtccgttgaagggtccgaggtacttgtagccaggaagcaccagaccccggccgtcgtcctgcttttgctggttggctttgggtttcggggctccaggtttcaggtcccaccactcgcgaatgccctcagagaggttgtcctcgagccaatctggaagataaccatcggcagccatacctggtttaagtcatttattgctcagaaacacagtcgtccaggtccacgttgaccaggtcgcaggccgagcaagcaatctcgggtgcccgccccagcagatgatgaatcgcacacagcttccgatacgtcttttttctgacgaccggttgagattctgacacgccggggaaacattctaaacagtctctgaccccgtgcgtgaagcaaatgttgaaattctgattcattctctcgcacgttttgcagggaaacagcacctgaagcatgcccgcgtgacgagaacatttgttttggtacctgtcggcaaagtccaccggagctccttccgcgtctgacgtcgatgggtccgtgactgagggacgggcccgcttgggctcgcttatatccgcgtcatcgggggcgggtcttttgctggctccgccctttctgacgtagaactcatgcgtcacctcagtcacgtgatcactagcccagcggaagaactctttgacttcctgctttgtcaccttgccaaagtcgtgttccagacggcgggtgagttcaaatttgaacatccggtcctgcaacggttgctggtgctcgaaggtggtgctgttcccgtcgatcacggcgcacatgttggtgttggaggtgacgatcacgggggtgggatcgatctgggcggacgacttgcacttttggtccacgcgcaccttgctgccgccgagaatggccttggcggactccacgaccttggccgtcatcttgccctcctcccaccagatcaccatcttgtcgacgcaatcgttgaagggaaagttctcattggtccagttgacgcagcaagggcgaattc

SEQ ID NO: 5017 - DNA, 3095 bp, Adeno-associated virus
gaattcgcccttcgcagagaccaaagttcaactgaaacgaatcaaccggtttattgattaacaagcaattacagattacgggtgaggtaacgagtgccaatggggcgaggctcagtataaacaccatcagggttcacagcaaattcaacattattagacttggcataattggaagtatactgaatttctgggttccagcgcttgctgttttctttctgcagctcccactcgatttccacgctgacttgtccggtgctgtactgcgtgatgaaggaggcaaacttggcaggagtaaacacctccggaggattagcaggtacaggtgtgtttttgatcaggatctgtggaggcgggtgttcgagtccaaaaccgcccatcagaggagacgggtgaaagttgccatccgtgtgaggaattttggcccagatgggaccctgcagatacacgtcccggttctgccagaccatgccaggcagtgctccctggctgttgatagtctgtgattgaggcccggctgtagacgactgcaggttgctggagaccacaccgtattcttctgtagccacagggttagtggtcttgatctcctcctcgctggtcatcagaacgttttccagcgtagttttgttggcagctcccgtcttgccaaaaaccagtaccccgttgatgggaaagaactggtcctcatcatccttgttggttgccatgggaatgccaggattggtcaaagagtttctgccattcagatgatatttagtggcagcagtccaggcaaaattgctgttgttgttaaagtccaagttctttgacagtctctgttgcctatagcagggtccaggcagccagttctttgactgctcggccatagtattgggcccagcttgatgaaattgcagttccctggtggaacccgtggtgctctgggtccgggccaggtagtacaggtactggtcgatgagagggttcatcagccggtctaggctctggctgtgcgcgtagctgctgtggaaaggcacgtcctcgaagctgtaactgaactcaaagttgttgcccgttctcagcatttgagaggggaaatattccaggcagtagaaggaggaacggcccaccgattggctgccgttgttcagagtcaggtagccgtactgaggaatcatgaagacgtccgccgggaacggaggcaggcagccctggtgcgcagagccgaggacgtacggcagctggtattccgagtccgagaagacctgaaccgtgctggtaaggttattagcgatggtcgtgacgccgtcattcgttgtgacctccttgacctggatgttgaagagcttgaaccgcagcttcttgggccggaatccccagttgttgttgatgagtcgctgccagtcacgtggtgagaagtggcagtggaatctgttaaagtcaaaatacccccagggggtgctgtagccgaagtagtggttgtcattggtggctcctgagctgctgctggagatttgcttgtagaggtggttgttgtaggtggggagggcccaggttctggtgctggtggtgatgactctgtcgcccagccatgtggaatcgcaatgccaatttcctgaggcattacccactccgtcggcaccttcgttattgtctgccgttggtgcgccaccgcctgcagccattgtaccagatcccacactagagggcgctgctggaggttctccaagaggttgagggtcggggactgactctgagtcgccagtctgaccaaaattgagcttctttttagcgggctgctggccttttttgccgatgcccgtggaggagtctggagagtctatgggtctcttctttccaggagccgtcttagcgccttcctcaaccagaccgagaggttcgagaacccgcttcttggcctggaagactgctcgcccgaggttgcccccaaatgacgtatcttcttgcaggcgctcctgaaactcggcgtcggcgtggttataccgcaggtacggattgtcacccgctttgagctgctggtcgtaggccttgtcgtgctcgagggccgctgcgtccgccgcgttgacgggctcccccttgtcgagtccgttgaagggtccgaggtacttgtagccaggaagcaccagaccccggccgtcgtcctgcttttgctggttggctttgggtttcggggctccaggtttcaggtcccaccactcgcgaatgccctcagagaggttgtcctcgagccaatctggaagataaccatcggcagccatacctggtttaagccatttattgctcagaaacacagtcgtccaggtccacgttgaccaggtcgcaggccgagcaggcaatctcgggtgcccgccccagcagatgatgaatcgcacacagcttccgatacgtcttttttctgacgaccggttgagattctgacacgccggggaaacattctaaacagtctctgaccccgtgcgtgaagcaaatgttgaaattctgattcattctctcgcacgttttgcagggaaacagcatctgaagcatgcccgcgtggcgagaacatttgttttggtacctgtcggcaaagtccaccggagctccttccgcgtctgacgtcgatgggtccgtgactgagggacaggcccgcttgggctcgcttatatccgcgtcatcgggggcgggtcttttgctggctccgccctttctgacgtagaactcatgcgtcacctcagtcacgtgatcactagcccagcggaagaactctttgacttcctgctttgtcaccttgccaaagtcgtgttccagacggcgggtgagttcaaatttgaacatccggtcctgcaacggctgctggtgctcgaaggtggtgctgttcccgtcgatcacggcgcgcatgttggtgttggaggtgacgatcacgggggtgggatcgatctgggcggacgacttgcacttttggtccacgcgcaccttgctgccgccgagaatggccttggcggactccacgaccttggccgtcatcttgccctcctcccaccagatcaccatcttgtcgacgcaatcgttgaagggaaagttctcattggtccagttgacgcagcaagggcgaattc

SEQ ID NO: 5018 - protein, 729 aa, Adeno-associated virus; identical to SEQ ID NO: 4833

SEQ ID NO: 5019 - protein, 729 aa, Adeno-associated virus
MAADGYLPDWLEDNLSEGIREWWDLKPGAPKPKANQQKQDDGRGLVLPGYKYLGPFNGLDKGEPVNAADAAALEHDKAYDQQLKAGDNPYLRYNHADAEFQERLQEDTSFGGNLGRAVFQAKKRVLEPLGLVEEGAKTAPGKKRPIDSPDSSTGIGKKGQQPAKKKLNFGQTGDSESVPDPQPLGEPPAAPSSVGSGTMAAGGGAPTADNNEGADGVGNASGNWHCDSTWLGDRVITTSTRTWALPTYNNHLYKQISSSSSGATNDNHYFGYSTPWGYFDFNRFHCHFSPRDWQRLINNNWGFRPKKLRFKLFNIQVKEVTTNDGVTTIANNLTSTVQVFSDSEYQLPYVLGSAHQGCLPPFPADVFMIPQYGYLTLNNGSQSVGRSSFYCLEYFPSQMLRTGNNFEFSYSFEDVPFHSSYAHSQSLDRLMNPLIDQYLYYLARTQSTTGSTRELQFHQAGPNTMAEQSKNWLPGPCYRQQRLSKNLDFNNNSNFAWTAATKYHLNGRNSLTNPGIPMATNKDDEDQFFPINGVLVFGKTGAANKTTLENVLMTSEEEIKTTNPVATEEYGVVSSNLQSSTAGPQSQTINSQGALPGMVWQNRDVYLQGPIWAKIPHTDGNFHPSPLMGGFGLKHPPPQILIKNTPVPANPPEVFTPAKFASFITQYSTGQVSVEIEWELQKENSKRWNPEIQYTSNYAKSNNVEFAVNPDGVYTEPRPIGTRYLTRNL

SEQ ID NO: 5020 - protein, 729 aa, Adeno-associated virus
MAADGYLPDWLEDNLSEGIREWWDLKPGAPKPKANQQKQDDGRGLVLPGYKYLGPFNGLDKGEPVNAADAAALEHDKAYDQQLKAGDNPYLRYNHADAEFQERLQEDTSFGGNLGRAVFQAKKRVLEPLGLVEEGAKTAPGKKRPIDSPDSSTGIGKKGQQPAKKKLNFGQTGDSESVPDPQPLGEPPAAPSSVGSGTMAAGGGAPMADNNEGADGVGNASGNWHCDSTWLGDRVITTSTRTWALPTYNNHLYKQISSSSSGATNDNHYFGYSTPWGYFDFNRFHCHFSPRDWQRLINNNWGFRPKKLRFKLFNIQVKEVTTNDGVTTIANNLTSTVQVFSDSEYQLPYVLGSAHQGCLPPFPADVFMIPQYGYLTLNNGSQSVGRSSFYCLEYFPSQMLRTGNNFEFSYSFEDVPFHSSYAHSQSLDRLMNPLIDQYLYYLARTQSTTGSTRELQFHQAGPNTMAEQSKNWLPGPCYRQQRLSKNLDFNNNSNFAWTAATKYHLNGRNSLTNPGIPMATNKDDEDQFFPINGVLVFGKTGAANKTTLENVLMTSEEEIKTTNPVATEEYGVVSSNLQSSTAGPQSQTINSQGALPGMVWQNRDVYLQGPIWAKIPHTDGNFHPSPLMGGFGLKHPPPQILIKNTPVPANPPEVFTPAKFASFITQYSTGQVSVEIEWELQKENSKRWNPEIQYTSNYAKSNNVEFAVNPDGVYTEPRPIGTRYLTRNL

SEQ ID NO: 5021 - DNA, 2217 bp, Adeno-associated virus
atggctgctgacggttatcttccagattggctcgaggacaacctctctgagggcattcgcgagtggtgggacctgaaacctggagcccccaagcccaaggccaaccagcagaagcaggacgacggccggggtctggtgcttcctggctacaagtacctcggacccttcaacggactcgacaagggggagcccgtcaacgcggcggacgcagcggccctcgagcacgacaaggcctacgaccagcagctcaaagcgggtgacaatccgtacctgcggtataaccacgccgacgccgagtttcaggagcgtctacaagaagatacgtcttttgggggcaacctcgggcgagcagtcttccaggccaagaagcgggttctcgaacctctcggtctggttgaggaagctgctaagacggctcctggaaagaagagaccggtagaaccgtcacctcagcgttcccccgactcctccacgggcatcggcaagaaaggccagcggcccgctaaaaagagactgaactttggtcagactggcgactcagagtcagtccccgaccctcaaccaatcggagaaccaccagcaggcccctctggtctgggatctggtacaatggctgcaggcggtggcgctccaatggcagacaataacgaaggcgccgacggagtgggtagttcctcaggaaattggcattgcgattccacatggctgggcgacagagtcatcaccaccagcacccgaacctgggccctgcccacctacaacaaccacctctacaagcaaatatccaatgggacatcgggaggaagcaccaacgacaacacctacttcggctacagcaccccctgggggtattttgacttcaacagattccactgccacttctcaccacgtgactggcagcgactcatcaacaacaactggggattccggccaaaaagactcagcttcaagcccttcaacatccaggtcaaggaggtcacgcagaatgaaggcaccaagaccatcgccaataaccttaccagcacgattcaggtatttacggactcggaataccagctgccgtacgtcctcggctccgcgcaccagggctgcctgcctccgttcccggcggacgtcttcatgattccccagtacggctaccttacactgaacaatggaagtcaagccgtaggccgttcctccttctactgcctggaatattttccatctcaaatgctgcgaactggaaacaattttgaattcagctacaccttcgaggacgtgcctttccacagcagctacgcacacagccagagcttggaccgactgatgaatcctctcatcgaccagtacctgcactacttatccagaactcagtccacaggaggaactcaaggtacccagcaattgttattttctcaagctgggcctgcaaacatgtcggctcaggctaagaactggctacctggaccttgctaccggcagcagcgagtctctacgacactgtcgcaaaacaacaacagcaactttgcttggactggtgccaccaaatatcacctgaacggaagagactctttggtaaatcccggtgtcgccatggcaacccacaaggacgacgaggaacgcttcttcccgtcgagtggagtcctgatgtttggaaaacagggtgctggaagagacaatgtggactacagcagcgttatgctaaccagcgaagaagaaattaaaaccactaaccctgtagccacagaacaatacggtgtggtggctgacaacttgcagcaaaccaatacagggcctattgtgggaaatgtcaacagccaaggagccttacctggcatggtctggcagaaccgagacgtgtacctgcagggtcccatctgggccaagattcctcacacggacggcaacttccacccttcaccgctaatgggaggatttggactgaagcacccacctcctcagatcctgatcaagaacacgccggtacctgcggatcctccaacaacgttcagccaggcgaaattggcttccttcattacgcagtacagcaccggacaggtcagcgtggaaatcgagtgggagctgcagaaggagaacagcaaacgctggaacccagagattcagtacacttcaaactactacaaatctacaaatgtggactttgctgtcaatacagagggaacttattctgagcctcgccccattggtactcgctacctcacccgtaatctgtaa

SEQ ID NO: 5022 - protein, 738 aa, Adeno-associated virus
MAADGYLPDWLEDNLSEGIREWWDLKPGAPKPKANQQKQDDGRGLVLPGYKYLGPFNGLDKGEPVNAADAAALEHDKAYDQQLKAGDNPYLRYNHADAEFQERLQEDTSFGGNLGRAVFQAKKRVLEPLGLVEEAAKTAPGKKRPVEPSPQRSPDSSTGIGKKGQRPAKKRLNFGQTGDSESVPDPQPIGEPPAGPSGLGSGTMAAGGGAPMADNNEGADGVGSSSGNWHCDSTWLGDRVITTSTRTWALPTYNNHLYKQISNGTSGGSTNDNTYFGYSTPWGYFDFNRFHCHFSPRDWQRLINNNWGFRPKRLSFKPFNIQVKEVTQNEGTKTIANNLTSTIQVFTDSEYQLPYVLGSAHQGCLPPFPADVFMIPQYGYLTLNNGSQAVGRSSFYCLEYFPSQMLRTGNNFEFSYTFEDVPFHSSYAHSQSLDRLMNPLIDQYLHYLSRTQSTGGTQGTQQLLFSQAGPANMSAQAKNWLPGPCYRQQRVSTTLSQNNNSNFAWTGATKYHLNGRDSLVNPGVAMATHKDDEERFFPSSGVLMFGKQGAGRDNVDYSSVMLTSEEEIKTTNPVATEQYGVVADNLQQTNTGPIVGNVNSQGALPGMVWQNRDVYLQGPIWAKIPHTDGNFHPSPLMGGFGLKHPPPQILIKNTPVPADPPTTFSQAKLASFITQYSTGQVSVEIEWELQKENSKRWNPEIQYTSNYYKSTNVDFAVNTEGTYSEPRPIGTRYLTRNL

SEQ ID NO: 5023 - DNA, 2217 bp, Adeno-associated virus
atggctgctgacggttatcttccagattggctcgaggacaacctctctgagggcattcgcgagtggtgggacctgaaacctggagcccccaagcccaaggccaaccagcagaagcaggacgacggccggggtctggtgcttcctggctacaagtacctcggacccttcaacggactcgacaagggggagcccgtcaacgcggcggacgcagcggccctcgagcacgacaaggcctacgaccagcagctcaaagcgggtgacaatccgtacctgcggtataaccacgccgacgccgagtttcaggagcgtctgcaagaagatacgtcttttgggggcaacctcgggcgagcagtcttccaggccaagaagcgggttctcgaacctctcggtctggttgaggaagctgctaagacggctcctggaaagaagagaccggtagaaccgtcacctcagcgttcccccgactcctccacgggcatcggcaagaaaggccagcagcccgctaaaaagagactgaactttggtcagactggcgactcagagtcagtccccgaccctcaaccaatcggagaaccaccagcaggcccctctggtctgggatctggtacaatggctgcaggcggtggcgctccaatggcagacaataacgaaggcgccgacggagtgggtagttcctcaggaaattggcattgcgattccacatggctgggcgacagagtcatcaccaccagcacccgaacctgggccctgcccacctacaacaaccacctctacaagcaaatatccaatgggacatcgggaggaagcaccaacgacaacacctacttcggctacagcaccccctgggggtattttgacttcaacagattccactgccacttctcaccacgtgactggcagcgactcatcaacaacaactggggattccggccaaaaagactcagcttcaagctcttcaacatccaggtcaaggaggtcacgcagaatgaaggcaccaagaccatcgccaataaccttaccagcacgattcaggtatttacggactcggaataccagctgccgtacgtcctcggctccgcgcaccagggctgcctgcctccgttcccggcggacgtcttcatgattccccagtacggctaccttacactgaacaatggaagtcaagccgtaggccgttcctccttctactgcctggaatattttccatctcaaatgctgcgaactggaaacaattttgaattcagctacaccttcgaggacgtgcctttccacagcagctacgcacacagccagagcttggaccgactgatgaatcctctcatcgaccagtacctgtactacttatccagaactcagtccacaggaggaactcaaggtacccagcaattgttattttctcaagctgggcctgcaaacatgtcggctcaggctaagaactggctacctggaccttgctaccggcagcagcgagtctctacgacactgtcgcaaaacaacaacagcaactttgcttggactggtgccaccaaatatcacctgaacggaagagactctttggtaaatcccggtgtcgccatggcaacccacaaggacgacgaggaacgcttcttcccgtcgagtggagtcctgatgtttggaaaacagggtgctggaagagacaatgtggactacagcagcgttatgctaaccagcgaagaagaaattaaaaccactaaccctgtagccacagaacaatacggtgtggtggctgataacttgcagcaaaccaatacggggcctattgtgggaaatgtcaacagccaaggagccttacctggcatggtctggcagaaccgagacgtgtacctgcagggtcccatctgggccaagattcctcacacggacggcaacttccacccttcaccgctaatgggaggatttggactgaagcacccacctcctcagatcctgatcaagaacacgccggtacctgcggatcctccaacaacgttcagccaggcgaaattggcttccttcattacgcagtacagcaccggacaggtcagcgtggaaatcgagtgggagctgcagaaggagaacagcaaacgctggaacccagagattcagtacacttcaaactactacaaatctacaaatgtggactttgctgtcaatacagagggaacttattctgagcctcgccccattggtactcgttacctcacccgtaatctgtaa

SEQ ID NO: 5024 - protein, 738 aa, Adeno-associated virus; identical to SEQ ID NO: 4797

SEQ ID NO: 5025 - protein, 738 aa, Adeno-associated virus
MAADGYLPDWLEDNLSEGIREWWDLKPGAPKPKANQQKQDDGRGLVLPGYKYLGPFNGLDKGEPVNAADAAALEHDKAYDQQLKAGDNPYLRYNHADAEFQERLQEDTSFGGNLGRAVFQAKKRVLEPLGLVEEAAKTAPGKKRPVEPSPQRSPDSSTGIGKKGQQPAKKRLNFGQTGDSESVPDPQPIGEPPAGPSGLGSGTMAAGGGAPMADNNEGADGVGSSSGNWHCDSTWLGDRVITTSTRTWALPTYNNHLYKQISNGTSGGSTNDNTYFGYSTPWGYFDFNRFHCHFSPRDWQRLINNNWGFRPKRLSFKLFNIQVKEVTQDEGTKTIANNLTSTIQVFTDSEYQLPYVLGSAHQGCLPPFPADVFMIPQYGYLTLNNGSQAVGRSSFYCLEYFPSQMLRTGNNFEFSYTFEDVPFHSSYAHSQSLDRLMNPLIDQYLYYLSRTQSTGGTQGTQQLLFSQAGPANMSARAKNWLPGPCYRQQRVSTTLSQNNNSNFAWTGATKYHLNGRDSLVNPGVAMATHKDDEERFFPSSGVLMFGKQGAGRDNVDYSSVMLTSEEEIKTTNPVATEQYGVVADNLQQANTGPIVGNVNSQGALPGMVWQNRDVYLQGPIWAKIPHTDGNFHPSPLMGGFGLKHPPPQILIKNTPVPADPPTTFSQAKLASFITQYSTGQVSVEIEWELQKENSKRWNPEIQYTSNYYKSTNVDFAVNSEGTYSEPRPIGTRYLTRNL

SEQ ID NO: 5026 - DNA, 2217 bp, Adeno-associated virus
atggctgctgacggttatcttccagattggctcgaggacaacctctctgagggcattcgcgagtggtgggacctgaaacctggagcccccaagcccaaggccaaccagcagaagcaggacgacggccggggtctggtgcttcctggctacaagtacctcggacccttcaacggactcgacaagggggagcccgtcaacgcggcggacgcagcggccctcgagcacgacaaggcctacgaccagcagctcaaagcgggtgacaatccgtacctgcggtataaccacgccgacgccgagtttcaggagcgtctgcaagaagatacgtcttttgggggcaacctcgggcgagcagtcttccaggccaagaagcgggttctcgaacctctcggtctggttgaggaagctgctaagacggctcctggaaagaagagaccggtagaaccgtcacctcagcgttcccccgactcctccacgggcatcggcaagaaaggccagcagcccgctaaaaagagactgaactttggtcagactggcgactcagagtcagtccccgaccctcaaccaatcggagaaccaccagcaggcccctctggtctgggatctggtacaatggctgcaggcggtggcgctccaatggcagacaataacgaaggcgccgacggagtgggtagttcctcaggaaattggcattgcgattccacatggctgggcgacagagtcatcaccaccagcacccgaacctgggccctgcccacctacaacaaccacctctacaagcaaatatccaatgggacatcgggaggaagcaccaacgacaacacctacttcggctacagcaccccctgggggtattttgacttcaacagattccactgccacttctcaccacgtgactggcagcgactcatcaacaacaactggggattccggccaaaaagactcagcttcaagctcttcaacatccaggtcaaggaggtcacgcaggatgaaggcaccaagaccatcgccaataaccttaccagcacgattcaggtatttacggactcggaataccagctgccgtacgtcctcggctccgcgcaccagggctgcctgcctccgttcccggcggacgtcttcatgattccccagtacggctaccttacactgaacaatggaagtcaagccgtaggccgttcctccttctactgcctggaatattttccatctcaaatgctgcgaactggaaacaattttgaattcagctacaccttcgaggacgtgcctttccacagcagctacgcacacagccagagcttggaccgactgatgaatcctctcatcgaccagtacctgtactacttatccagaactcagtccacaggaggaactcaaggtacccagcaattgttattttctcaagctgggcctgcaaacatgtcggctcgggctaagaactggctacctggaccttgctaccggcagcagcgagtctctacgacactgtcgcaaaacaacaacagcaactttgcttggactggtgccaccaaatatcacctgaacggaagagactctttggtaaatcccggtgttgctatggcaacgcataaggacgacgaggaacgtttctttccatcgagcggagtcctgatgtttggaaaacagggtgctggaagagacaatgtggactatagcagcgttatgctaaccagcgaggaagaaattaaaaccactaaccctgtagccacagaacaatacggtgtggtggctgacaacttgcagcaagccaatacagggcctattgtgggaaatgtcaacagccaaggagccttacctggcatggtctggcagaaccgagacgtgtacctgcagggtcccatctgggccaaaattcctcacacggacggcaattttcacccgtctcctctgatgggcggctttggactgaagcacccacctccccagatcctgatcaagaatacgccggtacctgcggatcctccaacgacgttcagccaggcaaaattggcttccttcatcacgcagtacagcaccggccaggtcagcgtggagatcgagtgggagctgcagaaggagaacagcaagcgatggaacccagaaattcagtacacttccaactactacaaatctacaaatgtggactttgctgtcaattctgagggtacatattcagagcctcgccccattggtactcgttatctgacacgtaatctgtaa

SEQ ID NO: 5027 - DNA, 2211 bp, Adeno-associated virus
atggctgccgatggttatcttccagattggctcgaggacaacctctctgagggcattcgcgagtggtgggacttgaaacctggagccccgaaacccaaagccaaccagcaaaagcaggacgacggccggggcctggtgcttcctggctacaagtacctcggacccttcaacggactcgacaagggggagcccgtcaacgcggcggacgcagcggccctcgagcacgacaaggcctacgaccagcagctcgaagcgggtgacaatccgtacctgcggtataaccacgccgacgccgagtttcaggagcgtctgcaagaagatacgtcttttgggggcaacctcgggcgagcagtcttccaggccaagaagcgggttctcgaacctctcggtctggttgaggaaggcgctaagacggctcctggaaagaagagaccagtagagcagtcaccccaagaaccagactcctcctcgggcatcggcaagaaaggccaacagcccgccagaaaaagactcaattttggccagactggcgactcagagtcagttccagaccctcaacctctcggagaacctccagcagcgccctctggtgtgggacctaatacaatggctgcaggcggtggcgcaccaatggcagacaataacgaaggcgccgacggagtgggtagttcctcgggaaattggcattgcgattccacatggctgggcgacagagtcatcaccaccagcacccgaacctgggccctgcccacctacaacaaccacctctacaagcaaatctccaacgggacatcgggaggagccaccaacgacaacacctacttcggctacagcaccccctgggggtattttgactttaacagattccactgccacttttcaccacgtgactggcagcgactcatcaacaacaactggggattccggcccaagagactcagcttcaagctcttcaacatccaggtcaaggaggtcacgcagaatgaaggcaccaagaccatcgccaataacctcaccagcaccatccaggtgtttacggactcggagtaccagctgccgtacgttctcggctctgcccaccagggctgcctgcctccgttcccggcggacgtgttcatgattccccagtacggctacctaacactcaacaacggtagtcaggccgtgggacgctcctccttctactgcctggaatactttccttcgcagatgctgagaaccggcaacaacttccagtttacttacaccttcgaggacgtgcctttccacagcagctacgcccacagccagagcttggaccggctgatgaatcctctgattgaccagtacctgtactacttgtctcggactcaaacaacaggaggcacggcaaatacgcagactctgggcttcagccaaggtgggcctaatacaatggccaatcaggcaaagaactggctgccaggaccctgttaccgccaacaacgcgtctcaacgacaaccgggcaaaacaacaatagcaactttgcctggactgctgggaccaaataccatctgaatggaagaaattcattggctaatcctggcatcgctatggcaacacacaaagacgacgaggagcgttttttcccagtaacgggatcctgtttttggcaacaaaatgctgccagagacaatgcggattacagcgatgtcatgctcaccagcgaggaagaaatcaaaaccactaaccctgtggctacagaggaatacggtatcgtggcagataacttgcagcagcaaaacacggctcctcaaattggaactgtcaacagccagggggccttacccggtatggtctggcagaaccgggacgtgtacctgcagggtcccatctgggccaagattcctcacacggacggcaacttccacccgtctccgctgatgggcggctttggcctgaaacatcctccgcctcagatcctgatcaagaacacgcctgtacctgcggatcctccgaccaccttcaaccagtcaaagctgaactctttcatcacgcaatacagcaccggacaggtcagcgtggaaattgaatgggagctacagaaggaaaacagcaagcgctggaaccccgagatccagtacacctccaactactacaaatctacaagtgtggactttgctgttaatacagaaggcgtgtactctgaaccccgccccattggcacccgttacctcacccgtaatctgtaa

SEQ ID NO: 5028 - protein, 736 aa, Adeno-associated virus
MAADGYLPDWLEDNLSEGIREWWDLKPGAPKPKANQQKQDDGRGLVLPGYKYLGPFNGLDKGEPVNAADAAALEHDKAYDQQLEAGDNPYLRYNHADAEFQERLQEDTSFGGNLGRAVFQAKKRVLEPLGLVEEGAKTAPGKKRPVEQSPQEPDSSSGIGKKGQQPARKRLNFGQTGDSESVPDPQPLGEPPAAPSGVGPNTMAAGGGAPMADNNEGADGVGSSSGNWHCDSTWLGDRVITTSTRTWALPTYNNHLYKQISNGTSGGATNDNTYFGYSTPWGYFDFNRFHCHFSPRDWQRLINNNWGFRPKRLSFKLFNIQVKEVTQNEGTKTIANNLTSTIQVFTDSEYQLPYVLGSAHQGCLPPFPADVFMIPQYGYLTLNNGSQAVGRSSFYCLEYFPSQMLRTGNNFQFTYTFEDVPFHSSYAHSQSLDRLMNPLIDQYLYYLSRTQTTGGTANTQTLGFSQGGPNTMANQAKNWLPGPCYRQQRVSTTTGQNNNSNFAWTAGTKYHLNGRNSLANPGIAMATHKDDEERFFPVTGSCFWQQNAARDNADYSDVMLTSEEEIKTTNPVATEEYGIVADNLQQQNTAPQIGTVNSQGALPGMVWQNRDVYLQGPIWAKIPHTDGNFHPSPLMGGFGLKHPPPQILIKNTPVPADPPTTFNQSKLNSFITQYSTGQVSVEIEWELQKENSKRWNPEIQYTSNYYKSTSVDFAVNTEGVYSEPRPIGTRYLTRNL

SEQ ID NO: 5029 - DNA, 2214 bp, Adeno-associated virus
atggctgctgacggttatcttccagattggctcgaggacaacctctctgagggcattcgcgagtggtgggacctgaaacctggagcccccaagcccaaggccaaccagcagaagcaggacgacggccggggtctggtgcttcctggctacaagtacctcggacccttcaacggactcgacaagggggagcccgtcagcgcggcggacgcagcggccctcgagcacgacaaggcctgcgaccagcggctcaaagcgggtgacaatccgtacctgcggtataaccacgccgacgccgagtttcaggagcgtctgcaagaagatacgtcttttgggggcaacctcgggcgagcagtcttccaggccaagaagcgggttctcgaacctctcggtctggttgaggaagctgctaagacggctcctggaaagaagggaccggtagaaccgtcacctcagcgttcccccgactcctccacgggcatcggcaagaaaggccagcagcccgctagaaagagactgaactttgggcagactggcgactcagagtcagtccccgaccctcaaccaatcggagaaccaccagcaggcccctctggtctgggatctggtacaatggctgcaggcggtggcgcaccaatggctgacaataacgagggcgccgacggagtgggtaatgcctcaggaaattggcattgcgattccacatggctgggcgacagagtcatcaccaccagcacccgaacctgggctttgcccacctacaacaatcacctctacaagcaaatctccagtcagtcagcaggtagcaccaacgacaacgtctacttcggctacagcaccccctgggggtattttgacttcaacagattccactgtcacttctcaccacgtgactggcagcggctcatcaacaacaactggggattccggcccaagaagctcaacttcaagctgttcaacatccaggtcaaggaggtcacaacgaatgacggcgtcacgaccatcgccaataaccttaccagcacggttcaggtcttttcggactcggaataccagctgccctacgtcctcggctccgcacaccagggctgcctgcctccgttcccggcggacgtcttcatgattccccagtacggctacctgactctgaacaatggcagccaatcggtgggtcgttcctctttctactgcctggaatatttcccttctcaaatgctgagaacgggcaacaacttcaccttcagctacaccttcgaggacgttcccttccacagcagctacgcacacagccagagcctggaccggctgatgaatcctcttatcgaccagtacctgtattacctggccagaacacagagcaacgcaggaggcacagctggcaatcgggaactgcagttttatcagggcgggcctaccaccatggccgaacaagccaaaaactggctgcctggaccttgcttccggcaacaaagagtctccaagacgctggatcaaaacaacaacagcaactttgcttggactggtgccaccaaataccatctaaatggaagaaattcattggttaatcccggtgtcgccatggcaacccacaaggacgacgaggaacgcttcttcccttcgagcggagtcctgatttttggaaaaactggagcagctaataagactacactggaaaatgtgttaatgacaaatgaagaggaaattcgtcctaccaacccggtagccaccgaggaatacgggactgttagcagcaacctgcaggcggctaacactgcagcccagacacaagttgtcaacaaccagggagccttacctggtatggtctggcagaaccgggacgtgtacctgcagggtcccatctgggccaagattcctcacacggacggcaactttcacccgtctccgctgatgggcggctttggactgaagcatccgcctcctcagatcctgatcaaaaacactcctgttcctgctaatcccccggaggtgtttacgcctgccaagtttgcttctttcatcacacagtacagcaccggccaggtcagcgtggagatcgagtgggagctgcagaaggagaacagcaagcgctggaacccagagattcagtatacctccaattttgacgaacagactggtgtggactttgccgttgacagccagggtgtttattctgagcctcgccccattggtactcgttacctcacccgtaatctgtaa

SEQ ID NO: 5030 - protein, 737 aa, Adeno-associated virus
MAADGYLPDWLEDNLSEGIREWWDLKPGAPKPKANQQKQDDGRGLVLPGYKYLGPFNGLDKGEPVSAADAAALEHDKACDQRLKAGDNPYLRYNHADAEFQERLQEDTSFGGNLGRAVFQAKKRVLEPLGLVEEAAKTAPGKKGPVEPSPQRSPDSSTGIGKKGQQPARKRLNFGQTGDSESVPDPQPIGEPPAGPSGLGSGTMAAGGGAPMADNNEGADGVGNASGNWHCDSTWLGDRVITTSTRTWALPTYNNHLYKQISSQSAGSTNDNVYFGYSTPWGYFDFNRFHCHFSPRDWQRLINNNWGFRPKKLNFKLFNIQVKEVTTNDGVTTIANNLTSTVQVFSDSEYQLPYVLGSAHQGCLPPFPADVFMIPQYGYLTLNNGSQSVGRSSFYCLEYFPSQMLRTGNNFTFSYTFEDVPFHSSYAHSQSLDRLMNPLIDQYLYYLARTQSNAGGTAGNRELQFYQGGPTTMAEQAKNWLPGPCFRQQRVSKTLDQNNNSNFAWTGATKYHLNGRNSLVNPGVAMATHKDDEERFFPSSGVLIFGKTGAANKTTLENVLMTNEEEIRPTNPVATEEYGTVSSNLQAANTAAQTQVVNNQGALPGMVWQNRDVYLQGPIWAKIPHTDGNFHPSPLMGGFGLKHPPPQILIKNTPVPANPPEVFTPAKFASFITQYSTGQVSVEIEWELQKENSKRWNPEIQYTSNFDEQTGVDFAVDSQGVYSEPRPIGTRYLTRNL

SEQ ID NO: 5031 - DNA, 2214 bp, Adeno-associated virus
atggctgccgatggttatcttccagattggctcgaggacaacctctctgagggcattcgcgagtggtgggacctgaaacctggagccccgaaacccaaagccaaccagcaaaagcaggacgacggccggggtctggtgcttcctggctacaagtacctcggacccttcaacggactcgacaagggggagcccgtcaacgcggcggacgcagcggccctcgagcacgacaaggcctacgaccagcagctcaaagcgggtgacaatccgtacctgcggtataaccacgccgacgccgagtttcaggagcgtctgcaagaagatacgtcttttgggggcaacctcgggcgagcagtcttccaggccaagaagcgggttctcgaacctctcggtctggttgaggaagctgctaagacggctcctggaaagaagagaccggtagaaccgtcacctcagcgttcccccgactcctccacgggcatcggcaagaaaggccagcagcccgctagaaagagactgaactttgggcagactggcgactcagagtcagtccccgaccctcaaccaatcggagaaccaccagcaggcccctctggtctgggatctggtacaatggctgcaggcggtggcgctccaatggcagacaataacgaaggcgccgacggagtgggtaatgcctcaggaaattggcattgcgattccacatggctgggcgacagagtcatcaccaccagcacccgaacctgggctttgcccacctacaacaaccacctctacaagcaaatctccagtcagtcagcaggtagcaccaacgacaacgtctacttcggctacagcaccccctgggggtattttgacttcaacagattccactgtcacttctcaccacgtgactggcagcggctcatcaacaacaactggggattccggcccaagaagctcaacttcaagctgttcaacatccaggtcaaggaggtcacaacgaatgacggcgtcacgaccatcgccaataaccttaccagcacggttcaggtcttttcggactcggaataccagctgccctacgtcctcggctccgcacaccagggctgcctgcctccgttcccggcggacgtcttcatgattcctcagtacggctacctgactctcaacaacggtagtcaggccgtgggacgttcctccttctactgcctggagtacttcccctctcagatgctgagaacgggcaacaacttttccttcagctacactttcgaggacgtgcctttccacagcagctacgcgcacagccagagtttggacaggctgatgaatcctctcatcgaccagtacctgtactacctgtcaagaacccagtctacgggaggcacagcgggaacccagcagttgctgttttctcaggccgggcctagcaacatgtcgactcaggccagaaactggctgcctggaccctgctacagacagcagcgcgtctccacgacactgtcgcaaaacaacaacagcaactttgcctggactggtgccaccaagtatcatctgaacggcagagactctctggtgaatccgggcgtcgccatggcaaccaacaaggacgacgaggaccgcttcttcccatccagcggcatcctcatgtttggcaagcagggagctggaaaagacaacgtggactatagcaacgtgatgctaaccagcgaggaagaaatcaagaccaccaaccccgtggccacagaacagtatggcgtggtggctgataacctacagcagcaaaacaccgctcctattgtgggggccgtcaacagccagggagccttacctggcatggtctggcagaaccgggacgtgtacctgcagggtcctatttgggccaagattcctcacacagatggcaactttcacccgtctcctttaatgggcggctttggacttaaacatccgcctcctcagatccttatcaaaaacactcctgttcctgcggatcctccaacagcgttcaaccaggccaagctgaattctttcatcacgcagtacagcaccggacaagtcagcgtggagatcgagtgggagctgcagaaggagaacagcaagcgctggaacccagagattcagtatacttccaactactacaaatctacaaatgtggactttgctgttaatactgagggtgcttactctgagcctcgccccattggcactcgttacctcacccgtaatctgtaa

SEQ ID NO: 5032 - protein, 737 aa, Adeno-associated virus
MAADGYLPDWLEDNLSEGIREWWDLKPGAPKPKANQQKQDDGRGLVLPGYKYLGPFNGLDKGEPVNAADAAALEHDKAYDQQLKAGDNPYLRYNHADAEFQERLQEDTSFGGNLGRAVFQAKKRVLEPLGLVEEAAKTAPGKKRPVEPSPQRSPDSSTGIGKKGQQPARKRLNFGQTGDSESVPDPQPIGEPPAGPSGLGSGTMAAGGGAPMADNNEGADGVGNASGNWHCDSTWLGDRVITTSTRTWALPTYNNHLYKQISSQSAGSTNDNVYFGYSTPWGYFDFNRFHCHFSPRDWQRLINNNWGFRPKKLNFKLFNIQVKEVTTNDGVTTIANNLTSTVQVFSDSEYQLPYVLGSAHQGCLPPFPADVFMIPQYGYLTLNNGSQAVGRSSFYCLEYFPSQMLRTGNNFSFSYTFEDVPFHSSYAHSQSLDRLMNPLIDQYLYYLSRTQSTGGTAGTQQLLFSQAGPSNMSTQARNWLPGPCYRQQRVSTTLSQNNNSNFAWTGATKYHLNGRDSLVNPGVAMATNKDDEDRFFPSSGILMFGKQGAGKDNVDYSNVMLTSEEEIKTTNPVATEQYGVVADNLQQQNTAPIVGAVNSQGALPGMVWQNRDVYLQGPIWAKIPHTDGNFHPSPLMGGFGLKHPPPQILIKNTPVPADPPTAFNQAKLNSFITQYSTGQVSVEIEWELQKENSKRWNPEIQYTSNYYKSTNVDFAVNTEGAYSEPRPIGTRYLTRNL

SEQ ID NO: 5033 - DNA, 2217 bp, Adeno-associated virus
atggctgccgatggttatcttccagattggctcgaggacaacctctctgagggcattcgcgagtggtgggacctgaaacctggagccccgaaacccaaagccaaccagcaaaagcaggacgacggccggggtctggtgcttcctggctacaagtacctcggacccttcaacggactcgacaagggggagcccgtcaacgcggcggacgcagcggccctcgagcacgacaaggcctacgaccagcagctcaaagcgggtgacaatccgtacctgcggtataatcacgccgacgccgagtttcaggagcgtctgcaagaagatacgtcttttgggggcaacctcgggcgagcagtcttccaggccaagaagcgggttctcgaacctctcggtctggttgaggaaggcgctaagacggctcctggaaagaagagaccggtagagccgtcaccacagcgttcccccgactcctccacgggcatcggcaagaaaggccagcagcccgccagaaagagactcaatttcggtcagactggcgactcagagtcagtccccgaccctcaacctatcggagaacctccagcagcgccctctagtgtgggatctggtacaatggctgcaggcggtggcgcaccaatggcagacaataacgaaggtgccgacggagtgggtagttcctcgggaaattggcattgcgattccacatggctgggcgacagagtcatcaccaccagcacccgaacctgggccctgcccacctacaacaaccacctctacaagcaaatctccaacgggacctcgggaggcagcaccaacgacaacacctactttggctacagcaccccctgggggtattttgactttaacagattccactgccacttctcaccacgtgactggcagcgactcatcaacaacaactggggattccggcccaagagactcagcttcaagctcttcaacatccaggtcaaagaggtcacgcagaatgaaggcaccaagaccatcgccaataacctcaccagcaccatccaggtgtttacggactcggaataccagctgccgtacgtcctcggctctgcccaccagggctgcctgcctccgttcccggcggacgtcttcatgattcctcagtacggctacctgactctcaacaacggtagtcaggccgtgggacgttcctccttctactgcctggagtacttcccctctcagatgctgagaacgggcaacaacttttccttcagctacactttcgaggacgtgcctttccacagcagctacgcgcacagccagagtttggacaggctgatgaatcctctcatcgaccagtacctgtactacctgtcaagaacccagtctacgggaggcacagcgggaacccagcagttgctgttttctcaggccgggcctagcaacatgtcggctcaggccagaaactggctgcctggaccctgctacagacagcagcgcgtctccacgacactgtcgcaaaacaacaacagcaactttgcctggactggtgccaccaagtatcatctgaacggcagagactctctggtgaatccgggcgtcgccatggcaaccaacaaggacgacgaggaccgcttcttcccatccagcggcatcctcatgtttggcaagcagggagctggaaaagacaacgtggactatagcaacgtgatgctaaccagcgaggaagaaatcaaggccaccaaccccgtggccacagaacagtatggcgtggtggctgataacctacagcagcaaaacaccgctcctattgtgggggccgtcaacagccagggagccttacctggcatggtctggcagaaccgggacgtgtacctgcagggtcctatttgggccaagattcctcacacagatggcaactttcacccgtctcctttaatgggcggctttggacttaaacatccgcctcctcagatcctcatcaaaaacactcctgttcctgcggatcctccaacagcgttcaaccaggccaagctgaattctttcatcacgcagtacagcaccggacaagtcagcgtggagatcgagtgggagctgcagaaggagaacagcaagcgctggaacccagagattcagtatacttccaactactacaaatctacaaatgtggactttgctgttaatactgagggtgtttactctgagcctcgccccattggcactcgttacctcacccgtaatctgtaa

SEQ ID NO: 5034 - protein, 738 aa, Adeno-associated virus
MAADGYLPDWLEDNLSEGIREWWDLKPGAPKPKANQQKQDDGRGLVLPGYKYLGPFNGLDKGEPVNAADAAALEHDKAYDQQLKAGDNPYLRYNHADAEFQERLQEDTSFGGNLGRAVFQAKKRVLEPLGLVEEGAKTAPGKKRPVEPSPQRSPDSSTGIGKKGQQPARKRLNFGQTGDSESVPDPQPIGEPPAAPSSVGSGTMAAGGGAPMADNNEGADGVGSSSGNWHCDSTWLGDRVITTSTRTWALPTYNNHLYKQISNGTSGGSTNDNTYFGYSTPWGYFDFNRFHCHFSPRDWQRLINNNWGFRPKRLSFKLFNIQVKEVTQNEGTKTIANNLTSTIQVFTDSEYQLPYVLGSAHQGCLPPFPADVFMIPQYGYLTLNNGSQAVGRSSFYCLEYFPSQMLRTGNNFSFSYTFEDVPFHSSYAHSQSLDRLMNPLIDQYLYYLSRTQSTGGTAGTQQLLFSQAGPSNMSAQARNWLPGPCYRQQRVSTTLSQNNNSNFAWTGATKYHLNGRDSLVNPGVAMATNKDDEDRFFPSSGILMFGKQGAGKDNVDYSNVMLTSEEEIKATNPVATEQYGVVADNLQQQNTAPIVGAVNSQGALPGMVWQNRDVYLQGPIWAKIPHTDGNFHPSPLMGGFGLKHPPPQILIKNTPVPADPPTAFNQAKLNSFITQYSTGQVSVEIEWELQKENSKRWNPEIQYTSNYYKSTNVDFAVNTEGVYSEPRPIGTRYLTRNL

SEQ ID NO: 5035 - DNA, 2217 bp, Adeno-associated virus
atggctgccgatggttatcttccagattggctcgaggacaacctctctgagggcattcgcgagtggtgggacctgaaacctggagccccgaaacccaaagccaaccagcaaaagcaggacgacggccggggtctggtgcttcctggctacaagcacctcggacccttcaacggactcgacaagggggagcccgtcaacgcggcggacgcagcggccctcgagcacgacaaggcctacgaccagcagctcaaagcgggtgacaatccgtacctgcggtataatcacgctgacgccgagtttcaggagcgtctgcaagaagatacgtcttttgggggcaacctcgggcgagcagtcttccaggccaagaagcgggttctcgaacctctcggtctggttgaggaaggcgctaagacggctcctggaaagaagagaccggtagagccgtcaccacagcgttcccccgactcctccacgggcatcggcaagaaaggccagcagcccgccagaaagagactcaatttcggtcagactggcgactcagagtcagtccccgaccctcaacctatcggagaacctccagcagcgccctctagtgtgggatctggtacaatggctgcaggcggtggcgcaccaatggcagacaataacgaaggtgccgacggagtgggtagttcctcgggaaattggcattgcgattccacatggctgggcgacagagtcatcaccaccagcacccgaacctgggccctgcccacctacaacaaccacctctacaagcaaatctccaacgggacctcgggaggcagcaccaacgacaacacctactttggctacagcaccccctgggggtattttgactttaacagattccactgccacttctcaccacgtgactggcagcgactcatcaacaacaactggggattccggcccaagagactcagcttcaagctcttcaacatccaggtcaaagaggtcacgcagaatgaaggcaccaagaccatcgccaataaccttaccagcacggttcaggtcttttcggactcggaataccagctgccctacgtcctcggctccgcacaccagggctgcctgcctccgttcccggcggacgtcttcatgattccccagtacggctacctgactctgaacaatggcagccaatcggtgggtcgttcctctttctactgcctggaatatttcccttctcaaatgctgagaacgggcaacaacttcaccttcagctacaccttcgaggacgttcccttccacagcagctacgcacacagccagagcctggaccggctgatgaatcctcttatcgaccagtacctgtattacctggccagaacacagagcaacgcaggaggcacagctggcaatcgggaactgcagttttatcagggcgggcctaccaccatggccgaacaagccaaaaactggctgcctggaccttgcttccggcaacaaagagtctccaagacgctggatcaaaacaacaacagcaactttgcttggactggtgccaccaaataccatctaaatggaagaaattcattggttaatcccggtgtcgccatggcaacccacaaggacgacgaggaacgcttcttcccttcgagcggagtcctgatttttggaaaaactggagcagctaataagactacactggaaaatgtgttaatgacaaatgaagaggaaattcgtcctaccaacccggtagccaccgaggaatacgggactgttagcagcaacctgcaggcggctaacactgcagcccagacacaagttgtcaacaaccagggagccttacctggtatggtctggcagaaccgggacgtgtacctgcagggtcccatctgggccaagattcctcacacggacggcaactttcacccgtctccgctgatgggcggctttggactgaagcatccgcctcctcagatcctgatcaaaaacactcctgttcctgctaatcccccggaggtgtttacgcctgccaagtttgcttctttcatcacacagtacagcaccggccaggtcagcgtggagatcgagtgggagctgcagaaggagaacagcaagcgctggaacccagagattcagtatacctccaattttgacaaacagactggtgtggactttgccgttgacagccagggtgtttattctgagcctcgccccattggtactcgttacctcacccgtaatctgtaa

SEQ ID NO: 5036 - protein, 738 aa, Adeno-associated virus
MAADGYLPDWLEDNLSEGIREWWDLKPGAPKPKANQQKQDDGRGLVLPGYKHLGPFNGLDKGEPVNAADAAALEHDKAYDQQLKAGDNPYLRYNHADAEFQERLQEDTSFGGNLGRAVFQAKKRVLEPLGLVEEGAKTAPGKKRPVEPSPQRSPDSSTGIGKKGQQPARKRLNFGQTGDSESVPDPQPIGEPPAAPSSVGSGTMAAGGGAPMADNNEGADGVGSSSGNWHCDSTWLGDRVITTSTRTWALPTYNNHLYKQISNGTSGGSTNDNTYFGYSTPWGYFDFNRFHCHFSPRDWQRLINNNWGFRPKRLSFKLFNIQVKEVTQNEGTKTIANNLTSTVQVFSDSEYQLPYVLGSAHQGCLPPFPADVFMIPQYGYLTLNNGSQSVGRSSFYCLEYFPSQMLRTGNNFTFSYTFEDVPFHSSYAHSQSLDRLMNPLIDQYLYYLARTQSNAGGTAGNRELQFYQGGPTTMAEQAKNWLPGPCFRQQRVSKTLDQNNNSNFAWTGATKYHLNGRNSLVNPGVAMATHKDDEERFFPSSGVLIFGKTGAANKTTLENVLMTNEEEIRPTNPVATEEYGTVSSNLQAANTAAQTQVVNNQGALPGMVWQNRDVYLQGPIWAKIPHTDGNFHPSPLMGGFGLKHPPPQILIKNTPVPANPPEVFTPAKFASFITQYSTGQVSVEIEWELQKENSKRWNPEIQYTSNFDKQTGVDFAVDSQGVYSEPRPIGTRYLTRNL

SEQ ID NO: 5037 - protein, 737 aa, Adeno-associated virus
MAADGYLPDWLEDNLSEGIREWWDLKPGAPKPKANQQKQDDGRGLVLPGYKYLGPFNGLDKGEPVNAADAAALEHDKAYDQQLKAGDNPYLRYNHADAEFQERLQEDTSFGGNLGRAVFQAKKRVLEPLGLVEEAAKTAPGKKRPVEPSPQRSPDSSTGIGKKGQQPARKRLNFGQTGDSESVPDPQPIGEPPAGPSGLGSGTMAAGGGAPMADNNKGADGVGNASGNWHCDSTWLGDRVITTSTRTWALPTYNNHLYKQISSQSAGSTNDNVYFGYSTPWGYFDFNRFHCHFSPRDWQRLINSNWGFRPKKLNFKLFNIQVKEVTTNDGVTTIANNLTSTVQVFSDSEYQLPYVLGSAHQGCLPPFPADVFMIPQYGYLTLNNGSQSVGRSSFYCLEYFPSQMLRTGNNFTFSYTFEDVPFHSSYAHSQSLDRLMNPLIDQYLYYLARTQSNAGGTAGNRELQFYQGGPTTMAEQAKNWLPGPCFRQQRVSKTLDQNNNSNFAWTGATKYHLNGRNSLVNPGVAMATHKDDEERFFPSSGVLIFGKTGAANKTTLENVLMTNEEEIRPTNPVATEEYGTVSSNLQAANTAAQTQVVNNQGALPGMVWQNRDVYLQGPIWAKIPHTDGNFHPSPLMGGFGLKHPPPQILIKNTPVPANPPEVFTPAKFASFITQYSTGQVSVEIEWELQKENSKRWNPEIQYTSNFDKQTGVDFAVDSQGVYSEPRPIGTRYLTRNL

SEQ ID NO: 5038 - DNA, 2214 bp, Adeno-associated virus
atggctgctgacggttatcttccagattggctcgaggacaacctctctgagggcattcgcgagtggtgggacctgaaacctggagcccccaagcccaaggccaaccagcagaagcaggacgacggccggggtctggtgcttcctggctacaagtacctcggacccttcaacggactcgacaagggggagcccgtcaacgcggcggacgcagcggccctcgagcacgacaaggcctacgaccagcagctcaaagcgggtgacaatccgtacctgcggtataaccacgccgacgccgagtttcaggagcgtctgcaagaagatacgtcttttgggggcaacctcgggcgagcagtcttccaggccaagaagcgggttctcgaacctctcggtctggttgaggaagctgctaagacggctcctggaaagaagagaccggtagaaccgtcacctcagcgttcccccgactcctccacgggcatcggcaagaaaggccagcagcccgctagaaagagactgaactttgggcagactggcgactcagagtcagtccccgaccctcaaccaatcggagaaccaccagcaggcccctctggtctgggatctggtacaatggctgcaggcggtggcgcaccaatggctgacaataacaagggcgccgacggagtgggtaatgcctcaggaaattggcattgcgattccacatggctgggcgacagagtcatcaccaccagcacccgaacctgggctttgcccacctacaacaaccacctctacaagcaaatctccagtcagtcagcaggtagcaccaacgacaacgtctacttcggctacagcaccccctgggggtattttgacttcaacagattccactgtcacttctcaccacgtgactggcagcggctcatcaacagcaactggggattccggcccaagaagctcaacttcaagctgttcaacatccaggtcaaggaggtcacaacgaatgacggcgtcacgaccatcgccaataaccttaccagcacggttcaggtcttttcggactcggaataccagctgccctacgtcctcggctccgcacaccagggctgcctgcctccgttcccggcggacgtcttcatgattccccagtacggctacctgactctgaacaatggcagccaatcggtgggtcgttcctctttctactgcctggaatatttcccttctcaaatgctgagaacgggcaacaacttcaccttcagctacaccttcgaggacgttcccttccacagcagctacgcacacagccagagcctggaccggctgatgaatcctcttatcgaccagtacctgtattacctggccagaacacagagcaacgcaggaggcacagctggcaatcgggaactgcagttttatcagggcgggcctaccaccatggccgaacaagccaaaaactggctgcctggaccttgcttccggcaacaaagagtctccaagacgctggatcaaaacaacaacagcaactttgcttggactggtgccaccaaataccatctaaatggaagaaattcattggttaatcccggtgtcgccatggcaacccacaaggacgacgaggaacgcttcttcccttcgagcggagtcctgatttttggaaaaactggagcagctaataagactacactggaaaatgtgttaatgacaaatgaagaggaaattcgtcctaccaacccggtagccaccgaggaatacgggactgttagcagcaacctgcaggcggctaacactgcagcccagacacaagttgtcaacaaccagggagccttacctggtatggtctggcagaaccgggacgtgtacctgcagggtcccatctgggccaagattcctcacacggacggcaactttcacccgtctccgctgatgggcggctttggactgaagcatccgcctcctcagatcctgatcaaaaacactcctgttcctgctaatcccccggaggtgtttacgcctgccaagtttgcttctttcatcacacagtacagcaccggccaggtcagcgtggagatcgagtgggagctgcagaaggagaacagcaagcgctggaacccagagattcagtatacctccaattttgacaaacagactggtgtggactttgccgttgacagccagggtgtttattctgagcctcgccccattggtactcgttacctcacccgtaatctgtaa

SEQ ID NO: 5039 - protein, 737 aa, Adeno-associated virus
MAADGYLPDWLEDNLSEGIREWWDLKPGAPKPKANQQKQDDGRGLVLPGYKYLGPFNGLDKGEPVNAADAAALEHDKAYDQQLKAGDNPYLRYNHADAEFQERLQEDTSFGGNLGRAVFQAKKRVLEPLGLVEEAAKTAPGKKRPVEPSPQRSPDSSTGIGKKGQQPARKRLNFGQTGDSESVPDPQPIGEPPAGPSGLGSGTMAAGGGAPMADNNEGADGVGNASGNWHCDSTWLGDRVITTSTRTWALPTYNNHLYKQISSQSAGSTNDNVYFGYSTPWGYFDFNRFHCHFSPRDWQRLINSNWGFRPKKLNFKLFNIQVKEVTTNDGVTTIANNLTSTVQVFSDSEYQLPYVLGSAHQGCLPPFPADVFMIPQYGYLTLNNGSQSVGRSSFYCLEYFPSQMLRTGNNFTFSYTFEDVPFHSSYAHSQSLDRLMNPLIDQYLYYLARTQSNAGGTAGNRELQFYQGGPTTMAEQAKNWLPGPCFRQQRVSKTLDQNNNSNFAWTGATKYHLNGRNSLVNPGVAMATHKDDEERFFPSSGVLIFGKTGAANKTTLENVLMTNEEEIRPTNPVATEEYGTVSSNLQAANTAAQTQVVNNQGALPGMVWQNRDVYLQGPIWAKIPHTDGNFHPSPLMGGFGLKHPPPQILIKNTPVPANPPEVFTPAKFASFITQYSTGQVSVEIEWELQKENSKRWNPEIQYTSNFDKQTGVDFAVDSQGVYSEPRPIGTRYLTRNL

SEQ ID NO: 5040 - protein, 737 aa, Adeno-associated virus
MAADGYLPDWLEDNLSEGIREWWDLKPGAPKPKANQQKQDDGRGLVLPGYKYLGPFNGLDKGEPVNAADAAALEHDKAYDQQLKAGDNPYLRYNHADAEFQERLQEDTSFGGNLGRAVFQAKKRVLEPLGLVEEAAKTAPGKKRPVEPSPQRSPDSSTGIGKKGQQPARKRLNFGQTGDSESVPDPQPIGEPPAGPSGLGSGTMAAGGGAPMADNNEGADGVGNASGNWHCDSTWLGDRVITTSTRTWALPTYNNHLYKQISSQSAGSTNDNVYFGYSTPWGYFDFNRFHCHFSPRDWQRLINNNWGFRPKKLNFKLFNIQVKEVTTNDGVTTIANNLTSTVQVFSDSEYQLPYVLGSAHQGCLPPFPADVFMIPQYGYLTLNNGSQSVGRSSFYCLEYFPSQMLRTGNNFTFSYTFEDVPFHSSYAHSQSLDRLMNPLIDQYLYYLARTQSNAGGTAGNRELQFYQGGPTTMAEQAKNWLPGPCFRQQRVSKTLDQNNNSNFAWTGATKYHLNGRNSLVNPGVAMATHKDDEERFFPSSGVLIFGKTGAANKTTLENVLMTNEEEIRPTNPVATEEYGTVSSNLQAANTAAQTQVVNNQGALPGMVWQNRDVYLQGPIWAKIPHTDGNFHPSPLMGGFGLKHPPPQILIKNTPVPANPPEVFTPAKFASFITQYSTGQVSVEIEWELQKENSKRWNPEIQYTSNFDKQTGVDFAVDSQGVYSEPRPIGTRYLTRNL

SEQ ID NO: 5041 - protein, 737 aa, Adeno-associated virus
MAADGYLPDWLEDNLSEGIREWWDLKPGAPKPKANQQKQDDGRGLVLPGYKYLGPFNGLDKGEPVNAADAAALEHDKAYDQQLKAGDNPYLRYNHADAEFQERLQEDTSFGGNLGRAVFQAKKRVLEPLGLVEEAAKTAPGKKRPVEPSPQRSPDSSTGIGKKGQQPARKRLNFGQTGDSESVPDPQPIGEPPAGPSGLGSGTMAAGGGAPMADNNKGADGVGNASGNWHCDSTWLGDRVITTSTRTWALPTYNNHLYKQISSQSAGSTNDNVYFGYSTPWGYFDFNRFHCHFSPRDWQRLINNNWGFRPKKLNFKLFNIQVKEVTTNDGVTTIANNLTSTVQVFSDSEYQLPYVLGSAHQGCLPPFPADVFMIPQYGYLTLNNGSQSVGRSSFYCLEYFPSQMLRTGNNFTFSYTFEDVPFHSSYAHSQSLDRLMNPLIDQYLYYLARTQSNAGGTAGNRELQFYQGGPTTMAEQAKNWLPGPCFRQQRVSKTLDQNNNSNFAWTGATKYHLNGRNSLVNPGVAMATHKDDEERFFPSSGVLIFGKTGAANKTTLENVLMTNEEEIRPTNPVATEEYGTVSSNLQAANTAAQTQVVNNQGALPGMVWQNRDVYLQGPIWAKIPHTDGNFHPSPLMGGFGLKHPPPQILIKNTPVPANPPEVFTPAKFASFITQYSTGQVSVEIEWELQKENSKRWNPEIQYTSNFDKQTGVDFAVDSQGVYSEPRPIGTRYLTRNL

SEQ ID NO: 5042 - DNA, 2217 bp, Adeno-associated virus
atggctgccgatggttatcttccagattggctcgaggacaacctctctgagggcattcgcgagtggtgggacctgaaacctggagccccgaaacccaaagccaaccagcaaaagcaggacgacggccggggtctggtgcttcctggctacaagtacctcggacccttcaacggactcgacaagggggagcccgtcaacgcggcggacgcagcggccctcgagcacgacaaggcctacgaccagcagctcaaagcgggtgacaatccgcacctgcggtataatcacgccgacgccgagtttcaggagcgtctgcaagaagatacgtcttttgggggcaacctcgggcgagcagtcttccaggccaagaagcgggttctcgaacctctcggtctggttgaggaaggcgctaagacggctcctggaaagaagagaccggtagagccgtcaccacagcgttcccccgactcctccacgggcatcggcaagaaaggccagcagcccgccagaaagagactcaatttcggtcagactggcgactcagagtcagtccccgaccctcaacttatcggagaacctccagcagcgccctctagtgtgggatctggtacaatggctgcaggcggtggcgcaccaatggcagacaataacgaaggtgccgacggagtgggtagttcctcgggaaattggcattgcgattccacatggctgggcgacagagtcatcaccaccagcacccgaacctgggccctgcccacctacaacaaccacctctacaagcaaatctccaacgggacctcgggaggcagcaccaacgacaacacctactttggctacagcaccccctgggggtattttgactttaacagattccactgccacttctcaccacgtgactggcagcgactcatcaacaacaactggggattccggcccaagagactcagcttcaagctcttcaacatccaggtcaaagaggtcacgcagaatgaaggcaccaagaccatcgccaataacctcaccagcaccatccaggtgtttacggactcggagtaccagctgccgtacgtcctcggctctgcccaccagggctgcctgcctccgttcccggcggacgtcttcatgattcctcagtacggcaacctgactctcaacaacggtagtcaggccgtgggacgttcctccttctactgcctggagtacttcccctctcagatgctgagaacgggcaacaacttttccttcagctacactttcgaggacgtgcctttccacagcagctacgcgcacagccagagtttggacaggctgatgaatcctctcatcgaccagtacctgtactacctgtcaagaacccagtctacgggaggcacagcgggaacccagcagttgctgttttctcaggccgggcctagcaacatgtcggctcaggccagaaactggctgcctggaccctgctacagacagcagcgcgtctccacgacactgtcgcaaaacaacaacagcaactttgcctggactggtgccaccaagtatcatctgaacggcagagactctctggtgaatccgggcgtcgccatggcaaccaacaaggacgacgaggaccgcttcttcccatccagcggcatcctcatgtttggcaagcagggagctggaaaagacaacatgggctatagcaacgtgatgctaaccagcgaggaagaaatcaagaccaccaaccccgtggccacagaacagtatggcgtggtggctgataacctacagcagcaaaacaccgctcctattgtgggggccgtcaacagccagggagccttacctggcatggtctggcagaaccgggacgtgtacctgcagggtcctatttgggccaagattcctcacacagatggcaactttcacccgtctcctttaatgggcggctttggacttaaacatccgcctcctcagatcctcatcaaaaacactcctgttcctgcggatcctccaacagcgttcaaccaggccaagctgaattctttcatcacgcagtacggcaccggacaagtcagcgtggagatcgagtgggagctgcagaaggagaacagcaagcgctggaacccagagattcagtatacttccaactactacaaatctacaaatgtggactttgctgttaatactgagggtgtttactctgagcctcgccccattggcactcgttacctcacccgtaatctgtaa

SEQ ID NO: 5043 - protein, 738 aa, Adeno-associated virus
MAADGYLPDWLEDNLSEGIREWWDLKPGAPKPKANQQKQDDGRGLVLPGYKYLGPFNGLDKGEPVNAADAAALEHDKAYDQQLKAGDNPHLRYNHADAEFQERLQEDTSFGGNLGRAVFQAKKRVLEPLGLVEEGAKTAPGKKRPVEPSPQRSPDSSTGIGKKGQQPARKRLNFGQTGDSESVPDPQLIGEPPAAPSSVGSGTMAAGGGAPMADNNEGADGVGSSSGNWHCDSTWLGDRVITTSTRTWALPTYNNHLYKQISNGTSGGSTNDNTYFGYSTPWGYFDFNRFHCHFSPRDWQRLINNNWGFRPKRLSFKLFNIQVKEVTQNEGTKTIANNLTSTIQVFTDSEYQLPYVLGSAHQGCLPPFPADVFMIPQYGNLTLNNGSQAVGRSSFYCLEYFPSQMLRTGNNFSFSYTFEDVPFHSSYAHSQSLDRLMNPLIDQYLYYLSRTQSTGGTAGTQQLLFSQAGPSNMSAQARNWLPGPCYRQQRVSTTLSQNNNSNFAWTGATKYHLNGRDSLVNPGVAMATNKDDEDRFFPSSGILMFGKQGAGKDNMGYSNVMLTSEEEIKTTNPVATEQYGVVADNLQQQNTAPIVGAVNSQGALPGMVWQNRDVYLQGPIWAKIPHTDGNFHPSPLMGGFGLKHPPPQILIKNTPVPADPPTAFNQAKLNSFITQYGTGQVSVEIEWELQKENSKRWNPEIQYTSNYYKSTNVDFAVNTEGVYSEPRPIGTRYLTRNL

SEQ ID NO: 5044 - DNA, 2217 bp, Adeno-associated virus
atggctgccgatggttatcttccagattggctcgaggacaacctctctgagggcattcgcgagtggtgggacctgaaacctggagccccgaaacccaaagccaaccagcaaaagcaggacgacggccggggtctggtgcttcctggctacaagtacctcggacccttcaacggactcgacaagggggagcccgtcaacgcggcggacgcagcggccctcgagcacgacaaggcctacgaccagcagctcaaagcgggtgacaatccgtacctgcggtataatcacgccgacgccgagtttcaggagcgtctgcaagaagatacgtcttttgggggcaacctcgggcgagcagtcttccaggccaagaagcgggttctcgaacctctcggtctggttgaggaaggcgctaagacggctcctggaaagaagagaccggtagagccgtcaccacagcgttcccccgactcctccacgggcatcggcaagaaaggccagcagcccgccggaaagagactcaatttcggtcagactggcgactcagagtcagtccccgaccctcaacctatcggagaacctccagcagcgccctctagtgtgggatctggtacaatggctgcaggcggtggcgcaccaatggcagacaataacgaaggtgccgacggagtgggtagttcctcgggaaattggcattgcgattccacatggctgggcgacagagtcatcaccaccagcacccgaacctgggccctgcccacctacaacaaccacctctacaagcaaatctccaacgggacctcgggaggcagcaccaacgacaacacctactttggctacagcaccccctgggggtattttgactttaacagattccactgccacttctcaccacgtgactggcagcgactcatcaacaacaactggggattccggcccaagagactcagcttcaagctcttcaacatccaggtcaaagaggtcacgcagaatgaaggcaccaagaccatcgccaataacctcaccagcaccatccaggtgtttacggactcggaataccagctgccgtacgtcctcggctctgcccaccagggctgcctgcctccgttcccggcggacgtcttcatgattcctcagtacggctacctgactctcaacaacggtagtcaggccgtgggacgttcctccttctactgcctggagtacttcccctctcagatgctgagaacgggcaacaacttttccttcagctacactttcgaggacgtgcctttccacagcagctacgcgcacagccagagtttggacaggctgatgaatcctctcgtcgaccagtacctgtactacctgtcaagaacccagtctacgggaggcacagcgggaacccagcagttgctgttttctcaggccgggcctagcaacatgtcggctcaggccagaaactggctgcctggaccctgctacagacagcagcgcgtctccacgacactgtcgcaaaacaacaacagcaactttgcctggactggtgccaccaagtatcatctgaacggcagagactctctggtgaatccgggcgtcgccatggcaaccaacaaggacgacgaggaccgcttcttcccatccagcggcatcctcatgtttggcaagcagggagctggaaaagacaacgtggactatagcaacgtgatgctaaccagcgaggaagaaatcaagaccaccaaccccgtggccacagaacagtatggcgtggtggctgataacctacagcagcaaaacaccgctcctattgtgggggccgtcaacagccagggagccttacctggcatggtctggcagaaccgggacgtgtacctgcagggtcctatttgggccaagattcctcacacagatggcaactttcacccgtctcctttaatgggcggctttggacttaaacatccgcctcctcagatcctcatcaaaaacactcctgttcctgcggatcctccaacagcgttcaaccaggccaagctgaattctttcatcacgcagtacagcaccggacaagtcagcgtggagatcgagtgggagctgcagaaggagaacagcaagcgctggagcccagagattcagtatacttccaactactacaaatctacaaatgtggactttgctgttaatactgagggtgtttactctgagcctcgccccattggcactcgttacctcacccgtaatctgtaa

SEQ ID NO: 5045 - protein, 738 aa, Adeno-associated virus
MAADGYLPDWLEDNLSEGIREWWDLKPGAPKPKANQQKQDDGRGLVLPGYKYLGPFNGLDKGEPVNAADAAALEHDKAYDQQLKAGDNPYLRYNHADAEFQERLQEDTSFGGNLGRAVFQAKKRVLEPLGLVEEGAKTAPGKKRPVEPSPQRSPDSSTGIGKKGQQPAGKRLNFGQTGDSESVPDPQPIGEPPAAPSSVGSGTMAAGGGAPMADNNEGADGVGSSSGNWHCDSTWLGDRVITTSTRTWALPTYNNHLYKQISNGTSGGSTNDNTYFGYSTPWGYFDFNRFHCHFSPRDWQRLINNNWGFRPKRLSFKLFNIQVKEVTQNEGTKTIANNLTSTIQVFTDSEYQLPYVLGSAHQGCLPPFPADVFMIPQYGYLTLNNGSQAVGRSSFYCLEYFPSQMLRTGNNFSFSYTFEDVPFHSSYAHSQSLDRLMNPLVDQYLYYLSRTQSTGGTAGTQQLLFSQAGPSNMSAQARNWLPGPCYRQQRVSTTLSQNNNSNFAWTGATKYHLNGRDSLVNPGVAMATNKDDEDRFFPSSGILMFGKQGAGKDNVDYSNVMLTSEEEIKTTNPVATEQYGVVADNLQQQNTAPIVGAVNSQGALPGMVWQNRDVYLQGPIWAKIPHTDGNFHPSPLMGGFGLKHPPPQILIKNTPVPADPPTAFNQAKLNSFITQYSTGQVSVEIEWELQKENSKRWSPEIQYTSNYYKSTNVDFAVNTEGVYSEPRPIGTRYLTRNL

SEQ ID NO: 5046 - DNA, 2217 bp, Adeno-associated virus
atggttgccgatggttatcttccagattggctcgaggacaacctctctgagggcattcgcgagtggtgggacctgaaacctggagccccgaaacccaaagccaaccagcaaaagcagggcgacggccggggtctggtgcttcctggctacaagtacctcggacccttcaacggactcgacaagggggagcccgtcaacgcggcggacgcagcggccctcgagcacgacaaggcctacgaccagcagcttaaagcgggtgacaatccgtacctgcggtataatcacgccgacgccgagcttcaggagcgtctgcaagaagatacgtcttttgggggcaacctcgggcgagcagtcttccaggccaagaagcgggttctcgaacctctcggtctggttgaggaaggcgctaagacggctcctggaaagaagagaccggtagagccgtcaccacagcgttcccccgactcctccacgggcatcggcaagaaaggccagcagcccgccagaaagagactcaatttcggtcagactggcgactcagagtcagtccccgaccctcaacctatcggagaacctccagcagcgccctctagtgtgggatctggtacaatggctgcaggcggtggcgcgccaatggcagacaataacgaaggtgccgacggagtgggtagttcctcgggaaattggcattgcgattccacatggctgggcgacagagtcatcaccaccagcacccgaacctgggccctgcccacctacaacaaccacctctacaagcaaatctccaacgggacctcgggaggcagcaccaacgacaacacctactttggctacagcaccccctgggggtattttgactttaacagattccactgccacttctcaccacgtgactggcagcgactcatcaacaacaactggggattccggcccaagagactcagcttcaagctcttcaacatccaggtcaaagaggtcacgcagaatgaaggcaccaagaccatcgccaataacctcaccagcaccatccaggtgtttacggactcggaataccagctgccgtacgtcctcggctctgcccaccagggctgccagcctccgttcccggcggacgtcttcatgattcctcagtacggctacctgactctcaacaacggtagtcaggccgtgggacgttcctccttctactgcctggagtacttcccctctcagatgctgagaacgggcaacaacttttccttcagctacactttcgaggacgtgcctttccacagcagctacgcgcacagccagagtttggacaggctgatgaatcctctcatcgaccagtacctgtactacctgtcaagaacccagtctacgggaggcacagcgggaacccagcagttgctgttttctcaggccgggcctagcaacatgtcggctcaggccagaaactggctgcctggaccctgctacagacagcagcgcgtctccacgacactgtcgcaaaacaacaacagcaactttgcctggactggtgccaccaagtatcatctgaacggcagagactctctggtgaatccgggcgtcgccatggcaaccaacaaggacgacgaggaccgcttcttcccatccagcggcatcctcatgtttggcaagcagggagctggaaaagacaacgtggactatagcaacgtgatgctaaccagcgaggaagaaatcaagaccaccaaccccgtggccacagaacagtatggcgtggtggctgataacctacagcagcaaaacaccgctcctattgtgggggccgtcaacagccagggagccttacctggcatggtctggcagaaccgggacgtgtacctgcagggtcctatttgggccaagattcctcacacagatggcaactttcacccgtctcctttaatgggcggctttggacttaaacatccgcctcctcagatcctcatcaaaaacactcctgttcctgcggatcctccaacagcgttcaaccaggccaagctgaattctttcatcacgcagtacagcaccggacaagtcagcgtggagatcgagtgggagccgcagaaggagaacagcaagcgctggaacccagagattcagtatacttccaactactacaaatctacaaatgtggactttgctgttaatactgagggtgtttactctgagcctcgccccattggcactcgttacctcacccgtaatctgtaa

SEQ ID NO: 5047 - protein, 738 aa, Adeno-associated virus
MVADGYLPDWLEDNLSEGIREWWDLKPGAPKPKANQQKQGDGRGLVLPGYKYLGPFNGLDKGEPVNAADAAALEHDKAYDQQLKAGDNPYLRYNHADAELQERLQEDTSFGGNLGRAVFQAKKRVLEPLGLVEEGAKTAPGKKRPVEPSPQRSPDSSTGIGKKGQQPARKRLNFGQTGDSESVPDPQPIGEPPAAPSSVGSGTMAAGGGAPMADNNEGADGVGSSSGNWHCDSTWLGDRVITTSTRTWALPTYNNHLYKQISNGTSGGSTNDNTYFGYSTPWGYFDFNRFHCHFSPRDWQRLINNNWGFRPKRLSFKLFNIQVKEVTQNEGTKTIANNLTSTIQVFTDSEYQLPYVLGSAHQGCQPPFPADVFMIPQYGYLTLNNGSQAVGRSSFYCLEYFPSQMLRTGNNFSFSYTFEDVPFHSSYAHSQSLDRLMNPLIDQYLYYLSRTQSTGGTAGTQQLLFSQAGPSNMSAQARNWLPGPCYRQQRVSTTLSQNNNSNFAWTGATKYHLNGRDSLVNPGVAMATNKDDEDRFFPSSGILMFGKQGAGKDNVDYSNVMLTSEEEIKTTNPVATEQYGVVADNLQQQNTAPIVGAVNSQGALPGMVWQNRDVYLQGPIWAKIPHTDGNFHPSPLMGGFGLKHPPPQILIKNTPVPADPPTAFNQAKLNSFITQYSTGQVSVEIEWEPQKENSKRWNPEIQYTSNYYKSTNVDFAVNTEGVYSEPRPIGTRYLTRNL

SEQ ID NO: 5048 - DNA, 2217 bp, Adeno-associated virus
atggctgccgatggttatcttccagattggctcgaggacaacctctctgagggcattcgcgagtggtgggacctgaaacctggagccccgaaacccaaagccaaccagcaaaagcaggacgacggccggggtctggtgcttcctggctacaagtacctcggacccttcaacggactcgacaagggggagcccgtcaacgcggcggacgcagcggccctcgagcacgacaaggcctacgaccagcagctcaaagcgggtgacaatccgtacctgcggtataatcacgccgacgccgagtttcaggagcgtctgcaagaagatacgtcttttgggggcaacctcgggcgagcagtcttccaggccaagaagcgggttctcgaacctctcggtctggttgaggaaggcgctaagacggctcctggaaagaagagaccggtagagccgtcaccacagcgttcccccgactcctccacgggcatcggcaagaaaggccagcagcccgccagaaagagactcaatttcggtcagactggcgactcagagtcagtccccgaccctcaacctatcggagaacctccagcagcgccctctagtgtgggatctggtacaatggctgcaggcggtggcgcaccaatggcagacaataacgaaggtgccgacggagtgggtagttcctcgggaaattggcattgcgattccacatggctgggcgacagagtcatcaccaccagcacccgaacctgggccctgcccacctacaacaaccacctctacaagcaaatctccaacgggacctcgggaggcagcaccaacgacaacacctactttggctacagcaccccctgggggtattttgactttaacagattccactgccacttctcaccacgtgactggcagcgactcatcaacaacaactggggattccggcccaagagactcagcttcaagctcttcaacatccaggtcaaagaggtcacgcagaatgaaggcaccaagaccatcgccaatagcctcaccagcaccatccaggtgtttacggactcggaataccagctgccgtacgtcctcggctctgcccaccagggctgcctgcctccgttcccggcggacgtcttcatgattcctcagtacggctacctgactcccaacaacggtagtcaggccgtgggacgttcctccttctactgcctggagtacttcccctctcagatgctgagaacgggcaacaacttttccttcagctacactttcgaggacgtgcctttccacagcagctacgcgcacagccagagtttggacaggctgatgaatcctctcatcgaccagtacctgtactacctgtcaagaacccagtctacgggaggcacagcgggaacccagcagttgctgtcttctcaggccgggcctagcaacatgtcggctcaggccagaaactggctgcctggaccctgctacagacagcagcgcgtctccacgacactgtcgcaaaacaacaacagcaactttgcctggactggtgccaccaagtatcatctgaacggcagagactctctggtgaatccgggcgtcgccatggcaaccaacaaggacgacgaggaccgcttcttcccatccagcggcatcctcatgtttggcaagcagggagctggaaaagacaacgtggactatagcaacgtgatgctaaccagcgaggaagaaatcaagaccaccaaccccgtggccacagaacagtatggcgtggtggctgataacctacagcagcaaaacaccgctcctattgtgggggccgtcaacagccagggagccttacctggcatggtctggcagaaccgggacgtgtacttgcagggtcctatttgggccaagattcctcacacagatggcaactttcacccgtctcctttaatgggcggctttggacttaaacatccgcctcctcagatcctcatcaaaaacactcctgttcctgcggatcctccaacagcgttcaaccaggccaagctgaattctttcatcacgcagtacagcaccggacaagtcagcgtggagatcgagtgggagctgcagaaggagaacagcaagcgctggaacccagagattcagtatacttccaactactacaaatctacaaatgtggactttgctgttaatactgagggtgtttactctgagcctcgccccattggcactcgttacctcacccgtaatctgtaa

SEQ ID NO: 5049 - protein, 738 aa, Adeno-associated virus
MAADGYLPDWLEDNLSEGIREWWDLKPGAPKPKANQQKQDDGRGLVLPGYKYLGPFNGLDKGEPVNAADAAALEHDKAYDQQLKAGDNPYLRYNHADAEFQERLQEDTSFGGNLGRAVFQAKKRVLEPLGLVEEGAKTAPGKKRPVEPSPQRSPDSSTGIGKKGQQPARKRLNFGQTGDSESVPDPQPIGEPPAAPSSVGSGTMAAGGGAPMADNNEGADGVGSSSGNWHCDSTWLGDRVITTSTRTWALPTYNNHLYKQISNGTSGGSTNDNTYFGYSTPWGYFDFNRFHCHFSPRDWQRLINNNWGFRPKRLSFKLFNIQVKEVTQNEGTKTIANSLTSTIQVFTDSEYQLPYVLGSAHQGCLPPFPADVFMIPQYGYLTPNNGSQAVGRSSFYCLEYFPSQMLRTGNNFSFSYTFEDVPFHSSYAHSQSLDRLMNPLIDQYLYYLSRTQSTGGTAGTQQLLSSQAGPSNMSAQARNWLPGPCYRQQRVSTTLSQNNNSNFAWTGATKYHLNGRDSLVNPGVAMATNKDDEDRFFPSSGILMFGKQGAGKDNVDYSNVMLTSEEEIKTTNPVATEQYGVVADNLQQQNTAPIVGAVNSQGALPGMVWQNRDVYLQGPIWAKIPHTDGNFHPSPLMGGFGLKHPPPQILIKNTPVPADPPTAFNQAKLNSFITQYSTGQVSVEIEWELQKENSKRWNPEIQYTSNYYKSTNVDFAVNTEGVYSEPRPIGTRYLTRNL

SEQ ID NO: 5050 - protein, 738 aa, Adeno-associated virus
MAADGYLPDWLEDNLSEGIREWWDLKPGAPKPKANQQKQDDGRGLVLPGYKYLGPFNGLDKGEPVNAADAAALEHDKAYDQQLKAGDNPYLRYNHADAEFQERLQEDTSFGGNLGRAVFQAKKRVLEPLGLVEEGAKTAPGKKRPVEPSPQRSPDSSTGIGKKGQQPARKRLNFGQTGDSESVPDPQPIGEPPAAPSSVGSGTMAAGGGAPMADNNEGADGVGSSSGNWHCDSTWLGDRVITTSTRTWALPTYNNHLYKQISNGTSGGSTNDNTYFGYSTPWGYFDFNRFHCHFSPRDWQRLINNNWGFRPKRLSFKLFNIQVKEVTQNEGTKTIANNLTSTIQVFTDSEYQLPYVLGSAHQGCLPPFPADVFMIPQYGYLTLNNGSQAVGRSSFYCLEYFPSQMLRTGNNFSFSYTFEDVPFHSSYVHSQSLDRLMNPLIDQYLYYLSRTQSTGGTAGTQQLLFSQAGPSNMSAQARNWLPGPCYRQQRVSTTLSQNNNSNFAWTGATKYHLNGRDSLVNSGVAMATNKDDEDRFFPSSGILMFGKQGAGKDNVDYSNVMLTSEEEIKTTNPVATEQYGVVADNLQQQNTAPIVGAVNSQGALPGMVWQNRDVYLQGPIWAKIPHTDGNFHPSPLMGGFGLKHPPPQILIKNTPVPADPPTAFNQAKLNSFITQYSTGQVSVEIEWELQKENSKRWNPEIQYTSNYYKSTNVDFAVNTEGVYSEPRPIGTRYPTRNL

SEQ ID NO: 5051 - DNA, 2217 bp, Adeno-associated virus
atggctgccgatggttatcttccagattggctcgaggacaacctctctgagggcattcgcgagtggtgggacctgaaacctggagccccgaaacccaaagccaaccagcaaaagcaggacgacggccggggtctggtgcttcctggctacaagtacctcggacccttcaacggactcgacaagggggagcccgtcaacgcggcggacgcagcggccctcgagcacgacaaggcctacgaccagcagctcaaagcgggtgacaatccgtacctgcggtataatcacgccgacgccgagtttcaggagcgtctgcaagaagatacgtcttttgggggcaacctcgggcgagcagtcttccaggccaagaagcgggttctcgaacctctcggtctggttgaggaaggcgctaagacggctcctggaaagaagagaccggtagagccgtcaccacagcgttcccccgactcctccacgggcatcggcaagaaaggccagcagcccgccagaaagagactcaatttcggtcagactggcgactcagagtcagtccccgaccctcaacctatcggagaacctccagcagcgccctctagtgtgggatctggtacaatggctgcaggcggtggcgcaccaatggcagacaataacgaaggtgccgacggagtgggtagttcctcgggaaattggcattgcgattccacatggctgggcgacagagtcatcaccaccagcacccgaacctgggccctgcccacctacaacaaccacctctacaagcaaatctccaacgggacctcgggaggcagcaccaacgacaacacctactttggctacagcaccccctgggggtattttgactttaacagattccactgccacttctcaccacgtgactggcagcgactcatcaacaacaactggggattccggcccaagagactcagcttcaagctcttcaacatccaggtcaaagaggtcacgcagaatgaaggcaccaagaccatcgccaataacctcaccagcaccatccaggtgtttacggactcggaataccagctgccgtacgtcctcggctctgcccaccagggctgcctgcctccgttcccggcggacgtcttcatgattcctcagtacggctacctgactctcaacaacggtagtcaggccgtgggacgttcctccttctactgcctggagtacttcccctctcagatgctgagaacgggcaacaacttttccttcagctacactttcgaggacgtgcctttccacagcagctacgtgcacagccagagtttggacaggctgatgaatcctctcatcgaccagtacctgtactacctgtcaagaacccagtctacgggaggcacagcgggaacccagcagttgctgttttctcaggccgggcctagcaacatgtcggctcaggccagaaactggctgcctggaccctgctacagacagcagcgcgtctccacgacactgtcgcaaaacaacaacagcaactttgcctggactggtgccaccaagtatcatctgaacggcagagactctctggtgaattcgggcgtcgccatggcaaccaacaaggacgacgaggaccgcttcttcccatccagcggcatcctcatgtttggcaagcagggagctggaaaagacaacgtggactatagcaacgtgatgctaaccagcgaggaagaaatcaagaccaccaaccccgtggccacagaacagtatggcgtggtggctgataacctacagcagcaaaacaccgctcctattgtgggggccgtcaacagccagggagccttacctggcatggtctggcagaaccgggacgtgtacctgcagggtcctatttgggccaagattcctcacacagatggcaactttcacccgtctcctttaatgggcggctttggacttaaacatccgcctcctcagatcctcatcaaaaacactcctgttcctgcggatcctccaacagcgttcaaccaggccaagctgaattctttcatcacgcagtacagcaccggacaagtcagcgtggagatcgagtgggagctgcagaaggagaacagcaagcgctggaacccagagattcagtatacttccaactactacaaatctacaaatgtggactttgctgttaatactgagggtgtttactctgagcctcgccccattggcactcgttaccccacccgtaatctgtaa

SEQ ID NO: 5052 - protein, 734 aa, Adeno-associated virus; identical to SEQ ID NO: 4948

SEQ ID NO: 5053 - DNA, 2214 bp, Adeno-associated virus
atggctgctgacggttatcttccagattggctcgaggacaacctctctgagggcattcgcgagtggtgggacctgaaacctggagccccgaaacccaaagccaaccagcagaagcaggacgacggccggggtctggtgcttcctggctacaagtacctcggacccttcaacggactcgacaagggggagcccgtcaacgcggcggacgcagcggccctcgagcacgacaaggcctacgaccagcagctcaaagcgggtgacaatccgtacctgcggtataaccacgccgacgccgagtttcaggagcgtctgcaagaagatacgtcttttgggggcaacctcgggcgagcagtcttccaggccaagaagcgggttctcgaacctctcggtctggttgaggaagctgctaagacggctcctggaaagaagagaccggtagaaccgtcacctcagcgttcccccgactcctccacgggcatcggcaagaaaggccagcagcccgctagaaagagactgaactttgggcagactggcgactcagagtcagtccccgaccctcaacctctcggagaaccaccagcaggcccctctggtctgggatctggtacaatggctgcaggcggtggcgctccaatggcagacaataacgaaggcgccgacggagtgggtaatgcctcaggaaattggcattgcgattccacatggctgggcgacagagtcatcaccaccagcacccgaacctgggctttgcccacctacaacaaccacctctacaagcaaatctccagtcagtcagcaggtagcaccaacgacaacgtctacttcggctacagcaccccctgggggtattttgacttcaacagattccactgtcacttctcaccacgtgactggcagcgactcatcaacaacaactggggattccggcccaagaagctcaacttcaagctcttcaacatccaagtcaaggaggtcacgacgaatgacggcgtcacgaccatcgctaataaccttaccagcacggttcaggtcttttcggactcggagtaccagctgccgtacgtcctcggctctgcccaccagggctgcctgcctccgttcccggcggacgtcttcatgattcctcagtacggctacctgactctgaacaatggcagccaatcggtgggacgttcatccttctactgcctggaatacttcccttctcaggtgctgagaacgggtaacaacttcaccttcagttacaccttcgaggacgtgcctttccacagcagctacgcgcacagccagagcctagaccggctgatgaatcccctcatcgaccagtacctgtattacctggctagaacacagagtaacccaggaggcacatctggcaatcgggaactgcagttttaccagggcgggccttccaccatggccgaacaagccaagaactggttacctggaccttgcttccggcaacaaagagtttccaaaacactggatcaaaacaacaacagcaactttgcttggactggtgccaccaaatatcacctgaacggcagaaactcattggtgaatcctggtgtcgccatggcaactcacaaggacgacgaggaccgctttttcccatccagcggagtcctgatttttggaaaaactggagcaaccaacaagactacattggaaaacgtgttaatgacaaatgaagaagaaattcgtcctactaatcctgtggccacagaagaatacgggatagtcagcagcaatttacaagcggccaatactgcagcccagacacaagttgtcaacaaccagggagccttacctggcatggtctggcagaaccgggacgtgtacctgcagggtcccatctgggccaaaattcctcacacagacggcaactttcacccgtctccgctgatgggcggctttggactgaagcatccgcctcctcagatcctgatcaaaaacactcctgttcctgctaatcccccggaggtgtttacgcctgccaagtttgcttctttcatcacacagtacagcaccggccaggtcagcgtggagatcgagtgggagctgcagaaggagaacagcaagcgctggaacccagagattcagtatacctccaattttgacaaacagactggtgtggactttgccgttgacagccagggtgtttattctgagcctcgccccattggtactcgttacctcacccgtaatctgtaa

SEQ ID NO: 5054 - protein, 737 aa, Adeno-associated virus
MAADGYLPDWLEDNLSEGIREWWDLKPGAPKPKANQQKQDDGRGLVLPGYKYLGPFNGLDKGEPVNAADAAALEHDKAYDQQLKAGDNPYLRYNHADAEFQERLQEDTSFGGNLGRAVFQAKKRVLEPLGLVEEAAKTAPGKKRPVEPSPQRSPDSSTGIGKKGQQPARKRLNFGQTGDSESVPDPQPLGEPPAGPSGLGSGTMAAGGGAPMADNNEGADGVGNASGNWHCDSTWLGDRVITTSTRTWALPTYNNHLYKQISSQSAGSTNDNVYFGYSTPWGYFDFNRFHCHFSPRDWQRLINNNWGFRPKKLNFKLFNIQVKEVTTNDGVTTIANNLTSTVQVFSDSEYQLPYVLGSAHQGCLPPFPADVFMIPQYGYLTLNNGSQSVGRSSFYCLEYFPSQVLRTGNNFTFSYTFEDVPFHSSYAHSQSLDRLMNPLIDQYLYYLARTQSNPGGTSGNRELQFYQGGPSTMAEQAKNWLPGPCFRQQRVSKTLDQNNNSNFAWTGATKYHLNGRNSLVNPGVAMATHKDDEDRFFPSSGVLIFGKTGATNKTTLENVLMTNEEEIRPTNPVATEEYGIVSSNLQAANTAAQTQVVNNQGALPGMVWQNRDVYLQGPIWAKIPHTDGNFHPSPLMGGFGLKHPPPQILIKNTPVPANPPEVFTPAKFASFITQYSTGQVSVEIEWELQKENSKRWNPEIQYTSNFDKQTGVDFAVDSQGVYSEPRPIGTRYLTRNL

SEQ ID NO: 5055 - DNA, 2214 bp, Adeno-associated virus
atggctgccgatggttatcttccagattggctcgaggacaacctctctgagggcattcgcgagtggtgggacctgaaacctggagccccgaaacccaaagccaaccagcaaaagcaggacgacggccggggtctggtgcttcctggctacaagtacctcggacccttcaacggactcgacaagggggagcccgtcaacgcggcggacgcagcggccctcgagcacgacaaggcctacgaccagcagctcaaagcgggtgacaatccgtacctgcggtataatcacgccgacgccgagtttcaggagcgtctgcaagaagatacgtcttttgggggcaacctcgggcgagcagtcttccaggccaagaagcgggttctcgaacctctcggtctggttgaggaaggcgctaagacggctcctggaaagaagagaccggtagagccgtcaccacagcgttcccccgactcctccacgggcatcggcaagaaaggccagcagcccgccagaaagagactcaatttcggtcagactggcgactcagagtcagtccccgaccctcaacctatcggagaacctccagcagcgccctctagtgtgggatctggtacaatggctgcaggcggtggcgcaccaatggcagacaataacgaaggtgccgacggagtgggtagttcctcgggaaattggcattgcgattccacacggctgggcgacagagtcatcaccaccagcacccggacctgggctttgcccacctacaacaaccacctctacaagcaaatctccagtcagtcagcaggtagcaccaacgacaacgtctacttcggctacagcaccccctgggggtattttgacttcaacagattccactgtcacttctcaccacgtgactggcagcggctcatcaacaacaactggggattccggcccaagaagctcaacttcaagctgttcaacatccaggtcaaggaggtcacaacgaatgacggcgtcacgaccatcgccaataaccttaccagcacggttcaggtcttttcggactcggaataccagctgccctacgtcctcggctccgcacaccagggctgcctgcctccgttcccggcggacgtcttcatgattccccagtacggctacctgactctgaacaatggcagccaatcggtgggtcgttcctctttctactgcctggaatatttcccttctcaaatgctgagaacgggcaacaacttcaccttcagctacaccttcgaggacgttcccttccacagcagctacgcacacagccagagcctggaccggctgatgaatcctcttatcgaccagtacctgtattacctggccagaacacagagcaacgcaggaggcacagctggcaatcgggaactgcagttttatcagggcgggcctaccaccatggccgaacaagccaaaaactggctgcctggaccttgcttccggcaacgaagagtctccaagacgctggatcaaaacaacaacagcaactttgcttggactggtgccaccaaataccatctaaatggaagaaattcattggttaatcccggtgtcgccatggcaacccacaaggacgacgaggaacgcttcttcccttcgagcggagtcctgatttttggaaaaactggagcagctaataagactacactggaaaatgtgttaatgacaaatgaagaggaaattcgtcctaccaacccggtagccaccgaggaatacgggactgttagcagcaacctgcaggcggctaacactgcagcccagacacaagttgtcaacaaccagggagccttacctggtatggtctggcagaaccgggacgtgtacctgcagggtcccatctgggccaagattcctcacacggacggcaactttcacccgtctccgctgatgggcggctttggactgaagcatccgcctcctcagatcctgatcaaaaacactcctgttcctgctaatcccccggaggtgtttacgcctgccaagtttgcttctttcatcacacagtacagcaccggccaggtcagcgtggagatcgagtgggagctgcagaaggagaacagcaagcgctggaacccagagattcagtatacctccaattttgacaaacagactggtgtggactttgccgttgacagccagggtgtttattctgagcctcgccccattggtactcgttacctcacccgtaatctgtaa

SEQ ID NO: 5056 - protein, 737 aa, Adeno-associated virus
MAADGYLPDWLEDNLSEGIREWWDLKPGAPKPKANQQKQDDGRGLVLPGYKYLGPFNGLDKGEPVNAADAAALEHDKAYDQQLKAGDNPYLRYNHADAEFQERLQEDTSFGGNLGRAVFQAKKRVLEPLGLVEEGAKTAPGKKRPVEPSPQRSPDSSTGIGKKGQQPARKRLNFGQTGDSESVPDPQPIGEPPAAPSSVGSGTMAAGGGAPMADNNEGADGVGSSSGNWHCDSTRLGDRVITTSTRTWALPTYNNHLYKQISSQSAGSTNDNVYFGYSTPWGYFDFNRFHCHFSPRDWQRLINNNWGFRPKKLNFKLFNIQVKEVTTNDGVTTIANNLTSTVQVFSDSEYQLPYVLGSAHQGCLPPFPADVFMIPQYGYLTLNNGSQSVGRSSFYCLEYFPSQMLRTGNNFTFSYTFEDVPFHSSYAHSQSLDRLMNPLIDQYLYYLARTQSNAGGTAGNRELQFYQGGPTTMAEQAKNWLPGPCFRQRRVSKTLDQNNNSNFAWTGATKYHLNGRNSLVNPGVAMATHKDDEERFFPSSGVLIFGKTGAANKTTLENVLMTNEEEIRPTNPVATEEYGTVSSNLQAANTAAQTQVVNNQGALPGMVWQNRDVYLQGPIWAKIPHTDGNFHPSPLMGGFGLKHPPPQILIKNTPVPANPPEVFTPAKFASFITQYSTGQVSVEIEWELQKENSKRWNPEIQYTSNFDKQTGVDFAVDSQGVYSEPRPIGTRYLTRNL

SEQ ID NO: 5057 - DNA, 2208 bp, Adeno-associated virus
atggctgccgatggttatcttccagattggctcgaggacactctctctgaaggaataagacagtggtggaagctcaaacctggcccaccaccaccaaagcccgcagagcggcataaggacgacagcaggggtcttgtgcttcctgggtacaagtacctcggacccttcaacggactcgacaagggggagccggtcaacgaggcagacgccgcggccctcgagcacgacaaggcctacgaccggcagctcgacagcggagacaacccgtacctcaagtacaaccacgccgacgcggagtttcaggagcgtcttaaagaagatacgtcttttgggggcaacctcggacgagcagtcttccaggcgaaaaagagggttcttgaacctctgggcctggttgaggaacctgttaagacggctccgggaaaaaagaggccggtagagcactctcctgcggagccagactcctcctcgggaaccggaaaagcgggccagcagcctgcaagaaaaagattgaattttggtcagactggagacgcagactccgtacctgacccccagcctctcggacagccaccagcagccccctctggtttgggatctactacaatggctacaggcagtggcgcaccaatggcagacaataacgagggtgccgatggagtgggtaattcttcaggaaattggcattgcgattcccaatggctgggcgacagagtcatcaccaccagcacccgaacctgggcccagcccacctacaacaaccacctctacaagcaaatctcaagccaatcaggagcctcaaacgacaaccactactttggctacagcaccccttgggggtattttgacttcaacagattccactgccacttttcaccacgtgactggcaaagactcatcaacaacaactggggattccgacccaagagactcaacttcaagctctttaacattcaagtcaaagaggtcacgcagaatgacggtacgacgacgattgccaataaccttaccagcacggttcaggtgtttactgactcggagtaccagctcccgtacgtcctcgggtcggcgcatcaaggatgcctcccgccgtttccagcggacgtcttcatggtcccacagtatggatacctcaccctgaacaacgggagtcaggcggtaggacgctcttccttttactgcctggagtactttccttctcagatgcttcgtactggaaacaactttcagttcagctacacctttgaagacgttcctttccacagcagctacgctcacagccagagtctggatcggctgatgaatcctctgatcgaccagtacctgtattatctgaacaaaacacaatcaaatagtggagctcttcagcagtctcggctactgtttagtcaagctggacccaccagcatgtctcttcaagctaaaaactggctacctggaccttgctacagacagcagcgtctgtcaaagcaggcaaacgacaacaacaacagcaactttccctggactgcggctacaaagtaccacctaaatggccgggactcgttggttaatccaggaccagctatggccagtcacaaagacgatgaagaaaagtttttccccatgcatggaaccctgatatttggtaaacaaggaacaaatgctaacgacgcggatttggacaatgtcatgattacagatgaagaagaaatccgcaccaccaatcccgtggctacggagcagtacggatatgtgtcaaataatttgcaaaactcaaatactggtccaactactggaactgtcaatcaccgaggagcgttacctggcatggtgtggcaggatcgagacgtgtacctgcagggacccatttgggccaagattcctcacaccgatggacactttcatccttctccactgatgggaggttttgggctcaaacacccgcctcctcagatcatgatcaaaaacactcccgttccagccaatcctcccacaaacttcagttctgccaagtttgcttctttcatcacacagtattccacggggcaggtcagcgtggagatcgagtgggagctgcagaaagagaacagcaaacgctggaatcccgaaattcagtacacttccaactacaacaaatctgttaatgtggactttactgtggacactaatggcgtgtattcagagcctcgccccattggcaccagatacctgactcgtaatctgtaa

SEQ ID NO: 5058 - protein, 735 aa, Adeno-associated virus
MAADGYLPDWLEDTLSEGIRQWWKLKPGPPPPKPAERHKDDSRGLVLPGYKYLGPFNGLDKGEPVNEADAAALEHDKAYDRQLDSGDNPYLKYNHADAEFQERLKEDTSFGGNLGRAVFQAKKRVLEPLGLVEEPVKTAPGKKRPVEHSPAEPDSSSGTGKAGQQPARKRLNFGQTGDADSVPDPQPLGQPPAAPSGLGSTTMATGSGAPMADNNEGADGVGNSSGNWHCDSQWLGDRVITTSTRTWAQPTYNNHLYKQISSQSGASNDNHYFGYSTPWGYFDFNRFHCHFSPRDWQRLINNNWGFRPKRLNFKLFNIQVKEVTQNDGTTTIANNLTSTVQVFTDSEYQLPYVLGSAHQGCLPPFPADVFMVPQYGYLTLNNGSQAVGRSSFYCLEYFPSQMLRTGNNFQFSYTFEDVPFHSSYAHSQSLDRLMNPLIDQYLYYLNKTQSNSGALQQSRLLFSQAGPTSMSLQAKNWLPGPCYRQQRLSKQANDNNNSNFPWTAATKYHLNGRDSLVNPGPAMASHKDDEEKFFPMHGTLIFGKQGTNANDADLDNVMITDEEEIRTTNPVATEQYGYVSNNLQNSNTGPTTGTVNHRGALPGMVWQDRDVYLQGPIWAKIPHTDGHFHPSPLMGGFGLKHPPPQIMIKNTPVPANPPTNFSSAKFASFITQYSTGQVSVEIEWELQKENSKRWNPEIQYTSNYNKSVNVDFTVDTNGVYSEPRPIGTRYLTRNL

SEQ ID NO: 5059 - DNA, 2217 bp, Adeno-associated virus
atggctgccgatggttatcttccagattggctcgaggacaacctctctgagggcattcgcgagtggtgggcgctgaaacctggagccccgaagcccaaagccaaccagcaaaagcaggacgacggccggggtctggtgcttcctggctacaagtacctcggacccttcaacggactcgacaagggggagcccgtcaacgcggcggacgcagcggccctcgagcacgacaaggcctacgaccagcagctgcaggcgggtgacaatccgtacctgcggtataatcacgccgacgccgagtttcaggagcgtctgcaagaagatacgtcttttgggggcaacctcgggcgagcagtcttccaggccaagaagcgggttctcgaacctctcggtctggttgaggaaggcgctaagacggctcctggaaagaagagaccggtagagccgtcaccacagcgttcccccgactcctccacgggcatcggcaagaaaggccagcagcccgccagaaagagactcaatttcggtcagactggcgactcagagtcagtccccgaccctcaacctatcggagaacctccagcagcgccctctagtgtgggatctggtacaatggctgcaggcggtggcgcgccaatggcagacaataacgaaggtgccgacggagtgggtagttcctcgggaaattggcattgcgattccacatggctgggcgacagagtcatcaccaccagcacccgaacctgggccctgcccacctacaacaaccacctctacaagcaaacctccaacgggacctcgggaggcagcaccaacgacaacacctactttggctacagcaccccctgggggtattttgactttaacagattccactgccacttctcaccacgtgactggcagcgactcatcaacaacaactggggattccggcccaagagactcagcttcaagctcttcaacatccaggtcaaagaggtcacgcagaatgaaggcaccaagaccatcgccaataacctcaccagcaccatccaggtgtttacggactcggaataccagctgccgtacgtcctcggctctgcccaccagggctgcctgcctccgttcccggcggacgtcttcatgattcctcagtacggctacctgactctcaacaacggtagtcaggccgtgggacgttcctccttctactgcctggagtacttcccctctcagatgctgagaacgggcaacaacttttccttcagctacactttcgaggacgtgcctttccacagcagctacgcgcacagccagagtttggacaggctgatgaatcctctcatcgaccagtacctgtactacctgtcaagaacccagtctacgggaggcacagcgggaacccagcagttgctgttttctcaggccgggcctagcaacatgtcggctcaggccagaaactggctgcctggaccctgctacagacagcagcgcgtctccacgacactgtcgcaaaacaacaacagcaactttgcctggactggtgccaccaagtatcatctgaacggcagagactctctggtgaatccgggcgtcgccatggcaaccaacaaggacgacgaggaccgcttcttcccatccagcggcatcctcatgtttggcaagcagggagctggaaaagacaacgtggactatagcaacgtgatgctaaccagcgaggaagaaatcaagaccaccaaccccgtggccacagaacagtatggcgtggtggctgataacctacagcagcaaaacaccgctcctattgtgggggccgtcaacagccagggagccttacctggcatggtctggcagaaccgggacgtgtacctgcagggtcctatttgggccaagattcctcacacagatggcaactttcacccgtctcctttaatgggcggctttggacttaaacatccgcctcctcagatcctcatcaaaaacactcctgttcctgcggatcctccaacagcgttcaaccaggccaagctgaattctttcatcacgcagtacagcaccggacaagtcagcgcggagatcgagtgggagctgcagaaggagaacagcaagcgctggaacccagagattcagtatacttccaactactacaaatctacaaatgtggactttgctgttaatactgagggtgtttactctgagcctcgccccattggcactcgttacctcacccgtaatctgtaa

SEQ ID NO: 5060 - protein, 738 aa, Adeno-associated virus
MAADGYLPDWLEDNLSEGIREWWALKPGAPKPKANQQKQDDGRGLVLPGYKYLGPFNGLDKGEPVNAADAAALEHDKAYDQQLQAGDNPYLRYNHADAEFQERLQEDTSFGGNLGRAVFQAKKRVLEPLGLVEEGAKTAPGKKRPVEPSPQRSPDSSTGIGKKGQQPARKRLNFGQTGDSESVPDPQPIGEPPAAPSSVGSGTMAAGGGAPMADNNEGADGVGSSSGNWHCDSTWLGDRVITTSTRTWALPTYNNHLYKQTSNGTSGGSTNDNTYFGYSTPWGYFDFNRFHCHFSPRDWQRLINNNWGFRPKRLSFKLFNIQVKEVTQNEGTKTIANNLTSTIQVFTDSEYQLPYVLGSAHQGCLPPFPADVFMIPQYGYLTLNNGSQAVGRSSFYCLEYFPSQMLRTGNNFSFSYTFEDVPFHSSYAHSQSLDRLMNPLIDQYLYYLSRTQSTGGTAGTQQLLFSQAGPSNMSAQARNWLPGPCYRQQRVSTTLSQNNNSNFAWTGATKYHLNGRDSLVNPGVAMATNKDDEDRFFPSSGILMFGKQGAGKDNVDYSNVMLTSEEEIKTTNPVATEQYGVVADNLQQQNTAPIVGAVNSQGALPGMVWQNRDVYLQGPIWAKIPHTDGNFHPSPLMGGFGLKHPPPQILIKNTPVPADPPTAFNQAKLNSFITQYSTGQVSAEIEWELQKENSKRWNPEIQYTSNYYKSTNVDFAVNTEGVYSEPRPIGTRYLTRNL

SEQ ID NO: 5061 - DNA, 2217 bp, Adeno-associated virus
atggctgctgacggttatcttccagattggctcgaggacaacctctctgagggcattcgcgagtggtgggacctgaaacctggagcccccaagcccaaggccaaccagcagaagcaggacgacggccggggtctggtgcttcctggctacaagtacctcggacccttcaacggactcgacaagggggagcccgtcaacgcggcggacgcagcggccctcgagcacgacaaggcctacgaccagcagctcaaagcgggtgacaatccgtacctgcggtataatcacgccgacgccgagtttcaggagcgtctgcaagaagatacgtcttttgggggcaacctcgggcgagcagtcttccaggccaagaagcgggttctcgaacctctcggtctggttgaggaagctgctaagacggctcctggaaagaagagaccggtagaaccgtcacctcagcgttcccccgactcctccacgggcatcggcaagaaaggccagcagcccgctagaaagagactgaactttgggcagactggcgactcagagtcagtccccgaccctcaaccaatcggagaacctccagcagcgccctctagtgtgggatctggtacaatggccgcaggcggtggcgcaccaatggcagacaataacgaaggtgccgacggagtgggtagttcctcgggaaattggcattgcgattccacatggctgggcgacagagtcatcaccaccagcacccgaacctgggccctgcccacctacaacaaccacctctacaagcaaatctccaacgggacctcgggaggcagcaccaacgacaacacctactttggctacagcaccccctgggggtattttgactttaacagattccactgccacttctcaccacgtgactggcagcgactcatcaacaacaactggggattccggcccaagagactcagcttcaagctcttcaacatccaggtcaaagaggtcacgcagaatgaaggcaccaagaccatcgccaataacctcaccagcaccatccaggtgtttacggactcggaataccagctgccgtacgtcctcggctctgcccaccagggctgcctgcctccgttcccggcggacgtcttcatgattcctcagtacggctacctgactctcaacaacggtagtcaggccgtgggacgttcctccttctactgcctggagtacttcccctctcagatgctgagaacgggcaacaacttttccttcagctacactttcgaggacgtgcctttccacagcagctacgcgcacagccagagtttggacaggctgatgaatcctctcatcgaccagtacctgtactacctgtcaagaacccagtctacgggaggcacagcgggaacccagcagctgctgttttctcaggccgggcctagcaacatgtcggctcaggccagaaactggctgcctggaccctgctacagacagcagcgcgtctccacgacactgtcgcaaaacaacaacagcaactttgcctggactggtgccaccaagtatcatctgaacggcagagactctctggtgaatccgggcgtcgccatggcaaccaacaaggacgacgaggaccgcttcttcccatccagcggcatcctcatgtttggcaagcagggagctggaaaagacaacgtggactatagcaacgtgatgctaaccagcgaggaagaaatcaagaccaccaaccccgtggccacagaacagtatggcgtggtggctgataacctacagcagcaaaacaccgctcctattgtgggggccgtcaacagccagggagccttacctggcatggtctggcagaaccgggacgtgtacctgcagggtcctatttgggccaagattcctcacacagatggcaactttcacccgtctcctttaatgggcggctttggacttaaacatccgcctcctcagatcctcatcaaaagcactcctgttcctgcggatcctccaacagcgttcaaccaggccaagctgaattctttcatcacgcagtacagcaccggacaagtcagcgtggagatcgagtgggagctgcagaaggagaacagcaagtgctggaacccagagattcagtatacttccaactactacaaatctacaaatgtggactttgctgttaatactgagggtgtttactctgagcctcgccccattggcactcgttacctcacccgtaatctgtaa

SEQ ID NO: 5062 - protein, 738 aa, Adeno-associated virus
MAADGYLPDWLEDNLSEGIREWWDLKPGAPKPKANQQKQDDGRGLVLPGYKYLGPFNGLDKGEPVNAADAAALEHDKAYDQQLKAGDNPYLRYNHADAEFQERLQEDTSFGGNLGRAVFQAKKRVLEPLGLVEEAAKTAPGKKRPVEPSPQRSPDSSTGIGKKGQQPARKRLNFGQTGDSESVPDPQPIGEPPAAPSSVGSGTMAAGGGAPMADNNEGADGVGSSSGNWHCDSTWLGDRVITTSTRTWALPTYNNHLYKQISNGTSGGSTNDNTYFGYSTPWGYFDFNRFHCHFSPRDWQRLINNNWGFRPKRLSFKLFNIQVKEVTQNEGTKTIANNLTSTIQVFTDSEYQLPYVLGSAHQGCLPPFPADVFMIPQYGYLTLNNGSQAVGRSSFYCLEYFPSQMLRTGNNFSFSYTFEDVPFHSSYAHSQSLDRLMNPLIDQYLYYLSRTQSTGGTAGTQQLLFSQAGPSNMSAQARNWLPGPCYRQQRVSTTLSQNNNSNFAWTGATKYHLNGRDSLVNPGVAMATNKDDEDRFFPSSGILMFGKQGAGKDNVDYSNVMLTSEEEIKTTNPVATEQYGVVADNLQQQNTAPIVGAVNSQGALPGMVWQNRDVYLQGPIWAKIPHTDGNFHPSPLMGGFGLKHPPPQILIKSTPVPADPPTAFNQAKLNSFITQYSTGQVSVEIEWELQKENSKCWNPEIQYTSNYYKSTNVDFAVNTEGVYSEPRPIGTRYLTRNL

SEQ ID NO: 5063 - protein, 738 aa, Adeno-associated virus
MAADGYLPDWLEDNLSEGIREWWDLKPGAPKPKANQQKQDDGRGLVLPGYKYLGPFNGLDKGEPVNAADAAALEHDKAYDQQLKAGDNPYLRYNHADAEFQERLQEDTSFGGNLGRAVFQAKKRVLEPLGLVEEAAKTAPGKKRPVEPSPQRSPDSSTGIGKKGQQPARKRLNFGQTGDSESVPDPQPIGEPPAAPSSVGSGTMAAGGGAPMADNNEGADGVGSSSGNWHCDSTWLGDRVITTSTRTWALPTYNNHLYKQISNGTSGGSTNDNTYFGYSTPWGYFDFNRFHCHFSPRDWQRLINNNWGFRPKRLSFKLFNIQVKEVTQNEGTKTIANNLTSTIQVFTDSEYQLPYVLGSAHQGCLPPFPADVFMIPQYGYLTLNNGSQAVGRSSFYCLEYFPSQMLRTGNNFSFSYTFEDVPFHSSYAHSQSLDRLMNPLIDQYLYYLSRTQSTGGTAGTQQLLFSQAGPSNMSAQARNWLPGPCYRQQRVSTTLSQNNNSNFAWTGATKYHLNGRDSLVNPGVAMATNKDDEDRFFPSSGILMFGKQGAGKDNVDYSNVMLTSEEEIKTTNPVATEQYGVVADNLQQQNTAPIVGAVNSQGALPGMVWQNRDVYLQGPIWAKIPHTDGNFHPSPLMGGFGLKHPPPQILIKSTPVPADPPTAFNQAKLNSFITQYSTGQVSVEIEWELQKENSKRWNPEIQYTSNYYKSTNVDFAVNTEGVYSEPRPIGTRYLTRNL

SEQ ID NO: 5064 - DNA, 2217 bp, Adeno-associated virus
atggctgctgacggttatcttccagattggctcgaggacaacctctctgagggcattcgcgagtggtgggacctgaaacctggagcccccaagcccaaggccaaccagcagaagcaggacgacggccggggtctggtgcttcctggctacaagtacctcggacccttcaacggactcgacaagggggagcccgtcaacgcggcggacgcagcggccctcgagcacgacaaggcctacgaccagcagctcaaagcgggtgacaatccgtacctgcggtataaccacgccgacgccgagtttcaggagcgtctgcaagaagatacgtcttttgggggcaacctcgggcgagcagtcttccaggccaagaagcgggttctcgaacctctcggtctggttgaggaagctgctaagacggctcctggaaagaagagaccggtagaaccgtcacctcagcgttcccccgactcctccacgggcatcggcaagaaaggccagcagcccgctagaaagagactgaactttgggcagactggcgactcagagtcagtccccgaccctcaaccaatcggagaaccaccagcaggcccctctggtctgggatctggtacaatggctgcaggcggtggcgcaccaatggctgacaataacgagggcgccgacggagtgggtaatgcctcaggaaattggcattgcgattccacatggctgggcgacagagtcatcaccaccagcacccgaacctgggctttgcccacctacaacaaccacctctacaagcaaatctccagtcagtcagcaggtagcaccaacgacaacgtctacttcggctacagcaccccctgggggtattttgacttcaacagattccactgtcacttctcaccacgtgactggcagcggctcatcaacaacaactggggattccggcccaagaagctcaacttcaagctgttcaacatccaggtcaaggaggtcacaacgaatgacggcgtcacgaccatcgccaataaccctaccagcacggttcaggtcttttcggactcggaataccagctgccctacgtcctcggctccgcacaccagggctgcctgcctccgttcccggcggacgtcttcatgattccccagtacggctacctgactctgaacaatggcagccaatcggtgggtcgttcctctttctactgcctggaatatttcccttctcaaatgctgagaacgggcaacaacttcaccttcagctacaccttcgaggacgttcccttccacagcagctacgcacacagccagagcctggaccggctgatgaatcctcttatcgaccagtacctgtattacctggccagaacacagagcaacgcaggaggcacagctggcaatcgggaactgcagttttatcagggcgggcctaccaccatggccgaacaagccaaaaactggctgcctggaccctgctacagacagcagcgcgtctccacgacactgtcgcaaaacaacaacagcaactttgcctggactggtgccaccaagtatcatctgaacggcagagactctctggtgaatccgggcgtcgccatggcaaccaacaaggacgacgaggaccgcttcttcccatccagcggcatcctcatgtttggcaagcagggagctggaaaagacaacgtggactatagcaacgtgatgctaaccagcgaggaagaaatcaagaccaccaaccccgtggccacagaacagtatggcgtggtggctgataacctacagcagcaaaacaccgctcctattgtgggggccgtcaacagccagggagccttacctggcatggtctggcagaaccgggacgtgtacctgcagggtcctatttgggccaagattcctcacacagatggcaactttcacccgtctcctttaatgggcggctttggacttaaacatccgcctcctcagatcctcatcaaaaacactcctgttcctgcggatcctccaacagcgttcaaccaggccaagctgaattctttcatcacgcagtacagcaccggacaagtcagcgtggagatcgagtgggagctgcagaaggagaacagcaagcgctggaacccagagattcagtatacttccaactactacaaatctacaaatgtggactttgctgttaatactgagggtgtttactctgagcctcgccccattggcactcgttacctcacccgtaatctgtaa

SEQ ID NO: 5065 - protein, 738 aa, Adeno-associated virus
MAADGYLPDWLEDNLSEGIREWWDLKPGAPKPKANQQKQDDGRGLVLPGYKYLGPFNGLDKGEPVNAADAAALEHDKAYDQQLKAGDNPYLRYNHADAEFQERLQEDTSFGGNLGRAVFQAKKRVLEPLGLVEEAAKTAPGKKRPVEPSPQRSPDSSTGIGKKGQQPARKRLNFGQTGDSESVPDPQPIGEPPAGPSGLGSGTMAAGGGAPMADNNEGADGVGNASGNWHCDSTWLGDRVITTSTRTWALPTYNNHLYKQISSQSAGSTNDNVYFGYSTPWGYFDFNRFHCHFSPRDWQRLINNNWGFRPKKLNFKLFNIQVKEVTTNDGVTTIANNPTSTVQVFSDSEYQLPYVLGSAHQGCLPPFPADVFMIPQYGYLTLNNGSQSVGRSSFYCLEYFPSQMLRTGNNFTFSYTFEDVPFHSSYAHSQSLDRLMNPLIDQYLYYLARTQSNAGGTAGNRELQFYQGGPTTMAEQAKNWLPGPCYRQQRVSTTLSQNNNSNFAWTGATKYHLNGRDSLVNPGVAMATNKDDEDRFFPSSGILMFGKQGAGKDNVDYSNVMLTSEEEIKTTNPVATEQYGVVADNLQQQNTAPIVGAVNSQGALPGMVWQNRDVYLQGPIWAKIPHTDGNFHPSPLMGGFGLKHPPPQILIKNTPVPADPPTAFNQAKLNSFITQYSTGQVSVEIEWELQKENSKRWNPEIQYTSNYYKSTNVDFAVNTEGVYSEPRPIGTRYLTRNL

SEQ ID NO: 5066 - DNA, 2208 bp, Adeno-associated virus
atggctgccgatggttatcttccagattggctcgaggacaacctctctgagggcattcacgagtggtgggacccgaaacctggagccccgaaacccaaagccaaccagcaaaagcaggacgacggccggggtctggtgcttcctggctacaagtacctcggacccttcaacggactcgacaagggggagcccgtcaacgcggcggacgcagcggccctcgagcacgacaaggcctacgaccagcagctcaaagcgggtgacaatccgtacctgcggtataatcacgccgacgccgagtttcaggagcgtctgcaagaagatacgtcttttgggggcaacctcgggcgagcagtcttccaggccaagaagcgggttctcgaacctctcggtctggttgaggaaggcgctaagacggctcctggaaagaagagaccggtagagccgtcaccacagcgttcccccgactcctccacgggcatcggcaagaaaggccagcagcccgccagaaagagactcaatttcggtcagactggcgactcagagtcagtccccgaccctcaacctatcggagaacctccagcagcgccctctagtgtgggatctggtacaatggctgcaggcggtggcgcaccaatggcagacaataacgaaggtgccgacggagtgggtagttcctcgggaaattggcattgcgattccacatggctgggcgacagagtcatcaccaccagcacccgaacctgggccctgcccacccacaacaaccacctctacaagcaaatctccaacgggacctcgggaggcagcaccaacgacaacgtctacttcggctacagcaccccctgggggtattttgacttcaacagattccactgtcacttctcaccacgtgaccggcagcgactcatcaacaacaactggggattccggcccaagagactcagcttcaagctcttcaacatccaggtcaaagaggtcacgcagaatgaaggcaccaagaccatcgccaataacctcaccagcaccatccaggtgtttacggactcggaataccagctgccgtacgtcctcggctctgcccaccagggctgcctgcctccgttcccggcggacgtcttcatgattcctcagtacggctacctgactctcaacaacggtagtcaggccgtgggacgttcctccttctactgcctggagtacttcccctctcagatgctgagaacgggcaacaacttttccttcagctacactttcgaggacgtgcctttccacagcagctacgcgcacagccagagtttggacaggctgatgaatcctctcatcgaccagtacctgtactacctgtcaagaacccagtctacggaaggcacagcgggaacccagcagttgctgttttctcaggccgggcctagcaacatgtcggctcaggccagaaactggctgcctggaccctgctacagacagcagcgcgtctccacgacactgtcgcaaaacaacaacagcaactttgcctggactggtgccaccaagtatcatctgaacggcagagactctctggtgaatccgggcgtcgccatggcaacccacaaggacgacgaggaacgcttcttcccttcgagcggagtcctgatttttggaaaaactggagcagctaataagactacactggaaaatgtgttaatgacaaatgaagaggaaattcgtcctaccaacccggtagccaccgaggaatacgggactgttagcagcaacctgcaggcggctaacactgcagcccagacacaagttgtcaacaaccagggagccttacctggtatggtctggcagaaccgggacgtgtacctgcagggtcccatctgggccaagattcctcacacggacggcaactttcacccgtctccgctgatgggcggctttggactgaagcatcctcagatcctgatcaaaaacactcctgttcctgctaatcccccggaggtgtttacgcctgccaagtttgcttctttcatcacacagtacagcaccggccaggtcagcgtggagatcgagtgggagctgcagaaggagaacagcaagcgctggaacccagagattcagtatacctccaattttgacaaacagactggtgtggactttgccgttgacagccagggtgtttattctgagcctcgccccattggtactcgttacctcacccgtaatctgtaa

SEQ ID NO: 5067 - protein, 735 aa, Adeno-associated virus
MAADGYLPDWLEDNLSEGIHEWWDPKPGAPKPKANQQKQDDGRGLVLPGYKYLGPFNGLDKGEPVNAADAAALEHDKAYDQQLKAGDNPYLRYNHADAEFQERLQEDTSFGGNLGRAVFQAKKRVLEPLGLVEEGAKTAPGKKRPVEPSPQRSPDSSTGIGKKGQQPARKRLNFGQTGDSESVPDPQPIGEPPAAPSSVGSGTMAAGGGAPMADNNEGADGVGSSSGNWHCDSTWLGDRVITTSTRTWALPTHNNHLYKQISNGTSGGSTNDNVYFGYSTPWGYFDFNRFHCHFSPRDRQRLINNNWGFRPKRLSFKLFNIQVKEVTQNEGTKTIANNLTSTIQVFTDSEYQLPYVLGSAHQGCLPPFPADVFMIPQYGYLTLNNGSQAVGRSSFYCLEYFPSQMLRTGNNFSFSYTFEDVPFHSSYAHSQSLDRLMNPLIDQYLYYLSRTQSTEGTAGTQQLLFSQAGPSNMSAQARNWLPGPCYRQQRVSTTLSQNNNSNFAWTGATKYHLNGRDSLVNPGVAMATHKDDEERFFPSSGVLIFGKTGAANKTTLENVLMTNEEEIRPTNPVATEEYGTVSSNLQAANTAAQTQVVNNQGALPGMVWQNRDVYLQGPIWAKIPHTDGNFHPSPLMGGFGLKHPQILIKNTPVPANPPEVFTPAKFASFITQYSTGQVSVEIEWELQKENSKRWNPEIQYTSNFDKQTGVDFAVDSQGVYSEPRPIGTRYLTRNL

SEQ ID NO: 5068 - protein, 738 aa, Adeno-associated virus
MAADGYLPDWLEDNLSEGIREWWDLKPGAPKPKANQQKQDDGRGLVLPGYKYLGPFNGLDKGEPVNAADAAALEHDKAYDQQLKAGDNPYLRYNHADAEFQERLQEDTSFGGNLGRAVFQAKKRVLEPLGLVEEGAKTAPGKKRPVEPSPQRSPDSSTGIGKKGQQPARKRLNFGQTGDSESVPDPQPIGEPPAAPSSVGSGTMAAGGGAPMADNNEGADGVGSSSGNWHCDSTWLGDRVITTSTRTWALPTYNNHLYKQISNGTSGGSTNDNTYFGYSTPWGYFDFNRFHCHFSPRDWQRPINNNWGFRPKRLSFKLFNIQVKEVTQNEGTKTIANNLTSTIQVFTDSEYQLPYVLGSAHQGCLPPFPADVFMIPQYGYLTLNNGSQAVGRSSFYCLEYFPSQMLRTGNNFSFSYPFEDVPFHSSYAHSQSLDRLMNPLIDQYLYYLSRTQSTGGTAGTQQLLFSQAGPSNMSAQARNWLPGPCYRQQRVSTTLSQNNNSNFAWTGATKYHLNGRDSLVNPGVAMATNKDDEDRFFPSSGILMFGKQGAGKDNVDYSNVMLTSEEEIKTTNPVATEQYGVVADNLQQQDTAPIVGAVNSQGALPGMVWQNRDVYLQGPIWAKIPHTDGNFHPSPLMGGFGLKHPPPQVLIKNTPVPADPPTAFNQAKLNSFITQYSTGQVSVEIEWELQKENSKRWNPEIQYTSNYYKSTNVDFAVNTEGVYSEPRPIGTRYLTRNL

SEQ ID NO: 5069 - DNA, 2217 bp, Adeno-associated virus
atggctgccgatggttatcttccagattggctcgaggacaacctctctgagggcattcgcgagtggtgggacctgaaacctggagccccgaaacccaaggccaaccagcaaaagcaggacgacggccggggtctggtgcttcctggctacaagtacctcggacccttcaacggactcgacaagggggagcccgtcaacgcggcggacgcagcggccctcgagcacgacaaggcctacgaccagcagctcaaagcgggtgacaatccgtacctgcggtataatcacgccgacgccgagtttcaggagcgtctgcaagaagatacgtcttttgggggcaacctcgggcgagcagtcttccaggccaagaagcgggttctcgaacctctcggtctggttgaggaaggcgctaagacggctcctggaaagaagagaccggtagagccgtcaccacagcgttcccccgactcctccacgggcatcggcaagaaaggccagcagcccgccagaaagagactcaatttcggtcagactggcgactcagagtcagtccccgaccctcaacctatcggagaacctccagcagcgccctctagtgtgggatctggtacaatggctgcaggcggtggcgcaccaatggcagacaataacgaaggtgccgacggagtgggtagttcctcgggaaattggcattgcgattccacatggctgggcgacagagtcatcaccaccagcacccgaacctgggccctgcccacctacaacaaccacctctacaagcaaatctccaacgggacctcgggaggcagcaccaacgacaacacctactttggctacagcaccccctgggggtattttgactttaacagattccactgccacttctcaccacgtgactggcagcgacccatcaacaacaactggggattccggcccaagagactcagcttcaagctcttcaacatccaggtcaaagaggtcacgcagaatgaaggcaccaagaccatcgccaataacctcaccagcaccatccaggtgtttacggactcggaataccagctgccgtacgtcctcggctctgcccaccagggctgcctgcctccgttcccggcggacgtcttcatgattcctcagtacggctacctgactctcaacaacggtagtcaggccgtgggacgttcctccttctactgcctggagtacttcccctctcagatgctgagaacgggcaacaacttttccttcagctaccctttcgaggacgtgcctttccacagcagctacgcgcacagccagagtttggacaggctgatgaatcctctcatcgaccagtacctgtactacctgtcaagaacccagtctacgggaggcacagcgggaacccagcagttgctgttttctcaggccgggcctagcaacatgtcggctcaggccagaaactggctgcctggaccctgctacagacagcagcgcgtctccacgacactgtcgcaaaacaacaacagcaactttgcctggactggtgccaccaagtatcatctgaacggcagagactctctggtgaatccgggcgtcgccatggcaaccaacaaggacgacgaggaccgcttcttcccatccagcggcatcctcatgtttggcaagcagggagctggaaaagacaacgtggactatagcaacgtgatgctaaccagcgaggaagaaatcaagaccaccaaccccgtggccacagaacagtatggcgtggtggctgataacctacagcagcaagacaccgctcctattgtgggggccgtcaacagccagggagccttacctggcatggtctggcagaaccgggacgtgtacctgcagggtcctatttgggccaagattcctcacacagatggcaactttcacccgtctcctttaatgggcggctttggacttaaacatccgcctcctcaggtcctcatcaaaaacactcctgttcctgcggatcctccaacagcgttcaaccaggccaagctgaattctttcatcacgcagtacagcaccggacaagtcagcgtggagatcgagtgggagctgcagaaggagaacagcaagcgctggaacccagagattcagtatacttccaactactacaaatctacaaatgtggactttgctgttaatactgagggtgtttactctgagcctcgccccattggcactcgttacctcacccgtaatctgtaa

SEQ ID NO: 5070 - DNA, 2214 bp, Adeno-associated virus
atggctgctgacggttatcttccagattggctcgaggacaacctctctgagggcattcgcgagtggtgggacctgaaacctggagcccccaagcccaaggccaaccagcagaagcaggacgacggccggggtctggtgcttcctggctacaagtacctcggacccttcaacggactcgacaagggggagcccgtcaacgcggcggacgcagcggccctcgagcacgacaaggcctacgaccagcagctcaaagcgggtgacaatccgtacctgcggtataaccacgccgacgccgagttccaggagcgtctgcaagaagatacgtcttttgggggcaacctcgggcgagcagtcttccaggccaagaagcgggttctcgaacctctcggtctggctgaggaagctgctaagacggctcctggaaagaagagaccggtagaaccgtcacctcagcgttcccccgactcctccacgggcatcggcaagaaaggccagcagcccgctagaaagagactgaactttgggcagactggcgactcagagtcagtccccgaccctcaaccaatcggagagccaccagcaggcccctctggtctgggatctggtacaatggctgcaggcggtggcgcaccaatggctgacaataacaagggcgccgacggagtgggtaatgcctcaggaaattggcattgcgattccacatggctgggcgacagagtcatcaccaccagcacccgaacctgggctttgcccacctacaacaaccacctctacaagcaaatctccagtcagtcagcaggtagcaccaacgacaacgtctacttcggctacagcaccccctgggggtattttgacttcaacagattccactgtcacttctcaccacgtgactggcagcggctcatcaacaacaactggggattccggcccaagaagctcaacttcaagctgttcaacatccaggtcaaggaggtcacaacgggtgacggcgtcacgaccatcgccaataaccttaccagcacggttcaggtcttttcggactcggaataccagctgccctacgtcctcggctccgcacaccagggctgcctgcctccgttcccggcggacgtcttcatgattccccagtacggctacctgactctgaacaatgacagccaatcggtgggtcgttcctctttctactgcctggaatatttcccttctcaaatgctgagaacgggcaacaacttcaccttcagctacaccttcgaggacgttcccttccacagcagctacgcacacagccagagcctggaccggctgatgaatcctcttatcgaccagtacctgtattacctggccagaacacagagcaacgcaggaggcacagctggcaatcgggaactgcagttttatcagggcgggcctaccaccatggccgaacaagccaaaaactggctgcctggaccttgcttccggcaacaaagagtctccaagacgctggatcaaaacaacaacagcaactttgcttggactggtgccaccaaataccatctaaatggaagaaattcattggttaatcccggtgtcgccatggcaacccacaaggacgacgaggaacgcttcttcccttcgagcggagtcctgatttttggaaaaactggagcagctaataagactacactggaaaatgtgttaatgacaaatgaagaggaaattcgtcctaccaacccggtagccaccgaggaatacgggactgttagcagcaacctgcaggcggctaacactgcagcccagacacaagttgtcaacaaccagggagccttacctggtatggtctggcagaaccgggacgtgtacctgcagggtcccatctgggccaagattcctcacacggacggcaactttcacccgtctccgctgatgggcggctttggactgaagcatccgcctcctcagatcctgatcaaaaacactcctgttcctgctaatcccccggaggtgtttacgcctgccaagtttgcttctttcatcacacagtacagcaccggccaggtcagcgtggagatcgagtgggagctgcagaaggagaacagcaagcgctggaacccagagattcagtatacctccaattttgacaaacagactggtgtggactttgccgttgacagccagggtgtttattctgagcctcgccccattggtactcgttacctcacccgtaatctgtaa

SEQ ID NO: 5071 - protein, 737 aa, Adeno-associated virus
MAADGYLPDWLEDNLSEGIREWWDLKPGAPKPKANQQKQDDGRGLVLPGYKYLGPFNGLDKGEPVNAADAAALEHDKAYDQQLKAGDNPYLRYNHADAEFQERLQEDTSFGGNLGRAVFQAKKRVLEPLGLAEEAAKTAPGKKRPVEPSPQRSPDSSTGIGKKGQQPARKRLNFGQTGDSESVPDPQPIGEPPAGPSGLGSGTMAAGGGAPMADNNKGADGVGNASGNWHCDSTWLGDRVITTSTRTWALPTYNNHLYKQISSQSAGSTNDNVYFGYSTPWGYFDFNRFHCHFSPRDWQRLINNNWGFRPKKLNFKLFNIQVKEVTTGDGVTTIANNLTSTVQVFSDSEYQLPYVLGSAHQGCLPPFPADVFMIPQYGYLTLNNDSQSVGRSSFYCLEYFPSQMLRTGNNFTFSYTFEDVPFHSSYAHSQSLDRLMNPLIDQYLYYLARTQSNAGGTAGNRELQFYQGGPTTMAEQAKNWLPGPCFRQQRVSKTLDQNNNSNFAWTGATKYHLNGRNSLVNPGVAMATHKDDEERFFPSSGVLIFGKTGAANKTTLENVLMTNEEEIRPTNPVATEEYGTVSSNLQAANTAAQTQVVNNQGALPGMVWQNRDVYLQGPIWAKIPHTDGNFHPSPLMGGFGLKHPPPQILIKNTPVPANPPEVFTPAKFASFITQYSTGQVSVEIEWELQKENSKRWNPEIQYTSNFDKQTGVDFAVDSQGVYSEPRPIGTRYLTRNL

SEQ ID NO: 5072 - DNA, 2217 bp, Adeno-associated virus
atggctgccgatggttatcttccagattggctcgaggacaacctctctgagggcattcgcgagtggtgggacctgaaacctggagccccgaaacccaaagccaaccagcaaaagcaggacgacggccggggtctggtgcttcctggctacaagtacctcggacccttcaacggactcgacaagggggagcccgtcaacgcggcggacgcagcggccctcgagcacgacaaggcctacgaccagcagctcaaagcgggtgacaatccgtacctgcggtataatcacgccgacgccgagtttcaggagcgtctgcaagaagatacgtcttttgggggcaacctcgggcgagcagtcttccaggccaagaagcgggttctcgaacctctcggtctggttgaggaaggcgctaagacggctcctggaaagaagagaccggtagagccgtcaccacagcgttcccccgactcctccacgggcatcggcaagaaaggccagcagcccgccagaaagagactcaatttcggtcagactggcgactcagagtcagtccccgaccctcaacctatcggagaacctccagcagcgccctctagtgtgggatctggtacaatggctgcaggcggtggcgcaccaatggcagacaataacgaaggtgccgacggagtgggtagttcctcgggaaattggcattgcgattccacatggctgggcgacagagtcatcaccaccagcacccgaacctgggccctgcccacctacaacaaccacctctacaagcaaatctccaacgggacctcgggaggcagcaccaacgacaacacctactttggctacagcaccccctgggggtattttgactttaacagattccactgccacttctcaccacgtgactggcagcgactcatcaacaacaactggggattccggcccaagagactcagcttcaagctcttcaacatccaggtcaaagaggtcacgcagaatgaaggcaccaagaccatcgccaataacctcaccagcaccatccaggtgtttacggactcggaataccagctgccgtacgtcctcggctctgcccaccagggctgcctgcctccgttcccggcggacgtcttcatgattcctcagtacggctacctgactctcaacaacggtagtcaggccgtgggacgttcctccttctactgcctggagtacttcccctctcagatgctgagaacgggcaacaacttttccttcagctacactttcgaggacgtgcctttccacagcagctacgcgcacagccagagtttggacaggctgatgaatcctctcatcgaccagtacctgtactacctgtcaagaacccagtctacgggaggcacagcgggaacccagcagttgctgttttctcaggccgggcctagcaacatgtcggctcaggccagaaactggctgcctggaccctgctacagacagcagcgcgtctccacgacactgtcgcaaaacaacaacagcaactttgcctggactggtgccaccaagtatcatctgaacggcagagactctctggtgaatccgggcgtcgccatggcaaccaacaaggacgacgaggaccgcttcttcccatccagcggcatcctcatgtttggcaagcagggagctggaaaagacaacgtggactatagcaacgtgatgctaaccagcgaggaagaaatcaagaccaccaaccccgtggccacagaacagtatggcgtggtggctgataacctacagcagcaaaacaccgctcctattgtgggggccgtcaacagccagggagccttacctggcatggtctggcagaaccgggacgtgtacctgcagggtcctatttgggccaagattcctcacacagatggcaactttcacccgtctcctttaatgggcggctttggacttaaacatccgcctcctcagatcctcatcaaaaacactcctgttcctgcggatcctccaacagcgttcaaccaggccaagctgaattctttcatcacgcagtacagcaccggacaagtcagcgtggagatcgtgtgggagctgcagaaggagaacagcaagcgcaggaacccagagattcagtatacttccaactactacaaatctacaaatgtggactttgctgttaatactgagggtgtttactctgagcctcgccccattggcactcgttacctcacccgtaatctgtaa

SEQ ID NO: 5073 - protein, 738 aa, Adeno-associated virus
MAADGYLPDWLEDNLSEGIREWWDLKPGAPKPKANQQKQDDGRGLVLPGYKYLGPFNGLDKGEPVNAADAAALEHDKAYDQQLKAGDNPYLRYNHADAEFQERLQEDTSFGGNLGRAVFQAKKRVLEPLGLVEEGAKTAPGKKRPVEPSPQRSPDSSTGIGKKGQQPARKRLNFGQTGDSESVPDPQPIGEPPAAPSSVGSGTMAAGGGAPMADNNEGADGVGSSSGNWHCDSTWLGDRVITTSTRTWALPTYNNHLYKQISNGTSGGSTNDNTYFGYSTPWGYFDFNRFHCHFSPRDWQRLINNNWGFRPKRLSFKLFNIQVKEVTQNEGTKTIANNLTSTIQVFTDSEYQLPYVLGSAHQGCLPPFPADVFMIPQYGYLTLNNGSQAVGRSSFYCLEYFPSQMLRTGNNFSFSYTFEDVPFHSSYAHSQSLDRLMNPLIDQYLYYLSRTQSTGGTAGTQQLLFSQAGPSNMSAQARNWLPGPCYRQQRVSTTLSQNNNSNFAWTGATKYHLNGRDSLVNPGVAMATNKDDEDRFFPSSGILMFGKQGAGKDNVDYSNVMLTSEEEIKTTNPVATEQYGVVADNLQQQNTAPIVGAVNSQGALPGMVWQNRDVYLQGPIWAKIPHTDGNFHPSPLMGGFGLKHPPPQILIKNTPVPADPPTAFNQAKLNSFITQYSTGQVSVEIVWELQKENSKRRNPEIQYTSNYYKSTNVDFAVNTEGVYSEPRPIGTRYLTRNL

SEQ ID NO: 5074 - protein, 738 aa, Adeno-associated virus
MAADGYLPDWLEDNLSEGIREWWDLKPGAPKPKANQQKQDDGRGLVLPGYKYLGPFNGLDKGEPVNAADAAALEHDKAYDQQLKAGDNPYLRYNHADAEFQERLQEDTSFGGNLGRAVFQAKKRVLEPLGLVEEGAKTAPGKKRPVEPSPQRSPDSSTGIGKKGQQPARKRLNFGQTGDSESVPDPQPIGEPPAAPSSVGSGTMAAGGGAPMADNNEGADGVGSSSGNWHCDSTWLGDRVITTSTRTWALPTYNNHLYKQISNGTSGGSTNDNTYFGYSTPWGYFDFNRFHCHFSPRDWQRLINNNWGFRPKRLSFKLFNIQVKEVTQNEGTKTIANNLTSTIQVFTDSEYQLPYVLGSAHQGCLPPFPADVFMIPQYGYLTLNNGSQAVGRSSFYCLEYFPSQMLRTGNNFSFSYTFEDVPFHSSYAHSQSLDRLMNPLIDQYLYYLSRTQSTGGTAGTQQLLFSQAGPSNMSAQARNWLPGPCYRQQRVSTTLSQNNNSNFAWTGATKYHLNGRDSLVNPGVAMATNKDDEDRFFPSSGILMFGKQGAGKDNVDYSNVMLTSEEEIKTTNPVATEQYGVVADNLQQQNTAPIVGAVNSQGALPGMVWQNRDVYLQGPIWAKIPHTDGNFHPSPLMGGFGLKHPPPQILIKNTPVPADPPTAFNQAKLNSFITQYSTGQVSVEIEWELQKENSKRWNPEIQYTSNYYKSTNVDFAVNTEGVYSEPRPIGTRYLTRNL

SEQ ID NO: 5075 - protein, 738 aa, Adeno-associated virus
MAADGYLPDWLEDNLSEGIREWWDLKPGAPKPKANQQKQDDGRGLVLPGYKYLGPFNGLDKGEPVNAADAAALEHDKAYDQQLKAGDNPYLRYNHADAEFQERLQEDTSFGGNLGRAVFQAKKRVLEPLGLVEEGAKTAPGKKRPVEPSPQRSPDSSTGIGKKGQQPARKRLNFGQTGDSESVPDPQPIGEPPAAPSSVGSGTMAAGGGAPMADNNEGADGVGSSSGNWHCDSTWLGDRVITTSTRTWALPTYNNHLYKQISNGTSGGSTNDNTYFGYSTPWGYFDFNRFHCHFSPRDWQRLINNNWGFRPKRLSFKLFNIQVKEVTQNEGTKTIANNLTSTIQVFTDSEYQLPYVLGSAHQGCLPPFPADVFMIPQYGYLTLNNGSQAVGRSSFYCLEYFPSQMLRTGNNFSFSYTFEDVPFHSSYAHSQSLDRLMNPLIDQYLYYLSRTQSTGGTAGTQQLLFSQAGPSNMSAQARNWLPGPCYRQQRVSTTLSQNNNSNFAWTGATKYHLNGRDSLVNPGVAMATNKDDEDRFFPSSGILMFGKQGAGKDNVDYSNVMLTSEEEIKTTNPVATEQYGVVADNLQQQNTAPIVGAVNSQGALPGMVWQNRDVYLQGPIWAKIPHTDGNFHPSPLMGGFGLKHPPPQILIKNTPVPADPPTAFNQAKLNSFITQYSTGQVSVEIVWELQKENSKRWNPEIQYTSNYYKSTNVDFAVNTEGVYSEPRPIGTRYLTRNL

SEQ ID NO: 5076 - protein, 738 aa, Adeno-associated virus; identical to SEQ ID NO: 5074

SEQ ID NO: 5077 - DNA, 2214 bp, Adeno-associated virus
atggctgctgacggttatcttccagattggctcgaggacaacctctctgagggcattcgcgagtggtgggacctgaaacctggagcccccaagcccaaggccaaccagcagaagcaggacgacggccggggtctggtgcttcctggctacaagtacctcggacccttcaacggactcgacaagggggagcccgtcaacgcggcggacgcagcggccctcgagcacgacaaggcctacgaccagcagctcaaagcgggtgacaatccgtacctgcggtataaccacgccgacgccgagtttcaggagcgtctgcaagaagatacgtcttttgggggcaacctcgggcgagcagtcttccaggccaagaagcgggttctcgaacctctcggtctggttgaggaagctgctaagacggctcctggaaagaagagaccggtagaaccgtcacctcagcgttcccccgactcctccacgggcatcggcaagaaaggccagcagcccgctagaaagagactgaactttgggcagactggcgactcagagtcagtccccgaccctcaaccaatcggagaaccaccagcaggcccctctggtctgggatctggtacaatggctgcaggcggtggcgctccaatggcagacaataacgaaggcgccgacggagtgggtaatgcctcaggaaattggcattgcgattccacatggctgggcgacagagtcatcaccaccagcacccgaacctgggctttgcccacctacaacaaccacctctacaagcaaatctccagtcagtcagcaggtagcaccaacgacaacgtctacttcggctacagcaccccctgggggtattttgacttcaacagattccactgtcacttctcaccacgtgactggcagcggctcatcaacaacaactggggattccggcccaagaagctcaacttcaagctgttcaacatccaggtcaaggaggtcacaacgaatgacggcgtcacgaccatcgccaataaccttaccagcacggttcaggtcttttcggactcggaataccagctgccctacgtcctcggctccgcacaccagggctgcctgcctccgttcccggcggacgtcttcatgattccccagtacggctacctgactctgaacaatggcagccaatcggtgggtcgttcctctttctactgcctggaatatttcccttctcaaatgctgagaacgggcaacaacttcaccttcagctacaccttcgaggacgttcccttccacagcagctacgcacacagccagagcctggaccggctgatgaatcctcttatcgaccagtacctgtattacctggccagaacacagagcaacgcaggaggcacagctggcaatcgggaactgcagttttatcagggcgggcctaccaccatggccgaacaagccaaaaactggctgcctagaccttgcttccggcaacaaagagtctccaagacgctggatcaaaacaacaacagcaactttgcttggactggtgccaccaaataccatctaaatggaagaaattcattggttaatcccggtgtcgccatggcaacccacaaggacgacgaggaacgcttcttcccttcgagcggagtcctgatttttggaaaaactggagcagctaataagactacactggaaaatgtgttaatgacaaatgaagaggaaattcgtcctaccaacccggtagccaccgaggaatacgggactgttagcagcaacctgcaggcggctaacactgcagcccagacacaagttgtcaacaaccagggagccttacctggtatggtctggcagaaccgggacgtgtacctgcagggtcccatctgggccaagattcctcacacggacggcaactttcacccgtctccgctgatgggcggctttggactgaagcatccgcctcctcagatcctgatcaaaaacactcctgttcctgctaatcccccggaggtgtttacgcctgccaagtttgcttctttcatcacacagtacagcaccggccaggtcagcgtggagatcgagtgggagctgcagaaggagaacagcaagcgctggaacccagagattcagtatacctccaattttgacaaacagactggtgtggactttgccgttgacagccagggtgtttattctgagcctcgccccattggtactcgttacctcacccgtaatctgtaa

SEQ ID NO: 5078 - protein, 737 aa, Adeno-associated virus
MAADGYLPDWLEDNLSEGIREWWDLKPGAPKPKANQQKQDDGRGLVLPGYKYLGPFNGLDKGEPVNAADAAALEHDKAYDQQLKAGDNPYLRYNHADAEFQERLQEDTSFGGNLGRAVFQAKKRVLEPLGLVEEAAKTAPGKKRPVEPSPQRSPDSSTGIGKKGQQPARKRLNFGQTGDSESVPDPQPIGEPPAGPSGLGSGTMAAGGGAPMADNNEGADGVGNASGNWHCDSTWLGDRVITTSTRTWALPTYNNHLYKQISSQSAGSTNDNVYFGYSTPWGYFDFNRFHCHFSPRDWQRLINNNWGFRPKKLNFKLFNIQVKEVTTNDGVTTIANNLTSTVQVFSDSEYQLPYVLGSAHQGCLPPFPADVFMIPQYGYLTLNNGSQSVGRSSFYCLEYFPSQMLRTGNNFTFSYTFEDVPFHSSYAHSQSLDRLMNPLIDQYLYYLARTQSNAGGTAGNRELQFYQGGPTTMAEQAKNWLPRPCFRQQRVSKTLDQNNNSNFAWTGATKYHLNGRNSLVNPGVAMATHKDDEERFFPSSGVLIFGKTGAANKTTLENVLMTNEEEIRPTNPVATEEYGTVSSNLQAANTAAQTQVVNNQGALPGMVWQNRDVYLQGPIWAKIPHTDGNFHPSPLMGGFGLKHPPPQILIKNTPVPANPPEVFTPAKFASFITQYSTGQVSVEIEWELQKENSKRWNPEIQYTSNFDKQTGVDFAVDSQGVYSEPRPIGTRYLTRNL

SEQ ID NO: 5079 - DNA, 2214 bp, Adeno-associated virus
atggctgctgacggttatcttccagattggctcgaggacaacctctctgagggcattcgcgagtggtgggacctgaaacctggagcccccaagcccaaggccaaccagcagaagcaggacgacggccggggtctggtgcttcctggctacaagtacctcggacccttcaacggactcgacaagggggagcccgtcaacgcggcggacgcagcggccctcgagcacgacaaggcctacgaccagcagctcaaagcgggtgacaatccgtacctgcggtataaccatgccgacgccgagtttcaggagcgtctgcaagaagatacgtcttttgggggcaacctcgggcgagcagtcctccaggccaagaagcgggttctcgaacctctcggtctggttgaggaagctgctaagacggctcctggaaagaagagaccggtagaaccgtcacctcagcgttcccccgactcctccacgggcatcggcaagaaaggccagcagcccgctagaaagagactgaactttgggcagactggcgactcagagtcagtccccgaccctcaaccaatcggagaaccaccagcaggcccctctggtctgggatctggtacaatggctgcaggcggtggcgctccaatggcagacaataacgaaggcgccgacggagtgggtaatgcctcaggaaattggcattgcgattccacatggctgggcgacagagtcatcaccaccagcacccgaacctgggctttgcccacctacaacaaccacctctacaagcaaatctccagtcagtcagcaggtagcaccaacgacaacgtctacttcggctacagcaccccctgggggtattttgacttcaacagattccactgtcacttctcaccacgtgactggcagcggctcatcaacaacaactggggattccggcccaagaagctcaacttcaagctgttcaacatccaggtcaaggaggtcacaacgaatgacggcgtcacgaccatcgccaataaccttaccagcacggttcaggtcttttcggactcggaataccagctgccctacgtcctcggctccgcacaccagggctgcctgcctccgttcccggcggacgtcttcatgattccccagtacggctacctgactctgaacaatggcagccaatcggtgggtcgttcctctttctactgcctggaatatttcccttctcaaatgctgagaacgggcaacaacttcaccttcagctacaccttcgaggacgttcccttccacagcagctacgcacacagccagagcctggaccggctgatgaatcctcttatcgaccagtacctgtattacctggccagaacacagagcaacgcaggaggcacagctggcaatcgggaactgcagttttatcagggcgggcctaccaccatggccgaacaagccaaaaactggctgcctggaccttgcttccggcaacaaagagtctccaagacgctggatcaaaacaacaacagcaactttgcttggactggtgccaccaaataccatctaaatggaagaaattcattggttaatcccggtgtcgccatggcaacccacaaggacgacgaggaacgcttcttcccttcgagcggagtcctgatttttggaaaaactggagcagctaataagactacactggaaaatgtgttaatgacaaatgaagaggaaattcgtcctaccaacccggtagccaccgaggaatacgggactgttagcagcaacctgcaggcggctaacactgcagcccagacacaagttgtcaacaaccagggagccttacctggtatggtctggcagaaccgggacgtgtacctgcagggtcccatctgggccaagattcctcacacggacggcaactttcacccgtctccgctgatgggcggctttggactgaagcatccgcctcctcagatcctgatcaaaaacactcctgttcctgctaatcccccggaggtgtttacgcctgccaagtttgcttctttcatcacacagtacagcaccggccaggtcagcgtggagatcgagtgggagctgcagaaggagaacagcaagcgctggaacccagagattcagtatacctccaattttgacaaacagactggtgtggactttgccgttgacagccagggtgtttattctgagcctcgccccattggtactcgttacctcacccgtaatctgtaa

SEQ ID NO: 5080 - protein, 737 aa, Adeno-associated virus; identical to SEQ ID NO: 5040

SEQ ID NO: 5081 - protein, 737 aa, Adeno-associated virus
MAADGYLPDWLEDNLSEGIREWWDLKPGAPKPKANQQKQDDGRGLVLPGYKYLGPFNGLDKGEPVNAADAAALEHDKAYDQQLKAGDNPYLRYNHADAEFQERLQEDTSFGGNLGRAVLQAKKRVLEPLGLVEEAAKTAPGKKRPVEPSPQRSPDSSTGIGKKGQQPARKRLNFGQTGDSESVPDPQPIGEPPAGPSGLGSGTMAAGGGAPMADNNEGADGVGNASGNWHCDSTWLGDRVITTSTRTWALPTYNNHLYKQISSQSAGSTNDNVYFGYSTPWGYFDFNRFHCHFSPRDWQRLINNNWGFRPKKLNFKLFNIQVKEVTTNDGVTTIANNLTSTVQVFSDSEYQLPYVLGSAHQGCLPPFPADVFMIPQYGYLTLNNGSQSVGRSSFYCLEYFPSQMLRTGNNFTFSYTFEDVPFHSSYAHSQSLDRLMNPLIDQYLYYLARTQSNAGGTAGNRELQFYQGGPTTMAEQAKNWLPGPCFRQQRVSKTLDQNNNSNFAWTGATKYHLNGRNSLVNPGVAMATHKDDEERFFPSSGVLIFGKTGAANKTTLENVLMTNEEEIRPTNPVATEEYGTVSSNLQAANTAAQTQVVNNQGALPGMVWQNRDVYLQGPIWAKIPHTDGNFHPSPLMGGFGLKHPPPQILIKNTPVPANPPEVFTPAKFASFITQYSTGQVSVEIEWELQKENSKRWNPEIQYTSNFDKQTGVDFAVDSQGVYSEPRPIGTRYLTRNL

SEQ ID NO: 5082 - DNA, 2217 bp, Adeno-associated virus
atggctgccgatggttatcttccagattggctcgaggacaacctctctgagggcattcgcgagtggtgggacctgaaacctggagccccgaaacccaaagccaaccagcaaaagcaggacgacggccggggtctggtgcttcctggctacaagtacctcggacccttcaacggactcgacaagggggagcccgtcaacgcggcggacgcagcggccctcgagcacgacaaggcctacgaccagcagctcaaagcgggtgacaatccgtacctgcggtataatcacgccgacgccgagtttcaggagcgtctgcaagaagatacgtcttttgggggcaacctcgggcgagcagtcttccaggccaagaagcgggttctcgaacctctcggtctggttgaggaaggcgctaagacggctcctggaaagaagagaccggtagagccgtcaccacagcgttcccccgactcctccacgggcatcggcaagaaaggccagcagcccgccagaaagagactcaatttcggtcagactggcgactcagagtcagtccccgaccctcaacctatcggagaacctccagcagcgccctctagtgtgggatctggtacaatggctgcaggcggtggcgcaccaatggcagacaataacgaaggtgccgacggagtgggtagttcctcgggaaattggcattgcgattccacatggctgggcgacagagtcatcaccaccagcacccgaacctgggccctgcccacctacaacaaccacctctacaagcaaatctccaacgggacctcgggaggcagcaccaacgacaacacctactttggctacagcaccccctgggggtattttgactttaacagattccactgccacttctcaccacgtgactggcagcgactcatcaacaacaactggggattccggcccaagagactcagcttcaagctcttcaacatccaggtcaaagaggtcacgcagaatgaaggcaccaagaccatcgccaataacctcaccagcaccatccaggtgtttacggactcggaataccagctgccgtacgtcctcggctctgcccaccagggctgcctgcctccgttcccggcggacgtcttcatgattcctcagtacggctacctgactctcaacaacggtagtcaggccgtgggacgttcctccttctactgcctggagtacttcccctctcagatgctgagaacgggcaacaacttttccttcagctacactttcgaggacgtgcctttccacagcagctacgcgcacagccagagtttggacaggctgatgaatcctctcatcgaccagtacctgtactacctgtcaagaacccagtctacgggaggcacagcgggaacccagcagttgctgttttctcaggccgggcctagcaacatgtcggctcaggccagaaactggctgcctggaccctgctacagacagcagcgcgtctccacgacactgtcgcaaaacaacaacagcaactttgcctggactggtgccaccaagtatcatctgaacggcagagactctctggtgaatccgggcgtcgccatggcaaccaacaaggacgacgaggaccgcttcttcccacccagcggcatcctcatgtttggcaagcagggagctggaaaagacaacgtggactatagcaacgtgatgctaaccagcgaggaagaaatcaagaccaccaaccccgtggccacagaacagtatggcgtggtggctgataacctacagcagcaaaacaccgctcctattgtgggggccgtcaacagccagggagccttacctggcatggtctggcagaaccgggacgtgtacctgcagggtcctatttgggccaagattcctcacacagatggcaactttcacccgtctcctttaatgggcggctttggacttaaacatccgcctcctcagatcctcatcaaaaacactcctgttcctgcggatcctccaacagcgttcaaccaggccaagctgaattctttcatcacgcagtacagcaccggacaagtcagcgtggtgatcgagtgggagctgcagaaggagaacagcaagcgctggaacccagagattcagtatacttccaactactacaaatctacaaatgtggactttgctgttaatactgagggtgtttactctgagcttcgccccattggcactcgttacctcacccgtaatctgtaa

SEQ ID NO: 5083 - protein, 738 aa, Adeno-associated virus
MAADGYLPDWLEDNLSEGIREWWDLKPGAPKPKANQQKQDDGRGLVLPGYKYLGPFNGLDKGEPVNAADAAALEHDKAYDQQLKAGDNPYLRYNHADAEFQERLQEDTSFGGNLGRAVFQAKKRVLEPLGLVEEGAKTAPGKKRPVEPSPQRSPDSSTGIGKKGQQPARKRLNFGQTGDSESVPDPQPIGEPPAAPSSVGSGTMAAGGGAPMADNNEGADGVGSSSGNWHCDSTWLGDRVITTSTRTWALPTYNNHLYKQISNGTSGGSTNDNTYFGYSTPWGYFDFNRFHCHFSPRDWQRLINNNWGFRPKRLSFKLFNIQVKEVTQNEGTKTIANNLTSTIQVFTDSEYQLPYVLGSAHQGCLPPFPADVFMIPQYGYLTLNNGSQAVGRSSFYCLEYFPSQMLRTGNNFSFSYTFEDVPFHSSYAHSQSLDRLMNPLIDQYLYYLSRTQSTGGTAGTQQLLFSQAGPSNMSAQARNWLPGPCYRQQRVSTTLSQNNNSNFAWTGATKYHLNGRDSLVNPGVAMATNKDDEDRFFPPSGILMFGKQGAGKDNVDYSNVMLTSEEEIKTTNPVATEQYGVVADNLQQQNTAPIVGAVNSQGALPGMVWQNRDVYLQGPIWAKIPHTDGNFHPSPLMGGFGLKHPPPQILIKNTPVPADPPTAFNQAKLNSFITQYSTGQVSVVIEWELQKENSKRWNPEIQYTSNYYKSTNVDFAVNTEGVYSELRPIGTRYLTRNL

SEQ ID NO: 5084 - DNA, 2214 bp, Adeno-associated virus
atggctgctgacggttatcttccagattggctcgaggacaacctctctgagggcattcgcgagtggtgggacctgaaacctggagcccccaagcccaaggccaaccagcagaagcaggacgacggccggggtctggtgcttcctggctacaagtacctcggacccttcaacggactcgacaagggggagcccgtcaacgcggcggacgcagcggccctcgagcacgacaaggcctacgaccagcagctcaaagcgggtgacaatccgtacctgcggtataaccacgccgacgccgagtttcaggagcgtctgcaagaagatacgtcttttgggggcaacctcgggcgagcagtcttccaggccaagaagcgggttctcgaacctctcggtctggttgaggaagctgctaagacggctcctggaaagaagagaccggtagaaccgtcacctcagcgttcccccgactcctccacgggcatcggcaagaaaggccagcagcccgctagaaagagactgaactttgggcagactggcgactcagagtcagtccccgaccctcaaccaatcggagaaccaccagcaggcccctctggtctgggatctggtacaatggctgcaggcggtggcgccccaatggcagacaataacgaaggcgccgacggagtgggtaatgcctcaggaaattggcattgcgattccacatggctgggcgacagagtcatcaccaccagcacccgaacctgggctttgcccacctacaacaaccacctctacaagcaaatctccagtcagtcagcaggtagcaccaacgacaacgtctacttcggctacagcaccccctgggggtattttgacttcaacagattccactgtcacttctcaccacgtgactggcagcggctcatcaacaacaactggggattccggcccaagaagctcaacttcaagctgttcaacatccaggtcaaggaggtcacaacgaatgacggcgtcacgaccatcgccaataaccttaccagcacggttcaggtcttttcggactcggaataccagctgccctacgtcctcggctccgcacaccagggctgcctgcctccgttcccggcggacgtcttcatgattccccagtacggctacctgactctgaacaatggcagccaatcggtgggtcgttcctctttctactgcctggaatatttcccttctcaaatgctgagaacgggcaacaacttcaccatcagctacaccttcgaggacgttcccttccacagcagctacgcacacagccagagcctggaccggctgatgaatcctcttatcgaccagtacctgtattacctggccagaacacagagcaacgcaggaggcacagctggcaatcaggaactgcagttttatcagggcgggcctaccaccatggccgaacaagccaaaaactggctgcctggaccttgcttccggcaacaaagagtctccaagacgctggatcaaaacaacaacagcaactttgcttggactggtgccaccaaataccatctaaatggaagaaattcattggttaatcccggtgtcgccatggcaacccacaaggacgacgaggaacgcttcttcccttcgagcggagtcctgatttttggaaaaactggagcagctaataagactacactggaaaatgtgttaatgacaaatgaagaggaaattcgtcctaccaacccggtagccaccgaggaatacgggactgttagcagcaacctgcaggcggctaacactgcagcccagacacaagttgtcaacaaccagggagccttacctggtatggtctggcagaaccgggacgtgtacctgcagggtcccatctgggccaagattcctcacacagatggcaactttcacccgtctcctttaatgggcggctttggacttaaacatccgcctcctcagatcctcatcaaaaacactcctgttcctgcggatcctccaacagcgttcaaccaggccaagctgaattctttcatcacgcagtacagcaccggacaagtcagcgtggagatcgagtgggagctgcagaaggagaacagcaagcgctggaacccagagattcagtatacttccaactactacaaatctacaaatgtggactttgctgttaatactgagggtgtttactctgagcctcgccccattggcactcgttacctcacccgtaatctgtaa

SEQ ID NO: 5085 - protein, 737 aa, Adeno-associated virus
MAADGYLPDWLEDNLSEGIREWWDLKPGAPKPKANQQKQDDGRGLVLPGYKYLGPFNGLDKGEPVNAADAAALEHDKAYDQQLKAGDNPYLRYNHADAEFQERLQEDTSFGGNLGRAVFQAKKRVLEPLGLVEEAAKTAPGKKRPVEPSPQRSPDSSTGIGKKGQQPARKRLNFGQTGDSESVPDPQPIGEPPAGPSGLGSGTMAAGGGAPMADNNEGADGVGNASGNWHCDSTWLGDRVITTSTRTWALPTYNNHLYKQISSQSAGSTNDNVYFGYSTPWGYFDFNRFHCHFSPRDWQRLINNNWGFRPKKLNFKLFNIQVKEVTTNDGVTTIANNLTSTVQVFSDSEYQLPYVLGSAHQGCLPPFPADVFMIPQYGYLTLNNGSQSVGRSSFYCLEYFPSQMLRTGNNFTISYTFEDVPFHSSYAHSQSLDRLMNPLIDQYLYYLARTQSNAGGTAGNQELQFYQGGPTTMAEQAKNWLPGPCFRQQRVSKTLDQNNNSNFAWTGATKYHLNGRNSLVNPGVAMATHKDDEERFFPSSGVLIFGKTGAANKTTLENVLMTNEEEIRPTNPVATEEYGTVSSNLQAANTAAQTQVVNNQGALPGMVWQNRDVYLQGPIWAKIPHTDGNFHPSPLMGGFGLKHPPPQILIKNTPVPADPPTAFNQAKLNSFITQYSTGQVSVEIEWELQKENSKRWNPEIQYTSNYYKSTNVDFAVNTEGVYSEPRPIGTRYLTRNL

SEQ ID NO: 5086 - DNA, 2217 bp, Adeno-associated virus
atggctgccgatggttatcttccagattggctcgaggacaacctctctgagggcattcgcgagtggtgggacctgaaacctggagccccgaaacccaaagccaaccagcaaaagcaggacgacggccggggtctggtgcttcctggctacaagtacctcggacccttcaacggactcgacaagggggagcccgtcaacgcggcggacgcagcggccctcgagcacgacaaggcctacgaccagcagctcaaagcgggtgacaatccgtacctgcggtataatcacgccgacgccgagtttcaggagcgtctgcaagaagatacgtcttttgggggcaacctcgggcgagcagtcttccaggccaagaagcgggttctcgaacctctcggtctggttgaggaaggcgctaagacggctcctggaaagaagagaccggtagagccgtcaccacagcgttcccccgactcctccacgggcatcggcaagaaaggccagcagcccgccagaaagagactcaatttcggtcagactggcgactcagagtcagtccccgaccctcaacctatcggagaacctccagcagcgccctctagtgtgggatctggtacaatggctgcaggcggtggcgcaccaatggcagacaataacgaaggtgccgacggagtgggtagttcctcgggaaattggcattgcgattccacatggctgggcgacagagtcatcaccaccagcacccgaacctgggccctgcccgcctacaacaaccacctctacaagcaaatctccaacgggacctcgggaggcagcaccaacgacaacacctactttggctacagcaccccctgggggtattttgactttaacagattccactgccacttctcaccacgtgactggcagcgactcatcaacaacaactggggattccggcccaagagactcagcttcaagctcttcaacatccaggtcaaagaggtcacgcagaatgaaggcaccaagaccatcgccaataacctcaccagcaccatccaggtgtttacggactcggaataccagctgccgtacgtcctcggctctgcccaccagggctgcctgcctccgttcccggcggatgtcttcatgattcctcagtacggctacctgactctcaacaacggtagtcaggccgtgggacgttcctccttctactgcctggagtacttcccctctcagatgctgagaacgggcaacaacttttccttcagctacactttcgaggacgtgcctttccacagcagctacgcgcacagccagagtttggacaggctgatgaatcctctcatcgaccagtacctgtactacctgtcaagaacccagtctacgggaggcacagcgggaacccagcagttgctgttttctcaggccgggcctagcaacatgtcggctcaggccagaaactggctgcctggaccctgctacagacagcagcgcgtctccacgacactgtcgcaaaacaacaacagcaactttgcctggactggtgccaccaagtatcatctgagcggcagagactctctggtgaatccgggcgtcgccatggcaaccaacaaggacgacgaggaccgcttcttcccatccagcggcatcctcatgtttggcaagcagggagctggaaaagacaacgtggactatagcaacgtgatgctaaccagcgaggaagaaatcaagaccaccaaccccgtggccacagaacagtatggcgtggtggctgataacctacagcagcaaaacaccgctcctattgtgggggccgtcaacagccagggagccttacctggcatggtctggcagaaccgggacgtgtacctgcagggtcctatttgggccaagattcctcacacagatggcaactttcacccgtctcctttaatgggcggctttggacttaaacatccgcctcctcagatcctcatcaaaaacactcctgttcctgcggatcctccaacagcgttcaaccaggccaagctgaattcttccatcacgcagtacagcaccggacaagtcagcgtggagatcgagtgggagctgcagaaggagaacagcaagcgctggaacccagagattcagtatacttccaactactacaaatctacaaatgtggactttgctgttaatactgagggtgtttactctgagcctcgccccattggcactcgttacctcacccgtaatttgtaa

SEQ ID NO: 5087 - protein, 738 aa, Adeno-associated virus
MAADGYLPDWLEDNLSEGIREWWDLKPGAPKPKANQQKQDDGRGLVLPGYKYLGPFNGLDKGEPVNAADAAALEHDKAYDQQLKAGDNPYLRYNHADAEFQERLQEDTSFGGNLGRAVFQAKKRVLEPLGLVEEGAKTAPGKKRPVEPSPQRSPDSSTGIGKKGQQPARKRLNFGQTGDSESVPDPQPIGEPPAAPSSVGSGTMAAGGGAPMADNNEGADGVGSSSGNWHCDSTWLGDRVITTSTRTWALPAYNNHLYKQISNGTSGGSTNDNTYFGYSTPWGYFDFNRFHCHFSPRDWQRLINNNWGFRPKRLSFKLFNIQVKEVTQNEGTKTIANNLTSTIQVFTDSEYQLPYVLGSAHQGCLPPFPADVFMIPQYGYLTLNNGSQAVGRSSFYCLEYFPSQMLRTGNNFSFSYTFEDVPFHSSYAHSQSLDRLMNPLIDQYLYYLSRTQSTGGTAGTQQLLFSQAGPSNMSAQARNWLPGPCYRQQRVSTTLSQNNNSNFAWTGATKYHLSGRDSLVNPGVAMATNKDDEDRFFPSSGILMFGKQGAGKDNVDYSNVMLTSEEEIKTTNPVATEQYGVVADNLQQQNTAPIVGAVNSQGALPGMVWQNRDVYLQGPIWAKIPHTDGNFHPSPLMGGFGLKHPPPQILIKNTPVPADPPTAFNQAKLNSSITQYSTGQVSVEIEWELQKENSKRWNPEIQYTSNYYKSTNVDFAVNTEGVYSEPRPIGTRYLTRNL

SEQ ID NO: 5088 - protein, 736 aa, Adeno-associated virus
MAADGYLPDWLEDNLSEGIREWWDLKPGAPKPKANQQKQDDGRGLVLPGYKYLGPFNGLDKGEPVNAADAAALEHDKAYDQQLKAGDNPYLRYNHADAEFQERLQEDTSFGGNLGRAVFQAKKRVLEPLGLVEEGAKTAPGKKRPVEQSPQEPDSSSGIGKTGQQPAKKRLNFGQTGDSESVPDPQPLGEPPATPAAVGPTTMASGGGAPMADNNEGADGVGNASGNWHCDSTWLGDRVITTSTRTWALPTYNNHLYKQISSASTGASNDNHYFGYSTPWGYFDFNRFHCHFSPRDWQRLINNNWGFRPKRLNFKLFNIQVKEVTTNDGVTTIANNLTSTVQVFSDSEYQLPYVLGSAHQGCLPPFPADVFMIPQYGYLTLNNGSQAVGRSSFYCLEYFPSQMLRTGNNFTFSYTFEEVPFHSSYAHSQSLDRLMNPLIDQYLYYLNRTQNQSGSAQNKDLLFSRGSPAGMSVQPKNWLPGPCYRQQRVSKTKTDNNNSNFTWTGASKYNLNGRESIINPGTAMASHKDDEDKFFPMSGVMIFGKESAGASNTALDNVMITDEEEIKATNPVATERFGTVAVNFQSSSTDPATGDVHAMGALPGMVWQDRDVYLQGPIWAKIPHTDGHFHPSPLMGGFGLKNPPPQILIKNTPVPANPPAEFSATKFASFITQYSTGQVSVEIEWELQKENSKRWNPEVQYTSNYAKSANVDFTVDNNGLYTEPRPIGTRYLTRPL

SEQ ID NO: 5089 - DNA, 2217 bp, Adeno-associated virus
atggctgctgacggttatcttccagattggctcgaggacaacctctctgagggcattcgcgagtggtgggacctgaaacctggagcccccaagcccaaggccaaccagcagaagcaggacgacggccggggtctggtgcttcctggctacaagtacctcggacccttcaacggactcgacaagggggagcccgtcaacgcggcggacgcagcggccctcgagcacgacaaggcctacgaccagcagctcaaagcgggtgacaatccgtacctgcggtataaccacgccgacgccgagtttcaggagcgtctgcaagaagatacgtcttttgggggcaacctcgggcgagcagtcttccaggccaagaagcgggttctcgaacctctcggtctggttgaggaagctgctaagacggctcctggaaagaagagaccggtagaaccgtcacctcagcgttcccccgactcctccacgggcatcggcaagaaaggccagcagcccgctaaaaagagactgaactttggtcagactggcgactcagagtcagtccccgaccctcaaccaatcggagaaccaccagcaggcccctctggtctgggatctggtacaatggctgcaggcggtggcgctccaatggcagacaataacgaaggcgccgacggagtgggtagttcctcaggaaattggcattgcgattccacatggctgggcgacagagtcatcaccaccagcacccgaacctgggccctgcccacctacaacaaccacctctacaagcaaatatccaatgggacatcgggaggaagcaccaacgacaacacctacttcggctacagcaccccctgggggtattttgacttcaacagattccactgccacttctcaccacgtgactggcagcgactcatcaacaacaactggggattccggccaaaaagactcagcttcaagctcttcaacatccaggtcaaggaggtcacgcagaatgaaggcaccaagaccatcgccaataaccttaccagcacgattcaggtatttacggactcggaataccagctgccgtacgtcctcggctccgcgcaccagggctgcctgcctccgttcccggcggacgtcttcatgattccccagtacggctaccttacactgaacaatggaagtcaagccgtaggccgttcctccttctactgcctggaatattttccatctcaaatgctgcgaactggaaacaattttgaattcagctacaccttcgaggacgtgcctttccacagcagctacgcacacagccagagcttggaccgactgatgaatcctctcatcgaccagtacctgtactacttatccagaactcagtccacaggaggaactcaaggtacccagcaattgttattttctcaagctgggcctgcaaacatgtcggctcaggctaagaactggctacctggaccttgctaccggcagcagcgagtctctacgacactgtcgcaaaacaacaacagcaactttgcttggactggtgccaccaaatatcacctgaacggaagagactctttggtaaatcccggtgtcgccatggcaacccacaaggacgacgaggaacgcttcttcccgtcgagtggagtcctgatgtttggaaaacagggtgctggaagagacaatgtggactacagcagcgttatgctaaccagcgaagaagaaattaaaaccactaaccctgtagccacagaacaatacggtgtggtggctgacaacttgcagcaaaccaatacagggcctattgtgggaaatgtcaacagccaaggagccttacctggcatggtctggcagaaccgagacgtgtacctgcagggtcccatctgggccaagattcctcacacggacggcaacttccacccttcaccgctaatgggaggatttggactgaagcacccacctcctcagatcctgatcaagaacacgccggtacctgcggatcctccaacaacgttcagccaggcgaaattggcttccttcattacgcagtacagcaccggacaggtcagcgtggaaatcgagtgggagctgcagaaggagaacagcaaacgctggaacccagagattcagtacacttcaaactactacaaatctacaaatgtggactttgctgtcaatacagagggaacttattctgagcctcgccccattggtactcgttacctcacccgtaatctgtaa

SEQ ID NO: 5090 - protein, 738 aa, Adeno-associated virus
MAADGYLPDWLEDNLSEGIREWWDLKPGAPKPKANQQKQDDGRGLVLPGYKYLGPFNGLDKGEPVNAADAAALEHDKAYDQQLKAGDNPYLRYNHADAEFQERLQEDTSFGGNLGRAVFQAKKRVLEPLGLVEEGAKTAPGKKRPVEPSPQRSPDSSTGIGKKGQQPARKRLNFGQTGDSESVPDPQPLGEPPAAPSSVGSGTMAAGGGAPMADNNEGADGVGSSSGNWHCDSTWLGDRVITTSTRTWALPTYNNHLYKQISNGTSGGSTNDNTYFGYSTPWGYFDFNRFHCHFSPRDWQRLINNNWGFRPKRLSFKLFNIQVKEVTQNEGTKTIANNLTSTIQVFTDSEYQLPYVLGSAHQGCLPPFPADVFMIPQYGYLTLNNGSQAVGRSSFYCLEYFPSQMLRTGNNFSFSYTFEDVPFHSSYAHSQSLDRLMNPLIDQYLYYLSRTQSTGGTAGTQQLLFSQAGPSNMSAQARNWLPGPCYRQQRVSTTLSQNNNSNFAWTGATKYHLNGRDSLVNPGVAMATNKDDEDRFFPSSGILMFGKQGAGKDNVDYSNVMLTSEEEIKTTNPVATEQYGVVADNLQRQNTAPIVGAVNSQGALPGMVWQNRDVYLQGPIWAKIPHTDGNFHPSPLMGGFGLKHPPPQILIKNTPVPADPPTAFNQAKLNSFITQYSTGQVSVEIEWELQKENSKRWNPEIQYTSNYYKSTNVDFAVNTEGVYSEPRPIGTRYLTRNL

SEQ ID NO: 5091 - protein, 736 aa, Adeno-associated virus
MAADGYLPDWLEDNLSEGIREWLNLKPGAPQPKANQQKQDNARGLVLPGYKYLGPFNGLDKGDPVNEADAAALEHDKAYGQQLKAGDNPYLKYNHADAEFQERLQKDTSFGGNLGKAVFQAKKRILEPLGLVETPAKTAPGKKRPVDPSPQRSPDSSSGIGKKSPHPARKRLNFGQTGEAESVPDPQPIGEPPSDPSSVGSGTMAAGGGAPMADNNEGADGVGNSSGNWHCDSTWLGDRVITTSTRTWALPTYNNHLYKQISSQSGATNDNHYFGYSTPWGYFDFNRFHCHFSPRDWQRLINNNWGFRPKRLSFKLFNIQVKEVTQNDGTTTIANNLTSTVQVFTDSEYQLPYVLGSAHQGCLPPFPADVFMIPQYGYLTLNNGSQAVGRSSFYCLEYFPSQMLRTGNNFQFSYTFEDVPFHSSYAHSQSLDRLMNPLIDQYLYYLSKTQGTNATVQGAKLQFSQAGPSNMRDQARNWLPGPCYRQQRVSKTANDNNNSEYAWTGATKYHLNGRDSLVNPGPAMASHKDDEEKFFPMNGTLVFGKNGAGNSNVDIENVMITDEEEIRTTNPVATEQYGVVSDNLQSSNTRPITGDVDSQGVLPGMVWQDRDVYLQGPIWAKIPHTDGHFHPSPLMGGFGLKHPPPQILIKNTPVPANPATTFTPGKFASFITQYSTGQVSVQIEWELQKENSKRWNPEIQYTSNYNKSVNVDFTVDTNGVYSEPRPIGTRYLTRNL

SEQ ID NO: 5092 - protein, 736 aa, Adeno-associated virus; identical to SEQ ID NO: 4787

SEQ ID NO: 5093 - protein, 736 aa, Adeno-associated virus
MAADGYLPDWLEDNLSEGIREWWDLKPGAPKPKANQQKQDDGRGLVLPGYKYLGPFNGLDKGEPVNAADAAALEHDKAYDQQLKAGDNPYLRYNHADAEFQERLQEDTSFGGNLGRAVFQAKKRVLEPLGLVEEGAKTAPGKKRPVEQSPQEPDSSSGIGKTGQQPAKKRLNFGQTGDSESVPDPQPLGEPPAAPSGLGPNTMASGGGAPMADNNEGADGVGNSSGNWHCDSTWLGDRVITTSTRTWALPTYNNHLYKQISNGTSGGSTNDNTYFGYSTPWGYFDFNRFHCHFSPRDWQRLINNNWGFRPKRLNFKLFNIQVKEVTTNEGTKTIANNLTSTVQVFTDSEYQLPYVLGSAHQGCLPPFPADVFMVPQYGYLTLNNGSQALGRSSFYCLEYFPSQMLRTGNNFQFSYTFEDVPFHSSYAHSQSLDRLMNPLIDQYLYYLVRTQTTGTGGTQTLAFSQAGPSSMANQARNWVPGPCYRQQRVSTTTNQNNNSNFAWTGAAKFKLNGRDSLMNPGVAMASHKDDEDRFFPSSGVLIFGKQGAGNDGVDYSQVLITDEEEIKATNPVATEEYGAVAINNQAANTQAQTGLVHNQGVIPGMVWQNRDVYLQGPIWAKIPHTDGNFHPSPLMGGFGLKHPPPQILIKNTPVPADPPLTFNQAKLNSFITQYSTGQVSVEIEWELQKENSKRWNPEIQYTSNYYKSTNVDFAVNTEGVYSEPRPIGTRYLTRNL

SEQ ID NO: 5094 - DNA, 2211 bp, Adeno-associated virus 1; identical to SEQ ID NO: 4977

SEQ ID NO: 5095 - protein, 736 aa, Adeno-associated virus 1; identical to SEQ ID NO: 5088

SEQ ID NO: 5096 - DNA, 4718 bp, Adeno-associated virus 1
ttgcccactccctctctgcgcgctcgctcgctcggtggggcctgcggaccaaaggtccgcagacggcagagctctgctctgccggccccaccgagcgagcgagcgcgcagagagggagtgggcaactccatcactaggggtaatcgcgaagcgcctcccacgctgccgcgtcagcgctgacgtaaattacgtcataggggagtggtcctgtattagctgtcacgtgagtgcttttgcgacattttgcgacaccacgtggccatttagggtatatatggccgagtgagcgagcaggatctccattttgaccgcgaaatttgaacgagcagcagccatgccgggcttctacgagatcgtgatcaaggtgccgagcgacctggacgagcacctgccgggcatttctgactcgtttgtgagctgggtggccgagaaggaatgggagctgcccccggattctgacatggatctgaatctgattgagcaggcacccctgaccgtggccgagaagctgcagcgcgacttcctggtccaatggcgccgcgtgagtaaggccccggaggccctcttctttgttcagttcgagaagggcgagtcctacttccacctccatattctggtggagaccacgggggtcaaatccatggtgctgggccgcttcctgagtcagattagggacaagctggtgcagaccatctaccgcgggatcgagccgaccctgcccaactggttcgcggtgaccaagacgcgtaatggcgccggaggggggaacaaggtggtggacgagtgctacatccccaactacctcctgcccaagactcagcccgagctgcagtgggcgtggactaacatggaggagtatataagcgcctgtttgaacctggccgagcgcaaacggctcgtggcgcagcacctgacccacgtcagccagacccaggagcagaacaaggagaatctgaaccccaattctgacgcgcctgtcatccggtcaaaaacctccgcgcgctacatggagctggtcgggtggctggtggaccggggcatcacctccgagaagcagtggatccaggaggaccaggcctcgtacatctccttcaacgccgcttccaactcgcggtcccagatcaaggccgctctggacaatgccggcaagatcatggcgctgaccaaatccgcgcccgactacctggtaggccccgctccgcccgcggacattaaaaccaaccgcatctaccgcatcctggagctgaacggctacgaacctgcctacgccggctccgtctttctcggctgggcccagaaaaggttcgggaagcgcaacaccatctggctgtttgggccggccaccacgggcaagaccaacatcgcggaagccatcgcccacgccgtgcccttctacggctgcgtcaactggaccaatgagaactttcccttcaatgattgcgtcgacaagatggtgatctggtgggaggagggcaagatgacggccaaggtcgtggagtccgccaaggccattctcggcggcagcaaggtgcgcgtggaccaaaagtgcaagtcgtccgcccagatcgaccccacccccgtgatcgtcacctccaacaccaacatgtgcgccgtgattgacgggaacagcaccaccttcgagcaccagcagccgttgcaggaccggatgttcaaatttgaactcacccgccgtctggagcatgactttggcaaggtgacaaagcaggaagtcaaagagttcttccgctgggcgcaggatcacgtgaccgaggtggcgcatgagttctacgtcagaaagggtggagccaacaaaagacccgcccccgatgacgcggataaaagcgagcccaagcgggcctgcccctcagtcgcggatccatcgacgtcagacgcggaaggagctccggtggactttgccgacaggtaccaaaacaaatgttctcgtcacgcgggcatgcttcagatgctgtttccctgcaagacatgcgagagaatgaatcagaatttcaacatttgcttcacgcacgggacgagagactgttcagagtgcttccccggcgtgtcagaatctcaaccggtcgtcagaaagaggacgtatcggaaactctgtgccattcatcatctgctggggcgggctcccgagattgcttgctcggcctgcgatctggtcaacgtggacctggatgactgtgtttctgagcaataaatgacttaaaccaggtatggctgccgatggttatcttccagattggctcgaggacaacctctctgagggcattcgcgagtggtgggacttgaaacctggagccccgaagcccaaagccaaccagcaaaagcaggacgacggccggggtctggtgcttcctggctacaagtacctcggacccttcaacggactcgacaagggggagcccgtcaacgcggcggacgcagcggccctcgagcacgacaaggcctacgaccagcagctcaaagcgggtgacaatccgtacctgcggtataaccacgccgacgccgagtttcaggagcgtctgcaagaagatacgtcttttgggggcaacctcgggcgagcagtcttccaggccaagaagcgggttctcgaacctctcggtctggttgaggaaggcgctaagacggctcctggaaagaaacgtccggtagagcagtcgccacaagagccagactcctcctcgggcatcggcaagacaggccagcagcccgctaaaaagagactcaattttggtcagactggcgactcagagtcagtccccgatccacaacctctcggagaacctccagcaacccccgctgctgtgggacctactacaatggcttcaggcggtggcgcaccaatggcagacaataacgaaggcgccgacggagtgggtaatgcctcaggaaattggcattgcgattccacatggctgggcgacagagtcatcaccaccagcacccgcacctgggccttgcccacctacaataaccacctctacaagcaaatctccagtgcttcaacgggggccagcaacgacaaccactacttcggctacagcaccccctgggggtattttgatttcaacagattccactgccacttttcaccacgtgactggcagcgactcatcaacaacaattggggattccggcccaagagactcaacttcaaactcttcaacatccaagtcaaggaggtcacgacgaatgatggcgtcacaaccatcgctaataaccttaccagcacggttcaagtcttctcggactcggagtaccagcttccgtacgtcctcggctctgcgcaccagggctgcctccctccgttcccggcggacgtgttcatgattccgcaatacggctacctgacgctcaacaatggcagccaagccgtgggacgttcatccttttactgcctggaatatttcccttctcagatgctgagaacgggcaacaactttaccttcagctacacctttgaggaagtgcctttccacagcagctacgcgcacagccagagcctggaccggctgatgaatcctctcatcgaccaatacctgtattacctgaacagaactcaaaatcagtccggaagtgcccaaaacaaggacttgctgtttagccgtgggtctccagctggcatgtctgttcagcccaaaaactggctacctggaccctgttatcggcagcagcgcgtttctaaaacaaaaacagacaacaacaacagcaattttacctggactggtgcttcaaaatataacctcaatgggcgtgaatccatcatcaaccctggcactgctatggcctcacacaaagacgacgaagacaagttctttcccatgagcggtgtcatgatttttggaaaagagagcgccggagcttcaaacactgcattggacaatgtcatgattacagacgaagaggaaattaaagccactaaccctgtggccaccgaaagatttgggaccgtggcagtcaatttccagagcagcagcacagaccctgcgaccggagatgtgcatgctatgggagcattacctggcatggtgtggcaagatagagacgtgtacctgcagggtcccatttgggccaaaattcctcacacagatggacactttcacccgtctcctcttatgggcggctttggactcaagaacccgcctcctcagatcctcatcaaaaacacgcctgttcctgcgaatcctccggcggagttttcagctacaaagtttgcttcattcatcacccaatactccacaggacaagtgagtgtggaaattgaatgggagctgcagaaagaaaacagcaagcgctggaatcccgaagtgcagtacacatccaattatgcaaaatctgccaacgttgattttactgtggacaacaatggactttatactgagcctcgccccattggcacccgttaccttacccgtcccctgtaattacgtgttaatcaataaaccggttgattcgtttcagttgaactttggtctcctgtccttcttatcttatcggttaccatggttatagcttacacattaactgcttggttgcgcttcgcgataaaagacttacgtcatcgggttacccctagtgatggagttgcccactccctctctgcgcgctcgctcgctcggtggggcctgcggaccaaaggtccgcagacggcagagctctgctctgccggccccaccgagcgagcgagcgcgcagagagggagtgggcaa

SEQ ID NO: 5097 - DNA, 255 bp, Adeno-associated virus 10
ggtaattcctccggaaattggcattgcgattccacatggctgggcgacagagtcatcaccaccagcacccgaacctgggtcctgcccacctacaacaaccacatctacaagcaaatctccagcgagacaggagccaccaacgacaaccactacttcggctacagcaccccctgggggtattttgactttaacagattccactgccacttttcaccacgtgactggcagcgactcatcaacaacaactggggattc

SEQ ID NO: 5098 - protein, 738 aa, Adeno-associated virus 10
MAADGYLPDWLEDNLSEGIREWWDLKPGAPKPKANQQKQDDGRGLVLPGYKYLGPFNGLDKGEPVNAADAAALEHDKAYDQQLKAGDNPYLRYNHADAEFQERLQEDTSFGGNLGRAVFQAKKRVLEPLGLVEEAAKTAPGKKRPVEPSPQRSPDSSTGIGKKGQQPAKKRLNFGQTGESESVPDPQPIGEPPAGPSGLGSGTMAAGGGAPMADNNEGADGVGSSSGNWHCDSTWLGDRVITTSTRTWALPTYNNHLYKQISNGTSGGSTNDNTYFGYSTPWGYFDFNRFHCHFSPRDWQRLINNNWGFRPKRLSFKLFNIQVKEVTQNEGTKTIANNLTSTIQVFTDSEYQLPYVLGSAHQGCLPPFPADVFMIPQYGYLTLNNGSQAVGRSSFYCLEYFPSQMLRTGNNFEFSYTFEDVPFHSSYAHSQSLDRLMNPLIDQYLYYLSRTQSTGGTQGTQQLLFSQAGPANMSAQAKNWLPGPCYRQQRVSTTLSQNNNSNFAWTGATKYHLNGRDSLVNPGVAMATHKDDEERFFPSSGVLMFGKQGAGRDNVDYSSVMLTSEEEIKTTNPVATEQYGVVADNLQQANTGPIVGNVNSQGALPGMVWQNRDVYLQGPIWAKIPHTDGNFHPSPLMGGFGLKHPPPQILIKNTPVPADPPTTFSQAKLASFITQYSTGQVSVEIEWELQKENSKRWNPEIQYTSNYYKSTNVDFAVNTEGTYSEPRPIGTRYLTRNL

SEQ ID NO: 5099 - protein, 738 aa, Adeno-associated virus 10; identical to SEQ ID NO: 4793

SEQ ID NO: 5100 - DNA, 258 bp, Adeno-associated virus 11
ggtaattcctccggaaattggcattgcgattccacatggctgggcgacagagtcatcaccaccagcacccgaacctgggccctgccaacctacaacaaccacctctacaaacaaatctccagcgcttcaacgggggccagcaacgacaaccactactttggctacagcaccccctgggggtattttgactttaacagattccactgccacttctcaccacgtgactggcagcgactcatcaacaacaactggggattc

SEQ ID NO: 5101 - DNA, 255 bp, Adeno-associated virus 12
ggtaattcctccggaaattggcattgcgattccacatggctgggcgaccgagtcattaccaccagcacccggacttgggccctgcccacctacaacaaccacctctacaagcaaatctccagccaatcgggtgccaccaacgacaaccactacttcggctacagcaccccttgggggtattttgatttcaacagattccactgccatttctcaccacgtgactggcagcgactcatcaacaacaactggggattc

SEQ ID NO: 5102 - DNA, 2208 bp, Adeno-associated virus 2
atggctgccgatggttatcttccagattggctcgaggacactctctctgaaggaataagacagtggtggaagctcaaacctggcccaccaccaccaaagcccgcagagcggcataaggacgacagcaggggtcttgtgcttcctgggtacaagtacctcggacccttcaacggactcgacaagggagagccggtcaacgaggcagacgccgcggccctcgagcacgacaaagcctacgaccggcagctcgacagcggagacaacccgtacctcaagtacaaccacgccgacgcggagtttcaggagcgccttaaagaagatacgtcttttgggggcaacctcggacgagcagtcttccaggcgaaaaagagggttcttgaacctctgggcctggttgaggaacctgttaagacggctccgggaaaaaagaggccggtagagcactctcctgtggagccagactcctcctcgggaaccggaaaggcgggccagcagcctgcaagaaaaagattgaattttggtcagactggagacgcagactcagtacctgacccccagcctctcggacagccaccagcagccccctctggtctgggaactaatacgatggctacaggcagtggcgcaccaatggcagacaataacgagggcgccgacggagtgggtaattcctcgggaaattggcattgcgattccacatggatgggcgacagagtcatcaccaccagcacccgaacctgggccctgcccacctacaacaaccacctctacaaacaaatttccagccaatcaggagcctcgaacgacaatcactactttggctacagcaccccttgggggtattttgacttcaacagattccactgccacttttcaccacgtgactggcaaagactcatcaacaacaactggggattccgacccaagagactcaacttcaagctctttaacattcaagtcaaagaggtcacgcagaatgacggtacgacgacgattgccaataaccttaccagcacggttcaggtgtttactgactcggagtaccagctcccgtacgtcctcggctcggcgcatcaaggatgcctcccgccgttcccagcagacgtcttcatggtgccacagtatggatacctcaccctgaacaacgggagtcaggcagtaggacgctcttcattttactgcctggagtactttccttctcagatgctgcgtaccggaaacaactttaccttcagctacacttttgaggacgttcctttccacagcagctacgctcacagccagagtctggaccgtctcatgaatcctctcatcgaccagtacctgtattacttgagcagaacaaacactccaagtggaaccaccacgcagtcaaggcttcagttttctcaggccggagcgagtgacattcgggaccagtctaggaactggcttcctggaccctgttaccgccagcagcgagtatcaaagacatctgcggataacaacaacagtgaatactcgtggactggagctaccaagtaccacctcaatggcagagactctctggtgaatccgggcccggccatggcaagccacaaggacgatgaagaaaagttttttcctcagagcggggttctcatctttgggaagcaaggctcagagaaaacaaatgtggacattgaaaaggtcatgattacagacgaagaggaaatcaggacaaccaatcccgtggctacggagcagtatggttctgtatctaccaacctccagagaggcaacagacaagcagctaccgcagatgtcaacacacaaggcgttcttccaggcatggtctggcaggacagagatgtgtaccttcaggggcccatctgggcaaagattccacacacggacggacattttcacccctctcccctcatgggtggattcggacttaaacaccctcctccacagattctcatcaagaacaccccggtacctgcgaatccttcgaccaccttcagtgcggcaaagtttgcttccttcatcacacagtactccacgggacaggtcagcgtggagatcgagtgggagctgcagaaggaaaacagcaaacgctggaatcccgaaattcagtacacttccaactacaacaagtctgttaatgtggactttactgtggacactaatggcgtgtattcagagcctcgccccattggcaccagatacctgactcgtaatctgtaa

SEQ ID NO: 5103 - protein, 735 aa, Adeno-associated virus 2 [sequence omitted]

SEQ ID NO: 5104 - protein, 621 aa, Adeno-associated virus 2
MPGFYEIVIKVPSDLDGHLPGISDSFVNWVAEKEWELPPDSDMDLNLIEQAPLTVAEKLQRDFLTEWRRVSKAPEALFFVQFEKGESYFHMHVLVETTGVKSMVLGRFLSQIREKLIQRIYRGIEPTLPNWFAVTKTRNGAGGGNKVVDECYIPNYLLPKTQPELQWAWTNMEQYLSACLNLTERKRLVAQHLTHVSQTQEQNKENQNPNSDAPVIRSKTSARYMELVGWLVDKGITSEKQWIQEDQASYISFNAASNSRSQIKAALDNAGKIMSLTKTAPDYLVGQQPVEDISSNRIYKILELNGYDPQYAASVFLGWATKKFGKRNTIWLFGPATTGKTNIAEAIAHTVPFYGCVNWTNENFPFNDCVDKMVIWWEEGKMTAKVVESAKAILGGSKVRVDQKCKSSAQIDPTPVIVTSNTNMCAVIDGNSTTFEHQQPLQDRMFKFELTRRLDHDFGKVTKQEVKDFFRWAKDHVVEVEHEFYVKKGGAKKRPAPSDADISEPKRVRESVAQPSTSDAEASINYADRYQNKCSRHVGMNLMLFPCRQCERMNQNSNICFTHGQKDCLECFPVSESQPVSVVKKAYQKLCYIHHIMGKVPDACTACDLVNVDLDDCIFEQ

SEQ ID NO: 5105 - DNA, 4675 bp, Adeno-associated virus 2
ttggccactccctctctgcgcgctcgctcgctcactgaggccgggcgaccaaaggtcgcccgacgcccgggctttgcccgggcggcctcagtgagcgagcgagcgcgcagagagggagtggccaactccatcactaggggttcctggaggggtggagtcgtgacgtgaattacgtcatagggttagggaggtcctgtattagaggtcacgtgagtgttttgcgacattttgcgacaccatgtggtcacgctgggtatttaagcccgagtgagcacgcagggtctccattttgaagcgggaggtttgaacgcgcagccgccatgccggggttttacgagattgtgattaaggtccccagcgaccttgacgggcatctgcccggcatttctgacagctttgtgaactgggtggccgagaaggaatgggagttgccgccagattctgacatggatctgaatctgattgagcaggcacccctgaccgtggccgagaagctgcagcgcgactttctgacggaatggcgccgtgtgagtaaggccccggaggcccttttctttgtgcaatttgagaagggagagagctacttccacatgcacgtgctcgtggaaaccaccggggtgaaatccatggttttgggacgtttcctgagtcagattcgcgaaaaactgattcagagaatttaccgcgggatcgagccgactttgccaaactggttcgcggtcacaaagaccagaaatggcgccggaggcgggaacaaggtggtggatgagtgctacatccccaattacttgctccccaaaacccagcctgagctccagtgggcgtggactaatatggaacagtatttaagcgcctgtttgaatctcacggagcgtaaacggttggtggcgcagcatctgacgcacgtgtcgcagacgcaggagcagaacaaagagaatcagaatcccaattctgatgcgccggtgatcagatcaaaaacttcagccaggtacatggagctggtcgggtggctcgtggacaaggggattacctcggagaagcagtggatccaggaggaccaggcctcatacatctccttcaatgcggcctccaactcgcggtcccaaatcaaggctgccttggacaatgcgggaaagattatgagcctgactaaaaccgcccccgactacctggtgggccagcagcccgtggaggacatttccagcaatcggatttataaaattttggaactaaacgggtacgatccccaatatgcggcttccgtctttctgggatgggccacgaaaaagttcggcaagaggaacaccatctggctgtttgggcctgcaactaccgggaagaccaacatcgcggaggccatagcccacactgtgcccttctacgggtgcgtaaactggaccaatgagaactttcccttcaacgactgtgtcgacaagatggtgatctggtgggaggaggggaagatgaccgccaaggtcgtggagtcggccaaagccattctcggaggaagcaaggtgcgcgtggaccagaaatgcaagtcctcggcccagatagacccgactcccgtgatcgtcacctccaacaccaacatgtgcgccgtgattgacgggaactcaacgaccttcgaacaccagcagccgttgcaagaccggatgttcaaatttgaactcacccgccgtctggatcatgactttgggaaggtcaccaagcaggaagtcaaagactttttccggtgggcaaaggatcacgtggttgaggtggagcatgaattctacgtcaaaaagggtggagccaagaaaagacccgcccccagtgacgcagatataagtgagcccaaacgggtgcgcgagtcagttgcgcagccatcgacgtcagacgcggaagcttcgatcaactacgcagacaggtaccaaaacaaatgttctcgtcacgtgggcatgaatctgatgctgtttccctgcagacaatgcgagagaatgaatcagaattcaaatatctgcttcactcacggacagaaagactgtttagagtgctttcccgtgtcagaatctcaacccgtttctgtcgtcaaaaaggcgtatcagaaactgtgctacattcatcatatcatgggaaaggtgccagacgcttgcactgcctgcgatctggtcaatgtggatttggatgactgcatctttgaacaataaatgatttaaatcaggtatggctgccgatggttatcttccagattggctcgaggacactctctctgaaggaataagacagtggtggaagctcaaacctggcccaccaccaccaaagcccgcagagcggcataaggacgacagcaggggtcttgtgcttcctgggtacaagtacctcggacccttcaacggactcgacaagggagagccggtcaacgaggcagacgccgcggccctcgagcacgtacaaagcctacgaccggcagctcgacagcggagacaacccgtacctcaagtacaaccacgccgacgcggagtttcaggagcgccttaaagaagatacgtcttttgggggcaacctcggacgagcagtcttccaggcgaaaaagagggttcttgaacctctgggcctggttgaggaacctgttaagacggctccgggaaaaaagaggccggtagagcactctcctgtggagccagactcctcctcgggaaccggaaaggcgggccagcagcctgcaagaaaaagattgaattttggtcagactggagacgcagactcagtacctgacccccagcctctcggacagccaccagcagccccctctggtctgggaactaatacgatggctacaggcagtggcgcaccaatggcagacaataacgagggcgccgacggagtgggtaattcctccggaaattggcattgcgattccacatggatgggcgacagagtcatcaccaccagcacccgaacctgggccctgcccacctacaacaaccacctctacaaacaaatttccagccaatcaggagcctcgaacgacaatcactactttggctacagcaccccttgggggtattttgacttcaacagattccactgccacttttcaccacgtgactggcaaagactcatcaacaacaactggggattccgacccaagagactcaacttcaagctctttaacattcaagtcaaagaggtcacgcagaatgacggtacgacgacgattgccaataaccttaccagcacggttcaggtgtttactgactcggagtaccagctcccgtacgtcctcggctcggcgcatcaaggatgcctcccgccgttcccagcagacgtcttcatggtgccacagtatggatacctcaccctgaacaacgggagtcaggcagtaggacgctcttcattttactgcctggagtactttccttctcagatgctgcgtaccggaaacaactttaccttcagctacacttttgaggacgttcctttccacagcagctacgctcacagccagagtctggaccgtctcatgaatcctctcatcgaccagtacctgtattacttgagcagaacaaacactccaagtggaaccaccacgcagtcaaggcttcagttttctcaggccggagcgagtgacattcgggaccagtctaggaactggcttcctggaccctgttaccgccagcagcgagtatcaaagacatctgcggataacaacaacagtgaatactcgtggactggagctaccaagtaccacctcaatggcagagactctctggtgaatccggccatggcaagccacaaggacgatgaagaaaagttttttcctcagagcggggttctcatctttgggaagcaaggctcagagaaaacaaatgtgaacattgaaaaggtcatgattacagacgaagaggaaatcggaacaaccaatcccgtggctacggagcagtatggttctgtatctaccaacctccagagaggcaacagacaagcagctaccgcagatgtcaacacacaaggcgttcttccaggcatggtctggcaggacagagatgtgtaccttcaggggcccatctgggcaaagattccacacacggacggacattttcacccctctcccctcatgggtggattcggacttaaacaccctcctccacagattctcatcaagaacaccccggtacctgcgaatccttcgaccaccttcagtgcggcaaagtttgcttccttcatcacacagtactccacgggacacggtcagcgtggagatcgagtgggagctgcagaaggaaaacagcaaacgctggaatcccgaaattcagtacacttccaactacaacaagtctgttaatcgtggacttaccgtggatactaatggcgtgtattcagagcctcgccccattggcaccagatacctgactcgtaatctgtaattgcttgttaatcaataaaccgtttaattcgtttcagttgaactttggtctctgcgtatttctttcttatctagtttccatggctacgtagataagtagcatggcgggttaatcattaactacaaggaacccctagtgatggagttggccactccctctctgcgcgctcgctcgctcactgaggccgggcgaccaaaggtcgcccgacgcccgggctttgcccgggcggcctcagtgagcgagcgagcgcgcagagagggagtggccaa

SEQ ID NO: 5106 - DNA, 4679 bp, Adeno-associated virus 2
ttggccactccctctctgcgcgctcgctcgctcactgaggccgggcgaccaaaggtcgcccgacgcccgggctttgcccgggcggcctcagtgagcgagcgagcgcgcagagagggagtggccaactccatcactaggggttcctggaggggtggagtcgtgacgtgaattacgtcatagggttagggaggtcctgtattagaggtcacgtgagtgttttgcgacattttgcgacaccatgtggtcacgctgggtatttaagcccgagtgagcacgcagggtctccattttgaagcgggaggtttgaacgcgcagccgccatgccggggttttacgagattgtgattaaggtccccagcgaccttgacgggcatctgcccggcatttctgacagctttgtgaactgggtggccgagaaggaatgggagttgccgccagattctgacatggatctgaatctgattgagcaggcacccctgaccgtggccgagaagctgcagcgcgactttctgacggaatggcgccgtgtgagtaaggccccggaggcccttttctttgtgcaatttgagaagggagagagctacttccacatgcacgtgctcgtggaaaccaccggggtgaaatccatggttttgggacgtttcctgagtcagattcgcgaaaaactgattcagagaatttaccgcgggatcgagccgactttgccaaactggttcgcggtcacaaagaccagaaatggcgccggaggcgggaacaaggtggtggatgagtgctacatccccaattacttgctccccaaaacccagcctgagctccagtgggcgtggactaatatggaacagtatttaagcgcctgtttgaatctcacggagcgtaaacggttggtggcgcagcatctgacgcacgtgtcgcagacgcaggagcagaacaaagagaatcagaatcccaattctgatgcgccggtgatcagatcaaaaacttcagccaggtacatggagctggtcgggtggctcgtggacaaggggattacctcggagaagcagtggatccaggaggaccaggcctcatacatctccttcaatgcggcctccaactcgcggtcccaaatcaaggctgccttggacaatgcgggaaagattatgagcctgactaaaaccgcccccgactacctggtgggccagcagcccgtggaggacatttccagcaatcggatttataaaattttggaactaaacgggtacgatccccaatatgcggcttccgtctttctgggatgggccacgaaaaagttcggcaagaggaacaccatctggctgtttgggcctgcaactaccgggaagaccaacatcgcggaggccatagcccacactgtgcccttctacgggtgcgtaaactggaccaatgagaactttcccttcaacgactgtgtcgacaagatggtgatctggtgggaggaggggaagatgaccgccaaggtcgtggagtcggccaaagccattctcggaggaagcaaggtgcgcgtggaccagaaatgcaagtcctcggcccagatagacccgactcccgtgatcgtcacctccaacaccaacatgtgcgccgtgattgacgggaactcaacgaccttcgaacaccagcagccgttgcaagaccggatgttcaaatttgaactcacccgccgtctggatcatgactttgggaaggtcaccaagcaggaagtcaaagactttttccggtgggcaaaggatcacgtggttgaggtggagcatgaattctacgtcaaaaagggtggagccaagaaaagacccgcccccagtgacgcagatataagtgagcccaaacgggtgcgcgagtcagttgcgcagccatcgacgtcagacgcggaagcttcgatcaactacgcagacaggtaccaaaacaaatgttctcgtcacgtgggcatgaatctgatgctgtttccctgcagacaatgcgagagaatgaatcagaattcaaatatctgcttcactcacggacagaaagactgtttagagtgctttcccgtgtcagaatctcaacccgtttctgtcgtcaaaaaggcgtatcagaaactgtgctacattcatcatatcatgggaaaggtgccagacgcttgcactgcctgcgatctggtcaatgtggatttggatgactgcatctttgaacaataaatgatttaaatcaggtatggctgccgatggttatcttccagattggctcgaggacactctctctgaaggaataagacagtggtggaagctcaaacctggcccaccaccaccaaagcccgcagagcggcataaggacgacagcaggggtcttgtgcttcctgggtacaagtacctcggacccttcaacggactcgacaagggagagccggtcaacgaggcagacgccgcggccctcgagcacgacaaagcctacgaccggcagctcgacagcggagacaacccgtacctcaagtacaaccacgccgacgcggagtttcaggagcgccttaaagaagatacgtcttttgggggcaacctcggacgagcagtcttccaggcgaaaaagagggttcttgaacctctgggcctggttgaggaacctgttaagacggctccgggaaaaaagaggccggtagagcactctcctgtggagccagactcctcctcgggaaccggaaaggcgggccagcagcctgcaagaaaaagattgaattttggtcagactggagacgcagactcagtacctgacccccagcctctcggacagccaccagcagccccctctggtctgggaactaatacgatggctacaggcagtggcgcaccaatggcagacaataacgagggcgccgacggagtgggtaattcctccggaaattggcattgcgattccacatggatgggcgacagagtcatcaccaccagcacccgaacctgggccctgcccacctacaacaaccacctctacaaacaaatttccagccaatcaggagcctcgaacgacaatcactactttggctacagcaccccttgggggtattttgacttcaacagattccactgccacttttcaccacgtgactggcaaagactcatcaacaacaactggggattccgacccaagagactcaacttcaagctctttaacattcaagtcaaagaggtcacgcagaatgacggtacgacgacgattgccaataaccttaccagcacggttcaggtgtttactgactcggagtaccagctcccgtacgtcctcggctcggcgcatcaaggatgcctcccgccgttcccagcagacgtcttcatggtgccacagtatggatacctcaccctgaacaacgggagtcaggcagtaggacgctcttcattttactgcctggagtactttccttctcagatgctgcgtaccggaaacaactttaccttcagctacacttttgaggacgttcctttccacagcagctacgctcacagccagagtctggaccgtctcatgaatcctctcatcgaccagtacctgtattacttgagcagaacaaacactccaagtggaaccaccacgcagtcaaggcttcagttttctcaggccggagcgagtgacattcgggaccagtctaggaactggcttcctggaccctgttaccgccagcagcgagtatcaaagacatctgcggataacaacaacagtgaatactcgtggactggagctaccaagtaccacctcaatggcagagactctctggtgaatccgggcccggccatggcaagccacaaggacgatgaagaaaagttttttcctcagagcggggttctcatctttgggaagcaaggctcagagaaaacaaatgtggacattgaaaaggtcatgattacagacgaagaggaaatcaggacaaccaatcccgtggctacggagcagtatggttctgtatctaccaacctccagagaggcaacagacaagcagctaccgcagatgtcaacacacaaggcgttcttccaggcatggtctggcaggacagagatgtgtaccttcaggggcccatctgggcaaagattccacacacggacggacattttcacccctctcccctcatgggtggattcggacttaaacaccctcctccacagattctcatcaagaacaccccggtacctgcgaatccttcgaccaccttcagtgcggcaaagtttgcttccttcatcacacagtactccacgggacaggtcagcgtggagatcgagtgggagctgcagaaggaaaacagcaaacgctggaatcccgaaattcagtacacttccaactacaacaagtctgttaatgtggactttactgtggacactaatggcgtgtattcagagcctcgccccattggcaccagatacctgactcgtaatctgtaattgcttgttaatcaataaaccgtttaattcgtttcagttgaactttggtctctgcgtatttctttcttatctagtttccatggctacgtagataagtagcatggcgggttaatcattaactacaaggaacccctagtgatggagttggccactccctctctgcgcgctcgctcgctcactgaggccgggcgaccaaaggtcgcccgacgcccgggctttgcccgggcggcctcagtgagcgagcgagcgcgcagagagggagtggccaa

SEQ ID NO: 5107 - protein, 735 aa, Adeno-associated virus 2
MAADGYLPDWLEDTLSEGIRQWWKLKPGPPPPKPAERHKDDSRGLVLPGYKYLGPFNGLDKGEPVNEADAAALEHDKAYDRQLDSGDNPYLKYNHADAEFQERLKEDTSFGGNLGRAVFQAKKRVLEPLGLVEEPVKTAPGKKRPVEHSPVEPDSSSGTGKAGQQPARKRLNFGQTGDADSVPDPQPLGEPPATPAAVGPTTMASGGGAPMADNNEGADGVGNASGNWHCDSTWLGDRVITTSTRTWALPTYNNHLYKQISSASTGASNDNHYFGYSTPWGYFDFNRFHCHFSPRDWQRLINNNWGFRPKRLNFKLFNIQVKEVTQNDGTTTIANNLTSTVQVFTDSEYQLPYVLGSAHQGCLPPFPADVFMIPQYGYLTLNNGSQAVGRSSFYCLEYFPSQMLRTGNNFTFSYTFEDVPFHSSYAHSQSLDRLMNPLIDQYLYYLNRTQNQSGSAQDKALLFSRGSPAGMSVQPKNWLPGPCYRQQRVSKTKTDNNNSNFTWTGASKYNLNGRESIINPGTAMASHKDDKDKFFPMSGVMIFGKESAGASNTALDNVMITDEEEIKATNPVATERFGTVAVNFQSSSTDPATGDVHVMGALPGMVWQDRDVYLQGPIWAKIPHTDGHFHPSPLMGGFGLKHPPPQILIKNTPVPANPPAEFSATKFASFITQYSTGQVSVEIEWELQKENSKRWNPEVQYTSNYAKSANVDFTVDNNGLYTEPRPIGTRYLTRP

SEQ ID NO: 5108 - protein, 740 aa, Adeno-associated virus 2
MAADGYLPDWLEDTLSEGIRQWWKLKPGPPPPKPAERHKDDSRGLVLPGYKYLGPFNGLDKGEPVNAADAAALEHDKAYDRQLDSGDNPYLKYNHADAEFQERLKEDTSFGGNLGRAVFQAKKRVLEPLGLVEEPVKTAPGKKRPVEHSPVEPDSSSGTGKAGQQPARKRLNFGQTGDADSVPDPQPLGQPPAAPSGLGTNTMATGSGAPMADNNEGADGVGNSSGNWHCDSTWMGDRVITTSTRTWALPTYNNHLYKQISSQSGASNDNHYFGYSTPWGYFDFNRFHCHFSPRDWQRLINNNWGFRPKRLNFKLFNIQVKEVTQNDGTTTIANNLTSTVQVFTDSEYQLPYVLGSAHQGCLPPFPADVFMVPQYGYLTLNNGSQAVGRSSFYCLEYFPSQMLRTGNNFTFSYTFEDVPFHSSYAHSQSLDRLMNPLIDQYLYYLSRTNTPSGTTTQSGLQFSQAGASDIRDQSRNWLPGPCYRQQRVSKTSADNNNSEYSWTGATKYHLNGRDSLVNPGPAMASHKDDEEKFFPQSGVLIFGKQGSEKTNVDIEKVMITDEEEIRTTNPVATEQYGSVSTNLQRGNRQAATADVNTQGVLPGMVWQDRDVYLQGPIWAKIPHTDGHFHPSPLMGGFGLKHPPPQILIKNTPVPANPSTTFSAAKFASFITQYSTGQVSVEIEWELQKENSKRWNPEIQYTSNYNKSVNVDFTVDTNGVYSEPRPIGTRYLTRNLLLAAA

SEQ ID NO: 5109 - protein, 734 aa, Adeno-associated virus 2
MAADGYLPDWLEDTLSEGIRQWWKLKPGPPPPKPAERHKDDSRGLVLPGYKYLGPFNGLDKGEPVNEADAAALEHDKAYDRQLDSGDNPYLKYNHADAEFQERLKEDTSFGGNLGRAVFQAKKRVLEPLGLVEEPVKTAPGKKRPVEHSPVEPDSSSGTGKAGQQPARKRLNFGQTGDADSVPDPQPLGQPPAAPSGLGTNTMATGSGAPMADNNEGADGVGNSSGNWHCDSTWMGDRVITTSTRTWALPTYNNHLYKQISSQSGASNDNHYFGYSTPWGYFDFNRFHCHFSPRDWQRLINNNWGFRPKRLNFKLFNIQVKEVTQNDGTTTIANNLTSTVQVFTDSEYQLPYVLGSAHQGCLPPFPADVFMVPQYGYLTLNNGSQAVGRSSFYCLEYFPSQMLRTGNNFTFSYTFEDVPFHSSYAHSQSLDRLMNPLIDQYLYYLSRTNTPSGTTTQSGLQFSQAGASDIRDQSRNWLPGPCYRQQRVSKTSADNNNSEYSWTGATMYHLNGRDSLVNPGPAMASHKDDEEKFFPQSGVLIFGKQGSEKTNVDIEKVMITDEEEIRTTNPVATEQYGSVSTNLQRGNRQAATADVNTQGVLPGMVWQDRDVYLQGPIWAKIPHTDGHFHPSPLMGGFGLKHPPPQILIKNTPVPANPSTTFSAAKFASFITQYSTGQVSVEIEWELQKENSKRWNPEIQYTSNYNKSINVDFTVDTNGVYSEPRPIGTRYLTRN

SEQ ID NO: 5110 - protein, 734 aa, Adeno-associated virus 2
MAADGYLPDWLEDTLSEGIRQWWKLKPGPPPPKPAERHKDDSRGLVLPGYKYLGPFNGLDKGEPVNEADAAALEHDKAYDRQLDSGDNPYLKYNHADAEFQERLKEDTSFGGNLGRAVFQAKKRVLEPLGLVEEPVKTAPGKKRPVEHSPVEPDSSSGTGKAGQQPARKRLNFGQTGDADSVPDPQPLGQPPAAPSGLGTNTMATGSGAPMADNNEGADGVGNSSGNWHCDSTWMGDRVITTSTRTWALPTYNNHLYKQISSQSGASNDNHYFGYSTPWGYFDFNRFHCHFSPRDWQRLINNNWGFRPKRLNFKLFNIQVKEVTQNDGTTTIANNLTSTVQVFTDSEYQLPYVLGSAHQGCLPPFPADVFMVPQYGYLTLNNGSQAVGRSSFYCLEYFPSQMLRTGNNFTFSYTFEDVPFHSSYAHSQSLDRLMNPLIDQYLYYLSRTNTPSGTTTQSGLQFSQAGASDIRDQSRNWLPGPCYRQQRVSKTSADNNNSEYSWTGATKYHLNGRDSLVNPGPAMASHKDDEEKFFPQSGVLIFGKQGSEKTNVDIEKVMITDEEEIRTTNPVATEQYGSVSTNLQRGNRQAATADVNTQGVLPGMVWQDRDVYLQGPIWAKIPHTDGHFHPSPLMGGFGLKHPPPQILIKNTPVPANPSTTFSEAKFASFITQYSTGQVSVEIEWELQKENSKRWNPEIQYTSNYNKSVNVDFTVDTNGVYSEPRPIGTRYLTRN

SEQ ID NO: 5111 - protein, 739 aa, Adeno-associated virus 2
MAADGYLPDWLEDTLSEGIRQWWKLKPGPPPPKPAERHKDDSRGLVLPGYKYLGPFNGLDKGEPVNEADAAALEHDKAYDRQLDSGDNPYLKYNHADAEFQERLKEDTSFGGNLGRAVFQAKKRVLEPLGLVEEPVKTAPGKKRPVEHSPVEPDSSSGTGKAGQQPARKRLNFGQTGDADSVPDPQPLGQPPAAPSGLGTNTMATGSGAPMADNNEGADGVGNSSGNWHCDSTWMGDRVITTSTRTWALPTYNNHLYKQISSQSGASNDNHYFGYSTPWGYFDFNRFHCHFSPRDWQRLINNNWGFRPKRLNFKLFNIQVKEVTQNDGTTTIANNLTSTVQVFTDSEYQLPYVLGSAHQGCLPPFPADVFMVPQYGYLTLNNGSQAVGRSSFYCLEYFPSQMLRTGNNFTFSYTFEDVPFHSSYAHSQSLDRLMNPLIDQYLYYLSRTNTPSGTTTQSGLQFSQAGASDIRDQSRNWLPGPCYRQQRVSKTSADNNNSEYSWTGATKYHLNGRDSLVNPGPAMASHKDDEEKFFPQSGVLIFGKQGSEKTNVDIEKVMITDEEEIRTTNPVATEQYGSVSTNLQRGNRQAATADVNTQGVLPGMVWQDRDVYLQGPIWAKIPHTDGHFHPSPLMGGFGLKHPPPQILIKNTPVPANPSTTFSAAKFASFITQYSTGQVSVEIEWELQKENSKRWNPEIQYTSNYNKSVNVDFTVDTNGVYSEPRPIGTRYLTRNLLLAA

SEQ ID NO: 5112 - protein, 725 aa, Adeno-associated virus 2
MAADGYLPDWLEDTLSEGIRQWWKLKPGPPPPKPAERHKDDSRGLVLPGYKYLGPFNGLDKGEPVNEADAAALEHDKAYDRQLDSGDNPYLKYNHADAEFQERLKEDTSFGGNLGRAVFQAKKRVLEPLGLVEEPVKTAPGKKRPVEHSPVEPDSSSGTGKAGQQPARKRLNFGQTGDADSVPDPQPLGQPPAAPSGLGTNTMATGSGAPMADNNEGADGVGNSSGNWHCDSTWMGDRVITTSTRTWALPTYNNHLYKQISSQSGASNDNHYFGYSTPWGYFDFNRFHCHFSPRDWQRLINNNWGFRPKRLNFKLFNIQVKEVTQNDGTTTIANNLTSTVQVFTDSEYQLPYVLGSAHQGCLPPFPADVFMVPQYGYLTLNNGSQAVGRSSFYCLEYFPSQMLRTGNNFTFSYTFEDVPFHSSYAHSQSLDRLMNPLIDQYLYYLSRTNTPSGTTTQSGLQFSQAGASDIRDQSRNWLPGPCYRQQRVSKTSADNNNSEYSWTGATKYHLNGRDSLVNPGPAMASHKDDEEKFFPQSGVLIFGKQGSEKTNVDIEKVMITDEEEIRTTNPVATEQYGSVSTNLQRGNRQAATADVNTQGVLPGMVWQDRDVYLQGPIWAKIPHTDGHFHPSPLMGGFGLKHPPPQILIKNTPVPANPSTTFSAAKFASFITQYSTGQVSVEIEWELQKENSKRWNPEIQYTSNYNKSVNVDFTVDTNGVYSEPRP

SEQ ID NO: 5113 - protein, 707 aa, Adeno-associated virus 2
MAADGYLPDWLEDTLSEGIRQWWKLKPGPPPPKPAERHKDDSRGLVLPGYKYLGPFNGLDKGEPVNEADAAALEHDKAYDRQLDSGDNPYLKYNHADAEFQERLKEDTSFGGNLGRAVFQAKKRVLEPLGLVEEPVKTAPGKKRPVEHSPVEPDSSSGTGKAGQQPARKRLNFGQTGDADSVPDPQPLGQPPAAPSGLGTNTMATGSGAPMADNNEGADGVGNSSGNWHCDSTWMGDRVITTSTRTWALPTYNNHLYKQISSQSGASNDNHYFGYSTPWGYFDFNRFHCHFSPRDWQRLINNNWGFRPKRLNFKLFNIQVKEVTQNDGTTTIANNLTSTVQVFTDSEYQLPYVLGSAHQGCLPPFPADVFMVPQYGYLTLNNGSQAVGRSSFYCLEYFPSQMLRTGNNFTFSYTFEDVPFHSSYAHSQSLDRLMNPLIDQYLYYLSRTNTPSGTTTQSGLQFSQAGASDIRDQSRNWLPGPCYRQQRVSKTSADNNNSEYSWTGATKYHLNGRDSLVNPGPAMASHKDDEEKFFPQSGVLIFGKQGSEKTNVDIEKVMITDEEEIRTTNPVATEQYGSCIYQPPERQQTSSYRRCQHTRRSSRHGLAGQRCVPSGAHLGKDSTHGRTFSPLSPHGWIRTTPSSTDSHQEHPGTCESFDHLQCGKVCFLHHTVLHGTGQRGDRVRAAEGKQQTLESRNSVHFQLQQVC

SEQ ID NO: 5114 - protein, 739 aa, Adeno-associated virus 2; identical to SEQ ID NO: 5111

SEQ ID NO: 5115 - protein, 737 aa, Adeno-associated virus 2
MASDGYLPDWLEDNLSEGIREWWDLKPGAPKPKANQQKQDDGRGLVLPGYKYLGPFNGLDKGEPVNAADAAALEHDKAYDQQLKAGDNPYLRYNHADAEFQERLQEDTSFGGNLGRAVFQAKKRVLEPFGLVEEGAKTAPGKKRPVEQSPQEPDSSSGIGKTGQQPAKKRLNFGQTGDSESVPDPQPLGEPPATPAAVGPTTMASGGGAPMADNNEGADGVGNASGNWHCDSTWLGDRVITTSTRTWALPTYNNHLYKQISSASTGASNDNHYFGYSTPWGYFDFNRFHCHFSPRDWQRLINNNWGFRPKRLNFKLFNIQVKEVTTNDGTTTIANNLTSTVQVFTDSEYQLPYVLGSAHQGCLPPFPADVFMVPQYGYLTLNNGSQAVGRSSFYCLEYFPSQMLRTGNNFTFSYTFEDVPFHSSYAHSQSLDRLMNPLIDQYLYYLSRTNTPSGTTTQSGLQFSQAGASDIRDQSRNWLPGPCYRQQRVSKTSADNNNSEYSWTGATKYHLNGRDSLVNPGPAMASHKDDEEKFFPQSGVLIFGKQGSEKTNVDIEKVMITDEEEIRTTNPVATEQYGSVSTNLQRGNRQAATADVNTQGVLPGMVWQDRDVYLQGPIWAKIPHTDGHFHPSPLMGGFGLKHHPPQILIKNTPVPANPSTTFSAAKFASFITQYSTGQVSVEIEWELQKENSKRWNPEIQYTSNYNKSVNVDFTVDTNGVYSEPRPIGTRYLTRNLL

SEQ ID NO: 5116 - protein, 741 aa, Adeno-associated virus 2
MAADGYLPDWLEDTLSEGIREWWALKPGAPKPKANQQKQDDGRGLVLPGYKYLGPFNGLDKGEPVNEADAAALEHDKAYDQQLQAGDNPYLRYNHADAEFQERLQEDTSFGGNLGRAVFQAKKRVLEPLGLVEEPVKTAPGKKRPVEHSPVEPDSSSGTGKSGQQPARKRLNFGQTGDADSVPDPQPLGQPPAAPSGLGTNTMATGSGAPMADNNEGADGVGNSSGNWHCDSTWMGDRVITTSTRTWALPTYNNHLYKQISSQSGASNDNHYFGYSTPWGYFDFNRFHCHFSPRDWQRLINNNWGFRPKRLNFKLFNIQVKEVTQNDGTTTIANNLTSTVQVFTDSEYQLPYVLGSAHQGCLPPFPADVFMVPQYGYLTLNNGSQAVGRSSFYCLEYFPSQMLRTGNNFTFSYTFEDVPFHSSYAHSQSLDRLMNPLIDQYLYYLSRTNTPSGTTTQSGLQFSQAGASDIRDQSRNWLPGPCYRQQRVSKTSADNNNSEYSWTGATKYHLNGRDSLVNPGPAMASHKDDEEKFFPQSGVLIFGKQGSEKTNVDIEKVMITDEEEIRTTNPVATEQYGSVSTNLQRGNLANHNNTTNARQAATADVNTQGVLPGMVWQDRDVYLQGPIWAKIPHTDGHFHPSPLMGGFGLKHPPPQILIKNTPVPANPSTTFSAAKFASFITQYSTGQVSVEIEWELQKENSKRWNPEIQYTSNYNKSINVDFTVDTNGVYSEPRPIGTRYL

SEQ ID NO: 5117 - protein, 730 aa, Adeno-associated virus 2
MASDGYLPDWLEDNLSEGIREWWDLKPGAPKPKANQQKQDDGRGLVLPGYKYLGPFNGLDKGEPVNAADAAALEHDKAYDQQLKAGDNPYLRYNHADAEFQERLQEDTSFGGNLGRAVFQAKKRVLEPFGLVEEGAKTAPGKKRPVEQSPQEPDSSSGIGKTGQQPAKKRLNFGQTGDSESVPDPQPLGEPPATPAAVGPTTMASGGGAPMADNNEGADGVGNASGNWHCDSTWLGDRVITTSTRTWALPTYNNHLYKQISSASTGASNDNHYFGYSTPWGYFDFNRFHCHFSPRDWQRLINNNWGFRPKRLNFKLFNIQVKEVTTNDGVTTIANNLTSTVQVFSDSEYQLPYVLGSAHQGCLPPFPADVFMIPQYGYLTLNNGSQAVGRSSFYCLEYFPSQMLRTGNNFTFSYTFEDVPFHSSYAHSQSLDRLMNPLIDQYLYYLNRTQNQSGSAQNNDLLFSRGSPAGMSVQPKNWLPGPCYRQQRVSKTKTDNNNSNFTWTGASKYNLNGRESIINPGTAMASHKDDKDKFFPMSGVMIFGKESAGASNTALDNVMITDEEEIKATNPVATERFGTVAVNLQSSSTDPATGDVHVMGALPGMVWQDRDVYLQGPIWAKIPHTDGHFHPSPLMGGFGLKNPPPQILIKNTPVPANPPAEFSATKFASFITQYSTGQVSVEIEWELQKENSKRWNPEVQYTSNYAKSANVDFTVDNNGLYTEPRPIGTR

SEQ ID NO: 5118 - protein, 735 aa, Adeno-associated virus 2
  MOD_RES (239)..(239): Any amino acid
MASDGYLPDWLEDNLSEGIREWWDLKPGAPKPKANQQKQDDGRGLVLPGYKYLGPFNGLDKGEPVNAADAAALEHDKAYDQQLKAGDNPYLRYNHADAEFQERLQEDTSFGGNLGRAVFQAKKRVLEPFGLVEEGAKTAPGKKRPVEQSPQEPDSSSGIGKTGQQPAKKRLNFGQTGDSESVPDPQPLGEPPATPAAVGPTTMASGGGAPMADNNEGADGVGNASGNWHCDSTWLGDRXITTSTRTWALPTYNNHLYKQISSASTGASNDNHYFGYSTPWGYFDFNRFHCHFSPRDWQRLINNNWGFRPKRLNFKLFNIQVKEVTTNDGVTTIANNLTSTVQVFSDSEYQLPYVLGSAHQGCLPPFPADVFMIPQYGYLTLNNGSQAVGRSSFYCLEYFPSQMLRTGNNFTFSYTFEDVPFHSSYAHSQSLDRLMNPLIDQYLYYLNRTQNQSGSAQNNDLLFSRGSPAGMSVQPKNWLPGPCYRQQRVSKTKTDNNNSNFTWTGASKYNLNGRESIINPGTAMASHKDDKDKFFPMSGVMIFGKESAGASNTALDNVMITDEEEIKATNPVATERFGTVAVNLQSSSTDPATGDVHVMGALPGMVWQDRDVYLQGPIWAKIPHTDGHFHPSPLMGGFGLKNPPPQILIKNTPVPANPPAEFSATKFASFITQYSTGQVSVEIEWELQKENSKRWNPEVQYTSNYAKSANVDFTVDNNGLYTEPRPIGTRYLTRP

SEQ ID NO: 5119 - protein, 733 aa, Adeno-associated virus 2
MASDGYLPDWLEDNLSEGIREWWDLKPGAPKPKANQQKQDDGRGLVLPGYKYLGPFNGLDKGEPVNAADAAALEHDKAYDQQLKAGDNPYLRYNHADAEFQERLQEDTSFGGNLGRAVFLAKKRVLEPFGLVEEGAKTAPGKKRPVEQSPQEPDSSSGIGKTGQQPAKKRLNFGQTGDSESVPDPQPLGEPPATPAAVGPTTMASGGGAPMADNNEGADGVGNASGNWHCDSTWLGDRVITTSTRTWALPTYNNHLYKQISSASTGASNDNHYFGYSTPWGYFDFNRFHCHFSPRDWQRLINNNWGFRPKRLNFKLFNIQVKEVTTNDGVTTIANNLTSTVQVFSDSEYQLPYVLGSAHQGCLPPFPADVFMIPQYGYLTLNNGSQAVGRSSFYCLEYFPSQMLRTGNNFTFSYTFEDVPFHSSYAHSQSLDRLMNPLIDQYLYYLNRTQNQSGSAQNNDLLFSRGSPAGMSVQPKNWLPGPCYRQQRVSKTKTDNNNSNFTWTGASKYNLNGRESIINPGTAMASHKDDKDKFFPMSGVMIFGKESAGASNTALDNVMITDEEEIKATNPVATERFGTVAVNLQSSSTDPATGDVHVMGALPGMVWQDRDVYLQGPIWAKIPHTDGHFHPSPLMGGFGLKNPPPQILIKNTPVPANPPAEFSATKFASFITQYSTGQVSVEIEWELQKENSKRWNPEVQYTSNYAKSANVDFTVDNNGLYTEPRPIGTRYLT

SEQ ID NO: 5120 - protein, 734 aa, Adeno-associated virus 2
MAADGYLPDWLEDTLSEGIRQWWKLKPGPPPPKPAERHKDDSRGLVLPGCKYLGPFNGLDKGEPVNEADAAALEHDKAYDRQLDSGDNPYLKYNHADAEFQERLKEDTSFGGNLGRAVFQAKKRVLEPLGLVEEPVKTAPGKKRPVEHSPVEPDSSSGTGKAGQQPARKRLNFGQTGDADSVPDPQPLGQPPAAPSGLGTNTMATGSGAPMADNNEGADGVGNSSGNWHCDSTWMGDRVITTSTRTWALPTYNNHLYKQISSQSGASNDNHYFGYSTPWGYFDFNRFHCHFSPRDWQRLINNNWGFRPKRLNFKLFNIQVKEVTQNDGTTTIANNLTSTVQVFSDSEYQLPYVLGSAHQGCLPPFPADVFMIPQYGYLTLNNGSQAVGRSSFYCLEYFPSQMLRTGNNFTFNYTFEDVPFHSSYAHSQSLDRLMNPLIDQYLYYLNRTQNQSGSAQNNDLLFSRGSPAGMSVQPKNWLPGPCYRQQRVSKTKTDNNNSNFTWTGASKYNLNGRESIINPGTAMASHKDDKDKFFPMSGVMIFGKESAGASNTALDNVMITDEEEIKATNPVATERFGTVAVNLQSSSTDPATGDVHVMGALPGMVWQDRDVYLQGPIWAKIPHTDGHFHPSPLMGGFGLKNPPPQILIKNTPVPANPPAEFSATKFASFITQYSTGQVSVEIEWELQKENSKRWNPEVQYTSNYAKSANVDFTVDNNGLYTEPRPIGTRYLTRP

SEQ ID NO: 5121 - protein, 734 aa, Adeno-associated virus 2
MAADGYLPDWLEDTLSEGIRQWWKLKPGPPPPKPAERHKDDSRGLVLPGYKYLGPFNGLDKGEPVNEADAAALEHDKAYDRQLDSGDNPYLKYNHADAEFQERLKEDTSFGGNLGRAVFQAKKRVLEPLGLVEEPVKTAPGKKRPVEHSPVEPDSSSGTGKAGQQPARKRLNFGQTGDADSVPDPQPLGQPPAAPSGLGTNTMATGSGAPMADNNEGADGVGNSSGNWHCDSTWMGDRVITTSTRTWALSTYNNHLYKQISSQSGASNDNHYFGYSTPWGYFDFNRFHCHFSPRDWQRLINNNWGFRPKRLNFKLFNIQVKEVTQNDGTTTIANNLTSTVQVFTDSEYQLPYVLGSAHQGCLPPFPADVFMVPQYGYLTLNNGSQAVGRSSFYCLEYFPSQMLRTGNNFTFSYTFEDVPFHSSYAHSQSLDRLMNPLIDQYLYYLSRTNTPSGTTTQSRLQFSQAGASDIRDQSRNWLPGPCYRQQRVSKTSADNNNSEYSWTGATKYHLNGRDSLVNPGPAMASHKDDEEKFFPQSGVLIFGKQGSEKTNVDIEKVMITDEEEIRTTNPVATEQYGSVSTNLQRGNRQAATADVNTQGVLPGMVWQDRDVYLQGPIWAKIPHTDGHFHPSPLMGGFGLKHPPPQILIKNTPVPANPSTTFSAAKFASFITQYSTGQVSVEIEWELQKENSKRWNPEIQYTSNYNKSINVDFTVDTNGVYSEPRPIGTRYLTRN

SEQ ID NO: 5122 - protein, 738 aa, Adeno-associated virus 2
MAADGYLPDWLEDTLSEGIRQWWKLKPGPPPPKPAERHKDDSRGLVLPGYKYLGPFNGLDKGEPVNEADAAALEHDKAYDRQLDGGDNPYLKYNHADAEFQERLKEDTSFGGNLGRAVFQAKKRVLEPLGLVEEPVKTAPGKKRPVEHSPVEPDSSSGTGKAGQQPARKRLNFGQTGDADSVPDPQPLGQPPAAPSGLGTNTMATGSGAPMADNNEGADGVGNSSGNWHCDSTWMGDRVITTSTRTWALPTYNNHLYKQISSQSGASNDNHYFGYSTPWGYFDFNRFHCHFSPRDWQRLINNNWGFRPKRLNFKLFNIQVKEVTQNDGTTTIANNLTSTVQVFTDSEYQLPYVLGSAHQGCLPPFPADVFMVPQYGYLTLNNGSQAVGRSSFYCLEYFPSQMLRTGNNFTFSYTFEDVPFHSSYAHSQSLDRLMNPLIDQYLYYLSRTNTPSGTTTQSGLQFSQAGASDIRDQSRNWLPGPCYRQQRVSKTSADNNNSEYSWTGATKYHLNGRDSLVNPGPAMASHKDDEEKFFPQSGVLIFGKQGSEKTNVDIEKVMITDEEEIRTTNPVATEQYGSVSTNLQRGNRQAATADVNTQGVLPGMVWQDRDVYLQGPIWAKIPHTDGHFHPSPLMGGFGLKHPPPQILIKNTPVPANPSTTFSAAKFASFITQYSTGQVSVEIEWELQKENSKRWNPEIQYTSNYNKSVNVDFTVDTNGVYSEPRPIGTRYLTRNLLRP

SEQ ID NO: 5123 - protein, 736 aa, Adeno-associated virus 3; identical to SEQ ID NO: 4757

SEQ ID NO: 5124 - DNA, 4726 bp, Adeno-associated virus 3
ttggccactccctctatgcgcactcgctcgctcggtggggcctggcgaccaaaggtcgccagacggacgtgctttgcacgtccggccccaccgagcgagcgagtgcgcatagagggagtggccaactccatcactagaggtatggcagtgacgtaacgcgaagcgcgcgaagcgagaccacgcctaccagctgcgtcagcagtcaggtgacccttttgcgacagtttgcgacaccacgtggccgctgagggtatatattctcgagtgagcgaaccaggagctccattttgaccgcgaaatttgaacgagcagcagccatgccggggttctacgagattgtcctgaaggtcccgagtgacctggacgagcgcctgccgggcatttctaactcgtttgttaactgggtggccgagaaggaatgggacgtgccgccggattctgacatggatccgaatctgattgagcaggcacccctgaccgtggccgaaaagcttcagcgcgagttcctggtggagtggcgccgcgtgagtaaggccccggaggccctcttttttgtccagttcgaaaagggggagacctacttccacctgcacgtgctgattgagaccatcggggtcaaatccatggtggtcggccgctacgtgagccagattaaagagaagctggtgacccgcatctaccgcggggtcgagccgcagcttccgaactggttcgcggtgaccaaaacgcgaaatggcgccgggggcgggaacaaggtggtggacgactgctacatccccaactacctgctccccaagacccagcccgagctccagtgggcgtggactaacatggaccagtatttaagcgcctgtttgaatctcgcggagcgtaaacggctggtggcgcagcatctgacgcacgtgtcgcagacgcaggagcagaacaaagagaatcagaaccccaattctgacgcgccggtcatcaggtcaaaaacctcagccaggtacatggagctggtcgggtggctggtggaccgcgggatcacgtcagaaaagcaatggattcaggaggaccaggcctcgtacatctccttcaacgccgcctccaactcgcggtcccagatcaaggccgcgctggacaatgcctccaagatcatgagcctgacaaagacggctccggactacctggtgggcagcaacccgccggaggacattaccaaaaatcggatctaccaaatcctggagctgaacgggtacgatccgcagtacgcggcctccgtcttcctgggctgggcgcaaaagaagttcgggaagaggaacaccatctggctctttgggccggccacgacgggtaaaaccaacatcgcggaagccatcgcccacgccgtgcccttctacggctgcgtaaactggaccaatgagaactttcccttcaacgattgcgtcgacaagatggtgatctggtgggaggagggcaagatgacggccaaggtcgtggagagcgccaaggccattctgggcggaagcaaggtgcgcgtggaccaaaagtgcaagtcatcggcccagatcgaacccactcccgtgatcgtcacctccaacaccaacatgtgcgccgtgattgacgggaacagcaccaccttcgagcatcagcagccgctgcaggaccggatgtttgaatttgaacttacccgccgtttggaccatgactttgggaaggtcaccaaacaggaagtaaaggactttttccggtgggcttccgatcacgtgactgacgtggctcatgagttctacgtcagaaagggtggagctaagaaacgccccgcctccaatgacgcggatgtaagcgagccaaaacgggagtgcacgtcacttgcgcagccgacaacgtcagacgcggaagcaccggcggactacgcggacaggtaccaaaacaaatgttctcgtcacgtgggcatgaatctgatgctttttccctgtaaaacatgcgagagaatgaatcaaatttccaatgtctgttttacgcatggtcaaagagactgtggggaatgcttccctggaatgtcagaatctcaacccgtttctgtcgtcaaaaagaagacttatcagaaactgtgtccaattcatcatatcctgggaagggcacccgagattgcctgttcggcctgcgatttggccaatgtggacttggatgactgtgtttctgagcaataaatgacttaaaccaggtatggctgctgacggttatcttccagattggctcgaggacaacctttctgaaggcattcgtgagtggtgggctctgaaacctggagtccctcaacccaaagcgaaccaacaacaccaggacaaccgtcggggtcttgtgcttccgggttacaaatacctcggacccggtaacggactcgacaaaggagagccggtcaacgaggcggacgcggcagccctcgaacacgacaaagcttacgaccagcagctcaaggccggtgacaacccgtacctcaagtacaaccacgccgacgccgagtttcaggagcgtcttcaagaagatacgtcttttgggggcaaccttggcagagcagtcttccaggccaaaaagaggatccttgagcctcttggtctggttgaggaagcagctaaaacggctcctggaaagaagggggctgtagatcagtctcctcaggaaccggactcatcatctggtgttggcaaatcgggcaaacagcctgccagaaaaagactaaatttcggtcagactggagactcagagtcagtcccagaccctcaacctctcggagaaccaccagcagcccccacaagtttgggatctaatacaatggcttcaggcggtggcgcaccaatggcagacaataacgagggtgccgatggagtgggtaattcctcaggaaattggcattgcgattcccaatggctgggcgacagagtcatcaccaccagcaccagaacctgggccctgcccacttacaacaaccatctctacaagcaaatctccagccaatcaggagcttcaaacgacaaccactactttggctacagcaccccttgggggtattttgactttaacagattccactgccacttctcaccacgtgactggcagcgactcattaacaacaactggggattccggcccaagaaactcagcttcaagctcttcaacatccaagttagaggggtcacgcagaacgatggcacgacgactattgccaataaccttaccagcacggttcaagtgtttacggactcggagtatcagctcccgtacgtgctcgggtcggcgcaccaaggctgtctcccgccgtttccagcggacgtcttcatggtccctcagtatggatacctcaccctgaacaacggaagtcaagcggtgggacgctcatccttttactgcctggagtacttcccttcgcagatgctaaggactggaaataacttccaattcagctataccttcgaggatgtaccttttcacagcagctacgctcacagccagagtttggatcgcttgatgaatcctcttattgatcagtatctgtactacctgaacagaacgcaaggaacaacctctggaacaaccaaccaatcacggctgctttttagccaggctgggcctcagtctatgtctttgcaggccagaaattggctacctgggccctgctaccggcaacagagactttcaaagactgctaacgacaacaacaacagtaactttccttggacagcggccagcaaatatcatctcaatggccgcgactcgctggtgaatccaggaccagctatggccagtcacaaggacgatgaagaaaaatttttccctatgcacggcaatctaatatttggcaaagaagggacaacggcaagtaacgcagaattagataatgtaatgattacggatgaagaagagattcgtaccaccaatcctgtggcaacagagcagtatggaactgtggcaaataacttgcagagctcaaatacagctcccacgactggaactgtcaatcatcagggggccttacctggcatggtgtggcaagatcgtgacgtgtaccttcaaggacctatctgggcaaagattcctcacacggatggacactttcatccttctcctctgatgggaggctttggactgaaacatccgcctcctcaaatcatgatcaaaaatactccggtaccggcaaatcctccgacgactttcagcccggccaagtttgcttcatttatcactcagtactccactggacaggtcagcgtggaaattgagtgggagctacagaaagaaaacagcaaacgttggaatccagagattcagtacacttccaactacaacaagtctgttaatgtggactttactgtagacactaatggtgtttatagtgaacctcgccctattggaacccggtatctcacacgaaacttgtgaatcctggttaatcaataaaccgtttaattcgtttcagttgaactttggctcttgtgcacttctttatctttatcttgtttccatggctactgcgtagataagcagcggcctgcggcgcttgcgcttcgcggtttacaactgctggttaatatttaactctcgccatacctctagtgatggagttggccactccctctatgcgcactcgctcgctcggtggggcctggcgaccaaaggtcgccagacggacgtgctttgcacgtccggccccaccgagcgagcgagtgcgcatagagggagtggccaa

SEQ ID NO: 5125 - protein, 736 aa, Adeno-associated virus 3A; identical to SEQ ID NO: 4757

SEQ ID NO: 5126 - protein, 624 aa, Adeno-associated virus 3A
MPGFYEIVLKVPSDLDERLPGISNSFVNWVAEKEWDVPPDSDMDPNLIEQAPLTVAEKLQREFLVEWRRVSKAPEALFFVQFEKGETYFHLHVLIETIGVKSMVVGRYVSQIKEKLVTRIYRGVEPQLPNWFAVTKTRNGAGGGNKVVDDCYIPNYLLPKTQPELQWAWTNMDQYLSACLNLAERKRLVAQHLTHVSQTQEQNKENQNPNSDAPVIRSKTSARYMELVGWLVDRGITSEKQWIQEDQASYISFNAASNSRSQIKAALDNASKIMSLTKTAPDYLVGSNPPEDITKNRIYQILELNGYDPQYAASVFLGWAQKKFGKRNTIWLFGPATTGKTNIAEAIAHAVPFYGCVNWTNENFPFNDCVDKMVIWWEEGKMTAKVVESAKAILGGSKVRVDQKCKSSAQIEPTPVIVTSNTNMCAVIDGNSTTFEHQQPLQDRMFEFELTRRLDHDFGKVTKQEVKDFFRWASDHVTDVAHEFYVRKGGAKKRPASNDADVSEPKRECTSLAQPTTSDAEAPADYADRYQNKCSRHVGMNLMLFPCKTCERMNQISNVCFTHGQRDCGECFPGMSESQPVSVVKKKTYQKLCPIHHILGRAPEIACSACDLANVDLDDCVSEQ

SEQ ID NO: 5127 - protein, 736 aa, Adeno-associated virus 3B
MAADGYLPDWLEDNLSEGIREWWALKPGVPQPKANQQHQDNRRGLVLPGYKYLGPGNGLDKGEPVNEADAAALEHDKAYDQQLKAGDNPYLKYNHADAEFQERLQEDTSFGGNLGRAVFQAKKRILEPLGLVEEAAKTAPGKKRPVDQSPQEPDSSSGVGKSGKQPARKRLNFGQTGDSESVPDPQPLGEPPAAPTSLGSNTMASGGGAPMADNNEGADGVGNSSGNWHCDSQWLGDRVITTSTRTWALPTYNNHLYKQISSQSGASNDNHYFGYSTPWGYFDFNRFHCHFSPRDWQRLINNNWGFRPKKLSFKLFNIQVKEVTQNDGTTTIANNLTSTVQVFTDSEYQLPYVLGSAHQGCLPPFPADVFMVPQYGYLTLNNGSQAVGRSSFYCLEYFPSQMLRTGNNFQFSYTFEDVPFHSSYAHSQSLDRLMNPLIDQYLYYLNRTQGTTSGTTNQSRLLFSQAGPQSMSLQARNWLPGPCYRQQRLSKTANDNNNSNFPWTAASKYHLNGRDSLVNPGPAMASHKDDEEKFFPMHGNLIFGKEGTTASNAELDNVMITDEEEIRTTNPVATEQYGTVANNLQSSNTAPTTRTVNDQGALPGMVWQDRDVYLQGPIWAKIPHTDGHFHPSPLMGGFGLKHPPPQIMIKNTPVPANPPTTFSPAKFASFITQYSTGQVSVEIEWELQKENSKRWNPEIQYTSNYNKSVNVDFTVDTNGVYSEPRPIGTRYLTRNL

SEQ ID NO: 5128 - protein, 624 aa, Adeno-associated virus 3B
MPGFYEIVLKVPSDLDEHLPGISNSFVNWVAEKEWELPPDSDMDPNLIEQAPLTVAEKLQREFLVEWRRVSKAPEALFFVQFEKGETYFHLHVLIETIGVKSMVVGRYVSQIKEKLVTRIYRGVEPQLPNWFAVTKTRNGAGGGNKVVDDCYIPNYLLPKTQPELQWAWTNMDQYLSACLNLAERKRLVAQHLTHVSQTQEQNKENQNPNSDAPVIRSKTSARYMELVGWLVDRGITSEKQWIQEDQASYISFNAASNSRSQIKAALDNASKIMSLTKTAPDYLVGSNPPEDITKNRIYQILELNGYDPQYAASVFLGWAQKKFGKRNTIWLFGPATTGKTNIAEAIAHAVPFYGCVNWTNENFPFNDCVDKMVIWWEEGKMTAKVVESAKAILGGSKVRVDQKCKSSAQIEPTPVIVTSNTNMCAVIDGNSTTFEHQQPLQDRMFKFELTRRLDHDFGKVTKQEVKDFFRWASDHVTDVAHEFYVRKGGAKKRPASNDADVSEPKRQCTSLAQPTTSDAEAPADYADRYQNKCSRHVGMNLMLFPCKTCERMNQISNVCFTHGQRDCGECFPGMSESQPVSVVKKKTYQKLCPIHHILGRAPEIACSACDLANVDLDDCVSEQ

SEQ ID NO: 5129 - DNA, 4722 bp, Adeno-associated virus 3B
tggccactccctctatgcgcactcgctcgctcggtggggcctggcgaccaaaggtcgccagacggacgtgctttgcacgtccggccccaccgagcgagcgagtgcgcatagagggagtggccaactccatcactagaggtatggcagtgacgtaacgcgaagcgcgcgaagcgagaccacgcctaccagctgcgtcagcagtcaggtgacccttttgcgacagtttgcgacaccacgtggccgctgagggtatatattctcgagtgagcgaaccaggagctccattttgaccgcgaaatttgaacgagcagcagccatgccggggttctacgagattgtcctgaaggtcccgagtgacctggacgagcacctgccgggcatttctaactcgtttgttaactgggtggccgagaaggaatgggagctgccgccggattctgacatggatccgaatctgattgagcaggcacccctgaccgtggccgaaaagcttcagcgcgagttcctggtggagtggcgccgcgtgagtaaggccccggaggccctcttttttgtccagttcgaaaagggggagacctacttccacctgcacgtgctgattgagaccatcggggtcaaatccatggtggtcggccgctacgtgagccagattaaagagaagctggtgacccgcatctaccgcggggtcgagccgcagcttccgaactggttcgcggtgaccaaaacgcgaaatggcgccgggggcgggaacaaggtggtggacgactgctacatccccaactacctgctccccaagacccagcccgagctccagtgggcgtggactaacatggaccagtatttaagcgcctgtttgaatctcgcggagcgtaaacggctggtggcgcagcatctgacgcacgtgtcgcagacgcaggagcagaacaaagagaatcagaaccccaattctgacgcgccggtcatcaggtcaaaaacctcagccaggtacatggagctggtcgggtggctggtggaccgcgggatcacgtcagaaaagcaatggattcaggaggaccaggcctcgtacatctccttcaacgccgcctccaactcgcggtcccagatcaaggccgcgctggacaatgcctccaagatcatgagcctgacaaagacggctccggactacctggtgggcagcaacccgccggaggacattaccaaaaatcggatctaccaaatcctggagctgaacgggtacgatccgcagtacgcggcctccgtcttcctgggctgggcgcaaaagaagttcgggaagaggaacaccatctggctctttgggccggccacgacgggtaaaaccaacatcgcggaagccatcgcccacgccgtgcccttctacggctgcgtaaactggaccaatgagaactttcccttcaacgattgcgtcgacaagatggtgatctggtgggaggagggcaagatgacggccaaggtcgtggagagcgccaaggccattctgggcggaagcaaggtgcgcgtggaccaaaagtgcaagtcatcggcccagatcgaacccactcccgtgatcgtcacctccaacaccaacatgtgcgccgtgattgacgggaacagcaccaccttcgagcatcagcagccgctgcaggaccggatgtttaaatttgaacttacccgccgtttggaccatgactttgggaaggtcaccaaacaggaagtaaaggactttttccggtgggcttccgatcacgtgactgacgtggctcatgagttctacgtcagaaagggtggagctaagaaacgccccgcctccaatgacgcggatgtaagcgagccaaaacggcagtgcacgtcacttgcgcagccgacaacgtcagacgcggaagcaccggcggactacgcggacaggtaccaaaacaaatgttctcgtcacgtgggcatgaatctgatgctttttccctgtaaaacatgcgagagaatgaatcaaatttccaatgtctgttttacgcatggtcaaagagactgtggggaatgcttccctggaatgtcagaatctcaacccgtttctgtcgtcaaaaagaagacttatcagaaactgtgtccaattcatcatatcctgggaagggcacccgagattgcctgttcggcctgcgatttggccaatgtggacttggatgactgtgtttctgagcaataaatgacttaaaccaggtatggctgctgacggttatcttccagattggctcgaggacaacctttctgaaggcattcgtgagtggtgggctctgaaacctggagtccctcaacccaaagcgaaccaacaacaccaggacaaccgtcggggtcttgtgcttccgggttacaaatacctcggacccggtaacggactcgacaaaggagagccggtcaacgaggcggacgcggcagccctcgaacacgacaaagcttacgaccagcagctcaaggccggtgacaacccgtacctcaagtacaaccacgccgacgccgagtttcaggagcgtcttcaagaagatacgtcttttgggggcaaccttggcagagcagtcttccaggccaaaaagaggatccttgagcctcttggtctggttgaggaagcagctaaaacggctcctggaaagaagaggcctgtagatcagtctcctcaggaaccggactcatcatctggtgttggcaaatcgggcaaacagcctgccagaaaaagactaaatttcggtcagactggcgactcagagtcagtcccagaccctcaacctctcggagaaccaccagcagcccccacaagtttgggatctaatacaatggcttcaggcggtggcgcaccaatggcagacaataacgagggtgccgatggagtgggtaattcctcaggaaattggcattgcgattcccaatggctgggcgacagagtcatcaccaccagcaccagaacctgggccctgcccacttacaacaaccatctctacaagcaaatctccagccaatcaggagcttcaaacgacaaccactactttggctacagcaccccttgggggtattttgactttaacagattccactgccacttctcaccacgtgactggcagcgactcattaacaacaactggggattccggcccaagaaactcagcttcaagctcttcaacatccaagttaaagaggtcacgcagaacgatggcacgacgactattgccaataaccttaccagcacggttcaagtgtttacggactcggagtatcagctcccgtacgtgctcgggtcggcgcaccaaggctgtctcccgccgtttccagcggacgtcttcatggtccctcagtatggatacctcaccctgaacaacggaagtcaagcggtgggacgctcatccttttactgcctggagtacttcccttcgcagatgctaaggactggaaataacttccaattcagctataccttcgaggatgtaccttttcacagcagctacgctcacagccagagtttggatcgcttgatgaatcctcttattgatcagtatctgtactacctgaacagaacgcaaggaacaacctctggaacaaccaaccaatcacggctgctttttagccaggctgggcctcagtctatgtctttgcaggccagaaattggctacctgggccctgctaccggcaacagagactttcaaagactgctaacgacaacaacaacagtaactttccttggacagcggccagcaaatatcatctcaatggccgcgactcgctggtgaatccaggaccagctatggccagtcacaaggacgatgaagaaaaatttttccctatgcacggcaatctaatatttggcaaagaagggacaacggcaagtaacgcagaattagataatgtaatgattacggatgaagaagagattcgtaccaccaatcctgtggcaacagagcagtatggaactgtggcaaataacttgcagagctcaaatacagctcccacgactagaactgtcaatgatcagggggccttacctggcatggtgtggcaagatcgtgacgtgtaccttcaaggacctatctgggcaaagattcctcacacggatggacactttcatccttctcctctgatgggaggctttggactgaaacatccgcctcctcaaatcatgatcaaaaatactccggtaccggcaaatcctccgacgactttcagcccggccaagtttgcttcatttatcactcagtactccactggacaggtcagcgtggaaattgagtgggagctacagaaagaaaacagcaaacgttggaatccagagattcagtacacttccaactacaacaagtctgttaatgtggactttactgtagacactaatggtgtttatagtgaacctcgccctattggaacccggtatctcacacgaaacttgtaatcctggttaatcaataaaccgtttaattcgtttcagttgaactttggctcttgtgcacttcttatcttatcttgtttccatggctactgcgtagataagcagcggcctgcggcgcttgcgcttcgcggtttacaactgctggttaatatttaactctcgccatacctctagtgatggagttggccactccctctatgcgcactcgctcgctcggtggggccggacgtgcaaagcacgtccgtctggcgacctttggtcgccaggccccaccgagcgagcgagtgcgcatagagggagtggccaa

SEQ ID NO: 5130 - DNA, 1800 bp, Adeno-associated virus 4
  modified_base (342)..(342): a, c, t or g
acggctcctggaaagaagagaccgttgattgaatccccccagcagcccgactcctccacgggtatcggcaaaaaaggcaagcagccggctaaaaagaagctcgttttcgaagacgaaactggagcaggcgacggaccccctgagggatcaacttccggagccatgtctgatgacagtgagatgcgtgcagcagctggcggagctgcagtcgagggsggacaaggtgccgatggagtgggtaatgcctcgggtgattggcattgcgattccacctggtctgagggccacgtcacgaccaccagcaccagaacctgggtcttgcccacctacaacaaccacctntacaagcgactcggagagagcctgcagtccaacacctacaacggattctccaccccctggggatactttgacttcaaccgcttccactgccacttctcaccacgtgactggcagcgactcatcaacaacaactggggcatgcgacccaaagccatgcgggtcaaaatcttcaacatccaggtcaaggaggtcacgacgtcgaacggcgagacaacggtggctaataaccttaccagcacggttcagatctttgcggactcgtcgtacgaactgccgtacgtgatggatgcgggtcaagagggcagcctgcctccttttcccaacgacgtctttatggtgccccagtacggctactgtggactggtgaccggcaacacttcgcagcaacagactgacagaaatgccttctactgcctggagtactttccttcgcagatgctgcggactggcaacaactttgaaattacgtacagttttgagaaggtgcctttccactcgatgtacgcgcacagccagagcctggaccggctgatgaaccctctcatcgaccagtacctgtggggactgcaatcgaccaccaccggaaccaccctgaatgccgggactgccaccaccaactttaccaagctgcggcctaccaacttttccaactttaaaaagaactggctgcccgggccttcaatcaagcagcagggcttctcaaagactgccaatcaaaactacaagatccctgccaccgggtcagacagtctcatcaaatacgagacgcacagcactctggacggaagatggagtgccctgacccccggacctccaatggccacggctggacctgcggacagcaagttcagcaacagccagctcatctttgcggggcctaaacagaacggcaacacggccaccgtacccgggactctgatcttcacctctgaggaggagctggcagccaccaacgccaccgatacggacatgtggggcaacctacctggcggtgaccagagcaacagcaacctgccgaccgtggacagactgacagccttgggagccgtgcctggaatggtctggcaaaacagagacatttactaccagggtcccatttgggccaagattcctcataccgatggacactttcacccctcaccgctgattggtgggtttgggctgaaacacccgcctcctcaaatttttatcaagaacaccccggtacctgcgaatcctgcaacgaccttcagctctactccggtaaactccttcattactcagtacagcactggccaggtgtcggtgcagattgactgggagatccagaaggagcggtccaaacgctggaaccccgaggtccagtttacctccaactacggacagcaaaactctctgttgtgggctcccgatgcggctgggaaatacactgagcctagggctatcggtacccgctacctcacccaccacctgtaataa

SEQ ID NO: 5131 - DNA, 2208 bp, Adeno-associated virus 4
  modified_base (750)..(750): a, c, t or g
atgactgacggttaccttccagattggctagaggacaacctctctgaaggcgttcgagagtggtgggcgctgcaacctggagcccctaaacccaaggcaaatcaacaacatcaggacaacgctcggggtcttgtgcttccgggttacaaatacctcggacccggcaacggactcgacaagggggaacccgtcaacgcagcggacgcggcagccctcgagcacgacaaggcctacgaccagcagctcaaggccggtgacaacccctacctcaagtacaaccacgccgacgcggagttccagcagcggcttcagggcgacacatcgtttgggggcaacctcggcagagcagtcttccaggccaaaaagagggttcttgaacctcttggtctggttgagcaagcgggtgagacggctcctggaaagaagagaccgttgattgaatccccccagcagcccgactcctccacgggtatcggcaaaaaaggcaagcagccggctaaaaagaagctcgttttcgaagacgaaactggagcaggcgacggaccccctgagggatcaacttccggagccatgtctgatgacagtgagatgcgtgcagcagctggcggagctgcagtcgagggsggacaaggtgccgatggagtgggtaatgcctcgggtgattggcattgcgattccacctggtctgagggccacgtcacgaccaccagcaccagaacctgggtcttgcccacctacaacaaccacctntacaagcgactcggagagagcctgcagtccaacacctacaacggattctccaccccctggggatactttgacttcaaccgcttccactgccacttctcaccacgtgactggcagcgactcatcaacaacaactggggcatgcgacccaaagccatgcgggtcaaaatcttcaacatccaggtcaaggaggtcacgacgtcgaacggcgagacaacggtggctaataaccttaccagcacggttcagatctttgcggactcgtcgtacgaactgccgtacgtgatggatgcgggtcaagagggcagcctgcctccttttcccaacgacgtctttatggtgccccagtacggctactgtggactggtgaccggcaacacttcgcagcaacagactgacagaaatgccttctactgcctggagtactttccttcgcagatgctgcggactggcaacaactttgaaattacgtacagttttgagaaggtgcctttccactcgatgtacgcgcacagccagagcctggaccggctgatgaaccctctcatcgaccagtacctgtggggactgcaatcgaccaccaccggaaccaccctgaatgccgggactgccaccaccaactttaccaagctgcggcctaccaacttttccaactttaaaaagaactggctgcccgggccttcaatcaagcagcagggcttctcaaagactgccaatcaaaactacaagatccctgccaccgggtcagacagtctcatcaaatacgagacgcacagcactctggacggaagatggagtgccctgacccccggacctccaatggccacggctggacctgcggacagcaagttcagcaacagccagctcatctttgcggggcctaaacagaacggcaacacggccaccgtacccgggactctgatcttcacctctgaggaggagctggcagccaccaacgccaccgatacggacatgtggggcaacctacctggcggtgaccagagcaacagcaacctgccgaccgtggacagactgacagccttgggagccgtgcctggaatggtctggcaaaacagagacatttactaccagggtcccatttgggccaagattcctcataccgatggacactttcacccctcaccgctgattggtgggtttgggctgaaacacccgcctcctcaaatttttatcaagaacaccccggtacctgcgaatcctgcaacgaccttcagctctactccggtaaactccttcattactcagtacagcactggccaggtgtcggtgcagattgactgggagatccagaaggagcggtccaaacgctggaaccccgaggtccagtttacctccaactacggacagcaaaactctctgttgtgggctcccgatgcggctgggaaatacactgagcctagggctatcggtacccgctacctcacccaccacctgtaataa

SEQ ID NO: 5132 - DNA, 1872 bp, Adeno-associated virus 4
atgccggggttctacgagatcgtgctgaaggtgcccagcgacctggacgagcacctgcccggcatttctgactcttttgtgagctgggtggccgagaaggaatgggagctgccgccggattctgacatggacttgaatctgattgagcaggcacccctgaccgtggccgaaaagctgcaacgcgagttcctggtcgagtggcgccgcgtgagtaaggccccggaggccctcttctttgtccagttcgagaagggggacagctacttccacctgcacatcctggtggagaccgtgggcgtcaaatccatggtggtgggccgctacgtgagccagattaaagagaagctggtgacccgcatctaccgcggggtcgagccgcagcttccgaactggttcgcggtgaccaagacgcgtaatggcgccggaggcgggaacaaggtggtggacgactgctacatccccaactacctgctccccaagacccagcccgagctccagtgggcgtggactaacatggaccagtatataagcgcctgtttgaatctcgcggagcgtaaacggctggtggcgcagcatctgacgcacgtgtcgcagacgcaggagcagaacaaggaaaaccagaaccccaattctgacgcgccggtcatcaggtcaaaaacctccgccaggtacatggagctggtcgggtggctggtggaccgcgggatcacgtcagaaaagcaatggatccaggaggaccaggcgtcctacatctccttcaacgccgcctccaactcgcggtcacaaatcaaggccgcgctggacaatgcctccaaaatcatgagcctgacaaagacggctccggactacctggtgggccagaacccgccggaggacatttccagcaaccgcatctaccgaatcctcgagatgaacgggtacgatccgcagtacgcggcctccgtcttcctgggctgggcgcaaaagaagttcgggaagaggaacaccatctggctctttgggccggccacgacgggtaaaaccaacatcgcggaagccatcgcccacgccgtgcccttctacggctgcgtgaactggaccaatgagaactttccgttcaacgattgcgtcgacaagatggtgatctggtgggaggagggcaagatgacggccaaggtcgtagagagcgccaaggccatcctgggcggaagcaaggtgcgcgtggaccaaaagtgcaagtcatcggcccagatcgacccaactcccgtgatcgtcacctccaacaccaacatgtgcgcggtcatcgacggaaactcgaccaccttcgagcaccaacaaccactccaggaccggatgttcaagttcgagctcaccaagcgcctggagcacgactttggcaaggtcaccaagcaggaagtcaaagactttttccggtgggcgtcagatcacgtgaccgaggtgactcacgagttttacgtcagaaagggtggagctagaaagaggcccgcccccaatgacgcagatataagtgagcccaagcgggcctgtccgtcagttgcgcagccatcgacgtcagacgcggaagctccggtggactacgcggacaggtaccaaaacaaatgttctcgtcacgtgggtatgaatctgatgctttttccctgccggcaatgcgagagaatgaatcagaatgtggacatttgcttcacgcacggggtcatggactgtgccgagtgcttccccgtgtcagaatctcaacccgtgtctgtcgtcagaaagcggacgtatcagaaactgtgtccgattcatcacatcatggggagggcgcccgaggtggcctgctcggcctgcgaactggccaatgtggacttggatgactgtgacatggaacaataa

SEQ ID NO: 5133 - DNA, 1611 bp, Adeno-associated virus 4
atgccggggttctacgagatcgtgctgaaggtgcccagcgacctggacgagcacctgcccggcatttctgactcttttgtgagctgggtggccgagaaggaatgggagctgccgccggattctgacatggacttgaatctgattgagcaggcacccctgaccgtggccgaaaagctgcaacgcgagttcctggtcgagtggcgccgcgtgagtaaggccccggaggccctcttctttgtccagttcgagaagggggacagctacttccacctgcacatcctggtggagaccgtgggcgtcaaatccatggtggtgggccgctacgtgagccagattaaagagaagctggtgacccgcatctaccgcggggtcgagccgcagcttccgaactggttcgcggtgaccaagacgcgtaatggcgccggaggcgggaacaaggtggtggacgactgctacatccccaactacctgctccccaagacccagcccgagctccagtgggcgtggactaacatggaccagtatataagcgcctgtttgaatctcgcggagcgtaaacggctggtggcgcagcatctgacgcacgtgtcgcagacgcaggagcagaacaaggaaaaccagaaccccaattctgacgcgccggtcatcaggtcaaaaacctccgccaggtacatggagctggtcgggtggctggtggaccgcgggatcacgtcagaaaagcaatggatccaggaggaccaggcgtcctacatctccttcaacgccgcctccaactcgcggtcacaaatcaaggccgcgctggacaatgcctccaaaatcatgagcctgacaaagacggctccggactacctggtgggccagaacccgccggaggacatttccagcaaccgcatctaccgaatcctcgagatgaacgggtacgatccgcagtacgcggcctccgtcttcctgggctgggcgcaaaagaagttcgggaagaggaacaccatctggctctttgggccggccacgacgggtaaaaccaacatcgcggaagccatcgcccacgccgtgcccttctacggctgcgtgaactggaccaatgagaactttccgttcaacgattgcgtcgacaagatggtgatctggtgggaggagggcaagatgacggccaaggtcgtagagagcgccaaggccatcctgggcggaagcaaggtgcgcgtggaccaaaagtgcaagtcatcggcccagatcgacccaactcccgtgatcgtcacctccaacaccaacatgtgcgcggtcatcgacggaaactcgaccaccttcgagcaccaacaaccactccaggaccggatgttcaagttcgagctcaccaagcgcctggagcacgactttggcaaggtcaccaagcaggaagtcaaagactttttccggtgggcgtcagatcacgtgaccgaggtgactcacgagttttacgtcagaaagggtggagctagaaagaggcccgcccccaatgacgcagatataagtgagcccaagcgggcctgtccgtcagttgcgcagccatcgacgtcagacgcggaagctccggtggactacgcggacagattggctagaggacaacctctctga

SEQ ID NO: 5134 - DNA, 1872 bp, Adeno-associated virus 4; identical to SEQ ID NO: 5132

SEQ ID NO: 5135 - DNA, 1617 bp, Adeno-associated virus 4
  modified_base (162)..(162): a, c, t or g
atgcgtgcagcagctggcggagctgcagtcgagggsggacaaggtgccgatggagtgggtaatgcctcgggtgattggcattgcgattccacctggtctgagggccacgtcacgaccaccagcaccagaacctgggtcttgcccacctacaacaaccacctntacaagcgactcggagagagcctgcagtccaacacctacaacggattctccaccccctggggatactttgacttcaaccgcttccactgccacttctcaccacgtgactggcagcgactcatcaacaacaactggggcatgcgacccaaagccatgcgggtcaaaatcttcaacatccaggtcaaggaggtcacgacgtcgaacggcgagacaacggtggctaataaccttaccagcacggttcagatctttgcggactcgtcgtacgaactgccgtacgtgatggatgcgggtcaagagggcagcctgcctccttttcccaacgacgtctttatggtgccccagtacggctactgtggactggtgaccggcaacacttcgcagcaacagactgacagaaatgccttctactgcctggagtactttccttcgcagatgctgcggactggcaacaactttgaaattacgtacagttttgagaaggtgcctttccactcgatgtacgcgcacagccagagcctggaccggctgatgaaccctctcatcgaccagtacctgtggggactgcaatcgaccaccaccggaaccaccctgaatgccgggactgccaccaccaactttaccaagctgcggcctaccaacttttccaactttaaaaagaactggctgcccgggccttcaatcaagcagcagggcttctcaaagactgccaatcaaaactacaagatccctgccaccgggtcagacagtctcatcaaatacgagacgcacagcactctggacggaagatggagtgccctgacccccggacctccaatggccacggctggacctgcggacagcaagttcagcaacagccagctcatctttgcggggcctaaacagaacggcaacacggccaccgtacccgggactctgatcttcacctctgaggaggagctggcagccaccaacgccaccgatacggacatgtggggcaacctacctggcggtgaccagagcaacagcaacctgccgaccgtggacagactgacagccttgggagccgtgcctggaatggtctggcaaaacagagacatttactaccagggtcccatttgggccaagattcctcataccgatggacactttcacccctcaccgctgattggtgggtttgggctgaaacacccgcctcctcaaatttttatcaagaacaccccggtacctgcgaatcctgcaacgaccttcagctctactccggtaaactccttcattactcagtacagcactggccaggtgtcggtgcagattgactgggagatccagaaggagcggtccaaacgctggaaccccgaggtccagtttacctccaactacggacagcaaaactctctgttgtgggctcccgatgcggctgggaaatacactgagcctagggctatcggtacccgctacctcacccaccacctgtaa

SEQ ID NO: 5136 - DNA, 939 bp, Adeno-associated virus 4
atggagctggtcgggtggctggtggaccgcgggatcacgtcagaaaagcaatggatccaggaggaccaggcgtcctacatctccttcaacgccgcctccaactcgcggtcacaaatcaaggccgcgctggacaatgcctccaaaatcatgagcctgacaaagacggctccggactacctggtgggccagaacccgccggaggacatttccagcaaccgcatctaccgaatcctcgagatgaacgggtacgatccgcagtacgcggcctccgtcttcctgggctgggcgcaaaagaagttcgggaagaggaacaccatctggctctttgggccggccacgacgggtaaaaccaacatcgcggaagccatcgcccacgccgtgcccttctacggctgcgtgaactggaccaatgagaactttccgttcaacgattgcgtcgacaagatggtgatctggtgggaggagggcaagatgacggccaaggtcgtagagagcgccaaggccatcctgggcggaagcaaggtgcgcgtggaccaaaagtgcaagtcatcggcccagatcgacccaactcccgtgatcgtcacctccaacaccaacatgtgcgcggtcatcgacggaaactcgaccaccttcgagcaccaacaaccactccaggaccggatgttcaagttcgagctcaccaagcgcctggagcacgactttggcaaggtcaccaagcaggaagtcaaagactttttccggtgggcgtcagatcacgtgaccgaggtgactcacgagttttacgtcagaaagggtggagctagaaagaggcccgcccccaatgacgcagatataagtgagcccaagcgggcctgtccgtcagttgcgcagccatcgacgtcagacgcggaagctccggtggactacgcggacagattggctagaggacaacctctctga

SEQ ID NO: 5137 - DNA, 1197 bp, Adeno-associated virus 4
atggagctggtcgggtggctggtggaccgcgggatcacgtcagaaaagcaatggatccaggaggaccaggcgtcctacatctccttcaacgccgcctccaactcgcggtcacaaatcaaggccgcgctggacaatgcctccaaaatcatgagcctgacaaagacggctccggactacctggtgggccagaacccgccggaggacatttccagcaaccgcatctaccgaatcctcgagatgaacgggtacgatccgcagtacgcggcctccgtcttcctgggctgggcgcaaaagaagttcgggaagaggaacaccatctggctctttgggccggccacgacgggtaaaaccaacatcgcggaagccatcgcccacgccgtgcccttctacggctgcgtgaactggaccaatgagaactttccgttcaacgattgcgtcgacaagatggtgatctggtgggaggagggcaagatgacggccaaggtcgtagagagcgccaaggccatcctgggcggaagcaaggtgcgcgtggaccaaaagtgcaagtcatcggcccagatcgacccaactcccgtgatcgtcacctccaacaccaacatgtgcgcggtcatcgacggaaactcgaccaccttcgagcaccaacaaccactccaggaccggatgttcaagttcgagctcaccaagcgcctggagcacgactttggcaaggtcaccaagcaggaagtcaaagactttttccggtgggcgtcagatcacgtgaccgaggtgactcacgagttttacgtcagaaagggtggagctagaaagaggcccgcccccaatgacgcagatataagtgagcccaagcgggcctgtccgtcagttgcgcagccatcgacgtcagacgcggaagctccggtggactacgcggacaggtaccaaaacaaatgttctcgtcacgtgggtatgaatctgatgctttttccctgccggcaatgcgagagaatgaatcagaatgtggacatttgcttcacgcacggggtcatggactgtgccgagtgcttccccgtgtcagaatctcaacccgtgtctgtcgtcagaaagcggacgtatcagaaactgtgtccgattcatcacatcatggggagggcgcccgaggtggcctgctcggcctgcgaactggccaatgtggacttggatgactgtgacatggaacaa

SEQ ID NO: 5138 - DNA, 245 bp, Adeno-associated virus 4
ctccatcatctaggtttgcccactgacgtcaatgtgacgtcctagggttagggaggtccctgtattagcagtcacgtgagtgtcgtatttcgcggagcgtagcggagcgcataccaagctgccacgtcacagccacgtggtccgtttgcgacagtttgcgacaccatgtggtcaggagggtatataaccgcgagtgagccagcgaggagctccattttgcccgcgaattttgaacgagcagcagc

SEQ ID NO: 5139 - protein, 313 aa, Adeno-associated virus 4
  MOD_RES (313)..(313): Any amino acid
MELVGWLVDRGITSEKQWIQEDQASYISFNAASNSRSQIKAALDNASKIMSLTKTAPDYLVGQNPPEDISSNRIYRILEMNGYDPQYAASVFLGWAQKKFGKRNTIWLFGPATTGKTNIAEAIAHAVPFYGCVNWTNENFPFNDCVDKMVIWWEEGKMTAKVVESAKAILGGSKVRVDQKCKSSAQIDPTPVIVTSNTNMCAVIDGNSTTFEHQQPLQDRMFKFELTKRLEHDFGKVTKQEVKDFFRWASDHVTEVTHEFYVRKGGARKRPAPNDADISEPKRACPSVAQPSTSDAEAPVDYADRLARGQPLX

SEQ ID NO: 5140 - protein, 399 aa, Adeno-associated virus 4
MELVGWLVDRGITSEKQWIQEDQASYISFNAASNSRSQIKAALDNASKIMSLTKTAPDYLVGQNPPEDISSNRIYRILEMNGYDPQYAASVFLGWAQKKFGKRNTIWLFGPATTGKTNIAEAIAHAVPFYGCVNWTNENFPFNDCVDKMVIWWEEGKMTAKVVESAKAILGGSKVRVDQKCKSSAQIDPTPVIVTSNTNMCAVIDGNSTTFEHQQPLQDRMFKFELTKRLEHDFGKVTKQEVKDFFRWASDHVTEVTHEFYVRKGGARKRPAPNDADISEPKRACPSVAQPSTSDAEAPVDYADRYQNKCSRHVGMNLMLFPCRQCERMNQNVDICFTHGVMDCAECFPVSESQPVSVVRKRTYQKLCPIHHIMGRAPEVACSACELANVDLDDCDMEQ

SEQ ID NO: 5141 - protein, 623 aa, Adeno-associated virus 4
MPGFYEIVLKVPSDLDEHLPGISDSFVSWVAEKEWELPPDSDMDLNLIEQAPLTVAEKLQREFLVEWRRVSKAPEALFFVQFEKGDSYFHLHILVETVGVKSMVVGRYVSQIKEKLVTRIYRGVEPQLPNWFAVTKTRNGAGGGNKVVDDCYIPNYLLPKTQPELQWAWTNMDQYISACLNLAERKRLVAQHLTHVSQTQEQNKENQNPNSDAPVIRSKTSARYMELVGWLVDRGITSEKQWIQEDQASYISFNAASNSRSQIKAALDNASKIMSLTKTAPDYLVGQNPPEDISSNRIYRILEMNGYDPQYAASVFLGWAQKKFGKRNTIWLFGPATTGKTNIAEAIAHAVPFYGCVNWTNENFPFNDCVDKMVIWWEEGKMTAKVVESAKAILGGSKVRVDQKCKSSAQIDPTPVIVTSNTNMCAVIDGNSTTFEHQQPLQDRMFKFELTKRLEHDFGKVTKQEVKDFFRWASDHVTEVTHEFYVRKGGARKRPAPNDADISEPKRACPSVAQPSTSDAEAPVDYADRYQNKCSRHVGMNLMLFPCRQCERMNQNVDICFTHGVMDCAECFPVSESQPVSVVRKRTYQKLCPIHHIMGRAPEVACSACELANVDLDDCDMEQ

SEQ ID NO: 5142 - protein, 537 aa, Adeno-associated virus 4
  MOD_RES (537)..(537): Any amino acid
MPGFYEIVLKVPSDLDEHLPGISDSFVSWVAEKEWELPPDSDMDLNLIEQAPLTVAEKLQREFLVEWRRVSKAPEALFFVQFEKGDSYFHLHILVETVGVKSMVVGRYVSQIKEKLVTRIYRGVEPQLPNWFAVTKTRNGAGGGNKVVDDCYIPNYLLPKTQPELQWAWTNMDQYISACLNLAERKRLVAQHLTHVSQTQEQNKENQNPNSDAPVIRSKTSARYMELVGWLVDRGITSEKQWIQEDQASYISFNAASNSRSQIKAALDNASKIMSLTKTAPDYLVGQNPPEDISSNRIYRILEMNGYDPQYAASVFLGWAQKKFGKRNTIWLFGPATTGKTNIAEAIAHAVPFYGCVNWTNENFPFNDCVDKMVIWWEEGKMTAKVVESAKAILGGSKVRVDQKCKSSAQIDPTPVIVTSNTNMCAVIDGNSTTFEHQQPLQDRMFKFELTKRLEHDFGKVTKQEVKDFFRWASDHVTEVTHEFYVRKGGARKRPAPNDADISEPKRACPSVAQPSTSDAEAPVDYADRLARGQPLX

SEQ ID NO: 5143 - protein, 623 aa, Adeno-associated virus 4; identical to SEQ ID NO: 5141

SEQ ID NO: 5144 - protein, 544 aa, Adeno-associated virus 4
MSDDSEMRAAAGGAAVEGGQGADGVGNASGDWHCDSTWSEGHVTTTSTRTWVLPTYNNHLYKRLGESLQSNTYNGFSTPWGYFDFNRFHCHFSPRDWQRLINNNWGMRPKAMRVKIFNIQVKEVTTSNGETTVANNLTSTVQIFADSSYELPYVMDAGQEGSLPPFPNDVFMVPQYGYCGLVTGNTSQQQTDRNAFYCLEYFPSQMLRTGNNFEITYSFEKVPFHSMYAHSQSLDRLMNPLIDQYLWGLQSTTTGTTLNAGTATTNFTKLRPTNFSNFKKNWLPGPSIKQQGFSKTANQNYKIPATGSDSLIKYETHSTLDGRWSALTPGPPMATAGPADSKFSNSQLIFAGPKQNGNTATVPGTLIFTSEEELAATNATDTDMWGNLPGGDQSNSNLPTVDRLTALGAVPGMVWQNRDIYYQGPIWAKIPHTDGHFHPSPLIGGFGLKHPPPQIFIKNTPVPANPATTFSSTPVNSFITQYSTGQVSVQIDWEIQKERSKRWNPEVQFTSNYGQQNSLLWAPDAAGKYTEPRAIGTRYLTHHL

SEQ ID NO: 5145 - protein, 734 aa, Adeno-associated virus 4; identical to SEQ ID NO: 4791

SEQ ID NO: 5146 - protein, 598 aa, Adeno-associated virus 4
TAPGKKRPLIESPQQPDSSTGIGKKGKQPAKKKLVFEDETGAGDGPPEGSTSGAMSDDSEMRAAAGGAAVEGGQGADGVGNASGDWHCDSTWSEGHVTTTSTRTWVLPTYNNHLYKRLGESLQSNTYNGFSTPWGYFDFNRFHCHFSPRDWQRLINNNWGMRPKAMRVKIFNIQVKEVTTSNGETTVANNLTSTVQIFADSSYELPYVMDAGQEGSLPPFPNDVFMVPQYGYCGLVTGNTSQQQTDRNAFYCLEYFPSQMLRTGNNFEITYSFEKVPFHSMYAHSQSLDRLMNPLIDQYLWGLQSTTTGTTLNAGTATTNFTKLRPTNFSNFKKNWLPGPSIKQQGFSKTANQNYKIPATGSDSLIKYETHSTLDGRWSALTPGPPMATAGPADSKFSNSQLIFAGPKQNGNTATVPGTLIFTSEEELAATNATDTDMWGNLPGGDQSNSNLPTVDRLTALGAVPGMVWQNRDIYYQGPIWAKIPHTDGHFHPSPLIGGFGLKHPPPQIFIKNTPVPANPATTFSSTPVNSFITQYSTGQVSVQIDWEIQKERSKRWNPEVQFTSNYGQQNSLLWAPDAAGKYTEPRAIGTRYLTHHL

SEQ ID NO: 5147 - DNA, 129 bp, Adeno-associated virus 4
ttggccactccctctatgcgcgctcgctcactcactcggccctgcggccagaggccggcagtctggagacctttggtgtccagggcagggccgagtgagtgagcgagcgcgcatagagggagtggccaa

SEQ ID NO: 5148 - DNA, 125 bp, Adeno-associated virus 4
ttggccactccctctatgcgcgctcgctcactcactcggccctggagaccaaaggtctccagactgccggcctctggccggcagggccgagtgagtgagcgagcgcgcatagagggagtggccaa

SEQ ID NO: 5149 - DNA, 4768 bp, Adeno-associated virus 4
  modified_base (3009)..(3009): a, c, t or g
ttggccactccctctatgcgcgctcgctcactcactcggccctggagaccaaaggtctccagactgccggcctctggccggcagggccgagtgagtgagcgagcgcgcatagagggagtggccaactccatcatctaggtttgcccactgacgtcaatgtgacgtcctagggttagggaggtccctgtattagcagtcacgtgagtgtcgtatttcgcggagcgtagcggagcgcataccaagctgccacgtcacagccacgtggtccgtttgcgacagtttgcgacaccatgtggtcaggagggtatataaccgcgagtgagccagcgaggagctccattttgcccgcgaattttgaacgagcagcagccatgccggggttctacgagatcgtgctgaaggtgcccagcgacctggacgagcacctgcccggcatttctgactcttttgtgagctgggtggccgagaaggaatgggagctgccgccggattctgacatggacttgaatctgattgagcaggcacccctgaccgtggccgaaaagctgcaacgcgagttcctggtcgagtggcgccgcgtgagtaaggccccggaggccctcttctttgtccagttcgagaagggggacagctacttccacctgcacatcctggtggagaccgtgggcgtcaaatccatggtggtgggccgctacgtgagccagattaaagagaagctggtgacccgcatctaccgcggggtcgagccgcagcttccgaactggttcgcggtgaccaagacgcgtaatggcgccggaggcgggaacaaggtggtggacgactgctacatccccaactacctgctccccaagacccagcccgagctccagtgggcgtggactaacatggaccagtatataagcgcctgtttgaatctcgcggagcgtaaacggctggtggcgcagcatctgacgcacgtgtcgcagacgcaggagcagaacaaggaaaaccagaaccccaattctgacgcgccggtcatcaggtcaaaaacctccgccaggtacatggagctggtcgggtggctggtggaccgcgggatcacgtcagaaaagcaatggatccaggaggaccaggcgtcctacatctccttcaacgccgcctccaactcgcggtcacaaatcaaggccgcgctggacaatgcctccaaaatcatgagcctgacaaagacggctccggactacctggtgggccagaacccgccggaggacatttccagcaaccgcatctaccgaatcctcgagatgaacgggtacgatccgcagtacgcggcctccgtcttcctgggctgggcgcaaaagaagttcgggaagaggaacaccatctggctctttgggccggccacgacgggtaaaaccaacatcgcggaagccatcgcccacgccgtgcccttctacggctgcgtgaactggaccaatgagaactttccgttcaacgattgcgtcgacaagatggtgatctggtgggaggagggcaagatgacggccaaggtcgtagagagcgccaaggccatcctgggcggaagcaaggtgcgcgtggaccaaaagtgcaagtcatcggcccagatcgacccaactcccgtgatcgtcacctccaacaccaacatgtgcgcggtcatcgacggaaactcgaccaccttcgagcaccaacaaccactccaggaccggatgttcaagttcgagctcaccaagcgcctggagcacgactttggcaaggtcaccaagcaggaagtcaaagactttttccggtgggcgtcagatcacgtgaccgaggtgactcacgagttttacgtcagaaagggtggagctagaaagaggcccgcccccaatgacgcagatataagtgagcccaagcgggcctgtccgtcagttgcgcagccatcgacgtcagacgcggaagctccggtggactacgcggacaggtaccaaaacaaatgttctcgtcacgtgggtatgaatctgatgctttttccctgccggcaatgcgagagaatgaatcagaatgtggacatttgcttcacgcacggggtcatggactgtgccgagtgcttccccgtgtcagaatctcaacccgtgtctgtcgtcagaaagcggacgtatcagaaactgtgtccgattcatcacatcatggggagggcgcccgaggtggcctgctcggcctgcgaactggccaatgtggacttggatgactgtgacatggaacaataaatgactcaaaccagatatgactgacggttaccttccagattggctagaggacaacctctctgaaggcgttcgagagtggtgggcgctgcaacctggagcccctaaacccaaggcaaatcaacaacatcaggacaacgctcggggtcttgtgcttccgggttacaaatacctcggacccggcaacggactcgacaagggggaacccgtcaacgcagcggacgcggcagccctcgagcacgacaaggcctacgaccagcagctcaaggccggtgacaacccctacctcaagtacaaccacgccgacgcggagttccagcagcggcttcagggcgacacaccgtttgggggcaacctcggcagagcagtcttccaggccaaaaagagggttcttgaacctcttggtctggttgagcaagcgggtgagacggctcctggaaagaagagaccgttgattgaatccccccagcagcccgactcctccacgggtatcggcaaaaaaggcaagcagccggctaaaaagaagctcgttttcgaagacgaaactggagcaggcgacggaccccctgagggatcaacttccggagccatgtctgatgacagtgagatgcgtgcagcagctggcggagctgcagtcgagggsggacaaggtgccgatggagtgggtaatgcctcgggtgattggcattgcgattccacctggtctgagggccacgtcacgaccaccagcaccagaacctgggtcttgcccacctacaacaaccacctntacaagcgactcggagagagcctgcagtccaacacctacaacggattctccaccccctggggatactttgacttcaaccgcttccactgccacttctcaccacgtgactggcagcgactcatcaacaacaactggggcatgcgacccaaagccatgcgggtcaaaatcttcaacatccaggtcaaggaggtcacgacgtcgaacggcgagacaacggtggctaataaccttaccagcacggttcagatctttgcggactcgtcgtacgaactgccgtacgtgatggatgcgggtcaagagggcagcctgcctccttttcccaacgacgtctttatggtgccccagtacggctactgtggactggtgaccggcaacacttcgcagcaacagactgacagaaatgccttctactgcctggagtactttccttcgcagatgctgcggactggcaacaactttgaaattacgtacagttttgagaaggtgcctttccactcgatgtacgcgcacagccagagcctggaccggctgatgaaccctctcatcgaccagtacctgtggggactgcaatcgaccaccaccggaaccaccctgaatgccgggactgccaccaccaactttaccaagctgcggcctaccaacttttccaactttaaaaagaactggctgcccgggccttcaatcaagcagcagggcttctcaaagactgccaatcaaaactacaagatccctgccaccgggtcagacagtctcatcaaatacgagacgcacagcactctggacggaagatggagtgccctgacccccggacctccaatggccacggctggacctgcggacagcaagttcagcaacagccagctcatctttgcggggcctaaacagaacggcaacacggccaccgtacccgggactctgatcttcacctctgaggaggagctggcagccaccaacgccaccgatacggacatgtggggcaacctacctggcggtgaccagagcaacagcaacctgccgaccgtggacagactgacagccttgggagccgtgcctggaatggtctggcaaaacagagacatttactaccagggtcccatttgggccaagattcctcataccgatggacactttcacccctcaccgctgattggtgggtttgggctgaaacacccgcctcctcaaatttttatcaagaacaccccggtacctgcgaatcctgcaacgaccttcagctctactccggtaaactccttcattactcagtacagcactggccaggtgtcggtgcagattgactgggagatccagaaggagcggtccaaacgctggaaccccgaggtccagtttacctccaactacggacagcaaaactctctgttgtgggctcccgatgcggctgggaaatacactgagcctagggctatcggtacccgctacctcacccaccacctgtaataacctgttaatcaataaaccggtttattcgtttcagttgaactttggtctccgtgtccttcttatcttatctcgtttccatggctactgcgtacataagcagcggcctgcggcgcttgcgcttcgcggtttacaactgccggttaatcagtaacttctggcaaaccatgatgatggagttggccactccctctatgcgcgctcgctcactcactcggccctggagaccaaaggtctccagactgccggcctctggccggcagggccgagtgagtgagcgagcgcgcatagagggagtggccaa

SEQ ID NO: 5150 - protein, 725 aa, Adeno-associated virus 5
MAADGYLPDWLEDTLSEGIRQWWKLKPGPPPPKPAERHKDDSRGLVLPGYKYLGPFNGLDKGEPVNEADAAALEHDKAYDRQLDSGDNPYLKYNHADAEFQERLKEDTSFGGNLGRAVFQAKKRVLEPFGLVEEGAKTAPTGKRIDDHFPKRKKARTEEDSKPSTSSDAEAGPSGSQQLQIPAQPASSLGADTMSAGGGGPLGDNNQGADGVGNASGDWHCDSTWMGDRVVTKSTRTWVLPSYNNHQYREIKSGSVDGSNANAYFGYSTPWGYFDFNRFHSHWSPRDWQRLINNYWGFRPRSLRVKIFNIQVKEVTVQDSTTTIANNLTSTVQVFTDDDYQLPYVVGNGTEGCLPAFPPQVFTLPQYGYATLNRDNTENPTERSSFFCLEYFPSKMLRTGNNFEFTYNFEEVPFHSSFAPSQNLFKLANPLVDQYLYRFVSTNNTGGVQFNKNLAGRYANTYKNWFPGPMGRTQGWNLGSGVNRASVSAFATTNRMELEGASYQVPPQPNGMTNNLQGSNTYALENTMIFNSQPANPGTTATYLEGNMLITSESETQPVNRVAYNVGGQMATNNQSSTTAPTTGTYNLQEIVPGSVWMERDVYLQGPIWAKIPETGAHFHPSPAMGGFGLKHPPPMMLIKNTPVPGNITSFSDVPVSSFITQYSTGQVTVEMEWELKKENSKRWNPEIQYTNNYNDPQFVDFAPDSTGEYRTTRPIGTRYLTRPL

SEQ ID NO: 5151 - protein, 724 aa, Adeno-associated virus 5
MSFVDHPPDWLEEVGEGLREFLGLEAGPPKPKPNQQHQDQARGLVLPGYNYLGPGNGLDRGEPVNRADEVAREHDISYNEQLEAGDNPYLKYNHADAEFQEKLADDTSFGGNLGKAVFQAKKRVLEPFGLVEEGAKTAPTGKRIDDHFPKRKKARTEEDSKPSTSSDAEAGPSGSQQLQIPAQPASSLGADTMSAGGGGPLGDNNQGADGVGNASGDWHCDSTWMGDRVVTKSTRTWVLPSYNNHQYREIKSGSVDGSNANAYFGYSTPWGYFDFNRFHSHWSPRDWQRLINNYWGFRPRSLRVKIFNIQVKEVTVQDSTTTIANNLTSTVQVFTDDDYQLPYVVGNGTEGCLPAFPPQVFTLPQYGYATLNRDNTENPTERSSFFCLEYFPSKMLRTGNNFEFTYNFEEVPFHSSFAPSQNLFKLANPLVDQYLYRFVSTNNTGGVQFNKNLAGRYANTYKNWFPGPMGRTQGWNLGSGVNRASVSAFATTNRMELEGASYQVPPQPNGMTNNLQGSNTYALENTMIFNSQPANPGTTATYLEGNMLITSESETQPVNRVAYNVGGQMATNNQSSTTAPATGTYNLQEIVPGSVWMERDVYLQGPIWAKIPETGAHFHPSPAMGGFGLKHPPPMMLIKNTPVPGNITSFSDVPVSSFITQYSTGQVTVEMEWELKKENSKRWNPEIQYTNNYNDPQFVDFAPDSTGEYRTTRPIGTRYLTRPL

SEQ ID NO: 5152 - DNA, 2175 bp, Adeno-associated virus 5
atgtcttttgttgatcaccctccagattggttggaagaagttggtgaaggtcttcgcgagtttttgggccttgaagcgggcccaccgaaaccaaaacccaatcagcagcatcaagatcaagcccgtggtcttgtgctgcctggttataactatctcggacccggaaacggtctcgatcgaggagagcctgtcaacagggcagacgaggtcgcgcgagagcacgacatctcgtacaacgagcagcttgaggcgggagacaacccctacctcaagtacaaccacgcggacgccgagtttcaggagaagctcgccgacgacacatccttcgggggaaacctcggaaaggcagtctttcaggccaagaaaagggttctcgaaccttttggcctggttgaagagggtgctaagacggcccctaccggaaagcggatagacgaccactttccaaaaagaaagaaggctcggaccgaagaggactccaagccttccacctcgtcagacgccgaagctggacccagcggatcccagcagctgcaaatcccagcccaaccagcctcaagtttgggagctgatacaatgtctgcgggaggtggcggcccattgggcgacaataaccaaggtgccgatggagtgggcaatgcctcgggagattggcattgcgattccacgtggatgggggacagagtcgtcaccaagtccacccgaacctgggtgctgcccagctacaacaaccaccagtaccgagagatcaaaagcggctccgtcgacggaagcaacgccaacgcctactttggatacagcaccccctgggggtactttgactttaaccgcttccacagccactggagcccccgagactggcaaagactcatcaacaactactggggcttcagaccccggtccctcagagtcaaaatcttcaacattcaagtcaaagaggtcacggtgcaggactccaccaccaccatcgccaacaacctcacctccaccgtccaagtgtttacggacgacgactaccagctgccctacgtcgtcggcaacgggaccgagggatgcctgccggccttccctccgcaggtctttacgctgccgcagtacggttacgcgacgctgaaccgcgacaacacagaaaatcccaccgagaggagcagcttcttctgcctagagtactttcccagcaagatgctgagaacgggcaacaactttgagtttacctacaactttgaggaggtgcccttccactccagcttcgctcccagtcagaacctgttcaagctggccaacccgctggtggaccagtacttgtaccgcttcgtgagcacaaataacactggcggagtccagttcaacaagaacctggccgggagatacgccaacacctacaaaaactggttcccggggcccatgggccgaacccagggctggaacctgggctccggggtcaaccgcgccagtgtcagcgccttcgccacgaccaataggatggagctcgagggcgcgagttaccaggtgcccccgcagccgaacggcatgaccaacaacctccagggcagcaacacctatgccctggagaacactatgatcttcaacagccagccggcgaacccgggcaccaccgccacgtacctcgagggcaacatgctcatcaccagcgagagcgagacgcagccggtgaaccgcgtggcgtacaacgtcggcgggcagatggccaccaacaaccagagctccaccactgcccccgcgaccggcacgtacaacctccaggaaatcgtgcccggcagcgtgtggatggagagggacgtgtacctccaaggacccatctgggccaagatcccagagacgggggcgcactttcacccctctccggccatgggcggattcggactcaaacacccaccgcccatgatgctcatcaagaacacgcctgtgcccggaaatatcaccagcttctcggacgtgcccgtcagcagcttcatcacccagtacagcaccgggcaggtcaccgtggagatggagtgggagctcaagaaggaaaactccaagaggtggaacccagagatccagtacacaaacaactacaacgacccccagtttgtggactttgccccggacagcaccggggaatacagaaccaccagacctatcggaacccgataccttacccgacccctttaa

SEQ ID NO: 5153 - DNA, 2208 bp, Adeno-associated virus 6
atggctgccgatggttatcttccagattggctcgaggacaacctctctgagggcattcgcgagtggtgggacttgaaacctggagccccgaaacccaaagccaaccagcaaaagcaggacgacggccggggtctggtgcttcctggctacaagtacctcggacccttcaacggactcgacaagggggagcccgtcaacgcggcggatgcagcggccctcgagcacgacaaggcctacgaccagcagctcaaagcgggtgacaatccgtacctgcggtataaccacgccgacgccgagtttcaggagcgtctgcaagaagatacgtcttttgggggcaacctcgggcgagcagtcttccaggccaagaagagggttctcgaaccttttggtctggttgaggaaggtgctaagacggctcctggaaagaaacgtccggtagagcagtcgccacaagagccagactcctcctcgggcattggcaagacaggccagcagcccgctaaaaagagactcaattttggtcagactggcgactcagagtcagtccccgacccacaacctctcggagaacctccagcaacccccgctgctgtgggacctactacaatggcttcaggcggtggcgcaccaatggcagacaataacgaaggcgccgacggagtgggtaatgcctcaggaaattggcattgcgattccacatggctgggcgacagagtcatcaccaccagcacccgaacatgggccttgcccacctataacaaccacctctacaagcaaatctccagtgcttcaacgggggccagcaacgacaaccactacttcggctacagcaccccctgggggtattttgatttcaacagattccactgccatttctcaccacgtgactggcagcgactcatcaacaacaattggggattccggcccaagagactcaacttcaagctcttcaacatccaagtcaaggaggtcacgacgaatgatggcgtcacgaccatcgctaataaccttaccagcacggttcaagtcttctcggactcggagtaccagttgccgtacgtcctcggctctgcgcaccagggctgcctccctccgttcccggcggacgtgttcatgattccgcagtacggctacctaacgctcaacaatggcagccaggcagtgggacggtcatccttttactgcctggaatatttcccatcgcagatgctgagaacgggcaataactttaccttcagctacaccttcgaggacgtgcctttccacagcagctacgcgcacagccagagcctggaccggctgatgaatcctctcatcgaccagtacctgtattacctgaacagaactcagaatcagtccggaagtgcccaaaacaaggacttgctgtttagccgggggtctccagctggcatgtctgttcagcccaaaaactggctacctggaccctgttaccggcagcagcgcgtttctaaaacaaaaacagacaacaacaacagcaactttacctggactggtgcttcaaaatataaccttaatgggcgtgaatctataatcaaccctggcactgctatggcctcacacaaagacgacaaagacaagttctttcccatgagcggtgtcatgatttttggaaaggagagcgccggagcttcaaacactgcattggacaatgtcatgatcacagacgaagaggaaatcaaagccactaaccccgtggccaccgaaagatttgggactgtggcagtcaatctccagagcagcagcacagaccctgcgaccggagatgtgcatgttatgggagccttacctggaatggtgtggcaagacagagacgtatacctgcagggtcctatttgggccaaaattcctcacacggatggacactttcacccgtctcctctcatgggcggctttggacttaagcacccgcctcctcagatcctcatcaaaaacacgcctgttcctgcgaatcctccggcagagttttcggctacaaagtttgcttcattcatcacccagtattccacaggacaagtgagcgtggagattgaatgggagctgcagaaagaaaacagcaaacgctggaatcccgaagtgcagtatacatctaactatgcaaaatctgccaacgttgatttcactgtggacaacaatggactttatactgagcctcgccccattggcacccgttacctcacccgtcccctg

SEQ ID NO: 5154 - protein, 736 aa, Adeno-associated virus 6; identical to SEQ ID NO: 4799

SEQ ID NO: 5155 - protein, 623 aa, Adeno-associated virus 6
MPGFYEIVIKVPSDLDEHLPGISDSFVNWVAEKEWELPPDSDMDLNLIEQAPLTVAEKLQRDFLVQWRRVSKAPEALFFVQFEKGESYFHLHILVETTGVKSMVLGRFLSQIRDKLVQTIYRGIEPTLPNWFAVTKTRNGAGGGNKVVDECYIPNYLLPKTQPELQWAWTNMEEYISACLNLAERKRLVAHDLTHVSQTQEQNKENLNPNSDAPVIRSKTSARYMELVGWLVDRGITSEKQWIQEDQASYISFNAASNSRSQIKAALDNAGKIMALTKSAPDYLVGPAPPADIKTNRIYRILELNGYDPAYAGSVFLGWAQKRFGKRNTIWLFGPATTGKTNIAEAIAHAVPFYGCVNWTNENFPFNDCVDKMVIWWEEGKMTAKVVESAKAILGGSKVRVDQKCKSSAQIDPTPVIVTSNTNMCAVIDGNSTTFEHQQPLQDRMFKFELTRRLEHDFGKVTKQEVKEFFRWAQDHVTEVAHEFYVRKGGANKRPAPDDADKSEPKRACPSVADPSTSDAEGAPVDFADRYQNKCSRHAGMLQMLFPCKTCERMNQNFNICFTHGTRDCSECFPGVSESQPVVRKRTYRKLCAIHHLLGRAPEIACSACDLVNVDLDDCVSEQ

SEQ ID NO: 5156 - DNA, 4683 bp, Adeno-associated virus 6
ttggccactccctctctgcgcgctcgctcgctcactgaggccgggcgaccaaaggtcgcccgacgcccgggctttgcccgggcggcctcagtgagcgagcgagcgcgcagagagggagtggccaactccatcactaggggttcctggaggggtggagtcgtgacgtgaattacgtcatagggttagggaggtcctgtattagaggtcacgtgagtgttttgcgacattttgcgacaccatgtggtcacgctgggtatttaagcccgagtgagcacgcagggtctccattttgaagcgggaggtttgaacgcgcagcgccatgccggggttttacgagattgtgattaaggtccccagcgaccttgacgagcatctgcccggcatttctgacagctttgtgaactgggtggccgagaaggaatgggagttgccgccagattctgacatggatctgaatctgattgagcaggcacccctgaccgtggccgagaagctgcagcgcgacttcctggtccagtggcgccgcgtgagtaaggccccggaggccctcttctttgttcagttcgagaagggcgagtcctacttccacctccatattctggtggagaccacgggggtcaaatccatggtgctgggccgcttcctgagtcagattagggacaagctggtgcagaccatctaccgcgggatcgagccgaccctgcccaactggttcgcggtgaccaagacgcgtaatggcgccggaggggggaacaaggtggtggacgagtgctacatccccaactacctcctgcccaagactcagcccgagctgcagtgggcgtggactaacatggaggagtatataagcgcgtgtttaaacctggccgagcgcaaacggctcgtggcgcacgacctgacccacgtcagccagacccaggagcagaacaaggagaatctgaaccccaattctgacgcgcctgtcatccggtcaaaaacctccgcacgctacatggagctggtcgggtggctggtggaccggggcatcacctccgagaagcagtggatccaggaggaccaggcctcgtacatctccttcaacgccgcctccaactcgcggtcccagatcaaggccgctctggacaatgccggcaagatcatggcgctgaccaaatccgcgcccgactacctggtaggccccgctccgcccgccgacattaaaaccaaccgcatttaccgcatcctggagctgaacggctacgaccctgcctacgccggctccgtctttctcggctgggcccagaaaaggttcggaaaacgcaacaccatctggctgtttgggccggccaccacgggcaagaccaacatcgcggaagccatcgcccacgccgtgcccttctacggctgcgtcaactggaccaatgagaactttcccttcaacgattgcgtcgacaagatggtgatctggtgggaggagggcaagatgacggccaaggtcgtggagtccgccaaggccattctcggcggcagcaaggtgcgcgtggaccaaaagtgcaagtcgtccgcccagatcgatcccacccccgtgatcgtcacctccaacaccaacatgtgcgccgtgattgacgggaacagcaccaccttcgagcaccagcagccgttgcaggaccggatgttcaaatttgaactcacccgccgtctggagcatgactttggcaaggtgacaaagcaggaagtcaaagagttcttccgctgggcgcaggatcacgtgaccgaggtggcgcatgagttctacgtcagaaagggtggagccaacaagagacccgcccccgatgacgcggataaaagcgagcccaagcgggcctgcccctcagtcgcggatccatcgacgtcagacgcggaaggagctccggtggactttgccgacaggtaccaaaacaaatgttctcgtcacgcgggcatgcttcagatgctgtttccctgcaaaacatgcgagagaatgaatcagaatttcaacatttgcttcacgcacgggaccagagactgttcagaatgtttccccggcgtgtcagaatctcaaccggtcgtcagaaagaggacgtatcggaaactctgtgccattcatcatctgctggggcgggctcccgagattgcttgctcggcctgcgatctggtcaacgtggatctggatgactgtgtttctgagcaataaatgacttaaaccaggtatggctgccgatggttatcttccagattggctcgaggacaacctctctgagggcattcgcgagtggtgggacttgaaacctggagccccgaaacccaaagccaaccagcaaaagcaggacgacggccggggtctggtgcttcctggctacaagtacctcggacccttcaacggactcgacaagggggagcccgtcaacgcggcggatgcagcggccctcgagcacgacaaggcctacgaccagcagctcaaagcgggtgacaatccgtacctgcggtataaccacgccgacgccgagtttcaggagcgtctgcaagaagatacgtcttttgggggcaacctcgggcgagcagtcttccaggccaagaagagggttctcgaaccttttggtctggttgaggaaggtgctaagacggctcctggaaagaaacgtccggtagagcagtcgccacaagagccagactcctcctcgggcattggcaagacaggccagcagcccgctaaaaagagactcaattttggtcagactggcgactcagagtcagtccccgacccacaacctctcggagaacctccagcaacccccgctgctgtgggacctactacaatggcttcaggcggtggcgcaccaatggcagacaataacgaaggcgccgacggagtgggtaatgcctcaggaaattggcattgcgattccacatggctgggcgacagagtcatcaccaccagcacccgaacatgggccttgcccacctataacaaccacctctacaagcaaatctccagtgcttcaacgggggccagcaacgacaaccactacttcggctacagcaccccctgggggtattttgatttcaacagattccactgccatttctcaccacgtgactggcagcgactcatcaacaacaattggggattccggcccaagagactcaacttcaagctcttcaacatccaagtcaaggaggtcacgacgaatgatggcgtcacgaccatcgctaataaccttaccagcacggttcaagtcttctcggactcggagtaccagttgccgtacgtcctcggctctgcgcaccagggctgcctccctccgttcccggcggacgtgttcatgattccgcagtacggctacctaacgctcaacaatggcagccaggcagtgggacggtcatccttttactgcctggaatatttcccatcgcagatgctgagaacgggcaataactttaccttcagctacaccttcgaggacgtgcctttccacagcagctacgcgcacagccagagcctggaccggctgatgaatcctctcatcgaccagtacctgtattacctgaacagaactcagaatcagtccggaagtgcccaaaacaaggacttgctgtttagccgggggtctccagctggcatgtctgttcagcccaaaaactggctacctggaccctgttaccggcagcagcgcgtttctaaaacaaaaacagacaacaacaacagcaactttacctggactggtgcttcaaaatataaccttaatgggcgtgaatctataatcaaccctggcactgctatggcctcacacaaagacgacaaagacaagttctttcccatgagcggtgtcatgatttttggaaaggagagcgccggagcttcaaacactgcattggacaatgtcatgatcacagacgaagaggaaatcaaagccactaaccccgtggccaccgaaagatttgggactgtggcagtcaatctccagagcagcagcacagaccctgcgaccggagatgtgcatgttatgggagccttacctggaatggtgtggcaagacagagacgtatacctgcagggtcctatttgggccaaaattcctcacacggatggacactttcacccgtctcctctcatgggcggctttggacttaagcacccgcctcctcagatcctcatcaaaaacacgcctgttcctgcgaatcctccggcagagttttcggctacaaagtttgcttcattcatcacccagtattccacaggacaagtgagcgtggagattgaatgggagctgcagaaagaaaacagcaaacgctggaatcccgaagtgcagtatacatctaactatgcaaaatctgccaacgttgatttcactgtggacaacaatggactttatactgagcctcgccccattggcacccgttacctcacccgtcccctgtaattgtgtgttaatcaataaaccggttaattcgtgtcagttgaactttggtctcatgtcgttattatcttatctggtcaccatagcaaccggttacacattaactgcttagttgcgcttcgcgaatacccctagtgatggagttgcccactccctctatgcgcgctcgctcgctcggtggggccggcagagcagagctctgccgtctgcggacctttggtccgcaggccccaccgagcgagcgagcgcgcatagagggagtgggcaa

SEQ ID NO: 5157 - DNA, 2211 bp, Adeno-associated virus 6
atggctgccgatggttatcttccagattggctcgaggacaacctctctgagggcattcgcgagtggtgggacttgaaacctggagccccgaaacccaaagccaaccagcaaaagcaggacgacggccggggtctggtgcttcctggctacaagtacctcggacccttcaacggactcgacaagggggagcccgtcaacgcggcggatgcagcggccctcgagcacgacaaggcctacgaccagcagctcaaagcgggtgacaatccgtacctgcggtataaccacgccgacgccgagtttcaggagcgtctgcaagaagatacgtcttttgggggcaacctcgggcgagcagtcttccaggccaagaagagggttctcgaaccttttggtctggttgaggaaggtgctaagacggctcctggaaagaaacgtccggtagagcagtcgccacaagagccagactcctcctcgggcattggcaagacaggccagcagcccgctaaaaagagactcaattttggtcagactggcgactcagagtcagtccccgacccacaacctctcggagaacctccagcaacccccgctgctgtgggacctactacaatggcttcaggcggtggcgcaccaatggcagacaataacgaaggcgccgacggagtgggtaatgcctcaggaaattggcattgcgattccacatggctgggcgacagagtcatcaccaccagcacccgaacatgggccttgcccacctataacaaccacctctacaagcaaatctccagtgcttcaacgggggccagcaacgacaaccactacttcggctacagcaccccctgggggtattttgatttcaacagattccactgccatttctcaccacgtgactggcagcgactcatcaacaacaattggggattccggcccaagagactcaacttcaagctcttcaacatccaagtcaaggaggtcacgacgaatgatggcgtcacgaccatcgctaataaccttaccagcacggttcaagtcttctcggactcggagtaccagttgccgtacgtcctcggctctgcgcaccagggctgcctccctccgttcccggcggacgtgttcatgattccgcagtacggctacctaacgctcaacaatggcagccaggcagtgggacggtcatccttttactgcctggaatatttcccatcgcagatgctgagaacgggcaataactttaccttcagctacaccttcgaggacgtgcctttccacagcagctacgcgcacagccagagcctggaccggctgatgaatcctctcatcgaccagtacctgtattacctgaacagaactcagaatcagtccggaagtgcccaaaacaaggacttgctgtttagccgggggtctccagctggcatgtctgttcagcccaaaaactggctacctggaccctgttaccggcagcagcgcgtttctaaaacaaaaacagacaacaacaacagcaactttacctggactggtgcttcaaaatataaccttaatgggcgtgaatctataatcaaccctggcactgctatggcctcacacaaagacgacaaagacaagttctttcccatgagcggtgtcatgatttttggaaaggagagcgccggagcttcaaacactgcattggacaatgtcatgatcacagacgaagaggaaatcaaagccactaaccccgtggccaccgaaagatttgggactgtggcagtcaatctccagagcagcagcacagaccctgcgaccggagatgtgcatgttatgggagccttacctggaatggtgtggcaagacagagacgtatacctgcagggtcctatttgggccaaaattcctcacacggatggacactttcacccgtctcctctcatgggcggctttggacttaagcacccgcctcctcagatcctcatcaaaaacacgcctgttcctgcgaatcctccggcagagttttcggctacaaagtttgcttcattcatcacccagtattccacaggacaagtgagcgtggagattgaatgggagctgcagaaagaaaacagcaaacgctggaatcccgaagtgcagtatacatctaactatgcaaaatctgccaacgttgatttcactgtggacaacaatggactttatactgagcctcgccccattggcacccgttacctcacccgtcccctgtaa

SEQ ID NO: 5158 - DNA, 2214 bp, Adeno-associated virus 7
atggctgccgatggttatcttccagattggctcgaggacaacctctctgagggcattcgcgagtggtgggacctgaaacctggagccccgaaacccaaagccaaccagcaaaagcaggacaacggccggggtctggtgcttcctggctacaagtacctcggacccttcaacggactcgacaagggggagcccgtcaacgcggcggacgcagcggccctcgagcacgacaaggcctacgaccagcagctcaaagcgggtgacaatccgtacctgcggtataaccacgccgacgccgagtttcaggagcgtctgcaagaagatacgtcatttgggggcaacctcgggcgagcagtcttccaggccaagaagcgggttctcgaacctctcggtctggttgaggaaggcgctaagacggctcctgcaaagaagagaccggtagagccgtcacctcagcgttcccccgactcctccacgggcatcggcaagaaaggccagcagcccgccagaaagagactcaatttcggtcagactggcgactcagagtcagtccccgaccctcaacctctcggagaacctccagcagcgccctctagtgtgggatctggtacagtggctgcaggcggtggcgcaccaatggcagacaataacgaaggtgccgacggagtgggtaatgcctcaggaaattggcattgcgattccacatggctgggcgacagagtcattaccaccagcacccgaacctgggccctgcccacctacaacaaccacctctacaagcaaatctccagtgaaactgcaggtagtaccaacgacaacacctacttcggctacagcaccccctgggggtattttgactttaacagattccactgccacttctcaccacgtgactggcagcgactcatcaacaacaactggggattccggcccaagaagctgcggttcaagctcttcaacatccaggtcaaggaggtcacgacgaatgacggcgttacgaccatcgctaataaccttaccagcacgattcaggtattctcggactcggaataccagctgccgtacgtcctcggctctgcgcaccagggctgcctgcctccgttcccggcggacgtcttcatgattcctcagtacggctacctgactctcaacaatggcagtcagtctgtgggacgttcctccttctactgcctggagtacttcccctctcagatgctgagaacgggcaacaactttgagttcagctacagcttcgaggacgtgcctttccacagcagctacgcacacagccagagcctggaccggctgatgaatcccctcatcgaccagtacttgtactacctggccagaacacagagtaacccaggaggcacagctggcaatcgggaactgcagttttaccagggcgggccttcaactatggccgaacaagccaagaattggttacctggaccttgcttccggcaacaaagagtctccaaaacgctggatcaaaacaacaacagcaactttgcttggactggtgccaccaaatatcacctgaacggcagaaactcgttggttaatcccggcgtcgccatggcaactcacaaggacgacgaggaccgctttttcccatccagcggagtcctgatttttggaaaaactggagcaactaacaaaactacattggaaaatgtgttaatgacaaatgaagaagaaattcgtcctactaatcctgtagccacggaagaatacgggatagtcagcagcaacttacaagcggctaatactgcagcccagacacaagttgtcaacaaccagggagccttacctggcatggtctggcagaaccgggacgtgtacctgcagggtcccatctgggccaagattcctcacacggatggcaactttcacccgtctcctttgatgggcggctttggacttaaacatccgcctcctcagatcctgatcaagaacactcccgttcccgctaatcctccggaggtgtttactcctgccaagtttgcttcgttcatcacacagtacagcaccggacaagtcagcgtggaaatcgagtgggagctgcagaaggaaaacagcaagcgctggaacccggagattcagtacacctccaactttgaaaagcagactggtgtggactttgccgttgacagccagggtgtttactctgagcctcgccctattggcactcgttacctcacccgtaatctgtaa

SEQ ID NO: 5159 - protein, 738 aa, Adeno-associated virus 7
MAADGYLPDWLEDNLSEGIREWWALKPGAPKPKANQQKQDDGRGLVLPGYKYLGPFNGLDKGEPVNAADAAALEHDKAYDQQLQAGDNPYLRYNHADAEFQERLQEDTSFGGNLGRAVFQAKKRVLEPLGLVEEGAKTAPGKKRPVEPSPQRSPDSSTGIGKKGQQPARKRLNFGQTGDSESVPDPQPLGEPPAAPSGVGPNTMAAGGGAPMADNNEGADGVGSSSGNWHCDSTWLGDRVITTSTRTWALPTYNNHLYKQISNGTSGGATNDNTYFGYSTPWGYFDFNRFHCHFSPRDWQRLINNNWGFRPKRLSFKLFNIQVKEVTQNEGTKTIANNLTSTIQVFTDSEYQLPYVLGSAHQGCLPPFPADVFMIPQYGYLTLNNGSQAVGRSSFYCLEYFPSQMLRTGNNFQFTYTFEDVPFHSSYAHSQSLDRLMNPLIDQYLYYLSRTQTTGGTANTQTLGFSQGGPNTMANQAKNWLPGPCYRQQRVSTTTGQNNNSNFAWTAGTKYHLNGRNSLANPGIAMATHKDDEERFFPSNGILIFGKQNAARDNADYSDVMLTSEEEIKTTNPVATEEYGIVADNLQQQNTAPQIGTVNSQGALPGMVWQNRDVYLQGPIWAKIPHTDGNFHPSPLMGGFGLKHPPPQILIKNTPVPADPPTTFNQSKLNSFITQYSTGQVSVEIEWELQKENSKRWNPEIQYTSNYYKSTSVDFAVNTEGVYSEPRPIGTRYLTRNL

SEQ ID NO: 5160 - protein, 737 aa, Adeno-associated virus 7
MAADGYLPDWLEDNLSEGIREWWDLKPGAPKPKANQQKQDNGRGLVLPGYKYLGPFNGLDKGEPVNAADAAALEHDKAYDQQLKAGDNPYLRYNHADAEFQERLQEDTSFGGNLGRAVFQAKKRVLEPLGLVEEGAKTAPAKKRPVEPSPQRSPDSSTGIGKKGQQPARKRLNFGQTGDSESVPDPQPLGEPPAAPSSVGSGTVAAGGGAPMADNNEGADGVGNASGNWHCDSTWLGDRVITTSTRTWALPTYNNHLYKQISSETAGSTNDNTYFGYSTPWGYFDFNRFHCHFSPRDWQRLINNNWGFRPKKLRFKLFNIQVKEVTTNDGVTTIANNLTSTIQVFSDSEYQLPYVLGSAHQGCLPPFPADVFMIPQYGYLTLNNGSQSVGRSSFYCLEYFPSQMLRTGNNFEFSYSFEDVPFHSSYAHSQSLDRLMNPLIDQYLYYLARTQSNPGGTAGNRELQFYQGGPSTMAEQAKNWLPGPCFRQQRVSKTLDQNNNSNFAWTGATKYHLNGRNSLVNPGVAMATHKDDEDRFFPSSGVLIFGKTGATNKTTLENVLMTNEEEIRPTNPVATEEYGIVSSNLQAANTAAQTQVVNNQGALPGMVWQNRDVYLQGPIWAKIPHTDGNFHPSPLMGGFGLKHPPPQILIKNTPVPANPPEVFTPAKFASFITQYSTGQVSVEIEWELQKENSKRWNPEIQYTSNFEKQTGVDFAVDSQGVYSEPRPIGTRYLTRNL

SEQ ID NO: 5161 - protein, 623 aa, Adeno-associated virus 7
MPGFYEIVIKVPSDLDEHLPGISDSFVNWVAEKEWELPPDSDMDLNLIEQAPLTVAEKLQRDFLVQWRRVSKAPEALFFVQFEKGESYFHLHVLVETTGVKSMVLGRFLSQIREKLVQTIYRGVEPTLPNWFAVTKTRNGAGGGNKVVDECYIPNYLLPKTQPELQWAWTNMEEYISACLNLAERKRLVAQHLTHVSQTQEQNKENLNPNSDAPVIRSKTSARYMELVGWLVDRGITSEKQWIQEDQASYISFNAASNSRSQIKAALDNAGKIMALTKSAPDYLVGPSLPADIKTNRIYRILELNGYDPAYAGSVFLGWAQKKFGKRNTIWLFGPATTGKTNIAEAIAHAVPFYGCVNWTNENFPFNDCVDKMVIWWEEGKMTAKVVESAKAILGGSKVRVDQKCKSSAQIDPTPVIVTSNTNMCAVIDGNSTTFEHQQPLQDRMFKFELTRRLEHDFGKVTKQEVKEFFRWASDHVTEVAHEFYVRKGGASKRPAPDDADISEPKRACPSVADPSTSDAEGAPVDFADRYQNKCSRHAGMIQMLFPCKTCERMNQNFNICFTHGVRDCLECFPGVSESQPVVRKKTYRKLCAIHHLLGRAPEIACSACDLVNVDLDDCVSEQ

SEQ ID NO: 5162 - DNA, 4721 bp, Adeno-associated virus 7
ttggccactccctctatgcgcgctcgctcgctcggtggggcctgcggaccaaaggtccgcagacggcagagctctgctctgccggccccaccgagcgagcgagcgcgcatagagggagtggccaactccatcactaggggtaccgcgaagcgcctcccacgctgccgcgtcagcgctgacgtaaatcacgtcataggggagtggtcctgtattagctgtcacgtgagtgcttttgcgacattttgcgacaccacgtggccatttgaggtatatatggccgagtgagcgagcaggatctccattttgaccgcgaaatttgaacgagcagcagccatgccgggtttctacgagatcgtgatcaaggtgccgagcgacctggacgagcacctgccgggcatttctgactcgtttgtgaactgggtggccgagaaggaatgggagctgcccccggattctgacatggatctgaatctgatcgagcaggcacccctgaccgtggccgagaagctgcagcgcgacttcctggtccaatggcgccgcgtgagtaaggccccggaggccctgttctttgttcagttcgagaagggcgagagctacttccaccttcacgttctggtggagaccacgggggtcaagtccatggtgctaggccgcttcctgagtcagattcgggagaagctggtccagaccatctaccgcggggtcgagcccacgctgcccaactggttcgcggtgaccaagacgcgtaatggcgccggcggggggaacaaggtggtggacgagtgctacatccccaactacctcctgcccaagacccagcccgagctgcagtgggcgtggactaacatggaggagtatataagcgcgtgtttgaacctggccgaacgcaaacggctcgtggcgcagcacctgacccacgtcagccagacgcaggagcagaacaaggagaatctgaaccccaattctgacgcgcccgtgatcaggtcaaaaacctccgcgcgctacatggagctggtcgggtggctggtggaccggggcatcacctccgagaagcagtggatccaggaggaccaggcctcgtacatctccttcaacgccgcctccaactcgcggtcccagatcaaggccgcgctggacaatgccggcaagatcatggcgctgaccaaatccgcgcccgactacctggtggggccctcgctgcccgcggacattaaaaccaaccgcatctaccgcatcctggagctgaacgggtacgatcctgcctacgccggctccgtctttctcggctgggcccagaaaaagttcgggaagcgcaacaccatctggctgtttgggcccgccaccaccggcaagaccaacattgcggaagccatcgcccacgccgtgcccttctacggctgcgtcaactggaccaatgagaactttcccttcaacgattgcgtcgacaagatggtgatctggtgggaggagggcaagatgacggccaaggtcgtggagtccgccaaggccattctcggcggcagcaaggtgcgcgtggaccaaaagtgcaagtcgtccgcccagatcgaccccacccccgtgatcgtcacctccaacaccaacatgtgcgccgtgattgacgggaacagcaccaccttcgagcaccagcagccgttgcaggaccggatgttcaaatttgaactcacccgccgtctggagcacgactttggcaaggtgacgaagcaggaagtcaaagagttcttccgctgggccagtgatcacgtgaccgaggtggcgcatgagttctacgtcagaaagggcggagccagcaaaagacccgcccccgatgacgcggatataagcgagcccaagcgggcctgcccctcagtcgcggatccatcgacgtcagacgcggaaggagctccggtggactttgccgacaggtaccaaaacaaatgttctcgtcacgcgggcatgattcagatgctgtttccctgcaaaacgtgcgagagaatgaatcagaatttcaacatttgcttcacacacggggtcagagactgtttagagtgtttccccggcgtgtcagaatctcaaccggtcgtcagaaaaaagacgtatcggaaactctgcgcgattcatcatctgctggggcgggcgcccgagattgcttgctcggcctgcgacctggtcaacgtggacctggacgactgcgtttctgagcaataaatgacttaaaccaggtatggctgccgatggttatcttccagattggctcgaggacaacctctctgagggcattcgcgagtggtgggacctgaaacctggagccccgaaacccaaagccaaccagcaaaagcaggacaacggccggggtctggtgcttcctggctacaagtacctcggacccttcaacggactcgacaagggggagcccgtcaacgcggcggacgcagcggccctcgagcacgacaaggcctacgaccagcagctcaaagcgggtgacaatccgtacctgcggtataaccacgccgacgccgagtttcaggagcgtctgcaagaagatacgtcatttgggggcaacctcgggcgagcagtcttccaggccaagaagcgggttctcgaacctctcggtctggttgaggaaggcgctaagacggctcctgcaaagaagagaccggtagagccgtcacctcagcgttcccccgactcctccacgggcatcggcaagaaaggccagcagcccgccagaaagagactcaatttcggtcagactggcgactcagagtcagtccccgaccctcaacctctcggagaacctccagcagcgccctctagtgtgggatctggtacagtggctgcaggcggtggcgcaccaatggcagacaataacgaaggtgccgacggagtgggtaatgcctcaggaaattggcattgcgattccacatggctgggcgacagagtcattaccaccagcacccgaacctgggccctgcccacctacaacaaccacctctacaagcaaatctccagtgaaactgcaggtagtaccaacgacaacacctacttcggctacagcaccccctgggggtattttgactttaacagattccactgccacttctcaccacgtgactggcagcgactcatcaacaacaactggggattccggcccaagaagctgcggttcaagctcttcaacatccaggtcaaggaggtcacgacgaatgacggcgttacgaccatcgctaataaccttaccagcacgattcaggtattctcggactcggaataccagctgccgtacgtcctcggctctgcgcaccagggctgcctgcctccgttcccggcggacgtcttcatgattcctcagtacggctacctgactctcaacaatggcagtcagtctgtgggacgttcctccttctactgcctggagtacttcccctctcagatgctgagaacgggcaacaactttgagttcagctacagcttcgaggacgtgcctttccacagcagctacgcacacagccagagcctggaccggctgatgaatcccctcatcgaccagtacttgtactacctggccagaacacagagtaacccaggaggcacagctggcaatcgggaactgcagttttaccagggcgggccttcaactatggccgaacaagccaagaattggttacctggaccttgcttccggcaacaaagagtctccaaaacgctggatcaaaacaacaacagcaactttgcttggactggtgccaccaaatatcacctgaacggcagaaactcgttggttaatcccggcgtcgccatggcaactcacaaggacgacgaggaccgctttttcccatccagcggagtcctgatttttggaaaaactggagcaactaacaaaactacattggaaaatgtgttaatgacaaatgaagaagaaattcgtcctactaatcctgtagccacggaagaatacgggatagtcagcagcaacttacaagcggctaatactgcagcccagacacaagttgtcaacaaccagggagccttacctggcatggtctggcagaaccgggacgtgtacctgcagggtcccatctgggccaagattcctcacacggatggcaactttcacccgtctcctttgatgggcggctttggacttaaacatccgcctcctcagatcctgatcaagaacactcccgttcccgctaatcctccggaggtgtttactcctgccaagtttgcttcgttcatcacacagtacagcaccggacaagtcagcgtggaaatcgagtgggagctgcagaaggaaaacagcaagcgctggaacccggagattcagtacacctccaactttgaaaagcagactggtgtggactttgccgttgacagccagggtgtttactctgagcctcgccctattggcactcgttacctcacccgtaatctgtaattgcatgttaatcaataaaccggttgattcgtttcagttgaactttggtctcctgtgcttcttatcttatcggtttccatagcaactggttacacattaactgcttgggtgcgcttcacgataagaacactgacgtcaccgcggtacccctagtgatggagttggccactccctctatgcgcgctcgctcgctcggtggggcctgcggaccaaaggtccgcagacggcagagctctgctctgccggccccaccgagcgagcgagcgcgcatagagggagtggccaa

SEQ ID NO: 5163 - DNA, 2214 bp, Adeno-associated virus 7; identical to SEQ ID NO: 5158

SEQ ID NO: 5164 - protein, 737 aa, Adeno-associated virus 7; identical to SEQ ID NO: 5160

SEQ ID NO: 5165 - DNA, 2217 bp, Adeno-associated virus 8
atggctgccgatggttatcttccagattggctcgaggacaacctctctgagggcattcgcgagtggtgggcgctgaaacctggagccccgaagcccaaagccaaccagcaaaagcaggacgacggccggggtctggtgcttcctggctacaagtacctcggacccttcaacggactcgacaagggggagcccgtcaacgcggcggacgcagcggccctcgagcacgacaaggcctacgaccagcagctgcaggcgggtgacaatccgtacctgcggtataaccacgccgacgccgagtttcaggagcgtctgcaagaagatacgtcttttgggggcaacctcgggcgagcagtcttccaggccaagaagcgggttctcgaacctctcggtctggttgaggaaggcgctaagacggctcctggaaagaagagaccggtagagccatcaccccagcgttctccagactcctctacgggcatcggcaagaaaggccaacagcccgccagaaaaagactcaattttggtcagactggcgactcagagtcagttccagaccctcaacctctcggagaacctccagcagcgccctctggtgtgggacctaatacaatggctgcaggcggtggcgcaccaatggcagacaataacgaaggcgccgacggagtgggtagttcctcgggaaattggcattgcgattccacatggctgggcgacagagtcatcaccaccagcacccgaacctgggccctgcccacctacaacaaccacctctacaagcaaatctccaacgggacatcgggaggagccaccaacgacaacacctacttcggctacagcaccccctgggggtattttgactttaacagattccactgccacttttcaccacgtgactggcagcgactcatcaacaacaactggggattccggcccaagagactcagcttcaagctcttcaacatccaggtcaaggaggtcacgcagaatgaaggcaccaagaccatcgccaataacctcaccagcaccatccaggtgtttacggactcggagtaccagctgccgtacgttctcggctctgcccaccagggctgcctgcctccgttcccggcggacgtgttcatgattccccagtacggctacctaacactcaacaacggtagtcaggccgtgggacgctcctccttctactgcctggaatactttccttcgcagatgctgagaaccggcaacaacttccagtttacttacaccttcgaggacgtgcctttccacagcagctacgcccacagccagagcttggaccggctgatgaatcctctgattgaccagtacctgtactacttgtctcggactcaaacaacaggaggcacggcaaatacgcagactctgggcttcagccaaggtgggcctaatacaatggccaatcaggcaaagaactggctgccaggaccctgttaccgccaacaacgcgtctcaacgacaaccgggcaaaacaacaatagcaactttgcctggactgctgggaccaaataccatctgaatggaagaaattcattggctaatcctggcatcgctatggcaacacacaaagacgacgaggagcgtttttttcccagtaacgggatcctgatttttggcaaacaaaatgctgccagagacaatgcggattacagcgatgtcatgctcaccagcgaggaagaaatcaaaaccactaaccctgtggctacagaggaatacggtatcgtggcagataacttgcagcagcaaaacacggctcctcaaattggaactgtcaacagccagggggccttacccggtatggtctggcagaaccgggacgtgtacctgcagggtcccatctgggccaagattcctcacacggacggcaacttccacccgtctccgctgatgggcggctttggcctgaaacatcctccgcctcagatcctgatcaagaacacgcctgtacctgcggatcctccgaccaccttcaaccagtcaaagctgaactctttcatcacgcaatacagcaccggacaggtcagcgtggaaattgaatgggagctgcagaaggaaaacagcaagcgctggaaccccgagatccagtacacctccaactactacaaatctacaagtgtggactttgctgttaatacagaaggcgtgtactctgaaccccgccccattggcacccgttacctcacccgtaatctgtaa

SEQ ID NO: 5166 - DNA, 2213 bp, Adeno-associated virus 8
atggctgccgatggttatcttccagattggctcgaggacaacctctctgagggcattcgcgagtggtgggcgctgaaacctggagccccgaagcccaaagccaaccagcaaaagcaggacgacggccggggtctggtgcttcctggctacaagtacctcggacccttcaacggactcgacaagggggagcccgtcaacgcggcggacgcagcggccctcgagcacgacaaggcctacgaccagcagctgcaggcgggtgacaatccgtacctgcggtataaccacgccgacgccgagtttcaggagcgtctgcaagaagatacgtcttttgggggcaacctcgggcgagcagtcttccaggccaagaagcgggttctcgaacctctcggtctggttgaggaaggcgctaagacggctcctggaaagaagagaccggtagagccatcaccccagcgttctccagactcctctacgggcatcggcaagaaaggccaacagcccgccagaaaaagactcaattttggtcagactggcgactcagagtcagttccagaccctcaacctctcggagaacctccagcagcgccctctggtgtgggacctaatacaatggctgcaggcggtggcgcaccaatggcagacaataacgaaggcgccgacggagtgggtagttcctcgggaaattggcattgcgattccacatggctgggcgacagagtcatcaccaccagcacccgaacctgggccctgcccacctacaacaaccacctctacaagcaaatctccaacgggacatcgggaggagccaccaacgacaacacctacttcggctacagcaccccctgggggtattttgactttaacagattccactgccacttttcaccacgtgactggcagcgactcatcaacaacaactggggattccggcccaagagactcagcttcaagctcttcaacatccaggtcaaggaggtcacgcagaatgaaggcaccaagaccatcgccaataacctcaccagcaccatccaggtgtttacggactcggagtaccagctgccgtacgttctcggctctgcccaccagggctgcctgcctccgttcccggcggacgtgttcatgattccccagtacggctacctaacactcaacaacggtagtcaggccgtgggacgctcctccttctactgcctggaatactttccttcgcagatgctgagaaccggcaacaacttccagtttacttacaccttcgaggacgtgcctttccacagcagctacgcccacagccagagcttggaccggctgatgaatcctctgattgaccagtacctgtactacttgtctcggactcaaacaacaggaggcacggcaaatacgcagactctgggcttcagccaaggtgggcctaatacaatggccaatcaggcaaagaactggctgccaggaccctgttaccgccaacaacgcgtctcaacgacaaccgggcaaaacaacaatagcaactttgcctggactgctgggaccaaataccatctgaatggaagaaattcattggctaatcctggcatcgctatggcaacacacaaagacgacgaggagcgtttttttcccagtaacgggatcctgatttttggcaaacaaaatgctgccagagacaatgcggattacagcgatgtcatgctcaccagcgaggaagaaatcaaaaccactaaccctgtggctacagaggaatacggtatcgtggcagataacttgcagcagcaaaacacggctcctcaaattggaactgtcaacagccagggggccttacccggtatggtctggcagaaccgggacgtgtacctgcagggtcccatctgggccaagattcctcacacggacggcaacttccacccgtctccgctgatgggcggctttggcctgaaacatcctccgcctcagatcctgatcaagaacacgcctgtacctgcggatcctccgaccaccttcaaccagtcaaagctgaactctttcatcacgcaatacagcaccggacaggtcagcgtggaaattgaatgggagctgcagaaggaaaacagcaagcgctggaaccccgagatccagtacacctccaactactacaaatctacaagtgtggactttgctgtaatacagaaggcgtgtactctgaaccccgccccattggcacccgttacctcacccgtaatctg

SEQ ID NO: 5167 - DNA, 4393 bp, Adeno-associated virus 8
cagagagggagtggccaactccatcactaggggtagcgcgaagcgcctcccacgctgccgcgtcagcgctgacgtaaattacgtcataggggagtggtcctgtattagctgtcacgtgagtgcttttgcggcattttgcgacaccacgtggccatttgaggtatatatggccgagtgagcgagcaggatctccattttgaccgcgaaatttgaacgagcagcagccatgccgggcttctacgagatcgtgatcaaggtgccgagcgacctggacgagcacctgccgggcatttctgactcgtttgtgaactgggtggccgagaaggaatgggagctgcccccggattctgacatggatcggaatctgatcgagcaggcacccctgaccgtggccgagaagctgcagcgcgacttcctggtccaatggcgccgcgtgagtaaggccccggaggccctcttctttgttcagttcgagaagggcgagagctactttcacctgcacgttctggtcgagaccacgggggtcaagtccatggtgctaggccgcttcctgagtcagattcgggaaaagcttggtccagaccatctacccgcggggtcgagccccaccttgcccaactggttcgcggtgaccaaagacgcggtaatggcgccggcgggggggaacaaggtggtggacgagtgctacatccccaactacctcctgcccaagactcagcccgagctgcagtgggcgtggactaacatggaggagtatataagcgcgtgcttgaacctggccgagcgcaaacggctcgtggcgcagcacctgacccacgtcagccagacgcaggagcagaacaaggagaatctgaaccccaattctgacgcgcccgtgatcaggtcaaaaacctccgcgcgctatatggagctggtcgggtggctggtggaccggggcatcacctccgagaagcagtggatccaggaggaccaggcctcgtacatctccttcaacgccgcctccaactcgcggtcccagatcaaggccgcgctggacaatgccggcaagatcatggcgctgaccaaatccgcgcccgactacctggtggggccctcgctgcccgcggacattacccagaaccgcatctaccgcatcctcgctctcaacggctacgaccctgcctacgccggctccgtctttctcggctgggctcagaaaaagttcgggaaacgcaacaccatctggctgtttggacccgccaccaccggcaagaccaacattgcggaagccatcgcccacgccgtgcccttctacggctgcgtcaactggaccaatgagaactttcccttcaatgattgcgtcgacaagatggtgatctggtgggaggagggcaagatgacggccaaggtcgtggagtccgccaaggccattctcggcggcagcaaggtgcgcgtggaccaaaagtgcaagtcgtccgcccagatcgaccccacccccgtgatcgtcacctccaacaccaacatgtgcgccgtgattgacgggaacagcaccaccttcgagcaccagcagcctctccaggaccggatgtttaagttcgaactcacccgccgtctggagcacgactttggcaaggtgacaaagcaggaagtcaaagagttcttccgctgggccagtgatcacgtgaccgaggtggcgcatgagttttacgtcagaaagggcggagccagcaaaagacccgcccccgatgacgcggataaaagcgagcccaagcgggcctgcccctcagtcgcggatccatcgacgtcagacgcggaaggagctccggtggactttgccgacaggtaccaaaacaaatgttctcgtcacgcgggcatgcttcagatgctgtttccctgcaaaacgtgcgagagaatgaatcagaatttcaacatttgcttcacacacggggtcagagactgctcagagtgtttccccggcgtgtcagaatctcaaccggtcgtcagaaagaggacgtatcggaaactctgtgcgattcatcatctgctggggcgggctcccgagattgcttgctcggcctgcgatctggtcaacgtggacctggatgactgtgtttctgagcaataaatgacttaaaccaggtatggctgccgatggttatcttccagattggctcgaggacaacctctctgagggcattcgcgagtggtgggcgctgaaacctggagccccgaagcccaaagccaaccagcaaaagcaggacgacggccggggtctggtgcttcctggctacaagtacctcggacccttcaacggactcgacaagggggagcccgtcaacgcggcggacgcagcggccctcgagcacgacaaggcctacgaccagcagctgcaggcgggtgacaatccgtacctgcggtataaccacgccgacgccgagtttcaggagcgtctgcaagaagatacgtcttttgggggcaacctcgggcgagcagtcttccaggccaagaagcgggttctcgaacctctcggtctggttgaggaaggcgctaagacggctcctggaaagaagagaccggtagagccatcaccccagcgttctccagactcctctacgggcatcggcaagaaaggccaacagcccgccagaaaaagactcaattttggtcagactggcgactcagagtcagttccagaccctcaacctctcggagaacctccagcagcgccctctggtgtgggacctaatacaatggctgcaggcggtggcgcaccaatggcagacaataacgaaggcgccgacggagtgggtagttcctcgggaaattggcattgcgattccacatggctgggcgacagagtcatcaccaccagcacccgaacctgggccctgcccacctacaacaaccacctctacaagcaaatctccaacgggacatcgggaggagccaccaacgacaacacctacttcggctacagcaccccctgggggtattttgactttaacagattccactgccacttttcaccacgtgactggcagcgactcatcaacaacaactggggattccggcccaagagactcagcttcaagctcttcaacatccaggtcaaggaggtcacgcagaatgaaggcaccaagaccatcgccaataacctcaccagcaccatccaggtgtttacggactcggagtaccagctgccgtacgttctcggctctgcccaccagggctgcctgcctccgttcccggcggacgtgttcatgattccccagtacggctacctaacactcaacaacggtagtcaggccgtgggacgctcctccttctactgcctggaatactttccttcgcagatgctgagaaccggcaacaacttccagtttacttacaccttcgaggacgtgcctttccacagcagctacgcccacagccagagcttggaccggctgatgaatcctctgattgaccagtacctgtactacttgtctcggactcaaacaacaggaggcacggcaaatacgcagactctgggcttcagccaaggtgggcctaatacaatggccaatcaggcaaagaactggctgccaggaccctgttaccgccaacaacgcgtctcaacgacaaccgggcaaaacaacaatagcaactttgcctggactgctgggaccaaataccatctgaatggaagaaattcattggctaatcctggcatcgctatggcaacacacaaagacgacgaggagcgtttttttcccagtaacgggatcctgatttttggcaaacaaaatgctgccagagacaatgcggattacagcgatgtcatgctcaccagcgaggaagaaatcaaaaccactaaccctgtggctacagaggaatacggtatcgtggcagataacttgcagcagcaaaacacggctcctcaaattggaactgtcaacagccagggggccttacccggtatggtctggcagaaccgggacgtgtacctgcagggtcccatctgggccaagattcctcacacggacggcaacttccacccgtctccgctgatgggcggctttggcctgaaacatcctccgcctcagatcctgatcaagaacacgcctgtacctgcggatcctccgaccaccttcaaccagtcaaagctgaactctttcatcacgcaatacagcaccggacaggtcagcgtggaaattgaatgggagctgcagaaggaaaacagcaagcgctggaaccccgagatccagtacacctccaactactacaaatctacaagtgtggactttgctgttaatacagaaggcgtgtactctgaaccccgccccattggcacccgttacctcacccgtaatctgtaattgcctgttaatcaataaaccggttgattcgtttcagttgaactttggtctctgcg

SEQ ID NO: 5168 - protein, 738 aa, Adeno-associated virus 8; identical to SEQ ID NO: 5159

SEQ ID NO: 5169 - protein, 737 aa, Adeno-associated virus 8
MAADGYLPDWLEDNLSEGIREWWALKPGAPKPKANQQKQDDGRGLVLPGYKYLGPFNGLDKGEPVNAADAAALEHDKAYDQQLQAGDNPYLRYNHADAEFQERLQEDTSFGGNLGRAVFQAKKRVLEPLGLVEEGAKTAPGKKRPVEPSPQRSPDSSTGIGKKGQQPARKRLNFGQTGDSESVPDPQPLGEPPAAPSGVGPNTMAAGGGAPMADNNEGADGVGSSSGNWHCDSTWLGDRVITTSTRTWALPTYNNHLYKQISNGTSGGATNDNTYFGYSTPWGYFDFNRFHCHFSPRDWQRLINNNWGFRPKRLSFKLFNIQVKEVTQNEGTKTIANNLTSTIQVFTDSEYQLPYVLGSAHQGCLPPFPADVFMIPQYGYLTLNNGSQAVGRSSFYCLEYFPSQMLRTGNNFQFTYTFEDVPFHSSYAHSQSLDRLMNPLIDQYLYYLSRTQTTGGTANTQTLGFSQGGPNTMANQAKNWLPGPCYRQQRVSTTTGQNNNSNFAWTAGTKYHLNGRNSLANPGIAMATHKDDEERFFPSNGILIFGKQNAARDNADYSDVMLTSEEEIKTTNPVATEEYGIVADNLQQQNTAPQIGTVNSQGALPGMVWQNRDVYLQGPIWAKIPHTDGNFHPSPLMGGFGLKHPPPQILIKNTPVPADPPTTFNQSKLNSFITQYSTGQVSVEIEWELQKENSKRWNPEIQYTSNYYKSTSVDFAVIQKACTLNPAPLAPVTSPVI

SEQ ID NO: 5170 - DNA, 2217 bp, Adeno-associated virus 8; identical to SEQ ID NO: 5165

SEQ ID NO: 5171 - DNA, 4385 bp, Adeno-associated virus 9
cagagagggagtggccaactccatcactaggggtaatcgcgaagcgcctcccacgctgccgcgtcagcgctgacgtagattacgtcataggggagtggtcctgtattagctgtcacgtgagtgcttttgcgacattttgcgacaccacatggccatttgaggtatatatggccgagtgagcgagcaggatctccattttgaccgcgaaatttgaacgagcagcagccatgccgggcttctacgagattgtgatcaaggtgccgagcgacctggacgagcacctgccgggcatttctgactcttttgtgaactgggtggccgagaaggaatgggagctgcccccggattctgacatggatcggaatctgatcgagcaggcacccctgaccgtggccgagaagctgcagcgcgacttcctggtccaatggcgccgcgtgagtaaggccccggaggccctcttctttgttcagttcgagaagggcgagagctactttcacctgcacgttctggtcgagaccacgggggtcaagtccatggtgctaggccgcttcctgagtcagattcgggagaagctggtccagaccatctaccgcgggatcgagccgaccctgcccaactggttcgcggtgaccaagacgcgtaatggcgccggcggggggaacaaggtggtggacgagtgctacatccccaactacctcctgcccaagactcagcccgagctgcagtgggcgtggactaacatggaggagtatataagcgcgtgcttgaacctggccgagcgcaaacggctcgtggcgcagcacctgacccacgtcagccagacgcaggagcagaacaaggagaatctgaaccccaattctgacgcgcccgtgatcaggtcaaaaacctccgcgcgctacatggagctggtcgggtggctggtggaccggggcatcacctccgagaagcagtggatccaggaggaccaggcctcgtacatctccttcaacgccgcctccaactcgcggtcccagatcaaggccgcgctggacaatgccggcaagatcatggcgctgaccaaatccgcgcccgactacctggtaggcccttcacttccggtggacattacgcagaaccgcatctaccgcatcctgcagctcaacggctacgaccctgcctacgccggctccgtctttctcggctgggcacaaaagaagttcgggaaacgcaacaccatctggctgtttgggccggccaccacgggaaagaccaacatcgcagaagccattgcccacgccgtgcccttctacggctgcgtcaactggaccaatgagaactttcccttcaacgattgcgtcgacaagatggtgatctggtgggaggagggcaagatgacggccaaggtcgtggagtccgccaaggccattctcggcggcagcaaggtgcgcgtggaccaaaagtgcaagtcgtccgcccagatcgaccccactcccgtgatcgtcacctccaacaccaacatgtgcgccgtgattgacgggaacagcaccaccttcgagcaccagcagcctctccaggaccggatgtttaagttcgaactcacccgccgtctggagcacgactttggcaaggtgacaaagcaggaagtcaaagagttcttccgctgggccagtgatcacgtgaccgaggtggcgcatgagttttacgtcagaaagggcggagccagcaaaagacccgcccccgatgacgcggataaaagcgagcccaagcgggcctgcccctcagtcgcggatccatcgacgtcagacgcggaaggagctccggtggactttgccgacaggtaccaaaacaaatgttctcgtcacgcgggcatgcttcagatgctgcttccctgcaaaacgtgcgagagaatgaatcagaatttcaacatttgcttcacacacggggtcagagactgctcagagtgtttccccggcgtgtcagaatctcaaccggtcgtcagaaagaggacgtatcggaaactctgtgcgattcatcatctgctggggcgggctcccgagattgcttgctcggcctgcgatctggtcaacgtggacctggatgactgtgtttctgagcaataaatgacttaaaccaggtatggctgccgatggttatcttccagattggctcgaggacaacctctctgagggcattcgcgagtggtgggcgctgaaacctggagccccgaagcccaaagccaaccagcaaaagcaggacgacggccggggtctggtgcttcctggctacaagtacctcggacccttcaacggactcgacaagggggagcccgtcaacgcggcggacgcagcggccctcgagcacggcaaggcctacgaccagcagctgcaggcgggtgacaatccgtacctgcggtataaccacgccgacgccgagtttcaggagcgtctgcaagaagatacgtcttttgggggcaacctcgggcgagcagtcttccaggccaagaagcgggttctcgaacctctcggtctggttgaggaaggcgctaagacggctcctggaaagaagagaccggtagagccatcaccccagcgttctccagactcctctacgggcatcggcaagaaaggccaacagcccgccagaaaaagactcaattttggtcagactggcgactcagagtcagttccagaccctcaacctctcggagaacctccagcagcgccctctggtgtgggacctaatacaatggctgcaggcggtggcgcaccaatggcagacaataacgaaggcgccgacggagtgggtaattcctcgggaaattggcattgcgattccacatggctgggggacagagtcatcaccaccagcacccgaacctgggcattgcccacctacaacaaccacctctacaagcaaatctccaatggaacatcgggaggaagcaccaacgacaacacctactttggctacagcaccccctgggggtattttgacttcaacagattccactgccacttctcaccacgtgactggcagcgactcatcaacaacaactggggattccggccaaagagactcaacttcaagctgttcaacatccaggtcaaggaggttacgacgaacgaaggcaccaagaccatcgccaataaccttaccagcaccgtccaggtctttacggactcggagtaccagctaccgtacgtcctaggctctgcccaccaaggatgcctgccaccgtttcctgcagacgtcttcatggttcctcagtacggctacctgacgctcaacaatggaagtcaagcgttaggacgttcttctttctactgtctggaatacttcccttctcagatgctgagaaccggcaacaactttcagttcagctacactttcgaggacgtgcctttccacagcagctacgcacacagccagagtctagatcgactgatgaaccccctcatcgaccagtacctatactacctggtcagaacacagacaactggaactgggggaactcaaactttggcattcagccaagcaggccctagctcaatggccaatcaggctagaaactgggtacccgggccttgctaccgtcagcagcgcgtctccacaaccaccaaccaaaataacaacagcaactttgcgtggacgggagctgctaaattcaagctgaacgggagagactcgctaatgaatcctggcgtggctatggcatcgcacaaagacgacgaggaccgcttctttccatcaagtggcgttctcatatttggcaagcaaggagccgggaacgatggagtcgactacagccaggtgctgattacagatgaggaagaaattaaagccaccaaccctgtagccacagaggaatacggagcagtggccatcaacaaccaggccgctaacacgcaggcgcaaactggacttgtgcataaccagggagttattcctggtatggtctggcagaaccgggacgtgtacctgcagggccctatttgggctaaaatacctcacacagatggcaactttcacccgtctcctctgatgggtggatttggactgaaacacccacctccacagattctaattaaaaatacaccagtgccggcagatcctcctcttaccttcaatcaagccaagctgaactctttcatcacgcagtacagcacgggacaagtcagcgtggaaatcgagtgggagctgcagaaagaaaacagcaagcgctggaatccagagatccagtatacttcaaactactacaaatctacaaatgtggactttgctgtcaataccaaaggtgtttactctgagcctcgccccattggtactcgttacctcacccgtaatttgtaattgcctgttaatcaataaaccggttaattcgtttcagttgaactttggtctctgcg

SEQ ID NO: 5172 - DNA, 4382 bp, Adeno-associated virus 9
cagagagggagtggccaactccatcactaggggtaatcgcgaagcgcctcccacgctgccgcgtcagcgctgacgtagattacgtcataggggagtggtcctgtattagctgtcacgtgagtgcttttgcgacattttgcgacaccacatggccatttgaggtatatatggccgagtgagcgagcaggatctccattttgaccgcgaaatttgaacgagcagcagccatgccgggcttctacgagattgtgatcaaggtgccgagcgacctggacgagcacctgccgggcatttctgactcttttgtgaactgggtggccgagaaggaatgggagctgcccccggattctgacatggatcggaatctgatcgagcaggcacccctgaccgtggccgagaagctgtagcgcgacttcctggtccaatggcgccgcgtgagtaaggccccggaggccctcttctttgttcagttcgagaagggcgagagctactttcacctgcacgttctggtcgagaccacgggggtcaagtccatggtgctaggccgcttcctgagtcagattcgggagaagctggtccagaccatctaccgcgggatcgagccgaccctgcccaactggttcgcggtgaccaagacgcgtaatggcgccggcggggggaacaaggtggtggacgagtgctacatccccaactacctcctgcccaagactcagcccgagctgcagtgggcgtggactaacatggaggagtatataagcgcgtgcttgaacctggccgagcgcaaacggctcgtggcgcagcacctgacccacgtcagccagacgcaggagcagaacaaggagaatctgaaccccaattctgacgcgcccgtgatcaggtcaaaaacctccgcgcgctacatggagctggtcgggtggctggtggaccggggcatcacctccgagaagcagtggatccaggaggaccaggcctcgtacatctccttcaacgccgcctccaactcgcggtcccagatcaaggccgcgctggacaatgccggcaagatcatggcgctgaccaaatccgcgcccgactacctggtaggcccttcacttccggtggacattacgcagaaccgcatctaccgcatcctgcagctcaacggctacgaccctgcctacgccggctccgtctttctcggctgggcacaaaagaagttcgggaaacgcaacaccatctggctgtttgggccggccaccacgggaaagaccaacatcgcagaagccattgcccacgccgtgcccttctacggctgcgtcaactggaccaatgagaactttcccttcaacgattgcgtcgacaagatggtgatctggtgggaggagggcaagatgacggccaaggtcgtggagtccgccaaggccattctcggcggcagcaaggtgcgcgtggaccaaaagtgcaagtcgtccgcccagatcgaccccactcccgtgatcgtcacctccaacaccaacatgtgcgccgtgattgacgggaacagcaccaccttcgagcaccagcagcctctccaggaccggatgtttaagttcgaactcacccgccgtctggagcacgactttggcaaggtgacaaagcaggaagtcaaagagttcttccgctgggccagtgatcacgtgaccgaggtggcgcatgagttttacgtcagaaagggcggagccagcaaaagacccgcccccgatgacgcggataaaagcgagcccaagcgggcctgcccctcagtcgcggatccatcgacgtcagacgcggaaggagctccggtggactttgccgacaggtaccaaaacaaatgttctcgtcacgcgggcatgcttcagatgctgcttccctgcaaaacgtgcgagagaatgaatcagaatttcaacatttgcttcacacacggggtcagagactgctcagagtgtttccccggcgtgtcagaatctcaaccggtcgtcagaaagaggacgtatcggaaactctgtgcgattcatcatctgctggggcgggctcccgagattgcttgctcggcctgcgatctggtcaacgtggacctggatgactgtgtttctgagcaataaatgacttaaaccaggtatggctgccgatggttatcttccagattggctcgaggacaacctctctgagggcattcgcgagtggtgggacctgaaacctggagccccgaaacccaaagccaaccagcaaaagcaggacgacggccggggtctggtgcttcctggctacaagtacctcggacccttcaacggactcgacaagggggagcccgtcaacgcggcggacgcagcggccctcgagcacgacaaggcctacgaccagcagctcaaagcgggtgacaatccgtacctgcggtataaccacgccgacgccgagtttcaggagcgtctgcaagaagatacgtcttttgggggcaacctcgggcgagcagtcttccaggccaagaagcgggttctcgaacctctcggtctggttgaggaaggcgctaagacggctcctggaaagaagagaccggtagagcagtcaccccaagaaccagactcatcctcgggcatcggcaaatcaggccagcagcccgctaaaaagagactcaattttggtcagactggcgactcagagtcagtccccgacccacaacctctcggagaacctccagaagccccctcaggtctgggacctaatacaatggcttcaggcggtggcgctccaatggcagacaataacgaaggcgccgacggagtgggtaattcctcgggaaattggcattgcgattccacatggctgggggacagagtcatcaccaccagcacccgaacctgggcattgcccacctacaacaaccacctctacaagcaaatctccaatggaacatcgggaggaagcaccaacgacaacacctactttggctacagcaccccctgggggtattttgacttcaacagattccactgccacttctcaccacgtgactggcagcgactcatcaacaacaactggggattccggccaaagagactcaacttcaagctgttcaacatccaggtcaaggaggttacgacgaacgaaggcaccaagaccatcgccaataaccttaccagcaccgtccaggtctttacggactcggagtaccagctaccgtacgtcctaggctctgcccaccaaggatgcctgccaccgtttcctgcagacgtcttcatggttcctcagtacggctacctgacgctcaacaatggaagtcaagcgttaggacgttcttctttctactgtctggaatacttcccttctcagatgctgagaaccggcaacaactttcagttcagctacactttcgaggacgtgcctttccacagcagctacgcacacagccagagtctagatcgactgatgaaccccctcatcgaccagtacctatactacctggtcagaacacagacaactggaactgggggaactcaaactttggcattcagccaagcaggccctagctcaatggccaatcaggctagaaactgggtacccgggccttgctaccgtcagcagcgcgtctccacaaccaccaaccaaaataacaacagcaactttgcgtggacgggagctgctaaattcaagctgaacgggagagactcgctaatgaatcctggcgtggctatggcatcgcacaaagacgacgaggaccgcttctttccatcaagtggcgttctcatatttggcaagcaaggagccgggaacgatggagtcgactacagccaggtgctgattacagatgaggaagaaattaaagccaccaaccctgtagccacagaggaatacggagcagtggccatcaacaaccaggccgctaacacgcaggcgcaaactggacttgtgcataaccagggagttattcctggtatggtctggcagaaccgggacgtgtacctgcagggccctatttgggctaaaatacctcacacagatggcaactttcacccgtctcctctgatgggtggatttggactgaaacacccacctccacagattctaattaaaaatacaccagtgccggcagatcctcctcttaccttcaatcaagccaagctgaactctttcatcacgcagtacagcacgggacaagtcagcgtggaaatcgagtgggagctgcagaaagaaaacagcaagcgctggaatccagagatccagtatacttcaaactactacaaatctacaaatgtggactttgctgtcaataccgaaggtgtttactctgagcctcgccccattggtactcgttacctcacccgtaatttgtaattgcctgttaatcaataaaccggttaattcgtttcagttgaactttggtctctgcg

SEQ ID NO: 5173 - protein, 736 aa, Adeno-associated virus 9; identical to SEQ ID NO: 4805

SEQ ID NO: 5174 - protein, 736 aa, Adeno-associated virus 9
MAADGYLPDWLEDNLSEGIREWWDLKPGAPKPKANQQKQDDGRGLVLPGYKYLGPFNGLDKGEPVNAADAAALEHDKAYDQQLKAGDNPYLRYNHADAEFQERLQEDTSFGGNLGRAVFQAKKRVLEPLGLVEEGAKTAPGKKRPVEQSPQEPDSSSGIGKSGQQPAKKRLNFGQTGDSESVPDPQPLGEPPEAPSGLGPNTMASGGGAPMADNNEGADGVGNSSGNWHCDSTWLGDRVITTSTRTWALPTYNNHLYKQISNGTSGGSTNDNTYFGYSTPWGYFDFNRFHCHFSPRDWQRLINNNWGFRPKRLNFKLFNIQVKEVTTNEGTKTIANNLTSTVQVFTDSEYQLPYVLGSAHQGCLPPFPADVFMVPQYGYLTLNNGSQALGRSSFYCLEYFPSQMLRTGNNFQFSYTFEDVPFHSSYAHSQSLDRLMNPLIDQYLYYLVRTQTTGTGGTQTLAFSQAGPSSMANQARNWVPGPCYRQQRVSTTTNQNNNSNFAWTGAAKFKLNGRDSLMNPGVAMASHKDDEDRFFPSSGVLIFGKQGAGNDGVDYSQVLITDEEEIKATNPVATEEYGAVAINNQAANTQAQTGLVHNQGVIPGMVWQNRDVYLQGPIWAKIPHTDGNFHPSPLMGGFGLKHPPPQILIKNTPVPADPPLTFNQAKLNSFITQYSTGQVSVEIEWELQKENSKRWNPEIQYTSNYYKSTNVDFAVNTEGVYSEPRPIGTRYLTRNL

SEQ ID NO: 5175 - protein, 623 aa, Adeno-associated virus 9
MPGFYEIVIKVPSDLDEHLPGISDSFVNWVAEKEWELPPDSDMDRNLIEQAPLTVAEKLQRDFLVQWRRVSKAPEALFFVQFEKGESYFHLHVLVETTGVKSMVLGRFLSQIREKLVQTIYRGIEPTLPNWFAVTKTRNGAGGGNKVVDECYIPNYLLPKTQPELQWAWTNMEEYISACLNLAERKRLVAQHLTHVSQTQEQNKENLNPNSDAPVIRSKTSARYMELVGWLVDRGITSEKQWIQEDQASYISFNAASNSRSQIKAALDNAGKIMALTKSAPDYLVGPSLPVDITQNRIYRILQLNGYDPAYAGSVFLGWAQKKFGKRNTIWLFGPATTGKTNIAEAIAHAVPFYGCVNWTNENFPFNDCVDKMVIWWEEGKMTAKVVESAKAILGGSKVRVDQKCKSSAQIDPTPVIVTSNTNMCAVIDGNSTTFEHQQPLQDRMFKFELTRRLEHDFGKVTKQEVKEFFRWASDHVTEVAHEFYVRKGGASKRPAPDDADKSEPKRACPSVADPSTSDAEGAPVDFADRYQNKCSRHAGMLQMLLPCKTCERMNQNFNICFTHGVRDCSECFPGVSESQPVVRKRTYRKLCAIHHLLGRAPEIACSACDLVNVDLDDCVSEQ

SEQ ID NO: 5176 - DNA, 1797 bp, Artificial Sequence
  Description of Artificial Sequence: Synthetic polynucleotide
acggctccgaccggagacaagcggaaaggcgaagacgaacctcgtttgcccgacacttcttcacagactcccaagaaaaacaagaagcctcgcaaggaaagaccttccggcggggcagaagatccgggcgaaggcacctcttccaacgctggagcagcagcacccgcctctagtgtgggatcatctatcatggctgaaggaggtggcggcccagtgggcgatgcaggccagggtgccgatggagtgggcaattcctccggaaattggcattgcgattcccaatggctggaaaacggagtcgtcactcgaaccacccgaacctgggtcttgcccagctacaacaaccacctgtacaaacgaatccaaggacccagcggaggcgacaacaacaacaaattctttggattcagcaccccctggggatactttgactacaatcgattccactgccacttttccccgcgagactggcaacgactcatcaacaacaactggggcatccgtcccaaagcgatgcgctttagactctttaacatccaggttaaagaggtcacggtccaagacttcaacaccaccatcggcaacaacctcaccagtacggtccaggtctttgcggacaaggactaccaactgccgtacgtcctcggatcggctaccgaaggcaccttcccgccgttcccagcggatatctacacgatcccgcagtacgggtactgcacgctaaactacaacaacgaggcggtggatcgttcggccttctactgtctggactactttccctcagacatgctgcggacaggaaataactttgagtttacttacaccttcgaggacgttcctttccatagcatgtttgcccacaaccagacgctagaccggctgatgaatcccctcgtggatcagtacctctgggctttcagctccgtcagccaagcaggctcatctggacgagctcttcattactcgcgggcgactaaaaccaacatggcggctcaatataggaactggttacctgggcctttcttccgtgatcagcaaatctttacgggcgctagcaacatcactaaaaataacgtctttagcgtttgggaaaaaggcaagcaatgggaactcgacaatcggaccaacctaatgcagcccggtcctgcggcagcgaccacctttagcggagaacctgaccgtcaagccatgcaaaacacgctggcttttagcaggaccgtctacgatcaaacgaccgccacgaccgatcgtaaccagatactcatcaccaacgaagacgaaatcagacccaccaactcggtcggtatcgacgcgtggggagcagttcccaccaacaaccagtcgatcgtgacccccggcactcgcgcggccgtcaacaatcaaggggcgcttcccgggatggtgtggcaaaacagagacatttaccctacagggacccatttggccaaaattcccgacactgacaatcacttccatccgtccccgcttattgggcggtttggctgcaagcatccccctccccagattttcattaaaaacacacccgtccctgccaacccttcggaaacgttccagacggccaaagtggcctccttcatcaaccagtactcgaccggacagtgcaccgtcgaaatcttttgggaactcaagaaggaaacctccaagcgctggaaccccgaaatccagttcacctccaactttggcaacgcggccgacatccagtttgccgtctccgacacgggatcctattccgaacctcgtcccatcggtacccgttaccttaccaaacctctgtaa

SEQ ID NO: 5177 - DNA, 1989 bp, Artificial Sequence
  Description of Artificial Sequence: Synthetic polynucleotide
atgaggtcgtactacgaggtcatcgttcagctgcccaacgacgtcgagagtcaggtacctggaatctccgattcgttcgtcaactggattacgtcgcgagaatggacgttgcctgaggacgccgattgggatttggaccaggtcgatcaagttcaactgacgctcggcgacaaaatccaacgggagattcgaactcattgggggacgatggccaaagaaccggactttcactattttatccaactggaacaaggtgaggtgttctttcatttacacgtcctgctggaaacgtgttccgtaaagccgatggtactcggaagatatatccgacatattcaacaaaaaattgtgagtaaagtctactgcgccacgagcctacgatggaaggatggatgcgtggtgaccaagaccaaaaatttcgggggcgcgaacaaggtccgggccgagtcgtatattcccgcctacctgatcccgaaacagcaaccggaagtgcagtgggcgtggactaacgtgcccgagtatataaaagcgtgcttgcaccgagaactgcgtgccagtctcgcgcgacttcacttcgaggaggcgggcgtctcgcaatccaaggaaaatctcgcgagaactgcagacggcgctcccgtgatgccgacccgcgtcagcaaacgctacatggagctcgtggattggctcgtggagaaggggatcaccaccgagaaggaatggctgctggaaaacagagaaagctttcggagctttcaggcctcgagcaactcggcgcgtcagatcaagacggccctgcaaggcgccattcaggagatgcttctgaccaagacggcggaggactacctcgtcggaaaggatcccgtctcggacgacgacatccgtcagaaccgcatctacaagattctggaactgaaccactacgacccagcgtacgtggggagtattttggtcgggtggtgccagaagaaatggggcaagcgaaacacgctgtggctgttcggacatgcgaccaccggcaagaccaacatcgcggaggctattgcccatgctgtgccgttctatggatgcgttaactggaccaacgagaactttccgttcaacgactgcgtcgaaaaaatgattatctggtgggaggagggcaaaatgaccgccaaagtggtggaaacagccaaggcgattctgggaggatctcgggtgagagtggaccaaaaatgcaaagcttcggttccgatcgaaccgacgccggtcattattaccagtaacaccaacatgtgttatgtcatcgacgggaacacgaccacgttcgagcataagcagccgttggaggacaggatgtttaagctcgaattgctgactcggttgcctgatgactttggtaaggtgaccaaacaggaggtgcgtcaattcttcaggtggtctcaggatcacctgacccctgtgatcccagaattcctagtgcggaaggcggagtctcgcaaaagacccgccccttccggggaaggctatataagcccgacaaagcggcccgcgctcgcagagcagcagcaggcgtcggagagcgcggacccggttcccaccaggtatcgtatcaaatgctcgaaacattgcggtatggataaaatgttgtttccttgccaaatttgtgaatcgatgaacagagatattaatatttgtgctattcataaaacgaccgactgtaaagagtgtttccccgactacggggataaagatgatgtagaactacccccctgtacagaacacaacgtgtctcgttgttatcaatgtcattcgggcgaattgtatcgcgtgacttcggactctgacgagaaacctgcccccgagagtgatgaaggcaccgagccatcctatgctccctgcacgattcaccacctgatgggcaagagtcacgggttagtcacttgcgcggcgtgtcggttgaaaaatagtacgttgcatgatgacttggatgacggtgatctcgaacaataa

SEQ ID NO: 5178 - DNA, 1626 bp, Artificial Sequence
  Description of Artificial Sequence: Synthetic polynucleotide
atgaggtcgtactacgaggtcatcgttcagctgcccaacgacgtcgagagtcaggtacctggaatctccgattcgttcgtcaactggattacgtcgcgagaatggacgttgcctgaggacgccgattgggatttggaccaggtcgatcaagttcaactgacgctcggcgacaaaatccaacgggagattcgaactcattgggggacgatggccaaagaaccggactttcactattttatccaactggaacaaggtgaggtgttctttcatttacacgtcctgctggaaacgtgttccgtaaagccgatggtactcggaagatatatccgacatattcaacaaaaaattgtgagtaaagtctactgcgccacgagcctacgatggaaggatggatgcgtggtgaccaagaccaaaaatttcgggggcgcgaacaaggtccgggccgagtcgtatattcccgcctacctgatcccgaaacagcaaccggaagtgcagtgggcgtggactaacgtgcccgagtatataaaagcgtgcttgcaccgagaactgcgtgccagtctcgcgcgacttcacttcgaggaggcgggcgtctcgcaatccaaggaaaatctcgcgagaactgcagacggcgctcccgtgatgccgacccgcgtcagcaaacgctacatggagctcgtggattggctcgtggagaaggggatcaccaccgagaaggaatggctgctggaaaacagagaaagctttcggagctttcaggcctcgagcaactcggcgcgtcagatcaagacggccctgcaaggcgccattcaggagatgcttctgaccaagacggcggaggactacctcgtcggaaaggatcccgtctcggacgacgacatccgtcagaaccgcatctacaagattctggaactgaaccactacgacccagcgtacgtggggagtattttggtcgggtggtgccagaagaaatggggcaagcgaaacacgctgtggctgttcggacatgcgaccaccggcaagaccaacatcgcggaggctattgcccatgctgtgccgttctatggatgcgttaactggaccaacgagaactttccgttcaacgactgcgtcgaaaaaatgattatctggtgggaggagggcaaaatgaccgccaaagtggtggaaacagccaaggcgattctgggaggatctcgggtgagagtggaccaaaaatgcaaagcttcggttccgatcgaaccgacgccggtcattattaccagtaacaccaacatgtgttatgtcatcgacgggaacacgaccacgttcgagcataagcagccgttggaggacaggatgtttaagctcgaattgctgactcggttgcctgatgactttggtaaggtgaccaaacaggaggtgcgtcaattcttcaggtggtctcaggatcacctgacccctgtgatcccagaattcctagtgcggaaggcggagtctcgcaaaagacccgccccttccggggaaggctatataagcccgacaaagcggcccgcgctcgcagagcagcagcaggcgtcggagagcgcggacccggttcccaccagattggttggagcggttggtcaaaaagggagtgaatgctgcagctga

SEQ ID NO: 5179 - DNA, 1323 bp, Artificial Sequence
  Description of Artificial Sequence: Synthetic polynucleotide
atggagctcgtggattggctcgtggagaaggggatcaccaccgagaaggaatggctgctggaaaacagagaaagctttcggagctttcaggcctcgagcaactcggcgcgtcagatcaagacggccctgcaaggcgccattcaggagatgcttctgaccaagacggcggaggactacctcgtcggaaaggatcccgtctcggacgacgacatccgtcagaaccgcatctacaagattctggaactgaaccactacgacccagcgtacgtggggagtattttggtcgggtggtgccagaagaaatggggcaagcgaaacacgctgtggctgttcggacatgcgaccaccggcaagaccaacatcgcggaggctattgcccatgctgtgccgttctatggatgcgttaactggaccaacgagaactttccgttcaacgactgcgtcgaaaaaatgattatctggtgggaggagggcaaaatgaccgccaaagtggtggaaacagccaaggcgattctgggaggatctcgggtgagagtggaccaaaaatgcaaagcttcggttccgatcgaaccgacgccggtcattattaccagtaacaccaacatgtgttatgtcatcgacgggaacacgaccacgttcgagcataagcagccgttggaggacaggatgtttaagctcgaattgctgactcggttgcctgatgactttggtaaggtgaccaaacaggaggtgcgtcaattcttcaggtggtctcaggatcacctgacccctgtgatcccagaattcctagtgcggaaggcggagtctcgcaaaagacccgccccttccggggaaggctatataagcccgacaaagcggcccgcgctcgcagagcagcagcaggcgtcggagagcgcggacccggttcccaccaggtatcgtatcaaatgctcgaaacattgcggtatggataaaatgttgtttccttgccaaatttgtgaatcgatgaacagagatattaatatttgtgctattcataaaacgaccgactgtaaagagtgtttccccgactacggggataaagatgatgtagaactacccccctgtacagaacacaacgtgtctcgttgttatcaatgtcattcgggcgaattgtatcgcgtgacttcggactctgacgagaaacctgcccccgagagtgatgaaggcaccgagccatcctatgctccctgcacgattcaccacctgatgggcaagagtcacgggttagtcacttgcgcggcgtgtcggttgaaaaatagtacgttgcatgatgacttggatgacggtgatctcgaacaataa

SEQ ID NO: 5180 - DNA, 960 bp, Artificial Sequence
  Description of Artificial Sequence: Synthetic polynucleotide
atggagctcgtggattggctcgtggagaaggggatcaccaccgagaaggaatggctgctggaaaacagagaaagctttcggagctttcaggcctcgagcaactcggcgcgtcagatcaagacggccctgcaaggcgccattcaggagatgcttctgaccaagacggcggaggactacctcgtcggaaaggatcccgtctcggacgacgacatccgtcagaaccgcatctacaagattctggaactgaaccactacgacccagcgtacgtggggagtattttggtcgggtggtgccagaagaaatggggcaagcgaaacacgctgtggctgttcggacatgcgaccaccggcaagaccaacatcgcggaggctattgcccatgctgtgccgttctatggatgcgttaactggaccaacgagaactttccgttcaacgactgcgtcgaaaaaatgattatctggtgggaggagggcaaaatgaccgccaaagtggtggaaacagccaaggcgattctgggaggatctcgggtgagagtggaccaaaaatgcaaagcttcggttccgatcgaaccgacgccggtcattattaccagtaacaccaacatgtgttatgtcatcgacgggaacacgaccacgttcgagcataagcagccgttggaggacaggatgtttaagctcgaattgctgactcggttgcctgatgactttggtaaggtgaccaaacaggaggtgcgtcaattcttcaggtggtctcaggatcacctgacccctgtgatcccagaattcctagtgcggaaggcggagtctcgcaaaagacccgccccttccggggaaggctatataagcccgacaaagcggcccgcgctcgcagagcagcagcaggcgtcggagagcgcggacccggttcccaccagattggttggagcggttggtcaaaaagggagtgaatgctgcagctga

SEQ ID NO: 5181 - DNA, 1608 bp, Artificial Sequence
  Description of Artificial Sequence: Synthetic polynucleotide
atggctgaaggaggtggcggcccagtgggcgatgcaggccagggtgccgatggagtgggcaattcctccggaaattggcattgcgattcccaatggctggaaaacggagtcgtcactcgaaccacccgaacctgggtcttgcccagctacaacaaccacctgtacaaacgaatccaaggacccagcggaggcgacaacaacaacaaattctttggattcagcaccccctggggatactttgactacaatcgattccactgccacttttccccgcgagactggcaacgactcatcaacaacaactggggcatccgtcccaaagcgatgcgctttagactctttaacatccaggttaaagaggtcacggtccaagacttcaacaccaccatcggcaacaacctcaccagtacggtccaggtctttgcggacaaggactaccaactgccgtacgtcctcggatcggctaccgaaggcaccttcccgccgttcccagcggatatctacacgatcccgcagtacgggtactgcacgctaaactacaacaacgaggcggtggatcgttcggccttctactgtctggactactttccctcagacatgctgcggacaggaaataactttgagtttacttacaccttcgaggacgttcctttccatagcatgtttgcccacaaccagacgctagaccggctgatgaatcccctcgtggatcagtacctctgggctttcagctccgtcagccaagcaggctcatctggacgagctcttcattactcgcgggcgactaaaaccaacatggcggctcaatataggaactggttacctgggcctttcttccgtgatcagcaaatctttacgggcgctagcaacatcactaaaaataacgtctttagcgtttgggaaaaaggcaagcaatgggaactcgacaatcggaccaacctaatgcagcccggtcctgcggcagcgaccacctttagcggagaacctgaccgtcaagccatgcaaaacacgctggcttttagcaggaccgtctacgatcaaacgaccgccacgaccgatcgtaaccagatactcatcaccaacgaagacgaaatcagacccaccaactcggtcggtatcgacgcgtggggagcagttcccaccaacaaccagtcgatcgtgacccccggcactcgcgcggccgtcaacaatcaaggggcgcttcccgggatggtgtggcaaaacagagacatttaccctacagggacccatttggccaaaattcccgacactgacaatcacttccatccgtccccgcttattgggcggtttggctgcaagcatccccctccccagattttcattaaaaacacacccgtccctgccaacccttcggaaacgttccagacggccaaagtggcctccttcatcaaccagtactcgaccggacagtgcaccgtcgaaatcttttgggaactcaagaaggaaacctccaagcgctggaaccccgaaatccagttcacctccaactttggcaacgcggccgacatccagtttgccgtctccgacacgggatcctattccgaacctcgtcccatcggtacccgttaccttaccaaacctctgtaa

SEQ ID NO: 5182 - DNA, 2232 bp, Artificial Sequence
  Description of Artificial Sequence: Synthetic polynucleotide
atgtctctcatttctgatgcgattccagattggttggagcggttggtcaaaaagggagtgaatgctgcagctgatttctaccatttggaaagcggtcctcctcgtcctaaggcaaatcagcaaactcaagaatctcttgaaaaggacgattcgagaggtctcgtgttcccaggctacaattatctaggccctttcaacggtctagataaaggagaacccgtcaacgaggcagacgctgccgccttagaacacgacaaggcttacgacctcgaaatcaaggacgggcacaacccgtactttgagtacaacgaggccgacagacgtttccaggaacgtctcaaagacgatacctcctttggaggcaatttaggtaaagccatcttccaggccaaaaagagggttctcgaaccctttggtctggtggaagactcaaagacggctccgaccggagacaagcggaaaggcgaagacgaacctcgtttgcccgacacttcttcacagactcccaagaaaaacaagaagcctcgcaaggaaagaccttccggcggggcagaagatccgggcgaaggcacctcttccaacgctggagcagcagcacccgcctctagtgtgggatcatctatcatggctgaaggaggtggcggcccagtgggcgatgcaggccagggtgccgatggagtgggcaattcctccggaaattggcattgcgattcccaatggctggaaaacggagtcgtcactcgaaccacccgaacctgggtcttgcccagctacaacaaccacctgtacaaacgaatccaaggacccagcggaggcgacaacaacaacaaattctttggattcagcaccccctggggatactttgactacaatcgattccactgccacttttccccgcgagactggcaacgactcatcaacaacaactggggcatccgtcccaaagcgatgcgctttagactctttaacatccaggttaaagaggtcacggtccaagacttcaacaccaccatcggcaacaacctcaccagtacggtccaggtctttgcggacaaggactaccaactgccgtacgtcctcggatcggctaccgaaggcaccttcccgccgttcccagcggatatctacacgatcccgcagtacgggtactgcacgctaaactacaacaacgaggcggtggatcgttcggccttctactgtctggactactttccctcagacatgctgcggacaggaaataactttgagtttacttacaccttcgaggacgttcctttccatagcatgtttgcccacaaccagacgctagaccggctgatgaatcccctcgtggatcagtacctctgggctttcagctccgtcagccaagcaggctcatctggacgagctcttcattactcgcgggcgactaaaaccaacatggcggctcaatataggaactggttacctgggcctttcttccgtgatcagcaaatctttacgggcgctagcaacatcactaaaaataacgtctttagcgtttgggaaaaaggcaagcaatgggaactcgacaatcggaccaacctaatgcagcccggtcctgcggcagcgaccacctttagcggagaacctgaccgtcaagccatgcaaaacacgctggcttttagcaggaccgtctacgatcaaacgaccgccacgaccgatcgtaaccagatactcatcaccaacgaagacgaaatcagacccaccaactcggtcggtatcgacgcgtggggagcagttcccaccaacaaccagtcgatcgtgacccccggcactcgcgcggccgtcaacaatcaaggggcgcttcccgggatggtgtggcaaaacagagacatttaccctacagggacccatttggccaaaattcccgacactgacaatcacttccatccgtccccgcttattgggcggtttggctgcaagcatccccctccccagattttcattaaaaacacacccgtccctgccaacccttcggaaacgttccagacggccaaagtggcctccttcatcaaccagtactcgaccggacagtgcaccgtcgaaatcttttgggaactcaagaaggaaacctccaagcgctggaaccccgaaatccagttcacctccaactttggcaacgcggccgacatccagtttgccgtctccgacacgggatcctattccgaacctcgtcccatcggtacccgttaccttaccaaacctctgtaa

SEQ ID NO: 5183 - protein, 535 aa, Artificial Sequence
  Description of Artificial Sequence: Synthetic polypeptide
MAEGGGGPVGDAGQGADGVGNSSGNWHCDSQWLENGVVTRTTRTWVLPSYNNHLYKRIQGPSGGDNNNKFFGFSTPWGYFDYNRFHCHFSPRDWQRLINNNWGIRPKAMRFRLFNIQVKEVTVQDFNTTIGNNLTSTVQVFADKDYQLPYVLGSATEGTFPPFPADIYTIPQYGYCTLNYNNEAVDRSAFYCLDYFPSDMLRTGNNFEFTYTFEDVPFHSMFAHNQTLDRLMNPLVDQYLWAFSSVSQAGSSGRALHYSRATKTNMAAQYRNWLPGPFFRDQQIFTGASNITKNNVFSVWEKGKQWELDNRTNLMQPGPAAATTFSGEPDRQAMQNTLAFSRTVYDQTTATTDRNQILITNEDEIRPTNSVGIDAWGAVPTNNQSIVTPGTRAAVNNQGALPGMVWQNRDIYPTGTHLAKIPDTDNHFHPSPLIGRFGCKHPPPQIFIKNTPVPANPSETFQTAKVASFINQYSTGQCTVEIFWELKKETSKRWNPEIQFTSNFGNAADIQFAVSDTGSYSEPRPIGTRYLTKPL

SEQ ID NO: 5184 - protein, 440 aa, Artificial Sequence
  Description of Artificial Sequence: Synthetic polypeptide
MELVDWLVEKGITTEKEWLLENRESFRSFQASSNSARQIKTALQGAIQEMLLTKTAEDYLVGKDPVSDDDIRQNRIYKILELNHYDPAYVGSILVGWCQKKWGKRNTLWLFGHATTGKTNIAEAIAHAVPFYGCVNWTNENFPFNDCVEKMIIWWEEGKMTAKVVETAKAILGGSRVRVDQKCKASVPIEPTPVIITSNTNMCYVIDGNTTTFEHKQPLEDRMFKLELLTRLPDDFGKVTKQEVRQFFRWSQDHLTPVIPEFLVRKAESRKRPAPSGEGYISPTKRPALAEQQQASESADPVPTRYRIKCSKHCGMDKMLFPCQICESMNRDINICAIHKTTDCKECFPDYGDKDDVELPPCTEHNVSRCYQCHSGELYRVTSDSDEKPAPESDEGTEPSYAPCTIHHLMGKSHGLVTCAACRLKNSTLHDDLDDGDLEQ

SEQ ID NO: 5185 - protein, 319 aa, Artificial Sequence
  Description of Artificial Sequence: Synthetic polypeptide
MELVDWLVEKGITTEKEWLLENRESFRSFQASSNSARQIKTALQGAIQEMLLTKTAEDYLVGKDPVSDDDIRQNRIYKILELNHYDPAYVGSILVGWCQKKWGKRNTLWLFGHATTGKTNIAEAIAHAVPFYGCVNWTNENFPFNDCVEKMIIWWEEGKMTAKVVETAKAILGGSRVRVDQKCKASVPIEPTPVIITSNTNMCYVIDGNTTTFEHKQPLEDRMFKLELLTRLPDDFGKVTKQEVRQFFRWSQDHLTPVIPEFLVRKAESRKRPAPSGEGYISPTKRPALAEQQQASESADPVPTRLVGAVGQKGSECCS

SEQ ID NO: 5186 - protein, 662 aa, Artificial Sequence
  Description of Artificial Sequence: Synthetic polypeptide
MRSYYEVIVQLPNDVESQVPGISDSFVNWITSREWTLPEDADWDLDQVDQVQLTLGDKIQREIRTHWGTMAKEPDFHYFIQLEQGEVFFHLHVLLETCSVKPMVLGRYIRHIQQKIVSKVYCATSLRWKDGCVVTKTKNFGGANKVRAESYIPAYLIPKQQPEVQWAWTNVPEYIKACLHRELRASLARLHFEEAGVSQSKENLARTADGAPVMPTRVSKRYMELVDWLVEKGITTEKEWLLENRESFRSFQASSNSARQIKTALQGAIQEMLLTKTAEDYLVGKDPVSDDDIRQNRIYKILELNHYDPAYVGSILVGWCQKKWGKRNTLWLFGHATTGKTNIAEAIAHAVPFYGCVNWTNENFPFNDCVEKMIIWWEEGKMTAKVVETAKAILGGSRVRVDQKCKASVPIEPTPVIITSNTNMCYVIDGNTTTFEHKQPLEDRMFKLELLTRLPDDFGKVTKQEVRQFFRWSQDHLTPVIPEFLVRKAESRKRPAPSGEGYISPTKRPALAEQQQASESADPVPTRYRIKCSKHCGMDKMLFPCQICESMNRDINICAIHKTTDCKECFPDYGDKDDVELPPCTEHNVSRCYQCHSGELYRVTSDSDEKPAPESDEGTEPSYAPCTIHHLMGKSHGLVTCAACRLKNSTLHDDLDDGDLEQ

SEQ ID NO: 5187 - protein, 541 aa, Artificial Sequence
  Description of Artificial Sequence: Synthetic polypeptide
MRSYYEVIVQLPNDVESQVPGISDSFVNWITSREWTLPEDADWDLDQVDQVQLTLGDKIQREIRTHWGTMAKEPDFHYFIQLEQGEVFFHLHVLLETCSVKPMVLGRYIRHIQQKIVSKVYCATSLRWKDGCVVTKTKNFGGANKVRAESYIPAYLIPKQQPEVQWAWTNVPEYIKACLHRELRASLARLHFEEAGVSQSKENLARTADGAPVMPTRVSKRYMELVDWLVEKGITTEKEWLLENRESFRSFQASSNSARQIKTALQGAIQEMLLTKTAEDYLVGKDPVSDDDIRQNRIYKILELNHYDPAYVGSILVGWCQKKWGKRNTLWLFGHATTGKTNIAEAIAHAVPFYGCVNWTNENFPFNDCVEKMIIWWEEGKMTAKVVETAKAILGGSRVRVDQKCKASVPIEPTPVIITSNTNMCYVIDGNTTTFEHKQPLEDRMFKLELLTRLPDDFGKVTKQEVRQFFRWSQDHLTPVIPEFLVRKAESRKRPAPSGEGYISPTKRPALAEQQQASESADPVPTRLVGAVGQKGSECCS

SEQ ID NO: 5188 - protein, 743 aa, Artificial Sequence
  Description of Artificial Sequence: Synthetic polypeptide
MSLISDAIPDWLERLVKKGVNAAADFYHLESGPPRPKANQQTQESLEKDDSRGLVFPGYNYLGPFNGLDKGEPVNEADAAALEHDKAYDLEIKDGHNPYFEYNEADRRFQERLKDDTSFGGNLGKAIFQAKKRVLEPFGLVEDSKTAPTGDKRKGEDEPRLPDTSSQTPKKNKKPRKERPSGGAEDPGEGTSSNAGAAAPASSVGSSIMAEGGGGPVGDAGQGADGVGNSSGNWHCDSQWLENGVVTRTTRTWVLPSYNNHLYKRIQGPSGGDNNNKFFGFSTPWGYFDYNRFHCHFSPRDWQRLINNNWGIRPKAMRFRLFNIQVKEVTVQDFNTTIGNNLTSTVQVFADKDYQLPYVLGSATEGTFPPFPADIYTIPQYGYCTLNYNNEAVDRSAFYCLDYFPSDMLRTGNNFEFTYTFEDVPFHSMFAHNQTLDRLMNPLVDQYLWAFSSVSQAGSSGRALHYSRATKTNMAAQYRNWLPGPFFRDQQIFTGASNITKNNVFSVWEKGKQWELDNRTNLMQPGPAAATTFSGEPDRQAMQNTLAFSRTVYDQTTATTDRNQILITNEDEIRPTNSVGIDAWGAVPTNNQSIVTPGTRAAVNNQGALPGMVWQNRDIYPTGTHLAKIPDTDNHFHPSPLIGRFGCKHPPPQIFIKNTPVPANPSETFQTAKVASFINQYSTGQCTVEIFWELKKETSKRWNPEIQFTSNFGNAADIQFAVSDTGSYSEPRPIGTRYLTKPL

SEQ ID NO: 5189 - protein, 598 aa, Artificial Sequence
  Description of Artificial Sequence: Synthetic polypeptide
TAPTGDKRKGEDEPRLPDTSSQTPKKNKKPRKERPSGGAEDPGEGTSSNAGAAAPASSVGSSIMAEGGGGPVGDAGQGADGVGNSSGNWHCDSQWLENGVVTRTTRTWVLPSYNNHLYKRIQGPSGGDNNNKFFGFSTPWGYFDYNRFHCHFSPRDWQRLINNNWGIRPKAMRFRLFNIQVKEVTVQDFNTTIGNNLTSTVQVFADKDYQLPYVLGSATEGTFPPFPADIYTIPQYGYCTLNYNNEAVDRSAFYCLDYFPSDMLRTGNNFEFTYTFEDVPFHSMFAHNQTLDRLMNPLVDQYLWAFSSVSQAGSSGRALHYSRATKTNMAAQYRNWLPGPFFRDQQIFTGASNITKNNVFSVWEKGKQWELDNRTNLMQPGPAAATTFSGEPDRQAMQNTLAFSRTVYDQTTATTDRNQILITNEDEIRPTNSVGIDAWGAVPTNNQSIVTPGTRAAVNNQGALPGMVWQNRDIYPTGTHLAKIPDTDNHFHPSPLIGRFGCKHPPPQIFIKNTPVPANPSETFQTAKVASFINQYSTGQCTVEIFWELKKETSKRWNPEIQFTSNFGNAADIQFAVSDTGSYSEPRPIGTRYLTKPL

SEQ ID NO: 5190 - DNA, 4694 bp, Artificial Sequence
  Description of Artificial Sequence: Synthetic polynucleotide
tggccagtttccaagacaggctcgctcgctcactcgggccggggccccaaaggggcccctagcgaccgcttcgcggtcgcggcccgagtgagcgagcgagcctgtcttggaaactggccagcactccggtgaggtaatgccgtcacgtggtcgggaatgggaacgggaaatctcgcgagaacgtaaacaaatataagacggcgccacacggcgctgcgtcatacgcgcgcgcgcaccggcgagatgaggtcgtactacgaggtcatcgttcagctgcccaacgacgtcgagagtcaggtacctggaatctccgattcgttcgtcaactggattacgtcgcgagaatggacgttgcctgaggacgccgattgggatttggaccaggtcgatcaagttcaactgacgctcggcgacaaaatccaacgggagattcgaactcattgggggacgatggccaaagaaccggactttcactattttatccaactggaacaaggtgaggtgttctttcatttacacgtcctgctggaaacgtgttccgtaaagccgatggtactcggaagatatatccgacatattcaacaaaaaattgtgagtaaagtctactgcgccacgagcctacgatggaaggatggatgcgtggtgaccaagaccaaaaatttcgggggcgcgaacaaggtccgggccgagtcgtatattcccgcctacctgatcccgaaacagcaaccggaagtgcagtgggcgtggactaacgtgcccgagtatataaaagcgtgcttgcaccgagaactgcgtgccagtctcgcgcgacttcacttcgaggaggcgggcgtctcgcaatccaaggaaaatctcgcgagaactgcagacggcgctcccgtgatgccgacccgcgtcagcaaacgctacatggagctcgtggattggctcgtggagaaggggatcaccaccgagaaggaatggctgctggaaaacagagaaagctttcggagctttcaggcctcgagcaactcggcgcgtcagatcaagacggccctgcaaggcgccattcaggagatgcttctgaccaagacggcggaggactacctcgtcggaaaggatcccgtctcggacgacgacatccgtcagaaccgcatctacaagattctggaactgaaccactacgacccagcgtacgtggggagtattttggtcgggtggtgccagaagaaatggggcaagcgaaacacgctgtggctgttcggacatgcgaccaccggcaagaccaacatcgcggaggctattgcccatgctgtgccgttctatggatgcgttaactggaccaacgagaactttccgttcaacgactgcgtcgaaaaaatgattatctggtgggaggagggcaaaatgaccgccaaagtggtggaaacagccaaggcgattctgggaggatctcgggtgagagtggaccaaaaatgcaaagcttcggttccgatcgaaccgacgccggtcattattaccagtaacaccaacatgtgttatgtcatcgacgggaacacgaccacgttcgagcataagcagccgttggaggacaggatgtttaagctcgaattgctgactcggttgcctgatgactttggtaaggtgaccaaacaggaggtgcgtcaattcttcaggtggtctcaggatcacctgacccctgtgatcccagaattcctagtgcggaaggcggagtctcgcaaaagacccgccccttccggggaaggctatataagcccgacaaagcggcccgcgctcgcagagcagcagcaggcgtcggagagcgcggacccggttcccaccaggtatcgtatcaaatgctcgaaacattgcggtatggataaaatgttgtttccttgccaaatttgtgaatcgatgaacagagatattaatatttgtgctattcataaaacgaccgactgtaaagagtgtttccccgactacggggataaagatgatgtagaactacccccctgtacagaacacaacgtgtctcgttgttatcaatgtcattcgggcgaattgtatcgcgtgacttcggactctgacgagaaacctgcccccgagagtgatgaaggcaccgagccatcctatgctccctgcacgattcaccacctgatgggcaagagtcacgggttagtcacttgcgcggcgtgtcggttgaaaaatagtacgttgcatgatgacttggatgacggtgatctcgaacaataaatgattgaaatgtagccatgtctctcatttctgatgcgattccagattggttggagcggttggtcaaaaagggagtgaatgctgcagctgatttctaccatttggaaagcggtcctcctcgtcctaaggcaaatcagcaaactcaagaatctcttgaaaaggacgattcgagaggtctcgtgttcccaggctacaattatctaggccctttcaacggtctagataaaggagaacccgtcaacgaggcagacgctgccgccttagaacacgacaaggcttacgacctcgaaatcaaggacgggcacaacccgtactttgagtacaacgaggccgacagacgtttccaggaacgtctcaaagacgatacctcctttggaggcaatttaggtaaagccatcttccaggccaaaaagagggttctcgaaccctttggtctggtggaagactcaaagacggctccgaccggagacaagcggaaaggcgaagacgaacctcgtttgcccgacacttcttcacagactcccaagaaaaacaagaagcctcgcaaggaaagaccttccggcggggcagaagatccgggcgaaggcacctcttccaacgctggagcagcagcacccgcctctagtgtgggatcatctatcatggctgaaggaggtggcggcccagtgggcgatgcaggccagggtgccgatggagtgggcaattcctccggaaattggcattgcgattcccaatggctggaaaacggagtcgtcactcgaaccacccgaacctgggtcttgcccagctacaacaaccacctgtacaaacgaatccaaggacccagcggaggcgacaacaacaacaaattctttggattcagcaccccctggggatactttgactacaatcgattccactgccacttttccccgcgagactggcaacgactcatcaacaacaactggggcatccgtcccaaagcgatgcgctttagactctttaacatccaggttaaagaggtcacggtccaagacttcaacaccaccatcggcaacaacctcaccagtacggtccaggtctttgcggacaaggactaccaactgccgtacgtcctcggatcggctaccgaaggcaccttcccgccgttcccagcggatatctacacgatcccgcagtacgggtactgcacgctaaactacaacaacgaggcggtggatcgttcggccttctactgtctggactactttccctcagacatgctgcggacaggaaataactttgagtttacttacaccttcgaggacgttcctttccatagcatgtttgcccacaaccagacgctagaccggctgatgaatcccctcgtggatcagtacctctgggctttcagctccgtcagccaagcaggctcatctggacgagctcttcattactcgcgggcgactaaaaccaacatggcggctcaatataggaactggttacctgggcctttcttccgtgatcagcaaatctttacgggcgctagcaacatcactaaaaataacgtctttagcgtttgggaaaaaggcaagcaatgggaactcgacaatcggaccaacctaatgcagcccggtcctgcggcagcgaccacctttagcggagaacctgaccgtcaagccatgcaaaacacgctggcttttagcaggaccgtctacgatcaaacgaccgccacgaccgatcgtaaccagatactcatcaccaacgaagacgaaatcagacccaccaactcggtcggtatcgacgcgtggggagcagttcccaccaacaaccagtcgatcgtgacccccggcactcgcgcggccgtcaacaatcaaggggcgcttcccgggatggtgtggcaaaacagagacatttaccctacagggacccatttggccaaaattcccgacactgacaatcacttccatccgtccccgcttattgggcggtttggctgcaagcatccccctccccagattttcattaaaaacacacccgtccctgccaacccttcggaaacgttccagacggccaaagtggcctccttcatcaaccagtactcgaccggacagtgcaccgtcgaaatcttttgggaactcaagaaggaaacctccaagcgctggaaccccgaaatccagttcacctccaactttggcaacgcggccgacatccagtttgccgtctccgacacgggatcctattccgaacctcgtcccatcggtacccgttaccttaccaaacctctgtaaattaaacccttcaataaaccgtttatgcgtaactgtatttccgtctcctgtcgttattcagtcacatgatgcggcattacctcaccggagtgctggccagtttccaagacaggctcgctcgctcactcgggccggggccccaaaggggcccctagcgaccgcttcgcggtcgcggcccgagtgagcgagcgagcctgtcttggaaactggcca

SEQ ID NO: 5191 - DNA, 2211 bp, Artificial Sequence
  Description of Artificial Sequence: Synthetic polynucleotide
atggctgctgatggttatcttccagattggctcgaggacactctctctgaaggaataagacagtggtggaagctcaaacctggcccaccaccaccaaagcccgcagagcggcataaggacgacagcaggggtcttgtgcttcctgggtacaagtacctcggacccttcaacggactcgacaagggagagccggtcaacgaggcagacgcagcggccctcgagcacgacaaggcctacgaccagcagctcaaggccggtgacaacccctacctcaagtacaaccacgccgacgcggagttccagcagcggcttcagggcgacacatcgtttgggggcaacctcggcagagcagtcttccaggccaaaaagagggttcttgaacctcttggtctggttgagcaagcgggtgagacggctcctggaaagaagagaccgttgattgaatccccccagcagcccgactcctccacgggtatcggcaaaaaaggcaagcagccggctaaaaagagactcaattttggtcagactggcgactcagagtcagtccccgacccacaacctctcggagaacctccagcaacccccgctgctgtgggacctactacaatggcttcaggtggtggcgcaccaatggcagacaataacgaaggcgccgacggagtgggtaatgcctcaggaaattggcattgcgattccacatggctgggcgacagagtcatcaccaccagcacccgcacctgggccttgcccacctacaataaccacctctacaagcaaatctccagtgcttcaacgggggccagcaacgacaaccactacttcggctacagcaccccctgggggtattttgacttcaacagattccactgccacttttcaccacgtgactggcagcgactcatcaacaacaattggggattccggcccaagagactcaacttcaaactcttcaacatccaagtcaaggaggtcacgacgaatgatggcgtcacaaccatcgctaataaccttaccagcacggttcaagtcttctcggactcagactatcagctcccgtacgtgctcgggtcggctcacgagggctgcctcccgccgttcccagcagacgtcttcatggtgccacagtatggatacctcaccctgaacaacgggagtcaggcagtaggacgctcttcattttactgcctggagtactttccttctcagatgctgcgtaccggaaacaactttaccttcagctacacttttgaggacgttcctttccacagcagctacgctcacagccagagtctggaccgtctcatgaatcctctcatcgaccagtacctgtattacctgaacagaactcagaatcagtccggaagtgcccaaaacaaggacttgctgtttagccgggggtctccagctggcatgtctgttcagcccaaaaactggctacctggaccctgttatcggcagcagcgcgtttctaaaacaaaaacagacaacaacaacagcaactttacctggactggtgcttcaaaatataaccttaatgggcgtgaatctataatcaaccctggcactgctatggcctcacacaaagacgacaaagacaagttctttcccatgagcggtgtcatgatttttggaaaggagagcgccggagcttcaaacactgcattggacaatgtcatgatcacagacgaagaggaaatcaaagccactaaccccgtggccaccgaaagatttgggactgtggcagtcaatctccagagcagcagcacagaccctgcgaccggagatgtgcatgttatgggagccttacctggaatggtgtggcaagacagagacgtatacctgcagggtcccatttgggccaaaattcctcacacagatggacactttcacccgtctcctcttatgggcggctttggactcaagaacccgcctcctcagatcctcatcaaaaacacgcctgttcctgcgaatcctccggcggagttttcagctacaaagtttgcttcattcatcacccaatactccacaggacaagtgagtgtggaaattgaatgggagctgcagaaagaaaacagcaagcgctggaatcccgaagtgcagtacacatccaattatgcaaaatctgccaacgttgattttactgtggacaacaatggactttatactgagcctcgccccattggcacccgttacctcacccgtcccctgtaa

SEQ ID NO: 5192 - protein, 736 aa, Artificial Sequence
  Description of Artificial Sequence: Synthetic polypeptide
MAADGYLPDWLEDTLSEGIRQWWKLKPGPPPPKPAERHKDDSRGLVLPGYKYLGPFNGLDKGEPVNEADAAALEHDKAYDQQLKAGDNPYLKYNHADAEFQQRLQGDTSFGGNLGRAVFQAKKRVLEPLGLVEQAGETAPGKKRPLIESPQQPDSSTGIGKKGKQPAKKRLNFGQTGDSESVPDPQPLGEPPATPAAVGPTTMASGGGAPMADNNEGADGVGNASGNWHCDSTWLGDRVITTSTRTWALPTYNNHLYKQISSASTGASNDNHYFGYSTPWGYFDFNRFHCHFSPRDWQRLINNNWGFRPKRLNFKLFNIQVKEVTTNDGVTTIANNLTSTVQVFSDSDYQLPYVLGSAHEGCLPPFPADVFMVPQYGYLTLNNGSQAVGRSSFYCLEYFPSQMLRTGNNFTFSYTFEDVPFHSSYAHSQSLDRLMNPLIDQYLYYLNRTQNQSGSAQNKDLLFSRGSPAGMSVQPKNWLPGPCYRQQRVSKTKTDNNNSNFTWTGASKYNLNGRESIINPGTAMASHKDDKDKFFPMSGVMIFGKESAGASNTALDNVMITDEEEIKATNPVATERFGTVAVNLQSSSTDPATGDVHVMGALPGMVWQDRDVYLQGPIWAKIPHTDGHFHPSPLMGGFGLKNPPPQILIKNTPVPANPPAEFSATKFASFITQYSTGQVSVEIEWELQKENSKRWNPEVQYTSNYAKSANVDFTVDNNGLYTEPRPIGTRYLTRPL

SEQ ID NO: 5193 - DNA, 2211 bp, Artificial Sequence
  Description of Artificial Sequence: Synthetic polynucleotide
atggcttccgatggttatcttccagattggctcgaggacaacctctctgagggcatccgcgagtggtgggacttgaaacctggagccccgaaacccaaagccaaccagcaaaagcaggacgacggccggggtctggtgcttcctggctacaagtacctcggacccttcaacggactcgacaagggggagcccgtcaacgcggcggatgcagcggccctcgagcacgacaaggcctacgaccagcagctcagagcgggtgacaatccgtacctgcggtataaccacgccgacgccgagtttcaggagcgtctgcaagaagatacgtcttttgggggcaacctcgggcgagcagtcttccaggccaagaagagggttctcgaaccttttggtctggttgaggaaggtgctaagacggctcctggaaagaaacgtccggtagagcagtcgccacaagagccagactcctcctcgggcattggcaagacaggccagcagcccgctaaaaagagactcaattttggtcagactggcgactcagagtcagtccccgacccacaacctctcggagaacctccagcaacccccgctgctgtgggacctactacaatggcttcaggcggtggcgcaccaatggcagacaataacgaaggcgccgacggagtgggtaatgcctcaggaaattggcattgcgattccacatggctgggcgacagagtcatcaccaccagcacccgaacatgggccttgcccacctataacaaccacctctacaagcaaatctccagtgcttcaacgggggccagcaacgacaaccactacttcggctacagcaccccctgggggtattttgatttcaacagattccactgccatttctcaccacgtgactggcagcgactcatcaacaacaattggggattccggcccaagagactcaacttcaaactcttcaacatccaagtcaaggaggtcacgacgaatgatggcgtcacaaccatcgctaataaccttaccagcacggttcaagtcttctcggactcggagtaccagcttccgtacgtcctcggctctgcgcaccagggctgcctccctccgttcccggcggacgtgttcatgattccgcagtacggctacctaacgctcaacaatggcagccaggcagtgggacggtcatccttttactgcctggaatatttcccatcgcagatgctgagaacgggcaataactttaccttcagctacaccttcgaggacgtgcctttccacagcagctacgcgcacagccagagcctggaccggctgatgaatcctctcatcgaccagtacctgtattacctgaacagaactcagaatcagtccggaagtgcccaaaacaaggacttgctgtttagccgggggtctccagctggcatgtctgttcagcccaaaaactggctacctggaccctgttaccggcagcagcgcgtttctaaaacaaaaacagacaacaacaacagcaactttacctggactggtgcttcaaaatataaccttaatgggcgtgaatctataatcaaccctggcactgctatggcctcacacaaagacgacaaagacaagttctttcccatgagcggtgtcatgatttttggaaaggagagcgccggagcttcaaacactgcattggacaatgtcatgatcacagacgaagaggaaatcaaagccactaaccccgtggccaccgaaagatttgggactgtggcagtcaatctccagagcagcagcacagaccctgcgaccggagatgtgcatgttatgggagccttacctggaatggtgtggcaagacagagacgtatacctgcagggtcccatttgggccaaaattcctcacacagatggacactttcacccgtctcctcttatgggcggctttggacttaagcacccgcctcctcagatcctcatcaaaaacacgcctgttcctgcgaatcctccggcagagttttcggctacaaagtttgcttcattcatcacccagtattctactggccaagtcagcgtggagattgaatgggagctgcagaaagaaaacagcaaacgctggaatcccgaagtgcagtatacatctaactatgcaaaatctgccaacgttgatttcactgtggacaacaatggactttatactgagcctcgtcccattggcacccgttacctcacccgtcccctgtaa

SEQ ID NO: 5194 - protein, 736 aa, Artificial Sequence
  Description of Artificial Sequence: Synthetic polypeptide
MASDGYLPDWLEDNLSEGIREWWDLKPGAPKPKANQQKQDDGRGLVLPGYKYLGPFNGLDKGEPVNAADAAALEHDKAYDQQLRAGDNPYLRYNHADAEFQERLQEDTSFGGNLGRAVFQAKKRVLEPFGLVEEGAKTAPGKKRPVEQSPQEPDSSSGIGKTGQQPAKKRLNFGQTGDSESVPDPQPLGEPPATPAAVGPTTMASGGGAPMADNNEGADGVGNASGNWHCDSTWLGDRVITTSTRTWALPTYNNHLYKQISSASTGASNDNHYFGYSTPWGYFDFNRFHCHFSPRDWQRLINNNWGFRPKRLNFKLFNIQVKEVTTNDGVTTIANNLTSTVQVFSDSEYQLPYVLGSAHQGCLPPFPADVFMIPQYGYLTLNNGSQAVGRSSFYCLEYFPSQMLRTGNNFTFSYTFEDVPFHSSYAHSQSLDRLMNPLIDQYLYYLNRTQNQSGSAQNKDLLFSRGSPAGMSVQPKNWLPGPCYRQQRVSKTKTDNNNSNFTWTGASKYNLNGRESIINPGTAMASHKDDKDKFFPMSGVMIFGKESAGASNTALDNVMITDEEEIKATNPVATERFGTVAVNLQSSSTDPATGDVHVMGALPGMVWQDRDVYLQGPIWAKIPHTDGHFHPSPLMGGFGLKHPPPQILIKNTPVPANPPAEFSATKFASFITQYSTGQVSVEIEWELQKENSKRWNPEVQYTSNYAKSANVDFTVDNNGLYTEPRPIGTRYLTRPL

SEQ ID NO: 5195 - DNA, 2211 bp, Artificial Sequence
  Description of Artificial Sequence: Synthetic polynucleotide
atggctgctgatggttatcttccagattggctcgaggacactctctctgaaggaataagacagtggtggaagctcaaacctggcccaccaccaccaaagcccgcagagcggcataaggacgacagcaggggtcttgtgcttcctgggtacaagtacctcggacccttcaacggactcgacaagggagagccggtcaacgaggcagacgcagcggccctcgagcacgacaaggcctacgaccagcagctcaaggccggtgacaacccctacctcaagtacaaccacgccgacgcggagttccagcagcggcttcagggcgacacatcgtttgggggcaacctcggcagagcagtcttccaggccaaaaagagggttcttgaacctcttggtctggttgagcaagcgggtgagacggctcctggaaagaagagaccgttgattgaatccccccagcagcccgactcctccacgggtatcggcaaaaaaggcaagcagccggctaaaaagagactcaattttggtcagactggcgactcagagtcagtccccgacccacaacctctcggagaacctccagcaacccccgctgctgtgggacctactacaatggcttcaggtggtggcgcaccaatggcagacaataacgaaggcgccgacggagtgggtaatgcctcaggaaattggcattgcgattccacatggctgggcgacagagtcatcaccaccagcacccgcacctgggccttgcccacctacaataaccacctctacaagcaaatctccagtgcttcaacgggggccagcaacgacaaccactacttcggctacagcaccccctgggggtattttgacttcaacagattccactgccacttttcaccacgtgactggcagcgactcatcaacaacaattggggattccggcccaagagactcaacttcaaactcttcaacatccaagtcaaggaggtcacgacgaatgatggcgtcacaaccatcgctaataaccttaccagcacggttcaagtcttctcggactcagactatcagctcccgtacgtgctcgggtcggctcacgagggctgcctcccgccgttcccagcagacgtcttcatggtgccacagtatggatacctcaccctgaacaacgggagtcaggcagtaggacgctcttcattttactgcctggagtactttccttctcagatgctgcgtaccggaaacaactttaccttcagctacacttttgaggacgttcctttccacagcagctacgctcacagccagagtctggaccgtctcatgaatcctctcatcgaccagtacctgtattacctgaacagaactcagaatcagtccggaagtgcccaaaacaaggacttgctgtttagccgggggtctccaactggcatgtctgttcagcccaaaaactggctacctggaccctgttatcggcagcagcgcgtttctaaaacaaaaacagacaacaacaacagcaactttacctggactggtgcttcaaaatataaccttaatgggcgtgaatctataatcaaccctggcactgctatggcctcacacaaagacgacaaagacaagttctttcccatgagcggtgtcatgatttttggaaaggagagcgccggagcttcaaacactgcattggacaatgtcatgatcacagacgaagaggaaatcaaagccactaaccccgtggccactgaaagatttgggactgtggcagtcaatctccagagcagcagcacagaccctgcgaccggagatgtgcatgccatgggagccttacctggaatggtgtggcaagacagagacgtatacctgcagggtcctatttgggccaaaattcctcacacggatggacactttcacccgtctcctctcatgggcggctttggactcaagaacccgcctcctcagatcctcatcaaaaacacgcctgttcctgcgaatcctccggcggagttttcagctacaaagtttgcttcattcatcacccagtattccacaggacaagtgagcgtggagattgaatgggagctgcagaaagaaaacagcaaacgctggaatcccgaagtgcagtatacatctaactatgcaaaatctgccaacgttgatttcactgtggacaacaatggactttatactgagcctcgccccattggcacccgttacctcacccgtcccctgtaa

SEQ ID NO: 5196 - protein, 736 aa, Artificial Sequence
  Description of Artificial Sequence: Synthetic polypeptide
MAADGYLPDWLEDTLSEGIRQWWKLKPGPPPPKPAERHKDDSRGLVLPGYKYLGPFNGLDKGEPVNEADAAALEHDKAYDQQLKAGDNPYLKYNHADAEFQQRLQGDTSFGGNLGRAVFQAKKRVLEPLGLVEQAGETAPGKKRPLIESPQQPDSSTGIGKKGKQPAKKRLNFGQTGDSESVPDPQPLGEPPATPAAVGPTTMASGGGAPMADNNEGADGVGNASGNWHCDSTWLGDRVITTSTRTWALPTYNNHLYKQISSASTGASNDNHYFGYSTPWGYFDFNRFHCHFSPRDWQRLINNNWGFRPKRLNFKLFNIQVKEVTTNDGVTTIANNLTSTVQVFSDSDYQLPYVLGSAHEGCLPPFPADVFMVPQYGYLTLNNGSQAVGRSSFYCLEYFPSQMLRTGNNFTFSYTFEDVPFHSSYAHSQSLDRLMNPLIDQYLYYLNRTQNQSGSAQNKDLLFSRGSPTGMSVQPKNWLPGPCYRQQRVSKTKTDNNNSNFTWTGASKYNLNGRESIINPGTAMASHKDDKDKFFPMSGVMIFGKESAGASNTALDNVMITDEEEIKATNPVATERFGTVAVNLQSSSTDPATGDVHAMGALPGMVWQDRDVYLQGPIWAKIPHTDGHFHPSPLMGGFGLKNPPPQILIKNTPVPANPPAEFSATKFASFITQYSTGQVSVEIEWELQKENSKRWNPEVQYTSNYAKSANVDFTVDNNGLYTEPRPIGTRYLTRPL

SEQ ID NO: 5197 - DNA, 2211 bp, Artificial Sequence
  Description of Artificial Sequence: Synthetic polynucleotide
atggctgccgatggttatcttccagattggctcgaggacaacctctctgagggcattcgcgagtggtgggcgctgaaacctggagccccgaagcccaaagccaaccagcaaaagcaggacgacggccggggtctggtgcttcctggctacaagtacctcggacccttcaacggactcgacaagggggagcccgtcaacgcggcggatgcagcggccctcgagcacgacaaggcctacgaccagcagctcaaagcgggtgacaatccgtacctgcggtataaccacgccgacgccgagtttcaggagcgtctgcaagaagatacgtcttttgggggcaacctcgggcgagcagtcttccaggccaagaagcgggttctcgaacctctcggtctggttgaggaaggcgctaagacggctcctggaaagaaacgtccggtagagcaatcgccacaagagccagactcctcctcgggcatcggcaagacaggccagcagcccgctaaaaagagactcaattttggtcagactggcgactcagagtcagtccccgacccacaacctctcggagaacctccagcaacccccgctgctgtgggacctactacaatggcttcaggcggtggcgcaccaatggcagacaataacgaaggcgccgacggagtgggtaatgcctcaggaaattggcattgcgattccacatggctgggcgacagagtcatcaccaccagcacccgaacatgggccttgcccacctataacaaccacctctacaagcaaatctccagtgcttcgacgggggccagcaacgacaaccactacttcggctacagcaccccctgggggtattttgactttaacagattccactgccacttttcaccacgtgactggcagcgactcatcaacaacaactggggattccggcccaagagactcagcttcaagctcttcaacatccaggtcaaggaggtcacgacgaatgatggcgtcacaaccatcgctaataaccttaccagcacggttcaagtcttctcggactcggagtaccagcttccgtacgtcctcggctctgcgcaccagggctgcctccctccgttcccggcggacgtgttcatgattccgcaatacggctacctgacgctcaacaatggcagccaagccgtgggacgttcatccttttactgcctggaatatttcccttctcagatgctgagaacgggcaacaactttaccttcagctacacctttgaggaagtgcctttccacagcagctacgcgcacagccagagcctggaccggctgatgaatcctctcatcgatcaatacctgtattacctgaacagaactcaaaatcagtccggaagtgcccaaaacaaggacttgctgtttagccgtgggtctccagctggcatgtctgttcagcccaaaaactggctacctggaccctgttatcggcagcagcgcgtttctaaaacaaaaacagacaacaacaacagcaattttacctggactggtgcttcaaaatataacctcaatgggcgtgaatccatcatcaaccctggcactgctatggcctcacataaagacgacgaagacaagttctttcccatgagcggtgtcatgatttttggaaaagagagcgccggagcttcaaacactgcattggacaatgtcatgattacagacgaagaggaaattaaagccactaaccctgtggccaccgaaagatttgggaccgtggcagtcaatttccagagcagcagcacagaccctgcgaccggagatgtgcatgctatgggagcattacctggcatggtgtggcaagatagagacgtgtacctgcagggtcccatttgggccaaaattcctcacacagatggacactttcacccgtctcctcttatgggcggctttggactcaagaacccgcctcctcagatcctcatcaaaaacacgcctgttcctgcgaatcctccggcggagttttcagctacaaagtttgcttcattcatcacccaatactccacaggacaagtgagcgtggagattgaatgggagctgcagaaagaaaacagcaaacgctggaatcccgaagtgcagtatacatctaactatgcaaaatctgccaacattgatttcactgtggacaacaatggactttatactgagcctcgccccattggcacccgttacctcacccgtccccagtaa

SEQ ID NO: 5198 - protein, 736 aa, Artificial Sequence
  Description of Artificial Sequence: Synthetic polypeptide
MAADGYLPDWLEDNLSEGIREWWALKPGAPKPKANQQKQDDGRGLVLPGYKYLGPFNGLDKGEPVNAADAAALEHDKAYDQQLKAGDNPYLRYNHADAEFQERLQEDTSFGGNLGRAVFQAKKRVLEPLGLVEEGAKTAPGKKRPVEQSPQEPDSSSGIGKTGQQPAKKRLNFGQTGDSESVPDPQPLGEPPATPAAVGPTTMASGGGAPMADNNEGADGVGNASGNWHCDSTWLGDRVITTSTRTWALPTYNNHLYKQISSASTGASNDNHYFGYSTPWGYFDFNRFHCHFSPRDWQRLINNNWGFRPKRLSFKLFNIQVKEVTTNDGVTTIANNLTSTVQVFSDSEYQLPYVLGSAHQGCLPPFPADVFMIPQYGYLTLNNGSQAVGRSSFYCLEYFPSQMLRTGNNFTFSYTFEEVPFHSSYAHSQSLDRLMNPLIDQYLYYLNRTQNQSGSAQNKDLLFSRGSPAGMSVQPKNWLPGPCYRQQRVSKTKTDNNNSNFTWTGASKYNLNGRESIINPGTAMASHKDDEDKFFPMSGVMIFGKESAGASNTALDNVMITDEEEIKATNPVATERFGTVAVNFQSSSTDPATGDVHAMGALPGMVWQDRDVYLQGPIWAKIPHTDGHFHPSPLMGGFGLKNPPPQILIKNTPVPANPPAEFSATKFASFITQYSTGQVSVEIEWELQKENSKRWNPEVQYTSNYAKSANIDFTVDNNGLYTEPRPIGTRYLTRPQ

SEQ ID NO: 5199 - DNA, 2211 bp, Artificial Sequence
  Description of Artificial Sequence: Synthetic polynucleotide
atggctgccgatggttatcttccagattggctcgaggacaacctctctgagggcattcgcgagtggtgggacttgaaacctggagccccgaaacccaaagccaaccagcaaaagcaggacgacggccggggtctggtgcttcctggctacaagtacctcggacccttcaacggactcgacaagggggagcccgtcaacgcggcggatgcagcggccctcgagcacgacaaggcctacgaccagcagctcaaagcgggtgacaatccgtaccttcggtataaccacgccgacgccgagtttcaggagcgtctgcaagaagatacgtcttttgggggcaacctcgggcgagcagtcttccaggccaaaaagagggttctcgaacctctcggtctggttgaggaagcggctaagacggctcctggaaagaaacgtccggtagagcagtcgccacaagagccagactcctcctcgggcattggcaagacaggccagcagcccgctaaaaagagactcaattttggtcagactggcgactcagagtcagtccccgacccacaacctctcggagaacctcccgcagccccctcaggtgtgggatctcttacaatggcttcaggtggtggcgcaccaatggcagacaataacgaaggcgccgacggagtgggtaatgcctcaggaaattggcattgcgattccacatggctgggcgacagagtcatcaccaccagcacccgcacctgggccttgcccacctacaataaccacctctacaagcaaatctccagtgcttcaacgggggccagcaacgacaaccactacttcggctacagcaccccctgggggtattttgacttcaacagattccactgccacttttcaccacgtgactggcaaagactcatcaacaacaattggggattccggcccaagagactcaacttcaagctcttcaacatccaagtcaaggaggtcacgacgaatgatggcgtcacgaccatcgctaataaccttaccagcacggttcaagtcttctcggactcggagtaccagttgccgtacgtcctcggctctgcgcaccagggctgcctccctccgttcccggcggacgtgttcatgattccgcagtacggctacctaacgctcaacaatggcagccaggcagtgggacggtcatccttttactgcctggaatatttcccatcgcagatgctgagaacgggcaacaactttaccttcagctacacctttgaggaagtgcctttccacagcagctacgcgcacagccagagcctggaccggctgatgaatcctctcatcgaccagtacctgtattacctgaacagaactcaaaatcagtccggaagtgcccaaaacaaggacttgctgtttagccgtgggtctccagctggcatgtctgttcagcccaaaaactggctacctggaccctgttaccggcagcagtgcgtttctaaaacaaaaacagacaacaacaacagcaactttacctggactggtgcttcaaaatataaccttaatgggcgtgaatctataatcaaccctggcactgctatggcctcacacaaagacgacaaagacaagttctttcccatgagcggtgtcatgatttttggaaaggagagcgccggagcttcaaacactgcattggacaatgtcatgatcacagacgaagaggaaatcaaagccactaaccccgtggccaccgaaagatttgggactgtggcagtcaatctccagagcagcagcacagaccctgcgaccggagatgtgcatgttatgggagccttacctggaatggtgtggcaagacagagacgtatacctgcagggtcctatttgggccaaaattcctcacacagatggacactttcacccgtctcctcttatgggcggctttggactcaagaacccgcctcctcagatcctcatcaaaaacacgcctgttcctgcgaatcctccggcggagttttcagctacaaagtttgcttcattcatcacccaatactccacaggacaagtgagcgtggagattgaatgggagctgcagaaagaaaacagcaagcgctggaatcccgaagtgcagtacacatccaattatgcaaaatctgccaacgttgatttcactgtggacaacaatggactttatactgagcctcgccccattggcacccgttacctcacccgtcccctgtaa

SEQ ID NO: 5200 - protein, 736 aa, Artificial Sequence
  Description of Artificial Sequence: Synthetic polypeptide
MAADGYLPDWLEDNLSEGIREWWDLKPGAPKPKANQQKQDDGRGLVLPGYKYLGPFNGLDKGEPVNAADAAALEHDKAYDQQLKAGDNPYLRYNHADAEFQERLQEDTSFGGNLGRAVFQAKKRVLEPLGLVEEAAKTAPGKKRPVEQSPQEPDSSSGIGKTGQQPAKKRLNFGQTGDSESVPDPQPLGEPPAAPSGVGSLTMASGGGAPMADNNEGADGVGNASGNWHCDSTWLGDRVITTSTRTWALPTYNNHLYKQISSASTGASNDNHYFGYSTPWGYFDFNRFHCHFSPRDWQRLINNNWGFRPKRLNFKLFNIQVKEVTTNDGVTTIANNLTSTVQVFSDSEYQLPYVLGSAHQGCLPPFPADVFMIPQYGYLTLNNGSQAVGRSSFYCLEYFPSQMLRTGNNFTFSYTFEEVPFHSSYAHSQSLDRLMNPLIDQYLYYLNRTQNQSGSAQNKDLLFSRGSPAGMSVQPKNWLPGPCYRQQCVSKTKTDNNNSNFTWTGASKYNLNGRESIINPGTAMASHKDDKDKFFPMSGVMIFGKESAGASNTALDNVMITDEEEIKATNPVATERFGTVAVNLQSSSTDPATGDVHVMGALPGMVWQDRDVYLQGPIWAKIPHTDGHFHPSPLMGGFGLKNPPPQILIKNTPVPANPPAEFSATKFASFITQYSTGQVSVEIEWELQKENSKRWNPEVQYTSNYAKSANVDFTVDNNGLYTEPRPIGTRYLTRPL

SEQ ID NO: 5201 - DNA, 2211 bp, Artificial Sequence
  Description of Artificial Sequence: Synthetic polynucleotide
atggctgccgatggttatcttccagattggctcgaggacaacctctctgagggcattcgcgaatggtgggacttgaaacctggagccccgaaacccaaagtcaaccagcaaaagcaggacaacgctcggggtcttgtgcttccgggttacaaatacctcggacccttcaacggactcgacaagggggagcccgtcaacgcggcggacgcagcggccctcgagcacgacaaggcctacgaccagcagctcaaagcgggtgacaatccgtaccttcggtataaccacgccgacgccgagtttcaggagcgtctgcaagaagatacgtcttttgggggcaaccttggacgagcagtcttccaggccaagaagagggttctcgaaccttttggtctggttgaggaaggtgctaagacggctcctggaaagaaacgtccggtagagcagtcgccacaagagccagactcctcctcgggcattggcaagacaggccagcagcccgctaaaaagagactcaattttggtcagactggcgactcagagtcagtccccgacccacaacctctcggagaacctccagcaacccccgctgctgtgggacctactacaatggcttcaggcggtggcgcaccaatggcagacaataacgaaggcgccgacggagtgggtaatgcctcaggaaattggcattgcgattccacatggctgggcgacagagtcatcaccaccagcacccgcacctgggccttgcccacctacaataaccacctctacaagcaaatctccagtgcttcaacgggggccagcaacgacaaccactacttcggctacagcaccccctgggggtattttgacttcaacagattccactgccacttttcaccacgtgactggcaaagactcatcaacaacaattggggattccggcccaagagactcaacttcaagctcttcaacatccaagtcaaggaggtcacgacgaatgatggcgtcacgaccatcgctaataaccttaccagcacggttcaagtcttctcggactcggagtaccagttgccgtacgtcctcggctctgcgcaccagggctgcctccctccgttcccggcggacgtgttcatgattccgcaatacggctacctgacgctcaacaatggcagccaggcagtgggacggtcatccttttactgcctggaatatttcccatcgcagatgctgagaacgggcaataactttaccttcagctacacttttgaggacgttcctttccacagcagctacgctcacagccagagcctggaccggctgatgaatcctctcatcgaccagtacctgtattacctgaacagaactcagaatcagtccggaagtgcccaaaacaaggacttgctgtttagccgtgggtctccaactggcatgtctgttcagcccaaaaactggctacctggaccctgttatcggcagcagcgcgtttctaaaacaaaaacagacaacaacaacagcaactttacctggactggtgcttcaaaatataaccttaatgggcgtgaatctataatcaaccctggcactgctatggcctcacacaaagacgacgaagacaagttctttcccatgagcggtgtcatgatttttggaaaggagagcgccggagcttcaaacactgcattggacaatgtcatgatcacagacgaagaggaaatcaaagccactaaccccgtggccactgaaagatttgggactgtggcagtcaatctccagagcagcagcacagaccctgcgaccggagatgtgcatgccatgggagccttacctggaatggtgtggcaagacagagacgtatacctgcagggtcctatttgggccaaaattcctcacacggatggacactttcacccgtctcctctcatgggcggctttggacttaagcacccgcctcctcagatcctcatcaaaaacacgcctgttcctgcgaatcctccggcagagttttcggctacaaagtttgcttcattcatcacccagtattccacaggacaagtgagcgtggagattgaatgggagctgcagaaagaaaacagcaaacgctggaatcccgaagtgcagtatacatctaactatgcaaaatctgccaacgttgatttcactgtggacaacaatggactttatactgagcctcgccccattggcacccgttacctcacccgtcccctgtaa

SEQ ID NO: 5202 - protein, 736 aa, Artificial Sequence
  Description of Artificial Sequence: Synthetic polypeptide
MAADGYLPDWLEDNLSEGIREWWDLKPGAPKPKVNQQKQDNARGLVLPGYKYLGPFNGLDKGEPVNAADAAALEHDKAYDQQLKAGDNPYLRYNHADAEFQERLQEDTSFGGNLGRAVFQAKKRVLEPFGLVEEGAKTAPGKKRPVEQSPQEPDSSSGIGKTGQQPAKKRLNFGQTGDSESVPDPQPLGEPPATPAAVGPTTMASGGGAPMADNNEGADGVGNASGNWHCDSTWLGDRVITTSTRTWALPTYNNHLYKQISSASTGASNDNHYFGYSTPWGYFDFNRFHCHFSPRDWQRLINNNWGFRPKRLNFKLFNIQVKEVTTNDGVTTIANNLTSTVQVFSDSEYQLPYVLGSAHQGCLPPFPADVFMIPQYGYLTLNNGSQAVGRSSFYCLEYFPSQMLRTGNNFTFSYTFEDVPFHSSYAHSQSLDRLMNPLIDQYLYYLNRTQNQSGSAQNKDLLFSRGSPTGMSVQPKNWLPGPCYRQQRVSKTKTDNNNSNFTWTGASKYNLNGRESIINPGTAMASHKDDEDKFFPMSGVMIFGKESAGASNTALDNVMITDEEEIKATNPVATERFGTVAVNLQSSSTDPATGDVHAMGALPGMVWQDRDVYLQGPIWAKIPHTDGHFHPSPLMGGFGLKHPPPQILIKNTPVPANPPAEFSATKFASFITQYSTGQVSVEIEWELQKENSKRWNPEVQYTSNYAKSANVDFTVDNNGLYTEPRPIGTRYLTRPL

SEQ ID NO: 5203 - DNA, 2208 bp, Artificial Sequence
  Description of Artificial Sequence: Synthetic polynucleotide
  modified_base (955)..(955): a, c, t or g
  modified_base (971)..(972): a, c, t or g
  modified_base (981)..(981): a, c, t or g
  modified_base (986)..(986): a, c, t or g
  modified_base (1235)..(1235): a, c, t or g
  modified_base (1694)..(1696): a, c, t or g
  modified_base (1698)..(1698): a, c, t or g
  modified_base (1763)..(1765): a, c, t or g
  modified_base (1778)..(1778): a, c, t or g
  modified_base (2204)..(2204): a, c, t or g
atggctgccgatggttatcttccagattggctcgaggacaacctctctgagggcattcgcgaatggtgggacttgaaacctggagccccgaaacccaaagtcaaccagcaaaagcaggacaacgctcggggtcttgtgcttccgggttacaaatacctcggacccttcaacggactcgacaagggggagcccgtcaacgcggcggacgcagcggccctcgagcacgacaaggcctacgaccagcagctcaaagcgggtgacaatccgtaccttcggtataaccacgccgacgccgagtttcaggagcgtctgcaagaagatacgtcttttgggggcaaccttggacgagcagtcttccaggccaagaagagggttctcgaaccttttggtctggttgaggaaggtgctaagacggctcctggaaagaaacgtccggtagagcagtcgccacaagagccagactcctcctcgggcattggcaagacaggccagcagcccgctaaaaagagactcaattttggtcagactggcgactcagagtcagtccccgacccacaacctctcggagaacctccagcaacccccgctgctgtgggacctactacaatggcttcaggcggtggcgcaccaatggcagacaataacgaaggcgccgacggagtgggtaatgcctcaggaaattggcattgcgattccacatggctgggcgacagagtcatcaccaccagcacccgaacatgggccttgcccacctataacaaccacctctacaagcaaatctccagtgcttcaacgggggccagcaacgacaaccactacttcggctacagcaccccctgggggtattttgatttcaacagattccactgccacttttcaccacgtgactggcagcgactcatcaataacaattggggattccggcccaagagactcaacttcaaactcttcaacntccaagtcaaggaggnnacgacgaangatgncgtcacaaccatcgctaataaccttaccagcacggttcaagtcttctcggactcggagtaccagcttccgtacgtcctcggctctgcgcaccagggctgcctccctccgttcccggcggacgtgttcatgattccgcaatacggctacctgacgctcaacaatggcagccaggcagtgggacggtcatccttttactgcctggaatatttcccatcgcagatgctgagaacgggcaataactttacctncagctacacttttgaggacgttcctttccacagcagctacgctcacagccagagcctggaccggctgatgaatcctctcatcgaccagtacctgtattacctgaacagaactcagaatcagtccggaagtgcccaaaacaaggacttgctgtttagccgtgggtctccaactggcatgtctgttcagcccaaaaactggctacctggaccctgttatcggcagcagcgcgtttctaaaacaaaaacagacaacaacaacagcaactttacctggactggtgcttcaaaatataaccttaatgggcgtgaatctataatcaaccctggcactgctatggcctcacacaaagacgacgaagacaagttctttcccatgagcggtgtcatgatttttggaaaggagagcgccggagcttcaaacactgcattggacaatgtcatgatcacagacgaagagannncnaagccactaaccccgtggccactgaaagatttgggactgtggcagtcaatctccaagcagcacannnaccctgcgaccgnagatgtgcatgccatgggagccttacctggaatggtgtggcaagacagagacgtatacctgcagggtcctatttgggccaaaattcctcacacggatggacactttcacccgtctcctctcatgggcggctttggacttaagcacccgcctcctcagatcctcatcaaaaacacgcctgttcctgcgaatcctccggcagagttttcggctacaaagtttgcttcattcatcacccagtattccacaggacaagtgagcgtggagattgaatgggagctgcagaaagaaaacagcaaacgctggaatcccgaagtgcagtatacatctaactatgcaaaatctgccaacgttgatttcactgtggacaacaatggactttatactgagcctcgccccattggcacccgttacctcacccgtccccngtaa

SEQ ID NO: 5204 - protein, 723 aa, Artificial Sequence
  Description of Artificial Sequence: Synthetic polypeptide
MAADGYLPDWLEDNLSEGIREWWDLKPGAPKPKVNQQKQDNARGLVLPGYKYLGPFNGLDKGEPVNAADAAALEHDKAYDQQLKAGDNPYLRYNHADAEFQERLQEDTSFGGNLGRAVFQAKKRVLEPFGLVEEGAKTAPGKKRPVEQSPQEPDSSSGIGKTGQQPAKKRLNFGQTGDSESVPDPQPLGEPPATPAAVGPTTMASGGGAPMADNNEGADGVGNASGNWHCDSTWLGDRVITTSTRTWALPTYNNHLYKQISSASTGASNDNHYFGYSTPWGYFDFNRFHCHFSPRDWQRLINNNWGFRPKRLNFKLFNQVKETTDVTTIANNLTSTVQVFSDSEYQLPYVLGSAHQGCLPPFPADVFMIPQYGYLTLNNGSQAVGRSSFYCLEYFPSQMLRTGNNFTSYTFEDVPFHSSYAHSQSLDRLMNPLIDQYLYYLNRTQNQSGSAQNKDLLFSRGSPTGMSVQPKNWLPGPCYRQQRVSKTKTDNNNSNFTWTGASKYNLNGRESIINPGTAMASHKDDEDKFFPMSGVMIFGKESAGASNTALDNVMITDEEATNPVATERFGTVAVNLQSSPATDVHAMGALPGMVWQDRDVYLQGPIWAKIPHTDGHFHPSPLMGGFGLKHPPPQILIKNTPVPANPPAEFSATKFASFITQYSTGQVSVEIEWELQKENSKRWNPEVQYTSNYAKSANVDFTVDNNGLYTEPRPIGTRYLTRP

SEQ ID NO: 5205 - DNA, 2208 bp, Artificial Sequence
  Description of Artificial Sequence: Synthetic polynucleotide
atggctgccgatggttatcttccagattggctcgaggacactctctctgaaggaataagacagtggtggaagctcaaacctggcccaccaccaccaaagcccgcagagcggcataaggacgacagcaggggtcttgtgcttcctgggtacaagtacctcggacccttcaacggactcgacaagggagagccggtcaacgaggcagacgccgcggccctcgagcacgacaaagcctatgaccggcagctcgacagcggagacaacccgtacctcaagtacaaccacgccgacgcggagtttcaggagcgccttaaagaagatacgtcttttgggggcaacctcggacgagcagtcttccaggcgaaaaagagggttcttgaacctctgggcctggttgaggaacctgttaagacggctccgggaaaaaagaggccggtagagcactctcctgtggagccagactcctcctcgggaaccggaaaggcgggtcagcagcctgcaagaaaaagattgaattttggtcagactggagacgcagactcagtacctgacccccagcctctcggacagccaccagcagccccctctggtctgggaactaatacgatggctacaggcagtggcgcaccaatggcagacaataacgagggcgccgacggagtgggtaattcctcgggaaattggcattgcgattccacatggatgggcgacagagtcatcaccaccagcacccgaacctgggccctgcccacctacaacaaccacctctacaaacaaatttccagccaatcaggagcctcgaacgacaatcactactttggctacagcaccccttgggggtattttgacttcaacagattccactgccacttttcaccacgtgactggcaaagactcatcaacaacaactggggattccgacccaagagactcaagttcaagctctttaacattcaagtcaaagaggtcacgcagaatgacggtacgacgacgattgccaataaccttaccagcacggttcaggtgtttactgactcggagtaccagctcccgtacgtcctcggctcggcgcatcaaggatgcctcccgccgttcccagcagacgtcttcatggtgccacagtatggatacctcaccctgaacaacgggagtcaggcagtaggacgctcttcattttactgcctggagtactttccttctcagatgctgcgtaccggtaacaactttaccttcagctacacttttgaggacgttcctttccacagcagctacgctcacagccagagtctggaccgtctcatgaatcctctcatcgaccagtacctgtattacttgagcagaacagacgctccaagtggaaccaccacgcagtcaaggcttcagttttctcaggccggagcgagtgacattcgggaccagtctaggaactggcttcctggaccctgttaccgccagcagcgagtatcaaagacatctgcggataacaacaacagtgaatactcgtggactggagctaccaagtaccacctcaatggcagagactctctggtgaatccgggcccggccatggcaagccacaaggacgatgaagaaaagttttttcctcagagcggggttctcatctttgggaagcaaggctcagagaaaacaagtgtggacattgaaaaggtcatgattacagacgaagaggaaatcaggacaaccaatcccgtggctacggagcagtatggttctgtatctaccaacctccagagaggcaacagacaagcagctaccgcagatgtcaacacacaaggcgttcttccaggcatggtctggcaggacagagatgtgtaccttcaggggcccatctgggcaaagattccacacacggacggacattttcacccctctcccctcatgggtggattcggacttaaacaccctcctccacagattctcatcaagaacaccccggtacctgcgaatccttcgaccaccttcagtgcggcaaagtttgcttccttcatcacacagtactccacgggacaggtcagcgtggagatcgagtgggagctgcagaaggaaaacagcaaacgctggaatcccgaagttcagtacacttccaactacaacaagtctgttaatgtggactttactgtggacactaatggcgtgtattcagagcctcgccccattggcaccagatacctgactcgtaatctgtaa

SEQ ID NO: 5206 - protein, 735 aa, Artificial Sequence
  Description of Artificial Sequence: Synthetic polypeptide
MAADGYLPDWLEDTLSEGIRQWWKLKPGPPPPKPAERHKDDSRGLVLPGYKYLGPFNGLDKGEPVNEADAAALEHDKAYDRQLDSGDNPYLKYNHADAEFQERLKEDTSFGGNLGRAVFQAKKRVLEPLGLVEEPVKTAPGKKRPVEHSPVEPDSSSGTGKAGQQPARKRLNFGQTGDADSVPDPQPLGQPPAAPSGLGTNTMATGSGAPMADNNEGADGVGNSSGNWHCDSTWMGDRVITTSTRTWALPTYNNHLYKQISSQSGASNDNHYFGYSTPWGYFDFNRFHCHFSPRDWQRLINNNWGFRPKRLKFKLFNIQVKEVTQNDGTTTIANNLTSTVQVFTDSEYQLPYVLGSAHQGCLPPFPADVFMVPQYGYLTLNNGSQAVGRSSFYCLEYFPSQMLRTGNNFTFSYTFEDVPFHSSYAHSQSLDRLMNPLIDQYLYYLSRTDAPSGTTTQSRLQFSQAGASDIRDQSRNWLPGPCYRQQRVSKTSADNNNSEYSWTGATKYHLNGRDSLVNPGPAMASHKDDEEKFFPQSGVLIFGKQGSEKTSVDIEKVMITDEEEIRTTNPVATEQYGSVSTNLQRGNRQAATADVNTQGVLPGMVWQDRDVYLQGPIWAKIPHTDGHFHPSPLMGGFGLKHPPPQILIKNTPVPANPSTTFSAAKFASFITQYSTGQVSVEIEWELQKENSKRWNPEVQYTSNYNKSVNVDFTVDTNGVYSEPRPIGTRYLTRNL

SEQ ID NO: 5207 - DNA, 2208 bp, Artificial Sequence
  Description of Artificial Sequence: Synthetic polynucleotide
atggctgccgatggttatcttccagattggctcgaggacactctctctgaaggaataagacagtggtggaagctcaaacctggcccaccaccaccaaagcccgcagagcggcataaggacgacagcaggggtcttgtgcttcctgggtacaagtacctcggacccttcaacggactcgacaagggagagccggtcaacgaggcagacgccgcggccctcgagcacgacaaagcctatgaccggcagctcgacagcggagacaacccgtacctcaagtacaaccacgccgacgcggagtttcaggagcgccttaaagaagatacgtcttttgggggcaacctcggacgagcagtcttccaggcgaaaaagagggttcttgaacctctgggcctggttgaggaacctgttaagacggctccgggaaaaaagaggccggtagagcactctcctgtggagccagactcctcctcgggaaccggaaaggcgggccagcagcctgcaagaaaaagattgaattttggtcagactggagacgcaaactcagtacctgacccccagcctctcggacagccaccagcagccccctctggtctgggaactaatacgatggctacaggcagtggcgcaccaatggcagacaataacgagggcgccgacggagtgggtaattcctcgggaaattggcattgcgattccacatggatgggcgacagagtcatcaccaccagcacccgaacctgggccctgcccacctacaacaaccacctctacaaacaaatttccagccaatcaggagcctcgaacgacaatcactactttggctacagcaccccttgggggtattttgacttcaacagattccactgccacttttcaccacgtgactggcaaagactcatcaacaacaactggggattccgacccaagagactcaagttcaagctctttaacattcaagtcaaagaggtcacgcagaatgacggtacgacgacgattgccaataaccttaccagcacggttcaggtgtttactgactcggagtaccagctcccgtacgtcctcggctcggcgcatcaaggatgcctcccgccgttcccagcagacgtcttcatggtgccacagtatggatacctcaccctgaacaacgggagtcgggcagtaggacgctcttcattttactgcctggagtactttccttctcagatgctgcgtaccggtaacaactttaccttcagctacacttttgaggacgttcctttccacagcagctacgctcacagccagagtctggaccgtctcatgaatcctctcatcgaccagtacctgtattacttgagcagaacagacactccaagtggaaccaccacgcagtcaaggcttcagttttctcaggccggagcgagtgacattcgggaccagtctaggaactggcttcctggaccctgttaccgccagcagcgagtatcaaagacatctgcggataacaacaacagtgaatactcgtggactggagctaccaagtaccacctcaatggcagagactctctggtgaatccgggcccggccatggcaagccacaaggacgatgaagaaaagttttttcctcagagcggggttctcatctttgggaagcaaggctcagagaaaacaagtgtggacattgaaaaggtcatgattacagacgaagaggaaatcaggacgaccaatcccgtggctacggagcagtatggttctgtatctaccaacctccagagaggcaacagacaagcagctaccgcagatgtcaacacacaaggcgttcttccaggcatggtctggcaggacagagatgtgtaccttcaggggcccatctgggcaaagattccacacacggacggacattttcacccctctcccctcatgggtggattcggacttaaacaccctcctccacagattctcatcaagaacaccccggtacctgcgaatccttcgaccaccttcagtgcggcaaagtttgcttccttcatcacacagtactccacgggacaggtcagcgtggagatcgagtgggagctgcagaaggaaaacagcaaacgctggaatcccgaagttcagtacacttccaactacaacaagtctgttaatgtggactttactgtggacactaatggcgtgtatacagagcctcgccccattggcaccagatacctgactcgtaatctgtaa

SEQ ID NO: 5208 - protein, 735 aa, Artificial Sequence
  Description of Artificial Sequence: Synthetic polypeptide
MAADGYLPDWLEDTLSEGIRQWWKLKPGPPPPKPAERHKDDSRGLVLPGYKYLGPFNGLDKGEPVNEADAAALEHDKAYDRQLDSGDNPYLKYNHADAEFQERLKEDTSFGGNLGRAVFQAKKRVLEPLGLVEEPVKTAPGKKRPVEHSPVEPDSSSGTGKAGQQPARKRLNFGQTGDANSVPDPQPLGQPPAAPSGLGTNTMATGSGAPMADNNEGADGVGNSSGNWHCDSTWMGDRVITTSTRTWALPTYNNHLYKQISSQSGASNDNHYFGYSTPWGYFDFNRFHCHFSPRDWQRLINNNWGFRPKRLKFKLFNIQVKEVTQNDGTTTIANNLTSTVQVFTDSEYQLPYVLGSAHQGCLPPFPADVFMVPQYGYLTLNNGSRAVGRSSFYCLEYFPSQMLRTGNNFTFSYTFEDVPFHSSYAHSQSLDRLMNPLIDQYLYYLSRTDTPSGTTTQSRLQFSQAGASDIRDQSRNWLPGPCYRQQRVSKTSADNNNSEYSWTGATKYHLNGRDSLVNPGPAMASHKDDEEKFFPQSGVLIFGKQGSEKTSVDIEKVMITDEEEIRTTNPVATEQYGSVSTNLQRGNRQAATADVNTQGVLPGMVWQDRDVYLQGPIWAKIPHTDGHFHPSPLMGGFGLKHPPPQILIKNTPVPANPSTTFSAAKFASFITQYSTGQVSVEIEWELQKENSKRWNPEVQYTSNYNKSVNVDFTVDTNGVYTEPRPIGTRYLTRNL

SEQ ID NO: 5209 - DNA, 2211 bp, Artificial Sequence
  Description of Artificial Sequence: Synthetic polynucleotide
atggctgccgatggttatcttccagattggctcgaggacactctctctgaaggaataagacagtggtggaagctcaaacctggcccaccaccaccaaagcccgcagagcggcataaggacgacagcaggggtcttgtgcttcctgggtacaagtacctcggacccttcaacggactcgacaagggagagccggtcaacgaggcagacgccgcggccctcgagcacgacaaggcctacgaccagcagctcaaagcgggtgacaatccgtacctgcggtataaccacgccgacgccgagtttcaggagcgtctgcaagaagatacgtcttttgggggcaacctcgggcgagcagtcttccaggccaagaagcgggttctcgaacctctcggtctggttgaggaaggcgctaagacggctcctggaaagaaacgtccggtagagcagtcgccacaagagccagactcctcctcgggcatcggcaagacaggccagcagcccgctaaaaagagactcaattttggtcagactggcgactcagagtcagtccccgacccacaacctctcggagaacctccagcaacccccgctgctgtgggacctactacaatggcttcaggcggtggcgcaccaatggcagacaataacgaaggcgccgacggagtgggtaatgcctcaggaaattggcattgcgattccacatggctgggcgacagagtcatcaccaccagcacccgaacatgggccttgcccacctataacaaccacctctacaagcaaatctccagtgcttcgacgggggccagcaacgacaaccactacttcggctacagcaccccctgggggtattttgactttaacagattccactgccacttttcaccacgtgactggcagcgactcatcaacaataactggggattccggcccaagagactcagcttcaagctcttcaacatccaggtcaaggaggtcacgacgaatgatggcgtcacaaccatcgctaataaccttaccagcacggttcaagtcttctcggactcggagtaccagcttccgtacgtcctcggctctgcgcaccagggctgcctccctccgttcccggcggacgtgttcatgattccgcaatacggctacctgacgctcaacaatggcagccaagccgtgggacgttcatccttttactgcctggaatatttcccttctcagatgctgagaacgggcaacaactttaccttcagctacacctttgaggaagtgcctttccacagcagctacgcgcacagccagagcctggaccggctgatgaatcctctcatcgatcaatacctgtattacctgaacagaactcaaaatcagtccggaagtgcccaaaacaaggacttgctgtttagccgtgggtctccagctggcatgtctgttcagcccaaaaactggctacctggaccctgttatcggcagcagcgcgtttctaaaacaaaaacagacaacaacaacagcaattttacctggactggtgcttcaaaatataacctcaatgggcgtgaatccatcatcaaccctggcactgctatggcctcacacaaagacgacgaagacaagttctttcccatgagcggtgtcatgatttttggaaaagagagcgccggagcttcaaacactgcattggacaatgtcatgattacggacgaagaggaaattaaagccactaaccctgtggccaccgaaagatttgggaccgtggcagtcaatttccagagcagcagcacagaccctgcgaccggagatgtgcatgctatgggagcattacctggcatggtgtggcaagatagagacgtgtacctgcagggtcccatttgggccaaaattcctcacacagatggacactttcacccgtctcctcttatgggcggctttggactcaagaacccgcctcctcagatcctcatcaaaaacacgcctgttcctgcgaatcctccggcggagttttcagctacaaagtttgcttcattcatcactcaatactccacaggacaagtgagcgtggaaattgaatgggagctgcagaaagaaaacagcaaacgctggaatcccgaagtgcagtatacatctaactatgcaaaatctgccaacgttgatttcactgtggacaacaatggactttatactgagcctcgccccattggcacccgttacctcacccgtcccctgtaa

SEQ ID NO: 5210 - protein, 736 aa, Artificial Sequence
  Description of Artificial Sequence: Synthetic polypeptide
MAADGYLPDWLEDTLSEGIRQWWKLKPGPPPPKPAERHKDDSRGLVLPGYKYLGPFNGLDKGEPVNEADAAALEHDKAYDQQLKAGDNPYLRYNHADAEFQERLQEDTSFGGNLGRAVFQAKKRVLEPLGLVEEGAKTAPGKKRPVEQSPQEPDSSSGIGKTGQQPAKKRLNFGQTGDSESVPDPQPLGEPPATPAAVGPTTMASGGGAPMADNNEGADGVGNASGNWHCDSTWLGDRVITTSTRTWALPTYNNHLYKQISSASTGASNDNHYFGYSTPWGYFDFNRFHCHFSPRDWQRLINNNWGFRPKRLSFKLFNIQVKEVTTNDGVTTIANNLTSTVQVFSDSEYQLPYVLGSAHQGCLPPFPADVFMIPQYGYLTLNNGSQAVGRSSFYCLEYFPSQMLRTGNNFTFSYTFEEVPFHSSYAHSQSLDRLMNPLIDQYLYYLNRTQNQSGSAQNKDLLFSRGSPAGMSVQPKNWLPGPCYRQQRVSKTKTDNNNSNFTWTGASKYNLNGRESIINPGTAMASHKDDEDKFFPMSGVMIFGKESAGASNTALDNVMITDEEEIKATNPVATERFGTVAVNFQSSSTDPATGDVHAMGALPGMVWQDRDVYLQGPIWAKIPHTDGHFHPSPLMGGFGLKNPPPQILIKNTPVPANPPAEFSATKFASFITQYSTGQVSVEIEWELQKENSKRWNPEVQYTSNYAKSANVDFTVDNNGLYTEPRPIGTRYLTRPL

SEQ ID NO: 5211 - protein, 735 aa, Artificial Sequence
  Description of Artificial Sequence: Synthetic polypeptide
MAADGYLPDWLEDTLSEGIRQWWKLKPGPPPPKPAERHKDDSRGLVLPGYKYLGPFNGLDKGEPVNEADAAALEHDKAYDRQLDSGDNPYLKYNHADAEFQERLKEDTSFGGNLGRAVFQAKKRVLEPLGLVEEPVKTAPGKKRPVEHSPVEPDSSSGTGKAGQQPARKRLNFGQTGDADSVPDPQPLGQPPAAPSGLGTNTMATGSGAPMADNNEGADGVGNSSGNWHCDSTWMGDRVITTSTRTWALPTYNNHLYKQISSQSGASNDNHYFGYSTPWGYFDFNRFHCHFSPRDWQRLINNNWGFRPKRLKFKLFNIQVKEVTQNDGTTTIANNLTSTVQVFTDSEYQLPYVLGSAHQGCLPPFPADVFMVPQYGYLTLNNGSQAVGRSSFYCLEYFPSQMLRTGNNFTFSYTFEDVPFHSSYAHSQSLDRLMNPLIDQYLYYLSRTDTPSGTTTQSRLQFSQAGASDIRNQSRNWLPGPCYRQQRVSKTSADNNNSEYSWTGATKYHLNGRDSLVNPGPAMASHKDDEEKFFPQSGVLIFGKQGSEKTSVDIEKVMITDEEEIRTTNPVATEQYGSVSTNLQRGNRQAATADVNTQGVLPGMVWQDRDVYLQGPIWAKIPHTDGHFHPSPLMGGFGLKHPPPQILIKNTPVPANPSTTFSAAKFASFITQYSTGQVSVEIEWELQKENSKRWNPEVQYTSNYNKSVNVDFTVDTNGVYSEPRPIGTRYLTRNQ

SEQ ID NO: 5212 - DNA, 2208 bp, Artificial Sequence
  Description of Artificial Sequence: Synthetic polynucleotide
atggctgccgatggttatcttccagattggctcgaggacactctctctgaaggaataagacagtggtggaagctcaaacctggcccaccaccaccaaagcccgcagagcggcataaggacgacagcaggggtcttgtgcttcctgggtacaagtacctcggacccttcaacggactcgacaagggagagccggtcaacgaggcagacgccgcggccctcgagcacgacaaagcctatgaccggcagctcgacagcggagacaacccgtacctcaagtacaaccacgccgacgcggagtttcaggaacgccttaaagaagatacgtcttttgggggcaacctcggacgagcagtcttccaggcgaaaaagagggttcttgaacctctgggcctggttgaggaacctgttaagacggctccgggaaaaaagaggccggtagagcactctcctgtggagccagactcctcctcgggaaccggaaaggcgggccagcagcctgcaagaaaaagattgaattttggtcagactggagacgcagactcagtacctgacccccagcctctcggacagccaccagcagccccctctggtctgggaactaatacgatggctacaggcagtggcgcaccaatggcagacaataacgagggcgccgacggagtgggtaattcctcgggaaattggcattgcgattccacatggatgggcgacagagtcatcaccaccagcacccgaacctgggccctgcccacctacaacaaccacctctacaaacaaatttccagccaatcaggagcctcgaacgacaatcactactttggctacagcaccccttgggggtattttgacttcaacagattccactgccacttttcaccacgtgactggcaaagactcatcaacaacaactggggattccgacccaagagactcaagttcaagctctttaacattcaagtcaaagaggtcacgcagaatgacggtacgacgacgattgccaataaccttaccagcacggttcaggtgtttactgactcggagtaccagctcccgtacgtcctcggctcggcgcatcaaggatgcctcccgccgttcccagcagacgtcttcatggtgccacagtatggatacctcaccctgaacaacgggagtcaggcagtaggacgctcttcattttactgcctggagtactttccttctcagatgctgcgtaccggtaacaactttaccttcagctacacttttgaggacgttcctttccacagcagctacgctcacagccagagtctggaccgtctcatgaatcctctcatcgaccagtacctgtattacttgagcagaacagacactccaagtggaaccaccacgcagtcaaggcttcagttttctcaggccggagcgagtgacattcggaaccagtctaggaactggcttcctggaccctgttaccgccagcagcgagtatcaaagacatctgcggataacaacaacagtgaatactcgtggactggagctaccaagtaccacctcaatggcagagactctctggtgaatccgggcccggccatggcaagccacaaggacgatgaagaaaagttttttcctcagagcggggttctcatctttgggaagcaaggctcagagaaaacaagtgtggacattgaaaaggtcatgattacagacgaagaggaaatcaggacaaccaatcccgtggctacggagcagtatggttctgtatctaccaacctccagagaggcaacagacaagcagctaccgcagatgtcaacacacaaggcgttcttccaggcatggtctggcaggacagagatgtgtaccttcaggggcccatctgggcaaagattccacacacggacggacattttcacccctctcccctcatgggtggattcggacttaaacaccctcctccacagattctcatcaagaacaccccggtacctgcgaatccttcgaccaccttcagtgcggcaaagtttgcttccttcatcacacagtactccacgggacaggtcagcgtggagatcgagtgggagctgcagaaggaaaacagcaaacgctggaatcccgaagttcagtacacttccaactacaacaagtctgttaatgtggactttactgtggacactaatggcgtgtattcagagcctcgccccattggcaccagatacctgactcgtaatcagtaa

SEQ ID NO: 5213 - DNA, 2208 bp, Artificial Sequence
  Description of Artificial Sequence: Synthetic polynucleotide
atggctgccgatggttatcttccagattggctcgaggacactctctctgaaggaataagacagtggtggaagctcaaacctggcccaccaccaccaaagcccgcagagcggcataaggacgacagcaggggtcttgtgcttcctgggtacaagtacctcggacccttcaacggactcgacaagggagagccggtcaacgaggcagacgccgcggccctcgagcacgacaaagcctatgaccggcagctcgacagcggagacaacccgtacctcaagtacaaccacgccgacgcggagtttcaggagcgccttaaagaagatacgtcttttgggggcaacctcggacgagcagtcttccaggcgaaaaagagggttcttgaacctctgggcctggttgaggaacctgttaagacggctccgggaaaaaagaggccggtagagcactctcctgtggagccagactcctcctcgggaaccggaaaggcgggccagcagcctgcaagaaaaagattgaattttggtcagactggagacgcagactcagtacctgatccccagcctctcggacagccaccagcagccccctctggtctgggaactaatacgatggctacaggcagtggcgcaccaatggcagacaataacgagggcgccgacggagtgggtaattcctcgggaaattggcattgcgattccacatggatgggcgacagagtcatcaccaccagcacccgaacctgggccctgcccacctacaacaaccacctctacaaacaaatttccagccaatcaggagcctcgaacgacaatcactactttggctacagcaccccttgggggtattttgacttcaacagattccactgccacttttcaccacgtgactggcaaagactcatcaacaacaactggggattccgacccaagagactcaagttcaagctctttaacattcaagtcaaagaggtcacgcagaatgacggtacgacgacgattgccaataaccttaccagcacggttcaggtgtttactgactcggagtaccagctcccgtatgtcctcggctcggcgcatcaaggatgcctcccgccgttcccagcagacgtcttcatggtgccacagtatggatacctcaccctgaacaacgggagtcaggcagtaggacgctcttcattttactgcctggagtactttccttctcagatgctgcgtaccggtaacaactttaccttcagctacacttttgaggacgttcctttccacagcagctacgctcacagccagagtctggaccgtctcatgaatcctctcatcgaccagtacctgtattacttgagcagaacagacactccaagtggaaccaccacgcagtcaaggcttcagttttctcaggccggagcgagtgacattcgggaccagtctaggaactggcttcctggaccctgttaccgccagcagcgagtatcaaagacatctgcggataacaacaacagtgaatactcgtggactggagctaccaagtaccacctcaatggcagagactctctggtgaatccgggcccggccatggcaagccacaaggacgatgaagaaaagttttttcctcagagcggggttctcatctttgggaagcaaggctcagagaaaacaagtgtggacattgaaaaggtcatgattacagacgaagaggaaatcaggacaaccaatcccgtggctacggagcagtatggttctgtatctaccaacctccagagaggcaacagacaagcagctaccgcagatgtcaacacacaaggcgttcttccaggcatggtctggcaggacagagatgtgtaccttcaggggcccatctgggcaaagattccacacacggacggacattttcacccctctcccctcatgggtggattcggacttaaacaccctcctccacagattctcatcaagaacaccccggtacctgcgaatccttcgaccaccttcagtgcggcaaagtttgcttccttcatcacacagtactccacgggacaggtcagcgtggagatcgagtgggagctgcagaaggaaaacagcaaacgctggaatcccgaagttcagtacacttccaactacaacaagtctgttaatgtggactttactgtggacactaatggcgtgtattcagagcctcgccccattggcaccagatacctgactcgtaatctgtaa

SEQ ID NO: 5214 - protein, 735 aa, Artificial Sequence
  Description of Artificial Sequence: Synthetic polypeptide
MAADGYLPDWLEDTLSEGIRQWWKLKPGPPPPKPAERHKDDSRGLVLPGYKYLGPFNGLDKGEPVNEADAAALEHDKAYDRQLDSGDNPYLKYNHADAEFQERLKEDTSFGGNLGRAVFQAKKRVLEPLGLVEEPVKTAPGKKRPVEHSPVEPDSSSGTGKAGQQPARKRLNFGQTGDADSVPDPQPLGQPPAAPSGLGTNTMATGSGAPMADNNEGADGVGNSSGNWHCDSTWMGDRVITTSTRTWALPTYNNHLYKQISSQSGASNDNHYFGYSTPWGYFDFNRFHCHFSPRDWQRLINNNWGFRPKRLKFKLFNIQVKEVTQNDGTTTIANNLTSTVQVFTDSEYQLPYVLGSAHQGCLPPFPADVFMVPQYGYLTLNNGSQAVGRSSFYCLEYFPSQMLRTGNNFTFSYTFEDVPFHSSYAHSQSLDRLMNPLIDQYLYYLSRTDTPSGTTTQSRLQFSQAGASDIRDQSRNWLPGPCYRQQRVSKTSADNNNSEYSWTGATKYHLNGRDSLVNPGPAMASHKDDEEKFFPQSGVLIFGKQGSEKTSVDIEKVMITDEEEIRTTNPVATEQYGSVSTNLQRGNRQAATADVNTQGVLPGMVWQDRDVYLQGPIWAKIPHTDGHFHPSPLMGGFGLKHPPPQILIKNTPVPANPSTTFSAAKFASFITQYSTGQVSVEIEWELQKENSKRWNPEVQYTSNYNKSVNVDFTVDTNGVYSEPRPIGTRYLTRNL

SEQ ID NO: 5215 - DNA, 2172 bp, Artificial Sequence
  Description of Artificial Sequence: Synthetic polynucleotide
atgtcttttgttgatcaccctccagattggttggaagaagttggtgaaggtcttcgcgagtttttgggccttgaagcgggcccaccgaaaccaaaacccaatcagcagcatcaagatcaagcccgtggtcttgtgctgcctggttataactatctcggacccggaaacggtctcgatcgaggagagcctgtcaacagggcagacgaggtcgcgcgagagcacgacatctcgtacaacgagcagcttgaggcgggagacaacccctacctcaagtacaaccacgcggacgccgagtttcaggagaagctcgccgacgacacatccttcgggggaaacctcggaaaggcagtctttcaggccaagaaaagggttctcgaaccttttggcctggttgaagagggtgctaagacggcccctaccggaaagcggatagacgaccactttccaaaaagaaagaaggctcggaccgaagaggactccaagccttccacctcgtcagacgccgaagctggacccagcggatcccagcagctgcaaatcccagcccaaccagcctcaagtttgggagctgatacaatgtctgcgggaggtggcggcccattgggcgacaataaccaaggtgccgatggagtgggcaatgcctcgggagattggcattgcgattccacgtggatgggggacagagtcgtcaccaagtccacccgaacctgggtgctgcccagctacaacaaccaccagtaccgagagatcaaaagcggctccgtcgacggaagcaacgccaacgcctactttggatacagcaccccctgggggtactttgactttaaccgcttccacagccactggagcccccgagactggcaaagactcatcaacaactactggggcttcagaccccggtccctcagagtcaaaatcttcaacattcaagtcaaagaggtcacggtgcaggactccaccaccaccatcgccaacaacctcacctccaccgtccaagtgtttacggacgacgactaccagctgccctacgtcgtcggcaacgggaccgagggatgcctgccggccttccctccgcaggtctttacgctgccgcagtacggttacgcgacgctgaaccgcgacaacacagaaaatcccaccgagaggagcagcttcttctgcctagagtactttcccagcaagatgctgagaacgggcaacaactttgagtttacctacaactttgaggaggtgcccttccactccagcttcgctcccagtcagaacctgttcaagctggccaacccgctggtggaccagtacttgtaccgcttcgtgagcacaaataacactggcggagtccagttcaacaagaacctggccgggagatacgccaacacctacaaaaactggttcccggggcccatgggccgaacccagggctggaacctgggctccggggtcaaccgcgccagtgtcagcgccttcgccacgaccaataggatggagctcgagggcgcgagttaccaggtgcccccgcagccgaacggcatgaccaacaacctccagggcagcaacacctatgccctggagaacactatgatcttcaacagccagccggcgaacccgggcaccaccgccacgtacctcgagggcaacatgctcatcaccagcgagagcgagacgcagccggtgaaccgcgtggcgtacaacgtcggcgggcagatggccaccaacaaccagagctccaccactgcccccgcgaccggcacgtacaacctccaggaaatcgtgcccggcagcgtgtggatggagagggacgtgtacctccaaggacccatctgggccaagatcccagagacgggggcgcactttcacccctctccggccatgggcggattcggactcaaacacccaccgcccatgatgctcatcaagaacacgcctgtgcccggaaatatcaccagcttctcggacgtgcccgtcagcagcttcatcacccagtacagcaccgggcaggtcaccgtggagatggagtgggagctcaagaaggaaaactccaagaggtggaacccagagatccagtacacaaacaactacaacgacccccagtttgtggactttgccccggacagcaccggggaatacagaaccaccagacctatcggaacccgataccttacccgacccctt

SEQ ID NO: 5216 - DNA, 2214 bp, Artificial Sequence
  Description of Artificial Sequence: Synthetic polynucleotide
atggctgccgatggttatcttccagattggctcgaggacaacctctctgagggcattcgcgagtggtgggcgctgaaacctggagccccgaagcccaaagccaaccagcaaaagcaggacgacggccggggtctggtgcttcctggctacaagtacctcggacccttcaacggactcgacaagggggagcccgtcaacgcggcggacgcagcggccctcgagcacgacaaggcctacgaccagcagctgcaggcgggtgacaatccgtacctgcggtataaccacgccgacgccgagtttcaggagcgtctgcaagaagatacgtcttttgggggcaacctcgggcgagcagtcttccaggccaagaagcgggttctcgaacctctcggtctggttgaggaaggcgctaagacggctcctggaaagaagagaccggtagagccatcaccccagcgttctccagactcctctacgggcatcggcaagaaaggccaacagcccgccagaaaaagactcaattttggtcagactggcgactcagagtcagttccagaccctcaacctctcggagaacctccagcagcgccctctggtgtgggacctaatacaatggctgcaggcggtggcgcaccaatggcagacaataacgaaggcgccgacggagtgggtagttcctcgggaaattggcattgcgattccacatggctgggcgacagagtcatcaccaccagcacccgaacctgggccctgcccacctacaacaaccacctctacaagcaaatctccaacgggacatcgggaggagccaccaacgacaacacctacttcggctacagcaccccctgggggtattttgactttaacagattccactgccacttttcaccacgtgactggcagcgactcatcaacaacaactggggattccggcccaagagactcagcttcaagctcttcaacatccaggtcaaggaggtcacgcagaatgaaggcaccaagaccatcgccaataacctcaccagcaccatccaggtgtttacggactcggagtaccagctgccgtacgttctcggctctgcccaccagggctgcctgcctccgttcccggcggacgtgttcatgattccccagtacggctacctaacactcaacaacggtagtcaggccgtgggacgctcctccttctactgcctggaatactttccttcgcagatgctgagaaccggcaacaacttccagtttacttacaccttcgaggacgtgcctttccacagcagctacgcccacagccagagcttggaccggctgatgaatcctctgattgaccagtacctgtactacttgtctcggactcaaacaacaggaggcacggcaaatacgcagactctgggcttcagccaaggtgggcctaatacaatggccaatcaggcaaagaactggctgccaggaccctgttaccgccaacaacgcgtctcaacgacaaccgggcaaaacaacaatagcaactttgcctggactgctgggaccaaataccatctgaatggaagaaattcattggctaatcctggcatcgctatggcaacacacaaagacgacgaggagcgtttttttcccagtaacgggatcctgatttttggcaaacaaaatgctgccagagacaatgcggattacagcgatgtcatgctcaccagcgaggaagaaatcaaaaccactaaccctgtggctacagaggaatacggtatcgtggcagataacttgcctgagcggacggcgatgagtcttccgggaactgtcaacagccagggggccttacccggtatggtctggcagaaccgggacgtgtacctgcagggtcccatctgggccaagattcctcacacggacggcaacttccacccgtctccgctgatgggcggctttggcctgaaacatcctccgcctcagatcctgatcaagaacacgcctgtacctgcggatcctccgaccaccttcaaccagtcaaagctgaactctttcatcacgcaatacagcaccggacaggtcagcgtggaaattgaatgggagctgcagaaggaaaacagcaagcgctggaaccccgagatccagtacacctccaactactacaaatctacaagtgtggactttgctgttaatacagaaggcgtgtactctgaaccccgccccattggcacccgttacctcacccgtaatctg

SEQ ID NO: 5217 - protein, 738 aa, Artificial Sequence
  Description of Artificial Sequence: Synthetic polypeptide
MAADGYLPDWLEDNLSEGIREWWALKPGAPKPKANQQKQDDGRGLVLPGYKYLGPFNGLDKGEPVNAADAAALEHDKAYDQQLQAGDNPYLRYNHADAEFQERLQEDTSFGGNLGRAVFQAKKRVLEPLGLVEEGAKTAPGKKRPVEPSPQRSPDSSTGIGKKGQQPARKRLNFGQTGDSESVPDPQPLGEPPAAPSGVGPNTMAAGGGAPMADNNEGADGVGSSSGNWHCDSTWLGDRVITTSTRTWALPTYNNHLYKQISNGTSGGATNDNTYFGYSTPWGYFDFNRFHCHFSPRDWQRLINNNWGFRPKRLSFKLFNIQVKEVTQNEGTKTIANNLTSTIQVFTDSEYQLPYVLGSAHQGCLPPFPADVFMIPQYGYLTLNNGSQAVGRSSFYCLEYFPSQMLRTGNNFQFTYTFEDVPFHSSYAHSQSLDRLMNPLIDQYLYYLSRTQTTGGTANTQTLGFSQGGPNTMANQAKNWLPGPCYRQQRVSTTTGQNNNSNFAWTAGTKYHLNGRNSLANPGIAMATHKDDEERFFPSNGILIFGKQNAARDNADYSDVMLTSEEEIKTTNPVATEEYGIVADNLPERTAMSLPGTVNSQGALPGMVWQNRDVYLQGPIWAKIPHTDGNFHPSPLMGGFGLKHPPPQILIKNTPVPADPPTTFNQSKLNSFITQYSTGQVSVEIEWELQKENSKRWNPEIQYTSNYYKSTSVDFAVNTEGVYSEPRPIGTRYLTRNL

SEQ ID NO: 5218 - DNA, 2214 bp, Artificial Sequence
  Description of Artificial Sequence: Synthetic polynucleotide
atggctgccgatggttatcttccagattggctcgaggacaacctctctgagggcattcgcgagtggtgggcgctgaaacctggagccccgaagcccaaagccaaccagcaaaagcaggacgacggccggggtctggtgcttcctggctacaagtacctcggacccttcaacggactcgacaagggggagcccgtcaacgcggcggacgcagcggccctcgagcacgacaaggcctacgaccagcagctgcaggcgggtgacaatccgtacctgcggtataaccacgccgacgccgagtttcaggagcgtctgcaagaagatacgtcttttgggggcaacctcgggcgagcagtcttccaggccaagaagcgggttctcgaacctctcggtctggttgaggaaggcgctaagacggctcctggaaagaagagaccggtagagccatcaccccagcgttctccagactcctctacgggcatcggcaagaaaggccaacagcccgccagaaaaagactcaattttggtcagactggcgactcagagtcagttccagaccctcaacctctcggagaacctccagcagcgccctctggtgtgggacctaatacaatggctgcaggcggtggcgcaccaatggcagacaataacgaaggcgccgacggagtgggtagttcctcgggaaattggcattgcgattccacatggctgggcgacagagtcatcaccaccagcacccgaacctgggccctgcccacctacaacaaccacctctacaagcaaatctccaacgggacatcgggaggagccaccaacgacaacacctacttcggctacagcaccccctgggggtattttgactttaacagattccactgccacttttcaccacgtgactggcagcgactcatcaacaacaactggggattccggcccaagagactcagcttcaagctcttcaacatccaggtcaaggaggtcacgcagaatgaaggcaccaagaccatcgccaataacctcaccagcaccatccaggtgtttacggactcggagtaccagctgccgtacgttctcggctctgcccaccagggctgcctgcctccgttcccggcggacgtgttcatgattccccagtacggctacctaacactcaacaacggtagtcaggccgtgggacgctcctccttctactgcctggaatactttccttcgcagatgctgagaaccggcaacaacttccagtttacttacaccttcgaggacgtgcctttccacagcagctacgcccacagccagagcttggaccggctgatgaatcctctgattgaccagtacctgtactacttgtctcggactcaaacaacaggaggcacggcaaatacgcagactctgggcttcagccaaggtgggcctaatacaatggccaatcaggcaaagaactggctgccaggaccctgttaccgccaacaacgcgtctcaacgacaaccgggcaaaacaacaatagcaactttgcctggactgctgggaccaaataccatctgaatggaagaaattcattggctaatcctggcatcgctatggcaacacacaaagacgacgaggagcgtttttttcccagtaacgggatcctgatttttggcaaacaaaatgctgccagagacaatgcggattacagcgatgtcatgctcaccagcgaggaagaaatcaaaaccactaaccctgtggctacagaggaatacggtatcgtggcagataacttgagttttagtcgtgcggttctttgtgatggaactgtcaacagccagggggccttacccggtatggtctggcagaaccgggacgtgtacctgcagggtcccatctgggccaagattcctcacacggacggcaacttccacccgtctccgctgatgggcggctttggcctgaaacatcctccgcctcagatcctgatcaagaacacgcctgtacctgcggatcctccgaccaccttcaaccagtcaaagctgaactctttcatcacgcaatacagcaccggacaggtcagcgtggaaattgaatgggagctgcagaaggaaaacagcaagcgctggaaccccgagatccagtacacctccaactactacaaatctacaagtgtggactttgctgttaatacagaaggcgtgtactctgaaccccgccccattggcacccgttacctcacccgtaatctg

SEQ ID NO: 5219 - protein, 738 aa, Artificial Sequence
  Description of Artificial Sequence: Synthetic polypeptide
MAADGYLPDWLEDNLSEGIREWWALKPGAPKPKANQQKQDDGRGLVLPGYKYLGPFNGLDKGEPVNAADAAALEHDKAYDQQLQAGDNPYLRYNHADAEFQERLQEDTSFGGNLGRAVFQAKKRVLEPLGLVEEGAKTAPGKKRPVEPSPQRSPDSSTGIGKKGQQPARKRLNFGQTGDSESVPDPQPLGEPPAAPSGVGPNTMAAGGGAPMADNNEGADGVGSSSGNWHCDSTWLGDRVITTSTRTWALPTYNNHLYKQISNGTSGGATNDNTYFGYSTPWGYFDFNRFHCHFSPRDWQRLINNNWGFRPKRLSFKLFNIQVKEVTQNEGTKTIANNLTSTIQVFTDSEYQLPYVLGSAHQGCLPPFPADVFMIPQYGYLTLNNGSQAVGRSSFYCLEYFPSQMLRTGNNFQFTYTFEDVPFHSSYAHSQSLDRLMNPLIDQYLYYLSRTQTTGGTANTQTLGFSQGGPNTMANQAKNWLPGPCYRQQRVSTTTGQNNNSNFAWTAGTKYHLNGRNSLANPGIAMATHKDDEERFFPSNGILIFGKQNAARDNADYSDVMLTSEEEIKTTNPVATEEYGIVADNLSFSRAVLCDGTVNSQGALPGMVWQNRDVYLQGPIWAKIPHTDGNFHPSPLMGGFGLKHPPPQILIKNTPVPADPPTTFNQSKLNSFITQYSTGQVSVEIEWELQKENSKRWNPEIQYTSNYYKSTSVDFAVNTEGVYSEPRPIGTRYLTRNL

SEQ ID NO: 5220 - DNA, 2215 bp, Artificial Sequence
  Description of Artificial Sequence: Synthetic polynucleotide
atggctgccgatggttatcttccagattggctcgaggacactctctctgaaggaataagacagtggtggaagctcaaacctggcccaccaccaccaaagcccgcagagcggcataaggacgacagcaggggtcttgtgcttcctgggtacaagtacctcggacccttcaacggactcgacaagggagagccggtcaacgaggcagacgccgcggccctcgagcacgacaaagcctacgaccggcagctcgacagcggagacaacccgtacctcaagtacaaccacgccgacgccgagttccaggagcggctcaaagaagatacgtcttttgggggcaacctcgggcgagcagtcttccaggccaaaaagaggcttcttgaacctcttggtctggttgaggaagcggctaagacggctcctggaaagaagaggcctgtagagcactctcctgtggagccagactcctcctcgggaaccggaaaggcgggccagcagcctgcaagaaaaagattgaattttggtcagactggagacgcagactcagtcccagaccctcaaccaatcggagaacctcccgcagccccctcaggtgtgggatctcttacaatggctgcaggcggtggcgcaccaatggcagacaataacgagggcgccgacggagtgggtaattcctcgggaaattggcattgcgattccacatggatgggcgacagagtcatcaccaccagcacccgaacctgggccctgcccacctacaacaaccacctctacaagcaaatctccaacagcacatctggaggatcttcaaatgacaacgcctacttcggctacagcaccccctgggggtattttgactttaacagattccactgccacttttcaccacgtgactggcagcgactcatcaacaacaactggggattccggcccaagagactcagcttcaagctcttcaacatccaggtcaaggaggtcacgcagaatgaaggcaccaagaccatcgccaataacctcaccagcaccatccaggtgtttacggactcggagtaccagctgccgtacgttctcggctctgcccaccagggctgcctgcctccgttcccggcggacgtgttcatgattccccagtacggctacctaacactcaacaacggtagtcaggccgtgggacgctcctccttctactgcctggaatactttccttcgcagatgctgagaaccggcaacaacttccagtttacttacaccttcgaggacgtgcctttccacagcagctacgcccacagccagagcttggaccggctgatgaatcctctgattgaccagtacctgtactacttgtctcggactcaaacaacaggaggcacgacaaatacgcagactctgggcttcagccaaggtgggcctaatacaatggccaatcaggcaaagaactggctgccaggaccctgttaccgccagcagcgagtatcaaagacatctgcggataacaacaacagtgaatactcgtggactggagctaccaagtaccacctcaatggcagagactctctggtgaatccgggcccggccatggcaagccacaaggacgatgaagaaaagtttttttcctcagagcggggttctcatctttgggaagcaaggctcagagaaaacaaatgtggacattgaaaaggtcatgattacagacgaagaggaaatcaggacaaccaatcccgtggctacggagcagtatggttctgtatctaccaacctccagagaggcaacagacaagcagctaccgcagatgtcaacacacaaggcgttcttccaggcatggtctggcaggacagagatgtgtaccttcaggggcccatctgggcaaagattccacacacggacggacattttcacccctctcccctcatgggtggattcggacttaaacaccctccgcctcagatcctgatcaagaacacgcctgtacctgcggatcctccgaccaccttcaaccagtcaaagctgaactctttcatcacccagtattctactggccaagtcagcgtggagatcgagtgggagctgcagaaggaaaacagcaagcgctggaaccccgagatccagtacacctccaactactacaaatctacaagtgtggactttgctgttaatacagaaggcgtgtactctgaaccccgccccattggcacccgttacctcacccgtaatctgtaa

SEQ ID NO: 5221 - protein, 737 aa, Artificial Sequence
  Description of Artificial Sequence: Synthetic polypeptide
MAADGYLPDWLEDTLSEGIRQWWKLKPGPPPPKPAERHKDDSRGLVLPGYKYLGPFNGLDKGEPVNEADAAALEHDKAYDRQLDSGDNPYLKYNHADAEFQERLKEDTSFGGNLGRAVFQAKKRLLEPLGLVEEAAKTAPGKKRPVEHSPVEPDSSSGTGKAGQQPARKRLNFGQTGDADSVPDPQPIGEPPAAPSGVGSLTMAAGGGAPMADNNEGADGVGNSSGNWHCDSTWMGDRVITTSTRTWALPTYNNHLYKQISNSTSGGSSNDNAYFGYSTPWGYFDFNRFHCHFSPRDWQRLINNNWGFRPKRLSFKLFNIQVKEVTQNEGTKTIANNLTSTIQVFTDSEYQLPYVLGSAHQGCLPPFPADVFMIPQYGYLTLNNGSQAVGRSSFYCLEYFPSQMLKTGNNFQFTYTFEDVPFHSSYAHSQSLDRLMNPLIDQYLYYLSRTQTTGGTTNTQTLGFSQGGPNTMANQAKNWLPGPCYRQQRVSKTSADNNNSEYSWTGATKYHLNGRDSLVNPGPAMASHKDDEEKFFPQSGVLIFGKQGSEKTNVDIEKVMITDEEEIRTTNPVATEQYGSVSTNLQRGNRQAATADVNTQGVLPGMVWQDRDVYLQGPIWAKIPHTDGHFHPSPLMGGFGLKHPPPQILIKNTPVPADPPTTFNQSKLNSFITQYSTGQVSVEIEWELQKENSKRWNPEIQYTSNYYKSTSVDFAVNTEGVYSEPRPIGTRYLTRNL

SEQ ID NO: 5222 - protein, 737 aa, Artificial Sequence
  Description of Artificial Sequence: Synthetic polypeptide
MAADGYLPDWLEDTLSEGIRQWWKLKPGPPPPKPAERHKDDSRGLVLPGYKYLGPFNGLDKGEPVNEADAAALEHDKAYDRQLDSGDNPYLKYNHADAEFQERLKEDTSFGGNLGRAVFQAKKRLLEPLGLVEEAAKTAPGKKRPVEHSPVEPDSSSGTGKAGQQPARKRLNFGQTGDADSVPDPQPIGEPPAAPSGVGSLTMAAGGGAPMADNNEGADGVGNSSGNWHCDSTWMGDRVITTSTRTWALPTYNNHLYKQISNSTSGGSSNDNAYFGYSTPWGYFDFNRFHCHFSPRDWQRLINNNWGFRPKRLSFKLFNIQVKEVTQNEGTKTIANNLTSTIQVFTDSEYQLPYVLGSAHQGCLPPFPADVFMIPQYGYLTLNNGSQAVGRSSFYCLEYFPSQMLKTGNNFQFTYTFEDVPFHSSYAHSQSLDRLMNPLIDQYLYYLSRTQTTGGTTNTQTLGFSQGGPNTMANQAKNWLPGPCYRQQRVSKTSADNNNSEYSWTGATKYHLNGRDSLVNPGPAMASHKDDEEKFFPQSGVLIFGKQGSEKTNVDIEKVMITDEEEIRTTNPVATEQYGSVSTNLQQGNTQAATADVNTQGVLPGMVWQDRDVYLQGPIWAKIPHTDGHFHPSPLMGGFGLKHPPPQILIKNTPVPADPPTTFNQSKLNSFITQYSTGQVSVEIEWELQKENSKRWNPEIQYTSNYYKSTSVDFAVNTEGVYSEPRPIGTRYLTRNL

SEQ ID NO: 5223 - protein, 737 aa, Artificial Sequence
  Description of Artificial Sequence: Synthetic polypeptide
MAADGYLPDWLEDTLSEGIRQWWKLKPGPPPPKPAERHKDDSRGLVLPGYKYLGPFNGLDKGEPVNEADAAALEHDKAYDRQLDSGDNPYLKYNHADAEFQERLKEDTSFGGNLGRAVFQAKKRLLEPLGLVEEAAKTAPGKKRPVEHSPVEPDSSSGTGKAGQQPARKRLNFGQTGDADSVPDPQPIGEPPAAPSGVGSLTMAAGGGAPMADNNEGADGVGNSSGNWHCDSTWMGDRVITTSTRTWALPTYNNHLYKQISNSTSGGSSNDNAYFGYSTPWGYFDFNRFHCHFSPRDWQRLINNNWGFRPKRLSFKLFNIQVKEVTQNEGTKTIANNLTSTIQVFTDSEYQLPYVLGSAHQGCLPPFPADVFMIPQYGYLTLNNGSQAVGRSSFYCLEYFPSQMLRTGNNFQFTYTFEDVPFHSSYAHSQSLDRLMNPLIDQYLYYLSRTQTTGGTTNTQTLGFSQGGPNTMANQAKNWLPGPCYRQQRVSKTSADNNNSEYSWTGATKYHLNGRDSLVNPGPAMASHKDDEEKFFPQSGVLIFGKQGSEKTNVDIEKVMITDEEEIRTTNPVATEQYGSVSTNLQQGNTQAATADVNTQGVLPGMVWQDRDVYLQGPIWAKIPHTDGHFHPSPLMGGFGLKHPPPQILIKNTPVPADPPTTFNQSKLNSFITQYSTGQVSVEIEWELQKENSKRWNPEIQYTSNYYKSTSVDFAVNTEGVYSEPRPIGTRYLTRNL

SEQ ID NO: 5224 - DNA, 2214 bp, Artificial Sequence
  Description of Artificial Sequence: Synthetic polynucleotide
atggctgccgatggttatcttccagattggctcgaggacaaccttagtgaaggaattcgcgagtggtgggctttgaaacctggagcccctcaacccaaggcaaatcaacaacatcaagacaacgctcgaggtcttgtgcttccgggttacaaataccttggacccggcaacggactcgacaagggggagccggtcaacgcagcagacgcggcggccctcgagcacgacaaggcctacgaccagcagctgcaggcgggtgacaatccgtacctgcggtataaccacgccgacgccgagtttcaggagcgtctgcaagaagatacgtcttttgggggcaaccttggcagagcagtcttccaggccaaaaagaggatccttgagcctcttggtctggttgaggaagcagctaaaacggctcctggaaagaagaggcctgtagatcagtctcctcaggaaccggactcatcatctggtgttggcaaatcgggcaaacagcctgccagaaaaagactaaatttcggtcagactggcgactcagagtcagtcccagaccctcaacctctcggagaaccaccagcagcccccacaagtttgggatctaatacaatggcttcaggcggtggcgcaccaatggcagacaataacgagggtgccgatggggtgggtagttcctcgggaaattggcattgcgattcccaatggctgggggacagagtcatcaccaccagcacccgaacctgggccctgcccacctacaacaatcacctctacaagcaaatctccaacgggacatcgggaggagccaccaacgacaacacctacttcggctacagcaccccctgggggtattttgactttaacagattccactgccacttttcaccacgtgactggcagcgactcatcaacaacaactggggattccggcccaagagactcagcttcaagctcttcaacatccaggtcaaggaggtcacgcagaatgaaggcaccaagaccatcgccaataacctcaccagcaccatccaggtgtttacggactcggagtaccagctgccgtacgttctcggctctgcgcaccagggctgcctccctccgttcccggcggacgtgttcatgattccgcaatacggctacctgacgctcaacaatggcagccaagccgtgggacgttcatccttttactgcctggaatatttcccttctcagatgctgagaacgggcaacaactttaccttcagctacacctttgaggaagtgcctttccacagcagctacgcgcacagccagagcttggaccggctgatgaatcctctgattgaccagtacctgtactacttgtctcggactcaaacaacaggaggcacggcaaatacgcagactctgggcttcagccaaggtgggcctaatacaatggccaatcaggcaaagaactggctgccaggaccctgttaccgccaacaacgcgtctcaacgacaaccgggcaaaacaacaatagcaactttgcctggactgctgggaccaaataccatctgaatggaagaaattcattggctaatcctggcatcgctatggcaacacacaaagacgacgaggagcgtttttttcccagtaacgggatcctgatttttggcaaacaaaatgctgccagagacaatgcggattacagcgatgtcatgctcaccagcgaggaagaaatcaaaaccactaaccctgtggctacagaggaatacggtatcgtggcagataacttgcagcagcaaaacacggctcctcaaattggaactgtcaacagccagggggccttacccggtatggtctggcagaaccgggacgtgtacctgcagggtcccatctgggccaagattcctcacacggacggcaacttccacccgtctccgctgatgggcggctttggcctgaaacatcctccgcctcagatcctgatcaagaacacgcctgtacctgcggatcctccgaccaccttcaaccagtcaaagctgaactctttcatcacgcaatacagcaccggacaggtcagcgtggagatcgagtgggagctgcagaaggaaaacagcaagcgctggaacccggagatccagtacacttccaactattacaagtctaataatgttgaatttgctgttaatactgaaggtgtatatagtgaaccccgccccattggcaccagatacctgactcgtaatctgtaa

SEQ ID NO: 5225 - protein, 737 aa, Artificial Sequence
  Description of Artificial Sequence: Synthetic polypeptide
MAADGYLPDWLEDNLSEGIREWWALKPGAPQPKANQQHQDNARGLVLPGYKYLGPGNGLDKGEPVNAADAAALEHDKAYDQQLQAGDNPYLRYNHADAEFQERLQEDTSFGGNLGRAVFQAKKRILEPLGLVEEAAKTAPGKKRPVDQSPQEPDSSSGVGKSGKQPARKRLNFGQTGDSESVPDPQPLGEPPAAPTSLGSNTMASGGGAPMADNNEGADGVGSSSGNWHCDSQWLGDRVITTSTRTWALPTYNNHLYKQISNGTSGGATNDNTYFGYSTPWGYFDFNRFHCHFSPRDWQRLINNNWGFRPKRLSFKLFNIQVKEVTQNEGTKTIANNLTSTIQVFTDSEYQLPYVLGSAHQGCLPPFPADVFMIPQYGYLTLNNGSQAVGRSSFYCLEYFPSQMLRTGNNFTFSYTFEEVPFHSSYAHSQSLDRLMNPLIDQYLYYLSRTQTTGGTANTQTLGFSQGGPNTMANQAKNWLPGPCYRQQRVSTTTGQNNNSNFAWTAGTKYHLNGRNSLANPGIAMATHKDDEERFFPSNGILIFGKQNAARDNADYSDVMLTSEEEIKTTNPVATEEYGIVADNLQQQNTAPQIGTVNSQGALPGMVWQNRDVYLQGPIWAKIPHTDGNFHPSPLMGGFGLKHPPPQILIKNTPVPADPPTTFNQSKLNSFITQYSTGQVSVEIEWELQKENSKRWNPEIQYTSNYYKSNNVEFAVNTEGVYSEPRPIGTRYLTRNL

SEQ ID NO: 5226 - DNA, 2211 bp, Artificial Sequence
  Description of Artificial Sequence: Synthetic polynucleotide
atggctgccgatggttatcttccagattggctcgaggacaacctctctgagggcattcgcgagtggtgggacttgaaacctggagccccgaagcccaaagccaaccagcaaaagcaggacgacggccggggtctggtgcttcctggctacaagtacctcggacccttcaacggactcgacaagggggagcccgtcaacgcggcggacgcagcggccctcgagcacgacaaggcctacgaccagcagctcaaagcgggtgacaatccgtacctgcggtataaccacgccgacgccgagtttcaggagcgtctgcaagaagatacgtcttttgggggcaacctcgggcgagcagtcttccaggccaagaagcgggttctcgaacctctcggtctggttgaggaaggcgctaagacggctcctggaaagaaacgtccggtagagcagtcgccacaagagccagactcctcctcgggcatcggcaagacaggccagcagcccgctaaaaagagactcaattttggtcagactggcgactcagagtcagtccccgacccacaacctctcggagaacctccagcaacccccgctgctgtgggacctactacaatggcttcaggcggtggcgcaccaatggcagacaataacgaaggcgccgacggagtgggtaatgcctcaggaaattggcattgcgattccacatggctgggcgacagagtcatcaccaccagcacccgaacatgggccttgcccacctataacaaccacctctacaagcaaatctccagtgcttcaacgggggccagcaacgacaaccactacttcggctacagcaccccctgggggtattttgatttcaacagattccactgccatttctcaccacgtgactggcagcgactcatcaacaacaattggggattccggcccaagagactcaacttcaagctcttcaacatccaagtcaaggaggtcacgacgaatgatggcgtcacgaccatcgctaataaccttaccagcacggttcaagtcttctcggactcggagtaccagctgccgtacgttctcggctctgcccaccagggctgcctgcctccgttcccggcggacgtgttcatgattccccagtacggctacctaacactcaacaacggtagtcaggccgtgggacgctcctccttctactgcctggaatactttccttcgcagatgctgagaaccggcaacaacttccagtttacttacaccttcgaggacgtgcctttccacagcagctacgcccacagccagagcttggaccggctgatgaatcctctgattgaccagtacctgtactacttgtctcggactcaaacaacaggaggcacggcaaatacgcagactctgggcttcagccaaggtgggcctaatacaatggccaatcaggcaaagaactggctgccaggaccctgttaccgccaacaacgcgtctcaacgacaaccgggcaaaacaacaatagcaattttacctggactggtgcttcaaaatataacctcaatgggcgtgaatccatcatcaaccctggcactgctatggcctcacacaaagacgacgaagacaagttctttcccatgagcggtgtcatgatttttggaaaagagagcgccggagcttcaaacactgcattggacaatgtcatgattacagacgaagaggaaattaaagccactaaccctgtggccaccgaaagatttgggaccgtggcagtcaatttccagagcagcagcacagaccctgcgaccggagatgtgcatgctatgggagcattacctggcatggtgtggcaagatagagacgtgtacctgcagggtcccatttgggccaaaattcctcacacagatggacactttcacccgtctcctcttatgggcggctttggactcaagaacccgcctcctcagatcctcatcaaaaacacgcctgttcctgcgaatcctccggcggagttttcagctacaaagtttgcttcattcatcacccaatactccacaggacaagtgagtgtggaaattgaatgggagctgcagaaagaaaacagcaagcgctggaatcccgaagtgcagtacacatccaattatgcaaaatctgccaacgttgattttactgtggacaacaatggactttatactgagcctcgccccattggcacccgttacctcacccgtcccctgtaa

SEQ ID NO: 5227 - protein, 736 aa, Artificial Sequence
  Description of Artificial Sequence: Synthetic polypeptide
MAADGYLPDWLEDNLSEGIREWWDLKPGAPKPKANQQKQDDGRGLVLPGYKYLGPFNGLDKGEPVNAADAAALEHDKAYDQQLKAGDNPYLRYNHADAEFQERLQEDTSFGGNLGRAVFQAKKRVLEPLGLVEEGAKTAPGKKRPVEQSPQEPDSSSGIGKTGQQPAKKRLNFGQTGDSESVPDPQPLGEPPATPAAVGPTTMASGGGAPMADNNEGADGVGNASGNWHCDSTWLGDRVITTSTRTWALPTYNNHLYKQISSASTGASNDNHYFGYSTPWGYFDFNRFHCHFSPRDWQRLINNNWGFRPKRLNFKLFNIQVKEVTTNDGVTTIANNLTSTVQVFSDSEYQLPYVLGSAHQGCLPPFPADVFMIPQYGYLTLNNGSQAVGRSSFYCLEYFPSQMLRTGNNFQFTYTFEDVPFHSSYAHSQSLDRLMNPLIDQYLYYLSRTQTTGGTANTQTLGFSQGGPNTMANQAKNWLPGPCYRQQRVSTTTGQNNNSNFTWTGASKYNLNGRESIINPGTAMASHKDDEDKFFPMSGVMIFGKESAGASNTALDNVMITDEEEIKATNPVATERFGTVAVNFQSSSTDPATGDVHAMGALPGMVWQDRDVYLQGPIWAKIPHTDGHFHPSPLMGGFGLKNPPPQILIKNTPVPANPPAEFSATKFASFITQYSTGQVSVEIEWELQKENSKRWNPEVQYTSNYAKSANVDFTVDNNGLYTEPRPIGTRYLTRPL

SEQ ID NO: 5228 - DNA, 2211 bp, Artificial Sequence
  Description of Artificial Sequence: Synthetic polynucleotide
atggctgctgacggttatcttccagattggctcgaggacaacctttctgaaggcattcgagagtggtgggcgctgcaacctggagcccctaaacccaaggcaaatcaacaacatcaggacaacgctcggggtcttgtgcttccgggttacaaatacctcggacccggcaacggactcgacaagggggaacccgtcaacgcagcggacgcggcagccctcgagcacgacaaggcctacgaccagcagctcaaggccggtgacaacccctacctcaagtacaaccacgccgacgccgagttccaggagcggctcaaagaagatacgtcttttgggggcaacctcgggcgagcagtcttccaggccaaaaagaggcttcttgaacctcttggtctggttgaggaagcggctaagacggctcctggaaagaagaggcctgtagatcagtctcctcaggaaccggactcatcatctggtgttggcaaatcgggcaaacagcctgccagaaaaagactaaatttcggtcagactggcgactcagagtcagtcccagaccctcaacctctcggagaaccaccagcagcccccacaagtttgggatctaatacaatggcttcaggcggtggcgcaccaatggcagacaataacgagggtgccgatggagtgggtaattcctcaggaaattggcattgcgattcccaatggctgggcgacagagtcatcaccaccagcaccagaacctgggccctgcccacttacaacaaccatctctacaagcaaatctccagccaatcaggagcttcaaacgacaaccactactttggctacagcaccccttgggggtattttgactttaacagattccactgccacttctcaccacgtgactggcagcgactcattaacaacaactggggattccggcccaagaaactcagcttcaagctcttcaacatccaagttaaagaggtcacgcagaacgatggcacgacgactattgccaataaccttaccagcacggttcaagtgtttacggactcggagtatcagctcccgtacgtgctcgggtcggcgcaccaaggctgtctcccgccgtttccagcggacgtcttcatggtccctcagtatggatacctcaccctgaacaacggaagtcaagcggtgggacgctcatccttttactgcctggagtacttcccttcgcagatgctaaggactggaaataacttccaattcagctataccttcgaggatgtaccttttcacagcagctacgctcacagccagagtttggatcgcttgatgaatcctcttattgatcagtatctgtactacctgaacagaacgcaaggaacaacctctggaacaaccaaccaatcacggctgctttttagccaggctgggcctcagtctatgtctttgcaggccagaaattggctacctgggccctgctaccggcaacagagactttcaaagactgctaacgacaacaacaacagtaactttccttggacagcggccagcaaatatcatctcaatggccgcgactcgctggtgaatccaggaccagctatggccagtcacaaggacgatgaagaaaaatttttccctatgcacggcaatctaatatttggcaaagaagggacaacggcaagtaacgcagaattagataatgtaatgattacggatgaagaagagattcgtaccaccaatcctgtggcaacagagcagtatggaactgtggcaaataacttgcagagctcaaatacagctcccacgactagaactgtcaatgatcagggggccttacctggcatggtgtggcaagatcgtgacgtgtaccttcaaggacctatctgggcaaagattcctcacacggatggacactttcatccttctcctctgatgggaggctttggactgaaacatccgcctcctcaaatcatgatcaaaaatactccggtaccggcaaatcctccgacgactttcagcccggccaagtttgcttcatttatcactcagtactccactggacaggtcagcgtggaaattgagtgggagctacagaaagaaaacagcaaacgttggaatccagagattcagtacacttccaactacaacaagtctgttaatgtggactttactgtagacactaatggtgtttatagtgaacctcgccccattggcacccgttaccttacccgtcccctgtaa

SEQ ID NO: 5229 - protein, 736 aa, Artificial Sequence
  Description of Artificial Sequence: Synthetic polypeptide
MAADGYLPDWLEDNLSEGIREWWALQPGAPKPKANQQHQDNARGLVLPGYKYLGPGNGLDKGEPVNAADAAALEHDKAYDQQLKAGDNPYLKYNHADAEFQERLKEDTSFGGNLGRAVFQAKKRLLEPLGLVEEAAKTAPGKKRPVDQSPQEPDSSSGVGKSGKQPARKRLNFGQTGDSESVPDPQPLGEPPAAPTSLGSNTMASGGGAPMADNNEGADGVGNSSGNWHCDSQWLGDRVITTSTRTWALPTYNNHLYKQISSQSGASNDNHYFGYSTPWGYFDFNRFHCHFSPRDWQRLINNNWGFRPKKLSFKLFNIQVKEVTQNDGTTTIANNLTSTVQVFTDSEYQLPYVLGSAHQGCLPPFPADVFMVPQYGYLTLNNGSQAVGRSSFYCLEYFPSQMLRTGNNFQFSYTFEDVPFHSSYAHSQSLDRLMNPLIDQYLYYLNRTQGTTSGTTNQSRLLFSQAGPQSMSLQARNWLPGPCYRQQRLSKTANDNNNSNFPWTAASKYHLNGRDSLVNPGPAMASHKDDEEKFFPMHGNLIFGKEGTTASNAELDNVMITDEEEIRTTNPVATEQYGTVANNLQSSNTAPTTRTVNDQGALPGMVWQDRDVYLQGPIWAKIPHTDGHFHPSPLMGGFGLKHPPPQIMIKNTPVPANPPTTFSPAKFASFITQYSTGQVSVEIEWELQKENSKRWNPEIQYTSNYNKSVNVDFTVDTNGVYSEPRPIGTRYLTRPL

SEQ ID NO: 5230 - DNA, 2211 bp, Artificial Sequence
  Description of Artificial Sequence: Synthetic polynucleotide
atggctgccgatggttatcttccagattggctcgaggacaaccttagtgaaggaattcgcgagtggtgggctttgaaacctggagcccctcaacccaaggcaaatcaacaacatcaagacaacgctcgaggtcttgtgcttccgggttacaaataccttggacccggcaacggactcgacaagggggagccggtcaacgcagcagacgcggcggccctcgagcacgacaaggcctacgaccagcagctcaaggccggagacaacccgtacctcaagtacaaccacgccgacgccgagttccaggagcggctcaaagaagatacgtcttttgggggcaacctcgggcgagcagtcttccaggccaaaaagaggcttcttgaacctcttggtctggttgaggaagcggctaagacggctcctggaaagaagagaccggtagagccatcaccccagcgttctccagactcctctacgggcatcggcaagaaaggccaacagcccgctaaaaagagactcaattttggtcagactggcgactcagagtcagtccccgacccacaacctctcggagaacctccagcaacccccgctgctgtgggacctactacaatggcttcaggcggtggcgcaccaatggcagacaataacgagggtgccgatggagtgggtaattcctcaggaaattggcattgcgattcccaatggctgggcgacagagtcatcaccaccagcaccagaacctgggccctgcccacttacaacaaccatctctacaagcaaatctccagccaatcaggagcttcaaacgacaaccactactttggctacagcaccccttgggggtattttgactttaacagattccactgccacttttcaccacgtgactggcaaagactcatcaacaacaactggggattccgacccaagagactcaacttcaagctcttcaacatccaagtcaaggaggtcacgacgaatgatggcgtcacgaccatcgctaataaccttaccagcacggttcaagtcttctcggactcggagtaccagttgccgtacgtcctcggctctgcgcaccagggctgcctccctccgttcccggcggacgtgttcatgattccgcagtacggctacctaacgctcaacaatggcagccaagccgtgggacgttcatccttttactgcctggaatatttcccttctcagatgctgagaacgggcaacaactttaccttcagctacacttttgaggacgttcctttccacagcagctacgctcacagccagagtctggaccgtctcatgaatcctctcatcgaccagtacctgtattacttgagcagaacaaacactccaagtggaaccaccacgcagtcaaggcttcagttttctcaggccggagcgagtgacattcgggaccagtctaggaactggcttcctggaccctgttaccgccagcagcgcgtttctaaaacaaaaacagacaacaacaacagcaattttacctggactggtgcttcaaaatataaccttaatgggcgtgaatctataatcaaccctggcactgctatggcctcacacaaagacgacgaagacaagttctttcccatgagcggtgtcatgatttttggaaaagagagcgccggagcttcaaacactgcattggacaatgtcatgattacagacgaagaggaaattaaagccactaaccctgtggccaccgaaagatttgggaccgtggcagtcaatttccagagcagcagcacagaccctgcgaccggagatgtgcatgttatgggagccttacctggaatggtgtggcaagacagagacgtatacctgcagggtcctatttgggccaaaattcctcacacggatggacactttcacccgtctcctcttatgggcggctttggactcaagaacccgcctcctcagatcctcatcaaaaacacgcctgttcctgcgaatcctccggcggagttttcagctacaaagtttgcttcattcatcacccaatactccacaggacaagtgagtgtggaaattgaatgggagctgcagaaagaaaacagcaagcgctggaatcccgaagtgcagtacacatccaattatgcaaaatctgccaacgttgattttactgtggacaacaatggactttatactgagcctcgccccattggcacccgttaccttacccgtcccctgtaa

SEQ ID NO: 5231 - protein, 736 aa, Artificial Sequence
  Description of Artificial Sequence: Synthetic polypeptide
MAADGYLPDWLEDNLSEGIREWWALKPGAPQPKANQQHQDNARGLVLPGYKYLGPGNGLDKGEPVNAADAAALEHDKAYDQQLKAGDNPYLKYNHADAEFQERLKEDTSFGGNLGRAVFQAKKRLLEPLGLVEEAAKTAPGKKRPVEPSPQRSPDSSTGIGKKGQQPAKKRLNFGQTGDSESVPDPQPLGEPPATPAAVGPTTMASGGGAPMADNNEGADGVGNSSGNWHCDSQWLGDRVITTSTRTWALPTYNNHLYKQISSQSGASNDNHYFGYSTPWGYFDFNRFHCHFSPRDWQRLINNNWGFRPKRLNFKLFNIQVKEVTTNDGVTTIANNLTSTVQVFSDSEYQLPYVLGSAHQGCLPPFPADVFMIPQYGYLTLNNGSQAVGRSSFYCLEYFPSQMLRTGNNFTFSYTFEDVPFHSSYAHSQSLDRLMNPLIDQYLYYLSRTNTPSGTTTQSRLQFSQAGASDIRDQSRNWLPGPCYRQQRVSKTKTDNNNSNFTWTGASKYNLNGRESIINPGTAMASHKDDEDKFFPMSGVMIFGKESAGASNTALDNVMITDEEEIKATNPVATERFGTVAVNFQSSSTDPATGDVHVMGALPGMVWQDRDVYLQGPIWAKIPHTDGHFHPSPLMGGFGLKNPPPQILIKNTPVPANPPAEFSATKFASFITQYSTGQVSVEIEWELQKENSKRWNPEVQYTSNYAKSANVDFTVDNNGLYTEPRPIGTRYLTRPL

SEQ ID NO: 5232 - DNA, 2211 bp, Artificial Sequence
  Description of Artificial Sequence: Synthetic polynucleotide
atggctgccgatggttatcttccagattggctcgaggacaacctctctgagggcattcgcgagtggtgggacttgaaacctggagcccctaaacccaaggcaaatcaacaacatcaggacaacgctcgaggtcttgtgcttccgggttacaaataccttggacccggcaacggactcgacaagggggagccggtcaacgcagcagacgcggcggccctcgagcacgacaaggcctacgaccagcagctcaaggccggagacaacccgtacctcaagtacaaccacgccgacgccgagttccaggagcggctcaaagaagatacgtcttttgggggcaacctcgggcgagcagtcttccaggccaaaaagaggcttcttgaacctcttggtctggttgaggaagcggctaagacggctcctggaaagaagagaccggtagagccatcaccccagcgttctccagactcctctacgggcatcggcaagaaaggccaacagcccgctaaaaagagactcaattttggtcagactggcgactcagagtcagtccccgacccacaacctctcggagaacctccagcaacccccgctgctgtgggacctactacaatggcttcaggcggtggcgcaccaatggcagacaataacgagggtgccgatggagtgggtaattcctcaggaaattggcattgcgattcccaatggctgggcgacagagtcatcaccaccagcaccagaacctgggccctgcccacttacaacaaccatctctacaagcaaatctccagccaatcaggagcttcaaacgacaaccactactttggctacagcaccccttgggggtattttgactttaacagattccactgccacttttcaccacgtgactggcaaagactcatcaacaacaactggggattccgacccaagagactcaacttcaagctcttcaacatccaagtcaaggaggtcacgacgaatgatggcgtcacgaccatcgctaataaccttaccagcacggttcaagtcttctcggactcggagtaccagttgccgtacgtcctcggctctgcgcaccagggctgcctccctccgttcccggcggacgtgttcatgattccgcagtacggctacctaacgctcaacaatggcagccaagccgtgggacgttcatccttttactgcctggaatatttcccttctcagatgctgagaacgggcaacaactttaccttcagctacacttttgaggacgttcctttccacagcagctacgctcacagccagagtctggaccgtctcatgaatcccctcatcgaccagtacctgtattacttgagcagaacaaacactccaagtggaaccaccacgcagtcaaggcttcagttttctcaggccggagcgagtgacattcgggaccagtctaggaactggcttcctggaccctgttaccggcagcagcgcgtttctaaaacaaaaacagacaacaacaacagcaactttacctggactggtgcttcaaaatataaccttaatgggcgtgaatctataatcaaccctggcactgctatggcctcacacaaagacgacgaagacaagttctttcccatgagcggtgtcatgatttttggaaaggagagcgccggagcttcaaacactgcattggacaatgtcatgatcacagacgaagaggaaatcaaagccactaaccccgtggccaccgaaagatttgggactgtggcagtcaatctccagagcagcagcacagaccctgcgaccggagatgtgcatgttatgggagccttacctggaatggtgtggcaagacagagacgtgtacctgcagggtcctatttgggccaaaattcctcacacggatggacactttcacccgtctcctctcatgggcggctttggacttaagcacccgcctcctcagatcctcatcaaaaacacgcctgttcctgcgaatcctccggcagagttttcggctacaaagtttgcttcattcatcacccagtattccacaggacaagtgagtgtggaaattgaatgggagctgcagaaagaaaacagcaagcgctggaatcccgaagtgcagtacacatccaattatgcaaaatctgccaacgttgattttactgtggacaacaatggactttatactgagcctcgccccattggcacccgttacctcacccgtcccctgtaa

SEQ ID NO: 5233 - protein, 736 aa, Artificial Sequence
  Description of Artificial Sequence: Synthetic polypeptide
MAADGYLPDWLEDNLSEGIREWWDLKPGAPKPKANQQHQDNARGLVLPGYKYLGPGNGLDKGEPVNAADAAALEHDKAYDQQLKAGDNPYLKYNHADAEFQERLKEDTSFGGNLGRAVFQAKKRLLEPLGLVEEAAKTAPGKKRPVEPSPQRSPDSSTGIGKKGQQPAKKRLNFGQTGDSESVPDPQPLGEPPATPAAVGPTTMASGGGAPMADNNEGADGVGNSSGNWHCDSQWLGDRVITTSTRTWALPTYNNHLYKQISSQSGASNDNHYFGYSTPWGYFDFNRFHCHFSPRDWQRLINNNWGFRPKRLNFKLFNIQVKEVTTNDGVTTIANNLTSTVQVFSDSEYQLPYVLGSAHQGCLPPFPADVFMIPQYGYLTLNNGSQAVGRSSFYCLEYFPSQMLRTGNNFTFSYTFEDVPFHSSYAHSQSLDRLMNPLIDQYLYYLSRTNTPSGTTTQSRLQFSQAGASDIRDQSRNWLPGPCYRQQRVSKTKTDNNNSNFTWTGASKYNLNGRESIINPGTAMASHKDDEDKFFPMSGVMIFGKESAGASNTALDNVMITDEEEIKATNPVATERFGTVAVNLQSSSTDPATGDVHVMGALPGMVWQDRDVYLQGPIWAKIPHTDGHFHPSPLMGGFGLKHPPPQILIKNTPVPANPPAEFSATKFASFITQYSTGQVSVEIEWELQKENSKRWNPEVQYTSNYAKSANVDFTVDNNGLYTEPRPIGTRYLTRPL

SEQ ID NO: 5234 - DNA, 2214 bp, Artificial Sequence
  Description of Artificial Sequence: Synthetic polynucleotide
atggctgccgatggttatcttccagattggctcgaggacaaccttagtgaaggaattcgcgagtggtgggctttgaaacctggagcccctcaacccaaggcaaatcaacaacatcaagacaacgctcgaggtcttgtgcttccgggttacaaataccttggacccggcaacggactcgacaagggggagccggtcaacgcagcagacgcggcggccctcgagcacgacaaggcctacgaccagcagctgcaggcgggtgacaatccgtacctgcggtataaccacgccgacgccgagtttcaggagcgtctgcaagaagatacgtcttttgggggcaaccttggcagagcagtcttccaggccaaaaagaggatccttgagcctcttggtctggttgaggaagcagctaaaacggctcctggaaagaagaggcctgtagatcagtctcctcaggaaccggactcatcatctggtgttggcaaatcgggcaaacagcctgccagaaaaagactaaatttcggtcagactggcgactcagagtcagtcccagaccctcaacctctcggagaaccaccagcagcccccacaagtttgggatctaatacaatggcttcaggcggtggcgcaccaatggcagacaataacgagggtgccgatggggtgggtagttcctcgggaaattggcattgcgattcccaatgactgggggacagagtcatcaccaccagcacccgaacctgggccctgcccacctacaacaatcacctctacaagcaaatctccaacgggacatcgggaggagccaccaacgacaacacctacttcggctacagcaccccctgggggtattttgactttaacagattccactgccacttttcaccacgtgactggcagcgactcatcaacaacaactggggattccggcccaagagactcagcttcaagctcttcaacatccaggtcaaggaggtcacgcagaatgaaggcaccaagaccatcgccaataacctcaccagcaccatccaggtgtttacggactcggagtaccagctgccgtacgttctcggctctgcgcaccagggctgcctccctccgttcccggcggacgtgttcatgattccgcaatacggctacctgacgctcaacaatggcagccaagccgtgggacgttcatccttttactgcctggaatatttcccttctcagatgctgagaacgggcaacaactttaccttcagctacacctttgaggaagtgcctttccacagcagctacgcgcacagccagagcttggaccggctgatgaatcctctgattgaccagtacctgtactacttgtctcggactcaaacaacaggaggcacggcaaatacgcagactctgggcttcagccaaggtgggcctaatacaatggccaatcaggcaaagaactggctgccaggaccctgttaccgccaacaacgcgtctcaacgacaaccgggcaaaacaacaatagcaactttgcctggactgctgggaccaaataccatctgaatggaagaaattcattggctaatcctggcatcgctatggcaacacacaaagacgacgaggagcgtttttttcccagtaacgggatcctgatttttggcaaacaaaatgctgccagagacaatgcggattacagcgatgtcatgctcaccagcgaggaagaaatcaaaaccactaaccctgtggctacagaggaatacggtatcgtggcagataacttgcagcagcaaaacacggctcctcaaattggaactgtcaacagccagggggccttacccggtatggtctggcagaaccgggacgtgtacctgcagggtcccatctgggccaagattcctcacacggacggcaacttccacccgtctccgctgatgggcggctttggcctgaaacatcctccgcctcagatcctgatcaagaacacgcctgtacctgcggatcctccgaccaccttcaaccagtcaaagctgaactctttcatcacgcaatacagcaccggacaggtcagcgtggagatcgagtgggagctgcagaaggaaaacagcaagcgctggaacccggagatccagtacacttccaactattacaagtctaataatgttgaatttgctgttaatactgaaggtgtatatagtgaaccccgccccattggcaccagatacctgactcgtaatctgtaa

SEQ ID NO: 5235 - protein, 736 aa, Artificial Sequence
  Description of Artificial Sequence: Synthetic polypeptide
MAADGYLPDWLEDNLSEGIREWWALKPGAPQPKANQQHQDNARGLVLPGYKYLGPGNGLDKGEPVNAADAAALEHDKAYDQQLQAGDNPYLRYNHADAEFQERLQEDTSFGGNLGRAVFQAKKRILEPLGLVEEAAKTAPGKKRPVDQSPQEPDSSSGVGKSGKQPARKRLNFGQTGDSESVPDPQPLGEPPAAPTSLGSNTMASGGGAPMADNNEGADGVGSSSGNWHCDSQLGDRVITTSTRTWALPTYNNHLYKQISNGTSGGATNDNTYFGYSTPWGYFDFNRFHCHFSPRDWQRLINNNWGFRPKRLSFKLFNIQVKEVTQNEGTKTIANNLTSTIQVFTDSEYQLPYVLGSAHQGCLPPFPADVFMIPQYGYLTLNNGSQAVGRSSFYCLEYFPSQMLRTGNNFTFSYTFEEVPFHSSYAHSQSLDRLMNPLIDQYLYYLSRTQTTGGTANTQTLGFSQGGPNTMANQAKNWLPGPCYRQQRVSTTTGQNNNSNFAWTAGTKYHLNGRNSLANPGIAMATHKDDEERFFPSNGILIFGKQNAARDNADYSDVMLTSEEEIKTTNPVATEEYGIVADNLQQQNTAPQIGTVNSQGALPGMVWQNRDVYLQGPIWAKIPHTDGNFHPSPLMGGFGLKHPPPQILIKNTPVPADPPTTFNQSKLNSFITQYSTGQVSVEIEWELQKENSKRWNPEIQYTSNYYKSNNVEFAVNTEGVYSEPRPIGTRYLTRNL

SEQ ID NO: 5236 - DNA, 2214 bp, Artificial Sequence
  Description of Artificial Sequence: Synthetic polynucleotide
atggctgccgatggttatcttccagattggctcgaggacaaccttagtgaaggaattcgcgagtggtgggctttgaaacctggagcccctcaacccaaggcaaatcaacaacatcaagacaacgctcgaggtcttgtgcttccgggttacaaataccttggacccggcaacggactcgacaagggggagccggtcaacgcagcagacgcggcggccctcgagcacgacaaggcctacgaccagcagctgcaggcgggtgacaatccgtacctgcggtataaccacgccgacgccgagtttcaggagcgtctgcaagaagatacgtcttttgggggcaaccttggcagagcagtcttccaggccaaaaagaggatccttgagcctcttggtctggttgaggaagcagctaaaacggctcctggaaagaagaggcctgtagatcagtctcctcaggaaccggactcatcatctggtgttggcaaatcgggcaaacagcctgccagaaaaagactaaatttcggtcagactggcgactcagagtcagtcccagaccctcaacctctcggagaaccaccagcagcccccacaagtttgggatctaatacaatggcttcaggcggtggcgcaccaatggcagacaataacgagggtgccgatggggtgggtagttcctcgggaaattggcattgcgattcccaatggctgggggacagagtcatcaccaccagcacccgaacctgggccctgcccacctacaacaatcacctctacaagcaaatctccaacgggacatcgggaggagccaccaacgacaacacctacttcggctacagcaccccctgggggtattttgactttaacagattccactgccacttttcaccacgtgactggcagcgactcatcaacaacaactggggattccggcccaagagactcagcttcaagctcttcaacatccaggtcaaggaggtcacgcagaatgaaggcaccaagaccatcgccaataacctcaccagcaccatccaggtgtttacggactcggagtaccagctgccgtacgttctcggctctgcgcaccagggctgcctccctccgttcccggcggacgtgttcatgattccgcaatacggctacctgacgctcaacaatggcagccaagccgtgggacgttcatccttttactgcctggaatatttcccttctcagatgctgagaacgggcaacaactttaccttcagctacacctttgaggaagtgccttttcacagcagctacgcgcacagccagagcttggaccggctgatgaatcctctgattgaccagtacctgtactacttgtctcggactcaaacaacaggaggcacggcaaatacgcagactctgggcttcagccaaggtgggcctaatacaatggccaatcaggcaaagaactggctgccaggaccctgttaccgccaacaacgcgtctcaacgacaaccgggcaaaacaacaatagcaactttgcctggactgctgggaccaaataccatctgaatggaagaaattcattggctaatcctggcatcgctatggcaacacacaaagacgacgaggagcgtttttttcccagtaacgggatcctgatttttggcaaacaaaatgctgccagagacaatgcggattacagcgatgtcatgctcaccagcgaggaagaaatcaaaaccactaaccctgtggctacagaggaatacggtatcgtggcagataacttgcagcagcaaaacacggctcctcaaattggaactgtcaacagccagggggccttacccggtatggtctggcagaaccgggacgtgtacctgcagggtcccatctgggccaagattcctcacacggacggcaacttccacccgtctccgctgatgggcggctttggcctgaaacatcctccgcctcagatcctgatcaagaacacgcctgtacctgcggatcctccgaccaccttcaaccagtcaaagctgaactctttcatcacgcaatacagcaccggacaggtcagcgtggagatcgagtgggagctgcagaaggaaaacagcaagcgctggaacccggagatccagtacacttccaactattacaagtctaataatgttgaatttgctgttaatactgaaggtgtatatagtgaaccccgccccattggcaccagatacctgactcgtaatctgtaa

SEQ ID NO: 5237 - protein, 737 aa, Artificial Sequence; identical to SEQ ID NO: 5225
  Description of Artificial Sequence: Synthetic polypeptide

SEQ ID NO: 5238 - DNA, 2211 bp, Artificial Sequence
  Description of Artificial Sequence: Synthetic polynucleotide
atggctgccgatggttatcttccagattggctcgaggacaacctctctgagggcattcgcgagtggtgggacttgaaacctggagcccctaaacccaaggcaaatcaacaacatcaggacaacgctcgaggtcttgtgcttccgggttacaaataccttggacccggcaacggactcgacaagggggagccggtcaacgcagcagacgcggcggccctcgagcacgacaaggcctacgaccagcagctcaaggccggagacaacccgtacctcaagtacaaccacgccgacgccgagttccaggagcggctcaaagaagatacgtcttttgggggcaacctcgggcgagcagtcttccaggccaaaaagaggcttcttgaacctcttggtctggttgaggaagcggctaagacggctcctggaaagaagagaccggtagagccatcaccccagcgttctccagactcctctacgggcatcggcaagaaaggccaacagcccgctaaaaagagactcaattttggtcagactggcgactcagagtcagtccccgacccacaacctctcggagaacctccagcaacccccgctgctgtgggacctactacaatggcttcaggcggtggcgcaccaatggcagacaataacgagggtgccgatggagtgggtaattcctcaggaaattggcattgcgattcccaatggctgggcgacagagtcatcaccaccagcaccagaacctgggccctgcccacttacaacaaccatctctacaagcaaatctccagccaatcaggagcttcaaacgacaaccactactttggctacagcaccccttgggggtattttgactttaacagattccactgccacttttcaccacgtgactggcaaagactcatcaacaacaactggggattccgacccaagagactcaacttcaagctcttcaacatccaagtcaaggaggtcacgacgaatgatggcgtcacgaccatcgctaataaccttaccagcacggttcaagtcttctcggactcggagtaccagttgccgtacgtcctcggctctgcgcaccagggctgcctccctccgttcccggcggacgtgttcatgattccgcagtacggctacctaacgctcaacaatggcagccaagccgtgggacgttcatccttttactgcctggaatatttcccttctcagatgctgagaacgggcaacaactttaccttcagctacacttttgaggacgttcctttccacagcagctacgctcacagccagagtctggaccgtctcatgaatcctctcatcgaccagtacctgtattacttgagcagaacaaacactccaagtggaaccaccacgcagtcaaggcttcagttttctcaggccggagcgagtgacattcgggaccagtctaggaactggcttcctggaccctgttaccgccagcagcgcgtttctaaaacaaaaacagacaacaacaacagcaattttacctggactggtgcttcaaaatataaccttaatgggcgtgaatctataatcaaccctggcactgctatggcctcacacaaagacgacgaagacaagttctttcccatgagcggtgtcatgatttttggaaaagagagcgccggagcttcaaacactgcattggacaatgtcatgattacagacgaagaggaaattaaagccactaaccctgtggccaccgaaagatttgggaccgtggcagtcaatttccagagcagcagcacagaccctgcgaccggagatgtgcatgctatgggagcattacctggcatggtgtggcaagatagagacgtgtacctgcagggtcccatttgggccaaaattcctcacacagatggacactttcacccgtctcctcttatgggcggctttggactcaagaacccgcctcctcagatcctcatcaaaaacacgcctgttcctgcgaatcctccggcggagttttcagctacaaagtttgcttcattcatcacccaatactccacaggacaagtgagtgtggaaattgaatgggagctgcagaaagaaaacagcaagcgctggaatcccgaagtgcagtacacatccaattatgcaaaatctgccaacgttgattttactgtggacaacaatggactttatactgagcctcgccccattggcacccgttaccttacccgtcccctgtaa

SEQ ID NO: 5239 - protein, 736 aa, Artificial Sequence
  Description of Artificial Sequence: Synthetic polypeptide
MAADGYLPDWLEDNLSEGIREWWDLKPGAPKPKANQQHQDNARGLVLPGYKYLGPGNGLDKGEPVNAADAAALEHDKAYDQQLKAGDNPYLKYNHADAEFQERLKEDTSFGGNLGRAVFQAKKRLLEPLGLVEEAAKTAPGKKRPVEPSPQRSPDSSTGIGKKGQQPAKKRLNFGQTGDSESVPDPQPLGEPPATPAAVGPTTMASGGGAPMADNNEGADGVGNSSGNWHCDSQWLGDRVITTSTRTWALPTYNNHLYKQISSQSGASNDNHYFGYSTPWGYFDFNRFHCHFSPRDWQRLINNNWGFRPKRLNFKLFNIQVKEVTTNDGVTTIANNLTSTVQVFSDSEYQLPYVLGSAHQGCLPPFPADVFMIPQYGYLTLNNGSQAVGRSSFYCLEYFPSQMLRTGNNFTFSYTFEDVPFHSSYAHSQSLDRLMNPLIDQYLYYLSRTNTPSGTTTQSRLQFSQAGASDIRDQSRNWLPGPCYRQQRVSKTKTDNNNSNFTWTGASKYNLNGRESIINPGTAMASHKDDEDKFFPMSGVMIFGKESAGASNTALDNVMITDEEEIKATNPVATERFGTVAVNFQSSSTDPATGDVHAMGALPGMVWQDRDVYLQGPIWAKIPHTDGHFHPSPLMGGFGLKNPPPQILIKNTPVPANPPAEFSATKFASFITQYSTGQVSVEIEWELQKENSKRWNPEVQYTSNYAKSANVDFTVDNNGLYTEPRPIGTRYLTRPL

SEQ ID NO: 5240 - DNA, 2211 bp, Artificial Sequence
  Description of Artificial Sequence: Synthetic polynucleotide
atggctgccgatggttatcttccagattggctcgaggacaaccttagtgaaggaattcgcgagtggtgggcgctgaaacctggagccccgaagcccaaagccaaccagcaaaagcaggacgacggccggggtctggtgcttccgggttacaaatacctcggacccggtaacggactcgacaaaggagagccggtcaacgaggcggacgcggcagccctcgagcacgacaaggcctacgaccagcagctcaaagcgggtgacaatccgtacctgcggtataaccacgccgacgccgagtttcaggagcgtctgcaagaagatacgtcttttgggggcaacctcgggcgagcagtcttccaggccaagaagcgggttctcgaacctctcggtctggttgaggaaggcgctaagacggctcccggaaagaaacgtccggtagagcagtcgccacaagagccagactcctctacgggcatcggcaagaaaggccaacagcccgccagaaaaagactcaatttcggtcagactggcgactcagagtcagttccagaccctcaacctctcggagaacctccagcagcgccctctggtgtgggacctactacaatggcttcaggcggtggcgcaccaatggcagacaataacgaaggcgccgacggagtgggtaatgcctcaggaaattggcattgcgattccacatggctgggcgacagagtcatcaccaccagcacccgaacatgggccttgcccacctataacaaccacctctacaagcaaatctccagtgcttcaacgggggccagcaacgacaacacctacttcggctacagcaccccctgggggtattttgatttcaacagattccactgccatttctcaccacgtgactggcagcgactcatcaacaacaattggggattccggcccaagagactcaacttcaaactcttcaacatccaagtcaaggaggtcacgacgaatgatggcgtcacgaccatcgctaataaccttaccagcacggttcaagtcttctcggactcggagtaccagttgccgtacgtcctcggctctgcgcaccagggctgcctccctccgttcccggcggacgtgttcatgattccgcagtacggctacctaacgctcaacaatggcagccaggcagtgggacggtcatccttttactgcctggaatatttcccatcgcagatgctgagaacgggcaataactttaccttcagctacaccttcgaggacgtgcctttccacagcagctacgcgcacagccagagcctggaccggctgatgaatcctctcatcgaccagtacctgtattacctgaacagaactcagaatcagtccggaagtgcccaaaacaaggacttgctgtttagccgggggtctccagctggcatgtctgttcagcccaaaaactggctacctggaccctgttatcggcagcagcgcgtttctaaaacaaaaacagacaacaacaacagcaattttacctggactggtgcttcaaaatataacctcaatgggcgtgaatccatcatcaaccctggcactgctatggcctcacacaaagacgacgaagacaagttctttcccatgagcggtgtcatgatttttggaaaagagagcgccggagcttcaaacactgcattggacaatgtcatgattacagacgaagaggaaattaaagccactaaccctgtggccaccgaaagatttgggaccgtggcagtcaatttccagagcagcagcacagaccctgcgaccggagatgtgcatgttatgggagccttacctggaatggtgtggcaagacagagacgtatacctgcagggtcctatttgggccaaaattcctcacacagatggacactttcacccgtctcctcttatgggcggctttggactcaagaacccgcctcctcagatcctcatcaaaaacacgcctgttcctgcgaatcctccggcagagttttcggctacaaagtttgcttcattcatcacccagtattccacaggacaagtgagcgtggagattgaatgggagctgcagaaagaaaacagcaaacgctggaatcccgaagtgcagtatacatctaactatgcaaaatctgccaacgttgatttcactgtggacaacaatggactttatactgagcctcgccccattggcacccgttacctcacccgtcccctgtaa

SEQ ID NO: 5241 - protein, 736 aa, Artificial Sequence
  Description of Artificial Sequence: Synthetic polypeptide
MAADGYLPDWLEDNLSEGIREWWALKPGAPKPKANQQKQDDGRGLVLPGYKYLGPGNGLDKGEPVNEADAAALEHDKAYDQQLKAGDNPYLRYNHADAEFQERLQEDTSFGGNLGRAVFQAKKRVLEPLGLVEEGAKTAPGKKRPVEQSPQEPDSSTGIGKKGQQPARKRLNFGQTGDSESVPDPQPLGEPPAAPSGVGPTTMASGGGAPMADNNEGADGVGNASGNWHCDSTWLGDRVITTSTRTWALPTYNNHLYKQISSASTGASNDNTYFGYSTPWGYFDFNRFHCHFSPRDWQRLINNNWGFRPKRLNFKLFNIQVKEVTTNDGVTTIANNLTSTVQVFSDSEYQLPYVLGSAHQGCLPPFPADVFMIPQYGYLTLNNGSQAVGRSSFYCLEYFPSQMLRTGNNFTFSYTFEDVPFHSSYAHSQSLDRLMNPLIDQYLYYLNRTQNQSGSAQNKDLLFSRGSPAGMSVQPKNWLPGPCYRQQRVSKTKTDNNNSNFTWTGASKYNLNGRESIINPGTAMASHKDDEDKFFPMSGVMIFGKESAGASNTALDNVMITDEEEIKATNPVATERFGTVAVNFQSSSTDPATGDVHVMGALPGMVWQDRDVYLQGPIWAKIPHTDGHFHPSPLMGGFGLKNPPPQILIKNTPVPANPPAEFSATKFASFITQYSTGQVSVEIEWELQKENSKRWNPEVQYTSNYAKSANVDFTVDNNGLYTEPRPIGTRYLTRPL

SEQ ID NO: 5242 - DNA, 2205 bp, Artificial Sequence
  Description of Artificial Sequence: Synthetic polynucleotide
atggctgctgacggttatcttccagattggctcgaggacaacctttctgaaggcattcgtgagtggtgggctctgaaacctggagtccctcaacccaaagcgaaccaacaacaccaggacaaccgtcggggtcttgtgcttccgggttacaaatacctcggacccggtaacggactcgacaaaggagagccggtcaacgaggcggacgcggcagccctcgaacacgacaaggcctacgaccagcagctcaaggccggagacaacccgtacctcaagtacaaccacgccgacgccgagttccaggagcggctcaaagaagatacgtcttttgggggcaacctcgggcgagcagtcttccaggccaaaaagaggcttcttgaacctcttggtctggttgaggaagcggctaagacggctcctggaaagaagaggcctgtagagcagtctcctcaggaaccggactcctccgcgggtattggcaaatcgggtgcacagcccgctaaaaagagactcaatttcggtcagactggcgacacagagtcagtcccagaccctcaaccaatcggagaacctcccgcagccccctcaggtgtgggatctcttacaatggcttcaggtggtggcgcaccagtggcagacaataacgaaggtgccgatggagtgggtagttcctcgggaaattggcattgcgattcccaatggctgggggacagagtcatcaccaccagcacccgaacctgggccctgcccacctacaacaaccacctctacaaacaaatttccagccaatcaggagcctcgaacgacaatcactactttggctacagcaccccttgggggtattttgacttcaacagattccactgccacttttcaccacgtgactggcagcgactcatcaacaacaactggggattccggcccaagagactcagcttcaagctcttcaacatccaggtcaaagaggttacggacaacaatggagtcaagaccatcgccaataaccttaccagcacggtccaggtcttcacggactcagactatcagctcccgtacgtgctcgggtcggctcacgagggctgcctcccgccgttcccagcggacgttttcatgattcctcagtacgggtatctgacgcttaatgatggaagccaggccgtgggtcgttcgtccttttactgcctggaatatttcccgtcgcaaatgctaagaacgggtaacaacttccagttcagctacgagtttgagaacgtacctttccatagcagctacgctcacagccaaagcctggaccgactaatgaatccactcatcgaccaatacttgtactatctctcaaagactattaacggttctggacagaatcaacaaacgctaaaattcagtgtggccggacccagcaacatggctgtccagggaagaaactacatacctggacccagctaccgacaacaacgtgtctcaaccactgtgactcaaaacaacaacagcgaatttgcttggcctggagcttcttcttgggctctcaatggacgtaatagcttgatgaatcctggacctgctatggccagccacaaagaaggagaggaccgtttctttcctttgtctggatctttaatttttggcaaacaaggaactggaagagacaacgtggatgcggacaaagtcatgataaccaacgaagaagaaattaaaactactaacccggtagcaacggagtcctatggacaagtggccacaaaccaccagagtgcccaagcacaggcgcagaccggctgggttcaaaaccaaggaatacttccgggtatggtttggcaggacagagatgtgtacctgcaaggacccatctgggccaagattcctcacacggacggcaacttccacccgtctccgctgatgggcggctttggcctgaaacatcctccgcctcagatcctgatcaagaacacgcctgtacctgcggatcctccgaccaccttcaaccagtcaaagctgaactctttcatcacgcaatacagcaccggacaggtcagcgtggaaattgaatgggagctgcagaaggaaaacagcaagcgctggaatcccgaagtgcagtatacatctaactatgcaaaatctgccaacgttgatttcactgtggacaacaatggactttatactgagcctcgccccattggcacccgttacctcacccgtcccctgtaa

SEQ ID NO: 5243 - protein, 734 aa, Artificial Sequence
  Description of Artificial Sequence: Synthetic polypeptide
MAADGYLPDWLEDNLSEGIREWWALKPGVPQPKANQQHQDNRRGLVLPGYKYLGPGNGLDKGEPVNEADAAALEHDKAYDQQLKAGDNPYLKYNHADAEFQERLKEDTSFGGNLGRAVFQAKKRLLEPLGLVEEAAKTAPGKKRPVEQSPQEPDSSAGIGKSGAQPAKKRLNFGQTGDTESVPDPQPIGEPPAAPSGVGSLTMASGGGAPVADNNEGADGVGSSSGNWHCDSQWLGDRVITTSTRTWALPTYNNHLYKQISSQSGASNDNHYFGYSTPWGYFDFNRFHCHFSPRDWQRLINNNWGFRPKRLSFKLFNIQVKEVTDNNGVKTIANNLTSTVQVFTDSDYQLPYVLGSAHEGCLPPFPADVFMIPQYGYLTLNDGSQAVGRSSFYCLEYFPSQMLRTGNNFQFSYEFENVPFHSSYAHSQSLDRLMNPLIDQYLYYLSKTINGSGQNQQTLKFSVAGPSNMAVQGRNYIPGPSYRQQRVSTTVTQNNNSEFAWPGASSWALNGRNSLMNPGPAMASHKEGEDRFFPLSGSLIFGKQGTGRDNVDADKVMITNEEEIKTTNPVATESYGQVATNHQSAQAQAQTGWVQNQGILPGMVWQDRDVYLQGPIWAKIPHTDGNFHPSPLMGGFGLKHPPPQILIKNTPVPADPPTTFNQSKLNSFITQYSTGQVSVEIEWELQKENSKRWNPEVQYTSNYAKSANVDFTVDNNGLYTEPRPIGTRYLTRPL

SEQ ID NO: 5244 - DNA, 2211 bp, Artificial Sequence
  Description of Artificial Sequence: Synthetic polynucleotide
atggctgccgatggttatcttccagattggctcgaggacaacctctctgagggcattcgcgagtggtgggcgctgaaacctggagccccgaagcccaaagccaaccagcaaaagcaggacgacggccggggtctggtgcttcctggctacaagtacctcggacccttcaacggactcgacaagggggagcccgtcaacgcggcggacgcagcggccctcgagcacgacaaggcctacgaccagcagctgcaggcgggtgacaatccgtacctgcggtataaccacgccgacgccgagtttcaggagcgtctgcaagaagatacgtcttttgggggcaacctcgggcgagcagtcttccaggccaagaagtgggttctcgaacctctcggtctggttgaggaaggcgctaagacggctcctggaaagaaacgtccggtagagcagtcgccacaagagccagactcctcctcgggcatcggcaagacaggccagcagcccgctaaaaagagactcaattttggtcagactggcgactcagagtcagtccccgacccacaacctctcggagaacctccagcaacccccgctgctgtgggacctactacaatggcttcaggcggtggcgcaccaatggcagacaataacgaaggcgccgacggagtgggtaatgcctcaggaaattggcattgcgattccacatggctgggcgacagagtcatcaccaccagcacccgcacctgggccttgcccacctacaataaccacctctacaagcaaatctccagtgcttcaacgggggccagcaacgacaaccactacttcggctacagcaccccctgggggtattttgatttcaacagattccactgccatttctcaccacgtgactggcagcgactcatcaacaacaattggggattccggcccaagagactcaacttcaagctcttcaacatccaagtcaaggaggtcacgacgaatgatggcgtcacaaccatcgctaataaccttaccagcacggttcaagtcttctcggactcggagtaccagcttccgtacgtcctcggctctgcgcaccagggctgcctccctccgttcccggcggacgtgttcatgattccgcaatacggctacctgacgctcaacaatggcagccaagccgtgggacgttcatccttttactgcctggaatatttcccttctcagatgctgagaacgggcaacaactttaccttcagctacacctttgaggaagtgcctttccacagcagctacgcgcacagccagagcctggaccggctgatgaatcctctcatcgaccaatacctgtattacctgaacagaactcaaaatcagtccggaagtgcccaaaacaaggacttgctgtttagccgtgggtctccagctggcatgtctgttcagcccaaaaactggctacctggaccctgttatcggcagcagcgcgtttctaaaacaaaaacagacaacaacaacagcaattttacctggactggtgcttcaaaatataacctcaatgggcgtgaatccatcatcaaccctggcactgctatggcctcacacaaagacgacgaagacaagttctttcccatgagcggtgtcatgatttttggaaaggagagcgccggagcttcaaacactgcattggacaatgtcatgatcaccgacgaagaggaaatcaaagccactaaccccgtggccaccgaaagatttgggactgtggcagtcaatctccagagcagcagcacagaccctgcgaccggagatgtgcatgttatgggagccttacctggcatggtgtggcaagatagagacgtgtacctgcagggtcccatttgggccaaaattcctcacacagatggacactttcacccgtctcctcttatgggcggctttggactcaagaacccgcctcctcagatcctcatcaaaaacacgcctgttcctgcgaatcctccggcggagttttcagctacaaagtttgcttcattcatcacccaatactccacaggacaagtgagtgtggaaattgaatgggagctgcagaaagaaaacagcaagcgctggaatcccgaagtgcagtacacatccaattatgcaaaatctgccaacgttgattttactgtggacaacaatggactttatactgagcctcgccccattggcacccgttacctcacccgtcccctgtaa

SEQ ID NO: 5245 - protein, 736 aa, Artificial Sequence
  Description of Artificial Sequence: Synthetic polypeptide
MAADGYLPDWLEDNLSEGIREWWALKPGAPKPKANQQKQDDGRGLVLPGYKYLGPFNGLDKGEPVNAADAAALEHDKAYDQQLQAGDNPYLRYNHADAEFQERLQEDTSFGGNLGRAVFQAKKWVLEPLGLVEEGAKTAPGKKRPVEQSPQEPDSSSGIGKTGQQPAKKRLNFGQTGDSESVPDPQPLGEPPATPAAVGPTTMASGGGAPMADNNEGADGVGNASGNWHCDSTWLGDRVITTSTRTWALPTYNNHLYKQISSASTGASNDNHYFGYSTPWGYFDFNRFHCHFSPRDWQRLINNNWGFRPKRLNFKLFNIQVKEVTTNDGVTTIANNLTSTVQVFSDSEYQLPYVLGSAHQGCLPPFPADVFMIPQYGYLTLNNGSQAVGRSSFYCLEYFPSQMLRTGNNFTFSYTFEEVPFHSSYAHSQSLDRLMNPLIDQYLYYLNRTQNQSGSAQNKDLLFSRGSPAGMSVQPKNWLPGPCYRQQRVSKTKTDNNNSNFTWTGASKYNLNGRESIINPGTAMASHKDDEDKFFPMSGVMIFGKESAGASNTALDNVMITDEEEIKATNPVATERFGTVAVNLQSSSTDPATGDVHVMGALPGMVWQDRDVYLQGPIWAKIPHTDGHFHPSPLMGGFGLKNPPPQILIKNTPVPANPPAEFSATKFASFITQYSTGQVSVEIEWELQKENSKRWNPEVQYTSNYAKSANVDFTVDNNGLYTEPRPIGTRYLTRPL

SEQ ID NO: 5246 - DNA, 2214 bp, Artificial Sequence
  Description of Artificial Sequence: Synthetic polynucleotide
atggctgccgatggttatcttccagattggctcgaggacaaccttagtgaaggaattcgcgagtggtgggctttgaaacctggagcccctcaacccaaggcaaatcaacaacatcaagacaacgctcgaggtcttgtgcttccgggttacaaataccttggacccggcaacggactcgacaagggggagccggtcaacgcagcagacgcggcggccctcgagcacgacaaggcctacgaccagcagctgcaggcgggtgacaatccgtacctgcggtataaccacgccgacgccgagtttcaggagcgtctgcaagaagatacgtcttttgggggcaaccttggcagagcagtcttccaggccaaaaagaggatccttgagcctcttggtctggttgaggaagcagctaaaacggctcctggaaagaagaggcctgtagatcagtctcctcaggaaccggactcatcatctggtgttggcaaatcgggcaaacagcctgccagaaaaagactaaatttcggtcagactggcgactcagagtcagtcccagaccctcaacctctcggagaaccaccagcagcccccacaagtttgggatctaatacaatggcttcaggcggtggcgcaccaatggcagacaataacgagggtgccgatggggtgggtagttcctcgggaaattggcattgcgattcccaatggctgggggacagagtcatcaccaccagcacccgaacctgggccctgcccacctacaacaatcacctctacaagcaaatctccaacgggacatcgggaggagccaccaacgacaacacctacttcggctacagcaccccctgggggtattttgactttaacagattccactgccacttttcaccacgtgactggcagcgactcatcaacaacaactggggattccggcccaagagactcagcttcaagctcttcaacatccaggtcaaggaggtcacgcagaatgaaggcaccaagaccatcgccaataacctcaccagcaccatccaggtgtttacggactcggagtaccagctgccgtacgttctcggctcggcgcaccagggctgcctccctccgttcccggcggacgtcttcatggtgccacagtatggatacctgacgctcaacaatggcagccaagccgtgggacgttcatccttttactgcctggaatatttcccttctcagatgctgagaacgggcaacaactttaccttcagctacacctttgaggaagtgcctttccacagcagctacgcgcacagccagagcttggaccggctgatgaatcctctgattgaccagtacctgtactacttgtctcggactcaaacaacaggaggcacggcaaatacgcagactctgggcttcagccaaggtgggcctaatacaatggccaatcaggcaaagaactggctgccaggaccctgttaccgccaacaacgcgtctcaacgacaaccgggcaaaacaacaatagcaactttgcctggactgctgggaccaaataccatctgaatggaagaaattcattggctaatcctggcatcgctatggcaacacacaaagacgacgaggagcgtttttttcccagtaacgggatcctgatttttggcaaacaaaatgctgccagagacaatgcggattacagcgatgtcatgctcaccagcgaggaagaaatcaaaaccactaaccctgtggctacagaggaatacggtatcgtggcagataacttgcagcagcaaaacacggctcctcaaattggaactgtcaacagccagggggacttacccggtatggtctggcagaaccgggacgtgtacctgcagggtcccatctgggccaagattcctcacacggacggcaacttccacccgtctccgctgatgggcggctttggcctgaaacatcctccgcctcagatcctgatcaagaacacgcctgtacctgcggatcctccgaccaccttcaaccagtcaaagctgaactctttcatcacgcaatacagcaccggacaggtcagcgtggagatcgagtgggagctgcagaaggaaaacagcaagcgctggaacccggagatccagtacacttccaactattacaagtctaataatgttgaatttgctgttaatactgaaggtgtatatagtgaaccccgccccattggcaccagatacctgactcgtaatctgtaa

SEQ ID NO: 5247 - protein, 737 aa, Artificial Sequence
  Description of Artificial Sequence: Synthetic polypeptide
MAADGYLPDWLEDNLSEGIREWWALKPGAPQPKANQQHQDNARGLVLPGYKYLGPGNGLDKGEPVNAADAAALEHDKAYDQQLQAGDNPYLRYNHADAEFQERLQEDTSFGGNLGRAVFQAKKRILEPLGLVEEAAKTAPGKKRPVDQSPQEPDSSSGVGKSGKQPARKRLNFGQTGDSESVPDPQPLGEPPAAPTSLGSNTMASGGGAPMADNNEGADGVGSSSGNWHCDSQWLGDRVITTSTRTWALPTYNNHLYKQISNGTSGGATNDNTYFGYSTPWGYFDFNRFHCHFSPRDWQRLINNNWGFRPKRLSFKLFNIQVKEVTQNEGTKTIANNLTSTIQVFTDSEYQLPYVLGSAHQGCLPPFPADVFMVPQYGYLTLNNGSQAVGRSSFYCLEYFPSQMLRTGNNFTFSYTFEEVPFHSSYAHSQSLDRLMNPLIDQYLYYLSRTQTTGGTANTQTLGFSQGGPNTMANQAKNWLPGPCYRQQRVSTTTGQNNNSNFAWTAGTKYHLNGRNSLANPGIAMATHKDDEERFFPSNGILIFGKQNAARDNADYSDVMLTSEEEIKTTNPVATEEYGIVADNLQQQNTAPQIGTVNSQGDLPGMVWQNRDVYLQGPIWAKIPHTDGNFHPSPLMGGFGLKHPPPQILIKNTPVPADPPTTFNQSKLNSFITQYSTGQVSVEIEWELQKENSKRWNPEIQYTSNYYKSNNVEFAVNTEGVYSEPRPIGTRYLTRNL

SEQ ID NO: 5248 - DNA, 2205 bp, Artificial Sequence
  Description of Artificial Sequence: Synthetic polynucleotide
atggctgctgacggttatcttccagattggctcgaggacaacctttctgaaggcattcgtgagtggtgggctctgaaacctggagtccctcaacccaaagcgaaccaacaacaccaggacaactgtcggggtcttgtgcttccgggttacaaatacctcggacccggtaacggactcgacaaaggagagccggtcaacgaggcggacgcggcagccctcgaacacgacaaggcctacgaccagcagctcaaggccggagacaacccgtacctcaagtacaaccacgccgacgccgagttccaggagcggctcaaagaagatacgtcttttgggggcaacctcgggcgagcagtcttccagaccaaaaagaggcttcttgaacctcttggtctggttgaggaagcggctaagacggctcctggaaagaagaggcctgtagagcagtctcctcaggaaccggactcctccgcgggtattggcaaatcgggtgcacagcccgctaaaaagagactcaatttcggtcagactggcgacacagagtcagtcccagaccctcaaccaatcggagaacctcccgcagccccctcaggtgtgggatctcttacaatggcttcaggtggtggcgcaccagtggcagacaataacgaaggtgccgatggagtgggtagttcctcgggaaattggcattgcgattcccaatggctgggggacagagtcatcaccaccagcacccgaacctgggccctgcccacctacaacaaccacctctacaaacaaatttccagccaatcaggagcctcgaacgacaatcactactttggctacagcaccccttgggggtattttgacttcaacagattccactgccacttttcaccacgtgactggcagcgactcatcaacaacaactggggattccggcccaagagactcagcttcaagctcttcaacatccaggtcaaagaggttacggacaacaatggagtcaagaccatcgccaataaccttaccagcacggtccaggtcttcacggactcagactatcagctcccgtacgtgctcgggtcggctcacgagggctgcctcccgccgttcccagcggacgttttcatgattcctcagtacgggtatctgacgcttaatgatggaagccaggccgtgggtcgttcgtccttttactgcctggaatatttcccgtcgcaaatgctaagaacgggtaacaacttccagttcagctacgagtttgagaacgtacctttccatagcagctacgctcacagccaaagcctggaccgactaatgaatccactcatcgaccaatacttgtactatctctcaaagactattaacggttctggacagaatcaacaaacgctaaaattcagtgtggccggacccagcaacatggctgtccagggaagaaactacatacctggacccagctaccgacaacaacgtgtctcaaccactgtgactcaaaacaacaacagcgaatttgcttggcctggagcttcttcttgggctctcaatggacgtaatagcttgatgaatcctggacctgctatggccagccacaaagaaggagaggaccgtttctttcctttgtctggatctttaatttttggcaaacaaggaactggaagagacaacgtggatgcggacaaagtcatgataaccaacgaagaagaaattaaaactactaacccggtagcaacggagtcctatggacaagtggccacaaaccaccagagtgcccaagcacaggcgcagaccggctgggttcaaaaccaaggaatacttccgggtatggtttggcaggacagagatgtgtacctgcaaggacccatctgggccaagattcctcacacggacggcaacttccacccgtctccgctgatgggcggctttggcctgaaacatcctccgcctcagatcctgatcaagaacacgcctgttcctgcgaatcctccggcggagttttcagctacaaagtttgcttcattcatcacccagtactccacaggacaagtgagtgtggaaattgaatgggagctgcagaaagaaaacagcaagcgctggaatcccgaagtgcagtacacatccaattatgcaaaatctgccaacgttgattttactgtggacaacaatggactttatactgagcctcgccccattggcacccgttaccttaccaaacctctgtaa

SEQ ID NO: 5249 - protein, 734 aa, Artificial Sequence
  Description of Artificial Sequence: Synthetic polypeptide
MAADGYLPDWLEDNLSEGIREWWALKPGVPQPKANQQHQDNCRGLVLPGYKYLGPGNGLDKGEPVNEADAAALEHDKAYDQQLKAGDNPYLKYNHADAEFQERLKEDTSFGGNLGRAVFQTKKRLLEPLGLVEEAAKTAPGKKRPVEQSPQEPDSSAGIGKSGAQPAKKRLNFGQTGDTESVPDPQPIGEPPAAPSGVGSLTMASGGGAPVADNNEGADGVGSSSGNWHCDSQWLGDRVITTSTRTWALPTYNNHLYKQISSQSGASNDNHYFGYSTPWGYFDFNRFHCHFSPRDWQRLINNNWGFRPKRLSFKLFNIQVKEVTDNNGVKTIANNLTSTVQVFTDSDYQLPYVLGSAHEGCLPPFPADVFMIPQYGYLTLNDGSQAVGRSSFYCLEYFPSQMLRTGNNFQFSYEFENVPFHSSYAHSQSLDRLMNPLIDQYLYYLSKTINGSGQNQQTLKFSVAGPSNMAVQGRNYIPGPSYRQQRVSTTVTQNNNSEFAWPGASSWALNGRNSLMNPGPAMASHKEGEDRFFPLSGSLIFGKQGTGRDNVDADKVMITNEEEIKTTNPVATESYGQVATNHQSAQAQAQTGWVQNQGILPGMVWQDRDVYLQGPIWAKIPHTDGNFHPSPLMGGFGLKHPPPQILIKNTPVPANPPAEFSATKFASFITQYSTGQVSVEIEWELQKENSKRWNPEVQYTSNYAKSANVDFTVDNNGLYTEPRPIGTRYLTKPL

SEQ ID NO: 5250 - DNA, 2211 bp, Artificial Sequence
  Description of Artificial Sequence: Synthetic polynucleotide
atggctgccgatggttatcttccagattggctcgaggacaacctctctgagggcattcgcgagtggtgggacttgaaacctggagcccctaaacccaaggcaaatcaacaacatcaggacaacgctcgaggtcttgtgcttccgggttacaaataccttggacccggcaacggactcgacaagggggagccggtcaacgcagcagacgcggcggccctcgagcacgacaaggcctacgaccagcagctcaaggccggagacaacccgtacctcaagtacaaccacgccgacgccgagttccaggagcggctcaaagaagatacgtcttttgggggcaacctcgggcgagcagtcttccaggccaaaaagaggcttcttgaacctcttggtctggttgaggaagcggctaagacggctcctggaaagaagagaccggtagagccatcaccccagcgttctccagactcctctacgggcatcggcaagaaaggccaacagcccgctaaaaagagactcaattttggtcagactggcgactcagagtcagtccccgacccacaacctctcggagaacctccagcaacccccgctgctgtgggacctactacaatggcttcaggcggtggcgcaccaatggcagacaataacgagggtgccgatggagtgggtaattcctcaggaaattggcattgcgattcccaatggctgggcgacagagtcatcaccaccagcaccagaacctgggccctgcccacttacaacaaccatctctacaagcaaatctccagccaatcaggagcttcaaacgacaaccactactttggctacagcaccccttgggggtattttgactttaacagattccactgccacttttcaccacgtgactggcaaagactcatcaacaacaactggggattccgacccaagagactcaacttcaagctcttcaacatccaagtcaaggaggtcacgacgaatgatggcgtcacgaccatcgctaataaccttaccagcacggttcaagtcttctcggactcggagtaccagttgccgtacgtcctcggctctgcgcaccagggctgcctccctccgttcccggcggacgtgttcatgattccgcagtacggctacctaacgctcaacaatggcagccaagccgtgggacgttcatccttttactgcctggaatatttcccttctcagatgctgagaacgggcaacaactttaccttcagctacacttttgaggacgttcctttccacagcagctacgctcacagccagagtctggaccgtctcatgaatcctctcatcgaccagtacctgtattacttgagcagaacaaacactccaagtggaaccaccacgcagtcaaggcttcagttttctcaggccggagcgagtgacattcgggaccagtctaggaactggcttcctggaccctgttaccgccagcagcgcgtttctaaaacaaaaacagacaacaacaacagcaattttacctggactggtgcttcaaaatataaccttaatgggcgtgaatctataatcaaccctggcactgctatggcctcacacaaagacgacgaagacaagttctttcccatgagcggtgtcatgatttttggaaaagagagcgccggagcttcaaacactgcattggacaatgtcatgatcacagacgaagaggaaatcaaagccactaaccccgtggccaccgaaagatttgggactgtggcagtcaatctccagagcagcagcacagaccctgcgaccggagatgtgcatgttatgggagcattacctggcatggtgtggcaagatagagacgtgtacctgcagggtcccatttgggccaaaattcctcacacagatggacactttcacccgtctcctcttatgggcggctttggactcaagaacccgcctcctcagatcctcatcaaaaacacgcctgttcctgcgaatcctccggcggagttttcagctacaaagtttgcttcattcatcacccaatactccacaggacaagtgagtgtggaaattgaatgggagctgcagaaagaaaacagcaagcgctggaatcccgaagtgcagtacacatccaattatgcaaaatctgccaacgttgattttactgtggacaacaatggactttatactgagcctcgccccattggcacccgttaccttacccgtcccctgtaa

SEQ ID NO: 5251 - protein, 736 aa, Artificial Sequence
  Description of Artificial Sequence: Synthetic polypeptide
MAADGYLPDWLEDNLSEGIREWWDLKPGAPKPKANQQHQDNARGLVLPGYKYLGPGNGLDKGEPVNAADAAALEHDKAYDQQLKAGDNPYLKYNHADAEFQERLKEDTSFGGNLGRAVFQAKKRLLEPLGLVEEAAKTAPGKKRPVEPSPQRSPDSSTGIGKKGQQPAKKRLNFGQTGDSESVPDPQPLGEPPATPAAVGPTTMASGGGAPMADNNEGADGVGNSSGNWHCDSQWLGDRVITTSTRTWALPTYNNHLYKQISSQSGASNDNHYFGYSTPWGYFDFNRFHCHFSPRDWQRLINNNWGFRPKRLNFKLFNIQVKEVTTNDGVTTIANNLTSTVQVFSDSEYQLPYVLGSAHQGCLPPFPADVFMIPQYGYLTLNNGSQAVGRSSFYCLEYFPSQMLRTGNNFTFSYTFEDVPFHSSYAHSQSLDRLMNPLIDQYLYYLSRTNTPSGTTTQSRLQFSQAGASDIRDQSRNWLPGPCYRQQRVSKTKTDNNNSNFTWTGASKYNLNGRESIINPGTAMASHKDDEDKFFPMSGVMIFGKESAGASNTALDNVMITDEEEIKATNPVATERFGTVAVNLQSSSTDPATGDVHVMGALPGMVWQDRDVYLQGPIWAKIPHTDGHFHPSPLMGGFGLKNPPPQILIKNTPVPANPPAEFSATKFASFITQYSTGQVSVEIEWELQKENSKRWNPEVQYTSNYAKSANVDFTVDNNGLYTEPRPIGTRYLTRPL

SEQ ID NO: 5252 - DNA, 2214 bp, Artificial Sequence; identical to SEQ ID NO: 5224
  Description of Artificial Sequence: Synthetic polynucleotide

SEQ ID NO: 5253 - protein, 737 aa, Artificial Sequence; identical to SEQ ID NO: 5225
  Description of Artificial Sequence: Synthetic polypeptide

SEQ ID NO: 5254 - DNA, 2205 bp, Artificial Sequence
  Description of Artificial Sequence: Synthetic polynucleotide
atggctgctgacggttatcttccagattggctcgaggacaacctttctgaaggcattcgtgagtggtgggctctgaaacctggagtccctcaacccaaagcgaaccaacaacaccaggacaaccgtcggggtcttgtgcttccgggttacaaatacctcggacccggtaacggactcgacaaaggagagccggtcaacgaggcggacgcggcagccctcgaacacgacaaggcctacgaccagcagctcaaggccggagacaacccgtacctcaagtacaaccacgccgacgccgagttccaggagcggctcaaagaagatacgtcttttgggggcaacctcgggcgagcagtcttccaggccaaaaagaggcttcttgaacctcttggtctggttgaggaagcggctaagacggctcctggaaagaagaggcctgtagagcagtctcctcaggaaccggactcctccgcgggtattggcaaatcgggtgcacagcccgctaaaaagagactcaatttcggtcagactggcgacacagagtcagtcccagaccctcaaccaatcggagaacctcccgcagccccctcaggtgtgggatctcttacaatggcttcaggtggtggcgcaccagtggcagacaataacgaaggtgccgatggagtgggtagttcctcgggaaattggcattgcgattcccaatggctgggggacagagtcatcaccaccagcacccgaacctgggccctgcccacctacaacaaccacctctacaaacaaatttccagccaatcaggagcctcgaacgacaatcactactttggctacagcaccccttgggggtattttgacttcaacagattccactgccacttttcaccacgtgactggcagcgactcatcaacaacaactggggattccggcccaagagactcagcttcaagctcttcaacatccaggtcaaagaggttacggacaacaatggagtcaagaccatcgccaataaccttaccagcacggtccaggtcttcacggactcagactatcagctcccgtacgtgctcgggtcggctcacgagggctgcctcccgccgttcccagcggacgttttcatgattcctcagtacgggtatctgacgcttaatgatggaagccaggccgtgggtcgttcgtccttttactgcctggaatatttcccgtcgcaaatgctaagaacgggtaacaacttccagttcagctacgagtttgagaacgtacctttccatagcagctacgctcacagccaaagcctggaccgactaatgaatccactcatcgaccaatacttgtactatctctcaaagactattaacggttctggacagaatcaacaaacgctaaaattcagtgtggccggacccagcaacatggctgtccagggaagaaactacatacctggacccagctaccgacaacaacgtgtctcaaccactgtgactcaaaacaacaacagcgaatttgcttggcctggagcttcttcttgggctctcaatggacgtaatagcttgatgaatcctggacctgctatggccagccacaaagaaggagaggaccgtttctttcctttgtctggatctttaatttttggcaaacaaggaactggaagagacaacgtggatgcggacaaagtcatgataaccaacgaagaagaaattaaaactactaacccggtagcaacggagtcctatggacaagtggccacaaaccaccagagtgcccaagcacaggcgcagaccggctgggttcaaaaccaaggaatacttccgggtatggtttggcaggacagagatgtgtacctgcaaggacccatttgggccaaaattcctcacacggacggcaactttcacccttctccgctgatgggagggtttggaatgaaacacccgcctcctcagatcctcatcaaaaacacacctgtacctgcggatcctccaacggccttcaacaaggacaagctgaactctttcatcacccagtattctactggccaagtcagcgtggagatcgagtgggagctgcagaaggaaaacagcaagcgctggaaccccgagatccagtacacctccaactactacaaatctacaagtgtggactttgctgttaatacagaaggcgtgtactctgaaccccgccccattggcacccgttacctcacccgtaatctgtaa

SEQ ID NO: 5255 - protein, 734 aa, Artificial Sequence
  Description of Artificial Sequence: Synthetic polypeptide
MAADGYLPDWLEDNLSEGIREWWALKPGVPQPKANQQHQDNRRGLVLPGYKYLGPGNGLDKGEPVNEADAAALEHDKAYDQQLKAGDNPYLKYNHADAEFQERLKEDTSFGGNLGRAVFQAKKRLLEPLGLVEEAAKTAPGKKRPVEQSPQEPDSSAGIGKSGAQPAKKRLNFGQTGDTESVPDPQPIGEPPAAPSGVGSLTMASGGGAPVADNNEGADGVGSSSGNWHCDSQWLGDRVITTSTRTWALPTYNNHLYKQISSQSGASNDNHYFGYSTPWGYFDFNRFHCHFSPRDWQRLINNNWGFRPKRLSFKLFNIQVKEVTDNNGVKTIANNLTSTVQVFTDSDYQLPYVLGSAHEGCLPPFPADVFMIPQYGYLTLNDGSQAVGRSSFYCLEYFPSQMLRTGNNFQFSYEFENVPFHSSYAHSQSLDRLMNPLIDQYLYYLSKTINGSGQNQQTLKFSVAGPSNMAVQGRNYIPGPSYRQQRVSTTVTQNNNSEFAWPGASSWALNGRNSLMNPGPAMASHKEGEDRFFPLSGSLIFGKQGTGRDNVDADKVMITNEEEIKTTNPVATESYGQVATNHQSAQAQAQTGWVQNQGILPGMVWQDRDVYLQGPIWAKIPHTDGNFHPSPLMGGFGMKHPPPQILIKNTPVPADPPTAFNKDKLNSFITQYSTGQVSVEIEWELQKENSKRWNPEIQYTSNYYKSTSVDFAVNTEGVYSEPRPIGTRYLTRNL

SEQ ID NO: 5256 - DNA, 2217 bp, Artificial Sequence
  Description of Artificial Sequence: Synthetic polynucleotide
atggctgccgatggttatcttccagattggctcgaggacaacctctctgagggcattcgcgagtggtgggcgctgaaacctggagccccgaagcccaaagccaaccagcaaaagcaggacgacggccggggtctggtgcttcctggctacaagtacctcggacccttcaacggactcgacaagggggagcccgtcaacgcggcggacgcagcggccctcgagcacgacaaggcctacgaccagcagctgcaggcgggtgacaatccgtacctgcggtataaccacgccgacgccgagtttcaggagcgtctgcaagaagatacgtcttttgggggcaacctcgggcgagcagtcttccaggccaagaagcgggttctcgaacctctcggtctggttgaggaaggcgctaagacggctcctggaaagaagagaccggtagagccatcaccccagcgttctccagactcctctacgggcatcggcaagaaaggccaacagcccgccagaaaaagactcaattttggtcagactggcgactcagagtcagttccagaccctcaacctctcggagaacctccagcagcgccctctggtgtgggacctaatacaatggctgcaggcggtggcgcaccaatggcagacaataacgaaggcgccgacggagtgggtagttcctcgggaaattggcattgcgattccacatggctgggcgacagagtcatcaccaccagcacccgaacctgggccctgcccacctacaacaaccacctctacaagcaaatctccaacgggacatcgggaggagccaccaacgacaacacctacttcggctacagcaccccctgggggtattttgactttaacagattccactgccacttttcaccacgtgactggcagcgactcatcaacaacaactggggattccggcccaagagactcagcttcaagctcttcaacatccaggtcaaggaggtcacgcagaatgaaggcaccaagaccatcgccaataacctcaccagcaccatccaggtgtttacggactcggagtaccagctgccgtacgttctcggctctgcccaccagggctgcctgcctccgttcccggcggacgtgttcatgattccccagtacggctacctaacactcaacaacggtagtcaggccgtgggacgctcctccttctactgcctggaatactttccttcgcagatgctgagaaccggcaacaacttccagtttacttacaccttcgaggacgtgcctttccacagcagctacgcccacagccagagcttggaccggctgatgaatcctctgattgaccagtacctgtactacttgtctcggactcaaacaacaggaggcacggcaaatacgcagactctgggcttcagccaaggtgggcctaatacaatggccaatcaggcaaagaactggctgccaggaccctgttaccgccaacaacgcgtctcaacgacaaccgggcaaaacaacaatagcaactttgcctggactgctgggaccaaataccatctgaatggaagaaattcattggctaatcctggcatcgctatggcaacacacaaagacgacgaggagcgtttttttcccagtaacgggatcctgatttttggcaaacaaaatgctgccagagacaatgcggattacagcgatgtcatgctcaccagcgaggaagaaatcaaaaccactaaccctgtggctacagaggaatacggtatcgtggcagataacttgcagcagcaaaacacggctcctcaaattggaactgtcaacagccagggggccttacccggtatggtctggcagaaccgggacgtgtacctgcagggtcccatctgggccaagattcctcacacggacggcaacttccacccctctcccctcatgggtggattcggacttaaacatcctccgcctcagatcctgatcaagaacacgcctgtacctgcggatcctccgaccaccttcaaccagtcaaagctgaactctttcatcacgcaatacagcaccggacaggtcagcgtggaaattgaatgggagctgcagaaggaaaacagcaagcgctggaaccccgagatccagtacacctccaactactacaaatctacaagtgtggactttgctgttaatacagaaggcgtgtactctgaaccccgccccattggcacccgttacctcacccgtaatctgtaa

SEQ ID NO: 5257 - protein, 738 aa, Artificial Sequence; identical to SEQ ID NO: 5159
  Description of Artificial Sequence: Synthetic polypeptide

SEQ ID NO: 5258 - DNA, 2211 bp, Artificial Sequence
  Description of Artificial Sequence: Synthetic polynucleotide
atggctgctgacggttatcttccagattggctcgaggacaacctttctgaaggcattcgagagtggtgggcgctgcaacctggagcccctaaacccaaggcaaatcaacaacatcaggacaacgctcggggtcttgtgcttccgggttacaaatacctcggacccggcaacggactcgacaagggggaacccgtcaacgcagcggacgcggcagccctcgagcacgacaaggcctacgaccagcagctcaaggccggtgacaacccctacctcaagtacaaccacgccgacgccgagttccaggagcggctcaaagaagatacgtcttttgggggcaacctcgggcgagcagtcttccaggccaaaaagaggcttcttgaacctcttggtctggttgaggaagcggctaagacggctcctggaaagaagaggcctgtagatcagtctcctcaggaaccggactcatcatctggtgttggcaaatcgggcaaacagcctgccagaaaaagactaaatttcggtcagactggcgactcagagtcagtcccagaccctcaacctctcggagaaccaccagcagcccccacaagtttgggatctaatacaatggcttcaggcggtggcgcaccaatggcagacaataacgagggtgccgatggagtgggtaattcctcaggaaattggcattgcgattcccaatggctgggcgacagagtcatcaccaccagcaccagaacctgggccctgcccacttacaacaaccatctctacaagcaaatctccagccaatcaggagcttcaaacgacaaccactactttggctacagcaccccttgggggtattttgactttaacagattccactgccacttctcaccacgtgactggcagcgactcattaacaacaactggggattccggcccaagaaactcagcttcaagctcttcaacatccaagttaaagaggtcacgcagaacgatggcacgacgactattgccaataaccttaccagcacggttcaggtgtttacggactcggagtatcagctcccgtacgtgctcgggtcggcgcaccaaggctgtctcccgccgtttccagcggacgtcttcatggtccctcagtatggatacctcaccctgaacaacggaagtcaagcggtgggacgctcatccttttactgcctggagtacttcccttcgcagatgctaaggactggaaataacttccaattcagctataccttcgaggatgtaccttttcacagcagctacgctcacagccagagtttggatcgcttgatgaatcctcttattgatcagtatctgtactacctgaacagaacgcaaggaacaacctctggaacaaccaaccaatcacggctgctttttagccaggctgggcctcagtctatgtctttgcaggccagaaattggctacctgggccctgctaccggcaacagagactttcaaagactgctaacgacaacaacaacagtaactttccttggacagcggccagcaaatatcatctcaatggccgcgactcgctggtgaatccaggaccagctatggccagtcacaaggacgatgaagaaaaatttttccctatgcacggcaatctaatatttggcaaagaagggacaacggcaagtaacgcagaattagataatgtaatgattacggatgaagaagagattcgtaccaccaatcctgtggcaacagagcagtatggaactgtggcaaataacttgcagagctcaaatacagctcccacgactagaactgtcaatgatcagggggccttacctggcatggtgtggcaagatcgtgacgtgtaccttcaaggacctatctgggcaaagattcctcacacggatggacactttcatccttctcctctgatgggaggctttggactgaaacatccgcctcctcaaatcatgatcaaaaatactccggtaccggcaaatcctccgacgactttcagcccggccaagtttgcttcatttatcactcagtactccactggacaggtcagcgtggaaattgagtgggagctacagaaagaaaacagcaaacgttggaatccagagattcagtacacttccaactacaacaagtctgttaatgtggactttactgtagacactaatggtgtttatagtgaacctcgccccattggcacccgttaccttacccgtcccctgtaa

SEQ ID NO: 5259 - protein, 736 aa, Artificial Sequence; identical to SEQ ID NO: 5229
  Description of Artificial Sequence: Synthetic polypeptide

SEQ ID NO: 5260 - DNA, 2211 bp, Artificial Sequence; identical to SEQ ID NO: 5228
  Description of Artificial Sequence: Synthetic polynucleotide

SEQ ID NO: 5261 - protein, 736 aa, Artificial Sequence; identical to SEQ ID NO: 5229
  Description of Artificial Sequence: Synthetic polypeptide

SEQ ID NO: 5262 - DNA, 2211 bp, Artificial Sequence
  Description of Artificial Sequence: Synthetic polynucleotide
atggctgctgacggttatcttccagattggctcgaggacaacctttctgaaggcattcgtgagtggtgggctctgaaacctggagtccctcaacccaaagcgaaccaacaacaccaggacaaccgtcggggtcttgtgcttccgggttacaaatacctcggacccggtaacggactcgacaaaggagagcccgtcaacgcggcggatgcagcggccctcgagcacgacaaggcctacgaccagcagctcaaagcgggtgacaatccgtacctgcggtataaccacgccgacgccgagtttcaggagcgtctgcaagaagatacgtcttttgggggcaacctcgggcgagcagtcttccaggccaagaagagggttctcgaaccttttggtctggttgaggaaggtgctaagacggctcctggaaagaaacgtccggtagagcagtcgccacaagagccagactcctcctcgggcatcggcaagacaggccagcagcccgctaaaaagagactcaattttggtcagactggcgactcagagtcagtccccgacccacaacctctcggagaacctccagcaacccccgctgctgtgggacctactacaatggcttcaggcggtggcgcaccaatggcagacaataacgaaggcgccgacggagtgggtaatgcctcaggaaattggcattgcgattccacatggctgggcgacagagtcatcaccaccagcacccgcacctgggccttgcccacctacaataaccacctctacaagcaaatctccagtgcttcaacgggggccagcaacgacaaccactacttcggctacagcaccccctgggggtattttgatttcaacagattccactgccatttctcaccacgtgactggcagcgactcatcaacaacaattggggattccggcccaagagactcaacttcaagctcttcaacatccaagtcaaggaggtcacgacgaatgatggcgtcacgaccatcgctaataaccttaccagcacggttcaagtcttctcggactcggagtaccagcttccgtacgtcctcggctctgcgcaccagggctgcctccctccgttcccggcggacgtgttcatgattccgcaatacggctacctgacgctcaacaatggcagccaagccgtgggacgttcatccttttactgcctggaatatttcccttctcagatgctgagaacgggcaacaactttaccttcagctacacctttgaggaagtgcctttccacagcagctacgcgcacagccagagcctggaccggctgatgaatcctctcatcgaccaatacctgtattacctgaacagaactcaaaatcagtccggaagtgcccaaaacaaggacttgctgtttagccgtgggtctccagctggcatgtctgttcagcccaaaaactggctacctggaccctgttatcggcagcagcgcgtttctaaaacaaaaacagacaacaacaacagcaattttacctggactggtgcttcaaaatataacctcaatgggcgtgaatccatcatcaaccctggcactgctatggcctcacacaaagacgacgaagacaagttctttcccatgagcggtgtcatgatttttggaaaagagagcgccggagcttcaaacactgcattggacaatgtcatgattacagacgaagaggaaattaaagccactaaccctgtggccaccgaaagatttgggaccgtggcagtcaatttccagagcagcagcacagaccctgcgaccggagatgtgcatgttatgggagccttacctggaatggtgtggcaagacagagacgtatacctgcagggtcctatttgggccaaaattcctcacacggatggacactttcacccgtctcctctcatgggcggctttggacttaagcacccgcctcctcagatcctcatcaaaaacacgcctgttcctgcgaatcctccggcagagttttcggctacaaagtttgcttcattcatcacccagtattccacaggacaagtgagcgtggagattgaatgggagctgcagaaagaaaacagcaaacgctggaatcccgaagtgcagtatacatctaactatgcaaaatctgccaacgttgatttcactgtggacaacaatggactttatactgagcctcgccccattggcacccgttacctcacccgtcccctgtaa

SEQ ID NO: 5263 - protein, 736 aa, Artificial Sequence
  Description of Artificial Sequence: Synthetic polypeptide
MAADGYLPDWLEDNLSEGIREWWALKPGVPQPKANQQHQDNRRGLVLPGYKYLGPGNGLDKGEPVNAADAAALEHDKAYDQQLKAGDNPYLRYNHADAEFQERLQEDTSFGGNLGRAVFQAKKRVLEPFGLVEEGAKTAPGKKRPVEQSPQEPDSSSGIGKTGQQPAKKRLNFGQTGDSESVPDPQPLGEPPATPAAVGPTTMASGGGAPMADNNEGADGVGNASGNWHCDSTWLGDRVITTSTRTWALPTYNNHLYKQISSASTGASNDNHYFGYSTPWGYFDFNRFHCHFSPRDWQRLINNNWGFRPKRLNFKLFNIQVKEVTTNDGVTTIANNLTSTVQVFSDSEYQLPYVLGSAHQGCLPPFPADVFMIPQYGYLTLNNGSQAVGRSSFYCLEYFPSQMLRTGNNFTFSYTFEEVPFHSSYAHSQSLDRLMNPLIDQYLYYLNRTQNQSGSAQNKDLLFSRGSPAGMSVQPKNWLPGPCYRQQRVSKTKTDNNNSNFTWTGASKYNLNGRESIINPGTAMASHKDDEDKFFPMSGVMIFGKESAGASNTALDNVMITDEEEIKATNPVATERFGTVAVNFQSSSTDPATGDVHVMGALPGMVWQDRDVYLQGPIWAKIPHTDGHFHPSPLMGGFGLKHPPPQILIKNTPVPANPPAEFSATKFASFITQYSTGQVSVEIEWELQKENSKRWNPEVQYTSNYAKSANVDFTVDNNGLYTEPRPIGTRYLTRPL

SEQ ID NO: 5264 - DNA, 2217 bp, Artificial Sequence
  Description of Artificial Sequence: Synthetic polynucleotide
atggctgccgatggttatcttccagattggctcgaggacaacctctctgagggcattcgcgagtggtgggacttgaaacctggagccccgaaacccaaagccaaccagcaaaagcaggacgacggccggggtctggtgcttcctggctacaagtacctcggacccttcaacggactcgacaagggggagcccgtcaacgcggcggatgcaacggccctcgagcacgacaaggcctacgaccagcagctgcaggcgggtgacaatccgtacctgcggtataaccacgccgacgccgagtttcaggagcgtctgcaagaagatacgtcttttgggggcaacctcgggcgagcagtcttccaggccaagaagcgggttctcgaacctctcggtctggttgaggaaggcgctaagacggctcctggaaagaagagaccggtagagccatcaccccagcgttctccagactcctctacgggcatcggcaagaaaggccaacagcccgccagaaaaagactcaattttggtcagactggcgactcagagtcagttccagaccctcaacctctcggagaaccaccagcagcccccacaagtttgggatctaatacaatggcttcaggcggtggcgcaccaatggcagacaataacgagggtgccgatggagtgggtaattcctcaggaaattggcattgcgattcccaatggctgggcgacagagtcatcaccaccagcacccgcacctgggccttgcccacctacaataaccacctctacaagcaaatctccagtgcttcaacgggggccagcaacgacaaccactacttcggctacagcaccccctgggggtattttgactttaaccgcttccactgccacttctcgccaagagactggcaaagactcatcaacaacaattggggattccggcccaagagactcaacttcaaactcttcaacatccaagtcaaggaggtcacgacgaatgatggcgtcacgaccatcgccaataacctcaccagcaccatccaggtgtttacggactcggagtaccagctgccgtacgttctcggctctgcccaccagggctgcctgcctccgttcccggcggacgtgttcatgattccccagtatggatacctcaccctgaacaacggaagtcaagcggtgggacgctcatccttttactgcctggagtacttcccttcgcagatgctaaggactggaaataacttccaattcagctataccttcgaggatgtaccttttcacagcagctacgctcacagccagagtttggatcgcttgatgaatcctcttattgatcagtatctgtactacctgaacagaacgcaaggaacaacctctggaacaaccaaccaatcacggctgctttttagccaggctgggcctcagtctatgtctttgcaggccagaaattggctacctgggccctgctaccggcaacagagactttcaaagactgctaacgacaacaacaacagtaactttccttggacagcagccagcaaatatcatctcaatggccgcgactcgctggtgaatccaggaccagctatggccagtcacaaggacgatgaagaaaaatttttccctatgcacggcaatctaatatttggcaaagaagggacaacggcaagtaacgcagaattagataatgtaatgattacggatgaagaagagattcgtaccaccaatcctgtggcaacagagcagtatggaactgtggcaaataacttgcagagctcaaatacagctcccacgactagaactgtcaatgatcagggggccttacctggcatggtgtggcaagatcgtgacgtgtaccttcaggggcccatctgggcaaagattccacacacggacggacattttcacccctctcccctcatgggtggattcggacttaaacaccctcctccgcagattctcatcaagaacaccccggtacctgcgaatccttcgaccaccttcagtgcggcaaagtttgcttccttcatcacacagtactccacgggacaggtcagcgtggagatcgagtgggagctgcagaaggaaaacagcaagcgctggaacccggagatccagtacacttccaactattacaagtctaataatgttgaatttgctgttaatactgaaggtgtatatagtgaaccccgccccattggcaccagatacctgactcgtaatctgtaa

SEQ ID NO: 5265 - protein, 738 aa, Artificial Sequence
  Description of Artificial Sequence: Synthetic polypeptide
MAADGYLPDWLEDNLSEGIREWWDLKPGAPKPKANQQKQDDGRGLVLPGYKYLGPFNGLDKGEPVNAADATALEHDKAYDQQLQAGDNPYLRYNHADAEFQERLQEDTSFGGNLGRAVFQAKKRVLEPLGLVEEGAKTAPGKKRPVEPSPQRSPDSSTGIGKKGQQPARKRLNFGQTGDSESVPDPQPLGEPPAAPTSLGSNTMASGGGAPMADNNEGADGVGNSSGNWHCDSQWLGDRVITTSTRTWALPTYNNHLYKQISSASTGASNDNHYFGYSTPWGYFDFNRFHCHFSPRDWQRLINNNWGFRPKRLNFKLFNIQVKEVTTNDGVTTIANNLTSTIQVFTDSEYQLPYVLGSAHQGCLPPFPADVFMIPQYGYLTLNNGSQAVGRSSFYCLEYFPSQMLRTGNNFQFSYTFEDVPFHSSYAHSQSLDRLMNPLIDQYLYYLNRTQGTTSGTTNQSRLLFSQAGPQSMSLQARNWLPGPCYRQQRLSKTANDNNNSNFPWTAASKYHLNGRDSLVNPGPAMASHKDDEEKFFPMHGNLIFGKEGTTASNAELDNVMITDEEEIRTTNPVATEQYGTVANNLQSSNTAPTTRTVNDQGALPGMVWQDRDVYLQGPIWAKIPHTDGHFHPSPLMGGFGLKHPPPQILIKNTPVPANPSTTFSAAKFASFITQYSTGQVSVEIEWELQKENSKRWNPEIQYTSNYYKSNNVEFAVNTEGVYSEPRPIGTRYLTRNL

SEQ ID NO: 5266 - DNA, 2208 bp, Artificial Sequence
  Description of Artificial Sequence: Synthetic polynucleotide
atggctgccgatggttatcttccagattggctcgaggacaaccttagtgaaggaattcgcgagtggtgggacttgaaacctggagccccgaagcccaaagccaaccagcaaaagcaggacgacggccggggtctggtgcttcctggctacaagtacctcggacccttcaacggactcgacaagggggagcccgtcaacgcggcggacgcagcggccctcgagcacgacaaggcctacgaccagcagctcaaagcgggtgacaatccgtacctgcggtataaccacgccgacgccgagtttcaggagcgtctgcaagaagatacgtcttttgggggcaacctcgggcgagcagtcttccaggccaagaagcgggttctcgaacctctcggtctggttgaggaaggtgctaagacggctcctggaaagaaacgtccggtagagcagtcgccacaagagccagactcctcctcgggcattggcaagacaggccagcagcccgctaaaaagagactcaattttggtcagactggcgactcagagtcagtccccgacccacaacctctcggagaacctccagcaacccccgctgctgtgggacctactacaatggcttcaggcggtggcgcaccaatggcagacaataacgaaggcgccgacggagtgggtaatgcctcaggaaattggcattgcgattccacatggctgggcgacagagtcatcaccaccagcacccgaacctgggccctgcccacctacaacaaccacctctacaaacaaatttccagccaatcaggagcctcgaacgacaatcactactttggctacagcaccccttgggggtattttgatttcaacagattccactgccacttttcaccacgtgactggcagcgactcatcaacaacaattggggattccggcccaagagactcagcttcaagctcttcaacatccaggtcaaggaggtcacgcagaatgaaggcaccaagaccatcgccaataaccttaccagcacggttcaagtgtttacggactcggagtatcagctcccgtacgtgctcggctcggcgcatcaaggatgcctcccgccgttcccagcagacgtcttcatggtgccacagtatggatacctcaccctgaacaacgggagtcaggcagtaggacgctcttcattttactgcctggagtactttccttctcagatgctgcgtaccggaaacaactttaccttcagctacacttttgaggacgttcctttccacagcagctacgctcacagccagagtctggaccgtctcatgaatcctctgattgaccagtacctgtattacttgagcagaacaaacactccaagtggaaccaccacgcagtcaaggcttcagttttctcaggccggagcgagtgacattcgggaccagtctaggaactggcttcctggaccctgttaccgccagcagcgagtatcaaagacatctgcggataacaacaacagtgaatactcgtggactggagctaccaagtaccacctcaatggcagagactctctggtgaatccgggcccggccatggcaagccacaaggactatgaagaaaagttttttcctcagagcggggttctcatctttgggaagcaaggctcagagaaaacaaatgtggacattgaaaaggtcatgattacagacgaagaggaaatcaggacaaccaatcccgtggctacggagcagtatggttctgtatctaccaacctccagagaggcaacagacaagcagctaccgcagatgtcaacacacaaggcgttcttccaggcatggtctggcaggacagagatgtgtaccttcaggggcccatctgggcaaagattccacacacggacggacattttcacccgtctccgctgatgggcggctttggcctgaaacatcctccgcctcagatcctgatcaagaacacgcctgtacctgcggatcctccgaccaccttcaaccagtcaaagctgaactctttcatcactcagtattctactggccaagtcagcgtggagatcgagtgggagctgcagaaggaaaacagcaagcgctggaaccccgagatccagtacacctccaactactacaaatctacaagtgtggactttgctgttaatacagaaggcgtgtactctgaaccccgccccattggcacccgttacctcacccgtaatctgtaa

SEQ ID NO: 5267 - protein, 735 aa, Artificial Sequence
  Description of Artificial Sequence: Synthetic polypeptide
MAADGYLPDWLEDNLSEGIREWWDLKPGAPKPKANQQKQDDGRGLVLPGYKYLGPFNGLDKGEPVNAADAAALEHDKAYDQQLKAGDNPYLRYNHADAEFQERLQEDTSFGGNLGRAVFQAKKRVLEPLGLVEEGAKTAPGKKRPVEQSPQEPDSSSGIGKTGQQPAKKRLNFGQTGDSESVPDPQPLGEPPATPAAVGPTTMASGGGAPMADNNEGADGVGNASGNWHCDSTWLGDRVITTSTRTWALPTYNNHLYKQISSQSGASNDNHYFGYSTPWGYFDFNRFHCHFSPRDWQRLINNNWGFRPKRLSFKLFNIQVKEVTQNEGTKTIANNLTSTVQVFTDSEYQLPYVLGSAHQGCLPPFPADVFMVPQYGYLTLNNGSQAVGRSSFYCLEYFPSQMLRTGNNFTFSYTFEDVPFHSSYAHSQSLDRLMNPLIDQYLYYLSRTNTPSGTTTQSRLQFSQAGASDIRDQSRNWLPGPCYRQQRVSKTSADNNNSEYSWTGATKYHLNGRDSLVNPGPAMASHKDYEEKFFPQSGVLIFGKQGSEKTNVDIEKVMITDEEEIRTTNPVATEQYGSVSTNLQRGNRQAATADVNTQGVLPGMVWQDRDVYLQGPIWAKIPHTDGHFHPSPLMGGFGLKHPPPQILIKNTPVPADPPTTFNQSKLNSFITQYSTGQVSVEIEWELQKENSKRWNPEIQYTSNYYKSTSVDFAVNTEGVYSEPRPIGTRYLTRNL

SEQ ID NO: 5268 - DNA, 2214 bp, Artificial Sequence
  Description of Artificial Sequence: Synthetic polynucleotide
atggctgccgatggttatcttccagattggctcgaggacaacctctctgagggcattcgcgagtggtgggacttgaaacctggagccccgaaacccaaagccaaccagcaaaagcaggacgacggccggggtctggtgcttcctggctacaagtacctcggacccttcaacggactcgacaagggggagcccgtcaacgcggcggatgcagcggccctcgagcacgacaaggcctacgaccagcagctcaaagcgggtgacaatccgtacctgcggtataaccacgccgacgccgagtttcaggagcgtctgcaagaagatacgtcttttgggggcaacctcgggcgagcagtcttccaggccaagaagagggttctcgaaccttttggtctggttgaggaaggtgctaagacggctcctggaaagaaacgtccggtagagcagtcgccacaagagccagactcctcctcgggcattggcaagacaggccagcagcctgcaagaaaaagattgaattttggtcagactggagacgcagactcagtacctgacccccagcctctcggacagccaccagcagccccctctggtctgggaactaatacgatggctacaggcagtggcgcaccaatggcagacaataacgagggcgccgacggagtgggtaattcctcgggaaattggcattgcgattcccaatggctgggggacagagtcatcaccaccagcacccgaacctgggccctgcccacctacaacaatcacctctacaagcaaatctccaacagcacatctggaggatcttcaaatgacaacgcctacttcggctacagcaccccctgggggtattttgatttcaacagattccactgccatttctcaccacgtgactggcagcgactcatcaacaacaattggggattccggcccaagagactcaacttcaagctcttcaacatccaggtcaaggaggtcacgcagaatgaaggcaccaagaccatcgccaataacctcaccagcaccatccaggtgtttacggactcggagtaccagctgccgtacgttctcggctctgcccaccagggctgcctgcctccgttcccggcggacgtgttcatgattccccagtacggctacctaacactcaacaacggtagtcaggccgtgggacgctcctccttctactgcctggaatactttccttcgcagatgctgagaaccggcaacaacttccagtttacttacaccttcgaggacgtgcctttccacagcagctacgcccacagccagagcttggaccggctgatgaatcctctgattgaccagtacctgtactacttgtctcggactcaaacaacaggaggcacgacaaatacgcagactctgggcttcagccaaggtgggcctaatacaatggccaatcaggcaaagaactggctgccaggaccctgttaccgccagcagcgagtatcaaagacatttgcggataacaacaacagtgaatactcgtggactggagctaccaagtaccacctcaatggcagagactctctggtgaatccgggcccggccatggcaagccacaaggacgatgaagaaaagttttttcctcagagcggggttctcatctttgggaagcaaggctcagagaaaacaaatgtggacattgaaaaggtcatgattacagacgaagaggaaatcaggacaaccaatcccgtggctacggagcagtatggttctgtatctaccaacctccagagaggcaacagacaagcagctaccgcagatgtcaacacacaaggcgttcttccaggcatggtctggcaggacagagatgtgtaccttcaggggcccatctgggcaaagattccacacacggacggacattttcacccctctcccctcatgggtggattcggacttaaacaccctccgcctcagatcctgatcaagaacacgcctgtacccgcggatcctccgaccaccttcaaccagtcaaagctgaactctttcatcacccagtattctactggccaagtcagcgtggagatcgagtgggagctgcagaaggaaaacagcaagcgctggaaccccgagatccagtacacctccaactactacaaatctacaagtgtggactttgctgttaatacagaaggcgtgtactctgaaccccgccccattggcacccgttacctcacccgtaatctgtaa

SEQ ID NO: 5269 - protein, 737 aa, Artificial Sequence
  Description of Artificial Sequence: Synthetic polypeptide
MAADGYLPDWLEDNLSEGIREWWDLKPGAPKPKANQQKQDDGRGLVLPGYKYLGPFNGLDKGEPVNAADAAALEHDKAYDQQLKAGDNPYLRYNHADAEFQERLQEDTSFGGNLGRAVFQAKKRVLEPFGLVEEGAKTAPGKKRPVEQSPQEPDSSSGIGKTGQQPARKRLNFGQTGDADSVPDPQPLGQPPAAPSGLGTNTMATGSGAPMADNNEGADGVGNSSGNWHCDSQWLGDRVITTSTRTWALPTYNNHLYKQISNSTSGGSSNDNAYFGYSTPWGYFDFNRFHCHFSPRDWQRLINNNWGFRPKRLNFKLFNIQVKEVTQNEGTKTIANNLTSTIQVFTDSEYQLPYVLGSAHQGCLPPFPADVFMIPQYGYLTLNNGSQAVGRSSFYCLEYFPSQMLRTGNNFQFTYTFEDVPFHSSYAHSQSLDRLMNPLIDQYLYYLSRTQTTGGTTNTQTLGFSQGGPNTMANQAKNWLPGPCYRQQRVSKTFADNNNSEYSWTGATKYHLNGRDSLVNPGPAMASHKDDEEKFFPQSGVLIFGKQGSEKTNVDIEKVMITDEEEIRTTNPVATEQYGSVSTNLQRGNRQAATADVNTQGVLPGMVWQDRDVYLQGPIWAKIPHTDGHFHPSPLMGGFGLKHPPPQILIKNTPVPADPPTTFNQSKLNSFITQYSTGQVSVEIEWELQKENSKRWNPEIQYTSNYYKSTSVDFAVNTEGVYSEPRPIGTRYLTRNL

SEQ ID NO: 5270 - DNA, 2217 bp, Artificial Sequence
  Description of Artificial Sequence: Synthetic polynucleotide
atggctgccgatggttatcttccagattggctcgaggacactctctctgaaggaataagacagtggtgggcgctgaaacctggagccccgaagcccaaagccaaccagcaaaagcaggacgacggccggggtctggtgcttcctggctacaagtacctcggacccttcaacggactcgacaagggggagcccgtcaacgcggcggatgcagcggccctcgagcacgacaaggcctacgaccagcagctcaaagcgggtgacaatccgtacctgcggtataaccacgccgacgccgagtttcaggagcgtctgcaagaagatacgtcttttgggggcaacctcgggcgagcagtcttccaggccaagaagcgggttctcgaacctctcggtctggttgaggaaggcgctaagacggctcctggaaagaagagaccggtagagccatcaccccagcgttctccagactcctctacgggcatcggcaagaaaggccaacagcccgccagaaaaagactcaattttggtcagactggcgactcagagtcagttccagaccctcaacctctcggagaaccaccagcagcccccacaagtttgggatctaatacaatggcttcaggcggtggcgcaccaatggcagacaataacgagggtgccgatggagtgggtaattcctcaggaaattggcattgcgattcccaatggctgggcgacagagtcatcaccaccagcacccgcacctgggccttgcccacctacaataaccacctctacaagcaaatctccagtgcttcaacgggggccagcaacgacaaccactacttcggctacagcaccccctgggggtattttgactttaaccgcttccactgccacttctcgccaagagactggcaaagactcatcaacaacaattggggattccggcccaagagactcaacttcaaactcttcaacatccaagtcaaggaggtcacgacgaatgatggcgtcacgaccatcgccaataacctcaccagcaccatccaggtgtttacggactcggagtaccagctgccgtacgttctcggctctgcccaccagggctgcctgcctccgttcccggcggacgtgttcatgattccccagtatggatacctcaccctgaacaacggaagtcaagcggtgggacgctcatccttttactgcctggagtacttcccttcgcagatgctaaggactggaaataacttccaattcagctataccttcgaggatgtaccttttcacagcagctacgctcacagccagagtttggatcgcttgatgaatcctcttattgatcagtatctgtactacctgaacagaacgcaaggaacaacctctggaacaaccaaccaatcacggctgctttttagccaggctgggcctcagtctatgtctttgcaggccagaaattggctacctgggccctgctaccggcaacagagactttcaaagactgctaacgacaacaacaacagtaactttccttggacagcagccagcaaatatcatctcaatggccgcgactcgctggtgaatccaggaccagctatggccagtcacaaggacgatgaagaaaaatttttccctatgcacggcaatctaatatttggcaaagaagggacaacggcaagtaacgcagaattagataatgtaatgattacggatgaagaagagattcgtaccaccaatcctgtggcaacagagcagtatggaactgtggcaaataacttgcagagctcaaatacagctcccacgactagaactgtcaatgatcagggggccttacctggcatggtgtggcaagatcgtgacgtgtaccttcaggggcccatctgggcaaagattccacacacggacggacattttcacccctctcccctcatgggtggattcggacttaaacaccctcctccgcagattctcatcaagaacaccccggtacctgcgaatccttcgaccaccttcagtgcggcaaagtttgcttccttcatcacacagtactccacgggacaggtcagcgtggagatcgagtgggagctgcagaaggaaaacagcaagcgctggaacccggagatccagtacacttccaactattacaagtctaataatgttgaatttgctgttaatactgaaggtgtatatagtgaaccccgccccattggcaccagatacctgactcgtaatctgtaa

SEQ ID NO: 5271 - protein, 738 aa, Artificial Sequence
  Description of Artificial Sequence: Synthetic polypeptide
MAADGYLPDWLEDTLSEGIRQWWALKPGAPKPKANQQKQDDGRGLVLPGYKYLGPFNGLDKGEPVNAADAAALEHDKAYDQQLKAGDNPYLRYNHADAEFQERLQEDTSFGGNLGRAVFQAKKRVLEPLGLVEEGAKTAPGKKRPVEPSPQRSPDSSTGIGKKGQQPARKRLNFGQTGDSESVPDPQPLGEPPAAPTSLGSNTMASGGGAPMADNNEGADGVGNSSGNWHCDSQWLGDRVITTSTRTWALPTYNNHLYKQISSASTGASNDNHYFGYSTPWGYFDFNRFHCHFSPRDWQRLINNNWGFRPKRLNFKLFNIQVKEVTTNDGVTTIANNLTSTIQVFTDSEYQLPYVLGSAHQGCLPPFPADVFMIPQYGYLTLNNGSQAVGRSSFYCLEYFPSQMLRTGNNFQFSYTFEDVPFHSSYAHSQSLDRLMNPLIDQYLYYLNRTQGTTSGTTNQSRLLFSQAGPQSMSLQARNWLPGPCYRQQRLSKTANDNNNSNFPWTAASKYHLNGRDSLVNPGPAMASHKDDEEKFFPMHGNLIFGKEGTTASNAELDNVMITDEEEIRTTNPVATEQYGTVANNLQSSNTAPTTRTVNDQGALPGMVWQDRDVYLQGPIWAKIPHTDGHFHPSPLMGGFGLKHPPPQILIKNTPVPANPSTTFSAAKFASFITQYSTGQVSVEIEWELQKENSKRWNPEIQYTSNYYKSNNVEFAVNTEGVYSEPRPIGTRYLTRNL

SEQ ID NO: 5272 - DNA, 2208 bp, Artificial Sequence; identical to SEQ ID NO: 5102
  Description of Artificial Sequence: Synthetic polynucleotide

SEQ ID NO: 5273 - protein, 735 aa, Artificial Sequence [sequence omitted]

SEQ ID NO: 5274 - DNA, 2208 bp, Artificial Sequence
  Description of Artificial Sequence: Synthetic polynucleotide
atggctgccgatggttatcttccagattggctcgaggacaacctctctgagggcattcgcgagtggtgggcgctgaaacctggagccccgaagcccaaagccaaccagcaaaagcaggacgacggccggggtctggtgcttcctggctacaagtacctcggacccttcaacggactcgacaagggggagcccgtcaacgcggcggacgccgcggccctcgagcacgacaaggcctacgaccagcagctgcaggcgggtgacaatccgtacctgcggtataaccacgccgacgccgagtttcaggagcgtctgcaagaagatacgtcttttgggggcaacctcgggcgagcagtcttccaggccaaaaagaggcttcttgaacctcttggtctggttgaggaagcagctaaaacggctcctggaaagaagaggcctgtagagcagtctcctcaggaaccggactcctccgcgggtattggcaaatcgggtgcacagcccgccaaaaagagactcaatttcggtcagactggcgactcagagtcagtcccagaccctcaacctctcggagaaccaccagcagcccccacaagtttgggatctaatacaatggcttcaggcggtggcgcaccaatggcagacaataacgaaggcgccgacggagtgggtaatgcctcaggaaattggcattgcgattccacatggctgggcgacagagtcatcaccaccagcacccgcacctgggccttgcccacctacagcaaccatctctacaagcaaatctccagccaatcaggagcttcaaacgacaacgactactttggctacagcaccccttgggggtattttgatttcaacagattccactgccacttttcaccacgtgactggcaaagactcatcaacaacaactggggattccgacccaagagactcaacttcaagctctttaacattcaagtcaaagaggtcacgcagaatgacggtacgacgacgattgccaataaccttaccagcacggttcaggtgtttactgactcggagtaccagctcccgtacgtcctcggctcggcgcatcaaggatgcctcccgccgttcccagcagacgtcttcatggtgccacagtatggatacctcaccctgaacaacgggagtcaggcagtaggacgctcttcattttactgcctggagtactttccttctcagatgctgcgtaccggaaacaactttaccttcagctacacttttgaggacgttcctttccacagcagctacgctcacagccagagtctggaccgtctcatgaatcctctcatcgaccagtacctgtattacttgagcagaacaaacactccaagtggaaccaccacgcagtcaaggcttcagttttctcaggccggagcgagtgacattcgggaccagtctaggaactggcttcctggaccctgttaccgccagcagcgagtatcaaagacatctgaggataacaacaacagtgaatactcgtggactggagctaccaagtaccacctcaatggcagagactctctggtgaatccgggcccggccatggcaagccacaaggacgatgaagaaaagttttttcctcagagcggggttctcatctttgggaagcaaggctcagagaaaacaaatgtggacattgaaaaggtcatgattacagacgaagaggaaatcaggacaaccaatcccgtggctacggagcagtatggttctgtatctaccaacctccagagaggcaacagacaagcagctaccgcagatgtcaacacacaaggcgttcttccaggcatggtctggcaggacagagatgtgtaccttcaggggcccatctgggcaaagattccacacacggacggacattttcacccctctcccctcatgggtggattcggacttaaacaccctcctccacagattctcatcaagaacaccccggtacctgcgaatccttcgaccaccttcagtgcggcaaagtttgcttccttcatcacacagtactccacgggacaggtcagcgtggagatcgagtgggagctgcagaaggaaaacagcaaacgctggaatcccgaaattcagtacacttccaactacaacaagtctgttaatgtggactttactgtggacactaatggcgtgtattcagagcctcgccccattggcaccagatacctgactcgtaatctgtaa

SEQ ID NO: 5275 - protein, 735 aa, Artificial Sequence
  Description of Artificial Sequence: Synthetic polypeptide
MAADGYLPDWLEDNLSEGIREWWALKPGAPKPKANQQKQDDGRGLVLPGYKYLGPFNGLDKGEPVNAADAAALEHDKAYDQQLQAGDNPYLRYNHADAEFQERLQEDTSFGGNLGRAVFQAKKRLLEPLGLVEEAAKTAPGKKRPVEQSPQEPDSSAGIGKSGAQPAKKRLNFGQTGDSESVPDPQPLGEPPAAPTSLGSNTMASGGGAPMADNNEGADGVGNASGNWHCDSTWLGDRVITTSTRTWALPTYSNHLYKQISSQSGASNDNDYFGYSTPWGYFDFNRFHCHFSPRDWQRLINNNWGFRPKRLNFKLFNIQVKEVTQNDGTTTIANNLTSTVQVFTDSEYQLPYVLGSAHQGCLPPFPADVFMVPQYGYLTLNNGSQAVGRSSFYCLEYFPSQMLRTGNNFTFSYTFEDVPFHSSYAHSQSLDRLMNPLIDQYLYYLSRTNTPSGTTTQSRLQFSQAGASDIRDQSRNWLPGPCYRQQRVSKTSEDNNNSEYSWTGATKYHLNGRDSLVNPGPAMASHKDDEEKFFPQSGVLIFGKQGSEKTNVDIEKVMITDEEEIRTTNPVATEQYGSVSTNLQRGNRQAATADVNTQGVLPGMVWQDRDVYLQGPIWAKIPHTDGHFHPSPLMGGFGLKHPPPQILIKNTPVPANPSTTFSAAKFASFITQYSTGQVSVEIEWELQKENSKRWNPEIQYTSNYNKSVNVDFTVDTNGVYSEPRPIGTRYLTRNL

SEQ ID NO: 5276 - DNA, 2208 bp, Artificial Sequence
  Description of Artificial Sequence: Synthetic polynucleotide
atggctgccgatggttatcttccagattggctcgaggacaacctctctgagggcattcgcgagtggtgggcgctgaaacctggagccccgaagcccaaagccaaccagcaaaagcaggacgacggccggggtctggtgcttcctggctacaagtacctcggacccttcaacggactcgacaagggggagcccgtcaacgcggcggacgcagcggccctcgagcacgacaaggcctacgaccagcagctgcaggcgggtgacaatccgtacctgcggtataaccacgccgacgccgagttccaggagcgtctgcaagaagatacgtcttttgggggcaacctcgggcgagcagtcttccaggccaagaagagggttctcgaaccttttggtctggttgaggaaggtgctaagacggctcctggaaagaaacgtccggtagagcagtcgccacaagagccagactcctcctcgggcattggcaagacaggccagcagcccgctaaaaagagactcaattttggtcagactggcgactcagagtcagtcccagaccctcaacctctcggagaaccaccagcagcccccacaagtttgggatctaatacaatggcttcaggcggtggcgcaccaatggcagacaataacgagggcgccgacggagtgggtaattcctcgggaaattggcattgcgattccacatggatgggcgacagagtcatcaccaccagcacccgaacctgggccctgcccacctacaacaaccacctctacaaacaaatttccagccaatcaggagcttcaaacgacaaccactactttggctacagcaccccttgggggtattttgactttaacagattccactgccacttttcaccacgtgactggcagcgactcattaacaacaactggggattccggcccaagaaactcaacttcaagctctttaacatccaggtcaaggaggtcacgcagaatgaaggcaccaagaccatcgccaataacctcaccagcaccatccaggtgtttacggactcggagtaccagctgccgtacgttctcggctctgcccaccagggctgcctgcctccgttcccggcggacgtgttcatgattccccagtacggctacctaacactcaacaacggtagtcaggccgtgggacgctcctccttctactgcctggaatactttccttcgcagatgctgagaaccggcaacaacttccagtttacttacaccttcgaggacgtgcctttccacagcagctacgcccacagccagagcttggaccggctgatgaatcctctgattgaccagtacctgtattacttgtctcggactcaaacaacaggaggcacgacaaatacgcagactctgggcttcagccaaggtgggcctaatacaatggccaatcaggcaaagaactggctgcctggaccctgttaccgccagcagcgagtatcaaagacatctgcggataacaacaacagtgaatactcgtggactggagctaccaagtaccacctcaatggcagagactctctggtgaatccgggcccggccatggcaagccacaaggacgatgaagaaaagttttttcctcagagcggggttctcatctttgggaagcaaggctcagagaaaacaaatgtggacattgaaaaggttatgattacagacgaagaggaaatcaggacaaccaatcccgtggctacggagcagtatggttctgtatctaccaacctccagagaggcaacagacaagcagctaccgcagatgtcaacacacagggcgttcttccaggcatggtctggcaggacagagatgtgtaccttcagggtcccatttgggccaaaattcctcacacagatggacactttcacccgtcccctcttatgggcggctttggactcaagaacccgcctcctcagatcctcatcaaaaacacgcctgttcctgcgaatcctccggcagagttttcagctacaaagtttgcttcattcatcacccaatactccacaggacaagtgagtgtggaaattgaatgggagctgcagaaagaaaacagcaagcgctggaatcccgaagtgcagtacacatccaattatgcaaaatctgccaacgttgattttactgtggacactaatggcgtgtattcagagcctcgccccattggcaccagatacctcacccgtaatctgtaa

SEQ ID NO: 5277 - protein, 735 aa, Artificial Sequence
  Description of Artificial Sequence: Synthetic polypeptide
MAADGYLPDWLEDNLSEGIREWWALKPGAPKPKANQQKQDDGRGLVLPGYKYLGPFNGLDKGEPVNAADAAALEHDKAYDQQLQAGDNPYLRYNHADAEFQERLQEDTSFGGNLGRAVFQAKKRVLEPFGLVEEGAKTAPGKKRPVEQSPQEPDSSSGIGKTGQQPAKKRLNFGQTGDSESVPDPQPLGEPPAAPTSLGSNTMASGGGAPMADNNEGADGVGNSSGNWHCDSTWMGDRVITTSTRTWALPTYNNHLYKQISSQSGASNDNHYFGYSTPWGYFDFNRFHCHFSPRDWQRLINNNWGFRPKKLNFKLFNIQVKEVTQNEGTKTIANNLTSTIQVFTDSEYQLPYVLGSAHQGCLPPFPADVFMIPQYGYLTLNNGSQAVGRSSFYCLEYFPSQMLRTGNNFQFTYTFEDVPFHSSYAHSQSLDRLMNPLIDQYLYYLSRTQTTGGTTNTQTLGFSQGGPNTMANQAKNWLPGPCYRQQRVSKTSADNNNSEYSWTGATKYHLNGRDSLVNPGPAMASHKDDEEKFFPQSGVLIFGKQGSEKTNVDIEKVMITDEEEIRTTNPVATEQYGSVSTNLQRGNRQAATADVNTQGVLPGMVWQDRDVYLQGPIWAKIPHTDGHFHPSPLMGGFGLKNPPPQILIKNTPVPANPPAEFSATKFASFITQYSTGQVSVEIEWELQKENSKRWNPEVQYTSNYAKSANVDFTVDTNGVYSEPRPIGTRYLTRNL

SEQ ID NO: 5278 - DNA, 2214 bp, Artificial Sequence; identical to SEQ ID NO: 5268
  Description of Artificial Sequence: Synthetic polynucleotide

SEQ ID NO: 5279 - protein, 737 aa, Artificial Sequence; identical to SEQ ID NO: 5269
  Description of Artificial Sequence: Synthetic polypeptide

SEQ ID NO: 5280 - protein, 736 aa, Artificial Sequence; identical to SEQ ID NO: 5093
  Description of Artificial Sequence: Synthetic polypeptide

SEQ ID NO: 5281 - protein, 736 aa, Artificial Sequence
  Description of Artificial Sequence: Synthetic polypeptide
MAADGYLPDWLEDNLSEGIREWWDLKPGAPKPKANQQKQDDGRGLVLPGYKYLGPFNGLDKGEPVNAADAAALEHDKAYDQQLKAGDNPYLRYNHADAEFQERLQEDTSFGGNLGRAVFQAKKRVLEPLGLVEEGAKTAPGKKRPVEQSPQEPDSSSGIGKTGQQPAKKRLNFGQTGDSESVPDPQPLGEPPAAPSGLGPNTMASGGGAPMADNNEGADGVGNSSGNWHCDSTWLGDRVITTSTRTWALPTYNNHLYKQISNGTSGGSTNDNTYFGYSTPWGYFDFNRFHCHFSPRDWQRLINNNWGFRPKRLNFKLFNIQVKEVTTNEGTKTIANNLTSTVQVFTDSEYQLPYVLGSAHQGCLPPFPADVFMVPQYGYLTLNNGSQALGRSSFYCLEYFPSQMLRTGNNFQFSYTFEDVPFHSSYAHSQSLDRLMNPLIDQYLYYLVRTQTTGTGGTQTLAFSQAGPSSMANQARNWVPGPCYRQQRVSTTTNQNNNSNFAWTGAAKFKLNGRDSLMNPGVAMASHKDDEDRFFPSSGVLIFGKQGAGNDGVDYSQVLITDEEEIKATNPVATEEYGAVAINNQRANTQAQTGLVHNQGVIPGMVWQNRDVYLQGPIWAKIPHTDGNFHPSPLMGGFGLKHPPPQILIKNTPVPADPPLTFNQAKLNSFITQYSTGQVSVEIEWELQKENSKRWNPEIQYTSNYYKSTNVDFAVNTEGVYSEPRPIGTRYLTRNL

SEQ ID NO: 5282 - protein, 736 aa, Artificial Sequence
  Description of Artificial Sequence: Synthetic polypeptide
MAADGYLPDWLEDNLSEGIREWWDLKPGAPKPKANQQKQDDGRGLVLPGYKYLGPFNGLDKGEPVNAADAAALEHDKAYDQQLKAGDNPYLRYNHADAEFQERLQEDTSFGGNLGRAVFQAKKRVLEPLGLVEEGAKTAPGKKRPVEQSPQEPDSSSGIGKTGQQPAKKRLNFGQTGDSESVPDPQPLGEPPAAPSGLGPNTMASGGGAPMADNNEGADGVGNSSGNWHCDSTWLGDRVITTSTRTWALPTYNNHLYKQISNGTSGGSTNDNTYFGYSTPWGYFDFNRFHCHFSPRDWQRLINNNWGFRPKRLNFKLFNIQVKEVTTNEGTKTIANNLTSTVQVFTDSEYQLPYVLGSAHQGCLPPFPADVFMVPQYGYLTLNNGSQALGRSSFYCLEYFPSQMLRTGNNFQFSYTFEDVPFHSSYAHSQSLDRLMNPLIDQYLYYLVRTQTTGTGGTQTLAFSQAGPSSMANQARNWVPGPCYRQQRVSTTTNQNNNSNFAWTGAAKFKLNGRDSLMNPGVAMASHKDDEDAFFPSSGVLIFGKQGAGNDGVDYSQVLITDEEEIKATNPVATEEYGAVAINNQAANTQAQTGLVHNQGVIPGMVWQNRDVYLQGPIWAKIPHTDGNFHPSPLMGGFGLKHPPPQILIKNTPVPADPPLTFNQAKLNSFITQYSTGQVSVEIEWELQKENSKRWNPEIQYTSNYYKSTNVDFAVNTEGVYSEPRPIGTRYLTRNL

SEQ ID NO: 5283 - protein, 538 aa, Artificial Sequence
  Description of Artificial Sequence: Synthetic polypeptide
MRAAAGGNGGDAGQGAEGVGNASGDWHCDSTWSESHVTTTSTRTWVLPTYNNHLYLRLGSSNASDTFNGFSTPWGYFDFNRFHCHFSPRDWQRLINNHWGLRPKSMQVRIFNIQVKEVTTSNGETTVSNNLTSTVQIFADSTYELPYVMDAGQEGSLPPFPNDVFMVPQYGYCGLVTGGSSQNQTDRNAFYCLEYFPSQMLRTGNNFEMVYKFENVPFHSMYAHSQSLDRLMNPLLDQYLWELQSTTSGGTLNQGNSATNFAKLTKTNFSGYRKNWLPGPMMKQQRFSKTASQNYKIPQGRNNSLLHYETRTTLDGRWSNFAPGTAMATAANDATDFSQAQLIFAGPNITGNTTTDANNLMFTSEDELRATNPRDTDLFGHLATNQQNATTVPTVDDVDGVGVYPGMVWQDRDIYYQGPIWAKIPHTDGHFHPSPLIGGFGLKSPPPQIFIKNTPVPANPATTFSPARINSFITQYSTGQVAVKIEWEIQKERSKRWNPEVQFTSNYGAQDSLLWAPDNAGAYKEPRAIGSRYLTNHL

SEQ ID NO: 5284 - protein, 736 aa, Artificial Sequence
  Description of Artificial Sequence: Synthetic polypeptide
MSFVDHPPDWLESIGDGFREFLGLEAGPPKPKANQQKQDNARGLVLPGYKYLGPGNGLDKGDPVNFADEVAREHDLSYQKQLEAGDNPYLKYNHADAEFQEKLASDTSFGGNLGKAVFQAKKRILEPLGLVETPDKTAPAAKKRPLEQSPQEPDSSSGVGKKGKQPARKRLNFDDEPGAGDGPPPEGPSSGAMSTETEMRAAAGGNGGDAGQGAEGVGNASGDWHCDSTWSESHVTTTSTRTWVLPTYNNHLYLRLGSSNASDTFNGFSTPWGYFDFNRFHCHFSPRDWQRLINNHWGLRPKSMQVRIFNIQVKEVTTSNGETTVSNNLTSTVHIFADSTYELPYVMDAGQEGSLPPFPNDVFMVPQYGYCGLVTGGSSQNQTDRNAFYCLEYFPSQMLRTGNNFEMVYKFENVPFHSMYAHSQSLDRLMNPLLDQYLWELQSTTSGGTLNQGNSATNFAKLTNKNFSGYRKNWLPGPMMKQQRFSKTASQNYKIPQGGNNSLLHYETRTTLDRRWSNFAPGTAMATAANDATDFSQAQLIFAGPNITGNTTTDANNLMFTSEDELRATNPRDTDLFGHLATNQQNATTVPTVDDVDGVGVYPGMVWQDRDIYYQGPIWAKIPHTDGHFHPSPLIGGFGLKSPPPQIFIKNTPVPANPATTFSPARINSFITQYSTGQVAVKIEWEIQKERSKRWNPEVQFTSNYGAQDSLLWAPDNAGAYKEPRAIGSRYLTNHL

SEQ ID NO: 5285 - protein, 736 aa, Artificial Sequence
  Description of Artificial Sequence: Synthetic polypeptide
MSFVDHPPDWLESIGDGFREFLGLEAGPPKPKANQQKQDNARGLVLPGYKYLGPGNGLDKGDPVNFADEVAREHDLSYQKQLEAGDNPYLKYNHADAEFQEKLASDTSFGGNLGKAVFQAKKRILEPLGLVETPDKTAPAAKKRPLEQSPQEPDSSSGVGKKGKQPARKRLNFDDEPGAGDGPPPEGPSSGAMSTETEMRAAAGGNGGDAGQGAEGVGNASGDWHCDSTWSESHVTTTSTRTWVLPTYNNHLYLRLGSSNASDTFNGFSTPWGYFDFNRFHCHFSPRDWQRLINNHWGLRPKSMQVRIFNIQVKEVTTSNGETTVSNNLTSTVQIFADSTYELPYVMDAGQEGSLPPFPNDVFMVPQYGYCGLVTGGSSQNQTDRNAFYCLEYFPSQMLRTGNNFEMVYKFENVPFHSMYAHSQSLDRLMNPLLDQYLWELQSTTSGGTLNQGNSATNFAKLTKTNFSGYRKNWLPGPMMKQQRFSKTASQNYKIPQGRNNSLLHYETRTTLDGRWSNFAPGTAMATAANDATDFSQAQLIFAGPNITGNTTTDANNLMFTSEDELRATNPRDTDLFGHLATNQQNATTVPTVDDVDGVGVYPGMVWQDRDIYYQGPIWAKIPHTDGHFHPSPLIGGFGLKSPPPQIFIKNTPVPANPATTFSPARINSFITQYSTGQVAVKIEWEIQKERSKRWNPEVQFTSNYGAQDSLLWAPDNAGAYKEPRAIGSRYLTNHL

SEQ ID NO: 5286 - DNA, 2214 bp, Artificial Sequence
  Description of Artificial Sequence: Synthetic polynucleotide
atggctgccgatggttatcttccagattggctcgaggacactctctctgaaggaataagacagtggtggaagctcaaacctggcccaccaccaccaaagcccgcagagcggcataaggacgacagcaggggtcttgtgcttcctgggtacaagtacctcggacccttcaacggactcgacaagggagagccggtcaacgaggcagacgccgcggccctcgagcacgacaaagcctacgaccggcagctcgacagcggagacaacccgtacctcaagtacaaccacgccgacgcggagtttcaggagcgccttaaagaagatacgtcttttgggggcaacctcgggcgagcagtcttccaggccaaaaagaggcttcttgaacctcttggtctggttgaggaagcggctaagacggctcctggaaagaagaggcctgtagagcagtctcctcaggaaccggactcctcctcgggcatcggcaagacaggccagcagcccgctaaaaagagactcaatttcggtcagactggcgacacagagtcagtcccagaccctcaaccaatcggagaacctcccgcagccccctcaggtgtgggatctcttacaatggcttcaggtggtggcgcaccagtggcagacaataacgaaggtgccgatggagtgggtagttcctcgggaaattggcattgcgattcccaatggctgggggacagagtcatcaccaccagcacccgaacctgggccctgcccacctacaacaatcacctctacaagcaaatctccaacgggacatcgggaggagccaccaacgacaacacctacttcggctacagcaccccctgggggtattttgactttaacagattccactgccacttttcaccacgtgactggcagcgactcatcaacaacaactggggattccggcccaagagactcagcttcaagctcttcaacatccaggtcaaggaggtcacgcagaatgaaggcaccaagaccatcgccaataaccttaccagcacggtccaggtcttcacggactcggagtaccagctgccgtacgttctcggctctgcccaccagggctgcctgcctccgttcccggcggacgtgttcatgattccccagtacggctacctaacactcaacaacggtagtcaggccgtgggacgctcctccttctactgcctggaatactttccttcgcagatgctgagaaccggcaacaacttccagtttacttacaccttcgaggacgtgcctttccacagcagctacgcccacagccagagcttggaccggctgatgaatcctctgattgaccagtacctgtactacttgtctcggactcaaacaacaggaggcacggcaaatacgcagactctgggcttcagccaaggtgggcctaatacaatggccaatcaggcaaagaactggctgccaggaccctgttaccgccaacaacgcgtctcaacgacaaccgggcaaaacaacaatagcaactttgcctggactgctgggaccaaataccatctgaatggaagaaattcattggctaatcctggcatcgctatggcaacacacaaagacgacaaggagcgtttttttcccagtaacgggatcctgatttttggcaaacaaaatgctgccagagacaatgcggattacagcgatgtcatgctcaccagcgaggaagaaatcaaaaccactaaccctgtggctacagaggaatacggtatcgtggcagataacttgcagcagcaaaacacggctcctcaaattggaactgtcaacagccagggggccttacccggtatggtttggcagaaccgggacgtgtacctgcagggtcccatctgggccaagattcctcacacggacggcaacttccacccgtctccgctgatgggcggctttggcctgaaacatcctccgcctcagatcctgatcaagaacacgcctgtacctgcggatcctccgaccaccttcaaccagtcaaagctgaactctttcatcacgcaatacagcaccggacaggtcagcgtggaaattgaatgggagctgcagaaggaaaacagcaagcgctggaaccccgagatccagtacacctccaactactacaaatctacaagtgtggactttgctgttaatacagaaggcgtgtactctgaaccccaccccattggcacccgttacctcacccgtcccctgtaa

SEQ ID NO: 5287 - protein, 737 aa, Artificial Sequence
  Description of Artificial Sequence: Synthetic polypeptide
MAADGYLPDWLEDTLSEGIRQWWKLKPGPPPPKPAERHKDDSRGLVLPGYKYLGPFNGLDKGEPVNEADAAALEHDKAYDRQLDSGDNPYLKYNHADAEFQERLKEDTSFGGNLGRAVFQAKKRLLEPLGLVEEAAKTAPGKKRPVEQSPQEPDSSSGIGKTGQQPAKKRLNFGQTGDTESVPDPQPIGEPPAAPSGVGSLTMASGGGAPVADNNEGADGVGSSSGNWHCDSQWLGDRVITTSTRTWALPTYNNHLYKQISNGTSGGATNDNTYFGYSTPWGYFDFNRFHCHFSPRDWQRLINNNWGFRPKRLSFKLFNIQVKEVTQNEGTKTIANNLTSTVQVFTDSEYQLPYVLGSAHQGCLPPFPADVFMIPQYGYLTLNNGSQAVGRSSFYCLEYFPSQMLRTGNNFQFTYTFEDVPFHSSYAHSQSLDRLMNPLIDQYLYYLSRTQTTGGTANTQTLGFSQGGPNTMANQAKNWLPGPCYRQQRVSTTTGQNNNSNFAWTAGTKYHLNGRNSLANPGIAMATHKDDKERFFPSNGILIFGKQNAARDNADYSDVMLTSEEEIKTTNPVATEEYGIVADNLQQQNTAPQIGTVNSQGALPGMVWQNRDVYLQGPIWAKIPHTDGNFHPSPLMGGFGLKHPPPQILIKNTPVPADPPTTFNQSKLNSFITQYSTGQVSVEIEWELQKENSKRWNPEIQYTSNYYKSTSVDFAVNTEGVYSEPHPIGTRYLTRPL

SEQ ID NO: 5288 - protein, 736 aa, Artificial Sequence
  Description of Artificial Sequence: Synthetic polypeptide
MAADGYLPDWLEDNLSEGIREWWDLKPGAPKPKANQQKQDDGRGLVLPGYKYLGPFNGLDKGEPVNAADAAALEHDKAYDQQLKAGDNPYLRYNHADAEFQERLQEDTSFGGNLGRAVFQAKKRVLEPLGLVEEGAKTAPGKKRPVEQSPQEPDSSSGIGKTGQQPAKKRLNFGQTGDTESVPDPQPIGEPPAAPSGVGSLTMASGGGAPVADNNEGADGVGSSSGNWHCDSQWLGDRVITTSTRTWALPTYNNHLYKQISSASTGASNDNHYFGYSTPWGYFDFNRFHCHFSPRDWQRLINNNWGFRPKRLNFKLFNIQVKEVTDNNGVKTIANNLTSTVQVFTDSDYQLPYVLGSAHQGCLPPFPADVFMIPQYGYLTLNNGSQAVGRSSFYCLEYFPSQMLRTGNNFQFTYTFEDVPFHSSYAHSQSLDRLMNPLIDQYLYYLSRTQTTGGTANTQTLGFSQGGPNTMANQAKNWLPGPCYRQQRVSTTTGQNNNSNFAWTAGTKYHLNGRNSLANPGIAMATHKDDKERFFPSNGILIFGKQNAARDNADYSDVMLTSEEEIKTTNPVATEEYGIVADNLQQQNTAPQIGTVNSQGALPGMVWQNRDVYLQGPIWAKIPHTDGNFHPSPLMGGFGLKHPPPQILIKNTPVPADPPTTFNQSKLNSFITQYSTGQVSVEIEWELQKENSKRWNPEIQYTSNYYKSTSVDFAVNTEGVYSEPHPIGTRYLTRPL

SEQ ID NO: 5289 - protein, 736 aa, Artificial Sequence
  Description of Artificial Sequence: Synthetic polypeptide
MAADGYLPDWLEDTLSEGIRQWWKLKPGPPPPKPAERHKDDSRGLVLPGYKYLGPFNGLDKGEPVNEADAAALEHDKAYDRQLDSGDNPYLKYNHADAEFQERLQGDTSFGGNLGRAVFQAKKRVLEPLGLVEEGAKTAPGKKRPVEQSPQEPDSSSGIGETGQQPAKKRLNFGQTGDSESVPDPQPLGEPPATPAAVGPTTMASGGGAPMADNNEGADGVGSSSGNWHCDSQWLGDRVITTSTRTWALPTYNNHLYKQISSASTGASNDNHYFGYSTPWGYFDFNRFHCHFSPRDWQRLINNNWGFRPKRLSFKLFNIQVKEVTDNNGVKTIANNLTSTVQVFTDSEYQLPYVLGSAHQGCLPPFPADVFMIPQYGYLTLNNGSQAVGRSSFYCLEYFPSQMLRTGNNFTFSYTFEDVPFHSSYAHSQSLDRLMNPLIDQYLYYLSRTQTTGGTANTQTLGFSQGGPNTMANQAKNWLPGPCYRQQRVSTTTGQNNNSNFAWTAGTKYHLNGRNSLANPGIAMATHKDDKERFFPSNGILIFGKQNAARDNADYSDVMLTSEEEIKTTNPVATEEYGIVADNLQQQNTAPQIGTVNSQGALPGMVWQNRDVYLQGPIWAKIPHTDGNFHPSPLMGGFGLKHPPPQILIKNTPVPADPPTTFNQSKLNSFITQYSTGQVSVEIEWELQKENSKRWNPEIQYTSNYYKSTSVDFAVNTEGVYSEPHPIGTRYLTRPL

SEQ ID NO: 5290 - DNA, 2181 bp, Artificial Sequence
  Description of Artificial Sequence: Synthetic polynucleotide
atgtcttttgttgatcaccctccagattggttggaagaagttggtgaaggtcttcgcgagtttttgggccttgaagcgggcccaccgaaaccaaaacccaatcagcagcatcaagatcaagcccgtggtcttgtgctgcctggttataactatctcggacccggaaacggtctcgatcgaggagagcctgtcaacagggcagacgaggtcgcgcgagagcacgacatctcgtacaacgagcagcttgaggcgggagacaacccctacctcaagtacaaccacgcggacgccgagtttcaggagaagctcgccgacgacacatccttcgggggaaacctcggaaaggcagtctttcaggccaagaaaagggttctcgaaccttttggcctggttgaagagggtgctaagacggcccctaccggaaagcggatagacgaccactttccaaaaagaaagaaggctcggaccgaagaggactccaagccttccacctcgtcagacgccgaagctggacccagcggatcccagcagctgcaaatcccagcacaaccagcctcaagtttgggagctgatacaatgtctgcgggaggtggcggcccattgggcgacaataaccaaggtgccgatggagtgggcaatgcctcgggagattggcattgcgattccacgtggatgggggacagagtcgtcaccaagtccacccgcacctgggtgctgcccagctacaacaaccaccagtaccgagagatcaaaagcggctccgtcgacggaagcaacgccaacgcctactttggatacagcaccccctgggggtactttgactttaaccgcttccacagccactggagcccccgagactggcaaagactcatcaacaactattggggcttcagaccccggtctctcagagtcaaaatcttcaacatccaagtcaaagaggtcacggtgcaggactccaccaccaccatcgccaacaacctcacctccaccgtccaagtgtttacggacgacgactaccaactcccgtacgtcgtcggcaacgggaccgagggatgcctgccggccttccccccgcaggtctttacgctgccgcagtacggctacgcgacgctgaaccgagacaacggagacaacccgacagagcggagcagcttcttttgcctagagtactttcccagcaagatgctgaggacgggcaacaactttgagtttacctacagctttgaagaggtgcccttccactgcagcttcgccccgagccagaacctctttaagctggccaacccgctggtggaccagtacctgtaccgcttcgtgagcacctcggccacgggcgccatccagttccaaaagaacctggcgggcagatacgccaacacctacaaaaactggttcccggggcccatgggccgaacccagggctggaacacgagctctggggtcagcagcaccaacagagtcagcgtcaacaacttttccgtctcaaaccggatgaacctggagggggccagctaccaagtgaacccccagcccaacgggatgacaaacacgctccaaggcagcaaccgctacgcgctggaaaacaccatgatcttcaacgctcaaaacgccacgccgggaactacctcggtgtacccagaggacaatctactgctgaccagcgagagcgagactcagcccgtcaaccgggtggcttacaacacgggcggtcagatggccaccaacgcccagaacgccaccacggctcccacggtcgggacctacaacctccaggaagtgcttcctggcagcgtatggatggagagggacgtgtacctccaaggacccatctgggccaagatcccagagacgggggcgcactttcacccctctccggccatgggcggattcggactcaaacacccgccgcccatgatgctcatcaaaaacacgccggtgcccggcaacatcaccagcttctcggacgtgcccgtcagcagcttcatcacccagtacagcaccgggcaggtcaccgtggagatggaatgggagctcaaaaaggaaaactccaagaggtggaacccagagatccagtacaccaacaactacaacgacccccagtttgtggactttgctccagacggctccggcgaatacagaaccaccagagccatcggaacccgatacctcacccgacccctt

SEQ ID NO: 5291 - protein, 726 aa, Artificial Sequence
  Description of Artificial Sequence: Synthetic polypeptide
MSFVDHPPDWLEEVGEGLREFLGLEAGPPKPKPNQQHQDQARGLVLPGYNYLGPGNGLDRGEPVNRADEVAREHDISYNEQLEAGDNPYLKYNHADAEFQEKLADDTSFGGNLGKAVFQAKKRVLEPFGLVEEGAKTAPTGKRIDDHFPKRKKARTEEDSKPSTSSDAEAGPSGSQQLQIPAQPASSLGADTMSAGGGGPLGDNNQGADGVGNASGDWHCDSTWMGDRVVTKSTRTWVLPSYNNHQYREIKSGSVDGSNANAYFGYSTPWGYFDFNRFHSHWSPRDWQRLINNYWGFRPRSLRVKIFNIQVKEVTVQDSTTTIANNLTSTVQVFTDDDYQLPYVVGNGTEGCLPAFPPQVFTLPQYGYATLNRDNGDNPTERSSFFCLEYFPSKMLRTGNNFEFTYSFEEVPFHCSFAPSQNLFKLANPLVDQYLYRFVSTSATGAIQFQKNLAGRYANTYKNWFPGPMGRTQGWNTSSGSSTNRVSVNNFSVSNRMNLEGASYQVNPQPNGMTNTLQGSNRYALENTMIFNAQNATPGTTSVYPEDNLLLTSESETQPVNRVAYNTGGQMATNAQNATTAPTVGTYNLQEVLPGSVWMERDVYLQGPIWAKIPETGAHFHPSPAMGGFGLKHPPPMMLIKNTPVPGNITSFSDVPVSSFITQYSTGQVTVEMEWELKKENSKRWNPEIQYTNNYNDPQFVDFAPDGSGEYRTTRAIGTRYLTRPL

SEQ ID NO: 5292 - protein, 735 aa, Artificial Sequence
  Description of Artificial Sequence: Synthetic polypeptide
MAADGYLPDWLEDTLSEGIRQWWKLKPGPPPPKPAERHKDDSRGLVLPGYKYLGPFNGLDKGEPVNEADAAALEHDKAYDRQLDSGDNPYLKYNHADAEFQERLKEDTSFGGNLGRAVFQAKKRILEPLGLVEEPVKTAPGKKRPVEHSPAEPDSSSGTGKSGQQPARKRLNFGQTGDADSVPDPQPLGQPPAAPSGLGTNTMASGSGAPMADNNEGADGVGNSSGNWHCDSTWMGDRVITTSTRTWALPTYNNHLYKQISSQSGASNDNHYFGYSTPWGYFDFNRFHCHFSPRDWQRLINNNWGFRPKRLSFKLFNIQVKEVTQNDGTTTIANNLTSTVQVFTDSEYQLPYVLGSAHQGCLPPFPADVFMVPQYGYLTLNNGSQAVGRSSFYCLEYFPSQMLRTGNNFTFSYTFEDVPFHSSYAHSQSLDRLMNPLIDQYLYYLSRTNTPSGTTTMSRLQFSQAGASDIRDQSRNWLPGPCYRQQRVSKTAADNNNSDYSWTGATKYHLNGRDSLVNPGPAMASHKDDEEKYFPQSGVLIFGKQDSGKTNVDIEKVMITDEEEIRTTNPVATEQYGSVSTNLQSGNTQAATSDVNTQGVLPGMVWQDRDVYLQGPIWAKIPHTDGHFHPSPLMGGFGLKHPPPQILIKNTPVPANPSTTFSAAKFASFITQYSTGQVSVEIEWELQKENSKRWNPEIQYTSNYNKSVNVDFTVDTNGVYSEPRPIGTRYLTRNL

SEQ ID NO: 5293 - DNA, 1803 bp, Bovine adeno-associated virus
acggcgcctgcggcaaaaaagaggcctctagagcagagtcctcaagagccagactcctcgagcggagttggcaagaaaggcaaacagcctgccagaaagagactcaactttgacgacgaacctggagccggagacgggcctcccccagaaggaccatcttccggagctatgtctactgagactgaaatgcgtgcagcagctggcggaaatggtggcgatgcgggacaaggtgccgagggagtgggtaatgcctccggtgattggcattgcgattccacttggtcagagagccacgtcaccaccacctcaacccgcacctgggtcctgccgacctacaacaaccacctgtacctgcggctcggctcgagcaacgccagcgacaccttcaacggattctccaccccctggggatactttgactttaaccgcttccactgccacttctcgccaagagactggcaaaggctcatcaacaaccactggggactgcgccccaaaagcatgcaagtccgcatcttcaacatccaagttaaggaggtcacgacgtctaacggggagacgaccgtatccaacaacctcaccagcacggtccagatctttgcggacagcacgtacgagctcccgtacgtgatggatgcaggtcaggagggcagcttgcctcctttccccaacgacgtgttcatggtgcctcagtacgggtactgcggactggtaaccggaggcagctctcaaaaccagacagacagaaatgccttctactgtctggagtactttcccagccagatgctgagaaccggaaacaactttgagatggtgtacaagtttgaaaacgtgcccttccactccatgtacgctcacagccagagcctggataggctgatgaacccgctgctggaccagtacctgtgggagctccagtctaccacctctggaggaactctcaaccagggcaattcagccaccaactttgccaagctgaccaaaacaaacttttctggctaccgcaaaaactggctcccggggcccatgatgaagcagcagagattctccaagactgccagtcaaaactacaagattccccagggaagaaacaacagtctgctccattatgagaccagaactaccctcgacggaagatggagcaattttgccccgggaacggccatggcaaccgcagccaacgacgccaccgacttctctcaggcccagctcatctttgcggggcccaacatcaccggcaacaccaccacagatgccaataacctgatgttcacttcagaagatgaacttagggccaccaacccccgggacactgacctgtttggccacctggcaaccaaccagcaaaacgccaccaccgttcctaccgtagacgacgtggacggagtcggcgtgtacccgggaatggtgtggcaggacagagacatttactaccaagggcccatttgggccaaaattccacacacggatggacactttcacccgtctcctctcattggcggatttggactgaaaagcccgcctccacaaatattcatcaaaaacactcctgtacccgccaatcccgcaacgaccttctctccggccagaatcaacagcttcatcacccagtacagcaccggacaggtggctgtcaaaatagaatgggaaatccagaaggagcggtccaagagatggaacccagaggtccagttcacgtccaactacggagcacaggactcgcttctctgggctcccgacaacgccggagcctacaaagagcccagggccattggatcccgatacctcaccaaccacctctag

SEQ ID NO: 5294 - DNA, 1617 bp, Bovine adeno-associated virus
atgcgtgcagcagctggcggaaatggtggcgatgcgggacaaggtgccgagggagtgggtaatgcctccggtgattggcattgcgattccacttggtcagagagccacgtcaccaccacctcaacccgcacctgggtcctgccgacctacaacaaccacctgtacctgcggctcggctcgagcaacgccagcgacaccttcaacggattctccaccccctggggatactttgactttaaccgcttccactgccacttctcgccaagagactggcaaaggctcatcaacaaccactggggactgcgccccaaaagcatgcaagtccgcatcttcaacatccaagttaaggaggtcacgacgtctaacggggagacgaccgtatccaacaacctcaccagcacggtccagatctttgcggacagcacgtacgagctcccgtacgtgatggatgcaggtcaggagggcagcttgcctcctttccccaacgacgtgttcatggtgcctcagtacgggtactgcggactggtaaccggaggcagctctcaaaaccagacagacagaaatgccttctactgtctggagtactttcccagccagatgctgagaaccggaaacaactttgagatggtgtacaagtttgaaaacgtgcccttccactccatgtacgctcacagccagagcctggataggctgatgaacccgctgctggaccagtacctgtgggagctccagtctaccacctctggaggaactctcaaccagggcaattcagccaccaactttgccaagctgaccaaaacaaacttttctggctaccgcaaaaactggctcccggggcccatgatgaagcagcagagattctccaagactgccagtcaaaactacaagattccccagggaagaaacaacagtctgctccattatgagaccagaactaccctcgacggaagatggagcaattttgccccgggaacggccatggcaaccgcagccaacgacgccaccgacttctctcaggcccagctcatctttgcggggcccaacatcaccggcaacaccaccacagatgccaataacctgatgttcacttcagaagatgaacttagggccaccaacccccgggacactgacctgtttggccacctggcaaccaaccagcaaaacgccaccaccgttcctaccgtagacgacgtggacggagtcggcgtgtacccgggaatggtgtggcaggacagagacatttactaccaagggcccatttgggccaaaattccacacacggatggacactttcacccgtctcctctcattggcggatttggactgaaaagcccgcctccacaaatattcatcaaaaacactcctgtacccgccaatcccgcaacgaccttctctccggccagaatcaacagcttcatcacccagtacagcaccggacaggtggctgtcaaaatagaatgggaaatccagaaggagcggtccaagagatggaacccagaggtccagttcacgtccaactacggagcacaggactcgcttctctgggctcccgacaacgccggagcctacaaagagcccagggccattggatcccgatacctcaccaaccacctctag

SEQ ID NO: 5295 - DNA, 1173 bp, Bovine adeno-associated virus
atggcgctggtaagctggctggtggaacatggcatcacttccgagaagcagtggattcaggagaatcaggagagctacctgtccttcaactccacgggaaactctcggagccagattaaagccgcgcttgacaacgcgtcaaaaattatgagtctgaccaaatctgcctcagactatctcgtgggacagactgttccagaggacatttctgaaaacagaatctggcagatttttgatctcaacggctacgacccggcatacgcgggctctgttctctacggctggtgcactcgcgcctttggaaagaggaacaccgtctggctgtatggacccgcgaccaccggaaagaccaacatcgcggaagccatctctcacaccgtgcccttttatggctgtgtgaactggactaatgagaactttccctttaatgactgtgtggaaaaaatgttgatctggtgggaggagggaaagatgaccagcaaggtggtggaacccgccaaggccatcttgggggggtctagagtacgagtggatcaaaaatgtaaatcctctgtacaagtagactctaccccggtgattatcacctccaatactaacatgtgtgtggtggtggatgggaactccacgacctttgaacaccagcagccgctggaagaccgcatgttcagatttgaactcatgcggcggctcccgccagattttggcaagattaccaagcaggaagtcaaagacttttttgcttgggcaaaggtcaaccaggtgccggtgactcacgagtttatggttcccaagaaagtggcgggaactgagagggcggagacttctagaaaacgcccactggatgacgtcaccaataccaactataaaagtccggagaagcgggcccggctctcagttgttcctgagacgcctcgcagttcagacgtgcctgtagagcccgctcctctgcgacctctcaactggtcttccaggtatgaatgcagatgtgactatcatgctaaatttgactctgtaacgggggaatgtgacgagtgtgaatatttgaatcggggcaaaaatggctgtatctttcataatgctacacattgtcaaatttgtcacgctgttcctccatgggaaaaggaaaatgtgtcagattttaatgattttgatgactgtaataaagagcagtaa

SEQ ID NO: 5296 - DNA, 1833 bp, Bovine adeno-associated virus
atggctaccttctatgaagtcattgttcgcgttccatttgatgtggaagagcacctgcctggaatttctgacaactttgtagactgggtaactggtcaaatttgggagctgcctcccgagtcagatttgaatttgactctgattgagcagcctcagctgacggtggctgacagaattcgccgcgtgttcctgtacgagtggaacaaattttccaagcaggagagcaaattctttgtgcagtttgaaaagggatctgaatattttcatctgcacacgctcgtggagacctccggcatctcttctatggtccttggccgctacgtgagtcagattcgcgcccagctggtgaaggtggtgttccagaacattgagccgcggattaacgactgggtcgccatcaccaaggtaaagaagggcggagccaataaggtggtggattctgggtatattcccgcctacctgctgccgaaggtccaaccagagcttcagtgggcgtggactaacctcgaagagtataaattggccgccctcaatctggaggagcgcaaacggctcgtcgctcagtttcagcttgagtcctcgcagcgctcgcaagaggcatcttcccagagggacgtttcggctgacccggtcatcaagagcaagacttcccagaaatacatggcgctggtaagctggctggtggaacatggcatcacttccgagaagcagtggattcaggagaatcaggagagctacctgtccttcaactccacgggaaactctcggagccagattaaagccgcgcttgacaacgcgtcaaaaattatgagtctgaccaaatctgcctcagactatctcgtgggacagactgttccagaggacatttctgaaaacagaatctggcagatttttgatctcaacggctacgacccggcatacgcgggctctgttctctacggctggtgcactcgcgcctttggaaagaggaacaccgtctggctgtatggacccgcgaccaccggaaagaccaacatcgcggaagccatctctcacaccgtgcccttttatggctgtgtgaactggactaatgagaactttccctttaatgactgtgtggaaaaaatgttgatctggtgggaggagggaaagatgaccagcaaggtggtggaacccgccaaggccatcttgggggggtctagagtacgagtggatcaaaaatgtaaatcctctgtacaagtagactctaccccggtgattatcacctccaatactaacatgtgtgtggtggtggatgggaactccacgacctttgaacaccagcagccgctggaagaccgcatgttcagatttgaactcatgcggcggctcccgccagattttggcaagattaccaagcaggaagtcaaagacttttttgcttgggcaaaggtcaaccaggtgccggtgactcacgagtttatggttcccaagaaagtggcgggaactgagagggcggagacttctagaaaacgcccactggatgacgtcaccaataccaactataaaagtccggagaagcgggcccggctctcagttgttcctgagacgcctcgcagttcagacgtgcctgtagagcccgctcctctgcgacctctcaactggtcttccaggtatgaatgcagatgtgactatcatgctaaatttgactctgtaacgggggaatgtgacgagtgtgaatatttgaatcggggcaaaaatggctgtatctttcataatgctacacattgtcaaatttgtcacgctgttcctccatgggaaaaggaaaatgtgtcagattttaatgattttgatgactgtaataaagagcagtaa

SEQ ID NO: 5297 - DNA, 2211 bp, Bovine adeno-associated virus
atgtcttttgttgaccaccctccagattggttggaatcgatcggcgacggctttcgtgaatttctcggccttgaggcgggtcccccgaaacccaaggccaatcaacagaagcaagataacgctcgaggtcttgtgcttcctgggtacaagtatcttggtcctgggaacggccttgataagggcgatcctgtcaattttgctgacgaggttgcccgagagcacgacctctcctaccagaaacagcttgaggcgggcgataacccttacctcaagtacaaccacgcggacgcagagtttcaggagaaactcgcttctgacacttcttttgggggaaaccttgggaaggctgttttccaggctaaaaagaggattctcgaacctcttggcctggttgagacgccggataaaacggcgcctgcggcaaaaaagaggcctctagagcagagtcctcaagagccagactcctcgagcggagttggcaagaaaggcaaacagcctgccagaaagagactcaactttgacgacgaacctggagccggagacgggcctcccccagaaggaccatcttccggagctatgtctactgagactgaaatgcgtgcagcagctggcggaaatggtggcgatgcgggacaaggtgccgagggagtgggtaatgcctccggtgattggcattgcgattccacttggtcagagagccacgtcaccaccacctcaacccgcacctgggtcctgccgacctacaacaaccacctgtacctgcggctcggctcgagcaacgccagcgacaccttcaacggattctccaccccctggggatactttgactttaaccgcttccactgccacttctcgccaagagactggcaaaggctcatcaacaaccactggggactgcgccccaaaagcatgcaagtccgcatcttcaacatccaagttaaggaggtcacgacgtctaacggggagacgaccgtatccaacaacctcaccagcacggtccagatctttgcggacagcacgtacgagctcccgtacgtgatggatgcaggtcaggagggcagcttgcctcctttccccaacgacgtgttcatggtgcctcagtacgggtactgcggactggtaaccggaggcagctctcaaaaccagacagacagaaatgccttctactgtctggagtactttcccagccagatgctgagaaccggaaacaactttgagatggtgtacaagtttgaaaacgtgcccttccactccatgtacgctcacagccagagcctggataggctgatgaacccgctgctggaccagtacctgtgggagctccagtctaccacctctggaggaactctcaaccagggcaattcagccaccaactttgccaagctgaccaaaacaaacttttctggctaccgcaaaaactggctcccggggcccatgatgaagcagcagagattctccaagactgccagtcaaaactacaagattccccagggaagaaacaacagtctgctccattatgagaccagaactaccctcgacggaagatggagcaattttgccccgggaacggccatggcaaccgcagccaacgacgccaccgacttctctcaggcccagctcatctttgcggggcccaacatcaccggcaacaccaccacagatgccaataacctgatgttcacttcagaagatgaacttagggccaccaacccccgggacactgacctgtttggccacctggcaaccaaccagcaaaacgccaccaccgttcctaccgtagacgacgtggacggagtcggcgtgtacccgggaatggtgtggcaggacagagacatttactaccaagggcccatttgggccaaaattccacacacggatggacactttcacccgtctcctctcattggcggatttggactgaaaagcccgcctccacaaatattcatcaaaaacactcctgtacccgccaatcccgcaacgaccttctctccggccagaatcaacagcttcatcacccagtacagcaccggacaggtggctgtcaaaatagaatgggaaatccagaaggagcggtccaagagatggaacccagaggtccagttcacgtccaactacggagcacaggactcgcttctctgggctcccgacaacgccggagcctacaaagagcccagggccattggatcccgatacctcaccaaccacctctag

SEQ ID NO: 5298 - DNA, 4694 bp, Bovine adeno-associated virus
gtggcactcccccccctgtcgcgttcgctcgttcgctggctcgattgggggggtggcagctcaaagagctgccagacgacggccctctgggccgtcgcccccccaatcgagccagcgaacgagcgaacgcgacaggggggggagtgccacactctctagcaagggggttttgtaggtggtgatgtcattgttgatgtcattatagttgtcacgcgatagttaatgattaacagtcatgtgatgtgtgttatccaataggatgaaagcgcgcgaatgagatctcgcgagacttccggggtataaaaggggtgagtgaacgagcccgccgccattctctgctctggactgctagaggaccctcgctgccatggctaccttctatgaagtcattgttcgcgttccatttgatgtggaagagcacctgcctggaatttctgacaactttgtagactgggtaactggtcaaatttgggagctgcctcccgagtcagatttgaatttgactctgattgagcagcctcagctgacggtggctgacagaattcgccgcgtgttcctgtacgagtggaacaaattttccaagcaggagagcaaattctttgtgcagtttgaaaagggatctgaatattttcatctgcacacgctcgtggagacctccggcatctcttctatggtccttggccgctacgtgagtcagattcgcgcccagctggtgaaggtggtgttccagaacattgagccgcggattaacgactgggtcgccatcaccaaggtaaagaagggcggagccaataaggtggtggattctgggtatattcccgcctacctgctgccgaaggtccaaccagagcttcagtgggcgtggactaacctcgaagagtataaattggccgccctcaatctggaggagcgcaaacggctcgtcgctcagtttcagcttgagtcctcgcagcgctcgcaagaggcatcttcccagagggacgtttcggctgacccggtcatcaagagcaagacttcccagaaatacatggcgctggtaagctggctggtggaacatggcatcacttccgagaagcagtggattcaggagaatcaggagagctacctgtccttcaactccacgggaaactctcggagccagattaaagccgcgcttgacaacgcgtcaaaaattatgagtctgaccaaatctgcctcagactatctcgtgggacagactgttccagaggacatttctgaaaacagaatctggcagatttttgatctcaacggctacgacccggcatacgcgggctctgttctctacggctggtgcactcgcgcctttggaaagaggaacaccgtctggctgtatggacccgcgaccaccggaaagaccaacatcgcggaagccatctctcacaccgtgcccttttatggctgtgtgaactggactaatgagaactttccctttaatgactgtgtggaaaaaatgttgatctggtgggaggagggaaagatgaccagcaaggtggtggaacccgccaaggccatcttgggggggtctagagtacgagtggatcaaaaatgtaaatcctctgtacaagtagactctaccccggtgattatcacctccaatactaacatgtgtgtggtggtggatgggaactccacgacctttgaacaccagcagccgctggaagaccgcatgttcagatttgaactcatgcggcggctcccgccagattttggcaagattaccaagcaggaagtcaaagacttttttgcttgggcaaaggtcaaccaggtgccggtgactcacgagtttatggttcccaagaaagtggcgggaactgagagggcggagacttctagaaaacgcccactggatgacgtcaccaataccaactataaaagtccggagaagcgggcccggctctcagttgttcctgagacgcctcgcagttcagacgtgcctgtagagcccgctcctctgcgacctctcaactggtcttccaggtatgaatgcagatgtgactatcatgctaaatttgactctgtaacgggggaatgtgacgagtgtgaatatttgaatcggggcaaaaatggctgtatctttcataatgctacacattgtcaaatttgtcacgctgttcctccatgggaaaaggaaaatgtgtcagattttaatgattttgatgactgtaataaagagcagtaaataaagtgagtagtcatgtcttttgttgaccaccctccagattggttggaatcgatcggcgacggctttcgtgaatttctcggccttgaggcgggtcccccgaaacccaaggccaatcaacagaagcaagataacgctcgaggtcttgtgcttcctgggtacaagtatcttggtcctgggaacggccttgataagggcgatcctgtcaattttgctgacgaggttgcccgagagcacgacctctcctaccagaaacagcttgaggcgggcgataacccttacctcaagtacaaccacgcggacgcagagtttcaggagaaactcgcttctgacacttcttttgggggaaaccttgggaaggctgttttccaggctaaaaagaggattctcgaacctcttggcctggttgagacgccggataaaacggcgcctgcggcaaaaaagaggcctctagagcagagtcctcaagagccagactcctcgagcggagttggcaagaaaggcaaacagcctgccagaaagagactcaactttgacgacgaacctggagccggagacgggcctcccccagaaggaccatcttccggagctatgtctactgagactgaaatgcgtgcagcagctggcggaaatggtggcgatgcgggacaaggtgccgagggagtgggtaatgcctccggtgattggcattgcgattccacttggtcagagagccacgtcaccaccacctcaacccgcacctgggtcctgccgacctacaacaaccacctgtacctgcggctcggctcgagcaacgccagcgacaccttcaacggattctccaccccctggggatactttgactttaaccgcttccactgccacttctcgccaagagactggcaaaggctcatcaacaaccactggggactgcgccccaaaagcatgcaagtccgcatcttcaacatccaagttaaggaggtcacgacgtctaacggggagacgaccgtatccaacaacctcaccagcacggtccagatctttgcggacagcacgtacgagctcccgtacgtgatggatgcaggtcaggagggcagcttgcctcctttccccaacgacgtgttcatggtgcctcagtacgggtactgcggactggtaaccggaggcagctctcaaaaccagacagacagaaatgccttctactgtctggagtactttcccagccagatgctgagaaccggaaacaactttgagatggtgtacaagtttgaaaacgtgcccttccactccatgtacgctcacagccagagcctggataggctgatgaacccgctgctggaccagtacctgtgggagctccagtctaccacctctggaggaactctcaaccagggcaattcagccaccaactttgccaagctgaccaaaacaaacttttctggctaccgcaaaaactggctcccggggcccatgatgaagcagcagagattctccaagactgccagtcaaaactacaagattccccagggaagaaacaacagtctgctccattatgagaccagaactaccctcgacggaagatggagcaattttgccccgggaacggccatggcaaccgcagccaacgacgccaccgacttctctcaggcccagctcatctttgcggggcccaacatcaccggcaacaccaccacagatgccaataacctgatgttcacttcagaagatgaacttagggccaccaacccccgggacactgacctgtttggccacctggcaaccaaccagcaaaacgccaccaccgttcctaccgtagacgacgtggacggagtcggcgtgtacccgggaatggtgtggcaggacagagacatttactaccaagggcccatttgggccaaaattccacacacggatggacactttcacccgtctcctctcattggcggatttggactgaaaagcccgcctccacaaatattcatcaaaaacactcctgtacccgccaatcccgcaacgaccttctctccggccagaatcaacagcttcatcacccagtacagcaccggacaggtggctgtcaaaatagaatgggaaatccagaaggagcggtccaagagatggaacccagaggtccagttcacgtccaactacggagcacaggactcgcttctctgggctcccgacaacgccggagcctacaaagagcccagggccattggatcccgatacctcaccaaccacctctagcccaattctgttgcataccctcaataaaccgtgtattcgtttcagtaaaatactgcctcttgtggtcattcggcgtacaacagcttacaacaacaacaaaacccccttgctagagagtgtggcactcccccccctgtcgcgttcgctcgttcgctggctcgattgggggggtggcagctcaaagagctgccagacgacggccctctgggccgtcgcccccccaatcgagccagcgaacgagcgaacgcgacaggggggggagtgccac

SEQ ID NO: 5299 - protein, 390 aa, Bovine adeno-associated virus
MALVSWLVEHGITSEKQWIQENQESYLSFNSTGNSRSQIKAALDNASKIMSLTKSASDYLVGQTVPEDISENRIWQIFDLNGYDPAYAGSVLYGWCTRAFGKRNTVWLYGPATTGKTNIAEAISHTVPFYGCVNWTNENFPFNDCVEKMLIWWEEGKMTSKVVEPAKAILGGSRVRVDQKCKSSVQVDSTPVIITSNTNMCVVVDGNSTTFEHQQPLEDRMFRFELMRRLPPDFGKITKQEVKDFFAWAKVNQVPVTHEFMVPKKVAGTERAETSRKRPLDDVTNTNYKSPEKRARLSVVPETPRSSDVPVEPAPLRPLNWSSRYECRCDYHAKFDSVTGECDECEYLNRGKNGCIFHNATHCQICHAVPPWEKENVSDFNDFDDCNKEQ

SEQ ID NO: 5300 - protein, 610 aa, Bovine adeno-associated virus
MATFYEVIVRVPFDVEEHLPGISDNFVDWVTGQIWELPPESDLNLTLIEQPQLTVADRIRRVFLYEWNKFSKQESKFFVQFEKGSEYFHLHTLVETSGISSMVLGRYVSQIRAQLVKVVFQNIEPRINDWVAITKVKKGGANKVVDSGYIPAYLLPKVQPELQWAWTNLEEYKLAALNLEERKRLVAQFQLESSQRSQEASSQRDVSADPVIKSKTSQKYMALVSWLVEHGITSEKQWIQENQESYLSFNSTGNSRSQIKAALDNASKIMSLTKSASDYLVGQTVPEDISENRIWQIFDLNGYDPAYAGSVLYGWCTRAFGKRNTVWLYGPATTGKTNIAEAISHTVPFYGCVNWTNENFPFNDCVEKMLIWWEEGKMTSKVVEPAKAILGGSRVRVDQKCKSSVQVDSTPVIITSNTNMCVVVDGNSTTFEHQQPLEDRMFRFELMRRLPPDFGKITKQEVKDFFAWAKVNQVPVTHEFMVPKKVAGTERAETSRKRPLDDVTNTNYKSPEKRARLSVVPETPRSSDVPVEPAPLRPLNWSSRYECRCDYHAKFDSVTGECDECEYLNRGKNGCIFHNATHCQICHAVPPWEKENVSDFNDFDDCNKEQ

SEQ ID NO: 5301 - protein, 736 aa, Bovine adeno-associated virus; identical to SEQ ID NO: 5285

SEQ ID NO: 5302 - protein, 600 aa, Bovine adeno-associated virus
TAPAAKKRPLEQSPQEPDSSSGVGKKGKQPARKRLNFDDEPGAGDGPPPEGPSSGAMSTETEMRAAAGGNGGDAGQGAEGVGNASGDWHCDSTWSESHVTTTSTRTWVLPTYNNHLYLRLGSSNASDTFNGFSTPWGYFDFNRFHCHFSPRDWQRLINNHWGLRPKSMQVRIFNIQVKEVTTSNGETTVSNNLTSTVQIFADSTYELPYVMDAGQEGSLPPFPNDVFMVPQYGYCGLVTGGSSQNQTDRNAFYCLEYFPSQMLRTGNNFEMVYKFENVPFHSMYAHSQSLDRLMNPLLDQYLWELQSTTSGGTLNQGNSATNFAKLTKTNFSGYRKNWLPGPMMKQQRFSKTASQNYKIPQGRNNSLLHYETRTTLDGRWSNFAPGTAMATAANDATDFSQAQLIFAGPNITGNTTTDANNLMFTSEDELRATNPRDTDLFGHLATNQQNATTVPTVDDVDGVGVYPGMVWQDRDIYYQGPIWAKIPHTDGHFHPSPLIGGFGLKSPPPQIFIKNTPVPANPATTFSPARINSFITQYSTGQVAVKIEWEIQKERSKRWNPEVQFTSNYGAQDSLLWAPDNAGAYKEPRAIGSRYLTNHL

SEQ ID NO: 5303 - DNA, 11085 bp, Homo sapiens
atgcgagcccagaaaagtctctcctggtcttgggatggaggtcacacgaagcctccgcaaggcaaggacttttggtgagttccgggctccgctgaactcagctctttttcttttccttcctttctttccttcttcctttctttccctccttccttccttcctctttctctctttcctttctctctctcttttctctctctctctccttcttccctccctccctacctctctctcttttctttttccgtccttccttccttctttccttctttctctctcttttctttcttttcttttcttttctcttctttcattttgagacgtactctggctctgtcgcccaggctggagcgcaatggcgccatctcggcgcactgcaacctccacctcccgggttcaagcgattctactgcctcagcctcccgagtagctgggactacaggcgcgcactaccaagcccggctaatttttttttgtatttttagtagagactgggtttcacgatgttggccgggctggtctggaagtcttgacctcaagcgtgcgccctctccgccactgggtaaggcgggggcggaatagggggcttgcaatttcacactagaggcgggcaccgtgggggaaagaagagtcacgtctcccacggttcgtagaggaaggcctgcctgagcctggagcgggggcgggagagccacagtttggcatccccagggcatcccccagcccgcagactaccaggcctccagaggacaggaccccacccccggccacaggccctgcccccagcactccccgcaccccgcctccaagactcctccgcccactccgcacccaacttataaaaaccgtcctcgggcgcggcggggagaagccgagctgagcggatcctcacacgactgtgatccgattctttccagcggcttctgcaaccaagcgggtcttacccccggtcctccgcgtctccagtcctcgcacctggaaccccaacgtccccgagagtccccgaatccccgctcccaggctacctaagaggatgagcggtgctccgacggccggggcagccctgatgctctgcgccgccaccgccgtgctactgagcgctcagggcggacccgtgcagtccaagtcgccgcgctttgcgtcctgggacgagatgaatgtcctggcgcacggactcctgcagctcggccaggggctgcgcgaacacgcggagcgcacccgcagtcagctgagcgcgctggagcggcgcctgagcgcgtgcgggtccgcctgtcagggaaccgaggggtccaccgacctcccgttagcccctgagagccgggtggaccctgaggtccttcacagcctgcaggtacgtgtccccagggctggttctccgcgcccctagtggctctcctggcttggaagggtatggacaggagtggggcgtgggggcggggtgcgcaactgtggctccctgggcttccctgcgtcaagggatgggctccccccttaggaagccgaggagggaggttcgctcaaggccaggaattcaagaccacctaaagcaaaatagcgagacccccgtctcttctacacacacacacacacacacacaaaataaataaaataaaataaaataaatataaaattaaaaaacgaccgggcgcagtggctcacggagcctccacctgctgtcgagactagcctggccaacatggagaaacctcgtctctactaaaaatacaaaaaattagcctggcatggtgtgcatgcctgtaatcccagctacttgggaggctgaggcaggagaatctcttgaacccgggaggcagaggttgcagtgagccgagatcgcagcactgcactccagcctgggcaacagagtgagactcctcaaaaaaataatagcgataaaataaaaataaagccaggtgcggtgactcacgcttgtagtcccagcactttgggagggcgaggccagtggatcacctgaggtcaggagttcaagaccagcctgaccaacacagtgaaaccccgtctctactaaaaatacaaaaattagctgggtgtggtggtgggcgcctgtaatcccagctactggggaggctgaggcaggagaacctcttgaacccgggaggcggaggttgcagtgagccgggatcatgccattgcactccagcctgggcgacagagctcgactccatctcaaaataataataataataaataaaataaaatacaaatacaaaaattagccaggtgtggtggcagctacttgggaggctgagacacaagaatcacttgagtctgggaggcagaggttgcagtgagccaagattgcgccactgcactccaacctgggtgacagagcgagactctgtctgaaaaaataaaaaataagccaggcatagagctgcatgactgtagtcccagctacacaggaggctgaaaacaggaggatcgcctgaccccaggagttggaggctgcagtgagctgtgacagcaccactgcactccagcctgggcgagagaacgagaccccgtcattgggaaaaaaaagaaaaaagaaagactcccttgcctggcctcagcggatggagatttggaaggatggatgagtggatgaattaagaggttggggtaggcaagctgggtcctcaccaaggttttcacccctccccagacacaactcaaggctcagaacagcaggatccagcaactcttccacaaggtggcccagcagcagcggcacctggagaagcagcacctgcgaattcagcatctgcaaagccaggtaaccctaggatcaagggagaaaaggtccctctgatagctggaccccaggttgagagggaggtggtgagaactggacgtgtggctggggacgtggggccaggcaggacctgacaccctcctcccgtcccatcctagtttggcctcctggaccacaagcacctagaccatgaggtggccaagcctgcccgaagaaagaggctgcccgagatggcccagccagttgacccggctcacaatgtcagccgcctgcaccgtgagtgtctgcccctcgatgctctccggtggccacccctaccccgccacttgccattgctggtcctctccttgtcaggtccaccttaaggagaagatgtcctggcctggagtccctgagggctcaccagtctctgggtcaaagctgatgggagcacctccttcctcagccctgacctggcccagccaggccacccaacccttctcctctgcaagccagtgggctgtccctgaagccctgctgatcactgattggaacagaggtggagaaagaggtcttgagggacttgagctgcaggggtgctggagaaggtagaaatggggttcggggtgccatcctgaaggttagaaccttctaggggagggtgtcatggaggagggggtgccaggtagtagtgtttgtagatttgggccctccacaatgtcttggggtatgtgggaattagggctgggaacccccagctcccagaccagaaacactcttgtatcttacaaatccaatgctccaggtccctgacccctcttcctccttcctctcttgttctcctcctccctccccgcccccgccggccccctccccaccgcagaaagtgggcttttgctgccaccacaagttgtaggtgctttattcccaaatctccgttcatctcgaaccacagcatgtccacgtgtgtccgatgcagactcgcggttctctaagttcacggccccacacggtttctctgtggtcctcatccttccctgcatctgtggctgtccacagccaactgggtgaaagtttggatccccctctcacaccctagggtcagtggcaggcttccagcactgtagacctgagggttctctcctccccaagctcccgctccttcccacctccgtgctgcccgcccccaaccccgccaggctagcatctcagcgtggtcagggtcctgtccaccctcccaaagccaccatcccaggatgaggggcttctggagggtgacgggggaaggcacaagtcctggctgggaaatgcggtggaagggggcaggggttctgtgggttcgggactcccagactcttggctcaggcccgccaagtaggagaaagttcagagctgggaaggcgaacagctggcattcatggaagccacactggtggtttggccgcgtgcccatccttactggatgggaggaaagtaggggaaaggggagatgcctgaggggccggaaagcgtcttcctggtcactctgggcccgcccccacccccaccgtgcagactcatttcgacctttcccctacttttccggctgggctgggggcggttcctcccagtctggagcgtctgagcctccagacgtgctcaacgccatcctcccctcctccctccctctttctttcctcaaccctgcctcctctccctctaggagctgggaccccaggcagagcctctgagatgctcctgctcagcacagttcttcccgttctggacctgctgcctcattcattcattcattcattcatttgtcaagactgttttgtttgctttttgagacggagtctcgctctgttgtccaggctggagtgcagtggcgcaatctcagctcactgcaacctctgcctcccactgggttcaagtgattctcctgcctcagcctctcaagtagatgggattataggcgcctaccgccaccacgcccagctaatttttattcatttatcaagtcttttttttttttgagacagagtctcactctgtcacccaggttggagtgcaatggttcaacctcagctgactgcaacctctgcctcccgggttcaagtgattctcctgcctctgcctcctaaggagctgggattactggcgtccaccatcacacccagctaatctttgtatgttttactagagatggggtttggccatgttgaccaggctggtctcaaactcctgaccgatccgcccgcctcccaaagtgctggattacaggcatgaaccactgcgcccggcccattcctcaagtctttattgagcagctgctatgcgctggggcctgcgtggatgctggtgccaggctgtgggcagagctgctccttgtccccagcctcatggagcctccattgagtcagaggagagaccattagatgacctcagtgtccaggagtgggaagtccttgctcaattcccatttggggtgttctggcctggtctgggggtgaggcaaggcagggtgtccttccagaagctgggacccagagagagaagtgaggaaagagagtcccgccgggcgcagtggttcacacctgtaatcccagcactttgggaggccaaggctggcggatcacgaggtcaggagatcgagaccagtctggccaacatggtgaaacccccgtctctacaaataatgcaaaaactagtcgggcgtggtggcacatgcctgtagtcccagctgctccggaggctgcggcagaattgcttgaacctgggaggcggaggttgcagtgagccaagattgcgccactgcactccagcctggcgacagagcgagactccgtatcaaaaaacaaaacaaaaaaagagagtcccaggcagggggaacagcatgtgcaaagtccctgtggcaggacggtgtgtggtacaagggtgggaagaaagcctgtgtgccagagagggtgtgggtacagcatggcaggaggaggatgggcacgggggctggtcctccaggtgccttgtggaccatgctgaggaaggacatagggagccatggaagaggttaggcagatggcagagaggtggtcatgagataagatttgccttttacttccctggtcatccactgttaagcccccagatatgcctggctcctgagaccccccccaggggctgccctcctgtttcaagtctccactttatctcccttcagggctgcccagggattgccaggagctgttccaggttggggagaggcagagtggactatttgaaatccagcctcaggggtctccgccatttttggtgaactgcaagatgacctcaggtagggtgtgttagtccaccaggggcccctctccccataggccctgttgtctttctttaaattgaaaacaaaacaaaacaaaaaaattaaaggcagggtcttgctatgttgcccaagctggtctttttttttttttttttttttgagatggagttttgctcttggagctggagtgcaatgccacgatctcagctcactgaaacctccgcctcccgggttcaagcaattctccagcgtcagcctccccagtagctgagactacaggtgcgagcaaccacacccagctaatttttgtatttttagtagagactgggtttcaccatgttggtctggctggtctcaaactcctgacctcaaatgatttgccgactttggcctcccaaaatgctgggattataggcattagccactgctcctggcctcttttctttaaaatgcagcccttgtctgggtgtagtggctcatatctgtaatcccgacactttgggaggcctatcatgaggatcacttgagcccagaagttcgagaccagcctggacaacatagtgagagctcatctttacaaaaaattttgtaaaagtaaaaaaaaaggccaagtgcagtggctcacacctgtaatcccagcactttgggaggttgaggcagacagatcacgaggtcaggagttcgagaccagcctgaccaacatggtgaaaccccgtctctactaaaaatacaaaaattagccgggcatggtggtgtgcacctgtaatcccagctactcaggtggctgaggcaggagaatctcttgaacctgggaggcagaggttgcagtgagctgagatgacgccaccgcactccagcctgggcgacagagcgagactccgtccccccatcaaaaaaataaaaaagagaaaataaaataaaataaaataaaattcagcccttgctgggcatggtggcacatgcctgtagtcccagctactcgggaggccaaggcaggagggtcacttcagcccaggagttaaaggctgccgtgagccgtgatcacacctgtgaatagccaccgcactccaacctgggcaacacaacaaaacctcgtttctaaaaaaaaacaaaggctgagcacggtggcttacacctgaaatgccagcactttgggaggctgaggcgggcaaatcacttgaggtcagaagttcaagaccagcctggccaacatggtgaaaccctatctctaccaacataaacattagccgggcgtgcctgtgattccagctgcttgtggggctgaagcacaagaatcgcttgagccccgaaggcagaggttgcagtgagctgagattgcggcactgcgatccagcctgggcaacagagtgagactccatctctaaaaaaaaaaaaaaaaaaaaagaaagcttttttttccactgagaagtcctttccattacaagaggttacaacacggggttttacccagttcagctggcccagagaggctttgcagatttccactgcctactccctcccacactcagtccctgctgggttcttgggacaaagatcttcccaaggccagcccataatattcctccctctgacccaccctcctcgagtcctccagggatgagtgagggagctgctgtcttcctgggtttggagggggtttggtgcttggcagccagatgagggagtggggtcgtctgtgaagagggacttcctggtgaccttgtacctttctgggcagatggaggctggacagtaattcagaggcgccacgatggctcagtggacttcaaccggccctgggaagcctacaaggcggggtttggggatccccacggtaggtgtttctagtggggacagaggcaggggaggaagagggaccctcagaagtggccctgcctcatggagtggcctctcccactccaggcgagttctggctgggtctggagaaggtgcatagcatcacgggggaccgcaacagccgcctggccgtgcagctgcgggactgggatggcaacgccgagttgctgcagttctccgtgcacctgggtggcgaggacacggcctatagcctgcagctcactgcacccgtggccggccagctgggcgccaccaccgtcccacccagcggcctctccgtacccttctccacttgggaccaggatcacgacctccgcagggacaagaactgcgccaagagcctctctggtgagcaggccctgccatgccacacccagccagcagcttccctccttatctttctgctgctctgtcctgccttcaaccccacattgcatctgtttcctgcccccacctcttccttacatgccgtgtgtgtgattgggccactaacttagcctatctggcctcagttttcccatcctgaaaagggtcttgaccgtctttacttttatttacttatgtgtttgtttatttatttatttatgtatttattttttgagacggagtctcactttgtcacccaggctggagtgctttgtggcacgatcttggctcactgcaagctccacctcctgagttcacaccattctcctgcctcagcctcccgagtagctgggactataggtgcccaccaccacgcctggctaatttttttgtatttttagtagagatggggtttcaccgtgttagccaggatggtctcgatctcctgacctcgtgatctgcctgcctcagcctcccaaagtgctgggattacaggcgtgagccaccgcgcccggcctacttatttattttttgagacagagtcccgctgtgtctcccaggctggagtgcaagtgacgtgatcttggctcactgcagcctccgcctcctgggttcaagtgattctcctgcctcagcctcctgagtagctgggattacaggttcccgccaccatgcacagataattgttttgtatttttagtagagacggggtttcaccatgttggccagggtggtcttgaactcctgacctcaagtgatctgcccacctcggcctcccaaagtgttgggattacaggcgtgagccacaatacccggccacaaacatctttataatggtgctccacaggattctttttttttttttttttttgaaacagggtctcactctgttgcctaagctggagtgcagtggtgcgatctcggctcactgcaacctccacctcccgggttcaagcaattctcaaaaaaaaaaaaaaattaggcacggtggctcacacttgcaatcccagcactttgggaggctgaagcgagtggatcacttgagcccaggagaccaatctgagcaacagggcgaaatcctgtctcaattaaaaatacaaaaaactagctgggcatggtggtgcctgcctgtgttcccatctacttgggaggctgagttgggaggatctcttgagcctaggagataaggctgcagtgagctgagactgcgccactgcactcaagcctgggtgacagagtgagacccctgcctcaaaagaaaaagaaaaaatgcaggcatggtggctcacacctgtggtcccagctacttgggaggcccaggtacaagaatcacttgagcccgtaaggttgacgctgcattgagccatcaccacaccactgcactccagcctgggcaatggagccaggccctgtctcaaaaaaaattgtttttaaacttaaaaataaggccgggtgtgggggctcacacctgtaatcccagcactttgggaggccgaggtgggtggatcacctgaggtcaggagttcaaaactagcctggccaacatggtgaaaccctgtctctactaaaaatacaaaaattaggccaggcgcagtgggtcatacctgtaatcccagcactttgggaggctgaggagggtggatcacatgaggtaaggagtttgagaccaacctggccaacatggtgaaaccccctcactactaaaaatacaaaaactagccaggcgtggtggcgggtgcctgtaatcccggctactcaggaggctgaggcatgagaatcccttgaacctgggaggcagaggtgcagtgagccgagattgtgccactgcactccagcctgggagatagagtgagactcagtctcaaaaaaaaagaccaaaaattagccaggtgtggtggcaggcgcctgtaatcccagctactcgggaggctgagggaggagaatcacttaaacctgagagacggaggttgcagtgagctgagatcgcaccactgcactccagcctgggtgacagagtaagactcaatctcaaaaaaaaaaaagtcaagtccaaagcccagcctggtccccaacctgcctcatcctcaaccctatccctatctcctttcagccccatcggtggctcaaagacctgaccatgttccctctcccctgaccccggcaggaggctggtggtttggcacctgcagccattccaacctcaacggccagtacttccgctccatcccacagcagcggcagaagcttaagaagggaatcttctggaagacctggcggggccgctactacccgctgcaggccaccaccatgttgatccagcccatggcagcagaggcagcctcctagcgtcctggctgggcctggtcccaggcccacgaaagacggtgactcttggctctgcccgaggatgtggccgttccctgcctgggcaggggctccaaggaggggccatctggaaacttgtggacagagaagaagaccacgactggagaagccccctttctgagtgcaggggggctgcatgcgttgcctcctgagatcgaggctgcaggatatgctcagactctagaggcgtggaccaaggggcatggagcttcactccttgctggccagggagttggggactcagagggaccacttggggccagccagactggcctcaatggcggactcagtcacattgactgacggggaccagggcttgtgtgggtcgagagcgccctcatggtgctggtgctgttgtgtgtaggtcccctggggacacaagcaggcgccaatggtatctgggcggagctcacagagttcttggaataaaagcaacctcagaacactt

SEQ ID NO: 5304 - DNA, 20223 bp, Homo sapiens
agacagagtcttgctctgtcacccaagctggagtgcaatggtacgatctccgcttactgcagcctccacctcctgggttcaagcgaatctcccacctcagcctcacaaatagctgagattacggccacacaccaccatgcctgctaatttctgtatttttagtagagatggggtttcaccatgctggccaggctggtctcgaactcccagactcaagtgatccacccacctcagcctcccaaagtgctaggattacaggtgtgagccaccatgccgggccccagctaatttttttttttttttgagacagagtctcgccctgttgcccaggctggagtgcagtggcgcaatctctgcttactgcaccctctgcctcccgggttccagcgattctcctgccccagcctcccgagtaactgggattacaggcgcgcgcctccacgcctggctaatttttacatttttagtagagaccgggtttcaccatgttggtcaggctggtctcgaacttctgacctcacgatctgcccaccttggactcccaaagtgctggtattacaggcatgagccaccgtgcccagcctggccccagctaattttttaaattttttgtacagacagggtcttgccatgttacccaatcttgaactcctgggctcaagcagtcctcccaccttggcctcccaaagtactgggattacaagcatgagccaccttgcctagcttaatggcatttacatttgtagtgaaatacacataacaggctgggcgcagtggctcatacctgtaatcccagcactttgggaggccgaggtaggcggatcacctgaggtcaggagttagagaccagcctggacatggcgaaaccccgtctctactaaaatacaaaaattagccaggcgtggtggtgggcacctgtaatcccagctactcgggaggctgaggcaggagaatcatttgaacccaggaggtggaagttgcagtgagcagagattgcaccactgcactccagccttggcgacagagcaagactctgtctcaaaaaaaagaaaaaaaaaagaaaagaaaagaaaaaaaagaaaaagaaaaaaagaaatatacataatataaaattggtcattttaacaatttttaactatgttggccaaagtagcccacgcgttgggattggagacccggtcttgcccaccgtgatcgccccagtacagtgcctggcatatagtaggtgctccaggaacaattgatcaggatgactttgtctttgctgggtaagaggccacattctaaaggtcagtttttggccaggcacagtgactcacacctgtcatcccagcactttgggaggccgaggcgagtgaatcccttgagctcaggagttcaagaccagcctgggcaacacggcaaaaatcctgtctctacaaaatctacagaaattaggcaggtctggtggcacatgcctatagtcccagctgcttgggaggctgaggtgggaggatcacttgagcctgggagtttgaggttgcggtgagctgtgattgtgacactgcactccagcctgggtgagtgagacccatctcagaaaaaaaaaaaaaaatacataaaacagggctgggcgtggtggctcatgcctgtaatcctagcactttgggaggctgaggtggtggatagcctaagcttaggagtttgagaccagcctgggcaacatggcgaaaccccaccccctctactagaatacaaaaaattagcgggcgtggtggtgggcacctgtagtcccagctactcaggaggctgaggcaggagaatggcgggaacctgggaggtggagcttgcagtgagccgagatgaggccactgcactccagcctgggcaacagagcaagactctgtctcaaaaaaaaaaaaaaaaaaaaggctaggccaggcacagtggctcacacctgtaatcccagcacgttgggaggccgagacaggtggatcacctgaggtcaggaatttgagaccagcagagccaacatagtgaaaccccgtttgcactaaaaatacaaaaaattagtcaggtgtggtggtgcacacctgtaatccccgctactcgggaggctgaggctggagaatcgcttgaacctgggaggcagaggttgcagtgagcggagattgcgccgttgcactccagcctgggcgacaagagggaaactccatctcaaaaaaataaataaataaaataaaaaataggctgggcgcggtggctcatgcctgtaatcccagcactttgggaggccgaagcgggcggatcacgaggtcaggagatcgagaccatcctggctaacatggtgaaaccctgtctctattaaaaatacaaaaaattagctgggcatggtggcaggtgcctgtagtcccagctactcgggaggctgaggcaggagaatggcactaacccgggaggtggagcttgcagtgagccgagattgcgccactgcactccagcgtgggcgacagagcgagactccttctcaaaaaataaataaataaataaataaataaataaataaataaaaaataaagagcagtttttagaataaaatctagagccaacttgaggcgacagtatagactcttttgtagattgctcacagcaggtgcccttaagaccctgggtctgtgatgtgttttgtgctgtgggacacatggctccaaagaagtccctgaaaatcagatcatgaaaaggtcatcaggttggggaagtaattgatcagttctctcagtttaagaaggtggggaagaggaggagcttgcattctgggatagcctgggatagctgtgtccctactcagagagaggctgggggcttgggggtggacaggccagacggtgaccatctgaacctactcctcactggggttttcctccctccctttcctgtccactgctgctgggagggatttgctgtcctggcatctggcccagctgacggggccaagtgtatgagtggcagcctgcacgtcagcccttgggtgtgcagtttcagattccagagaatgagctggcttggagccctgctgagtcaatgcccttctccttgccagtgctctgagccaacctgccccgagttcttcctggcaggctggttttctgtgccagcctccccttcctgacagggtataggggaatgggtagggaagaggcagaggagatcggtgcaagtttgaatgaacacttagccctgtggaatgaatgtggtccagccctttagcctcactcagtacttcctttgtcccaactctatccctaccccaggctcagaatgttggggtatctccacctgcctgagaacttcaaacatacaggggctgggcttagagggcagcagcaccttcgttcagtgcatgagtgaatgaatgaatgagggagagaaagaggaaggtcttccatgtctgaaacttttttttttttttttgacacacagtctcactctgtcacccaggctggagtgctgtggtgcaatctcagctcactgcaacctccgtctcctgagttcaagcgattctcctgacacagtctcccgagtagctgtaagcacgtgccaccacacccggctaattttttatttttagtagagacgaggtttcaccatgttggccaggctgatctcgaacccctgacctcaggtgatccgcccccccccccctcccaccacccggcctcccaaagtgctgggattacaggcgtgagccaccgcgcctggccacagacttttattttatttcttttttagagacaggatctcactctgttgcccaggctggagtgcagtggcaccattgtggctcactgcagcctctacctcctgggctcaagtgagcctcccacctcaggctcccaagtagctgcgaccacagtcatgggcgaccgccctggttcctcccttccttgtgtctcctctttctgttctctaagttcctgctttattataggcaaagctcaggacattaaagaccctggcggtagagggtaggctatgggggtgaggccctgatccaagtcctgccgctaaggcactcataatttcgggctcaggggagaaatggaagtcaaagaatctcataaacacagctgcgatgacgaaccctttcacgggaaggaacatgcgagcccagaaaagtctctcctggtcttgggatggaggtcacacgaagcctccgcaaggcaaggacttttggtgagttccgggctccgctgaactcagctctttttcttttccttcctttctttccttcttcctttctttccctccttccttccttcctctttctctctttcctttctctctctcttttctctctctctctccttcttccctccctccctacctctctctcttttctttttccgtccttccttccttctttccttctttctctctcttttctttcttttcttttcttttctcttctttcattttgagacgtactctggctctgtcgcccaggctggagcgcaatggcgccatctcggcgcactgcaacctccacctcccgggttcaagcgattctactgcctcagcctcccgagtagctgggactacaggcgcgcactaccaagcccggctaatttttttttgtatttttagtagagactgggtttcacgatgttggccgggctggtctggaagtcttgacctcaagcgtgcgccctctccgccactgggtaaggcgggggcggaatagggggcttgcaatttcacactagaggcgggcaccgtgggggaaagaagagtcacgtctcccacggttcgtagaggaaggcctgcctgagcctggagcgggggcgggagagccacagtttggcatccccagggcatcccccagcccgcagactaccaggcctccagaggacaggaccccacccccggccacaggccctgcccccagcactccccgcaccccgcctccaagactcctccgcccactccgcacccaacttataaaaaccgtcctcgggcgcggcggggagaagccgagctgagcggatcctcacacgactgtgatccgattctttccagcggcttctgcaaccaagcgggtcttacccccggtcctccgcgtctccagtcctcgcacctggaaccccaacgtccccgagagtccccgaatccccgctcccaggctacctaagaggatgagcggtgctccgacggccggggcagccctgatgctctgcgccgccaccgccgtgctactgagcgctcagggcggacccgtgcagtccaagtcgccgcgctttgcgtcctgggacgagatgaatgtcctggcgcacggactcctgcagctcggccaggggctgcgcgaacacgcggagcgcacccgcagtcagctgagcgcgctggagcggcgcctgagcgcgtgcgggtccgcctgtcagggaaccgaggggtccaccgacctcccgttagcccctgagagccgggtggaccctgaggtccttcacagcctgcaggtacgtgtccccagggctggttctccgcgcccctagtggctctcctggcttggaagggtatggacaggagtggggcgtgggggcggggtgcgcaactgtggctccctgggcttccctgcgtcaagggatgggctccccccttaggaagccgaggagggaggttcgctcaaggccaggaattcaagaccacctaaagcaaaatagcgagacccccgtctcttctacacacacacacacacacacacaaaataaataaaataaaataaaataaatataaaattaaaaaacgaccgggcgcagtggctcacggagcctccacctgctgtcgagactagcctggccaacatggagaaacctcgtctctactaaaaatacaaaaaattagcctggcatggtgtgcatgcctgtaatcccagctacttgggaggctgaggcaggagaatctcttgaacccgggaggcagaggttgcagtgagccgagatcgcagcactgcactccagcctgggcaacagagtgagactcctcaaaaaaataatagcgataaaataaaaataaagccaggtgcggtgactcacgcttgtagtcccagcactttgggagggcgaggccagtggatcacctgaggtcaggagttcaagaccagcctgaccaacacagtgaaaccccgtctctactaaaaatacaaaaattagctgggtgtggtggtgggcgcctgtaatcccagctactggggaggctgaggcaggagaacctcttgaacccgggaggcggaggttgcagtgagccgggatcatgccattgcactccagcctgggcgacagagctcgactccatctcaaaataataataataataaataaaataaaatacaaatacaaaaattagccaggtgtggtggcagctacttgggaggctgagacacaagaatcacttgagtctgggaggcagaggttgcagtgagccaagattgcgccactgcactccaacctgggtgacagagcgagactctgtctgaaaaaataaaaaataagccaggcatagagctgcatgactgtagtcccagctacacaggaggctgaaaacaggaggatcgcctgaccccaggagttggaggctgcagtgagctgtgacagcaccactgcactccagcctgggcgagagaacgagaccccgtcattgggaaaaaaaagaaaaaagaaagactcccttgcctggcctcagcggatggagatttggaaggatggatgagtggatgaattaagaggttggggtaggcaagctgggtcctcaccaaggttttcacccctccccagacacaactcaaggctcagaacagcaggatccagcaactcttccacaaggtggcccagcagcagcggcacctggagaagcagcacctgcgaattcagcatctgcaaagccaggtaaccctaggatcaagggagaaaaggtccctctgatagctggaccccaggttgagagggaggtggtgagaactggacgtgtggctggggacgtggggccaggcaggacctgacaccctcctcccgtcccatcctagtttggcctcctggaccacaagcacctagaccatgaggtggccaagcctgcccgaagaaagaggctgcccgagatggcccagccagttgacccggctcacaatgtcagccgcctgcaccgtgagtgtctgcccctcgatgctctccggtggccacccctaccccgccacttgccattgctggtcctctccttgtcaggtccaccttaaggagaagatgtcctggcctggagtccctgagggctcaccagtctctgggtcaaagctgatgggagcacctccttcctcagccctgacctggcccagccaggccacccaacccttctcctctgcaagccagtgggctgtccctgaagccctgctgatcactgattggaacagaggtggagaaagaggtcttgagggacttgagctgcaggggtgctggagaaggtagaaatggggttcggggtgccatcctgaaggttagaaccttctaggggagggtgtcatggaggagggggtgccaggtagtagtgtttgtagatttgggccctccacaatgtcttggggtatgtgggaattagggctgggaacccccagctcccagaccagaaacactcttgtatcttacaaatccaatgctccaggtccctgacccctcttcctccttcctctcttgttctcctcctccctccccgcccccgccggccccctccccaccgcagaaagtgggcttttgctgccaccacaagttgtaggtgctttattcccaaatctccgttcatctcgaaccacagcatgtccacgtgtgtccgatgcagactcgcggttctctaagttcacggccccacacggtttctctgtggtcctcatccttccctgcatctgtggctgtccacagccaactgggtgaaagtttggatccccctctcacaccctagggtcagtggcaggcttccagcactgtagacctgagggttctctcctccccaagctcccgctccttcccacctccgtgctgcccgcccccaaccccgccaggctagcatctcagcgtggtcagggtcctgtccaccctcccaaagccaccatcccaggatgaggggcttctggagggtgacgggggaaggcacaagtcctggctgggaaatgcggtggaagggggcaggggttctgtgggttcgggactcccagactcttggctcaggcccgccaagtaggagaaagttcagagctgggaaggcgaacagctggcattcatggaagccacactggtggtttggccgcgtgcccatccttactggatgggaggaaagtaggggaaaggggagatgcctgaggggccggaaagcgtcttcctggtcactctgggcccgcccccacccccaccgtgcagactcatttcgacctttcccctacttttccggctgggctgggggcggttcctcccagtctggagcgtctgagcctccagacgtgctcaacgccatcctcccctcctccctccctctttctttcctcaaccctgcctcctctccctctaggagctgggaccccaggcagagcctctgagatgctcctgctcagcacagttcttcccgttctggacctgctgcctcattcattcattcattcattcatttgtcaagactgttttgtttgctttttgagacggagtctcgctctgttgtccaggctggagtgcagtggcgcaatctcagctcactgcaacctctgcctcccactgggttcaagtgattctcctgcctcagcctctcaagtagatgggattataggcgcctaccgccaccacgcccagctaatttttattcatttatcaagtcttttttttttttgagacagagtctcactctgtcacccaggttggagtgcaatggttcaacctcagctgactgcaacctctgcctcccgggttcaagtgattctcctgcctctgcctcctaaggagctgggattactggcgtccaccatcacacccagctaatctttgtatgttttactagagatggggtttggccatgttgaccaggctggtctcaaactcctgaccgatccgcccgcctcccaaagtgctggattacaggcatgaaccactgcgcccggcccattcctcaagtctttattgagcagctgctatgcgctggggcctgcgtggatgctggtgccaggctgtgggcagagctgctccttgtccccagcctcatggagcctccattgagtcagaggagagaccattagatgacctcagtgtccaggagtgggaagtccttgctcaattcccatttggggtgttctggcctggtctgggggtgaggcaaggcagggtgtccttccagaagctgggacccagagagagaagtgaggaaagagagtcccgccgggcgcagtggttcacacctgtaatcccagcactttgggaggccaaggctggcggatcacgaggtcaggagatcgagaccagtctggccaacatggtgaaacccccgtctctacaaataatgcaaaaactagtcgggcgtggtggcacatgcctgtagtcccagctgctccggaggctgcggcagaattgcttgaacctgggaggcggaggttgcagtgagccaagattgcgccactgcactccagcctggcgacagagcgagactccgtatcaaaaaacaaaacaaaaaaagagagtcccaggcagggggaacagcatgtgcaaagtccctgtggcaggacggtgtgtggtacaagggtgggaagaaagcctgtgtgccagagagggtgtgggtacagcatggcaggaggaggatgggcacgggggctggtcctccaggtgccttgtggaccatgctgaggaaggacatagggagccatggaagaggttaggcagatggcagagaggtggtcatgagataagatttgccttttacttccctggtcatccactgttaagcccccagatatgcctggctcctgagaccccccccaggggctgccctcctgtttcaagtctccactttatctcccttcagggctgcccagggattgccaggagctgttccaggttggggagaggcagagtggactatttgaaatccagcctcaggggtctccgccatttttggtgaactgcaagatgacctcaggtagggtgtgttagtccaccaggggcccctctccccataggccctgttgtctttctttaaattgaaaacaaaacaaaacaaaaaaattaaaggcagggtcttgctatgttgcccaagctggtctttttttttttttttttttttgagatggagttttgctcttggagctggagtgcaatgccacgatctcagctcactgaaacctccgcctcccgggttcaagcaattctccagcgtcagcctccccagtagctgagactacaggtgcgagcaaccacacccagctaatttttgtatttttagtagagactgggtttcaccatgttggtctggctggtctcaaactcctgacctcaaatgatttgccgactttggcctcccaaaatgctgggattataggcattagccactgctcctggcctcttttctttaaaatgcagcccttgtctgggtgtagtggctcatatctgtaatcccgacactttgggaggcctatcatgaggatcacttgagcccagaagttcgagaccagcctggacaacatagtgagagctcatctttacaaaaaattttgtaaaagtaaaaaaaaaggccaagtgcagtggctcacacctgtaatcccagcactttgggaggttgaggcagacagatcacgaggtcaggagttcgagaccagcctgaccaacatggtgaaaccccgtctctactaaaaatacaaaaattagccgggcatggtggtgtgcacctgtaatcccagctactcaggtggctgaggcaggagaatctcttgaacctgggaggcagaggttgcagtgagctgagatgacgccaccgcactccagcctgggcgacagagcgagactccgtccccccatcaaaaaaataaaaaagagaaaataaaataaaataaaataaaattcagcccttgctgggcatggtggcacatgcctgtagtcccagctactcgggaggccaaggcaggagggtcacttcagcccaggagttaaaggctgccgtgagccgtgatcacacctgtgaatagccaccgcactccaacctgggcaacacaacaaaacctcgtttctaaaaaaaaacaaaggctgagcacggtggcttacacctgaaatgccagcactttgggaggctgaggcgggcaaatcacttgaggtcagaagttcaagaccagcctggccaacatggtgaaaccctatctctaccaacataaacattagccgggcgtgcctgtgattccagctgcttgtggggctgaagcacaagaatcgcttgagccccgaaggcagaggttgcagtgagctgagattgcggcactgcgatccagcctgggcaacagagtgagactccatctctaaaaaaaaaaaaaaaaaaaaagaaagcttttttttccactgagaagtcctttccattacaagaggttacaacacggggttttacccagttcagctggcccagagaggctttgcagatttccactgcctactccctcccacactcagtccctgctgggttcttgggacaaagatcttcccaaggccagcccataatattcctccctctgacccaccctcctcgagtcctccagggatgagtgagggagctgctgtcttcctgggtttggagggggtttggtgcttggcagccagatgagggagtggggtcgtctgtgaagagggacttcctggtgaccttgtacctttctgggcagatggaggctggacagtaattcagaggcgccacgatggctcagtggacttcaaccggccctgggaagcctacaaggcggggtttggggatccccacggtaggtgtttctagtggggacagaggcaggggaggaagagggaccctcagaagtggccctgcctcatggagtggcctctcccactccaggcgagttctggctgggtctggagaaggtgcatagcatcacgggggaccgcaacagccgcctggccgtgcagctgcgggactgggatggcaacgccgagttgctgcagttctccgtgcacctgggtggcgaggacacggcctatagcctgcagctcactgcacccgtggccggccagctgggcgccaccaccgtcccacccagcggcctctccgtacccttctccacttgggaccaggatcacgacctccgcagggacaagaactgcgccaagagcctctctggtgagcaggccctgccatgccacacccagccagcagcttccctccttatctttctgctgctctgtcctgccttcaaccccacattgcatctgtttcctgcccccacctcttccttacatgccgtgtgtgtgattgggccactaacttagcctatctggcctcagttttcccatcctgaaaagggtcttgaccgtctttacttttatttacttatgtgtttgtttatttatttatttatgtatttattttttgagacggagtctcactttgtcacccaggctggagtgctttgtggcacgatcttggctcactgcaagctccacctcctgagttcacaccattctcctgcctcagcctcccgagtagctgggactataggtgcccaccaccacgcctggctaatttttttgtatttttagtagagatggggtttcaccgtgttagccaggatggtctcgatctcctgacctcgtgatctgcctgcctcagcctcccaaagtgctgggattacaggcgtgagccaccgcgcccggcctacttatttattttttgagacagagtcccgctgtgtctcccaggctggagtgcaagtgacgtgatcttggctcactgcagcctccgcctcctgggttcaagtgattctcctgcctcagcctcctgagtagctgggattacaggttcccgccaccatgcacagataattgttttgtatttttagtagagacggggtttcaccatgttggccagggtggtcttgaactcctgacctcaagtgatctgcccacctcggcctcccaaagtgttgggattacaggcgtgagccacaatacccggccacaaacatctttataatggtgctccacaggattctttttttttttttttttttgaaacagggtctcactctgttgcctaagctggagtgcagtggtgcgatctcggctcactgcaacctccacctcccgggttcaagcaattctcaaaaaaaaaaaaaaattaggcacggtggctcacacttgcaatcccagcactttgggaggctgaagcgagtggatcacttgagcccaggagaccaatctgagcaacagggcgaaatcctgtctcaattaaaaatacaaaaaactagctgggcatggtggtgcctgcctgtgttcccatctacttgggaggctgagttgggaggatctcttgagcctaggagataaggctgcagtgagctgagactgcgccactgcactcaagcctgggtgacagagtgagacccctgcctcaaaagaaaaagaaaaaatgcaggcatggtggctcacacctgtggtcccagctacttgggaggcccaggtacaagaatcacttgagcccgtaaggttgacgctgcattgagccatcaccacaccactgcactccagcctgggcaatggagccaggccctgtctcaaaaaaaattgtttttaaacttaaaaataaggccgggtgtgggggctcacacctgtaatcccagcactttgggaggccgaggtgggtggatcacctgaggtcaggagttcaaaactagcctggccaacatggtgaaaccctgtctctactaaaaatacaaaaattaggccaggcgcagtgggtcatacctgtaatcccagcactttgggaggctgaggagggtggatcacatgaggtaaggagtttgagaccaacctggccaacatggtgaaaccccctcactactaaaaatacaaaaactagccaggcgtggtggcgggtgcctgtaatcccggctactcaggaggctgaggcatgagaatcccttgaacctgggaggcagaggtgcagtgagccgagattgtgccactgcactccagcctgggagatagagtgagactcagtctcaaaaaaaaagaccaaaaattagccaggtgtggtggcaggcgcctgtaatcccagctactcgggaggctgagggaggagaatcacttaaacctgagagacggaggttgcagtgagctgagatcgcaccactgcactccagcctgggtgacagagtaagactcaatctcaaaaaaaaaaaagtcaagtccaaagcccagcctggtccccaacctgcctcatcctcaaccctatccctatctcctttcagccccatcggtggctcaaagacctgaccatgttccctctcccctgaccccggcaggaggctggtggtttggcacctgcagccattccaacctcaacggccagtacttccgctccatcccacagcagcggcagaagcttaagaagggaatcttctggaagacctggcggggccgctactacccgctgcaggccaccaccatgttgatccagcccatggcagcagaggcagcctcctagcgtcctggctgggcctggtcccaggcccacgaaagacggtgactcttggctctgcccgaggatgtggccgttccctgcctgggcaggggctccaaggaggggccatctggaaacttgtggacagagaagaagaccacgactggagaagccccctttctgagtgcaggggggctgcatgcgttgcctcctgagatcgaggctgcaggatatgctcagactctagaggcgtggaccaaggggcatggagcttcactccttgctggccagggagttggggactcagagggaccacttggggccagccagactggcctcaatggcggactcagtcacattgactgacggggaccagggcttgtgtgggtcgagagcgccctcatggtgctggtgctgttgtgtgtaggtcccctggggacacaagcaggcgccaatggtatctgggcggagctcacagagttcttggaataaaagcaacctcagaacactttgttctttgttcttgtttgttttctttcttttttttctctttctttagttcacagatctagtaagttaccctcagtttgttttaaaaagtgaacaaagtccatgtaaacatgttcccagggccaggcacggtgtctcgtgcctgtaatcccagccatttgtgaggccgagacaggcaggtcacttgaggtcagcagttcgagaccagccgggccaacatggtggaacccccatctctacaaaaaaatacaaaaattagccgagcatggtggtgcacgtctgtagtcccagctactctagaggctgacgcagaagaatcacttgagccaaggaggcagaggctgcaaataagccgagattgcgccactgcactccagcctgggcaacagagcaagactccatctcaaaacaaaaataatttttttttcgtagaggcagggtctcattctattgtccaggctggtctcaaacaccgagactcaagggatcctcctgccttggcttcacaaagtgatgggattaaaggtgtgagcgccactgcacccacccctgaaggctctaattctacatctgtgttttgttaaaaaaaaaaaaaaaagatggcgtggtcgctcatgcctgtaatcccagcactttaggaggccgaggcaggtggatcatctgacattacgagttccaggcccgcctgaccaacatggtgaaaccccgtctctactaaaaatacaaaaattagccgggtgtggtggcgggtgcctgtaatcccagctactcaggaggctgaggcaggagaatcacttgaactcgggaggtggaggttgcggtgagcagagatcatgccactgcactccagcctgggtgacagagcaagacttgatttcaaaaaaaaaaaaaaaaaaaaaaagaatagggctgggcgcattggctcacacttgtaacactagcactttgggaggccaacgagcggatcacccgaggtcgggtgatcccgctgtattgctctatatagtgagatccctatatagggtctcactctattgtccaggctggtctggcctggccaatgtggtgaaacctcatttctactaaaaatacaaaaattagctgggcatagtgatgcgcacctataatcccagctactcaggaggctgaggccggagaattgcttgaacccaggaggtggaggttgcagtgagccgagatggcgctgagaggtgacagcgtgctggcagtcctcacagccctcgctcactctctgcgactcctctgcctgggctcccactgtggcggcacttcaggagcccttcagcccaccgctgcactgtgggagcccctttctgggctggccaaggccggagctggctccctcagcttgcagggaagtgtggagggagaggcgcgagccggaatcggggctgcgcgcggtgcttgtgggccagctggagttccgggtgggcgtgggcttggcggaccctgcactcagagcagccgtccggccctgctggccccgggcaatgaggggcttagcacccgggccggacagcggctgcggagggtgtactgggtcccccagcagtgccagcgcaccggcgctgcgcttgatttctcaccaggccttagctgccttcccgcggggcagggatcgggacctgcagcccgccatgcctgagcctcccaccccctccatgggctcctgtgcggcccgcgcctccctgacgagcactgccccatgctccatggtgcccagtcccatccaccacccaagggctgaggagtgcaggcgcacggcgtgggactggcaggcagctccacctgcagccccggtgcaggatccactgggtgaagctagctgggctcctgagtctggtggggacgtggagaacctttgtctagctcagggattgtaaatacaccaatcatcaccctatgtctagctcagggtttgtgaatgcaccaatgaacactctgtatctagctactctggtggggccttggagaacctttatgtctagctcagggattgtaaatacaccaatcggcactctgtatctagctcaaggtttgtaaacacaccaatcagcaccctgtgtctagctcagggtttgtgaatgcaccaatcgacactctgtatctagctactgtggtggggccttggagaacctttgtgttgacactctgtatctagttaatctggtggggatgtggagaacctttgtgtctagctcaggaattgtaaacgcaccaatcagcgccctgtcaaaacagaccagtgggctctaccaatcagcaggatgtgggtggggccagataagagaataaaagcaggctgcccgagccagcagtggcaacccacttgggtccccttccacactgtggaagctttgttcttttgctctttgcaataaatcttgtactgctcactctttgggtccccactgcttttatgagctgtaacactcactgcgaaggtctgcagcttcactcctgagccagtgaaaccatgaacccaccagaaggaagaaacgctgaacacacctgaacatcagaagaaacaaactccagacgcgccaccttaagagctggaacacttaccgcaagggtccatggcttcattcttgaagtcagtgagaccaagaaccccccaattccggatacagtgccactgcactccagcccaggcaacagagcgagattctgtctaaaaaataaataaataaatatgaaataaaataaaaattgtaataattggataccctacatctaggacatgtatttgaggaaaaccacatctgtccattttctgaaccccagctgctgttaattttttttttttttttttccgagacaagagtctcactctgtcacccaggctggagcgcggtagtgcgatctcagcttactgcaacctccacctcccgggttcaagcgattctcctgcctcggcctcccgagtagctgagattacaggcgcctcccactgcacccagctaatttttgtatttttagtatagatgggtttggccaggctggtctcaaactcctgacctcaagtgatctgcccgcctcggcctccgaaactggtgggattacaggcgcaagccactgtgcccggcctgttaatttatttttgccccagtatctccctccaaatattccttatagatgtctcttggggaggtggtgggggttcttgcgctagaagaaaaaatatctgtgatttccttgtcttgacccttcctggcaggtgctggggacacagctgtttccctggggctgtggctgggtataggtgacaaactttttagctttgtagaggtaggtcctacagctgccaggccagggaggctagaggctgccctctccaggttccttgtttgcctgtgtcctgtactgagcaggcttagaggatctcctctgagcccactgtcactggagctggtggtgagtccagtctgcaggagagggggttcctctagccacaccctcttcatttccaggctctgccaatgatgggctcatctcttcaatgtcatcctttttcctgcagccaccttgacctcaaagcatttcctgcccctccaacctggggaacgacagaaaaaaaaaaaaaaaaaccaccacctgggcacggtggcgcactcctacactccccgcactctgggaggctgaggtgggtagatcacaaggtcaggagatcaagaccatactggctgacacggtgaaaccccgtctctactaaaaatacaaaaaattagccaggcatggtggcacatgcccgtagtcccagctattcgggaggctaaggcaggagaatcacttgaacctgggaggcggaggttgcagtgagctgagattgcaccactgcactccagcctgggtgacagagcaagactctgtctcaaaaaagaaagaaaaaaagaaagaaaagaaaaacaccatggcaggaaactaacaaggggccaggaagctgggatgtgaacctggacctgttaaactccagagctgcagctgtaaatcacatccctctcctggaccacaggagctcactggccccagttcctgcatttggaaaatggggatggttttgacaccccacccctccatgccaccatcccttcctggcctcatggtgtggggagggggtggtaaagaattaataaggcattaatattcatcacaggctgggtccagtgcctcgcgactgtaatcccagctctttgggaggctgaggctggaggaccttggagtttgagaccagcctacgcaacacagcaagacctcatctctacgataaatttttaaaaagtccgggtgcagtggctcatgcctataatcccagcactttgggaggccaaggcgggtggatcatgaggttaggagttcaagaccagcctggccaagatagtgaaaccccatctctactaaaaatacaaaaaaattagccaggtgtggtggtgggcgcctgtaatcccagctacttgagaggctaaggcagagaattgcttggactcgggaggcagagggtgcagtgagccgagatcatgccactgcactccagcctgggcaacagagtgagaccctgcctcaaaaaaaaaaaaaaagaatcaagagaaatttcagagggaggagagacagaataaggcaactgaggatgatagagggagggaggcagagaggagaagatgagacagaagtccatgtcctctgggtttgatgggagggagggaaggaaggatggagacacaagagggggagtggatatggggaaggagtcaaatttgtttatgggattgagaggtgaagccggctaggcttctgggtcgggtggggacttgaacttttctgtctagctaaaggattgtaaacgtaccaatcagcactctgtgtctagctaaaggattgtaaatgcaccaatcagcactctgtgtctagctaaaggtttgtaaatgcaccaatcagcgctctgtgtctagctaatcaggtaggggacttggagaattttct

SEQ ID NO: 5305 - DNA, 20 bp, Artificial Sequence
  Description of Artificial Sequence: Synthetic oligonucleotide
  Target: ANGPTL4; (-) strand; PAM type: NAAAAC; PAM sequence: AAAAAC
gtgagtcactgtgcctggcc

SEQ ID NO: 5306 - DNA, 20 bp, Artificial Sequence
  Description of Artificial Sequence: Synthetic oligonucleotide
  Target: ANGPTL4; (-) strand; PAM type: NAAAAC; PAM sequence: AAAAAC
ttggctctagattttattct

SEQ ID NO: 5307 - DNA, 20 bp, Artificial Sequence
  Description of Artificial Sequence: Synthetic oligonucleotide
  Target: ANGPTL4; (-) strand; PAM type: NAAAAC; PAM sequence: CAAAAC
gagccatgtgtcccacagca

SEQ ID NO: 5308 - DNA, 20 bp, Artificial Sequence
  Description of Artificial Sequence: Synthetic oligonucleotide
  Target: ANGPTL4; (-) strand; PAM type: NAAAAC; PAM sequence: GAAAAC
tggacaggaaagggagggag

SEQ ID NO: 5309 - DNA, 20 bp, Artificial Sequence
  Description of Artificial Sequence: Synthetic oligonucleotide
  Target: ANGPTL4; (-) strand; PAM type: NAAAAC; PAM sequence: GAAAAC
aggaaggggaggctggcaca

SEQ ID NO: 5310 - DNA, 20 bp, Artificial Sequence
  Description of Artificial Sequence: Synthetic oligonucleotide
  Target: ANGPTL4; (-) strand; PAM type: NAAAAC; PAM sequence: GAAAAC
agttgtgtctggggaggggt

SEQ ID NO: 5311 - DNA, 20 bp, Artificial Sequence
  Description of Artificial Sequence: Synthetic oligonucleotide
  Target: ANGPTL4; (-) strand; PAM type: NAAAAC; PAM sequence: CAAAAC
actccgtctcaaaaagcaaa

SEQ ID NO: 5312 - DNA, 20 bp, Artificial Sequence
  Description of Artificial Sequence: Synthetic oligonucleotide
  Target: ANGPTL4; (-) strand; PAM type: NAAAAC; PAM sequence: TAAAAC
tggccaaaccccatctctag

SEQ ID NO: 5313 - DNA, 20 bp, Artificial Sequence
  Description of Artificial Sequence: Synthetic oligonucleotide
  Target: ANGPTL4; (-) strand; PAM type: NAAAAC; PAM sequence: CAAAAC
ttgcactccagctccaagag

SEQ ID NO: 5314 - DNA, 20 bp, Artificial Sequence
  Description of Artificial Sequence: Synthetic oligonucleotide
  Target: ANGPTL4; (-) strand; PAM type: NAAAAC; PAM sequence: TAAAAC
tctgggccagctgaactggg

SEQ ID NO: 5315 - DNA, 20 bp, Artificial Sequence
  Description of Artificial Sequence: Synthetic oligonucleotide
  Target: ANGPTL4; (-) strand; PAM type: NAAAAC; PAM sequence: GAAAAC
caagacccttttcaggatgg

SEQ ID NO: 5316 - DNA, 20 bp, Artificial Sequence
  Description of Artificial Sequence: Synthetic oligonucleotide
  Target: ANGPTL4; (-) strand; PAM type: NAAAAC; PAM sequence: CAAAAC
ccccgtctctactaaaaata

SEQ ID NO: 5317 - DNA, 20 bp, Artificial Sequence
  Description of Artificial Sequence: Synthetic oligonucleotide
  Target: ANGPTL4; (-) strand; PAM type: NAAAAC; PAM sequence: AAAAAC
ccggccttatttttaagttt

SEQ ID NO: 5318 - DNA, 20 bp, Artificial Sequence
  Description of Artificial Sequence: Synthetic oligonucleotide
  Target: ANGPTL4; (-) strand; PAM type: NAAAAC; PAM sequence: GAAAAC
agaaagagaaaaaaaagaaa

SEQ ID NO: 5319 - DNA, 20 bp, Artificial Sequence
  Description of Artificial Sequence: Synthetic oligonucleotide
  Target: ANGPTL4; (-) strand; PAM type: NAAAAC; PAM sequence: TAAAAC
catggactttgttcactttt

SEQ ID NO: 5320 - DNA, 20 bp, Artificial Sequence
  Description of Artificial Sequence: Synthetic oligonucleotide
  Target: ANGPTL4; (-) strand; PAM type: NAAAAC; PAM sequence: CAAAAC
tcttttttttttttttttaa

SEQ ID NO: 5321 - DNA, 20 bp, Artificial Sequence
  Description of Artificial Sequence: Synthetic oligonucleotide
  Target: ANGPTL4; (-) strand; PAM type: NAAAAC; PAM sequence: CAAAAC
ggcatggaggggtggggtgt

SEQ ID NO: 5322 - DNA, 20 bp, Artificial Sequence
  Description of Artificial Sequence: Synthetic oligonucleotide
  Target: ANGPTL4; (+) strand; PAM type: NAAAAC; PAM sequence: TAAAAC
gaaaaaaaaaaaaaaataca

SEQ ID NO: 5323 - DNA, 20 bp, Artificial Sequence
  Description of Artificial Sequence: Synthetic oligonucleotide
  Target: ANGPTL4; (+) strand; PAM type: NAAAAC; PAM sequence: AAAAAC
ccactccgcacccaacttat

SEQ ID NO: 5324 - DNA, 20 bp, Artificial Sequence
  Description of Artificial Sequence: Synthetic oligonucleotide
  Target: ANGPTL4; (+) strand; PAM type: NAAAAC; PAM sequence: AAAAAC
ataaaataaatataaaatta

SEQ ID NO: 5325 - DNA, 20 bp, Artificial Sequence
  Description of Artificial Sequence: Synthetic oligonucleotide
  Target: ANGPTL4; (+) strand; PAM type: NAAAAC; PAM sequence: GAAAAC
tcccagctacacaggaggct

SEQ ID NO: 5326 - DNA, 20 bp, Artificial Sequence
  Description of Artificial Sequence: Synthetic oligonucleotide
  Target: ANGPTL4; (+) strand; PAM type: NAAAAC; PAM sequence: AAAAAC
cccgtctctacaaataatgc

SEQ ID NO: 5327 - DNA, 20 bp, Artificial Sequence
  Description of Artificial Sequence: Synthetic oligonucleotide
  Target: ANGPTL4; (+) strand; PAM type: NAAAAC; PAM sequence: AAAAAC
cagagcgagactccgtatca

SEQ ID NO: 5328 - DNA, 20 bp, Artificial Sequence
  Description of Artificial Sequence: Synthetic oligonucleotide
  Target: ANGPTL4; (+) strand; PAM type: NAAAAC; PAM sequence: CAAAAC
cgagactccgtatcaaaaaa

SEQ ID NO: 5329 - DNA, 20 bp, Artificial Sequence
  Description of Artificial Sequence: Synthetic oligonucleotide
  Target: ANGPTL4; (+) strand; PAM type: NAAAAC; PAM sequence: GAAAAC
ctgttgtctttctttaaatt

SEQ ID NO: 5330 - DNA, 20 bp, Artificial Sequence
  Description of Artificial Sequence: Synthetic oligonucleotide
  Target: ANGPTL4; (+) strand; PAM type: NAAAAC; PAM sequence: CAAAAC
gtctttctttaaattgaaaa

SEQ ID NO: 5331 - DNA, 20 bp, Artificial Sequence
  Description of Artificial Sequence: Synthetic oligonucleotide
  Target: ANGPTL4; (+) strand; PAM type: NAAAAC; PAM sequence: CAAAAC
tctttaaattgaaaacaaaa

SEQ ID NO: 5332 - DNA, 20 bp, Artificial Sequence
  Description of Artificial Sequence: Synthetic oligonucleotide
  Target: ANGPTL4; (+) strand; PAM type: NAAAAC; PAM sequence: CAAAAC
ctccaacctgggcaacacaa

SEQ ID NO: 5333 - DNA, 20 bp, Artificial Sequence
  Description of Artificial Sequence: Synthetic oligonucleotide
  Target: ANGPTL4; (+) strand; PAM type: NAAAAC; PAM sequence: AAAAAC
acaaaacctcgtttctaaaa

SEQ ID NO: 5334 - DNA, 20 bp, Artificial Sequence
  Description of Artificial Sequence: Synthetic oligonucleotide
  Target: ANGPTL4; (+) strand; PAM type: NAAAAC; PAM sequence: AAAAAC
ctgtctcaattaaaaataca

SEQ ID NO: 5335 - DNA, 20 bp, Artificial Sequence
  Description of Artificial Sequence: Synthetic oligonucleotide
  Target: ANGPTL4; (+) strand; PAM type: NAAAAC; PAM sequence: CAAAAC
atcacctgaggtcaggagtt

SEQ ID NO: 5336 - DNA, 20 bp, Artificial Sequence
  Description of Artificial Sequence: Synthetic oligonucleotide
  Target: ANGPTL4; (+) strand; PAM type: NAAAAC; PAM sequence: AAAAAC
cccctcactactaaaaatac

SEQ ID NO: 5337 - DNA, 20 bp, Artificial Sequence
  Description of Artificial Sequence: Synthetic oligonucleotide
  Target: ANGPTL4; (+) strand; PAM type: NAAAAC; PAM sequence: CAAAAC
aacagagcaagactccatct

SEQ ID NO: 5338 - DNA, 20 bp, Artificial Sequence
  Description of Artificial Sequence: Synthetic oligonucleotide
  Target: ANGPTL4; (+) strand; PAM type: NAAAAC; PAM sequence: CAAAAC
cgcaccaatcagcgccctgt

SEQ ID NO: 5339 - DNA, 20 bp, Artificial Sequence
  Description of Artificial Sequence: Synthetic oligonucleotide
  Target: ANGPTL4; (+) strand; PAM type: NAAAAC; PAM sequence: GAAAAC
atctaggacatgtatttgag

SEQ ID NO: 5340 - DNA, 20 bp, Artificial Sequence
  Description of Artificial Sequence: Synthetic oligonucleotide
  Target: ANGPTL4; (+) strand; PAM type: NAAAAC; PAM sequence: AAAAAC
aacgacagaaaaaaaaaaaa

SEQ ID NO: 5341 - DNA, 20 bp, Artificial Sequence
  Description of Artificial Sequence: Synthetic oligonucleotide
  Target: ANGPTL4; (+) strand; PAM type: NAAAAC; PAM sequence: AAAAAC
aagaaaaaaagaaagaaaag

SEQ ID NO: 5342 - DNA, 20 bp, Artificial Sequence
  Description of Artificial Sequence: Synthetic oligonucleotide
  Target: ANGPTL4; (-) strand; PAM type: NNAGAAW; PAM sequence: ACAGAAA
accccatctctactaaaaat

SEQ ID NO: 5343 - DNA, 20 bp, Artificial Sequence
  Description of Artificial Sequence: Synthetic oligonucleotide
  Target: ANGPTL4; (-) strand; PAM type: NNAGAAW; PAM sequence: GGAGAAT
ttactcgggaggctggggca

SEQ ID NO: 5344 - DNA, 20 bp, Artificial Sequence
  Description of Artificial Sequence: Synthetic oligonucleotide
  Target: ANGPTL4; (-) strand; PAM type: NNAGAAW; PAM sequence: TTAGAAT
gcctggccaaaaactgacct

SEQ ID NO: 5345 - DNA, 20 bp, Artificial Sequence
  Description of Artificial Sequence: Synthetic oligonucleotide
  Target: ANGPTL4; (-) strand; PAM type: NNAGAAW; PAM sequence: CCAGAAT
cacagctatcccaggctatc

SEQ ID NO: 5346 - DNA, 20 bp, Artificial Sequence
  Description of Artificial Sequence: Synthetic oligonucleotide
  Target: ANGPTL4; (-) strand; PAM type: NNAGAAW; PAM sequence: ACAGAAA
gtcaggaaggggaggctggc

SEQ ID NO: 5347 - DNA, 20 bp, Artificial Sequence
  Description of Artificial Sequence: Synthetic oligonucleotide
  Target: ANGPTL4; (-) strand; PAM type: NNAGAAW; PAM sequence: GGAGAAT
ctactcgggagactgtgtca

SEQ ID NO: 5348 - DNA, 20 bp, Artificial Sequence
  Description of Artificial Sequence: Synthetic oligonucleotide
  Target: ANGPTL4; (-) strand; PAM type: NNAGAAW; PAM sequence: AAAGAAA
agtgagatcctgtctctaaa

SEQ ID NO: 5349 - DNA, 20 bp, Artificial Sequence
  Description of Artificial Sequence: Synthetic oligonucleotide
  Target: ANGPTL4; (-) strand; PAM type: NNAGAAW; PAM sequence: ACAGAAA
ataaagcaggaacttagaga

SEQ ID NO: 5350 - DNA, 20 bp, Artificial Sequence
  Description of Artificial Sequence: Synthetic oligonucleotide
  Target: ANGPTL4; (-) strand; PAM type: NNAGAAW; PAM sequence: AAAGAAA
agaaggaaagaaaggaagga

SEQ ID NO: 5351 - DNA, 20 bp, Artificial Sequence
  Description of Artificial Sequence: Synthetic oligonucleotide
  Target: ANGPTL4; (-) strand; PAM type: NNAGAAW; PAM sequence: AAAGAAA
agggaaagaaaggaagaagg

SEQ ID NO: 5352 - DNA, 20 bp, Artificial Sequence
  Description of Artificial Sequence: Synthetic oligonucleotide
  Target: ANGPTL4; (-) strand; PAM type: NNAGAAW; PAM sequence: AAAGAAA
gaggaaggaaggaaggaggg

SEQ ID NO: 5353 - DNA, 20 bp, Artificial Sequence
  Description of Artificial Sequence: Synthetic oligonucleotide
  Target: ANGPTL4; (-) strand; PAM type: NNAGAAW; PAM sequence: AGAGAAA
aagagagagagaaaggaaag

SEQ ID NO: 5354 - DNA, 20 bp, Artificial Sequence
  Description of Artificial Sequence: Synthetic oligonucleotide
  Target: ANGPTL4; (-) strand; PAM type: NNAGAAW; PAM sequence: AGAGAAA
gagagagagagaaaagagag

SEQ ID NO: 5355 - DNA, 20 bp, Artificial Sequence
  Description of Artificial Sequence: Synthetic oligonucleotide
  Target: ANGPTL4; (-) strand; PAM type: NNAGAAW; PAM sequence: AGAGAAA
gagggaagaaggagagagag

SEQ ID NO: 5356 - DNA, 20 bp, Artificial Sequence
  Description of Artificial Sequence: Synthetic oligonucleotide
  Target: ANGPTL4; (-) strand; PAM type: NNAGAAW; PAM sequence: AAAGAAA
agaaggaaggaaggacggaa

SEQ ID NO: 5357 - DNA, 20 bp, Artificial Sequence
  Description of Artificial Sequence: Synthetic oligonucleotide
  Target: ANGPTL4; (-) strand; PAM type: NNAGAAW; PAM sequence: AGAGAAA
aaagaaaagaaagaaaagag

SEQ ID NO: 5358 - DNA, 20 bp, Artificial Sequence
  Description of Artificial Sequence: Synthetic oligonucleotide
  Target: ANGPTL4; (-) strand; PAM type: NNAGAAW; PAM sequence: AAAGAAA
aagagaaaagaaaagaaaag

SEQ ID NO: 5359 - DNA, 20 bp, Artificial Sequence
  Description of Artificial Sequence: Synthetic oligonucleotide
  Target: ANGPTL4; (-) strand; PAM type: NNAGAAW; PAM sequence: AAAGAAA
aaagaagagaaaagaaaaga

SEQ ID NO: 5360 - DNA, 20 bp, Artificial Sequence
  Description of Artificial Sequence: Synthetic oligonucleotide
  Target: ANGPTL4; (-) strand; PAM type: NNAGAAW; PAM sequence: AAAGAAA
aaatgaaagaagagaaaaga

SEQ ID NO: 5361 - DNA, 20 bp, Artificial Sequence
  Description of Artificial Sequence: Synthetic oligonucleotide
  Target: ANGPTL4; (-) strand; PAM type: NNAGAAW; PAM sequence: AAAGAAA
tctcaaaatgaaagaagaga

SEQ ID NO: 5362 - DNA, 20 bp, Artificial Sequence
  Description of Artificial Sequence: Synthetic oligonucleotide
  Target: ANGPTL4; (-) strand; PAM type: NNAGAAW; PAM sequence: AGAGAAA
gtacgtctcaaaatgaaaga

SEQ ID NO: 5363 - DNA, 20 bp, Artificial Sequence
  Description of Artificial Sequence: Synthetic oligonucleotide
  Target: ANGPTL4; (-) strand; PAM type: NNAGAAW; PAM sequence: GTAGAAT
ctactcgggaggctgaggca

SEQ ID NO: 5364 - DNA, 20 bp, Artificial Sequence
  Description of Artificial Sequence: Synthetic oligonucleotide
  Target: ANGPTL4; (-) strand; PAM type: NNAGAAW; PAM sequence: AAAGAAT
ttggttgcagaagccgctgg

SEQ ID NO: 5365 - DNA, 20 bp, Artificial Sequence
  Description of Artificial Sequence: Synthetic oligonucleotide
  Target: ANGPTL4; (-) strand; PAM type: NNAGAAW; PAM sequence: AGAGAAA
cagggaaggatgaggaccac

SEQ ID NO: 5366 - DNA, 20 bp, Artificial Sequence
  Description of Artificial Sequence: Synthetic oligonucleotide
  Target: ANGPTL4; (-) strand; PAM type: NNAGAAW; PAM sequence: AAAGAAA
gagaggaggcagggttgagg

SEQ ID NO: 5367 - DNA, 20 bp, Artificial Sequence
  Description of Artificial Sequence: Synthetic oligonucleotide
  Target: ANGPTL4; (-) strand; PAM type: NNAGAAW; PAM sequence: GGAGAAT
ctacttgagaggctgaggca

SEQ ID NO: 5368 - DNA, 20 bp, Artificial Sequence
  Description of Artificial Sequence: Synthetic oligonucleotide
  Target: ANGPTL4; (-) strand; PAM type: NNAGAAW; PAM sequence: GGAGAAT
ctccttaggaggcagaggca

SEQ ID NO: 5369 - DNA, 20 bp, Artificial Sequence
  Description of Artificial Sequence: Synthetic oligonucleotide
  Target: ANGPTL4; (-) strand; PAM type: NNAGAAW; PAM sequence: AAAGAAA
ttttgttttgttttcaattt

SEQ ID NO: 5370 - DNA, 20 bp, Artificial Sequence
  Description of Artificial Sequence: Synthetic oligonucleotide
  Target: ANGPTL4; (-) strand; PAM type: NNAGAAW; PAM sequence: GGAGAAT
ctactggggaggctgacgct

SEQ ID NO: 5371 - DNA, 20 bp, Artificial Sequence
  Description of Artificial Sequence: Synthetic oligonucleotide
  Target: ANGPTL4; (-) strand; PAM type: NNAGAAW; PAM sequence: AAAGAAA
ccagacaagggctgcatttt

SEQ ID NO: 5372 - DNA, 20 bp, Artificial Sequence
  Description of Artificial Sequence: Synthetic oligonucleotide
  Target: ANGPTL4; (-) strand; PAM type: NNAGAAW; PAM sequence: TTAGAAA
tgctcagcctttgttttttt

SEQ ID NO: 5373 - DNA, 20 bp, Artificial Sequence
  Description of Artificial Sequence: Synthetic oligonucleotide
  Target: ANGPTL4; (-) strand; PAM type: NNAGAAW; PAM sequence: CCAGAAA
actgtccagcctccatctgc

SEQ ID NO: 5374 - DNA, 20 bp, Artificial Sequence
  Description of Artificial Sequence: Synthetic oligonucleotide
  Target: ANGPTL4; (-) strand; PAM type: NNAGAAW; PAM sequence: CTAGAAA
ctcccctgcctctgtcccca

SEQ ID NO: 5375 - DNA, 20 bp, Artificial Sequence
  Description of Artificial Sequence: Synthetic oligonucleotide
  Target: ANGPTL4; (-) strand; PAM type: NNAGAAW; PAM sequence: GCAGAAA
gttgaaggcaggacagagca

SEQ ID NO: 5376 - DNA, 20 bp, Artificial Sequence
  Description of Artificial Sequence: Synthetic oligonucleotide
  Target: ANGPTL4; (-) strand; PAM type: NNAGAAW; PAM sequence: GGAGAAT
ctactcgggaggctgaggca

SEQ ID NO: 5377 - DNA, 20 bp, Artificial Sequence
  Description of Artificial Sequence: Synthetic oligonucleotide
  Target: ANGPTL4; (-) strand; PAM type: NNAGAAW; PAM sequence: GGAGAAT
ctactcaggaggctgaggca

SEQ ID NO: 5378 - DNA, 20 bp, Artificial Sequence
  Description of Artificial Sequence: Synthetic oligonucleotide
  Target: ANGPTL4; (-) strand; PAM type: NNAGAAW; PAM sequence: AAAGAAT
tttcaaaaaaaaaaaaaaaa

SEQ ID NO: 5379 - DNA, 20 bp, Artificial Sequence
  Description of Artificial Sequence: Synthetic oligonucleotide
  Target: ANGPTL4; (-) strand; PAM type: NNAGAAW; PAM sequence: TGAGAAT
gcctaatttttttttttttt

SEQ ID NO: 5380 - DNA, 20 bp, Artificial Sequence
  Description of Artificial Sequence: Synthetic oligonucleotide
  Target: ANGPTL4; (-) strand; PAM type: NNAGAAW; PAM sequence: TCAGAAA
cgcatgcagcccccctgcac

SEQ ID NO: 5381 - DNA, 20 bp, Artificial Sequence
  Description of Artificial Sequence: Synthetic oligonucleotide
  Target: ANGPTL4; (-) strand; PAM type: NNAGAAW; PAM sequence: AAAGAAA
taaagaaagagaaaaaaaag

SEQ ID NO: 5382 - DNA, 20 bp, Artificial Sequence
  Description of Artificial Sequence: Synthetic oligonucleotide
  Target: ANGPTL4; (-) strand; PAM type: NNAGAAW; PAM sequence: AAAGAAA
gaactaaagaaagagaaaaa

SEQ ID NO: 5383 - DNA, 20 bp, Artificial Sequence
  Description of Artificial Sequence: Synthetic oligonucleotide
  Target: ANGPTL4; (-) strand; PAM type: NNAGAAW; PAM sequence: AGAGAAA
tagatctgtgaactaaagaa

SEQ ID NO: 5384 - DNA, 20 bp, Artificial Sequence
  Description of Artificial Sequence: Synthetic oligonucleotide
  Target: ANGPTL4; (-) strand; PAM type: NNAGAAW; PAM sequence: AAAGAAA
acttactagatctgtgaact

SEQ ID NO: 5385 - DNA, 20 bp, Artificial Sequence
  Description of Artificial Sequence: Synthetic oligonucleotide
  Target: ANGPTL4; (-) strand; PAM type: NNAGAAW; PAM sequence: ATAGAAT
gtttgagaccagcctggaca

SEQ ID NO: 5386 - DNA, 20 bp, Artificial Sequence
  Description of Artificial Sequence: Synthetic oligonucleotide
  Target: ANGPTL4; (-) strand; PAM type: NNAGAAW; PAM sequence: GTAGAAT
ttttttaacaaaacacagat

SEQ ID NO: 5387 - DNA, 20 bp, Artificial Sequence
  Description of Artificial Sequence: Synthetic oligonucleotide
  Target: ANGPTL4; (-) strand; PAM type: NNAGAAW; PAM sequence: GTAGAAA
agctaatttttgtattttta

SEQ ID NO: 5388 - DNA, 20 bp, Artificial Sequence
  Description of Artificial Sequence: Synthetic oligonucleotide
  Target: ANGPTL4; (-) strand; PAM type: NNAGAAW; PAM sequence: CCAGAAA
cagctccggccttggccagc

SEQ ID NO: 5389 - DNA, 20 bp, Artificial Sequence
  Description of Artificial Sequence: Synthetic oligonucleotide
  Target: ANGPTL4; (-) strand; PAM type: NNAGAAW; PAM sequence: TGAGAAA
ggaaggcagctaaggcctgg

SEQ ID NO: 5390 - DNA, 20 bp, Artificial Sequence
  Description of Artificial Sequence: Synthetic oligonucleotide
  Target: ANGPTL4; (-) strand; PAM type: NNAGAAW; PAM sequence: CAAGAAT
gttcttggtctcactgactt

SEQ ID NO: 5391 - DNA, 20 bp, Artificial Sequence
  Description of Artificial Sequence: Synthetic oligonucleotide
  Target: ANGPTL4; (-) strand; PAM type: NNAGAAW; PAM sequence: ACAGAAT
tttatttatttattttttag

SEQ ID NO: 5392 - DNA, 20 bp, Artificial Sequence
  Description of Artificial Sequence: Synthetic oligonucleotide
  Target: ANGPTL4; (-) strand; PAM type: NNAGAAW; PAM sequence: TCAGAAA
aaattaacagcagctggggt

SEQ ID NO: 5393 - DNA, 20 bp, Artificial Sequence
  Description of Artificial Sequence: Synthetic oligonucleotide
  Target: ANGPTL4; (-) strand; PAM type: NNAGAAW; PAM sequence: GGAGAAT
ctactcgggaggccgaggca

SEQ ID NO: 5394 - DNA, 20 bp, Artificial Sequence
  Description of Artificial Sequence: Synthetic oligonucleotide
  Target: ANGPTL4; (-) strand; PAM type: NNAGAAW; PAM sequence: ACAGAAA
gtttacaatcctttagctag

SEQ ID NO: 5395 - DNA, 20 bp, Artificial Sequence
  Description of Artificial Sequence: Synthetic oligonucleotide
  Target: ANGPTL4; (+) strand; PAM type: NNAGAAW; PAM sequence: GGAGAAT
ctactcgggaggctgaggca

SEQ ID NO: 5396 - DNA, 20 bp, Artificial Sequence
  Description of Artificial Sequence: Synthetic oligonucleotide
  Target: ANGPTL4; (+) strand; PAM type: NNAGAAW; PAM sequence: AAAGAAA
gcaagactctgtctcaaaaa

SEQ ID NO: 5397 - DNA, 20 bp, Artificial Sequence
  Description of Artificial Sequence: Synthetic oligonucleotide
  Target: ANGPTL4; (+) strand; PAM type: NNAGAAW; PAM sequence: AAAGAAA
tctcaaaaaaaagaaaaaaa

SEQ ID NO: 5398 - DNA, 20 bp, Artificial Sequence
  Description of Artificial Sequence: Synthetic oligonucleotide
  Target: ANGPTL4; (+) strand; PAM type: NNAGAAW; PAM sequence: AAAGAAA
aaaaaaagaaaaaaaaaaga

SEQ ID NO: 5399 - DNA, 20 bp, Artificial Sequence
  Description of Artificial Sequence: Synthetic oligonucleotide
  Target: ANGPTL4; (+) strand; PAM type: NNAGAAW; PAM sequence: AAAGAAA
aagaaaaaaaaaagaaaaga

SEQ ID NO: 5400 - DNA, 20 bp, Artificial Sequence
  Description of Artificial Sequence: Synthetic oligonucleotide
  Target: ANGPTL4; (+) strand; PAM type: NNAGAAW; PAM sequence: AAAGAAA
aaaagaaaagaaaagaaaaa

SEQ ID NO: 5401 - DNA, 20 bp, Artificial Sequence
  Description of Artificial Sequence: Synthetic oligonucleotide
  Target: ANGPTL4; (+) strand; PAM type: NNAGAAW; PAM sequence: AAAGAAA
aaagaaaagaaaaaaaagaa

SEQ ID NO: 5402 - DNA, 20 bp, Artificial Sequence
  Description of Artificial Sequence: Synthetic oligonucleotide
  Target: ANGPTL4; (+) strand; PAM type: NNAGAAW; PAM sequence: AAAGAAA
gaaaaaaaagaaaaagaaaa

SEQ ID NO: 5403 - DNA, 20 bp, Artificial Sequence
  Description of Artificial Sequence: Synthetic oligonucleotide
  Target: ANGPTL4; (+) strand; PAM type: NNAGAAW; PAM sequence: ACAGAAA
atcctgtctctacaaaatct

SEQ ID NO: 5404 - DNA, 20 bp, Artificial Sequence
  Description of Artificial Sequence: Synthetic oligonucleotide
  Target: ANGPTL4; (+) strand; PAM type: NNAGAAW; PAM sequence: TCAGAAA
ctgggtgagtgagacccatc

SEQ ID NO: 5405 - DNA, 20 bp, Artificial Sequence
  Description of Artificial Sequence: Synthetic oligonucleotide
  Target: ANGPTL4; (+) strand; PAM type: NNAGAAW; PAM sequence: CTAGAAT
gcgaaaccccaccccctcta

SEQ ID NO: 5406 - DNA, 20 bp, Artificial Sequence
  Description of Artificial Sequence: Synthetic oligonucleotide
  Target: ANGPTL4; (+) strand; PAM type: NNAGAAW; PAM sequence: GGAGAAT
ctactcaggaggctgaggca

SEQ ID NO: 5407 - DNA, 20 bp, Artificial Sequence
  Description of Artificial Sequence: Synthetic oligonucleotide
  Target: ANGPTL4; (+) strand; PAM type: NNAGAAW; PAM sequence: GGAGAAT
ctactcgggaggctgaggct

SEQ ID NO: 5408 - DNA, 20 bp, Artificial Sequence
  Description of Artificial Sequence: Synthetic oligonucleotide
  Target: ANGPTL4; (+) strand; PAM type: NNAGAAW; PAM sequence: GGAGAAT
ctactcgggaggctgaggca

SEQ ID NO: 5409 - DNA, 20 bp, Artificial Sequence
  Description of Artificial Sequence: Synthetic oligonucleotide
  Target: ANGPTL4; (+) strand; PAM type: NNAGAAW; PAM sequence: TTAGAAT
taaaaaataaagagcagttt

SEQ ID NO: 5410 - DNA, 20 bp, Artificial Sequence
  Description of Artificial Sequence: Synthetic oligonucleotide
  Target: ANGPTL4; (+) strand; PAM type: NNAGAAW; PAM sequence: AGAGAAT
ggtgtgcagtttcagattcc

SEQ ID NO: 5411 - DNA, 20 bp, Artificial Sequence
  Description of Artificial Sequence: Synthetic oligonucleotide
  Target: ANGPTL4; (+) strand; PAM type: NNAGAAW; PAM sequence: TCAGAAT
actctatccctaccccaggc

SEQ ID NO: 5412 - DNA, 20 bp, Artificial Sequence
  Description of Artificial Sequence: Synthetic oligonucleotide
  Target: ANGPTL4; (+) strand; PAM type: NNAGAAW; PAM sequence: AGAGAAA
agtgaatgaatgaatgaggg

SEQ ID NO: 5413 - DNA, 20 bp, Artificial Sequence
  Description of Artificial Sequence: Synthetic oligonucleotide
  Target: ANGPTL4; (+) strand; PAM type: NNAGAAW; PAM sequence: GGAGAAA
ctcataatttcgggctcagg

SEQ ID NO: 5414 - DNA, 20 bp, Artificial Sequence
  Description of Artificial Sequence: Synthetic oligonucleotide
  Target: ANGPTL4; (+) strand; PAM type: NNAGAAW; PAM sequence: AAAGAAT
tcaggggagaaatggaagtc

SEQ ID NO: 5415 - DNA, 20 bp, Artificial Sequence
  Description of Artificial Sequence: Synthetic oligonucleotide
  Target: ANGPTL4; (+) strand; PAM type: NNAGAAW; PAM sequence: CCAGAAA
acgggaaggaacatgcgagc

SEQ ID NO: 5416 - DNA, 20 bp, Artificial Sequence
  Description of Artificial Sequence: Synthetic oligonucleotide
  Target: ANGPTL4; (+) strand; PAM type: NNAGAAW; PAM sequence: GGAGAAA
gagactagcctggccaacat

SEQ ID NO: 5417 - DNA, 20 bp, Artificial Sequence
  Description of Artificial Sequence: Synthetic oligonucleotide
  Target: ANGPTL4; (+) strand; PAM type: NNAGAAW; PAM sequence: GGAGAAT
ctacttgggaggctgaggca

SEQ ID NO: 5418 - DNA, 20 bp, Artificial Sequence
  Description of Artificial Sequence: Synthetic oligonucleotide
  Target: ANGPTL4; (+) strand; PAM type: NNAGAAW; PAM sequence: CAAGAAT
ctacttgggaggctgagaca

SEQ ID NO: 5419 - DNA, 20 bp, Artificial Sequence
  Description of Artificial Sequence: Synthetic oligonucleotide
  Target: ANGPTL4; (+) strand; PAM type: NNAGAAW; PAM sequence: AAAGAAA
gaccccgtcattgggaaaaa

SEQ ID NO: 5420 - DNA, 20 bp, Artificial Sequence
  Description of Artificial Sequence: Synthetic oligonucleotide
  Target: ANGPTL4; (+) strand; PAM type: NNAGAAW; PAM sequence: AAAGAAA
tcattgggaaaaaaaagaaa

SEQ ID NO: 5421 - DNA, 20 bp, Artificial Sequence
  Description of Artificial Sequence: Synthetic oligonucleotide
  Target: ANGPTL4; (+) strand; PAM type: NNAGAAW; PAM sequence: GGAGAAA
caggtaaccctaggatcaag

SEQ ID NO: 5422 - DNA, 20 bp, Artificial Sequence
  Description of Artificial Sequence: Synthetic oligonucleotide
  Target: ANGPTL4; (+) strand; PAM type: NNAGAAW; PAM sequence: GAAGAAA
tgaggtggccaagcctgccc

SEQ ID NO: 5423 - DNA, 20 bp, Artificial Sequence
  Description of Artificial Sequence: Synthetic oligonucleotide
  Target: ANGPTL4; (+) strand; PAM type: NNAGAAW; PAM sequence: GGAGAAA
tcactgattggaacagaggt

SEQ ID NO: 5424 - DNA, 20 bp, Artificial Sequence
  Description of Artificial Sequence: Synthetic oligonucleotide
  Target: ANGPTL4; (+) strand; PAM type: NNAGAAW; PAM sequence: GTAGAAA
ctgcaggggtgctggagaag

SEQ ID NO: 5425 - DNA, 20 bp, Artificial Sequence
  Description of Artificial Sequence: Synthetic oligonucleotide
  Target: ANGPTL4; (+) strand; PAM type: NNAGAAW; PAM sequence: CCAGAAA
gggaacccccagctcccaga

SEQ ID NO: 5426 - DNA, 20 bp, Artificial Sequence
  Description of Artificial Sequence: Synthetic oligonucleotide
  Target: ANGPTL4; (+) strand; PAM type: NNAGAAW; PAM sequence: GCAGAAA
ccgccggccccctccccacc

SEQ ID NO: 5427 - DNA, 20 bp, Artificial Sequence
  Description of Artificial Sequence: Synthetic oligonucleotide
  Target: ANGPTL4; (+) strand; PAM type: NNAGAAW; PAM sequence: GGAGAAA
tggctcaggcccgccaagta

SEQ ID NO: 5428 - DNA, 20 bp, Artificial Sequence
  Description of Artificial Sequence: Synthetic oligonucleotide
  Target: ANGPTL4; (+) strand; PAM type: NNAGAAW; PAM sequence: GCAGAAT
cagctgctccggaggctgcg

SEQ ID NO: 5429 - DNA, 20 bp, Artificial Sequence
  Description of Artificial Sequence: Synthetic oligonucleotide
  Target: ANGPTL4; (+) strand; PAM type: NNAGAAW; PAM sequence: GAAGAAA
ggtgtgtggtacaagggtgg

SEQ ID NO: 5430 - DNA, 20 bp, Artificial Sequence
  Description of Artificial Sequence: Synthetic oligonucleotide
  Target: ANGPTL4; (+) strand; PAM type: NNAGAAW; PAM sequence: GGAGAAT
ctactcaggtggctgaggca

SEQ ID NO: 5431 - DNA, 20 bp, Artificial Sequence
  Description of Artificial Sequence: Synthetic oligonucleotide
  Target: ANGPTL4; (+) strand; PAM type: NNAGAAW; PAM sequence: AGAGAAA
ccccatcaaaaaaataaaaa

SEQ ID NO: 5432 - DNA, 20 bp, Artificial Sequence
  Description of Artificial Sequence: Synthetic oligonucleotide
  Target: ANGPTL4; (+) strand; PAM type: NNAGAAW; PAM sequence: CAAGAAT
ctgcttgtggggctgaagca

SEQ ID NO: 5433 - DNA, 20 bp, Artificial Sequence
  Description of Artificial Sequence: Synthetic oligonucleotide
  Target: ANGPTL4; (+) strand; PAM type: NNAGAAW; PAM sequence: AAAGAAA
ctaaaaaaaaaaaaaaaaaa

SEQ ID NO: 5434 - DNA, 20 bp, Artificial Sequence
  Description of Artificial Sequence: Synthetic oligonucleotide
  Target: ANGPTL4; (+) strand; PAM type: NNAGAAW; PAM sequence: AAAGAAA
agagtgagacccctgcctca

SEQ ID NO: 5435 - DNA, 20 bp, Artificial Sequence
  Description of Artificial Sequence: Synthetic oligonucleotide
  Target: ANGPTL4; (+) strand; PAM type: NNAGAAW; PAM sequence: AAAGAAA
agacccctgcctcaaaagaa

SEQ ID NO: 5436 - DNA, 20 bp, Artificial Sequence
  Description of Artificial Sequence: Synthetic oligonucleotide
  Target: ANGPTL4; (+) strand; PAM type: NNAGAAW; PAM sequence: CAAGAAT
ctacttgggaggcccaggta

SEQ ID NO: 5437 - DNA, 20 bp, Artificial Sequence
  Description of Artificial Sequence: Synthetic oligonucleotide
  Target: ANGPTL4; (+) strand; PAM type: NNAGAAW; PAM sequence: TGAGAAT
ctactcaggaggctgaggca

SEQ ID NO: 5438 - DNA, 20 bp, Artificial Sequence
  Description of Artificial Sequence: Synthetic oligonucleotide
  Target: ANGPTL4; (+) strand; PAM type: NNAGAAW; PAM sequence: GGAGAAT
ctactcgggaggctgaggga

SEQ ID NO: 5439 - DNA, 20 bp, Artificial Sequence
  Description of Artificial Sequence: Synthetic oligonucleotide
  Target: ANGPTL4; (+) strand; PAM type: NNAGAAW; PAM sequence: GAAGAAT
ctactctagaggctgacgca

SEQ ID NO: 5440 - DNA, 20 bp, Artificial Sequence
  Description of Artificial Sequence: Synthetic oligonucleotide
  Target: ANGPTL4; (+) strand; PAM type: NNAGAAW; PAM sequence: GGAGAAT
ctactcaggaggctgaggca

SEQ ID NO: 5441 - DNA, 20 bp, Artificial Sequence
  Description of Artificial Sequence: Synthetic oligonucleotide
  Target: ANGPTL4; (+) strand; PAM type: NNAGAAW; PAM sequence: AAAGAAT
aaaaaaaaaaaaaaaaaaaa

SEQ ID NO: 5442 - DNA, 20 bp, Artificial Sequence
  Description of Artificial Sequence: Synthetic oligonucleotide
  Target: ANGPTL4; (+) strand; PAM type: NNAGAAW; PAM sequence: GGAGAAT
ctactcaggaggctgaggcc

SEQ ID NO: 5443 - DNA, 20 bp, Artificial Sequence
  Description of Artificial Sequence: Synthetic oligonucleotide
  Target: ANGPTL4; (+) strand; PAM type: NNAGAAW; PAM sequence: AGAGAAT
gatgtgggtggggccagata

SEQ ID NO: 5444 - DNA, 20 bp, Artificial Sequence
  Description of Artificial Sequence: Synthetic oligonucleotide
  Target: ANGPTL4; (+) strand; PAM type: NNAGAAW; PAM sequence: GAAGAAA
aaccatgaacccaccagaag

SEQ ID NO: 5445 - DNA, 20 bp, Artificial Sequence
  Description of Artificial Sequence: Synthetic oligonucleotide
  Target: ANGPTL4; (+) strand; PAM type: NNAGAAW; PAM sequence: GAAGAAA
ctgaacacacctgaacatca

SEQ ID NO: 5446 - DNA, 20 bp, Artificial Sequence
  Description of Artificial Sequence: Synthetic oligonucleotide
  Target: ANGPTL4; (+) strand; PAM type: NNAGAAW; PAM sequence: GAAGAAA
tggtgggggttcttgcgcta

SEQ ID NO: 5447 - DNA, 20 bp, Artificial Sequence
  Description of Artificial Sequence: Synthetic oligonucleotide
  Target: ANGPTL4; (+) strand; PAM type: NNAGAAW; PAM sequence: ACAGAAA
cccctccaacctggggaacg

SEQ ID NO: 5448 - DNA, 20 bp, Artificial Sequence
  Description of Artificial Sequence: Synthetic oligonucleotide
  Target: ANGPTL4; (+) strand; PAM type: NNAGAAW; PAM sequence: GGAGAAT
ctattcgggaggctaaggca

SEQ ID NO: 5449 - DNA, 20 bp, Artificial Sequence
  Description of Artificial Sequence: Synthetic oligonucleotide
  Target: ANGPTL4; (+) strand; PAM type: NNAGAAW; PAM sequence: AAAGAAA
gagcaagactctgtctcaaa

SEQ ID NO: 5450 - DNA, 20 bp, Artificial Sequence
  Description of Artificial Sequence: Synthetic oligonucleotide
  Target: ANGPTL4; (+) strand; PAM type: NNAGAAW; PAM sequence: AAAGAAA
aagactctgtctcaaaaaag

SEQ ID NO: 5451 - DNA, 20 bp, Artificial Sequence
  Description of Artificial Sequence: Synthetic oligonucleotide
  Target: ANGPTL4; (+) strand; PAM type: NNAGAAW; PAM sequence: AAAGAAA
gtctcaaaaaagaaagaaaa

SEQ ID NO: 5452 - DNA, 20 bp, Artificial Sequence
  Description of Artificial Sequence: Synthetic oligonucleotide
  Target: ANGPTL4; (+) strand; PAM type: NNAGAAW; PAM sequence: AAAGAAA
caaaaaagaaagaaaaaaag

SEQ ID NO: 5453 - DNA, 20 bp, Artificial Sequence
  Description of Artificial Sequence: Synthetic oligonucleotide
  Target: ANGPTL4; (+) strand; PAM type: NNAGAAW; PAM sequence: AAAGAAA
aagaaagaaaaaaagaaaga

SEQ ID NO: 5454 - DNA, 20 bp, Artificial Sequence
  Description of Artificial Sequence: Synthetic oligonucleotide
  Target: ANGPTL4; (+) strand; PAM type: NNAGAAW; PAM sequence: AAAGAAT
tggtgtggggagggggtggt

SEQ ID NO: 5455 - DNA, 20 bp, Artificial Sequence
  Description of Artificial Sequence: Synthetic oligonucleotide
  Target: ANGPTL4; (+) strand; PAM type: NNAGAAW; PAM sequence: AGAGAAT
gctacttgagaggctaaggc

SEQ ID NO: 5456 - DNA, 20 bp, Artificial Sequence
  Description of Artificial Sequence: Synthetic oligonucleotide
  Target: ANGPTL4; (+) strand; PAM type: NNAGAAW; PAM sequence: AAAGAAT
cctgcctcaaaaaaaaaaaa

SEQ ID NO: 5457 - DNA, 20 bp, Artificial Sequence
  Description of Artificial Sequence: Synthetic oligonucleotide
  Target: ANGPTL4; (+) strand; PAM type: NNAGAAW; PAM sequence: AGAGAAA
aaaaaaaaaaaaaagaatca

SEQ ID NO: 5458 - DNA, 20 bp, Artificial Sequence
  Description of Artificial Sequence: Synthetic oligonucleotide
  Target: ANGPTL4; (+) strand; PAM type: NNAGAAW; PAM sequence: ACAGAAT
aaatttcagagggaggagag

SEQ ID NO: 5459 - DNA, 20 bp, Artificial Sequence
  Description of Artificial Sequence: Synthetic oligonucleotide
  Target: ANGPTL4; (+) strand; PAM type: NNAGAAW; PAM sequence: GGAGAAT
gctaatcaggtaggggactt

SEQ ID NO: 5460 - DNA, 20 bp, Artificial Sequence
  Description of Artificial Sequence: Synthetic oligonucleotide
  Target: ANGPTL4; (-) strand; PAM type: NNGRRT; PAM sequence: TTGGGT
tcgtaccattgcactccagc

SEQ ID NO: 5461 - DNA, 20 bp, Artificial Sequence
  Description of Artificial Sequence: Synthetic oligonucleotide
  Target: ANGPTL4; (-) strand; PAM type: NNGRRT; PAM sequence: GGGAGT
tgggtggatcacttgagtct

SEQ ID NO: 5462 - DNA, 20 bp, Artificial Sequence
  Description of Artificial Sequence: Synthetic oligonucleotide
  Target: ANGPTL4; (-) strand; PAM type: NNGRRT; PAM sequence: TTGAGT
ggctgaggtgggtggatcac

SEQ ID NO: 5463 - DNA, 20 bp, Artificial Sequence
  Description of Artificial Sequence: Synthetic oligonucleotide
  Target: ANGPTL4; (-) strand; PAM type: NNGRRT; PAM sequence: GTGGAT
actttgggaggctgaggtgg

SEQ ID NO: 5464 - DNA, 20 bp, Artificial Sequence
  Description of Artificial Sequence: Synthetic oligonucleotide
  Target: ANGPTL4; (-) strand; PAM type: NNGRRT; PAM sequence: GTGGGT
tagcactttgggaggctgag

SEQ ID NO: 5465 - DNA, 20 bp, Artificial Sequence
  Description of Artificial Sequence: Synthetic oligonucleotide
  Target: ANGPTL4; (-) strand; PAM type: NNGRRT; PAM sequence: GAGGGT
tcgctggaacccgggaggca

SEQ ID NO: 5466 - DNA, 20 bp, Artificial Sequence
  Description of Artificial Sequence: Synthetic oligonucleotide
  Target: ANGPTL4; (-) strand; PAM type: NNGRRT; PAM sequence: GAGAAT
tactcgggaggctggggcag

SEQ ID NO: 5467 - DNA, 20 bp, Artificial Sequence
  Description of Artificial Sequence: Synthetic oligonucleotide
  Target: ANGPTL4; (-) strand; PAM type: NNGRRT; PAM sequence: GGGAGT
gcctgtaataccagcacttt

SEQ ID NO: 5468 - DNA, 20 bp, Artificial Sequence
  Description of Artificial Sequence: Synthetic oligonucleotide
  Target: ANGPTL4; (-) strand; PAM type: NNGRRT; PAM sequence: TTGGGT
ttgagcccaggagttcaaga

SEQ ID NO: 5469 - DNA, 20 bp, Artificial Sequence
  Description of Artificial Sequence: Synthetic oligonucleotide
  Target: ANGPTL4; (-) strand; PAM type: NNGRRT; PAM sequence: AGGAGT
tgggaggactgcttgagccc

SEQ ID NO: 5470 - DNA, 20 bp, Artificial Sequence
  Description of Artificial Sequence: Synthetic oligonucleotide
  Target: ANGPTL4; (-) strand; PAM type: NNGRRT; PAM sequence: TGGGAT
acctcggcctcccaaagtgc

SEQ ID NO: 5471 - DNA, 20 bp, Artificial Sequence
  Description of Artificial Sequence: Synthetic oligonucleotide
  Target: ANGPTL4; (-) strand; PAM type: NNGRRT; PAM sequence: CGGGGT
tttttgtattttagtagaga

SEQ ID NO: 5472 - DNA, 20 bp, Artificial Sequence
  Description of Artificial Sequence: Synthetic oligonucleotide
  Target: ANGPTL4; (-) strand; PAM type: NNGRRT; PAM sequence: TGGGAT
gcctcagcctcccgagtagc

SEQ ID NO: 5473 - DNA, 20 bp, Artificial Sequence
  Description of Artificial Sequence: Synthetic oligonucleotide
  Target: ANGPTL4; (-) strand; PAM type: NNGRRT; PAM sequence: CCGAGT
gattctcctgcctcagcctc

SEQ ID NO: 5474 - DNA, 20 bp, Artificial Sequence
  Description of Artificial Sequence: Synthetic oligonucleotide
  Target: ANGPTL4; (-) strand; PAM type: NNGRRT; PAM sequence: CTGGGT
ctcactgcaacttccacctc

SEQ ID NO: 5475 - DNA, 20 bp, Artificial Sequence
  Description of Artificial Sequence: Synthetic oligonucleotide
  Target: ANGPTL4; (-) strand; PAM type: NNGRRT; PAM sequence: TGGAGT
tcttgctctgtcgccaaggc

SEQ ID NO: 5476 - DNA, 20 bp, Artificial Sequence
  Description of Artificial Sequence: Synthetic oligonucleotide
  Target: ANGPTL4; (-) strand; PAM type: NNGRRT; PAM sequence: CAGAGT
tttttttcttttttttgaga

SEQ ID NO: 5477 - DNA, 20 bp, Artificial Sequence
  Description of Artificial Sequence: Synthetic oligonucleotide
  Target: ANGPTL4; (-) strand; PAM type: NNGRRT; PAM sequence: CCGGGT
ggcgatcacggtgggcaaga

SEQ ID NO: 5478 - DNA, 20 bp, Artificial Sequence
  Description of Artificial Sequence: Synthetic oligonucleotide
  Target: ANGPTL4; (-) strand; PAM type: NNGRRT; PAM sequence: TAGAAT
cctggccaaaaactgacctt

SEQ ID NO: 5479 - DNA, 20 bp, Artificial Sequence
  Description of Artificial Sequence: Synthetic oligonucleotide
  Target: ANGPTL4; (-) strand; PAM type: NNGRRT; PAM sequence: GTGAGT
aaagtgctgggatgacaggt

SEQ ID NO: 5480 - DNA, 20 bp, Artificial Sequence
  Description of Artificial Sequence: Synthetic oligonucleotide
  Target: ANGPTL4; (-) strand; PAM type: NNGRRT; PAM sequence: TGGGAT
gcctcggcctcccaaagtgc

SEQ ID NO: 5481 - DNA, 20 bp, Artificial Sequence
  Description of Artificial Sequence: Synthetic oligonucleotide
  Target: ANGPTL4; (-) strand; PAM type: NNGRRT; PAM sequence: AGGGAT
gtcttgaactcctgagctca

SEQ ID NO: 5482 - DNA, 20 bp, Artificial Sequence
  Description of Artificial Sequence: Synthetic oligonucleotide
  Target: ANGPTL4; (-) strand; PAM type: NNGRRT; PAM sequence: CAGGAT
ttctgtagattttgtagaga

SEQ ID NO: 5483 - DNA, 20 bp, Artificial Sequence
  Description of Artificial Sequence: Synthetic oligonucleotide
  Target: ANGPTL4; (-) strand; PAM type: NNGRRT; PAM sequence: TGGAGT
tgggtctcactcacccaggc

SEQ ID NO: 5484 - DNA, 20 bp, Artificial Sequence
  Description of Artificial Sequence: Synthetic oligonucleotide
  Target: ANGPTL4; (-) strand; PAM type: NNGRRT; PAM sequence: ATGGGT
tttttttttttttttctgag

SEQ ID NO: 5485 - DNA, 20 bp, Artificial Sequence
  Description of Artificial Sequence: Synthetic oligonucleotide
  Target: ANGPTL4; (-) strand; PAM type: NNGRRT; PAM sequence: TAGGAT
acctcagcctcccaaagtgc

SEQ ID NO: 5486 - DNA, 20 bp, Artificial Sequence
  Description of Artificial Sequence: Synthetic oligonucleotide
  Target: ANGPTL4; (-) strand; PAM type: NNGRRT; PAM sequence: TGGGGT
ttgtattctagtagaggggg

SEQ ID NO: 5487 - DNA, 20 bp, Artificial Sequence
  Description of Artificial Sequence: Synthetic oligonucleotide
  Target: ANGPTL4; (-) strand; PAM type: NNGRRT; PAM sequence: GGGGGT
attttttgtattctagtaga

SEQ ID NO: 5488 - DNA, 20 bp, Artificial Sequence
  Description of Artificial Sequence: Synthetic oligonucleotide
  Target: ANGPTL4; (-) strand; PAM type: NNGRRT; PAM sequence: CTGAGT
cattctcctgcctcagcctc

SEQ ID NO: 5489 - DNA, 20 bp, Artificial Sequence
  Description of Artificial Sequence: Synthetic oligonucleotide
  Target: ANGPTL4; (-) strand; PAM type: NNGRRT; PAM sequence: TGGAGT
tcttgctctgttgcccaggc

SEQ ID NO: 5490 - DNA, 20 bp, Artificial Sequence
  Description of Artificial Sequence: Synthetic oligonucleotide
  Target: ANGPTL4; (-) strand; PAM type: NNGRRT; PAM sequence: CAGAGT
ttttttttttttttttgaga

SEQ ID NO: 5491 - DNA, 20 bp, Artificial Sequence
  Description of Artificial Sequence: Synthetic oligonucleotide
  Target: ANGPTL4; (-) strand; PAM type: NNGRRT; PAM sequence: TGGGAT
gtctcggcctcccaacgtgc

SEQ ID NO: 5492 - DNA, 20 bp, Artificial Sequence
  Description of Artificial Sequence: Synthetic oligonucleotide
  Target: ANGPTL4; (-) strand; PAM type: NNGRRT; PAM sequence: CGGGGT
ttttgtatttttagtgcaaa

SEQ ID NO: 5493 - DNA, 20 bp, Artificial Sequence
  Description of Artificial Sequence: Synthetic oligonucleotide
  Target: ANGPTL4; (-) strand; PAM type: NNGRRT; PAM sequence: GGGGAT
gcctcagcctcccgagtagc

SEQ ID NO: 5494 - DNA, 20 bp, Artificial Sequence
  Description of Artificial Sequence: Synthetic oligonucleotide
  Target: ANGPTL4; (-) strand; PAM type: NNGRRT; PAM sequence: CCGAGT
gattctccagcctcagcctc

SEQ ID NO: 5495 - DNA, 20 bp, Artificial Sequence
  Description of Artificial Sequence: Synthetic oligonucleotide
  Target: ANGPTL4; (-) strand; PAM type: NNGRRT; PAM sequence: TGGAGT
ttccctcttgtcgcccaggc

SEQ ID NO: 5496 - DNA, 20 bp, Artificial Sequence
  Description of Artificial Sequence: Synthetic oligonucleotide
  Target: ANGPTL4; (-) strand; PAM type: NNGRRT; PAM sequence: TGGAGT
atttatttatttttttgaga

SEQ ID NO: 5497 - DNA, 20 bp, Artificial Sequence
  Description of Artificial Sequence: Synthetic oligonucleotide
  Target: ANGPTL4; (-) strand; PAM type: NNGRRT; PAM sequence: TGGGAT
gcttcggcctcccaaagtgc

SEQ ID NO: 5498 - DNA, 20 bp, Artificial Sequence
  Description of Artificial Sequence: Synthetic oligonucleotide
  Target: ANGPTL4; (-) strand; PAM type: NNGRRT; PAM sequence: CAGGAT
cagggtttcaccatgttagc

SEQ ID NO: 5499 - DNA, 20 bp, Artificial Sequence
  Description of Artificial Sequence: Synthetic oligonucleotide
  Target: ANGPTL4; (-) strand; PAM type: NNGRRT; PAM sequence: CAGGGT
ttttgtatttttaatagaga

SEQ ID NO: 5500 - DNA, 20 bp, Artificial Sequence
  Description of Artificial Sequence: Synthetic oligonucleotide
  Target: ANGPTL4; (-) strand; PAM type: NNGRRT; PAM sequence: CCGAGT
cattctcctgcctcagcctc

SEQ ID NO: 5501 - DNA, 20 bp, Artificial Sequence
  Description of Artificial Sequence: Synthetic oligonucleotide
  Target: ANGPTL4; (-) strand; PAM type: NNGRRT; PAM sequence: CCGGGT
ctcactgcaagctccacctc

SEQ ID NO: 5502 - DNA, 20 bp, Artificial Sequence
  Description of Artificial Sequence: Synthetic oligonucleotide
  Target: ANGPTL4; (-) strand; PAM type: NNGRRT; PAM sequence: TGGAGT
tctcgctctgtcgcccacgc

SEQ ID NO: 5503 - DNA, 20 bp, Artificial Sequence
  Description of Artificial Sequence: Synthetic oligonucleotide
  Target: ANGPTL4; (-) strand; PAM type: NNGRRT; PAM sequence: AGGAGT
tatttatttattttttgaga

SEQ ID NO: 5504 - DNA, 20 bp, Artificial Sequence
  Description of Artificial Sequence: Synthetic oligonucleotide
  Target: ANGPTL4; (-) strand; PAM type: NNGRRT; PAM sequence: AAGAGT
ctgctgtgagcaatctacaa

SEQ ID NO: 5505 - DNA, 20 bp, Artificial Sequence
  Description of Artificial Sequence: Synthetic oligonucleotide
  Target: ANGPTL4; (-) strand; PAM type: NNGRRT; PAM sequence: CAGGGT
cacaaaacacatcacagacc

SEQ ID NO: 5506 - DNA, 20 bp, Artificial Sequence
  Description of Artificial Sequence: Synthetic oligonucleotide
  Target: ANGPTL4; (-) strand; PAM type: NNGRRT; PAM sequence: CAGAAT
acagctatcccaggctatcc

SEQ ID NO: 5507 - DNA, 20 bp, Artificial Sequence
  Description of Artificial Sequence: Synthetic oligonucleotide
  Target: ANGPTL4; (-) strand; PAM type: NNGRRT; PAM sequence: CTGAGT
cccaagcccccagcctctct

SEQ ID NO: 5508 - DNA, 20 bp, Artificial Sequence
  Description of Artificial Sequence: Synthetic oligonucleotide
  Target: ANGPTL4; (-) strand; PAM type: NNGRRT; PAM sequence: AGGAGT
gagggaggaaaaccccagtg

SEQ ID NO: 5509 - DNA, 20 bp, Artificial Sequence
  Description of Artificial Sequence: Synthetic oligonucleotide
  Target: ANGPTL4; (-) strand; PAM type: NNGRRT; PAM sequence: TGGAAT
ctccaagccagctcattctc

SEQ ID NO: 5510 - DNA, 20 bp, Artificial Sequence
  Description of Artificial Sequence: Synthetic oligonucleotide
  Target: ANGPTL4; (-) strand; PAM type: NNGRRT; PAM sequence: CTGAGT
gagttgggacaaaggaagta

SEQ ID NO: 5511 - DNA, 20 bp, Artificial Sequence
  Description of Artificial Sequence: Synthetic oligonucleotide
  Target: ANGPTL4; (-) strand; PAM type: NNGRRT; PAM sequence: TAGAGT
ttctgagcctggggtaggga

SEQ ID NO: 5512 - DNA, 20 bp, Artificial Sequence
  Description of Artificial Sequence: Synthetic oligonucleotide
  Target: ANGPTL4; (-) strand; PAM type: NNGRRT; PAM sequence: AGGGAT
caacattctgagcctggggt

SEQ ID NO: 5513 - DNA, 20 bp, Artificial Sequence
  Description of Artificial Sequence: Synthetic oligonucleotide
  Target: ANGPTL4; (-) strand; PAM type: NNGRRT; PAM sequence: TGGGGT
ataccccaacattctgagcc

SEQ ID NO: 5514 - DNA, 20 bp, Artificial Sequence
  Description of Artificial Sequence: Synthetic oligonucleotide
  Target: ANGPTL4; (-) strand; PAM type: NNGRRT; PAM sequence: CAGAGT
cagcactccagcctgggtga

SEQ ID NO: 5515 - DNA, 20 bp, Artificial Sequence
  Description of Artificial Sequence: Synthetic oligonucleotide
  Target: ANGPTL4; (-) strand; PAM type: NNGRRT; PAM sequence: CTGGGT
ttgcaccacagcactccagc

SEQ ID NO: 5516 - DNA, 20 bp, Artificial Sequence
  Description of Artificial Sequence: Synthetic oligonucleotide
  Target: ANGPTL4; (-) strand; PAM type: NNGRRT; PAM sequence: GAGAAT
tactcgggagactgtgtcag

SEQ ID NO: 5517 - DNA, 20 bp, Artificial Sequence
  Description of Artificial Sequence: Synthetic oligonucleotide
  Target: ANGPTL4; (-) strand; PAM type: NNGRRT; PAM sequence: CCGGGT
tactaaaaataaaaaattag

SEQ ID NO: 5518 - DNA, 20 bp, Artificial Sequence
  Description of Artificial Sequence: Synthetic oligonucleotide
  Target: ANGPTL4; (-) strand; PAM type: NNGRRT; PAM sequence: AGGGGT
ggggcggatcacctgaggtc

SEQ ID NO: 5519 - DNA, 20 bp, Artificial Sequence
  Description of Artificial Sequence: Synthetic oligonucleotide
  Target: ANGPTL4; (-) strand; PAM type: NNGRRT; PAM sequence: GCGGAT
gtggtgggaggggggggggg

SEQ ID NO: 5520 - DNA, 20 bp, Artificial Sequence
  Description of Artificial Sequence: Synthetic oligonucleotide
  Target: ANGPTL4; (-) strand; PAM type: NNGRRT; PAM sequence: CCGGGT
aatcccagcactttgggagg

SEQ ID NO: 5521 - DNA, 20 bp, Artificial Sequence
  Description of Artificial Sequence: Synthetic oligonucleotide
  Target: ANGPTL4; (-) strand; PAM type: NNGRRT; PAM sequence: CAGAGT
ctgcactccagcctgggcaa

SEQ ID NO: 5522 - DNA, 20 bp, Artificial Sequence
  Description of Artificial Sequence: Synthetic oligonucleotide
  Target: ANGPTL4; (-) strand; PAM type: NNGRRT; PAM sequence: CAGGGT
catagcctaccctctaccgc

SEQ ID NO: 5523 - DNA, 20 bp, Artificial Sequence
  Description of Artificial Sequence: Synthetic oligonucleotide
  Target: ANGPTL4; (-) strand; PAM type: NNGRRT; PAM sequence: TTGGAT
gagtgccttagcggcaggac

SEQ ID NO: 5524 - DNA, 20 bp, Artificial Sequence
  Description of Artificial Sequence: Synthetic oligonucleotide
  Target: ANGPTL4; (-) strand; PAM type: NNGRRT; PAM sequence: ATGAGT
tctcccctgagcccgaaatt

SEQ ID NO: 5525 - DNA, 20 bp, Artificial Sequence
  Description of Artificial Sequence: Synthetic oligonucleotide
  Target: ANGPTL4; (-) strand; PAM type: NNGRRT; PAM sequence: AAGGGT
tcgcatgttccttcccgtga

SEQ ID NO: 5526 - DNA, 20 bp, Artificial Sequence
  Description of Artificial Sequence: Synthetic oligonucleotide
  Target: ANGPTL4; (-) strand; PAM type: NNGRRT; PAM sequence: CTGAGT
aggaaggaaaagaaaaagag

SEQ ID NO: 5527 - DNA, 20 bp, Artificial Sequence
  Description of Artificial Sequence: Synthetic oligonucleotide
  Target: ANGPTL4; (-) strand; PAM type: NNGRRT; PAM sequence: CAGAGT
tccagcctgggcgacagagc

SEQ ID NO: 5528 - DNA, 20 bp, Artificial Sequence
  Description of Artificial Sequence: Synthetic oligonucleotide
  Target: ANGPTL4; (-) strand; PAM type: NNGRRT; PAM sequence: TAGAAT
tactcgggaggctgaggcag

SEQ ID NO: 5529 - DNA, 20 bp, Artificial Sequence
  Description of Artificial Sequence: Synthetic oligonucleotide
  Target: ANGPTL4; (-) strand; PAM type: NNGRRT; PAM sequence: GGGGAT
tgcgggctgggggatgccct

SEQ ID NO: 5530 - DNA, 20 bp, Artificial Sequence
  Description of Artificial Sequence: Synthetic oligonucleotide
  Target: ANGPTL4; (-) strand; PAM type: NNGRRT; PAM sequence: GGGGAT
gcctggtagtctgcgggctg

SEQ ID NO: 5531 - DNA, 20 bp, Artificial Sequence
  Description of Artificial Sequence: Synthetic oligonucleotide
  Target: ANGPTL4; (-) strand; PAM type: NNGRRT; PAM sequence: TGGGGT
gcagggcctgtggccggggg

SEQ ID NO: 5532 - DNA, 20 bp, Artificial Sequence
  Description of Artificial Sequence: Synthetic oligonucleotide
  Target: ANGPTL4; (-) strand; PAM type: NNGRRT; PAM sequence: GGGGGT
tgggggcagggcctgtggcc

SEQ ID NO: 5533 - DNA, 20 bp, Artificial Sequence
  Description of Artificial Sequence: Synthetic oligonucleotide
  Target: ANGPTL4; (-) strand; PAM type: NNGRRT; PAM sequence: GGGAGT
agtcttggaggcggggtgcg

SEQ ID NO: 5534 - DNA, 20 bp, Artificial Sequence
  Description of Artificial Sequence: Synthetic oligonucleotide
  Target: ANGPTL4; (-) strand; PAM type: NNGRRT; PAM sequence: CGGGGT
gggcggaggagtcttggagg

SEQ ID NO: 5535 - DNA, 20 bp, Artificial Sequence
  Description of Artificial Sequence: Synthetic oligonucleotide
  Target: ANGPTL4; (-) strand; PAM type: NNGRRT; PAM sequence: AGGAGT
gttgggtgcggagtgggcgg

SEQ ID NO: 5536 - DNA, 20 bp, Artificial Sequence
  Description of Artificial Sequence: Synthetic oligonucleotide
  Target: ANGPTL4; (-) strand; PAM type: NNGRRT; PAM sequence: CGGAGT
cggtttttataagttgggtg

SEQ ID NO: 5537 - DNA, 20 bp, Artificial Sequence
  Description of Artificial Sequence: Synthetic oligonucleotide
  Target: ANGPTL4; (-) strand; PAM type: NNGRRT; PAM sequence: TTGGGT
ccgaggacggtttttataag

SEQ ID NO: 5538 - DNA, 20 bp, Artificial Sequence
  Description of Artificial Sequence: Synthetic oligonucleotide
  Target: ANGPTL4; (-) strand; PAM type: NNGRRT; PAM sequence: GAGGAT
gaatcggatcacagtcgtgt

SEQ ID NO: 5539 - DNA, 20 bp, Artificial Sequence
  Description of Artificial Sequence: Synthetic oligonucleotide
  Target: ANGPTL4; (-) strand; PAM type: NNGRRT; PAM sequence: TCGGAT
gcagaagccgctggaaagaa

SEQ ID NO: 5540 - DNA, 20 bp, Artificial Sequence
  Description of Artificial Sequence: Synthetic oligonucleotide
  Target: ANGPTL4; (-) strand; PAM type: NNGRRT; PAM sequence: AAGAAT
tggttgcagaagccgctgga

SEQ ID NO: 5541 - DNA, 20 bp, Artificial Sequence
  Description of Artificial Sequence: Synthetic oligonucleotide
  Target: ANGPTL4; (-) strand; PAM type: NNGRRT; PAM sequence: GGGGGT
gactggagacgcggaggacc

SEQ ID NO: 5542 - DNA, 20 bp, Artificial Sequence
  Description of Artificial Sequence: Synthetic oligonucleotide
  Target: ANGPTL4; (-) strand; PAM type: NNGRRT; PAM sequence: TGGGGT
tcggggactctcggggacgt

SEQ ID NO: 5543 - DNA, 20 bp, Artificial Sequence
  Description of Artificial Sequence: Synthetic oligonucleotide
  Target: ANGPTL4; (-) strand; PAM type: NNGRRT; PAM sequence: GGGGAT
ctcttaggtagcctgggagc

SEQ ID NO: 5544 - DNA, 20 bp, Artificial Sequence
  Description of Artificial Sequence: Synthetic oligonucleotide
  Target: ANGPTL4; (-) strand; PAM type: NNGRRT; PAM sequence: ACGGGT
agcgcggcgacttggactgc

SEQ ID NO: 5545 - DNA, 20 bp, Artificial Sequence
  Description of Artificial Sequence: Synthetic oligonucleotide
  Target: ANGPTL4; (-) strand; PAM type: NNGRRT; PAM sequence: AGGAGT
gcagcccctggccgagctgc

SEQ ID NO: 5546 - DNA, 20 bp, Artificial Sequence
  Description of Artificial Sequence: Synthetic oligonucleotide
  Target: ANGPTL4; (-) strand; PAM type: NNGRRT; PAM sequence: GCGGGT
tccagcgcgctcagctgact

SEQ ID NO: 5547 - DNA, 20 bp, Artificial Sequence
  Description of Artificial Sequence: Synthetic oligonucleotide
  Target: ANGPTL4; (-) strand; PAM type: NNGRRT; PAM sequence: CAGGGT
ctgcaggctgtgaaggacct

SEQ ID NO: 5548 - DNA, 20 bp, Artificial Sequence
  Description of Artificial Sequence: Synthetic oligonucleotide
  Target: ANGPTL4; (-) strand; PAM type: NNGRRT; PAM sequence: TTGAAT
ctattttgctttaggtggtc

SEQ ID NO: 5549 - DNA, 20 bp, Artificial Sequence
  Description of Artificial Sequence: Synthetic oligonucleotide
  Target: ANGPTL4; (-) strand; PAM type: NNGRRT; PAM sequence: GGGGGT
tgtgtgtgtgtagaagagac

SEQ ID NO: 5550 - DNA, 20 bp, Artificial Sequence
  Description of Artificial Sequence: Synthetic oligonucleotide
  Target: ANGPTL4; (-) strand; PAM type: NNGRRT; PAM sequence: TGGGAT
gcctcagcctcccaagtagc

SEQ ID NO: 5551 - DNA, 20 bp, Artificial Sequence
  Description of Artificial Sequence: Synthetic oligonucleotide
  Target: ANGPTL4; (-) strand; PAM type: NNGRRT; PAM sequence: CCGGGT
ctcactgcaacctctgcctc

SEQ ID NO: 5552 - DNA, 20 bp, Artificial Sequence
  Description of Artificial Sequence: Synthetic oligonucleotide
  Target: ANGPTL4; (-) strand; PAM type: NNGRRT; PAM sequence: TGGAGT
tctcactctgttgcccaggc

SEQ ID NO: 5553 - DNA, 20 bp, Artificial Sequence
  Description of Artificial Sequence: Synthetic oligonucleotide
  Target: ANGPTL4; (-) strand; PAM type: NNGRRT; PAM sequence: AGGAGT
ttatcgctattatttttttg

SEQ ID NO: 5554 - DNA, 20 bp, Artificial Sequence
  Description of Artificial Sequence: Synthetic oligonucleotide
  Target: ANGPTL4; (-) strand; PAM type: NNGRRT; PAM sequence: GTGAGT
aaagtgctgggactacaagc

SEQ ID NO: 5555 - DNA, 20 bp, Artificial Sequence
  Description of Artificial Sequence: Synthetic oligonucleotide
  Target: ANGPTL4; (-) strand; PAM type: NNGRRT; PAM sequence: CGGGGT
ttttgtatttttagtagaga

SEQ ID NO: 5556 - DNA, 20 bp, Artificial Sequence
  Description of Artificial Sequence: Synthetic oligonucleotide
  Target: ANGPTL4; (-) strand; PAM type: NNGRRT; PAM sequence: TGGGAT
gcctcagcctccccagtagc

SEQ ID NO: 5557 - DNA, 20 bp, Artificial Sequence
  Description of Artificial Sequence: Synthetic oligonucleotide
  Target: ANGPTL4; (-) strand; PAM type: NNGRRT; PAM sequence: CCGGGT
ctcactgcaacctccgcctc

SEQ ID NO: 5558 - DNA, 20 bp, Artificial Sequence
  Description of Artificial Sequence: Synthetic oligonucleotide
  Target: ANGPTL4; (-) strand; PAM type: NNGRRT; PAM sequence: TGGAGT
tcgagctctgtcgcccaggc

SEQ ID NO: 5559 - DNA, 20 bp, Artificial Sequence
  Description of Artificial Sequence: Synthetic oligonucleotide
  Target: ANGPTL4; (-) strand; PAM type: NNGRRT; PAM sequence: TGGAGT
ttattattattattttgaga

SEQ ID NO: 5560 - DNA, 20 bp, Artificial Sequence
  Description of Artificial Sequence: Synthetic oligonucleotide
  Target: ANGPTL4; (-) strand; PAM type: NNGRRT; PAM sequence: TGGAGT
tctcgctctgtcacccaggt

SEQ ID NO: 5561 - DNA, 20 bp, Artificial Sequence
  Description of Artificial Sequence: Synthetic oligonucleotide
  Target: ANGPTL4; (-) strand; PAM type: NNGRRT; PAM sequence: CAGAGT
ttattttttattttttcaga

SEQ ID NO: 5562 - DNA, 20 bp, Artificial Sequence
  Description of Artificial Sequence: Synthetic oligonucleotide
  Target: ANGPTL4; (-) strand; PAM type: NNGRRT; PAM sequence: TGGGGT
tcactgcagcctccaactcc

SEQ ID NO: 5563 - DNA, 20 bp, Artificial Sequence
  Description of Artificial Sequence: Synthetic oligonucleotide
  Target: ANGPTL4; (-) strand; PAM type: NNGRRT; PAM sequence: TGGAGT
tctcgttctctcgcccaggc

SEQ ID NO: 5564 - DNA, 20 bp, Artificial Sequence
  Description of Artificial Sequence: Synthetic oligonucleotide
  Target: ANGPTL4; (-) strand; PAM type: NNGRRT; PAM sequence: CGGGGT
tttcttttttttcccaatga

SEQ ID NO: 5565 - DNA, 20 bp, Artificial Sequence
  Description of Artificial Sequence: Synthetic oligonucleotide
  Target: ANGPTL4; (-) strand; PAM type: NNGRRT; PAM sequence: GGGAGT
catccgctgaggccaggcaa

SEQ ID NO: 5566 - DNA, 20 bp, Artificial Sequence
  Description of Artificial Sequence: Synthetic oligonucleotide
  Target: ANGPTL4; (-) strand; PAM type: NNGRRT; PAM sequence: AGGGGT
gccttgagttgtgtctgggg

SEQ ID NO: 5567 - DNA, 20 bp, Artificial Sequence
  Description of Artificial Sequence: Synthetic oligonucleotide
  Target: ANGPTL4; (-) strand; PAM type: NNGRRT; PAM sequence: TTGAGT
ggatcctgctgttctgagcc

SEQ ID NO: 5568 - DNA, 20 bp, Artificial Sequence
  Description of Artificial Sequence: Synthetic oligonucleotide
  Target: ANGPTL4; (-) strand; PAM type: NNGRRT; PAM sequence: CTGGAT
gccaccttgtggaagagttg

SEQ ID NO: 5569 - DNA, 20 bp, Artificial Sequence
  Description of Artificial Sequence: Synthetic oligonucleotide
  Target: ANGPTL4; (-) strand; PAM type: NNGRRT; PAM sequence: AAGAGT
gctgctgggccaccttgtgg

SEQ ID NO: 5570 - DNA, 20 bp, Artificial Sequence
  Description of Artificial Sequence: Synthetic oligonucleotide
  Target: ANGPTL4; (-) strand; PAM type: NNGRRT; PAM sequence: CTGAAT
gttacctggctttgcagatg

SEQ ID NO: 5571 - DNA, 20 bp, Artificial Sequence
  Description of Artificial Sequence: Synthetic oligonucleotide
  Target: ANGPTL4; (-) strand; PAM type: NNGRRT; PAM sequence: TAGGGT
gaccttttctcccttgatcc

SEQ ID NO: 5572 - DNA, 20 bp, Artificial Sequence
  Description of Artificial Sequence: Synthetic oligonucleotide
  Target: ANGPTL4; (-) strand; PAM type: NNGRRT; PAM sequence: TGGGGT
tcaccacctccctctcaacc

SEQ ID NO: 5573 - DNA, 20 bp, Artificial Sequence
  Description of Artificial Sequence: Synthetic oligonucleotide
  Target: ANGPTL4; (-) strand; PAM type: NNGRRT; PAM sequence: GAGGGT
aaactaggatgggacgggag

SEQ ID NO: 5574 - DNA, 20 bp, Artificial Sequence
  Description of Artificial Sequence: Synthetic oligonucleotide
  Target: ANGPTL4; (-) strand; PAM type: NNGRRT; PAM sequence: TAGGAT
tgtggtccaggaggccaaac

SEQ ID NO: 5575 - DNA, 20 bp, Artificial Sequence
  Description of Artificial Sequence: Synthetic oligonucleotide
  Target: ANGPTL4; (-) strand; PAM type: NNGRRT; PAM sequence: CCGGGT
caggcggctgacattgtgag

SEQ ID NO: 5576 - DNA, 20 bp, Artificial Sequence
  Description of Artificial Sequence: Synthetic oligonucleotide
  Target: ANGPTL4; (-) strand; PAM type: NNGRRT; PAM sequence: AGGGGT
gcaatggcaagtggcggggt

SEQ ID NO: 5577 - DNA, 20 bp, Artificial Sequence
  Description of Artificial Sequence: Synthetic oligonucleotide
  Target: ANGPTL4; (-) strand; PAM type: NNGRRT; PAM sequence: CGGGGT
ggaccagcaatggcaagtgg

SEQ ID NO: 5578 - DNA, 20 bp, Artificial Sequence
  Description of Artificial Sequence: Synthetic oligonucleotide
  Target: ANGPTL4; (-) strand; PAM type: NNGRRT; PAM sequence: TTGGGT
tggcttgcagaggagaaggg

SEQ ID NO: 5579 - DNA, 20 bp, Artificial Sequence
  Description of Artificial Sequence: Synthetic oligonucleotide
  Target: ANGPTL4; (-) strand; PAM type: NNGRRT; PAM sequence: AAGGGT
cccactggcttgcagaggag

SEQ ID NO: 5580 - DNA, 20 bp, Artificial Sequence
  Description of Artificial Sequence: Synthetic oligonucleotide
  Target: ANGPTL4; (-) strand; PAM type: NNGRRT; PAM sequence: CAGGAT
ccctagaaggttctaacctt

SEQ ID NO: 5581 - DNA, 20 bp, Artificial Sequence
  Description of Artificial Sequence: Synthetic oligonucleotide
  Target: ANGPTL4; (-) strand; PAM type: NNGRRT; PAM sequence: GGGGGT
gtgtttctggtctgggagct

SEQ ID NO: 5582 - DNA, 20 bp, Artificial Sequence
  Description of Artificial Sequence: Synthetic oligonucleotide
  Target: ANGPTL4; (-) strand; PAM type: NNGRRT; PAM sequence: AAGAGT
gcattggatttgtaagatac

SEQ ID NO: 5583 - DNA, 20 bp, Artificial Sequence
  Description of Artificial Sequence: Synthetic oligonucleotide
  Target: ANGPTL4; (-) strand; PAM type: NNGRRT; PAM sequence: TTGGAT
ggggtcagggacctggagca

SEQ ID NO: 5584 - DNA, 20 bp, Artificial Sequence
  Description of Artificial Sequence: Synthetic oligonucleotide
  Target: ANGPTL4; (-) strand; PAM type: NNGRRT; PAM sequence: AGGGGT
acaagagaggaaggaggaag

SEQ ID NO: 5585 - DNA, 20 bp, Artificial Sequence
  Description of Artificial Sequence: Synthetic oligonucleotide
  Target: ANGPTL4; (-) strand; PAM type: NNGRRT; PAM sequence: GGGAAT
ttcgagatgaacggagattt

SEQ ID NO: 5586 - DNA, 20 bp, Artificial Sequence
  Description of Artificial Sequence: Synthetic oligonucleotide
  Target: ANGPTL4; (-) strand; PAM type: NNGRRT; PAM sequence: GCGAGT
ggccgtgaacttagagaacc

SEQ ID NO: 5587 - DNA, 20 bp, Artificial Sequence
  Description of Artificial Sequence: Synthetic oligonucleotide
  Target: ANGPTL4; (-) strand; PAM type: NNGRRT; PAM sequence: AAGGAT
ggacagccacagatgcaggg

SEQ ID NO: 5588 - DNA, 20 bp, Artificial Sequence
  Description of Artificial Sequence: Synthetic oligonucleotide
  Target: ANGPTL4; (-) strand; PAM type: NNGRRT; PAM sequence: GGGGAT
ctgaccctagggtgtgagag

SEQ ID NO: 5589 - DNA, 20 bp, Artificial Sequence
  Description of Artificial Sequence: Synthetic oligonucleotide
  Target: ANGPTL4; (-) strand; PAM type: NNGRRT; PAM sequence: TAGGGT
tggaagcctgccactgaccc

SEQ ID NO: 5590 - DNA, 20 bp, Artificial Sequence
  Description of Artificial Sequence: Synthetic oligonucleotide
  Target: ANGPTL4; (-) strand; PAM type: NNGRRT; PAM sequence: CGGGGT
acgctgagatgctagcctgg

SEQ ID NO: 5591 - DNA, 20 bp, Artificial Sequence
  Description of Artificial Sequence: Synthetic oligonucleotide
  Target: ANGPTL4; (-) strand; PAM type: NNGRRT; PAM sequence: GAGGGT
tcctgggatggtggctttgg

SEQ ID NO: 5592 - DNA, 20 bp, Artificial Sequence
  Description of Artificial Sequence: Synthetic oligonucleotide
  Target: ANGPTL4; (-) strand; PAM type: NNGRRT; PAM sequence: TGGGAT
cctccagaagcccctcatcc

SEQ ID NO: 5593 - DNA, 20 bp, Artificial Sequence
  Description of Artificial Sequence: Synthetic oligonucleotide
  Target: ANGPTL4; (-) strand; PAM type: NNGRRT; PAM sequence: GGGAGT
cgggcctgagccaagagtct

SEQ ID NO: 5594 - DNA, 20 bp, Artificial Sequence
  Description of Artificial Sequence: Synthetic oligonucleotide
  Target: ANGPTL4; (-) strand; PAM type: NNGRRT; PAM sequence: AAGAGT
ctacttggcgggcctgagcc

SEQ ID NO: 5595 - DNA, 20 bp, Artificial Sequence
  Description of Artificial Sequence: Synthetic oligonucleotide
  Target: ANGPTL4; (-) strand; PAM type: NNGRRT; PAM sequence: ATGAAT
aaaccaccagtgtggcttcc

SEQ ID NO: 5596 - DNA, 20 bp, Artificial Sequence
  Description of Artificial Sequence: Synthetic oligonucleotide
  Target: ANGPTL4; (-) strand; PAM type: NNGRRT; PAM sequence: AAGGAT
ctactttcctcccatccagt

SEQ ID NO: 5597 - DNA, 20 bp, Artificial Sequence
  Description of Artificial Sequence: Synthetic oligonucleotide
  Target: ANGPTL4; (-) strand; PAM type: NNGRRT; PAM sequence: CAGAGT
ggtgggggtgggggcgggcc

SEQ ID NO: 5598 - DNA, 20 bp, Artificial Sequence
  Description of Artificial Sequence: Synthetic oligonucleotide
  Target: ANGPTL4; (-) strand; PAM type: NNGRRT; PAM sequence: GGGGGT
tcgaaatgagtctgcacggt

SEQ ID NO: 5599 - DNA, 20 bp, Artificial Sequence
  Description of Artificial Sequence: Synthetic oligonucleotide
  Target: ANGPTL4; (-) strand; PAM type: NNGRRT; PAM sequence: ATGAGT
aaagtaggggaaaggtcgaa

SEQ ID NO: 5600 - DNA, 20 bp, Artificial Sequence
  Description of Artificial Sequence: Synthetic oligonucleotide
  Target: ANGPTL4; (-) strand; PAM type: NNGRRT; PAM sequence: GAGGAT
gaaagagggagggaggaggg

SEQ ID NO: 5601 - DNA, 20 bp, Artificial Sequence
  Description of Artificial Sequence: Synthetic oligonucleotide
  Target: ANGPTL4; (-) strand; PAM type: NNGRRT; PAM sequence: CAGGGT
gctcctagagggagaggagg

SEQ ID NO: 5602 - DNA, 20 bp, Artificial Sequence
  Description of Artificial Sequence: Synthetic oligonucleotide
  Target: ANGPTL4; (-) strand; PAM type: NNGRRT; PAM sequence: TGGGGT
agcatctcagaggctctgcc

SEQ ID NO: 5603 - DNA, 20 bp, Artificial Sequence
  Description of Artificial Sequence: Synthetic oligonucleotide
  Target: ANGPTL4; (-) strand; PAM type: NNGRRT; PAM sequence: ATGAAT
acaaatgaatgaatgaatga

SEQ ID NO: 5604 - DNA, 20 bp, Artificial Sequence
  Description of Artificial Sequence: Synthetic oligonucleotide
  Target: ANGPTL4; (-) strand; PAM type: NNGRRT; PAM sequence: ATGAAT
cttgacaaatgaatgaatga

SEQ ID NO: 5605 - DNA, 20 bp, Artificial Sequence
  Description of Artificial Sequence: Synthetic oligonucleotide
  Target: ANGPTL4; (-) strand; PAM type: NNGRRT; PAM sequence: ATGAAT
cagtcttgacaaatgaatga

SEQ ID NO: 5606 - DNA, 20 bp, Artificial Sequence
  Description of Artificial Sequence: Synthetic oligonucleotide
  Target: ANGPTL4; (-) strand; PAM type: NNGRRT; PAM sequence: ATGAAT
aaaacagtcttgacaaatga

SEQ ID NO: 5607 - DNA, 20 bp, Artificial Sequence
  Description of Artificial Sequence: Synthetic oligonucleotide
  Target: ANGPTL4; (-) strand; PAM type: NNGRRT; PAM sequence: ATGAAT
aaacaaaacagtcttgacaa

SEQ ID NO: 5608 - DNA, 20 bp, Artificial Sequence
  Description of Artificial Sequence: Synthetic oligonucleotide
  Target: ANGPTL4; (-) strand; PAM type: NNGRRT; PAM sequence: GAGAAT
tacttgagaggctgaggcag

SEQ ID NO: 5609 - DNA, 20 bp, Artificial Sequence
  Description of Artificial Sequence: Synthetic oligonucleotide
  Target: ANGPTL4; (-) strand; PAM type: NNGRRT; PAM sequence: ATGAAT
aaaaaaaaaagacttgataa

SEQ ID NO: 5610 - DNA, 20 bp, Artificial Sequence
  Description of Artificial Sequence: Synthetic oligonucleotide
  Target: ANGPTL4; (-) strand; PAM type: NNGRRT; PAM sequence: CAGAGT
ttgcactccaacctgggtga

SEQ ID NO: 5611 - DNA, 20 bp, Artificial Sequence
  Description of Artificial Sequence: Synthetic oligonucleotide
  Target: ANGPTL4; (-) strand; PAM type: NNGRRT; PAM sequence: CTGGGT
ttgaaccattgcactccaac

SEQ ID NO: 5612 - DNA, 20 bp, Artificial Sequence
  Description of Artificial Sequence: Synthetic oligonucleotide
  Target: ANGPTL4; (-) strand; PAM type: NNGRRT; PAM sequence: GAGAAT
tccttaggaggcagaggcag

SEQ ID NO: 5613 - DNA, 20 bp, Artificial Sequence
  Description of Artificial Sequence: Synthetic oligonucleotide
  Target: ANGPTL4; (-) strand; PAM type: NNGRRT; PAM sequence: CTGGGT
gtaaaacatacaaagattag

SEQ ID NO: 5614 - DNA, 20 bp, Artificial Sequence
  Description of Artificial Sequence: Synthetic oligonucleotide
  Target: ANGPTL4; (-) strand; PAM type: NNGRRT; PAM sequence: AGGAGT
gggaggcgggcggatcggtc

SEQ ID NO: 5615 - DNA, 20 bp, Artificial Sequence
  Description of Artificial Sequence: Synthetic oligonucleotide
  Target: ANGPTL4; (-) strand; PAM type: NNGRRT; PAM sequence: GCGGAT
tccagcactttgggaggcgg

SEQ ID NO: 5616 - DNA, 20 bp, Artificial Sequence
  Description of Artificial Sequence: Synthetic oligonucleotide
  Target: ANGPTL4; (-) strand; PAM type: NNGRRT; PAM sequence: AGGAAT
agctgctcaataaagacttg

SEQ ID NO: 5617 - DNA, 20 bp, Artificial Sequence
  Description of Artificial Sequence: Synthetic oligonucleotide
  Target: ANGPTL4; (-) strand; PAM type: NNGRRT; PAM sequence: GGGAAT
caggccagaacaccccaaat

SEQ ID NO: 5618 - DNA, 20 bp, Artificial Sequence
  Description of Artificial Sequence: Synthetic oligonucleotide
  Target: ANGPTL4; (-) strand; PAM type: NNGRRT; PAM sequence: CTGGGT
ctctttcctcacttctctct

SEQ ID NO: 5619 - DNA, 20 bp, Artificial Sequence
  Description of Artificial Sequence: Synthetic oligonucleotide
  Target: ANGPTL4; (-) strand; PAM type: NNGRRT; PAM sequence: TGGGAT
gccttggcctcccaaagtgc

SEQ ID NO: 5620 - DNA, 20 bp, Artificial Sequence
  Description of Artificial Sequence: Synthetic oligonucleotide
  Target: ANGPTL4; (-) strand; PAM type: NNGRRT; PAM sequence: GGGGGT
tttgcattatttgtagagac

SEQ ID NO: 5621 - DNA, 20 bp, Artificial Sequence
  Description of Artificial Sequence: Synthetic oligonucleotide
  Target: ANGPTL4; (-) strand; PAM type: NNGRRT; PAM sequence: TGGAGT
gtctcgctctgtcgccaggc

SEQ ID NO: 5622 - DNA, 20 bp, Artificial Sequence
  Description of Artificial Sequence: Synthetic oligonucleotide
  Target: ANGPTL4; (-) strand; PAM type: NNGRRT; PAM sequence: CGGAGT
ttttgttttgttttttgata

SEQ ID NO: 5623 - DNA, 20 bp, Artificial Sequence
  Description of Artificial Sequence: Synthetic oligonucleotide
  Target: ANGPTL4; (-) strand; PAM type: NNGRRT; PAM sequence: GTGGAT
gcatatctgggggcttaaca

SEQ ID NO: 5624 - DNA, 20 bp, Artificial Sequence
  Description of Artificial Sequence: Synthetic oligonucleotide
  Target: ANGPTL4; (-) strand; PAM type: NNGRRT; PAM sequence: GGGGGT
acaggagggcagcccctggg

SEQ ID NO: 5625 - DNA, 20 bp, Artificial Sequence
  Description of Artificial Sequence: Synthetic oligonucleotide
  Target: ANGPTL4; (-) strand; PAM type: NNGRRT; PAM sequence: CTGGAT
aatggcggagacccctgagg

SEQ ID NO: 5626 - DNA, 20 bp, Artificial Sequence
  Description of Artificial Sequence: Synthetic oligonucleotide
  Target: ANGPTL4; (-) strand; PAM type: NNGRRT; PAM sequence: GAGAAT
tactggggaggctgacgctg

SEQ ID NO: 5627 - DNA, 20 bp, Artificial Sequence
  Description of Artificial Sequence: Synthetic oligonucleotide
  Target: ANGPTL4; (-) strand; PAM type: NNGRRT; PAM sequence: CTGGGT
actaaaaatacaaaaattag

SEQ ID NO: 5628 - DNA, 20 bp, Artificial Sequence
  Description of Artificial Sequence: Synthetic oligonucleotide
  Target: ANGPTL4; (-) strand; PAM type: NNGRRT; PAM sequence: AGGAGT
tcggcaaatcatttgaggtc

SEQ ID NO: 5629 - DNA, 20 bp, Artificial Sequence
  Description of Artificial Sequence: Synthetic oligonucleotide
  Target: ANGPTL4; (-) strand; PAM type: NNGRRT; PAM sequence: CGGGAT
tgataggcctcccaaagtgt

SEQ ID NO: 5630 - DNA, 20 bp, Artificial Sequence
  Description of Artificial Sequence: Synthetic oligonucleotide
  Target: ANGPTL4; (-) strand; PAM type: NNGRRT; PAM sequence: TGGGAT
gcctcaacctcccaaagtgc

SEQ ID NO: 5631 - DNA, 20 bp, Artificial Sequence
  Description of Artificial Sequence: Synthetic oligonucleotide
  Target: ANGPTL4; (-) strand; PAM type: NNGRRT; PAM sequence: CGGGGT
ttttgtatttttagtagaga

SEQ ID NO: 5632 - DNA, 20 bp, Artificial Sequence
  Description of Artificial Sequence: Synthetic oligonucleotide
  Target: ANGPTL4; (-) strand; PAM type: NNGRRT; PAM sequence: TGGGAT
gcctcagccacctgagtagc

SEQ ID NO: 5633 - DNA, 20 bp, Artificial Sequence
  Description of Artificial Sequence: Synthetic oligonucleotide
  Target: ANGPTL4; (-) strand; PAM type: NNGRRT; PAM sequence: CTGAGT
gattctcctgcctcagccac

SEQ ID NO: 5634 - DNA, 20 bp, Artificial Sequence
  Description of Artificial Sequence: Synthetic oligonucleotide
  Target: ANGPTL4; (-) strand; PAM type: NNGRRT; PAM sequence: TGGAGT
tctcgctctgtcgcccaggc

SEQ ID NO: 5635 - DNA, 20 bp, Artificial Sequence
  Description of Artificial Sequence: Synthetic oligonucleotide
  Target: ANGPTL4; (-) strand; PAM type: NNGRRT; PAM sequence: CGGAGT
ttatttttttgatgggggga

SEQ ID NO: 5636 - DNA, 20 bp, Artificial Sequence
  Description of Artificial Sequence: Synthetic oligonucleotide
  Target: ANGPTL4; (-) strand; PAM type: NNGRRT; PAM sequence: CTGAAT
gccaccatgcccagcaaggg

SEQ ID NO: 5637 - DNA, 20 bp, Artificial Sequence
  Description of Artificial Sequence: Synthetic oligonucleotide
  Target: ANGPTL4; (-) strand; PAM type: NNGRRT; PAM sequence: CCGAGT
gaccctcctgccttggcctc

SEQ ID NO: 5638 - DNA, 20 bp, Artificial Sequence
  Description of Artificial Sequence: Synthetic oligonucleotide
  Target: ANGPTL4; (-) strand; PAM type: NNGRRT; PAM sequence: TGGAGT
ttttgttgtgttgcccaggt

SEQ ID NO: 5639 - DNA, 20 bp, Artificial Sequence
  Description of Artificial Sequence: Synthetic oligonucleotide
  Target: ANGPTL4; (-) strand; PAM type: NNGRRT; PAM sequence: TAGGGT
aatgtttatgttggtagaga

SEQ ID NO: 5640 - DNA, 20 bp, Artificial Sequence
  Description of Artificial Sequence: Synthetic oligonucleotide
  Target: ANGPTL4; (-) strand; PAM type: NNGRRT; PAM sequence: TGGAAT
gcttcagccccacaagcagc

SEQ ID NO: 5641 - DNA, 20 bp, Artificial Sequence
  Description of Artificial Sequence: Synthetic oligonucleotide
  Target: ANGPTL4; (-) strand; PAM type: NNGRRT; PAM sequence: CTGGAT
gtctcactctgttgcccagg

SEQ ID NO: 5642 - DNA, 20 bp, Artificial Sequence
  Description of Artificial Sequence: Synthetic oligonucleotide
  Target: ANGPTL4; (-) strand; PAM type: NNGRRT; PAM sequence: TGGAGT
tttttttttttttttagaga

SEQ ID NO: 5643 - DNA, 20 bp, Artificial Sequence
  Description of Artificial Sequence: Synthetic oligonucleotide
  Target: ANGPTL4; (-) strand; PAM type: NNGRRT; PAM sequence: CTGGGT
gcctctctgggccagctgaa

SEQ ID NO: 5644 - DNA, 20 bp, Artificial Sequence
  Description of Artificial Sequence: Synthetic oligonucleotide
  Target: ANGPTL4; (-) strand; PAM type: NNGRRT; PAM sequence: GGGAGT
agcagggactgagtgtggga

SEQ ID NO: 5645 - DNA, 20 bp, Artificial Sequence
  Description of Artificial Sequence: Synthetic oligonucleotide
  Target: ANGPTL4; (-) strand; PAM type: NNGRRT; PAM sequence: CTGAGT
tcccaagaacccagcaggga

SEQ ID NO: 5646 - DNA, 20 bp, Artificial Sequence
  Description of Artificial Sequence: Synthetic oligonucleotide
  Target: ANGPTL4; (-) strand; PAM type: NNGRRT; PAM sequence: AGGAAT
gaggagggtgggtcagaggg

SEQ ID NO: 5647 - DNA, 20 bp, Artificial Sequence
  Description of Artificial Sequence: Synthetic oligonucleotide
  Target: ANGPTL4; (-) strand; PAM type: NNGRRT; PAM sequence: GTGGGT
ccctggaggactcgaggagg

SEQ ID NO: 5648 - DNA, 20 bp, Artificial Sequence
  Description of Artificial Sequence: Synthetic oligonucleotide
  Target: ANGPTL4; (-) strand; PAM type: NNGRRT; PAM sequence: GAGGGT
tcatccctggaggactcgag

SEQ ID NO: 5649 - DNA, 20 bp, Artificial Sequence
  Description of Artificial Sequence: Synthetic oligonucleotide
  Target: ANGPTL4; (-) strand; PAM type: NNGRRT; PAM sequence: CTGAAT
actgagccatcgtggcgcct

SEQ ID NO: 5650 - DNA, 20 bp, Artificial Sequence
  Description of Artificial Sequence: Synthetic oligonucleotide
  Target: ANGPTL4; (-) strand; PAM type: NNGRRT; PAM sequence: GGGGAT
ccactagaaacacctaccgt

SEQ ID NO: 5651 - DNA, 20 bp, Artificial Sequence
  Description of Artificial Sequence: Synthetic oligonucleotide
  Target: ANGPTL4; (-) strand; PAM type: NNGRRT; PAM sequence: GAGGGT
catgaggcagggccacttct

SEQ ID NO: 5652 - DNA, 20 bp, Artificial Sequence
  Description of Artificial Sequence: Synthetic oligonucleotide
  Target: ANGPTL4; (-) strand; PAM type: NNGRRT; PAM sequence: TGGAGT
agacccagccagaactcgcc

SEQ ID NO: 5653 - DNA, 20 bp, Artificial Sequence
  Description of Artificial Sequence: Synthetic oligonucleotide
  Target: ANGPTL4; (-) strand; PAM type: NNGRRT; PAM sequence: ACGGGT
tggcgcccagctggccggcc

SEQ ID NO: 5654 - DNA, 20 bp, Artificial Sequence
  Description of Artificial Sequence: Synthetic oligonucleotide
  Target: ANGPTL4; (-) strand; PAM type: NNGRRT; PAM sequence: CTGGGT
agaagggtacggagaggccg

SEQ ID NO: 5655 - DNA, 20 bp, Artificial Sequence
  Description of Artificial Sequence: Synthetic oligonucleotide
  Target: ANGPTL4; (-) strand; PAM type: NNGRRT; PAM sequence: AAGGGT
gatcctggtcccaagtggag

SEQ ID NO: 5656 - DNA, 20 bp, Artificial Sequence
  Description of Artificial Sequence: Synthetic oligonucleotide
  Target: ANGPTL4; (-) strand; PAM type: NNGRRT; PAM sequence: CTGGGT
ataaggagggaagctgctgg

SEQ ID NO: 5657 - DNA, 20 bp, Artificial Sequence
  Description of Artificial Sequence: Synthetic oligonucleotide
  Target: ANGPTL4; (-) strand; PAM type: NNGRRT; PAM sequence: TGGGGT
ggcaggaaacagatgcaatg

SEQ ID NO: 5658 - DNA, 20 bp, Artificial Sequence
  Description of Artificial Sequence: Synthetic oligonucleotide
  Target: ANGPTL4; (-) strand; PAM type: NNGRRT; PAM sequence: CAGGAT
aagacggtcaagaccctttt

SEQ ID NO: 5659 - DNA, 20 bp, Artificial Sequence
  Description of Artificial Sequence: Synthetic oligonucleotide
  Target: ANGPTL4; (-) strand; PAM type: NNGRRT; PAM sequence: CTGGGT
gtgccacaaagcactccagc

SEQ ID NO: 5660 - DNA, 20 bp, Artificial Sequence
  Description of Artificial Sequence: Synthetic oligonucleotide
  Target: ANGPTL4; (-) strand; PAM type: NNGRRT; PAM sequence: GAGAAT
tactcgggaggctgaggcag

SEQ ID NO: 5661 - DNA, 20 bp, Artificial Sequence
  Description of Artificial Sequence: Synthetic oligonucleotide
  Target: ANGPTL4; (-) strand; PAM type: NNGRRT; PAM sequence: GAGAAT
tactcaggaggctgaggcag

SEQ ID NO: 5662 - DNA, 20 bp, Artificial Sequence
  Description of Artificial Sequence: Synthetic oligonucleotide
  Target: ANGPTL4; (-) strand; PAM type: NNGRRT; PAM sequence: AGGAGT
tgggcagatcacttgaggtc

SEQ ID NO: 5663 - DNA, 20 bp, Artificial Sequence
  Description of Artificial Sequence: Synthetic oligonucleotide
  Target: ANGPTL4; (-) strand; PAM type: NNGRRT; PAM sequence: CCGGGT
cattataaagatgtttgtgg

SEQ ID NO: 5664 - DNA, 20 bp, Artificial Sequence
  Description of Artificial Sequence: Synthetic oligonucleotide
  Target: ANGPTL4; (-) strand; PAM type: NNGRRT; PAM sequence: AAGAAT
ttcaaaaaaaaaaaaaaaaa

SEQ ID NO: 5665 - DNA, 20 bp, Artificial Sequence
  Description of Artificial Sequence: Synthetic oligonucleotide
  Target: ANGPTL4; (-) strand; PAM type: NNGRRT; PAM sequence: CAGAGT
ctgcactccagcttaggcaa

SEQ ID NO: 5666 - DNA, 20 bp, Artificial Sequence
  Description of Artificial Sequence: Synthetic oligonucleotide
  Target: ANGPTL4; (-) strand; PAM type: NNGRRT; PAM sequence: GAGAAT
cctaattttttttttttttt

SEQ ID NO: 5667 - DNA, 20 bp, Artificial Sequence
  Description of Artificial Sequence: Synthetic oligonucleotide
  Target: ANGPTL4; (-) strand; PAM type: NNGRRT; PAM sequence: TGGGAT
gcttcagcctcccaaagtgc

SEQ ID NO: 5668 - DNA, 20 bp, Artificial Sequence
  Description of Artificial Sequence: Synthetic oligonucleotide
  Target: ANGPTL4; (-) strand; PAM type: NNGRRT; PAM sequence: CAGGAT
ttttgtatttttaattgaga

SEQ ID NO: 5669 - DNA, 20 bp, Artificial Sequence
  Description of Artificial Sequence: Synthetic oligonucleotide
  Target: ANGPTL4; (-) strand; PAM type: NNGRRT; PAM sequence: TTGAGT
tctcactctgtcacccaggc

SEQ ID NO: 5670 - DNA, 20 bp, Artificial Sequence
  Description of Artificial Sequence: Synthetic oligonucleotide
  Target: ANGPTL4; (-) strand; PAM type: NNGRRT; PAM sequence: AGGGGT
ttttctttttcttttgaggc

SEQ ID NO: 5671 - DNA, 20 bp, Artificial Sequence
  Description of Artificial Sequence: Synthetic oligonucleotide
  Target: ANGPTL4; (-) strand; PAM type: NNGRRT; PAM sequence: TGGAGT
cctggctccattgcccaggc

SEQ ID NO: 5672 - DNA, 20 bp, Artificial Sequence
  Description of Artificial Sequence: Synthetic oligonucleotide
  Target: ANGPTL4; (-) strand; PAM type: NNGRRT; PAM sequence: TGGGAT
acctcggcctcccaaagtgc

SEQ ID NO: 5673 - DNA, 20 bp, Artificial Sequence
  Description of Artificial Sequence: Synthetic oligonucleotide
  Target: ANGPTL4; (-) strand; PAM type: NNGRRT; PAM sequence: CAGGGT
ttttgtatttttagtagaga

SEQ ID NO: 5674 - DNA, 20 bp, Artificial Sequence
  Description of Artificial Sequence: Synthetic oligonucleotide
  Target: ANGPTL4; (-) strand; PAM type: NNGRRT; PAM sequence: TGGGAT
tcctcagcctcccaaagtgc

SEQ ID NO: 5675 - DNA, 20 bp, Artificial Sequence
  Description of Artificial Sequence: Synthetic oligonucleotide
  Target: ANGPTL4; (-) strand; PAM type: NNGRRT; PAM sequence: GGGGGT
ttttgtatttttagtagtga

SEQ ID NO: 5676 - DNA, 20 bp, Artificial Sequence
  Description of Artificial Sequence: Synthetic oligonucleotide
  Target: ANGPTL4; (-) strand; PAM type: NNGRRT; PAM sequence: CGGGAT
gcctcagcctcctgagtagc

SEQ ID NO: 5677 - DNA, 20 bp, Artificial Sequence
  Description of Artificial Sequence: Synthetic oligonucleotide
  Target: ANGPTL4; (-) strand; PAM type: NNGRRT; PAM sequence: CTGAGT
gattctcatgcctcagcctc

SEQ ID NO: 5678 - DNA, 20 bp, Artificial Sequence
  Description of Artificial Sequence: Synthetic oligonucleotide
  Target: ANGPTL4; (-) strand; PAM type: NNGRRT; PAM sequence: AGGGAT
acctctgcctcccaggttca

SEQ ID NO: 5679 - DNA, 20 bp, Artificial Sequence
  Description of Artificial Sequence: Synthetic oligonucleotide
  Target: ANGPTL4; (-) strand; PAM type: NNGRRT; PAM sequence: TGGAGT
tctcactctatctcccaggc

SEQ ID NO: 5680 - DNA, 20 bp, Artificial Sequence
  Description of Artificial Sequence: Synthetic oligonucleotide
  Target: ANGPTL4; (-) strand; PAM type: NNGRRT; PAM sequence: CTGAGT
tttggtctttttttttgaga

SEQ ID NO: 5681 - DNA, 20 bp, Artificial Sequence
  Description of Artificial Sequence: Synthetic oligonucleotide
  Target: ANGPTL4; (-) strand; PAM type: NNGRRT; PAM sequence: TGGGAT
ccctcagcctcccgagtagc

SEQ ID NO: 5682 - DNA, 20 bp, Artificial Sequence
  Description of Artificial Sequence: Synthetic oligonucleotide
  Target: ANGPTL4; (-) strand; PAM type: NNGRRT; PAM sequence: CCGAGT
gattctcctccctcagcctc

SEQ ID NO: 5683 - DNA, 20 bp, Artificial Sequence
  Description of Artificial Sequence: Synthetic oligonucleotide
  Target: ANGPTL4; (-) strand; PAM type: NNGRRT; PAM sequence: TGGAGT
tcttactctgtcacccaggc

SEQ ID NO: 5684 - DNA, 20 bp, Artificial Sequence
  Description of Artificial Sequence: Synthetic oligonucleotide
  Target: ANGPTL4; (-) strand; PAM type: NNGRRT; PAM sequence: TTGAGT
tgacttttttttttttgaga

SEQ ID NO: 5685 - DNA, 20 bp, Artificial Sequence
  Description of Artificial Sequence: Synthetic oligonucleotide
  Target: ANGPTL4; (-) strand; PAM type: NNGRRT; PAM sequence: GAGGAT
aaggagatagggatagggtt

SEQ ID NO: 5686 - DNA, 20 bp, Artificial Sequence
  Description of Artificial Sequence: Synthetic oligonucleotide
  Target: ANGPTL4; (-) strand; PAM type: NNGRRT; PAM sequence: TAGGGT
gggctgaaaggagataggga

SEQ ID NO: 5687 - DNA, 20 bp, Artificial Sequence
  Description of Artificial Sequence: Synthetic oligonucleotide
  Target: ANGPTL4; (-) strand; PAM type: NNGRRT; PAM sequence: AGGGAT
cgatggggctgaaaggagat

SEQ ID NO: 5688 - DNA, 20 bp, Artificial Sequence
  Description of Artificial Sequence: Synthetic oligonucleotide
  Target: ANGPTL4; (-) strand; PAM type: NNGRRT; PAM sequence: CGGGGT
ccaaaccaccagcctcctgc

SEQ ID NO: 5689 - DNA, 20 bp, Artificial Sequence
  Description of Artificial Sequence: Synthetic oligonucleotide
  Target: ANGPTL4; (-) strand; PAM type: NNGRRT; PAM sequence: TGGAAT
gaagtactggccgttgaggt

SEQ ID NO: 5690 - DNA, 20 bp, Artificial Sequence
  Description of Artificial Sequence: Synthetic oligonucleotide
  Target: ANGPTL4; (-) strand; PAM type: NNGRRT; PAM sequence: TGGGAT
ttaagcttctgccgctgctg

SEQ ID NO: 5691 - DNA, 20 bp, Artificial Sequence
  Description of Artificial Sequence: Synthetic oligonucleotide
  Target: ANGPTL4; (-) strand; PAM type: NNGRRT; PAM sequence: GCGGGT
caacatggtggtggcctgca

SEQ ID NO: 5692 - DNA, 20 bp, Artificial Sequence
  Description of Artificial Sequence: Synthetic oligonucleotide
  Target: ANGPTL4; (-) strand; PAM type: NNGRRT; PAM sequence: CTGGAT
gctgcctctgctgccatggg

SEQ ID NO: 5693 - DNA, 20 bp, Artificial Sequence
  Description of Artificial Sequence: Synthetic oligonucleotide
  Target: ANGPTL4; (-) strand; PAM type: NNGRRT; PAM sequence: AAGAGT
ccacatcctcgggcagagcc

SEQ ID NO: 5694 - DNA, 20 bp, Artificial Sequence
  Description of Artificial Sequence: Synthetic oligonucleotide
  Target: ANGPTL4; (-) strand; PAM type: NNGRRT; PAM sequence: TAGAGT
tgccccttggtccacgcctc

SEQ ID NO: 5695 - DNA, 20 bp, Artificial Sequence
  Description of Artificial Sequence: Synthetic oligonucleotide
  Target: ANGPTL4; (-) strand; PAM type: NNGRRT; PAM sequence: AGGAGT
ccccaactccctggccagca

SEQ ID NO: 5696 - DNA, 20 bp, Artificial Sequence
  Description of Artificial Sequence: Synthetic oligonucleotide
  Target: ANGPTL4; (-) strand; PAM type: NNGRRT; PAM sequence: CTGAGT
gctggccccaagtggtccct

SEQ ID NO: 5697 - DNA, 20 bp, Artificial Sequence
  Description of Artificial Sequence: Synthetic oligonucleotide
  Target: ANGPTL4; (-) strand; PAM type: NNGRRT; PAM sequence: CTGAGT
gtccccgtcagtcaatgtga

SEQ ID NO: 5698 - DNA, 20 bp, Artificial Sequence
  Description of Artificial Sequence: Synthetic oligonucleotide
  Target: ANGPTL4; (-) strand; PAM type: NNGRRT; PAM sequence: GAGGGT
ttcactttttaaaacaaact

SEQ ID NO: 5699 - DNA, 20 bp, Artificial Sequence
  Description of Artificial Sequence: Synthetic oligonucleotide
  Target: ANGPTL4; (-) strand; PAM type: NNGRRT; PAM sequence: TGGGAT
gtctcggcctcacaaatggc

SEQ ID NO: 5700 - DNA, 20 bp, Artificial Sequence
  Description of Artificial Sequence: Synthetic oligonucleotide
  Target: ANGPTL4; (-) strand; PAM type: NNGRRT; PAM sequence: GGGGGT
ttgtatttttttgtagagat

SEQ ID NO: 5701 - DNA, 20 bp, Artificial Sequence
  Description of Artificial Sequence: Synthetic oligonucleotide
  Target: ANGPTL4; (-) strand; PAM type: NNGRRT; PAM sequence: TAGAGT
gattcttctgcgtcagcctc

SEQ ID NO: 5702 - DNA, 20 bp, Artificial Sequence
  Description of Artificial Sequence: Synthetic oligonucleotide
  Target: ANGPTL4; (-) strand; PAM type: NNGRRT; PAM sequence: TGGAGT
tcttgctctgttgcccaggc

SEQ ID NO: 5703 - DNA, 20 bp, Artificial Sequence
  Description of Artificial Sequence: Synthetic oligonucleotide
  Target: ANGPTL4; (-) strand; PAM type: NNGRRT; PAM sequence: TGGAGT
aaattatttttgttttgaga

SEQ ID NO: 5704 - DNA, 20 bp, Artificial Sequence
  Description of Artificial Sequence: Synthetic oligonucleotide
  Target: ANGPTL4; (-) strand; PAM type: NNGRRT; PAM sequence: TAGAAT
tttgagaccagcctggacaa

SEQ ID NO: 5705 - DNA, 20 bp, Artificial Sequence
  Description of Artificial Sequence: Synthetic oligonucleotide
  Target: ANGPTL4; (-) strand; PAM type: NNGRRT; PAM sequence: TTGAGT
agccaaggcaggaggatccc

SEQ ID NO: 5706 - DNA, 20 bp, Artificial Sequence
  Description of Artificial Sequence: Synthetic oligonucleotide
  Target: ANGPTL4; (-) strand; PAM type: NNGRRT; PAM sequence: GAGGAT
actttgtgaagccaaggcag

SEQ ID NO: 5707 - DNA, 20 bp, Artificial Sequence
  Description of Artificial Sequence: Synthetic oligonucleotide
  Target: ANGPTL4; (-) strand; PAM type: NNGRRT; PAM sequence: GTGGGT
tagaattagagccttcaggg

SEQ ID NO: 5708 - DNA, 20 bp, Artificial Sequence
  Description of Artificial Sequence: Synthetic oligonucleotide
  Target: ANGPTL4; (-) strand; PAM type: NNGRRT; PAM sequence: AGGGGT
gatgtagaattagagccttc

SEQ ID NO: 5709 - DNA, 20 bp, Artificial Sequence
  Description of Artificial Sequence: Synthetic oligonucleotide
  Target: ANGPTL4; (-) strand; PAM type: NNGRRT; PAM sequence: TAGAAT
tttttaacaaaacacagatg

SEQ ID NO: 5710 - DNA, 20 bp, Artificial Sequence
  Description of Artificial Sequence: Synthetic oligonucleotide
  Target: ANGPTL4; (-) strand; PAM type: NNGRRT; PAM sequence: TGGGAT
gcctcggcctcctaaagtgc

SEQ ID NO: 5711 - DNA, 20 bp, Artificial Sequence
  Description of Artificial Sequence: Synthetic oligonucleotide
  Target: ANGPTL4; (-) strand; PAM type: NNGRRT; PAM sequence: CGGGGT
ttttgtatttttagtagaga

SEQ ID NO: 5712 - DNA, 20 bp, Artificial Sequence
  Description of Artificial Sequence: Synthetic oligonucleotide
  Target: ANGPTL4; (-) strand; PAM type: NNGRRT; PAM sequence: TGGGAT
gcctcagcctcctgagtagc

SEQ ID NO: 5713 - DNA, 20 bp, Artificial Sequence
  Description of Artificial Sequence: Synthetic oligonucleotide
  Target: ANGPTL4; (-) strand; PAM type: NNGRRT; PAM sequence: CTGAGT
gattctcctgcctcagcctc

SEQ ID NO: 5714 - DNA, 20 bp, Artificial Sequence
  Description of Artificial Sequence: Synthetic oligonucleotide
  Target: ANGPTL4; (-) strand; PAM type: NNGRRT; PAM sequence: CCGAGT
ctcaccgcaacctccacctc

SEQ ID NO: 5715 - DNA, 20 bp, Artificial Sequence
  Description of Artificial Sequence: Synthetic oligonucleotide
  Target: ANGPTL4; (-) strand; PAM type: NNGRRT; PAM sequence: TGGAGT
tcttgctctgtcacccaggc

SEQ ID NO: 5716 - DNA, 20 bp, Artificial Sequence
  Description of Artificial Sequence: Synthetic oligonucleotide
  Target: ANGPTL4; (-) strand; PAM type: NNGRRT; PAM sequence: TCGGGT
tacagcgggatcacccgacc

SEQ ID NO: 5717 - DNA, 20 bp, Artificial Sequence
  Description of Artificial Sequence: Synthetic oligonucleotide
  Target: ANGPTL4; (-) strand; PAM type: NNGRRT; PAM sequence: CGGGAT
cactatatagagcaatacag

SEQ ID NO: 5718 - DNA, 20 bp, Artificial Sequence
  Description of Artificial Sequence: Synthetic oligonucleotide
  Target: ANGPTL4; (-) strand; PAM type: NNGRRT; PAM sequence: AGGGAT
aatagagtgagaccctatat

SEQ ID NO: 5719 - DNA, 20 bp, Artificial Sequence
  Description of Artificial Sequence: Synthetic oligonucleotide
  Target: ANGPTL4; (-) strand; PAM type: NNGRRT; PAM sequence: TAGAGT
ggccagaccagcctggacaa

SEQ ID NO: 5720 - DNA, 20 bp, Artificial Sequence
  Description of Artificial Sequence: Synthetic oligonucleotide
  Target: ANGPTL4; (-) strand; PAM type: NNGRRT; PAM sequence: TGGGAT
gcctcagcctcctgagtagc

SEQ ID NO: 5721 - DNA, 20 bp, Artificial Sequence
  Description of Artificial Sequence: Synthetic oligonucleotide
  Target: ANGPTL4; (-) strand; PAM type: NNGRRT; PAM sequence: CTGAGT
aattctccggcctcagcctc

SEQ ID NO: 5722 - DNA, 20 bp, Artificial Sequence
  Description of Artificial Sequence: Synthetic oligonucleotide
  Target: ANGPTL4; (-) strand; PAM type: NNGRRT; PAM sequence: CTGGGT
ctcactgcaacctccacctc

SEQ ID NO: 5723 - DNA, 20 bp, Artificial Sequence
  Description of Artificial Sequence: Synthetic oligonucleotide
  Target: ANGPTL4; (-) strand; PAM type: NNGRRT; PAM sequence: GAGAGT
gcccaggcagaggagtcgca

SEQ ID NO: 5724 - DNA, 20 bp, Artificial Sequence
  Description of Artificial Sequence: Synthetic oligonucleotide
  Target: ANGPTL4; (-) strand; PAM type: NNGRRT; PAM sequence: AGGAGT
cacagtgggagcccaggcag

SEQ ID NO: 5725 - DNA, 20 bp, Artificial Sequence
  Description of Artificial Sequence: Synthetic oligonucleotide
  Target: ANGPTL4; (-) strand; PAM type: NNGRRT; PAM sequence: CAGGGT
ccggacggctgctctgagtg

SEQ ID NO: 5726 - DNA, 20 bp, Artificial Sequence
  Description of Artificial Sequence: Synthetic oligonucleotide
  Target: ANGPTL4; (-) strand; PAM type: NNGRRT; PAM sequence: CTGAGT
agcagggccggacggctgct

SEQ ID NO: 5727 - DNA, 20 bp, Artificial Sequence
  Description of Artificial Sequence: Synthetic oligonucleotide
  Target: ANGPTL4; (-) strand; PAM type: NNGRRT; PAM sequence: CCGGGT
ctccgcagccgctgtccggc

SEQ ID NO: 5728 - DNA, 20 bp, Artificial Sequence
  Description of Artificial Sequence: Synthetic oligonucleotide
  Target: ANGPTL4; (-) strand; PAM type: NNGRRT; PAM sequence: GGGGGT
gccgcacaggagcccatgga

SEQ ID NO: 5729 - DNA, 20 bp, Artificial Sequence
  Description of Artificial Sequence: Synthetic oligonucleotide
  Target: ANGPTL4; (-) strand; PAM type: NNGRRT; PAM sequence: GTGGAT
cactcctcagcccttgggtg

SEQ ID NO: 5730 - DNA, 20 bp, Artificial Sequence
  Description of Artificial Sequence: Synthetic oligonucleotide
  Target: ANGPTL4; (-) strand; PAM type: NNGRRT; PAM sequence: TTGGGT
gcgcctgcactcctcagccc

SEQ ID NO: 5731 - DNA, 20 bp, Artificial Sequence
  Description of Artificial Sequence: Synthetic oligonucleotide
  Target: ANGPTL4; (-) strand; PAM type: NNGRRT; PAM sequence: GTGGAT
agcccagctagcttcaccca

SEQ ID NO: 5732 - DNA, 20 bp, Artificial Sequence
  Description of Artificial Sequence: Synthetic oligonucleotide
  Target: ANGPTL4; (-) strand; PAM type: NNGRRT; PAM sequence: TAGGGT
cacaaaccctgagctagaca

SEQ ID NO: 5733 - DNA, 20 bp, Artificial Sequence
  Description of Artificial Sequence: Synthetic oligonucleotide
  Target: ANGPTL4; (-) strand; PAM type: NNGRRT; PAM sequence: CAGAGT
cccaccagagtagctagata

SEQ ID NO: 5734 - DNA, 20 bp, Artificial Sequence
  Description of Artificial Sequence: Synthetic oligonucleotide
  Target: ANGPTL4; (-) strand; PAM type: NNGRRT; PAM sequence: CAGAGT
aaggttctccaaggccccac

SEQ ID NO: 5735 - DNA, 20 bp, Artificial Sequence
  Description of Artificial Sequence: Synthetic oligonucleotide
  Target: ANGPTL4; (-) strand; PAM type: NNGRRT; PAM sequence: CAGAGT
tacaaaccttgagctagata

SEQ ID NO: 5736 - DNA, 20 bp, Artificial Sequence
  Description of Artificial Sequence: Synthetic oligonucleotide
  Target: ANGPTL4; (-) strand; PAM type: NNGRRT; PAM sequence: CAGGGT
cacaaaccctgagctagaca

SEQ ID NO: 5737 - DNA, 20 bp, Artificial Sequence
  Description of Artificial Sequence: Synthetic oligonucleotide
  Target: ANGPTL4; (-) strand; PAM type: NNGRRT; PAM sequence: CAGAGT
cccaccacagtagctagata

SEQ ID NO: 5738 - DNA, 20 bp, Artificial Sequence
  Description of Artificial Sequence: Synthetic oligonucleotide
  Target: ANGPTL4; (-) strand; PAM type: NNGRRT; PAM sequence: CAGAGT
cccaccagattaactagata

SEQ ID NO: 5739 - DNA, 20 bp, Artificial Sequence
  Description of Artificial Sequence: Synthetic oligonucleotide
  Target: ANGPTL4; (-) strand; PAM type: NNGRRT; PAM sequence: GTGGGT
cagtgtggaaggggacccaa

SEQ ID NO: 5740 - DNA, 20 bp, Artificial Sequence
  Description of Artificial Sequence: Synthetic oligonucleotide
  Target: ANGPTL4; (-) strand; PAM type: NNGRRT; PAM sequence: AAGAGT
ataaaagcagtggggaccca

SEQ ID NO: 5741 - DNA, 20 bp, Artificial Sequence
  Description of Artificial Sequence: Synthetic oligonucleotide
  Target: ANGPTL4; (-) strand; PAM type: NNGRRT; PAM sequence: GTGAGT
tgaagctgcagaccttcgca

SEQ ID NO: 5742 - DNA, 20 bp, Artificial Sequence
  Description of Artificial Sequence: Synthetic oligonucleotide
  Target: ANGPTL4; (-) strand; PAM type: NNGRRT; PAM sequence: AGGAGT
gttcatggtttcactggctc

SEQ ID NO: 5743 - DNA, 20 bp, Artificial Sequence
  Description of Artificial Sequence: Synthetic oligonucleotide
  Target: ANGPTL4; (-) strand; PAM type: NNGRRT; PAM sequence: GTGGGT
ttcagcgtttcttccttctg

SEQ ID NO: 5744 - DNA, 20 bp, Artificial Sequence
  Description of Artificial Sequence: Synthetic oligonucleotide
  Target: ANGPTL4; (-) strand; PAM type: NNGRRT; PAM sequence: TGGAGT
agctcttaaggtggcgcgtc

SEQ ID NO: 5745 - DNA, 20 bp, Artificial Sequence
  Description of Artificial Sequence: Synthetic oligonucleotide
  Target: ANGPTL4; (-) strand; PAM type: NNGRRT; PAM sequence: AAGAAT
ttcttggtctcactgacttc

SEQ ID NO: 5746 - DNA, 20 bp, Artificial Sequence
  Description of Artificial Sequence: Synthetic oligonucleotide
  Target: ANGPTL4; (-) strand; PAM type: NNGRRT; PAM sequence: GGGGGT
tggcactgtatccggaattg

SEQ ID NO: 5747 - DNA, 20 bp, Artificial Sequence
  Description of Artificial Sequence: Synthetic oligonucleotide
  Target: ANGPTL4; (-) strand; PAM type: NNGRRT; PAM sequence: CGGAAT
gagtgcagtggcactgtatc

SEQ ID NO: 5748 - DNA, 20 bp, Artificial Sequence
  Description of Artificial Sequence: Synthetic oligonucleotide
  Target: ANGPTL4; (-) strand; PAM type: NNGRRT; PAM sequence: TGGAGT
tctcgctctgttgcctgggc

SEQ ID NO: 5749 - DNA, 20 bp, Artificial Sequence
  Description of Artificial Sequence: Synthetic oligonucleotide
  Target: ANGPTL4; (-) strand; PAM type: NNGRRT; PAM sequence: CAGAAT
ttatttatttattttttaga

SEQ ID NO: 5750 - DNA, 20 bp, Artificial Sequence
  Description of Artificial Sequence: Synthetic oligonucleotide
  Target: ANGPTL4; (-) strand; PAM type: NNGRRT; PAM sequence: TAGGGT
tcaaatacatgtcctagatg

SEQ ID NO: 5751 - DNA, 20 bp, Artificial Sequence
  Description of Artificial Sequence: Synthetic oligonucleotide
  Target: ANGPTL4; (-) strand; PAM type: NNGRRT; PAM sequence: TGGGGT
aaaaaaaaattaacagcagc

SEQ ID NO: 5752 - DNA, 20 bp, Artificial Sequence
  Description of Artificial Sequence: Synthetic oligonucleotide
  Target: ANGPTL4; (-) strand; PAM type: NNGRRT; PAM sequence: CAGAGT
ccgcgctccagcctgggtga

SEQ ID NO: 5753 - DNA, 20 bp, Artificial Sequence
  Description of Artificial Sequence: Synthetic oligonucleotide
  Target: ANGPTL4; (-) strand; PAM type: NNGRRT; PAM sequence: CTGGGT
tcgcactaccgcgctccagc

SEQ ID NO: 5754 - DNA, 20 bp, Artificial Sequence
  Description of Artificial Sequence: Synthetic oligonucleotide
  Target: ANGPTL4; (-) strand; PAM type: NNGRRT; PAM sequence: GAGAAT
tactcgggaggccgaggcag

SEQ ID NO: 5755 - DNA, 20 bp, Artificial Sequence
  Description of Artificial Sequence: Synthetic oligonucleotide
  Target: ANGPTL4; (-) strand; PAM type: NNGRRT; PAM sequence: CTGGGT
actaaaaatacaaaaattag

SEQ ID NO: 5756 - DNA, 20 bp, Artificial Sequence
  Description of Artificial Sequence: Synthetic oligonucleotide
  Target: ANGPTL4; (-) strand; PAM type: NNGRRT; PAM sequence: AGGAGT
cgggcagatcacttgaggtc

SEQ ID NO: 5757 - DNA, 20 bp, Artificial Sequence
  Description of Artificial Sequence: Synthetic oligonucleotide
  Target: ANGPTL4; (-) strand; PAM type: NNGRRT; PAM sequence: AGGAAT
ctccccaagagacatctata

SEQ ID NO: 5758 - DNA, 20 bp, Artificial Sequence
  Description of Artificial Sequence: Synthetic oligonucleotide
  Target: ANGPTL4; (-) strand; PAM type: NNGRRT; PAM sequence: AAGGGT
tgtccccagcacctgccagg

SEQ ID NO: 5759 - DNA, 20 bp, Artificial Sequence
  Description of Artificial Sequence: Synthetic oligonucleotide
  Target: ANGPTL4; (-) strand; PAM type: NNGRRT; PAM sequence: GAGGGT
tggcagagcctggaaatgaa

SEQ ID NO: 5760 - DNA, 20 bp, Artificial Sequence
  Description of Artificial Sequence: Synthetic oligonucleotide
  Target: ANGPTL4; (-) strand; PAM type: NNGRRT; PAM sequence: AAGGAT
gtcaaggtggctgcaggaaa

SEQ ID NO: 5761 - DNA, 20 bp, Artificial Sequence
  Description of Artificial Sequence: Synthetic oligonucleotide
  Target: ANGPTL4; (-) strand; PAM type: NNGRRT; PAM sequence: AGGAGT
tcccagagtgcggggagtgt

SEQ ID NO: 5762 - DNA, 20 bp, Artificial Sequence
  Description of Artificial Sequence: Synthetic oligonucleotide
  Target: ANGPTL4; (-) strand; PAM type: NNGRRT; PAM sequence: GGGAGT
cctcagcctcccagagtgcg

SEQ ID NO: 5763 - DNA, 20 bp, Artificial Sequence
  Description of Artificial Sequence: Synthetic oligonucleotide
  Target: ANGPTL4; (-) strand; PAM type: NNGRRT; PAM sequence: CAGAGT
atctacccacctcagcctcc

SEQ ID NO: 5764 - DNA, 20 bp, Artificial Sequence
  Description of Artificial Sequence: Synthetic oligonucleotide
  Target: ANGPTL4; (-) strand; PAM type: NNGRRT; PAM sequence: CGGGGT
ttttgtatttttagtagaga

SEQ ID NO: 5765 - DNA, 20 bp, Artificial Sequence
  Description of Artificial Sequence: Synthetic oligonucleotide
  Target: ANGPTL4; (-) strand; PAM type: NNGRRT; PAM sequence: CCGAAT
gattctcctgccttagcctc

SEQ ID NO: 5766 - DNA, 20 bp, Artificial Sequence
  Description of Artificial Sequence: Synthetic oligonucleotide
  Target: ANGPTL4; (-) strand; PAM type: NNGRRT; PAM sequence: TGGAGT
tcttgctctgtcacccaggc

SEQ ID NO: 5767 - DNA, 20 bp, Artificial Sequence
  Description of Artificial Sequence: Synthetic oligonucleotide
  Target: ANGPTL4; (-) strand; PAM type: NNGRRT; PAM sequence: CAGAGT
tttttctttcttttttgaga

SEQ ID NO: 5768 - DNA, 20 bp, Artificial Sequence
  Description of Artificial Sequence: Synthetic oligonucleotide
  Target: ANGPTL4; (-) strand; PAM type: NNGRRT; PAM sequence: TGGAGT
gtgatttacagctgcagctc

SEQ ID NO: 5769 - DNA, 20 bp, Artificial Sequence
  Description of Artificial Sequence: Synthetic oligonucleotide
  Target: ANGPTL4; (-) strand; PAM type: NNGRRT; PAM sequence: AGGGAT
gagctcctgtggtccaggag

SEQ ID NO: 5770 - DNA, 20 bp, Artificial Sequence
  Description of Artificial Sequence: Synthetic oligonucleotide
  Target: ANGPTL4; (-) strand; PAM type: NNGRRT; PAM sequence: TGGGGT
gggatggtggcatggagggg

SEQ ID NO: 5771 - DNA, 20 bp, Artificial Sequence
  Description of Artificial Sequence: Synthetic oligonucleotide
  Target: ANGPTL4; (-) strand; PAM type: NNGRRT; PAM sequence: AGGGGT
aggaagggatggtggcatgg

SEQ ID NO: 5772 - DNA, 20 bp, Artificial Sequence
  Description of Artificial Sequence: Synthetic oligonucleotide
  Target: ANGPTL4; (-) strand; PAM type: NNGRRT; PAM sequence: AGGGAT
cccacaccatgaggccagga

SEQ ID NO: 5773 - DNA, 20 bp, Artificial Sequence
  Description of Artificial Sequence: Synthetic oligonucleotide
  Target: ANGPTL4; (-) strand; PAM type: NNGRRT; PAM sequence: ATGAAT
ggcactggacccagcctgtg

SEQ ID NO: 5774 - DNA, 20 bp, Artificial Sequence
  Description of Artificial Sequence: Synthetic oligonucleotide
  Target: ANGPTL4; (-) strand; PAM type: NNGRRT; PAM sequence: TGGGAT
gcctcagcctcccaaagagc

SEQ ID NO: 5775 - DNA, 20 bp, Artificial Sequence
  Description of Artificial Sequence: Synthetic oligonucleotide
  Target: ANGPTL4; (-) strand; PAM type: NNGRRT; PAM sequence: TGGGAT
gccttggcctcccaaagtgc

SEQ ID NO: 5776 - DNA, 20 bp, Artificial Sequence
  Description of Artificial Sequence: Synthetic oligonucleotide
  Target: ANGPTL4; (-) strand; PAM type: NNGRRT; PAM sequence: TGGGGT
ttttgtatttttagtagaga

SEQ ID NO: 5777 - DNA, 20 bp, Artificial Sequence
  Description of Artificial Sequence: Synthetic oligonucleotide
  Target: ANGPTL4; (-) strand; PAM type: NNGRRT; PAM sequence: TGGGAT
gccttagcctctcaagtagc

SEQ ID NO: 5778 - DNA, 20 bp, Artificial Sequence
  Description of Artificial Sequence: Synthetic oligonucleotide
  Target: ANGPTL4; (-) strand; PAM type: NNGRRT; PAM sequence: CCGAGT
ctcactgcaccctctgcctc

SEQ ID NO: 5779 - DNA, 20 bp, Artificial Sequence
  Description of Artificial Sequence: Synthetic oligonucleotide
  Target: ANGPTL4; (-) strand; PAM type: NNGRRT; PAM sequence: TGGAGT
tctcactctgttgcccaggc

SEQ ID NO: 5780 - DNA, 20 bp, Artificial Sequence
  Description of Artificial Sequence: Synthetic oligonucleotide
  Target: ANGPTL4; (-) strand; PAM type: NNGRRT; PAM sequence: CAGGGT
ctttttttttttttttgagg

SEQ ID NO: 5781 - DNA, 20 bp, Artificial Sequence
  Description of Artificial Sequence: Synthetic oligonucleotide
  Target: ANGPTL4; (-) strand; PAM type: NNGRRT; PAM sequence: CAGAGT
tacaatcctttagctagaca

SEQ ID NO: 5782 - DNA, 20 bp, Artificial Sequence
  Description of Artificial Sequence: Synthetic oligonucleotide
  Target: ANGPTL4; (-) strand; PAM type: NNGRRT; PAM sequence: CAGAGT
tacaaacctttagctagaca

SEQ ID NO: 5783 - DNA, 20 bp, Artificial Sequence
  Description of Artificial Sequence: Synthetic oligonucleotide
  Target: ANGPTL4; (+) strand; PAM type: NNGRRT; PAM sequence: TGGAGT
tcttgctctgtcacccaagc

SEQ ID NO: 5784 - DNA, 20 bp, Artificial Sequence
  Description of Artificial Sequence: Synthetic oligonucleotide
  Target: ANGPTL4; (+) strand; PAM type: NNGRRT; PAM sequence: CTGGGT
cttactgcagcctccacctc

SEQ ID NO: 5785 - DNA, 20 bp, Artificial Sequence
  Description of Artificial Sequence: Synthetic oligonucleotide
  Target: ANGPTL4; (+) strand; PAM type: NNGRRT; PAM sequence: GCGAAT
cctccacctcctgggttcaa

SEQ ID NO: 5786 - DNA, 20 bp, Artificial Sequence
  Description of Artificial Sequence: Synthetic oligonucleotide
  Target: ANGPTL4; (+) strand; PAM type: NNGRRT; PAM sequence: TGGGGT
ttctgtatttttagtagaga

SEQ ID NO: 5787 - DNA, 20 bp, Artificial Sequence
  Description of Artificial Sequence: Synthetic oligonucleotide
  Target: ANGPTL4; (+) strand; PAM type: NNGRRT; PAM sequence: TAGGAT
acctcagcctcccaaagtgc

SEQ ID NO: 5788 - DNA, 20 bp, Artificial Sequence
  Description of Artificial Sequence: Synthetic oligonucleotide
  Target: ANGPTL4; (+) strand; PAM type: NNGRRT; PAM sequence: CAGAGT
atttttttttttttttgaga

SEQ ID NO: 5789 - DNA, 20 bp, Artificial Sequence
  Description of Artificial Sequence: Synthetic oligonucleotide
  Target: ANGPTL4; (+) strand; PAM type: NNGRRT; PAM sequence: TGGAGT
tctcgccctgttgcccaggc

SEQ ID NO: 5790 - DNA, 20 bp, Artificial Sequence
  Description of Artificial Sequence: Synthetic oligonucleotide
  Target: ANGPTL4; (+) strand; PAM type: NNGRRT; PAM sequence: CCGGGT
cttactgcaccctctgcctc

SEQ ID NO: 5791 - DNA, 20 bp, Artificial Sequence
  Description of Artificial Sequence: Synthetic oligonucleotide
  Target: ANGPTL4; (+) strand; PAM type: NNGRRT; PAM sequence: CCGAGT
gattctcctgccccagcctc

SEQ ID NO: 5792 - DNA, 20 bp, Artificial Sequence
  Description of Artificial Sequence: Synthetic oligonucleotide
  Target: ANGPTL4; (+) strand; PAM type: NNGRRT; PAM sequence: TGGGAT
gccccagcctcccgagtaac

SEQ ID NO: 5793 - DNA, 20 bp, Artificial Sequence
  Description of Artificial Sequence: Synthetic oligonucleotide
  Target: ANGPTL4; (+) strand; PAM type: NNGRRT; PAM sequence: CCGGGT
ttttacatttttagtagaga

SEQ ID NO: 5794 - DNA, 20 bp, Artificial Sequence
  Description of Artificial Sequence: Synthetic oligonucleotide
  Target: ANGPTL4; (+) strand; PAM type: NNGRRT; PAM sequence: CAGGGT
ttttaaattttttgtacaga

SEQ ID NO: 5795 - DNA, 20 bp, Artificial Sequence
  Description of Artificial Sequence: Synthetic oligonucleotide
  Target: ANGPTL4; (+) strand; PAM type: NNGRRT; PAM sequence: TGGGAT
accttggcctcccaaagtac

SEQ ID NO: 5796 - DNA, 20 bp, Artificial Sequence
  Description of Artificial Sequence: Synthetic oligonucleotide
  Target: ANGPTL4; (+) strand; PAM type: NNGRRT; PAM sequence: GCGGAT
actttgggaggccgaggtag

SEQ ID NO: 5797 - DNA, 20 bp, Artificial Sequence
  Description of Artificial Sequence: Synthetic oligonucleotide
  Target: ANGPTL4; (+) strand; PAM type: NNGRRT; PAM sequence: AGGAGT
taggcggatcacctgaggtc

SEQ ID NO: 5798 - DNA, 20 bp, Artificial Sequence
  Description of Artificial Sequence: Synthetic oligonucleotide
  Target: ANGPTL4; (+) strand; PAM type: NNGRRT; PAM sequence: GAGAAT
tactcgggaggctgaggcag

SEQ ID NO: 5799 - DNA, 20 bp, Artificial Sequence
  Description of Artificial Sequence: Synthetic oligonucleotide
  Target: ANGPTL4; (+) strand; PAM type: NNGRRT; PAM sequence: TGGGAT
ggccaaagtagcccacgcgt

SEQ ID NO: 5800 - DNA, 20 bp, Artificial Sequence
  Description of Artificial Sequence: Synthetic oligonucleotide
  Target: ANGPTL4; (+) strand; PAM type: NNGRRT; PAM sequence: CAGGAT
gtgctccaggaacaattgat

SEQ ID NO: 5801 - DNA, 20 bp, Artificial Sequence
  Description of Artificial Sequence: Synthetic oligonucleotide
  Target: ANGPTL4; (+) strand; PAM type: NNGRRT; PAM sequence: CTGGGT
tcaggatgactttgtctttg

SEQ ID NO: 5802 - DNA, 20 bp, Artificial Sequence
  Description of Artificial Sequence: Synthetic oligonucleotide
  Target: ANGPTL4; (+) strand; PAM type: NNGRRT; PAM sequence: GCGAGT
cagcactttgggaggccgag

SEQ ID NO: 5803 - DNA, 20 bp, Artificial Sequence
  Description of Artificial Sequence: Synthetic oligonucleotide
  Target: ANGPTL4; (+) strand; PAM type: NNGRRT; PAM sequence: GTGAAT
actttgggaggccgaggcga

SEQ ID NO: 5804 - DNA, 20 bp, Artificial Sequence
  Description of Artificial Sequence: Synthetic oligonucleotide
  Target: ANGPTL4; (+) strand; PAM type: NNGRRT; PAM sequence: AGGAGT
cgagtgaatcccttgagctc

SEQ ID NO: 5805 - DNA, 20 bp, Artificial Sequence
  Description of Artificial Sequence: Synthetic oligonucleotide
  Target: ANGPTL4; (+) strand; PAM type: NNGRRT; PAM sequence: GAGGAT
tgcttgggaggctgaggtgg

SEQ ID NO: 5806 - DNA, 20 bp, Artificial Sequence
  Description of Artificial Sequence: Synthetic oligonucleotide
  Target: ANGPTL4; (+) strand; PAM type: NNGRRT; PAM sequence: GGGAGT
tgggaggatcacttgagcct

SEQ ID NO: 5807 - DNA, 20 bp, Artificial Sequence
  Description of Artificial Sequence: Synthetic oligonucleotide
  Target: ANGPTL4; (+) strand; PAM type: NNGRRT; PAM sequence: CTGGGT
ttgtgacactgcactccagc

SEQ ID NO: 5808 - DNA, 20 bp, Artificial Sequence
  Description of Artificial Sequence: Synthetic oligonucleotide
  Target: ANGPTL4; (+) strand; PAM type: NNGRRT; PAM sequence: GTGAGT
gacactgcactccagcctgg

SEQ ID NO: 5809 - DNA, 20 bp, Artificial Sequence
  Description of Artificial Sequence: Synthetic oligonucleotide
  Target: ANGPTL4; (+) strand; PAM type: NNGRRT; PAM sequence: GTGGAT
cactttgggaggctgaggtg

SEQ ID NO: 5810 - DNA, 20 bp, Artificial Sequence
  Description of Artificial Sequence: Synthetic oligonucleotide
  Target: ANGPTL4; (+) strand; PAM type: NNGRRT; PAM sequence: AGGAGT
gtggtggatagcctaagctt

SEQ ID NO: 5811 - DNA, 20 bp, Artificial Sequence
  Description of Artificial Sequence: Synthetic oligonucleotide
  Target: ANGPTL4; (+) strand; PAM type: NNGRRT; PAM sequence: TAGAAT
cgaaaccccaccccctctac

SEQ ID NO: 5812 - DNA, 20 bp, Artificial Sequence
  Description of Artificial Sequence: Synthetic oligonucleotide
  Target: ANGPTL4; (+) strand; PAM type: NNGRRT; PAM sequence: GAGAAT
tactcaggaggctgaggcag

SEQ ID NO: 5813 - DNA, 20 bp, Artificial Sequence
  Description of Artificial Sequence: Synthetic oligonucleotide
  Target: ANGPTL4; (+) strand; PAM type: NNGRRT; PAM sequence: GTGGAT
acgttgggaggccgagacag

SEQ ID NO: 5814 - DNA, 20 bp, Artificial Sequence
  Description of Artificial Sequence: Synthetic oligonucleotide
  Target: ANGPTL4; (+) strand; PAM type: NNGRRT; PAM sequence: AGGAAT
caggtggatcacctgaggtc

SEQ ID NO: 5815 - DNA, 20 bp, Artificial Sequence
  Description of Artificial Sequence: Synthetic oligonucleotide
  Target: ANGPTL4; (+) strand; PAM type: NNGRRT; PAM sequence: GAGAAT
tactcgggaggctgaggctg

SEQ ID NO: 5816 - DNA, 20 bp, Artificial Sequence
  Description of Artificial Sequence: Synthetic oligonucleotide
  Target: ANGPTL4; (+) strand; PAM type: NNGRRT; PAM sequence: GCGGAT
actttgggaggccgaagcgg

SEQ ID NO: 5817 - DNA, 20 bp, Artificial Sequence
  Description of Artificial Sequence: Synthetic oligonucleotide
  Target: ANGPTL4; (+) strand; PAM type: NNGRRT; PAM sequence: GAGAAT
tactcgggaggctgaggcag

SEQ ID NO: 5818 - DNA, 20 bp, Artificial Sequence
  Description of Artificial Sequence: Synthetic oligonucleotide
  Target: ANGPTL4; (+) strand; PAM type: NNGRRT; PAM sequence: TAGAAT
aaaaaataaagagcagtttt

SEQ ID NO: 5819 - DNA, 20 bp, Artificial Sequence
  Description of Artificial Sequence: Synthetic oligonucleotide
  Target: ANGPTL4; (+) strand; PAM type: NNGRRT; PAM sequence: CTGGGT
cagcaggtgcccttaagacc

SEQ ID NO: 5820 - DNA, 20 bp, Artificial Sequence
  Description of Artificial Sequence: Synthetic oligonucleotide
  Target: ANGPTL4; (+) strand; PAM type: NNGRRT; PAM sequence: TGGGAT
aagaggaggagcttgcattc

SEQ ID NO: 5821 - DNA, 20 bp, Artificial Sequence
  Description of Artificial Sequence: Synthetic oligonucleotide
  Target: ANGPTL4; (+) strand; PAM type: NNGRRT; PAM sequence: TGGGAT
gcttgcattctgggatagcc

SEQ ID NO: 5822 - DNA, 20 bp, Artificial Sequence
  Description of Artificial Sequence: Synthetic oligonucleotide
  Target: ANGPTL4; (+) strand; PAM type: NNGRRT; PAM sequence: GGGGGT
cagagagaggctgggggctt

SEQ ID NO: 5823 - DNA, 20 bp, Artificial Sequence
  Description of Artificial Sequence: Synthetic oligonucleotide
  Target: ANGPTL4; (+) strand; PAM type: NNGRRT; PAM sequence: TGGGGT
catctgaacctactcctcac

SEQ ID NO: 5824 - DNA, 20 bp, Artificial Sequence
  Description of Artificial Sequence: Synthetic oligonucleotide
  Target: ANGPTL4; (+) strand; PAM type: NNGRRT; PAM sequence: AGGGAT
tcctgtccactgctgctggg

SEQ ID NO: 5825 - DNA, 20 bp, Artificial Sequence
  Description of Artificial Sequence: Synthetic oligonucleotide
  Target: ANGPTL4; (+) strand; PAM type: NNGRRT; PAM sequence: ATGAGT
cagctgacggggccaagtgt

SEQ ID NO: 5826 - DNA, 20 bp, Artificial Sequence
  Description of Artificial Sequence: Synthetic oligonucleotide
  Target: ANGPTL4; (+) strand; PAM type: NNGRRT; PAM sequence: TTGGGT
ggcagcctgcacgtcagccc

SEQ ID NO: 5827 - DNA, 20 bp, Artificial Sequence
  Description of Artificial Sequence: Synthetic oligonucleotide
  Target: ANGPTL4; (+) strand; PAM type: NNGRRT; PAM sequence: GAGAAT
gtgtgcagtttcagattcca

SEQ ID NO: 5828 - DNA, 20 bp, Artificial Sequence
  Description of Artificial Sequence: Synthetic oligonucleotide
  Target: ANGPTL4; (+) strand; PAM type: NNGRRT; PAM sequence: CTGAGT
tgagctggcttggagccctg

SEQ ID NO: 5829 - DNA, 20 bp, Artificial Sequence
  Description of Artificial Sequence: Synthetic oligonucleotide
  Target: ANGPTL4; (+) strand; PAM type: NNGRRT; PAM sequence: CCGAGT
gtgctctgagccaacctgcc

SEQ ID NO: 5830 - DNA, 20 bp, Artificial Sequence
  Description of Artificial Sequence: Synthetic oligonucleotide
  Target: ANGPTL4; (+) strand; PAM type: NNGRRT; PAM sequence: CAGGGT
tgccagcctccccttcctga

SEQ ID NO: 5831 - DNA, 20 bp, Artificial Sequence
  Description of Artificial Sequence: Synthetic oligonucleotide
  Target: ANGPTL4; (+) strand; PAM type: NNGRRT; PAM sequence: GGGAAT
cccttcctgacagggtatag

SEQ ID NO: 5832 - DNA, 20 bp, Artificial Sequence
  Description of Artificial Sequence: Synthetic oligonucleotide
  Target: ANGPTL4; (+) strand; PAM type: NNGRRT; PAM sequence: ATGGGT
tcctgacagggtatagggga

SEQ ID NO: 5833 - DNA, 20 bp, Artificial Sequence
  Description of Artificial Sequence: Synthetic oligonucleotide
  Target: ANGPTL4; (+) strand; PAM type: NNGRRT; PAM sequence: TTGAAT
cagaggagatcggtgcaagt

SEQ ID NO: 5834 - DNA, 20 bp, Artificial Sequence
  Description of Artificial Sequence: Synthetic oligonucleotide
  Target: ANGPTL4; (+) strand; PAM type: NNGRRT; PAM sequence: TGGAAT
tgaatgaacacttagccctg

SEQ ID NO: 5835 - DNA, 20 bp, Artificial Sequence
  Description of Artificial Sequence: Synthetic oligonucleotide
  Target: ANGPTL4; (+) strand; PAM type: NNGRRT; PAM sequence: ATGAAT
tgaacacttagccctgtgga

SEQ ID NO: 5836 - DNA, 20 bp, Artificial Sequence
  Description of Artificial Sequence: Synthetic oligonucleotide
  Target: ANGPTL4; (+) strand; PAM type: NNGRRT; PAM sequence: CAGAAT
ctctatccctaccccaggct

SEQ ID NO: 5837 - DNA, 20 bp, Artificial Sequence
  Description of Artificial Sequence: Synthetic oligonucleotide
  Target: ANGPTL4; (+) strand; PAM type: NNGRRT; PAM sequence: TGGGGT
ctaccccaggctcagaatgt

SEQ ID NO: 5838 - DNA, 20 bp, Artificial Sequence
  Description of Artificial Sequence: Synthetic oligonucleotide
  Target: ANGPTL4; (+) strand; PAM type: NNGRRT; PAM sequence: ATGAGT
gcagcaccttcgttcagtgc

SEQ ID NO: 5839 - DNA, 20 bp, Artificial Sequence
  Description of Artificial Sequence: Synthetic oligonucleotide
  Target: ANGPTL4; (+) strand; PAM type: NNGRRT; PAM sequence: GTGAAT
caccttcgttcagtgcatga

SEQ ID NO: 5840 - DNA, 20 bp, Artificial Sequence
  Description of Artificial Sequence: Synthetic oligonucleotide
  Target: ANGPTL4; (+) strand; PAM type: NNGRRT; PAM sequence: ATGAAT
ttcgttcagtgcatgagtga

SEQ ID NO: 5841 - DNA, 20 bp, Artificial Sequence
  Description of Artificial Sequence: Synthetic oligonucleotide
  Target: ANGPTL4; (+) strand; PAM type: NNGRRT; PAM sequence: ATGAAT
ttcagtgcatgagtgaatga

SEQ ID NO: 5842 - DNA, 20 bp, Artificial Sequence
  Description of Artificial Sequence: Synthetic oligonucleotide
  Target: ANGPTL4; (+) strand; PAM type: NNGRRT; PAM sequence: TGGAGT
tctcactctgtcacccaggc

SEQ ID NO: 5843 - DNA, 20 bp, Artificial Sequence
  Description of Artificial Sequence: Synthetic oligonucleotide
  Target: ANGPTL4; (+) strand; PAM type: NNGRRT; PAM sequence: CTGAGT
ctcactgcaacctccgtctc

SEQ ID NO: 5844 - DNA, 20 bp, Artificial Sequence
  Description of Artificial Sequence: Synthetic oligonucleotide
  Target: ANGPTL4; (+) strand; PAM type: NNGRRT; PAM sequence: CCGAGT
gattctcctgacacagtctc

SEQ ID NO: 5845 - DNA, 20 bp, Artificial Sequence
  Description of Artificial Sequence: Synthetic oligonucleotide
  Target: ANGPTL4; (+) strand; PAM type: NNGRRT; PAM sequence: TGGGAT
cacccggcctcccaaagtgc

SEQ ID NO: 5846 - DNA, 20 bp, Artificial Sequence
  Description of Artificial Sequence: Synthetic oligonucleotide
  Target: ANGPTL4; (+) strand; PAM type: NNGRRT; PAM sequence: CAGGAT
ttttatttcttttttagaga

SEQ ID NO: 5847 - DNA, 20 bp, Artificial Sequence
  Description of Artificial Sequence: Synthetic oligonucleotide
  Target: ANGPTL4; (+) strand; PAM type: NNGRRT; PAM sequence: TGGAGT
tctcactctgttgcccaggc

SEQ ID NO: 5848 - DNA, 20 bp, Artificial Sequence
  Description of Artificial Sequence: Synthetic oligonucleotide
  Target: ANGPTL4; (+) strand; PAM type: NNGRRT; PAM sequence: GAGGGT
cattaaagaccctggcggta

SEQ ID NO: 5849 - DNA, 20 bp, Artificial Sequence
  Description of Artificial Sequence: Synthetic oligonucleotide
  Target: ANGPTL4; (+) strand; PAM type: NNGRRT; PAM sequence: GGGGGT
ggcggtagagggtaggctat

SEQ ID NO: 5850 - DNA, 20 bp, Artificial Sequence
  Description of Artificial Sequence: Synthetic oligonucleotide
  Target: ANGPTL4; (+) strand; PAM type: NNGRRT; PAM sequence: AAGAAT
caggggagaaatggaagtca

SEQ ID NO: 5851 - DNA, 20 bp, Artificial Sequence
  Description of Artificial Sequence: Synthetic oligonucleotide
  Target: ANGPTL4; (+) strand; PAM type: NNGRRT; PAM sequence: TGGGAT
agaaaagtctctcctggtct

SEQ ID NO: 5852 - DNA, 20 bp, Artificial Sequence
  Description of Artificial Sequence: Synthetic oligonucleotide
  Target: ANGPTL4; (+) strand; PAM type: NNGRRT; PAM sequence: GTGAGT
ccgcaaggcaaggacttttg

SEQ ID NO: 5853 - DNA, 20 bp, Artificial Sequence
  Description of Artificial Sequence: Synthetic oligonucleotide
  Target: ANGPTL4; (+) strand; PAM type: NNGRRT; PAM sequence: CCGGGT
cgcactgcaacctccacctc

SEQ ID NO: 5854 - DNA, 20 bp, Artificial Sequence
  Description of Artificial Sequence: Synthetic oligonucleotide
  Target: ANGPTL4; (+) strand; PAM type: NNGRRT; PAM sequence: CCGAGT
gattctactgcctcagcctc

SEQ ID NO: 5855 - DNA, 20 bp, Artificial Sequence
  Description of Artificial Sequence: Synthetic oligonucleotide
  Target: ANGPTL4; (+) strand; PAM type: NNGRRT; PAM sequence: CTGGGT
ttttgtatttttagtagaga

SEQ ID NO: 5856 - DNA, 20 bp, Artificial Sequence
  Description of Artificial Sequence: Synthetic oligonucleotide
  Target: ANGPTL4; (+) strand; PAM type: NNGRRT; PAM sequence: CTGGGT
agcgtgcgccctctccgcca

SEQ ID NO: 5857 - DNA, 20 bp, Artificial Sequence
  Description of Artificial Sequence: Synthetic oligonucleotide
  Target: ANGPTL4; (+) strand; PAM type: NNGRRT; PAM sequence: CGGAAT
gccactgggtaaggcggggg

SEQ ID NO: 5858 - DNA, 20 bp, Artificial Sequence
  Description of Artificial Sequence: Synthetic oligonucleotide
  Target: ANGPTL4; (+) strand; PAM type: NNGRRT; PAM sequence: AAGAGT
gcgggcaccgtgggggaaag

SEQ ID NO: 5859 - DNA, 20 bp, Artificial Sequence
  Description of Artificial Sequence: Synthetic oligonucleotide
  Target: ANGPTL4; (+) strand; PAM type: NNGRRT; PAM sequence: GCGGAT
gcggggagaagccgagctga

SEQ ID NO: 5860 - DNA, 20 bp, Artificial Sequence
  Description of Artificial Sequence: Synthetic oligonucleotide
  Target: ANGPTL4; (+) strand; PAM type: NNGRRT; PAM sequence: GCGGGT
ccagcggcttctgcaaccaa

SEQ ID NO: 5861 - DNA, 20 bp, Artificial Sequence
  Description of Artificial Sequence: Synthetic oligonucleotide
  Target: ANGPTL4; (+) strand; PAM type: NNGRRT; PAM sequence: GAGAGT
cctggaaccccaacgtcccc

SEQ ID NO: 5862 - DNA, 20 bp, Artificial Sequence
  Description of Artificial Sequence: Synthetic oligonucleotide
  Target: ANGPTL4; (+) strand; PAM type: NNGRRT; PAM sequence: CCGAAT
cccaacgtccccgagagtcc

SEQ ID NO: 5863 - DNA, 20 bp, Artificial Sequence
  Description of Artificial Sequence: Synthetic oligonucleotide
  Target: ANGPTL4; (+) strand; PAM type: NNGRRT; PAM sequence: GAGGAT
cccgctcccaggctacctaa

SEQ ID NO: 5864 - DNA, 20 bp, Artificial Sequence
  Description of Artificial Sequence: Synthetic oligonucleotide
  Target: ANGPTL4; (+) strand; PAM type: NNGRRT; PAM sequence: ATGAAT
gctttgcgtcctgggacgag

SEQ ID NO: 5865 - DNA, 20 bp, Artificial Sequence
  Description of Artificial Sequence: Synthetic oligonucleotide
  Target: ANGPTL4; (+) strand; PAM type: NNGRRT; PAM sequence: GCGGGT
ggagcggcgcctgagcgcgt

SEQ ID NO: 5866 - DNA, 20 bp, Artificial Sequence
  Description of Artificial Sequence: Synthetic oligonucleotide
  Target: ANGPTL4; (+) strand; PAM type: NNGRRT; PAM sequence: AGGGGT
gtccgcctgtcagggaaccg

SEQ ID NO: 5867 - DNA, 20 bp, Artificial Sequence
  Description of Artificial Sequence: Synthetic oligonucleotide
  Target: ANGPTL4; (+) strand; PAM type: NNGRRT; PAM sequence: CCGGGT
ctcccgttagcccctgagag

SEQ ID NO: 5868 - DNA, 20 bp, Artificial Sequence
  Description of Artificial Sequence: Synthetic oligonucleotide
  Target: ANGPTL4; (+) strand; PAM type: NNGRRT; PAM sequence: AAGGGT
tagtggctctcctggcttgg

SEQ ID NO: 5869 - DNA, 20 bp, Artificial Sequence
  Description of Artificial Sequence: Synthetic oligonucleotide
  Target: ANGPTL4; (+) strand; PAM type: NNGRRT; PAM sequence: AGGAGT
tggcttggaagggtatggac

SEQ ID NO: 5870 - DNA, 20 bp, Artificial Sequence
  Description of Artificial Sequence: Synthetic oligonucleotide
  Target: ANGPTL4; (+) strand; PAM type: NNGRRT; PAM sequence: CGGGGT
acaggagtggggcgtggggg

SEQ ID NO: 5871 - DNA, 20 bp, Artificial Sequence
  Description of Artificial Sequence: Synthetic oligonucleotide
  Target: ANGPTL4; (+) strand; PAM type: NNGRRT; PAM sequence: AGGGAT
ccctgggcttccctgcgtca

SEQ ID NO: 5872 - DNA, 20 bp, Artificial Sequence
  Description of Artificial Sequence: Synthetic oligonucleotide
  Target: ANGPTL4; (+) strand; PAM type: NNGRRT; PAM sequence: AGGAAT
agggaggttcgctcaaggcc

SEQ ID NO: 5873 - DNA, 20 bp, Artificial Sequence
  Description of Artificial Sequence: Synthetic oligonucleotide
  Target: ANGPTL4; (+) strand; PAM type: NNGRRT; PAM sequence: GAGAAT
tacttgggaggctgaggcag

SEQ ID NO: 5874 - DNA, 20 bp, Artificial Sequence
  Description of Artificial Sequence: Synthetic oligonucleotide
  Target: ANGPTL4; (+) strand; PAM type: NNGRRT; PAM sequence: CAGAGT
ctgcactccagcctgggcaa

SEQ ID NO: 5875 - DNA, 20 bp, Artificial Sequence
  Description of Artificial Sequence: Synthetic oligonucleotide
  Target: ANGPTL4; (+) strand; PAM type: NNGRRT; PAM sequence: GTGGAT
actttgggagggcgaggcca

SEQ ID NO: 5876 - DNA, 20 bp, Artificial Sequence
  Description of Artificial Sequence: Synthetic oligonucleotide
  Target: ANGPTL4; (+) strand; PAM type: NNGRRT; PAM sequence: AGGAGT
ccagtggatcacctgaggtc

SEQ ID NO: 5877 - DNA, 20 bp, Artificial Sequence
  Description of Artificial Sequence: Synthetic oligonucleotide
  Target: ANGPTL4; (+) strand; PAM type: NNGRRT; PAM sequence: CTGGGT
actaaaaatacaaaaattag

SEQ ID NO: 5878 - DNA, 20 bp, Artificial Sequence
  Description of Artificial Sequence: Synthetic oligonucleotide
  Target: ANGPTL4; (+) strand; PAM type: NNGRRT; PAM sequence: CGGGAT
aggcggaggttgcagtgagc

SEQ ID NO: 5879 - DNA, 20 bp, Artificial Sequence
  Description of Artificial Sequence: Synthetic oligonucleotide
  Target: ANGPTL4; (+) strand; PAM type: NNGRRT; PAM sequence: AAGAAT
tacttgggaggctgagacac

SEQ ID NO: 5880 - DNA, 20 bp, Artificial Sequence
  Description of Artificial Sequence: Synthetic oligonucleotide
  Target: ANGPTL4; (+) strand; PAM type: NNGRRT; PAM sequence: TTGAGT
ggctgagacacaagaatcac

SEQ ID NO: 5881 - DNA, 20 bp, Artificial Sequence
  Description of Artificial Sequence: Synthetic oligonucleotide
  Target: ANGPTL4; (+) strand; PAM type: NNGRRT; PAM sequence: CTGGGT
ttgcgccactgcactccaac

SEQ ID NO: 5882 - DNA, 20 bp, Artificial Sequence
  Description of Artificial Sequence: Synthetic oligonucleotide
  Target: ANGPTL4; (+) strand; PAM type: NNGRRT; PAM sequence: GAGGAT
acacaggaggctgaaaacag

SEQ ID NO: 5883 - DNA, 20 bp, Artificial Sequence
  Description of Artificial Sequence: Synthetic oligonucleotide
  Target: ANGPTL4; (+) strand; PAM type: NNGRRT; PAM sequence: AGGAGT
caggaggatcgcctgacccc

SEQ ID NO: 5884 - DNA, 20 bp, Artificial Sequence
  Description of Artificial Sequence: Synthetic oligonucleotide
  Target: ANGPTL4; (+) strand; PAM type: NNGRRT; PAM sequence: GCGGAT
gactcccttgcctggcctca

SEQ ID NO: 5885 - DNA, 20 bp, Artificial Sequence
  Description of Artificial Sequence: Synthetic oligonucleotide
  Target: ANGPTL4; (+) strand; PAM type: NNGRRT; PAM sequence: AAGGAT
ctcagcggatggagatttgg

SEQ ID NO: 5886 - DNA, 20 bp, Artificial Sequence
  Description of Artificial Sequence: Synthetic oligonucleotide
  Target: ANGPTL4; (+) strand; PAM type: NNGRRT; PAM sequence: ATGGAT
gcggatggagatttggaagg

SEQ ID NO: 5887 - DNA, 20 bp, Artificial Sequence
  Description of Artificial Sequence: Synthetic oligonucleotide
  Target: ANGPTL4; (+) strand; PAM type: NNGRRT; PAM sequence: ATGAGT
atggagatttggaaggatgg

SEQ ID NO: 5888 - DNA, 20 bp, Artificial Sequence
  Description of Artificial Sequence: Synthetic oligonucleotide
  Target: ANGPTL4; (+) strand; PAM type: NNGRRT; PAM sequence: GTGGAT
agatttggaaggatggatga

SEQ ID NO: 5889 - DNA, 20 bp, Artificial Sequence
  Description of Artificial Sequence: Synthetic oligonucleotide
  Target: ANGPTL4; (+) strand; PAM type: NNGRRT; PAM sequence: ATGAAT
ttggaaggatggatgagtgg

SEQ ID NO: 5890 - DNA, 20 bp, Artificial Sequence
  Description of Artificial Sequence: Synthetic oligonucleotide
  Target: ANGPTL4; (+) strand; PAM type: NNGRRT; PAM sequence: TGGGGT
gagtggatgaattaagaggt

SEQ ID NO: 5891 - DNA, 20 bp, Artificial Sequence
  Description of Artificial Sequence: Synthetic oligonucleotide
  Target: ANGPTL4; (+) strand; PAM type: NNGRRT; PAM sequence: CTGGGT
aagaggttggggtaggcaag

SEQ ID NO: 5892 - DNA, 20 bp, Artificial Sequence
  Description of Artificial Sequence: Synthetic oligonucleotide
  Target: ANGPTL4; (+) strand; PAM type: NNGRRT; PAM sequence: CAGGAT
caactcaaggctcagaacag

SEQ ID NO: 5893 - DNA, 20 bp, Artificial Sequence
  Description of Artificial Sequence: Synthetic oligonucleotide
  Target: ANGPTL4; (+) strand; PAM type: NNGRRT; PAM sequence: GCGAAT
cacctggagaagcagcacct

SEQ ID NO: 5894 - DNA, 20 bp, Artificial Sequence
  Description of Artificial Sequence: Synthetic oligonucleotide
  Target: ANGPTL4; (+) strand; PAM type: NNGRRT; PAM sequence: TAGGAT
tctgcaaagccaggtaaccc

SEQ ID NO: 5895 - DNA, 20 bp, Artificial Sequence
  Description of Artificial Sequence: Synthetic oligonucleotide
  Target: ANGPTL4; (+) strand; PAM type: NNGRRT; PAM sequence: GTGAGT
caatgtcagccgcctgcacc

SEQ ID NO: 5896 - DNA, 20 bp, Artificial Sequence
  Description of Artificial Sequence: Synthetic oligonucleotide
  Target: ANGPTL4; (+) strand; PAM type: NNGRRT; PAM sequence: TGGAGT
aaggagaagatgtcctggcc

SEQ ID NO: 5897 - DNA, 20 bp, Artificial Sequence
  Description of Artificial Sequence: Synthetic oligonucleotide
  Target: ANGPTL4; (+) strand; PAM type: NNGRRT; PAM sequence: CTGGGT
ccctgagggctcaccagtct

SEQ ID NO: 5898 - DNA, 20 bp, Artificial Sequence
  Description of Artificial Sequence: Synthetic oligonucleotide
  Target: ANGPTL4; (+) strand; PAM type: NNGRRT; PAM sequence: AGGGGT
tcttgagggacttgagctgc

SEQ ID NO: 5899 - DNA, 20 bp, Artificial Sequence
  Description of Artificial Sequence: Synthetic oligonucleotide
  Target: ANGPTL4; (+) strand; PAM type: NNGRRT; PAM sequence: TGGGGT
ggtgctggagaaggtagaaa

SEQ ID NO: 5900 - DNA, 20 bp, Artificial Sequence
  Description of Artificial Sequence: Synthetic oligonucleotide
  Target: ANGPTL4; (+) strand; PAM type: NNGRRT; PAM sequence: CGGGGT
gagaaggtagaaatggggtt

SEQ ID NO: 5901 - DNA, 20 bp, Artificial Sequence
  Description of Artificial Sequence: Synthetic oligonucleotide
  Target: ANGPTL4; (+) strand; PAM type: NNGRRT; PAM sequence: GAGGGT
aaggttagaaccttctaggg

SEQ ID NO: 5902 - DNA, 20 bp, Artificial Sequence
  Description of Artificial Sequence: Synthetic oligonucleotide
  Target: ANGPTL4; (+) strand; PAM type: NNGRRT; PAM sequence: GGGGGT
ggggagggtgtcatggagga

SEQ ID NO: 5903 - DNA, 20 bp, Artificial Sequence
  Description of Artificial Sequence: Synthetic oligonucleotide
  Target: ANGPTL4; (+) strand; PAM type: NNGRRT; PAM sequence: TGGGGT
ttgggccctccacaatgtct

SEQ ID NO: 5904 - DNA, 20 bp, Artificial Sequence
  Description of Artificial Sequence: Synthetic oligonucleotide
  Target: ANGPTL4; (+) strand; PAM type: NNGRRT; PAM sequence: GGGAAT
cacaatgtcttggggtatgt

SEQ ID NO: 5905 - DNA, 20 bp, Artificial Sequence
  Description of Artificial Sequence: Synthetic oligonucleotide
  Target: ANGPTL4; (+) strand; PAM type: NNGRRT; PAM sequence: CTGGGT
ctgtggctgtccacagccaa

SEQ ID NO: 5906 - DNA, 20 bp, Artificial Sequence
  Description of Artificial Sequence: Synthetic oligonucleotide
  Target: ANGPTL4; (+) strand; PAM type: NNGRRT; PAM sequence: TTGGAT
acagccaactgggtgaaagt

SEQ ID NO: 5907 - DNA, 20 bp, Artificial Sequence
  Description of Artificial Sequence: Synthetic oligonucleotide
  Target: ANGPTL4; (+) strand; PAM type: NNGRRT; PAM sequence: TAGGGT
tggatccccctctcacaccc

SEQ ID NO: 5908 - DNA, 20 bp, Artificial Sequence
  Description of Artificial Sequence: Synthetic oligonucleotide
  Target: ANGPTL4; (+) strand; PAM type: NNGRRT; PAM sequence: GAGGGT
gcttccagcactgtagacct

SEQ ID NO: 5909 - DNA, 20 bp, Artificial Sequence
  Description of Artificial Sequence: Synthetic oligonucleotide
  Target: ANGPTL4; (+) strand; PAM type: NNGRRT; PAM sequence: CAGGGT
ggctagcatctcagcgtggt

SEQ ID NO: 5910 - DNA, 20 bp, Artificial Sequence
  Description of Artificial Sequence: Synthetic oligonucleotide
  Target: ANGPTL4; (+) strand; PAM type: NNGRRT; PAM sequence: CAGGAT
ccctcccaaagccaccatcc

SEQ ID NO: 5911 - DNA, 20 bp, Artificial Sequence
  Description of Artificial Sequence: Synthetic oligonucleotide
  Target: ANGPTL4; (+) strand; PAM type: NNGRRT; PAM sequence: GAGGGT
cccaggatgaggggcttctg

SEQ ID NO: 5912 - DNA, 20 bp, Artificial Sequence
  Description of Artificial Sequence: Synthetic oligonucleotide
  Target: ANGPTL4; (+) strand; PAM type: NNGRRT; PAM sequence: AGGGGT
gaaatgcggtggaagggggc

SEQ ID NO: 5913 - DNA, 20 bp, Artificial Sequence
  Description of Artificial Sequence: Synthetic oligonucleotide
  Target: ANGPTL4; (+) strand; PAM type: NNGRRT; PAM sequence: GTGGGT
tggaagggggcaggggttct

SEQ ID NO: 5914 - DNA, 20 bp, Artificial Sequence
  Description of Artificial Sequence: Synthetic oligonucleotide
  Target: ANGPTL4; (+) strand; PAM type: NNGRRT; PAM sequence: CTGGAT
tggccgcgtgcccatcctta

SEQ ID NO: 5915 - DNA, 20 bp, Artificial Sequence
  Description of Artificial Sequence: Synthetic oligonucleotide
  Target: ANGPTL4; (+) strand; PAM type: NNGRRT; PAM sequence: CGGAGT
gttttgtttgctttttgaga

SEQ ID NO: 5916 - DNA, 20 bp, Artificial Sequence
  Description of Artificial Sequence: Synthetic oligonucleotide
  Target: ANGPTL4; (+) strand; PAM type: NNGRRT; PAM sequence: TGGAGT
tctcgctctgttgtccaggc

SEQ ID NO: 5917 - DNA, 20 bp, Artificial Sequence
  Description of Artificial Sequence: Synthetic oligonucleotide
  Target: ANGPTL4; (+) strand; PAM type: NNGRRT; PAM sequence: CTGGGT
actgcaacctctgcctccca

SEQ ID NO: 5918 - DNA, 20 bp, Artificial Sequence
  Description of Artificial Sequence: Synthetic oligonucleotide
  Target: ANGPTL4; (+) strand; PAM type: NNGRRT; PAM sequence: TGGGAT
gcctcagcctctcaagtaga

SEQ ID NO: 5919 - DNA, 20 bp, Artificial Sequence
  Description of Artificial Sequence: Synthetic oligonucleotide
  Target: ANGPTL4; (+) strand; PAM type: NNGRRT; PAM sequence: CAGAGT
agtcttttttttttttgaga

SEQ ID NO: 5920 - DNA, 20 bp, Artificial Sequence
  Description of Artificial Sequence: Synthetic oligonucleotide
  Target: ANGPTL4; (+) strand; PAM type: NNGRRT; PAM sequence: TGGAGT
tctcactctgtcacccaggt

SEQ ID NO: 5921 - DNA, 20 bp, Artificial Sequence
  Description of Artificial Sequence: Synthetic oligonucleotide
  Target: ANGPTL4; (+) strand; PAM type: NNGRRT; PAM sequence: CCGGGT
ctgactgcaacctctgcctc

SEQ ID NO: 5922 - DNA, 20 bp, Artificial Sequence
  Description of Artificial Sequence: Synthetic oligonucleotide
  Target: ANGPTL4; (+) strand; PAM type: NNGRRT; PAM sequence: TGGGAT
gcctctgcctcctaaggagc

SEQ ID NO: 5923 - DNA, 20 bp, Artificial Sequence
  Description of Artificial Sequence: Synthetic oligonucleotide
  Target: ANGPTL4; (+) strand; PAM type: NNGRRT; PAM sequence: TGGGGT
tttgtatgttttactagaga

SEQ ID NO: 5924 - DNA, 20 bp, Artificial Sequence
  Description of Artificial Sequence: Synthetic oligonucleotide
  Target: ANGPTL4; (+) strand; PAM type: NNGRRT; PAM sequence: CTGGAT
tccgcccgcctcccaaagtg

SEQ ID NO: 5925 - DNA, 20 bp, Artificial Sequence
  Description of Artificial Sequence: Synthetic oligonucleotide
  Target: ANGPTL4; (+) strand; PAM type: NNGRRT; PAM sequence: GTGGAT
tgctatgcgctggggcctgc

SEQ ID NO: 5926 - DNA, 20 bp, Artificial Sequence
  Description of Artificial Sequence: Synthetic oligonucleotide
  Target: ANGPTL4; (+) strand; PAM type: NNGRRT; PAM sequence: TTGAGT
ccagcctcatggagcctcca

SEQ ID NO: 5927 - DNA, 20 bp, Artificial Sequence
  Description of Artificial Sequence: Synthetic oligonucleotide
  Target: ANGPTL4; (+) strand; PAM type: NNGRRT; PAM sequence: AGGAGT
attagatgacctcagtgtcc

SEQ ID NO: 5928 - DNA, 20 bp, Artificial Sequence
  Description of Artificial Sequence: Synthetic oligonucleotide
  Target: ANGPTL4; (+) strand; PAM type: NNGRRT; PAM sequence: TGGGGT
gtccttgctcaattcccatt

SEQ ID NO: 5929 - DNA, 20 bp, Artificial Sequence
  Description of Artificial Sequence: Synthetic oligonucleotide
  Target: ANGPTL4; (+) strand; PAM type: NNGRRT; PAM sequence: GGGGGT
ggggtgttctggcctggtct

SEQ ID NO: 5930 - DNA, 20 bp, Artificial Sequence
  Description of Artificial Sequence: Synthetic oligonucleotide
  Target: ANGPTL4; (+) strand; PAM type: NNGRRT; PAM sequence: CAGGGT
ggtctgggggtgaggcaagg

SEQ ID NO: 5931 - DNA, 20 bp, Artificial Sequence
  Description of Artificial Sequence: Synthetic oligonucleotide
  Target: ANGPTL4; (+) strand; PAM type: NNGRRT; PAM sequence: GAGAGT
cagagagagaagtgaggaaa

SEQ ID NO: 5932 - DNA, 20 bp, Artificial Sequence
  Description of Artificial Sequence: Synthetic oligonucleotide
  Target: ANGPTL4; (+) strand; PAM type: NNGRRT; PAM sequence: GCGGAT
actttgggaggccaaggctg

SEQ ID NO: 5933 - DNA, 20 bp, Artificial Sequence
  Description of Artificial Sequence: Synthetic oligonucleotide
  Target: ANGPTL4; (+) strand; PAM type: NNGRRT; PAM sequence: CAGAAT
agctgctccggaggctgcgg

SEQ ID NO: 5934 - DNA, 20 bp, Artificial Sequence
  Description of Artificial Sequence: Synthetic oligonucleotide
  Target: ANGPTL4; (+) strand; PAM type: NNGRRT; PAM sequence: GAGAGT
caaaaaacaaaacaaaaaaa

SEQ ID NO: 5935 - DNA, 20 bp, Artificial Sequence
  Description of Artificial Sequence: Synthetic oligonucleotide
  Target: ANGPTL4; (+) strand; PAM type: NNGRRT; PAM sequence: AAGGGT
ggcaggacggtgtgtggtac

SEQ ID NO: 5936 - DNA, 20 bp, Artificial Sequence
  Description of Artificial Sequence: Synthetic oligonucleotide
  Target: ANGPTL4; (+) strand; PAM type: NNGRRT; PAM sequence: GAGGGT
aagaaagcctgtgtgccaga

SEQ ID NO: 5937 - DNA, 20 bp, Artificial Sequence
  Description of Artificial Sequence: Synthetic oligonucleotide
  Target: ANGPTL4; (+) strand; PAM type: NNGRRT; PAM sequence: GTGGGT
gcctgtgtgccagagagggt

SEQ ID NO: 5938 - DNA, 20 bp, Artificial Sequence
  Description of Artificial Sequence: Synthetic oligonucleotide
  Target: ANGPTL4; (+) strand; PAM type: NNGRRT; PAM sequence: GAGGAT
tgggtacagcatggcaggag

SEQ ID NO: 5939 - DNA, 20 bp, Artificial Sequence
  Description of Artificial Sequence: Synthetic oligonucleotide
  Target: ANGPTL4; (+) strand; PAM type: NNGRRT; PAM sequence: AGGGAT
atctcccttcagggctgccc

SEQ ID NO: 5940 - DNA, 20 bp, Artificial Sequence
  Description of Artificial Sequence: Synthetic oligonucleotide
  Target: ANGPTL4; (+) strand; PAM type: NNGRRT; PAM sequence: CAGAGT
tgttccaggttggggagagg

SEQ ID NO: 5941 - DNA, 20 bp, Artificial Sequence
  Description of Artificial Sequence: Synthetic oligonucleotide
  Target: ANGPTL4; (+) strand; PAM type: NNGRRT; PAM sequence: AGGGGT
actatttgaaatccagcctc

SEQ ID NO: 5942 - DNA, 20 bp, Artificial Sequence
  Description of Artificial Sequence: Synthetic oligonucleotide
  Target: ANGPTL4; (+) strand; PAM type: NNGRRT; PAM sequence: TAGGGT
aactgcaagatgacctcagg

SEQ ID NO: 5943 - DNA, 20 bp, Artificial Sequence
  Description of Artificial Sequence: Synthetic oligonucleotide
  Target: ANGPTL4; (+) strand; PAM type: NNGRRT; PAM sequence: CAGGGT
caaaacaaaaaaattaaagg

SEQ ID NO: 5944 - DNA, 20 bp, Artificial Sequence
  Description of Artificial Sequence: Synthetic oligonucleotide
  Target: ANGPTL4; (+) strand; PAM type: NNGRRT; PAM sequence: TGGAGT
ttttttttttttttttgaga

SEQ ID NO: 5945 - DNA, 20 bp, Artificial Sequence
  Description of Artificial Sequence: Synthetic oligonucleotide
  Target: ANGPTL4; (+) strand; PAM type: NNGRRT; PAM sequence: TGGAGT
tggagttttgctcttggagc

SEQ ID NO: 5946 - DNA, 20 bp, Artificial Sequence
  Description of Artificial Sequence: Synthetic oligonucleotide
  Target: ANGPTL4; (+) strand; PAM type: NNGRRT; PAM sequence: CCGGGT
ctcactgaaacctccgcctc

SEQ ID NO: 5947 - DNA, 20 bp, Artificial Sequence
  Description of Artificial Sequence: Synthetic oligonucleotide
  Target: ANGPTL4; (+) strand; PAM type: NNGRRT; PAM sequence: CTGGGT
ttttgtatttttagtagaga

SEQ ID NO: 5948 - DNA, 20 bp, Artificial Sequence
  Description of Artificial Sequence: Synthetic oligonucleotide
  Target: ANGPTL4; (+) strand; PAM type: NNGRRT; PAM sequence: TGGGAT
actttggcctcccaaaatgc

SEQ ID NO: 5949 - DNA, 20 bp, Artificial Sequence
  Description of Artificial Sequence: Synthetic oligonucleotide
  Target: ANGPTL4; (+) strand; PAM type: NNGRRT; PAM sequence: CTGGGT
ctttaaaatgcagcccttgt

SEQ ID NO: 5950 - DNA, 20 bp, Artificial Sequence
  Description of Artificial Sequence: Synthetic oligonucleotide
  Target: ANGPTL4; (+) strand; PAM type: NNGRRT; PAM sequence: GAGGAT
cactttgggaggcctatcat

SEQ ID NO: 5951 - DNA, 20 bp, Artificial Sequence
  Description of Artificial Sequence: Synthetic oligonucleotide
  Target: ANGPTL4; (+) strand; PAM type: NNGRRT; PAM sequence: AGGAGT
ggcagacagatcacgaggtc

SEQ ID NO: 5952 - DNA, 20 bp, Artificial Sequence
  Description of Artificial Sequence: Synthetic oligonucleotide
  Target: ANGPTL4; (+) strand; PAM type: NNGRRT; PAM sequence: GAGAAT
tactcaggtggctgaggcag

SEQ ID NO: 5953 - DNA, 20 bp, Artificial Sequence
  Description of Artificial Sequence: Synthetic oligonucleotide
  Target: ANGPTL4; (+) strand; PAM type: NNGRRT; PAM sequence: GAGGGT
tactcgggaggccaaggcag

SEQ ID NO: 5954 - DNA, 20 bp, Artificial Sequence
  Description of Artificial Sequence: Synthetic oligonucleotide
  Target: ANGPTL4; (+) strand; PAM type: NNGRRT; PAM sequence: AGGAGT
caggagggtcacttcagccc

SEQ ID NO: 5955 - DNA, 20 bp, Artificial Sequence
  Description of Artificial Sequence: Synthetic oligonucleotide
  Target: ANGPTL4; (+) strand; PAM type: NNGRRT; PAM sequence: GTGAAT
cgtgagccgtgatcacacct

SEQ ID NO: 5956 - DNA, 20 bp, Artificial Sequence
  Description of Artificial Sequence: Synthetic oligonucleotide
  Target: ANGPTL4; (+) strand; PAM type: NNGRRT; PAM sequence: AAGAAT
tgcttgtggggctgaagcac

SEQ ID NO: 5957 - DNA, 20 bp, Artificial Sequence
  Description of Artificial Sequence: Synthetic oligonucleotide
  Target: ANGPTL4; (+) strand; PAM type: NNGRRT; PAM sequence: CAGAGT
ctgcgatccagcctgggcaa

SEQ ID NO: 5958 - DNA, 20 bp, Artificial Sequence
  Description of Artificial Sequence: Synthetic oligonucleotide
  Target: ANGPTL4; (+) strand; PAM type: NNGRRT; PAM sequence: CGGGGT
cattacaagaggttacaaca

SEQ ID NO: 5959 - DNA, 20 bp, Artificial Sequence
  Description of Artificial Sequence: Synthetic oligonucleotide
  Target: ANGPTL4; (+) strand; PAM type: NNGRRT; PAM sequence: CTGGGT
cctcccacactcagtccctg

SEQ ID NO: 5960 - DNA, 20 bp, Artificial Sequence
  Description of Artificial Sequence: Synthetic oligonucleotide
  Target: ANGPTL4; (+) strand; PAM type: NNGRRT; PAM sequence: TCGAGT
ctccctctgacccaccctcc

SEQ ID NO: 5961 - DNA, 20 bp, Artificial Sequence
  Description of Artificial Sequence: Synthetic oligonucleotide
  Target: ANGPTL4; (+) strand; PAM type: NNGRRT; PAM sequence: AGGGAT
ccaccctcctcgagtcctcc

SEQ ID NO: 5962 - DNA, 20 bp, Artificial Sequence
  Description of Artificial Sequence: Synthetic oligonucleotide
  Target: ANGPTL4; (+) strand; PAM type: NNGRRT; PAM sequence: ATGAGT
cctcctcgagtcctccaggg

SEQ ID NO: 5963 - DNA, 20 bp, Artificial Sequence
  Description of Artificial Sequence: Synthetic oligonucleotide
  Target: ANGPTL4; (+) strand; PAM type: NNGRRT; PAM sequence: CTGGGT
gtgagggagctgctgtcttc

SEQ ID NO: 5964 - DNA, 20 bp, Artificial Sequence
  Description of Artificial Sequence: Synthetic oligonucleotide
  Target: ANGPTL4; (+) strand; PAM type: NNGRRT; PAM sequence: GGGGGT
gctgtcttcctgggtttgga

SEQ ID NO: 5965 - DNA, 20 bp, Artificial Sequence
  Description of Artificial Sequence: Synthetic oligonucleotide
  Target: ANGPTL4; (+) strand; PAM type: NNGRRT; PAM sequence: GGGAGT
ggtgcttggcagccagatga

SEQ ID NO: 5966 - DNA, 20 bp, Artificial Sequence
  Description of Artificial Sequence: Synthetic oligonucleotide
  Target: ANGPTL4; (+) strand; PAM type: NNGRRT; PAM sequence: TGGGGT
ttggcagccagatgagggag

SEQ ID NO: 5967 - DNA, 20 bp, Artificial Sequence
  Description of Artificial Sequence: Synthetic oligonucleotide
  Target: ANGPTL4; (+) strand; PAM type: NNGRRT; PAM sequence: CGGGGT
gccctgggaagcctacaagg

SEQ ID NO: 5968 - DNA, 20 bp, Artificial Sequence
  Description of Artificial Sequence: Synthetic oligonucleotide
  Target: ANGPTL4; (+) strand; PAM type: NNGRRT; PAM sequence: GGGGAT
aagcctacaaggcggggttt

SEQ ID NO: 5969 - DNA, 20 bp, Artificial Sequence
  Description of Artificial Sequence: Synthetic oligonucleotide
  Target: ANGPTL4; (+) strand; PAM type: NNGRRT; PAM sequence: TGGAGT
tcagaagtggccctgcctca

SEQ ID NO: 5970 - DNA, 20 bp, Artificial Sequence
  Description of Artificial Sequence: Synthetic oligonucleotide
  Target: ANGPTL4; (+) strand; PAM type: NNGRRT; PAM sequence: GCGAGT
agtggcctctcccactccag

SEQ ID NO: 5971 - DNA, 20 bp, Artificial Sequence
  Description of Artificial Sequence: Synthetic oligonucleotide
  Target: ANGPTL4; (+) strand; PAM type: NNGRRT; PAM sequence: CTGGGT
ccactccaggcgagttctgg

SEQ ID NO: 5972 - DNA, 20 bp, Artificial Sequence
  Description of Artificial Sequence: Synthetic oligonucleotide
  Target: ANGPTL4; (+) strand; PAM type: NNGRRT; PAM sequence: TGGGAT
tggccgtgcagctgcgggac

SEQ ID NO: 5973 - DNA, 20 bp, Artificial Sequence
  Description of Artificial Sequence: Synthetic oligonucleotide
  Target: ANGPTL4; (+) strand; PAM type: NNGRRT; PAM sequence: CCGAGT
gcgggactgggatggcaacg

SEQ ID NO: 5974 - DNA, 20 bp, Artificial Sequence
  Description of Artificial Sequence: Synthetic oligonucleotide
  Target: ANGPTL4; (+) strand; PAM type: NNGRRT; PAM sequence: CTGGGT
tgctgcagttctccgtgcac

SEQ ID NO: 5975 - DNA, 20 bp, Artificial Sequence
  Description of Artificial Sequence: Synthetic oligonucleotide
  Target: ANGPTL4; (+) strand; PAM type: NNGRRT; PAM sequence: CAGGAT
tacccttctccacttgggac

SEQ ID NO: 5976 - DNA, 20 bp, Artificial Sequence
  Description of Artificial Sequence: Synthetic oligonucleotide
  Target: ANGPTL4; (+) strand; PAM type: NNGRRT; PAM sequence: AAGGGT
ctcagttttcccatcctgaa

SEQ ID NO: 5977 - DNA, 20 bp, Artificial Sequence
  Description of Artificial Sequence: Synthetic oligonucleotide
  Target: ANGPTL4; (+) strand; PAM type: NNGRRT; PAM sequence: CGGAGT
tatgtatttattttttgaga

SEQ ID NO: 5978 - DNA, 20 bp, Artificial Sequence
  Description of Artificial Sequence: Synthetic oligonucleotide
  Target: ANGPTL4; (+) strand; PAM type: NNGRRT; PAM sequence: TGGAGT
tctcactttgtcacccaggc

SEQ ID NO: 5979 - DNA, 20 bp, Artificial Sequence
  Description of Artificial Sequence: Synthetic oligonucleotide
  Target: ANGPTL4; (+) strand; PAM type: NNGRRT; PAM sequence: CTGAGT
ctcactgcaagctccacctc

SEQ ID NO: 5980 - DNA, 20 bp, Artificial Sequence
  Description of Artificial Sequence: Synthetic oligonucleotide
  Target: ANGPTL4; (+) strand; PAM type: NNGRRT; PAM sequence: CCGAGT
cattctcctgcctcagcctc

SEQ ID NO: 5981 - DNA, 20 bp, Artificial Sequence
  Description of Artificial Sequence: Synthetic oligonucleotide
  Target: ANGPTL4; (+) strand; PAM type: NNGRRT; PAM sequence: TGGGGT
ttttgtatttttagtagaga

SEQ ID NO: 5982 - DNA, 20 bp, Artificial Sequence
  Description of Artificial Sequence: Synthetic oligonucleotide
  Target: ANGPTL4; (+) strand; PAM type: NNGRRT; PAM sequence: CAGGAT
tggggtttcaccgtgttagc

SEQ ID NO: 5983 - DNA, 20 bp, Artificial Sequence
  Description of Artificial Sequence: Synthetic oligonucleotide
  Target: ANGPTL4; (+) strand; PAM type: NNGRRT; PAM sequence: TGGGAT
gcctcagcctcccaaagtgc

SEQ ID NO: 5984 - DNA, 20 bp, Artificial Sequence
  Description of Artificial Sequence: Synthetic oligonucleotide
  Target: ANGPTL4; (+) strand; PAM type: NNGRRT; PAM sequence: CAGAGT
tacttatttattttttgaga

SEQ ID NO: 5985 - DNA, 20 bp, Artificial Sequence
  Description of Artificial Sequence: Synthetic oligonucleotide
  Target: ANGPTL4; (+) strand; PAM type: NNGRRT; PAM sequence: TGGAGT
tcccgctgtgtctcccaggc

SEQ ID NO: 5986 - DNA, 20 bp, Artificial Sequence
  Description of Artificial Sequence: Synthetic oligonucleotide
  Target: ANGPTL4; (+) strand; PAM type: NNGRRT; PAM sequence: CTGGGT
ctcactgcagcctccgcctc

SEQ ID NO: 5987 - DNA, 20 bp, Artificial Sequence
  Description of Artificial Sequence: Synthetic oligonucleotide
  Target: ANGPTL4; (+) strand; PAM type: NNGRRT; PAM sequence: CTGAGT
gattctcctgcctcagcctc

SEQ ID NO: 5988 - DNA, 20 bp, Artificial Sequence
  Description of Artificial Sequence: Synthetic oligonucleotide
  Target: ANGPTL4; (+) strand; PAM type: NNGRRT; PAM sequence: TGGGAT
gcctcagcctcctgagtagc

SEQ ID NO: 5989 - DNA, 20 bp, Artificial Sequence
  Description of Artificial Sequence: Synthetic oligonucleotide
  Target: ANGPTL4; (+) strand; PAM type: NNGRRT; PAM sequence: CGGGGT
ttttgtatttttagtagaga

SEQ ID NO: 5990 - DNA, 20 bp, Artificial Sequence
  Description of Artificial Sequence: Synthetic oligonucleotide
  Target: ANGPTL4; (+) strand; PAM type: NNGRRT; PAM sequence: CAGGGT
cggggtttcaccatgttggc

SEQ ID NO: 5991 - DNA, 20 bp, Artificial Sequence
  Description of Artificial Sequence: Synthetic oligonucleotide
  Target: ANGPTL4; (+) strand; PAM type: NNGRRT; PAM sequence: TGGGAT
acctcggcctcccaaagtgt

SEQ ID NO: 5992 - DNA, 20 bp, Artificial Sequence
  Description of Artificial Sequence: Synthetic oligonucleotide
  Target: ANGPTL4; (+) strand; PAM type: NNGRRT; PAM sequence: CAGGAT
atctttataatggtgctcca

SEQ ID NO: 5993 - DNA, 20 bp, Artificial Sequence
  Description of Artificial Sequence: Synthetic oligonucleotide
  Target: ANGPTL4; (+) strand; PAM type: NNGRRT; PAM sequence: CAGGGT
ttttttttttttttttgaaa

SEQ ID NO: 5994 - DNA, 20 bp, Artificial Sequence
  Description of Artificial Sequence: Synthetic oligonucleotide
  Target: ANGPTL4; (+) strand; PAM type: NNGRRT; PAM sequence: TGGAGT
tctcactctgttgcctaagc

SEQ ID NO: 5995 - DNA, 20 bp, Artificial Sequence
  Description of Artificial Sequence: Synthetic oligonucleotide
  Target: ANGPTL4; (+) strand; PAM type: NNGRRT; PAM sequence: CCGGGT
ctcactgcaacctccacctc

SEQ ID NO: 5996 - DNA, 20 bp, Artificial Sequence
  Description of Artificial Sequence: Synthetic oligonucleotide
  Target: ANGPTL4; (+) strand; PAM type: NNGRRT; PAM sequence: GCGAGT
cagcactttgggaggctgaa

SEQ ID NO: 5997 - DNA, 20 bp, Artificial Sequence
  Description of Artificial Sequence: Synthetic oligonucleotide
  Target: ANGPTL4; (+) strand; PAM type: NNGRRT; PAM sequence: GTGGAT
actttgggaggctgaagcga

SEQ ID NO: 5998 - DNA, 20 bp, Artificial Sequence
  Description of Artificial Sequence: Synthetic oligonucleotide
  Target: ANGPTL4; (+) strand; PAM type: NNGRRT; PAM sequence: CTGAGT
gttcccatctacttgggagg

SEQ ID NO: 5999 - DNA, 20 bp, Artificial Sequence
  Description of Artificial Sequence: Synthetic oligonucleotide
  Target: ANGPTL4; (+) strand; PAM type: NNGRRT; PAM sequence: GAGGAT
tacttgggaggctgagttgg

SEQ ID NO: 6000 - DNA, 20 bp, Artificial Sequence
  Description of Artificial Sequence: Synthetic oligonucleotide
  Target: ANGPTL4; (+) strand; PAM type: NNGRRT; PAM sequence: CTGGGT
ctgcgccactgcactcaagc

SEQ ID NO: 6001 - DNA, 20 bp, Artificial Sequence
  Description of Artificial Sequence: Synthetic oligonucleotide
  Target: ANGPTL4; (+) strand; PAM type: NNGRRT; PAM sequence: CAGAGT
ctgcactcaagcctgggtga

SEQ ID NO: 6002 - DNA, 20 bp, Artificial Sequence
  Description of Artificial Sequence: Synthetic oligonucleotide
  Target: ANGPTL4; (+) strand; PAM type: NNGRRT; PAM sequence: AAGAAT
tacttgggaggcccaggtac

SEQ ID NO: 6003 - DNA, 20 bp, Artificial Sequence
  Description of Artificial Sequence: Synthetic oligonucleotide
  Target: ANGPTL4; (+) strand; PAM type: NNGRRT; PAM sequence: CCGGGT
ttttaaacttaaaaataagg

SEQ ID NO: 6004 - DNA, 20 bp, Artificial Sequence
  Description of Artificial Sequence: Synthetic oligonucleotide
  Target: ANGPTL4; (+) strand; PAM type: NNGRRT; PAM sequence: GTGGGT
cagcactttgggaggccgag

SEQ ID NO: 6005 - DNA, 20 bp, Artificial Sequence
  Description of Artificial Sequence: Synthetic oligonucleotide
  Target: ANGPTL4; (+) strand; PAM type: NNGRRT; PAM sequence: GTGGAT
actttgggaggccgaggtgg

SEQ ID NO: 6006 - DNA, 20 bp, Artificial Sequence
  Description of Artificial Sequence: Synthetic oligonucleotide
  Target: ANGPTL4; (+) strand; PAM type: NNGRRT; PAM sequence: AGGAGT
tgggtggatcacctgaggtc

SEQ ID NO: 6007 - DNA, 20 bp, Artificial Sequence
  Description of Artificial Sequence: Synthetic oligonucleotide
  Target: ANGPTL4; (+) strand; PAM type: NNGRRT; PAM sequence: GTGGGT
caaaaattaggccaggcgca

SEQ ID NO: 6008 - DNA, 20 bp, Artificial Sequence
  Description of Artificial Sequence: Synthetic oligonucleotide
  Target: ANGPTL4; (+) strand; PAM type: NNGRRT; PAM sequence: GAGGGT
cagcactttgggaggctgag

SEQ ID NO: 6009 - DNA, 20 bp, Artificial Sequence
  Description of Artificial Sequence: Synthetic oligonucleotide
  Target: ANGPTL4; (+) strand; PAM type: NNGRRT; PAM sequence: GTGGAT
actttgggaggctgaggagg

SEQ ID NO: 6010 - DNA, 20 bp, Artificial Sequence
  Description of Artificial Sequence: Synthetic oligonucleotide
  Target: ANGPTL4; (+) strand; PAM type: NNGRRT; PAM sequence: AGGAGT
agggtggatcacatgaggta

SEQ ID NO: 6011 - DNA, 20 bp, Artificial Sequence
  Description of Artificial Sequence: Synthetic oligonucleotide
  Target: ANGPTL4; (+) strand; PAM type: NNGRRT; PAM sequence: GCGGGT
aaaactagccaggcgtggtg

SEQ ID NO: 6012 - DNA, 20 bp, Artificial Sequence
  Description of Artificial Sequence: Synthetic oligonucleotide
  Target: ANGPTL4; (+) strand; PAM type: NNGRRT; PAM sequence: GAGAAT
tactcaggaggctgaggcat

SEQ ID NO: 6013 - DNA, 20 bp, Artificial Sequence
  Description of Artificial Sequence: Synthetic oligonucleotide
  Target: ANGPTL4; (+) strand; PAM type: NNGRRT; PAM sequence: TAGAGT
ctgcactccagcctgggaga

SEQ ID NO: 6014 - DNA, 20 bp, Artificial Sequence
  Description of Artificial Sequence: Synthetic oligonucleotide
  Target: ANGPTL4; (+) strand; PAM type: NNGRRT; PAM sequence: GAGAAT
tactcgggaggctgagggag

SEQ ID NO: 6015 - DNA, 20 bp, Artificial Sequence
  Description of Artificial Sequence: Synthetic oligonucleotide
  Target: ANGPTL4; (+) strand; PAM type: NNGRRT; PAM sequence: CTGGGT
tcgcaccactgcactccagc

SEQ ID NO: 6016 - DNA, 20 bp, Artificial Sequence
  Description of Artificial Sequence: Synthetic oligonucleotide
  Target: ANGPTL4; (+) strand; PAM type: NNGRRT; PAM sequence: CAGAGT
ctgcactccagcctgggtga

SEQ ID NO: 6017 - DNA, 20 bp, Artificial Sequence
  Description of Artificial Sequence: Synthetic oligonucleotide
  Target: ANGPTL4; (+) strand; PAM type: NNGRRT; PAM sequence: GGGAAT
cagcggcagaagcttaagaa

SEQ ID NO: 6018 - DNA, 20 bp, Artificial Sequence
  Description of Artificial Sequence: Synthetic oligonucleotide
  Target: ANGPTL4; (+) strand; PAM type: NNGRRT; PAM sequence: GAGGAT
ggtgactcttggctctgccc

SEQ ID NO: 6019 - DNA, 20 bp, Artificial Sequence
  Description of Artificial Sequence: Synthetic oligonucleotide
  Target: ANGPTL4; (+) strand; PAM type: NNGRRT; PAM sequence: CTGAGT
cgactggagaagcccccttt

SEQ ID NO: 6020 - DNA, 20 bp, Artificial Sequence
  Description of Artificial Sequence: Synthetic oligonucleotide
  Target: ANGPTL4; (+) strand; PAM type: NNGRRT; PAM sequence: CAGGAT
gcctcctgagatcgaggctg

SEQ ID NO: 6021 - DNA, 20 bp, Artificial Sequence
  Description of Artificial Sequence: Synthetic oligonucleotide
  Target: ANGPTL4; (+) strand; PAM type: NNGRRT; PAM sequence: GGGAGT
gcttcactccttgctggcca

SEQ ID NO: 6022 - DNA, 20 bp, Artificial Sequence
  Description of Artificial Sequence: Synthetic oligonucleotide
  Target: ANGPTL4; (+) strand; PAM type: NNGRRT; PAM sequence: GTGGGT
tgacggggaccagggcttgt

SEQ ID NO: 6023 - DNA, 20 bp, Artificial Sequence
  Description of Artificial Sequence: Synthetic oligonucleotide
  Target: ANGPTL4; (+) strand; PAM type: NNGRRT; PAM sequence: CAGAGT
tggtatctgggcggagctca

SEQ ID NO: 6024 - DNA, 20 bp, Artificial Sequence
  Description of Artificial Sequence: Synthetic oligonucleotide
  Target: ANGPTL4; (+) strand; PAM type: NNGRRT; PAM sequence: TGGAAT
ggcggagctcacagagttct

SEQ ID NO: 6025 - DNA, 20 bp, Artificial Sequence
  Description of Artificial Sequence: Synthetic oligonucleotide
  Target: ANGPTL4; (+) strand; PAM type: NNGRRT; PAM sequence: AAGAAT
tactctagaggctgacgcag

SEQ ID NO: 6026 - DNA, 20 bp, Artificial Sequence
  Description of Artificial Sequence: Synthetic oligonucleotide
  Target: ANGPTL4; (+) strand; PAM type: NNGRRT; PAM sequence: CAGGGT
taatttttttttcgtagagg

SEQ ID NO: 6027 - DNA, 20 bp, Artificial Sequence
  Description of Artificial Sequence: Synthetic oligonucleotide
  Target: ANGPTL4; (+) strand; PAM type: NNGRRT; PAM sequence: AGGGAT
gtctcaaacaccgagactca

SEQ ID NO: 6028 - DNA, 20 bp, Artificial Sequence
  Description of Artificial Sequence: Synthetic oligonucleotide
  Target: ANGPTL4; (+) strand; PAM type: NNGRRT; PAM sequence: TGGGAT
gccttggcttcacaaagtga

SEQ ID NO: 6029 - DNA, 20 bp, Artificial Sequence
  Description of Artificial Sequence: Synthetic oligonucleotide
  Target: ANGPTL4; (+) strand; PAM type: NNGRRT; PAM sequence: GTGGAT
actttaggaggccgaggcag

SEQ ID NO: 6030 - DNA, 20 bp, Artificial Sequence
  Description of Artificial Sequence: Synthetic oligonucleotide
  Target: ANGPTL4; (+) strand; PAM type: NNGRRT; PAM sequence: ACGAGT
caggtggatcatctgacatt

SEQ ID NO: 6031 - DNA, 20 bp, Artificial Sequence
  Description of Artificial Sequence: Synthetic oligonucleotide
  Target: ANGPTL4; (+) strand; PAM type: NNGRRT; PAM sequence: CCGGGT
actaaaaatacaaaaattag

SEQ ID NO: 6032 - DNA, 20 bp, Artificial Sequence
  Description of Artificial Sequence: Synthetic oligonucleotide
  Target: ANGPTL4; (+) strand; PAM type: NNGRRT; PAM sequence: GCGGGT
aaaattagccgggtgtggtg

SEQ ID NO: 6033 - DNA, 20 bp, Artificial Sequence
  Description of Artificial Sequence: Synthetic oligonucleotide
  Target: ANGPTL4; (+) strand; PAM type: NNGRRT; PAM sequence: GAGAAT
tactcaggaggctgaggcag

SEQ ID NO: 6034 - DNA, 20 bp, Artificial Sequence
  Description of Artificial Sequence: Synthetic oligonucleotide
  Target: ANGPTL4; (+) strand; PAM type: NNGRRT; PAM sequence: CTGGGT
tcatgccactgcactccagc

SEQ ID NO: 6035 - DNA, 20 bp, Artificial Sequence
  Description of Artificial Sequence: Synthetic oligonucleotide
  Target: ANGPTL4; (+) strand; PAM type: NNGRRT; PAM sequence: AAGAAT
aaaaaaaaaaaaaaaaaaaa

SEQ ID NO: 6036 - DNA, 20 bp, Artificial Sequence
  Description of Artificial Sequence: Synthetic oligonucleotide
  Target: ANGPTL4; (+) strand; PAM type: NNGRRT; PAM sequence: GCGGAT
gcactttgggaggccaacga

SEQ ID NO: 6037 - DNA, 20 bp, Artificial Sequence
  Description of Artificial Sequence: Synthetic oligonucleotide
  Target: ANGPTL4; (+) strand; PAM type: NNGRRT; PAM sequence: TCGGGT
aacgagcggatcacccgagg

SEQ ID NO: 6038 - DNA, 20 bp, Artificial Sequence
  Description of Artificial Sequence: Synthetic oligonucleotide
  Target: ANGPTL4; (+) strand; PAM type: NNGRRT; PAM sequence: TAGGGT
tatatagtgagatccctata

SEQ ID NO: 6039 - DNA, 20 bp, Artificial Sequence
  Description of Artificial Sequence: Synthetic oligonucleotide
  Target: ANGPTL4; (+) strand; PAM type: NNGRRT; PAM sequence: GAGAAT
tactcaggaggctgaggccg

SEQ ID NO: 6040 - DNA, 20 bp, Artificial Sequence
  Description of Artificial Sequence: Synthetic oligonucleotide
  Target: ANGPTL4; (+) strand; PAM type: NNGRRT; PAM sequence: CGGAAT
gtggagggagaggcgcgagc

SEQ ID NO: 6041 - DNA, 20 bp, Artificial Sequence
  Description of Artificial Sequence: Synthetic oligonucleotide
  Target: ANGPTL4; (+) strand; PAM type: NNGRRT; PAM sequence: TGGAGT
cgcggtgcttgtgggccagc

SEQ ID NO: 6042 - DNA, 20 bp, Artificial Sequence
  Description of Artificial Sequence: Synthetic oligonucleotide
  Target: ANGPTL4; (+) strand; PAM type: NNGRRT; PAM sequence: CCGGGT
cttgtgggccagctggagtt

SEQ ID NO: 6043 - DNA, 20 bp, Artificial Sequence
  Description of Artificial Sequence: Synthetic oligonucleotide
  Target: ANGPTL4; (+) strand; PAM type: NNGRRT; PAM sequence: GAGGGT
cgggccggacagcggctgcg

SEQ ID NO: 6044 - DNA, 20 bp, Artificial Sequence
  Description of Artificial Sequence: Synthetic oligonucleotide
  Target: ANGPTL4; (+) strand; PAM type: NNGRRT; PAM sequence: CTGGGT
cagcggctgcggagggtgta

SEQ ID NO: 6045 - DNA, 20 bp, Artificial Sequence
  Description of Artificial Sequence: Synthetic oligonucleotide
  Target: ANGPTL4; (+) strand; PAM type: NNGRRT; PAM sequence: AGGGAT
tagctgccttcccgcggggc

SEQ ID NO: 6046 - DNA, 20 bp, Artificial Sequence
  Description of Artificial Sequence: Synthetic oligonucleotide
  Target: ANGPTL4; (+) strand; PAM type: NNGRRT; PAM sequence: AGGAGT
catccaccacccaagggctg

SEQ ID NO: 6047 - DNA, 20 bp, Artificial Sequence
  Description of Artificial Sequence: Synthetic oligonucleotide
  Target: ANGPTL4; (+) strand; PAM type: NNGRRT; PAM sequence: CAGGAT
ctccacctgcagccccggtg

SEQ ID NO: 6048 - DNA, 20 bp, Artificial Sequence
  Description of Artificial Sequence: Synthetic oligonucleotide
  Target: ANGPTL4; (+) strand; PAM type: NNGRRT; PAM sequence: CTGGGT
cagccccggtgcaggatcca

SEQ ID NO: 6049 - DNA, 20 bp, Artificial Sequence
  Description of Artificial Sequence: Synthetic oligonucleotide
  Target: ANGPTL4; (+) strand; PAM type: NNGRRT; PAM sequence: CTGAGT
gggtgaagctagctgggctc

SEQ ID NO: 6050 - DNA, 20 bp, Artificial Sequence
  Description of Artificial Sequence: Synthetic oligonucleotide
  Target: ANGPTL4; (+) strand; PAM type: NNGRRT; PAM sequence: AGGGAT
ggagaacctttgtctagctc

SEQ ID NO: 6051 - DNA, 20 bp, Artificial Sequence
  Description of Artificial Sequence: Synthetic oligonucleotide
  Target: ANGPTL4; (+) strand; PAM type: NNGRRT; PAM sequence: CAGGGT
tcatcaccctatgtctagct

SEQ ID NO: 6052 - DNA, 20 bp, Artificial Sequence
  Description of Artificial Sequence: Synthetic oligonucleotide
  Target: ANGPTL4; (+) strand; PAM type: NNGRRT; PAM sequence: GTGAAT
ctatgtctagctcagggttt

SEQ ID NO: 6053 - DNA, 20 bp, Artificial Sequence
  Description of Artificial Sequence: Synthetic oligonucleotide
  Target: ANGPTL4; (+) strand; PAM type: NNGRRT; PAM sequence: AGGGAT
agaacctttatgtctagctc

SEQ ID NO: 6054 - DNA, 20 bp, Artificial Sequence
  Description of Artificial Sequence: Synthetic oligonucleotide
  Target: ANGPTL4; (+) strand; PAM type: NNGRRT; PAM sequence: CAGGGT
tcagcaccctgtgtctagct

SEQ ID NO: 6055 - DNA, 20 bp, Artificial Sequence
  Description of Artificial Sequence: Synthetic oligonucleotide
  Target: ANGPTL4; (+) strand; PAM type: NNGRRT; PAM sequence: GTGAAT
ctgtgtctagctcagggttt

SEQ ID NO: 6056 - DNA, 20 bp, Artificial Sequence
  Description of Artificial Sequence: Synthetic oligonucleotide
  Target: ANGPTL4; (+) strand; PAM type: NNGRRT; PAM sequence: GGGGAT
ctgtatctagttaatctggt

SEQ ID NO: 6057 - DNA, 20 bp, Artificial Sequence
  Description of Artificial Sequence: Synthetic oligonucleotide
  Target: ANGPTL4; (+) strand; PAM type: NNGRRT; PAM sequence: AGGAAT
agaacctttgtgtctagctc

SEQ ID NO: 6058 - DNA, 20 bp, Artificial Sequence
  Description of Artificial Sequence: Synthetic oligonucleotide
  Target: ANGPTL4; (+) strand; PAM type: NNGRRT; PAM sequence: CAGGAT
cagtgggctctaccaatcag

SEQ ID NO: 6059 - DNA, 20 bp, Artificial Sequence
  Description of Artificial Sequence: Synthetic oligonucleotide
  Target: ANGPTL4; (+) strand; PAM type: NNGRRT; PAM sequence: GTGGGT
gctctaccaatcagcaggat

SEQ ID NO: 6060 - DNA, 20 bp, Artificial Sequence
  Description of Artificial Sequence: Synthetic oligonucleotide
  Target: ANGPTL4; (+) strand; PAM type: NNGRRT; PAM sequence: GAGAAT
atgtgggtggggccagataa

SEQ ID NO: 6061 - DNA, 20 bp, Artificial Sequence
  Description of Artificial Sequence: Synthetic oligonucleotide
  Target: ANGPTL4; (+) strand; PAM type: NNGRRT; PAM sequence: TTGGGT
agccagcagtggcaacccac

SEQ ID NO: 6062 - DNA, 20 bp, Artificial Sequence
  Description of Artificial Sequence: Synthetic oligonucleotide
  Target: ANGPTL4; (+) strand; PAM type: NNGRRT; PAM sequence: TTGGGT
aatcttgtactgctcactct

SEQ ID NO: 6063 - DNA, 20 bp, Artificial Sequence
  Description of Artificial Sequence: Synthetic oligonucleotide
  Target: ANGPTL4; (+) strand; PAM type: NNGRRT; PAM sequence: AAGGGT
agagctggaacacttaccgc

SEQ ID NO: 6064 - DNA, 20 bp, Artificial Sequence
  Description of Artificial Sequence: Synthetic oligonucleotide
  Target: ANGPTL4; (+) strand; PAM type: NNGRRT; PAM sequence: CCGGAT
agaccaagaaccccccaatt

SEQ ID NO: 6065 - DNA, 20 bp, Artificial Sequence
  Description of Artificial Sequence: Synthetic oligonucleotide
  Target: ANGPTL4; (+) strand; PAM type: NNGRRT; PAM sequence: TTGGAT
taaaataaaaattgtaataa

SEQ ID NO: 6066 - DNA, 20 bp, Artificial Sequence
  Description of Artificial Sequence: Synthetic oligonucleotide
  Target: ANGPTL4; (+) strand; PAM type: NNGRRT; PAM sequence: AAGAGT
tttttttttttttccgagac

SEQ ID NO: 6067 - DNA, 20 bp, Artificial Sequence
  Description of Artificial Sequence: Synthetic oligonucleotide
  Target: ANGPTL4; (+) strand; PAM type: NNGRRT; PAM sequence: CCGGGT
cttactgcaacctccacctc

SEQ ID NO: 6068 - DNA, 20 bp, Artificial Sequence
  Description of Artificial Sequence: Synthetic oligonucleotide
  Target: ANGPTL4; (+) strand; PAM type: NNGRRT; PAM sequence: CCGAGT
gattctcctgcctcggcctc

SEQ ID NO: 6069 - DNA, 20 bp, Artificial Sequence
  Description of Artificial Sequence: Synthetic oligonucleotide
  Target: ANGPTL4; (+) strand; PAM type: NNGRRT; PAM sequence: ATGGGT
tttttgtatttttagtatag

SEQ ID NO: 6070 - DNA, 20 bp, Artificial Sequence
  Description of Artificial Sequence: Synthetic oligonucleotide
  Target: ANGPTL4; (+) strand; PAM type: NNGRRT; PAM sequence: TGGGAT
gcctcggcctccgaaactgg

SEQ ID NO: 6071 - DNA, 20 bp, Artificial Sequence
  Description of Artificial Sequence: Synthetic oligonucleotide
  Target: ANGPTL4; (+) strand; PAM type: NNGRRT; PAM sequence: GGGGGT
atgtctcttggggaggtggt

SEQ ID NO: 6072 - DNA, 20 bp, Artificial Sequence
  Description of Artificial Sequence: Synthetic oligonucleotide
  Target: ANGPTL4; (+) strand; PAM type: NNGRRT; PAM sequence: CTGGGT
ctgtttccctggggctgtgg

SEQ ID NO: 6073 - DNA, 20 bp, Artificial Sequence
  Description of Artificial Sequence: Synthetic oligonucleotide
  Target: ANGPTL4; (+) strand; PAM type: NNGRRT; PAM sequence: GAGGAT
tcctgtactgagcaggctta

SEQ ID NO: 6074 - DNA, 20 bp, Artificial Sequence
  Description of Artificial Sequence: Synthetic oligonucleotide
  Target: ANGPTL4; (+) strand; PAM type: NNGRRT; PAM sequence: GTGAGT
cactgtcactggagctggtg

SEQ ID NO: 6075 - DNA, 20 bp, Artificial Sequence
  Description of Artificial Sequence: Synthetic oligonucleotide
  Target: ANGPTL4; (+) strand; PAM type: NNGRRT; PAM sequence: GGGGGT
tgagtccagtctgcaggaga

SEQ ID NO: 6076 - DNA, 20 bp, Artificial Sequence
  Description of Artificial Sequence: Synthetic oligonucleotide
  Target: ANGPTL4; (+) strand; PAM type: NNGRRT; PAM sequence: GTGGGT
ccgcactctgggaggctgag

SEQ ID NO: 6077 - DNA, 20 bp, Artificial Sequence
  Description of Artificial Sequence: Synthetic oligonucleotide
  Target: ANGPTL4; (+) strand; PAM type: NNGRRT; PAM sequence: GAGAAT
tattcgggaggctaaggcag

SEQ ID NO: 6078 - DNA, 20 bp, Artificial Sequence
  Description of Artificial Sequence: Synthetic oligonucleotide
  Target: ANGPTL4; (+) strand; PAM type: NNGRRT; PAM sequence: CTGGGT
ttgcaccactgcactccagc

SEQ ID NO: 6079 - DNA, 20 bp, Artificial Sequence
  Description of Artificial Sequence: Synthetic oligonucleotide
  Target: ANGPTL4; (+) strand; PAM type: NNGRRT; PAM sequence: TGGGAT
ctaacaaggggccaggaagc

SEQ ID NO: 6080 - DNA, 20 bp, Artificial Sequence
  Description of Artificial Sequence: Synthetic oligonucleotide
  Target: ANGPTL4; (+) strand; PAM type: NNGRRT; PAM sequence: GGGGAT
agttcctgcatttggaaaat

SEQ ID NO: 6081 - DNA, 20 bp, Artificial Sequence
  Description of Artificial Sequence: Synthetic oligonucleotide
  Target: ANGPTL4; (+) strand; PAM type: NNGRRT; PAM sequence: GGGGGT
ctggcctcatggtgtgggga

SEQ ID NO: 6082 - DNA, 20 bp, Artificial Sequence
  Description of Artificial Sequence: Synthetic oligonucleotide
  Target: ANGPTL4; (+) strand; PAM type: NNGRRT; PAM sequence: AAGAAT
ggtgtggggagggggtggta

SEQ ID NO: 6083 - DNA, 20 bp, Artificial Sequence
  Description of Artificial Sequence: Synthetic oligonucleotide
  Target: ANGPTL4; (+) strand; PAM type: NNGRRT; PAM sequence: CTGGGT
gcattaatattcatcacagg

SEQ ID NO: 6084 - DNA, 20 bp, Artificial Sequence
  Description of Artificial Sequence: Synthetic oligonucleotide
  Target: ANGPTL4; (+) strand; PAM type: NNGRRT; PAM sequence: TGGAGT
aggctgaggctggaggacct

SEQ ID NO: 6085 - DNA, 20 bp, Artificial Sequence
  Description of Artificial Sequence: Synthetic oligonucleotide
  Target: ANGPTL4; (+) strand; PAM type: NNGRRT; PAM sequence: CCGGGT
acgataaatttttaaaaagt

SEQ ID NO: 6086 - DNA, 20 bp, Artificial Sequence
  Description of Artificial Sequence: Synthetic oligonucleotide
  Target: ANGPTL4; (+) strand; PAM type: NNGRRT; PAM sequence: GCGGGT
cagcactttgggaggccaag

SEQ ID NO: 6087 - DNA, 20 bp, Artificial Sequence
  Description of Artificial Sequence: Synthetic oligonucleotide
  Target: ANGPTL4; (+) strand; PAM type: NNGRRT; PAM sequence: GTGGAT
actttgggaggccaaggcgg

SEQ ID NO: 6088 - DNA, 20 bp, Artificial Sequence
  Description of Artificial Sequence: Synthetic oligonucleotide
  Target: ANGPTL4; (+) strand; PAM type: NNGRRT; PAM sequence: AGGAGT
ggcgggtggatcatgaggtt

SEQ ID NO: 6089 - DNA, 20 bp, Artificial Sequence
  Description of Artificial Sequence: Synthetic oligonucleotide
  Target: ANGPTL4; (+) strand; PAM type: NNGRRT; PAM sequence: GAGAAT
ctacttgagaggctaaggca

SEQ ID NO: 6090 - DNA, 20 bp, Artificial Sequence
  Description of Artificial Sequence: Synthetic oligonucleotide
  Target: ANGPTL4; (+) strand; PAM type: NNGRRT; PAM sequence: GAGGGT
ttgcttggactcgggaggca

SEQ ID NO: 6091 - DNA, 20 bp, Artificial Sequence
  Description of Artificial Sequence: Synthetic oligonucleotide
  Target: ANGPTL4; (+) strand; PAM type: NNGRRT; PAM sequence: CAGAGT
ctgcactccagcctgggcaa

SEQ ID NO: 6092 - DNA, 20 bp, Artificial Sequence
  Description of Artificial Sequence: Synthetic oligonucleotide
  Target: ANGPTL4; (+) strand; PAM type: NNGRRT; PAM sequence: AAGAAT
ctgcctcaaaaaaaaaaaaa

SEQ ID NO: 6093 - DNA, 20 bp, Artificial Sequence
  Description of Artificial Sequence: Synthetic oligonucleotide
  Target: ANGPTL4; (+) strand; PAM type: NNGRRT; PAM sequence: CAGAAT
aatttcagagggaggagaga

SEQ ID NO: 6094 - DNA, 20 bp, Artificial Sequence
  Description of Artificial Sequence: Synthetic oligonucleotide
  Target: ANGPTL4; (+) strand; PAM type: NNGRRT; PAM sequence: GAGGAT
agagacagaataaggcaact

SEQ ID NO: 6095 - DNA, 20 bp, Artificial Sequence
  Description of Artificial Sequence: Synthetic oligonucleotide
  Target: ANGPTL4; (+) strand; PAM type: NNGRRT; PAM sequence: CTGGGT
gagacagaagtccatgtcct

SEQ ID NO: 6096 - DNA, 20 bp, Artificial Sequence
  Description of Artificial Sequence: Synthetic oligonucleotide
  Target: ANGPTL4; (+) strand; PAM type: NNGRRT; PAM sequence: AAGGAT
ttgatgggagggagggaagg

SEQ ID NO: 6097 - DNA, 20 bp, Artificial Sequence
  Description of Artificial Sequence: Synthetic oligonucleotide
  Target: ANGPTL4; (+) strand; PAM type: NNGRRT; PAM sequence: GGGAGT
aaggatggagacacaagagg

SEQ ID NO: 6098 - DNA, 20 bp, Artificial Sequence
  Description of Artificial Sequence: Synthetic oligonucleotide
  Target: ANGPTL4; (+) strand; PAM type: NNGRRT; PAM sequence: GTGGAT
atggagacacaagaggggga

SEQ ID NO: 6099 - DNA, 20 bp, Artificial Sequence
  Description of Artificial Sequence: Synthetic oligonucleotide
  Target: ANGPTL4; (+) strand; PAM type: NNGRRT; PAM sequence: AGGAGT
agggggagtggatatgggga

SEQ ID NO: 6100 - DNA, 20 bp, Artificial Sequence
  Description of Artificial Sequence: Synthetic oligonucleotide
  Target: ANGPTL4; (+) strand; PAM type: NNGRRT; PAM sequence: TGGGAT
gaaggagtcaaatttgttta

SEQ ID NO: 6101 - DNA, 20 bp, Artificial Sequence
  Description of Artificial Sequence: Synthetic oligonucleotide
  Target: ANGPTL4; (+) strand; PAM type: NNGRRT; PAM sequence: CTGGGT
aggtgaagccggctaggctt

SEQ ID NO: 6102 - DNA, 20 bp, Artificial Sequence
  Description of Artificial Sequence: Synthetic oligonucleotide
  Target: ANGPTL4; (+) strand; PAM type: NNGRRT; PAM sequence: TCGGGT
aagccggctaggcttctggg

SEQ ID NO: 6103 - DNA, 20 bp, Artificial Sequence
  Description of Artificial Sequence: Synthetic oligonucleotide
  Target: ANGPTL4; (+) strand; PAM type: NNGRRT; PAM sequence: AAGGAT
tgaacttttctgtctagcta

SEQ ID NO: 6104 - DNA, 20 bp, Artificial Sequence
  Description of Artificial Sequence: Synthetic oligonucleotide
  Target: ANGPTL4; (+) strand; PAM type: NNGRRT; PAM sequence: AAGGAT
cagcactctgtgtctagcta

SEQ ID NO: 6105 - DNA, 20 bp, Artificial Sequence
  Description of Artificial Sequence: Synthetic oligonucleotide
  Target: ANGPTL4; (+) strand; PAM type: NNGRRT; PAM sequence: GAGAAT
ctaatcaggtaggggacttg

SEQ ID NO: 6106 - DNA, 20 bp, Artificial Sequence
  Description of Artificial Sequence: Synthetic oligonucleotide
  Target: ANGPTL4; (-) strand; PAM type: NNNNGHTT; PAM sequence: TCCAGCTT
cggagatcgtaccattgcac

SEQ ID NO: 6107 - DNA, 20 bp, Artificial Sequence
  Description of Artificial Sequence: Synthetic oligonucleotide
  Target: ANGPTL4; (-) strand; PAM type: NNNNGHTT; PAM sequence: ATTCGCTT
ttgtgaggctgaggtgggag

SEQ ID NO: 6108 - DNA, 20 bp, Artificial Sequence
  Description of Artificial Sequence: Synthetic oligonucleotide
  Target: ANGPTL4; (-) strand; PAM type: NNNNGHTT; PAM sequence: GGGAGATT
gctatttgtgaggctgaggt

SEQ ID NO: 6109 - DNA, 20 bp, Artificial Sequence
  Description of Artificial Sequence: Synthetic oligonucleotide
  Target: ANGPTL4; (-) strand; PAM type: NNNNGHTT; PAM sequence: CAGAGATT
gaggcagagggtgcagtaag

SEQ ID NO: 6110 - DNA, 20 bp, Artificial Sequence
  Description of Artificial Sequence: Synthetic oligonucleotide
  Target: ANGPTL4; (-) strand; PAM type: NNNNGHTT; PAM sequence: TCAAGATT
gactgcttgagcccaggagt

SEQ ID NO: 6111 - DNA, 20 bp, Artificial Sequence
  Description of Artificial Sequence: Synthetic oligonucleotide
  Target: ANGPTL4; (-) strand; PAM type: NNNNGHTT; PAM sequence: GACTGCTT
ttgggaggccaaggtgggag

SEQ ID NO: 6112 - DNA, 20 bp, Artificial Sequence
  Description of Artificial Sequence: Synthetic oligonucleotide
  Target: ANGPTL4; (-) strand; PAM type: NNNNGHTT; PAM sequence: TCATGCTT
attaagctaggcaaggtggc

SEQ ID NO: 6113 - DNA, 20 bp, Artificial Sequence
  Description of Artificial Sequence: Synthetic oligonucleotide
  Target: ANGPTL4; (-) strand; PAM type: NNNNGHTT; PAM sequence: CTGGGATT
tacctcggcctcccaaagtg

SEQ ID NO: 6114 - DNA, 20 bp, Artificial Sequence
  Description of Artificial Sequence: Synthetic oligonucleotide
  Target: ANGPTL4; (-) strand; PAM type: NNNNGHTT; PAM sequence: CGGGGTTT
tttttgtattttagtagaga

SEQ ID NO: 6115 - DNA, 20 bp, Artificial Sequence
  Description of Artificial Sequence: Synthetic oligonucleotide
  Target: ANGPTL4; (-) strand; PAM type: NNNNGHTT; PAM sequence: CTGGGATT
tgcctcagcctcccgagtag

SEQ ID NO: 6116 - DNA, 20 bp, Artificial Sequence
  Description of Artificial Sequence: Synthetic oligonucleotide
  Target: ANGPTL4; (-) strand; PAM type: NNNNGHTT; PAM sequence: AAATGATT
aacttccacctcctgggttc

SEQ ID NO: 6117 - DNA, 20 bp, Artificial Sequence
  Description of Artificial Sequence: Synthetic oligonucleotide
  Target: ANGPTL4; (-) strand; PAM type: NNNNGHTT; PAM sequence: AAGGGATT
ggtcttgaactcctgagctc

SEQ ID NO: 6118 - DNA, 20 bp, Artificial Sequence
  Description of Artificial Sequence: Synthetic oligonucleotide
  Target: ANGPTL4; (-) strand; PAM type: NNNNGHTT; PAM sequence: ACAGGATT
tttctgtagattttgtagag

SEQ ID NO: 6119 - DNA, 20 bp, Artificial Sequence
  Description of Artificial Sequence: Synthetic oligonucleotide
  Target: ANGPTL4; (-) strand; PAM type: NNNNGHTT; PAM sequence: TGTAGATT
caccagacctgcctaatttc

SEQ ID NO: 6120 - DNA, 20 bp, Artificial Sequence
  Description of Artificial Sequence: Synthetic oligonucleotide
  Target: ANGPTL4; (-) strand; PAM type: NNNNGHTT; PAM sequence: CCCTGTTT
gcatgagccaccacgcccag

SEQ ID NO: 6121 - DNA, 20 bp, Artificial Sequence
  Description of Artificial Sequence: Synthetic oligonucleotide
  Target: ANGPTL4; (-) strand; PAM type: NNNNGHTT; PAM sequence: CTAGGATT
cacctcagcctcccaaagtg

SEQ ID NO: 6122 - DNA, 20 bp, Artificial Sequence
  Description of Artificial Sequence: Synthetic oligonucleotide
  Target: ANGPTL4; (-) strand; PAM type: NNNNGHTT; PAM sequence: CTAAGCTT
cccaggctggtctcaaactc

SEQ ID NO: 6123 - DNA, 20 bp, Artificial Sequence
  Description of Artificial Sequence: Synthetic oligonucleotide
  Target: ANGPTL4; (-) strand; PAM type: NNNNGHTT; PAM sequence: TGGGGTTT
ttgtattctagtagaggggg

SEQ ID NO: 6124 - DNA, 20 bp, Artificial Sequence
  Description of Artificial Sequence: Synthetic oligonucleotide
  Target: ANGPTL4; (-) strand; PAM type: NNNNGHTT; PAM sequence: CTGGGATT
tgtctcggcctcccaacgtg

SEQ ID NO: 6125 - DNA, 20 bp, Artificial Sequence
  Description of Artificial Sequence: Synthetic oligonucleotide
  Target: ANGPTL4; (-) strand; PAM type: NNNNGHTT; PAM sequence: CGGGGTTT
ttttgtatttttagtgcaaa

SEQ ID NO: 6126 - DNA, 20 bp, Artificial Sequence
  Description of Artificial Sequence: Synthetic oligonucleotide
  Target: ANGPTL4; (-) strand; PAM type: NNNNGHTT; PAM sequence: CGGGGATT
agcctcagcctcccgagtag

SEQ ID NO: 6127 - DNA, 20 bp, Artificial Sequence
  Description of Artificial Sequence: Synthetic oligonucleotide
  Target: ANGPTL4; (-) strand; PAM type: NNNNGHTT; PAM sequence: AAGCGATT
aacctctgcctcccaggttc

SEQ ID NO: 6128 - DNA, 20 bp, Artificial Sequence
  Description of Artificial Sequence: Synthetic oligonucleotide
  Target: ANGPTL4; (-) strand; PAM type: NNNNGHTT; PAM sequence: TGGAGTTT
atttatttatttttttgaga

SEQ ID NO: 6129 - DNA, 20 bp, Artificial Sequence
  Description of Artificial Sequence: Synthetic oligonucleotide
  Target: ANGPTL4; (-) strand; PAM type: NNNNGHTT; PAM sequence: CTGGGATT
cgcttcggcctcccaaagtg

SEQ ID NO: 6130 - DNA, 20 bp, Artificial Sequence
  Description of Artificial Sequence: Synthetic oligonucleotide
  Target: ANGPTL4; (-) strand; PAM type: NNNNGHTT; PAM sequence: GCCCGCTT
atctcctgacctcgtgatcc

SEQ ID NO: 6131 - DNA, 20 bp, Artificial Sequence
  Description of Artificial Sequence: Synthetic oligonucleotide
  Target: ANGPTL4; (-) strand; PAM type: NNNNGHTT; PAM sequence: CAGGGTTT
ttttgtatttttaatagaga

SEQ ID NO: 6132 - DNA, 20 bp, Artificial Sequence
  Description of Artificial Sequence: Synthetic oligonucleotide
  Target: ANGPTL4; (-) strand; PAM type: NNNNGHTT; PAM sequence: TCTAGATT
tactgtcgcctcaagttggc

SEQ ID NO: 6133 - DNA, 20 bp, Artificial Sequence
  Description of Artificial Sequence: Synthetic oligonucleotide
  Target: ANGPTL4; (-) strand; PAM type: NNNNGHTT; PAM sequence: ATCTGATT
aacctgatgaccttttcatg

SEQ ID NO: 6134 - DNA, 20 bp, Artificial Sequence
  Description of Artificial Sequence: Synthetic oligonucleotide
  Target: ANGPTL4; (-) strand; PAM type: NNNNGHTT; PAM sequence: GTATGTTT
gccctctaagcccagcccct

SEQ ID NO: 6135 - DNA, 20 bp, Artificial Sequence
  Description of Artificial Sequence: Synthetic oligonucleotide
  Target: ANGPTL4; (-) strand; PAM type: NNNNGHTT; PAM sequence: AAAAGTTT
tgtgtgtcaaaaaaaaaaaa

SEQ ID NO: 6136 - DNA, 20 bp, Artificial Sequence
  Description of Artificial Sequence: Synthetic oligonucleotide
  Target: ANGPTL4; (-) strand; PAM type: NNNNGHTT; PAM sequence: CTGAGATT
gagacggaggttgcagtgag

SEQ ID NO: 6137 - DNA, 20 bp, Artificial Sequence
  Description of Artificial Sequence: Synthetic oligonucleotide
  Target: ANGPTL4; (-) strand; PAM type: NNNNGHTT; PAM sequence: AATCGCTT
tcgggagactgtgtcaggag

SEQ ID NO: 6138 - DNA, 20 bp, Artificial Sequence
  Description of Artificial Sequence: Synthetic oligonucleotide
  Target: ANGPTL4; (-) strand; PAM type: NNNNGHTT; PAM sequence: ACGTGCTT
aattagccgggtgtggtggc

SEQ ID NO: 6139 - DNA, 20 bp, Artificial Sequence
  Description of Artificial Sequence: Synthetic oligonucleotide
  Target: ANGPTL4; (-) strand; PAM type: NNNNGHTT; PAM sequence: CTGAGCTT
ccgccagggtctttaatgtc

SEQ ID NO: 6140 - DNA, 20 bp, Artificial Sequence
  Description of Artificial Sequence: Synthetic oligonucleotide
  Target: ANGPTL4; (-) strand; PAM type: NNNNGHTT; PAM sequence: ATGAGATT
tcgtcatcgcagctgtgttt

SEQ ID NO: 6141 - DNA, 20 bp, Artificial Sequence
  Description of Artificial Sequence: Synthetic oligonucleotide
  Target: ANGPTL4; (-) strand; PAM type: NNNNGHTT; PAM sequence: CTGTGTTT
gaaagggttcgtcatcgcag

SEQ ID NO: 6142 - DNA, 20 bp, Artificial Sequence
  Description of Artificial Sequence: Synthetic oligonucleotide
  Target: ANGPTL4; (-) strand; PAM type: NNNNGHTT; PAM sequence: GGAGGCTT
accaaaagtccttgccttgc

SEQ ID NO: 6143 - DNA, 20 bp, Artificial Sequence
  Description of Artificial Sequence: Synthetic oligonucleotide
  Target: ANGPTL4; (-) strand; PAM type: NNNNGHTT; PAM sequence: AATCGCTT
tcgggaggctgaggcagtag

SEQ ID NO: 6144 - DNA, 20 bp, Artificial Sequence
  Description of Artificial Sequence: Synthetic oligonucleotide
  Target: ANGPTL4; (-) strand; PAM type: NNNNGHTT; PAM sequence: CCGGGCTT
aaaatacaaaaaaaaattag

SEQ ID NO: 6145 - DNA, 20 bp, Artificial Sequence
  Description of Artificial Sequence: Synthetic oligonucleotide
  Target: ANGPTL4; (-) strand; PAM type: NNNNGHTT; PAM sequence: GCACGCTT
tacccagtggcggagagggc

SEQ ID NO: 6146 - DNA, 20 bp, Artificial Sequence
  Description of Artificial Sequence: Synthetic oligonucleotide
  Target: ANGPTL4; (-) strand; PAM type: NNNNGHTT; PAM sequence: GACGGTTT
ttctccccgccgcgcccgag

SEQ ID NO: 6147 - DNA, 20 bp, Artificial Sequence
  Description of Artificial Sequence: Synthetic oligonucleotide
  Target: ANGPTL4; (-) strand; PAM type: NNNNGHTT; PAM sequence: CTCGGCTT
tcgtgtgaggatccgctcag

SEQ ID NO: 6148 - DNA, 20 bp, Artificial Sequence
  Description of Artificial Sequence: Synthetic oligonucleotide
  Target: ANGPTL4; (-) strand; PAM type: NNNNGHTT; PAM sequence: ACCCGCTT
cgcggaggaccgggggtaag

SEQ ID NO: 6149 - DNA, 20 bp, Artificial Sequence
  Description of Artificial Sequence: Synthetic oligonucleotide
  Target: ANGPTL4; (-) strand; PAM type: NNNNGHTT; PAM sequence: CGGGGATT
cctcttaggtagcctgggag

SEQ ID NO: 6150 - DNA, 20 bp, Artificial Sequence
  Description of Artificial Sequence: Synthetic oligonucleotide
  Target: ANGPTL4; (-) strand; PAM type: NNNNGHTT; PAM sequence: CTCGGCTT
gccttgagcgaacctccctc

SEQ ID NO: 6151 - DNA, 20 bp, Artificial Sequence
  Description of Artificial Sequence: Synthetic oligonucleotide
  Target: ANGPTL4; (-) strand; PAM type: NNNNGHTT; PAM sequence: TTTTGCTT
aagagacgggggtctcgcta

SEQ ID NO: 6152 - DNA, 20 bp, Artificial Sequence
  Description of Artificial Sequence: Synthetic oligonucleotide
  Target: ANGPTL4; (-) strand; PAM type: NNNNGHTT; PAM sequence: GGTCGTTT
ctccgtgagccactgcgccc

SEQ ID NO: 6153 - DNA, 20 bp, Artificial Sequence
  Description of Artificial Sequence: Synthetic oligonucleotide
  Target: ANGPTL4; (-) strand; PAM type: NNNNGHTT; PAM sequence: CGAGGTTT
ttttgtatttttagtagaga

SEQ ID NO: 6154 - DNA, 20 bp, Artificial Sequence
  Description of Artificial Sequence: Synthetic oligonucleotide
  Target: ANGPTL4; (-) strand; PAM type: NNNNGHTT; PAM sequence: CTGGGATT
tgcctcagcctcccaagtag

SEQ ID NO: 6155 - DNA, 20 bp, Artificial Sequence
  Description of Artificial Sequence: Synthetic oligonucleotide
  Target: ANGPTL4; (-) strand; PAM type: NNNNGHTT; PAM sequence: AAGAGATT
aacctctgcctcccgggttc

SEQ ID NO: 6156 - DNA, 20 bp, Artificial Sequence
  Description of Artificial Sequence: Synthetic oligonucleotide
  Target: ANGPTL4; (-) strand; PAM type: NNNNGHTT; PAM sequence: CCTGGCTT
tacaagcgtgagtcaccgca

SEQ ID NO: 6157 - DNA, 20 bp, Artificial Sequence
  Description of Artificial Sequence: Synthetic oligonucleotide
  Target: ANGPTL4; (-) strand; PAM type: NNNNGHTT; PAM sequence: CGGGGTTT
ttttgtatttttagtagaga

SEQ ID NO: 6158 - DNA, 20 bp, Artificial Sequence
  Description of Artificial Sequence: Synthetic oligonucleotide
  Target: ANGPTL4; (-) strand; PAM type: NNNNGHTT; PAM sequence: CTGGGATT
tgcctcagcctccccagtag

SEQ ID NO: 6159 - DNA, 20 bp, Artificial Sequence
  Description of Artificial Sequence: Synthetic oligonucleotide
  Target: ANGPTL4; (-) strand; PAM type: NNNNGHTT; PAM sequence: AAGTGATT
aacctctgcctcccagactc

SEQ ID NO: 6160 - DNA, 20 bp, Artificial Sequence
  Description of Artificial Sequence: Synthetic oligonucleotide
  Target: ANGPTL4; (-) strand; PAM type: NNNNGHTT; PAM sequence: CCTGGCTT
tacagtcatgcagctctatg

SEQ ID NO: 6161 - DNA, 20 bp, Artificial Sequence
  Description of Artificial Sequence: Synthetic oligonucleotide
  Target: ANGPTL4; (-) strand; PAM type: NNNNGHTT; PAM sequence: TCCTGTTT
ctcctggggtcaggcgatcc

SEQ ID NO: 6162 - DNA, 20 bp, Artificial Sequence
  Description of Artificial Sequence: Synthetic oligonucleotide
  Target: ANGPTL4; (-) strand; PAM type: NNNNGHTT; PAM sequence: CCCAGCTT
ggtgaaaaccttggtgagga

SEQ ID NO: 6163 - DNA, 20 bp, Artificial Sequence
  Description of Artificial Sequence: Synthetic oligonucleotide
  Target: ANGPTL4; (-) strand; PAM type: NNNNGHTT; PAM sequence: TGCTGCTT
gcagatgctgaattcgcagg

SEQ ID NO: 6164 - DNA, 20 bp, Artificial Sequence
  Description of Artificial Sequence: Synthetic oligonucleotide
  Target: ANGPTL4; (-) strand; PAM type: NNNNGHTT; PAM sequence: CCTGGCTT
ctcccttgatcctagggtta

SEQ ID NO: 6165 - DNA, 20 bp, Artificial Sequence
  Description of Artificial Sequence: Synthetic oligonucleotide
  Target: ANGPTL4; (-) strand; PAM type: NNNNGHTT; PAM sequence: AGGTGCTT
gcttggccacctcatggtct

SEQ ID NO: 6166 - DNA, 20 bp, Artificial Sequence
  Description of Artificial Sequence: Synthetic oligonucleotide
  Target: ANGPTL4; (-) strand; PAM type: NNNNGHTT; PAM sequence: GCAGGCTT
cgggcagcctctttcttcgg

SEQ ID NO: 6167 - DNA, 20 bp, Artificial Sequence
  Description of Artificial Sequence: Synthetic oligonucleotide
  Target: ANGPTL4; (-) strand; PAM type: NNNNGHTT; PAM sequence: ATCAGCTT
ctgaggaaggaggtgctccc

SEQ ID NO: 6168 - DNA, 20 bp, Artificial Sequence
  Description of Artificial Sequence: Synthetic oligonucleotide
  Target: ANGPTL4; (-) strand; PAM type: NNNNGHTT; PAM sequence: ACTGGCTT
cagggcttcagggacagccc

SEQ ID NO: 6169 - DNA, 20 bp, Artificial Sequence
  Description of Artificial Sequence: Synthetic oligonucleotide
  Target: ANGPTL4; (-) strand; PAM type: NNNNGHTT; PAM sequence: CAGGGCTT
ctgttccaatcagtgatcag

SEQ ID NO: 6170 - DNA, 20 bp, Artificial Sequence
  Description of Artificial Sequence: Synthetic oligonucleotide
  Target: ANGPTL4; (-) strand; PAM type: NNNNGHTT; PAM sequence: GAGTGTTT
attggatttgtaagatacaa

SEQ ID NO: 6171 - DNA, 20 bp, Artificial Sequence
  Description of Artificial Sequence: Synthetic oligonucleotide
  Target: ANGPTL4; (-) strand; PAM type: NNNNGHTT; PAM sequence: ATTGGATT
aggggtcagggacctggagc

SEQ ID NO: 6172 - DNA, 20 bp, Artificial Sequence
  Description of Artificial Sequence: Synthetic oligonucleotide
  Target: ANGPTL4; (-) strand; PAM type: NNNNGHTT; PAM sequence: CGGAGATT
atgctgtggttcgagatgaa

SEQ ID NO: 6173 - DNA, 20 bp, Artificial Sequence
  Description of Artificial Sequence: Synthetic oligonucleotide
  Target: ANGPTL4; (-) strand; PAM type: NNNNGHTT; PAM sequence: GGGAGCTT
gcacggaggtgggaaggagc

SEQ ID NO: 6174 - DNA, 20 bp, Artificial Sequence
  Description of Artificial Sequence: Synthetic oligonucleotide
  Target: ANGPTL4; (-) strand; PAM type: NNNNGHTT; PAM sequence: GGTGGCTT
gaagcccctcatcctgggat

SEQ ID NO: 6175 - DNA, 20 bp, Artificial Sequence
  Description of Artificial Sequence: Synthetic oligonucleotide
  Target: ANGPTL4; (-) strand; PAM type: NNNNGHTT; PAM sequence: TGTGGCTT
gcacgcggccaaaccaccag

SEQ ID NO: 6176 - DNA, 20 bp, Artificial Sequence
  Description of Artificial Sequence: Synthetic oligonucleotide
  Target: ANGPTL4; (-) strand; PAM type: NNNNGHTT; PAM sequence: AGACGCTT
cgggcccagagtgaccagga

SEQ ID NO: 6177 - DNA, 20 bp, Artificial Sequence
  Description of Artificial Sequence: Synthetic oligonucleotide
  Target: ANGPTL4; (-) strand; PAM type: NNNNGHTT; PAM sequence: CTGAGATT
gaggcagaggttgcagtgag

SEQ ID NO: 6178 - DNA, 20 bp, Artificial Sequence
  Description of Artificial Sequence: Synthetic oligonucleotide
  Target: ANGPTL4; (-) strand; PAM type: NNNNGHTT; PAM sequence: CAAAGATT
cccatctctagtaaaacata

SEQ ID NO: 6179 - DNA, 20 bp, Artificial Sequence
  Description of Artificial Sequence: Synthetic oligonucleotide
  Target: ANGPTL4; (-) strand; PAM type: NNNNGHTT; PAM sequence: AGGAGTTT
gggaggcgggcggatcggtc

SEQ ID NO: 6180 - DNA, 20 bp, Artificial Sequence
  Description of Artificial Sequence: Synthetic oligonucleotide
  Target: ANGPTL4; (-) strand; PAM type: NNNNGHTT; PAM sequence: CCCAGCTT
cctcacttctctctctgggt

SEQ ID NO: 6181 - DNA, 20 bp, Artificial Sequence
  Description of Artificial Sequence: Synthetic oligonucleotide
  Target: ANGPTL4; (-) strand; PAM type: NNNNGHTT; PAM sequence: CTGGGATT
agccttggcctcccaaagtg

SEQ ID NO: 6182 - DNA, 20 bp, Artificial Sequence
  Description of Artificial Sequence: Synthetic oligonucleotide
  Target: ANGPTL4; (-) strand; PAM type: NNNNGHTT; PAM sequence: GGGGGTTT
tttgcattatttgtagagac

SEQ ID NO: 6183 - DNA, 20 bp, Artificial Sequence
  Description of Artificial Sequence: Synthetic oligonucleotide
  Target: ANGPTL4; (-) strand; PAM type: NNNNGHTT; PAM sequence: ACTAGTTT
ggcatgtgccaccacgcccg

SEQ ID NO: 6184 - DNA, 20 bp, Artificial Sequence
  Description of Artificial Sequence: Synthetic oligonucleotide
  Target: ANGPTL4; (-) strand; PAM type: NNNNGHTT; PAM sequence: TTTTGTTT
cctgggactctctttttttg

SEQ ID NO: 6185 - DNA, 20 bp, Artificial Sequence
  Description of Artificial Sequence: Synthetic oligonucleotide
  Target: ANGPTL4; (-) strand; PAM type: NNNNGHTT; PAM sequence: TTTTGTTT
ccctgcctgggactctcttt

SEQ ID NO: 6186 - DNA, 20 bp, Artificial Sequence
  Description of Artificial Sequence: Synthetic oligonucleotide
  Target: ANGPTL4; (-) strand; PAM type: NNNNGHTT; PAM sequence: ACAGGCTT
acccacaccctctctggcac

SEQ ID NO: 6187 - DNA, 20 bp, Artificial Sequence
  Description of Artificial Sequence: Synthetic oligonucleotide
  Target: ANGPTL4; (-) strand; PAM type: NNNNGHTT; PAM sequence: GGGGGCTT
ctcaggagccaggcatatct

SEQ ID NO: 6188 - DNA, 20 bp, Artificial Sequence
  Description of Artificial Sequence: Synthetic oligonucleotide
  Target: ANGPTL4; (-) strand; PAM type: NNNNGHTT; PAM sequence: GCTGGATT
aaatggcggagacccctgag

SEQ ID NO: 6189 - DNA, 20 bp, Artificial Sequence
  Description of Artificial Sequence: Synthetic oligonucleotide
  Target: ANGPTL4; (-) strand; PAM type: NNNNGHTT; PAM sequence: TTTTGTTT
cctttaatttttttgttttg

SEQ ID NO: 6190 - DNA, 20 bp, Artificial Sequence
  Description of Artificial Sequence: Synthetic oligonucleotide
  Target: ANGPTL4; (-) strand; PAM type: NNNNGHTT; PAM sequence: TTTTGTTT
ccctgcctttaatttttttg

SEQ ID NO: 6191 - DNA, 20 bp, Artificial Sequence
  Description of Artificial Sequence: Synthetic oligonucleotide
  Target: ANGPTL4; (-) strand; PAM type: NNNNGHTT; PAM sequence: TTTTGTTT
caagaccctgcctttaattt

SEQ ID NO: 6192 - DNA, 20 bp, Artificial Sequence
  Description of Artificial Sequence: Synthetic oligonucleotide
  Target: ANGPTL4; (-) strand; PAM type: NNNNGHTT; PAM sequence: ACCAGCTT
aaaaaaaaaaaaaaaaaaag

SEQ ID NO: 6193 - DNA, 20 bp, Artificial Sequence
  Description of Artificial Sequence: Synthetic oligonucleotide
  Target: ANGPTL4; (-) strand; PAM type: NNNNGHTT; PAM sequence: GGAGGTTT
attgcttgaacccgggaggc

SEQ ID NO: 6194 - DNA, 20 bp, Artificial Sequence
  Description of Artificial Sequence: Synthetic oligonucleotide
  Target: ANGPTL4; (-) strand; PAM type: NNNNGHTT; PAM sequence: AATTGCTT
tggggaggctgacgctggag

SEQ ID NO: 6195 - DNA, 20 bp, Artificial Sequence
  Description of Artificial Sequence: Synthetic oligonucleotide
  Target: ANGPTL4; (-) strand; PAM type: NNNNGHTT; PAM sequence: AGGAGTTT
tcggcaaatcatttgaggtc

SEQ ID NO: 6196 - DNA, 20 bp, Artificial Sequence
  Description of Artificial Sequence: Synthetic oligonucleotide
  Target: ANGPTL4; (-) strand; PAM type: NNNNGHTT; PAM sequence: TCGGGATT
atgataggcctcccaaagtg

SEQ ID NO: 6197 - DNA, 20 bp, Artificial Sequence
  Description of Artificial Sequence: Synthetic oligonucleotide
  Target: ANGPTL4; (-) strand; PAM type: NNNNGHTT; PAM sequence: CTGGGATT
tgcctcaacctcccaaagtg

SEQ ID NO: 6198 - DNA, 20 bp, Artificial Sequence
  Description of Artificial Sequence: Synthetic oligonucleotide
  Target: ANGPTL4; (-) strand; PAM type: NNNNGHTT; PAM sequence: CGGGGTTT
ttttgtatttttagtagaga

SEQ ID NO: 6199 - DNA, 20 bp, Artificial Sequence
  Description of Artificial Sequence: Synthetic oligonucleotide
  Target: ANGPTL4; (-) strand; PAM type: NNNNGHTT; PAM sequence: CTGGGATT
tgcctcagccacctgagtag

SEQ ID NO: 6200 - DNA, 20 bp, Artificial Sequence
  Description of Artificial Sequence: Synthetic oligonucleotide
  Target: ANGPTL4; (-) strand; PAM type: NNNNGHTT; PAM sequence: AAGAGATT
aacctctgcctcccaggttc

SEQ ID NO: 6201 - DNA, 20 bp, Artificial Sequence
  Description of Artificial Sequence: Synthetic oligonucleotide
  Target: ANGPTL4; (-) strand; PAM type: NNNNGHTT; PAM sequence: CGAGGTTT
cctttgtttttttttagaaa

SEQ ID NO: 6202 - DNA, 20 bp, Artificial Sequence
  Description of Artificial Sequence: Synthetic oligonucleotide
  Target: ANGPTL4; (-) strand; PAM type: NNNNGHTT; PAM sequence: CTTTGTTT
tgtaagccaccgtgctcagc

SEQ ID NO: 6203 - DNA, 20 bp, Artificial Sequence
  Description of Artificial Sequence: Synthetic oligonucleotide
  Target: ANGPTL4; (-) strand; PAM type: NNNNGHTT; PAM sequence: AAGTGATT
ggtcttgaacttctgacctc

SEQ ID NO: 6204 - DNA, 20 bp, Artificial Sequence
  Description of Artificial Sequence: Synthetic oligonucleotide
  Target: ANGPTL4; (-) strand; PAM type: NNNNGHTT; PAM sequence: TAGGGTTT
aatgtttatgttggtagaga

SEQ ID NO: 6205 - DNA, 20 bp, Artificial Sequence
  Description of Artificial Sequence: Synthetic oligonucleotide
  Target: ANGPTL4; (-) strand; PAM type: NNNNGHTT; PAM sequence: TAATGTTT
gaatcacaggcacgcccggc

SEQ ID NO: 6206 - DNA, 20 bp, Artificial Sequence
  Description of Artificial Sequence: Synthetic oligonucleotide
  Target: ANGPTL4; (-) strand; PAM type: NNNNGHTT; PAM sequence: TTGTGCTT
cttcggggctcaagcgattc

SEQ ID NO: 6207 - DNA, 20 bp, Artificial Sequence
  Description of Artificial Sequence: Synthetic oligonucleotide
  Target: ANGPTL4; (-) strand; PAM type: NNNNGHTT; PAM sequence: AAGCGATT
aacctctgccttcggggctc

SEQ ID NO: 6208 - DNA, 20 bp, Artificial Sequence
  Description of Artificial Sequence: Synthetic oligonucleotide
  Target: ANGPTL4; (-) strand; PAM type: NNNNGHTT; PAM sequence: AAAAGCTT
aaggacttctcagtggaaaa

SEQ ID NO: 6209 - DNA, 20 bp, Artificial Sequence
  Description of Artificial Sequence: Synthetic oligonucleotide
  Target: ANGPTL4; (-) strand; PAM type: NNNNGHTT; PAM sequence: GTAGGCTT
ggatccccaaaccccgcctt

SEQ ID NO: 6210 - DNA, 20 bp, Artificial Sequence
  Description of Artificial Sequence: Synthetic oligonucleotide
  Target: ANGPTL4; (-) strand; PAM type: NNNNGHTT; PAM sequence: TGGAGCTT
aatggtgtgaactcaggagg

SEQ ID NO: 6211 - DNA, 20 bp, Artificial Sequence
  Description of Artificial Sequence: Synthetic oligonucleotide
  Target: ANGPTL4; (-) strand; PAM type: NNNNGHTT; PAM sequence: AGATGTTT
cctgtggagcaccattataa

SEQ ID NO: 6212 - DNA, 20 bp, Artificial Sequence
  Description of Artificial Sequence: Synthetic oligonucleotide
  Target: ANGPTL4; (-) strand; PAM type: NNNNGHTT; PAM sequence: CCCTGTTT
gcttaggcaacagagtgaga

SEQ ID NO: 6213 - DNA, 20 bp, Artificial Sequence
  Description of Artificial Sequence: Synthetic oligonucleotide
  Target: ANGPTL4; (-) strand; PAM type: NNNNGHTT; PAM sequence: TCCAGCTT
ccgagatcgcaccactgcac

SEQ ID NO: 6214 - DNA, 20 bp, Artificial Sequence
  Description of Artificial Sequence: Synthetic oligonucleotide
  Target: ANGPTL4; (-) strand; PAM type: NNNNGHTT; PAM sequence: AATTGCTT
aatttttttttttttttgag

SEQ ID NO: 6215 - DNA, 20 bp, Artificial Sequence
  Description of Artificial Sequence: Synthetic oligonucleotide
  Target: ANGPTL4; (-) strand; PAM type: NNNNGHTT; PAM sequence: CTGGGATT
cgcttcagcctcccaaagtg

SEQ ID NO: 6216 - DNA, 20 bp, Artificial Sequence
  Description of Artificial Sequence: Synthetic oligonucleotide
  Target: ANGPTL4; (-) strand; PAM type: NNNNGHTT; PAM sequence: ACTCGCTT
ctcctgggctcaagtgatcc

SEQ ID NO: 6217 - DNA, 20 bp, Artificial Sequence
  Description of Artificial Sequence: Synthetic oligonucleotide
  Target: ANGPTL4; (-) strand; PAM type: NNNNGHTT; PAM sequence: CTCAGATT
gacaggatttcgccctgttg

SEQ ID NO: 6218 - DNA, 20 bp, Artificial Sequence
  Description of Artificial Sequence: Synthetic oligonucleotide
  Target: ANGPTL4; (-) strand; PAM type: NNNNGHTT; PAM sequence: ACAGGATT
tttttgtatttttaattgag

SEQ ID NO: 6219 - DNA, 20 bp, Artificial Sequence
  Description of Artificial Sequence: Synthetic oligonucleotide
  Target: ANGPTL4; (-) strand; PAM type: NNNNGHTT; PAM sequence: GCTAGTTT
ggcaggcaccaccatgccca

SEQ ID NO: 6220 - DNA, 20 bp, Artificial Sequence
  Description of Artificial Sequence: Synthetic oligonucleotide
  Target: ANGPTL4; (-) strand; PAM type: NNNNGHTT; PAM sequence: CCAGGCTT
caggggtctcactctgtcac

SEQ ID NO: 6221 - DNA, 20 bp, Artificial Sequence
  Description of Artificial Sequence: Synthetic oligonucleotide
  Target: ANGPTL4; (-) strand; PAM type: NNNNGHTT; PAM sequence: AAGTGATT
agcgtcaaccttacgggctc

SEQ ID NO: 6222 - DNA, 20 bp, Artificial Sequence
  Description of Artificial Sequence: Synthetic oligonucleotide
  Target: ANGPTL4; (-) strand; PAM type: NNNNGHTT; PAM sequence: TTAAGTTT
ccccacacccggccttattt

SEQ ID NO: 6223 - DNA, 20 bp, Artificial Sequence
  Description of Artificial Sequence: Synthetic oligonucleotide
  Target: ANGPTL4; (-) strand; PAM type: NNNNGHTT; PAM sequence: CTGGGATT
cacctcggcctcccaaagtg

SEQ ID NO: 6224 - DNA, 20 bp, Artificial Sequence
  Description of Artificial Sequence: Synthetic oligonucleotide
  Target: ANGPTL4; (-) strand; PAM type: NNNNGHTT; PAM sequence: GCTAGTTT
ggtttcaccatgttggccag

SEQ ID NO: 6225 - DNA, 20 bp, Artificial Sequence
  Description of Artificial Sequence: Synthetic oligonucleotide
  Target: ANGPTL4; (-) strand; PAM type: NNNNGHTT; PAM sequence: CAGGGTTT
ttttgtatttttagtagaga

SEQ ID NO: 6226 - DNA, 20 bp, Artificial Sequence
  Description of Artificial Sequence: Synthetic oligonucleotide
  Target: ANGPTL4; (-) strand; PAM type: NNNNGHTT; PAM sequence: CTGGGATT
ctcctcagcctcccaaagtg

SEQ ID NO: 6227 - DNA, 20 bp, Artificial Sequence
  Description of Artificial Sequence: Synthetic oligonucleotide
  Target: ANGPTL4; (-) strand; PAM type: NNNNGHTT; PAM sequence: GGGGGTTT
ttttgtatttttagtagtga

SEQ ID NO: 6228 - DNA, 20 bp, Artificial Sequence
  Description of Artificial Sequence: Synthetic oligonucleotide
  Target: ANGPTL4; (-) strand; PAM type: NNNNGHTT; PAM sequence: GCTAGTTT
ggcacccgccaccacgcctg

SEQ ID NO: 6229 - DNA, 20 bp, Artificial Sequence
  Description of Artificial Sequence: Synthetic oligonucleotide
  Target: ANGPTL4; (-) strand; PAM type: NNNNGHTT; PAM sequence: CCGGGATT
tgcctcagcctcctgagtag

SEQ ID NO: 6230 - DNA, 20 bp, Artificial Sequence
  Description of Artificial Sequence: Synthetic oligonucleotide
  Target: ANGPTL4; (-) strand; PAM type: NNNNGHTT; PAM sequence: AAGGGATT
cacctctgcctcccaggttc

SEQ ID NO: 6231 - DNA, 20 bp, Artificial Sequence
  Description of Artificial Sequence: Synthetic oligonucleotide
  Target: ANGPTL4; (-) strand; PAM type: NNNNGHTT; PAM sequence: CTGGGATT
tccctcagcctcccgagtag

SEQ ID NO: 6232 - DNA, 20 bp, Artificial Sequence
  Description of Artificial Sequence: Synthetic oligonucleotide
  Target: ANGPTL4; (-) strand; PAM type: NNNNGHTT; PAM sequence: AAGTGATT
aacctccgtctctcaggttt

SEQ ID NO: 6233 - DNA, 20 bp, Artificial Sequence
  Description of Artificial Sequence: Synthetic oligonucleotide
  Target: ANGPTL4; (-) strand; PAM type: NNNNGHTT; PAM sequence: TCAGGTTT
ctcactgcaacctccgtctc

SEQ ID NO: 6234 - DNA, 20 bp, Artificial Sequence
  Description of Artificial Sequence: Synthetic oligonucleotide
  Target: ANGPTL4; (-) strand; PAM type: NNNNGHTT; PAM sequence: TTGAGATT
tggacttgactttttttttt

SEQ ID NO: 6235 - DNA, 20 bp, Artificial Sequence
  Description of Artificial Sequence: Synthetic oligonucleotide
  Target: ANGPTL4; (-) strand; PAM type: NNNNGHTT; PAM sequence: CTGGGCTT
gaggcaggttggggaccagg

SEQ ID NO: 6236 - DNA, 20 bp, Artificial Sequence
  Description of Artificial Sequence: Synthetic oligonucleotide
  Target: ANGPTL4; (-) strand; PAM type: NNNNGHTT; PAM sequence: TTAAGCTT
tcttccagaagattcccttc

SEQ ID NO: 6237 - DNA, 20 bp, Artificial Sequence
  Description of Artificial Sequence: Synthetic oligonucleotide
  Target: ANGPTL4; (-) strand; PAM type: NNNNGHTT; PAM sequence: AGAAGATT
gcggccccgccaggtcttcc

SEQ ID NO: 6238 - DNA, 20 bp, Artificial Sequence
  Description of Artificial Sequence: Synthetic oligonucleotide
  Target: ANGPTL4; (-) strand; PAM type: NNNNGHTT; PAM sequence: ACAAGTTT
cgtggtcttcttctctgtcc

SEQ ID NO: 6239 - DNA, 20 bp, Artificial Sequence
  Description of Artificial Sequence: Synthetic oligonucleotide
  Target: ANGPTL4; (-) strand; PAM type: NNNNGHTT; PAM sequence: GGGGGCTT
agcccccctgcactcagaaa

SEQ ID NO: 6240 - DNA, 20 bp, Artificial Sequence
  Description of Artificial Sequence: Synthetic oligonucleotide
  Target: ANGPTL4; (-) strand; PAM type: NNNNGHTT; PAM sequence: GCCTGCTT
tccgcccagataccattggc

SEQ ID NO: 6241 - DNA, 20 bp, Artificial Sequence
  Description of Artificial Sequence: Synthetic oligonucleotide
  Target: ANGPTL4; (-) strand; PAM type: NNNNGHTT; PAM sequence: GGTTGCTT
caaagaacaaagtgttctga

SEQ ID NO: 6242 - DNA, 20 bp, Artificial Sequence
  Description of Artificial Sequence: Synthetic oligonucleotide
  Target: ANGPTL4; (-) strand; PAM type: NNNNGHTT; PAM sequence: ACATGTTT
caccgtgcctggccctggga

SEQ ID NO: 6243 - DNA, 20 bp, Artificial Sequence
  Description of Artificial Sequence: Synthetic oligonucleotide
  Target: ANGPTL4; (-) strand; PAM type: NNNNGHTT; PAM sequence: CTGGGATT
tgtctcggcctcacaaatgg

SEQ ID NO: 6244 - DNA, 20 bp, Artificial Sequence
  Description of Artificial Sequence: Synthetic oligonucleotide
  Target: ANGPTL4; (-) strand; PAM type: NNNNGHTT; PAM sequence: AAGTGATT
agcctctgcctccttggctc

SEQ ID NO: 6245 - DNA, 20 bp, Artificial Sequence
  Description of Artificial Sequence: Synthetic oligonucleotide
  Target: ANGPTL4; (-) strand; PAM type: NNNNGHTT; PAM sequence: CTCGGCTT
ctggagtgcagtggcgcaat

SEQ ID NO: 6246 - DNA, 20 bp, Artificial Sequence
  Description of Artificial Sequence: Synthetic oligonucleotide
  Target: ANGPTL4; (-) strand; PAM type: NNNNGHTT; PAM sequence: TTTTGTTT
ctctacgaaaaaaaaattat

SEQ ID NO: 6247 - DNA, 20 bp, Artificial Sequence
  Description of Artificial Sequence: Synthetic oligonucleotide
  Target: ANGPTL4; (-) strand; PAM type: NNNNGHTT; PAM sequence: CGGTGTTT
caggaggatcccttgagtct

SEQ ID NO: 6248 - DNA, 20 bp, Artificial Sequence
  Description of Artificial Sequence: Synthetic oligonucleotide
  Target: ANGPTL4; (-) strand; PAM type: NNNNGHTT; PAM sequence: CTGGGATT
tgcctcggcctcctaaagtg

SEQ ID NO: 6249 - DNA, 20 bp, Artificial Sequence
  Description of Artificial Sequence: Synthetic oligonucleotide
  Target: ANGPTL4; (-) strand; PAM type: NNNNGHTT; PAM sequence: CGGGGTTT
ttttgtatttttagtagaga

SEQ ID NO: 6250 - DNA, 20 bp, Artificial Sequence
  Description of Artificial Sequence: Synthetic oligonucleotide
  Target: ANGPTL4; (-) strand; PAM type: NNNNGHTT; PAM sequence: CTGGGATT
tgcctcagcctcctgagtag

SEQ ID NO: 6251 - DNA, 20 bp, Artificial Sequence
  Description of Artificial Sequence: Synthetic oligonucleotide
  Target: ANGPTL4; (-) strand; PAM type: NNNNGHTT; PAM sequence: AAGTGATT
aacctccacctcccgagttc

SEQ ID NO: 6252 - DNA, 20 bp, Artificial Sequence
  Description of Artificial Sequence: Synthetic oligonucleotide
  Target: ANGPTL4; (-) strand; PAM type: NNNNGHTT; PAM sequence: TGAGGTTT
ttttgtatttttagtagaaa

SEQ ID NO: 6253 - DNA, 20 bp, Artificial Sequence
  Description of Artificial Sequence: Synthetic oligonucleotide
  Target: ANGPTL4; (-) strand; PAM type: NNNNGHTT; PAM sequence: CTGGGATT
ggcctcagcctcctgagtag

SEQ ID NO: 6254 - DNA, 20 bp, Artificial Sequence
  Description of Artificial Sequence: Synthetic oligonucleotide
  Target: ANGPTL4; (-) strand; PAM type: NNNNGHTT; PAM sequence: CCCCGATT
cccacaagcaccgcgcgcag

SEQ ID NO: 6255 - DNA, 20 bp, Artificial Sequence
  Description of Artificial Sequence: Synthetic oligonucleotide
  Target: ANGPTL4; (-) strand; PAM type: NNNNGHTT; PAM sequence: GCTAGCTT
ccaccagactcaggagccca

SEQ ID NO: 6256 - DNA, 20 bp, Artificial Sequence
  Description of Artificial Sequence: Synthetic oligonucleotide
  Target: ANGPTL4; (-) strand; PAM type: NNNNGHTT; PAM sequence: TGATGATT
accctgagctagacataggg

SEQ ID NO: 6257 - DNA, 20 bp, Artificial Sequence
  Description of Artificial Sequence: Synthetic oligonucleotide
  Target: ANGPTL4; (-) strand; PAM type: NNNNGHTT; PAM sequence: TGCCGATT
accttgagctagatacagag

SEQ ID NO: 6258 - DNA, 20 bp, Artificial Sequence
  Description of Artificial Sequence: Synthetic oligonucleotide
  Target: ANGPTL4; (-) strand; PAM type: NNNNGHTT; PAM sequence: GTGTGTTT
tagacacagggtgctgattg

SEQ ID NO: 6259 - DNA, 20 bp, Artificial Sequence
  Description of Artificial Sequence: Synthetic oligonucleotide
  Target: ANGPTL4; (-) strand; PAM type: NNNNGHTT; PAM sequence: TGCTGATT
accctgagctagacacaggg

SEQ ID NO: 6260 - DNA, 20 bp, Artificial Sequence
  Description of Artificial Sequence: Synthetic oligonucleotide
  Target: ANGPTL4; (-) strand; PAM type: NNNNGHTT; PAM sequence: TGTCGATT
cacagtagctagatacagag

SEQ ID NO: 6261 - DNA, 20 bp, Artificial Sequence
  Description of Artificial Sequence: Synthetic oligonucleotide
  Target: ANGPTL4; (-) strand; PAM type: NNNNGHTT; PAM sequence: ACCAGATT
caaaggttctccacatcccc

SEQ ID NO: 6262 - DNA, 20 bp, Artificial Sequence
  Description of Artificial Sequence: Synthetic oligonucleotide
  Target: ANGPTL4; (-) strand; PAM type: NNNNGHTT; PAM sequence: GTGCGTTT
ttttgacagggcgctgattg

SEQ ID NO: 6263 - DNA, 20 bp, Artificial Sequence
  Description of Artificial Sequence: Synthetic oligonucleotide
  Target: ANGPTL4; (-) strand; PAM type: NNNNGHTT; PAM sequence: CGCTGATT
actggtctgttttgacaggg

SEQ ID NO: 6264 - DNA, 20 bp, Artificial Sequence
  Description of Artificial Sequence: Synthetic oligonucleotide
  Target: ANGPTL4; (-) strand; PAM type: NNNNGHTT; PAM sequence: GTCTGTTT
ctgattggtagagcccactg

SEQ ID NO: 6265 - DNA, 20 bp, Artificial Sequence
  Description of Artificial Sequence: Synthetic oligonucleotide
  Target: ANGPTL4; (-) strand; PAM type: NNNNGHTT; PAM sequence: TGCTGATT
atctggccccacccacatcc

SEQ ID NO: 6266 - DNA, 20 bp, Artificial Sequence
  Description of Artificial Sequence: Synthetic oligonucleotide
  Target: ANGPTL4; (-) strand; PAM type: NNNNGHTT; PAM sequence: GCCTGCTT
tgccactgctggctcgggca

SEQ ID NO: 6267 - DNA, 20 bp, Artificial Sequence
  Description of Artificial Sequence: Synthetic oligonucleotide
  Target: ANGPTL4; (-) strand; PAM type: NNNNGHTT; PAM sequence: CAAAGCTT
tattgcaaagagcaaaagaa

SEQ ID NO: 6268 - DNA, 20 bp, Artificial Sequence
  Description of Artificial Sequence: Synthetic oligonucleotide
  Target: ANGPTL4; (-) strand; PAM type: NNNNGHTT; PAM sequence: ACAAGATT
ggacccaaagagtgagcagt

SEQ ID NO: 6269 - DNA, 20 bp, Artificial Sequence
  Description of Artificial Sequence: Synthetic oligonucleotide
  Target: ANGPTL4; (-) strand; PAM type: NNNNGHTT; PAM sequence: CATGGTTT
tttcttccttctggtgggtt

SEQ ID NO: 6270 - DNA, 20 bp, Artificial Sequence
  Description of Artificial Sequence: Synthetic oligonucleotide
  Target: ANGPTL4; (-) strand; PAM type: NNNNGHTT; PAM sequence: CAGCGTTT
ttctgatgttcaggtgtgtt

SEQ ID NO: 6271 - DNA, 20 bp, Artificial Sequence
  Description of Artificial Sequence: Synthetic oligonucleotide
  Target: ANGPTL4; (-) strand; PAM type: NNNNGHTT; PAM sequence: GTTTGTTT
cttaaggtggcgcgtctgga

SEQ ID NO: 6272 - DNA, 20 bp, Artificial Sequence
  Description of Artificial Sequence: Synthetic oligonucleotide
  Target: ANGPTL4; (-) strand; PAM type: NNNNGHTT; PAM sequence: TGGAGTTT
agctcttaaggtggcgcgtc

SEQ ID NO: 6273 - DNA, 20 bp, Artificial Sequence
  Description of Artificial Sequence: Synthetic oligonucleotide
  Target: ANGPTL4; (-) strand; PAM type: NNNNGHTT; PAM sequence: TGTGGTTT
gggttcagaaaatggacaga

SEQ ID NO: 6274 - DNA, 20 bp, Artificial Sequence
  Description of Artificial Sequence: Synthetic oligonucleotide
  Target: ANGPTL4; (-) strand; PAM type: NNNNGHTT; PAM sequence: AATCGCTT
tcgggaggccgaggcaggag

SEQ ID NO: 6275 - DNA, 20 bp, Artificial Sequence
  Description of Artificial Sequence: Synthetic oligonucleotide
  Target: ANGPTL4; (-) strand; PAM type: NNNNGHTT; PAM sequence: AGGAGTTT
cgggcagatcacttgaggtc

SEQ ID NO: 6276 - DNA, 20 bp, Artificial Sequence
  Description of Artificial Sequence: Synthetic oligonucleotide
  Target: ANGPTL4; (-) strand; PAM type: NNNNGHTT; PAM sequence: ACCAGTTT
tggcttgcgcctgtaatccc

SEQ ID NO: 6277 - DNA, 20 bp, Artificial Sequence
  Description of Artificial Sequence: Synthetic oligonucleotide
  Target: ANGPTL4; (-) strand; PAM type: NNNNGHTT; PAM sequence: AGTGGCTT
taaattaacaggccgggcac

SEQ ID NO: 6278 - DNA, 20 bp, Artificial Sequence
  Description of Artificial Sequence: Synthetic oligonucleotide
  Target: ANGPTL4; (-) strand; PAM type: NNNNGHTT; PAM sequence: AAAAGTTT
gacctacctctacaaagcta

SEQ ID NO: 6279 - DNA, 20 bp, Artificial Sequence
  Description of Artificial Sequence: Synthetic oligonucleotide
  Target: ANGPTL4; (-) strand; PAM type: NNNNGHTT; PAM sequence: AAATGCTT
ccccaggttggaggggcagg

SEQ ID NO: 6280 - DNA, 20 bp, Artificial Sequence
  Description of Artificial Sequence: Synthetic oligonucleotide
  Target: ANGPTL4; (-) strand; PAM type: NNNNGHTT; PAM sequence: GGTGGTTT
gtgcgccaccgtgcccaggt

SEQ ID NO: 6281 - DNA, 20 bp, Artificial Sequence
  Description of Artificial Sequence: Synthetic oligonucleotide
  Target: ANGPTL4; (-) strand; PAM type: NNNNGHTT; PAM sequence: CGGGGTTT
ttttgtatttttagtagaga

SEQ ID NO: 6282 - DNA, 20 bp, Artificial Sequence
  Description of Artificial Sequence: Synthetic oligonucleotide
  Target: ANGPTL4; (-) strand; PAM type: NNNNGHTT; PAM sequence: AAGTGATT
aacctccgcctcccaggttc

SEQ ID NO: 6283 - DNA, 20 bp, Artificial Sequence
  Description of Artificial Sequence: Synthetic oligonucleotide
  Target: ANGPTL4; (-) strand; PAM type: NNNNGHTT; PAM sequence: TGGTGTTT
cccttgttagtttcctgcca

SEQ ID NO: 6284 - DNA, 20 bp, Artificial Sequence
  Description of Artificial Sequence: Synthetic oligonucleotide
  Target: ANGPTL4; (-) strand; PAM type: NNNNGHTT; PAM sequence: GTTAGTTT
tcccagcttcctggcccctt

SEQ ID NO: 6285 - DNA, 20 bp, Artificial Sequence
  Description of Artificial Sequence: Synthetic oligonucleotide
  Target: ANGPTL4; (-) strand; PAM type: NNNNGHTT; PAM sequence: CCCAGCTT
taacaggtccaggttcacat

SEQ ID NO: 6286 - DNA, 20 bp, Artificial Sequence
  Description of Artificial Sequence: Synthetic oligonucleotide
  Target: ANGPTL4; (-) strand; PAM type: NNNNGHTT; PAM sequence: TGGAGTTT
gtgatttacagctgcagctc

SEQ ID NO: 6287 - DNA, 20 bp, Artificial Sequence
  Description of Artificial Sequence: Synthetic oligonucleotide
  Target: ANGPTL4; (-) strand; PAM type: NNNNGHTT; PAM sequence: ATGTGATT
tcctgtggtccaggagaggg

SEQ ID NO: 6288 - DNA, 20 bp, Artificial Sequence
  Description of Artificial Sequence: Synthetic oligonucleotide
  Target: ANGPTL4; (-) strand; PAM type: NNNNGHTT; PAM sequence: CTGGGATT
agcctcagcctcccaaagag

SEQ ID NO: 6289 - DNA, 20 bp, Artificial Sequence
  Description of Artificial Sequence: Synthetic oligonucleotide
  Target: ANGPTL4; (-) strand; PAM type: NNNNGHTT; PAM sequence: CTGGGATT
cgccttggcctcccaaagtg

SEQ ID NO: 6290 - DNA, 20 bp, Artificial Sequence
  Description of Artificial Sequence: Synthetic oligonucleotide
  Target: ANGPTL4; (-) strand; PAM type: NNNNGHTT; PAM sequence: TGGGGTTT
ttttgtatttttagtagaga

SEQ ID NO: 6291 - DNA, 20 bp, Artificial Sequence
  Description of Artificial Sequence: Synthetic oligonucleotide
  Target: ANGPTL4; (-) strand; PAM type: NNNNGHTT; PAM sequence: CTGGGATT
tgccttagcctctcaagtag

SEQ ID NO: 6292 - DNA, 20 bp, Artificial Sequence
  Description of Artificial Sequence: Synthetic oligonucleotide
  Target: ANGPTL4; (-) strand; PAM type: NNNNGHTT; PAM sequence: TCTTGATT
tctcctccctctgaaatttc

SEQ ID NO: 6293 - DNA, 20 bp, Artificial Sequence
  Description of Artificial Sequence: Synthetic oligonucleotide
  Target: ANGPTL4; (-) strand; PAM type: NNNNGHTT; PAM sequence: GCCGGCTT
ccacccgacccagaagccta

SEQ ID NO: 6294 - DNA, 20 bp, Artificial Sequence
  Description of Artificial Sequence: Synthetic oligonucleotide
  Target: ANGPTL4; (-) strand; PAM type: NNNNGHTT; PAM sequence: GTACGTTT
tagacacagagtgctgattg

SEQ ID NO: 6295 - DNA, 20 bp, Artificial Sequence
  Description of Artificial Sequence: Synthetic oligonucleotide
  Target: ANGPTL4; (-) strand; PAM type: NNNNGHTT; PAM sequence: TGCTGATT
tcctttagctagacacagag

SEQ ID NO: 6296 - DNA, 20 bp, Artificial Sequence
  Description of Artificial Sequence: Synthetic oligonucleotide
  Target: ANGPTL4; (-) strand; PAM type: NNNNGHTT; PAM sequence: TGCTGATT
acctttagctagacacagag

SEQ ID NO: 6297 - DNA, 20 bp, Artificial Sequence
  Description of Artificial Sequence: Synthetic oligonucleotide
  Target: ANGPTL4; (-) strand; PAM type: NNNNGHTT; PAM sequence: CGCTGATT
ctgattagctagacacagag

SEQ ID NO: 6298 - DNA, 20 bp, Artificial Sequence
  Description of Artificial Sequence: Synthetic oligonucleotide
  Target: ANGPTL4; (-) strand; PAM type: NNNNGHTT; PAM sequence: ACCTGATT
gaaaattctccaagtcccct

SEQ ID NO: 6299 - DNA, 20 bp, Artificial Sequence
  Description of Artificial Sequence: Synthetic oligonucleotide
  Target: ANGPTL4; (+) strand; PAM type: NNNNGHTT; PAM sequence: CTCCGCTT
ctggagtgcaatggtacgat

SEQ ID NO: 6300 - DNA, 20 bp, Artificial Sequence
  Description of Artificial Sequence: Synthetic oligonucleotide
  Target: ANGPTL4; (+) strand; PAM type: NNNNGHTT; PAM sequence: CTGAGATT
cacctcagcctcacaaatag

SEQ ID NO: 6301 - DNA, 20 bp, Artificial Sequence
  Description of Artificial Sequence: Synthetic oligonucleotide
  Target: ANGPTL4; (+) strand; PAM type: NNNNGHTT; PAM sequence: TGGGGTTT
ttctgtatttttagtagaga

SEQ ID NO: 6302 - DNA, 20 bp, Artificial Sequence
  Description of Artificial Sequence: Synthetic oligonucleotide
  Target: ANGPTL4; (+) strand; PAM type: NNNNGHTT; PAM sequence: CTAGGATT
cacctcagcctcccaaagtg

SEQ ID NO: 6303 - DNA, 20 bp, Artificial Sequence
  Description of Artificial Sequence: Synthetic oligonucleotide
  Target: ANGPTL4; (+) strand; PAM type: NNNNGHTT; PAM sequence: CTCTGCTT
ctggagtgcagtggcgcaat

SEQ ID NO: 6304 - DNA, 20 bp, Artificial Sequence
  Description of Artificial Sequence: Synthetic oligonucleotide
  Target: ANGPTL4; (+) strand; PAM type: NNNNGHTT; PAM sequence: CAGCGATT
accctctgcctcccgggttc

SEQ ID NO: 6305 - DNA, 20 bp, Artificial Sequence
  Description of Artificial Sequence: Synthetic oligonucleotide
  Target: ANGPTL4; (+) strand; PAM type: NNNNGHTT; PAM sequence: CTGGGATT
tgccccagcctcccgagtaa

SEQ ID NO: 6306 - DNA, 20 bp, Artificial Sequence
  Description of Artificial Sequence: Synthetic oligonucleotide
  Target: ANGPTL4; (+) strand; PAM type: NNNNGHTT; PAM sequence: CCGGGTTT
ttttacatttttagtagaga

SEQ ID NO: 6307 - DNA, 20 bp, Artificial Sequence
  Description of Artificial Sequence: Synthetic oligonucleotide
  Target: ANGPTL4; (+) strand; PAM type: NNNNGHTT; PAM sequence: CTGGGATT
caccttggcctcccaaagta

SEQ ID NO: 6308 - DNA, 20 bp, Artificial Sequence
  Description of Artificial Sequence: Synthetic oligonucleotide
  Target: ANGPTL4; (+) strand; PAM type: NNNNGHTT; PAM sequence: CCTAGCTT
tacaagcatgagccaccttg

SEQ ID NO: 6309 - DNA, 20 bp, Artificial Sequence
  Description of Artificial Sequence: Synthetic oligonucleotide
  Target: ANGPTL4; (+) strand; PAM type: NNNNGHTT; PAM sequence: CAGAGATT
gaggtggaagttgcagtgag

SEQ ID NO: 6310 - DNA, 20 bp, Artificial Sequence
  Description of Artificial Sequence: Synthetic oligonucleotide
  Target: ANGPTL4; (+) strand; PAM type: NNNNGHTT; PAM sequence: TTGGGATT
tggccaaagtagcccacgcg

SEQ ID NO: 6311 - DNA, 20 bp, Artificial Sequence
  Description of Artificial Sequence: Synthetic oligonucleotide
  Target: ANGPTL4; (+) strand; PAM type: NNNNGHTT; PAM sequence: GTCAGTTT
taagaggccacattctaaag

SEQ ID NO: 6312 - DNA, 20 bp, Artificial Sequence
  Description of Artificial Sequence: Synthetic oligonucleotide
  Target: ANGPTL4; (+) strand; PAM type: NNNNGHTT; PAM sequence: AGCTGCTT
tggcacatgcctatagtccc

SEQ ID NO: 6313 - DNA, 20 bp, Artificial Sequence
  Description of Artificial Sequence: Synthetic oligonucleotide
  Target: ANGPTL4; (+) strand; PAM type: NNNNGHTT; PAM sequence: GGGAGTTT
tgggaggatcacttgagcct

SEQ ID NO: 6314 - DNA, 20 bp, Artificial Sequence
  Description of Artificial Sequence: Synthetic oligonucleotide
  Target: ANGPTL4; (+) strand; PAM type: NNNNGHTT; PAM sequence: CTGTGATT
gagtttgaggttgcggtgag

SEQ ID NO: 6315 - DNA, 20 bp, Artificial Sequence
  Description of Artificial Sequence: Synthetic oligonucleotide
  Target: ANGPTL4; (+) strand; PAM type: NNNNGHTT; PAM sequence: CTAAGCTT
aggctgaggtggtggatagc

SEQ ID NO: 6316 - DNA, 20 bp, Artificial Sequence
  Description of Artificial Sequence: Synthetic oligonucleotide
  Target: ANGPTL4; (+) strand; PAM type: NNNNGHTT; PAM sequence: AGGAGTTT
gtggtggatagcctaagctt

SEQ ID NO: 6317 - DNA, 20 bp, Artificial Sequence
  Description of Artificial Sequence: Synthetic oligonucleotide
  Target: ANGPTL4; (+) strand; PAM type: NNNNGHTT; PAM sequence: TGGAGCTT
aatggcgggaacctgggagg

SEQ ID NO: 6318 - DNA, 20 bp, Artificial Sequence
  Description of Artificial Sequence: Synthetic oligonucleotide
  Target: ANGPTL4; (+) strand; PAM type: NNNNGHTT; PAM sequence: CCCCGTTT
gcagagccaacatagtgaaa

SEQ ID NO: 6319 - DNA, 20 bp, Artificial Sequence
  Description of Artificial Sequence: Synthetic oligonucleotide
  Target: ANGPTL4; (+) strand; PAM type: NNNNGHTT; PAM sequence: AATCGCTT
tcgggaggctgaggctggag

SEQ ID NO: 6320 - DNA, 20 bp, Artificial Sequence
  Description of Artificial Sequence: Synthetic oligonucleotide
  Target: ANGPTL4; (+) strand; PAM type: NNNNGHTT; PAM sequence: CGGAGATT
gaggcagaggttgcagtgag

SEQ ID NO: 6321 - DNA, 20 bp, Artificial Sequence
  Description of Artificial Sequence: Synthetic oligonucleotide
  Target: ANGPTL4; (+) strand; PAM type: NNNNGHTT; PAM sequence: TGGAGCTT
aatggcactaacccgggagg

SEQ ID NO: 6322 - DNA, 20 bp, Artificial Sequence
  Description of Artificial Sequence: Synthetic oligonucleotide
  Target: ANGPTL4; (+) strand; PAM type: NNNNGHTT; PAM sequence: CCGAGATT
gaggtggagcttgcagtgag

SEQ ID NO: 6323 - DNA, 20 bp, Artificial Sequence
  Description of Artificial Sequence: Synthetic oligonucleotide
  Target: ANGPTL4; (+) strand; PAM type: NNNNGHTT; PAM sequence: AGCAGTTT
taaataaataaaaaataaag

SEQ ID NO: 6324 - DNA, 20 bp, Artificial Sequence
  Description of Artificial Sequence: Synthetic oligonucleotide
  Target: ANGPTL4; (+) strand; PAM type: NNNNGHTT; PAM sequence: TGTAGATT
ggcgacagtatagactcttt

SEQ ID NO: 6325 - DNA, 20 bp, Artificial Sequence
  Description of Artificial Sequence: Synthetic oligonucleotide
  Target: ANGPTL4; (+) strand; PAM type: NNNNGHTT; PAM sequence: ATGTGTTT
cttaagaccctgggtctgtg

SEQ ID NO: 6326 - DNA, 20 bp, Artificial Sequence
  Description of Artificial Sequence: Synthetic oligonucleotide
  Target: ANGPTL4; (+) strand; PAM type: NNNNGHTT; PAM sequence: CTCAGTTT
ggaagtaattgatcagttct

SEQ ID NO: 6327 - DNA, 20 bp, Artificial Sequence
  Description of Artificial Sequence: Synthetic oligonucleotide
  Target: ANGPTL4; (+) strand; PAM type: NNNNGHTT; PAM sequence: AGGAGCTT
ttaagaaggtggggaagagg

SEQ ID NO: 6328 - DNA, 20 bp, Artificial Sequence
  Description of Artificial Sequence: Synthetic oligonucleotide
  Target: ANGPTL4; (+) strand; PAM type: NNNNGHTT; PAM sequence: GGGGGCTT
tccctactcagagagaggct

SEQ ID NO: 6329 - DNA, 20 bp, Artificial Sequence
  Description of Artificial Sequence: Synthetic oligonucleotide
  Target: ANGPTL4; (+) strand; PAM type: NNNNGHTT; PAM sequence: TGGGGTTT
catctgaacctactcctcac

SEQ ID NO: 6330 - DNA, 20 bp, Artificial Sequence
  Description of Artificial Sequence: Synthetic oligonucleotide
  Target: ANGPTL4; (+) strand; PAM type: NNNNGHTT; PAM sequence: GAGGGATT
ttcctgtccactgctgctgg

SEQ ID NO: 6331 - DNA, 20 bp, Artificial Sequence
  Description of Artificial Sequence: Synthetic oligonucleotide
  Target: ANGPTL4; (+) strand; PAM type: NNNNGHTT; PAM sequence: TGCAGTTT
tgcacgtcagcccttgggtg

SEQ ID NO: 6332 - DNA, 20 bp, Artificial Sequence
  Description of Artificial Sequence: Synthetic oligonucleotide
  Target: ANGPTL4; (+) strand; PAM type: NNNNGHTT; PAM sequence: TTCAGATT
tcagcccttgggtgtgcagt

SEQ ID NO: 6333 - DNA, 20 bp, Artificial Sequence
  Description of Artificial Sequence: Synthetic oligonucleotide
  Target: ANGPTL4; (+) strand; PAM type: NNNNGHTT; PAM sequence: GCTGGCTT
tttcagattccagagaatga

SEQ ID NO: 6334 - DNA, 20 bp, Artificial Sequence
  Description of Artificial Sequence: Synthetic oligonucleotide
  Target: ANGPTL4; (+) strand; PAM type: NNNNGHTT; PAM sequence: GCTGGTTT
ccccgagttcttcctggcag

SEQ ID NO: 6335 - DNA, 20 bp, Artificial Sequence
  Description of Artificial Sequence: Synthetic oligonucleotide
  Target: ANGPTL4; (+) strand; PAM type: NNNNGHTT; PAM sequence: GCAAGTTT
aagaggcagaggagatcggt

SEQ ID NO: 6336 - DNA, 20 bp, Artificial Sequence
  Description of Artificial Sequence: Synthetic oligonucleotide
  Target: ANGPTL4; (+) strand; PAM type: NNNNGHTT; PAM sequence: CTGGGCTT
gaacttcaaacatacagggg

SEQ ID NO: 6337 - DNA, 20 bp, Artificial Sequence
  Description of Artificial Sequence: Synthetic oligonucleotide
  Target: ANGPTL4; (+) strand; PAM type: NNNNGHTT; PAM sequence: AAGCGATT
aacctccgtctcctgagttc

SEQ ID NO: 6338 - DNA, 20 bp, Artificial Sequence
  Description of Artificial Sequence: Synthetic oligonucleotide
  Target: ANGPTL4; (+) strand; PAM type: NNNNGHTT; PAM sequence: CGAGGTTT
ttttttatttttagtagaga

SEQ ID NO: 6339 - DNA, 20 bp, Artificial Sequence
  Description of Artificial Sequence: Synthetic oligonucleotide
  Target: ANGPTL4; (+) strand; PAM type: NNNNGHTT; PAM sequence: CTGGGATT
ccacccggcctcccaaagtg

SEQ ID NO: 6340 - DNA, 20 bp, Artificial Sequence
  Description of Artificial Sequence: Synthetic oligonucleotide
  Target: ANGPTL4; (+) strand; PAM type: NNNNGHTT; PAM sequence: TCCTGCTT
cctctttctgttctctaagt

SEQ ID NO: 6341 - DNA, 20 bp, Artificial Sequence
  Description of Artificial Sequence: Synthetic oligonucleotide
  Target: ANGPTL4; (+) strand; PAM type: NNNNGHTT; PAM sequence: AAGCGATT
aacctccacctcccgggttc

SEQ ID NO: 6342 - DNA, 20 bp, Artificial Sequence
  Description of Artificial Sequence: Synthetic oligonucleotide
  Target: ANGPTL4; (+) strand; PAM type: NNNNGHTT; PAM sequence: CTGGGTTT
ttttgtatttttagtagaga

SEQ ID NO: 6343 - DNA, 20 bp, Artificial Sequence
  Description of Artificial Sequence: Synthetic oligonucleotide
  Target: ANGPTL4; (+) strand; PAM type: NNNNGHTT; PAM sequence: GGGGGCTT
ggtaaggcgggggcggaata

SEQ ID NO: 6344 - DNA, 20 bp, Artificial Sequence
  Description of Artificial Sequence: Synthetic oligonucleotide
  Target: ANGPTL4; (+) strand; PAM type: NNNNGHTT; PAM sequence: CACAGTTT
tggagcgggggcgggagagc

SEQ ID NO: 6345 - DNA, 20 bp, Artificial Sequence
  Description of Artificial Sequence: Synthetic oligonucleotide
  Target: ANGPTL4; (+) strand; PAM type: NNNNGHTT; PAM sequence: ATCCGATT
cggatcctcacacgactgtg

SEQ ID NO: 6346 - DNA, 20 bp, Artificial Sequence
  Description of Artificial Sequence: Synthetic oligonucleotide
  Target: ANGPTL4; (+) strand; PAM type: NNNNGHTT; PAM sequence: AGCGGCTT
actgtgatccgattctttcc

SEQ ID NO: 6347 - DNA, 20 bp, Artificial Sequence
  Description of Artificial Sequence: Synthetic oligonucleotide
  Target: ANGPTL4; (+) strand; PAM type: NNNNGHTT; PAM sequence: CCGCGCTT
gacccgtgcagtccaagtcg

SEQ ID NO: 6348 - DNA, 20 bp, Artificial Sequence
  Description of Artificial Sequence: Synthetic oligonucleotide
  Target: ANGPTL4; (+) strand; PAM type: NNNNGHTT; PAM sequence: CCTGGCTT
tccgcgcccctagtggctct

SEQ ID NO: 6349 - DNA, 20 bp, Artificial Sequence
  Description of Artificial Sequence: Synthetic oligonucleotide
  Target: ANGPTL4; (+) strand; PAM type: NNNNGHTT; PAM sequence: CTGGGCTT
gggtgcgcaactgtggctcc

SEQ ID NO: 6350 - DNA, 20 bp, Artificial Sequence
  Description of Artificial Sequence: Synthetic oligonucleotide
  Target: ANGPTL4; (+) strand; PAM type: NNNNGHTT; PAM sequence: TCACGCTT
ataaagccaggtgcggtgac

SEQ ID NO: 6351 - DNA, 20 bp, Artificial Sequence
  Description of Artificial Sequence: Synthetic oligonucleotide
  Target: ANGPTL4; (+) strand; PAM type: NNNNGHTT; PAM sequence: CCAAGATT
gaggcagaggttgcagtgag

SEQ ID NO: 6352 - DNA, 20 bp, Artificial Sequence
  Description of Artificial Sequence: Synthetic oligonucleotide
  Target: ANGPTL4; (+) strand; PAM type: NNNNGHTT; PAM sequence: TGGAGATT
ccttgcctggcctcagcgga

SEQ ID NO: 6353 - DNA, 20 bp, Artificial Sequence
  Description of Artificial Sequence: Synthetic oligonucleotide
  Target: ANGPTL4; (+) strand; PAM type: NNNNGHTT; PAM sequence: CAAGGTTT
taggcaagctgggtcctcac

SEQ ID NO: 6354 - DNA, 20 bp, Artificial Sequence
  Description of Artificial Sequence: Synthetic oligonucleotide
  Target: ANGPTL4; (+) strand; PAM type: NNNNGHTT; PAM sequence: CCTAGTTT
acaccctcctcccgtcccat

SEQ ID NO: 6355 - DNA, 20 bp, Artificial Sequence
  Description of Artificial Sequence: Synthetic oligonucleotide
  Target: ANGPTL4; (+) strand; PAM type: NNNNGHTT; PAM sequence: CACTGATT
gtccctgaagccctgctgat

SEQ ID NO: 6356 - DNA, 20 bp, Artificial Sequence
  Description of Artificial Sequence: Synthetic oligonucleotide
  Target: ANGPTL4; (+) strand; PAM type: NNNNGHTT; PAM sequence: TAGTGTTT
gaggagggggtgccaggtag

SEQ ID NO: 6357 - DNA, 20 bp, Artificial Sequence
  Description of Artificial Sequence: Synthetic oligonucleotide
  Target: ANGPTL4; (+) strand; PAM type: NNNNGHTT; PAM sequence: TGTAGATT
gggtgccaggtagtagtgtt

SEQ ID NO: 6358 - DNA, 20 bp, Artificial Sequence
  Description of Artificial Sequence: Synthetic oligonucleotide
  Target: ANGPTL4; (+) strand; PAM type: NNNNGHTT; PAM sequence: GTGGGCTT
ccccctccccaccgcagaaa

SEQ ID NO: 6359 - DNA, 20 bp, Artificial Sequence
  Description of Artificial Sequence: Synthetic oligonucleotide
  Target: ANGPTL4; (+) strand; PAM type: NNNNGHTT; PAM sequence: AGGTGCTT
ttgctgccaccacaagttgt

SEQ ID NO: 6360 - DNA, 20 bp, Artificial Sequence
  Description of Artificial Sequence: Synthetic oligonucleotide
  Target: ANGPTL4; (+) strand; PAM type: NNNNGHTT; PAM sequence: CACGGTTT
tctctaagttcacggcccca

SEQ ID NO: 6361 - DNA, 20 bp, Artificial Sequence
  Description of Artificial Sequence: Synthetic oligonucleotide
  Target: ANGPTL4; (+) strand; PAM type: NNNNGHTT; PAM sequence: GAAAGTTT
ctgtccacagccaactgggt

SEQ ID NO: 6362 - DNA, 20 bp, Artificial Sequence
  Description of Artificial Sequence: Synthetic oligonucleotide
  Target: ANGPTL4; (+) strand; PAM type: NNNNGHTT; PAM sequence: GCAGGCTT
ctcacaccctagggtcagtg

SEQ ID NO: 6363 - DNA, 20 bp, Artificial Sequence
  Description of Artificial Sequence: Synthetic oligonucleotide
  Target: ANGPTL4; (+) strand; PAM type: NNNNGHTT; PAM sequence: AGGGGCTT
aaagccaccatcccaggatg

SEQ ID NO: 6364 - DNA, 20 bp, Artificial Sequence
  Description of Artificial Sequence: Synthetic oligonucleotide
  Target: ANGPTL4; (+) strand; PAM type: NNNNGHTT; PAM sequence: GGTGGTTT
gcattcatggaagccacact

SEQ ID NO: 6365 - DNA, 20 bp, Artificial Sequence
  Description of Artificial Sequence: Synthetic oligonucleotide
  Target: ANGPTL4; (+) strand; PAM type: NNNNGHTT; PAM sequence: GACTGTTT
ttcattcattcatttgtcaa

SEQ ID NO: 6366 - DNA, 20 bp, Artificial Sequence
  Description of Artificial Sequence: Synthetic oligonucleotide
  Target: ANGPTL4; (+) strand; PAM type: NNNNGHTT; PAM sequence: TTTTGTTT
tcattcatttgtcaagactg

SEQ ID NO: 6367 - DNA, 20 bp, Artificial Sequence
  Description of Artificial Sequence: Synthetic oligonucleotide
  Target: ANGPTL4; (+) strand; PAM type: NNNNGHTT; PAM sequence: GTTTGCTT
tcatttgtcaagactgtttt

SEQ ID NO: 6368 - DNA, 20 bp, Artificial Sequence
  Description of Artificial Sequence: Synthetic oligonucleotide
  Target: ANGPTL4; (+) strand; PAM type: NNNNGHTT; PAM sequence: AAGTGATT
ctctgcctcccactgggttc

SEQ ID NO: 6369 - DNA, 20 bp, Artificial Sequence
  Description of Artificial Sequence: Synthetic oligonucleotide
  Target: ANGPTL4; (+) strand; PAM type: NNNNGHTT; PAM sequence: ATGGGATT
tgcctcagcctctcaagtag

SEQ ID NO: 6370 - DNA, 20 bp, Artificial Sequence
  Description of Artificial Sequence: Synthetic oligonucleotide
  Target: ANGPTL4; (+) strand; PAM type: NNNNGHTT; PAM sequence: AAGTGATT
aacctctgcctcccgggttc

SEQ ID NO: 6371 - DNA, 20 bp, Artificial Sequence
  Description of Artificial Sequence: Synthetic oligonucleotide
  Target: ANGPTL4; (+) strand; PAM type: NNNNGHTT; PAM sequence: CTGGGATT
tgcctctgcctcctaaggag

SEQ ID NO: 6372 - DNA, 20 bp, Artificial Sequence
  Description of Artificial Sequence: Synthetic oligonucleotide
  Target: ANGPTL4; (+) strand; PAM type: NNNNGHTT; PAM sequence: GTATGTTT
atcacacccagctaatcttt

SEQ ID NO: 6373 - DNA, 20 bp, Artificial Sequence
  Description of Artificial Sequence: Synthetic oligonucleotide
  Target: ANGPTL4; (+) strand; PAM type: NNNNGHTT; PAM sequence: TGGGGTTT
tttgtatgttttactagaga

SEQ ID NO: 6374 - DNA, 20 bp, Artificial Sequence
  Description of Artificial Sequence: Synthetic oligonucleotide
  Target: ANGPTL4; (+) strand; PAM type: NNNNGHTT; PAM sequence: GCTGGATT
atccgcccgcctcccaaagt

SEQ ID NO: 6375 - DNA, 20 bp, Artificial Sequence
  Description of Artificial Sequence: Synthetic oligonucleotide
  Target: ANGPTL4; (+) strand; PAM type: NNNNGHTT; PAM sequence: AATTGCTT
tgctccggaggctgcggcag

SEQ ID NO: 6376 - DNA, 20 bp, Artificial Sequence
  Description of Artificial Sequence: Synthetic oligonucleotide
  Target: ANGPTL4; (+) strand; PAM type: NNNNGHTT; PAM sequence: CCAAGATT
gaggcggaggttgcagtgag

SEQ ID NO: 6377 - DNA, 20 bp, Artificial Sequence
  Description of Artificial Sequence: Synthetic oligonucleotide
  Target: ANGPTL4; (+) strand; PAM type: NNNNGHTT; PAM sequence: ATAAGATT
ggcagagaggtggtcatgag

SEQ ID NO: 6378 - DNA, 20 bp, Artificial Sequence
  Description of Artificial Sequence: Synthetic oligonucleotide
  Target: ANGPTL4; (+) strand; PAM type: NNNNGHTT; PAM sequence: TCCTGTTT
accccccccaggggctgccc

SEQ ID NO: 6379 - DNA, 20 bp, Artificial Sequence
  Description of Artificial Sequence: Synthetic oligonucleotide
  Target: ANGPTL4; (+) strand; PAM type: NNNNGHTT; PAM sequence: CAGGGATT
tatctcccttcagggctgcc

SEQ ID NO: 6380 - DNA, 20 bp, Artificial Sequence
  Description of Artificial Sequence: Synthetic oligonucleotide
  Target: ANGPTL4; (+) strand; PAM type: NNNNGHTT; PAM sequence: TGGAGTTT
ttttttttttttttttgaga

SEQ ID NO: 6381 - DNA, 20 bp, Artificial Sequence
  Description of Artificial Sequence: Synthetic oligonucleotide
  Target: ANGPTL4; (+) strand; PAM type: NNNNGHTT; PAM sequence: CTGGGTTT
ttttgtatttttagtagaga

SEQ ID NO: 6382 - DNA, 20 bp, Artificial Sequence
  Description of Artificial Sequence: Synthetic oligonucleotide
  Target: ANGPTL4; (+) strand; PAM type: NNNNGHTT; PAM sequence: AAATGATT
ggtctcaaactcctgacctc

SEQ ID NO: 6383 - DNA, 20 bp, Artificial Sequence
  Description of Artificial Sequence: Synthetic oligonucleotide
  Target: ANGPTL4; (+) strand; PAM type: NNNNGHTT; PAM sequence: CTGGGATT
gactttggcctcccaaaatg

SEQ ID NO: 6384 - DNA, 20 bp, Artificial Sequence
  Description of Artificial Sequence: Synthetic oligonucleotide
  Target: ANGPTL4; (+) strand; PAM type: NNNNGHTT; PAM sequence: CCTCGTTT
acctgggcaacacaacaaaa

SEQ ID NO: 6385 - DNA, 20 bp, Artificial Sequence
  Description of Artificial Sequence: Synthetic oligonucleotide
  Target: ANGPTL4; (+) strand; PAM type: NNNNGHTT; PAM sequence: GGTGGCTT
aaaaaacaaaggctgagcac

SEQ ID NO: 6386 - DNA, 20 bp, Artificial Sequence
  Description of Artificial Sequence: Synthetic oligonucleotide
  Target: ANGPTL4; (+) strand; PAM type: NNNNGHTT; PAM sequence: CTGTGATT
taaacattagccgggcgtgc

SEQ ID NO: 6387 - DNA, 20 bp, Artificial Sequence
  Description of Artificial Sequence: Synthetic oligonucleotide
  Target: ANGPTL4; (+) strand; PAM type: NNNNGHTT; PAM sequence: AGCTGCTT
ccgggcgtgcctgtgattcc

SEQ ID NO: 6388 - DNA, 20 bp, Artificial Sequence
  Description of Artificial Sequence: Synthetic oligonucleotide
  Target: ANGPTL4; (+) strand; PAM type: NNNNGHTT; PAM sequence: AATCGCTT
ttgtggggctgaagcacaag

SEQ ID NO: 6389 - DNA, 20 bp, Artificial Sequence
  Description of Artificial Sequence: Synthetic oligonucleotide
  Target: ANGPTL4; (+) strand; PAM type: NNNNGHTT; PAM sequence: CTGAGATT
aaggcagaggttgcagtgag

SEQ ID NO: 6390 - DNA, 20 bp, Artificial Sequence
  Description of Artificial Sequence: Synthetic oligonucleotide
  Target: ANGPTL4; (+) strand; PAM type: NNNNGHTT; PAM sequence: GAAAGCTT
aaaaaaaaaaaaaaaaaaaa

SEQ ID NO: 6391 - DNA, 20 bp, Artificial Sequence
  Description of Artificial Sequence: Synthetic oligonucleotide
  Target: ANGPTL4; (+) strand; PAM type: NNNNGHTT; PAM sequence: CGGGGTTT
cattacaagaggttacaaca

SEQ ID NO: 6392 - DNA, 20 bp, Artificial Sequence
  Description of Artificial Sequence: Synthetic oligonucleotide
  Target: ANGPTL4; (+) strand; PAM type: NNNNGHTT; PAM sequence: AGAGGCTT
acccagttcagctggcccag

SEQ ID NO: 6393 - DNA, 20 bp, Artificial Sequence
  Description of Artificial Sequence: Synthetic oligonucleotide
  Target: ANGPTL4; (+) strand; PAM type: NNNNGHTT; PAM sequence: TGCAGATT
cagctggcccagagaggctt

SEQ ID NO: 6394 - DNA, 20 bp, Artificial Sequence
  Description of Artificial Sequence: Synthetic oligonucleotide
  Target: ANGPTL4; (+) strand; PAM type: NNNNGHTT; PAM sequence: CTGGGTTT
gtgagggagctgctgtcttc

SEQ ID NO: 6395 - DNA, 20 bp, Artificial Sequence
  Description of Artificial Sequence: Synthetic oligonucleotide
  Target: ANGPTL4; (+) strand; PAM type: NNNNGHTT; PAM sequence: GGGGGTTT
gctgtcttcctgggtttgga

SEQ ID NO: 6396 - DNA, 20 bp, Artificial Sequence
  Description of Artificial Sequence: Synthetic oligonucleotide
  Target: ANGPTL4; (+) strand; PAM type: NNNNGHTT; PAM sequence: TGGTGCTT
tcctgggtttggagggggtt

SEQ ID NO: 6397 - DNA, 20 bp, Artificial Sequence
  Description of Artificial Sequence: Synthetic oligonucleotide
  Target: ANGPTL4; (+) strand; PAM type: NNNNGHTT; PAM sequence: CGGGGTTT
gccctgggaagcctacaagg

SEQ ID NO: 6398 - DNA, 20 bp, Artificial Sequence
  Description of Artificial Sequence: Synthetic oligonucleotide
  Target: ANGPTL4; (+) strand; PAM type: NNNNGHTT; PAM sequence: AGGTGTTT
ggtttggggatccccacggt

SEQ ID NO: 6399 - DNA, 20 bp, Artificial Sequence
  Description of Artificial Sequence: Synthetic oligonucleotide
  Target: ANGPTL4; (+) strand; PAM type: NNNNGHTT; PAM sequence: AGCAGCTT
ctgccatgccacacccagcc

SEQ ID NO: 6400 - DNA, 20 bp, Artificial Sequence
  Description of Artificial Sequence: Synthetic oligonucleotide
  Target: ANGPTL4; (+) strand; PAM type: NNNNGHTT; PAM sequence: ATCTGTTT
tgccttcaaccccacattgc

SEQ ID NO: 6401 - DNA, 20 bp, Artificial Sequence
  Description of Artificial Sequence: Synthetic oligonucleotide
  Target: ANGPTL4; (+) strand; PAM type: NNNNGHTT; PAM sequence: GTGTGATT
ctcttccttacatgccgtgt

SEQ ID NO: 6402 - DNA, 20 bp, Artificial Sequence
  Description of Artificial Sequence: Synthetic oligonucleotide
  Target: ANGPTL4; (+) strand; PAM type: NNNNGHTT; PAM sequence: CTCAGTTT
actaacttagcctatctggc

SEQ ID NO: 6403 - DNA, 20 bp, Artificial Sequence
  Description of Artificial Sequence: Synthetic oligonucleotide
  Target: ANGPTL4; (+) strand; PAM type: NNNNGHTT; PAM sequence: ATGTGTTT
gtctttacttttatttactt

SEQ ID NO: 6404 - DNA, 20 bp, Artificial Sequence
  Description of Artificial Sequence: Synthetic oligonucleotide
  Target: ANGPTL4; (+) strand; PAM type: NNNNGHTT; PAM sequence: GTTTGTTT
ttacttttatttacttatgt

SEQ ID NO: 6405 - DNA, 20 bp, Artificial Sequence
  Description of Artificial Sequence: Synthetic oligonucleotide
  Target: ANGPTL4; (+) strand; PAM type: NNNNGHTT; PAM sequence: GAGTGCTT
tcactttgtcacccaggctg

SEQ ID NO: 6406 - DNA, 20 bp, Artificial Sequence
  Description of Artificial Sequence: Synthetic oligonucleotide
  Target: ANGPTL4; (+) strand; PAM type: NNNNGHTT; PAM sequence: TGGGGTTT
ttttgtatttttagtagaga

SEQ ID NO: 6407 - DNA, 20 bp, Artificial Sequence
  Description of Artificial Sequence: Synthetic oligonucleotide
  Target: ANGPTL4; (+) strand; PAM type: NNNNGHTT; PAM sequence: CTGGGATT
tgcctcagcctcccaaagtg

SEQ ID NO: 6408 - DNA, 20 bp, Artificial Sequence
  Description of Artificial Sequence: Synthetic oligonucleotide
  Target: ANGPTL4; (+) strand; PAM type: NNNNGHTT; PAM sequence: AAGTGATT
agcctccgcctcctgggttc

SEQ ID NO: 6409 - DNA, 20 bp, Artificial Sequence
  Description of Artificial Sequence: Synthetic oligonucleotide
  Target: ANGPTL4; (+) strand; PAM type: NNNNGHTT; PAM sequence: CTGGGATT
tgcctcagcctcctgagtag

SEQ ID NO: 6410 - DNA, 20 bp, Artificial Sequence
  Description of Artificial Sequence: Synthetic oligonucleotide
  Target: ANGPTL4; (+) strand; PAM type: NNNNGHTT; PAM sequence: AATTGTTT
tcccgccaccatgcacagat

SEQ ID NO: 6411 - DNA, 20 bp, Artificial Sequence
  Description of Artificial Sequence: Synthetic oligonucleotide
  Target: ANGPTL4; (+) strand; PAM type: NNNNGHTT; PAM sequence: CGGGGTTT
ttttgtatttttagtagaga

SEQ ID NO: 6412 - DNA, 20 bp, Artificial Sequence
  Description of Artificial Sequence: Synthetic oligonucleotide
  Target: ANGPTL4; (+) strand; PAM type: NNNNGHTT; PAM sequence: TTGGGATT
cacctcggcctcccaaagtg

SEQ ID NO: 6413 - DNA, 20 bp, Artificial Sequence
  Description of Artificial Sequence: Synthetic oligonucleotide
  Target: ANGPTL4; (+) strand; PAM type: NNNNGHTT; PAM sequence: ACAGGATT
catctttataatggtgctcc

SEQ ID NO: 6414 - DNA, 20 bp, Artificial Sequence
  Description of Artificial Sequence: Synthetic oligonucleotide
  Target: ANGPTL4; (+) strand; PAM type: NNNNGHTT; PAM sequence: AATTGTTT
ccaggccctgtctcaaaaaa

SEQ ID NO: 6415 - DNA, 20 bp, Artificial Sequence
  Description of Artificial Sequence: Synthetic oligonucleotide
  Target: ANGPTL4; (+) strand; PAM type: NNNNGHTT; PAM sequence: AGGAGTTT
agggtggatcacatgaggta

SEQ ID NO: 6416 - DNA, 20 bp, Artificial Sequence
  Description of Artificial Sequence: Synthetic oligonucleotide
  Target: ANGPTL4; (+) strand; PAM type: NNNNGHTT; PAM sequence: CCGAGATT
ggaggcagaggtgcagtgag

SEQ ID NO: 6417 - DNA, 20 bp, Artificial Sequence
  Description of Artificial Sequence: Synthetic oligonucleotide
  Target: ANGPTL4; (+) strand; PAM type: NNNNGHTT; PAM sequence: GGTGGTTT
cctgaccccggcaggaggct

SEQ ID NO: 6418 - DNA, 20 bp, Artificial Sequence
  Description of Artificial Sequence: Synthetic oligonucleotide
  Target: ANGPTL4; (+) strand; PAM type: NNNNGHTT; PAM sequence: AGAAGCTT
ctccatcccacagcagcggc

SEQ ID NO: 6419 - DNA, 20 bp, Artificial Sequence
  Description of Artificial Sequence: Synthetic oligonucleotide
  Target: ANGPTL4; (+) strand; PAM type: NNNNGHTT; PAM sequence: TGGAGCTT
gaggcgtggaccaaggggca

SEQ ID NO: 6420 - DNA, 20 bp, Artificial Sequence
  Description of Artificial Sequence: Synthetic oligonucleotide
  Target: ANGPTL4; (+) strand; PAM type: NNNNGHTT; PAM sequence: CAGGGCTT
tcacattgactgacggggac

SEQ ID NO: 6421 - DNA, 20 bp, Artificial Sequence
  Description of Artificial Sequence: Synthetic oligonucleotide
  Target: ANGPTL4; (+) strand; PAM type: NNNNGHTT; PAM sequence: TCTTGTTT
cagaacactttgttctttgt

SEQ ID NO: 6422 - DNA, 20 bp, Artificial Sequence
  Description of Artificial Sequence: Synthetic oligonucleotide
  Target: ANGPTL4; (+) strand; PAM type: NNNNGHTT; PAM sequence: GTTTGTTT
acactttgttctttgttctt

SEQ ID NO: 6423 - DNA, 20 bp, Artificial Sequence
  Description of Artificial Sequence: Synthetic oligonucleotide
  Target: ANGPTL4; (+) strand; PAM type: NNNNGHTT; PAM sequence: CTCAGTTT
cacagatctagtaagttacc

SEQ ID NO: 6424 - DNA, 20 bp, Artificial Sequence
  Description of Artificial Sequence: Synthetic oligonucleotide
  Target: ANGPTL4; (+) strand; PAM type: NNNNGHTT; PAM sequence: GTTTGTTT
gatctagtaagttaccctca

SEQ ID NO: 6425 - DNA, 20 bp, Artificial Sequence
  Description of Artificial Sequence: Synthetic oligonucleotide
  Target: ANGPTL4; (+) strand; PAM type: NNNNGHTT; PAM sequence: CCGAGATT
aggcagaggctgcaaataag

SEQ ID NO: 6426 - DNA, 20 bp, Artificial Sequence
  Description of Artificial Sequence: Synthetic oligonucleotide
  Target: ANGPTL4; (+) strand; PAM type: NNNNGHTT; PAM sequence: CTTGGCTT
gactcaagggatcctcctgc

SEQ ID NO: 6427 - DNA, 20 bp, Artificial Sequence
  Description of Artificial Sequence: Synthetic oligonucleotide
  Target: ANGPTL4; (+) strand; PAM type: NNNNGHTT; PAM sequence: ATGGGATT
tgccttggcttcacaaagtg

SEQ ID NO: 6428 - DNA, 20 bp, Artificial Sequence
  Description of Artificial Sequence: Synthetic oligonucleotide
  Target: ANGPTL4; (+) strand; PAM type: NNNNGHTT; PAM sequence: CTGTGTTT
tgaaggctctaattctacat

SEQ ID NO: 6429 - DNA, 20 bp, Artificial Sequence
  Description of Artificial Sequence: Synthetic oligonucleotide
  Target: ANGPTL4; (+) strand; PAM type: NNNNGHTT; PAM sequence: ACTTGATT
agcctgggtgacagagcaag

SEQ ID NO: 6430 - DNA, 20 bp, Artificial Sequence
  Description of Artificial Sequence: Synthetic oligonucleotide
  Target: ANGPTL4; (+) strand; PAM type: NNNNGHTT; PAM sequence: AATTGCTT
tcaggaggctgaggccggag

SEQ ID NO: 6431 - DNA, 20 bp, Artificial Sequence
  Description of Artificial Sequence: Synthetic oligonucleotide
  Target: ANGPTL4; (+) strand; PAM type: NNNNGHTT; PAM sequence: CTCAGCTT
ccaaggccggagctggctcc

SEQ ID NO: 6432 - DNA, 20 bp, Artificial Sequence
  Description of Artificial Sequence: Synthetic oligonucleotide
  Target: ANGPTL4; (+) strand; PAM type: NNNNGHTT; PAM sequence: CGGTGCTT
gccggaatcggggctgcgcg

SEQ ID NO: 6433 - DNA, 20 bp, Artificial Sequence
  Description of Artificial Sequence: Synthetic oligonucleotide
  Target: ANGPTL4; (+) strand; PAM type: NNNNGHTT; PAM sequence: GTGGGCTT
agctggagttccgggtgggc

SEQ ID NO: 6434 - DNA, 20 bp, Artificial Sequence
  Description of Artificial Sequence: Synthetic oligonucleotide
  Target: ANGPTL4; (+) strand; PAM type: NNNNGHTT; PAM sequence: AGGGGCTT
cctgctggccccgggcaatg

SEQ ID NO: 6435 - DNA, 20 bp, Artificial Sequence
  Description of Artificial Sequence: Synthetic oligonucleotide
  Target: ANGPTL4; (+) strand; PAM type: NNNNGHTT; PAM sequence: CTGCGCTT
gcagtgccagcgcaccggcg

SEQ ID NO: 6436 - DNA, 20 bp, Artificial Sequence
  Description of Artificial Sequence: Synthetic oligonucleotide
  Target: ANGPTL4; (+) strand; PAM type: NNNNGHTT; PAM sequence: GCTTGATT
tgccagcgcaccggcgctgc

SEQ ID NO: 6437 - DNA, 20 bp, Artificial Sequence
  Description of Artificial Sequence: Synthetic oligonucleotide
  Target: ANGPTL4; (+) strand; PAM type: NNNNGHTT; PAM sequence: CAGGGATT
tggagaacctttgtctagct

SEQ ID NO: 6438 - DNA, 20 bp, Artificial Sequence
  Description of Artificial Sequence: Synthetic oligonucleotide
  Target: ANGPTL4; (+) strand; PAM type: NNNNGHTT; PAM sequence: CAGGGTTT
tcatcaccctatgtctagct

SEQ ID NO: 6439 - DNA, 20 bp, Artificial Sequence
  Description of Artificial Sequence: Synthetic oligonucleotide
  Target: ANGPTL4; (+) strand; PAM type: NNNNGHTT; PAM sequence: CAGGGATT
gagaacctttatgtctagct

SEQ ID NO: 6440 - DNA, 20 bp, Artificial Sequence
  Description of Artificial Sequence: Synthetic oligonucleotide
  Target: ANGPTL4; (+) strand; PAM type: NNNNGHTT; PAM sequence: CAAGGTTT
tcggcactctgtatctagct

SEQ ID NO: 6441 - DNA, 20 bp, Artificial Sequence
  Description of Artificial Sequence: Synthetic oligonucleotide
  Target: ANGPTL4; (+) strand; PAM type: NNNNGHTT; PAM sequence: CAGGGTTT
tcagcaccctgtgtctagct

SEQ ID NO: 6442 - DNA, 20 bp, Artificial Sequence
  Description of Artificial Sequence: Synthetic oligonucleotide
  Target: ANGPTL4; (+) strand; PAM type: NNNNGHTT; PAM sequence: GGAAGCTT
tgggtccccttccacactgt

SEQ ID NO: 6443 - DNA, 20 bp, Artificial Sequence
  Description of Artificial Sequence: Synthetic oligonucleotide
  Target: ANGPTL4; (+) strand; PAM type: NNNNGHTT; PAM sequence: CACTGCTT
ctgctcactctttgggtccc

SEQ ID NO: 6444 - DNA, 20 bp, Artificial Sequence
  Description of Artificial Sequence: Synthetic oligonucleotide
  Target: ANGPTL4; (+) strand; PAM type: NNNNGHTT; PAM sequence: TGCAGCTT
taacactcactgcgaaggtc

SEQ ID NO: 6445 - DNA, 20 bp, Artificial Sequence
  Description of Artificial Sequence: Synthetic oligonucleotide
  Target: ANGPTL4; (+) strand; PAM type: NNNNGHTT; PAM sequence: CATGGCTT
gaacacttaccgcaagggtc

SEQ ID NO: 6446 - DNA, 20 bp, Artificial Sequence
  Description of Artificial Sequence: Synthetic oligonucleotide
  Target: ANGPTL4; (+) strand; PAM type: NNNNGHTT; PAM sequence: GCGAGATT
actccagcccaggcaacaga

SEQ ID NO: 6447 - DNA, 20 bp, Artificial Sequence
  Description of Artificial Sequence: Synthetic oligonucleotide
  Target: ANGPTL4; (+) strand; PAM type: NNNNGHTT; PAM sequence: CTCAGCTT
ctggagcgcggtagtgcgat

SEQ ID NO: 6448 - DNA, 20 bp, Artificial Sequence
  Description of Artificial Sequence: Synthetic oligonucleotide
  Target: ANGPTL4; (+) strand; PAM type: NNNNGHTT; PAM sequence: AAGCGATT
aacctccacctcccgggttc

SEQ ID NO: 6449 - DNA, 20 bp, Artificial Sequence
  Description of Artificial Sequence: Synthetic oligonucleotide
  Target: ANGPTL4; (+) strand; PAM type: NNNNGHTT; PAM sequence: CTGAGATT
tgcctcggcctcccgagtag

SEQ ID NO: 6450 - DNA, 20 bp, Artificial Sequence
  Description of Artificial Sequence: Synthetic oligonucleotide
  Target: ANGPTL4; (+) strand; PAM type: NNNNGHTT; PAM sequence: ATGGGTTT
tttttgtatttttagtatag

SEQ ID NO: 6451 - DNA, 20 bp, Artificial Sequence
  Description of Artificial Sequence: Synthetic oligonucleotide
  Target: ANGPTL4; (+) strand; PAM type: NNNNGHTT; PAM sequence: GTGGGATT
cgcctcggcctccgaaactg

SEQ ID NO: 6452 - DNA, 20 bp, Artificial Sequence
  Description of Artificial Sequence: Synthetic oligonucleotide
  Target: ANGPTL4; (+) strand; PAM type: NNNNGHTT; PAM sequence: CTGTGATT
tgcgctagaagaaaaaatat

SEQ ID NO: 6453 - DNA, 20 bp, Artificial Sequence
  Description of Artificial Sequence: Synthetic oligonucleotide
  Target: ANGPTL4; (+) strand; PAM type: NNNNGHTT; PAM sequence: AGCTGTTT
ctggcaggtgctggggacac

SEQ ID NO: 6454 - DNA, 20 bp, Artificial Sequence
  Description of Artificial Sequence: Synthetic oligonucleotide
  Target: ANGPTL4; (+) strand; PAM type: NNNNGHTT; PAM sequence: TTTAGCTT
tgggtataggtgacaaactt

SEQ ID NO: 6455 - DNA, 20 bp, Artificial Sequence
  Description of Artificial Sequence: Synthetic oligonucleotide
  Target: ANGPTL4; (+) strand; PAM type: NNNNGHTT; PAM sequence: CCTTGTTT
gaggctgccctctccaggtt

SEQ ID NO: 6456 - DNA, 20 bp, Artificial Sequence
  Description of Artificial Sequence: Synthetic oligonucleotide
  Target: ANGPTL4; (+) strand; PAM type: NNNNGHTT; PAM sequence: GCAGGCTT
ttgcctgtgtcctgtactga

SEQ ID NO: 6457 - DNA, 20 bp, Artificial Sequence
  Description of Artificial Sequence: Synthetic oligonucleotide
  Target: ANGPTL4; (+) strand; PAM type: NNNNGHTT; PAM sequence: CTGAGATT
gaggcggaggttgcagtgag

SEQ ID NO: 6458 - DNA, 20 bp, Artificial Sequence
  Description of Artificial Sequence: Synthetic oligonucleotide
  Target: ANGPTL4; (+) strand; PAM type: NNNNGHTT; PAM sequence: GATGGTTT
tcctgcatttggaaaatggg

SEQ ID NO: 6459 - DNA, 20 bp, Artificial Sequence
  Description of Artificial Sequence: Synthetic oligonucleotide
  Target: ANGPTL4; (+) strand; PAM type: NNNNGHTT; PAM sequence: TGGAGTTT
aggctgaggctggaggacct

SEQ ID NO: 6460 - DNA, 20 bp, Artificial Sequence
  Description of Artificial Sequence: Synthetic oligonucleotide
  Target: ANGPTL4; (+) strand; PAM type: NNNNGHTT; PAM sequence: AATTGCTT
cttgagaggctaaggcagag

SEQ ID NO: 6461 - DNA, 20 bp, Artificial Sequence
  Description of Artificial Sequence: Synthetic oligonucleotide
  Target: ANGPTL4; (+) strand; PAM type: NNNNGHTT; PAM sequence: CTGGGTTT
gagacagaagtccatgtcct

SEQ ID NO: 6462 - DNA, 20 bp, Artificial Sequence
  Description of Artificial Sequence: Synthetic oligonucleotide
  Target: ANGPTL4; (+) strand; PAM type: NNNNGHTT; PAM sequence: ATTTGTTT
ggatatggggaaggagtcaa

SEQ ID NO: 6463 - DNA, 20 bp, Artificial Sequence
  Description of Artificial Sequence: Synthetic oligonucleotide
  Target: ANGPTL4; (+) strand; PAM type: NNNNGHTT; PAM sequence: ATGGGATT
ggaaggagtcaaatttgttt

SEQ ID NO: 6464 - DNA, 20 bp, Artificial Sequence
  Description of Artificial Sequence: Synthetic oligonucleotide
  Target: ANGPTL4; (+) strand; PAM type: NNNNGHTT; PAM sequence: CTAGGCTT
ggattgagaggtgaagccgg

SEQ ID NO: 6465 - DNA, 20 bp, Artificial Sequence
  Description of Artificial Sequence: Synthetic oligonucleotide
  Target: ANGPTL4; (+) strand; PAM type: NNNNGHTT; PAM sequence: AAAGGATT
ttgaacttttctgtctagct

SEQ ID NO: 6466 - DNA, 20 bp, Artificial Sequence
  Description of Artificial Sequence: Synthetic oligonucleotide
  Target: ANGPTL4; (+) strand; PAM type: NNNNGHTT; PAM sequence: AAAGGATT
tcagcactctgtgtctagct

SEQ ID NO: 6467 - DNA, 20 bp, Artificial Sequence
  Description of Artificial Sequence: Synthetic oligonucleotide
  Target: ANGPTL4; (+) strand; PAM type: NNNNGHTT; PAM sequence: AAAGGTTT
tcagcactctgtgtctagct

SEQ ID NO: 6468 - DNA, 20 bp, Artificial Sequence
  Description of Artificial Sequence: Synthetic oligonucleotide
  Target: ANGPTL4; (-) strand; PAM type: NRG; PAM sequence: AAG
tccagcttgggtgacagagc

SEQ ID NO: 6469 - DNA, 20 bp, Artificial Sequence
  Description of Artificial Sequence: Synthetic oligonucleotide
  Target: ANGPTL4; (-) strand; PAM type: NRG; PAM sequence: GAG
gcactccagcttgggtgaca

SEQ ID NO: 6470 - DNA, 20 bp, Artificial Sequence
  Description of Artificial Sequence: Synthetic oligonucleotide
  Target: ANGPTL4; (-) strand; PAM type: NRG; PAM sequence: CAG
ttgcactccagcttgggtga

SEQ ID NO: 6471 - DNA, 20 bp, Artificial Sequence
  Description of Artificial Sequence: Synthetic oligonucleotide
  Target: ANGPTL4; (-) strand; PAM type: NRG; PAM sequence: GGG
gtaccattgcactccagctt

SEQ ID NO: 6472 - DNA, 20 bp, Artificial Sequence
  Description of Artificial Sequence: Synthetic oligonucleotide
  Target: ANGPTL4; (-) strand; PAM type: NRG; PAM sequence: TGG
cgtaccattgcactccagct

SEQ ID NO: 6473 - DNA, 20 bp, Artificial Sequence
  Description of Artificial Sequence: Synthetic oligonucleotide
  Target: ANGPTL4; (-) strand; PAM type: NRG; PAM sequence: CAG
gagatcgtaccattgcactc

SEQ ID NO: 6474 - DNA, 20 bp, Artificial Sequence
  Description of Artificial Sequence: Synthetic oligonucleotide
  Target: ANGPTL4; (-) strand; PAM type: NRG; PAM sequence: GAG
ggtggaggctgcagtaagcg

SEQ ID NO: 6475 - DNA, 20 bp, Artificial Sequence
  Description of Artificial Sequence: Synthetic oligonucleotide
  Target: ANGPTL4; (-) strand; PAM type: NRG; PAM sequence: CGG
gaggtggaggctgcagtaag

SEQ ID NO: 6476 - DNA, 20 bp, Artificial Sequence
  Description of Artificial Sequence: Synthetic oligonucleotide
  Target: ANGPTL4; (-) strand; PAM type: NRG; PAM sequence: AAG
caggaggtggaggctgcagt

SEQ ID NO: 6477 - DNA, 20 bp, Artificial Sequence
  Description of Artificial Sequence: Synthetic oligonucleotide
  Target: ANGPTL4; (-) strand; PAM type: NRG; PAM sequence: CAG
aacccaggaggtggaggctg

SEQ ID NO: 6478 - DNA, 20 bp, Artificial Sequence
  Description of Artificial Sequence: Synthetic oligonucleotide
  Target: ANGPTL4; (-) strand; PAM type: NRG; PAM sequence: AGG
cgcttgaacccaggaggtgg

SEQ ID NO: 6479 - DNA, 20 bp, Artificial Sequence
  Description of Artificial Sequence: Synthetic oligonucleotide
  Target: ANGPTL4; (-) strand; PAM type: NRG; PAM sequence: GAG
tcgcttgaacccaggaggtg

SEQ ID NO: 6480 - DNA, 20 bp, Artificial Sequence
  Description of Artificial Sequence: Synthetic oligonucleotide
  Target: ANGPTL4; (-) strand; PAM type: NRG; PAM sequence: TGG
attcgcttgaacccaggagg

SEQ ID NO: 6481 - DNA, 20 bp, Artificial Sequence
  Description of Artificial Sequence: Synthetic oligonucleotide
  Target: ANGPTL4; (-) strand; PAM type: NRG; PAM sequence: AGG
gagattcgcttgaacccagg

SEQ ID NO: 6482 - DNA, 20 bp, Artificial Sequence
  Description of Artificial Sequence: Synthetic oligonucleotide
  Target: ANGPTL4; (-) strand; PAM type: NRG; PAM sequence: GAG
ggagattcgcttgaacccag

SEQ ID NO: 6483 - DNA, 20 bp, Artificial Sequence
  Description of Artificial Sequence: Synthetic oligonucleotide
  Target: ANGPTL4; (-) strand; PAM type: NRG; PAM sequence: AGG
tgggagattcgcttgaaccc

SEQ ID NO: 6484 - DNA, 20 bp, Artificial Sequence
  Description of Artificial Sequence: Synthetic oligonucleotide
  Target: ANGPTL4; (-) strand; PAM type: NRG; PAM sequence: CAG
gtgggagattcgcttgaacc

SEQ ID NO: 6485 - DNA, 20 bp, Artificial Sequence
  Description of Artificial Sequence: Synthetic oligonucleotide
  Target: ANGPTL4; (-) strand; PAM type: NRG; PAM sequence: GAG
tatttgtgaggctgaggtgg

SEQ ID NO: 6486 - DNA, 20 bp, Artificial Sequence
  Description of Artificial Sequence: Synthetic oligonucleotide
  Target: ANGPTL4; (-) strand; PAM type: NRG; PAM sequence: GGG
gctatttgtgaggctgaggt

SEQ ID NO: 6487 - DNA, 20 bp, Artificial Sequence
  Description of Artificial Sequence: Synthetic oligonucleotide
  Target: ANGPTL4; (-) strand; PAM type: NRG; PAM sequence: TGG
agctatttgtgaggctgagg

SEQ ID NO: 6488 - DNA, 20 bp, Artificial Sequence
  Description of Artificial Sequence: Synthetic oligonucleotide
  Target: ANGPTL4; (-) strand; PAM type: NRG; PAM sequence: AGG
ctcagctatttgtgaggctg

SEQ ID NO: 6489 - DNA, 20 bp, Artificial Sequence
  Description of Artificial Sequence: Synthetic oligonucleotide
  Target: ANGPTL4; (-) strand; PAM type: NRG; PAM sequence: GAG
tctcagctatttgtgaggct

SEQ ID NO: 6490 - DNA, 20 bp, Artificial Sequence
  Description of Artificial Sequence: Synthetic oligonucleotide
  Target: ANGPTL4; (-) strand; PAM type: NRG; PAM sequence: AGG
cgtaatctcagctatttgtg

SEQ ID NO: 6491 - DNA, 20 bp, Artificial Sequence
  Description of Artificial Sequence: Synthetic oligonucleotide
  Target: ANGPTL4; (-) strand; PAM type: NRG; PAM sequence: GAG
ccgtaatctcagctatttgt

SEQ ID NO: 6492 - DNA, 20 bp, Artificial Sequence
  Description of Artificial Sequence: Synthetic oligonucleotide
  Target: ANGPTL4; (-) strand; PAM type: NRG; PAM sequence: CAG
gtggtgtgtggccgtaatct

SEQ ID NO: 6493 - DNA, 20 bp, Artificial Sequence
  Description of Artificial Sequence: Synthetic oligonucleotide
  Target: ANGPTL4; (-) strand; PAM type: NRG; PAM sequence: TGG
ttagcaggcatggtggtgtg

SEQ ID NO: 6494 - DNA, 20 bp, Artificial Sequence
  Description of Artificial Sequence: Synthetic oligonucleotide
  Target: ANGPTL4; (-) strand; PAM type: NRG; PAM sequence: TGG
acagaaattagcaggcatgg

SEQ ID NO: 6495 - DNA, 20 bp, Artificial Sequence
  Description of Artificial Sequence: Synthetic oligonucleotide
  Target: ANGPTL4; (-) strand; PAM type: NRG; PAM sequence: TGG
aatacagaaattagcaggca

SEQ ID NO: 6496 - DNA, 20 bp, Artificial Sequence
  Description of Artificial Sequence: Synthetic oligonucleotide
  Target: ANGPTL4; (-) strand; PAM type: NRG; PAM sequence: AGG
ctaaaaatacagaaattagc

SEQ ID NO: 6497 - DNA, 20 bp, Artificial Sequence
  Description of Artificial Sequence: Synthetic oligonucleotide
  Target: ANGPTL4; (-) strand; PAM type: NRG; PAM sequence: CAG
actaaaaatacagaaattag

SEQ ID NO: 6498 - DNA, 20 bp, Artificial Sequence
  Description of Artificial Sequence: Synthetic oligonucleotide
  Target: ANGPTL4; (-) strand; PAM type: NRG; PAM sequence: TAG
tctactaaaaatacagaaat

SEQ ID NO: 6499 - DNA, 20 bp, Artificial Sequence
  Description of Artificial Sequence: Synthetic oligonucleotide
  Target: ANGPTL4; (-) strand; PAM type: NRG; PAM sequence: CAG
ccccatctctactaaaaata

SEQ ID NO: 6500 - DNA, 20 bp, Artificial Sequence
  Description of Artificial Sequence: Synthetic oligonucleotide
  Target: ANGPTL4; (-) strand; PAM type: NRG; PAM sequence: TGG
cgagaccagcctggccagca

SEQ ID NO: 6501 - DNA, 20 bp, Artificial Sequence
  Description of Artificial Sequence: Synthetic oligonucleotide
  Target: ANGPTL4; (-) strand; PAM type: NRG; PAM sequence: CAG
gagttcgagaccagcctggc

SEQ ID NO: 6502 - DNA, 20 bp, Artificial Sequence
  Description of Artificial Sequence: Synthetic oligonucleotide
  Target: ANGPTL4; (-) strand; PAM type: NRG; PAM sequence: TGG
ctgggagttcgagaccagcc

SEQ ID NO: 6503 - DNA, 20 bp, Artificial Sequence
  Description of Artificial Sequence: Synthetic oligonucleotide
  Target: ANGPTL4; (-) strand; PAM type: NRG; PAM sequence: CAG
tgagtctgggagttcgagac

SEQ ID NO: 6504 - DNA, 20 bp, Artificial Sequence
  Description of Artificial Sequence: Synthetic oligonucleotide
  Target: ANGPTL4; (-) strand; PAM type: NRG; PAM sequence: GAG
tcacttgagtctgggagttc

SEQ ID NO: 6505 - DNA, 20 bp, Artificial Sequence
  Description of Artificial Sequence: Synthetic oligonucleotide
  Target: ANGPTL4; (-) strand; PAM type: NRG; PAM sequence: GAG
ggtggatcacttgagtctgg

SEQ ID NO: 6506 - DNA, 20 bp, Artificial Sequence
  Description of Artificial Sequence: Synthetic oligonucleotide
  Target: ANGPTL4; (-) strand; PAM type: NRG; PAM sequence: GGG
tgggtggatcacttgagtct

SEQ ID NO: 6507 - DNA, 20 bp, Artificial Sequence
  Description of Artificial Sequence: Synthetic oligonucleotide
  Target: ANGPTL4; (-) strand; PAM type: NRG; PAM sequence: TGG
gtgggtggatcacttgagtc

SEQ ID NO: 6508 - DNA, 20 bp, Artificial Sequence
  Description of Artificial Sequence: Synthetic oligonucleotide
  Target: ANGPTL4; (-) strand; PAM type: NRG; PAM sequence: GAG
ctgaggtgggtggatcactt

SEQ ID NO: 6509 - DNA, 20 bp, Artificial Sequence
  Description of Artificial Sequence: Synthetic oligonucleotide
  Target: ANGPTL4; (-) strand; PAM type: NRG; PAM sequence: TGG
ctttgggaggctgaggtggg

SEQ ID NO: 6510 - DNA, 20 bp, Artificial Sequence
  Description of Artificial Sequence: Synthetic oligonucleotide
  Target: ANGPTL4; (-) strand; PAM type: NRG; PAM sequence: GGG
gcactttgggaggctgaggt

SEQ ID NO: 6511 - DNA, 20 bp, Artificial Sequence
  Description of Artificial Sequence: Synthetic oligonucleotide
  Target: ANGPTL4; (-) strand; PAM type: NRG; PAM sequence: TGG
agcactttgggaggctgagg

SEQ ID NO: 6512 - DNA, 20 bp, Artificial Sequence
  Description of Artificial Sequence: Synthetic oligonucleotide
  Target: ANGPTL4; (-) strand; PAM type: NRG; PAM sequence: AGG
cctagcactttgggaggctg

SEQ ID NO: 6513 - DNA, 20 bp, Artificial Sequence
  Description of Artificial Sequence: Synthetic oligonucleotide
  Target: ANGPTL4; (-) strand; PAM type: NRG; PAM sequence: GAG
tcctagcactttgggaggct

SEQ ID NO: 6514 - DNA, 20 bp, Artificial Sequence
  Description of Artificial Sequence: Synthetic oligonucleotide
  Target: ANGPTL4; (-) strand; PAM type: NRG; PAM sequence: AGG
tgtaatcctagcactttggg

SEQ ID NO: 6515 - DNA, 20 bp, Artificial Sequence
  Description of Artificial Sequence: Synthetic oligonucleotide
  Target: ANGPTL4; (-) strand; PAM type: NRG; PAM sequence: GAG
ctgtaatcctagcactttgg

SEQ ID NO: 6516 - DNA, 20 bp, Artificial Sequence
  Description of Artificial Sequence: Synthetic oligonucleotide
  Target: ANGPTL4; (-) strand; PAM type: NRG; PAM sequence: GGG
acctgtaatcctagcacttt

SEQ ID NO: 6517 - DNA, 20 bp, Artificial Sequence
  Description of Artificial Sequence: Synthetic oligonucleotide
  Target: ANGPTL4; (-) strand; PAM type: NRG; PAM sequence: TGG
cacctgtaatcctagcactt

SEQ ID NO: 6518 - DNA, 20 bp, Artificial Sequence
  Description of Artificial Sequence: Synthetic oligonucleotide
  Target: ANGPTL4; (-) strand; PAM type: NRG; PAM sequence: TAG
gtggctcacacctgtaatcc

SEQ ID NO: 6519 - DNA, 20 bp, Artificial Sequence
  Description of Artificial Sequence: Synthetic oligonucleotide
  Target: ANGPTL4; (-) strand; PAM type: NRG; PAM sequence: TGG
ttagctggggcccggcatgg

SEQ ID NO: 6520 - DNA, 20 bp, Artificial Sequence
  Description of Artificial Sequence: Synthetic oligonucleotide
  Target: ANGPTL4; (-) strand; PAM type: NRG; PAM sequence: TGG
aaattagctggggcccggca

SEQ ID NO: 6521 - DNA, 20 bp, Artificial Sequence
  Description of Artificial Sequence: Synthetic oligonucleotide
  Target: ANGPTL4; (-) strand; PAM type: NRG; PAM sequence: CGG
aaaaaaaattagctggggcc

SEQ ID NO: 6522 - DNA, 20 bp, Artificial Sequence
  Description of Artificial Sequence: Synthetic oligonucleotide
  Target: ANGPTL4; (-) strand; PAM type: NRG; PAM sequence: GGG
aaaaaaaaaaaaattagctg

SEQ ID NO: 6523 - DNA, 20 bp, Artificial Sequence
  Description of Artificial Sequence: Synthetic oligonucleotide
  Target: ANGPTL4; (-) strand; PAM type: NRG; PAM sequence: GGG
aaaaaaaaaaaaaattagct

SEQ ID NO: 6524 - DNA, 20 bp, Artificial Sequence
  Description of Artificial Sequence: Synthetic oligonucleotide
  Target: ANGPTL4; (-) strand; PAM type: NRG; PAM sequence: TGG
aaaaaaaaaaaaaaattagc

SEQ ID NO: 6525 - DNA, 20 bp, Artificial Sequence
  Description of Artificial Sequence: Synthetic oligonucleotide
  Target: ANGPTL4; (-) strand; PAM type: NRG; PAM sequence: TAG
tctcaaaaaaaaaaaaaaat

SEQ ID NO: 6526 - DNA, 20 bp, Artificial Sequence
  Description of Artificial Sequence: Synthetic oligonucleotide
  Target: ANGPTL4; (-) strand; PAM type: NRG; PAM sequence: GAG
tccagcctgggcaacagggc

SEQ ID NO: 6527 - DNA, 20 bp, Artificial Sequence
  Description of Artificial Sequence: Synthetic oligonucleotide
  Target: ANGPTL4; (-) strand; PAM type: NRG; PAM sequence: GGG
gcactccagcctgggcaaca

SEQ ID NO: 6528 - DNA, 20 bp, Artificial Sequence
  Description of Artificial Sequence: Synthetic oligonucleotide
  Target: ANGPTL4; (-) strand; PAM type: NRG; PAM sequence: AGG
tgcactccagcctgggcaac

SEQ ID NO: 6529 - DNA, 20 bp, Artificial Sequence
  Description of Artificial Sequence: Synthetic oligonucleotide
  Target: ANGPTL4; (-) strand; PAM type: NRG; PAM sequence: CAG
ctgcactccagcctgggcaa

SEQ ID NO: 6530 - DNA, 20 bp, Artificial Sequence
  Description of Artificial Sequence: Synthetic oligonucleotide
  Target: ANGPTL4; (-) strand; PAM type: NRG; PAM sequence: GGG
gcgccactgcactccagcct

SEQ ID NO: 6531 - DNA, 20 bp, Artificial Sequence
  Description of Artificial Sequence: Synthetic oligonucleotide
  Target: ANGPTL4; (-) strand; PAM type: NRG; PAM sequence: TGG
tgcgccactgcactccagcc

SEQ ID NO: 6532 - DNA, 20 bp, Artificial Sequence
  Description of Artificial Sequence: Synthetic oligonucleotide
  Target: ANGPTL4; (-) strand; PAM type: NRG; PAM sequence: CAG
gagattgcgccactgcactc

SEQ ID NO: 6533 - DNA, 20 bp, Artificial Sequence
  Description of Artificial Sequence: Synthetic oligonucleotide
  Target: ANGPTL4; (-) strand; PAM type: NRG; PAM sequence: GAG
ggcagagggtgcagtaagca

SEQ ID NO: 6534 - DNA, 20 bp, Artificial Sequence
  Description of Artificial Sequence: Synthetic oligonucleotide
  Target: ANGPTL4; (-) strand; PAM type: NRG; PAM sequence: CAG
gaggcagagggtgcagtaag

SEQ ID NO: 6535 - DNA, 20 bp, Artificial Sequence
  Description of Artificial Sequence: Synthetic oligonucleotide
  Target: ANGPTL4; (-) strand; PAM type: NRG; PAM sequence: AAG
cgggaggcagagggtgcagt

SEQ ID NO: 6536 - DNA, 20 bp, Artificial Sequence
  Description of Artificial Sequence: Synthetic oligonucleotide
  Target: ANGPTL4; (-) strand; PAM type: NRG; PAM sequence: CAG
aacccgggaggcagagggtg

SEQ ID NO: 6537 - DNA, 20 bp, Artificial Sequence
  Description of Artificial Sequence: Synthetic oligonucleotide
  Target: ANGPTL4; (-) strand; PAM type: NRG; PAM sequence: GGG
gctggaacccgggaggcaga

SEQ ID NO: 6538 - DNA, 20 bp, Artificial Sequence
  Description of Artificial Sequence: Synthetic oligonucleotide
  Target: ANGPTL4; (-) strand; PAM type: NRG; PAM sequence: AGG
cgctggaacccgggaggcag

SEQ ID NO: 6539 - DNA, 20 bp, Artificial Sequence
  Description of Artificial Sequence: Synthetic oligonucleotide
  Target: ANGPTL4; (-) strand; PAM type: NRG; PAM sequence: GAG
tcgctggaacccgggaggca

SEQ ID NO: 6540 - DNA, 20 bp, Artificial Sequence
  Description of Artificial Sequence: Synthetic oligonucleotide
  Target: ANGPTL4; (-) strand; PAM type: NRG; PAM sequence: CAG
aatcgctggaacccgggagg

SEQ ID NO: 6541 - DNA, 20 bp, Artificial Sequence
  Description of Artificial Sequence: Synthetic oligonucleotide
  Target: ANGPTL4; (-) strand; PAM type: NRG; PAM sequence: AGG
gagaatcgctggaacccggg

SEQ ID NO: 6542 - DNA, 20 bp, Artificial Sequence
  Description of Artificial Sequence: Synthetic oligonucleotide
  Target: ANGPTL4; (-) strand; PAM type: NRG; PAM sequence: GAG
ggagaatcgctggaacccgg

SEQ ID NO: 6543 - DNA, 20 bp, Artificial Sequence
  Description of Artificial Sequence: Synthetic oligonucleotide
  Target: ANGPTL4; (-) strand; PAM type: NRG; PAM sequence: GGG
caggagaatcgctggaaccc

SEQ ID NO: 6544 - DNA, 20 bp, Artificial Sequence
  Description of Artificial Sequence: Synthetic oligonucleotide
  Target: ANGPTL4; (-) strand; PAM type: NRG; PAM sequence: CGG
gcaggagaatcgctggaacc

SEQ ID NO: 6545 - DNA, 20 bp, Artificial Sequence
  Description of Artificial Sequence: Synthetic oligonucleotide
  Target: ANGPTL4; (-) strand; PAM type: NRG; PAM sequence: TGG
ggctggggcaggagaatcgc

SEQ ID NO: 6546 - DNA, 20 bp, Artificial Sequence
  Description of Artificial Sequence: Synthetic oligonucleotide
  Target: ANGPTL4; (-) strand; PAM type: NRG; PAM sequence: GAG
tactcgggaggctggggcag

SEQ ID NO: 6547 - DNA, 20 bp, Artificial Sequence
  Description of Artificial Sequence: Synthetic oligonucleotide
  Target: ANGPTL4; (-) strand; PAM type: NRG; PAM sequence: AGG
gttactcgggaggctggggc

SEQ ID NO: 6548 - DNA, 20 bp, Artificial Sequence
  Description of Artificial Sequence: Synthetic oligonucleotide
  Target: ANGPTL4; (-) strand; PAM type: NRG; PAM sequence: CAG
agttactcgggaggctgggg

SEQ ID NO: 6549 - DNA, 20 bp, Artificial Sequence
  Description of Artificial Sequence: Synthetic oligonucleotide
  Target: ANGPTL4; (-) strand; PAM type: NRG; PAM sequence: GGG
cccagttactcgggaggctg

SEQ ID NO: 6550 - DNA, 20 bp, Artificial Sequence
  Description of Artificial Sequence: Synthetic oligonucleotide
  Target: ANGPTL4; (-) strand; PAM type: NRG; PAM sequence: GGG
tcccagttactcgggaggct

SEQ ID NO: 6551 - DNA, 20 bp, Artificial Sequence
  Description of Artificial Sequence: Synthetic oligonucleotide
  Target: ANGPTL4; (-) strand; PAM type: NRG; PAM sequence: TGG
atcccagttactcgggaggc

SEQ ID NO: 6552 - DNA, 20 bp, Artificial Sequence
  Description of Artificial Sequence: Synthetic oligonucleotide
  Target: ANGPTL4; (-) strand; PAM type: NRG; PAM sequence: AGG
tgtaatcccagttactcggg

SEQ ID NO: 6553 - DNA, 20 bp, Artificial Sequence
  Description of Artificial Sequence: Synthetic oligonucleotide
  Target: ANGPTL4; (-) strand; PAM type: NRG; PAM sequence: GAG
ctgtaatcccagttactcgg

SEQ ID NO: 6554 - DNA, 20 bp, Artificial Sequence
  Description of Artificial Sequence: Synthetic oligonucleotide
  Target: ANGPTL4; (-) strand; PAM type: NRG; PAM sequence: GGG
gcctgtaatcccagttactc

SEQ ID NO: 6555 - DNA, 20 bp, Artificial Sequence
  Description of Artificial Sequence: Synthetic oligonucleotide
  Target: ANGPTL4; (-) strand; PAM type: NRG; PAM sequence: CGG
cgcctgtaatcccagttact

SEQ ID NO: 6556 - DNA, 20 bp, Artificial Sequence
  Description of Artificial Sequence: Synthetic oligonucleotide
  Target: ANGPTL4; (-) strand; PAM type: NRG; PAM sequence: CAG
gaggcgcgcgcctgtaatcc

SEQ ID NO: 6557 - DNA, 20 bp, Artificial Sequence
  Description of Artificial Sequence: Synthetic oligonucleotide
  Target: ANGPTL4; (-) strand; PAM type: NRG; PAM sequence: AGG
taaaaattagccaggcgtgg

SEQ ID NO: 6558 - DNA, 20 bp, Artificial Sequence
  Description of Artificial Sequence: Synthetic oligonucleotide
  Target: ANGPTL4; (-) strand; PAM type: NRG; PAM sequence: GAG
gtaaaaattagccaggcgtg

SEQ ID NO: 6559 - DNA, 20 bp, Artificial Sequence
  Description of Artificial Sequence: Synthetic oligonucleotide
  Target: ANGPTL4; (-) strand; PAM type: NRG; PAM sequence: TGG
atgtaaaaattagccaggcg

SEQ ID NO: 6560 - DNA, 20 bp, Artificial Sequence
  Description of Artificial Sequence: Synthetic oligonucleotide
  Target: ANGPTL4; (-) strand; PAM type: NRG; PAM sequence: AGG
taaaaatgtaaaaattagcc

SEQ ID NO: 6561 - DNA, 20 bp, Artificial Sequence
  Description of Artificial Sequence: Synthetic oligonucleotide
  Target: ANGPTL4; (-) strand; PAM type: NRG; PAM sequence: CAG
ctaaaaatgtaaaaattagc

SEQ ID NO: 6562 - DNA, 20 bp, Artificial Sequence
  Description of Artificial Sequence: Synthetic oligonucleotide
  Target: ANGPTL4; (-) strand; PAM type: NRG; PAM sequence: TAG
tctactaaaaatgtaaaaat

SEQ ID NO: 6563 - DNA, 20 bp, Artificial Sequence
  Description of Artificial Sequence: Synthetic oligonucleotide
  Target: ANGPTL4; (-) strand; PAM type: NRG; PAM sequence: CGG
ctgaccaacatggtgaaacc

SEQ ID NO: 6564 - DNA, 20 bp, Artificial Sequence
  Description of Artificial Sequence: Synthetic oligonucleotide
  Target: ANGPTL4; (-) strand; PAM type: NRG; PAM sequence: TGG
cgagaccagcctgaccaaca

SEQ ID NO: 6565 - DNA, 20 bp, Artificial Sequence
  Description of Artificial Sequence: Synthetic oligonucleotide
  Target: ANGPTL4; (-) strand; PAM type: NRG; PAM sequence: CAG
tgaggtcagaagttcgagac

SEQ ID NO: 6566 - DNA, 20 bp, Artificial Sequence
  Description of Artificial Sequence: Synthetic oligonucleotide
  Target: ANGPTL4; (-) strand; PAM type: NRG; PAM sequence: GAG
gatcgtgaggtcagaagttc

SEQ ID NO: 6567 - DNA, 20 bp, Artificial Sequence
  Description of Artificial Sequence: Synthetic oligonucleotide
  Target: ANGPTL4; (-) strand; PAM type: NRG; PAM sequence: AAG
tgggcagatcgtgaggtcag

SEQ ID NO: 6568 - DNA, 20 bp, Artificial Sequence
  Description of Artificial Sequence: Synthetic oligonucleotide
  Target: ANGPTL4; (-) strand; PAM type: NRG; PAM sequence: CAG
aggtgggcagatcgtgaggt

SEQ ID NO: 6569 - DNA, 20 bp, Artificial Sequence
  Description of Artificial Sequence: Synthetic oligonucleotide
  Target: ANGPTL4; (-) strand; PAM type: NRG; PAM sequence: AGG
tccaaggtgggcagatcgtg

SEQ ID NO: 6570 - DNA, 20 bp, Artificial Sequence
  Description of Artificial Sequence: Synthetic oligonucleotide
  Target: ANGPTL4; (-) strand; PAM type: NRG; PAM sequence: GAG
gtccaaggtgggcagatcgt

SEQ ID NO: 6571 - DNA, 20 bp, Artificial Sequence
  Description of Artificial Sequence: Synthetic oligonucleotide
  Target: ANGPTL4; (-) strand; PAM type: NRG; PAM sequence: CAG
ctttgggagtccaaggtggg

SEQ ID NO: 6572 - DNA, 20 bp, Artificial Sequence
  Description of Artificial Sequence: Synthetic oligonucleotide
  Target: ANGPTL4; (-) strand; PAM type: NRG; PAM sequence: GGG
gcactttgggagtccaaggt

SEQ ID NO: 6573 - DNA, 20 bp, Artificial Sequence
  Description of Artificial Sequence: Synthetic oligonucleotide
  Target: ANGPTL4; (-) strand; PAM type: NRG; PAM sequence: TGG
agcactttgggagtccaagg

SEQ ID NO: 6574 - DNA, 20 bp, Artificial Sequence
  Description of Artificial Sequence: Synthetic oligonucleotide
  Target: ANGPTL4; (-) strand; PAM type: NRG; PAM sequence: AGG
accagcactttgggagtcca

SEQ ID NO: 6575 - DNA, 20 bp, Artificial Sequence
  Description of Artificial Sequence: Synthetic oligonucleotide
  Target: ANGPTL4; (-) strand; PAM type: NRG; PAM sequence: AAG
taccagcactttgggagtcc

SEQ ID NO: 6576 - DNA, 20 bp, Artificial Sequence
  Description of Artificial Sequence: Synthetic oligonucleotide
  Target: ANGPTL4; (-) strand; PAM type: NRG; PAM sequence: GAG
ctgtaataccagcactttgg

SEQ ID NO: 6577 - DNA, 20 bp, Artificial Sequence
  Description of Artificial Sequence: Synthetic oligonucleotide
  Target: ANGPTL4; (-) strand; PAM type: NRG; PAM sequence: GGG
gcctgtaataccagcacttt

SEQ ID NO: 6578 - DNA, 20 bp, Artificial Sequence
  Description of Artificial Sequence: Synthetic oligonucleotide
  Target: ANGPTL4; (-) strand; PAM type: NRG; PAM sequence: TGG
tgcctgtaataccagcactt

SEQ ID NO: 6579 - DNA, 20 bp, Artificial Sequence
  Description of Artificial Sequence: Synthetic oligonucleotide
  Target: ANGPTL4; (-) strand; PAM type: NRG; PAM sequence: CAG
gtggctcatgcctgtaatac

SEQ ID NO: 6580 - DNA, 20 bp, Artificial Sequence
  Description of Artificial Sequence: Synthetic oligonucleotide
  Target: ANGPTL4; (-) strand; PAM type: NRG; PAM sequence: TGG
tggggccaggctgggcacgg

SEQ ID NO: 6581 - DNA, 20 bp, Artificial Sequence
  Description of Artificial Sequence: Synthetic oligonucleotide
  Target: ANGPTL4; (-) strand; PAM type: NRG; PAM sequence: CGG
agctggggccaggctgggca

SEQ ID NO: 6582 - DNA, 20 bp, Artificial Sequence
  Description of Artificial Sequence: Synthetic oligonucleotide
  Target: ANGPTL4; (-) strand; PAM type: NRG; PAM sequence: GGG
aaattagctggggccaggct

SEQ ID NO: 6583 - DNA, 20 bp, Artificial Sequence
  Description of Artificial Sequence: Synthetic oligonucleotide
  Target: ANGPTL4; (-) strand; PAM type: NRG; PAM sequence: TGG
aaaattagctggggccaggc

SEQ ID NO: 6584 - DNA, 20 bp, Artificial Sequence
  Description of Artificial Sequence: Synthetic oligonucleotide
  Target: ANGPTL4; (-) strand; PAM type: NRG; PAM sequence: AGG
ttaaaaaattagctggggcc

SEQ ID NO: 6585 - DNA, 20 bp, Artificial Sequence
  Description of Artificial Sequence: Synthetic oligonucleotide
  Target: ANGPTL4; (-) strand; PAM type: NRG; PAM sequence: CAG
tttaaaaaattagctggggc

SEQ ID NO: 6586 - DNA, 20 bp, Artificial Sequence
  Description of Artificial Sequence: Synthetic oligonucleotide
  Target: ANGPTL4; (-) strand; PAM type: NRG; PAM sequence: GGG
aaaatttaaaaaattagctg

SEQ ID NO: 6587 - DNA, 20 bp, Artificial Sequence
  Description of Artificial Sequence: Synthetic oligonucleotide
  Target: ANGPTL4; (-) strand; PAM type: NRG; PAM sequence: GGG
aaaaatttaaaaaattagct

SEQ ID NO: 6588 - DNA, 20 bp, Artificial Sequence
  Description of Artificial Sequence: Synthetic oligonucleotide
  Target: ANGPTL4; (-) strand; PAM type: NRG; PAM sequence: TGG
aaaaaatttaaaaaattagc

SEQ ID NO: 6589 - DNA, 20 bp, Artificial Sequence
  Description of Artificial Sequence: Synthetic oligonucleotide
  Target: ANGPTL4; (-) strand; PAM type: NRG; PAM sequence: TAG
gtacaaaaaatttaaaaaat

SEQ ID NO: 6590 - DNA, 20 bp, Artificial Sequence
  Description of Artificial Sequence: Synthetic oligonucleotide
  Target: ANGPTL4; (-) strand; PAM type: NRG; PAM sequence: AAG
tcaagattgggtaacatggc

SEQ ID NO: 6591 - DNA, 20 bp, Artificial Sequence
  Description of Artificial Sequence: Synthetic oligonucleotide
  Target: ANGPTL4; (-) strand; PAM type: NRG; PAM sequence: TGG
gagttcaagattgggtaaca

SEQ ID NO: 6592 - DNA, 20 bp, Artificial Sequence
  Description of Artificial Sequence: Synthetic oligonucleotide
  Target: ANGPTL4; (-) strand; PAM type: NRG; PAM sequence: GGG
gagcccaggagttcaagatt

SEQ ID NO: 6593 - DNA, 20 bp, Artificial Sequence
  Description of Artificial Sequence: Synthetic oligonucleotide
  Target: ANGPTL4; (-) strand; PAM type: NRG; PAM sequence: TGG
tgagcccaggagttcaagat

SEQ ID NO: 6594 - DNA, 20 bp, Artificial Sequence
  Description of Artificial Sequence: Synthetic oligonucleotide
  Target: ANGPTL4; (-) strand; PAM type: NRG; PAM sequence: AAG
ctgcttgagcccaggagttc

SEQ ID NO: 6595 - DNA, 20 bp, Artificial Sequence
  Description of Artificial Sequence: Synthetic oligonucleotide
  Target: ANGPTL4; (-) strand; PAM type: NRG; PAM sequence: GAG
ggaggactgcttgagcccag

SEQ ID NO: 6596 - DNA, 20 bp, Artificial Sequence
  Description of Artificial Sequence: Synthetic oligonucleotide
  Target: ANGPTL4; (-) strand; PAM type: NRG; PAM sequence: AGG
tgggaggactgcttgagccc

SEQ ID NO: 6597 - DNA, 20 bp, Artificial Sequence
  Description of Artificial Sequence: Synthetic oligonucleotide
  Target: ANGPTL4; (-) strand; PAM type: NRG; PAM sequence: CAG
gtgggaggactgcttgagcc

SEQ ID NO: 6598 - DNA, 20 bp, Artificial Sequence
  Description of Artificial Sequence: Synthetic oligonucleotide
  Target: ANGPTL4; (-) strand; PAM type: NRG; PAM sequence: GAG
ccaaggtgggaggactgctt

SEQ ID NO: 6599 - DNA, 20 bp, Artificial Sequence
  Description of Artificial Sequence: Synthetic oligonucleotide
  Target: ANGPTL4; (-) strand; PAM type: NRG; PAM sequence: AGG
ctttgggaggccaaggtggg

SEQ ID NO: 6600 - DNA, 20 bp, Artificial Sequence
  Description of Artificial Sequence: Synthetic oligonucleotide
  Target: ANGPTL4; (-) strand; PAM type: NRG; PAM sequence: GAG
actttgggaggccaaggtgg

SEQ ID NO: 6601 - DNA, 20 bp, Artificial Sequence
  Description of Artificial Sequence: Synthetic oligonucleotide
  Target: ANGPTL4; (-) strand; PAM type: NRG; PAM sequence: GGG
gtactttgggaggccaaggt

SEQ ID NO: 6602 - DNA, 20 bp, Artificial Sequence
  Description of Artificial Sequence: Synthetic oligonucleotide
  Target: ANGPTL4; (-) strand; PAM type: NRG; PAM sequence: TGG
agtactttgggaggccaagg

SEQ ID NO: 6603 - DNA, 20 bp, Artificial Sequence
  Description of Artificial Sequence: Synthetic oligonucleotide
  Target: ANGPTL4; (-) strand; PAM type: NRG; PAM sequence: AGG
cccagtactttgggaggcca

SEQ ID NO: 6604 - DNA, 20 bp, Artificial Sequence
  Description of Artificial Sequence: Synthetic oligonucleotide
  Target: ANGPTL4; (-) strand; PAM type: NRG; PAM sequence: AAG
tcccagtactttgggaggcc

SEQ ID NO: 6605 - DNA, 20 bp, Artificial Sequence
  Description of Artificial Sequence: Synthetic oligonucleotide
  Target: ANGPTL4; (-) strand; PAM type: NRG; PAM sequence: AGG
tgtaatcccagtactttggg

SEQ ID NO: 6606 - DNA, 20 bp, Artificial Sequence
  Description of Artificial Sequence: Synthetic oligonucleotide
  Target: ANGPTL4; (-) strand; PAM type: NRG; PAM sequence: GAG
ttgtaatcccagtactttgg

SEQ ID NO: 6607 - DNA, 20 bp, Artificial Sequence
  Description of Artificial Sequence: Synthetic oligonucleotide
  Target: ANGPTL4; (-) strand; PAM type: NRG; PAM sequence: GGG
gcttgtaatcccagtacttt

SEQ ID NO: 6608 - DNA, 20 bp, Artificial Sequence
  Description of Artificial Sequence: Synthetic oligonucleotide
  Target: ANGPTL4; (-) strand; PAM type: NRG; PAM sequence: TGG
tgcttgtaatcccagtactt

SEQ ID NO: 6609 - DNA, 20 bp, Artificial Sequence
  Description of Artificial Sequence: Synthetic oligonucleotide
  Target: ANGPTL4; (-) strand; PAM type: NRG; PAM sequence: CAG
gtggctcatgcttgtaatcc

SEQ ID NO: 6610 - DNA, 20 bp, Artificial Sequence
  Description of Artificial Sequence: Synthetic oligonucleotide
  Target: ANGPTL4; (-) strand; PAM type: NRG; PAM sequence: TGG
tgccattaagctaggcaagg

SEQ ID NO: 6611 - DNA, 20 bp, Artificial Sequence
  Description of Artificial Sequence: Synthetic oligonucleotide
  Target: ANGPTL4; (-) strand; PAM type: NRG; PAM sequence: AGG
aaatgccattaagctaggca

SEQ ID NO: 6612 - DNA, 20 bp, Artificial Sequence
  Description of Artificial Sequence: Synthetic oligonucleotide
  Target: ANGPTL4; (-) strand; PAM type: NRG; PAM sequence: AAG
taaatgccattaagctaggc

SEQ ID NO: 6613 - DNA, 20 bp, Artificial Sequence
  Description of Artificial Sequence: Synthetic oligonucleotide
  Target: ANGPTL4; (-) strand; PAM type: NRG; PAM sequence: AGG
aatgtaaatgccattaagct

SEQ ID NO: 6614 - DNA, 20 bp, Artificial Sequence
  Description of Artificial Sequence: Synthetic oligonucleotide
  Target: ANGPTL4; (-) strand; PAM type: NRG; PAM sequence: TAG
aaatgtaaatgccattaagc

SEQ ID NO: 6615 - DNA, 20 bp, Artificial Sequence
  Description of Artificial Sequence: Synthetic oligonucleotide
  Target: ANGPTL4; (-) strand; PAM type: NRG; PAM sequence: AAG
ctacaaatgtaaatgccatt

SEQ ID NO: 6616 - DNA, 20 bp, Artificial Sequence
  Description of Artificial Sequence: Synthetic oligonucleotide
  Target: ANGPTL4; (-) strand; PAM type: NRG; PAM sequence: CAG
caggtatgagccactgcgcc

SEQ ID NO: 6617 - DNA, 20 bp, Artificial Sequence
  Description of Artificial Sequence: Synthetic oligonucleotide
  Target: ANGPTL4; (-) strand; PAM type: NRG; PAM sequence: GAG
agtgctgggattacaggtat

SEQ ID NO: 6618 - DNA, 20 bp, Artificial Sequence
  Description of Artificial Sequence: Synthetic oligonucleotide
  Target: ANGPTL4; (-) strand; PAM type: NRG; PAM sequence: AGG
tcccaaagtgctgggattac

SEQ ID NO: 6619 - DNA, 20 bp, Artificial Sequence
  Description of Artificial Sequence: Synthetic oligonucleotide
  Target: ANGPTL4; (-) strand; PAM type: NRG; PAM sequence: CAG
ctcccaaagtgctgggatta

SEQ ID NO: 6620 - DNA, 20 bp, Artificial Sequence
  Description of Artificial Sequence: Synthetic oligonucleotide
  Target: ANGPTL4; (-) strand; PAM type: NRG; PAM sequence: GGG
cctcggcctcccaaagtgct

SEQ ID NO: 6621 - DNA, 20 bp, Artificial Sequence
  Description of Artificial Sequence: Synthetic oligonucleotide
  Target: ANGPTL4; (-) strand; PAM type: NRG; PAM sequence: TGG
acctcggcctcccaaagtgc

SEQ ID NO: 6622 - DNA, 20 bp, Artificial Sequence
  Description of Artificial Sequence: Synthetic oligonucleotide
  Target: ANGPTL4; (-) strand; PAM type: NRG; PAM sequence: AAG
ccgcctacctcggcctccca

SEQ ID NO: 6623 - DNA, 20 bp, Artificial Sequence
  Description of Artificial Sequence: Synthetic oligonucleotide
  Target: ANGPTL4; (-) strand; PAM type: NRG; PAM sequence: CGG
ctcaggtgatccgcctacct

SEQ ID NO: 6624 - DNA, 20 bp, Artificial Sequence
  Description of Artificial Sequence: Synthetic oligonucleotide
  Target: ANGPTL4; (-) strand; PAM type: NRG; PAM sequence: AGG
ggtctctaactcctgacctc

SEQ ID NO: 6625 - DNA, 20 bp, Artificial Sequence
  Description of Artificial Sequence: Synthetic oligonucleotide
  Target: ANGPTL4; (-) strand; PAM type: NRG; PAM sequence: CAG
tggtctctaactcctgacct

SEQ ID NO: 6626 - DNA, 20 bp, Artificial Sequence
  Description of Artificial Sequence: Synthetic oligonucleotide
  Target: ANGPTL4; (-) strand; PAM type: NRG; PAM sequence: TGG
gggtttcgccatgtccaggc

SEQ ID NO: 6627 - DNA, 20 bp, Artificial Sequence
  Description of Artificial Sequence: Synthetic oligonucleotide
  Target: ANGPTL4; (-) strand; PAM type: NRG; PAM sequence: AGG
gacggggtttcgccatgtcc

SEQ ID NO: 6628 - DNA, 20 bp, Artificial Sequence
  Description of Artificial Sequence: Synthetic oligonucleotide
  Target: ANGPTL4; (-) strand; PAM type: NRG; PAM sequence: CAG
agacggggtttcgccatgtc

SEQ ID NO: 6629 - DNA, 20 bp, Artificial Sequence
  Description of Artificial Sequence: Synthetic oligonucleotide
  Target: ANGPTL4; (-) strand; PAM type: NRG; PAM sequence: GGG
tttgtattttagtagagacg

SEQ ID NO: 6630 - DNA, 20 bp, Artificial Sequence
  Description of Artificial Sequence: Synthetic oligonucleotide
  Target: ANGPTL4; (-) strand; PAM type: NRG; PAM sequence: GGG
ttttgtattttagtagagac

SEQ ID NO: 6631 - DNA, 20 bp, Artificial Sequence
  Description of Artificial Sequence: Synthetic oligonucleotide
  Target: ANGPTL4; (-) strand; PAM type: NRG; PAM sequence: CGG
tttttgtattttagtagaga

SEQ ID NO: 6632 - DNA, 20 bp, Artificial Sequence
  Description of Artificial Sequence: Synthetic oligonucleotide
  Target: ANGPTL4; (-) strand; PAM type: NRG; PAM sequence: GAG
ctaatttttgtattttagta

SEQ ID NO: 6633 - DNA, 20 bp, Artificial Sequence
  Description of Artificial Sequence: Synthetic oligonucleotide
  Target: ANGPTL4; (-) strand; PAM type: NRG; PAM sequence: TAG
ggctaatttttgtattttag

SEQ ID NO: 6634 - DNA, 20 bp, Artificial Sequence
  Description of Artificial Sequence: Synthetic oligonucleotide
  Target: ANGPTL4; (-) strand; PAM type: NRG; PAM sequence: TAG
cctggctaatttttgtattt

SEQ ID NO: 6635 - DNA, 20 bp, Artificial Sequence
  Description of Artificial Sequence: Synthetic oligonucleotide
  Target: ANGPTL4; (-) strand; PAM type: NRG; PAM sequence: TGG
caggtgcccaccaccacgcc

SEQ ID NO: 6636 - DNA, 20 bp, Artificial Sequence
  Description of Artificial Sequence: Synthetic oligonucleotide
  Target: ANGPTL4; (-) strand; PAM type: NRG; PAM sequence: AGG
tcccgagtagctgggattac

SEQ ID NO: 6637 - DNA, 20 bp, Artificial Sequence
  Description of Artificial Sequence: Synthetic oligonucleotide
  Target: ANGPTL4; (-) strand; PAM type: NRG; PAM sequence: CAG
ctcccgagtagctgggatta

SEQ ID NO: 6638 - DNA, 20 bp, Artificial Sequence
  Description of Artificial Sequence: Synthetic oligonucleotide
  Target: ANGPTL4; (-) strand; PAM type: NRG; PAM sequence: GGG
cctcagcctcccgagtagct

SEQ ID NO: 6639 - DNA, 20 bp, Artificial Sequence
  Description of Artificial Sequence: Synthetic oligonucleotide
  Target: ANGPTL4; (-) strand; PAM type: NRG; PAM sequence: TGG
gcctcagcctcccgagtagc

SEQ ID NO: 6640 - DNA, 20 bp, Artificial Sequence
  Description of Artificial Sequence: Synthetic oligonucleotide
  Target: ANGPTL4; (-) strand; PAM type: NRG; PAM sequence: TAG
tcctgcctcagcctcccgag

SEQ ID NO: 6641 - DNA, 20 bp, Artificial Sequence
  Description of Artificial Sequence: Synthetic oligonucleotide
  Target: ANGPTL4; (-) strand; PAM type: NRG; PAM sequence: GAG
ttctcctgcctcagcctccc

SEQ ID NO: 6642 - DNA, 20 bp, Artificial Sequence
  Description of Artificial Sequence: Synthetic oligonucleotide
  Target: ANGPTL4; (-) strand; PAM type: NRG; PAM sequence: CAG
ttcaaatgattctcctgcct

SEQ ID NO: 6643 - DNA, 20 bp, Artificial Sequence
  Description of Artificial Sequence: Synthetic oligonucleotide
  Target: ANGPTL4; (-) strand; PAM type: NRG; PAM sequence: GGG
cactgcaacttccacctcct

SEQ ID NO: 6644 - DNA, 20 bp, Artificial Sequence
  Description of Artificial Sequence: Synthetic oligonucleotide
  Target: ANGPTL4; (-) strand; PAM type: NRG; PAM sequence: TGG
tcactgcaacttccacctcc

SEQ ID NO: 6645 - DNA, 20 bp, Artificial Sequence
  Description of Artificial Sequence: Synthetic oligonucleotide
  Target: ANGPTL4; (-) strand; PAM type: NRG; PAM sequence: TGG
tcgccaaggctggagtgcag

SEQ ID NO: 6646 - DNA, 20 bp, Artificial Sequence
  Description of Artificial Sequence: Synthetic oligonucleotide
  Target: ANGPTL4; (-) strand; PAM type: NRG; PAM sequence: CAG
ctgtcgccaaggctggagtg

SEQ ID NO: 6647 - DNA, 20 bp, Artificial Sequence
  Description of Artificial Sequence: Synthetic oligonucleotide
  Target: ANGPTL4; (-) strand; PAM type: NRG; PAM sequence: GAG
ttgctctgtcgccaaggctg

SEQ ID NO: 6648 - DNA, 20 bp, Artificial Sequence
  Description of Artificial Sequence: Synthetic oligonucleotide
  Target: ANGPTL4; (-) strand; PAM type: NRG; PAM sequence: TGG
tcttgctctgtcgccaaggc

SEQ ID NO: 6649 - DNA, 20 bp, Artificial Sequence
  Description of Artificial Sequence: Synthetic oligonucleotide
  Target: ANGPTL4; (-) strand; PAM type: NRG; PAM sequence: AGG
agagtcttgctctgtcgcca

SEQ ID NO: 6650 - DNA, 20 bp, Artificial Sequence
  Description of Artificial Sequence: Synthetic oligonucleotide
  Target: ANGPTL4; (-) strand; PAM type: NRG; PAM sequence: AAG
cagagtcttgctctgtcgcc

SEQ ID NO: 6651 - DNA, 20 bp, Artificial Sequence
  Description of Artificial Sequence: Synthetic oligonucleotide
  Target: ANGPTL4; (-) strand; PAM type: NRG; PAM sequence: GAG
tttttcttttttttgagaca

SEQ ID NO: 6652 - DNA, 20 bp, Artificial Sequence
  Description of Artificial Sequence: Synthetic oligonucleotide
  Target: ANGPTL4; (-) strand; PAM type: NRG; PAM sequence: CAG
tttttttcttttttttgaga

SEQ ID NO: 6653 - DNA, 20 bp, Artificial Sequence
  Description of Artificial Sequence: Synthetic oligonucleotide
  Target: ANGPTL4; (-) strand; PAM type: NRG; PAM sequence: GAG
cttttttttttctttttttt

SEQ ID NO: 6654 - DNA, 20 bp, Artificial Sequence
  Description of Artificial Sequence: Synthetic oligonucleotide
  Target: ANGPTL4; (-) strand; PAM type: NRG; PAM sequence: TAG
gtgggctactttggccaaca

SEQ ID NO: 6655 - DNA, 20 bp, Artificial Sequence
  Description of Artificial Sequence: Synthetic oligonucleotide
  Target: ANGPTL4; (-) strand; PAM type: NRG; PAM sequence: TGG
tcccaacgcgtgggctactt

SEQ ID NO: 6656 - DNA, 20 bp, Artificial Sequence
  Description of Artificial Sequence: Synthetic oligonucleotide
  Target: ANGPTL4; (-) strand; PAM type: NRG; PAM sequence: GGG
ggtctccaatcccaacgcgt

SEQ ID NO: 6657 - DNA, 20 bp, Artificial Sequence
  Description of Artificial Sequence: Synthetic oligonucleotide
  Target: ANGPTL4; (-) strand; PAM type: NRG; PAM sequence: TGG
gggtctccaatcccaacgcg

SEQ ID NO: 6658 - DNA, 20 bp, Artificial Sequence
  Description of Artificial Sequence: Synthetic oligonucleotide
  Target: ANGPTL4; (-) strand; PAM type: NRG; PAM sequence: GGG
cgatcacggtgggcaagacc

SEQ ID NO: 6659 - DNA, 20 bp, Artificial Sequence
  Description of Artificial Sequence: Synthetic oligonucleotide
  Target: ANGPTL4; (-) strand; PAM type: NRG; PAM sequence: CGG
gcgatcacggtgggcaagac

SEQ ID NO: 6660 - DNA, 20 bp, Artificial Sequence
  Description of Artificial Sequence: Synthetic oligonucleotide
  Target: ANGPTL4; (-) strand; PAM type: NRG; PAM sequence: AAG
ctggggcgatcacggtgggc

SEQ ID NO: 6661 - DNA, 20 bp, Artificial Sequence
  Description of Artificial Sequence: Synthetic oligonucleotide
  Target: ANGPTL4; (-) strand; PAM type: NRG; PAM sequence: GGG
tgtactggggcgatcacggt

SEQ ID NO: 6662 - DNA, 20 bp, Artificial Sequence
  Description of Artificial Sequence: Synthetic oligonucleotide
  Target: ANGPTL4; (-) strand; PAM type: NRG; PAM sequence: TGG
ctgtactggggcgatcacgg

SEQ ID NO: 6663 - DNA, 20 bp, Artificial Sequence
  Description of Artificial Sequence: Synthetic oligonucleotide
  Target: ANGPTL4; (-) strand; PAM type: NRG; PAM sequence: CGG
gcactgtactggggcgatca

SEQ ID NO: 6664 - DNA, 20 bp, Artificial Sequence
  Description of Artificial Sequence: Synthetic oligonucleotide
  Target: ANGPTL4; (-) strand; PAM type: NRG; PAM sequence: GGG
atatgccaggcactgtactg

SEQ ID NO: 6665 - DNA, 20 bp, Artificial Sequence
  Description of Artificial Sequence: Synthetic oligonucleotide
  Target: ANGPTL4; (-) strand; PAM type: NRG; PAM sequence: GGG
tatatgccaggcactgtact

SEQ ID NO: 6666 - DNA, 20 bp, Artificial Sequence
  Description of Artificial Sequence: Synthetic oligonucleotide
  Target: ANGPTL4; (-) strand; PAM type: NRG; PAM sequence: TGG
ctatatgccaggcactgtac

SEQ ID NO: 6667 - DNA, 20 bp, Artificial Sequence
  Description of Artificial Sequence: Synthetic oligonucleotide
  Target: ANGPTL4; (-) strand; PAM type: NRG; PAM sequence: AGG
tggagcacctactatatgcc

SEQ ID NO: 6668 - DNA, 20 bp, Artificial Sequence
  Description of Artificial Sequence: Synthetic oligonucleotide
  Target: ANGPTL4; (-) strand; PAM type: NRG; PAM sequence: CAG
ctggagcacctactatatgc

SEQ ID NO: 6669 - DNA, 20 bp, Artificial Sequence
  Description of Artificial Sequence: Synthetic oligonucleotide
  Target: ANGPTL4; (-) strand; PAM type: NRG; PAM sequence: GAG
atcctgatcaattgttcctg

SEQ ID NO: 6670 - DNA, 20 bp, Artificial Sequence
  Description of Artificial Sequence: Synthetic oligonucleotide
  Target: ANGPTL4; (-) strand; PAM type: NRG; PAM sequence: TGG
tcatcctgatcaattgttcc

SEQ ID NO: 6671 - DNA, 20 bp, Artificial Sequence
  Description of Artificial Sequence: Synthetic oligonucleotide
  Target: ANGPTL4; (-) strand; PAM type: NRG; PAM sequence: AAG
cctcttacccagcaaagaca

SEQ ID NO: 6672 - DNA, 20 bp, Artificial Sequence
  Description of Artificial Sequence: Synthetic oligonucleotide
  Target: ANGPTL4; (-) strand; PAM type: NRG; PAM sequence: AAG
atgtggcctcttacccagca

SEQ ID NO: 6673 - DNA, 20 bp, Artificial Sequence
  Description of Artificial Sequence: Synthetic oligonucleotide
  Target: ANGPTL4; (-) strand; PAM type: NRG; PAM sequence: CAG
ttagaatgtggcctcttacc

SEQ ID NO: 6674 - DNA, 20 bp, Artificial Sequence
  Description of Artificial Sequence: Synthetic oligonucleotide
  Target: ANGPTL4; (-) strand; PAM type: NRG; PAM sequence: TGG
aaaaactgacctttagaatg

SEQ ID NO: 6675 - DNA, 20 bp, Artificial Sequence
  Description of Artificial Sequence: Synthetic oligonucleotide
  Target: ANGPTL4; (-) strand; PAM type: NRG; PAM sequence: TAG
cctggccaaaaactgacctt

SEQ ID NO: 6676 - DNA, 20 bp, Artificial Sequence
  Description of Artificial Sequence: Synthetic oligonucleotide
  Target: ANGPTL4; (-) strand; PAM type: NRG; PAM sequence: TGG
caggtgtgagtcactgtgcc

SEQ ID NO: 6677 - DNA, 20 bp, Artificial Sequence
  Description of Artificial Sequence: Synthetic oligonucleotide
  Target: ANGPTL4; (-) strand; PAM type: NRG; PAM sequence: GAG
agtgctgggatgacaggtgt

SEQ ID NO: 6678 - DNA, 20 bp, Artificial Sequence
  Description of Artificial Sequence: Synthetic oligonucleotide
  Target: ANGPTL4; (-) strand; PAM type: NRG; PAM sequence: AGG
tcccaaagtgctgggatgac

SEQ ID NO: 6679 - DNA, 20 bp, Artificial Sequence
  Description of Artificial Sequence: Synthetic oligonucleotide
  Target: ANGPTL4; (-) strand; PAM type: NRG; PAM sequence: CAG
ctcccaaagtgctgggatga

SEQ ID NO: 6680 - DNA, 20 bp, Artificial Sequence
  Description of Artificial Sequence: Synthetic oligonucleotide
  Target: ANGPTL4; (-) strand; PAM type: NRG; PAM sequence: GGG
cctcggcctcccaaagtgct

SEQ ID NO: 6681 - DNA, 20 bp, Artificial Sequence
  Description of Artificial Sequence: Synthetic oligonucleotide
  Target: ANGPTL4; (-) strand; PAM type: NRG; PAM sequence: TGG
gcctcggcctcccaaagtgc

SEQ ID NO: 6682 - DNA, 20 bp, Artificial Sequence
  Description of Artificial Sequence: Synthetic oligonucleotide
  Target: ANGPTL4; (-) strand; PAM type: NRG; PAM sequence: AAG
tcactcgcctcggcctccca

SEQ ID NO: 6683 - DNA, 20 bp, Artificial Sequence
  Description of Artificial Sequence: Synthetic oligonucleotide
  Target: ANGPTL4; (-) strand; PAM type: NRG; PAM sequence: CGG
ctcaagggattcactcgcct

SEQ ID NO: 6684 - DNA, 20 bp, Artificial Sequence
  Description of Artificial Sequence: Synthetic oligonucleotide
  Target: ANGPTL4; (-) strand; PAM type: NRG; PAM sequence: GGG
tcttgaactcctgagctcaa

SEQ ID NO: 6685 - DNA, 20 bp, Artificial Sequence
  Description of Artificial Sequence: Synthetic oligonucleotide
  Target: ANGPTL4; (-) strand; PAM type: NRG; PAM sequence: AGG
gtcttgaactcctgagctca

SEQ ID NO: 6686 - DNA, 20 bp, Artificial Sequence
  Description of Artificial Sequence: Synthetic oligonucleotide
  Target: ANGPTL4; (-) strand; PAM type: NRG; PAM sequence: AAG
ggtcttgaactcctgagctc

SEQ ID NO: 6687 - DNA, 20 bp, Artificial Sequence
  Description of Artificial Sequence: Synthetic oligonucleotide
  Target: ANGPTL4; (-) strand; PAM type: NRG; PAM sequence: GAG
caggctggtcttgaactcct

SEQ ID NO: 6688 - DNA, 20 bp, Artificial Sequence
  Description of Artificial Sequence: Synthetic oligonucleotide
  Target: ANGPTL4; (-) strand; PAM type: NRG; PAM sequence: TGG
ttttgccgtgttgcccaggc

SEQ ID NO: 6689 - DNA, 20 bp, Artificial Sequence
  Description of Artificial Sequence: Synthetic oligonucleotide
  Target: ANGPTL4; (-) strand; PAM type: NRG; PAM sequence: AGG
ggatttttgccgtgttgccc

SEQ ID NO: 6690 - DNA, 20 bp, Artificial Sequence
  Description of Artificial Sequence: Synthetic oligonucleotide
  Target: ANGPTL4; (-) strand; PAM type: NRG; PAM sequence: CAG
aggatttttgccgtgttgcc

SEQ ID NO: 6691 - DNA, 20 bp, Artificial Sequence
  Description of Artificial Sequence: Synthetic oligonucleotide
  Target: ANGPTL4; (-) strand; PAM type: NRG; PAM sequence: AGG
tctgtagattttgtagagac

SEQ ID NO: 6692 - DNA, 20 bp, Artificial Sequence
  Description of Artificial Sequence: Synthetic oligonucleotide
  Target: ANGPTL4; (-) strand; PAM type: NRG; PAM sequence: CAG
ttctgtagattttgtagaga

SEQ ID NO: 6693 - DNA, 20 bp, Artificial Sequence
  Description of Artificial Sequence: Synthetic oligonucleotide
  Target: ANGPTL4; (-) strand; PAM type: NRG; PAM sequence: GAG
taatttctgtagattttgta

SEQ ID NO: 6694 - DNA, 20 bp, Artificial Sequence
  Description of Artificial Sequence: Synthetic oligonucleotide
  Target: ANGPTL4; (-) strand; PAM type: NRG; PAM sequence: TAG
cctaatttctgtagattttg

SEQ ID NO: 6695 - DNA, 20 bp, Artificial Sequence
  Description of Artificial Sequence: Synthetic oligonucleotide
  Target: ANGPTL4; (-) strand; PAM type: NRG; PAM sequence: TAG
ccagacctgcctaatttctg

SEQ ID NO: 6696 - DNA, 20 bp, Artificial Sequence
  Description of Artificial Sequence: Synthetic oligonucleotide
  Target: ANGPTL4; (-) strand; PAM type: NRG; PAM sequence: CAG
ggactataggcatgtgccac

SEQ ID NO: 6697 - DNA, 20 bp, Artificial Sequence
  Description of Artificial Sequence: Synthetic oligonucleotide
  Target: ANGPTL4; (-) strand; PAM type: NRG; PAM sequence: AGG
tcccaagcagctgggactat

SEQ ID NO: 6698 - DNA, 20 bp, Artificial Sequence
  Description of Artificial Sequence: Synthetic oligonucleotide
  Target: ANGPTL4; (-) strand; PAM type: NRG; PAM sequence: TAG
ctcccaagcagctgggacta

SEQ ID NO: 6699 - DNA, 20 bp, Artificial Sequence
  Description of Artificial Sequence: Synthetic oligonucleotide
  Target: ANGPTL4; (-) strand; PAM type: NRG; PAM sequence: GGG
cctcagcctcccaagcagct

SEQ ID NO: 6700 - DNA, 20 bp, Artificial Sequence
  Description of Artificial Sequence: Synthetic oligonucleotide
  Target: ANGPTL4; (-) strand; PAM type: NRG; PAM sequence: TGG
acctcagcctcccaagcagc

SEQ ID NO: 6701 - DNA, 20 bp, Artificial Sequence
  Description of Artificial Sequence: Synthetic oligonucleotide
  Target: ANGPTL4; (-) strand; PAM type: NRG; PAM sequence: CAG
tcccacctcagcctcccaag

SEQ ID NO: 6702 - DNA, 20 bp, Artificial Sequence
  Description of Artificial Sequence: Synthetic oligonucleotide
  Target: ANGPTL4; (-) strand; PAM type: NRG; PAM sequence: AAG
tcctcccacctcagcctccc

SEQ ID NO: 6703 - DNA, 20 bp, Artificial Sequence
  Description of Artificial Sequence: Synthetic oligonucleotide
  Target: ANGPTL4; (-) strand; PAM type: NRG; PAM sequence: CAG
ctcaagtgatcctcccacct

SEQ ID NO: 6704 - DNA, 20 bp, Artificial Sequence
  Description of Artificial Sequence: Synthetic oligonucleotide
  Target: ANGPTL4; (-) strand; PAM type: NRG; PAM sequence: AAG
aacctcaaactcccaggctc

SEQ ID NO: 6705 - DNA, 20 bp, Artificial Sequence
  Description of Artificial Sequence: Synthetic oligonucleotide
  Target: ANGPTL4; (-) strand; PAM type: NRG; PAM sequence: AGG
caccgcaacctcaaactccc

SEQ ID NO: 6706 - DNA, 20 bp, Artificial Sequence
  Description of Artificial Sequence: Synthetic oligonucleotide
  Target: ANGPTL4; (-) strand; PAM type: NRG; PAM sequence: CAG
tcaccgcaacctcaaactcc

SEQ ID NO: 6707 - DNA, 20 bp, Artificial Sequence
  Description of Artificial Sequence: Synthetic oligonucleotide
  Target: ANGPTL4; (-) strand; PAM type: NRG; PAM sequence: CAG
ggagtgcagtgtcacaatca

SEQ ID NO: 6708 - DNA, 20 bp, Artificial Sequence
  Description of Artificial Sequence: Synthetic oligonucleotide
  Target: ANGPTL4; (-) strand; PAM type: NRG; PAM sequence: CAG
cactcacccaggctggagtg

SEQ ID NO: 6709 - DNA, 20 bp, Artificial Sequence
  Description of Artificial Sequence: Synthetic oligonucleotide
  Target: ANGPTL4; (-) strand; PAM type: NRG; PAM sequence: GAG
ggtctcactcacccaggctg

SEQ ID NO: 6710 - DNA, 20 bp, Artificial Sequence
  Description of Artificial Sequence: Synthetic oligonucleotide
  Target: ANGPTL4; (-) strand; PAM type: NRG; PAM sequence: TGG
tgggtctcactcacccaggc

SEQ ID NO: 6711 - DNA, 20 bp, Artificial Sequence
  Description of Artificial Sequence: Synthetic oligonucleotide
  Target: ANGPTL4; (-) strand; PAM type: NRG; PAM sequence: AGG
gagatgggtctcactcaccc

SEQ ID NO: 6712 - DNA, 20 bp, Artificial Sequence
  Description of Artificial Sequence: Synthetic oligonucleotide
  Target: ANGPTL4; (-) strand; PAM type: NRG; PAM sequence: CAG
tgagatgggtctcactcacc

SEQ ID NO: 6713 - DNA, 20 bp, Artificial Sequence
  Description of Artificial Sequence: Synthetic oligonucleotide
  Target: ANGPTL4; (-) strand; PAM type: NRG; PAM sequence: GGG
tttttttttttttctgagat

SEQ ID NO: 6714 - DNA, 20 bp, Artificial Sequence
  Description of Artificial Sequence: Synthetic oligonucleotide
  Target: ANGPTL4; (-) strand; PAM type: NRG; PAM sequence: TGG
ttttttttttttttctgaga

SEQ ID NO: 6715 - DNA, 20 bp, Artificial Sequence
  Description of Artificial Sequence: Synthetic oligonucleotide
  Target: ANGPTL4; (-) strand; PAM type: NRG; PAM sequence: GAG
gtatttttttttttttttct

SEQ ID NO: 6716 - DNA, 20 bp, Artificial Sequence
  Description of Artificial Sequence: Synthetic oligonucleotide
  Target: ANGPTL4; (-) strand; PAM type: NRG; PAM sequence: CAG
caggcatgagccaccacgcc

SEQ ID NO: 6717 - DNA, 20 bp, Artificial Sequence
  Description of Artificial Sequence: Synthetic oligonucleotide
  Target: ANGPTL4; (-) strand; PAM type: NRG; PAM sequence: GAG
agtgctaggattacaggcat

SEQ ID NO: 6718 - DNA, 20 bp, Artificial Sequence
  Description of Artificial Sequence: Synthetic oligonucleotide
  Target: ANGPTL4; (-) strand; PAM type: NRG; PAM sequence: AGG
tcccaaagtgctaggattac

SEQ ID NO: 6719 - DNA, 20 bp, Artificial Sequence
  Description of Artificial Sequence: Synthetic oligonucleotide
  Target: ANGPTL4; (-) strand; PAM type: NRG; PAM sequence: CAG
ctcccaaagtgctaggatta

SEQ ID NO: 6720 - DNA, 20 bp, Artificial Sequence
  Description of Artificial Sequence: Synthetic oligonucleotide
  Target: ANGPTL4; (-) strand; PAM type: NRG; PAM sequence: AGG
cctcagcctcccaaagtgct

SEQ ID NO: 6721 - DNA, 20 bp, Artificial Sequence
  Description of Artificial Sequence: Synthetic oligonucleotide
  Target: ANGPTL4; (-) strand; PAM type: NRG; PAM sequence: TAG
acctcagcctcccaaagtgc

SEQ ID NO: 6722 - DNA, 20 bp, Artificial Sequence
  Description of Artificial Sequence: Synthetic oligonucleotide
  Target: ANGPTL4; (-) strand; PAM type: NRG; PAM sequence: AAG
tccaccacctcagcctccca

SEQ ID NO: 6723 - DNA, 20 bp, Artificial Sequence
  Description of Artificial Sequence: Synthetic oligonucleotide
  Target: ANGPTL4; (-) strand; PAM type: NRG; PAM sequence: CAG
gcttaggctatccaccacct

SEQ ID NO: 6724 - DNA, 20 bp, Artificial Sequence
  Description of Artificial Sequence: Synthetic oligonucleotide
  Target: ANGPTL4; (-) strand; PAM type: NRG; PAM sequence: AGG
ggtctcaaactcctaagctt

SEQ ID NO: 6725 - DNA, 20 bp, Artificial Sequence
  Description of Artificial Sequence: Synthetic oligonucleotide
  Target: ANGPTL4; (-) strand; PAM type: NRG; PAM sequence: TAG
tggtctcaaactcctaagct

SEQ ID NO: 6726 - DNA, 20 bp, Artificial Sequence
  Description of Artificial Sequence: Synthetic oligonucleotide
  Target: ANGPTL4; (-) strand; PAM type: NRG; PAM sequence: AAG
caggctggtctcaaactcct

SEQ ID NO: 6727 - DNA, 20 bp, Artificial Sequence
  Description of Artificial Sequence: Synthetic oligonucleotide
  Target: ANGPTL4; (-) strand; PAM type: NRG; PAM sequence: TGG
tttcgccatgttgcccaggc

SEQ ID NO: 6728 - DNA, 20 bp, Artificial Sequence
  Description of Artificial Sequence: Synthetic oligonucleotide
  Target: ANGPTL4; (-) strand; PAM type: NRG; PAM sequence: AGG
ggggtttcgccatgttgccc

SEQ ID NO: 6729 - DNA, 20 bp, Artificial Sequence
  Description of Artificial Sequence: Synthetic oligonucleotide
  Target: ANGPTL4; (-) strand; PAM type: NRG; PAM sequence: CAG
tggggtttcgccatgttgcc

SEQ ID NO: 6730 - DNA, 20 bp, Artificial Sequence
  Description of Artificial Sequence: Synthetic oligonucleotide
  Target: ANGPTL4; (-) strand; PAM type: NRG; PAM sequence: GGG
gtattctagtagagggggtg

SEQ ID NO: 6731 - DNA, 20 bp, Artificial Sequence
  Description of Artificial Sequence: Synthetic oligonucleotide
  Target: ANGPTL4; (-) strand; PAM type: NRG; PAM sequence: GGG
tgtattctagtagagggggt

SEQ ID NO: 6732 - DNA, 20 bp, Artificial Sequence
  Description of Artificial Sequence: Synthetic oligonucleotide
  Target: ANGPTL4; (-) strand; PAM type: NRG; PAM sequence: TGG
ttgtattctagtagaggggg

SEQ ID NO: 6733 - DNA, 20 bp, Artificial Sequence
  Description of Artificial Sequence: Synthetic oligonucleotide
  Target: ANGPTL4; (-) strand; PAM type: NRG; PAM sequence: GGG
tttttgtattctagtagagg

SEQ ID NO: 6734 - DNA, 20 bp, Artificial Sequence
  Description of Artificial Sequence: Synthetic oligonucleotide
  Target: ANGPTL4; (-) strand; PAM type: NRG; PAM sequence: GGG
ttttttgtattctagtagag

SEQ ID NO: 6735 - DNA, 20 bp, Artificial Sequence
  Description of Artificial Sequence: Synthetic oligonucleotide
  Target: ANGPTL4; (-) strand; PAM type: NRG; PAM sequence: GGG
attttttgtattctagtaga

SEQ ID NO: 6736 - DNA, 20 bp, Artificial Sequence
  Description of Artificial Sequence: Synthetic oligonucleotide
  Target: ANGPTL4; (-) strand; PAM type: NRG; PAM sequence: AGG
aattttttgtattctagtag

SEQ ID NO: 6737 - DNA, 20 bp, Artificial Sequence
  Description of Artificial Sequence: Synthetic oligonucleotide
  Target: ANGPTL4; (-) strand; PAM type: NRG; PAM sequence: GAG
taattttttgtattctagta

SEQ ID NO: 6738 - DNA, 20 bp, Artificial Sequence
  Description of Artificial Sequence: Synthetic oligonucleotide
  Target: ANGPTL4; (-) strand; PAM type: NRG; PAM sequence: TAG
gctaattttttgtattctag

SEQ ID NO: 6739 - DNA, 20 bp, Artificial Sequence
  Description of Artificial Sequence: Synthetic oligonucleotide
  Target: ANGPTL4; (-) strand; PAM type: NRG; PAM sequence: TAG
cccgctaattttttgtattc

SEQ ID NO: 6740 - DNA, 20 bp, Artificial Sequence
  Description of Artificial Sequence: Synthetic oligonucleotide
  Target: ANGPTL4; (-) strand; PAM type: NRG; PAM sequence: AGG
tcctgagtagctgggactac

SEQ ID NO: 6741 - DNA, 20 bp, Artificial Sequence
  Description of Artificial Sequence: Synthetic oligonucleotide
  Target: ANGPTL4; (-) strand; PAM type: NRG; PAM sequence: CAG
ctcctgagtagctgggacta

SEQ ID NO: 6742 - DNA, 20 bp, Artificial Sequence
  Description of Artificial Sequence: Synthetic oligonucleotide
  Target: ANGPTL4; (-) strand; PAM type: NRG; PAM sequence: GGG
cctcagcctcctgagtagct

SEQ ID NO: 6743 - DNA, 20 bp, Artificial Sequence
  Description of Artificial Sequence: Synthetic oligonucleotide
  Target: ANGPTL4; (-) strand; PAM type: NRG; PAM sequence: TGG
gcctcagcctcctgagtagc

SEQ ID NO: 6744 - DNA, 20 bp, Artificial Sequence
  Description of Artificial Sequence: Synthetic oligonucleotide
  Target: ANGPTL4; (-) strand; PAM type: NRG; PAM sequence: TAG
tcctgcctcagcctcctgag

SEQ ID NO: 6745 - DNA, 20 bp, Artificial Sequence
  Description of Artificial Sequence: Synthetic oligonucleotide
  Target: ANGPTL4; (-) strand; PAM type: NRG; PAM sequence: GAG
ttctcctgcctcagcctcct

SEQ ID NO: 6746 - DNA, 20 bp, Artificial Sequence
  Description of Artificial Sequence: Synthetic oligonucleotide
  Target: ANGPTL4; (-) strand; PAM type: NRG; PAM sequence: CAG
ttcccgccattctcctgcct

SEQ ID NO: 6747 - DNA, 20 bp, Artificial Sequence
  Description of Artificial Sequence: Synthetic oligonucleotide
  Target: ANGPTL4; (-) strand; PAM type: NRG; PAM sequence: AGG
cactgcaagctccacctccc

SEQ ID NO: 6748 - DNA, 20 bp, Artificial Sequence
  Description of Artificial Sequence: Synthetic oligonucleotide
  Target: ANGPTL4; (-) strand; PAM type: NRG; PAM sequence: CAG
tcactgcaagctccacctcc

SEQ ID NO: 6749 - DNA, 20 bp, Artificial Sequence
  Description of Artificial Sequence: Synthetic oligonucleotide
  Target: ANGPTL4; (-) strand; PAM type: NRG; PAM sequence: AAG
gcctcatctcggctcactgc

SEQ ID NO: 6750 - DNA, 20 bp, Artificial Sequence
  Description of Artificial Sequence: Synthetic oligonucleotide
  Target: ANGPTL4; (-) strand; PAM type: NRG; PAM sequence: CGG
ggagtgcagtggcctcatct

SEQ ID NO: 6751 - DNA, 20 bp, Artificial Sequence
  Description of Artificial Sequence: Synthetic oligonucleotide
  Target: ANGPTL4; (-) strand; PAM type: NRG; PAM sequence: TGG
ttgcccaggctggagtgcag

SEQ ID NO: 6752 - DNA, 20 bp, Artificial Sequence
  Description of Artificial Sequence: Synthetic oligonucleotide
  Target: ANGPTL4; (-) strand; PAM type: NRG; PAM sequence: CAG
ctgttgcccaggctggagtg

SEQ ID NO: 6753 - DNA, 20 bp, Artificial Sequence
  Description of Artificial Sequence: Synthetic oligonucleotide
  Target: ANGPTL4; (-) strand; PAM type: NRG; PAM sequence: GAG
ttgctctgttgcccaggctg

SEQ ID NO: 6754 - DNA, 20 bp, Artificial Sequence
  Description of Artificial Sequence: Synthetic oligonucleotide
  Target: ANGPTL4; (-) strand; PAM type: NRG; PAM sequence: TGG
tcttgctctgttgcccaggc

SEQ ID NO: 6755 - DNA, 20 bp, Artificial Sequence
  Description of Artificial Sequence: Synthetic oligonucleotide
  Target: ANGPTL4; (-) strand; PAM type: NRG; PAM sequence: AGG
agagtcttgctctgttgccc

SEQ ID NO: 6756 - DNA, 20 bp, Artificial Sequence
  Description of Artificial Sequence: Synthetic oligonucleotide
  Target: ANGPTL4; (-) strand; PAM type: NRG; PAM sequence: CAG
cagagtcttgctctgttgcc

SEQ ID NO: 6757 - DNA, 20 bp, Artificial Sequence
  Description of Artificial Sequence: Synthetic oligonucleotide
  Target: ANGPTL4; (-) strand; PAM type: NRG; PAM sequence: GAG
ttttttttttttttgagaca

SEQ ID NO: 6758 - DNA, 20 bp, Artificial Sequence
  Description of Artificial Sequence: Synthetic oligonucleotide
  Target: ANGPTL4; (-) strand; PAM type: NRG; PAM sequence: CAG
ttttttttttttttttgaga

SEQ ID NO: 6759 - DNA, 20 bp, Artificial Sequence
  Description of Artificial Sequence: Synthetic oligonucleotide
  Target: ANGPTL4; (-) strand; PAM type: NRG; PAM sequence: GAG
tttttttttttttttttttt

SEQ ID NO: 6760 - DNA, 20 bp, Artificial Sequence
  Description of Artificial Sequence: Synthetic oligonucleotide
  Target: ANGPTL4; (-) strand; PAM type: NRG; PAM sequence: TAG
gtgagccactgtgcctggcc

SEQ ID NO: 6761 - DNA, 20 bp, Artificial Sequence
  Description of Artificial Sequence: Synthetic oligonucleotide
  Target: ANGPTL4; (-) strand; PAM type: NRG; PAM sequence: TGG
caggtgtgagccactgtgcc

SEQ ID NO: 6762 - DNA, 20 bp, Artificial Sequence
  Description of Artificial Sequence: Synthetic oligonucleotide
  Target: ANGPTL4; (-) strand; PAM type: NRG; PAM sequence: GAG
cgtgctgggattacaggtgt

SEQ ID NO: 6763 - DNA, 20 bp, Artificial Sequence
  Description of Artificial Sequence: Synthetic oligonucleotide
  Target: ANGPTL4; (-) strand; PAM type: NRG; PAM sequence: AGG
tcccaacgtgctgggattac

SEQ ID NO: 6764 - DNA, 20 bp, Artificial Sequence
  Description of Artificial Sequence: Synthetic oligonucleotide
  Target: ANGPTL4; (-) strand; PAM type: NRG; PAM sequence: CAG
ctcccaacgtgctgggatta

SEQ ID NO: 6765 - DNA, 20 bp, Artificial Sequence
  Description of Artificial Sequence: Synthetic oligonucleotide
  Target: ANGPTL4; (-) strand; PAM type: NRG; PAM sequence: GGG
tctcggcctcccaacgtgct

SEQ ID NO: 6766 - DNA, 20 bp, Artificial Sequence
  Description of Artificial Sequence: Synthetic oligonucleotide
  Target: ANGPTL4; (-) strand; PAM type: NRG; PAM sequence: TGG
gtctcggcctcccaacgtgc

SEQ ID NO: 6767 - DNA, 20 bp, Artificial Sequence
  Description of Artificial Sequence: Synthetic oligonucleotide
  Target: ANGPTL4; (-) strand; PAM type: NRG; PAM sequence: CGG
ctcaggtgatccacctgtct

SEQ ID NO: 6768 - DNA, 20 bp, Artificial Sequence
  Description of Artificial Sequence: Synthetic oligonucleotide
  Target: ANGPTL4; (-) strand; PAM type: NRG; PAM sequence: AGG
ggtctcaaattcctgacctc

SEQ ID NO: 6769 - DNA, 20 bp, Artificial Sequence
  Description of Artificial Sequence: Synthetic oligonucleotide
  Target: ANGPTL4; (-) strand; PAM type: NRG; PAM sequence: CAG
tggtctcaaattcctgacct

SEQ ID NO: 6770 - DNA, 20 bp, Artificial Sequence
  Description of Artificial Sequence: Synthetic oligonucleotide
  Target: ANGPTL4; (-) strand; PAM type: NRG; PAM sequence: TGG
tttcactatgttggctctgc

SEQ ID NO: 6771 - DNA, 20 bp, Artificial Sequence
  Description of Artificial Sequence: Synthetic oligonucleotide
  Target: ANGPTL4; (-) strand; PAM type: NRG; PAM sequence: TGG
caaacggggtttcactatgt

SEQ ID NO: 6772 - DNA, 20 bp, Artificial Sequence
  Description of Artificial Sequence: Synthetic oligonucleotide
  Target: ANGPTL4; (-) strand; PAM type: NRG; PAM sequence: GGG
ttgtatttttagtgcaaacg

SEQ ID NO: 6773 - DNA, 20 bp, Artificial Sequence
  Description of Artificial Sequence: Synthetic oligonucleotide
  Target: ANGPTL4; (-) strand; PAM type: NRG; PAM sequence: GGG
tttgtatttttagtgcaaac

SEQ ID NO: 6774 - DNA, 20 bp, Artificial Sequence
  Description of Artificial Sequence: Synthetic oligonucleotide
  Target: ANGPTL4; (-) strand; PAM type: NRG; PAM sequence: CGG
ttttgtatttttagtgcaaa

SEQ ID NO: 6775 - DNA, 20 bp, Artificial Sequence
  Description of Artificial Sequence: Synthetic oligonucleotide
  Target: ANGPTL4; (-) strand; PAM type: NRG; PAM sequence: TAG
tgactaattttttgtatttt

SEQ ID NO: 6776 - DNA, 20 bp, Artificial Sequence
  Description of Artificial Sequence: Synthetic oligonucleotide
  Target: ANGPTL4; (-) strand; PAM type: NRG; PAM sequence: AGG
tcccgagtagcggggattac

SEQ ID NO: 6777 - DNA, 20 bp, Artificial Sequence
  Description of Artificial Sequence: Synthetic oligonucleotide
  Target: ANGPTL4; (-) strand; PAM type: NRG; PAM sequence: CAG
ctcccgagtagcggggatta

SEQ ID NO: 6778 - DNA, 20 bp, Artificial Sequence
  Description of Artificial Sequence: Synthetic oligonucleotide
  Target: ANGPTL4; (-) strand; PAM type: NRG; PAM sequence: GGG
cctcagcctcccgagtagcg

SEQ ID NO: 6779 - DNA, 20 bp, Artificial Sequence
  Description of Artificial Sequence: Synthetic oligonucleotide
  Target: ANGPTL4; (-) strand; PAM type: NRG; PAM sequence: GGG
gcctcagcctcccgagtagc

SEQ ID NO: 6780 - DNA, 20 bp, Artificial Sequence
  Description of Artificial Sequence: Synthetic oligonucleotide
  Target: ANGPTL4; (-) strand; PAM type: NRG; PAM sequence: CGG
agcctcagcctcccgagtag

SEQ ID NO: 6781 - DNA, 20 bp, Artificial Sequence
  Description of Artificial Sequence: Synthetic oligonucleotide
  Target: ANGPTL4; (-) strand; PAM type: NRG; PAM sequence: TAG
tccagcctcagcctcccgag

SEQ ID NO: 6782 - DNA, 20 bp, Artificial Sequence
  Description of Artificial Sequence: Synthetic oligonucleotide
  Target: ANGPTL4; (-) strand; PAM type: NRG; PAM sequence: GAG
ttctccagcctcagcctccc

SEQ ID NO: 6783 - DNA, 20 bp, Artificial Sequence
  Description of Artificial Sequence: Synthetic oligonucleotide
  Target: ANGPTL4; (-) strand; PAM type: NRG; PAM sequence: CAG
ttcaagcgattctccagcct

SEQ ID NO: 6784 - DNA, 20 bp, Artificial Sequence
  Description of Artificial Sequence: Synthetic oligonucleotide
  Target: ANGPTL4; (-) strand; PAM type: NRG; PAM sequence: CAG
cccaggttcaagcgattctc

SEQ ID NO: 6785 - DNA, 20 bp, Artificial Sequence
  Description of Artificial Sequence: Synthetic oligonucleotide
  Target: ANGPTL4; (-) strand; PAM type: NRG; PAM sequence: AAG
aacctctgcctcccaggttc

SEQ ID NO: 6786 - DNA, 20 bp, Artificial Sequence
  Description of Artificial Sequence: Synthetic oligonucleotide
  Target: ANGPTL4; (-) strand; PAM type: NRG; PAM sequence: AGG
cactgcaacctctgcctccc

SEQ ID NO: 6787 - DNA, 20 bp, Artificial Sequence
  Description of Artificial Sequence: Synthetic oligonucleotide
  Target: ANGPTL4; (-) strand; PAM type: NRG; PAM sequence: CAG
tcactgcaacctctgcctcc

SEQ ID NO: 6788 - DNA, 20 bp, Artificial Sequence
  Description of Artificial Sequence: Synthetic oligonucleotide
  Target: ANGPTL4; (-) strand; PAM type: NRG; PAM sequence: CGG
tcgcccaggctggagtgcaa

SEQ ID NO: 6789 - DNA, 20 bp, Artificial Sequence
  Description of Artificial Sequence: Synthetic oligonucleotide
  Target: ANGPTL4; (-) strand; PAM type: NRG; PAM sequence: GAG
ccctcttgtcgcccaggctg

SEQ ID NO: 6790 - DNA, 20 bp, Artificial Sequence
  Description of Artificial Sequence: Synthetic oligonucleotide
  Target: ANGPTL4; (-) strand; PAM type: NRG; PAM sequence: TGG
ttccctcttgtcgcccaggc

SEQ ID NO: 6791 - DNA, 20 bp, Artificial Sequence
  Description of Artificial Sequence: Synthetic oligonucleotide
  Target: ANGPTL4; (-) strand; PAM type: NRG; PAM sequence: AGG
gagtttccctcttgtcgccc

SEQ ID NO: 6792 - DNA, 20 bp, Artificial Sequence
  Description of Artificial Sequence: Synthetic oligonucleotide
  Target: ANGPTL4; (-) strand; PAM type: NRG; PAM sequence: CAG
ggagtttccctcttgtcgcc

SEQ ID NO: 6793 - DNA, 20 bp, Artificial Sequence
  Description of Artificial Sequence: Synthetic oligonucleotide
  Target: ANGPTL4; (-) strand; PAM type: NRG; PAM sequence: GAG
ttatttatttttttgagatg

SEQ ID NO: 6794 - DNA, 20 bp, Artificial Sequence
  Description of Artificial Sequence: Synthetic oligonucleotide
  Target: ANGPTL4; (-) strand; PAM type: NRG; PAM sequence: TGG
atttatttatttttttgaga

SEQ ID NO: 6795 - DNA, 20 bp, Artificial Sequence
  Description of Artificial Sequence: Synthetic oligonucleotide
  Target: ANGPTL4; (-) strand; PAM type: NRG; PAM sequence: GAG
ttttatttatttattttttt

SEQ ID NO: 6796 - DNA, 20 bp, Artificial Sequence
  Description of Artificial Sequence: Synthetic oligonucleotide
  Target: ANGPTL4; (-) strand; PAM type: NRG; PAM sequence: CAG
caggcatgagccaccgcgcc

SEQ ID NO: 6797 - DNA, 20 bp, Artificial Sequence
  Description of Artificial Sequence: Synthetic oligonucleotide
  Target: ANGPTL4; (-) strand; PAM type: NRG; PAM sequence: GAG
agtgctgggattacaggcat

SEQ ID NO: 6798 - DNA, 20 bp, Artificial Sequence
  Description of Artificial Sequence: Synthetic oligonucleotide
  Target: ANGPTL4; (-) strand; PAM type: NRG; PAM sequence: AGG
tcccaaagtgctgggattac

SEQ ID NO: 6799 - DNA, 20 bp, Artificial Sequence
  Description of Artificial Sequence: Synthetic oligonucleotide
  Target: ANGPTL4; (-) strand; PAM type: NRG; PAM sequence: CAG
ctcccaaagtgctgggatta

SEQ ID NO: 6800 - DNA, 20 bp, Artificial Sequence
  Description of Artificial Sequence: Synthetic oligonucleotide
  Target: ANGPTL4; (-) strand; PAM type: NRG; PAM sequence: GGG
cttcggcctcccaaagtgct

SEQ ID NO: 6801 - DNA, 20 bp, Artificial Sequence
  Description of Artificial Sequence: Synthetic oligonucleotide
  Target: ANGPTL4; (-) strand; PAM type: NRG; PAM sequence: TGG
gcttcggcctcccaaagtgc

SEQ ID NO: 6802 - DNA, 20 bp, Artificial Sequence
  Description of Artificial Sequence: Synthetic oligonucleotide
  Target: ANGPTL4; (-) strand; PAM type: NRG; PAM sequence: AAG
ccgcccgcttcggcctccca

SEQ ID NO: 6803 - DNA, 20 bp, Artificial Sequence
  Description of Artificial Sequence: Synthetic oligonucleotide
  Target: ANGPTL4; (-) strand; PAM type: NRG; PAM sequence: CGG
acctcgtgatccgcccgctt

SEQ ID NO: 6804 - DNA, 20 bp, Artificial Sequence
  Description of Artificial Sequence: Synthetic oligonucleotide
  Target: ANGPTL4; (-) strand; PAM type: NRG; PAM sequence: TGG
tttcaccatgttagccagga

SEQ ID NO: 6805 - DNA, 20 bp, Artificial Sequence
  Description of Artificial Sequence: Synthetic oligonucleotide
  Target: ANGPTL4; (-) strand; PAM type: NRG; PAM sequence: AGG
agggtttcaccatgttagcc

SEQ ID NO: 6806 - DNA, 20 bp, Artificial Sequence
  Description of Artificial Sequence: Synthetic oligonucleotide
  Target: ANGPTL4; (-) strand; PAM type: NRG; PAM sequence: CAG
cagggtttcaccatgttagc

SEQ ID NO: 6807 - DNA, 20 bp, Artificial Sequence
  Description of Artificial Sequence: Synthetic oligonucleotide
  Target: ANGPTL4; (-) strand; PAM type: NRG; PAM sequence: TAG
gagacagggtttcaccatgt

SEQ ID NO: 6808 - DNA, 20 bp, Artificial Sequence
  Description of Artificial Sequence: Synthetic oligonucleotide
  Target: ANGPTL4; (-) strand; PAM type: NRG; PAM sequence: GGG
ttgtatttttaatagagaca

SEQ ID NO: 6809 - DNA, 20 bp, Artificial Sequence
  Description of Artificial Sequence: Synthetic oligonucleotide
  Target: ANGPTL4; (-) strand; PAM type: NRG; PAM sequence: AGG
tttgtatttttaatagagac

SEQ ID NO: 6810 - DNA, 20 bp, Artificial Sequence
  Description of Artificial Sequence: Synthetic oligonucleotide
  Target: ANGPTL4; (-) strand; PAM type: NRG; PAM sequence: CAG
ttttgtatttttaatagaga

SEQ ID NO: 6811 - DNA, 20 bp, Artificial Sequence
  Description of Artificial Sequence: Synthetic oligonucleotide
  Target: ANGPTL4; (-) strand; PAM type: NRG; PAM sequence: GAG
aattttttgtatttttaata

SEQ ID NO: 6812 - DNA, 20 bp, Artificial Sequence
  Description of Artificial Sequence: Synthetic oligonucleotide
  Target: ANGPTL4; (-) strand; PAM type: NRG; PAM sequence: TAG
ctaattttttgtatttttaa

SEQ ID NO: 6813 - DNA, 20 bp, Artificial Sequence
  Description of Artificial Sequence: Synthetic oligonucleotide
  Target: ANGPTL4; (-) strand; PAM type: NRG; PAM sequence: CAG
caggcacctgccaccatgcc

SEQ ID NO: 6814 - DNA, 20 bp, Artificial Sequence
  Description of Artificial Sequence: Synthetic oligonucleotide
  Target: ANGPTL4; (-) strand; PAM type: NRG; PAM sequence: AGG
tcccgagtagctgggactac

SEQ ID NO: 6815 - DNA, 20 bp, Artificial Sequence
  Description of Artificial Sequence: Synthetic oligonucleotide
  Target: ANGPTL4; (-) strand; PAM type: NRG; PAM sequence: CAG
ctcccgagtagctgggacta

SEQ ID NO: 6816 - DNA, 20 bp, Artificial Sequence
  Description of Artificial Sequence: Synthetic oligonucleotide
  Target: ANGPTL4; (-) strand; PAM type: NRG; PAM sequence: GGG
cctcagcctcccgagtagct

SEQ ID NO: 6817 - DNA, 20 bp, Artificial Sequence
  Description of Artificial Sequence: Synthetic oligonucleotide
  Target: ANGPTL4; (-) strand; PAM type: NRG; PAM sequence: TGG
gcctcagcctcccgagtagc

SEQ ID NO: 6818 - DNA, 20 bp, Artificial Sequence
  Description of Artificial Sequence: Synthetic oligonucleotide
  Target: ANGPTL4; (-) strand; PAM type: NRG; PAM sequence: TAG
tcctgcctcagcctcccgag

SEQ ID NO: 6819 - DNA, 20 bp, Artificial Sequence
  Description of Artificial Sequence: Synthetic oligonucleotide
  Target: ANGPTL4; (-) strand; PAM type: NRG; PAM sequence: GAG
ttctcctgcctcagcctccc

SEQ ID NO: 6820 - DNA, 20 bp, Artificial Sequence
  Description of Artificial Sequence: Synthetic oligonucleotide
  Target: ANGPTL4; (-) strand; PAM type: NRG; PAM sequence: CAG
ttagtgccattctcctgcct

SEQ ID NO: 6821 - DNA, 20 bp, Artificial Sequence
  Description of Artificial Sequence: Synthetic oligonucleotide
  Target: ANGPTL4; (-) strand; PAM type: NRG; PAM sequence: TAG
gcaagctccacctcccgggt

SEQ ID NO: 6822 - DNA, 20 bp, Artificial Sequence
  Description of Artificial Sequence: Synthetic oligonucleotide
  Target: ANGPTL4; (-) strand; PAM type: NRG; PAM sequence: GGG
cactgcaagctccacctccc

SEQ ID NO: 6823 - DNA, 20 bp, Artificial Sequence
  Description of Artificial Sequence: Synthetic oligonucleotide
  Target: ANGPTL4; (-) strand; PAM type: NRG; PAM sequence: CGG
tcactgcaagctccacctcc

SEQ ID NO: 6824 - DNA, 20 bp, Artificial Sequence
  Description of Artificial Sequence: Synthetic oligonucleotide
  Target: ANGPTL4; (-) strand; PAM type: NRG; PAM sequence: AAG
gcgcaatctcggctcactgc

SEQ ID NO: 6825 - DNA, 20 bp, Artificial Sequence
  Description of Artificial Sequence: Synthetic oligonucleotide
  Target: ANGPTL4; (-) strand; PAM type: NRG; PAM sequence: CGG
ggagtgcagtggcgcaatct

SEQ ID NO: 6826 - DNA, 20 bp, Artificial Sequence
  Description of Artificial Sequence: Synthetic oligonucleotide
  Target: ANGPTL4; (-) strand; PAM type: NRG; PAM sequence: TGG
tcgcccacgctggagtgcag

SEQ ID NO: 6827 - DNA, 20 bp, Artificial Sequence
  Description of Artificial Sequence: Synthetic oligonucleotide
  Target: ANGPTL4; (-) strand; PAM type: NRG; PAM sequence: CAG
ctgtcgcccacgctggagtg

SEQ ID NO: 6828 - DNA, 20 bp, Artificial Sequence
  Description of Artificial Sequence: Synthetic oligonucleotide
  Target: ANGPTL4; (-) strand; PAM type: NRG; PAM sequence: GAG
tcgctctgtcgcccacgctg

SEQ ID NO: 6829 - DNA, 20 bp, Artificial Sequence
  Description of Artificial Sequence: Synthetic oligonucleotide
  Target: ANGPTL4; (-) strand; PAM type: NRG; PAM sequence: TGG
tctcgctctgtcgcccacgc

SEQ ID NO: 6830 - DNA, 20 bp, Artificial Sequence
  Description of Artificial Sequence: Synthetic oligonucleotide
  Target: ANGPTL4; (-) strand; PAM type: NRG; PAM sequence: GAG
tttatttattttttgagaag

SEQ ID NO: 6831 - DNA, 20 bp, Artificial Sequence
  Description of Artificial Sequence: Synthetic oligonucleotide
  Target: ANGPTL4; (-) strand; PAM type: NRG; PAM sequence: AGG
tatttatttattttttgaga

SEQ ID NO: 6832 - DNA, 20 bp, Artificial Sequence
  Description of Artificial Sequence: Synthetic oligonucleotide
  Target: ANGPTL4; (-) strand; PAM type: NRG; PAM sequence: AAG
ttatttatttattttttgag

SEQ ID NO: 6833 - DNA, 20 bp, Artificial Sequence
  Description of Artificial Sequence: Synthetic oligonucleotide
  Target: ANGPTL4; (-) strand; PAM type: NRG; PAM sequence: GAG
tatttatttatttatttttt

SEQ ID NO: 6834 - DNA, 20 bp, Artificial Sequence
  Description of Artificial Sequence: Synthetic oligonucleotide
  Target: ANGPTL4; (-) strand; PAM type: NRG; PAM sequence: TAG
ctgtcgcctcaagttggctc

SEQ ID NO: 6835 - DNA, 20 bp, Artificial Sequence
  Description of Artificial Sequence: Synthetic oligonucleotide
  Target: ANGPTL4; (-) strand; PAM type: NRG; PAM sequence: TGG
tctatactgtcgcctcaagt

SEQ ID NO: 6836 - DNA, 20 bp, Artificial Sequence
  Description of Artificial Sequence: Synthetic oligonucleotide
  Target: ANGPTL4; (-) strand; PAM type: NRG; PAM sequence: AAG
agagtctatactgtcgcctc

SEQ ID NO: 6837 - DNA, 20 bp, Artificial Sequence
  Description of Artificial Sequence: Synthetic oligonucleotide
  Target: ANGPTL4; (-) strand; PAM type: NRG; PAM sequence: GAG
gctgtgagcaatctacaaaa

SEQ ID NO: 6838 - DNA, 20 bp, Artificial Sequence
  Description of Artificial Sequence: Synthetic oligonucleotide
  Target: ANGPTL4; (-) strand; PAM type: NRG; PAM sequence: AAG
ctgctgtgagcaatctacaa

SEQ ID NO: 6839 - DNA, 20 bp, Artificial Sequence
  Description of Artificial Sequence: Synthetic oligonucleotide
  Target: ANGPTL4; (-) strand; PAM type: NRG; PAM sequence: GAG
gtcttaagggcacctgctgt

SEQ ID NO: 6840 - DNA, 20 bp, Artificial Sequence
  Description of Artificial Sequence: Synthetic oligonucleotide
  Target: ANGPTL4; (-) strand; PAM type: NRG; PAM sequence: GGG
tcacagacccagggtcttaa

SEQ ID NO: 6841 - DNA, 20 bp, Artificial Sequence
  Description of Artificial Sequence: Synthetic oligonucleotide
  Target: ANGPTL4; (-) strand; PAM type: NRG; PAM sequence: AGG
atcacagacccagggtctta

SEQ ID NO: 6842 - DNA, 20 bp, Artificial Sequence
  Description of Artificial Sequence: Synthetic oligonucleotide
  Target: ANGPTL4; (-) strand; PAM type: NRG; PAM sequence: AAG
catcacagacccagggtctt

SEQ ID NO: 6843 - DNA, 20 bp, Artificial Sequence
  Description of Artificial Sequence: Synthetic oligonucleotide
  Target: ANGPTL4; (-) strand; PAM type: NRG; PAM sequence: GGG
caaaacacatcacagaccca

SEQ ID NO: 6844 - DNA, 20 bp, Artificial Sequence
  Description of Artificial Sequence: Synthetic oligonucleotide
  Target: ANGPTL4; (-) strand; PAM type: NRG; PAM sequence: AGG
acaaaacacatcacagaccc

SEQ ID NO: 6845 - DNA, 20 bp, Artificial Sequence
  Description of Artificial Sequence: Synthetic oligonucleotide
  Target: ANGPTL4; (-) strand; PAM type: NRG; PAM sequence: CAG
cacaaaacacatcacagacc

SEQ ID NO: 6846 - DNA, 20 bp, Artificial Sequence
  Description of Artificial Sequence: Synthetic oligonucleotide
  Target: ANGPTL4; (-) strand; PAM type: NRG; PAM sequence: CAG
ccacagcacaaaacacatca

SEQ ID NO: 6847 - DNA, 20 bp, Artificial Sequence
  Description of Artificial Sequence: Synthetic oligonucleotide
  Target: ANGPTL4; (-) strand; PAM type: NRG; PAM sequence: CAG
ctttggagccatgtgtccca

SEQ ID NO: 6848 - DNA, 20 bp, Artificial Sequence
  Description of Artificial Sequence: Synthetic oligonucleotide
  Target: ANGPTL4; (-) strand; PAM type: NRG; PAM sequence: GAG
gattttcagggacttctttg

SEQ ID NO: 6849 - DNA, 20 bp, Artificial Sequence
  Description of Artificial Sequence: Synthetic oligonucleotide
  Target: ANGPTL4; (-) strand; PAM type: NRG; PAM sequence: TGG
ctgattttcagggacttctt

SEQ ID NO: 6850 - DNA, 20 bp, Artificial Sequence
  Description of Artificial Sequence: Synthetic oligonucleotide
  Target: ANGPTL4; (-) strand; PAM type: NRG; PAM sequence: GGG
ttttcatgatctgattttca

SEQ ID NO: 6851 - DNA, 20 bp, Artificial Sequence
  Description of Artificial Sequence: Synthetic oligonucleotide
  Target: ANGPTL4; (-) strand; PAM type: NRG; PAM sequence: AGG
cttttcatgatctgattttc

SEQ ID NO: 6852 - DNA, 20 bp, Artificial Sequence
  Description of Artificial Sequence: Synthetic oligonucleotide
  Target: ANGPTL4; (-) strand; PAM type: NRG; PAM sequence: CAG
ccttttcatgatctgatttt

SEQ ID NO: 6853 - DNA, 20 bp, Artificial Sequence
  Description of Artificial Sequence: Synthetic oligonucleotide
  Target: ANGPTL4; (-) strand; PAM type: NRG; PAM sequence: GAG
tccccaccttcttaaactga

SEQ ID NO: 6854 - DNA, 20 bp, Artificial Sequence
  Description of Artificial Sequence: Synthetic oligonucleotide
  Target: ANGPTL4; (-) strand; PAM type: NRG; PAM sequence: GAG
cttccccaccttcttaaact

SEQ ID NO: 6855 - DNA, 20 bp, Artificial Sequence
  Description of Artificial Sequence: Synthetic oligonucleotide
  Target: ANGPTL4; (-) strand; PAM type: NRG; PAM sequence: AAG
cccaggctatcccagaatgc

SEQ ID NO: 6856 - DNA, 20 bp, Artificial Sequence
  Description of Artificial Sequence: Synthetic oligonucleotide
  Target: ANGPTL4; (-) strand; PAM type: NRG; PAM sequence: CAG
acagctatcccaggctatcc

SEQ ID NO: 6857 - DNA, 20 bp, Artificial Sequence
  Description of Artificial Sequence: Synthetic oligonucleotide
  Target: ANGPTL4; (-) strand; PAM type: NRG; PAM sequence: AGG
agtagggacacagctatccc

SEQ ID NO: 6858 - DNA, 20 bp, Artificial Sequence
  Description of Artificial Sequence: Synthetic oligonucleotide
  Target: ANGPTL4; (-) strand; PAM type: NRG; PAM sequence: CAG
gagtagggacacagctatcc

SEQ ID NO: 6859 - DNA, 20 bp, Artificial Sequence
  Description of Artificial Sequence: Synthetic oligonucleotide
  Target: ANGPTL4; (-) strand; PAM type: NRG; PAM sequence: CAG
cctctctctgagtagggaca

SEQ ID NO: 6860 - DNA, 20 bp, Artificial Sequence
  Description of Artificial Sequence: Synthetic oligonucleotide
  Target: ANGPTL4; (-) strand; PAM type: NRG; PAM sequence: GGG
ccccagcctctctctgagta

SEQ ID NO: 6861 - DNA, 20 bp, Artificial Sequence
  Description of Artificial Sequence: Synthetic oligonucleotide
  Target: ANGPTL4; (-) strand; PAM type: NRG; PAM sequence: AGG
cccccagcctctctctgagt

SEQ ID NO: 6862 - DNA, 20 bp, Artificial Sequence
  Description of Artificial Sequence: Synthetic oligonucleotide
  Target: ANGPTL4; (-) strand; PAM type: NRG; PAM sequence: TAG
gcccccagcctctctctgag

SEQ ID NO: 6863 - DNA, 20 bp, Artificial Sequence
  Description of Artificial Sequence: Synthetic oligonucleotide
  Target: ANGPTL4; (-) strand; PAM type: NRG; PAM sequence: GAG
caagcccccagcctctctct

SEQ ID NO: 6864 - DNA, 20 bp, Artificial Sequence
  Description of Artificial Sequence: Synthetic oligonucleotide
  Target: ANGPTL4; (-) strand; PAM type: NRG; PAM sequence: CAG
cctgtccacccccaagcccc

SEQ ID NO: 6865 - DNA, 20 bp, Artificial Sequence
  Description of Artificial Sequence: Synthetic oligonucleotide
  Target: ANGPTL4; (-) strand; PAM type: NRG; PAM sequence: AAG
cgtctggcctgtccaccccc

SEQ ID NO: 6866 - DNA, 20 bp, Artificial Sequence
  Description of Artificial Sequence: Synthetic oligonucleotide
  Target: ANGPTL4; (-) strand; PAM type: NRG; PAM sequence: TGG
aggttcagatggtcaccgtc

SEQ ID NO: 6867 - DNA, 20 bp, Artificial Sequence
  Description of Artificial Sequence: Synthetic oligonucleotide
  Target: ANGPTL4; (-) strand; PAM type: NRG; PAM sequence: TGG
cagtgaggagtaggttcaga

SEQ ID NO: 6868 - DNA, 20 bp, Artificial Sequence
  Description of Artificial Sequence: Synthetic oligonucleotide
  Target: ANGPTL4; (-) strand; PAM type: NRG; PAM sequence: CAG
accccagtgaggagtaggtt

SEQ ID NO: 6869 - DNA, 20 bp, Artificial Sequence
  Description of Artificial Sequence: Synthetic oligonucleotide
  Target: ANGPTL4; (-) strand; PAM type: NRG; PAM sequence: AGG
ggaaaaccccagtgaggagt

SEQ ID NO: 6870 - DNA, 20 bp, Artificial Sequence
  Description of Artificial Sequence: Synthetic oligonucleotide
  Target: ANGPTL4; (-) strand; PAM type: NRG; PAM sequence: TAG
aggaaaaccccagtgaggag

SEQ ID NO: 6871 - DNA, 20 bp, Artificial Sequence
  Description of Artificial Sequence: Synthetic oligonucleotide
  Target: ANGPTL4; (-) strand; PAM type: NRG; PAM sequence: GAG
gggaggaaaaccccagtgag

SEQ ID NO: 6872 - DNA, 20 bp, Artificial Sequence
  Description of Artificial Sequence: Synthetic oligonucleotide
  Target: ANGPTL4; (-) strand; PAM type: NRG; PAM sequence: AGG
gagggaggaaaaccccagtg

SEQ ID NO: 6873 - DNA, 20 bp, Artificial Sequence
  Description of Artificial Sequence: Synthetic oligonucleotide
  Target: ANGPTL4; (-) strand; PAM type: NRG; PAM sequence: GAG
ggagggaggaaaaccccagt

SEQ ID NO: 6874 - DNA, 20 bp, Artificial Sequence
  Description of Artificial Sequence: Synthetic oligonucleotide
  Target: ANGPTL4; (-) strand; PAM type: NRG; PAM sequence: CAG
aaagggagggaggaaaaccc

SEQ ID NO: 6875 - DNA, 20 bp, Artificial Sequence
  Description of Artificial Sequence: Synthetic oligonucleotide
  Target: ANGPTL4; (-) strand; PAM type: NRG; PAM sequence: AGG
agtggacaggaaagggaggg

SEQ ID NO: 6876 - DNA, 20 bp, Artificial Sequence
  Description of Artificial Sequence: Synthetic oligonucleotide
  Target: ANGPTL4; (-) strand; PAM type: NRG; PAM sequence: GAG
cagtggacaggaaagggagg

SEQ ID NO: 6877 - DNA, 20 bp, Artificial Sequence
  Description of Artificial Sequence: Synthetic oligonucleotide
  Target: ANGPTL4; (-) strand; PAM type: NRG; PAM sequence: GGG
agcagtggacaggaaaggga

SEQ ID NO: 6878 - DNA, 20 bp, Artificial Sequence
  Description of Artificial Sequence: Synthetic oligonucleotide
  Target: ANGPTL4; (-) strand; PAM type: NRG; PAM sequence: AGG
cagcagtggacaggaaaggg

SEQ ID NO: 6879 - DNA, 20 bp, Artificial Sequence
  Description of Artificial Sequence: Synthetic oligonucleotide
  Target: ANGPTL4; (-) strand; PAM type: NRG; PAM sequence: GAG
gcagcagtggacaggaaagg

SEQ ID NO: 6880 - DNA, 20 bp, Artificial Sequence
  Description of Artificial Sequence: Synthetic oligonucleotide
  Target: ANGPTL4; (-) strand; PAM type: NRG; PAM sequence: GGG
cagcagcagtggacaggaaa

SEQ ID NO: 6881 - DNA, 20 bp, Artificial Sequence
  Description of Artificial Sequence: Synthetic oligonucleotide
  Target: ANGPTL4; (-) strand; PAM type: NRG; PAM sequence: AGG
ccagcagcagtggacaggaa

SEQ ID NO: 6882 - DNA, 20 bp, Artificial Sequence
  Description of Artificial Sequence: Synthetic oligonucleotide
  Target: ANGPTL4; (-) strand; PAM type: NRG; PAM sequence: AAG
cccagcagcagtggacagga

SEQ ID NO: 6883 - DNA, 20 bp, Artificial Sequence
  Description of Artificial Sequence: Synthetic oligonucleotide
  Target: ANGPTL4; (-) strand; PAM type: NRG; PAM sequence: AGG
ccctcccagcagcagtggac

SEQ ID NO: 6884 - DNA, 20 bp, Artificial Sequence
  Description of Artificial Sequence: Synthetic oligonucleotide
  Target: ANGPTL4; (-) strand; PAM type: NRG; PAM sequence: CAG
tccctcccagcagcagtgga

SEQ ID NO: 6885 - DNA, 20 bp, Artificial Sequence
  Description of Artificial Sequence: Synthetic oligonucleotide
  Target: ANGPTL4; (-) strand; PAM type: NRG; PAM sequence: TGG
caaatccctcccagcagcag

SEQ ID NO: 6886 - DNA, 20 bp, Artificial Sequence
  Description of Artificial Sequence: Synthetic oligonucleotide
  Target: ANGPTL4; (-) strand; PAM type: NRG; PAM sequence: CAG
cagcaaatccctcccagcag

SEQ ID NO: 6887 - DNA, 20 bp, Artificial Sequence
  Description of Artificial Sequence: Synthetic oligonucleotide
  Target: ANGPTL4; (-) strand; PAM type: NRG; PAM sequence: CAG
ggacagcaaatccctcccag

SEQ ID NO: 6888 - DNA, 20 bp, Artificial Sequence
  Description of Artificial Sequence: Synthetic oligonucleotide
  Target: ANGPTL4; (-) strand; PAM type: NRG; PAM sequence: CAG
ccaggacagcaaatccctcc

SEQ ID NO: 6889 - DNA, 20 bp, Artificial Sequence
  Description of Artificial Sequence: Synthetic oligonucleotide
  Target: ANGPTL4; (-) strand; PAM type: NRG; PAM sequence: CAG
agctgggccagatgccagga

SEQ ID NO: 6890 - DNA, 20 bp, Artificial Sequence
  Description of Artificial Sequence: Synthetic oligonucleotide
  Target: ANGPTL4; (-) strand; PAM type: NRG; PAM sequence: AGG
cgtcagctgggccagatgcc

SEQ ID NO: 6891 - DNA, 20 bp, Artificial Sequence
  Description of Artificial Sequence: Synthetic oligonucleotide
  Target: ANGPTL4; (-) strand; PAM type: NRG; PAM sequence: CAG
ccgtcagctgggccagatgc

SEQ ID NO: 6892 - DNA, 20 bp, Artificial Sequence
  Description of Artificial Sequence: Synthetic oligonucleotide
  Target: ANGPTL4; (-) strand; PAM type: NRG; PAM sequence: CAG
cttggccccgtcagctgggc

SEQ ID NO: 6893 - DNA, 20 bp, Artificial Sequence
  Description of Artificial Sequence: Synthetic oligonucleotide
  Target: ANGPTL4; (-) strand; PAM type: NRG; PAM sequence: GGG
tacacttggccccgtcagct

SEQ ID NO: 6894 - DNA, 20 bp, Artificial Sequence
  Description of Artificial Sequence: Synthetic oligonucleotide
  Target: ANGPTL4; (-) strand; PAM type: NRG; PAM sequence: TGG
atacacttggccccgtcagc

SEQ ID NO: 6895 - DNA, 20 bp, Artificial Sequence
  Description of Artificial Sequence: Synthetic oligonucleotide
  Target: ANGPTL4; (-) strand; PAM type: NRG; PAM sequence: CAG
actcatacacttggccccgt

SEQ ID NO: 6896 - DNA, 20 bp, Artificial Sequence
  Description of Artificial Sequence: Synthetic oligonucleotide
  Target: ANGPTL4; (-) strand; PAM type: NRG; PAM sequence: TGG
caggctgccactcatacact

SEQ ID NO: 6897 - DNA, 20 bp, Artificial Sequence
  Description of Artificial Sequence: Synthetic oligonucleotide
  Target: ANGPTL4; (-) strand; PAM type: NRG; PAM sequence: AGG
acacccaagggctgacgtgc

SEQ ID NO: 6898 - DNA, 20 bp, Artificial Sequence
  Description of Artificial Sequence: Synthetic oligonucleotide
  Target: ANGPTL4; (-) strand; PAM type: NRG; PAM sequence: CAG
cacacccaagggctgacgtg

SEQ ID NO: 6899 - DNA, 20 bp, Artificial Sequence
  Description of Artificial Sequence: Synthetic oligonucleotide
  Target: ANGPTL4; (-) strand; PAM type: NRG; PAM sequence: GGG
atctgaaactgcacacccaa

SEQ ID NO: 6900 - DNA, 20 bp, Artificial Sequence
  Description of Artificial Sequence: Synthetic oligonucleotide
  Target: ANGPTL4; (-) strand; PAM type: NRG; PAM sequence: AGG
aatctgaaactgcacaccca

SEQ ID NO: 6901 - DNA, 20 bp, Artificial Sequence
  Description of Artificial Sequence: Synthetic oligonucleotide
  Target: ANGPTL4; (-) strand; PAM type: NRG; PAM sequence: AAG
gaatctgaaactgcacaccc

SEQ ID NO: 6902 - DNA, 20 bp, Artificial Sequence
  Description of Artificial Sequence: Synthetic oligonucleotide
  Target: ANGPTL4; (-) strand; PAM type: NRG; PAM sequence: TGG
ctccaagccagctcattctc

SEQ ID NO: 6903 - DNA, 20 bp, Artificial Sequence
  Description of Artificial Sequence: Synthetic oligonucleotide
  Target: ANGPTL4; (-) strand; PAM type: NRG; PAM sequence: CAG
gactcagcagggctccaagc

SEQ ID NO: 6904 - DNA, 20 bp, Artificial Sequence
  Description of Artificial Sequence: Synthetic oligonucleotide
  Target: ANGPTL4; (-) strand; PAM type: NRG; PAM sequence: AAG
cattgactcagcagggctcc

SEQ ID NO: 6905 - DNA, 20 bp, Artificial Sequence
  Description of Artificial Sequence: Synthetic oligonucleotide
  Target: ANGPTL4; (-) strand; PAM type: NRG; PAM sequence: GGG
agaagggcattgactcagca

SEQ ID NO: 6906 - DNA, 20 bp, Artificial Sequence
  Description of Artificial Sequence: Synthetic oligonucleotide
  Target: ANGPTL4; (-) strand; PAM type: NRG; PAM sequence: AGG
gagaagggcattgactcagc

SEQ ID NO: 6907 - DNA, 20 bp, Artificial Sequence
  Description of Artificial Sequence: Synthetic oligonucleotide
  Target: ANGPTL4; (-) strand; PAM type: NRG; PAM sequence: CAG
ggagaagggcattgactcag

SEQ ID NO: 6908 - DNA, 20 bp, Artificial Sequence
  Description of Artificial Sequence: Synthetic oligonucleotide
  Target: ANGPTL4; (-) strand; PAM type: NRG; PAM sequence: CAG
caaggagaagggcattgact

SEQ ID NO: 6909 - DNA, 20 bp, Artificial Sequence
  Description of Artificial Sequence: Synthetic oligonucleotide
  Target: ANGPTL4; (-) strand; PAM type: NRG; PAM sequence: GGG
cagagcactggcaaggagaa

SEQ ID NO: 6910 - DNA, 20 bp, Artificial Sequence
  Description of Artificial Sequence: Synthetic oligonucleotide
  Target: ANGPTL4; (-) strand; PAM type: NRG; PAM sequence: AGG
tcagagcactggcaaggaga

SEQ ID NO: 6911 - DNA, 20 bp, Artificial Sequence
  Description of Artificial Sequence: Synthetic oligonucleotide
  Target: ANGPTL4; (-) strand; PAM type: NRG; PAM sequence: AAG
ctcagagcactggcaaggag

SEQ ID NO: 6912 - DNA, 20 bp, Artificial Sequence
  Description of Artificial Sequence: Synthetic oligonucleotide
  Target: ANGPTL4; (-) strand; PAM type: NRG; PAM sequence: GAG
tggctcagagcactggcaag

SEQ ID NO: 6913 - DNA, 20 bp, Artificial Sequence
  Description of Artificial Sequence: Synthetic oligonucleotide
  Target: ANGPTL4; (-) strand; PAM type: NRG; PAM sequence: AGG
gttggctcagagcactggca

SEQ ID NO: 6914 - DNA, 20 bp, Artificial Sequence
  Description of Artificial Sequence: Synthetic oligonucleotide
  Target: ANGPTL4; (-) strand; PAM type: NRG; PAM sequence: AAG
ggttggctcagagcactggc

SEQ ID NO: 6915 - DNA, 20 bp, Artificial Sequence
  Description of Artificial Sequence: Synthetic oligonucleotide
  Target: ANGPTL4; (-) strand; PAM type: NRG; PAM sequence: TGG
ggcaggttggctcagagcac

SEQ ID NO: 6916 - DNA, 20 bp, Artificial Sequence
  Description of Artificial Sequence: Synthetic oligonucleotide
  Target: ANGPTL4; (-) strand; PAM type: NRG; PAM sequence: GAG
actcggggcaggttggctca

SEQ ID NO: 6917 - DNA, 20 bp, Artificial Sequence
  Description of Artificial Sequence: Synthetic oligonucleotide
  Target: ANGPTL4; (-) strand; PAM type: NRG; PAM sequence: CAG
gaactcggggcaggttggct

SEQ ID NO: 6918 - DNA, 20 bp, Artificial Sequence
  Description of Artificial Sequence: Synthetic oligonucleotide
  Target: ANGPTL4; (-) strand; PAM type: NRG; PAM sequence: TGG
aggaagaactcggggcaggt

SEQ ID NO: 6919 - DNA, 20 bp, Artificial Sequence
  Description of Artificial Sequence: Synthetic oligonucleotide
  Target: ANGPTL4; (-) strand; PAM type: NRG; PAM sequence: AGG
tgccaggaagaactcggggc

SEQ ID NO: 6920 - DNA, 20 bp, Artificial Sequence
  Description of Artificial Sequence: Synthetic oligonucleotide
  Target: ANGPTL4; (-) strand; PAM type: NRG; PAM sequence: CAG
ctgccaggaagaactcgggg

SEQ ID NO: 6921 - DNA, 20 bp, Artificial Sequence
  Description of Artificial Sequence: Synthetic oligonucleotide
  Target: ANGPTL4; (-) strand; PAM type: NRG; PAM sequence: GGG
agcctgccaggaagaactcg

SEQ ID NO: 6922 - DNA, 20 bp, Artificial Sequence
  Description of Artificial Sequence: Synthetic oligonucleotide
  Target: ANGPTL4; (-) strand; PAM type: NRG; PAM sequence: GGG
cagcctgccaggaagaactc

SEQ ID NO: 6923 - DNA, 20 bp, Artificial Sequence
  Description of Artificial Sequence: Synthetic oligonucleotide
  Target: ANGPTL4; (-) strand; PAM type: NRG; PAM sequence: CGG
ccagcctgccaggaagaact

SEQ ID NO: 6924 - DNA, 20 bp, Artificial Sequence
  Description of Artificial Sequence: Synthetic oligonucleotide
  Target: ANGPTL4; (-) strand; PAM type: NRG; PAM sequence: AAG
cagaaaaccagcctgccagg

SEQ ID NO: 6925 - DNA, 20 bp, Artificial Sequence
  Description of Artificial Sequence: Synthetic oligonucleotide
  Target: ANGPTL4; (-) strand; PAM type: NRG; PAM sequence: AGG
gcacagaaaaccagcctgcc

SEQ ID NO: 6926 - DNA, 20 bp, Artificial Sequence
  Description of Artificial Sequence: Synthetic oligonucleotide
  Target: ANGPTL4; (-) strand; PAM type: NRG; PAM sequence: CAG
ggcacagaaaaccagcctgc

SEQ ID NO: 6927 - DNA, 20 bp, Artificial Sequence
  Description of Artificial Sequence: Synthetic oligonucleotide
  Target: ANGPTL4; (-) strand; PAM type: NRG; PAM sequence: CAG
gggaggctggcacagaaaac

SEQ ID NO: 6928 - DNA, 20 bp, Artificial Sequence
  Description of Artificial Sequence: Synthetic oligonucleotide
  Target: ANGPTL4; (-) strand; PAM type: NRG; PAM sequence: CAG
tcaggaaggggaggctggca

SEQ ID NO: 6929 - DNA, 20 bp, Artificial Sequence
  Description of Artificial Sequence: Synthetic oligonucleotide
  Target: ANGPTL4; (-) strand; PAM type: NRG; PAM sequence: TGG
ccctgtcaggaaggggaggc

SEQ ID NO: 6930 - DNA, 20 bp, Artificial Sequence
  Description of Artificial Sequence: Synthetic oligonucleotide
  Target: ANGPTL4; (-) strand; PAM type: NRG; PAM sequence: AGG
tataccctgtcaggaagggg

SEQ ID NO: 6931 - DNA, 20 bp, Artificial Sequence
  Description of Artificial Sequence: Synthetic oligonucleotide
  Target: ANGPTL4; (-) strand; PAM type: NRG; PAM sequence: GAG
ctataccctgtcaggaaggg

SEQ ID NO: 6932 - DNA, 20 bp, Artificial Sequence
  Description of Artificial Sequence: Synthetic oligonucleotide
  Target: ANGPTL4; (-) strand; PAM type: NRG; PAM sequence: GGG
ccctataccctgtcaggaag

SEQ ID NO: 6933 - DNA, 20 bp, Artificial Sequence
  Description of Artificial Sequence: Synthetic oligonucleotide
  Target: ANGPTL4; (-) strand; PAM type: NRG; PAM sequence: GGG
cccctataccctgtcaggaa

SEQ ID NO: 6934 - DNA, 20 bp, Artificial Sequence
  Description of Artificial Sequence: Synthetic oligonucleotide
  Target: ANGPTL4; (-) strand; PAM type: NRG; PAM sequence: AGG
tcccctataccctgtcagga

SEQ ID NO: 6935 - DNA, 20 bp, Artificial Sequence
  Description of Artificial Sequence: Synthetic oligonucleotide
  Target: ANGPTL4; (-) strand; PAM type: NRG; PAM sequence: AAG
ttcccctataccctgtcagg

SEQ ID NO: 6936 - DNA, 20 bp, Artificial Sequence
  Description of Artificial Sequence: Synthetic oligonucleotide
  Target: ANGPTL4; (-) strand; PAM type: NRG; PAM sequence: AGG
ccattcccctataccctgtc

SEQ ID NO: 6937 - DNA, 20 bp, Artificial Sequence
  Description of Artificial Sequence: Synthetic oligonucleotide
  Target: ANGPTL4; (-) strand; PAM type: NRG; PAM sequence: CAG
cccattcccctataccctgt

SEQ ID NO: 6938 - DNA, 20 bp, Artificial Sequence
  Description of Artificial Sequence: Synthetic oligonucleotide
  Target: ANGPTL4; (-) strand; PAM type: NRG; PAM sequence: AAG
cacattcattccacagggct

SEQ ID NO: 6939 - DNA, 20 bp, Artificial Sequence
  Description of Artificial Sequence: Synthetic oligonucleotide
  Target: ANGPTL4; (-) strand; PAM type: NRG; PAM sequence: GGG
tggaccacattcattccaca

SEQ ID NO: 6940 - DNA, 20 bp, Artificial Sequence
  Description of Artificial Sequence: Synthetic oligonucleotide
  Target: ANGPTL4; (-) strand; PAM type: NRG; PAM sequence: AGG
ctggaccacattcattccac

SEQ ID NO: 6941 - DNA, 20 bp, Artificial Sequence
  Description of Artificial Sequence: Synthetic oligonucleotide
  Target: ANGPTL4; (-) strand; PAM type: NRG; PAM sequence: CAG
gctggaccacattcattcca

SEQ ID NO: 6942 - DNA, 20 bp, Artificial Sequence
  Description of Artificial Sequence: Synthetic oligonucleotide
  Target: ANGPTL4; (-) strand; PAM type: NRG; PAM sequence: TGG
actgagtgaggctaaagggc

SEQ ID NO: 6943 - DNA, 20 bp, Artificial Sequence
  Description of Artificial Sequence: Synthetic oligonucleotide
  Target: ANGPTL4; (-) strand; PAM type: NRG; PAM sequence: GGG
aagtactgagtgaggctaaa

SEQ ID NO: 6944 - DNA, 20 bp, Artificial Sequence
  Description of Artificial Sequence: Synthetic oligonucleotide
  Target: ANGPTL4; (-) strand; PAM type: NRG; PAM sequence: AGG
gaagtactgagtgaggctaa

SEQ ID NO: 6945 - DNA, 20 bp, Artificial Sequence
  Description of Artificial Sequence: Synthetic oligonucleotide
  Target: ANGPTL4; (-) strand; PAM type: NRG; PAM sequence: AAG
ggaagtactgagtgaggcta

SEQ ID NO: 6946 - DNA, 20 bp, Artificial Sequence
  Description of Artificial Sequence: Synthetic oligonucleotide
  Target: ANGPTL4; (-) strand; PAM type: NRG; PAM sequence: AGG
gacaaaggaagtactgagtg

SEQ ID NO: 6947 - DNA, 20 bp, Artificial Sequence
  Description of Artificial Sequence: Synthetic oligonucleotide
  Target: ANGPTL4; (-) strand; PAM type: NRG; PAM sequence: GAG
ggacaaaggaagtactgagt

SEQ ID NO: 6948 - DNA, 20 bp, Artificial Sequence
  Description of Artificial Sequence: Synthetic oligonucleotide
  Target: ANGPTL4; (-) strand; PAM type: NRG; PAM sequence: GAG
gttgggacaaaggaagtact

SEQ ID NO: 6949 - DNA, 20 bp, Artificial Sequence
  Description of Artificial Sequence: Synthetic oligonucleotide
  Target: ANGPTL4; (-) strand; PAM type: NRG; PAM sequence: AAG
ggatagagttgggacaaagg

SEQ ID NO: 6950 - DNA, 20 bp, Artificial Sequence
  Description of Artificial Sequence: Synthetic oligonucleotide
  Target: ANGPTL4; (-) strand; PAM type: NRG; PAM sequence: AGG
tagggatagagttgggacaa

SEQ ID NO: 6951 - DNA, 20 bp, Artificial Sequence
  Description of Artificial Sequence: Synthetic oligonucleotide
  Target: ANGPTL4; (-) strand; PAM type: NRG; PAM sequence: AAG
gtagggatagagttgggaca

SEQ ID NO: 6952 - DNA, 20 bp, Artificial Sequence
  Description of Artificial Sequence: Synthetic oligonucleotide
  Target: ANGPTL4; (-) strand; PAM type: NRG; PAM sequence: GGG
cctggggtagggatagagtt

SEQ ID NO: 6953 - DNA, 20 bp, Artificial Sequence
  Description of Artificial Sequence: Synthetic oligonucleotide
  Target: ANGPTL4; (-) strand; PAM type: NRG; PAM sequence: TGG
gcctggggtagggatagagt

SEQ ID NO: 6954 - DNA, 20 bp, Artificial Sequence
  Description of Artificial Sequence: Synthetic oligonucleotide
  Target: ANGPTL4; (-) strand; PAM type: NRG; PAM sequence: GAG
ctgagcctggggtagggata

SEQ ID NO: 6955 - DNA, 20 bp, Artificial Sequence
  Description of Artificial Sequence: Synthetic oligonucleotide
  Target: ANGPTL4; (-) strand; PAM type: NRG; PAM sequence: TAG
ttctgagcctggggtaggga

SEQ ID NO: 6956 - DNA, 20 bp, Artificial Sequence
  Description of Artificial Sequence: Synthetic oligonucleotide
  Target: ANGPTL4; (-) strand; PAM type: NRG; PAM sequence: GGG
aacattctgagcctggggta

SEQ ID NO: 6957 - DNA, 20 bp, Artificial Sequence
  Description of Artificial Sequence: Synthetic oligonucleotide
  Target: ANGPTL4; (-) strand; PAM type: NRG; PAM sequence: AGG
caacattctgagcctggggt

SEQ ID NO: 6958 - DNA, 20 bp, Artificial Sequence
  Description of Artificial Sequence: Synthetic oligonucleotide
  Target: ANGPTL4; (-) strand; PAM type: NRG; PAM sequence: TAG
ccaacattctgagcctgggg

SEQ ID NO: 6959 - DNA, 20 bp, Artificial Sequence
  Description of Artificial Sequence: Synthetic oligonucleotide
  Target: ANGPTL4; (-) strand; PAM type: NRG; PAM sequence: GGG
accccaacattctgagcctg

SEQ ID NO: 6960 - DNA, 20 bp, Artificial Sequence
  Description of Artificial Sequence: Synthetic oligonucleotide
  Target: ANGPTL4; (-) strand; PAM type: NRG; PAM sequence: GGG
taccccaacattctgagcct

SEQ ID NO: 6961 - DNA, 20 bp, Artificial Sequence
  Description of Artificial Sequence: Synthetic oligonucleotide
  Target: ANGPTL4; (-) strand; PAM type: NRG; PAM sequence: TGG
ataccccaacattctgagcc

SEQ ID NO: 6962 - DNA, 20 bp, Artificial Sequence
  Description of Artificial Sequence: Synthetic oligonucleotide
  Target: ANGPTL4; (-) strand; PAM type: NRG; PAM sequence: GAG
tggagataccccaacattct

SEQ ID NO: 6963 - DNA, 20 bp, Artificial Sequence
  Description of Artificial Sequence: Synthetic oligonucleotide
  Target: ANGPTL4; (-) strand; PAM type: NRG; PAM sequence: GAG
ttgaagttctcaggcaggtg

SEQ ID NO: 6964 - DNA, 20 bp, Artificial Sequence
  Description of Artificial Sequence: Synthetic oligonucleotide
  Target: ANGPTL4; (-) strand; PAM type: NRG; PAM sequence: TGG
gtttgaagttctcaggcagg

SEQ ID NO: 6965 - DNA, 20 bp, Artificial Sequence
  Description of Artificial Sequence: Synthetic oligonucleotide
  Target: ANGPTL4; (-) strand; PAM type: NRG; PAM sequence: AGG
tatgtttgaagttctcaggc

SEQ ID NO: 6966 - DNA, 20 bp, Artificial Sequence
  Description of Artificial Sequence: Synthetic oligonucleotide
  Target: ANGPTL4; (-) strand; PAM type: NRG; PAM sequence: CAG
gtatgtttgaagttctcagg

SEQ ID NO: 6967 - DNA, 20 bp, Artificial Sequence
  Description of Artificial Sequence: Synthetic oligonucleotide
  Target: ANGPTL4; (-) strand; PAM type: NRG; PAM sequence: AGG
cctgtatgtttgaagttctc

SEQ ID NO: 6968 - DNA, 20 bp, Artificial Sequence
  Description of Artificial Sequence: Synthetic oligonucleotide
  Target: ANGPTL4; (-) strand; PAM type: NRG; PAM sequence: CAG
ccctgtatgtttgaagttct

SEQ ID NO: 6969 - DNA, 20 bp, Artificial Sequence
  Description of Artificial Sequence: Synthetic oligonucleotide
  Target: ANGPTL4; (-) strand; PAM type: NRG; PAM sequence: AAG
gcccagcccctgtatgtttg

SEQ ID NO: 6970 - DNA, 20 bp, Artificial Sequence
  Description of Artificial Sequence: Synthetic oligonucleotide
  Target: ANGPTL4; (-) strand; PAM type: NRG; PAM sequence: CAG
gtgctgctgccctctaagcc

SEQ ID NO: 6971 - DNA, 20 bp, Artificial Sequence
  Description of Artificial Sequence: Synthetic oligonucleotide
  Target: ANGPTL4; (-) strand; PAM type: NRG; PAM sequence: AAG
cgaaggtgctgctgccctct

SEQ ID NO: 6972 - DNA, 20 bp, Artificial Sequence
  Description of Artificial Sequence: Synthetic oligonucleotide
  Target: ANGPTL4; (-) strand; PAM type: NRG; PAM sequence: AGG
ttcactcatgcactgaacga

SEQ ID NO: 6973 - DNA, 20 bp, Artificial Sequence
  Description of Artificial Sequence: Synthetic oligonucleotide
  Target: ANGPTL4; (-) strand; PAM type: NRG; PAM sequence: AAG
attcactcatgcactgaacg

SEQ ID NO: 6974 - DNA, 20 bp, Artificial Sequence
  Description of Artificial Sequence: Synthetic oligonucleotide
  Target: ANGPTL4; (-) strand; PAM type: NRG; PAM sequence: AAG
aaaaaaagtttcagacatgg

SEQ ID NO: 6975 - DNA, 20 bp, Artificial Sequence
  Description of Artificial Sequence: Synthetic oligonucleotide
  Target: ANGPTL4; (-) strand; PAM type: NRG; PAM sequence: TGG
aaaaaaaaaagtttcagaca

SEQ ID NO: 6976 - DNA, 20 bp, Artificial Sequence
  Description of Artificial Sequence: Synthetic oligonucleotide
  Target: ANGPTL4; (-) strand; PAM type: NRG; PAM sequence: CAG
aaaaaaaaaaaaaaaagttt

SEQ ID NO: 6977 - DNA, 20 bp, Artificial Sequence
  Description of Artificial Sequence: Synthetic oligonucleotide
  Target: ANGPTL4; (-) strand; PAM type: NRG; PAM sequence: AAG
tgtgtcaaaaaaaaaaaaaa

SEQ ID NO: 6978 - DNA, 20 bp, Artificial Sequence
  Description of Artificial Sequence: Synthetic oligonucleotide
  Target: ANGPTL4; (-) strand; PAM type: NRG; PAM sequence: GAG
tccagcctgggtgacagagt

SEQ ID NO: 6979 - DNA, 20 bp, Artificial Sequence
  Description of Artificial Sequence: Synthetic oligonucleotide
  Target: ANGPTL4; (-) strand; PAM type: NRG; PAM sequence: GAG
gcactccagcctgggtgaca

SEQ ID NO: 6980 - DNA, 20 bp, Artificial Sequence
  Description of Artificial Sequence: Synthetic oligonucleotide
  Target: ANGPTL4; (-) strand; PAM type: NRG; PAM sequence: CAG
cagcactccagcctgggtga

SEQ ID NO: 6981 - DNA, 20 bp, Artificial Sequence
  Description of Artificial Sequence: Synthetic oligonucleotide
  Target: ANGPTL4; (-) strand; PAM type: NRG; PAM sequence: GGG
gcaccacagcactccagcct

SEQ ID NO: 6982 - DNA, 20 bp, Artificial Sequence
  Description of Artificial Sequence: Synthetic oligonucleotide
  Target: ANGPTL4; (-) strand; PAM type: NRG; PAM sequence: TGG
tgcaccacagcactccagcc

SEQ ID NO: 6983 - DNA, 20 bp, Artificial Sequence
  Description of Artificial Sequence: Synthetic oligonucleotide
  Target: ANGPTL4; (-) strand; PAM type: NRG; PAM sequence: CAG
gagattgcaccacagcactc

SEQ ID NO: 6984 - DNA, 20 bp, Artificial Sequence
  Description of Artificial Sequence: Synthetic oligonucleotide
  Target: ANGPTL4; (-) strand; PAM type: NRG; PAM sequence: CAG
agtgagctgagattgcacca

SEQ ID NO: 6985 - DNA, 20 bp, Artificial Sequence
  Description of Artificial Sequence: Synthetic oligonucleotide
  Target: ANGPTL4; (-) strand; PAM type: NRG; PAM sequence: GAG
gacggaggttgcagtgagct

SEQ ID NO: 6986 - DNA, 20 bp, Artificial Sequence
  Description of Artificial Sequence: Synthetic oligonucleotide
  Target: ANGPTL4; (-) strand; PAM type: NRG; PAM sequence: GAG
caggagacggaggttgcagt

SEQ ID NO: 6987 - DNA, 20 bp, Artificial Sequence
  Description of Artificial Sequence: Synthetic oligonucleotide
  Target: ANGPTL4; (-) strand; PAM type: NRG; PAM sequence: CAG
aactcaggagacggaggttg

SEQ ID NO: 6988 - DNA, 20 bp, Artificial Sequence
  Description of Artificial Sequence: Synthetic oligonucleotide
  Target: ANGPTL4; (-) strand; PAM type: NRG; PAM sequence: AGG
cgcttgaactcaggagacgg

SEQ ID NO: 6989 - DNA, 20 bp, Artificial Sequence
  Description of Artificial Sequence: Synthetic oligonucleotide
  Target: ANGPTL4; (-) strand; PAM type: NRG; PAM sequence: GAG
tcgcttgaactcaggagacg

SEQ ID NO: 6990 - DNA, 20 bp, Artificial Sequence
  Description of Artificial Sequence: Synthetic oligonucleotide
  Target: ANGPTL4; (-) strand; PAM type: NRG; PAM sequence: CGG
aatcgcttgaactcaggaga

SEQ ID NO: 6991 - DNA, 20 bp, Artificial Sequence
  Description of Artificial Sequence: Synthetic oligonucleotide
  Target: ANGPTL4; (-) strand; PAM type: NRG; PAM sequence: GAG
ggagaatcgcttgaactcag

SEQ ID NO: 6992 - DNA, 20 bp, Artificial Sequence
  Description of Artificial Sequence: Synthetic oligonucleotide
  Target: ANGPTL4; (-) strand; PAM type: NRG; PAM sequence: AGG
caggagaatcgcttgaactc

SEQ ID NO: 6993 - DNA, 20 bp, Artificial Sequence
  Description of Artificial Sequence: Synthetic oligonucleotide
  Target: ANGPTL4; (-) strand; PAM type: NRG; PAM sequence: CAG
tcaggagaatcgcttgaact

SEQ ID NO: 6994 - DNA, 20 bp, Artificial Sequence
  Description of Artificial Sequence: Synthetic oligonucleotide
  Target: ANGPTL4; (-) strand; PAM type: NRG; PAM sequence: GAG
tactcgggagactgtgtcag

SEQ ID NO: 6995 - DNA, 20 bp, Artificial Sequence
  Description of Artificial Sequence: Synthetic oligonucleotide
  Target: ANGPTL4; (-) strand; PAM type: NRG; PAM sequence: AGG
gctactcgggagactgtgtc

SEQ ID NO: 6996 - DNA, 20 bp, Artificial Sequence
  Description of Artificial Sequence: Synthetic oligonucleotide
  Target: ANGPTL4; (-) strand; PAM type: NRG; PAM sequence: CAG
agctactcgggagactgtgt

SEQ ID NO: 6997 - DNA, 20 bp, Artificial Sequence
  Description of Artificial Sequence: Synthetic oligonucleotide
  Target: ANGPTL4; (-) strand; PAM type: NRG; PAM sequence: GAG
acgtgcttacagctactcgg

SEQ ID NO: 6998 - DNA, 20 bp, Artificial Sequence
  Description of Artificial Sequence: Synthetic oligonucleotide
  Target: ANGPTL4; (-) strand; PAM type: NRG; PAM sequence: GGG
gcacgtgcttacagctactc

SEQ ID NO: 6999 - DNA, 20 bp, Artificial Sequence
  Description of Artificial Sequence: Synthetic oligonucleotide
  Target: ANGPTL4; (-) strand; PAM type: NRG; PAM sequence: CGG
ggcacgtgcttacagctact

SEQ ID NO: 7000 - DNA, 20 bp, Artificial Sequence
  Description of Artificial Sequence: Synthetic oligonucleotide
  Target: ANGPTL4; (-) strand; PAM type: NRG; PAM sequence: CAG
ggtgtggtggcacgtgctta

SEQ ID NO: 7001 - DNA, 20 bp, Artificial Sequence
  Description of Artificial Sequence: Synthetic oligonucleotide
  Target: ANGPTL4; (-) strand; PAM type: NRG; PAM sequence: TGG
aaaaaattagccgggtgtgg

SEQ ID NO: 7002 - DNA, 20 bp, Artificial Sequence
  Description of Artificial Sequence: Synthetic oligonucleotide
  Target: ANGPTL4; (-) strand; PAM type: NRG; PAM sequence: TGG
aataaaaaattagccgggtg

SEQ ID NO: 7003 - DNA, 20 bp, Artificial Sequence
  Description of Artificial Sequence: Synthetic oligonucleotide
  Target: ANGPTL4; (-) strand; PAM type: NRG; PAM sequence: GGG
ctaaaaataaaaaattagcc

SEQ ID NO: 7004 - DNA, 20 bp, Artificial Sequence
  Description of Artificial Sequence: Synthetic oligonucleotide
  Target: ANGPTL4; (-) strand; PAM type: NRG; PAM sequence: CGG
actaaaaataaaaaattagc

SEQ ID NO: 7005 - DNA, 20 bp, Artificial Sequence
  Description of Artificial Sequence: Synthetic oligonucleotide
  Target: ANGPTL4; (-) strand; PAM type: NRG; PAM sequence: TAG
ctctactaaaaataaaaaat

SEQ ID NO: 7006 - DNA, 20 bp, Artificial Sequence
  Description of Artificial Sequence: Synthetic oligonucleotide
  Target: ANGPTL4; (-) strand; PAM type: NRG; PAM sequence: TGG
cgagatcagcctggccaaca

SEQ ID NO: 7007 - DNA, 20 bp, Artificial Sequence
  Description of Artificial Sequence: Synthetic oligonucleotide
  Target: ANGPTL4; (-) strand; PAM type: NRG; PAM sequence: TGG
tcaggggttcgagatcagcc

SEQ ID NO: 7008 - DNA, 20 bp, Artificial Sequence
  Description of Artificial Sequence: Synthetic oligonucleotide
  Target: ANGPTL4; (-) strand; PAM type: NRG; PAM sequence: CAG
tgaggtcaggggttcgagat

SEQ ID NO: 7009 - DNA, 20 bp, Artificial Sequence
  Description of Artificial Sequence: Synthetic oligonucleotide
  Target: ANGPTL4; (-) strand; PAM type: NRG; PAM sequence: GAG
tcacctgaggtcaggggttc

SEQ ID NO: 7010 - DNA, 20 bp, Artificial Sequence
  Description of Artificial Sequence: Synthetic oligonucleotide
  Target: ANGPTL4; (-) strand; PAM type: NRG; PAM sequence: GGG
ggcggatcacctgaggtcag

SEQ ID NO: 7011 - DNA, 20 bp, Artificial Sequence
  Description of Artificial Sequence: Synthetic oligonucleotide
  Target: ANGPTL4; (-) strand; PAM type: NRG; PAM sequence: GGG
gggcggatcacctgaggtca

SEQ ID NO: 7012 - DNA, 20 bp, Artificial Sequence
  Description of Artificial Sequence: Synthetic oligonucleotide
  Target: ANGPTL4; (-) strand; PAM type: NRG; PAM sequence: AGG
ggggcggatcacctgaggtc

SEQ ID NO: 7013 - DNA, 20 bp, Artificial Sequence
  Description of Artificial Sequence: Synthetic oligonucleotide
  Target: ANGPTL4; (-) strand; PAM type: NRG; PAM sequence: CAG
gggggcggatcacctgaggt

SEQ ID NO: 7014 - DNA, 20 bp, Artificial Sequence
  Description of Artificial Sequence: Synthetic oligonucleotide
  Target: ANGPTL4; (-) strand; PAM type: NRG; PAM sequence: AGG
gggggggggcggatcacctg

SEQ ID NO: 7015 - DNA, 20 bp, Artificial Sequence
  Description of Artificial Sequence: Synthetic oligonucleotide
  Target: ANGPTL4; (-) strand; PAM type: NRG; PAM sequence: GAG
ggggggggggcggatcacct

SEQ ID NO: 7016 - DNA, 20 bp, Artificial Sequence
  Description of Artificial Sequence: Synthetic oligonucleotide
  Target: ANGPTL4; (-) strand; PAM type: NRG; PAM sequence: CGG
tggtgggagggggggggggg

SEQ ID NO: 7017 - DNA, 20 bp, Artificial Sequence
  Description of Artificial Sequence: Synthetic oligonucleotide
  Target: ANGPTL4; (-) strand; PAM type: NRG; PAM sequence: GGG
gggtggtgggaggggggggg

SEQ ID NO: 7018 - DNA, 20 bp, Artificial Sequence
  Description of Artificial Sequence: Synthetic oligonucleotide
  Target: ANGPTL4; (-) strand; PAM type: NRG; PAM sequence: GGG
cgggtggtgggagggggggg

SEQ ID NO: 7019 - DNA, 20 bp, Artificial Sequence
  Description of Artificial Sequence: Synthetic oligonucleotide
  Target: ANGPTL4; (-) strand; PAM type: NRG; PAM sequence: GGG
ccgggtggtgggaggggggg

SEQ ID NO: 7020 - DNA, 20 bp, Artificial Sequence
  Description of Artificial Sequence: Synthetic oligonucleotide
  Target: ANGPTL4; (-) strand; PAM type: NRG; PAM sequence: GGG
gccgggtggtgggagggggg

SEQ ID NO: 7021 - DNA, 20 bp, Artificial Sequence
  Description of Artificial Sequence: Synthetic oligonucleotide
  Target: ANGPTL4; (-) strand; PAM type: NRG; PAM sequence: GGG
ggccgggtggtgggaggggg

SEQ ID NO: 7022 - DNA, 20 bp, Artificial Sequence
  Description of Artificial Sequence: Synthetic oligonucleotide
  Target: ANGPTL4; (-) strand; PAM type: NRG; PAM sequence: GGG
aggccgggtggtgggagggg

SEQ ID NO: 7023 - DNA, 20 bp, Artificial Sequence
  Description of Artificial Sequence: Synthetic oligonucleotide
  Target: ANGPTL4; (-) strand; PAM type: NRG; PAM sequence: GGG
gaggccgggtggtgggaggg

SEQ ID NO: 7024 - DNA, 20 bp, Artificial Sequence
  Description of Artificial Sequence: Synthetic oligonucleotide
  Target: ANGPTL4; (-) strand; PAM type: NRG; PAM sequence: GGG
ggaggccgggtggtgggagg

SEQ ID NO: 7025 - DNA, 20 bp, Artificial Sequence
  Description of Artificial Sequence: Synthetic oligonucleotide
  Target: ANGPTL4; (-) strand; PAM type: NRG; PAM sequence: GGG
gggaggccgggtggtgggag

SEQ ID NO: 7026 - DNA, 20 bp, Artificial Sequence
  Description of Artificial Sequence: Synthetic oligonucleotide
  Target: ANGPTL4; (-) strand; PAM type: NRG; PAM sequence: GGG
tgggaggccgggtggtggga

SEQ ID NO: 7027 - DNA, 20 bp, Artificial Sequence
  Description of Artificial Sequence: Synthetic oligonucleotide
  Target: ANGPTL4; (-) strand; PAM type: NRG; PAM sequence: AGG
ttgggaggccgggtggtggg

SEQ ID NO: 7028 - DNA, 20 bp, Artificial Sequence
  Description of Artificial Sequence: Synthetic oligonucleotide
  Target: ANGPTL4; (-) strand; PAM type: NRG; PAM sequence: GAG
tttgggaggccgggtggtgg

SEQ ID NO: 7029 - DNA, 20 bp, Artificial Sequence
  Description of Artificial Sequence: Synthetic oligonucleotide
  Target: ANGPTL4; (-) strand; PAM type: NRG; PAM sequence: GGG
actttgggaggccgggtggt

SEQ ID NO: 7030 - DNA, 20 bp, Artificial Sequence
  Description of Artificial Sequence: Synthetic oligonucleotide
  Target: ANGPTL4; (-) strand; PAM type: NRG; PAM sequence: TGG
cactttgggaggccgggtgg

SEQ ID NO: 7031 - DNA, 20 bp, Artificial Sequence
  Description of Artificial Sequence: Synthetic oligonucleotide
  Target: ANGPTL4; (-) strand; PAM type: NRG; PAM sequence: TGG
cagcactttgggaggccggg

SEQ ID NO: 7032 - DNA, 20 bp, Artificial Sequence
  Description of Artificial Sequence: Synthetic oligonucleotide
  Target: ANGPTL4; (-) strand; PAM type: NRG; PAM sequence: GGG
tcccagcactttgggaggcc

SEQ ID NO: 7033 - DNA, 20 bp, Artificial Sequence
  Description of Artificial Sequence: Synthetic oligonucleotide
  Target: ANGPTL4; (-) strand; PAM type: NRG; PAM sequence: CGG
atcccagcactttgggaggc

SEQ ID NO: 7034 - DNA, 20 bp, Artificial Sequence
  Description of Artificial Sequence: Synthetic oligonucleotide
  Target: ANGPTL4; (-) strand; PAM type: NRG; PAM sequence: AGG
tgtaatcccagcactttggg

SEQ ID NO: 7035 - DNA, 20 bp, Artificial Sequence
  Description of Artificial Sequence: Synthetic oligonucleotide
  Target: ANGPTL4; (-) strand; PAM type: NRG; PAM sequence: GAG
ctgtaatcccagcactttgg

SEQ ID NO: 7036 - DNA, 20 bp, Artificial Sequence
  Description of Artificial Sequence: Synthetic oligonucleotide
  Target: ANGPTL4; (-) strand; PAM type: NRG; PAM sequence: GGG
gcctgtaatcccagcacttt

SEQ ID NO: 7037 - DNA, 20 bp, Artificial Sequence
  Description of Artificial Sequence: Synthetic oligonucleotide
  Target: ANGPTL4; (-) strand; PAM type: NRG; PAM sequence: TGG
cgcctgtaatcccagcactt

SEQ ID NO: 7038 - DNA, 20 bp, Artificial Sequence
  Description of Artificial Sequence: Synthetic oligonucleotide
  Target: ANGPTL4; (-) strand; PAM type: NRG; PAM sequence: CAG
gtggctcacgcctgtaatcc

SEQ ID NO: 7039 - DNA, 20 bp, Artificial Sequence
  Description of Artificial Sequence: Synthetic oligonucleotide
  Target: ANGPTL4; (-) strand; PAM type: NRG; PAM sequence: TGG
aagtctgtggccaggcgcgg

SEQ ID NO: 7040 - DNA, 20 bp, Artificial Sequence
  Description of Artificial Sequence: Synthetic oligonucleotide
  Target: ANGPTL4; (-) strand; PAM type: NRG; PAM sequence: CGG
taaaagtctgtggccaggcg

SEQ ID NO: 7041 - DNA, 20 bp, Artificial Sequence
  Description of Artificial Sequence: Synthetic oligonucleotide
  Target: ANGPTL4; (-) strand; PAM type: NRG; PAM sequence: AGG
taaaataaaagtctgtggcc

SEQ ID NO: 7042 - DNA, 20 bp, Artificial Sequence
  Description of Artificial Sequence: Synthetic oligonucleotide
  Target: ANGPTL4; (-) strand; PAM type: NRG; PAM sequence: CAG
ataaaataaaagtctgtggc

SEQ ID NO: 7043 - DNA, 20 bp, Artificial Sequence
  Description of Artificial Sequence: Synthetic oligonucleotide
  Target: ANGPTL4; (-) strand; PAM type: NRG; PAM sequence: TGG
agaaataaaataaaagtctg

SEQ ID NO: 7044 - DNA, 20 bp, Artificial Sequence
  Description of Artificial Sequence: Synthetic oligonucleotide
  Target: ANGPTL4; (-) strand; PAM type: NRG; PAM sequence: AAG
ctaaaaaagaaataaaataa

SEQ ID NO: 7045 - DNA, 20 bp, Artificial Sequence
  Description of Artificial Sequence: Synthetic oligonucleotide
  Target: ANGPTL4; (-) strand; PAM type: NRG; PAM sequence: AAG
gtgagatcctgtctctaaaa

SEQ ID NO: 7046 - DNA, 20 bp, Artificial Sequence
  Description of Artificial Sequence: Synthetic oligonucleotide
  Target: ANGPTL4; (-) strand; PAM type: NRG; PAM sequence: GAG
tccagcctgggcaacagagt

SEQ ID NO: 7047 - DNA, 20 bp, Artificial Sequence
  Description of Artificial Sequence: Synthetic oligonucleotide
  Target: ANGPTL4; (-) strand; PAM type: NRG; PAM sequence: GAG
gcactccagcctgggcaaca

SEQ ID NO: 7048 - DNA, 20 bp, Artificial Sequence
  Description of Artificial Sequence: Synthetic oligonucleotide
  Target: ANGPTL4; (-) strand; PAM type: NRG; PAM sequence: CAG
ctgcactccagcctgggcaa

SEQ ID NO: 7049 - DNA, 20 bp, Artificial Sequence
  Description of Artificial Sequence: Synthetic oligonucleotide
  Target: ANGPTL4; (-) strand; PAM type: NRG; PAM sequence: GGG
gtgccactgcactccagcct

SEQ ID NO: 7050 - DNA, 20 bp, Artificial Sequence
  Description of Artificial Sequence: Synthetic oligonucleotide
  Target: ANGPTL4; (-) strand; PAM type: NRG; PAM sequence: TGG
ggtgccactgcactccagcc

SEQ ID NO: 7051 - DNA, 20 bp, Artificial Sequence
  Description of Artificial Sequence: Synthetic oligonucleotide
  Target: ANGPTL4; (-) strand; PAM type: NRG; PAM sequence: CAG
acaatggtgccactgcactc

SEQ ID NO: 7052 - DNA, 20 bp, Artificial Sequence
  Description of Artificial Sequence: Synthetic oligonucleotide
  Target: ANGPTL4; (-) strand; PAM type: NRG; PAM sequence: TGG
gaggctgcagtgagccacaa

SEQ ID NO: 7053 - DNA, 20 bp, Artificial Sequence
  Description of Artificial Sequence: Synthetic oligonucleotide
  Target: ANGPTL4; (-) strand; PAM type: NRG; PAM sequence: GAG
caggaggtagaggctgcagt

SEQ ID NO: 7054 - DNA, 20 bp, Artificial Sequence
  Description of Artificial Sequence: Synthetic oligonucleotide
  Target: ANGPTL4; (-) strand; PAM type: NRG; PAM sequence: CAG
agcccaggaggtagaggctg

SEQ ID NO: 7055 - DNA, 20 bp, Artificial Sequence
  Description of Artificial Sequence: Synthetic oligonucleotide
  Target: ANGPTL4; (-) strand; PAM type: NRG; PAM sequence: AGG
cacttgagcccaggaggtag

SEQ ID NO: 7056 - DNA, 20 bp, Artificial Sequence
  Description of Artificial Sequence: Synthetic oligonucleotide
  Target: ANGPTL4; (-) strand; PAM type: NRG; PAM sequence: GAG
tcacttgagcccaggaggta

SEQ ID NO: 7057 - DNA, 20 bp, Artificial Sequence
  Description of Artificial Sequence: Synthetic oligonucleotide
  Target: ANGPTL4; (-) strand; PAM type: NRG; PAM sequence: TAG
gctcacttgagcccaggagg

SEQ ID NO: 7058 - DNA, 20 bp, Artificial Sequence
  Description of Artificial Sequence: Synthetic oligonucleotide
  Target: ANGPTL4; (-) strand; PAM type: NRG; PAM sequence: AGG
gaggctcacttgagcccagg

SEQ ID NO: 7059 - DNA, 20 bp, Artificial Sequence
  Description of Artificial Sequence: Synthetic oligonucleotide
  Target: ANGPTL4; (-) strand; PAM type: NRG; PAM sequence: GAG
ggaggctcacttgagcccag

SEQ ID NO: 7060 - DNA, 20 bp, Artificial Sequence
  Description of Artificial Sequence: Synthetic oligonucleotide
  Target: ANGPTL4; (-) strand; PAM type: NRG; PAM sequence: AGG
tgggaggctcacttgagccc

SEQ ID NO: 7061 - DNA, 20 bp, Artificial Sequence
  Description of Artificial Sequence: Synthetic oligonucleotide
  Target: ANGPTL4; (-) strand; PAM type: NRG; PAM sequence: CAG
gtgggaggctcacttgagcc

SEQ ID NO: 7062 - DNA, 20 bp, Artificial Sequence
  Description of Artificial Sequence: Synthetic oligonucleotide
  Target: ANGPTL4; (-) strand; PAM type: NRG; PAM sequence: GAG
ctgaggtgggaggctcactt

SEQ ID NO: 7063 - DNA, 20 bp, Artificial Sequence
  Description of Artificial Sequence: Synthetic oligonucleotide
  Target: ANGPTL4; (-) strand; PAM type: NRG; PAM sequence: AGG
acttgggagcctgaggtggg

SEQ ID NO: 7064 - DNA, 20 bp, Artificial Sequence
  Description of Artificial Sequence: Synthetic oligonucleotide
  Target: ANGPTL4; (-) strand; PAM type: NRG; PAM sequence: GAG
tacttgggagcctgaggtgg

SEQ ID NO: 7065 - DNA, 20 bp, Artificial Sequence
  Description of Artificial Sequence: Synthetic oligonucleotide
  Target: ANGPTL4; (-) strand; PAM type: NRG; PAM sequence: GGG
gctacttgggagcctgaggt

SEQ ID NO: 7066 - DNA, 20 bp, Artificial Sequence
  Description of Artificial Sequence: Synthetic oligonucleotide
  Target: ANGPTL4; (-) strand; PAM type: NRG; PAM sequence: TGG
agctacttgggagcctgagg

SEQ ID NO: 7067 - DNA, 20 bp, Artificial Sequence
  Description of Artificial Sequence: Synthetic oligonucleotide
  Target: ANGPTL4; (-) strand; PAM type: NRG; PAM sequence: AGG
cgcagctacttgggagcctg

SEQ ID NO: 7068 - DNA, 20 bp, Artificial Sequence
  Description of Artificial Sequence: Synthetic oligonucleotide
  Target: ANGPTL4; (-) strand; PAM type: NRG; PAM sequence: GAG
tcgcagctacttgggagcct

SEQ ID NO: 7069 - DNA, 20 bp, Artificial Sequence
  Description of Artificial Sequence: Synthetic oligonucleotide
  Target: ANGPTL4; (-) strand; PAM type: NRG; PAM sequence: GAG
ctgtggtcgcagctacttgg

SEQ ID NO: 7070 - DNA, 20 bp, Artificial Sequence
  Description of Artificial Sequence: Synthetic oligonucleotide
  Target: ANGPTL4; (-) strand; PAM type: NRG; PAM sequence: GGG
gactgtggtcgcagctactt

SEQ ID NO: 7071 - DNA, 20 bp, Artificial Sequence
  Description of Artificial Sequence: Synthetic oligonucleotide
  Target: ANGPTL4; (-) strand; PAM type: NRG; PAM sequence: TGG
tgactgtggtcgcagctact

SEQ ID NO: 7072 - DNA, 20 bp, Artificial Sequence
  Description of Artificial Sequence: Synthetic oligonucleotide
  Target: ANGPTL4; (-) strand; PAM type: NRG; PAM sequence: CAG
gtcgcccatgactgtggtcg

SEQ ID NO: 7073 - DNA, 20 bp, Artificial Sequence
  Description of Artificial Sequence: Synthetic oligonucleotide
  Target: ANGPTL4; (-) strand; PAM type: NRG; PAM sequence: TGG
agggcggtcgcccatgactg

SEQ ID NO: 7074 - DNA, 20 bp, Artificial Sequence
  Description of Artificial Sequence: Synthetic oligonucleotide
  Target: ANGPTL4; (-) strand; PAM type: NRG; PAM sequence: CGG
aaggaagggaggaaccaggg

SEQ ID NO: 7075 - DNA, 20 bp, Artificial Sequence
  Description of Artificial Sequence: Synthetic oligonucleotide
  Target: ANGPTL4; (-) strand; PAM type: NRG; PAM sequence: GGG
cacaaggaagggaggaacca

SEQ ID NO: 7076 - DNA, 20 bp, Artificial Sequence
  Description of Artificial Sequence: Synthetic oligonucleotide
  Target: ANGPTL4; (-) strand; PAM type: NRG; PAM sequence: AGG
acacaaggaagggaggaacc

SEQ ID NO: 7077 - DNA, 20 bp, Artificial Sequence
  Description of Artificial Sequence: Synthetic oligonucleotide
  Target: ANGPTL4; (-) strand; PAM type: NRG; PAM sequence: CAG
gacacaaggaagggaggaac

SEQ ID NO: 7078 - DNA, 20 bp, Artificial Sequence
  Description of Artificial Sequence: Synthetic oligonucleotide
  Target: ANGPTL4; (-) strand; PAM type: NRG; PAM sequence: AGG
agaggagacacaaggaaggg

SEQ ID NO: 7079 - DNA, 20 bp, Artificial Sequence
  Description of Artificial Sequence: Synthetic oligonucleotide
  Target: ANGPTL4; (-) strand; PAM type: NRG; PAM sequence: GAG
aagaggagacacaaggaagg

SEQ ID NO: 7080 - DNA, 20 bp, Artificial Sequence
  Description of Artificial Sequence: Synthetic oligonucleotide
  Target: ANGPTL4; (-) strand; PAM type: NRG; PAM sequence: GGG
gaaagaggagacacaaggaa

SEQ ID NO: 7081 - DNA, 20 bp, Artificial Sequence
  Description of Artificial Sequence: Synthetic oligonucleotide
  Target: ANGPTL4; (-) strand; PAM type: NRG; PAM sequence: AGG
agaaagaggagacacaagga

SEQ ID NO: 7082 - DNA, 20 bp, Artificial Sequence
  Description of Artificial Sequence: Synthetic oligonucleotide
  Target: ANGPTL4; (-) strand; PAM type: NRG; PAM sequence: AAG
cagaaagaggagacacaagg

SEQ ID NO: 7083 - DNA, 20 bp, Artificial Sequence
  Description of Artificial Sequence: Synthetic oligonucleotide
  Target: ANGPTL4; (-) strand; PAM type: NRG; PAM sequence: AGG
gaacagaaagaggagacaca

SEQ ID NO: 7084 - DNA, 20 bp, Artificial Sequence
  Description of Artificial Sequence: Synthetic oligonucleotide
  Target: ANGPTL4; (-) strand; PAM type: NRG; PAM sequence: AAG
agaacagaaagaggagacac

SEQ ID NO: 7085 - DNA, 20 bp, Artificial Sequence
  Description of Artificial Sequence: Synthetic oligonucleotide
  Target: ANGPTL4; (-) strand; PAM type: NRG; PAM sequence: GAG
aacttagagaacagaaagag

SEQ ID NO: 7086 - DNA, 20 bp, Artificial Sequence
  Description of Artificial Sequence: Synthetic oligonucleotide
  Target: ANGPTL4; (-) strand; PAM type: NRG; PAM sequence: AGG
ggaacttagagaacagaaag

SEQ ID NO: 7087 - DNA, 20 bp, Artificial Sequence
  Description of Artificial Sequence: Synthetic oligonucleotide
  Target: ANGPTL4; (-) strand; PAM type: NRG; PAM sequence: GAG
aggaacttagagaacagaaa

SEQ ID NO: 7088 - DNA, 20 bp, Artificial Sequence
  Description of Artificial Sequence: Synthetic oligonucleotide
  Target: ANGPTL4; (-) strand; PAM type: NRG; PAM sequence: AAG
gcaggaacttagagaacaga

SEQ ID NO: 7089 - DNA, 20 bp, Artificial Sequence
  Description of Artificial Sequence: Synthetic oligonucleotide
  Target: ANGPTL4; (-) strand; PAM type: NRG; PAM sequence: CAG
taaagcaggaacttagagaa

SEQ ID NO: 7090 - DNA, 20 bp, Artificial Sequence
  Description of Artificial Sequence: Synthetic oligonucleotide
  Target: ANGPTL4; (-) strand; PAM type: NRG; PAM sequence: GAG
tataataaagcaggaactta

SEQ ID NO: 7091 - DNA, 20 bp, Artificial Sequence
  Description of Artificial Sequence: Synthetic oligonucleotide
  Target: ANGPTL4; (-) strand; PAM type: NRG; PAM sequence: TAG
cctataataaagcaggaact

SEQ ID NO: 7092 - DNA, 20 bp, Artificial Sequence
  Description of Artificial Sequence: Synthetic oligonucleotide
  Target: ANGPTL4; (-) strand; PAM type: NRG; PAM sequence: AGG
agctttgcctataataaagc

SEQ ID NO: 7093 - DNA, 20 bp, Artificial Sequence
  Description of Artificial Sequence: Synthetic oligonucleotide
  Target: ANGPTL4; (-) strand; PAM type: NRG; PAM sequence: CAG
gagctttgcctataataaag

SEQ ID NO: 7094 - DNA, 20 bp, Artificial Sequence
  Description of Artificial Sequence: Synthetic oligonucleotide
  Target: ANGPTL4; (-) strand; PAM type: NRG; PAM sequence: AAG
cctgagctttgcctataata

SEQ ID NO: 7095 - DNA, 20 bp, Artificial Sequence
  Description of Artificial Sequence: Synthetic oligonucleotide
  Target: ANGPTL4; (-) strand; PAM type: NRG; PAM sequence: GAG
gccagggtctttaatgtcct

SEQ ID NO: 7096 - DNA, 20 bp, Artificial Sequence
  Description of Artificial Sequence: Synthetic oligonucleotide
  Target: ANGPTL4; (-) strand; PAM type: NRG; PAM sequence: GGG
tagcctaccctctaccgcca

SEQ ID NO: 7097 - DNA, 20 bp, Artificial Sequence
  Description of Artificial Sequence: Synthetic oligonucleotide
  Target: ANGPTL4; (-) strand; PAM type: NRG; PAM sequence: AGG
atagcctaccctctaccgcc

SEQ ID NO: 7098 - DNA, 20 bp, Artificial Sequence
  Description of Artificial Sequence: Synthetic oligonucleotide
  Target: ANGPTL4; (-) strand; PAM type: NRG; PAM sequence: CAG
catagcctaccctctaccgc

SEQ ID NO: 7099 - DNA, 20 bp, Artificial Sequence
  Description of Artificial Sequence: Synthetic oligonucleotide
  Target: ANGPTL4; (-) strand; PAM type: NRG; PAM sequence: TAG
ggatcagggcctcaccccca

SEQ ID NO: 7100 - DNA, 20 bp, Artificial Sequence
  Description of Artificial Sequence: Synthetic oligonucleotide
  Target: ANGPTL4; (-) strand; PAM type: NRG; PAM sequence: GGG
tagcggcaggacttggatca

SEQ ID NO: 7101 - DNA, 20 bp, Artificial Sequence
  Description of Artificial Sequence: Synthetic oligonucleotide
  Target: ANGPTL4; (-) strand; PAM type: NRG; PAM sequence: AGG
ttagcggcaggacttggatc

SEQ ID NO: 7102 - DNA, 20 bp, Artificial Sequence
  Description of Artificial Sequence: Synthetic oligonucleotide
  Target: ANGPTL4; (-) strand; PAM type: NRG; PAM sequence: CAG
cttagcggcaggacttggat

SEQ ID NO: 7103 - DNA, 20 bp, Artificial Sequence
  Description of Artificial Sequence: Synthetic oligonucleotide
  Target: ANGPTL4; (-) strand; PAM type: NRG; PAM sequence: TGG
agtgccttagcggcaggact

SEQ ID NO: 7104 - DNA, 20 bp, Artificial Sequence
  Description of Artificial Sequence: Synthetic oligonucleotide
  Target: ANGPTL4; (-) strand; PAM type: NRG; PAM sequence: AGG
attatgagtgccttagcggc

SEQ ID NO: 7105 - DNA, 20 bp, Artificial Sequence
  Description of Artificial Sequence: Synthetic oligonucleotide
  Target: ANGPTL4; (-) strand; PAM type: NRG; PAM sequence: CAG
aattatgagtgccttagcgg

SEQ ID NO: 7106 - DNA, 20 bp, Artificial Sequence
  Description of Artificial Sequence: Synthetic oligonucleotide
  Target: ANGPTL4; (-) strand; PAM type: NRG; PAM sequence: CGG
cgaaattatgagtgccttag

SEQ ID NO: 7107 - DNA, 20 bp, Artificial Sequence
  Description of Artificial Sequence: Synthetic oligonucleotide
  Target: ANGPTL4; (-) strand; PAM type: NRG; PAM sequence: TAG
gcccgaaattatgagtgcct

SEQ ID NO: 7108 - DNA, 20 bp, Artificial Sequence
  Description of Artificial Sequence: Synthetic oligonucleotide
  Target: ANGPTL4; (-) strand; PAM type: NRG; PAM sequence: GAG
tcccctgagcccgaaattat

SEQ ID NO: 7109 - DNA, 20 bp, Artificial Sequence
  Description of Artificial Sequence: Synthetic oligonucleotide
  Target: ANGPTL4; (-) strand; PAM type: NRG; PAM sequence: GAG
ttgacttccatttctcccct

SEQ ID NO: 7110 - DNA, 20 bp, Artificial Sequence
  Description of Artificial Sequence: Synthetic oligonucleotide
  Target: ANGPTL4; (-) strand; PAM type: NRG; PAM sequence: GAG
gtcatcgcagctgtgtttat

SEQ ID NO: 7111 - DNA, 20 bp, Artificial Sequence
  Description of Artificial Sequence: Synthetic oligonucleotide
  Target: ANGPTL4; (-) strand; PAM type: NRG; PAM sequence: CAG
cgtgaaagggttcgtcatcg

SEQ ID NO: 7112 - DNA, 20 bp, Artificial Sequence
  Description of Artificial Sequence: Synthetic oligonucleotide
  Target: ANGPTL4; (-) strand; PAM type: NRG; PAM sequence: GGG
gcatgttccttcccgtgaaa

SEQ ID NO: 7113 - DNA, 20 bp, Artificial Sequence
  Description of Artificial Sequence: Synthetic oligonucleotide
  Target: ANGPTL4; (-) strand; PAM type: NRG; PAM sequence: AGG
cgcatgttccttcccgtgaa

SEQ ID NO: 7114 - DNA, 20 bp, Artificial Sequence
  Description of Artificial Sequence: Synthetic oligonucleotide
  Target: ANGPTL4; (-) strand; PAM type: NRG; PAM sequence: AAG
tcgcatgttccttcccgtga

SEQ ID NO: 7115 - DNA, 20 bp, Artificial Sequence
  Description of Artificial Sequence: Synthetic oligonucleotide
  Target: ANGPTL4; (-) strand; PAM type: NRG; PAM sequence: GGG
agaccaggagagacttttct

SEQ ID NO: 7116 - DNA, 20 bp, Artificial Sequence
  Description of Artificial Sequence: Synthetic oligonucleotide
  Target: ANGPTL4; (-) strand; PAM type: NRG; PAM sequence: TGG
aagaccaggagagacttttc

SEQ ID NO: 7117 - DNA, 20 bp, Artificial Sequence
  Description of Artificial Sequence: Synthetic oligonucleotide
  Target: ANGPTL4; (-) strand; PAM type: NRG; PAM sequence: GAG
cctccatcccaagaccagga

SEQ ID NO: 7118 - DNA, 20 bp, Artificial Sequence
  Description of Artificial Sequence: Synthetic oligonucleotide
  Target: ANGPTL4; (-) strand; PAM type: NRG; PAM sequence: GAG
gacctccatcccaagaccag

SEQ ID NO: 7119 - DNA, 20 bp, Artificial Sequence
  Description of Artificial Sequence: Synthetic oligonucleotide
  Target: ANGPTL4; (-) strand; PAM type: NRG; PAM sequence: AGG
gtgacctccatcccaagacc

SEQ ID NO: 7120 - DNA, 20 bp, Artificial Sequence
  Description of Artificial Sequence: Synthetic oligonucleotide
  Target: ANGPTL4; (-) strand; PAM type: NRG; PAM sequence: CAG
tgtgacctccatcccaagac

SEQ ID NO: 7121 - DNA, 20 bp, Artificial Sequence
  Description of Artificial Sequence: Synthetic oligonucleotide
  Target: ANGPTL4; (-) strand; PAM type: NRG; PAM sequence: AAG
cttcgtgtgacctccatccc

SEQ ID NO: 7122 - DNA, 20 bp, Artificial Sequence
  Description of Artificial Sequence: Synthetic oligonucleotide
  Target: ANGPTL4; (-) strand; PAM type: NRG; PAM sequence: AGG
caaaagtccttgccttgcgg

SEQ ID NO: 7123 - DNA, 20 bp, Artificial Sequence
  Description of Artificial Sequence: Synthetic oligonucleotide
  Target: ANGPTL4; (-) strand; PAM type: NRG; PAM sequence: GAG
ccaaaagtccttgccttgcg

SEQ ID NO: 7124 - DNA, 20 bp, Artificial Sequence
  Description of Artificial Sequence: Synthetic oligonucleotide
  Target: ANGPTL4; (-) strand; PAM type: NRG; PAM sequence: CGG
caccaaaagtccttgccttg

SEQ ID NO: 7125 - DNA, 20 bp, Artificial Sequence
  Description of Artificial Sequence: Synthetic oligonucleotide
  Target: ANGPTL4; (-) strand; PAM type: NRG; PAM sequence: AAG
cggagcccggaactcaccaa

SEQ ID NO: 7126 - DNA, 20 bp, Artificial Sequence
  Description of Artificial Sequence: Synthetic oligonucleotide
  Target: ANGPTL4; (-) strand; PAM type: NRG; PAM sequence: CGG
gagctgagttcagcggagcc

SEQ ID NO: 7127 - DNA, 20 bp, Artificial Sequence
  Description of Artificial Sequence: Synthetic oligonucleotide
  Target: ANGPTL4; (-) strand; PAM type: NRG; PAM sequence: GAG
aaaaagagctgagttcagcg

SEQ ID NO: 7128 - DNA, 20 bp, Artificial Sequence
  Description of Artificial Sequence: Synthetic oligonucleotide
  Target: ANGPTL4; (-) strand; PAM type: NRG; PAM sequence: CGG
agaaaaagagctgagttcag

SEQ ID NO: 7129 - DNA, 20 bp, Artificial Sequence
  Description of Artificial Sequence: Synthetic oligonucleotide
  Target: ANGPTL4; (-) strand; PAM type: NRG; PAM sequence: CAG
aaaagaaaaagagctgagtt

SEQ ID NO: 7130 - DNA, 20 bp, Artificial Sequence
  Description of Artificial Sequence: Synthetic oligonucleotide
  Target: ANGPTL4; (-) strand; PAM type: NRG; PAM sequence: GAG
gaaggaaaagaaaaagagct

SEQ ID NO: 7131 - DNA, 20 bp, Artificial Sequence
  Description of Artificial Sequence: Synthetic oligonucleotide
  Target: ANGPTL4; (-) strand; PAM type: NRG; PAM sequence: GAG
gaaaggaaggaaaagaaaaa

SEQ ID NO: 7132 - DNA, 20 bp, Artificial Sequence
  Description of Artificial Sequence: Synthetic oligonucleotide
  Target: ANGPTL4; (-) strand; PAM type: NRG; PAM sequence: AAG
aagaaaggaaggaaaagaaa

SEQ ID NO: 7133 - DNA, 20 bp, Artificial Sequence
  Description of Artificial Sequence: Synthetic oligonucleotide
  Target: ANGPTL4; (-) strand; PAM type: NRG; PAM sequence: AAG
gaaggaaagaaaggaaggaa

SEQ ID NO: 7134 - DNA, 20 bp, Artificial Sequence
  Description of Artificial Sequence: Synthetic oligonucleotide
  Target: ANGPTL4; (-) strand; PAM type: NRG; PAM sequence: AGG
aggaagaaggaaagaaagga

SEQ ID NO: 7135 - DNA, 20 bp, Artificial Sequence
  Description of Artificial Sequence: Synthetic oligonucleotide
  Target: ANGPTL4; (-) strand; PAM type: NRG; PAM sequence: AAG
aaggaagaaggaaagaaagg

SEQ ID NO: 7136 - DNA, 20 bp, Artificial Sequence
  Description of Artificial Sequence: Synthetic oligonucleotide
  Target: ANGPTL4; (-) strand; PAM type: NRG; PAM sequence: AGG
agaaaggaagaaggaaagaa

SEQ ID NO: 7137 - DNA, 20 bp, Artificial Sequence
  Description of Artificial Sequence: Synthetic oligonucleotide
  Target: ANGPTL4; (-) strand; PAM type: NRG; PAM sequence: AAG
aagaaaggaagaaggaaaga

SEQ ID NO: 7138 - DNA, 20 bp, Artificial Sequence
  Description of Artificial Sequence: Synthetic oligonucleotide
  Target: ANGPTL4; (-) strand; PAM type: NRG; PAM sequence: AAG
gggaaagaaaggaagaagga

SEQ ID NO: 7139 - DNA, 20 bp, Artificial Sequence
  Description of Artificial Sequence: Synthetic oligonucleotide
  Target: ANGPTL4; (-) strand; PAM type: NRG; PAM sequence: AGG
aggagggaaagaaaggaaga

SEQ ID NO: 7140 - DNA, 20 bp, Artificial Sequence
  Description of Artificial Sequence: Synthetic oligonucleotide
  Target: ANGPTL4; (-) strand; PAM type: NRG; PAM sequence: AAG
aaggagggaaagaaaggaag

SEQ ID NO: 7141 - DNA, 20 bp, Artificial Sequence
  Description of Artificial Sequence: Synthetic oligonucleotide
  Target: ANGPTL4; (-) strand; PAM type: NRG; PAM sequence: AAG
aggaaggagggaaagaaagg

SEQ ID NO: 7142 - DNA, 20 bp, Artificial Sequence
  Description of Artificial Sequence: Synthetic oligonucleotide
  Target: ANGPTL4; (-) strand; PAM type: NRG; PAM sequence: AGG
ggaaggaaggagggaaagaa

SEQ ID NO: 7143 - DNA, 20 bp, Artificial Sequence
  Description of Artificial Sequence: Synthetic oligonucleotide
  Target: ANGPTL4; (-) strand; PAM type: NRG; PAM sequence: AAG
aggaaggaaggagggaaaga

SEQ ID NO: 7144 - DNA, 20 bp, Artificial Sequence
  Description of Artificial Sequence: Synthetic oligonucleotide
  Target: ANGPTL4; (-) strand; PAM type: NRG; PAM sequence: AAG
aggaaggaaggaaggaggga

SEQ ID NO: 7145 - DNA, 20 bp, Artificial Sequence
  Description of Artificial Sequence: Synthetic oligonucleotide
  Target: ANGPTL4; (-) strand; PAM type: NRG; PAM sequence: GGG
aaagaggaaggaaggaagga

SEQ ID NO: 7146 - DNA, 20 bp, Artificial Sequence
  Description of Artificial Sequence: Synthetic oligonucleotide
  Target: ANGPTL4; (-) strand; PAM type: NRG; PAM sequence: AGG
gaaagaggaaggaaggaagg

SEQ ID NO: 7147 - DNA, 20 bp, Artificial Sequence
  Description of Artificial Sequence: Synthetic oligonucleotide
  Target: ANGPTL4; (-) strand; PAM type: NRG; PAM sequence: GAG
agaaagaggaaggaaggaag

SEQ ID NO: 7148 - DNA, 20 bp, Artificial Sequence
  Description of Artificial Sequence: Synthetic oligonucleotide
  Target: ANGPTL4; (-) strand; PAM type: NRG; PAM sequence: AGG
agagaaagaggaaggaagga

SEQ ID NO: 7149 - DNA, 20 bp, Artificial Sequence
  Description of Artificial Sequence: Synthetic oligonucleotide
  Target: ANGPTL4; (-) strand; PAM type: NRG; PAM sequence: AAG
gagagaaagaggaaggaagg

SEQ ID NO: 7150 - DNA, 20 bp, Artificial Sequence
  Description of Artificial Sequence: Synthetic oligonucleotide
  Target: ANGPTL4; (-) strand; PAM type: NRG; PAM sequence: AGG
aaagagagaaagaggaagga

SEQ ID NO: 7151 - DNA, 20 bp, Artificial Sequence
  Description of Artificial Sequence: Synthetic oligonucleotide
  Target: ANGPTL4; (-) strand; PAM type: NRG; PAM sequence: AAG
gaaagagagaaagaggaagg

SEQ ID NO: 7152 - DNA, 20 bp, Artificial Sequence
  Description of Artificial Sequence: Synthetic oligonucleotide
  Target: ANGPTL4; (-) strand; PAM type: NRG; PAM sequence: AGG
aaggaaagagagaaagagga

SEQ ID NO: 7153 - DNA, 20 bp, Artificial Sequence
  Description of Artificial Sequence: Synthetic oligonucleotide
  Target: ANGPTL4; (-) strand; PAM type: NRG; PAM sequence: AAG
aaaggaaagagagaaagagg

SEQ ID NO: 7154 - DNA, 20 bp, Artificial Sequence
  Description of Artificial Sequence: Synthetic oligonucleotide
  Target: ANGPTL4; (-) strand; PAM type: NRG; PAM sequence: AGG
gagaaaggaaagagagaaag

SEQ ID NO: 7155 - DNA, 20 bp, Artificial Sequence
  Description of Artificial Sequence: Synthetic oligonucleotide
  Target: ANGPTL4; (-) strand; PAM type: NRG; PAM sequence: GAG
agagaaaggaaagagagaaa

SEQ ID NO: 7156 - DNA, 20 bp, Artificial Sequence
  Description of Artificial Sequence: Synthetic oligonucleotide
  Target: ANGPTL4; (-) strand; PAM type: NRG; PAM sequence: AAG
agagagaaaggaaagagaga

SEQ ID NO: 7157 - DNA, 20 bp, Artificial Sequence
  Description of Artificial Sequence: Synthetic oligonucleotide
  Target: ANGPTL4; (-) strand; PAM type: NRG; PAM sequence: GAG
agagagagagaaaggaaaga

SEQ ID NO: 7158 - DNA, 20 bp, Artificial Sequence
  Description of Artificial Sequence: Synthetic oligonucleotide
  Target: ANGPTL4; (-) strand; PAM type: NRG; PAM sequence: GAG
aaagagagagagaaaggaaa

SEQ ID NO: 7159 - DNA, 20 bp, Artificial Sequence
  Description of Artificial Sequence: Synthetic oligonucleotide
  Target: ANGPTL4; (-) strand; PAM type: NRG; PAM sequence: AAG
gaaaagagagagagaaagga

SEQ ID NO: 7160 - DNA, 20 bp, Artificial Sequence
  Description of Artificial Sequence: Synthetic oligonucleotide
  Target: ANGPTL4; (-) strand; PAM type: NRG; PAM sequence: AGG
gagagaaaagagagagagaa

SEQ ID NO: 7161 - DNA, 20 bp, Artificial Sequence
  Description of Artificial Sequence: Synthetic oligonucleotide
  Target: ANGPTL4; (-) strand; PAM type: NRG; PAM sequence: AAG
agagagaaaagagagagaga

SEQ ID NO: 7162 - DNA, 20 bp, Artificial Sequence
  Description of Artificial Sequence: Synthetic oligonucleotide
  Target: ANGPTL4; (-) strand; PAM type: NRG; PAM sequence: GAG
agagagagagaaaagagaga

SEQ ID NO: 7163 - DNA, 20 bp, Artificial Sequence
  Description of Artificial Sequence: Synthetic oligonucleotide
  Target: ANGPTL4; (-) strand; PAM type: NRG; PAM sequence: GAG
agagagagagagaaaagaga

SEQ ID NO: 7164 - DNA, 20 bp, Artificial Sequence
  Description of Artificial Sequence: Synthetic oligonucleotide
  Target: ANGPTL4; (-) strand; PAM type: NRG; PAM sequence: GAG
ggagagagagagagaaaaga

SEQ ID NO: 7165 - DNA, 20 bp, Artificial Sequence
  Description of Artificial Sequence: Synthetic oligonucleotide
  Target: ANGPTL4; (-) strand; PAM type: NRG; PAM sequence: GAG
aaggagagagagagagaaaa

SEQ ID NO: 7166 - DNA, 20 bp, Artificial Sequence
  Description of Artificial Sequence: Synthetic oligonucleotide
  Target: ANGPTL4; (-) strand; PAM type: NRG; PAM sequence: AAG
agaaggagagagagagagaa

SEQ ID NO: 7167 - DNA, 20 bp, Artificial Sequence
  Description of Artificial Sequence: Synthetic oligonucleotide
  Target: ANGPTL4; (-) strand; PAM type: NRG; PAM sequence: GAG
agggaagaaggagagagaga

SEQ ID NO: 7168 - DNA, 20 bp, Artificial Sequence
  Description of Artificial Sequence: Synthetic oligonucleotide
  Target: ANGPTL4; (-) strand; PAM type: NRG; PAM sequence: GAG
ggagggaagaaggagagaga

SEQ ID NO: 7169 - DNA, 20 bp, Artificial Sequence
  Description of Artificial Sequence: Synthetic oligonucleotide
  Target: ANGPTL4; (-) strand; PAM type: NRG; PAM sequence: GAG
agggagggaagaaggagaga

SEQ ID NO: 7170 - DNA, 20 bp, Artificial Sequence
  Description of Artificial Sequence: Synthetic oligonucleotide
  Target: ANGPTL4; (-) strand; PAM type: NRG; PAM sequence: GAG
ggagggagggaagaaggaga

SEQ ID NO: 7171 - DNA, 20 bp, Artificial Sequence
  Description of Artificial Sequence: Synthetic oligonucleotide
  Target: ANGPTL4; (-) strand; PAM type: NRG; PAM sequence: GAG
agggagggagggaagaagga

SEQ ID NO: 7172 - DNA, 20 bp, Artificial Sequence
  Description of Artificial Sequence: Synthetic oligonucleotide
  Target: ANGPTL4; (-) strand; PAM type: NRG; PAM sequence: GAG
gtagggagggagggaagaag

SEQ ID NO: 7173 - DNA, 20 bp, Artificial Sequence
  Description of Artificial Sequence: Synthetic oligonucleotide
  Target: ANGPTL4; (-) strand; PAM type: NRG; PAM sequence: AGG
aggtagggagggagggaaga

SEQ ID NO: 7174 - DNA, 20 bp, Artificial Sequence
  Description of Artificial Sequence: Synthetic oligonucleotide
  Target: ANGPTL4; (-) strand; PAM type: NRG; PAM sequence: AAG
gaggtagggagggagggaag

SEQ ID NO: 7175 - DNA, 20 bp, Artificial Sequence
  Description of Artificial Sequence: Synthetic oligonucleotide
  Target: ANGPTL4; (-) strand; PAM type: NRG; PAM sequence: AAG
agagaggtagggagggaggg

SEQ ID NO: 7176 - DNA, 20 bp, Artificial Sequence
  Description of Artificial Sequence: Synthetic oligonucleotide
  Target: ANGPTL4; (-) strand; PAM type: NRG; PAM sequence: GGG
gagagagaggtagggaggga

SEQ ID NO: 7177 - DNA, 20 bp, Artificial Sequence
  Description of Artificial Sequence: Synthetic oligonucleotide
  Target: ANGPTL4; (-) strand; PAM type: NRG; PAM sequence: AGG
agagagagaggtagggaggg

SEQ ID NO: 7178 - DNA, 20 bp, Artificial Sequence
  Description of Artificial Sequence: Synthetic oligonucleotide
  Target: ANGPTL4; (-) strand; PAM type: NRG; PAM sequence: GAG
aagagagagaggtagggagg

SEQ ID NO: 7179 - DNA, 20 bp, Artificial Sequence
  Description of Artificial Sequence: Synthetic oligonucleotide
  Target: ANGPTL4; (-) strand; PAM type: NRG; PAM sequence: GGG
aaaagagagagaggtaggga

SEQ ID NO: 7180 - DNA, 20 bp, Artificial Sequence
  Description of Artificial Sequence: Synthetic oligonucleotide
  Target: ANGPTL4; (-) strand; PAM type: NRG; PAM sequence: AGG
gaaaagagagagaggtaggg

SEQ ID NO: 7181 - DNA, 20 bp, Artificial Sequence
  Description of Artificial Sequence: Synthetic oligonucleotide
  Target: ANGPTL4; (-) strand; PAM type: NRG; PAM sequence: GAG
agaaaagagagagaggtagg

SEQ ID NO: 7182 - DNA, 20 bp, Artificial Sequence
  Description of Artificial Sequence: Synthetic oligonucleotide
  Target: ANGPTL4; (-) strand; PAM type: NRG; PAM sequence: GGG
aaagaaaagagagagaggta

SEQ ID NO: 7183 - DNA, 20 bp, Artificial Sequence
  Description of Artificial Sequence: Synthetic oligonucleotide
  Target: ANGPTL4; (-) strand; PAM type: NRG; PAM sequence: AGG
aaaagaaaagagagagaggt

SEQ ID NO: 7184 - DNA, 20 bp, Artificial Sequence
  Description of Artificial Sequence: Synthetic oligonucleotide
  Target: ANGPTL4; (-) strand; PAM type: NRG; PAM sequence: TAG
aaaaagaaaagagagagagg

SEQ ID NO: 7185 - DNA, 20 bp, Artificial Sequence
  Description of Artificial Sequence: Synthetic oligonucleotide
  Target: ANGPTL4; (-) strand; PAM type: NRG; PAM sequence: AGG
cggaaaaagaaaagagagag

SEQ ID NO: 7186 - DNA, 20 bp, Artificial Sequence
  Description of Artificial Sequence: Synthetic oligonucleotide
  Target: ANGPTL4; (-) strand; PAM type: NRG; PAM sequence: GAG
acggaaaaagaaaagagaga

SEQ ID NO: 7187 - DNA, 20 bp, Artificial Sequence
  Description of Artificial Sequence: Synthetic oligonucleotide
  Target: ANGPTL4; (-) strand; PAM type: NRG; PAM sequence: GAG
ggacggaaaaagaaaagaga

SEQ ID NO: 7188 - DNA, 20 bp, Artificial Sequence
  Description of Artificial Sequence: Synthetic oligonucleotide
  Target: ANGPTL4; (-) strand; PAM type: NRG; PAM sequence: GAG
aaggacggaaaaagaaaaga

SEQ ID NO: 7189 - DNA, 20 bp, Artificial Sequence
  Description of Artificial Sequence: Synthetic oligonucleotide
  Target: ANGPTL4; (-) strand; PAM type: NRG; PAM sequence: GAG
ggaaggacggaaaaagaaaa

SEQ ID NO: 7190 - DNA, 20 bp, Artificial Sequence
  Description of Artificial Sequence: Synthetic oligonucleotide
  Target: ANGPTL4; (-) strand; PAM type: NRG; PAM sequence: AAG
aaggaaggacggaaaaagaa

SEQ ID NO: 7191 - DNA, 20 bp, Artificial Sequence
  Description of Artificial Sequence: Synthetic oligonucleotide
  Target: ANGPTL4; (-) strand; PAM type: NRG; PAM sequence: AAG
gaaggaaggaaggacggaaa

SEQ ID NO: 7192 - DNA, 20 bp, Artificial Sequence
  Description of Artificial Sequence: Synthetic oligonucleotide
  Target: ANGPTL4; (-) strand; PAM type: NRG; PAM sequence: CGG
aggaaagaaggaaggaagga

SEQ ID NO: 7193 - DNA, 20 bp, Artificial Sequence
  Description of Artificial Sequence: Synthetic oligonucleotide
  Target: ANGPTL4; (-) strand; PAM type: NRG; PAM sequence: AGG
aagaaggaaagaaggaagga

SEQ ID NO: 7194 - DNA, 20 bp, Artificial Sequence
  Description of Artificial Sequence: Synthetic oligonucleotide
  Target: ANGPTL4; (-) strand; PAM type: NRG; PAM sequence: AAG
aaagaaggaaagaaggaagg

SEQ ID NO: 7195 - DNA, 20 bp, Artificial Sequence
  Description of Artificial Sequence: Synthetic oligonucleotide
  Target: ANGPTL4; (-) strand; PAM type: NRG; PAM sequence: AGG
gagaaagaaggaaagaagga

SEQ ID NO: 7196 - DNA, 20 bp, Artificial Sequence
  Description of Artificial Sequence: Synthetic oligonucleotide
  Target: ANGPTL4; (-) strand; PAM type: NRG; PAM sequence: AAG
agagaaagaaggaaagaagg

SEQ ID NO: 7197 - DNA, 20 bp, Artificial Sequence
  Description of Artificial Sequence: Synthetic oligonucleotide
  Target: ANGPTL4; (-) strand; PAM type: NRG; PAM sequence: AGG
gagagagaaagaaggaaaga

SEQ ID NO: 7198 - DNA, 20 bp, Artificial Sequence
  Description of Artificial Sequence: Synthetic oligonucleotide
  Target: ANGPTL4; (-) strand; PAM type: NRG; PAM sequence: AAG
agagagagaaagaaggaaag

SEQ ID NO: 7199 - DNA, 20 bp, Artificial Sequence
  Description of Artificial Sequence: Synthetic oligonucleotide
  Target: ANGPTL4; (-) strand; PAM type: NRG; PAM sequence: AAG
aaaagagagagaaagaagga

SEQ ID NO: 7200 - DNA, 20 bp, Artificial Sequence
  Description of Artificial Sequence: Synthetic oligonucleotide
  Target: ANGPTL4; (-) strand; PAM type: NRG; PAM sequence: AGG
aaagaaaagagagagaaaga

SEQ ID NO: 7201 - DNA, 20 bp, Artificial Sequence
  Description of Artificial Sequence: Synthetic oligonucleotide
  Target: ANGPTL4; (-) strand; PAM type: NRG; PAM sequence: AAG
gaaagaaaagagagagaaag

SEQ ID NO: 7202 - DNA, 20 bp, Artificial Sequence
  Description of Artificial Sequence: Synthetic oligonucleotide
  Target: ANGPTL4; (-) strand; PAM type: NRG; PAM sequence: AAG
aaagaaagaaaagagagaga

SEQ ID NO: 7203 - DNA, 20 bp, Artificial Sequence
  Description of Artificial Sequence: Synthetic oligonucleotide
  Target: ANGPTL4; (-) strand; PAM type: NRG; PAM sequence: GAG
aagaaaagaaagaaaagaga

SEQ ID NO: 7204 - DNA, 20 bp, Artificial Sequence
  Description of Artificial Sequence: Synthetic oligonucleotide
  Target: ANGPTL4; (-) strand; PAM type: NRG; PAM sequence: GAG
aaaagaaaagaaagaaaaga

SEQ ID NO: 7205 - DNA, 20 bp, Artificial Sequence
  Description of Artificial Sequence: Synthetic oligonucleotide
  Target: ANGPTL4; (-) strand; PAM type: NRG; PAM sequence: GAG
agaaaagaaaagaaagaaaa

SEQ ID NO: 7206 - DNA, 20 bp, Artificial Sequence
  Description of Artificial Sequence: Synthetic oligonucleotide
  Target: ANGPTL4; (-) strand; PAM type: NRG; PAM sequence: AAG
aaagaaaagaaaagaaagaa

SEQ ID NO: 7207 - DNA, 20 bp, Artificial Sequence
  Description of Artificial Sequence: Synthetic oligonucleotide
  Target: ANGPTL4; (-) strand; PAM type: NRG; PAM sequence: AAG
agagaaaagaaaagaaaaga

SEQ ID NO: 7208 - DNA, 20 bp, Artificial Sequence
  Description of Artificial Sequence: Synthetic oligonucleotide
  Target: ANGPTL4; (-) strand; PAM type: NRG; PAM sequence: AAG
aagaagagaaaagaaaagaa

SEQ ID NO: 7209 - DNA, 20 bp, Artificial Sequence
  Description of Artificial Sequence: Synthetic oligonucleotide
  Target: ANGPTL4; (-) strand; PAM type: NRG; PAM sequence: AAG
aatgaaagaagagaaaagaa

SEQ ID NO: 7210 - DNA, 20 bp, Artificial Sequence
  Description of Artificial Sequence: Synthetic oligonucleotide
  Target: ANGPTL4; (-) strand; PAM type: NRG; PAM sequence: AAG
ctcaaaatgaaagaagagaa

SEQ ID NO: 7211 - DNA, 20 bp, Artificial Sequence
  Description of Artificial Sequence: Synthetic oligonucleotide
  Target: ANGPTL4; (-) strand; PAM type: NRG; PAM sequence: GAG
tacgtctcaaaatgaaagaa

SEQ ID NO: 7212 - DNA, 20 bp, Artificial Sequence
  Description of Artificial Sequence: Synthetic oligonucleotide
  Target: ANGPTL4; (-) strand; PAM type: NRG; PAM sequence: AAG
agtacgtctcaaaatgaaag

SEQ ID NO: 7213 - DNA, 20 bp, Artificial Sequence
  Description of Artificial Sequence: Synthetic oligonucleotide
  Target: ANGPTL4; (-) strand; PAM type: NRG; PAM sequence: AAG
cagagtacgtctcaaaatga

SEQ ID NO: 7214 - DNA, 20 bp, Artificial Sequence
  Description of Artificial Sequence: Synthetic oligonucleotide
  Target: ANGPTL4; (-) strand; PAM type: NRG; PAM sequence: GAG
cagcctgggcgacagagcca

SEQ ID NO: 7215 - DNA, 20 bp, Artificial Sequence
  Description of Artificial Sequence: Synthetic oligonucleotide
  Target: ANGPTL4; (-) strand; PAM type: NRG; PAM sequence: CAG
tccagcctgggcgacagagc

SEQ ID NO: 7216 - DNA, 20 bp, Artificial Sequence
  Description of Artificial Sequence: Synthetic oligonucleotide
  Target: ANGPTL4; (-) strand; PAM type: NRG; PAM sequence: GAG
gcgctccagcctgggcgaca

SEQ ID NO: 7217 - DNA, 20 bp, Artificial Sequence
  Description of Artificial Sequence: Synthetic oligonucleotide
  Target: ANGPTL4; (-) strand; PAM type: NRG; PAM sequence: CAG
ttgcgctccagcctgggcga

SEQ ID NO: 7218 - DNA, 20 bp, Artificial Sequence
  Description of Artificial Sequence: Synthetic oligonucleotide
  Target: ANGPTL4; (-) strand; PAM type: NRG; PAM sequence: GGG
gcgccattgcgctccagcct

SEQ ID NO: 7219 - DNA, 20 bp, Artificial Sequence
  Description of Artificial Sequence: Synthetic oligonucleotide
  Target: ANGPTL4; (-) strand; PAM type: NRG; PAM sequence: TGG
ggcgccattgcgctccagcc

SEQ ID NO: 7220 - DNA, 20 bp, Artificial Sequence
  Description of Artificial Sequence: Synthetic oligonucleotide
  Target: ANGPTL4; (-) strand; PAM type: NRG; PAM sequence: CAG
gagatggcgccattgcgctc

SEQ ID NO: 7221 - DNA, 20 bp, Artificial Sequence
  Description of Artificial Sequence: Synthetic oligonucleotide
  Target: ANGPTL4; (-) strand; PAM type: NRG; PAM sequence: TGG
gaggttgcagtgcgccgaga

SEQ ID NO: 7222 - DNA, 20 bp, Artificial Sequence
  Description of Artificial Sequence: Synthetic oligonucleotide
  Target: ANGPTL4; (-) strand; PAM type: NRG; PAM sequence: GAG
ggtggaggttgcagtgcgcc

SEQ ID NO: 7223 - DNA, 20 bp, Artificial Sequence
  Description of Artificial Sequence: Synthetic oligonucleotide
  Target: ANGPTL4; (-) strand; PAM type: NRG; PAM sequence: CAG
aacccgggaggtggaggttg

SEQ ID NO: 7224 - DNA, 20 bp, Artificial Sequence
  Description of Artificial Sequence: Synthetic oligonucleotide
  Target: ANGPTL4; (-) strand; PAM type: NRG; PAM sequence: AGG
cgcttgaacccgggaggtgg

SEQ ID NO: 7225 - DNA, 20 bp, Artificial Sequence
  Description of Artificial Sequence: Synthetic oligonucleotide
  Target: ANGPTL4; (-) strand; PAM type: NRG; PAM sequence: GAG
tcgcttgaacccgggaggtg

SEQ ID NO: 7226 - DNA, 20 bp, Artificial Sequence
  Description of Artificial Sequence: Synthetic oligonucleotide
  Target: ANGPTL4; (-) strand; PAM type: NRG; PAM sequence: TGG
aatcgcttgaacccgggagg

SEQ ID NO: 7227 - DNA, 20 bp, Artificial Sequence
  Description of Artificial Sequence: Synthetic oligonucleotide
  Target: ANGPTL4; (-) strand; PAM type: NRG; PAM sequence: AGG
tagaatcgcttgaacccggg

SEQ ID NO: 7228 - DNA, 20 bp, Artificial Sequence
  Description of Artificial Sequence: Synthetic oligonucleotide
  Target: ANGPTL4; (-) strand; PAM type: NRG; PAM sequence: GAG
gtagaatcgcttgaacccgg

SEQ ID NO: 7229 - DNA, 20 bp, Artificial Sequence
  Description of Artificial Sequence: Synthetic oligonucleotide
  Target: ANGPTL4; (-) strand; PAM type: NRG; PAM sequence: GGG
cagtagaatcgcttgaaccc

SEQ ID NO: 7230 - DNA, 20 bp, Artificial Sequence
  Description of Artificial Sequence: Synthetic oligonucleotide
  Target: ANGPTL4; (-) strand; PAM type: NRG; PAM sequence: CGG
gcagtagaatcgcttgaacc

SEQ ID NO: 7231 - DNA, 20 bp, Artificial Sequence
  Description of Artificial Sequence: Synthetic oligonucleotide
  Target: ANGPTL4; (-) strand; PAM type: NRG; PAM sequence: TAG
tactcgggaggctgaggcag

SEQ ID NO: 7232 - DNA, 20 bp, Artificial Sequence
  Description of Artificial Sequence: Synthetic oligonucleotide
  Target: ANGPTL4; (-) strand; PAM type: NRG; PAM sequence: CAG
agctactcgggaggctgagg

SEQ ID NO: 7233 - DNA, 20 bp, Artificial Sequence
  Description of Artificial Sequence: Synthetic oligonucleotide
  Target: ANGPTL4; (-) strand; PAM type: NRG; PAM sequence: AGG
cccagctactcgggaggctg

SEQ ID NO: 7234 - DNA, 20 bp, Artificial Sequence
  Description of Artificial Sequence: Synthetic oligonucleotide
  Target: ANGPTL4; (-) strand; PAM type: NRG; PAM sequence: GAG
tcccagctactcgggaggct

SEQ ID NO: 7235 - DNA, 20 bp, Artificial Sequence
  Description of Artificial Sequence: Synthetic oligonucleotide
  Target: ANGPTL4; (-) strand; PAM type: NRG; PAM sequence: AGG
tgtagtcccagctactcggg

SEQ ID NO: 7236 - DNA, 20 bp, Artificial Sequence
  Description of Artificial Sequence: Synthetic oligonucleotide
  Target: ANGPTL4; (-) strand; PAM type: NRG; PAM sequence: GAG
ctgtagtcccagctactcgg

SEQ ID NO: 7237 - DNA, 20 bp, Artificial Sequence
  Description of Artificial Sequence: Synthetic oligonucleotide
  Target: ANGPTL4; (-) strand; PAM type: NRG; PAM sequence: GGG
gcctgtagtcccagctactc

SEQ ID NO: 7238 - DNA, 20 bp, Artificial Sequence
  Description of Artificial Sequence: Synthetic oligonucleotide
  Target: ANGPTL4; (-) strand; PAM type: NRG; PAM sequence: CGG
cgcctgtagtcccagctact

SEQ ID NO: 7239 - DNA, 20 bp, Artificial Sequence
  Description of Artificial Sequence: Synthetic oligonucleotide
  Target: ANGPTL4; (-) strand; PAM type: NRG; PAM sequence: CAG
gtagtgcgcgcctgtagtcc

SEQ ID NO: 7240 - DNA, 20 bp, Artificial Sequence
  Description of Artificial Sequence: Synthetic oligonucleotide
  Target: ANGPTL4; (-) strand; PAM type: NRG; PAM sequence: TAG
ggcttggtagtgcgcgcctg

SEQ ID NO: 7241 - DNA, 20 bp, Artificial Sequence
  Description of Artificial Sequence: Synthetic oligonucleotide
  Target: ANGPTL4; (-) strand; PAM type: NRG; PAM sequence: TAG
aaaaaattagccgggcttgg

SEQ ID NO: 7242 - DNA, 20 bp, Artificial Sequence
  Description of Artificial Sequence: Synthetic oligonucleotide
  Target: ANGPTL4; (-) strand; PAM type: NRG; PAM sequence: TGG
aaaaaaaaattagccgggct

SEQ ID NO: 7243 - DNA, 20 bp, Artificial Sequence
  Description of Artificial Sequence: Synthetic oligonucleotide
  Target: ANGPTL4; (-) strand; PAM type: NRG; PAM sequence: GGG
aatacaaaaaaaaattagcc

SEQ ID NO: 7244 - DNA, 20 bp, Artificial Sequence
  Description of Artificial Sequence: Synthetic oligonucleotide
  Target: ANGPTL4; (-) strand; PAM type: NRG; PAM sequence: CGG
aaatacaaaaaaaaattagc

SEQ ID NO: 7245 - DNA, 20 bp, Artificial Sequence
  Description of Artificial Sequence: Synthetic oligonucleotide
  Target: ANGPTL4; (-) strand; PAM type: NRG; PAM sequence: TAG
ctaaaaatacaaaaaaaaat

SEQ ID NO: 7246 - DNA, 20 bp, Artificial Sequence
  Description of Artificial Sequence: Synthetic oligonucleotide
  Target: ANGPTL4; (-) strand; PAM type: NRG; PAM sequence: CAG
ccggccaacatcgtgaaacc

SEQ ID NO: 7247 - DNA, 20 bp, Artificial Sequence
  Description of Artificial Sequence: Synthetic oligonucleotide
  Target: ANGPTL4; (-) strand; PAM type: NRG; PAM sequence: CGG
tcaagacttccagaccagcc

SEQ ID NO: 7248 - DNA, 20 bp, Artificial Sequence
  Description of Artificial Sequence: Synthetic oligonucleotide
  Target: ANGPTL4; (-) strand; PAM type: NRG; PAM sequence: CAG
tgaggtcaagacttccagac

SEQ ID NO: 7249 - DNA, 20 bp, Artificial Sequence
  Description of Artificial Sequence: Synthetic oligonucleotide
  Target: ANGPTL4; (-) strand; PAM type: NRG; PAM sequence: CAG
acgcttgaggtcaagacttc

SEQ ID NO: 7250 - DNA, 20 bp, Artificial Sequence
  Description of Artificial Sequence: Synthetic oligonucleotide
  Target: ANGPTL4; (-) strand; PAM type: NRG; PAM sequence: AAG
gagggcgcacgcttgaggtc

SEQ ID NO: 7251 - DNA, 20 bp, Artificial Sequence
  Description of Artificial Sequence: Synthetic oligonucleotide
  Target: ANGPTL4; (-) strand; PAM type: NRG; PAM sequence: AGG
gcggagagggcgcacgcttg

SEQ ID NO: 7252 - DNA, 20 bp, Artificial Sequence
  Description of Artificial Sequence: Synthetic oligonucleotide
  Target: ANGPTL4; (-) strand; PAM type: NRG; PAM sequence: GAG
ggcggagagggcgcacgctt

SEQ ID NO: 7253 - DNA, 20 bp, Artificial Sequence
  Description of Artificial Sequence: Synthetic oligonucleotide
  Target: ANGPTL4; (-) strand; PAM type: NRG; PAM sequence: GGG
gccttacccagtggcggaga

SEQ ID NO: 7254 - DNA, 20 bp, Artificial Sequence
  Description of Artificial Sequence: Synthetic oligonucleotide
  Target: ANGPTL4; (-) strand; PAM type: NRG; PAM sequence: AGG
cgccttacccagtggcggag

SEQ ID NO: 7255 - DNA, 20 bp, Artificial Sequence
  Description of Artificial Sequence: Synthetic oligonucleotide
  Target: ANGPTL4; (-) strand; PAM type: NRG; PAM sequence: GAG
ccgccttacccagtggcgga

SEQ ID NO: 7256 - DNA, 20 bp, Artificial Sequence
  Description of Artificial Sequence: Synthetic oligonucleotide
  Target: ANGPTL4; (-) strand; PAM type: NRG; PAM sequence: GAG
ccccgccttacccagtggcg

SEQ ID NO: 7257 - DNA, 20 bp, Artificial Sequence
  Description of Artificial Sequence: Synthetic oligonucleotide
  Target: ANGPTL4; (-) strand; PAM type: NRG; PAM sequence: CGG
gcccccgccttacccagtgg

SEQ ID NO: 7258 - DNA, 20 bp, Artificial Sequence
  Description of Artificial Sequence: Synthetic oligonucleotide
  Target: ANGPTL4; (-) strand; PAM type: NRG; PAM sequence: TGG
tccgcccccgccttacccag

SEQ ID NO: 7259 - DNA, 20 bp, Artificial Sequence
  Description of Artificial Sequence: Synthetic oligonucleotide
  Target: ANGPTL4; (-) strand; PAM type: NRG; PAM sequence: CAG
tattccgcccccgccttacc

SEQ ID NO: 7260 - DNA, 20 bp, Artificial Sequence
  Description of Artificial Sequence: Synthetic oligonucleotide
  Target: ANGPTL4; (-) strand; PAM type: NRG; PAM sequence: AAG
cgcctctagtgtgaaattgc

SEQ ID NO: 7261 - DNA, 20 bp, Artificial Sequence
  Description of Artificial Sequence: Synthetic oligonucleotide
  Target: ANGPTL4; (-) strand; PAM type: NRG; PAM sequence: TAG
tcccccacggtgcccgcctc

SEQ ID NO: 7262 - DNA, 20 bp, Artificial Sequence
  Description of Artificial Sequence: Synthetic oligonucleotide
  Target: ANGPTL4; (-) strand; PAM type: NRG; PAM sequence: CGG
cgtgactcttctttccccca

SEQ ID NO: 7263 - DNA, 20 bp, Artificial Sequence
  Description of Artificial Sequence: Synthetic oligonucleotide
  Target: ANGPTL4; (-) strand; PAM type: NRG; PAM sequence: GAG
ccttcctctacgaaccgtgg

SEQ ID NO: 7264 - DNA, 20 bp, Artificial Sequence
  Description of Artificial Sequence: Synthetic oligonucleotide
  Target: ANGPTL4; (-) strand; PAM type: NRG; PAM sequence: GGG
ggccttcctctacgaaccgt

SEQ ID NO: 7265 - DNA, 20 bp, Artificial Sequence
  Description of Artificial Sequence: Synthetic oligonucleotide
  Target: ANGPTL4; (-) strand; PAM type: NRG; PAM sequence: TGG
aggccttcctctacgaaccg

SEQ ID NO: 7266 - DNA, 20 bp, Artificial Sequence
  Description of Artificial Sequence: Synthetic oligonucleotide
  Target: ANGPTL4; (-) strand; PAM type: NRG; PAM sequence: AGG
cccccgctccaggctcaggc

SEQ ID NO: 7267 - DNA, 20 bp, Artificial Sequence
  Description of Artificial Sequence: Synthetic oligonucleotide
  Target: ANGPTL4; (-) strand; PAM type: NRG; PAM sequence: CAG
gcccccgctccaggctcagg

SEQ ID NO: 7268 - DNA, 20 bp, Artificial Sequence
  Description of Artificial Sequence: Synthetic oligonucleotide
  Target: ANGPTL4; (-) strand; PAM type: NRG; PAM sequence: AGG
cccgcccccgctccaggctc

SEQ ID NO: 7269 - DNA, 20 bp, Artificial Sequence
  Description of Artificial Sequence: Synthetic oligonucleotide
  Target: ANGPTL4; (-) strand; PAM type: NRG; PAM sequence: CAG
tcccgcccccgctccaggct

SEQ ID NO: 7270 - DNA, 20 bp, Artificial Sequence
  Description of Artificial Sequence: Synthetic oligonucleotide
  Target: ANGPTL4; (-) strand; PAM type: NRG; PAM sequence: AGG
ggctctcccgcccccgctcc

SEQ ID NO: 7271 - DNA, 20 bp, Artificial Sequence
  Description of Artificial Sequence: Synthetic oligonucleotide
  Target: ANGPTL4; (-) strand; PAM type: NRG; PAM sequence: CAG
tggctctcccgcccccgctc

SEQ ID NO: 7272 - DNA, 20 bp, Artificial Sequence
  Description of Artificial Sequence: Synthetic oligonucleotide
  Target: ANGPTL4; (-) strand; PAM type: NRG; PAM sequence: TGG
gccctggggatgccaaactg

SEQ ID NO: 7273 - DNA, 20 bp, Artificial Sequence
  Description of Artificial Sequence: Synthetic oligonucleotide
  Target: ANGPTL4; (-) strand; PAM type: NRG; PAM sequence: GGG
gcgggctgggggatgccctg

SEQ ID NO: 7274 - DNA, 20 bp, Artificial Sequence
  Description of Artificial Sequence: Synthetic oligonucleotide
  Target: ANGPTL4; (-) strand; PAM type: NRG; PAM sequence: GGG
tgcgggctgggggatgccct

SEQ ID NO: 7275 - DNA, 20 bp, Artificial Sequence
  Description of Artificial Sequence: Synthetic oligonucleotide
  Target: ANGPTL4; (-) strand; PAM type: NRG; PAM sequence: TGG
ctgcgggctgggggatgccc

SEQ ID NO: 7276 - DNA, 20 bp, Artificial Sequence
  Description of Artificial Sequence: Synthetic oligonucleotide
  Target: ANGPTL4; (-) strand; PAM type: NRG; PAM sequence: GGG
cctggtagtctgcgggctgg

SEQ ID NO: 7277 - DNA, 20 bp, Artificial Sequence
  Description of Artificial Sequence: Synthetic oligonucleotide
  Target: ANGPTL4; (-) strand; PAM type: NRG; PAM sequence: GGG
gcctggtagtctgcgggctg

SEQ ID NO: 7278 - DNA, 20 bp, Artificial Sequence
  Description of Artificial Sequence: Synthetic oligonucleotide
  Target: ANGPTL4; (-) strand; PAM type: NRG; PAM sequence: GGG
ggcctggtagtctgcgggct

SEQ ID NO: 7279 - DNA, 20 bp, Artificial Sequence
  Description of Artificial Sequence: Synthetic oligonucleotide
  Target: ANGPTL4; (-) strand; PAM type: NRG; PAM sequence: TGG
aggcctggtagtctgcgggc

SEQ ID NO: 7280 - DNA, 20 bp, Artificial Sequence
  Description of Artificial Sequence: Synthetic oligonucleotide
  Target: ANGPTL4; (-) strand; PAM type: NRG; PAM sequence: GGG
ctggaggcctggtagtctgc

SEQ ID NO: 7281 - DNA, 20 bp, Artificial Sequence
  Description of Artificial Sequence: Synthetic oligonucleotide
  Target: ANGPTL4; (-) strand; PAM type: NRG; PAM sequence: CGG
tctggaggcctggtagtctg

SEQ ID NO: 7282 - DNA, 20 bp, Artificial Sequence
  Description of Artificial Sequence: Synthetic oligonucleotide
  Target: ANGPTL4; (-) strand; PAM type: NRG; PAM sequence: TAG
cctgtcctctggaggcctgg

SEQ ID NO: 7283 - DNA, 20 bp, Artificial Sequence
  Description of Artificial Sequence: Synthetic oligonucleotide
  Target: ANGPTL4; (-) strand; PAM type: NRG; PAM sequence: TGG
ggtcctgtcctctggaggcc

SEQ ID NO: 7284 - DNA, 20 bp, Artificial Sequence
  Description of Artificial Sequence: Synthetic oligonucleotide
  Target: ANGPTL4; (-) strand; PAM type: NRG; PAM sequence: AGG
ggtggggtcctgtcctctgg

SEQ ID NO: 7285 - DNA, 20 bp, Artificial Sequence
  Description of Artificial Sequence: Synthetic oligonucleotide
  Target: ANGPTL4; (-) strand; PAM type: NRG; PAM sequence: GAG
gggtggggtcctgtcctctg

SEQ ID NO: 7286 - DNA, 20 bp, Artificial Sequence
  Description of Artificial Sequence: Synthetic oligonucleotide
  Target: ANGPTL4; (-) strand; PAM type: NRG; PAM sequence: TGG
gggggtggggtcctgtcctc

SEQ ID NO: 7287 - DNA, 20 bp, Artificial Sequence
  Description of Artificial Sequence: Synthetic oligonucleotide
  Target: ANGPTL4; (-) strand; PAM type: NRG; PAM sequence: GGG
agggcctgtggccgggggtg

SEQ ID NO: 7288 - DNA, 20 bp, Artificial Sequence
  Description of Artificial Sequence: Synthetic oligonucleotide
  Target: ANGPTL4; (-) strand; PAM type: NRG; PAM sequence: GGG
cagggcctgtggccgggggt

SEQ ID NO: 7289 - DNA, 20 bp, Artificial Sequence
  Description of Artificial Sequence: Synthetic oligonucleotide
  Target: ANGPTL4; (-) strand; PAM type: NRG; PAM sequence: TGG
gcagggcctgtggccggggg

SEQ ID NO: 7290 - DNA, 20 bp, Artificial Sequence
  Description of Artificial Sequence: Synthetic oligonucleotide
  Target: ANGPTL4; (-) strand; PAM type: NRG; PAM sequence: GGG
ggggcagggcctgtggccgg

SEQ ID NO: 7291 - DNA, 20 bp, Artificial Sequence
  Description of Artificial Sequence: Synthetic oligonucleotide
  Target: ANGPTL4; (-) strand; PAM type: NRG; PAM sequence: GGG
gggggcagggcctgtggccg

SEQ ID NO: 7292 - DNA, 20 bp, Artificial Sequence
  Description of Artificial Sequence: Synthetic oligonucleotide
  Target: ANGPTL4; (-) strand; PAM type: NRG; PAM sequence: GGG
tgggggcagggcctgtggcc

SEQ ID NO: 7293 - DNA, 20 bp, Artificial Sequence
  Description of Artificial Sequence: Synthetic oligonucleotide
  Target: ANGPTL4; (-) strand; PAM type: NRG; PAM sequence: CGG
ctgggggcagggcctgtggc

SEQ ID NO: 7294 - DNA, 20 bp, Artificial Sequence
  Description of Artificial Sequence: Synthetic oligonucleotide
  Target: ANGPTL4; (-) strand; PAM type: NRG; PAM sequence: TGG
agtgctgggggcagggcctg

SEQ ID NO: 7295 - DNA, 20 bp, Artificial Sequence
  Description of Artificial Sequence: Synthetic oligonucleotide
  Target: ANGPTL4; (-) strand; PAM type: NRG; PAM sequence: GGG
tgcggggagtgctgggggca

SEQ ID NO: 7296 - DNA, 20 bp, Artificial Sequence
  Description of Artificial Sequence: Synthetic oligonucleotide
  Target: ANGPTL4; (-) strand; PAM type: NRG; PAM sequence: AGG
gtgcggggagtgctgggggc

SEQ ID NO: 7297 - DNA, 20 bp, Artificial Sequence
  Description of Artificial Sequence: Synthetic oligonucleotide
  Target: ANGPTL4; (-) strand; PAM type: NRG; PAM sequence: CAG
ggtgcggggagtgctggggg

SEQ ID NO: 7298 - DNA, 20 bp, Artificial Sequence
  Description of Artificial Sequence: Synthetic oligonucleotide
  Target: ANGPTL4; (-) strand; PAM type: NRG; PAM sequence: GGG
cggggtgcggggagtgctgg

SEQ ID NO: 7299 - DNA, 20 bp, Artificial Sequence
  Description of Artificial Sequence: Synthetic oligonucleotide
  Target: ANGPTL4; (-) strand; PAM type: NRG; PAM sequence: GGG
gcggggtgcggggagtgctg

SEQ ID NO: 7300 - DNA, 20 bp, Artificial Sequence
  Description of Artificial Sequence: Synthetic oligonucleotide
  Target: ANGPTL4; (-) strand; PAM type: NRG; PAM sequence: GGG
ggcggggtgcggggagtgct

SEQ ID NO: 7301 - DNA, 20 bp, Artificial Sequence
  Description of Artificial Sequence: Synthetic oligonucleotide
  Target: ANGPTL4; (-) strand; PAM type: NRG; PAM sequence: TGG
aggcggggtgcggggagtgc

SEQ ID NO: 7302 - DNA, 20 bp, Artificial Sequence
  Description of Artificial Sequence: Synthetic oligonucleotide
  Target: ANGPTL4; (-) strand; PAM type: NRG; PAM sequence: GAG
tcttggaggcggggtgcggg

SEQ ID NO: 7303 - DNA, 20 bp, Artificial Sequence
  Description of Artificial Sequence: Synthetic oligonucleotide
  Target: ANGPTL4; (-) strand; PAM type: NRG; PAM sequence: GGG
agtcttggaggcggggtgcg

SEQ ID NO: 7304 - DNA, 20 bp, Artificial Sequence
  Description of Artificial Sequence: Synthetic oligonucleotide
  Target: ANGPTL4; (-) strand; PAM type: NRG; PAM sequence: GGG
gagtcttggaggcggggtgc

SEQ ID NO: 7305 - DNA, 20 bp, Artificial Sequence
  Description of Artificial Sequence: Synthetic oligonucleotide
  Target: ANGPTL4; (-) strand; PAM type: NRG; PAM sequence: CGG
ggagtcttggaggcggggtg

SEQ ID NO: 7306 - DNA, 20 bp, Artificial Sequence
  Description of Artificial Sequence: Synthetic oligonucleotide
  Target: ANGPTL4; (-) strand; PAM type: NRG; PAM sequence: GGG
gcggaggagtcttggaggcg

SEQ ID NO: 7307 - DNA, 20 bp, Artificial Sequence
  Description of Artificial Sequence: Synthetic oligonucleotide
  Target: ANGPTL4; (-) strand; PAM type: NRG; PAM sequence: GGG
ggcggaggagtcttggaggc

SEQ ID NO: 7308 - DNA, 20 bp, Artificial Sequence
  Description of Artificial Sequence: Synthetic oligonucleotide
  Target: ANGPTL4; (-) strand; PAM type: NRG; PAM sequence: CGG
gggcggaggagtcttggagg

SEQ ID NO: 7309 - DNA, 20 bp, Artificial Sequence
  Description of Artificial Sequence: Synthetic oligonucleotide
  Target: ANGPTL4; (-) strand; PAM type: NRG; PAM sequence: AGG
agtgggcggaggagtcttgg

SEQ ID NO: 7310 - DNA, 20 bp, Artificial Sequence
  Description of Artificial Sequence: Synthetic oligonucleotide
  Target: ANGPTL4; (-) strand; PAM type: NRG; PAM sequence: GAG
gagtgggcggaggagtcttg

SEQ ID NO: 7311 - DNA, 20 bp, Artificial Sequence
  Description of Artificial Sequence: Synthetic oligonucleotide
  Target: ANGPTL4; (-) strand; PAM type: NRG; PAM sequence: TGG
cggagtgggcggaggagtct

SEQ ID NO: 7312 - DNA, 20 bp, Artificial Sequence
  Description of Artificial Sequence: Synthetic oligonucleotide
  Target: ANGPTL4; (-) strand; PAM type: NRG; PAM sequence: GAG
tgggtgcggagtgggcggag

SEQ ID NO: 7313 - DNA, 20 bp, Artificial Sequence
  Description of Artificial Sequence: Synthetic oligonucleotide
  Target: ANGPTL4; (-) strand; PAM type: NRG; PAM sequence: AGG
gttgggtgcggagtgggcgg

SEQ ID NO: 7314 - DNA, 20 bp, Artificial Sequence
  Description of Artificial Sequence: Synthetic oligonucleotide
  Target: ANGPTL4; (-) strand; PAM type: NRG; PAM sequence: GAG
agttgggtgcggagtgggcg

SEQ ID NO: 7315 - DNA, 20 bp, Artificial Sequence
  Description of Artificial Sequence: Synthetic oligonucleotide
  Target: ANGPTL4; (-) strand; PAM type: NRG; PAM sequence: CGG
taagttgggtgcggagtggg

SEQ ID NO: 7316 - DNA, 20 bp, Artificial Sequence
  Description of Artificial Sequence: Synthetic oligonucleotide
  Target: ANGPTL4; (-) strand; PAM type: NRG; PAM sequence: GGG
ttataagttgggtgcggagt

SEQ ID NO: 7317 - DNA, 20 bp, Artificial Sequence
  Description of Artificial Sequence: Synthetic oligonucleotide
  Target: ANGPTL4; (-) strand; PAM type: NRG; PAM sequence: TGG
tttataagttgggtgcggag

SEQ ID NO: 7318 - DNA, 20 bp, Artificial Sequence
  Description of Artificial Sequence: Synthetic oligonucleotide
  Target: ANGPTL4; (-) strand; PAM type: NRG; PAM sequence: GAG
gtttttataagttgggtgcg

SEQ ID NO: 7319 - DNA, 20 bp, Artificial Sequence
  Description of Artificial Sequence: Synthetic oligonucleotide
  Target: ANGPTL4; (-) strand; PAM type: NRG; PAM sequence: CGG
cggtttttataagttgggtg

SEQ ID NO: 7320 - DNA, 20 bp, Artificial Sequence
  Description of Artificial Sequence: Synthetic oligonucleotide
  Target: ANGPTL4; (-) strand; PAM type: NRG; PAM sequence: GGG
gaggacggtttttataagtt

SEQ ID NO: 7321 - DNA, 20 bp, Artificial Sequence
  Description of Artificial Sequence: Synthetic oligonucleotide
  Target: ANGPTL4; (-) strand; PAM type: NRG; PAM sequence: TGG
cgaggacggtttttataagt

SEQ ID NO: 7322 - DNA, 20 bp, Artificial Sequence
  Description of Artificial Sequence: Synthetic oligonucleotide
  Target: ANGPTL4; (-) strand; PAM type: NRG; PAM sequence: AAG
cgcccgaggacggtttttat

SEQ ID NO: 7323 - DNA, 20 bp, Artificial Sequence
  Description of Artificial Sequence: Synthetic oligonucleotide
  Target: ANGPTL4; (-) strand; PAM type: NRG; PAM sequence: CGG
ctccccgccgcgcccgagga

SEQ ID NO: 7324 - DNA, 20 bp, Artificial Sequence
  Description of Artificial Sequence: Synthetic oligonucleotide
  Target: ANGPTL4; (-) strand; PAM type: NRG; PAM sequence: AGG
gcttctccccgccgcgcccg

SEQ ID NO: 7325 - DNA, 20 bp, Artificial Sequence
  Description of Artificial Sequence: Synthetic oligonucleotide
  Target: ANGPTL4; (-) strand; PAM type: NRG; PAM sequence: GAG
ggcttctccccgccgcgccc

SEQ ID NO: 7326 - DNA, 20 bp, Artificial Sequence
  Description of Artificial Sequence: Synthetic oligonucleotide
  Target: ANGPTL4; (-) strand; PAM type: NRG; PAM sequence: CGG
gtgtgaggatccgctcagct

SEQ ID NO: 7327 - DNA, 20 bp, Artificial Sequence
  Description of Artificial Sequence: Synthetic oligonucleotide
  Target: ANGPTL4; (-) strand; PAM type: NRG; PAM sequence: CAG
cagtcgtgtgaggatccgct

SEQ ID NO: 7328 - DNA, 20 bp, Artificial Sequence
  Description of Artificial Sequence: Synthetic oligonucleotide
  Target: ANGPTL4; (-) strand; PAM type: NRG; PAM sequence: AGG
aatcggatcacagtcgtgtg

SEQ ID NO: 7329 - DNA, 20 bp, Artificial Sequence
  Description of Artificial Sequence: Synthetic oligonucleotide
  Target: ANGPTL4; (-) strand; PAM type: NRG; PAM sequence: GAG
gaatcggatcacagtcgtgt

SEQ ID NO: 7330 - DNA, 20 bp, Artificial Sequence
  Description of Artificial Sequence: Synthetic oligonucleotide
  Target: ANGPTL4; (-) strand; PAM type: NRG; PAM sequence: CAG
cgctggaaagaatcggatca

SEQ ID NO: 7331 - DNA, 20 bp, Artificial Sequence
  Description of Artificial Sequence: Synthetic oligonucleotide
  Target: ANGPTL4; (-) strand; PAM type: NRG; PAM sequence: CGG
cagaagccgctggaaagaat

SEQ ID NO: 7332 - DNA, 20 bp, Artificial Sequence
  Description of Artificial Sequence: Synthetic oligonucleotide
  Target: ANGPTL4; (-) strand; PAM type: NRG; PAM sequence: AAG
tggttgcagaagccgctgga

SEQ ID NO: 7333 - DNA, 20 bp, Artificial Sequence
  Description of Artificial Sequence: Synthetic oligonucleotide
  Target: ANGPTL4; (-) strand; PAM type: NRG; PAM sequence: TGG
cgcttggttgcagaagccgc

SEQ ID NO: 7334 - DNA, 20 bp, Artificial Sequence
  Description of Artificial Sequence: Synthetic oligonucleotide
  Target: ANGPTL4; (-) strand; PAM type: NRG; PAM sequence: AAG
taagacccgcttggttgcag

SEQ ID NO: 7335 - DNA, 20 bp, Artificial Sequence
  Description of Artificial Sequence: Synthetic oligonucleotide
  Target: ANGPTL4; (-) strand; PAM type: NRG; PAM sequence: CAG
gggtaagacccgcttggttg

SEQ ID NO: 7336 - DNA, 20 bp, Artificial Sequence
  Description of Artificial Sequence: Synthetic oligonucleotide
  Target: ANGPTL4; (-) strand; PAM type: NRG; PAM sequence: TGG
gaccgggggtaagacccgct

SEQ ID NO: 7337 - DNA, 20 bp, Artificial Sequence
  Description of Artificial Sequence: Synthetic oligonucleotide
  Target: ANGPTL4; (-) strand; PAM type: NRG; PAM sequence: AAG
agacgcggaggaccgggggt

SEQ ID NO: 7338 - DNA, 20 bp, Artificial Sequence
  Description of Artificial Sequence: Synthetic oligonucleotide
  Target: ANGPTL4; (-) strand; PAM type: NRG; PAM sequence: GGG
ctggagacgcggaggaccgg

SEQ ID NO: 7339 - DNA, 20 bp, Artificial Sequence
  Description of Artificial Sequence: Synthetic oligonucleotide
  Target: ANGPTL4; (-) strand; PAM type: NRG; PAM sequence: GGG
actggagacgcggaggaccg

SEQ ID NO: 7340 - DNA, 20 bp, Artificial Sequence
  Description of Artificial Sequence: Synthetic oligonucleotide
  Target: ANGPTL4; (-) strand; PAM type: NRG; PAM sequence: GGG
gactggagacgcggaggacc

SEQ ID NO: 7341 - DNA, 20 bp, Artificial Sequence
  Description of Artificial Sequence: Synthetic oligonucleotide
  Target: ANGPTL4; (-) strand; PAM type: NRG; PAM sequence: CGG
ggactggagacgcggaggac

SEQ ID NO: 7342 - DNA, 20 bp, Artificial Sequence
  Description of Artificial Sequence: Synthetic oligonucleotide
  Target: ANGPTL4; (-) strand; PAM type: NRG; PAM sequence: AGG
tgcgaggactggagacgcgg

SEQ ID NO: 7343 - DNA, 20 bp, Artificial Sequence
  Description of Artificial Sequence: Synthetic oligonucleotide
  Target: ANGPTL4; (-) strand; PAM type: NRG; PAM sequence: GAG
gtgcgaggactggagacgcg

SEQ ID NO: 7344 - DNA, 20 bp, Artificial Sequence
  Description of Artificial Sequence: Synthetic oligonucleotide
  Target: ANGPTL4; (-) strand; PAM type: NRG; PAM sequence: CGG
aggtgcgaggactggagacg

SEQ ID NO: 7345 - DNA, 20 bp, Artificial Sequence
  Description of Artificial Sequence: Synthetic oligonucleotide
  Target: ANGPTL4; (-) strand; PAM type: NRG; PAM sequence: GAG
ggttccaggtgcgaggactg

SEQ ID NO: 7346 - DNA, 20 bp, Artificial Sequence
  Description of Artificial Sequence: Synthetic oligonucleotide
  Target: ANGPTL4; (-) strand; PAM type: NRG; PAM sequence: TGG
ggggttccaggtgcgaggac

SEQ ID NO: 7347 - DNA, 20 bp, Artificial Sequence
  Description of Artificial Sequence: Synthetic oligonucleotide
  Target: ANGPTL4; (-) strand; PAM type: NRG; PAM sequence: AGG
acgttggggttccaggtgcg

SEQ ID NO: 7348 - DNA, 20 bp, Artificial Sequence
  Description of Artificial Sequence: Synthetic oligonucleotide
  Target: ANGPTL4; (-) strand; PAM type: NRG; PAM sequence: GAG
gacgttggggttccaggtgc

SEQ ID NO: 7349 - DNA, 20 bp, Artificial Sequence
  Description of Artificial Sequence: Synthetic oligonucleotide
  Target: ANGPTL4; (-) strand; PAM type: NRG; PAM sequence: AGG
ctcggggacgttggggttcc

SEQ ID NO: 7350 - DNA, 20 bp, Artificial Sequence
  Description of Artificial Sequence: Synthetic oligonucleotide
  Target: ANGPTL4; (-) strand; PAM type: NRG; PAM sequence: CAG
tctcggggacgttggggttc

SEQ ID NO: 7351 - DNA, 20 bp, Artificial Sequence
  Description of Artificial Sequence: Synthetic oligonucleotide
  Target: ANGPTL4; (-) strand; PAM type: NRG; PAM sequence: GGG
ggggactctcggggacgttg

SEQ ID NO: 7352 - DNA, 20 bp, Artificial Sequence
  Description of Artificial Sequence: Synthetic oligonucleotide
  Target: ANGPTL4; (-) strand; PAM type: NRG; PAM sequence: GGG
cggggactctcggggacgtt

SEQ ID NO: 7353 - DNA, 20 bp, Artificial Sequence
  Description of Artificial Sequence: Synthetic oligonucleotide
  Target: ANGPTL4; (-) strand; PAM type: NRG; PAM sequence: TGG
tcggggactctcggggacgt

SEQ ID NO: 7354 - DNA, 20 bp, Artificial Sequence
  Description of Artificial Sequence: Synthetic oligonucleotide
  Target: ANGPTL4; (-) strand; PAM type: NRG; PAM sequence: GGG
cggggattcggggactctcg

SEQ ID NO: 7355 - DNA, 20 bp, Artificial Sequence
  Description of Artificial Sequence: Synthetic oligonucleotide
  Target: ANGPTL4; (-) strand; PAM type: NRG; PAM sequence: GGG
gcggggattcggggactctc

SEQ ID NO: 7356 - DNA, 20 bp, Artificial Sequence
  Description of Artificial Sequence: Synthetic oligonucleotide
  Target: ANGPTL4; (-) strand; PAM type: NRG; PAM sequence: CGG
agcggggattcggggactct

SEQ ID NO: 7357 - DNA, 20 bp, Artificial Sequence
  Description of Artificial Sequence: Synthetic oligonucleotide
  Target: ANGPTL4; (-) strand; PAM type: NRG; PAM sequence: GGG
agcctgggagcggggattcg

SEQ ID NO: 7358 - DNA, 20 bp, Artificial Sequence
  Description of Artificial Sequence: Synthetic oligonucleotide
  Target: ANGPTL4; (-) strand; PAM type: NRG; PAM sequence: GGG
tagcctgggagcggggattc

SEQ ID NO: 7359 - DNA, 20 bp, Artificial Sequence
  Description of Artificial Sequence: Synthetic oligonucleotide
  Target: ANGPTL4; (-) strand; PAM type: NRG; PAM sequence: CGG
gtagcctgggagcggggatt

SEQ ID NO: 7360 - DNA, 20 bp, Artificial Sequence
  Description of Artificial Sequence: Synthetic oligonucleotide
  Target: ANGPTL4; (-) strand; PAM type: NRG; PAM sequence: GGG
tcttaggtagcctgggagcg

SEQ ID NO: 7361 - DNA, 20 bp, Artificial Sequence
  Description of Artificial Sequence: Synthetic oligonucleotide
  Target: ANGPTL4; (-) strand; PAM type: NRG; PAM sequence: GGG
ctcttaggtagcctgggagc

SEQ ID NO: 7362 - DNA, 20 bp, Artificial Sequence
  Description of Artificial Sequence: Synthetic oligonucleotide
  Target: ANGPTL4; (-) strand; PAM type: NRG; PAM sequence: CGG
cctcttaggtagcctgggag

SEQ ID NO: 7363 - DNA, 20 bp, Artificial Sequence
  Description of Artificial Sequence: Synthetic oligonucleotide
  Target: ANGPTL4; (-) strand; PAM type: NRG; PAM sequence: GAG
catcctcttaggtagcctgg

SEQ ID NO: 7364 - DNA, 20 bp, Artificial Sequence
  Description of Artificial Sequence: Synthetic oligonucleotide
  Target: ANGPTL4; (-) strand; PAM type: NRG; PAM sequence: GGG
ctcatcctcttaggtagcct

SEQ ID NO: 7365 - DNA, 20 bp, Artificial Sequence
  Description of Artificial Sequence: Synthetic oligonucleotide
  Target: ANGPTL4; (-) strand; PAM type: NRG; PAM sequence: TGG
gctcatcctcttaggtagcc

SEQ ID NO: 7366 - DNA, 20 bp, Artificial Sequence
  Description of Artificial Sequence: Synthetic oligonucleotide
  Target: ANGPTL4; (-) strand; PAM type: NRG; PAM sequence: TAG
gcaccgctcatcctcttagg

SEQ ID NO: 7367 - DNA, 20 bp, Artificial Sequence
  Description of Artificial Sequence: Synthetic oligonucleotide
  Target: ANGPTL4; (-) strand; PAM type: NRG; PAM sequence: AGG
ggagcaccgctcatcctctt

SEQ ID NO: 7368 - DNA, 20 bp, Artificial Sequence
  Description of Artificial Sequence: Synthetic oligonucleotide
  Target: ANGPTL4; (-) strand; PAM type: NRG; PAM sequence: TAG
cggagcaccgctcatcctct

SEQ ID NO: 7369 - DNA, 20 bp, Artificial Sequence
  Description of Artificial Sequence: Synthetic oligonucleotide
  Target: ANGPTL4; (-) strand; PAM type: NRG; PAM sequence: GAG
cagggctgccccggccgtcg

SEQ ID NO: 7370 - DNA, 20 bp, Artificial Sequence
  Description of Artificial Sequence: Synthetic oligonucleotide
  Target: ANGPTL4; (-) strand; PAM type: NRG; PAM sequence: CGG
atcagggctgccccggccgt

SEQ ID NO: 7371 - DNA, 20 bp, Artificial Sequence
  Description of Artificial Sequence: Synthetic oligonucleotide
  Target: ANGPTL4; (-) strand; PAM type: NRG; PAM sequence: CGG
gcagagcatcagggctgccc

SEQ ID NO: 7372 - DNA, 20 bp, Artificial Sequence
  Description of Artificial Sequence: Synthetic oligonucleotide
  Target: ANGPTL4; (-) strand; PAM type: NRG; PAM sequence: GGG
ggtggcggcgcagagcatca

SEQ ID NO: 7373 - DNA, 20 bp, Artificial Sequence
  Description of Artificial Sequence: Synthetic oligonucleotide
  Target: ANGPTL4; (-) strand; PAM type: NRG; PAM sequence: AGG
cggtggcggcgcagagcatc

SEQ ID NO: 7374 - DNA, 20 bp, Artificial Sequence
  Description of Artificial Sequence: Synthetic oligonucleotide
  Target: ANGPTL4; (-) strand; PAM type: NRG; PAM sequence: CAG
gcggtggcggcgcagagcat

SEQ ID NO: 7375 - DNA, 20 bp, Artificial Sequence
  Description of Artificial Sequence: Synthetic oligonucleotide
  Target: ANGPTL4; (-) strand; PAM type: NRG; PAM sequence: GAG
agcacggcggtggcggcgca

SEQ ID NO: 7376 - DNA, 20 bp, Artificial Sequence
  Description of Artificial Sequence: Synthetic oligonucleotide
  Target: ANGPTL4; (-) strand; PAM type: NRG; PAM sequence: CAG
gtagcacggcggtggcggcg

SEQ ID NO: 7377 - DNA, 20 bp, Artificial Sequence
  Description of Artificial Sequence: Synthetic oligonucleotide
  Target: ANGPTL4; (-) strand; PAM type: NRG; PAM sequence: CGG
gctcagtagcacggcggtgg

SEQ ID NO: 7378 - DNA, 20 bp, Artificial Sequence
  Description of Artificial Sequence: Synthetic oligonucleotide
  Target: ANGPTL4; (-) strand; PAM type: NRG; PAM sequence: TGG
agcgctcagtagcacggcgg

SEQ ID NO: 7379 - DNA, 20 bp, Artificial Sequence
  Description of Artificial Sequence: Synthetic oligonucleotide
  Target: ANGPTL4; (-) strand; PAM type: NRG; PAM sequence: CGG
ctgagcgctcagtagcacgg

SEQ ID NO: 7380 - DNA, 20 bp, Artificial Sequence
  Description of Artificial Sequence: Synthetic oligonucleotide
  Target: ANGPTL4; (-) strand; PAM type: NRG; PAM sequence: CGG
gccctgagcgctcagtagca

SEQ ID NO: 7381 - DNA, 20 bp, Artificial Sequence
  Description of Artificial Sequence: Synthetic oligonucleotide
  Target: ANGPTL4; (-) strand; PAM type: NRG; PAM sequence: TAG
ggtccgccctgagcgctcag

SEQ ID NO: 7382 - DNA, 20 bp, Artificial Sequence
  Description of Artificial Sequence: Synthetic oligonucleotide
  Target: ANGPTL4; (-) strand; PAM type: NRG; PAM sequence: CAG
acgggtccgccctgagcgct

SEQ ID NO: 7383 - DNA, 20 bp, Artificial Sequence
  Description of Artificial Sequence: Synthetic oligonucleotide
  Target: ANGPTL4; (-) strand; PAM type: NRG; PAM sequence: GAG
ggactgcacgggtccgccct

SEQ ID NO: 7384 - DNA, 20 bp, Artificial Sequence
  Description of Artificial Sequence: Synthetic oligonucleotide
  Target: ANGPTL4; (-) strand; PAM type: NRG; PAM sequence: GGG
cgcggcgacttggactgcac

SEQ ID NO: 7385 - DNA, 20 bp, Artificial Sequence
  Description of Artificial Sequence: Synthetic oligonucleotide
  Target: ANGPTL4; (-) strand; PAM type: NRG; PAM sequence: CGG
gcgcggcgacttggactgca

SEQ ID NO: 7386 - DNA, 20 bp, Artificial Sequence
  Description of Artificial Sequence: Synthetic oligonucleotide
  Target: ANGPTL4; (-) strand; PAM type: NRG; PAM sequence: TGG
ggacgcaaagcgcggcgact

SEQ ID NO: 7387 - DNA, 20 bp, Artificial Sequence
  Description of Artificial Sequence: Synthetic oligonucleotide
  Target: ANGPTL4; (-) strand; PAM type: NRG; PAM sequence: CGG
tcgtcccaggacgcaaagcg

SEQ ID NO: 7388 - DNA, 20 bp, Artificial Sequence
  Description of Artificial Sequence: Synthetic oligonucleotide
  Target: ANGPTL4; (-) strand; PAM type: NRG; PAM sequence: AAG
tcatctcgtcccaggacgca

SEQ ID NO: 7389 - DNA, 20 bp, Artificial Sequence
  Description of Artificial Sequence: Synthetic oligonucleotide
  Target: ANGPTL4; (-) strand; PAM type: NRG; PAM sequence: AGG
caggacattcatctcgtccc

SEQ ID NO: 7390 - DNA, 20 bp, Artificial Sequence
  Description of Artificial Sequence: Synthetic oligonucleotide
  Target: ANGPTL4; (-) strand; PAM type: NRG; PAM sequence: CAG
ccaggacattcatctcgtcc

SEQ ID NO: 7391 - DNA, 20 bp, Artificial Sequence
  Description of Artificial Sequence: Synthetic oligonucleotide
  Target: ANGPTL4; (-) strand; PAM type: NRG; PAM sequence: AGG
gctgcaggagtccgtgcgcc

SEQ ID NO: 7392 - DNA, 20 bp, Artificial Sequence
  Description of Artificial Sequence: Synthetic oligonucleotide
  Target: ANGPTL4; (-) strand; PAM type: NRG; PAM sequence: CAG
agctgcaggagtccgtgcgc

SEQ ID NO: 7393 - DNA, 20 bp, Artificial Sequence
  Description of Artificial Sequence: Synthetic oligonucleotide
  Target: ANGPTL4; (-) strand; PAM type: NRG; PAM sequence: GAG
agcccctggccgagctgcag

SEQ ID NO: 7394 - DNA, 20 bp, Artificial Sequence
  Description of Artificial Sequence: Synthetic oligonucleotide
  Target: ANGPTL4; (-) strand; PAM type: NRG; PAM sequence: AGG
gcagcccctggccgagctgc

SEQ ID NO: 7395 - DNA, 20 bp, Artificial Sequence
  Description of Artificial Sequence: Synthetic oligonucleotide
  Target: ANGPTL4; (-) strand; PAM type: NRG; PAM sequence: CAG
cgcagcccctggccgagctg

SEQ ID NO: 7396 - DNA, 20 bp, Artificial Sequence
  Description of Artificial Sequence: Synthetic oligonucleotide
  Target: ANGPTL4; (-) strand; PAM type: NRG; PAM sequence: GAG
tgttcgcgcagcccctggcc

SEQ ID NO: 7397 - DNA, 20 bp, Artificial Sequence
  Description of Artificial Sequence: Synthetic oligonucleotide
  Target: ANGPTL4; (-) strand; PAM type: NRG; PAM sequence: TGG
ccgcgtgttcgcgcagcccc

SEQ ID NO: 7398 - DNA, 20 bp, Artificial Sequence
  Description of Artificial Sequence: Synthetic oligonucleotide
  Target: ANGPTL4; (-) strand; PAM type: NRG; PAM sequence: CAG
gtgcgctccgcgtgttcgcg

SEQ ID NO: 7399 - DNA, 20 bp, Artificial Sequence
  Description of Artificial Sequence: Synthetic oligonucleotide
  Target: ANGPTL4; (-) strand; PAM type: NRG; PAM sequence: GGG
cagcgcgctcagctgactgc

SEQ ID NO: 7400 - DNA, 20 bp, Artificial Sequence
  Description of Artificial Sequence: Synthetic oligonucleotide
  Target: ANGPTL4; (-) strand; PAM type: NRG; PAM sequence: CGG
ccagcgcgctcagctgactg

SEQ ID NO: 7401 - DNA, 20 bp, Artificial Sequence
  Description of Artificial Sequence: Synthetic oligonucleotide
  Target: ANGPTL4; (-) strand; PAM type: NRG; PAM sequence: CAG
aggcgccgctccagcgcgct

SEQ ID NO: 7402 - DNA, 20 bp, Artificial Sequence
  Description of Artificial Sequence: Synthetic oligonucleotide
  Target: ANGPTL4; (-) strand; PAM type: NRG; PAM sequence: CAG
cacgcgctcaggcgccgctc

SEQ ID NO: 7403 - DNA, 20 bp, Artificial Sequence
  Description of Artificial Sequence: Synthetic oligonucleotide
  Target: ANGPTL4; (-) strand; PAM type: NRG; PAM sequence: AGG
aggcggacccgcacgcgctc

SEQ ID NO: 7404 - DNA, 20 bp, Artificial Sequence
  Description of Artificial Sequence: Synthetic oligonucleotide
  Target: ANGPTL4; (-) strand; PAM type: NRG; PAM sequence: CAG
caggcggacccgcacgcgct

SEQ ID NO: 7405 - DNA, 20 bp, Artificial Sequence
  Description of Artificial Sequence: Synthetic oligonucleotide
  Target: ANGPTL4; (-) strand; PAM type: NRG; PAM sequence: CGG
cccctcggttccctgacagg

SEQ ID NO: 7406 - DNA, 20 bp, Artificial Sequence
  Description of Artificial Sequence: Synthetic oligonucleotide
  Target: ANGPTL4; (-) strand; PAM type: NRG; PAM sequence: AGG
ggacccctcggttccctgac

SEQ ID NO: 7407 - DNA, 20 bp, Artificial Sequence
  Description of Artificial Sequence: Synthetic oligonucleotide
  Target: ANGPTL4; (-) strand; PAM type: NRG; PAM sequence: CAG
tggacccctcggttccctga

SEQ ID NO: 7408 - DNA, 20 bp, Artificial Sequence
  Description of Artificial Sequence: Synthetic oligonucleotide
  Target: ANGPTL4; (-) strand; PAM type: NRG; PAM sequence: CGG
cgggaggtcggtggacccct

SEQ ID NO: 7409 - DNA, 20 bp, Artificial Sequence
  Description of Artificial Sequence: Synthetic oligonucleotide
  Target: ANGPTL4; (-) strand; PAM type: NRG; PAM sequence: TGG
aggggctaacgggaggtcgg

SEQ ID NO: 7410 - DNA, 20 bp, Artificial Sequence
  Description of Artificial Sequence: Synthetic oligonucleotide
  Target: ANGPTL4; (-) strand; PAM type: NRG; PAM sequence: CGG
ctcaggggctaacgggaggt

SEQ ID NO: 7411 - DNA, 20 bp, Artificial Sequence
  Description of Artificial Sequence: Synthetic oligonucleotide
  Target: ANGPTL4; (-) strand; PAM type: NRG; PAM sequence: AGG
ggctctcaggggctaacggg

SEQ ID NO: 7412 - DNA, 20 bp, Artificial Sequence
  Description of Artificial Sequence: Synthetic oligonucleotide
  Target: ANGPTL4; (-) strand; PAM type: NRG; PAM sequence: GAG
cggctctcaggggctaacgg

SEQ ID NO: 7413 - DNA, 20 bp, Artificial Sequence
  Description of Artificial Sequence: Synthetic oligonucleotide
  Target: ANGPTL4; (-) strand; PAM type: NRG; PAM sequence: GGG
cccggctctcaggggctaac

SEQ ID NO: 7414 - DNA, 20 bp, Artificial Sequence
  Description of Artificial Sequence: Synthetic oligonucleotide
  Target: ANGPTL4; (-) strand; PAM type: NRG; PAM sequence: CGG
acccggctctcaggggctaa

SEQ ID NO: 7415 - DNA, 20 bp, Artificial Sequence
  Description of Artificial Sequence: Synthetic oligonucleotide
  Target: ANGPTL4; (-) strand; PAM type: NRG; PAM sequence: GGG
agggtccacccggctctcag

SEQ ID NO: 7416 - DNA, 20 bp, Artificial Sequence
  Description of Artificial Sequence: Synthetic oligonucleotide
  Target: ANGPTL4; (-) strand; PAM type: NRG; PAM sequence: GGG
cagggtccacccggctctca

SEQ ID NO: 7417 - DNA, 20 bp, Artificial Sequence
  Description of Artificial Sequence: Synthetic oligonucleotide
  Target: ANGPTL4; (-) strand; PAM type: NRG; PAM sequence: AGG
tcagggtccacccggctctc

SEQ ID NO: 7418 - DNA, 20 bp, Artificial Sequence
  Description of Artificial Sequence: Synthetic oligonucleotide
  Target: ANGPTL4; (-) strand; PAM type: NRG; PAM sequence: CAG
ctcagggtccacccggctct

SEQ ID NO: 7419 - DNA, 20 bp, Artificial Sequence
  Description of Artificial Sequence: Synthetic oligonucleotide
  Target: ANGPTL4; (-) strand; PAM type: NRG; PAM sequence: CGG
gaaggacctcagggtccacc

SEQ ID NO: 7420 - DNA, 20 bp, Artificial Sequence
  Description of Artificial Sequence: Synthetic oligonucleotide
  Target: ANGPTL4; (-) strand; PAM type: NRG; PAM sequence: GGG
gcaggctgtgaaggacctca

SEQ ID NO: 7421 - DNA, 20 bp, Artificial Sequence
  Description of Artificial Sequence: Synthetic oligonucleotide
  Target: ANGPTL4; (-) strand; PAM type: NRG; PAM sequence: AGG
tgcaggctgtgaaggacctc

SEQ ID NO: 7422 - DNA, 20 bp, Artificial Sequence
  Description of Artificial Sequence: Synthetic oligonucleotide
  Target: ANGPTL4; (-) strand; PAM type: NRG; PAM sequence: CAG
ctgcaggctgtgaaggacct

SEQ ID NO: 7423 - DNA, 20 bp, Artificial Sequence
  Description of Artificial Sequence: Synthetic oligonucleotide
  Target: ANGPTL4; (-) strand; PAM type: NRG; PAM sequence: AGG
cacgtacctgcaggctgtga

SEQ ID NO: 7424 - DNA, 20 bp, Artificial Sequence
  Description of Artificial Sequence: Synthetic oligonucleotide
  Target: ANGPTL4; (-) strand; PAM type: NRG; PAM sequence: AAG
acacgtacctgcaggctgtg

SEQ ID NO: 7425 - DNA, 20 bp, Artificial Sequence
  Description of Artificial Sequence: Synthetic oligonucleotide
  Target: ANGPTL4; (-) strand; PAM type: NRG; PAM sequence: AGG
ccctggggacacgtacctgc

SEQ ID NO: 7426 - DNA, 20 bp, Artificial Sequence
  Description of Artificial Sequence: Synthetic oligonucleotide
  Target: ANGPTL4; (-) strand; PAM type: NRG; PAM sequence: CAG
gccctggggacacgtacctg

SEQ ID NO: 7427 - DNA, 20 bp, Artificial Sequence
  Description of Artificial Sequence: Synthetic oligonucleotide
  Target: ANGPTL4; (-) strand; PAM type: NRG; PAM sequence: GGG
ggcgcggagaaccagccctg

SEQ ID NO: 7428 - DNA, 20 bp, Artificial Sequence
  Description of Artificial Sequence: Synthetic oligonucleotide
  Target: ANGPTL4; (-) strand; PAM type: NRG; PAM sequence: GGG
gggcgcggagaaccagccct

SEQ ID NO: 7429 - DNA, 20 bp, Artificial Sequence
  Description of Artificial Sequence: Synthetic oligonucleotide
  Target: ANGPTL4; (-) strand; PAM type: NRG; PAM sequence: TGG
ggggcgcggagaaccagccc

SEQ ID NO: 7430 - DNA, 20 bp, Artificial Sequence
  Description of Artificial Sequence: Synthetic oligonucleotide
  Target: ANGPTL4; (-) strand; PAM type: NRG; PAM sequence: CAG
ccactaggggcgcggagaac

SEQ ID NO: 7431 - DNA, 20 bp, Artificial Sequence
  Description of Artificial Sequence: Synthetic oligonucleotide
  Target: ANGPTL4; (-) strand; PAM type: NRG; PAM sequence: GAG
ggagagccactaggggcgcg

SEQ ID NO: 7432 - DNA, 20 bp, Artificial Sequence
  Description of Artificial Sequence: Synthetic oligonucleotide
  Target: ANGPTL4; (-) strand; PAM type: NRG; PAM sequence: CGG
caggagagccactaggggcg

SEQ ID NO: 7433 - DNA, 20 bp, Artificial Sequence
  Description of Artificial Sequence: Synthetic oligonucleotide
  Target: ANGPTL4; (-) strand; PAM type: NRG; PAM sequence: GGG
caagccaggagagccactag

SEQ ID NO: 7434 - DNA, 20 bp, Artificial Sequence
  Description of Artificial Sequence: Synthetic oligonucleotide
  Target: ANGPTL4; (-) strand; PAM type: NRG; PAM sequence: GGG
ccaagccaggagagccacta

SEQ ID NO: 7435 - DNA, 20 bp, Artificial Sequence
  Description of Artificial Sequence: Synthetic oligonucleotide
  Target: ANGPTL4; (-) strand; PAM type: NRG; PAM sequence: AGG
tccaagccaggagagccact

SEQ ID NO: 7436 - DNA, 20 bp, Artificial Sequence
  Description of Artificial Sequence: Synthetic oligonucleotide
  Target: ANGPTL4; (-) strand; PAM type: NRG; PAM sequence: TAG
ttccaagccaggagagccac

SEQ ID NO: 7437 - DNA, 20 bp, Artificial Sequence
  Description of Artificial Sequence: Synthetic oligonucleotide
  Target: ANGPTL4; (-) strand; PAM type: NRG; PAM sequence: GAG
catacccttccaagccagga

SEQ ID NO: 7438 - DNA, 20 bp, Artificial Sequence
  Description of Artificial Sequence: Synthetic oligonucleotide
  Target: ANGPTL4; (-) strand; PAM type: NRG; PAM sequence: GAG
tccatacccttccaagccag

SEQ ID NO: 7439 - DNA, 20 bp, Artificial Sequence
  Description of Artificial Sequence: Synthetic oligonucleotide
  Target: ANGPTL4; (-) strand; PAM type: NRG; PAM sequence: AGG
tgtccatacccttccaagcc

SEQ ID NO: 7440 - DNA, 20 bp, Artificial Sequence
  Description of Artificial Sequence: Synthetic oligonucleotide
  Target: ANGPTL4; (-) strand; PAM type: NRG; PAM sequence: CAG
ctgtccatacccttccaagc

SEQ ID NO: 7441 - DNA, 20 bp, Artificial Sequence
  Description of Artificial Sequence: Synthetic oligonucleotide
  Target: ANGPTL4; (-) strand; PAM type: NRG; PAM sequence: AAG
actcctgtccatacccttcc

SEQ ID NO: 7442 - DNA, 20 bp, Artificial Sequence
  Description of Artificial Sequence: Synthetic oligonucleotide
  Target: ANGPTL4; (-) strand; PAM type: NRG; PAM sequence: CAG
cagggaagcccagggagcca

SEQ ID NO: 7443 - DNA, 20 bp, Artificial Sequence
  Description of Artificial Sequence: Synthetic oligonucleotide
  Target: ANGPTL4; (-) strand; PAM type: NRG; PAM sequence: GAG
ttgacgcagggaagcccagg

SEQ ID NO: 7444 - DNA, 20 bp, Artificial Sequence
  Description of Artificial Sequence: Synthetic oligonucleotide
  Target: ANGPTL4; (-) strand; PAM type: NRG; PAM sequence: GGG
ccttgacgcagggaagccca

SEQ ID NO: 7445 - DNA, 20 bp, Artificial Sequence
  Description of Artificial Sequence: Synthetic oligonucleotide
  Target: ANGPTL4; (-) strand; PAM type: NRG; PAM sequence: AGG
cccttgacgcagggaagccc

SEQ ID NO: 7446 - DNA, 20 bp, Artificial Sequence
  Description of Artificial Sequence: Synthetic oligonucleotide
  Target: ANGPTL4; (-) strand; PAM type: NRG; PAM sequence: CAG
tcccttgacgcagggaagcc

SEQ ID NO: 7447 - DNA, 20 bp, Artificial Sequence
  Description of Artificial Sequence: Synthetic oligonucleotide
  Target: ANGPTL4; (-) strand; PAM type: NRG; PAM sequence: AAG
gcccatcccttgacgcaggg

SEQ ID NO: 7448 - DNA, 20 bp, Artificial Sequence
  Description of Artificial Sequence: Synthetic oligonucleotide
  Target: ANGPTL4; (-) strand; PAM type: NRG; PAM sequence: GGG
ggagcccatcccttgacgca

SEQ ID NO: 7449 - DNA, 20 bp, Artificial Sequence
  Description of Artificial Sequence: Synthetic oligonucleotide
  Target: ANGPTL4; (-) strand; PAM type: NRG; PAM sequence: AGG
gggagcccatcccttgacgc

SEQ ID NO: 7450 - DNA, 20 bp, Artificial Sequence
  Description of Artificial Sequence: Synthetic oligonucleotide
  Target: ANGPTL4; (-) strand; PAM type: NRG; PAM sequence: CAG
ggggagcccatcccttgacg

SEQ ID NO: 7451 - DNA, 20 bp, Artificial Sequence
  Description of Artificial Sequence: Synthetic oligonucleotide
  Target: ANGPTL4; (-) strand; PAM type: NRG; PAM sequence: GAG
tcctcggcttcctaaggggg

SEQ ID NO: 7452 - DNA, 20 bp, Artificial Sequence
  Description of Artificial Sequence: Synthetic oligonucleotide
  Target: ANGPTL4; (-) strand; PAM type: NRG; PAM sequence: GGG
cctcctcggcttcctaaggg

SEQ ID NO: 7453 - DNA, 20 bp, Artificial Sequence
  Description of Artificial Sequence: Synthetic oligonucleotide
  Target: ANGPTL4; (-) strand; PAM type: NRG; PAM sequence: GGG
ccctcctcggcttcctaagg

SEQ ID NO: 7454 - DNA, 20 bp, Artificial Sequence
  Description of Artificial Sequence: Synthetic oligonucleotide
  Target: ANGPTL4; (-) strand; PAM type: NRG; PAM sequence: GGG
tccctcctcggcttcctaag

SEQ ID NO: 7455 - DNA, 20 bp, Artificial Sequence
  Description of Artificial Sequence: Synthetic oligonucleotide
  Target: ANGPTL4; (-) strand; PAM type: NRG; PAM sequence: GGG
ctccctcctcggcttcctaa

SEQ ID NO: 7456 - DNA, 20 bp, Artificial Sequence
  Description of Artificial Sequence: Synthetic oligonucleotide
  Target: ANGPTL4; (-) strand; PAM type: NRG; PAM sequence: AGG
cctccctcctcggcttccta

SEQ ID NO: 7457 - DNA, 20 bp, Artificial Sequence
  Description of Artificial Sequence: Synthetic oligonucleotide
  Target: ANGPTL4; (-) strand; PAM type: NRG; PAM sequence: AAG
acctccctcctcggcttcct

SEQ ID NO: 7458 - DNA, 20 bp, Artificial Sequence
  Description of Artificial Sequence: Synthetic oligonucleotide
  Target: ANGPTL4; (-) strand; PAM type: NRG; PAM sequence: CGG
cttgagcgaacctccctcct

SEQ ID NO: 7459 - DNA, 20 bp, Artificial Sequence
  Description of Artificial Sequence: Synthetic oligonucleotide
  Target: ANGPTL4; (-) strand; PAM type: NRG; PAM sequence: GAG
ggtcttgaattcctggcctt

SEQ ID NO: 7460 - DNA, 20 bp, Artificial Sequence
  Description of Artificial Sequence: Synthetic oligonucleotide
  Target: ANGPTL4; (-) strand; PAM type: NRG; PAM sequence: TGG
tttaggtggtcttgaattcc

SEQ ID NO: 7461 - DNA, 20 bp, Artificial Sequence
  Description of Artificial Sequence: Synthetic oligonucleotide
  Target: ANGPTL4; (-) strand; PAM type: NRG; PAM sequence: TGG
tctcgctattttgctttagg

SEQ ID NO: 7462 - DNA, 20 bp, Artificial Sequence
  Description of Artificial Sequence: Synthetic oligonucleotide
  Target: ANGPTL4; (-) strand; PAM type: NRG; PAM sequence: AGG
gggtctcgctattttgcttt

SEQ ID NO: 7463 - DNA, 20 bp, Artificial Sequence
  Description of Artificial Sequence: Synthetic oligonucleotide
  Target: ANGPTL4; (-) strand; PAM type: NRG; PAM sequence: TAG
ggggtctcgctattttgctt

SEQ ID NO: 7464 - DNA, 20 bp, Artificial Sequence
  Description of Artificial Sequence: Synthetic oligonucleotide
  Target: ANGPTL4; (-) strand; PAM type: NRG; PAM sequence: GGG
tgtgtgtgtagaagagacgg

SEQ ID NO: 7465 - DNA, 20 bp, Artificial Sequence
  Description of Artificial Sequence: Synthetic oligonucleotide
  Target: ANGPTL4; (-) strand; PAM type: NRG; PAM sequence: GGG
gtgtgtgtgtagaagagacg

SEQ ID NO: 7466 - DNA, 20 bp, Artificial Sequence
  Description of Artificial Sequence: Synthetic oligonucleotide
  Target: ANGPTL4; (-) strand; PAM type: NRG; PAM sequence: GGG
tgtgtgtgtgtagaagagac

SEQ ID NO: 7467 - DNA, 20 bp, Artificial Sequence
  Description of Artificial Sequence: Synthetic oligonucleotide
  Target: ANGPTL4; (-) strand; PAM type: NRG; PAM sequence: CGG
gtgtgtgtgtgtagaagaga

SEQ ID NO: 7468 - DNA, 20 bp, Artificial Sequence
  Description of Artificial Sequence: Synthetic oligonucleotide
  Target: ANGPTL4; (-) strand; PAM type: NRG; PAM sequence: GAG
gtgtgtgtgtgtgtgtagaa

SEQ ID NO: 7469 - DNA, 20 bp, Artificial Sequence
  Description of Artificial Sequence: Synthetic oligonucleotide
  Target: ANGPTL4; (-) strand; PAM type: NRG; PAM sequence: AAG
gtgtgtgtgtgtgtgtgtag

SEQ ID NO: 7470 - DNA, 20 bp, Artificial Sequence
  Description of Artificial Sequence: Synthetic oligonucleotide
  Target: ANGPTL4; (-) strand; PAM type: NRG; PAM sequence: TAG
tgtgtgtgtgtgtgtgtgtg

SEQ ID NO: 7471 - DNA, 20 bp, Artificial Sequence
  Description of Artificial Sequence: Synthetic oligonucleotide
  Target: ANGPTL4; (-) strand; PAM type: NRG; PAM sequence: CGG
gctccgtgagccactgcgcc

SEQ ID NO: 7472 - DNA, 20 bp, Artificial Sequence
  Description of Artificial Sequence: Synthetic oligonucleotide
  Target: ANGPTL4; (-) strand; PAM type: NRG; PAM sequence: GAG
acagcaggtggaggctccgt

SEQ ID NO: 7473 - DNA, 20 bp, Artificial Sequence
  Description of Artificial Sequence: Synthetic oligonucleotide
  Target: ANGPTL4; (-) strand; PAM type: NRG; PAM sequence: AGG
ctagtctcgacagcaggtgg

SEQ ID NO: 7474 - DNA, 20 bp, Artificial Sequence
  Description of Artificial Sequence: Synthetic oligonucleotide
  Target: ANGPTL4; (-) strand; PAM type: NRG; PAM sequence: GAG
gctagtctcgacagcaggtg

SEQ ID NO: 7475 - DNA, 20 bp, Artificial Sequence
  Description of Artificial Sequence: Synthetic oligonucleotide
  Target: ANGPTL4; (-) strand; PAM type: NRG; PAM sequence: TGG
aggctagtctcgacagcagg

SEQ ID NO: 7476 - DNA, 20 bp, Artificial Sequence
  Description of Artificial Sequence: Synthetic oligonucleotide
  Target: ANGPTL4; (-) strand; PAM type: NRG; PAM sequence: AGG
gccaggctagtctcgacagc

SEQ ID NO: 7477 - DNA, 20 bp, Artificial Sequence
  Description of Artificial Sequence: Synthetic oligonucleotide
  Target: ANGPTL4; (-) strand; PAM type: NRG; PAM sequence: CAG
ggccaggctagtctcgacag

SEQ ID NO: 7478 - DNA, 20 bp, Artificial Sequence
  Description of Artificial Sequence: Synthetic oligonucleotide
  Target: ANGPTL4; (-) strand; PAM type: NRG; PAM sequence: CAG
gttggccaggctagtctcga

SEQ ID NO: 7479 - DNA, 20 bp, Artificial Sequence
  Description of Artificial Sequence: Synthetic oligonucleotide
  Target: ANGPTL4; (-) strand; PAM type: NRG; PAM sequence: TAG
tttctccatgttggccaggc

SEQ ID NO: 7480 - DNA, 20 bp, Artificial Sequence
  Description of Artificial Sequence: Synthetic oligonucleotide
  Target: ANGPTL4; (-) strand; PAM type: NRG; PAM sequence: AGG
gaggtttctccatgttggcc

SEQ ID NO: 7481 - DNA, 20 bp, Artificial Sequence
  Description of Artificial Sequence: Synthetic oligonucleotide
  Target: ANGPTL4; (-) strand; PAM type: NRG; PAM sequence: CAG
cgaggtttctccatgttggc

SEQ ID NO: 7482 - DNA, 20 bp, Artificial Sequence
  Description of Artificial Sequence: Synthetic oligonucleotide
  Target: ANGPTL4; (-) strand; PAM type: NRG; PAM sequence: TGG
gagacgaggtttctccatgt

SEQ ID NO: 7483 - DNA, 20 bp, Artificial Sequence
  Description of Artificial Sequence: Synthetic oligonucleotide
  Target: ANGPTL4; (-) strand; PAM type: NRG; PAM sequence: AGG
ttgtatttttagtagagacg

SEQ ID NO: 7484 - DNA, 20 bp, Artificial Sequence
  Description of Artificial Sequence: Synthetic oligonucleotide
  Target: ANGPTL4; (-) strand; PAM type: NRG; PAM sequence: GAG
tttgtatttttagtagagac

SEQ ID NO: 7485 - DNA, 20 bp, Artificial Sequence
  Description of Artificial Sequence: Synthetic oligonucleotide
  Target: ANGPTL4; (-) strand; PAM type: NRG; PAM sequence: GAG
aattttttgtatttttagta

SEQ ID NO: 7486 - DNA, 20 bp, Artificial Sequence
  Description of Artificial Sequence: Synthetic oligonucleotide
  Target: ANGPTL4; (-) strand; PAM type: NRG; PAM sequence: TAG
ctaattttttgtatttttag

SEQ ID NO: 7487 - DNA, 20 bp, Artificial Sequence
  Description of Artificial Sequence: Synthetic oligonucleotide
  Target: ANGPTL4; (-) strand; PAM type: NRG; PAM sequence: TAG
aggctaattttttgtatttt

SEQ ID NO: 7488 - DNA, 20 bp, Artificial Sequence
  Description of Artificial Sequence: Synthetic oligonucleotide
  Target: ANGPTL4; (-) strand; PAM type: NRG; PAM sequence: AGG
acaggcatgcacaccatgcc

SEQ ID NO: 7489 - DNA, 20 bp, Artificial Sequence
  Description of Artificial Sequence: Synthetic oligonucleotide
  Target: ANGPTL4; (-) strand; PAM type: NRG; PAM sequence: CAG
tacaggcatgcacaccatgc

SEQ ID NO: 7490 - DNA, 20 bp, Artificial Sequence
  Description of Artificial Sequence: Synthetic oligonucleotide
  Target: ANGPTL4; (-) strand; PAM type: NRG; PAM sequence: AGG
tcccaagtagctgggattac

SEQ ID NO: 7491 - DNA, 20 bp, Artificial Sequence
  Description of Artificial Sequence: Synthetic oligonucleotide
  Target: ANGPTL4; (-) strand; PAM type: NRG; PAM sequence: CAG
ctcccaagtagctgggatta

SEQ ID NO: 7492 - DNA, 20 bp, Artificial Sequence
  Description of Artificial Sequence: Synthetic oligonucleotide
  Target: ANGPTL4; (-) strand; PAM type: NRG; PAM sequence: GGG
cctcagcctcccaagtagct

SEQ ID NO: 7493 - DNA, 20 bp, Artificial Sequence
  Description of Artificial Sequence: Synthetic oligonucleotide
  Target: ANGPTL4; (-) strand; PAM type: NRG; PAM sequence: TGG
gcctcagcctcccaagtagc

SEQ ID NO: 7494 - DNA, 20 bp, Artificial Sequence
  Description of Artificial Sequence: Synthetic oligonucleotide
  Target: ANGPTL4; (-) strand; PAM type: NRG; PAM sequence: TAG
tcctgcctcagcctcccaag

SEQ ID NO: 7495 - DNA, 20 bp, Artificial Sequence
  Description of Artificial Sequence: Synthetic oligonucleotide
  Target: ANGPTL4; (-) strand; PAM type: NRG; PAM sequence: AAG
ttctcctgcctcagcctccc

SEQ ID NO: 7496 - DNA, 20 bp, Artificial Sequence
  Description of Artificial Sequence: Synthetic oligonucleotide
  Target: ANGPTL4; (-) strand; PAM type: NRG; PAM sequence: CAG
ttcaagagattctcctgcct

SEQ ID NO: 7497 - DNA, 20 bp, Artificial Sequence
  Description of Artificial Sequence: Synthetic oligonucleotide
  Target: ANGPTL4; (-) strand; PAM type: NRG; PAM sequence: GAG
cctctgcctcccgggttcaa

SEQ ID NO: 7498 - DNA, 20 bp, Artificial Sequence
  Description of Artificial Sequence: Synthetic oligonucleotide
  Target: ANGPTL4; (-) strand; PAM type: NRG; PAM sequence: AAG
aacctctgcctcccgggttc

SEQ ID NO: 7499 - DNA, 20 bp, Artificial Sequence
  Description of Artificial Sequence: Synthetic oligonucleotide
  Target: ANGPTL4; (-) strand; PAM type: NRG; PAM sequence: GGG
cactgcaacctctgcctccc

SEQ ID NO: 7500 - DNA, 20 bp, Artificial Sequence
  Description of Artificial Sequence: Synthetic oligonucleotide
  Target: ANGPTL4; (-) strand; PAM type: NRG; PAM sequence: CGG
tcactgcaacctctgcctcc

SEQ ID NO: 7501 - DNA, 20 bp, Artificial Sequence
  Description of Artificial Sequence: Synthetic oligonucleotide
  Target: ANGPTL4; (-) strand; PAM type: NRG; PAM sequence: CGG
ggagtgcagtgctgcgatct

SEQ ID NO: 7502 - DNA, 20 bp, Artificial Sequence
  Description of Artificial Sequence: Synthetic oligonucleotide
  Target: ANGPTL4; (-) strand; PAM type: NRG; PAM sequence: CAG
ctgttgcccaggctggagtg

SEQ ID NO: 7503 - DNA, 20 bp, Artificial Sequence
  Description of Artificial Sequence: Synthetic oligonucleotide
  Target: ANGPTL4; (-) strand; PAM type: NRG; PAM sequence: GAG
tcactctgttgcccaggctg

SEQ ID NO: 7504 - DNA, 20 bp, Artificial Sequence
  Description of Artificial Sequence: Synthetic oligonucleotide
  Target: ANGPTL4; (-) strand; PAM type: NRG; PAM sequence: TGG
tctcactctgttgcccaggc

SEQ ID NO: 7505 - DNA, 20 bp, Artificial Sequence
  Description of Artificial Sequence: Synthetic oligonucleotide
  Target: ANGPTL4; (-) strand; PAM type: NRG; PAM sequence: AGG
ggagtctcactctgttgccc

SEQ ID NO: 7506 - DNA, 20 bp, Artificial Sequence
  Description of Artificial Sequence: Synthetic oligonucleotide
  Target: ANGPTL4; (-) strand; PAM type: NRG; PAM sequence: CAG
aggagtctcactctgttgcc

SEQ ID NO: 7507 - DNA, 20 bp, Artificial Sequence
  Description of Artificial Sequence: Synthetic oligonucleotide
  Target: ANGPTL4; (-) strand; PAM type: NRG; PAM sequence: GAG
atcgctattatttttttgag

SEQ ID NO: 7508 - DNA, 20 bp, Artificial Sequence
  Description of Artificial Sequence: Synthetic oligonucleotide
  Target: ANGPTL4; (-) strand; PAM type: NRG; PAM sequence: AGG
ttatcgctattatttttttg

SEQ ID NO: 7509 - DNA, 20 bp, Artificial Sequence
  Description of Artificial Sequence: Synthetic oligonucleotide
  Target: ANGPTL4; (-) strand; PAM type: NRG; PAM sequence: GAG
tttatcgctattattttttt

SEQ ID NO: 7510 - DNA, 20 bp, Artificial Sequence
  Description of Artificial Sequence: Synthetic oligonucleotide
  Target: ANGPTL4; (-) strand; PAM type: NRG; PAM sequence: TGG
caagcgtgagtcaccgcacc

SEQ ID NO: 7511 - DNA, 20 bp, Artificial Sequence
  Description of Artificial Sequence: Synthetic oligonucleotide
  Target: ANGPTL4; (-) strand; PAM type: NRG; PAM sequence: GAG
agtgctgggactacaagcgt

SEQ ID NO: 7512 - DNA, 20 bp, Artificial Sequence
  Description of Artificial Sequence: Synthetic oligonucleotide
  Target: ANGPTL4; (-) strand; PAM type: NRG; PAM sequence: AAG
tcccaaagtgctgggactac

SEQ ID NO: 7513 - DNA, 20 bp, Artificial Sequence
  Description of Artificial Sequence: Synthetic oligonucleotide
  Target: ANGPTL4; (-) strand; PAM type: NRG; PAM sequence: GGG
cctcgccctcccaaagtgct

SEQ ID NO: 7514 - DNA, 20 bp, Artificial Sequence
  Description of Artificial Sequence: Synthetic oligonucleotide
  Target: ANGPTL4; (-) strand; PAM type: NRG; PAM sequence: TGG
gcctcgccctcccaaagtgc

SEQ ID NO: 7515 - DNA, 20 bp, Artificial Sequence
  Description of Artificial Sequence: Synthetic oligonucleotide
  Target: ANGPTL4; (-) strand; PAM type: NRG; PAM sequence: AAG
ccactggcctcgccctccca

SEQ ID NO: 7516 - DNA, 20 bp, Artificial Sequence
  Description of Artificial Sequence: Synthetic oligonucleotide
  Target: ANGPTL4; (-) strand; PAM type: NRG; PAM sequence: TGG
cctgacctcaggtgatccac

SEQ ID NO: 7517 - DNA, 20 bp, Artificial Sequence
  Description of Artificial Sequence: Synthetic oligonucleotide
  Target: ANGPTL4; (-) strand; PAM type: NRG; PAM sequence: AGG
ggtcttgaactcctgacctc

SEQ ID NO: 7518 - DNA, 20 bp, Artificial Sequence
  Description of Artificial Sequence: Synthetic oligonucleotide
  Target: ANGPTL4; (-) strand; PAM type: NRG; PAM sequence: CAG
tggtcttgaactcctgacct

SEQ ID NO: 7519 - DNA, 20 bp, Artificial Sequence
  Description of Artificial Sequence: Synthetic oligonucleotide
  Target: ANGPTL4; (-) strand; PAM type: NRG; PAM sequence: TGG
tttcactgtgttggtcaggc

SEQ ID NO: 7520 - DNA, 20 bp, Artificial Sequence
  Description of Artificial Sequence: Synthetic oligonucleotide
  Target: ANGPTL4; (-) strand; PAM type: NRG; PAM sequence: AGG
ggggtttcactgtgttggtc

SEQ ID NO: 7521 - DNA, 20 bp, Artificial Sequence
  Description of Artificial Sequence: Synthetic oligonucleotide
  Target: ANGPTL4; (-) strand; PAM type: NRG; PAM sequence: CAG
cggggtttcactgtgttggt

SEQ ID NO: 7522 - DNA, 20 bp, Artificial Sequence
  Description of Artificial Sequence: Synthetic oligonucleotide
  Target: ANGPTL4; (-) strand; PAM type: NRG; PAM sequence: TGG
gagacggggtttcactgtgt

SEQ ID NO: 7523 - DNA, 20 bp, Artificial Sequence
  Description of Artificial Sequence: Synthetic oligonucleotide
  Target: ANGPTL4; (-) strand; PAM type: NRG; PAM sequence: GGG
ttgtatttttagtagagacg

SEQ ID NO: 7524 - DNA, 20 bp, Artificial Sequence
  Description of Artificial Sequence: Synthetic oligonucleotide
  Target: ANGPTL4; (-) strand; PAM type: NRG; PAM sequence: GGG
tttgtatttttagtagagac

SEQ ID NO: 7525 - DNA, 20 bp, Artificial Sequence
  Description of Artificial Sequence: Synthetic oligonucleotide
  Target: ANGPTL4; (-) strand; PAM type: NRG; PAM sequence: CGG
ttttgtatttttagtagaga

SEQ ID NO: 7526 - DNA, 20 bp, Artificial Sequence
  Description of Artificial Sequence: Synthetic oligonucleotide
  Target: ANGPTL4; (-) strand; PAM type: NRG; PAM sequence: GAG
taatttttgtatttttagta

SEQ ID NO: 7527 - DNA, 20 bp, Artificial Sequence
  Description of Artificial Sequence: Synthetic oligonucleotide
  Target: ANGPTL4; (-) strand; PAM type: NRG; PAM sequence: TAG
gctaatttttgtatttttag

SEQ ID NO: 7528 - DNA, 20 bp, Artificial Sequence
  Description of Artificial Sequence: Synthetic oligonucleotide
  Target: ANGPTL4; (-) strand; PAM type: NRG; PAM sequence: TAG
ccagctaatttttgtatttt

SEQ ID NO: 7529 - DNA, 20 bp, Artificial Sequence
  Description of Artificial Sequence: Synthetic oligonucleotide
  Target: ANGPTL4; (-) strand; PAM type: NRG; PAM sequence: CAG
caggcgcccaccaccacacc

SEQ ID NO: 7530 - DNA, 20 bp, Artificial Sequence
  Description of Artificial Sequence: Synthetic oligonucleotide
  Target: ANGPTL4; (-) strand; PAM type: NRG; PAM sequence: AGG
tccccagtagctgggattac

SEQ ID NO: 7531 - DNA, 20 bp, Artificial Sequence
  Description of Artificial Sequence: Synthetic oligonucleotide
  Target: ANGPTL4; (-) strand; PAM type: NRG; PAM sequence: CAG
ctccccagtagctgggatta

SEQ ID NO: 7532 - DNA, 20 bp, Artificial Sequence
  Description of Artificial Sequence: Synthetic oligonucleotide
  Target: ANGPTL4; (-) strand; PAM type: NRG; PAM sequence: GGG
cctcagcctccccagtagct

SEQ ID NO: 7533 - DNA, 20 bp, Artificial Sequence
  Description of Artificial Sequence: Synthetic oligonucleotide
  Target: ANGPTL4; (-) strand; PAM type: NRG; PAM sequence: TGG
gcctcagcctccccagtagc

SEQ ID NO: 7534 - DNA, 20 bp, Artificial Sequence
  Description of Artificial Sequence: Synthetic oligonucleotide
  Target: ANGPTL4; (-) strand; PAM type: NRG; PAM sequence: TAG
tcctgcctcagcctccccag

SEQ ID NO: 7535 - DNA, 20 bp, Artificial Sequence
  Description of Artificial Sequence: Synthetic oligonucleotide
  Target: ANGPTL4; (-) strand; PAM type: NRG; PAM sequence: CAG
ttctcctgcctcagcctccc

SEQ ID NO: 7536 - DNA, 20 bp, Artificial Sequence
  Description of Artificial Sequence: Synthetic oligonucleotide
  Target: ANGPTL4; (-) strand; PAM type: NRG; PAM sequence: CAG
ttcaagaggttctcctgcct

SEQ ID NO: 7537 - DNA, 20 bp, Artificial Sequence
  Description of Artificial Sequence: Synthetic oligonucleotide
  Target: ANGPTL4; (-) strand; PAM type: NRG; PAM sequence: AGG
ctccgcctcccgggttcaag

SEQ ID NO: 7538 - DNA, 20 bp, Artificial Sequence
  Description of Artificial Sequence: Synthetic oligonucleotide
  Target: ANGPTL4; (-) strand; PAM type: NRG; PAM sequence: GAG
cctccgcctcccgggttcaa

SEQ ID NO: 7539 - DNA, 20 bp, Artificial Sequence
  Description of Artificial Sequence: Synthetic oligonucleotide
  Target: ANGPTL4; (-) strand; PAM type: NRG; PAM sequence: AAG
aacctccgcctcccgggttc

SEQ ID NO: 7540 - DNA, 20 bp, Artificial Sequence
  Description of Artificial Sequence: Synthetic oligonucleotide
  Target: ANGPTL4; (-) strand; PAM type: NRG; PAM sequence: GGG
cactgcaacctccgcctccc

SEQ ID NO: 7541 - DNA, 20 bp, Artificial Sequence
  Description of Artificial Sequence: Synthetic oligonucleotide
  Target: ANGPTL4; (-) strand; PAM type: NRG; PAM sequence: CGG
tcactgcaacctccgcctcc

SEQ ID NO: 7542 - DNA, 20 bp, Artificial Sequence
  Description of Artificial Sequence: Synthetic oligonucleotide
  Target: ANGPTL4; (-) strand; PAM type: NRG; PAM sequence: CGG
ggagtgcaatggcatgatcc

SEQ ID NO: 7543 - DNA, 20 bp, Artificial Sequence
  Description of Artificial Sequence: Synthetic oligonucleotide
  Target: ANGPTL4; (-) strand; PAM type: NRG; PAM sequence: TGG
tcgcccaggctggagtgcaa

SEQ ID NO: 7544 - DNA, 20 bp, Artificial Sequence
  Description of Artificial Sequence: Synthetic oligonucleotide
  Target: ANGPTL4; (-) strand; PAM type: NRG; PAM sequence: GAG
gagctctgtcgcccaggctg

SEQ ID NO: 7545 - DNA, 20 bp, Artificial Sequence
  Description of Artificial Sequence: Synthetic oligonucleotide
  Target: ANGPTL4; (-) strand; PAM type: NRG; PAM sequence: TGG
tcgagctctgtcgcccaggc

SEQ ID NO: 7546 - DNA, 20 bp, Artificial Sequence
  Description of Artificial Sequence: Synthetic oligonucleotide
  Target: ANGPTL4; (-) strand; PAM type: NRG; PAM sequence: AGG
ggagtcgagctctgtcgccc

SEQ ID NO: 7547 - DNA, 20 bp, Artificial Sequence
  Description of Artificial Sequence: Synthetic oligonucleotide
  Target: ANGPTL4; (-) strand; PAM type: NRG; PAM sequence: CAG
tggagtcgagctctgtcgcc

SEQ ID NO: 7548 - DNA, 20 bp, Artificial Sequence
  Description of Artificial Sequence: Synthetic oligonucleotide
  Target: ANGPTL4; (-) strand; PAM type: NRG; PAM sequence: GAG
tattattttgagatggagtc

SEQ ID NO: 7549 - DNA, 20 bp, Artificial Sequence
  Description of Artificial Sequence: Synthetic oligonucleotide
  Target: ANGPTL4; (-) strand; PAM type: NRG; PAM sequence: GAG
attattattattttgagatg

SEQ ID NO: 7550 - DNA, 20 bp, Artificial Sequence
  Description of Artificial Sequence: Synthetic oligonucleotide
  Target: ANGPTL4; (-) strand; PAM type: NRG; PAM sequence: TGG
ttattattattattttgaga

SEQ ID NO: 7551 - DNA, 20 bp, Artificial Sequence
  Description of Artificial Sequence: Synthetic oligonucleotide
  Target: ANGPTL4; (-) strand; PAM type: NRG; PAM sequence: GAG
tttattattattattatttt

SEQ ID NO: 7552 - DNA, 20 bp, Artificial Sequence
  Description of Artificial Sequence: Synthetic oligonucleotide
  Target: ANGPTL4; (-) strand; PAM type: NRG; PAM sequence: TGG
caagtagctgccaccacacc

SEQ ID NO: 7553 - DNA, 20 bp, Artificial Sequence
  Description of Artificial Sequence: Synthetic oligonucleotide
  Target: ANGPTL4; (-) strand; PAM type: NRG; PAM sequence: TAG
ttgtgtctcagcctcccaag

SEQ ID NO: 7554 - DNA, 20 bp, Artificial Sequence
  Description of Artificial Sequence: Synthetic oligonucleotide
  Target: ANGPTL4; (-) strand; PAM type: NRG; PAM sequence: AAG
ttcttgtgtctcagcctccc

SEQ ID NO: 7555 - DNA, 20 bp, Artificial Sequence
  Description of Artificial Sequence: Synthetic oligonucleotide
  Target: ANGPTL4; (-) strand; PAM type: NRG; PAM sequence: CAG
ctcaagtgattcttgtgtct

SEQ ID NO: 7556 - DNA, 20 bp, Artificial Sequence
  Description of Artificial Sequence: Synthetic oligonucleotide
  Target: ANGPTL4; (-) strand; PAM type: NRG; PAM sequence: AAG
aacctctgcctcccagactc

SEQ ID NO: 7557 - DNA, 20 bp, Artificial Sequence
  Description of Artificial Sequence: Synthetic oligonucleotide
  Target: ANGPTL4; (-) strand; PAM type: NRG; PAM sequence: CAG
tcactgcaacctctgcctcc

SEQ ID NO: 7558 - DNA, 20 bp, Artificial Sequence
  Description of Artificial Sequence: Synthetic oligonucleotide
  Target: ANGPTL4; (-) strand; PAM type: NRG; PAM sequence: TGG
ggagtgcagtggcgcaatct

SEQ ID NO: 7559 - DNA, 20 bp, Artificial Sequence
  Description of Artificial Sequence: Synthetic oligonucleotide
  Target: ANGPTL4; (-) strand; PAM type: NRG; PAM sequence: TGG
tcacccaggttggagtgcag

SEQ ID NO: 7560 - DNA, 20 bp, Artificial Sequence
  Description of Artificial Sequence: Synthetic oligonucleotide
  Target: ANGPTL4; (-) strand; PAM type: NRG; PAM sequence: CAG
ctgtcacccaggttggagtg

SEQ ID NO: 7561 - DNA, 20 bp, Artificial Sequence
  Description of Artificial Sequence: Synthetic oligonucleotide
  Target: ANGPTL4; (-) strand; PAM type: NRG; PAM sequence: GAG
tcgctctgtcacccaggttg

SEQ ID NO: 7562 - DNA, 20 bp, Artificial Sequence
  Description of Artificial Sequence: Synthetic oligonucleotide
  Target: ANGPTL4; (-) strand; PAM type: NRG; PAM sequence: TGG
tctcgctctgtcacccaggt

SEQ ID NO: 7563 - DNA, 20 bp, Artificial Sequence
  Description of Artificial Sequence: Synthetic oligonucleotide
  Target: ANGPTL4; (-) strand; PAM type: NRG; PAM sequence: AGG
agagtctcgctctgtcaccc

SEQ ID NO: 7564 - DNA, 20 bp, Artificial Sequence
  Description of Artificial Sequence: Synthetic oligonucleotide
  Target: ANGPTL4; (-) strand; PAM type: NRG; PAM sequence: CAG
cagagtctcgctctgtcacc

SEQ ID NO: 7565 - DNA, 20 bp, Artificial Sequence
  Description of Artificial Sequence: Synthetic oligonucleotide
  Target: ANGPTL4; (-) strand; PAM type: NRG; PAM sequence: GAG
attttttattttttcagaca

SEQ ID NO: 7566 - DNA, 20 bp, Artificial Sequence
  Description of Artificial Sequence: Synthetic oligonucleotide
  Target: ANGPTL4; (-) strand; PAM type: NRG; PAM sequence: CAG
ttattttttattttttcaga

SEQ ID NO: 7567 - DNA, 20 bp, Artificial Sequence
  Description of Artificial Sequence: Synthetic oligonucleotide
  Target: ANGPTL4; (-) strand; PAM type: NRG; PAM sequence: CAG
tggcttattttttatttttt

SEQ ID NO: 7568 - DNA, 20 bp, Artificial Sequence
  Description of Artificial Sequence: Synthetic oligonucleotide
  Target: ANGPTL4; (-) strand; PAM type: NRG; PAM sequence: TGG
cagtcatgcagctctatgcc

SEQ ID NO: 7569 - DNA, 20 bp, Artificial Sequence
  Description of Artificial Sequence: Synthetic oligonucleotide
  Target: ANGPTL4; (-) strand; PAM type: NRG; PAM sequence: CAG
tagctgggactacagtcatg

SEQ ID NO: 7570 - DNA, 20 bp, Artificial Sequence
  Description of Artificial Sequence: Synthetic oligonucleotide
  Target: ANGPTL4; (-) strand; PAM type: NRG; PAM sequence: CAG
ctcctgtgtagctgggacta

SEQ ID NO: 7571 - DNA, 20 bp, Artificial Sequence
  Description of Artificial Sequence: Synthetic oligonucleotide
  Target: ANGPTL4; (-) strand; PAM type: NRG; PAM sequence: GGG
tttcagcctcctgtgtagct

SEQ ID NO: 7572 - DNA, 20 bp, Artificial Sequence
  Description of Artificial Sequence: Synthetic oligonucleotide
  Target: ANGPTL4; (-) strand; PAM type: NRG; PAM sequence: TGG
ttttcagcctcctgtgtagc

SEQ ID NO: 7573 - DNA, 20 bp, Artificial Sequence
  Description of Artificial Sequence: Synthetic oligonucleotide
  Target: ANGPTL4; (-) strand; PAM type: NRG; PAM sequence: TAG
cctgttttcagcctcctgtg

SEQ ID NO: 7574 - DNA, 20 bp, Artificial Sequence
  Description of Artificial Sequence: Synthetic oligonucleotide
  Target: ANGPTL4; (-) strand; PAM type: NRG; PAM sequence: CAG
tcaggcgatcctcctgtttt

SEQ ID NO: 7575 - DNA, 20 bp, Artificial Sequence
  Description of Artificial Sequence: Synthetic oligonucleotide
  Target: ANGPTL4; (-) strand; PAM type: NRG; PAM sequence: AGG
agcctccaactcctggggtc

SEQ ID NO: 7576 - DNA, 20 bp, Artificial Sequence
  Description of Artificial Sequence: Synthetic oligonucleotide
  Target: ANGPTL4; (-) strand; PAM type: NRG; PAM sequence: CAG
cagcctccaactcctggggt

SEQ ID NO: 7577 - DNA, 20 bp, Artificial Sequence
  Description of Artificial Sequence: Synthetic oligonucleotide
  Target: ANGPTL4; (-) strand; PAM type: NRG; PAM sequence: GGG
actgcagcctccaactcctg

SEQ ID NO: 7578 - DNA, 20 bp, Artificial Sequence
  Description of Artificial Sequence: Synthetic oligonucleotide
  Target: ANGPTL4; (-) strand; PAM type: NRG; PAM sequence: GGG
cactgcagcctccaactcct

SEQ ID NO: 7579 - DNA, 20 bp, Artificial Sequence
  Description of Artificial Sequence: Synthetic oligonucleotide
  Target: ANGPTL4; (-) strand; PAM type: NRG; PAM sequence: TGG
tcactgcagcctccaactcc

SEQ ID NO: 7580 - DNA, 20 bp, Artificial Sequence
  Description of Artificial Sequence: Synthetic oligonucleotide
  Target: ANGPTL4; (-) strand; PAM type: NRG; PAM sequence: CAG
ggtgctgtcacagctcactg

SEQ ID NO: 7581 - DNA, 20 bp, Artificial Sequence
  Description of Artificial Sequence: Synthetic oligonucleotide
  Target: ANGPTL4; (-) strand; PAM type: NRG; PAM sequence: CAG
ggagtgcagtggtgctgtca

SEQ ID NO: 7582 - DNA, 20 bp, Artificial Sequence
  Description of Artificial Sequence: Synthetic oligonucleotide
  Target: ANGPTL4; (-) strand; PAM type: NRG; PAM sequence: TGG
tcgcccaggctggagtgcag

SEQ ID NO: 7583 - DNA, 20 bp, Artificial Sequence
  Description of Artificial Sequence: Synthetic oligonucleotide
  Target: ANGPTL4; (-) strand; PAM type: NRG; PAM sequence: CAG
ctctcgcccaggctggagtg

SEQ ID NO: 7584 - DNA, 20 bp, Artificial Sequence
  Description of Artificial Sequence: Synthetic oligonucleotide
  Target: ANGPTL4; (-) strand; PAM type: NRG; PAM sequence: GAG
tcgttctctcgcccaggctg

SEQ ID NO: 7585 - DNA, 20 bp, Artificial Sequence
  Description of Artificial Sequence: Synthetic oligonucleotide
  Target: ANGPTL4; (-) strand; PAM type: NRG; PAM sequence: TGG
tctcgttctctcgcccaggc

SEQ ID NO: 7586 - DNA, 20 bp, Artificial Sequence
  Description of Artificial Sequence: Synthetic oligonucleotide
  Target: ANGPTL4; (-) strand; PAM type: NRG; PAM sequence: AGG
ggggtctcgttctctcgccc

SEQ ID NO: 7587 - DNA, 20 bp, Artificial Sequence
  Description of Artificial Sequence: Synthetic oligonucleotide
  Target: ANGPTL4; (-) strand; PAM type: NRG; PAM sequence: CAG
cggggtctcgttctctcgcc

SEQ ID NO: 7588 - DNA, 20 bp, Artificial Sequence
  Description of Artificial Sequence: Synthetic oligonucleotide
  Target: ANGPTL4; (-) strand; PAM type: NRG; PAM sequence: GGG
tcttttttttcccaatgacg

SEQ ID NO: 7589 - DNA, 20 bp, Artificial Sequence
  Description of Artificial Sequence: Synthetic oligonucleotide
  Target: ANGPTL4; (-) strand; PAM type: NRG; PAM sequence: GGG
ttcttttttttcccaatgac

SEQ ID NO: 7590 - DNA, 20 bp, Artificial Sequence
  Description of Artificial Sequence: Synthetic oligonucleotide
  Target: ANGPTL4; (-) strand; PAM type: NRG; PAM sequence: CGG
tttcttttttttcccaatga

SEQ ID NO: 7591 - DNA, 20 bp, Artificial Sequence
  Description of Artificial Sequence: Synthetic oligonucleotide
  Target: ANGPTL4; (-) strand; PAM type: NRG; PAM sequence: GAG
tccgctgaggccaggcaagg

SEQ ID NO: 7592 - DNA, 20 bp, Artificial Sequence
  Description of Artificial Sequence: Synthetic oligonucleotide
  Target: ANGPTL4; (-) strand; PAM type: NRG; PAM sequence: GGG
catccgctgaggccaggcaa

SEQ ID NO: 7593 - DNA, 20 bp, Artificial Sequence
  Description of Artificial Sequence: Synthetic oligonucleotide
  Target: ANGPTL4; (-) strand; PAM type: NRG; PAM sequence: AGG
ccatccgctgaggccaggca

SEQ ID NO: 7594 - DNA, 20 bp, Artificial Sequence
  Description of Artificial Sequence: Synthetic oligonucleotide
  Target: ANGPTL4; (-) strand; PAM type: NRG; PAM sequence: AAG
tccatccgctgaggccaggc

SEQ ID NO: 7595 - DNA, 20 bp, Artificial Sequence
  Description of Artificial Sequence: Synthetic oligonucleotide
  Target: ANGPTL4; (-) strand; PAM type: NRG; PAM sequence: AGG
aatctccatccgctgaggcc

SEQ ID NO: 7596 - DNA, 20 bp, Artificial Sequence
  Description of Artificial Sequence: Synthetic oligonucleotide
  Target: ANGPTL4; (-) strand; PAM type: NRG; PAM sequence: CAG
aaatctccatccgctgaggc

SEQ ID NO: 7597 - DNA, 20 bp, Artificial Sequence
  Description of Artificial Sequence: Synthetic oligonucleotide
  Target: ANGPTL4; (-) strand; PAM type: NRG; PAM sequence: AGG
ttccaaatctccatccgctg

SEQ ID NO: 7598 - DNA, 20 bp, Artificial Sequence
  Description of Artificial Sequence: Synthetic oligonucleotide
  Target: ANGPTL4; (-) strand; PAM type: NRG; PAM sequence: GAG
cttccaaatctccatccgct

SEQ ID NO: 7599 - DNA, 20 bp, Artificial Sequence
  Description of Artificial Sequence: Synthetic oligonucleotide
  Target: ANGPTL4; (-) strand; PAM type: NRG; PAM sequence: CAG
tgaaaaccttggtgaggacc

SEQ ID NO: 7600 - DNA, 20 bp, Artificial Sequence
  Description of Artificial Sequence: Synthetic oligonucleotide
  Target: ANGPTL4; (-) strand; PAM type: NRG; PAM sequence: AGG
gaggggtgaaaaccttggtg

SEQ ID NO: 7601 - DNA, 20 bp, Artificial Sequence
  Description of Artificial Sequence: Synthetic oligonucleotide
  Target: ANGPTL4; (-) strand; PAM type: NRG; PAM sequence: GAG
ggaggggtgaaaaccttggt

SEQ ID NO: 7602 - DNA, 20 bp, Artificial Sequence
  Description of Artificial Sequence: Synthetic oligonucleotide
  Target: ANGPTL4; (-) strand; PAM type: NRG; PAM sequence: TGG
ctggggaggggtgaaaacct

SEQ ID NO: 7603 - DNA, 20 bp, Artificial Sequence
  Description of Artificial Sequence: Synthetic oligonucleotide
  Target: ANGPTL4; (-) strand; PAM type: NRG; PAM sequence: GGG
cttgagttgtgtctggggag

SEQ ID NO: 7604 - DNA, 20 bp, Artificial Sequence
  Description of Artificial Sequence: Synthetic oligonucleotide
  Target: ANGPTL4; (-) strand; PAM type: NRG; PAM sequence: GGG
ccttgagttgtgtctgggga

SEQ ID NO: 7605 - DNA, 20 bp, Artificial Sequence
  Description of Artificial Sequence: Synthetic oligonucleotide
  Target: ANGPTL4; (-) strand; PAM type: NRG; PAM sequence: AGG
gccttgagttgtgtctgggg

SEQ ID NO: 7606 - DNA, 20 bp, Artificial Sequence
  Description of Artificial Sequence: Synthetic oligonucleotide
  Target: ANGPTL4; (-) strand; PAM type: NRG; PAM sequence: GAG
agccttgagttgtgtctggg

SEQ ID NO: 7607 - DNA, 20 bp, Artificial Sequence
  Description of Artificial Sequence: Synthetic oligonucleotide
  Target: ANGPTL4; (-) strand; PAM type: NRG; PAM sequence: GGG
tgagccttgagttgtgtctg

SEQ ID NO: 7608 - DNA, 20 bp, Artificial Sequence
  Description of Artificial Sequence: Synthetic oligonucleotide
  Target: ANGPTL4; (-) strand; PAM type: NRG; PAM sequence: GGG
ctgagccttgagttgtgtct

SEQ ID NO: 7609 - DNA, 20 bp, Artificial Sequence
  Description of Artificial Sequence: Synthetic oligonucleotide
  Target: ANGPTL4; (-) strand; PAM type: NRG; PAM sequence: TGG
tctgagccttgagttgtgtc

SEQ ID NO: 7610 - DNA, 20 bp, Artificial Sequence
  Description of Artificial Sequence: Synthetic oligonucleotide
  Target: ANGPTL4; (-) strand; PAM type: NRG; PAM sequence: GAG
atcctgctgttctgagcctt

SEQ ID NO: 7611 - DNA, 20 bp, Artificial Sequence
  Description of Artificial Sequence: Synthetic oligonucleotide
  Target: ANGPTL4; (-) strand; PAM type: NRG; PAM sequence: GAG
ttgctggatcctgctgttct

SEQ ID NO: 7612 - DNA, 20 bp, Artificial Sequence
  Description of Artificial Sequence: Synthetic oligonucleotide
  Target: ANGPTL4; (-) strand; PAM type: NRG; PAM sequence: TGG
ccaccttgtggaagagttgc

SEQ ID NO: 7613 - DNA, 20 bp, Artificial Sequence
  Description of Artificial Sequence: Synthetic oligonucleotide
  Target: ANGPTL4; (-) strand; PAM type: NRG; PAM sequence: GAG
tgctgggccaccttgtggaa

SEQ ID NO: 7614 - DNA, 20 bp, Artificial Sequence
  Description of Artificial Sequence: Synthetic oligonucleotide
  Target: ANGPTL4; (-) strand; PAM type: NRG; PAM sequence: AAG
gctgctgggccaccttgtgg

SEQ ID NO: 7615 - DNA, 20 bp, Artificial Sequence
  Description of Artificial Sequence: Synthetic oligonucleotide
  Target: ANGPTL4; (-) strand; PAM type: NRG; PAM sequence: TGG
gctgctgctgggccaccttg

SEQ ID NO: 7616 - DNA, 20 bp, Artificial Sequence
  Description of Artificial Sequence: Synthetic oligonucleotide
  Target: ANGPTL4; (-) strand; PAM type: NRG; PAM sequence: GGG
ctccaggtgccgctgctgct

SEQ ID NO: 7617 - DNA, 20 bp, Artificial Sequence
  Description of Artificial Sequence: Synthetic oligonucleotide
  Target: ANGPTL4; (-) strand; PAM type: NRG; PAM sequence: TGG
tctccaggtgccgctgctgc

SEQ ID NO: 7618 - DNA, 20 bp, Artificial Sequence
  Description of Artificial Sequence: Synthetic oligonucleotide
  Target: ANGPTL4; (-) strand; PAM type: NRG; PAM sequence: AGG
ttcgcaggtgctgcttctcc

SEQ ID NO: 7619 - DNA, 20 bp, Artificial Sequence
  Description of Artificial Sequence: Synthetic oligonucleotide
  Target: ANGPTL4; (-) strand; PAM type: NRG; PAM sequence: CAG
attcgcaggtgctgcttctc

SEQ ID NO: 7620 - DNA, 20 bp, Artificial Sequence
  Description of Artificial Sequence: Synthetic oligonucleotide
  Target: ANGPTL4; (-) strand; PAM type: NRG; PAM sequence: AGG
tttgcagatgctgaattcgc

SEQ ID NO: 7621 - DNA, 20 bp, Artificial Sequence
  Description of Artificial Sequence: Synthetic oligonucleotide
  Target: ANGPTL4; (-) strand; PAM type: NRG; PAM sequence: CAG
ctttgcagatgctgaattcg

SEQ ID NO: 7622 - DNA, 20 bp, Artificial Sequence
  Description of Artificial Sequence: Synthetic oligonucleotide
  Target: ANGPTL4; (-) strand; PAM type: NRG; PAM sequence: CAG
cctagggttacctggctttg

SEQ ID NO: 7623 - DNA, 20 bp, Artificial Sequence
  Description of Artificial Sequence: Synthetic oligonucleotide
  Target: ANGPTL4; (-) strand; PAM type: NRG; PAM sequence: TGG
cccttgatcctagggttacc

SEQ ID NO: 7624 - DNA, 20 bp, Artificial Sequence
  Description of Artificial Sequence: Synthetic oligonucleotide
  Target: ANGPTL4; (-) strand; PAM type: NRG; PAM sequence: GGG
ccttttctcccttgatccta

SEQ ID NO: 7625 - DNA, 20 bp, Artificial Sequence
  Description of Artificial Sequence: Synthetic oligonucleotide
  Target: ANGPTL4; (-) strand; PAM type: NRG; PAM sequence: AGG
accttttctcccttgatcct

SEQ ID NO: 7626 - DNA, 20 bp, Artificial Sequence
  Description of Artificial Sequence: Synthetic oligonucleotide
  Target: ANGPTL4; (-) strand; PAM type: NRG; PAM sequence: TAG
gaccttttctcccttgatcc

SEQ ID NO: 7627 - DNA, 20 bp, Artificial Sequence
  Description of Artificial Sequence: Synthetic oligonucleotide
  Target: ANGPTL4; (-) strand; PAM type: NRG; PAM sequence: GGG
cctggggtccagctatcaga

SEQ ID NO: 7628 - DNA, 20 bp, Artificial Sequence
  Description of Artificial Sequence: Synthetic oligonucleotide
  Target: ANGPTL4; (-) strand; PAM type: NRG; PAM sequence: AGG
acctggggtccagctatcag

SEQ ID NO: 7629 - DNA, 20 bp, Artificial Sequence
  Description of Artificial Sequence: Synthetic oligonucleotide
  Target: ANGPTL4; (-) strand; PAM type: NRG; PAM sequence: GAG
aacctggggtccagctatca

SEQ ID NO: 7630 - DNA, 20 bp, Artificial Sequence
  Description of Artificial Sequence: Synthetic oligonucleotide
  Target: ANGPTL4; (-) strand; PAM type: NRG; PAM sequence: CAG
tcaacctggggtccagctat

SEQ ID NO: 7631 - DNA, 20 bp, Artificial Sequence
  Description of Artificial Sequence: Synthetic oligonucleotide
  Target: ANGPTL4; (-) strand; PAM type: NRG; PAM sequence: CAG
ctccctctcaacctggggtc

SEQ ID NO: 7632 - DNA, 20 bp, Artificial Sequence
  Description of Artificial Sequence: Synthetic oligonucleotide
  Target: ANGPTL4; (-) strand; PAM type: NRG; PAM sequence: GGG
accacctccctctcaacctg

SEQ ID NO: 7633 - DNA, 20 bp, Artificial Sequence
  Description of Artificial Sequence: Synthetic oligonucleotide
  Target: ANGPTL4; (-) strand; PAM type: NRG; PAM sequence: GGG
caccacctccctctcaacct

SEQ ID NO: 7634 - DNA, 20 bp, Artificial Sequence
  Description of Artificial Sequence: Synthetic oligonucleotide
  Target: ANGPTL4; (-) strand; PAM type: NRG; PAM sequence: TGG
tcaccacctccctctcaacc

SEQ ID NO: 7635 - DNA, 20 bp, Artificial Sequence
  Description of Artificial Sequence: Synthetic oligonucleotide
  Target: ANGPTL4; (-) strand; PAM type: NRG; PAM sequence: CAG
cacgtccccagccacacgtc

SEQ ID NO: 7636 - DNA, 20 bp, Artificial Sequence
  Description of Artificial Sequence: Synthetic oligonucleotide
  Target: ANGPTL4; (-) strand; PAM type: NRG; PAM sequence: CAG
cctgcctggccccacgtccc

SEQ ID NO: 7637 - DNA, 20 bp, Artificial Sequence
  Description of Artificial Sequence: Synthetic oligonucleotide
  Target: ANGPTL4; (-) strand; PAM type: NRG; PAM sequence: TGG
ggagggtgtcaggtcctgcc

SEQ ID NO: 7638 - DNA, 20 bp, Artificial Sequence
  Description of Artificial Sequence: Synthetic oligonucleotide
  Target: ANGPTL4; (-) strand; PAM type: NRG; PAM sequence: AGG
tgggacgggaggagggtgtc

SEQ ID NO: 7639 - DNA, 20 bp, Artificial Sequence
  Description of Artificial Sequence: Synthetic oligonucleotide
  Target: ANGPTL4; (-) strand; PAM type: NRG; PAM sequence: CAG
atgggacgggaggagggtgt

SEQ ID NO: 7640 - DNA, 20 bp, Artificial Sequence
  Description of Artificial Sequence: Synthetic oligonucleotide
  Target: ANGPTL4; (-) strand; PAM type: NRG; PAM sequence: GGG
actaggatgggacgggagga

SEQ ID NO: 7641 - DNA, 20 bp, Artificial Sequence
  Description of Artificial Sequence: Synthetic oligonucleotide
  Target: ANGPTL4; (-) strand; PAM type: NRG; PAM sequence: AGG
aactaggatgggacgggagg

SEQ ID NO: 7642 - DNA, 20 bp, Artificial Sequence
  Description of Artificial Sequence: Synthetic oligonucleotide
  Target: ANGPTL4; (-) strand; PAM type: NRG; PAM sequence: GAG
aaactaggatgggacgggag

SEQ ID NO: 7643 - DNA, 20 bp, Artificial Sequence
  Description of Artificial Sequence: Synthetic oligonucleotide
  Target: ANGPTL4; (-) strand; PAM type: NRG; PAM sequence: AGG
ccaaactaggatgggacggg

SEQ ID NO: 7644 - DNA, 20 bp, Artificial Sequence
  Description of Artificial Sequence: Synthetic oligonucleotide
  Target: ANGPTL4; (-) strand; PAM type: NRG; PAM sequence: GAG
gccaaactaggatgggacgg

(The sequence listing continues in the following parts.)
